United States Patent Application Publication US 2024/0327476 A1 - sequence listing, part 86

SEQ ID NO: 164641 - DNA, 6861 bp, synthetic construct
  misc_feature 1..6861: note = Description of Artificial Sequence: Synthetic coding sequence
  source 1..6861: mol_type = other DNA
atgagcctgcggagcggcggcagaagaagagctgaccctggagcagatggagaggccagcagagatgatggagccaccagctctgtgtctgccctgaagaggctggagaggagccagtggacagacaagatggacctgcgcttcggctttgagcggctgaaggagcccggggagaagacaggctggctgatcaacatgcaccccacagagatcctggatgaggacaagaggctgggcagcgctgtggactactacttcatccaggatgatggcagccgcttcaaggtggccctgccctacaagccctacttctacatcgccaccaggaagggctgtgagcgggaggtgagcagcttcctgagcaagaagttccagggcaagatcgccaaggtggagaccgtgcccaaggaggacctggacctgcccaaccacctggtgggcctgaagaggaactacatccggctgtccttccacacagtggaggacctggtgaaggtgaggaaggagatcagccctgctgtgaagaagaaccgggagcaggaccacgccagtgatgcctacacagccctgctgagctctgtgctgcagagaggaggagtcatcacagatgaggaggagaccagcaagaagattgctgaccagctggacaacatcgtggacatgagagaatatgatgtgccctaccacatccggctgagcattgacctgaagatccacgtggcccactggtacaacgtgcgctacagaggaaatgccttccctgtggagatcaccaggagagatgacctggtggagaggccagaccctgtggtgctggcctttgacatcgagaccaccaagctgcccctgaagttcccagatgctgagacagaccagatcatgatgatctcctacatgattgatggccagggctacctgatcaccaaccgggagatcgtgtctgaagatattgaggactttgagttcacccccaagccagaatatgagggccccttctgtgtgttcaatgaaccagatgaggcccacctgatccagcgctggtttgagcacgtgcaggagaccaagcccaccatcatggtgacctacaatggagacttctttgactggccctttgtggaggcccgggctgctgtgcacggcctgtccatgcagcaggagatcggcttccagaaggacagccagggcgagtacaaggccccccagtgcatccacatggactgcctgcgctgggtgaagagggacagctacctgcctgtgggcagccacaacctgaaggctgctgccaaggccaagctgggctatgaccctgtggagctggaccctgaggacatgtgcaggatggccacagagcagccccagaccctggccacctacagcgtgtctgatgctgtggccacctactacctgtacatgaagtatgtgcaccccttcatctttgccctgtgcaccatcatccccatggagccagatgaggtgctgaggaaaggaagtggcaccctgtgtgaggccctgctgatggtgcaggccttccacgccaacatcatcttccccaacaagcaggagcaggagttcaacaagctgacagatgatggccacgtgctggacagcgagacctacgtgggcggccacgtggaggccctggagagcggggtcttcagaagtgacatcccctgccgcttcaggatgaacccagctgcctttgacttcctgctgcagagggtggagaagaccctgcggcatgccctggaggaggaggagaaggtgcctgtggagcaggtgaccaactttgaggaggtgtgtgatgagatcaagagcaagctggccagcctgaaggatgtgcccagcagaattgagtgccccctcatctaccacctggatgtgggcgccatgtaccccaacatcatcctgaccaaccggctgcagcccagcgccatggtggatgaggccacctgtgccgcctgtgacttcaacaagccaggggccaactgccagaggaagatggcctggcagtggagaggagagttcatgcctgccagccgctctgagtaccaccgcatccagcaccagctggagagcgagaagttccccccactcttccctgagggccctgcccgggccttccacgagctgagccgggaggagcaggccaagtatgagaagaggcggctggccgactactgcaggaaggcctacaagaagatccacatcaccaaggtggaggagcggctgaccaccatctgccagcgggagaacagcttctacgtggacacagtgcgggccttccgggaccggcgctatgagttcaagggcctgcacaaggtgtggaagaagaagctgtctgctgctgtggaggtgggagatgctgctgaggtgaagcgctgcaagaacatggaggtgctgtatgacagcctgcagctggcccacaagtgcatcctgaacagcttctacggctacgtgatgaggaagggggcccgctggtacagcatggagatggccggcatcgtgtgcttcaccggggccaacatcatcacccaggcccgggagctgattgagcagatcggccggcccctggagctggacacagatggcatctggtgtgtgctgcccaacagcttccctgagaactttgtgttcaagaccaccaacgtgaagaagcccaaggtgaccatctcctacccaggggccatgctgaacatcatggtgaaggagggcttcaccaatgaccagtaccaggagctggccgagcccagcagcctgacctacgtgaccaggtctgagaacagcatcttctttgaggtggatggcccctacctggccatgatcctgcctgccagcaaggaggagggcaagaagctgaagaagagatatgctgtgttcaatgaagatggcagcctggccgagctgaagggctttgaggtgaagagaagaggagagctgcagctgatcaagatcttccagagctctgtgtttgaggccttcctgaagggcagcaccctggaggaggtgtatggctctgtggccaaggtggccgactactggctggatgtgctgtacagcaaggccgccaacatgccagattctgagctgtttgagctgatcagtgaaaatagatccatgagcaggaagctggaggactatggagagcagaagagcaccagcatcagcacagccaagaggctggccgagttcctgggggaccagatggtgaaggatgctggcctgagctgccgctacatcatcagcaggaagccagagggcagccctgtgacagagcgggccatccccctggccatcttccaggccgagcccaccgtgaggaagcacttcctgaggaagtggctgaagagcagcagcctgcaggactttgacatccgggccatcctggactgggactactacatcgagcggctgggcagcgccatccagaagatcatcaccatcccagctgccctgcagcaggtgaagaaccctgtgccccgggtgaagcacccagactggctgcacaagaagctgctggagaagaatgatgtgtacaagcagaagaagatcagcgagctgttcaccctggagggccggcggcaggtgaccatggccgaggccagcgaggacagcccccggcccagcgccccagacatggaggactttggcctggtgaagctgccccaccctgctgcccctgtgacagtgaagaggaagagggtgctgtgggagagccaggaggagagccaggacctgacccccaccgtgccctggcaggagatcctgggccagcccccagccctgggcaccagccaggaggagtggctggtgtggctgcgcttccacaagaagaagtggcagctgcaggcccggcagaggctggcccggaggaagaggcagaggctggagagcgctgagggcgtgctgcggcctggggccatcagagatggccctgccaccggcctgggcagcttcctgcggaggacagcccggagcatcctggacctgccctggcagatcgtgcagatcagcgagaccagccaggccggcctcttccggctgtgggccctggtgggcagtgacctgcactgcatccggctgagcatccccagggtcttctacgtgaaccagagggtggccaaggccgaggagggcgccagctacaggaaggtgaacagagtgctgcccaggagcaacatggtgtacaacctgtatgagtacagcgtgcctgaggacatgtaccaggagcacatcaatgagatcaatgctgagctgagcgccccagacattgaaggagtgtatgagacccaggtgcccctgctcttccgggccctggtgcacctgggctgtgtgtgtgtggtgaacaagcagctggtgcgccacctgagcggctgggaggccgagacctttgccctggagcacctggagatgaggagcctggcccagttctcctacctggagcccggcagcatccgccacatctacctgtaccaccacgcccaggcccacaaggccctgtttggcatcttcatccccagccagaggcgggcctctgtgtttgtgctggacacagtgcgcagcaaccagatgcccagcctgggcgccctgtacagcgctgagcacggcctgctgctggagaaggtgggccctgagctgctgcccccacccaagcacacctttgaggtgcgggcagagacagacctgaagaccatctgccgggccatccagcgcttcctgctggcctacaaggaggagcggcggggccccaccctgattgctgtgcagagctcctgggagctgaagaggctggccagcgagatccctgtgctggaggagttccccctggtgcccatctgtgtggccgacaagatcaactatggagtgctggactggcagagacatggagcccggaggatgatccgccactacctgaacctggacacctgcctgagccaggcctttgagatgagccgctacttccacatccccatcggcaacctgcctgaggacatcagcacctttggaagtgacctcttctttgcccggcacctgcagaggcacaaccacctgctgtggctgagccccacagcccggccagacctgggcggcaaggaggctgatgacaactgcctggtgatggagtttgatgaccaggccaccgtggagatcaacagcagcggctgctacagcacagtgtgtgtggagctggacctgcagaacctggccgtgaacaccatcctgcagagccaccacgtgaatgacatggagggcgctgacagcatgggcatcagctttgatgtgatccagcaggccagcctggaggacatgatcactggaggccaggccgccagcgccccagccagctatgatgaaacagccctgtgcagcaacaccttccgcatcctgaagtccatggtggtgggctgggtgaaggagatcacccagtaccacaacatctatgctgacaaccaggtgatgcacttctaccgctggctgcggagccccagcagcctgctgcatgaccctgccctgcacaggaccctgcacaacatgatgaagaagctgttcctgcagctgattgctgagttcaagaggctgggcagcagcgtcatctatgccaacttcaaccgcatcatcctgtgcaccaagaagagaagagtggaggatgccatcgcctacgtggagtacatcaccagcagcatccacagcaaggagaccttccacagcctgaccatctccttcagccgctgctgggagttcctgctgtggatggaccccagcaactacggcggcatcaagggcaaggtgagcagccgcatccactgcggcctgcaggacagccagaaggccggcggcgcagaagatgagcaggagaatgaagatgatgaggaggagagagatggagaggaggaggaggaggccgaggagagcaatgtggaggacctgctggagaacaactggaacatcctgcagttcctgccccaggccgccagctgccagaactacttcctgatgattgtgtctgcctacatcgtggccgtgtaccactgcatgaaggatggcctgcggcgcagcgcccctggcagcacccctgtgagaagaagaggagccagccagctgagccaggaggccgagggcgctgtgggcgccctgcccggcatgatcaccttcagccaggactatgtggccaatgagctgacccagagcttcttcaccatcacccagaagatccagaagaaggtgacaggcagcaggaacagcacagagctgtctgagatgtttcctgtgctgcccggcagccacctgctgctgaacaacccagccctggagttcatcaagtatgtgtgcaaggtgctgagcctggacaccaacatcaccaaccaggtgaacaagctgaacagagacctgctgcggctggtggatgtgggggagttcagcgaggaggcccagttccgggacccctgccgctcctatgtgctgcctgaggtgatctgccgcagctgcaacttctgccgggacctggacctgtgcaaggacagcagcttctctgaagatggagctgtgctgccccagtggctgtgcagcaactgccaggccccctatgacagcagcgccatcgagatgaccctggtggaggtgctgcagaagaagctgatggccttcaccctgcaggacctggtgtgcctgaagtgccggggcgtgaaggagacctccatgcctgtgtactgcagctgtgccggggactttgccctgaccatccacacccaggtgttcatggagcagatcggcatcttcagaaatattgcccagcactacggcatgagctacctgctggagaccctggagtggctgctgcagaagaacccccagctgggccactag

SEQ ID NO: 164642 - DNA, 3330 bp, synthetic construct
  misc_feature 1..3330: note = Description of Artificial Sequence: Synthetic coding sequence
  source 1..3330: mol_type = other DNA
atgcaccccacagagatcctggatgaggacaagaggctgggcagcgctgtggactactacttcatccaggatgatggcagccgcttcaaggtggccctgccctacaagccctacttctacatcgccaccaggaagggctgtgagcgggaggtgtcctccttcctgagcaagaagttccagggcaagatcgccaaggtggagaccgtgcccaaggaggacctggacctgcccaaccacctggtgggcctgaagaggaactacatccggctgtccttccacacagtggaggacctggtgaaggtgaggaaggagatcagccctgctgtgaagaagaaccgggagcaggaccacgccagtgatgcctacacagccctgctgagctctgtgctgcagagaggaggagtcatcacagatgaggaggagaccagcaagaagattgctgaccagctggacaacatcgtggacatgagagaatatgatgtgccctaccacatccggctgagcattgacctgaagatccacgtggcccactggtacaacgtgcgctacagaggaaatgccttccctgtggagatcaccaggagagatgacctggtggagaggccagaccctgtggtgctggcctttgatattgagaccaccaagctgcccctgaagttcccagatgctgagacagaccagatcatgatgatctcctacatgattgatggccagggctacctgatcaccaaccgggagatcgtgtctgaggacattgaagattttgagttcacccccaagccagaatatgagggccccttctgtgtgttcaatgaaccagatgaggcccacctgatccagcgctggtttgaacatgtgcaggagaccaagcccaccatcatggtgacctacaacggggacttctttgactggccctttgtggaggcccgggctgctgtgcacggcctgtccatgcagcaggagatcggcttccagaaggacagccagggcgagtacaaggccccccagtgcatccacatggactgcctgcgctgggtgaagagggacagctacctgcctgtgggcagccacaacctgaaggccgccgccaaggccaagctgggctatgaccctgtggagctggaccctgaggacatgtgcaggatggccacagagcagccccagaccctggccacctacagcgtgtctgatgctgtggccacctactacctgtacatgaagtatgtgcaccccttcatctttgccctgtgcaccatcatccccatggagccagatgaggtgctgaggaagggcagcggcaccctgtgtgaggccctgctgatggtgcaggccttccacgccaacatcatcttccccaacaagcaggagcaggagttcaacaagctgacagatgatggccacgtgctggacagcgagacctacgtgggcggccacgtggaggccctggagagcggggtcttcagaagtgacatcccctgccgcttcaggatgaacccagctgcctttgacttcctgctgcagagggtggagaagaccctgcggcatgccctggaggaggaggagaaggtgcctgtggagcaggtgaccaactttgaggaggtgtgtgatgagatcaagagcaagctggccagcctgaaggatgtgcccagcagaattgaatgtcccctcatctaccacctggatgtgggcgccatgtaccccaacatcatcctgaccaaccggctgcagcccagcgccatggtggatgaggccacctgtgccgcctgtgacttcaacaagccaggggccaactgccagaggaagatggcctggcagtggagaggagagttcatgcctgccagccgctctgagtaccaccgcatccagcaccagctggagagcgagaagtttcctcctctcttccctgagggccctgcccgggccttccacgagctgagccgggaggagcaggccaagtatgagaagaggcggctggccgactactgcaggaaggcctacaagaagatccacatcaccaaggtggaggagcggctgaccaccatctgccagagagaaaattccttctacgtggacacagtgcgggccttccgggacagaagatatgagttcaagggcctgcacaaggtgtggaagaagaagctgtctgctgctgtggaggtgggagatgctgctgaggtgaagcgctgcaagaacatggaggtgctgtatgacagcctgcagctggcccacaagtgcatcctgaacagcttctacggctacgtgatgaggaaaggagcccgctggtacagcatggagatggccggcatcgtgtgcttcaccggggccaacatcatcacccaggcccgggagctgattgagcagatcggccggcccctggagctggacacagatggcatctggtgtgtgctgcccaacagcttcccagaaaattttgtgttcaagaccaccaacgtgaagaagcccaaggtgaccatctcctacccaggggccatgctgaacatcatggtgaaggagggcttcaccaatgaccagtaccaggagctggccgagcccagcagcctgacctacgtgaccaggagtgaaaattccatcttctttgaggtggatggcccctacctggccatgatcctgcctgccagcaaggaggagggcaagaagctgaagaagagatatgctgtgttcaatgaagatggcagcctggccgagctgaagggctttgaggtgaagagaagaggagagctgcagctgatcaagatcttccagagctctgtgtttgaggccttcctgaagggcagcaccctggaggaggtgtatggctctgtggccaaggtggccgactactggctggatgtgctgtacagcaaggccgccaacatgccagacagcgagctgtttgagctgatcagcgagaacagatccatgagcaggaagctggaggactatggagagcagaagagcaccagcatcagcacagccaagaggctggccgagttcctgggggaccagatggtgaaggatgctggcctgagctgccgctacatcatcagcaggaagccagagggcagccctgtgacagagcgggccatccccctggccatcttccaggccgagcccaccgtgaggaagcacttcctgaggaagtggctgaagagcagcagcctgcaggactttgacatccgggccatcctggactgggactactacatcgagcggctgggcagcgccatccagaagatcatcaccatcccagctgccctgcagcaggtgaagaaccctgtgccccgggtgaagcacccagactggctgcacaagacagctggggaggagtag

SEQ ID NO: 164643 - DNA, 1491 bp, synthetic construct
  misc_feature 1..1491: note = Description of Artificial Sequence: Synthetic coding sequence
  source 1..1491: mol_type = other DNA
atggagggcatcctgaagtccatggtggtgggctgggtgaaggagatcacccagtaccacaacatctatgctgacaaccaggtgatgcacttctaccgctggctgcggagccccagcagcctgctgcatgaccctgccctgcacaggaccctgcacaacatgatgaagaagctgttcctgcagctgattgctgagttcaagaggctgggcagcagcgtcatctatgccaacttcaaccgcatcatcctgtgcaccaagaagagaagagtggaggatgccatcgcctacgtggagtacatcaccagcagcatccacagcaaggagaccttccacagcctgaccatctccttcagccgctgctgggagttcctgctgtggatggaccccagcaactacggcggcatcaagggcaaggtgagcagccgcatccactgcggcctgcaggacagccagaaggccggcggcgcagaagatgagcaggagaatgaagatgatgaggaggagagagatggagaggaggaggaggaggccgaggagagcaatgtggaggacctgctggagaacaactggaacatcctgcagttcctgccccaggccgccagctgccagaactacttcctgatgattgtgtctgcctacatcgtggccgtgtaccactgcatgaaggatggcctgcggcgcagcgcccctggcagcacccctgtgagaagaagaggagccagccagctgagccaggaggccgagggcgctgtgggcgccctgcccggcatgatcaccttcagccaggactatgtggccaatgagctgacccagagcttcttcaccatcacccagaagatccagaagaaggtgacaggcagcaggaacagcacagagctgtctgagatgtttcctgtgctgcccggcagccacctgctgctgaacaacccagccctggagttcatcaagtatgtgtgcaaggtgctgagcctggacaccaacatcaccaaccaggtgaacaagctgaacagagacctgctgcggctggtggatgtgggggagttcagcgaggaggcccagttccgggacccctgccgctcctatgtgctgcctgaggtgatctgccgcagctgcaacttctgccgggacctggacctgtgcaaggacagcagcttctctgaagatggagctgtgctgccccagtggctgtgcagcaactgccaggccccctatgacagcagcgccatcgagatgaccctggtggaggtgctgcagaagaagctgatggccttcaccctgcaggacctggtgtgcctgaagtgccggggcgtgaaggagacctccatgcctgtgtactgcagctgtgccggggactttgccctgaccatccacacccaggtgttcatggagcagatcggcatcttcagaaatattgcccagcactacggcatgagctacctgctggagaccctggagtggctgctgcagaagaacccccagctgggccactag

SEQ ID NO: 164644 - DNA, 6894 bp, synthetic construct
  misc_feature 1..6894: note = Description of Artificial Sequence: Synthetic coding sequence
  source 1..6894: mol_type = other DNA
atgagccggcccctgggcctgaagagcttccccaggcacaagcaggcccccctgcccctgagcctgaccttccacggctgcctgctgctgcggagagatgatggagccaccagctctgtgtctgccctgaagaggctggagaggagccagtggacagacaagatggacctgcgctttggatttgagcggctgaaggagcctggagagaagacaggctggctgatcaacatgcaccccacagagatcctggatgaggacaagaggctgggcagcgctgtggactactacttcatccaggatgatggcagccgcttcaaggtggccctgccctacaagccctacttctacatcgccaccaggaagggctgtgagcgggaggtgtcctccttcctgagcaagaagttccagggcaagatcgccaaggtggagaccgtgcccaaggaggacctggacctgcccaaccacctggtgggcctgaagaggaactacatccggctgtccttccacacagtggaggacctggtgaaggtgaggaaggagatcagccctgctgtgaagaagaaccgggagcaggaccacgccagtgatgcctacacagccctgctgagctctgtgctgcagagaggaggagtcatcacagatgaggaggagaccagcaagaagattgctgaccagctggacaacatcgtggacatgagagaatatgatgtgccctaccacatccggctgagcattgacctgaagatccacgtggcccactggtacaacgtgcgctacagaggaaatgccttccctgtggagatcaccaggagagatgacctggtggagaggccagaccctgtggtgctggcctttgatattgagaccaccaagctgcccctgaagttcccagatgctgagacagaccagatcatgatgatctcctacatgattgatggccagggctacctgatcaccaaccgggagatcgtgtctgaggacattgaagattttgagttcacccccaagccagaatatgagggccccttctgtgtgttcaatgaaccagatgaggcccacctgatccagcgctggtttgaacatgtgcaggagaccaagcccaccatcatggtgacctacaacggggacttctttgactggccctttgtggaggcccgggctgctgtgcacggcctgtccatgcagcaggagatcggcttccagaaggacagccagggcgagtacaaggccccccagtgcatccacatggactgcctgcgctgggtgaagagggacagctacctgcctgtgggcagccacaacctgaaggccgccgccaaggccaagctgggctatgaccctgtggagctggaccctgaggacatgtgcaggatggccacagagcagccccagaccctggccacctacagcgtgtctgatgctgtggccacctactacctgtacatgaagtatgtgcaccccttcatctttgccctgtgcaccatcatccccatggagccagatgaggtgctgaggaagggcagcggcaccctgtgtgaggccctgctgatggtgcaggccttccacgccaacatcatcttccccaacaagcaggagcaggagttcaacaagctgacagatgatggccacgtgctggacagcgagacctacgtgggcggccacgtggaggccctggagagcggggtcttcagaagtgacatcccctgccgcttcaggatgaacccagctgcctttgacttcctgctgcagagggtggagaagaccctgcggcatgccctggaggaggaggagaaggtgcctgtggagcaggtgaccaactttgaggaggtgtgtgatgagatcaagagcaagctggccagcctgaaggatgtgcccagcagaattgaatgtcccctcatctaccacctggatgtgggcgccatgtaccccaacatcatcctgaccaaccggctgcagcccagcgccatggtggatgaggccacctgtgccgcctgtgacttcaacaagccaggggccaactgccagaggaagatggcctggcagtggagaggagagttcatgcctgccagccgctctgagtaccaccgcatccagcaccagctggagagcgagaagtttcctcctctcttccctgagggccctgcccgggccttccacgagctgagccgggaggagcaggccaagtatgagaagaggcggctggccgactactgcaggaaggcctacaagaagatccacatcaccaaggtggaggagcggctgaccaccatctgccagagagaaaattccttctacgtggacacagtgcgggccttccgggacagaagatatgagttcaagggcctgcacaaggtgtggaagaagaagctgtctgctgctgtggaggtgggagatgctgctgaggtgaagcgctgcaagaacatggaggtgctgtatgacagcctgcagctggcccacaagtgcatcctgaacagcttctacggctacgtgatgaggaaaggagcccgctggtacagcatggagatggccggcatcgtgtgcttcaccggggccaacatcatcacccaggcccgggagctgattgagcagatcggccggcccctggagctggacacagatggcatctggtgtgtgctgcccaacagcttcccagaaaattttgtgttcaagaccaccaacgtgaagaagcccaaggtgaccatctcctacccaggggccatgctgaacatcatggtgaaggagggcttcaccaatgaccagtaccaggagctggccgagcccagcagcctgacctacgtgaccaggagtgaaaattccatcttctttgaggtggatggcccctacctggccatgatcctgcctgccagcaaggaggagggcaagaagctgaagaagagatatgctgtgttcaatgaagatggcagcctggccgagctgaagggctttgaggtgaagagaagaggagagctgcagctgatcaagatcttccagagctctgtgtttgaggccttcctgaagggcagcaccctggaggaggtgtatggctctgtggccaaggtggccgactactggctggatgtgctgtacagcaaggccgccaacatgccagacagcgagctgtttgagctgatcagcgagaacagatccatgagcaggaagctggaggactatggagagcagaagagcaccagcatcagcacagccaagaggctggccgagttcctgggggaccagatggtgaaggatgctggcctgagctgccgctacatcatcagcaggaagccagagggcagccctgtgacagagcgggccatccccctggccatcttccaggccgagcccaccgtgaggaagcacttcctgaggaagtggctgaagagcagcagcctgcaggactttgacatccgggccatcctggactgggactactacatcgagcggctgggcagcgccatccagaagatcatcaccatcccagctgccctgcagcaggtgaagaaccctgtgccccgggtgaagcacccagactggctgcacaagaagctgctggagaagaatgatgtgtacaagcagaagaagatcagcgagctgttcaccctggagggccggcggcaggtgaccatggccgaggccagcgaggacagcccccggcccagcgccccagacatggaggactttggcctggtgaagctgccccaccctgctgcccctgtgacagtgaagaggaagagggtgctgtgggagagccaggaggagagccaggacctgacccccaccgtgccctggcaggagatcctgggccagcccccagccctgggcaccagccaggaggagtggctggtgtggctgcgcttccacaagaagaagtggcagctgcaggcccggcagaggctggcccggaggaagaggcagaggctggagagcgctgagggcgtgctgcggcctggggccatcagagatggccctgccaccggcctgggcagcttcctgcggaggacagcccggagcatcctggacctgccctggcagatcgtgcagatcagcgagaccagccaggccggcctcttccggctgtgggccctggtgggcagtgacctgcactgcatccggctgagcatccccagggtcttctacgtgaaccagagggtggccaaggccgaggagggcgccagctacaggaaggtgaacagagtgctgcccaggagcaacatggtgtacaacctgtatgagtacagcgtgcctgaggacatgtaccaggagcacatcaatgagatcaatgctgagctgagcgccccagacatcgagggcgtgtatgagacccaggtgcccctgctcttccgggccctggtgcacctgggctgtgtgtgtgtggtgaacaagcagctggtgcgccacctgagcggctgggaggccgagacctttgccctggagcacctggagatgaggagcctggcccagttctcctacctggagcccggcagcatccgccacatctacctgtaccaccacgcccaggcccacaaggccctgtttggcatcttcatccccagccagaggcgggcctctgtgtttgtgctggacacagtgcgcagcaaccagatgcccagcctgggcgccctgtacagcgctgagcacggcctgctgctggagaaggtgggccctgagctgctgcccccacccaagcacacctttgaggtgcgggcagagacagacctgaagaccatctgccgggccatccagcgcttcctgctggcctacaaggaggagcggcggggccccaccctgattgctgtgcagagctcctgggagctgaagaggctggccagcgagatccctgtgctggaggagttccccctggtgcccatctgtgtggccgacaagatcaactacggcgtgctggactggcagagacatggagcccggaggatgatccgccactacctgaacctggacacctgcctgagccaggcctttgagatgagccgctacttccacatccccatcggcaacctgcctgaggacatcagcaccttcggcagtgacctcttctttgcccggcacctgcagaggcacaaccacctgctgtggctgagccccacagcccggccagacctgggcggcaaggaggctgatgacaactgcctggtgatggagtttgatgaccaggccaccgtggagatcaacagcagcggctgctacagcacagtgtgtgtggagctggacctgcagaacctggccgtgaacaccatcctgcagagccaccacgtgaatgacatggagggcgctgacagcatgggcatcagctttgatgtgatccagcaggccagcctggaggacatgatcaccggcggccaggccgccagcgccccagccagctatgatgaaacagccctgtgcagcaacaccttccgcatcctgaagtccatggtggtgggctgggtgaaggagatcacccagtaccacaacatctatgctgacaaccaggtgatgcacttctaccgctggctgcggagccccagcagcctgctgcatgaccctgccctgcacaggaccctgcacaacatgatgaagaagctgttcctgcagctgattgctgagttcaagaggctgggcagcagcgtcatctatgccaacttcaaccgcatcatcctgtgcaccaagaagagaagagtggaggatgccatcgcctacgtggagtacatcaccagcagcatccacagcaaggagaccttccacagcctgaccatctccttcagccgctgctgggagttcctgctgtggatggaccccagcaactatggaggcatcaagggcaaggtgagcagccgcatccactgcggcctgcaggacagccagaaggccggcggcgcagaagatgagcaggagaatgaagatgatgaggaggagagagatggagaggaggaggaggaggccgaggagagcaatgtggaggacctgctggagaacaactggaacatcctgcagttcctgccccaggccgccagctgccagaactacttcctgatgattgtgtctgcctacatcgtggccgtgtaccactgcatgaaggatggcctgcggcgcagcgcccctggcagcacccctgtgagaagaagaggagccagccagctgagccaggaggccgagggcgctgtgggcgccctgcccggcatgatcaccttcagccaggactatgtggccaatgagctgacccagagcttcttcaccatcacccagaagatccagaagaaggtgacaggcagcaggaacagcacagagctgtctgagatgtttcctgtgctgcccggcagccacctgctgctgaacaacccagccctggagttcatcaagtatgtgtgcaaggtgctgagcctggacaccaacatcaccaaccaggtgaacaagctgaacagagacctgctgcggctggtggatgtgggggagttcagcgaggaggcccagttccgggacccctgccgctcctatgtgctgcctgaggtgatctgccgcagctgcaacttctgccgggacctggacctgtgcaaggacagcagcttctctgaagatggagctgtgctgccccagtggctgtgcagcaactgccaggccccctatgacagcagcgccatcgagatgaccctggtggaggtgctgcagaagaagctgatggccttcaccctgcaggacctggtgtgcctgaagtgccggggcgtgaaggagacctccatgcctgtgtactgcagctgtgccggggactttgccctgaccatccacacccaggtgttcatggagcagatcggcatcttcaggaacatcgcccagcactacggcatgagctacctgctggagaccctggagtggctgctgcagaagaacccccagctgggccactag

SEQ ID NO: 164645 - DNA, 6780 bp, synthetic construct
  misc_feature 1..6780: note = Description of Artificial Sequence: Synthetic coding sequence
  source 1..6780: mol_type = other DNA
atgagcctgcggagcggcggcagaagaagagctgaccctggagcagatggagaggccagcagagatgatggagccaccagctctgtgtctgccctgaagaggctggagaggagccagtggacagacaagatggacctgcgcttcggctttgagcggctgaaggagcccggggagaagacaggctggctgatcaacatgcaccctgtggccctgccctacaagccctacttctacatcgccaccaggaagggctgtgagcgggaggtgtcctccttcctgagcaagaagttccagggcaagatcgccaaggtggagaccgtgcccaaggaggacctggacctgcccaaccacctggtgggcctgaagaggaactacatccggctgtccttccacacagtggaggacctggtgaaggtgaggaaggagatcagccctgctgtgaagaagaaccgggagcaggaccacgccagtgatgcctacacagccctgctgagctctgtgctgcagagaggaggagtcatcacagatgaggaggagaccagcaagaagattgctgaccagctggacaacatcgtggacatgagagaatatgatgtgccctaccacatccggctgagcattgacctgaagatccacgtggcccactggtacaacgtgcgctacagaggaaatgccttccctgtggagatcaccaggagagatgacctggtggagaggccagaccctgtggtgctggcctttgatattgagaccaccaagctgcccctgaagttcccagatgctgagacagaccagatcatgatgatctcctacatgattgatggccagggctacctgatcaccaaccgggagatcgtgtctgaggacattgaagattttgagttcacccccaagccagaatatgagggccccttctgtgtgttcaatgaaccagatgaggcccacctgatccagcgctggtttgaacatgtgcaggagaccaagcccaccatcatggtgacctacaacggggacttctttgactggccctttgtggaggcccgggctgctgtgcacggcctgtccatgcagcaggagatcggcttccagaaggacagccagggcgagtacaaggccccccagtgcatccacatggactgcctgcgctgggtgaagagggacagctacctgcctgtgggcagccacaacctgaaggccgccgccaaggccaagctgggctatgaccctgtggagctggaccctgaggacatgtgcaggatggccacagagcagccccagaccctggccacctacagcgtgtctgatgctgtggccacctactacctgtacatgaagtatgtgcaccccttcatctttgccctgtgcaccatcatccccatggagccagatgaggtgctgaggaagggcagcggcaccctgtgtgaggccctgctgatggtgcaggccttccacgccaacatcatcttccccaacaagcaggagcaggagttcaacaagctgacagatgatggccacgtgctggacagcgagacctacgtgggcggccacgtggaggccctggagagcggggtcttcagaagtgacatcccctgccgcttcaggatgaacccagctgcctttgacttcctgctgcagagggtggagaagaccctgcggcatgccctggaggaggaggagaaggtgcctgtggagcaggtgaccaactttgaggaggtgtgtgatgagatcaagagcaagctggccagcctgaaggatgtgcccagcagaattgaatgtcccctcatctaccacctggatgtgggcgccatgtaccccaacatcatcctgaccaaccggctgcagcccagcgccatggtggatgaggccacctgtgccgcctgtgacttcaacaagccaggggccaactgccagaggaagatggcctggcagtggagaggagagttcatgcctgccagccgctctgagtaccaccgcatccagcaccagctggagagcgagaagtttcctcctctcttccctgagggccctgcccgggccttccacgagctgagccgggaggagcaggccaagtatgagaagaggcggctggccgactactgcaggaaggcctacaagaagatccacatcaccaaggtggaggagcggctgaccaccatctgccagagagaaaattccttctacgtggacacagtgcgggccttccgggacagaagatatgagttcaagggcctgcacaaggtgtggaagaagaagctgtctgctgctgtggaggtgggagatgctgctgaggtgaagcgctgcaagaacatggaggtgctgtatgacagcctgcagctggcccacaagtgcatcctgaacagcttctacggctacgtgatgaggaaaggagcccgctggtacagcatggagatggccggcatcgtgtgcttcaccggggccaacatcatcacccaggcccgggagctgattgagcagatcggccggcccctggagctggacacagatggcatctggtgtgtgctgcccaacagcttcccagaaaattttgtgttcaagaccaccaacgtgaagaagcccaaggtgaccatctcctacccaggggccatgctgaacatcatggtgaaggagggcttcaccaatgaccagtaccaggagctggccgagcccagcagcctgacctacgtgaccaggagtgaaaattccatcttctttgaggtggatggcccctacctggccatgatcctgcctgccagcaaggaggagggcaagaagctgaagaagagatatgctgtgttcaatgaagatggcagcctggccgagctgaagggctttgaggtgaagagaagaggagagctgcagctgatcaagatcttccagagctctgtgtttgaggccttcctgaagggcagcaccctggaggaggtgtatggctctgtggccaaggtggccgactactggctggatgtgctgtacagcaaggccgccaacatgccagacagcgagctgtttgagctgatcagcgagaacagatccatgagcaggaagctggaggactatggagagcagaagagcaccagcatcagcacagccaagaggctggccgagttcctgggggaccagatggtgaaggatgctggcctgagctgccgctacatcatcagcaggaagccagagggcagccctgtgacagagcgggccatccccctggccatcttccaggccgagcccaccgtgaggaagcacttcctgaggaagtggctgaagagcagcagcctgcaggactttgacatccgggccatcctggactgggactactacatcgagcggctgggcagcgccatccagaagatcatcaccatcccagctgccctgcagcaggtgaagaaccctgtgccccgggtgaagcacccagactggctgcacaagaagctgctggagaagaatgatgtgtacaagcagaagaagatcagcgagctgttcaccctggagggccggcggcaggtgaccatggccgaggccagcgaggacagcccccggcccagcgccccagacatggaggactttggcctggtgaagctgccccaccctgctgcccctgtgacagtgaagaggaagagggtgctgtgggagagccaggaggagagccaggacctgacccccaccgtgccctggcaggagatcctgggccagcccccagccctgggcaccagccaggaggagtggctggtgtggctgcgcttccacaagaagaagtggcagctgcaggcccggcagaggctggcccggaggaagaggcagaggctggagagcgctgagggcgtgctgcggcctggggccatcagagatggccctgccaccggcctgggcagcttcctgcggaggacagcccggagcatcctggacctgccctggcagatcgtgcagatcagcgagaccagccaggccggcctcttccggctgtgggccctggtgggcagtgacctgcactgcatccggctgagcatccccagggtcttctacgtgaaccagagggtggccaaggccgaggagggcgccagctacaggaaggtgaacagagtgctgcccaggagcaacatggtgtacaacctgtatgagtacagcgtgcctgaggacatgtaccaggagcacatcaatgagatcaatgctgagctgagcgccccagacatcgagggcgtgtatgagacccaggtgcccctgctcttccgggccctggtgcacctgggctgtgtgtgtgtggtgaacaagcagctggtgcgccacctgagcggctgggaggccgagacctttgccctggagcacctggagatgaggagcctggcccagttctcctacctggagcccggcagcatccgccacatctacctgtaccaccacgcccaggcccacaaggccctgtttggcatcttcatccccagccagaggcgggcctctgtgtttgtgctggacacagtgcgcagcaaccagatgcccagcctgggcgccctgtacagcgctgagcacggcctgctgctggagaaggtgggccctgagctgctgcccccacccaagcacacctttgaggtgcgggcagagacagacctgaagaccatctgccgggccatccagcgcttcctgctggcctacaaggaggagcggcggggccccaccctgattgctgtgcagagctcctgggagctgaagaggctggccagcgagatccctgtgctggaggagttccccctggtgcccatctgtgtggccgacaagatcaactacggcgtgctggactggcagagacatggagcccggaggatgatccgccactacctgaacctggacacctgcctgagccaggcctttgagatgagccgctacttccacatccccatcggcaacctgcctgaggacatcagcaccttcggcagtgacctcttctttgcccggcacctgcagaggcacaaccacctgctgtggctgagccccacagcccggccagacctgggcggcaaggaggctgatgacaactgcctggtgatggagtttgatgaccaggccaccgtggagatcaacagcagcggctgctacagcacagtgtgtgtggagctggacctgcagaacctggccgtgaacaccatcctgcagagccaccacgtgaatgacatggagggcgctgacagcatgggcatcagctttgatgtgatccagcaggccagcctggaggacatgatcaccggcggccaggccgccagcgccccagccagctatgatgaaacagccctgtgcagcaacaccttccgcatcctgaagtccatggtggtgggctgggtgaaggagatcacccagtaccacaacatctatgctgacaaccaggtgatgcacttctaccgctggctgcggagccccagcagcctgctgcatgaccctgccctgcacaggaccctgcacaacatgatgaagaagctgttcctgcagctgattgctgagttcaagaggctgggcagcagcgtcatctatgccaacttcaaccgcatcatcctgtgcaccaagaagagaagagtggaggatgccatcgcctacgtggagtacatcaccagcagcatccacagcaaggagaccttccacagcctgaccatctccttcagccgctgctgggagttcctgctgtggatggaccccagcaactatggaggcatcaagggcaaggtgagcagccgcatccactgcggcctgcaggacagccagaaggccggcggcgcagaagatgagcaggagaatgaagatgatgaggaggagagagatggagaggaggaggaggaggccgaggagagcaatgtggaggacctgctggagaacaactggaacatcctgcagttcctgccccaggccgccagctgccagaactacttcctgatgattgtgtctgcctacatcgtggccgtgtaccactgcatgaaggatggcctgcggcgcagcgcccctggcagcacccctgtgagaagaagaggagccagccagctgagccaggaggccgagggcgctgtgggcgccctgcccggcatgatcaccttcagccaggactatgtggccaatgagctgacccagagcttcttcaccatcacccagaagatccagaagaaggtgacaggcagcaggaacagcacagagctgtctgagatgtttcctgtgctgcccggcagccacctgctgctgaacaacccagccctggagttcatcaagtatgtgtgcaaggtgctgagcctggacaccaacatcaccaaccaggtgaacaagctgaacagagacctgctgcggctggtggatgtgggggagttcagcgaggaggcccagttccgggacccctgccgctcctatgtgctgcctgaggtgatctgccgcagctgcaacttctgccgggacctggacctgtgcaaggacagcagcttctctgaagatggagctgtgctgccccagtggctgtgcagcaactgccaggccccctatgacagcagcgccatcgagatgaccctggtggaggtgctgcagaagaagctgatggccttcaccctgcaggacctggtgtgcctgaagtgccggggcgtgaaggagacctccatgcctgtgtactgcagctgtgccggggactttgccctgaccatccacacccaggtgttcatggagcagatcggcatcttcaggaacatcgcccagcactacggcatgagctacctgctggagaccctggagtggctgctgcagaagaacccccagctgggccactag

SEQ ID NO: 164646 - DNA, 480 bp, synthetic construct
  misc_feature 1..480: note = Description of Artificial Sequence: Synthetic coding sequence
  source 1..480: mol_type = other DNA
atgatcaagttcttcctgatggtgaacaagcagggccagacccggctgagcaagtactatgagcacgtggacatcaacaagaggaccctgctggagacagaggtgatcaagagctgcctgagccgcagcaatgagcagtgcagcttcatcgagtacaaggacttcaagctgatctaccggcagtatgctgccctcttcatcgtggtgggcgtgaatgacacagaaaatgagatggccatctatgagttcatccacaactttgtggaggtgctggatgagtacttcagccgggtgtctgagctggatgtgtccttcttcaacacagtgttccacagcacctggcagatgcacagcggcccctaccaggagcccattgatgagctgcccaagatctgcagcgccctggagccccagcagacctgcttctccccagacagcagcagcttcaagggggccgccagcaccacccccatctactag

SEQ ID NO: 164647 - DNA, 1506 bp, synthetic construct
  misc_feature 1..1506: note = Description of Artificial Sequence: Synthetic coding sequence
  source 1..1506: mol_type = other DNA
atggcccctgagcggctgcggagccgggccctgagcgccttcaagctgcggggcctgctgctgcggggggaggccatcaagtacctgacagaggccctgcagagcatcagcgagctggagctggaggacaagctggagaagatcatcaatgctgtggagaagcagcccctgagcagcaacatgattgaaagatctgtggtggaggccgctgtgcaggagtgcagccagagcgtggatgagaccatcctgctgatgaccaaccacccagcccccaacctgtttggcaccccccgggacaaggccgagatgttccgggagcgctacaccatcctgcaccagaggacccacagacatgagctgttcaccccacctgtgattggcagccacccagatgaaagtggcagcaagttccagctgaagaccatcgagaccctgctgggcagcaccaccaagattggagatgccatcgtgctgggcatgatcacccagctgaaggagggcaagttcttcctggaggaccccactggaacagtgcagctggacctgagcaaggcccagttccacagcggcctgtacacagaggcctgctttgtgctggccgagggctggtttgaggaccaggtgttccacgtgaatgccttcggcttccccccaacagagcccagcagcaccacccgggcctactacggcaacatcaacttctttggaggccccagcaacacctctgtgaagaccagcgccaagctgaagcagctggaggaggagaacaaggatgccatgtttgtgttcctgagtgatgtgtggctggaccaggtggaggtgctggagaagctgcgcatcatgtttgctggctacagccctgccccacccacctgcttcatcctgtgtggcaacttcagcagcgccccctacggcaagaaccaggtgcaggccctgaaggacagcctgaagaccctggccgacatcatctgtgagtacccagacatccaccagagcagcagatttgtgtttgtgcccggccctgaggaccccggcttcggcagcatcctgcccaggcctcccctggccgagagcatcaccaatgagttccggcagagggtgcccttcagcgtcttcaccaccaacccctgccgcatccagtactgcacccaggagatcaccgtcttccgggaggacctggtgaacaagatgtgcaggaactgtgtgcgcttccccagcagcaacctggccatccccaaccactttgtgaagaccatcctgagccagggccacctgacccccctgcccctgtatgtgtgccctgtgtactgggcctatgactatgccctgcgggtgtaccctgtgcctgacctgctggtgattgctgacaagtatgaccccttcaccaccaccaacacagaatgtctgtgcatcaaccctggcagcttccccaggagcggcttctccttcaaggtgttctaccccagcaacaagacagtggaggacagcaagctgcagggcttctag

SEQ ID NO: 164648 - DNA, 1509 bp, synthetic construct
  misc_feature 1..1509: note = Description of Artificial Sequence: Synthetic coding sequence
  source 1..1509: mol_type = other DNA
atggcccctgagcggctgcggagccgggccctgagcgccttcaagctgcggggcctgctgctgcggggggaggccatcaagtacctgacagaggccctgcagagcatcagcgagctggagctggaggacaagctggagaagatcatcaatgctgtggagaagcagcccctgagcagcaacatgattgaaagatctgtggtggaggccgctgtgcaggagtgcagccagagcgtggatgagaccatcgagcacgtgttcaacatcattggagcctttgacatccccaggtttgtgtacaacagcgagaggaagaagttcctgcccctgctgatgaccaaccacccagcccccaacctgtttggcaccccccgggacaaggccgagatgttccgggagcgctacaccatcctgcaccagaggacccacagacatgagctgttcaccccacctgtgattggcagccacccagatgaaagtggcagcaagttccagctgaagaccatcgagaccctgctgggcagcaccaccaagattggagatgccatcgtgctgggcatgatcacccagctgaaggagggcaagttcttcctggaggaccccactggaacagtgcagctggacctgagcaaggcccagttccacagcggcctgtacacagaggcctgctttgtgctggccgagggctggtttgaggaccaggtgttccacgtgaatgccttcggcttccccccaacagagcccagcagcaccacccgggcctactacggcaacatcaacttctttggaggccccagcaacacctctgtgaagaccagcgccaagctgaagcagctggaggaggagaacaaggatgccatgtttgtgttcctgagtgatgtgtggctggaccaggtggaggtgctggagaagctgcgcatcatgtttgctggctacagccctgccccacccacctgcttcatcctgtgtggcaacttcagcagcgccccctacggcaagaaccaggtgcaggccctgaaggacagcctgaagaccctggccgacatcatctgtgagtacccagacatccaccagagcagcagatttgtgtttgtgcccggccctgaggaccccggcttcggcagcatcctgcccaggcctcccctggccgagagcatcaccaatgagttccggcagagggtgcccttcagcgtcttcaccaccaacccctgccgcatccagtactgcacccaggagatcaccgtcttccgggaggacctggtgaacaagatgtgcaggaactgtgtgcgcttccccagcagcaacctggccatccccaaccactttgtgaagaccatcctgagccagggccacctgacccccctgcccctgtatgtgtgccctgtgtactgggcctatgactatgccctgcgggtgtaccctgtgcctgacctgctggtgattgctgacaagtatgaccccttcaccaccaccaacacagaatgtctgtgcatcaaccctgtgaggatgtag

SEQ ID NO: 164649 - DNA, 444 bp, synthetic construct
  misc_feature 1..444: note = Description of Artificial Sequence: Synthetic coding sequence
  source 1..444: mol_type = other DNA
atggccgagaggcctgaggacctgaacctgcccaatgctgtgatcacccgcatcatcaaggaggccctgcctgatggagtgaacatcagcaaggaggcccggagcgccatcagccgggccgcctctgtgtttgtgctgtatgccaccagctgtgccaacaactttgccatgaagggcaagaggaagaccctgaatgccagtgatgtgctgagcgccatggaggagatggagttccagagatttgtgacccccctgaaggaggccctggaggcctacagaagagagcagaagggcaagaaggaggccagcgagcagaagaagaaggacaaggacaagaagacagacagcgaggagcaggacaagagcagagatgaagataatgatgaagatgaggagcggctggaggaggaggagcagaatgaggaggaggaggtggacaactag

SEQ ID NO: 164650 - DNA, 444 bp, synthetic construct; identical to SEQ ID NO: 164649
  misc_feature 1..444: note = Description of Artificial Sequence: Synthetic coding sequence
  source 1..444: mol_type = other DNA

SEQ ID NO: 164651 - DNA, 1245 bp, synthetic construct
  misc_feature 1..1245: note = Description of Artificial Sequence: Synthetic coding sequence
  source 1..1245: mol_type = other DNA
atggccaccggccaggacagagtggtggccctggtggacatggactgcttctttgtgcaggtggagcagaggcagaacccccacctgaggaacaagccctgtgctgtggtgcagtacaagtcctggaagggcggcggcatcatcgctgtgtcctatgaggcccgggcctttggagtgaccaggtccatgtgggcagatgatgccaagaagctgtgcccagacctgctgctggcccaggtgcgggagagccggggcaaggccaacctgaccaagtaccgggaggcctctgtggaggtgatggagatcatgagcagatttgctgtgattgagcgggccagcattgatgaggcctacgtggacctgaccagcgctgtgcaggagcggctgcagaagctgcagggccagcccatctctgctgacctgctgcccagcacctacatcgagggcctgccccagggccccaccacagctgaggagaccgtgcagaaggagggcatgaggaagcagggcctcttccagtggctggacagcctgcagattgacaacctgaccagcccagacctgcagctgactgtgggcgccgtcatcgtggaggagatgagagctgccatcgagcgggagaccggcttccagtgcagcgctggcatcagccacaacaaggtgctggccaagctggcctgtggcctgaacaagcccaaccggcagaccctggtgagccacggctctgtgccccagctgttcagccagatgcccatcaggaagatccgcagcctgggcggcaagctgggcgcctctgtgattgagatcctgggcatcgagtacatgggagagctgacccagttcacagagagccagctgcagagccactttggagagaagaatggctcctggctgtatgccatgtgccggggcattgaacatgaccctgtgaagccccggcagctgcccaagaccatcggctgcagcaagaacttccctgggaagacagccctggccacccgggagcaggtgcagtggtggctgctgcagctggcccaggagctggaggagcggctgaccaaggacagaaatgacaatgacagagtggccacccagctggtggtgtccatccgggtgcagggcgacaagaggctgagcagcctgcggcgctgctgtgccctgaccaggtatgatgcccacaagatgagccatgatgccttcaccgtcatcaagaactgcaacaccagcggcatccagacagaatag

SEQ ID NO: 164652 - DNA, 2142 bp, synthetic construct
  misc_feature 1..2142: note = Description of Artificial Sequence: Synthetic coding sequence
  source 1..2142: mol_type = other DNA
atggccaccggccaggacagagtggtggccctggtggacatggactgcttctttgtgcaggtggagcagaggcagaacccccacctgaggaacaagccctgtgctgtggtgcagtacaagtcctggaagggcggcggcatcatcgctgtgtcctatgaggcccgggcctttggagtgaccaggtccatgtgggcagatgatgccaagaagctgtgcccagacctgctgctggcccaggtgcgggagagccggggcaaggccaacctgaccaagtaccgggaggcctctgtggaggtgatggagatcatgagcagatttgctgtgattgagcgggccagcattgatgaggcctacgtggacctgaccagcgctgtgcaggagcggctgcagaagctgcagggccagcccatctctgctgacctgctgcccagcacctacatcgagggcctgccccagggccccaccacagctgaggagaccgtgcagaaggagggcatgaggaagcagggcctcttccagtggctggacagcctgcagattgacaacctgaccagcccagacctgcagctgactgtgggcgccgtcatcgtggaggagatgagagctgccatcgagcgggagaccggcttccagtgcagcgctggcatcagccacaacaaggtgctggccaagctggcctgtggcctgaacaagcccaaccggcagaccctggtgagccacggctctgtgccccagctgttcagccagatgcccatcaggaagatccgcagcctgggcggcaagctgggcgcctctgtgattgagatcctgggcatcgagtacatgggagagctgacccagttcacagagagccagctgcagagccactttggagagaagaatggctcctggctgtatgccatgtgccggggcattgaacatgaccctgtgaagccccggcagctgcccaagaccatcggctgcagcaagaacttccctgggaagacagccctggccacccgggagcaggtgcagtggtggctgctgcagctggcccaggagctggaggagcggctgaccaaggacagaaatgacaatgacagagtggccacccagctggtggtgtccatccgggtgcagggcgacaagaggctgagcagcctgcggcgctgctgtgccctgaccaggtatgatgcccacaagatgagccatgatgccttcaccgtcatcaagaactgcaacaccagcggcatccagacagagtggagcccccccctgaccatgctgttcctgtgtgccaccaagttcagcgccagcgcccccagcagcagcacagacatcaccagcttcctgagcagtgaccccagcagcctgcccaaggtgcctgtgaccagcagcgaggccaagacccagggcagcggccctgctgtgacagccaccaagaaggccaccaccagcctggagagcttcttccagaaggctgctgagcggcagaaggtgaaggaggccagcctgagcagcctgacagcccccacccaggcccccatgagcaacagccccagcaagcccagcctgcccttccagaccagccagagcactggaacagagcccttcttcaagcagaagagcctgctgctgaagcagaagcagctgaacaacagctctgtgagcagcccccagcagaacccctggagcaactgcaaggccctgcccaacagcctgcccacagagtacccaggctgtgtgcctgtgtgtgagggcgtgtccaagctggaggagagcagcaaggccaccccagctgagatggacctggcccacaacagccagagcatgcacgccagcagcgccagcaagtctgtgctggaggtgacccagaaggccacccccaaccccagcctgctggccgctgaggaccaggtgccctgtgagaagtgtggcagcctggtgcctgtgtgggacatgcctgagcacatggactaccactttgccctggagctgcagaagagcttcctgcagccccacagcagcaacccccaggtggtgtctgctgtgagccaccagggcaagaggaaccccaagagccccctggcctgcaccaacaagaggcccaggcctgagggcatgcagaccctggagagcttcttcaagcccctgacccactag

SEQ ID NO: 164653 - DNA, 219 bp, synthetic construct
  misc_feature 1..219: note = Description of Artificial Sequence: Synthetic coding sequence
  source 1..219: mol_type = other DNA
atgtgggcagatgatgccaagaagctgtgcccagacctgctgctggcccaggtgcgggagagccggggcaaggccaacctgaccaagtaccgggaggcctctgtggaggtgatggagatcatgagcagatttgctgtgattgagcgggccagcattgatgaggcctacgtggacctgaccagcgctgtgcaggagcggctgcagaagctgcagggctag

SEQ ID NO: 164654 - DNA, 1956 bp, synthetic construct
  misc_feature 1..1956: note = Description of Artificial Sequence: Synthetic coding sequence
  source 1..1956: mol_type = other DNA
atgtgggcagatgatgccaagaagctgtgcccagacctgctgctggcccaggtgcgggagagccggggcaaggccaacctgaccaagtaccgggaggcctctgtggaggtgatggagatcatgagcagatttgctgtgattgagcgggccagcattgatgaggcctacgtggacctgaccagcgctgtgcaggagcggctgcagaagctgcagggccagcccatctctgctgacctgctgcccagcacctacatcgagggcctgccccagggccccaccacagctgaggagaccgtgcagaaggagggcatgaggaagcagggcctcttccagtggctggacagcctgcagattgacaacctgaccagcccagacctgcagctgactgtgggcgccgtcatcgtggaggagatgagagctgccatcgagcgggagaccggcttccagtgcagcgctggcatcagccacaacaaggtgctggccaagctggcctgtggcctgaacaagcccaaccggcagaccctggtgagccacggctctgtgccccagctgttcagccagatgcccatcaggaagatccgcagcctgggcggcaagctgggcgcctctgtgattgagatcctgggcatcgagtacatgggagagctgacccagttcacagagagccagctgcagagccactttggagagaagaatggctcctggctgtatgccatgtgccggggcattgaacatgaccctgtgaagccccggcagctgcccaagaccatcggctgcagcaagaacttccctgggaagacagccctggccacccgggagcaggtgcagtggtggctgctgcagctggcccaggagctggaggagcggctgaccaaggacagaaatgacaatgacagagtggccacccagctggtggtgtccatccgggtgcagggcgacaagaggctgagcagcctgcggcgctgctgtgccctgaccaggtatgatgcccacaagatgagccatgatgccttcaccgtcatcaagaactgcaacaccagcggcatccagacagagtggagcccccccctgaccatgctgttcctgtgtgccaccaagttcagcgccagcgcccccagcagcagcacagacatcaccagcttcctgagcagtgaccccagcagcctgcccaaggtgcctgtgaccagcagcgaggccaagacccagggcagcggccctgctgtgacagccaccaagaaggccaccaccagcctggagagcttcttccagaaggctgctgagcggcagaaggtgaaggaggccagcctgagcagcctgacagcccccacccaggcccccatgagcaacagccccagcaagcccagcctgcccttccagaccagccagagcactggaacagagcccttcttcaagcagaagagcctgctgctgaagcagaagcagctgaacaacagctctgtgagcagcccccagcagaacccctggagcaactgcaaggccctgcccaacagcctgcccacagagtacccaggctgtgtgcctgtgtgtgagggcgtgtccaagctggaggagagcagcaaggccaccccagctgagatggacctggcccacaacagccagagcatgcacgccagcagcgccagcaagtctgtgctggaggtgacccagaaggccacccccaaccccagcctgctggccgctgaggaccaggtgccctgtgagaagtgtggcagcctggtgcctgtgtgggacatgcctgagcacatggactaccactttgccctggagctgcagaagagcttcctgcagccccacagcagcaacccccaggtggtgtctgctgtgagccaccagggcaagaggaaccccaagagccccctggcctgcaccaacaagaggcccaggcctgagggcatgcagaccctggagagcttcttcaagcccctgacccactag

SEQ ID NO: 164655 - DNA, 3720 bp, synthetic construct
  misc_feature 1..3720: note = Description of Artificial Sequence: Synthetic coding sequence
  source 1..3720: mol_type = other DNA
atgagccggctgctgtggaggaaggtggccggggccaccgtgggccctggccctgtgcctgcccctggccgctgggtgagcagctctgtgcctgccagtgaccccagtgatggccagaggcggcggcagcagcagcagcagcagcagcagcagcagcagcagcagccccagcagccccaggtgctgagcagcgagggcggccagctgcggcacaaccccctggacatccagatgctgagccggggcctgcacgagcagatcttcggccagggcggggagatgcctggagaggccgctgtgagaagatctgtggagcacctgcagaagcacggcctgtggggccagcctgctgtgcccctgcctgatgtggagctgcggctgccccccctgtatggagacaacctggaccagcacttccggctgctggcccagaagcagagcctgccctacctggaggccgccaacctgctgctgcaggcccagctgccccccaagcccccagcctgggcctgggccgagggctggaccaggtatggccctgagggggaggccgtgcctgtggccatccctgaggagcgggccctggtgtttgatgtggaggtgtgcctggccgagggcacctgccccaccctggccgtggccatcagccccagcgcctggtacagctggtgcagccagaggctggtggaggagcgctacagctggaccagccagctgagccctgctgacctgatccccctggaggtgcccactggagccagcagccccacccagagggactggcaggagcagctggtggtgggccacaacgtgtcctttgaccgggcccacatccgggagcagtacctgatccagggcagcaggatgaggttcctggacaccatgtccatgcacatggccatcagcggcctgagcagcttccagaggagcctgtggattgctgccaagcagggcaagcacaaggtgcagccccccaccaagcagggccagaagagccagaggaaggcccggcggggccctgccatcagctcctgggactggctggacatcagctctgtgaacagcctggccgaggtgcaccggctgtatgtgggcggcccccccctggagaaggagccccgggagctgtttgtgaagggcaccatgaaggacatccgggagaacttccaggacctgatgcagtactgtgcccaggatgtgtgggccacccatgaggtgttccagcagcagctgcccctcttcctggagcgctgcccccaccctgtgaccctggccggcatgctggagatgggcgtgtcctacctgcctgtgaaccagaactgggagcgctacctggccgaggcccagggcacctatgaggagctgcagcgggagatgaagaagagcctgatggacctggccaatgatgcctgccagctgctgtctggagagcgctacaaggaggacccctggctgtgggacctggagtgggacctgcaggagttcaagcagaagaaggccaagaaggtgaagaaggagcccgccacagccagcaagctgcccattgaaggagctggggcccctggggaccccatggaccaggaggacctgggcccctgcagcgaggaggaggagttccagcaggatgtgatggcccgggcctgcctgcagaagctgaagggcaccacagagctgctgcccaagaggccccagcacctgcccggccaccctggctggtacaggaagctgtgcccccggctggatgatcctgcctggaccccaggccccagcctgctgagcctgcagatgagggtgacccccaagctgatggccctgacctgggatggcttccccctgcactacagcgagcggcacggctggggctacctggtgcctggaagaagagacaacctggccaagctgcccaccggcaccaccctggagagcgctggggtggtgtgcccctaccgggccatcgagagcctgtacaggaagcactgcctggagcagggcaagcagcagctgatgccccaggaggccggcctggccgaggagttcctgctgacagacaacagcgccatctggcagacagtggaggagctggactacctggaggtggaggccgaggccaagatggagaacctgcgggctgctgtgcccggccagcccctggccctgacagcccggggcggccccaaggacacccagcccagctaccaccacggcaatggcccctacaatgatgtggacatccctggctgctggttcttcaagctgccccacaaggatggcaacagctgcaatgtgggcagcccctttgccaaggacttcctgcccaagatggaggatggcaccctgcaggccggccctggaggagccagcggcccccgggccctggagatcaacaagatgatctccttctggagaaatgcccacaagaggatcagcagccagatggtggtgtggctgcccaggtctgccctgccccgggccgtcatccgccacccagactatgatgaggagggcctgtatggagccatcctgccccaggtggtgacagctggcaccatcacccggcgggctgtggagcccacctggctgacagccagcaatgcccggccagacagagtgggcagcgagctgaaggccatggtgcaggcccctcctggctacaccctggtgggcgcagatgtggacagccaggagctgtggattgctgctgtgctgggagatgcccactttgctggcatgcacggctgcacagccttcggctggatgaccctgcagggcaggaagagccggggcacagacctgcacagcaagacagccaccaccgtgggcatcagccgggagcacgccaagatcttcaactacggccgcatctatggagctggccagccctttgctgagcggctgctgatgcagttcaaccaccggctgacccagcaggaggccgctgagaaggcccagcagatgtatgctgccaccaagggcctgcgctggtaccgcctgagtgatgaaggagagtggctggtgcgggagctgaacctgcctgtggacagaacagaaggaggctggatcagcctgcaggacctgaggaaggtgcagcgggagacagccaggaagagccagtggaagaagtgggaggtggtggccgagcgggcctggaagggcggcacagaaagtgagatgttcaacaagctggagagcatcgccaccagtgacatccccaggacccctgtgctgggctgctgcatcagccgggccctggagcccagcgctgtgcaggaggagttcatgaccagccgggtgaactgggtggtgcagagcagcgctgtggactacctgcacctgatgctggtggccatgaagtggctgtttgaggagtttgccattgatggccgcttctgcatcagcatccatgatgaggtgcgctacctggtgcgggaggaggaccgctacagagctgccctggccctgcagatcaccaacctgctgacccgctgcatgtttgcctacaagctgggcctgaatgacctgccccagagcgtggccttcttctctgctgtggacatcgaccgctgcctgaggaaggaggtgaccatggactgcaagacccccagcaaccccaccggcatggagcggcgctatggcatcccccagggcgaggccctggacatctaccagatcatcgagctgaccaagggcagcctggagaagaggagccagcccggcccctag

SEQ ID NO: 164656 - DNA, 3720 bp, synthetic construct; identical to SEQ ID NO: 164655
  misc_feature 1..3720: note = Description of Artificial Sequence: Synthetic coding sequence
  source 1..3720: mol_type = other DNA

SEQ ID NO: 164657 - DNA, 1458 bp, synthetic construct
  misc_feature 1..1458: note = Description of Artificial Sequence: Synthetic coding sequence
  source 1..1458: mol_type = other DNA
atgaggagccgggtggccgtgcgggcctgccacaaggtgtgccgctgcctgctgagcggctttggaggccgggtggatgctggccagcctgagctgctgacagagaggagcagccccaagggcggccacgtgaagagccacgccgagctggagggcaatggagagcaccctgaggcccctggcagcggggagggcagcgaggccctgctggagatctgccagaggaggcacttcctgagcggcagcaagcagcagctgagccgggacagcctgctgagcggctgccaccctggcttcggccccctgggcgtggagctgaggaagaacctggccgctgagtggtggacctctgtggtggtgttccgggagcaggtgtttcctgtggatgccctgcaccacaagccaggccccctgctgcccggggacagcgccttccggctggtgtctgctgagaccctgcgggagatcctgcaggacaaggagctgagcaaggagcagctggtggccttcctggagaatgtgctgaagaccagcggcaagctgcgggagaacctgctgcatggagccctggagcactacgtgaactgcctggacctggtgaacaagaggctgccctacggcctggcccagattggagtgtgcttccaccctgtgtttgacaccaagcagatcagaaatggagtgaagagcattggagagaagacagaggccagcctggtgtggttcaccccacccaggaccagcaaccagtggctggacttctggctgcggcaccggctgcagtggtggaggaagtttgccatgagccccagcaacttcagcagcagtgactgccaggatgaggagggcaggaaaggaaacaagctgtactacaacttcccctggggcaaggagctgattgagaccctgtggaacctgggggaccacgagctgctgcacatgtacccaggaaatgtgtccaagctgcacggcagagatggcaggaagaatgtggtgccctgtgtgctgtctgtgaatggagacctggaccggggcatgctggcctacctgtatgacagcttccagctgacagagaacagcttcaccaggaagaagaacctgcacaggaaggtgctgaagctgcacccctgcctggcccccatcaaggtggccctggatgtgggccggggccccaccctggagctgcggcaggtgtgccagggcctcttcaatgagctgctggagaatggcatctctgtgtggccaggctacctggagaccatgcagagcagcctggagcagctgtacagcaaatatgatgagatgagcatcctcttcaccgtgctggtgacagagaccaccctggagaatggcctcatccacctgcggagccgggacaccaccatgaaggagatgatgcacatcagcaagctgaaggacttcctgatcaagtacatcagcagcgccaagaatgtgtag

SEQ ID NO: 164658 - DNA, 7773 bp, synthetic construct
  misc_feature 1..7773: note = Description of Artificial Sequence: Synthetic coding sequence
  source 1..7773: mol_type = other DNA
atgaacctgctgcggcgcagcggcaagagaagaagaagtgaaagtggcagtgacagcttcagcggcagcggcggggacagcagcgccagcccccagttcctgagcggctctgtgctgagccccccacctggcctgggccgctgcctgaaggctgctgctgctggggagtgcaagcccaccgtgcctgactatgaaagagacaagctgctgctggccaactggggcctgcccaaggctgtgctggagaagtaccacagctttggagtgaagaagatgtttgagtggcaggccgagtgcctgctgctgggccaggtgctggagggcaagaacctggtgtacagcgcccccaccagcgctgggaagaccctggtggccgagctgctgatcctgaagagggtgctggagatgaggaagaaggccctcttcatcctgccctttgtgtctgtggccaaggagaagaagtactacctgcagagcctcttccaggaggtgggcatcaaggtggatggctacatgggcagcaccagccccagccgccacttcagcagcctggacattgctgtgtgcaccatcgagcgggccaacggcctcatcaacagactcatcgaggagaacaagatggacctgctgggcatggtggtggtggatgagctgcacatgctgggggacagccaccggggctacctgctggagctgctgctgaccaagatctgctacatcaccaggaagagcgccagctgccaggccgacctggccagcagcctgagcaatgctgtgcagatcgtgggcatgtctgccaccctgcccaacctggagctggtggcctcctggctgaatgctgagctgtaccacacagacttccggcctgtgcccctgctggagagcgtgaaggtgggcaacagcatctatgacagctccatgaagctggtgcgggagtttgagcccatgctgcaggtgaagggagatgaagatcatgtggtgtccctgtgctatgagaccatctgtgacaaccacagcgtgctgctcttctgccccagcaagaagtggtgtgagaagctggccgacatcatcgcccgggagttctacaacctgcaccaccaggccgagggcctggtgaagcccagcgagtgcccccctgtgatcctggagcagaaggagctgctggaggtgatggaccagctgcggcggctgcccagcggcctggacagcgtgctgcagaagacagtgccctggggcgtggccttccaccacgccggcctgacctttgaggagcgggacatcatcgagggcgccttccggcagggcctcatccgggtgctggccgccaccagcaccctgagcagcggcgtgaacctgcctgcccggcgggtcatcatccgcacccccatctttggaggccggcccctggacatcctgacctacaagcagatggtgggccgggccggcaggaagggcgtggacacagtgggggagagcatcctgatctgcaagaacagcgagaagagcaaaggaattgccctgctgcagggcagcctgaagcctgtgcgcagctgcctgcagaggcgggagggggaggaggtgacaggctccatgatccgggccatcctggagatcatcgtgggcggcgtggccagcaccagccaggacatgcacacctacgccgcctgcaccttcctggccgcctccatgaaggagggcaagcagggcatccagaggaaccaggagagcgtgcagctgggcgccatcgaggcctgtgtgatgtggctgctggagaatgagttcatccagagcacagaggccagtgatggaacagagggcaaggtgtaccaccccacccacctgggcagcgccaccctgagcagcagcctgagccctgctgacaccctggacatctttgctgacctgcagagggccatgaagggctttgtgctggagaatgacctgcacatcctgtacctggtgacccccatgtttgaggactggaccaccatcgactggtaccgcttcttctgcctgtgggagaagctgcccacctccatgaagagggtggccgagctggtgggcgtggaggagggcttcctggcccgctgtgtgaagggcaaggtggtggccaggacagagcggcagcaccggcagatggccatccacaagcgcttcttcaccagcctggtgctgctggacctgatcagcgaggtgcccctgcgggagatcaaccagaagtatggctgcaacagaggccagatccagagcctgcagcagagcgctgctgtgtatgccggcatgatcaccgtcttcagcaaccggctgggctggcacaacatggagctgctgctgagccagttccagaagaggctgaccttcggcatccagcgggagctgtgtgacctggtgcgggtgtccctgctgaatgcccagagggcccgggtgctgtatgccagcggcttccacacagtggccgacctggcccgggccaacatcgtggaggtggaggtgatcctgaagaatgctgtgcccttcaagagcgccaggaaggctgtggatgaggaggaggaggccgtggaggagaggaggaacatgaggaccatctgggtgactggaaggaagggcctgacagagcgggaggccgccgccctgattgtggaggaggccaggatgatcctgcagcaggacctggtggagatgggcgtgcagtggaacccctgtgccctgctgcacagcagcacctgcagcctgacccacagcgagagcgaggtgaaggagcacaccttcatcagccagaccaagagcagctacaagaagctgaccagcaagaacaagagcaacaccatcttcagtgacagctacatcaagcacagccccaacatcgtgcaggacctgaacaagagccgggagcacaccagcagcttcaactgcaacttccagaatggaaaccaggagcaccagacctgcagcatcttccgggccaggaagagggccagcctggacatcaacaaggagaagccaggggccagccagaatgaaggcaagaccagtgacaagaaggtggtgcagaccttcagccagaagaccaagaaggcccccctgaacttcaacagcgagaagatgagccgctccttccgctcctggaagaggaggaagcacctgaagaggagccgggacagcagccccctgaaggacagcggggcctgccgcatccacctgcagggccagaccctgagcaaccccagcctgtgtgaggaccccttcaccctggatgagaagaagacagagttcaggaacagcggcccctttgccaagaatgtgtccctgagcggcaaggagaaggacaacaagaccagcttccccctgcagatcaagcagaactgctcctggaacatcaccctgaccaatgacaactttgtggagcacatcgtgacaggcagccagagcaagaatgtgacctgccaggccacctctgtggtgtctgagaagggccggggcgtggccgtggaggccgagaagatcaatgaggtgctgatccagaatggcagcaagaaccagaatgtgtacatgaagcaccacgacatccaccccatcaaccagtacctgaggaagcagagccatgagcagaccagcaccatcaccaagcagaagaacatcatcgagcggcagatgccctgtgaggccgtgtcctcctacatcaacagagacagcaatgtgaccatcaactgtgagcgcatcaagctgaacacagaggagaacaagcccagccacttccaggccctgggagatgacatcagcaggacagtcatccccagcgaggtgctgcccagcgctggggccttcagcaagtctgagggccagcacgagaacttcctgaacatcagccggctgcaggagaagacaggcacctacaccaccaacaagaccaagaacaaccacgtgtctgacctgggcctggtgctgtgtgactttgaagattccttctacctggacacccagagcgagaagatcatccagcagatggccacagaaaatgccaagctgggcgccaaggacaccaacctggccgccggcatcatgcagaagagcctggtgcagcagaacagcatgaacagcttccagaaggagtgccacatccccttccctgctgagcagcaccccctgggcgccaccaagattgaccacctggacctgaagacagtgggcaccatgaagcagagcagtgacagccatggagtggacatcctgaccccagagagccccatcttccacagccccatcctgctggaggagaatggcctcttcctgaagaagaatgaggtgtctgtgacagacagccagctgaacagcttcctgcagggctaccagacccaggagaccgtgaagcctgtgatcctgctgatcccccagaagaggacccccactggagtggagggggagtgcctgcctgtgcctgagaccagcctgaacatgtctgacagcctgctgtttgacagcttcagtgatgactacctggtgaaggagcagctgcctgacatgcagatgaaggagcccctgcccagcgaggtgaccagcaaccacttcagtgacagcctgtgcctgcaggaggacctgatcaagaagagcaatgtgaatgaaaaccaggacacccaccagcagctgacctgcagcaatgatgagagcatcatcttcagcgagatggattctgtgcagatggtggaggccctggacaacgtggacatcttccctgtgcaggagaagaaccacacagtggtgagcccccgggccctggagctgagtgaccctgtgctggatgagcaccaccagggcgaccaggatggaggagaccaggatgaaagagctgagaagagcaagctgaccggcacccggcagaaccacagcttcatctggagcggggccagctttgacctgagccctggcctgcagaggatcctggacaaggtgagcagccccctggagaatgagaagctgaagtccatgaccatcaacttcagcagcctgaacaggaagaacacagagctgaatgaggagcaggaggtgatcagcaacctggagaccaagcaggtgcagggcatctccttcagcagcaacaatgaggtgaagagcaagattgagatgctggagaacaatgccaaccatgatgagaccagcagcctgctgcccaggaaggagagcaacatcgtggatgacaatggcctcatcccccccacccccatccccaccagcgccagcaagctgaccttccctggcatcctggagacccctgtgaacccctggaagaccaacaacgtgctgcagcccggggagagctacctgtttggcagccccagcgacatcaagaaccacgacctgagccctggcagcagaaatggcttcaaggacaacagccccatcagtgacaccagcttcagcctgcagctgagccaggacggcctgcagctgaccccagccagcagcagcagcgagagcctgagcatcattgatgtggccagtgaccagaacctcttccagaccttcatcaaggagtggcgctgcaagaagcgcttcagcatcagcctggcctgtgagaagatccgcagcctgaccagcagcaagacagccaccatcggcagccgcttcaagcaggccagcagcccccaggagatccccatcagagatgatggcttccccatcaagggctgtgatgacaccctggtggtgggcctggccgtgtgctggggcggcagagatgcctactacttcagcctgcagaaggagcagaagcacagcgagatcagcgccagcctggtgccccccagcctggaccccagcctgaccctgaaggacaggatgtggtacctgcagagctgcctgaggaaggagagtgacaaggaatgttctgtggtgatctatgacttcatccagagctacaagatcctgctgctgagctgtggcatcagcctggagcagagctatgaggaccccaaggtggcctgctggctgctggaccctgacagccaggagcccaccctgcacagcatcgtgaccagcttcctgccccatgagctgcccctgctggagggcatggagaccagccagggcatccagagcctgggcctgaatgccggcagcgagcacagcggccgctaccgggcctctgtggagagcatcctgatcttcaacagcatgaaccagctgaacagcctgctgcagaaggagaacctgcaggatgtgttcaggaaggtggagatgcccagccagtactgcctggccctgctggagctgaatggcatcggcttcagcacagcagaatgtgagagccagaagcacatcatgcaggccaagctggatgccatcgagacccaggcctaccagctggccggccacagcttctccttcaccagcagtgatgacattgctgaggtgctcttcctggagctgaagctgccccccaaccgggagatgaagaaccagggcagcaagaagaccctgggcagcacccggcggggcatcgacaatggaaggaagctgcggctgggccggcagttcagcaccagcaaggatgtgctgaacaagctgaaggccctgcaccccctgcccggcctcatcctggagtggaggcgcatcaccaatgccatcaccaaggtggtgttccccctgcagcgggagaagtgcctgaaccccttcctgggcatggagcgcatctaccctgtgtcccagagccacacagccaccggccgcatcaccttcacagagcccaacatccagaatgtgccccgggactttgagatcaagatgcccaccctggtgggggagagcccccccagccaggccgtgggcaagggcctgctgcccatgggccggggcaagtacaagaagggcttctctgtgaacccccgctgccaggcccagatggaggagagagctgctgaccggggcatgcccttcagcatctccatgagacatgcctttgtgcccttccctgggggcagcatcctggccgctgactacagccagctggagctgcgcatcctggcccacctgagccatgaccggcggctcatccaggtgctgaacacaggagcagatgtgttccgcagcattgctgctgagtggaagatgattgagcctgagagcgtgggagatgacctgcggcagcaggccaagcagatctgctacggcatcatctacggcatgggcgccaagagcctgggggagcagatgggcatcaaggaaaatgatgctgcctgctacatcgacagcttcaagagccgctacacaggcatcaaccagttcatgacagagaccgtgaagaactgcaagagagatggctttgtgcagaccatcctgggcagaagacgctacctgcccggcatcaaggacaacaacccctacaggaaggcccacgccgagcggcaggccatcaacaccatcgtgcagggcagcgctgctgacatcgtgaagatcgccaccgtgaacatccagaagcagctggagaccttccacagcaccttcaagagccacggccaccgggagggcatgctgcagagcgaccagacaggcctgagcaggaagaggaagctgcagggcatgttctgccccatccggggcggcttcttcatcctgcagctgcatgatgagctgctgtatgaggtggccgaggaggatgtggtgcaggtggcccagatcgtgaagaatgagatggagagcgctgtgaagctgtctgtgaagctgaaggtgaaggtgaagatcggggcctcctggggcgagctgaaggactttgatgtgtag

SEQ ID NO: 164659 - DNA, 8181 bp, synthetic construct
  misc_feature 1..8181: note = Description of Artificial Sequence: Synthetic coding sequence
  source 1..8181: mol_type = other DNA
atgaatggccaccgcttcaccttccgcaccaggagcctgctgcccctgcagaagggccagcaccgctgcatcaccaagctgctggcccacaatgacccctggggcatcttccgggcccccagcagcagaagaagctacagcgtgtctggagtgtgccagcctgccatccccaacagcagcctgcacatcccccacaatgcctgctggctgaagtggaagctgtgcagcgagatcgccctgccctaccaccacatcctgggggagaggaggaagctgtgcagcatccgccgctttgaatttgaggactggagagaagatgtgcgcagctgctgccaggcccgggtgctgccccggggccgcaccctgggcctgtggctggccctgattggccgggaggagtttgccatgaacctgctgcggcgcagcggcaagagaagaagaagtgagagcggcagtgacagcttcagcggcagcggcggggacagcagcgccagcccccagttcctgagcggctctgtgctgagccccccacctggcctgggccgctgcctgaaggctgctgctgctggggagtgcaagcccaccgtgcctgactatgagcgggacaagctgctgctggccaactggggcctgcccaaggctgtgctggagaagtaccacagctttggagtgaagaagatgtttgagtggcaggctgaatgtctgctgctgggccaggtgctggagggcaagaacctggtgtacagcgcccccaccagcgctgggaagaccctggtggccgagctgctgatcctgaagagggtgctggagatgaggaagaaggccctcttcatcctgccctttgtgtctgtggccaaggagaagaagtactacctgcagagcctcttccaggaggtgggcatcaaggtggatggctacatgggcagcaccagccccagccgccacttcagcagcctggacattgctgtgtgcaccatcgagcgggccaacggcctcatcaaccggctgattgaggagaacaagatggacctgctgggcatggtggtggtggatgagctgcacatgctgggggacagccaccggggctacctgctggagctgctgctgaccaagatctgctacatcaccaggaagagcgccagctgccaggccgacctggccagcagcctgagcaatgctgtgcagatcgtgggcatgtctgccaccctgcccaacctggagctggtggcctcctggctgaatgctgagctgtaccacacagacttccggcctgtgcccctgctggagagcgtgaaggtgggcaacagcatctatgacagctccatgaagctggtgcgggagtttgagcccatgctgcaggtgaagggagatgaggaccacgtggtgtccctgtgctatgagaccatctgtgacaaccacagcgtgctgctcttctgccccagcaagaagtggtgtgagaagctggccgacatcatcgcccgggagttctacaacctgcaccaccaggccgagggggagggcctggtgaagcccagtgaatgtcctcctgtgatcctggagcagaaggagctgctggaggtgatggaccagctgcggcggctgcccagcggcctggacagcgtgctgcagaagacagtgccctggggcgtggccttccaccacgccggcctgacctttgaggagcgggacatcattgaaggagccttccggcagggcctcatccgggtgctggccgccaccagcaccctgagcagtggagtgaacctgcctgcccggcgggtcatcatccgcacccccatctttggaggccggcccctggacatcctgacctacaagcagatggtgggccgggccggcaggaaaggagtggacacagtggagagcatcctgatctgcaagaacagcgagaagagcaaaggaattgccctgctgcagggcagcctgaagcctgtgcgcagctgcctgcagaggcgggagggggaggaggtgacaggctccatgatccgggccatcctggagatcatcgtgggcggcgtggccagcaccagccaggacatgcacacctacgccgcctgcaccttcctggccgcctccatgaaggagggcaagcagggcatccagaggaaccaggagagcgtgcagctgggcgccatcgaggcctgtgtgatgtggctgctggagaatgagttcatccagagcacagaggccagtgatggaacagagggcaaggtgtaccaccccacccacctgggcagcgccaccctgagcagcagcctgagccctgctgacaccctggacatctttgctgacctgcagagggccatgaagggctttgtgctggagaatgacctgcacatcctgtacctggtgacccccatgtttgaggactggaccaccatcgactggtaccgcttcttctgcctgtgggagaagctgcccacctccatgaagagggtggccgagctggtgggcgtggaggagggcttcctggcccgctgtgtgaagggcaaggtggtggccaggacagagcggcagcaccggcagatggccatccacaagcgcttcttcaccagcctggtgctgctggacctgatcagcgaggtgcccctgcgggagatcaaccagaagtatggctgcaacagaggccagatccagagcctgcagcagagcgctgctgtgtatgccggcatgatcaccgtcttcagcaaccggctgggctggcacaacatggagctgctgctgagccagttccagaagaggctgaccttcggcatccagcgggagctgtgtgacctggtgcgggtgtccctgctgaatgcccagagggcccgggtgctgtatgccagcggcttccacacagtggccgacctggcccgggccaacatcgtggaggtggaggtgatcctgaagaatgctgtgcccttcaagagcgccaggaaggctgtggatgaggaggaggaggccgtggaggagaggaggaacatgaggaccatctgggtgactggaaggaagggcctgacagagcgggaggccgccgccctgattgtggaggaggccaggatgatcctgcagcaggacctggtggagatgggcgtgcagtggaacccctgtgccctgctgcacagcagcacctgcagcctgacccacagcgagagcgaggtgaaggagcacaccttcatcagccagaccaagagcagctacaagaagctgaccagcaagaacaagagcaacaccatcttcagtgacagctacatcaagcacagccccaacatcgtgcaggacctgaacaagagccgggagcacaccagcagcttcaactgcaacttccagaatggaaaccaggagcaccagacctgcagcatcttccgggccaggaagagggccagcctggacatcaacaaggagaagccaggggccagccagaatgaaggcaagaccagtgacaagaaggtggtgcagaccttcagccagaagaccaagaaggcccccctgaacttcaacagcgagaagatgagccgctccttccgctcctggaagaggaggaagcacctgaagaggagccgggacagcagccccctgaaggacagcggggcctgccgcatccacctgcagggccagaccctgagcaaccccagcctgtgtgaggaccccttcaccctggatgagaagaagacagagttcaggaacagcggcccctttgccaagaatgtgtccctgagcggcaaggagaaggacaacaagaccagcttccccctgcagatcaagcagaactgctcctggaacatcaccctgaccaatgacaactttgtggagcacatcgtgacaggcagccagagcaagaatgtgacctgccaggccacctctgtggtgtctgagaagggccggggcgtggccgtggaggccgagaagatcaatgaggtgctgatccagaatggcagcaagaaccagaatgtgtacatgaagcaccacgacatccaccccatcaaccagtacctgaggaagcagagccatgagcagaccagcaccatcaccaagcagaagaacatcatcgagcggcagatgccctgtgaggccgtgtcctcctacatcaacagagacagcaatgtgaccatcaactgtgagcgcatcaagctgaacacagaggagaacaagcccagccacttccaggccctgggagatgacatcagcaggacagtcatccccagcgaggtgctgcccagcgctggggccttcagcaagtctgagggccagcacgagaacttcctgaacatcagccggctgcaggagaagacaggcacctacaccaccaacaagaccaagaacaaccacgtgtctgacctgggcctggtgctgtgtgactttgaagattccttctacctggacacccagagcgagaagatcatccagcagatggccacagaaaatgccaagctgggcgccaaggacaccaacctggccgccggcatcatgcagaagagcctggtgcagcagaacagcatgaacagcttccagaaggagtgccacatccccttccctgctgagcagcaccccctgggcgccaccaagattgaccacctggacctgaagacagtgggcaccatgaagcagagcagtgacagccatggagtggacatcctgaccccagagagccccatcttccacagccccatcctgctggaggagaatggcctcttcctgaagaagaatgaggtgtctgtgacagacagccagctgaacagcttcctgcagggctaccagacccaggagaccgtgaagcctgtgatcctgctgatcccccagaagaggacccccactggagtggagggggagtgcctgcctgtgcctgagaccagcctgaacatgtctgacagcctgctgtttgacagcttcagtgatgactacctggtgaaggagcagctgcctgacatgcagatgaaggagcccctgcccagcgaggtgaccagcaaccacttcagtgacagcctgtgcctgcaggaggacctgatcaagaagagcaatgtgaatgaaaaccaggacacccaccagcagctgacctgcagcaatgatgagagcatcatcttcagcgagatggattctgtgcagatggtggaggccctggacaacgtggacatcttccctgtgcaggagaagaaccacacagtggtgagcccccgggccctggagctgagtgaccctgtgctggatgagcaccaccagggcgaccaggatggaggagaccaggatgaaagagctgagaagagcaagctgaccggcacccggcagaaccacagcttcatctggagcggggccagctttgacctgagccctggcctgcagaggatcctggacaaggtgagcagccccctggagaatgagaagctgaagtccatgaccatcaacttcagcagcctgaacaggaagaacacagagctgaatgaggagcaggaggtgatcagcaacctggagaccaagcaggtgcagggcatctccttcagcagcaacaatgaggtgaagagcaagattgagatgctggagaacaatgccaaccatgatgagaccagcagcctgctgcccaggaaggagagcaacatcgtggatgacaatggcctcatcccccccacccccatccccaccagcgccagcaagctgaccttccctggcatcctggagacccctgtgaacccctggaagaccaacaacgtgctgcagcccggggagagctacctgtttggcagccccagcgacatcaagaaccacgacctgagccctggcagcagaaatggcttcaaggacaacagccccatcagtgacaccagcttcagcctgcagctgagccaggacggcctgcagctgaccccagccagcagcagcagcgagagcctgagcatcattgatgtggccagtgaccagaacctcttccagaccttcatcaaggagtggcgctgcaagaagcgcttcagcatcagcctggcctgtgagaagatccgcagcctgaccagcagcaagacagccaccatcggcagccgcttcaagcaggccagcagcccccaggagatccccatcagagatgatggcttccccatcaagggctgtgatgacaccctggtggtgggcctggccgtgtgctggggcggcagagatgcctactacttcagcctgcagaaggagcagaagcacagcgagatcagcgccagcctggtgccccccagcctggaccccagcctgaccctgaaggacaggatgtggtacctgcagagctgcctgaggaaggagagtgacaaggaatgttctgtggtgatctatgacttcatccagagctacaagatcctgctgctgagctgtggcatcagcctggagcagagctatgaggaccccaaggtggcctgctggctgctggaccctgacagccaggagcccaccctgcacagcatcgtgaccagcttcctgccccatgagctgcccctgctggagggcatggagaccagccagggcatccagagcctgggcctgaatgccggcagcgagcacagcggccgctaccgggcctctgtggagagcatcctgatcttcaacagcatgaaccagctgaacagcctgctgcagaaggagaacctgcaggatgtgttcaggaaggtggagatgcccagccagtactgcctggccctgctggagctgaatggcatcggcttcagcacagcagaatgtgagagccagaagcacatcatgcaggccaagctggatgccatcgagacccaggcctaccagctggccggccacagcttctccttcaccagcagtgatgacattgctgaggtgctcttcctggagctgaagctgccccccaaccgggagatgaagaaccagggcagcaagaagaccctgggcagcacccggcggggcatcgacaatggaaggaagctgcggctgggccggcagttcagcaccagcaaggatgtgctgaacaagctgaaggccctgcaccccctgcccggcctcatcctggagtggaggcgcatcaccaatgccatcaccaaggtggtgttccccctgcagcgggagaagtgcctgaaccccttcctgggcatggagcgcatctaccctgtgtcccagagccacacagccaccggccgcatcaccttcacagagcccaacatccagaatgtgccccgggactttgagatcaagatgcccaccctggtgggggagagcccccccagccaggccgtgggcaagggcctgctgcccatgggccggggcaagtacaagaagggcttctctgtgaacccccgctgccaggcccagatggaggagagagctgctgaccggggcatgcccttcagcatctccatgagacatgcctttgtgcccttccctgggggcagcatcctggccgctgactacagccagctggagctgcgcatcctggcccacctgagccatgaccggcggctcatccaggtgctgaacacaggagcagatgtgttccgcagcattgctgctgagtggaagatgattgagcctgagagcgtgggagatgacctgcggcagcaggccaagcagatctgctacggcatcatctacggcatgggcgccaagagcctgggggagcagatgggcatcaaggaaaatgatgctgcctgctacatcgacagcttcaagagccgctacacaggcatcaaccagttcatgacagagaccgtgaagaactgcaagagagatggctttgtgcagaccatcctgggcagaagacgctacctgcccggcatcaaggacaacaacccctacaggaaggcccacgccgagcggcaggccatcaacaccatcgtgcagggcagcgctgctgacatcgtgaagatcgccaccgtgaacatccagaagcagctggagaccttccacagcaccttcaagagccacggccaccgggagggcatgctgcagagcgaccagacaggcctgagcaggaagaggaagctgcagggcatgttctgccccatccggggcggcttcttcatcctgcagctgcatgatgagctgctgtatgaggtggccgaggaggatgtggtgcaggtggcccagatcgtgaagaatgagatggagagcgctgtgaagctgtctgtgaagctgaaggtgaaggtgaagatcggggcctcctggggcgagctgaaggactttgatgtgtag

SEQ ID NO: 164660 - DNA, 6642 bp, synthetic construct
  misc_feature 1..6642: note = Description of Artificial Sequence: Synthetic coding sequence
  source 1..6642: mol_type = other DNA
atgcccaccagcaacagccagaaggagctgctggaggtgatggaccagctgcggcggctgcccagcggcctggacagcgtgctgcagaagacagtgccctggggcgtggccttccaccacgccggcctgacctttgaggagcgggacatcattgaaggagccttccggcagggcctcatccgggtgctggccgccaccagcaccctgagcagtggagtgaacctgcctgcccggcgggtcatcatccgcacccccatctttggaggccggcccctggacatcctgacctacaagcagatggtgggccgggccggcaggaaaggagtggacacagtgggggagagcatcctgatctgcaagaacagcgagaagagcaagggcatcgccctgctgcagggcagcctgaagcctgtgcgcagctgcctgcagaggcgggagggggaggaggtgacaggctccatgatccgggccatcctggagatcatcgtgggcggcgtggccagcaccagccaggacatgcacacctatgctgcctgcaccttcctggccgcctccatgaaggagggcaagcagggcatccagaggaaccaggagagcgtgcagctgggcgccatcgaggcctgtgtgatgtggctgctggagaatgagttcatccagagcacagaggccagtgatggaacagagggcaaggtgtaccaccccacccacctgggcagcgccaccctgagcagcagcctgagccctgctgacaccctggacatctttgctgacctgcagagggccatgaagggctttgtgctggagaatgacctgcacatcctgtacctggtgacccccatgtttgaggactggaccaccatcgactggtaccgcttcttctgcctgtgggagaagctgcccacctccatgaagagggtggccgagctggtgggcgtggaggagggcttcctggcccgctgtgtgaagggcaaggtggtggccaggacagagcggcagcaccggcagatggccatccacaagcgcttcttcaccagcctggtgctgctggacctgatcagcgaggtgcccctgcgggagatcaaccagaagtatggctgcaacagaggccagatccagagcctgcagcagagcgctgctgtgtatgccggcatgatcaccgtcttcagcaaccggctgggctggcacaacatggagctgctgctgagccagttccagaagaggctgaccttcggcatccagcgggagctgtgtgacctggtgcgggtgtccctgctgaatgcccagagggcccgggtgctgtatgccagcggcttccacacagtggccgacctggcccgggccaacatcgtggaggtggaggtgatcctgaagaatgctgtgcccttcaagagcgccaggaaggctgtggatgaggaggaggaggccgtggaggagaggaggaacatgaggaccatctgggtgacaggcaggaagggcctgacagagcgggaggccgccgccctgattgtggaggaggccaggatgatcctgcagcaggacctggtggagatgggcgtgcagtggaacccctgtgccctgctgcacagcagcacctgcagcctgacccacagcgagagcgaggtgaaggagcacaccttcatcagccagaccaagagcagctacaagaagctgaccagcaagaacaagagcaacaccatcttcagtgacagctacatcaagcacagccccaacatcgtgcaggacctgaacaagagccgggagcacaccagcagcttcaactgcaacttccagaatggaaaccaggagcaccagacctgcagcatcttccgggccaggaagagggccagcctggacatcaacaaggagaagccaggggccagccagaatgaaggcaagaccagtgacaagaaggtggtgcagaccttcagccagaagaccaagaaggcccccctgaacttcaacagcgagaagatgagccgctccttccgctcctggaagaggaggaagcacctgaagaggagccgggacagcagccccctgaaggacagcggggcctgccgcatccacctgcagggccagaccctgagcaaccccagcctgtgtgaggaccccttcaccctggatgagaagaagacagagttcagaaattctggcccctttgccaagaatgtgtccctgagcggcaaggagaaggacaacaagaccagcttccccctgcagatcaagcagaactgctcctggaacatcaccctgaccaatgacaactttgtggagcacatcgtgacaggcagccagagcaagaatgtgacctgccaggccacctctgtggtgtctgagaagggccggggcgtggccgtggaggccgagaagatcaatgaggtgctgatccagaatggcagcaagaaccagaatgtgtacatgaagcaccacgacatccaccccatcaaccagtacctgaggaagcagagccatgagcagaccagcaccatcaccaagcagaagaacatcatcgagcggcagatgccctgtgaggccgtgagcagctacatcaacagagacagcaatgtgaccatcaactgtgagcgcatcaagctgaacacagaggagaacaagcccagccacttccaggccctgggagatgacatcagcaggacagtcatccccagcgaggtgctgcccagcgctggggccttcagcaagtctgagggccagcacgagaacttcctgaacatcagccggctgcaggagaagacaggcacctacaccaccaacaagaccaagaacaaccacgtgtctgacctgggcctggtgctgtgtgactttgaggacagcttctacctggacacccagagcgagaagatcatccagcagatggccacagaaaatgccaagctgggcgccaaggacaccaacctggccgccggcatcatgcagaagagcctggtgcagcagaacagcatgaacagcttccagaaggagtgccacatccccttccctgctgagcagcaccccctgggcgccaccaagattgaccacctggacctgaagacagtgggcaccatgaagcagagcagtgacagccacggcgtggacatcctgaccccagagagccccatcttccacagccccatcctgctggaggagaatggcctcttcctgaagaagaatgaggtgtctgtgacagacagccagctgaacagcttcctgcagggctaccagacccaggagaccgtgaagcctgtgatcctgctgatcccccagaagaggacccccaccggggtggagggagaatgtctgcctgtgcctgagaccagcctgaacatgtctgacagcctgctgtttgacagcttcagtgatgactacctggtgaaggagcagctgcctgacatgcagatgaaggagcccctgcccagcgaggtgaccagcaaccacttcagtgacagcctgtgcctgcaggaggacctgatcaagaagagcaatgtgaatgaaaaccaggacacccaccagcagctgacctgcagcaatgatgagagcatcatcttcagcgagatggacagcgtgcagatggtggaggccctggacaacgtggacatcttccctgtgcaggagaagaaccacacagtggtgagcccccgggccctggagctgagtgaccctgtgctggatgagcaccaccagggcgaccaggacggcggggaccaggatgagcgggcagagaagagcaagctgaccggcacccggcagaaccacagcttcatctggagcggggccagctttgacctgagccctggcctgcagaggatcctggacaaggtgagcagccccctggagaatgagaagctgaagtccatgaccatcaacttcagcagcctgaacaggaagaacacagagctgaatgaggagcaggaggtgatcagcaacctggagaccaagcaggtgcagggcatctccttcagcagcaacaatgaggtgaagagcaagattgagatgctggagaacaatgccaaccatgatgagaccagcagcctgctgcccaggaaggagagcaacatcgtggatgacaatggcctcatcccccccacccccatccccaccagcgccagcaagctgaccttccctggcatcctggagacccctgtgaacccctggaagaccaacaacgtgctgcagcctggagagagctacctgtttggcagccccagcgacatcaagaaccacgacctgagccctggcagcagaaatggcttcaaggacaacagccccatcagtgacaccagcttcagcctgcagctgagccaggacggcctgcagctgaccccagccagcagcagcagcgagagcctgagcatcattgatgtggccagtgaccagaacctcttccagaccttcatcaaggagtggcgctgcaagaagcgcttcagcatcagcctggcctgtgagaagatccgcagcctgaccagcagcaagacagccaccatcggcagccgcttcaagcaggccagcagcccccaggagatccccatcagagatgatggcttccccatcaagggctgtgatgacaccctggtggtgggcctggccgtgtgctggggcggcagagatgcctactacttcagcctgcagaaggagcagaagcacagcgagatcagcgccagcctggtgccccccagcctggaccccagcctgaccctgaaggacaggatgtggtacctgcagagctgcctgaggaaggagagtgacaaggagtgcagcgtggtgatctatgacttcatccagagctacaagatcctgctgctgagctgtggcatcagcctggagcagagctatgaggaccccaaggtggcctgctggctgctggaccctgacagccaggagcccaccctgcacagcatcgtgaccagcttcctgccccatgagctgcccctgctggagggcatggagaccagccagggcatccagagcctgggcctgaatgccggcagcgagcacagcggccgctaccgggcctctgtggagagcatcctgatcttcaacagcatgaaccagctgaacagcctgctgcagaaggagaacctgcaggatgtgttcaggaaggtggagatgcccagccagtactgcctggccctgctggagctgaatggaattggcttcagcacagcagaatgtgagagccagaagcacatcatgcaggccaagctggatgccatcgagacccaggcctaccagctggccggccacagcttctccttcaccagcagtgatgacattgctgaggtgctcttcctggagctgaagctgccccccaaccgggagatgaagaaccagggcagcaagaagaccctgggcagcacccggcggggcatcgacaatggaaggaagctgcggctgggccggcagttcagcaccagcaaggatgtgctgaacaagctgaaggccctgcaccccctgcccggcctcatcctggagtggaggcgcatcaccaatgccatcaccaaggtggtgttccccctgcagcgggagaagtgcctgaaccccttcctgggcatggagcgcatctaccctgtgtcccagagccacacagccaccggccgcatcaccttcacagagcccaacatccagaatgtgccccgggactttgagatcaagatgcccaccctggtgggggagagcccccccagccaggccgtgggcaagggcctgctgcccatgggccggggcaagtacaagaagggcttctctgtgaacccccgctgccaggcccagatggaggagagagctgctgaccggggcatgcccttcagcatctccatgagacatgcctttgtgcccttccctgggggcagcatcctggccgctgactacagccagctggagctgcgcatcctggcccacctgagccatgacagaagactcatccaggtgctgaacacaggagcagatgtgttccgcagcattgctgctgagtggaagatgattgagcctgagagcgtgggagatgacctgcggcagcaggccaagcagatctgctacggcatcatctacggcatgggcgccaagagcctgggggagcagatgggcatcaaggaaaatgatgctgcctgctacatcgacagcttcaagagccgctacacaggcatcaaccagttcatgacagaaacagtgaagaactgcaagagagatggctttgtgcagaccatcctgggcagaagacgctacctgcccggcatcaaggacaacaacccctacaggaaggcccatgctgagcggcaggccatcaacaccatcgtgcagggcagcgctgctgacatcgtgaagatcgccaccgtgaacatccagaagcagctggagaccttccacagcaccttcaagagccacggccaccgggagggcatgctgcagagcgaccagacaggcctgagcaggaagaggaagctgcagggcatgttctgccccatccggggcggcttcttcatcctgcagctgcatgatgagctgctgtatgaggtggccgaggaggatgtggtgcaggtggcccagatcgtgaagaatgagatggagagcgctgtgaagctgtctgtgaagctgaaggtgaaggtgaagattggagcctcctggggcgagctgaaggactttgatgtgtag

SEQ ID NO: 164661 - DNA, 240 bp, synthetic construct
  misc_feature 1..240: note = Description of Artificial Sequence: Synthetic coding sequence
  source 1..240: mol_type = other DNA
atgggcaggaagaggctcatcacagacagctaccctgtggtgaagaggcgggagggccctgctggccacagcaaaggagagctggcccctgagctgggggaggagccccagcccagagatgaggaggaggccgagctggagctgctgcggcagtttgacctggcctggcagtatggcccctgcaccgtgtctggcatcagcatcccctatgaggcccccaggaagaccagctgcccctag

SEQ ID NO: 164662 - DNA, 324 bp, synthetic construct
  misc_feature 1..324: note = Description of Artificial Sequence: Synthetic coding sequence
  source 1..324: mol_type = other DNA
atgggcaggaagaggctcatcacagacagctaccctgtggtgaagaggcgggagggccctgctggccacagcaaaggagagctggcccctgagctgggggaggagccccagcccagagatgaggaggaggccgagctggagctgctgcggcagtttgacctggcctggcagtatggcccctgcaccggcatcacccggctgcagcgctggtgccgggccaagcagatgggcctggagcccccacctgaggtgtggcaggtgctgaagacccaccctggggacccccgcttccagtgcagcctgtggcacctgtaccccctgtag

SEQ ID NO: 164663 - DNA, 105 bp, synthetic construct
  misc_feature 1..105: note = Description of Artificial Sequence: Synthetic coding sequence
  source 1..105: mol_type = other DNA
atgggcaggaagaggctcatcacagacagctaccctgtggtgaagaggcgggagggccctgctggccacagcaaaggagagctggcccctgagctgggcctgtag

SEQ ID NO: 164664 - DNA, 1266 bp, synthetic construct
  misc_feature 1..1266: note = Description of Artificial Sequence: Synthetic coding sequence
  source 1..1266: mol_type = other DNA
atggctgacatcagcctggatgagctgatcaggaagagaggagctgctgccaagggccgcctgaatgcccggcctggggtgggcggcgtgcgcagccgggtgggcatccagcagggcctgctgagccagagcaccaggacagccaccttccagcagagatttgatgcccggcagaagattggcctgagtgatgcccggctgaagctgggcgtgaaggatgcccgggagaagctgctgcagaaggatgcccgcttccgcatcaagggcaaggtgcaggatgcccgggagatgctgaacagcaggaagcagcagaccaccgtgccccagaagccccggcaggtggctgatgcccgggagaagatcagcctgaagaggagcagccctgctgccttcatcaacccccccatcggcaccgtgaccccagccctgaagctgaccaagaccatccaggtgccccagcagaaggccatggcccccctgcacccccaccctgctggcatgaggatcaacgtggtgaacaaccaccaggccaagcagaacctgtatgacctggatgaagatgatgatggcatcgcctctgtgcccaccaagcagatgaagtttgctgccagcggcggcttcctgcaccacatggccggcctgagcagcagcaagctgtccatgagcaaggccctgcccctgaccaaggtggtgcagaatgatgcctacacagccccagccctgcccagcagcatccgcaccaaggccctgaccaacatgagcaggaccctggtgaacaaggaggagccccccaaggagctgcctgctgctgagcctgtgctgagccccctggagggcaccaagatgacagtgaacaacctgcacccccgggtgacagaggaggacatcgtggagctgttctgtgtgtgtggggccctgaagagggcccggctggtgcaccctggggtggccgaggtggtgtttgtgaagaaggatgatgccatcacagcctacaagaagtacaacaaccgctgcctggatggccagcccatgaagtgcaacctgcacatgaatggaaatgtcatcaccagtgaccagcccatcctgctgcggctgagtgacagccccagcatgaagaaggagagcgagctgcccaggagagtgaacagcgccagcagcagcaaccccccagctgaggtggaccctgacaccatcctgaaggccctcttcaagagcagcggggcctctgtgaccacccagcccacagagttcaagatcaagctgtag

SEQ ID NO: 164665 - DNA, 558 bp, synthetic construct
  misc_feature 1..558: note = Description of Artificial Sequence: Synthetic coding sequence
  source 1..558: mol_type = other DNA
atggctgacatcagcctggatgagctgatcaggaagagaggagctgctgccaagggccgcctgaatgcccggcctggggtgggcggcgtgcgcagccgggtgggcatccagcagggcctgctgagccagagcaccaggacagccaccttccagcagagatttgatgcccggcagaagattggcctgagtgatgcccggctgaagctgggcgtgaaggatgcccgggagaagctgctgcagaaggatgcccgcttccgcatcaagggcaaggtgcaggatgcccgggagatgctgaacagcaggaagcagcagaccaccgtgccccagaagccccggcaggtggctgatgcccgggagaagatcagcctgaagaggagcagccctgctgccttcatcaacccccccatcggcaccgtgaccccagccctgaagctgaccaagaccatccaggtgggcctgcgggctgtgcccctgctgtgcctggtgtctggaggagcctgggtgggcagccgcagccaggccagctgccccctgcccagcggcagccggccccactag

SEQ ID NO: 164666 - DNA, 1179 bp, synthetic construct
  misc_feature 1..1179: note = Description of Artificial Sequence: Synthetic coding sequence
  source 1..1179: mol_type = other DNA
atggctgacatcagcctggatgagctgatcaggaagagaggagctgctgccaagggccgcctgaatgcccggcctggggtgggcggcgtgcgcagccgggtgggcatccagcagggcctgctgagccagagcaccaggacagccaccttccagcagagatttgatgcccggcagaagattggcctgagtgatgcccggctgaagctgggcgtgaaggatgcccgggagaagctgctgcagaaggatgcccgcttccgcatcaagggcaaggtgcaggatgcccgggagatgctgaacagcaggaagcagcagaccaccgtgccccagaagccccggcaggtggctgatgcccgggagaagatcagcctgaagaggagcagccctgctgccttcatcaacccccccatcggcaccgtgaccccagccctgaagctgaccaagaccatccagaacctgtatgacctggatgaagatgatgatggcatcgcctctgtgcccaccaagcagatgaagtttgctgccagcggcggcttcctgcaccacatggccggcctgagcagcagcaagctgtccatgagcaaggccctgcccctgaccaaggtggtgcagaatgatgcctacacagccccagccctgcccagcagcatccgcaccaaggccctgaccaacatgagcaggaccctggtgaacaaggaggagccccccaaggagctgcctgctgctgagcctgtgctgagccccctggagggcaccaagatgacagtgaacaacctgcacccccgggtgacagaagaagatattgtggagctgttctgtgtgtgtggggccctgaagagggcccggctggtgcaccctggggtggccgaggtggtgtttgtgaagaaggatgatgccatcacagcctacaagaagtacaacaaccgctgcctggatggccagcccatgaagtgcaacctgcacatgaatggaaatgtcatcaccagtgaccagcccatcctgctgcggctgagtgacagccccagcatgaagaaggagagcgagctgccccggcgggtgaacagcgccagcagcagcaaccccccagctgaggtggaccctgacaccatcctgaaggccctcttcaagagcagcggggcctctgtgaccacccagcccacagagttcaagatcaagctgtag

SEQ ID NO: 164667 - DNA, 690 bp, synthetic construct
  misc_feature 1..690: note = Description of Artificial Sequence: Synthetic coding sequence
  source 1..690: mol_type = other DNA
atggctgacatcagcctggatgagctgatcaggaagagaggagctgctgccaagggccgcctgaatgcccggcctggggtgggcggcgtgcgcagccgggtgggcatccagcagggcctgctgagccagagcaccaggacagccaccttccagcagagatttgatgcccggcagaagattggcctgagtgatgcccggctgaagctgggcgtgaaggatgcccgggagaagctgctgcagaaggatgcccgcttccgcatcaagggcaaggtgcaggatgcccgggagatgctgaacagcaggaagcagcagaccaccgtgccccagaagccccggcaggtggctgatgcccgggagaagatcagcctgaagaggagcagccctgctgccttcatcaacccccccatcggcaccgtgaccccagccctgaagctgaccaagaccatccagaacctgtatgacctggatgaagatgatgatggcatcgcctctgtgcccaccaagcagatgaagtttgctgccagcggcggcttcctgcaccacatggccggcctgagcagcagcaagctgtccatgagcaaggccctgcccctgaccaaggtggtgcagaatgatgcctacacagccccagccctgcccagcagcatccgcaccaaggccctgcctgtgctgaccagccctggcacctag

SEQ ID NO: 164668 - DNA, 561 bp, synthetic construct
  misc_feature 1..561: note = Description of Artificial Sequence: Synthetic coding sequence
  source 1..561: mol_type = other DNA
atggcccccctgcacccccaccctgctggcatgaggatcaacgtggtgaacaaccaccaggccaagcagaacctgtatgacctggatgaagatgatgatggcatcgcctctgtgcccaccaagcagatgaagtttgctgccagcggcggcttcctgcaccacatggccggcctgagcagcagcaagctgtccatgagcaaggccctgcccctgaccaaggtggtgcagaatgatgcctacacagccccagccctgcccagcagcatccgcaccaaggccctgaccaacatgagcaggaccctggtgaacaaggaggagccccccaaggagctgcctgctgctgagcctgtgctgagccccctggagggcaccaagatgacagtgaacaacctgcacccccgggtgacagaggaggacatcgtggagctgttctgtgtgtgtggggccctgaagagggcccggctggtgcaccctggggtggccgaggtggtgtttgtgaagaaggatgatgccatcacagcctacaagaagtacaacaaccgctgcctggatggcggctag

SEQ ID NO: 164669 - DNA, 555 bp, synthetic construct
  misc_feature 1..555: note = Description of Artificial Sequence: Synthetic coding sequence
  source 1..555: mol_type = other DNA
atggctgacatcagcctggatgagctgatcaggaagagaggagctgctgccaagggccgcctgaatgcccggcctggggtgggcggcgtgcgcagccgggtgggcatccagcagggcctgctgagccagagcaccaggacagccaccttccagcagagatttgatgcccggcagaagattggcctgagtgatgcccggctgaagctgggcgtgaaggatgcccgggagaagctgctgcagaaggatgcccgcttccgcatcaagggcaaggtgcaggatgcccgggagatgctgaacagcaggaagcagcagaccaccgtgccccagaagccccggcaggtggctgatgcccgggagaagatcagcctgaagaggagcagccctgctgccttcatcaacccccccatcggcaccgtgaccccagccctgaagctgaccaagaccatccaggtgcccagcttcccctgcccccggcccagcctgagccccaagtggttcaggatgatgcacacccagctgctgctgagcctgcccctgtttgagcagaagccctag

SEQ ID NO: 164670 - DNA, 354 bp, synthetic construct
  misc_feature 1..354: note = Description of Artificial Sequence: Synthetic coding sequence
  source 1..354: mol_type = other DNA
atggctgctgctgctgctgctggcagcggcaccccccgggaggaggagggccctgctggggaggccgccgccagccagccccaggcccccacctctgtgcctggggcccggctgagccggctgcccctggcccgggtgaaggccctggtgaaggctgaccctgatgtgaccctggccggccaggaggccatcttcatcctggcccgggctgctgagctgtttgtggagaccatcgccaaggatgcctactgctgtgcccagcagggcaagaggaagaccctgcagaggcgggacctggacaatgccattgaagctgtggatgaatttgccttcctggagggcaccctggactag

SEQ ID NO: 164671 - DNA, 1029 bp, synthetic construct
  misc_feature 1..1029: note = Description of Artificial Sequence: Synthetic coding sequence
  source 1..1029: mol_type = other DNA
atggccgccagccaggccgtggaggagatgaggagccgggtggtgctgggggagtttggagtgagaaatgtgcacaccacagacttccctggcaactacagcggctatgatgatgcctgggaccaggacagatttgagaagaacttccgggtggatgtggtgcacatggatgagaacagcctggagtttgacatggtgggcattgatgctgccatcgccaatgccttccgccgcatcctgctggccgaggtgcccaccatggctgtggagaaggtgctggtgtacaacaacaccagcatcgtgcaggatgagatcctggcccaccggctgggcctcatccccatccatgctgacccccggctgtttgagtacagaaaccagggagatgaggagggcacagaaattgacaccctgcagttccggctgcaggtgcgctgcaccaggaacccccacgccgccaaggacagcagtgaccccaatgagctgtatgtgaaccacaaggtgtacaccaggcacatgacctggatccccctgggcaaccaggccgacctcttccctgagggcaccatccggcctgtgcatgatgacatcctgattgcccagctgcggcccggccaggagattgacctgctgatgcactgtgtgaagggcatcggcaaggaccacgccaagttcagccctgtggccacagccagctaccgcctgctgcctgacatcaccctgctggagcctgtggagggggaggccgctgaggagctgagccgctgcttcagccctggggtcatcgaggtgcaggaggtgcagggcaagaaggtggcccgggtggccaacccccggctggacaccttcagccgggagatcttcagaaatgagaagctgaagaaggtggtgcggctggcccgggtgcgggaccactacatctgcaagaaggacctgctggccgctgtggcccacacctgcaaccccagcaccctgggcggccagggcgagtggatcaccggcagccgggagcgggaccaccctggatag

SEQ ID NO: 164672 - DNA, 633 bp, synthetic construct
  misc_feature 1..633: note = Description of Artificial Sequence: Synthetic coding sequence
  source 1..633: mol_type = other DNA
atggctgtggagaaggtgctggtgtacaacaacaccagcatcgtgcaggatgagatcctggcccaccggctgggcctcatccccatccatgctgacccccggctgtttgagtacagaaaccagggagatgaggagggcacagaaattgacaccctgcagttccggctgcaggtgcgctgcaccaggaacccccacgccgccaaggacagcagtgaccccaatgagctgtatgtgaaccacaaggtgtacaccaggcacatgacctggatccccctgggcaaccaggccgacctcttccctgagggcaccatccggcctgtgcatgatgacatcctgattgcccagctgcggcccggccaggagattgacctgctgatgcactgtgtgaagggcatcggcaagaaggtggcccgggtggccaacccccggctggacaccttcagccgggagatcttcagaaatgagaagctgaagaaggtggtgcggctggcccgggtgcgggaccactacatcttctctgtggagagcactggagtgctgcccccagatgtgctggtgtctgaggccatcaaggtgctgatgggcaagtgccgccgcttcctggatgagctggatgctgtgcagatggactag

SEQ ID NO: 164673 - DNA, 1041 bp, synthetic construct
  misc_feature 1..1041: note = Description of Artificial Sequence: Synthetic coding sequence
  source 1..1041: mol_type = other DNA
atggccgccagccaggccgtggaggagatgaggagccgggtggtgctgggggagtttggagtgagaaatgtgcacaccacagacttccctggcaactacagcggctatgatgatgcctgggaccaggacagatttgagaagaacttccgggtggatgtggtgcacatggatgagaacagcctggagtttgacatggtgggcattgatgctgccatcgccaatgccttccgccgcatcctgctggccgaggtgcccaccatggctgtggagaaggtgctggtgtacaacaacaccagcatcgtgcaggatgagatcctggcccaccggctgggcctcatccccatccatgctgacccccggctgtttgagtacagaaaccagggagatgaggagggcacagaaattgacaccctgcagttccggctgcaggtgcgctgcaccaggaacccccacgccgccaaggacagcagtgaccccaatgagctgtatgtgaaccacaaggtgtacaccaggcacatgacctggatccccctgggcaaccaggccgacctcttccctgagggcaccatccggcctgtgcatgatgacatcctgattgcccagctgcggcccggccaggagattgacctgctgatgcactgtgtgaagggcatcggcaaggaccacgccaagttcagccctgtggccacagccagctaccgcctgctgcctgacatcaccctgctggagcctgtggagggggaggccgctgaggagctgagccgctgcttcagccctggggtcatcgaggtgcaggaggtgcagggcaagaaggtggcccgggtggccaacccccggctggacaccttcagccgggagatcttcagaaatgagaagctgaagaaggtggtgcggctggcccgggtgcgggaccactacatcttctctgtggagagcactggagtgctgcccccagatgtgctggtgtctgaggccatcaaggtgctgatgggcaagtgccgccgcttcctggatgagctggatgctgtgcagatggactag

SEQ ID NO: 164674 - DNA, 369 bp, synthetic construct
  misc_feature 1..369: note = Description of Artificial Sequence: Synthetic coding sequence
  source 1..369: mol_type = other DNA
atggaggaggaccaggagctggagaggaaggccatcgaggagctgctgaaggaggccaagaggggcaagaccagggctgagaccatgggccccatgggctggatgaagtgccccctggccagcaccaacaagcgcttcctgatcaacaccatcaagaacaccctgcccagccacaaggagcaggaccacgagcagaaggagggggacaaggagcccgccaagagccaggcccagaaggaggagaaccccaagaagcacaggagccacccctacaagcacagcttccgggcccggggcagcgccagctacagcccccccaggaagaggagcagccaggacaagtatgagaagaggagcaacagaagatag

SEQ ID NO: 164675 - DNA, 402 bp, synthetic construct
  misc_feature 1..402: note = Description of Artificial Sequence: Synthetic coding sequence
  source 1..402: mol_type = other DNA
atggaggaggaccaggagctggagaggaagatcagcggcctgaagacctccatggccgagggggagaggaagacagccctggagatggtgcaggccgccggcacagacagacactgtgtgacctttgtgctgcacgaggaggaccacaccctgggcaacagcctgcgctacatgatcatgaagaaccctgaggtggagttctgtggctacaccaccacccaccccagcgagagcaagatcaacctgcgcatccagacccggggcaccctgcctgctgtggagcccttccagaggggcctgaatgagctgatgaatgtgtgccagcacgtgctggacaagtttgaggccagcatcaaggactacaaggaccagaaggccagcagaaatgaaagcaccttctag

SEQ ID NO: 164676 - DNA, 402 bp, synthetic construct; identical to SEQ ID NO: 164675
  misc_feature 1..402: note = Description of Artificial Sequence: Synthetic coding sequence
  source 1..402: mol_type = other DNA

SEQ ID NO: 164677 - DNA, 5913 bp, synthetic construct
  misc_feature 1..5913: note = Description of Artificial Sequence: Synthetic coding sequence
  source 1..5913: mol_type = other DNA
atgcacggcggcggcccccccagcggggacagcgcctgccccctgcggaccatcaagagggtgcagtttggagtgctgagcccagatgagctgaagaggatgtctgtgacagaaggaggcatcaagtacccagagaccacagaaggaggccggcccaagctgggcggcctgatggacccccggcagggcgtgattgaaagaacaggccgctgccagacctgtgccggcaacatgacagagtgccccggccacttcggccacatcgagctggccaagcctgtgttccacgtgggcttcctggtgaagaccatgaaggtgctgcgctgtgtgtgcttcttctgcagcaagctgctggtggacagcaacaaccccaagatcaaggacatcctggccaagagcaagggccagcccaagaagaggctgacccacgtgtatgacctgtgcaagggcaagaacatctgtgagggcggggaggagatggacaacaagtttggagtggagcagccagaaggagatgaggacctgaccaaggagaagggccatggaggctgcggccgctaccagccccgcatccgccgcagcggcctggagctgtatgcagagtggaagcacgtgaatgaagacagccaggagaagaagatcctgctgagccctgagcgggtgcatgagatcttcaagaggatcagtgatgaggagtgctttgtgctgggcatggagcccaggtatgcccggcctgagtggatgattgtgacagtgctgcctgtgccccccctgtctgtgcggcctgctgtggtgatgcagggcagcgccaggaaccaggatgacctgacccacaagctggccgacatcgtgaagatcaacaaccagctgcggagaaatgagcagaatggagctgctgcccacgtgattgctgaagatgtgaagctgctgcagttccacgtggccaccatggtggacaatgagctgcccggcctgccccgggccatgcagaagagcggccggcccctgaagagcctgaagcagaggctgaagggcaaggagggccgggtgcggggcaacctgatgggcaagagggtggacttcagcgccaggacagtcatcaccccagaccccaacctgagcattgaccaggtgggcgtgcccaggagcattgctgccaacatgacctttgctgagatcgtgacccccttcaacatcgaccggctgcaggagctggtgagaagaggcaacagccagtacccaggggccaagtacatcatccgggacaatggagacagaattgacctgcgcttccaccccaagcccagcgacctgcacctgcagacaggctacaaggtggagcggcacatgtgtgatggagacatcgtcatcttcaaccggcagcccaccctgcacaagatgtccatgatgggccaccgggtgcgcatcctgccctggagcaccttccggctgaacctgtctgtgaccaccccctacaatgctgactttgatggagatgagatgaacctgcacctgccccagagcctggagaccagggctgagatccaggagctggccatggtgcccaggatgattgtgaccccccagagcaacagacctgtgatgggcatcgtgcaggacaccctgacagctgtgaggaagttcaccaagagagatgtgttcctggagcggggggaggtgatgaacctgctgatgttcctgagcacctgggatggcaaggtgccccagcctgccatcctgaagccccggcccctgtggacaggcaagcagatcttcagcctcatcatccctggccacatcaactgcatccgcacccacagcacccacccagatgatgaagattctggcccctacaagcacatcagccctggggacaccaaggtggtggtggagaatggagagctgatcatgggcatcctgtgcaagaagagcctgggcaccagcgctggcagcctggtgcacatctcctacctggagatgggccatgacatcaccaggctcttctacagcaacatccagaccgtcatcaacaactggctgctgattgagggccacaccatcggcattggagacagcattgctgacagcaagacctaccaggacatccagaacaccatcaagaaggccaagcaggacgtcatcgaggtgattgagaaggcccacaacaatgagctggagcccaccccaggcaacaccctgcggcagacctttgagaaccaggtgaaccgcatcctgaatgatgcccgggacaagacaggcagcagcgcccagaagagcctgtctgagtacaacaacttcaagtccatggtggtgtctggggccaagggcagcaagatcaacatcagccaggtgattgctgtggtgggccagcagaatgtggagggcaagaggatccccttcggcttcaagcacaggaccctgccccacttcatcaaggatgattatggccctgagagccggggctttgtggagaacagctacctggccggcctgacccccacagagttcttcttccacgccatgggcggccgggagggcctgattgacacagctgtgaagacagctgagaccggctacatccagaggaggctcatcaagtccatggagagcgtgatggtgaagtatgatgccaccgtgaggaacagcatcaaccaggtggtgcagctgcgctatggagaagatggcctggccggggagagcgtggagttccagaacctggccaccctgaagcccagcaacaaggcctttgagaagaagttccgctttgactacaccaatgaaagagccctgcggaggaccctgcaggaggacctggtgaaggatgtgctgagcaatgcccacatccagaatgagctggagcgggagtttgagaggatgagagaagatcgggaggtgctgcgggtcatcttccccaccggggacagcaaggtggtgctgccctgcaacctgctgaggatgatctggaatgcccagaagatcttccacatcaacccccggctgcccagcgacctgcaccccatcaaggtggtggagggcgtgaaggagctgagcaagaagctggtgattgtgaatggagatgaccccctgagccggcaggcccaggagaatgccaccctgctcttcaacatccacctgcggagcaccctgtgcagcaggaggatggccgaggagttccggctgtctggagaggcctttgactggctgctgggggagattgagagcaagttcaaccaggccatcgcccaccctggagagatggtgggcgccctggccgcccagagcctgggggagcccgccacccagatgaccctgaacaccttccactacgccggcgtgtctgccaagaatgtgaccctgggcgtgccccggctgaaggagctgatcaacatcagcaagaagcccaagacccccagcctgaccgtcttcctgctgggccagagcgccagagatgctgagcgggccaaggacatcctgtgccgcctggagcacaccaccctgaggaaggtgacagccaacacagccatctactatgaccccaacccccagagcacagtggtggccgaggaccaggagtgggtgaatgtgtactatgagatgccagactttgatgtggcccgcatcagcccctggctgctgcgggtggagctggacaggaagcacatgacagacaggaagctgaccatggagcagattgctgagaagatcaatgccggctttggagatgacctgaactgcatcttcaatgatgacaatgctgagaagctggtgctgcgcatccgcatcatgaacagtgatgagaacaagatgcaggaggaggaggaggtggtggacaagatggatgatgatgtgttcctgcgctgcatcgagagcaacatgctgacagacatgaccctgcagggcatcgagcagatcagcaaggtgtacatgcacctgccccagacagacaacaagaagaagatcatcatcacagaagatggagagttcaaggccctgcaggagtggatcctggagacagatggagtgtccctgatgagggtgctgtctgagaaggatgtggaccctgtgaggaccaccagcaatgacatcgtggagatcttcaccgtgctgggcattgaagctgtgaggaaggccctggagcgggagctgtaccacgtgatcagctttgatggcagctatgtgaactaccgccacctggccctgctgtgtgacaccatgacctgccggggccacctgatggccatcaccaggcatggagtgaaccggcaggacaccggccccctgatgaagtgcagctttgaggagaccgtggatgtgctgatggaggccgccgcccatggagagagtgaccccatgaagggcgtgtctgagaacatcatgctgggccagctggccccagctggcaccggctgctttgacctgctgctggatgctgagaagtgcaagtatggcatggagatccccaccaacatccctggcctgggcgccgccggccccaccggcatgttctttggaagtgcccccagccccatgggcggcatcagccctgccatgaccccctggaaccagggcgccaccccagcctacggggcctggagccccagcgtgggcagcggcatgaccccaggagctgctggcttcagccccagcgctgccagtgatgccagcggcttcagccctggctacagccctgcctggagccccaccccaggcagccctggcagccctggccccagcagcccctacatccccagccctggaggagccatgagccccagctacagccccaccagccctgcctatgagcccaggagccctgggggctacaccccccagagccccagctacagccccaccagccccagctacagccccaccagccccagctacagccccaccagccccaactacagccccaccagccccagctacagccccaccagccccagctacagccccaccagccccagctacagccccaccagccccagctacagccccaccagccccagctacagccccaccagccccagctacagccccaccagccccagctacagccccaccagccccagctacagccccaccagccccagctacagccccaccagccccagctacagccccaccagccccagctacagccccaccagccccagctacagccccaccagccccagctacagccccaccagccccagctacagccccaccagccccagctacagccccaccagccccaactacagccccaccagccccaactacacccccaccagccccagctacagccccaccagccccagctacagccccaccagccccaactacacccccaccagccccaactacagccccaccagccccagctacagccccaccagccccagctacagccccaccagccccagctacagccccagcagcccccgctacaccccccagagccccacctacacccccagcagccccagctacagccccagcagccccagctacagccctgccagccccaagtacacccccaccagccccagctacagccccagcagccctgagtacacccccaccagccccaagtacagccccaccagccccaagtacagccccaccagccccaagtacagccccaccagccccacctacagccccaccacccccaagtacagccccaccagccccacctacagccccaccagccctgtgtacacccccaccagccccaagtacagccccaccagccccacctacagccccaccagccccaagtacagccccaccagccccacctacagccccaccagccccaagggcagcacctacagccccaccagccctggctacagccccaccagccccacctacagcctgaccagccctgccatcagcccagatgacagtgatgaagaaaattag

SEQ ID NO: 164678 - DNA, 1626 bp, synthetic construct
  misc_feature 1..1626: note = Description of Artificial Sequence: Synthetic coding sequence
  source 1..1626: mol_type = other DNA
atgcctggccgctgccagagtgatgctgccatgagggtgaatggacctgccagccgggccccagctggctggaccagcggcagcctgcacacaggccccagggctggccggccccgggcccaggcccggggcgtgcggggccggggcctgctgctgcggcccaggcctgccaaggagctgcccctgcccaggaaaggaggagcctgggccccagctggcaaccctggccccctgcaccccctgggcgtggccgtgggcatggccggcagcggccgcctggtgctgcggccctggatccgggagctgatcctgggcagcgagacccccagcagcccccgggccggccagctgctggaggatgctgaggccgctgtggccggccccagccacgccccagacaccagtgatgtgggcgccaccctgctggtgtctgatggcacccacagcgtgcgctgcctggtgacccgggaggccctggacaccagtgactgggaggagaaggagtttggcttccggggcacagagggccgcctgctgctgctgcaggactgtggggtgcacgtgcaggtggccgagggcggggccccagctgagttctacctgcaggtggaccgcttcagcctgctgcccacagagcagccccggctgcgggtgcccggctgcaaccaggacctggatgtgcagaagaagctgtatgactgcctggaggagcacctgtctgagagcaccagcagcaatgccggcctgagcctgagccagctgctggatgagatgagggaggaccaggagcaccagggcgccctggtgtgcctggccgagagctgcctgaccctggagggcccctgcacagcccctcctgtgacccactgggccgccagccgctgcaaggccaccggggaggccgtgtacacagtgcccagctccatgctgtgcatcagtgaaaatgaccagctgatcctgagcagcctgggcccctgccagaggacccagggccctgagctgcccccaccagaccctgccctgcaggacctgagcctgaccctgattgccagcccccccagcagccccagcagcagcggcaccccagccctgcccggccacatgagcagcgaggagagcggcaccagcatcagcctgctgcctgccctgagcctggccgccccagaccccggccagaggagcagcagccagcccagccctgccatctgcagcgccccagccaccctgacccccaggagcccccacgccagcaggacccccagcagccccctgcagagctgcacccccagcctgagccccaggagccacgtgcccagcccccaccaggccctggtgacccggccccagaagcccagcctggagttcaaggagtttgtgggcctgccctgcaagaacagaccacccttccccaggactggagccaccaggggggcccaggagccctgcagcgtgtgggagccccccaagaggcacagagatggcagcgccttccagtatgaatatgagcccccctgcaccagcctgtgtgcccgggtgcaggccgtgcggctgcccccccagctgatggcctgggccctgcacttcctgatggatgcccagcccggcagcgagcccacccccatgtag

SEQ ID NO: 164679 - DNA, 2040 bp, synthetic construct
  misc_feature 1..2040: note = Description of Artificial Sequence: Synthetic coding sequence
  source 1..2040: mol_type = other DNA
atggacagagtgacccgctaccccatcctgggcatcccccaggcccaccggggcaccggcctggtgctggatggagacaccagctacacctaccacctggtgtgcatgggccctgaggccagcggctggggccaggatgagccccagacctggcccacagaccaccgggcccagcagggcgtgcagaggcagggcgtgtcctacagcgtgcacgcctacacaggccagcccagcccccggggcctgcacagtgaaaatcgggaggatgagggctggcaggtgtaccgcctgggcgccagagatgcccaccagggccggcccacctgggccctgcggccagaagatggagaggacaaggagatgaagacctaccgcctggatgctggagatgctgacccccggcggctgtgtgacctggagcgggagcgctgggccgtcatccagggccaggccgtgaggaagagcagcacagtggccaccctgcagggcaccccagaccatggagaccccaggaccccaggccccccaagaagcacccccctggaggagaatgtggtggaccgggagcagattgacttcctggccgcccggcagcagttcctgagcctggagcaggccaacaagggggccccccacagcagccctgcccggggcaccccagctggcaccacccctggggccagccaggcccccaaggccttcaacaagccccacctggccaatggacatgtggtgcccatcaagccccaggtgaagggcgtggtgcgggaggagaacaaggtgcgggctgtgcccacctgggcctctgtgcaggtggtggatgaccccggcagcctggcctctgtggagagccctggcacccccaaggagacccccatcgagcgggagatccggctggcccaggagcgggaggccgacctgcgggagcagaggggcctgcggcaggccacagaccaccaggagctggtggagatccccacccggcccctgctgaccaagctgagcctcatcacagccccccggcgggagcggggccggcccagcctgtatgtgcagagggacatcgtgcaggagacccagcgggaggaggaccaccggcgggagggcctgcacgtgggccgggccagcaccccagactgggtgtctgagggcccccagcccggcctgcggcgggccctgagcagtgacagcatcctgagccctgccccagatgcccgggctgctgaccctgcccctgaggtgaggaaggtgaaccgcatccccccagatgcctaccagccctacctgagccctggcaccccccagctggagttcagcgcctttggagccttcggcaagcccagcagcctgagcacagctgaggccaaggccgccaccagccccaaggccaccatgagccccaggcacctgtctgagagcagcggcaagcccctgagcaccaagcaggaggccagcaagccaccccggggctgcccccaggccaacagaggagtggtgcgctgggagtacttccggctgcggcccctgcgcttccgggccccagatgagccccagcaggcccaggtgccccacgtgtggggctgggaggtggccggggccccagccctgcggctgcagaagagccagagcagtgacctgctggagcgggagcgggagagcgtgctgcggcgggagcaggaggtggccgaggagaggagaaatgccctcttccctgaggtgttcagccccaccccagatgagaacagcgaccagaacagccgcagcagcagccaggccagcggcatcaccggcagctacagcgtgtctgagagccccttcttcagccccatccacctgcacagcaatgtggcctggacagtggaggaccctgtggacagcgcccctcctggccagaggaagaaggagcagtggtacgccggcatcaaccccagtgatggcatcaacagcgaggtgctggaggccatccgggtgaccaggcacaagaatgccatggccgagcgctgggagagccgcatctatgcctctgaagaagatgactag

SEQ ID NO: 164680 - DNA, 381 bp, synthetic construct
  misc_feature 1..381: note = Description of Artificial Sequence: Synthetic coding sequence
  source 1..381: mol_type = other DNA
atgtctgacaatgaagacaactttgatggagatgactttgatgatgtggaggaggatgagggcctggatgacctggagaatgctgaggaggagggccaggagaatgtggagatcctgcccagcggggagcggccccaggccaaccagaagaggatcaccaccccctacatgaccaagtatgaaagagcccgggtgctgggcacccgggccctgcagatcgccatgtgtgcccctgtgatggtggagctggagggggagacagaccccctgctgattgccatgaaggagctgaagctgctgtggggcctggagtacacagtgctgcggcccagctatgccctggcccacagcctgggcagcttcagcatcagcagcaggtag

SEQ ID NO: 164681 - DNA, 477 bp, synthetic construct
  misc_feature 1..477: note = Description of Artificial Sequence: Synthetic coding sequence
  source 1..477: mol_type = other DNA
atgtctgacaatgaagacaactttgatggagatgactttgatgatgtggaggaggatgagggcctggatgacctggagaatgctgaggaggagggccaggagaatgtggagatcctgcccagcggggagcggccccaggccaaccagaagaggatcaccaccccctacatgaccaagtatgaaagagcccgggtgctgggcacccgggccctgcagatcgccatgtgtgcccctgtgatggtggagctggagggggagacagaccccctgctgattgccatgaaggagctgaatgcccggagcgccagcgagcccccaggagaggagcccccctggatggaccggggcaccagagatgagcacctgcccagctgccccggctgcccagctgtggccagcaacacccgctgctgccccccagctgcctgcctgcccggcatcagcctgagcagaagaagaaggctgcgggaggagtag

SEQ ID NO: 164682 - DNA, 384 bp, synthetic construct
  misc_feature 1..384: note = Description of Artificial Sequence: Synthetic coding sequence
  source 1..384: mol_type = other DNA
atgtctgacaatgaagacaactttgatggagatgactttgatgatgtggaggaggatgagggcctggatgacctggagaatgctgaggaggagggccaggagaatgtggagatcctgcccagcggggagcggccccaggccaaccagaagaggatcaccaccccctacatgaccaagtatgaaagagcccgggtgctgggcacccgggccctgcagatcgccatgtgtgcccctgtgatggtggagctggagggggagacagaccccctgctgattgccatgaaggagctgaaggccaggaagatccccatcatcatccgccgctacctgcctgatggcagctatgaggactggggcgtggatgagctgatcatcacagactag

SEQ ID NO: 164683 - DNA, 519 bp, synthetic construct
  misc_feature 1..519: note = Description of Artificial Sequence: Synthetic coding sequence
  source 1..519: mol_type = other DNA
atgttctaccacatcagcctggagcacgagatcctgctgcacccccgctacttcggccccaacctgctgaacacagtgaagcagaagctgttcacagaggtggagggcacctgcaccgggaagtatggctttgtgattgctgtgaccaccatcgacaacatcggggccggggtcatccagcccggccggggctttgtgctgtaccctgtgaagtacaaggccatcgtgttccggcccttcaagggggaggtggtggatgctgtggtgacccaggtgaacaaggtgggcctcttcacagaaattggccccatgagctgcttcatcagccgccacagcatccccagcgagatggagtttgaccccaacagcaaccccccctgctacaagaccatggatgaagatattgtcatccagcaggatgatgagatccggctgaagatcgtgggcaccagggtggacaagaatgacatctttgccatcggcagcctgatggatgactacctgggcctggtgtcctag

SEQ ID NO: 164684 - DNA, 453 bp, synthetic construct
  misc_feature 1..453: note = Description of Artificial Sequence: Synthetic coding sequence
  source 1..453: mol_type = other DNA
atggccggcatcctgtttgaggacatctttgatgtgaaggacattgatcctgagggcaagaagtttgacagagtgtcccggctgcactgtgagagcgagagcttcaagatggacctgatcctggatgtgaacatccagatctaccctgtggacctgggggacaagttccggctggtgattgccagcaccctgtatgaagatggcaccctggatgatggagagtacaaccccacagatgaccggcccagcagagctgaccagtttgaatatgtgatgtatggcaaggtgtacagaattgaaggagatgagaccagcacagaggccgccacccggctgagcgcctacgtgtcctatggaggcctgctgatgaggctgcagggagatgccaacaacctgcacggctttgaggtggacagccgggtgtacctgctgatgaagaagctggccttctag

SEQ ID NO: 164685 - DNA, 39 bp, synthetic construct
  misc_feature 1..39: note = Description of Artificial Sequence: Synthetic coding sequence
  source 1..39: mol_type = other DNA
atggccggcatcctgtttgaggacatctttgatgtgtag

SEQ ID NO: 164686 - DNA, 450 bp, synthetic construct
  misc_feature 1..450: note = Description of Artificial Sequence: Synthetic coding sequence
  source 1..450: mol_type = other DNA
atggccggcatcctgtttgaggacatctttgatgtgaaggacattgatcctgagggcaagaagtttgacagagtgtcccggctgcactgtgagagcgagagcttcaagatggacctgatcctggatgtgaacatccagatctaccctgtggacctgggggacaagttccggctggtgattgccagcaccctgtatgaagatggcaccctggatgatggagagtacaaccccacagatgaccggcccagcagagctgaccagtttgaatatgtgatgtatggcaaggtgtacagaattgaaggagatgagaccagcacagaggccgccacccggctgagcgcctacgtgtcctatggaggcctgctgatgaggctgcagggagatgccaacaacctgcacggctttgaggtggacagccgggtgtacctgctgatgaagaagctggcctag

SEQ ID NO: 164687 - DNA, 453 bp, synthetic construct; identical to SEQ ID NO: 164684
  misc_feature 1..453: note = Description of Artificial Sequence: Synthetic coding sequence
  source 1..453: mol_type = other DNA

SEQ ID NO: 164688 - DNA, 1491 bp, synthetic construct
  misc_feature 1..1491: note = Description of Artificial Sequence: Synthetic coding sequence
  source 1..1491: mol_type = other DNA
atggaggagcagcgggaggccctgaggaagatcatcaagaccctggccgtgaagaatgaggagatccagagcttcatctacagcctgaagcagatgctgctgaatgtggaggccaacagcgccaaggtgcaggaggacctggaggccgagttccagagcctcttcagcctgctggaggagctgaaggagggcatgctgatgaagatcaagcaggaccgggccagcaggacctatgagctgcagaaccagctggccgcctgcacccgggccctggagagcagcgaggagctgctggagacagccaaccagaccctgcaggccatggacagcgaggacttcccccaggccgccaagcagatcaaggatggagtgaccatggccccagccttccggctgagcctgaaggccaaggtgtctgacaacatgagccacctgatggtggactttgcccaggagcggcagatgctgcaggccctgaagttcctgcctgtgcccagcgcccctgtgattgacctggccgagagcctggtggccgacaactgtgtgaccctggtgtggaggatgccagatgaggacagcaagattgaccactacgtgctggagtacagaaggaccaactttgagggccccccccggctgaaggaggaccagccctggatggtgattgagggcatccggcagacagagtacaccctgaccggcctgaagtttgacatgaagtacatgaacttccgggtgaaggcctgcaacaaggctgtggccggggagttcagcgagcctgtgaccctggagaccccagccttcatgttccggctggatgccagcaccagccaccagaacctgcgggtggatgacctgtctgtggagtgggatgccatgggcggcaaggtgcaggacatcaaggcccgggagaaggatggcaagggccgcacagccagccccatcaacagccctgcccggggcacccccagccccaagaggatgcccagcggccggggcggccgggaccgcttcaccgctgagagctacacagtgctgggggacaccctgattgatggaggagagcactactgggaggtgcgctatgagccagacagcaaggcctttggagtgggcgtggcctaccgcagcctgggccgctttgagcagctgggcaagacagctgcctcctggtgcctgcacgtgaacaactggctgcaggtgtccttcaccgccaagcacgccaacaaggtgaaggtgctggatgcccctgtgcctgactgcctgggcgtgcactgtgacttccaccagggcctgctgtccttctacaatgcccggaccaagcaggtgctgcacaccttcaagacccgcttcacccagcccctgctgcctgccttcaccgtgtggtgtggcagcttccaggtgaccaccggcctgcaggtgcccagcgctgtgcgctgcctgcagaagaggggcagcgccaccagcagcagcaacaccagcctgacctag

SEQ ID NO: 164689 - DNA, 354 bp, synthetic construct
  misc_feature 1..354: note = Description of Artificial Sequence: Synthetic coding sequence
  source 1..354: mol_type = other DNA
atgaatgcccccccagcctttgagagcttcctgctgtttgaaggagagaagaagatcaccatcaacaaggacaccaaggtgcccaatgcctgcctcttcaccatcaacaaggaggaccacaccctgggcaacatcatcaagagccagctgctgaaggacccccaggtgctgtttgctggctacaaggtgccccaccccctggagcacaagatcatcatccgggtgcagaccaccccagactacagcccccaggaggccttcaccaatgccatcacagacctgatcagcgagctgagcctgctggaggagcgcttccgggtggccatcaaggacaagcaggagggcatcgagtag

SEQ ID NO: 164690 - DNA, 384 bp, synthetic construct
  misc_feature 1..384: note = Description of Artificial Sequence: Synthetic coding sequence
  source 1..384: mol_type = other DNA
atgaatgcccccccagcctttgagagcttcctgctgtttgaaggagagaagaagatcaccatcaacaaggacaccaaggtgcccaatgcctgcctcttcaccatcaacaaggaggaccacaccctgggcaacatcatcaagagccagctgctgaaggacccccaggtgctgtttgctggctacaaggtgccccaccccctggagcacaagatcatcatccgggtgcagaccaccccagactacagcccccaggaggccttcaccaatgccatcacagacctgatcagcgagctgagcctgctggaggagcgcttccgggtgcgggccggccctggaggagcagatggagtggccatcaaggacaagcaggagggcatcgagtag

SEQ ID NO: 164691 - DNA, 351 bp, synthetic construct
  misc_feature 1..351: note = Description of Artificial Sequence: Synthetic coding sequence
  source 1..351: mol_type = other DNA
atgaatgcccccccagcctttgagagcttcctgctgtttgaaggagagaagatcaccatcaacaaggacaccaaggtgcccaaggcctgcctcttcaccatcaacaaggaggaccacaccctgggcaacatcatcaagagccgggcctgcttcccctttgccttctgccgggactgccagtttcctgaggccagccctgccaccctgcctgtgcagcctgctgagctgtgcccccgggcccaccagctgtgtgccccagccctgaagaggcacctgggcggggaggcccaccctgtgcacctgcatgctggagctgccagcaggcctgtgcagcagccccagcacctgtag

SEQ ID NO: 164692 - DNA, 348 bp, synthetic construct
  misc_feature 1..348: note = Description of Artificial Sequence: Synthetic coding sequence
  source 1..348: mol_type = other DNA
atgaatgcccccccagcctttgagagcttcctgctgtttgaaggagagaagatcaccatcaacaaggacaccaaggtgcccaaggcctgcctcttcaccatcaacaaggaggaccacaccctgggcaacatcatcaagagccagctgctgaaggacccccaggtgctgtttgctggctacaaggtgccccaccccctggagcacaagatcatcatccgggtgcagaccaccccagactacagcccccaggaggccttcaccaatgccatcacagacctgatcagcgagctgagcctgctggaggagcgcttccgcacctgcctgctgcccctgcggctgctgccctag

SEQ ID NO: 164693 - DNA, 177 bp, synthetic construct
  misc_feature 1..177: note = Description of Artificial Sequence: Synthetic coding sequence
  source 1..177: mol_type = other DNA
atggacacccagaaggatgtgcagccccccaagcagcagcccatgatctacatctgtggggagtgccacacagaaaatgagatcaagagccgggaccccatccgctgccgggagtgtggctaccgcatcatgtacaagaagaggaccaagaggctggtggtgtttgatgccaggtag

SEQ ID NO: 164694 - DNA, 204 bp, synthetic construct
  misc_feature 1..204: note = Description of Artificial Sequence: Synthetic coding sequence
  source 1..204: mol_type = other DNA
atgatcatccctgtgcgctgcttcacctgtgggaagatcgtgggcaacaagtgggaggcctacctgggcctgctgcaggccgagtacacagaaggagatgccctggatgccctgggcctgaagcgctactgctgcaggaggatgctgctggcccacgtggacctgattgagaagctgctgaactatgcccccctggagaagtag

SEQ ID NO: 164695 - DNA, 204 bp, synthetic construct; identical to SEQ ID NO: 164694
  misc_feature 1..204: note = Description of Artificial Sequence: Synthetic coding sequence
  source 1..204: mol_type = other DNA

SEQ ID NO: 164696 - DNA, 4173 bp, synthetic construct
  misc_feature 1..4173: note = Description of Artificial Sequence: Synthetic coding sequence
  source 1..4173: mol_type = other DNA
atggtgaaggagcagttccgggagacagatgtggccaagaagatcagccacatctgcttcggcatgaagagccctgaggagatgaggcagcaggcccacatccaggtggtgtccaagaacctgtacagccaggacaaccagcacgcccccctgctgtatggagtgctggaccacaggatgggcaccagcgagaaggaccggccctgtgagacctgtgggaagaacctggccgactgcctgggccactacggctacatcgacctggagctgccctgcttccacgtgggctacttccgggccgtcatcggcatcctgcagatgatctgcaagacctgctgccacatcatgctgagccaggaggagaagaagcagttcctggactacctgaagaggcctggcctgacctacctgcagaagaggggcctgaagaagaagatcagtgacaagtgcaggaagaagaacatctgccaccactgtggggccttcaatggaacagtgaagaagtgtggcctgctgaagatcatccacgagaagtacaagaccaacaagaaggtggtggaccccatcgtgagcaacttcctgcagagctttgaaacagccatcgagcacaacaaggaggtggagcccctgctgggccgggcccaggagaacctgaaccccctggtggtgctgaacctcttcaagaggatcccagcagaagatgtgcccctgctgctgatgaaccctgaggccggcaagcccagcgacctgatcctgacccggctgctggtgccccccctgtgcatccggcccagcgtggtgtctgacctgaagagcggcaccaatgaagatgacctgaccatgaagctgacagagatcatcttcctgaatgatgtgatcaagaagcaccgcatcagcggggccaagacccagatgatcatggaggactgggacttcctgcagctgcagtgtgccctgtacatcaacagcgagctgagcggcatccccctgaacatggcccccaagaagtggacccggggctttgtgcagaggctgaagggcaagcagggccgcttccggggcaacctgagcggcaagagggtggacttcagcggccgcaccgtcatcagcccagaccccaacctgagaattgatgaggtggccgtgcctgtgcacgtggccaagatcctgaccttccctgagaaggtgaacaaggccaacatcaacttcctgaggaagctggtgcagaatggacctgaggtgcaccctggggccaacttcatccagcagaggcacacccagatgaagcgcttcctgaagtatggcaaccgggagaagatggcccaggagctgaagtacggggacatcgtggagcggcacctgattgatggagatgtggtgctcttcaaccggcagcccagcctgcacaagctgagcatcatggcccacctggcccgggtgaagccccacaggaccttccgcttcaatgaatgtgtgtgcaccccctacaatgctgactttgatggagatgagatgaacctgcacctgccccagacagaggaggccaaggccgaggccctggtgctgatgggcaccaaggccaacctggtgaccccaagaaatggagagcccctgattgctgccatccaggacttcctgactggagcctacctgctgaccctgaaggacaccttctttgaccgggccaaggcctgccagatcatcgccagcatcctggtgggcaaggatgagaagatcaaggtgcggctgcccccacccaccatcctgaagcctgtgaccctgtggacaggcaagcagatcttcagcgtcatcctgcggcccagtgatgacaaccctgtgcgggccaacctgcggaccaagggcaagcagtactgtgggaaaggagaggacctgtgtgccaatgacagctatgtgaccatccagaacagcgagctgatgagcggctccatggacaagggcaccctgggcagcggcagcaagaacaacatcttctacatcctgctgcgggactggggccagaatgaggccgcagatgccatgagccggctggcccggctggcccctgtgtacctgagcaacagaggcttcagcatcggcattggagatgtgaccccaggccagggcctgctgaaggccaagtatgagctgctgaatgccggctacaagaagtgtgatgagtacatcgaggccctgaacacaggcaagctgcagcagcagcccggctgcacagctgaggagaccctggaggccctgatcctgaaggagctgagcgtcatccgggaccatgctggcagcgcctgcctgcgggagctggacaagagcaacagccccctgaccatggccctgtgtggcagcaagggcagcttcatcaacatcagccagatgattgcctgtgtgggccagcaggccatcagcggcagccgggtgcctgatggctttgagaacagaagcctgccccactttgagaagcacagcaagctgcctgctgccaagggctttgtggccaacagcttctacagcggcctgacccccacagagttcttcttccacaccatggccggccgggagggcctggtggacacagctgtgaagacagctgagaccggctacatgcagaggcggctggtgaagagcctggaggacctgtgcagccagtatgacctgactgtgcgcagcagcactggagacatcatccagttcatctatggaggagatggcctggaccctgctgccatggagggcaaggatgagcccctggagttcaagagggtgctggacaacatcaaggctgtgttcccctgccccagcgagcccgccctgagcaagaatgaactcatcctgaccacagagagcatcatgaagaagtctgagttcctgtgctgccaggacagcttcctgcaggagatcaagaagttcatcaagggcgtgtctgagaagatcaagaagacccgggacaagtatggcatcaatgacaatggcaccacagagccccgggtgctgtaccagctggaccgcatcacccccacccaggtggagaagttcctggagacctgccgggacaagtacatgagggcccagatggagcccggcagcgctgtgggcgccctgtgtgcccagagcattggagagcccggcacccagatgaccctgaagaccttccactttgctggggtggcctccatgaacatcaccctgggcgtgccccgcatcaaggagatcatcaatgccagcaaggccatcagcacccccatcatcacagcccagctggacaaggatgatgatgctgactatgcccggctggtgaagggcagaattgagaagaccctgctgggggagatcagcgagtacatcgaggaggtgttcctgcctgatgactgcttcatcctggtgaagctgagcctggagcgcatccggctgctgcggctggaggtgaatgctgagaccgtgcgctacagcatctgcaccagcaagctgcgggtgaagccaggagatgtggccgtgcacggggaggccgtggtgtgtgtgaccccccgggagaacagcaagagctccatgtactacgtgctgcagttcctgaaggaggacctgcccaaggtggtggtgcagggcatccctgaggtgtcccgggccgtcatccacattgatgagcagagcggcaaggagaagtacaagctgctggtggagggggacaacctgcgggctgtgatggccacccatggagtgaagggcaccaggaccaccagcaacaacacctatgaggtggagaagaccctgggcatcgaggccgcccggaccaccatcatcaatgagatccagtacaccatggtgaaccacggcatgagcattgaccggcggcacgtgatgctgctgagtgacctgatgacctacaagggggaggtgctgggcatcacccgcttcggcctggccaagatgaaggagagcgtgctgatgctggccagctttgagaagacagctgaccacctgtttgatgctgcctacttcggccagaaggacagcgtgtgtggggtgtctgagtgcatcatcatgggcatccccatgaacattggaacaggcctcttcaagctgctgcacaaggctgaccgggaccccaacccccccaagaggcccctcatctttgacaccaatgagttccacatccccctggtgacctag

SEQ ID NO: 164697 - DNA, 489 bp, synthetic construct
  misc_feature 1..489: note = Description of Artificial Sequence: Synthetic coding sequence
  source 1..489: mol_type = other DNA
atgtactacgtgctgcagttcctgaaggaggacctgcccaaggtggtggtgcagggcatccctgaggtgtcccgggccgtcatccacattgatgagcagagcggcaaggagaagtacaagctgctggtggagggggacaacctgcgggctgtgatggccacccatggagtgaagggcaccaggaccaccagcaacaacacctatgaggtggagaagaccctgggcatcgaggccgcccggaccaccatcatcaatgagatccagtacaccatggtgaaccacggcatgagcattgaccggcggcacgtgatgctgctgagtgacctgatgacctacaagggggaggtgctgggcatcacccgcttcggcctggccaagatgaaggagagcgtgctgatgctggccagctttgagaagacagctgaccacctgtttgatgctgcctacttcggccagaaggacagcgtgtgtgcctggccccagccctag

SEQ ID NO: 164698 - DNA, 4110 bp, synthetic construct
  misc_feature 1..4110: note = Description of Artificial Sequence: Synthetic coding sequence
  source 1..4110: mol_type = other DNA
atggtgaaggagcagttccgggagacagatgtggccaagaagatcagccacatctgcttcggcatgaagagccctgaggagatgaggcagcaggcccacatccaggtggtgtccaagaacctgtacagccaggacaaccagcacgcccccctgctgtatggagtgctggaccacaggatgggcaccagcgagaaggaccggccctgtgagacctgtgggaagaacctggccgactgcctgggccactacggctacatcgacctggagctgccctgcttccacgtgggctacttccgggccgtcatcggcatcctgcagatgatctgcaagacctgctgccacatcatgctgagccaggaggagaagaagcagttcctggactacctgaagaggcctggcctgacctacctgcagaagaggggcctgaagaagaagatcagtgacaagtgcaggaagaagaacatctgccaccactgtggggccttcaatggaacagtgaagaagtgtggcctgctgaagatcatccacgagaagtacaagaccaacaagaaggtggtggaccccatcgtgagcaacttcctgcagagctttgaaacagccatcgagcacaacaaggaggtggagcccctgctgggccgggcccaggagaacctgaaccccctggtggtgctgaacctcttcaagaggatcccagcagaagatgtgcccctgctgctgatgaaccctgaggccggcaagcccagcgacctgatcctgacccggctgctggtgccccccctgtgcatccggcccagcgtggtgtctgacctgaagagcggcaccaatgaagatgacctgaccatgaagctgacagagatcatcttcctgaatgatgtgatcaagaagcaccgcatcagcggggccaagacccagatgatcatggaggactgggacttcctgcagctgcagtgtgccctgtacatcaacagcgagctgagcggcatccccctgaacatggcccccaagaagtggacccggggctttgtgcagaggctgaagggcaagcagggccgcttccggggcaacctgagcggcaagagggtggacttcagcggccgcaccgtcatcagcccagaccccaacctgagaattgatgaggtggccgtgcctgtgcacgtggccaagatcctgaccttccctgagaaggtgaacaaggccaacatcaacttcctgaggaagctggtgcagaatggacctgaggtgcaccctggggccaacttcatccagcagaggcacacccagatgaagcgcttcctgaagtatggcaaccgggagaagatggcccaggagctgaagtacggggacatcgtggagcggcacctgattgatggagatgtggtgctcttcaaccggcagcccagcctgcacaagctgagcatcatggcccacctggcccgggtgaagccccacaggaccttccgcttcaatgaatgtgtgtgcaccccctacaatgctgactttgatggagatgagatgaacctgcacctgccccagacagaggaggccaaggccgaggccctggtgctgatgggcaccaaggccaacctggtgaccccaagaaatggagagcccctgattgctgccatccaggacttcctgactggagcctacctgctgaccctgaaggacaccttctttgaccgggccaaggcctgccagatcatcgccagcatcctggtgggcaaggatgagaagatcaaggtgcggctgcccccacccaccatcctgaagcctgtgaccctgtggacaggcaagcagatcttcagcgtcatcctgcggcccagtgatgacaaccctgtgcgggccaacctgcggaccaagggcaagcagtactgtgggaaaggagaggacctgtgtgccaatgacagctatgtgaccatccagaacagcgagctgatgagcggctccatggacaagggcaccctgggcagcggcagcaagaacaacatcttctacatcctgctgcgggactggggccagaatgaggccgcagatgccatgagccggctggcccggctggcccctgtgtacctgagcaacagaggcttcagcatcggcattggagatgtgaccccaggccagggcctgctgaaggccaagtatgagctgctgaatgccggctacaagaagtgtgatgagtacatcgaggccctgaacacaggcaagctgcagcagcagcccggctgcacagctgaggagaccctggaggccctgatcctgaaggagctgagcgtcatccgggaccatgctggcagcgcctgcctgcgggagctggacaagagcaacagccccctgaccatggccctgtgtggcagcaagggcagcttcatcaacatcagccagatgattgcctgtgtgggccagcaggccatcagcggcagccgggtgcctgatggctttgagaacagaagcctgccccactttgagaagcacagcaagctgcctgctgccaagggctttgtggccaacagcttctacagcggcctgacccccacagagttcttcttccacaccatggccggccgggagggcctggtggacacagctgtgaagacagctgagaccggctacatgcagaggcggctggtgaagagcctggaggacctgtgcagccagtatgacctgactgtgcgcagcagcactggagacatcatccagttcatctatggaggagatggcctggaccctgctgccatggagggcaaggatgagcccctggagttcaagagggtgctggacaacatcaaggctgtgttcccctgccccagcgagcccgccctgagcaagaatgaactcatcctgaccacagagagcatcatgaagaagtctgagttcctgtgctgccaggacagcttcctgcaggagatcaagaagttcatcaagggcgtgtctgagaagatcaagaagacccgggacaagtatggcatcaatgacaatggcaccacagagccccgggtgctgtaccagctggaccgcatcacccccacccaggtggagaagttcctggagacctgccgggacaagtacatgagggcccagatggagcccggcagcgctgtgggcgccctgtgtgcccagaggaacatcaccctgggcgtgccccgcatcaaggagatcatcaatgccagcaaggccatcagcacccccatcatcacagcccagctggacaaggatgatgatgctgactatgcccggctggtgaagggccgcatcgagaagaccctgctgggggagatcagcgagtacatcgaggaggtgttcctgcctgatgactgcttcatcctggtgaagctgagcctggagcgcatccggctgctgcggctggaggtgaatgctgagaccgtgcgctacagcatctgcaccagcaagctgcgggtgaagccaggagatgtggccgtgcatggagaggccgtggtgtgtgtgaccccccgggagaacagcaagagctccatgtactacgtgctgcagttcctgaaggaggacctgcccaaggtggtggtgcagggcatccctgaggtgtccagagctgtgatccacattgatgagcagagcggcaaggagaagtacaagctgctggtggagggggacaacctgcgggctgtgatggccacccacggcgtgaagggcaccaggaccaccagcaacaacacctatgaggtggagaagaccctgggcattgaagctgcccggaccaccatcatcaatgagatccagtacaccatggtgaaccacggcatgagcattgacagaagacatgtgatgctgctgagtgacctgatgacctacaagggggaggtgctgggcatcaccaggtttggcctggccaagatgaaggagagcgtgctgatgctggccagctttgagaagacagctgaccacctgtttgatgctgcctacttcggccagaaggacagcgtgtgtggggtgtctgagtgcatcatcatgggcatccccatgaacatcggcaccggcctcttcaagctgctgcacaaggctgaccgggaccccaacccccccaagaggcccctcatctttgacaccaatgagttccacatccccctggtgacctag

SEQ ID NO: 164699 - DNA, 753 bp, synthetic construct; identical to SEQ ID NO: 149633
  misc_feature 1..753: note = Description of Artificial Sequence: Synthetic coding sequence
  source 1..753: mol_type = other DNA

SEQ ID NO: 164700 - DNA, 3228 bp, synthetic construct
  misc_feature 1..3228: note = Description of Artificial Sequence: Synthetic coding sequence
  source 1..3228: mol_type = other DNA
atgaaggccaatgagaaggtgaccagtgatgctgaccccatgtggtacctgaagtacctgaacatctacgtgggcctgcctgatgtggaggagagcttcaacgtgaccaggcctgtgagcccccatgaatgtcggctgcgggacatgacctacagcgcccccatcaccgtggacatcgagtacacccggggcagccagaggatcatcagaaatgccctgcccatcggccgcatgcccatcatgctgcggagcagcaactgtgtgctgaccgggaagaccccagctgagtttgccaagctgaatgaatgtcccctggaccccggcggctacttcatcgtgaagggcgtggagaaggtgatcctgatccaggagcagctgagcaagaaccgcatcatcgtggaggccgacagaaaaggagctgtgggcgcctctgtgaccagcagcacccatgagaagaagagcaggaccaacatggctgtgaagcagggccgcttctacctgcggcacaacaccctgtctgaggacatccccatcgtcatcatcttcaaggccatgggcgtggagagtgaccaggagatcgtgcagatgattggaacagaggagcacgtgatggccgccttcggccccagcctggaggagtgccagaaggcccagatcttcacccagatgcaggccctgaagtacatcggcaacaaggtgcggcggcagaggatgtggggcggcggccccaagaagaccaagattgaggaggcccgggagctgctggccagcaccatcctgacccacgtgcctgtgaaggagttcaacttccgggccaagtgcatctacacagctgtgatggtgcggcgggtcatcctggcccagggcgacaacaaggtggatgaccgggactactacggcaacaagaggctggagctggccggccagctgctgagcctgctgtttgaggacctcttcaagaagttcaacagcgagatgaagaagattgctgaccaggtgatccccaagcagagagctgcccagtttgatgtggtgaagcacatgaggcaggaccagatcaccaacggcatggtgaatgccatcagcactggaaactggagcctgaagcgcttcaagatggaccggcagggcgtgacccaggtgctgagccggctgagctacatcagcgccctgggcatgatgacccgcatcagcagccagtttgagaagaccaggaaggtgtctggccccaggagcctgcagcccagccagtggggcatgctgtgccccagcgacaccccagagggggaggcctgtggcctggtgaagaacctggccctgatgacccacatcaccacagacatggaggatggccccatcgtgaagctggccagcaacctgggcgtggaggatgtgaacctgctgtgtggggaggagctgagctacccaaatgtgttcctggtgttcctgaatggaaacatcctgggcgtcatccgggaccacaagaagctggtgaacaccttccggctgatgagaagagctggctacatcaatgaatttgtgtccatcagcaccaacctgacagacagatgtgtgtacatcagcagtgatggcggccgcctgtgccggccctacatcatcgtgaagaagcagaagccagctgtgaccaacaagcacatggaggagctggcccagggctacagaaactttgaggacttcctgcacgagagcctggtggagtacctggatgtgaatgaggagaatgactgcaacatcgccctgtatgagcacaccatcaacaaggacaccacccacctggagattgagcccttcaccctgctgggcgtgtgtgccggcctcatcccctacccccaccacaaccagagccccaggaacacctaccagtgtgccatgggcaagcaggccatgggcaccatcggctacaaccagaggaacagaattgacaccctgatgtacctgctggcctacccccagaagcccatggtgaagaccaagaccatcgagctgattgaatttgagaagctgcctgctggccagaatgccaccgtggccgtgatgagctacagcggctatgacattgaagatgccctggtgctgaacaaggccagcctggaccggggcttcggccgctgcctggtgtacaagaatgccaagtgcaccctgaagcgctacaccaaccagacctttgacaaggtgatgggccccatgctggatgctgccaccaggaagcccatctggaggcatgagatcctggatgctgatggcatctgcagccctggagagaaggtggagaacaagcaggtgctggtgaacaagtccatgcccaccgtgacccagatccccctggagggcagcaatgtgccccagcagccccagtacaaggatgtgcccatcacctacaagggggccacagacagctacatcgagaaggtgatgatcagcagcaatgcagaagatgccttcctgatcaagatgctgctgcggcagaccaggaggcctgagattggagacaagttcagcagcagacatggccagaagggcgtgtgtggcctcatcgtgccccaggaggacatgcccttctgtgacagcggcatctgcccagacatcatcatgaacccccacggcttccccagcaggatgacagtgggcaagctgattgagctgctggccggcaaggccggcgtgctggatggccgcttccactacggcacagccttcggcggcagcaaggtgaaggatgtgtgtgaggacctggtgagacatggctacaactacctgggcaaggactatgtgaccagcggcatcaccggggagcccctggaggcctacatctacttcggccctgtgtactaccagaagctgaagcacatggtgctggacaagatgcacgcccgggcccggggccccagggctgtgctgacccggcagcccacagagggccgcagcagagatggcggcctgcggctgggggagatggagcgggactgcctgattggctacggggcctccatgctgctgctggagcggctgatgatcagcagtgatgcctttgaggtggatgtgtgtggccagtgtggcctgctgggctacagcggctggtgccactactgcaagagcagctgccacgtgagcagcctgcgcatcccctatgcctgcaagctgctcttccaggagctgcagagcatgaacatcatcccccggctgaagctgagcaagtacaatgaatag

SEQ ID NO: 164701 - DNA, 633 bp, synthetic construct
  misc_feature 1..633: note = Description of Artificial Sequence: Synthetic coding sequence
  source 1..633: mol_type = other DNA
atggatgatgaggaggagacctaccgcctgtggaagatcaggaagaccatcatgcagctgtgccacgaccggggctacctggtgacccaggatgagctggaccagaccctggaggagttcaaggcccagagcggggacaagcccagcgagggccggcccaggagaacagacctgactgtgctggtggcccacaatgatgaccccacagaccagatgtttgtgttcttccctgaggagcccaaggtgggcatcaagaccatcaaggtgtactgccagaggatgcaggaggagaacatcacccgggccctgattgtggtgcagcagggcatgaccccatctgccaagcagagcctggtggacatggcccccaagtacatcctggagcagttcctgcagcaggagctgctgatcaacatcacagagcacgagctggtgcctgagcacgtggtgatgaccaaggaggaggtgacagagctgctggcccgctacaagctgcgggagaaccagctgccccgcatccaggccggggaccctgtggcccgctacttcggcatcaagaggggccaggtggtgaagatcatccggcccagcgagacagctggccgctacatcacctaccgcctggtgcagtag

SEQ ID NO: 164702 - DNA, 1173 bp, synthetic construct
  misc_feature 1..1173: note = Description of Artificial Sequence: Synthetic coding sequence
  source 1..1173: mol_type = other DNA
atggaggaccccaccctgtacatcgtggagcggcccctgcccggctacccagatgctgaggcccctgagcccagcagcgctggggcccaggccgctgaggagcccagcggggccggcagcgaggagctgatcaagagtgaccaggtgaatggagtgctggtgctgagcctgctggacaagatcatcggggctgtggaccagatccagctgacccaggcccagctggaggagcggcaggccgagatggagggcgctgtgcagagcatccagggcgagctgagcaagctgggcaaggcccacgccaccaccagcaacacagtgtccaagctgctggagaaggtgaggaaggtgtctgtgaatgtgaagacagtgcggggcagcctggagcggcaggccggccagatcaagaagctggaggtgaatgaagctgagctgctgcggcggaggaacttcaaggtgatgatctaccaggatgaggtgaagctgcctgccaagctgagcatcagcaagagcctgaaggagagcgaggccctgcctgagaaggagggggaggagctgggggagggggagaggcctgaggaggatgctgctgccctggagctgagcagtgatgaggccgtggaggtggaggaggtgattgaggagagcagagctgagcgcatcaagaggagcggcctgcggcgggtggatgacttcaagaaggccttcagcaaggagaagatggagaagaccaaggtgaggacccgggagaacctggagaagacccggctgaagaccaaggagaacctggagaagaccaggcacaccctggagaagaggatgaacaagctgggcacccggctggtgcctgctgagcggcgggagaagctgaagaccagccgggacaagctgaggaagagcttcaccccagaccacgtggtgtatgcccggagcaagacagctgtgtacaaggtgccccccttcaccttccacgtgaagaagatccgggagggccaggtggaggtgctgaaggccacagagatggtggaggtgggcgcagatgatgatgaaggaggagctgagcggggggaggccggggacctgcggcggggcagcagcccagatgtgcacgccctgctggagatcacagaggagagtgatgctgtgctggtggacaagagtgacagcgactag

SEQ ID NO: 164703 - DNA, 1038 bp, synthetic construct
  misc_feature 1..1038: note = Description of Artificial Sequence: Synthetic coding sequence
  source 1..1038: mol_type = other DNA
atggaggaccccaccctgtacatcgtggagcggcccctgcccggctacccagatgctgtggaccagatccagctgacccaggcccagctggaggagcggcaggccgagatggagggcgctgtgcagagcatccagggcgagctgagcaagctgggcaaggcccacgccaccaccagcaacacagtgtccaagctgctggagaaggtgaggaaggtgtctgtgaatgtgaagacagtgcggggcagcctggagcggcaggccggccagatcaagaagctggaggtgaatgaggccgagctgctgcggcggaggaacttcaaggtgatgatctaccaggatgaggtgaagctgcctgccaagctgagcatcagcaagagcctgaaggagagcgaggccctgcctgagaaggagggggaggagctgggggagggggagaggccagaagaagatgctgctgccctggagctgagcagtgatgaagctgtggaggtggaggaggtgattgaggagagcagagctgagcgcatcaagaggagcggcctgcggcgggtggatgacttcaagaaggccttcagcaaggagaagatggagaagaccaaggtgaggacccgggagaacctggagaagacccggctgaagaccaaggagaacctggagaagaccaggcacaccctggagaagaggatgaacaagctgggcacccggctggtgcctgctgagcggcgggagaagctgaagaccagccgggacaagctgaggaagagcttcaccccagaccacgtggtgtatgcccggagcaagacagctgtgtacaaggtgccccccttcaccttccacgtgaagaagatccgggagggccaggtggaggtgctgaaggccacagagatggtggaggtgggcgcagatgatgatgagggcggcgctgagcggggggaggccggggacctgcggcggggcagcagcccagatgtgcacgccctgctggagatcacagaggagagtgatgctgtgctggtggacaagagtgacagcgactag

SEQ ID NO: 164704 - DNA, 2295 bp, synthetic construct
  misc_feature 1..2295: note = Description of Artificial Sequence: Synthetic coding sequence
  source 1..2295: mol_type = other DNA
atgctgctgtttgtgctgacctgcctgctggccgtgtttcctgccatcagcaccaagagccccatctttggacctgaggaggtgaacagcgtggagggcaacagcgtgtccatcacctgctactacccacccacctctgtgaacagacacaccaggaagtactggtgccggcagggcgcccggggcggctgcatcaccctcatcagcagcgagggctacgtgagcagcaaatatgccggccgggccaacctgaccaacttcccagaaaatggcacctttgtggtgaacatcgcccagctgagccaggatgattctggccgctacaagtgtggcctgggcatcaacagccggggcctgagctttgatgtgtccctggaggtgtcccagggccctggcctgctgaatgacaccaaggtgtacacagtggacctgggccgcacagtgaccatcaactgccccttcaagacagaaaatgcccagaagaggaagagcctgtacaagcagatcggcctgtaccctgtgctggtgattgacagcagcggctacgtgaaccccaactacacaggccgcatccggctggacatccagggcaccggccagctgctcttctctgtggtgatcaaccagctgcggctgagtgatgctggccagtacctgtgccaggccggagatgacagcaacagcaacaagaagaatgctgacctgcaggtgctgaagccagagcctgagctggtgtatgaggacctgcggggctctgtgaccttccactgtgccctgggccctgaggtggccaacgtggccaagttcctgtgccggcagagcagtggagagaactgtgatgtggtggtgaacaccctgggcaagagggccccagcctttgagggccgcatcctgctgaacccccaggacaaggatggcagcttctctgtggtgatcaccggcctgaggaaggaggatgctggccgctacctgtgtggggcccacagtgatggccagctgcaggagggcagccccatccaggcctggcagctgtttgtgaatgaggagagcaccatccccaggagccccaccgtggtgaagggcgtggccggcggctctgtggccgtgctgtgcccctacaacaggaaggagagcaagagcatcaagtactggtgcctgtgggagggcgcccagaatggccgctgccccctgctggtggacagcgagggctgggtgaaggcccagtatgagggccgcctgagcctgctggaggagcctggaaatggcaccttcaccgtcatcctgaaccagctgaccagcagagatgctggcttctactggtgcctgaccaacggggacaccctgtggaggaccaccgtggagatcaagatcatcgagggggagcccaacctgaaggtgcctggaaatgtgacagctgtgctgggggagaccctgaaggtgccctgccacttcccctgcaagttcagcagctatgagaagtactggtgcaagtggaacaacacaggctgccaggccctgcccagccaggatgagggccccagcaaggcctttgtgaactgtgatgagaacagccggctggtgtccctgaccctgaacctggtgaccagggcagatgagggctggtactggtgtggggtgaagcagggccacttctacggggagacagctgctgtgtatgtggccgtggaggagaggaaggccgccggcagcagagatgtgtccctggccaaggcagatgctgccccagatgagaaggtgctggacagcggcttccgggagattgagaacaaggccatccaggacccccggctgtttgctgaggagaaggctgtggccgacacccgggaccaggctgatggcagccgggcctctgtggacagcggcagcagcgaggagcagggcggcagcagccgggccctggtgtccaccctggtgcccctgggcctggtgctggccgtgggcgctgtggccgtgggcgtggcccgggcccggcacaggaagaatgtggacagagtgtccatccgcagctacagaacagacatctccatgtctgactttgagaacagccgggagtttggagccaatgacaacatgggcgccagcagcatcacccaggagaccagcctgggcggcaaggaggagtttgtggccaccacagagagcaccacagagaccaaggagcccaagaaggccaagaggagcagcaaggaggaggccgagatggcctacaaggacttcctgctgcagagcagcacagtggccgctgaggcccaggacggcccccaggaggcctag

SEQ ID NO: 164705 - DNA, 1596 bp, synthetic construct
  misc_feature 1..1596: note = Description of Artificial Sequence: Synthetic coding sequence
  source 1..1596: mol_type = other DNA
atggatggcatcgtgcctgacattgctgtgggcaccaagaggggcagtgatgagctgttcagcacctgtgtgaccaacggccccttcatcatgagcagcaacagcgccagcgctgccaatggaaatgacagcaagaagttcaagggggacagccgctctgctggggtgcccagcagggtcatccacatcaggaagctgcccattgatgtgacagaaggagaggtgatcagcctgggcctgccctttgggaaggtgaccaacctgctgatgctgaagggcaagaaccaggccttcatcgagatgaacacagaggaggccgccaacaccatggtgaactactacacctctgtgacccctgtgctgcggggccagcccatctacatccagttcagcaaccacaaggagctgaagacagacagcagccccaaccaggcccgggcccaggccgccctgcaggccgtgaacagcgtgcagagcggcaacctggccctggccgccagcgctgctgctgtggatgctggcatggccatggccggccagagccctgtgctgcgcatcatcgtggagaacctcttctaccctgtgaccctggatgtgctgcaccagatcttcagcaagtttggaacagtgctgaagatcatcaccttcaccaagaacaaccagttccaggccctgctgcagtatgctgaccctgtgtctgcccagcacgccaagctgagcctggatggccagaacatctacaatgcctgctgcaccctgagaattgacttcagcaagctgaccagcctgaatgtgaagtacaacaatgacaagagccgggactacaccaggccagacctgcccagcggggacagccagcccagcctggaccagaccatggctgctgccttcggcctgtctgtgcccaacgtgcatggagccctggcccccctggccatccccagcgctgctgctgctgctgctgctgctggccgcatcgccatccctggcctggccggggccggcaacagcgtgctgctggtgagcaacctgaaccctgagcgggtgaccccccagagcctcttcatcctgtttggagtgtatggagatgtgcagagggtgaagatcctcttcaacaagaaggaaaatgccctggtgcagatggctgatggcaaccaggcccagctggccatgagccacctgaatggccacaagctgcacggcaagcccatccgcatcaccctgagcaagcaccagaatgtgcagctgccccgggagggccaggaggaccagggcctgaccaaggactatggcaacagccccctgcaccgcttcaagaagccaggcagcaagaacttccagaacatcttccccccatctgccaccctgcacctgagcaacatcccccccagcgtgtctgaggaggacctgaaggtgctcttcagcagcaatggaggagtggtgaagggcttcaagttcttccagaaggacaggaagatggccctgatccagatgggctctgtggaggaggccgtgcaggccctgattgacctgcacaaccacgacctgggggagaaccaccacctgcgggtgtccttcagcaagagcaccatctag

SEQ ID NO: 164706 - DNA, 594 bp, synthetic construct
  misc_feature 1..594: note = Description of Artificial Sequence: Synthetic coding sequence
  source 1..594: mol_type = other DNA
atggatggcatcgtgcctgacattgctgtgggcaccaagagggtgaccccccagagcctcttcatcctgtttggagtgtatggagatgtgcagagggtgaagatcctcttcaacaagaaggaaaatgccctggtgcagatggctgatggcaaccaggcccagctggccatgagccacctgaatggccacaagctgcacggcaagcccatccgcatcaccctgagcaagcaccagaatgtgcagctgccccgggagggccaggaggaccagggcctgaccaaggactatggcaacagccccctgcaccgcttcaagaagccaggcagcaagaacttccagaacatcttccccccatctgccaccctgcacctgagcaacatcccccccagcgtgtctgaggaggacctgaaggtgctcttcagcagcaatggaggagtggtgaagggcttcaagttcttccagaaggacaggaagatggccctgatccagatgggctctgtggaggaggccgtgcaggccctgattgacctgcacaaccacgacctgggggagaaccaccacctgcgggtgtccttcagcaagagcaccatctag

SEQ ID NO: 164707 - DNA, 1674 bp, synthetic construct
  misc_feature 1..1674: note = Description of Artificial Sequence: Synthetic coding sequence
  source 1..1674: mol_type = other DNA
atggatggcatcgtgcctgacattgctgtgggcaccaagaggggcagtgatgagctgttcagcacctgtgtgaccaacggccccttcatcatgagcagcaacagcgccagcgctgccaatggaaatgacagcaagaagttcaagggggacagccgctctgctggggtgcccagcagggtcatccacatcaggaagctgcccattgatgtgacagaaggagaggtgatcagcctgggcctgccctttgggaaggtgaccaacctgctgatgctgaagggcaagaaccaggccttcatcgagatgaacacagaggaggccgccaacaccatggtgaactactacacctctgtgacccctgtgctgcggggccagcccatctacatccagttcagcaaccacaaggagctgaagacagacagcagccccaaccaggcccgggcccaggccgccctgcaggccgtgaacagcgtgcagagcggcaacctggccctggccgccagcgctgctgctgtggatgctggcatggccatggccggccagagccctgtgctgcgcatcatcgtggagaacctcttctaccctgtgaccctggatgtgctgcaccagatcttcagcaagtttggaacagtgctgaagatcatcaccttcaccaagaacaaccagttccaggccctgctgcagtatgctgaccctgtgtctgcccagcacgccaagctgagcctggatggccagaacatctacaatgcctgctgcaccctgagaattgacttcagcaagctgaccagcctgaatgtgaagtacaacaatgacaagagccgggactacaccaggccagacctgcccagcggggacagccagcccagcctggaccagaccatggctgctgcctttggagcccctggcatcatcagcgccagcccctatgctggggccggcttcccccccacctttgccatcccccaggccgccggcctgtctgtgcccaacgtgcatggagccctggcccccctggccatccccagcgctgctgctgctgctgctgctgctggccgcatcgccatccctggcctggccggggccggcaacagcgtgctgctggtgagcaacctgaaccctgagcgggtgaccccccagagcctcttcatcctgtttggagtgtatggagatgtgcagagggtgaagatcctcttcaacaagaaggaaaatgccctggtgcagatggctgatggcaaccaggcccagctggccatgagccacctgaatggccacaagctgcacggcaagcccatccgcatcaccctgagcaagcaccagaatgtgcagctgccccgggagggccaggaggaccagggcctgaccaaggactatggcaacagccccctgcaccgcttcaagaagccaggcagcaagaacttccagaacatcttccccccatctgccaccctgcacctgagcaacatcccccccagcgtgtctgaggaggacctgaaggtgctcttcagcagcaatggaggagtggtgaagggcttcaagttcttccagaaggacaggaagatggccctgatccagatgggctctgtggaggaggccgtgcaggccctgattgacctgcacaaccacgacctgggggagaaccaccacctgcgggtgtccttcagcaagagcaccatctag

SEQ ID NO: 164708 - DNA, 1653 bp, synthetic construct
  misc_feature 1..1653: note = Description of Artificial Sequence: Synthetic coding sequence
  source 1..1653: mol_type = other DNA
atggatggcatcgtgcctgacattgctgtgggcaccaagaggggcagtgatgagctgttcagcacctgtgtgaccaacggccccttcatcatgagcagcaacagcgccagcgctgccaatggaaatgacagcaagaagttcaagggggacagccgctctgctggggtgcccagcagggtcatccacatcaggaagctgcccattgatgtgacagaaggagaggtgatcagcctgggcctgccctttgggaaggtgaccaacctgctgatgctgaagggcaagaaccaggccttcatcgagatgaacacagaggaggccgccaacaccatggtgaactactacacctctgtgacccctgtgctgcggggccagcccatctacatccagttcagcaaccacaaggagctgaagacagacagcagccccaaccaggcccgggcccaggccgccctgcaggccgtgaacagcgtgcagagcggcaacctggccctggccgccagcgctgctgctgtggatgctggcatggccatggccggccagagccctgtgctgcgcatcatcgtggagaacctcttctaccctgtgaccctggatgtgctgcaccagatcttcagcaagtttggaacagtgctgaagatcatcaccttcaccaagaacaaccagttccaggccctgctgcagtatgctgaccctgtgtctgcccagcacgccaagctgagcctggatggccagaacatctacaatgcctgctgcaccctgagaattgacttcagcaagctgaccagcctgaatgtgaagtacaacaatgacaagagccgggactacaccaggccagacctgcccagcggggacagccagcccagcctggaccagaccatggctgctgcctttgccagcccctatgctggggccggcttcccccccacctttgccatcccccaggccgccggcctgtctgtgcccaacgtgcacggggccctggcccccctggccatccccagcgctgctgctgctgctgctgctgctggaagaattgccatccctggcctggccggggccggcaacagcgtgctgctggtgagcaacctgaaccctgagcgggtgaccccccagagcctcttcatcctgtttggagtgtatggagatgtgcagagggtgaagatcctcttcaacaagaaggaaaatgccctggtgcagatggctgatggcaaccaggcccagctggccatgagccacctgaatggccacaagctgcacggcaagcccatccgcatcaccctgagcaagcaccagaatgtgcagctgccccgggagggccaggaggaccagggcctgaccaaggactatggcaacagccccctgcaccgcttcaagaagccaggcagcaagaacttccagaacatcttcccccccagcgccaccctgcacctgagcaacatccccccatctgtgtctgaggaggacctgaaggtgctcttcagcagcaatggaggagtggtgaagggcttcaagttcttccagaaggacaggaagatggccctgatccagatgggctctgtggaggaggccgtgcaggccctgattgacctgcacaaccacgacctgggggagaaccaccacctgcgggtgtccttcagcaagagcaccatctag

SEQ ID NO: 164709 - DNA, 1599 bp, synthetic construct
  misc_feature 1..1599: note = Description of Artificial Sequence: Synthetic coding sequence
  source 1..1599: mol_type = other DNA
atggatggcatcgtgacagaggtggccgtgggcgtgaagaggggcagtgatgagctgctgagcggctctgtgctgagcagccccaacagcaacatgagctccatggtggtgacagccaatggaaatgacagcaagaagttcaagggggaggacaagatggatggagcccccagccgggtgctgcacatcaggaagctgcctggagaggtgacagaaacagaggtgattgccctgggcctgccctttgggaaggtgaccaacatcctgatgctgaagggcaagaaccaggccttcctggagctggccacagaggaggccgccatcaccatggtgaactactacagcgctgtgaccccccacctgaggaaccagcccatctacatccagtacagcaaccacaaggagctgaagacagacaacaccctgaaccagagggcccaggccgtgctgcaggccgtgacagctgtgcagacagccaacacccccctgagcggcaccaccgtgtctgagagcgctgtgaccccagcccagagccctgtgctgcgcatcatcatcgacaacatgtactaccctgtgaccctggatgtgctgcaccagatcttcagcaagtttggagctgtgctgaagatcatcaccttcaccaagaacaaccagttccaggccctgctgcagtatggagaccctgtgaatgcccagcaggccaagctggccctggatggccagaacatctacaatgcctgctgcaccctgagaattgacttcagcaagctggtgaacctgaatgtgaagtacaacaatgacaagagccgggactacaccaggccagacctgcccagcggagatggccagcctgccctggaccctgccatcgccgccgcctttgccaaggagaccagcctgctggccgtgcctggggccctgagccccctggccatccccaatgctgctgctgctgctgctgctgctgctgctggccgggtgggcatgcctggggtgtctgctgggggcaacacagtgctgctggtgagcaacctgaatgaggagatggtgaccccccagagcctcttcaccctgtttggagtgtatggagatgtgcagagggtgaagatcctgtacaacaagaaggacagcgccctgatccagatggctgatggcaaccagagccagctggccatgaaccacctgaatggccagaagatgtatggcaagatcatccgggtgaccctgagcaagcaccagacagtgcagctgccccgggagggcctggatgaccagggcctgaccaaggactttggaaacagccccctgcaccgcttcaagaagccaggcagcaagaacttccagaacatcttcccccccagcgccaccctgcacctgagcaacatccccccatctgtggccgaggaggacctgcggaccctgtttgccaacacaggaggcaccgtgaaggccttcaagttcttccagagggaccacaagatggccctgctgcagatggccaccgtggaggaggccatccaggccctgattgacctgcacaactacaacctgggggagaaccaccacctgcgggtgtccttcagcaagagcaccatctag

SEQ ID NO: 164710 - DNA, 1614 bp, synthetic construct
  misc_feature 1..1614: note = Description of Artificial Sequence: Synthetic coding sequence
  source 1..1614: mol_type = other DNA
atggatggcatcgtgacagaggtggccgtgggcgtgaagaggggcagtgatgagctgctgagcggctctgtgctgagcagccccaacagcaacatgagctccatggtggtgacagccaatggaaatgacagcaagaagttcaagggggaggacaagatggatggagcccccagccgggtgctgcacatcaggaagctgcctggagaggtgacagaaacagaggtgattgccctgggcctgccctttgggaaggtgaccaacatcctgatgctgaagggcaagaaccaggccttcctggagctggccacagaggaggccgccatcaccatggtgaactactacagcgctgtgaccccccacctgaggaaccagcccatctacatccagtacagcaaccacaaggagctgaagacagacaacaccctgaaccagagggcccaggccgtgctgcaggccgtgacagctgtgcagacagccaacacccccctgagcggcaccaccgtgtctgagagcgctgtgaccccagcccagagccctgtgctgcgcatcatcatcgacaacatgtactaccctgtgaccctggatgtgctgcaccagatcttcagcaagtttggagctgtgctgaagatcatcaccttcaccaagaacaaccagttccaggccctgctgcagtatggagaccctgtgaatgcccagcaggccaagctggccctggatggccagaacatctacaatgcctgctgcaccctgagaattgacttcagcaagctggtgaacctgaatgtgaagtacaacaatgacaagagccgggactacaccaggccagacctgcccagcggagatggccagcctgccctggaccctgccatcgccgccgcctttgccaaggagaccagcctgctgggcctgcctgtggccgctgtgcctggggccctgagccccctggccatccccaatgctgctgctgctgctgctgctgctgctgctggccgggtgggcatgcctggggtgtctgctgggggcaacacagtgctgctggtgagcaacctgaatgaggagatggtgaccccccagagcctcttcaccctgtttggagtgtatggagatgtgcagagggtgaagatcctgtacaacaagaaggacagcgccctgatccagatggctgatggcaaccagagccagctggccatgaaccacctgaatggccagaagatgtatggcaagatcatccgggtgaccctgagcaagcaccagacagtgcagctgccccgggagggcctggatgaccagggcctgaccaaggactttggaaacagccccctgcaccgcttcaagaagccaggcagcaagaacttccagaacatcttccccccatctgccaccctgcacctgagcaacatcccccccagcgtggccgaggaggacctgcggaccctgtttgccaacacaggaggcaccgtgaaggccttcaagttcttccagagggaccacaagatggccctgctgcagatggccaccgtggaggaggccatccaggccctgattgacctgcacaactacaacctgggggagaaccaccacctgcgggtgtccttcagcaagagcaccatctag

SEQ ID NO: 164711 - DNA, 1611 bp, synthetic construct
  misc_feature 1..1611: note = Description of Artificial Sequence: Synthetic coding sequence
  source 1..1611: mol_type = other DNA
atggatggcatcgtgacagaggtggccgtgggcgtgaagaggggcagtgatgagctgctgagcggctctgtgctgagcagccccaacagcaacatgagctccatggtggtgacagccaatggaaatgacagcaagaagttcaagggggaggacaagatggatggagcccccagccgggtgctgcacatcaggaagctgcctggagaggtgacagaaacagaggtgattgccctgggcctgccctttgggaaggtgaccaacatcctgatgctgaagggcaagaaccaggccttcctggagctggccacagaggaggccgccatcaccatggtgaactactacagcgctgtgaccccccacctgaggaaccagcccatctacatccagtacagcaaccacaaggagctgaagacagacaacaccctgaaccagagggcccaggccgtgctgcaggccgtgacagctgtgcagacagccaacacccccctgagcggcaccaccgtgtctgagagcgctgtgaccccagcccagagccctgtgctgcgcatcatcatcgacaacatgtactaccctgtgaccctggatgtgctgcaccagatcttcagcaagtttggagctgtgctgaagatcatcaccttcaccaagaacaaccagttccaggccctgctgcagtatggagaccctgtgaatgcccagcaggccaagctggccctggatggccagaacatctacaatgcctgctgcaccctgagaattgacttcagcaagctggtgaacctgaatgtgaagtacaacaatgacaagagccgggactacaccaggccagacctgcccagcggagatggccagcctgccctggaccctgccatcgccgccgcctttgccaaggagaccagcctgctgggcctgcctgtggccgctgtgcctggggccctgagccccctggccatccccaatgctgctgctgctgctgctgctgctgctgctggccgggtgggcatgcctggggtgtctgctgggggcaacacagtgctgctggtgagcaacctgaatgaggagatggtgaccccccagagcctcttcaccctgtttggagtgtatggagatgtgcagagggtgaagatcctgtacaacaagaaggacagcgccctgatccagatggctgatggcaaccagagccagctggccatgaaccacctgaatggccagaagatgtatggcaagatcatccgggtgaccctgagcaagcaccagacagtgcagctgccccgggagggcctggatgaccagggcctgaccaaggactttggaaacagccccctgcaccgcttcaagaagccaggcagcaagaacttccagaacatcttccccccatctgccaccctgcacctgagcaacatcccccccagcgtggccgaggaggacctgcggaccctgtttgccaacacaggaggcaccgtgaaggccttcaagttcttccaggaccacaagatggccctgctgcagatggccaccgtggaggaggccatccaggccctgattgacctgcacaactacaacctgggggagaaccaccacctgcgggtgtccttcagcaagagcaccatctag

SEQ ID NO: 164712 - DNA, 1056 bp, synthetic construct
  misc_feature 1..1056: note = Description of Artificial Sequence: Synthetic coding sequence
  source 1..1056: mol_type = other DNA
ggcatgaagaggggcagtgatgagctgctgagcggctctgtgctgagcagccccaacagcaacatgagctccatggtggtgacagccaatggaaatgacagcaagaagttcaagggggaggacaagatggatggagcccccagccgggtgctgcacatcaggaagctgcctggagaggtgacagaaacagaggtgattgccctgggcctgccctttgggaaggtgaccaacatcctgatgctgaagggcaagaaccaggccttcctggagctggccacagaggaggccgccatcaccatggtgaactactacagcgctgtgaccccccacctgaggaaccagcccatctacatccagtacagcaaccacaaggagctgaagacagacaacaccctgaaccagagggcccaggccgtgctgcaggccgtgacagctgtgcagacagccaacacccccctgagcggcaccaccgtgtctgagagcgctgtgaccccagcccagagccctgtgctgcgcatcatcatcgacaacatgtactaccctgtgaccctggatgtgctgcaccagatcttcagcaagtttggagctgtgctgaagatcatcaccttcaccaagaacaaccagttccaggccctgctgcagtatggagaccctgtgaatgcccagcaggccaagctggccctggatggccagaacatctacaatgcctgctgcaccctgagaattgacttcagcaagctggtgaacctgaatgtgaagtacaacaatgacaagagccgggactacaccaggccagacctgcccagcggagatggccagcctgccctggaccctgccatcgccgccgcctttgccaaggagaccagcctgctgggcctgcctgtggccgctgtgcctggggccctgagccccctggccatccccaatgctgctgctgctgctgctgctgctgctgctggccgggtgggcatgcctggggtgtctgctgggggcaacacagtgctgctggtgagcaacctgaatgaggaggtgttcatggagatgtgcagcgtgtag

SEQ ID NO: 164713 - DNA, 1647 bp, synthetic construct
  misc_feature 1..1647: note = Description of Artificial Sequence: Synthetic coding sequence
  source 1..1647: mol_type = other DNA
atgtggagcaacctgaccttctccttcttcggcctgcggaccaaggccaagaagtatgtgacagtgaacaacagaggaagtgatgagctgctgagcggctctgtgctgagcagccccaacagcaacatgagctccatggtggtgacagccaatggaaatgacagcaagaagttcaagggggaggacaagatggatggagcccccagccgggtgctgcacatcaggaagctgcccggggaggtgacagaaacagaggtgattgccctgggcctgccctttgggaaggtgaccaacatcctgatgctgaagggcaagaaccaggccttcctggagctggccacagaggaggccgccatcaccatggtgaactactacagcgctgtgaccccccacctgaggaaccagcccatctacatccagtacagcaaccacaaggagctgaagacagacaacaccctgaaccagagggcccaggccgtgctgcaggccgtgacagctgtgcagacagccaacacccccctgagcggcaccaccgtgtctgagagcgctgtgaccccagcccagagccctgtgctgcgcatcatcatcgacaacatgtactaccctgtgaccctggatgtgctgcaccagatcttcagcaagtttggagctgtgctgaagatcatcaccttcaccaagaacaaccagttccaggccctgctgcagtacggggaccctgtgaatgcccagcaggccaagctggccctggatggccagaacatctacaatgcctgctgcaccctgagaattgacttcagcaagctggtgaacctgaatgtgaagtacaacaatgacaagagccgggactacaccaggccagacctgcccagcggagatggccagcctgccctggaccctgccatcgctgctgcctttgccaaggagaccagcctgctgggcctgcctgtggccgctgtgcctggggccctgagccccctggccatccccaatgctgctgctgctgctgctgctgctgctgctggccgggtgggcatgcctggggtgtctgctgggggcaacacagtgctgctggtgagcaacctgaatgaggagatggtgaccccccagagcctcttcaccctgtttggagtgtatggagatgtgcagagggtgaagatcctgtacaacaagaaggacagcgccctgatccagatggctgatggcaaccagagccagctggccatgaaccacctgaatggccagaagatgtatggcaagatcatccgggtgaccctgagcaagcaccagacagtgcagctgccccgggagggcctggatgaccagggcctgaccaaggactttggaaacagccccctgcaccgcttcaagaagccaggcagcaagaacttccagaacatcttcccccccagcgccaccctgcacctgagcaacatccccccatctgtggccgaggaggacctgcggaccctgtttgccaacacaggaggcaccgtgaaggccttcaagttcttccagagggaccacaagatggccctgctgcagatggccaccgtggaggaggccatccaggccctgattgacctgcacaactacaacctgggggagaaccaccacctgcgggtgtccttcagcaagagcaccatctag

SEQ ID NO: 164714 - DNA, 1596 bp, synthetic construct
  misc_feature 1..1596: note = Description of Artificial Sequence: Synthetic coding sequence
  source 1..1596: mol_type = other DNA
atggatggcatcgtgacagaggtggccgtgggcgtgaagaggggcagtgatgagctgctgagcggctctgtgctgagcagccccaacagcaacatgagctccatggtggtgacagccaatggaaatgacagcaagaagttcaagggggaggacaagatggatggagcccccagccgggtgctgcacatcaggaagctgcctggagaggtgacagaaacagaggtgattgccctgggcctgccctttgggaaggtgaccaacatcctgatgctgaagggcaagaaccaggccttcctggagctggccacagaggaggccgccatcaccatggtgaactactacagcgctgtgaccccccacctgaggaaccagcccatctacatccagtacagcaaccacaaggagctgaagacagacaacaccctgaaccagagggcccaggccgtgctgcaggccgtgacagctgtgcagacagccaacacccccctgagcggcaccaccgtgtctgagagcgctgtgaccccagcccagagccctgtgctgcgcatcatcatcgacaacatgtactaccctgtgaccctggatgtgctgcaccagatcttcagcaagtttggagctgtgctgaagatcatcaccttcaccaagaacaaccagttccaggccctgctgcagtatggagaccctgtgaatgcccagcaggccaagctggccctggatggccagaacatctacaatgcctgctgcaccctgagaattgacttcagcaagctggtgaacctgaatgtgaagtacaacaatgacaagagccgggactacaccaggccagacctgcccagcggagatggccagcctgccctggaccctgccatcgccgccgcctttgccaaggagaccagcctgctggccgtgcctggggccctgagccccctggccatccccaatgctgctgctgctgctgctgctgctgctgctggccgggtgggcatgcctggggtgtctgctgggggcaacacagtgctgctggtgagcaacctgaatgaggagatggtgaccccccagagcctcttcaccctgtttggagtgtatggagatgtgcagagggtgaagatcctgtacaacaagaaggacagcgccctgatccagatggctgatggcaaccagagccagctggccatgaaccacctgaatggccagaagatgtatggcaagatcatccgggtgaccctgagcaagcaccagacagtgcagctgccccgggagggcctggatgaccagggcctgaccaaggactttggaaacagccccctgcaccgcttcaagaagccaggcagcaagaacttccagaacatcttcccccccagcgccaccctgcacctgagcaacatccccccatctgtggccgaggaggacctgcggaccctgtttgccaacacaggaggcaccgtgaaggccttcaagttcttccaggaccacaagatggccctgctgcagatggccaccgtggaggaggccatccaggccctgattgacctgcacaactacaacctgggggagaaccaccacctgcgggtgtccttcagcaagagcaccatctag

SEQ ID NO: 164715 - DNA, 978 bp, synthetic construct
  misc_feature 1..978: note = Description of Artificial Sequence: Synthetic coding sequence
  source 1..978: mol_type = other DNA
atgagctccatggtggtgacagccaatggaaatgacagcaagaagttcaagggggaggacaagatggatggagcccccagccgggtgctgcacatcaggaagctgcccggggaggtgacagaaacagaggtgattgccctgggcctgccctttgggaaggtgaccaacatcctgatgctgaagggcaagaaccaggccttcctggagctggccacagaggaggccgccatcaccatggtgaactactacagcgctgtgaccccccacctgaggaaccagcccatctacatccagtacagcaaccacaaggagctgaagacagacaacaccctgaaccagagggcccaggccgtgctgcaggccgtgacagctgtgcagacagccaacacccccctgagcggcaccaccgtgtctgagagcgctgtgaccccagcccagagccctgtgctgcgcatcatcatcgacaacatgtactaccctgtgaccctggatgtgctgcaccagatcttcagcaagtttggagctgtgctgaagatcatcaccttcaccaagaacaaccagttccaggccctgctgcagtacggggaccctgtgaatgcccagcaggccaagctggccctggatggccagaacatctacaatgcctgctgcaccctgagaattgacttcagcaagctggtgaacctgaatgtgaagtacaacaatgacaagagccgggactacaccaggccagacctgcccagcggagatggccagcctgccctggaccctgccatcgctgctgcctttgccaaggagaccagcctgctggccgtgcctggggccctgagccccctggccatccccaatgctgctgctgctgctgctgctgctgctgctggccgggtgggcatgcctggggtgtctgctgggggcaacacagtgctgctggtgagcaacctgaatgaggaggtgttcatggagatgtgcagcgtgtag

SEQ ID NO: 164716 - DNA, 615 bp, synthetic construct
  misc_feature 1..615: note = Description of Artificial Sequence: Synthetic coding sequence
  source 1..615: mol_type = other DNA
atgcctggggtgtctgctgggggcaacacagtgctgctggtgagcaacctgaatgaggagatggtgaccccccagagcctcttcaccctgtttggagtgtatggagatgtgcagagggtgaagatcctgtacaacaagaaggacagcgccctgatccagatggctgatggcaaccagagccagctggccatgaaccacctgaatggccagaagatgtatggcaagatcatccgggtgaccctgagcaagcaccagacagtgcagctgccccgggagggcctggatgaccagggcctgaccaaggactttggaaacagccccctgcaccgcttcaagaagccaggcagcaagaacttccagaacatcttcccccccagcgccaccctgcacctgagcaacatccccccatctgtggccgaggaggacctgcggaccctgtttgccaacacaggaggcaccgtgaaggccttcaagttcttccagagggaccacaagatggccctgctgcagatggccaccgtggaggaggccatccaggccctgattgacctgcacaactacaacctgggggagaaccaccacctgcgggtgtccttcagcaagagcaccatctag

SEQ ID NO: 164717 - DNA, 348 bp, synthetic construct
  misc_feature 1..348: note = Description of Artificial Sequence: Synthetic coding sequence
  source 1..348: mol_type = other DNA
atggtgtgcagccctgtgaccctgcgcatcgcccccccagaccggcgcttcagccgcagcgccatccctgagcagatcatcagcagcaccctgagcagccccagcagcaatgccccagacccctgtgccaaggagaccgtgctgagcgccctgaaggagaagaagaagaagaggacagtggaggaggaggaccagatcttcctggatggccaggagaacaagaggagctgcctggtggatggcctgacagatgccagcagcgccttcaaggtgccccggcccggccctgacaccctgcagttcaccgtggatgtgttccactttgccaatgacagcaggaacatgtag

SEQ ID NO: 164718 - DNA, 564 bp, synthetic construct
  misc_feature 1..564: note = Description of Artificial Sequence: Synthetic coding sequence
  source 1..564: mol_type = other DNA
atggtgtgcagccctgtgaccctgcgcatcgcccccccagaccggcgcttcagccgcagcgccatccctgagcagatcatcagcagcaccctgagcagccccagcagcaatgccccagacccctgtgccaaggagaccgtgctgagcgccctgaaggagaagaagaagaagaggacagtggaggaggaggaccagatcttcctggatggccaggagaacaagaggagctgcctggtggatggcctgacagatgccagcagcgccttcaaggtgccccggcccggccctgacaccctgcagttcaccgtggatgtgttccactttgccaatgacagcaggaacatgatctacatcacctgccacctgaaggtgaccctggccgagcaggaccctgatgagctgaacaaggcctgcagcttcagcaagcccagcaacagctggttccctgtggagggcctggccgacatctgccagtgctgcaacaagggggactgtggcacccccagccacagccggcggcagccccgggtggtgtcccagtggagcaccagcgccagcctgtag

SEQ ID NO: 164719 - DNA, 1095 bp, synthetic construct
  misc_feature 1..1095: note = Description of Artificial Sequence: Synthetic coding sequence
  source 1..1095: mol_type = other DNA
atgtctgccaacagcagccgggtgggccagctgctgctgcagggcagcgcctgcatccgctggaagcaggatgtggagggcgctgtgtaccacctggccaactgcctgctgctgctgggcttcatgggcggcagcggcgtgtatggctgcttctacctgtttggcttcctgtctgctggctacctgtgctgcgtgctgtggggctggttcagcgcctgtggcctggacatcgtgctgtggagcttcctgctggccgtggtgtgcctgctgcagctggcccacctggtgtaccgcctgcgggaggacaccctgcctgaggagtttgacctgctgtacaagaccctgtgcctgcccctgcaggtgcccctgcagacctacaaggagatcgtgcactgctgtgaggagcaggtgctgaccctggccacagagcagacctatgctgtggagggggagacccccatcaaccggctgagcctgctgctgagcggccgggtgcgggtgtcccaggacggccagttcctgcactacatcttcccctaccagttcatggacagccctgagtgggagagcctgcagcccagcgaggagggcgtcttccaggtgaccctgacagctgagaccagctgcagctacatctcctggcccaggaagagcctgcacctgctgctgaccaaggagcgctacatcagctgcctcttcagcgccctgctgggctatgacatcagcgagaagctgtacaccctgaatgacaagctgtttgccaagtttggcctgcgctttgacatccggctgcccagcctgtaccacgtgctgggccccacagctgctgatgctggccctgagagcgagaagggagatgaggaggtgtgtgagcctgctgtgagccccccccaggccacccccaccagcctgcagcagaccccaccctgcagcaccccaccagccaccaccaacttccctgccccacccacccgggcccggctgagcaggccagattctggcatcctggccagccgcatccccctgcagagctacagccaggtgatcagccggggccaggcccccctggcccccacccacaccccagagctgtag

SEQ ID NO: 164720 - DNA, 1083 bp, synthetic construct
  misc_feature 1..1083: note = Description of Artificial Sequence: Synthetic coding sequence
  source 1..1083: mol_type = other DNA
atgtctgccaacagcagccgggtgggccagctgctgctgcagggcagcgcctgcatccgctggaagcaggatgtggagggcgctgtgtaccacctggccaactgcctgctgctgctgggcttcatgggcggcagcggcgtgtatggctgcttctacctgtttggcttcctgtctgctggctacctgtgctgcgtgctgtggggctggttcagcgcctgtggcctggacatcgtgctgtggagcttcctgctggccgtggtgtgcctgctgcagctggcccacctggtgtaccgcctgcgggaggacaccctgcctgaggagtttgacctgctgtacaagaccctgtgcctgcccctgcaggtgcccctgcagacctacaaggagatcgtgcactgctgtgaggagcaggtgctgaccctggccacagagcagacctatgctgtggagggggagacccccatcaaccggctgagcctgctgctgagcggccgggtgcgggtgtcccaggacggccagttcctgcactacatcttcccctaccagttcatggacagccctgagtgggagagcctgcagcccagcgaggagggcgtcttccaggtgaccctgacagctgagaccagctgcagctacatctcctggcccaggaagagcctgcacctgctgctgaccaaggagcgctacatcagctgcctcttcagcgccctgctgggctatgacatcagcgagaagctgtacaccctgaatgacaagctgtttgccaagtttggcctgcgctttgacatccggctgcccagcctgtaccacgtgctgggccccacagctgctgatgctggccctgagagcgagaagggagatgaggaggtgtgtgagcctgctgtgagccccccccaggccacccccaccagcctgcagcagaccccaccctgcagcaccccaccagccaccaccaacttccctgccccacccacccgggcccggctgagcaggccagattctggcatcctggagattgatgacttccccagctacttccaccagtttggcttcagcggcaaggtggccgccggccgcatcccctag

SEQ ID NO: 164721 - DNA, 1083 bp, synthetic construct; identical to SEQ ID NO: 164720
  misc_feature 1..1083: note = Description of Artificial Sequence: Synthetic coding sequence
  source 1..1083: mol_type = other DNA

SEQ ID NO: 164722 - DNA, 876 bp, synthetic construct
  misc_feature 1..876: note = Description of Artificial Sequence: Synthetic coding sequence
  source 1..876: mol_type = other DNA
atggagaggaacagcagcctgtggaagaacctgattgatgagcaccctgtgtgcaccacctggaagcaggaggccgagggcgccatctaccacctggccagcatcctgtttgtggtgggcttcatgggcggcagcggcttcttcggcctgctgtatgtgttcagcctgctgggcctgggcttcctgtgcagcgctgtgtgggcctgggtggatgtgtgtgccgctgacatcttctcctggaactttgtgctgtttgtgatctgcttcatgcagtttgtgcacatcgcctaccaggtgcgcagcatcacctttgcccgggagttccaggtgctgtacagcagcctcttccagcccctgggcatcagcctgcccgtcttccgcaccatcgccctgagcagcgaggtggtgaccctggagaaggagcactgctacgccatgcagggcaagaccagcattgacaagctgagcctgctggtgtctggccgcatccgggtgacagtggatggagagttcctgcactacatcttccccctgcagttcctggacagccctgagtgggacagcctgcggcccacagaggagggcatcttccaggtgaccctgacagctgagacagactgccgctacgtgtcctggaggaggaagaagctgtacctgctgtttgcccagcaccgctacatcagccgcctcttctctgtgctgattggaagtgacattgctgacaagctgtatgccctgaatgacagagtgtacatcggcaagcgctaccactatgacatccggctgcccaacttctaccagatgagcaccccagagatccgccgcagccccctgacccagcacttccagaacagccgccgctactgtgacaagtag

SEQ ID NO: 164723 - DNA, 306 bp, synthetic construct
  misc_feature 1..306: note = Description of Artificial Sequence: Synthetic coding sequence
  source 1..306: mol_type = other DNA
atgctgttcctgtgctttgaccgcatccgggtgacagtggatggagagttcctgcactacatcttccccctgcagttcctggacagccctgagtgggacagcctgcggcccacagaggagggcatcttccaggtgaccctgacagctgagacagactgccgctacgtgtcctggaggaggaagaagctgtacctgctgtttgcccagcaccgctacatcagccgcctcttctctgtgctgattggaagtgacattgctgacaagctgtatgccctgaatgacagagtgtacatcggcaagaggtag

SEQ ID NO: 164724 - DNA, 1386 bp, synthetic construct
  misc_feature 1..1386: note = Description of Artificial Sequence: Synthetic coding sequence
  source 1..1386: mol_type = other DNA
atggccaccttcagccggcaggagttcttccagcagctgctgcagggctgcctgctgcccacagcccagcagggcctggaccagatctggctgctgctggccatctgcctggcctgccgcctgctgtggaggctgggcctgcccagctacctgaagcacgccagcacagtggccggcggcttcttcagcctgtaccacttcttccagctgcacatggtgtgggtggtgctgctgagcctgctgtgctacctggtgctcttcctgtgccgccacagcagccaccggggcgtcttcctgtctgtgaccatcctgatctacctgctgatgggagagatgcacatggtggacacagtgacctggcacaagatgagaggagcccagatgattgtggccatgaaggctgtgtccctgggctttgacctggacagaggagaggtgggcaccgtgcccagccctgtggagttcatgggctacctgtactttgtgggcaccatcgtgtttggcccctggatctccttccacagctacctgcaggccgtgcagggccggcccctgagctgccgctggctgcagaaggtggcccggagcctggccctggccctgctgtgcctggtgctgagcacctgtgtgggcccctacctgttcccctacttcatccccctgaatggagaccggctgctgaggaacaagaagaggaaggcccggggcaccatggtgcgctggctgcgggcctatgaatctgctgtgtccttccacttcagcaactactttgtgggcttcctgtctgaggccacagccaccctggccggggccggcttcacagaggagaaggaccacctggagtgggacctgactgtgtccaagcccctgaatgtggagctgcccaggtccatggtggaggtggtgacctcctggaacctgcccatgagctactggctgaacaactacgtgttcaagaatgccctgcggctgggcaccttctctgctgtgctggtgacctatgctgccagcgccctgctgcacggcttctccttccacctggccgctgtgctgctgagcctggccttcatcacctacgtggagcacgtgctgaggaagaggctggcccgcatcctgagcgcctgtgtgctgagcaagcgctgccccccagactgcagccaccagcaccggctgggcctgggcgtgcgggccctgaacctgctgtttggagccctggccatcttccacctggcctacctgggcagcctgtttgatgtggatgtggatgacaccacagaggagcagggctacggcatggcctacacagtgcacaagtggagcgagctgtcctgggccagccactgggtgaccttcggctgctggatcttctaccgcctcatcggctag

SEQ ID NO: 164725 - DNA, 1368 bp, synthetic construct
  misc_feature 1..1368: note = Description of Artificial Sequence: Synthetic coding sequence
  source 1..1368: mol_type = other DNA
atggccaccttcagccggcaggagttcttccagcagctgctgcagggctgcctgctgcccacagcccagcagggcctggaccagatctggctgctgctggccatctgcctggcctgccgcctgctgtggaggctgggcctgcccagctacctgaagcacgccagcacagtggccggcggcttcttcagcctgtaccacttcttccagctgcacatggtgtgggtggtgctgctgagcctgctgtgctacctggtgctcttcctgtgccgccacagcagccaccggggcgtcttcctgtctgtgaccatcctgatctacctgctgatgggagagatgcacatggtggacacagtgacctggcacaagatgagaggagcccagatgattgtggccatgaaggctgtgtccctgggctttgacctggacagaggagaggtgggcaccgtgcccagccctgtggagttcatgggctacctgtactttgtgggcaccatcgtgtttggcccctggatctccttccacagctacctgcaggccgtgcagggccggcccctgagctgccgctggctgcagaaggtggcccggagcctggccctggccctgctgtgcctggtgctgagcacctgtgtgggcccctacctgttcccctacttcatccccctgaatggagaccggctgctgaggaagggcaccatggtgcgctggctgcgggcctatgaatctgctgtgtccttccacttcagcaactactttgtgggcttcctgtctgaggccacagccaccctggccggggccggcttcacagaggagaaggaccacctggagtgggacctgactgtgtccaagcccctgaatgtggagctgcccaggtccatggtggaggtggtgacctcctggaacctgcccatgagctactggctgaacaactacgtgttcaagaatgccctgcggctgggcaccttctctgctgtgctggtgacctatgctgccagcgccctgctgcacggcttctccttccacctggccgctgtgctgctgagcctggccttcatcacctacgtggagcacgtgctgaggaagaggctggcccgcatcctgagcgcctgtgtgctgagcaagcgctgccccccagactgcagccaccagcaccggctgggcctgggcgtgcgggccctgaacctgctgtttggagccctggccatcttccacctggcctacctgggcagcctgtttgatgtggatgtggatgacaccacagaggagcagggctacggcatggcctacacagtgcacaagtggagcgagctgtcctgggccagccactgggtgaccttcggctgctggatcttctaccgcctcatcggctag

SEQ ID NO: 164726 - DNA, 1371 bp, synthetic construct
  misc_feature 1..1371: note = Description of Artificial Sequence: Synthetic coding sequence
  source 1..1371: mol_type = other DNA
atggccaccttcagccggcaggagttcttccagcagctgctgcagggctgcctgctgcccacagcccagcagggcctggaccagatctggctgctgctggccatctgcctggcctgccgcctgctgtggaggctgggcctgcccagctacctgaagcacgccagcacagtggccggcggcttcttcagcctgtaccacttcttccagctgcacatggtgtgggtggtgctgctgagcctgctgtgctacctggtgctcttcctgtgccgccacagcagccaccggggcgtcttcctgtctgtgaccatcctgatctacctgctgatgggagagatgcacatggtggacacagtgacctggcacaagatgagaggagcccagatgattgtggccatgaaggctgtgtccctgggctttgacctggacagaggagaggtgggcaccgtgcccagccctgtggagttcatgggctacctgtactttgtgggcaccatcgtgtttggcccctggatctccttccacagctacctgcaggccgtgcagggccggcccctgagctgccgctggctgcagaaggtggcccggagcctggccctggccctgctgtgcctggtgctgagcacctgtgtgggcccctacctgttcccctacttcatccccctgaatggagaccggctgctgaggaacaagaagaggaaggcccgctggctgcgggcctatgagagcgctgtgtccttccacttcagcaactactttgtgggcttcctgtctgaggccacagccaccctggccggggccggcttcacagaggagaaggaccacctggagtgggacctgactgtgtccaagcccctgaatgtggagctgcccaggtccatggtggaggtggtgacctcctggaacctgcccatgagctactggctgaacaactacgtgttcaagaatgccctgcggctgggcaccttctctgctgtgctggtgacctacgccgccagcgccctgctgcacggcttctccttccacctggccgctgtgctgctgagcctggccttcatcacctacgtggagcacgtgctgaggaagaggctggcccgcatcctgagcgcctgtgtgctgagcaagcgctgccccccagactgcagccaccagcaccggctgggcctgggcgtgcgggccctgaacctgctgtttggagccctggccatcttccacctggcctacctgggcagcctgtttgatgtggatgtggatgacaccacagaggagcagggctacggcatggcctacacagtgcacaagtggagcgagctgtcctgggccagccactgggtgaccttcggctgctggatcttctaccgcctgattggatag

SEQ ID NO: 164727 - DNA, 1368 bp, synthetic construct; identical to SEQ ID NO: 164725
  misc_feature 1..1368: note = Description of Artificial Sequence: Synthetic coding sequence
  source 1..1368: mol_type = other DNA

SEQ ID NO: 164728 - DNA, 1353 bp, synthetic construct
  misc_feature 1..1353: note = Description of Artificial Sequence: Synthetic coding sequence
  source 1..1353: mol_type = other DNA
atggccaccttcagccggcaggagttcttccagcagctgctgcagggctgcctgctgcccacagcccagcagggcctggaccagatctggctgctgctggccatctgcctggcctgccgcctgctgtggaggctgggcctgcccagctacctgaagcacgccagcacagtggccggcggcttcttcagcctgtaccacttcttccagctgcacatggtgtgggtggtgctgctgagcctgctgtgctacctggtgctcttcctgtgccgccacagcagccaccggggcgtcttcctgtctgtgaccatcctgatctacctgctgatgggagagatgcacatggtggacacagtgacctggcacaagatgagaggagcccagatgattgtggccatgaaggctgtgtccctgggctttgacctggacagaggagaggtgggcaccgtgcccagccctgtggagttcatgggctacctgtactttgtgggcaccatcgtgtttggcccctggatctccttccacagctacctgcaggccgtgcagggccggcccctgagctgccgctggctgcagaaggtggcccggagcctggccctggccctgctgtgcctggtgctgagcacctgtgtgggcccctacctgttcccctacttcatccccctgaatggagaccggctgctgaggaagtggctgcgggcctatgagagcgctgtgtccttccacttcagcaactactttgtgggcttcctgtctgaggccacagccaccctggccggggccggcttcacagaggagaaggaccacctggagtgggacctgactgtgtccaagcccctgaatgtggagctgcccaggtccatggtggaggtggtgacctcctggaacctgcccatgagctactggctgaacaactacgtgttcaagaatgccctgcggctgggcaccttctctgctgtgctggtgacctacgccgccagcgccctgctgcacggcttctccttccacctggccgctgtgctgctgagcctggccttcatcacctacgtggagcacgtgctgaggaagaggctggcccgcatcctgagcgcctgtgtgctgagcaagcgctgccccccagactgcagccaccagcaccggctgggcctgggcgtgcgggccctgaacctgctgtttggagccctggccatcttccacctggcctacctgggcagcctgtttgatgtggatgtggatgacaccacagaggagcagggctacggcatggcctacacagtgcacaagtggagcgagctgtcctgggccagccactgggtgaccttcggctgctggatcttctaccgcctgattggatag

SEQ ID NO: 164729 - DNA, 1140 bp, synthetic construct
  misc_feature 1..1140: note = Description of Artificial Sequence: Synthetic coding sequence
  source 1..1140: mol_type = other DNA
atggtgtgggtggtgctgctgagcctgctgtgctacctggtgctcttcctgtgccgccacagcagccacagaggagtcttcctgtctgtgaccatcctgatctacctgctgatgggagagatgcacatggtggacacagtgacctggcacaagatgagaggagcccagatgattgtggccatgaaggctgtgtccctgggctttgacctggacagaggagaggtgggcaccgtgcccagccctgtggagttcatgggctacctgtactttgtgggcaccatcgtgtttggcccctggatctccttccacagctacctgcaggccgtgcagggccggcccctgagctgccgctggctgcagaaggtggcccggagcctggccctggccctgctgtgcctggtgctgagcacctgtgtgggcccctacctgttcccctacttcatccccctgaatggagaccggctgctgaggaagtggctgcgggcctatgaatctgctgtgtccttccacttcagcaactactttgtgggcttcctgtctgaggccacagccaccctggccggggccggcttcacagaggagaaggaccacctggagtgggacctgactgtgtccaagcccctgaatgtggagctgcccaggtccatggtggaggtggtgacctcctggaacctgcccatgagctactggctgaacaactacgtgttcaagaatgccctgcggctgggcaccttctctgctgtgctggtgacctatgctgccagcgccctgctgcacggcttctccttccacctggccgctgtgctgctgagcctggccttcatcacctacgtggagcacgtgctgaggaagaggctggcccgcatcctgagcgcctgtgtgctgagcaagcgctgccccccagactgcagccaccagcaccggctgggcctgggcgtgcgggccctgaacctgctgtttggagccctggccatcttccacctggcctacctgggcagcctgtttgatgtggatgtggatgacaccacagaggagcagggctacggcatggcctacacagtgcacaagtggagcgagctgtcctgggccagccactgggtgaccttcggctgctggatcttctaccgcctcatcggctag

SEQ ID NO: 164730 - DNA, 294 bp, synthetic construct
  misc_feature 1..294: note = Description of Artificial Sequence: Synthetic coding sequence
  source 1..294: mol_type = other DNA
atggccaccttcagccggcaggagttcttccagcagctgctgcagggctgcctgctgcccacagcccagcagggcctggaccagatctggctgctgctggccatctgcctggcctgccgcctgctgtggaggctgggcctgcccagctacctgaagcacgccagcacagtggccggcggcttcttcagcctgtaccacttcttccagctgcacatggtgtgggtggtgctgctgagcctgctgtgctacctggtgctcttcctgtgccgccacagcagccaccggggcgtgtag

SEQ ID NO: 164731 - DNA, 1386 bp, synthetic construct; identical to SEQ ID NO: 164724
  misc_feature 1..1386: note = Description of Artificial Sequence: Synthetic coding sequence
  source 1..1386: mol_type = other DNA

SEQ ID NO: 164732 - DNA, 2769 bp, synthetic construct
  misc_feature 1..2769: note = Description of Artificial Sequence: Synthetic coding sequence
  source 1..2769: mol_type = other DNA
atgttcctgcacagcgtgaacctgtggaacctggccttctacgtgttcatggtgttcctggccaccctgggcctgtgggatgtgttcttcggctttgaggagaacaagtgcagcatgagctacatgtttgagtacccagagtaccagaagattgagctgcccaagaagctggccaagcgctacccagcctatgagctgtacctgtatggagagggcagctatgcagaggagcacaagatcctgcccctgaccggcatccctgtgctcttcctgcctggaaatgccggcagctacaagcaggtgcgcagcatcggcagcatcgccctgaggaaggcagaagatattgacttcaagtaccactttgacttcttctctgtgaacttcaatgaggagctggtggccctgtatggaggcagcctgcagaagcagaccaagtttgtgcatgagtgcatcaagaccatcctgaagctgtacaagggccaggagtttgcccccaagtctgtggccatcatcggccacagcatgggcggcctggtggcccgggccctgctgaccctgaagaacttcaagcatgacctgatcaacctgctgatcacccaggccaccccccacgtggcccctgtgatgcccctggaccgcttcatcacagacttctacaccaccgtgaacaactactggatcctgaatgcccggcacatcaacctgaccaccctgtctgtggccggcggcttccgggactaccaggtgcgcagcggcctgaccttcctgcccaagctgagccaccacaccagcgccctgtctgtggtgtcctctgctgtgcccaagacctgggtgtccacagaccacctgagcatcgtgtggtgcaagcagctgcagctgaccaccgtgcgggccttctttgacctgattgatgctgacaccaagcagatcacccagaacagcaagaagaagctgtctgtgctgtaccaccacttcatccgccaccccagcaagcactttgaagaaaatcctgccatcatcagtgacctgaccggcacctccatgtgggtgctggtgaaggtgtccaagtggacctacgtggcctacaatgaaagtgagaagatctacttcaccttccccctggagaaccacaggaagatctacacccacgtgtactgccagagcaccatgctggacaccaacagctggatctttgcctgcatcaacagcacctccatgtgcctgcagggcgtggacctgtcctggaaggccgagctgctgcccaccatcaagtacctgaccctgcggctgcaggactaccccagcctgagccacctggtggtgtatgtgcccagcgtgcggggcagcaagtttgtggtggactgtgagttcttcaagaaggagaagcgctacatccagctgcctgtgacccacctgttctcctttggcctgagcagcaggaaggtggtgctgaacaccaacggcctgtactacaacctggagctgctgaactttggccagatctaccaggccttcaagatcaacgtggtgtccaagtgcagcgctgtgaaggaggagatcaccagcatctaccgcctgcacatcccctggagctatgaggacagcctgaccatcgcccaggcccccagcagcacagagatcagcctgaagctgcacatcgcccagcctgagaacaacacccacgtggccctcttcaagatgtacaccagcagtgactgccgctatgaggtgacagtgaagaccagcttcagccagatcctgggccaggtggtgcgcttccacggcggggccctgcctgcctacgtggtgagcaacatcctgctggcctaccggggccagctgtacagcctcttcagcacaggctgctgcctggagtatgccaccatgctggacaaggaggccaagccctacaaggtggaccccttcgtcatcatcatcaagttcctgctgggctacaagtggttcaaggagctgtgggatgtgctgctgctgcctgagctggatgctgtgatcctgacctgccagagcatgtgcttccccctcatcagcctcatcctcttcctgtttggcacctgcacagcctactggagcggcctgctgagcagcgcctctgtgcggctgctgagcagcctgtggctggccctgaagaggccttctgagctgcccaaggacatcaagatgatcagcccagacctgcccttcctgaccatcgtgctgatcatcgtgtcctggaccacctgtggggccctggccatcctgctgagctacctgtactacgtgttcaaggtggtgcacctgcaggccagcctgaccaccttcaagaacagccagcctgtgaaccccaagcacagcagaagaagtgagaagaagagcaaccaccacaaggacagcagcatccaccacctgcggctgagcgccaatgatgctgaggacagcctgaggatgcacagcaccgtcatcaacctgctgacctggatcgtgctgctgtccatgcccagcctcatctactggctgaagaacctgcgctactacttcaagctgaacccagacccctgcaagcccctggccttcatcctgatccccaccatggccatcctgggcaacacctacacagtgtccatcaagagcagcaagctgctgaagaccaccagccagttccccctgcccctggccgtgggcgtgattgcctttggaagtgcccacctgtaccgcctgccctgctttgtgttcatccccctgctgctgcacgccctgtgcaacttcatgtag

SEQ ID NO: 164733 - DNA, 915 bp, synthetic construct
  misc_feature 1..915: note = Description of Artificial Sequence: Synthetic coding sequence
  source 1..915: mol_type = other DNA
atggaggtgctggagagcaagaagattgagctgcccaagaagctggccaagcgctacccagcctatgagctgtacctgtatggagagggcagctatgcagaggagcacaagatcctgcccctgaccggcatccctgtgctcttcctgcctggaaatgccggcagctacaagcaggtgcgcagcatcggcagcatcgccctgaggaaggcagaagatattgacttcaagtaccactttgacttcttctctgtgaacttcaatgaggagctggtggccctgtatggaggcagcctgcagaagcagaccaagtttgtgcatgagtgcatcaagaccatcctgaagctgtacaagggccaggagtttgcccccaagtctgtggccatcatcggccacagcatgggcggcctggtggcccgggccctgctgaccctgaagaacttcaagcatgacctgatcaacctgctgatcacccaggccaccccccacgtggcccctgtgatgcccctggaccgcttcatcacagacttctacaccaccgtgaacaactactggatcctgaatgcccggcacatcaacctgaccaccctgtctgtggccggcggcttccgggactaccaggtgcgcagcggcctgaccttcctgcccaagctgagccaccacaccagcgccctgtctgtggtgtcctctgctgtgcccaagacctgggtgtccacagaccacctgagcatcgtgtggtgcaagcagctgcagctgaccaccgtgcgggccttctttgacctgattgatgctgacaccaagcagatcacccagaacagcaagaagaagctgtctgtgctgtaccaccacttcatccgccaccccagcaagcactttgaagaaaatcctgccatcatcagtgacctgaccggcatctag

SEQ ID NO: 164734 - DNA, 1779 bp, synthetic construct
  misc_feature 1..1779: note = Description of Artificial Sequence: Synthetic coding sequence
  source 1..1779: mol_type = other DNA
atgttcctgcacagcgtgaacctgtggaacctggccttctacgtgttcatggtgttcctggccaccctgggcctgtgggatgtgttcttcggctttgaggagaacaagtgcagcatgagctacatgtttgagtacccagagtaccagaagattgagctgcccaagaagctggccaagcgctacccagcctatgagctgtacctgtatggagagggcagctatgcagaggagcacaagatcctgcccctgaccggcatccctgtgctcttcctgcctggaaatgccggcagctacaagcaggtgcgcagcatcggcagcatcgccctgaggaaggcagaagatattgacttcaagtaccactttgacttcttctctgtgaacttcaatgaggagctggtggccctgtatggaggcagcctgcagaagcagaccaagtttgtgcatgagtgcatcaagaccatcctgaagctgtacaagggccaggagtttgcccccaagtctgtggccatcatcggccacagcatgggcggcctggtggcccgggccctgctgaccctgaagaacttcaagcatgacctgatcaacctgctgatcacccaggccaccccccacgtggcccctgtgatgcccctggaccgcttcatcacagacttctacaccaccgtgaacaactactggatcctgaatgcccggcacatcaacctgaccaccctgtctgtggccggcggcttccgggactaccaggtgcgcagcggcctgaccttcctgcccaagctgagccaccacaccagcgccctgtctgtggtgtcctctgctgtgcccaagacctgggtgtccacagaccacctgagcatcgtgtggtgcaagcagctgcagctgaccaccgtgcgggccttctttgacctgattgatgctgacaccaagcagatcacccagaacagcaagaagaagctgtctgtgctgtaccaccacttcatccgccaccccagcaagcactttgaagaaaatcctgccatcatcagtgacctgaccggcacctccatgtgggtgctggtgaaggtgtccaagtggacctacgtggcctacaatgaaagtgagaagatctacttcaccttccccctggagaaccacaggaagatctacacccacgtgtactgccagagcaccatgctggacaccaacagctggatctttgcctgcatcaacagcacctccatgtgcctgcagggcgtggacctgtcctggaaggccgagctgctgcccaccatcaagtacctgaccctgcggctgcaggactaccccagcctgagccacctggtggtgtatgtgcccagcgtgcggggcagcaagtttgtggtggactgtgagttcttcaagaaggagaagcgctacatccagctgcctgtgacccacctgttctcctttggcctgagcagcaggaaggtggtgctgaacaccaacggcctgtactacaacctggagctgctgaactttggccagatctaccaggccttcaagatcaacgtggtgtccaagtgcagcgctgtgaaggaggagatcaccagcatctaccgcctgcacatcccctggagctatgaggacagcctgaccatcgcccaggcccccagcagcacagagatcagcctgaagctgcacatcgcccagcctgagaacaacacccacgtggccctcttcaagatgtacaccagcagtgactgccgctatgaggtgacagtgaagaccagcttcagccagatcctgggccaggtggtggcctag

SEQ ID NO: 164735 - DNA, 1293 bp, synthetic construct
  misc_feature 1..1293: note = Description of Artificial Sequence: Synthetic coding sequence
  source 1..1293: mol_type = other DNA
atgttcctgcacagcgtgaacctgtggaacctggccttctacgtgttcatggtgttcctggccaccctgggcctgtgggatgtgttcttcggctttgaggagaacaagtgcagcatgagctacatgtttgagtacccagagtaccagagcagcgctgtgcccaagacctgggtgtccacagaccacctgagcatcgtgtggtgcaagcagctgcagctgaccaccgtgcgggccttctttgacctgattgatgctgacaccaagcagatcacccagaacagcaagaagaagctgtctgtgctgtaccaccacttcatccgccaccccagcaagcactttgaagaaaatcctgccatcatcagtgacctgaccggcacctccatgtgggtgctggtgaaggtgtccaagtggacctacgtggcctacaatgaaagtgagaagatctacttcaccttccccctggagaaccacaggaagatctacacccacgtgtactgccagagcaccatgctggacaccaacagctggatctttgcctgcatcaacagcacctccatgtgcctgcagggcgtggacctgtcctggaaggccgagctgctgcccaccatcaagtacctgaccctgcggctgcaggactaccccagcctgagccacctggtggtgtatgtgcccagcgtgcggggcagcaagtttgtggtggactgtgagttcttcaagaaggagaagcgctacatccagctgcctgtgacccacctgttctcctttggcctgagcagcaggaaggtggtgctgaacaccaacggcctgtactacaacctggagctgctgaactttggccagatctaccaggccttcaagatcaacgtggtgtccaagtgcagcgctgtgaaggaggagatcaccagcatctaccgcctgcacatcccctggagctatgaggacagcctgaccatcgcccaggcccccagcagcacagagatcagcctgaagctgcacatcgcccagcctgagaacaacacccacgtggccctcttcaagatgtacaccagcagtgactgccgctatgaggtgacagtgaagaccagcttcagccagatcctgggccaggtggtgcgcttccacggcggggccctgcctgcctacgtggtgagcaacatcctgctggcctaccggggccagctgtacagcctcttcagcacaggctgctgcctggagtatgccaccatgctggacaaggaggccaagccctacaaggtggaccccttcgtcatcatcatcaagttcctgctgtag

SEQ ID NO: 164736 - DNA, 774 bp, synthetic construct
  misc_feature 1..774: note = Description of Artificial Sequence: Synthetic coding sequence
  source 1..774: mol_type = other DNA
atgagccggcccctcatcaccaggagccctgccagccccctgaacaaccagggcatccccaccccagcccagctgaccaagagcaatgcccctgtgcacattgatgtgggcggccacatgtacaccagcagcctggccaccctgaccaagtacccagagagccgcatcggccgcctgtttgatggaacagagcccatcgtgctggacagcctgaagcagcactacttcatcgacagagatggccagatgttccgctacatcctgaacttcctgcggaccagcaagctgctgatcccagatgacttcaaggactacaccctgctgtatgaggaggccaagtacttccagctgcagcccatgctgctggagatggagcgctggaagcaggaccgggagaccggccgcttcagccggccctgtgaatgtctggtggtgcgggtggccccagacctgggggagcgcatcaccctgagcggggacaagagcctcatcgaggaggtgtttcctgagattggagatgtgatgtgcaacagcgtgaatgccggctggaaccacgacagcacccacgtgatccgcttccccctgaatggctactgccacctgaacagcgtgcaggtgctggagcggctgcagcagaggggctttgaaattgtgggcagctgtggcggcggcgtggacagcagccagttctctgaatatgtgctgcggcgggagctgcggaggaccccccgggtgcccagcgtcatccgcatcaagcaggagcccctggactag

SEQ ID NO: 164737 - DNA, 774 bp, synthetic construct; identical to SEQ ID NO: 164736
  misc_feature 1..774: note = Description of Artificial Sequence: Synthetic coding sequence
  source 1..774: mol_type = other DNA

SEQ ID NO: 164738 - DNA, 2598 bp, synthetic construct
  misc_feature 1..2598: note = Description of Artificial Sequence: Synthetic coding sequence
  source 1..2598: mol_type = other DNA
atggccaggatgcctggcagcggggactgcaacaccagcgctgggggcagcgccagcgctgctgctgctgctgctgagaacaacggggagcggggggagggggagcggggggccggcggccggggcagaagacacagccggccccactactgcagcgctggggaggaggaggaggaggaggaggaggaggatgagatccaggaggtgcagatcactggagatgaggaggaggaggaggatggcggcggcggcctggaggaggatgaggaggaggaggaggaggaggagatgggcctggactgggatgagcccctggagcctgaggacagcgctggggaggagctggagcctgagcctgtgcacatgatcaacatggaccagagcgctgccctggagcctgaggccccaccccggctgctggccccccgggcccggggcggccccccaggagatggcagcgagctggaccctgatgtgctgcagaggcctgagcgggcccggctgtctgagaacacccggctggccaccaggtatgctgtgcgcatcttccgggagtacctgtctgagaaggcccagagcccagactttgagaccatggacaagggggccctgtgccgggtgctgcggagcttctatgcagaggcccggagcaagagcggccagctgtacagcaagagcagcctcatcagcatccgcagcagcctgaaccgctacctgaatgagcccccctactgcaggaccctggacctgaccaaggaccctgagctgcggagcgccaacctgaccctggccgctgtgatcaggaagctggaggagcagggcgccggccctgtggtgcagaagcaggccatcaccagggctgacctgaggaagctgtacaccagcagcgtcttcagcaccaacacccccttcggcctgctgaacaaggtgtggtttgagacctgcatgtacttctgcacccggggccgggagaaccagcgggagctggaggaggacagctttggcctggccatggatgaagatggcaggaagtttgtgtacttcaagagcctgggcccctaccacaagagccgcagcagctcctggagcaagaagagagctgagagcagtgatgaggagaacctgcccaggatgtatgaaacaggaacagagttctgcccctatgccagctttgtgaagtacctgagcaagaggaaccccctgtgcaaggccttcttccagaggccccgggaccactgcagtgaaggagatgtgacctggtatgagaacaaggccatcggcaagaacctgctgggcaccaggatgcagatgctgagcaaggccgccaagctgagcaagacctacaccaaccactgcattggagctgtgtccatcgccaccctgaacagcattgctggcatcggcaccaagctgggcagccctgccccccagggctgctacgccgaggccctgaatggagctgcccggcaccacagccaccacccccccacccaccccagccaccaccaccggccccagccccccagcctgggcaacacctacatcctgcccaaggacagccaggtgggcccagatgtgaagtctgaggccgcccccaagagggccctgtatgaatctgtgtttggaagtggagagatctgtggccccaccagccccaagaggctgtgcatccggcccagcgagcctgtggatgctgtggtggtggtgtctgtgaagcatgaccccctgcccctgctgcctgaggccaacggccacaggagcaccaacagccccaccatcgtgtccccagccatcgtgagccccacccaggacagccggcccaacatgagccggcccctcatcaccaggagccctgccagccccctgaacaaccagggcatccccaccccagcccagctgaccaagagcaatgcccctgtgcacattgatgtgggcggccacatgtacaccagcagcctggccaccctgaccaagtacccagagagccgcatcggccgcctgtttgatggaacagagcccatcgtgctggacagcctgaagcagcactacttcatcgacagagatggccagatgttccgctacatcctgaacttcctgcggaccagcaagctgctgatcccagatgacttcaaggactacaccctgctgtatgaggaggccaagtacttccagctgcagcccatgctgctggagatggagcgctggaagcaggaccgggagaccggccgcttcagccggccctgtgaatgtctggtggtgcgggtggccccagacctgggggagcgcatcaccctgagcggggacaagagcctcatcgaggaggtgtttcctgagattggagatgtgatgtgcaacagcgtgaatgccggctggaaccacgacagcacccacgtgatccgcttccccctgaatggctactgccacctgaacagcgtgcaggtgctggagcggctgcagcagaggggctttgaaattgtgggcagctgtggcggcggcgtggacagcagccagttctctgaatatgtgctgcggcgggagctgcggaggaccccccgggtgcccagcgtcatccgcatcaagcaggagcccctggactag

SEQ ID NO: 164739 - DNA, 774 bp, synthetic construct; identical to SEQ ID NO: 164736
  misc_feature 1..774: note = Description of Artificial Sequence: Synthetic coding sequence
  source 1..774: mol_type = other DNA

SEQ ID NO: 164740 - DNA, 1044 bp, synthetic construct
  misc_feature 1..1044: note = Description of Artificial Sequence: Synthetic coding sequence
  source 1..1044: mol_type = other DNA
atgagggtggtggtgattggagctggggtgattggcctgagcacagccctgtgcatccacgagcgctaccacagcgtgctgcagcccctggacatcaaggtgtatgctgaccgcttcacccccctgaccaccacagatgtggccgccggcctgtggcagccctacctgagtgaccccaacaacccccaggaggccgactggagccagcagacctttgactacctgctgagccacgtgcacagccccaatgctgagaacctgggcctcttcctgatcagcggctacaacctcttccacgaggccatcccagaccccagctggaaggacacagtgctgggcttcaggaagctgaccccccgggagctggacatgtttcctgactatggctacggctggttccacaccagcctcatcctggagggcaagaactacctgcagtggctgacagagcggctgacagagcggggcgtgaagttcttccagaggaaggtggagagctttgaggaggtggcccgggagggcgcagatgtgattgtgaactgcaccggggtgtgggccggggccctgcagagggaccccctgctgcagcccggccggggccagatcatgaaggtggatgccccctggatgaagcacttcatcctgacccatgaccctgagcggggcatctacaacagcccctacatcatccctggcacccagacagtgaccctgggcggcatcttccagctgggcaactggagcgagctgaacaacatccaggaccacaacaccatctgggagggctgctgccgcctggagcccaccctgaagaatgcccgcatcatcggggagaggacaggcttccggcctgtgcggccccagatccggctggagcgggagcagctgaggacaggccccagcaacacagaggtgatccacaactacggccatggaggctacggcctgaccatccactggggctgtgccctggaggccgccaagctgtttggccgcatcctggaggagaagaagctgagcaggatgccacccagccacctgtag

SEQ ID NO: 164741 - DNA, 399 bp, synthetic construct
  misc_feature 1..399: note = Description of Artificial Sequence: Synthetic coding sequence
  source 1..399: mol_type = other DNA
atgctgaagaacatcgagctgtttgacaagctgagcctgcgcttcaacggccgggtgctcttcatcaaggatgtgattggagatgagatctgctgctggagcttctacggccagggcaggaagattgctgaggtgtgctgcaccagcatcgtgtatgccacagagaagaagcagaccaaggtggagttccctgaggcccgcatctatgaggagaccctgaacatcctgctgtatgaggcccaggacggccggggccctgacaatgccctgctggaggccaccggcggggccgccggccgcagccaccacctggatgaagatgaggagcgggagagaattgagcgggtgcggcgcatccacatcaagaggccagatgaccgggcccacctgcaccagtag

SEQ ID NO: 164742 - DNA, 840 bp, synthetic construct
  misc_feature 1..840: note = Description of Artificial Sequence: Synthetic coding sequence
  source 1..840: mol_type = other DNA
tgaagatactgccgcagccccttctggagcggctacggcaacttctacagcctgcagaagagcggcttcctgcccaccctgggcaccgtgcagcccttcaactactgcaagagcggctggatcctgattgacagatgtgggaagcacttcggcaccatcctgaactacctgagagatggagctgtgcccctgcctgagagccggcgggagattgaggagctgctggccgaggccaagtactacctggtgcagggcctggtggaggagtgccaggccgccctgcagaacaaggacacctatgagcccttctgcaaggtgcctgtgatcaccagcagcaaggaggagcagaagctgattgccaccagcaacaagccagctgtgaagctgctgtacaacagaagcaacaacaagtacagctacaccagcaacagtgatgacaacatgctgaagaacatcgagctgtttgacaagctgagcctgcgcttcaacggccgggtgctcttcatcaaggatgtgattggagatgagatctgctgctggagcttctacggccagggcaggaagattgctgaggtgtgctgcaccagcatcgtgtatgccacagagaagaagcagaccaaggtggagttccctgaggcccgcatctatgaggagaccctgaacatcctgctgtatgaggcccaggacggccggggccctgacaatgccctgctggaggccactggaggagctgctggccgcagccaccacctggatgaagatgaggagcgggagcgcatcgagcgggtgcggcgcatccacatcaagaggccagatgaccgggcccacctgcaccagtag

SEQ ID NO: 164743 - DNA, 864 bp, synthetic construct
  misc_feature 1..864: note = Description of Artificial Sequence: Synthetic coding sequence
  source 1..864: mol_type = other DNA
atgtctggagagagcgtggtgtcctctgctgtgcctgctgctgccaccaggaccaccagcttcaagggcaccagccccagcagcaaatatgtgaagctgaatgtgggcggggccctgtactacaccaccatgcagaccctgaccaagcaggacaccatgctgaaggccatgttttctggccgcatggaggtgctgacagacagcgagggctggatcctgattgacagatgtgggaagcacttcggcaccatcctgaactacctgagagatggagctgtgcccctgcctgagagcagaagagaaattgaggagctgctggccgaggccaagtactacctggtgcagggcctggtggaggagtgccaggccgccctgcagaacaaggacacctatgagcccttctgcaaggtgcctgtgatcaccagcagcaaggaggagcagaagctgattgccaccagcaacaagccagctgtgaagctgctgtacaacagaagcaacaacaagtacagctacaccagggtgctcttcatcaaggatgtgattggagatgagatctgctgctggagcttctacggccagggcaggaagattgctgaggtgtgctgcaccagcatcgtgtatgccacagagaagaagcagaccaaggtggagttccctgaggcccgcatctatgaggagaccctgaacatcctgctgtatgaggcccaggacggccggggccctgacaatgccctgctggaggccactggaggagctgctggccgcagccaccacctggatgaagatgaggagcgggagcgcatcgagcgggtgcggcgcatccacatcaagaggccagatgaccgggcccacctgcaccagtag

SEQ ID NO: 164744 - DNA, 468 bp, synthetic construct
  misc_feature 1..468: note = Description of Artificial Sequence: Synthetic coding sequence
  source 1..468: mol_type = other DNA
atgatggctgtgttcaccagcctgtggagcccctaccagatgctgttctgcagcaacagtgatgacaacatgctgaagaacatcgagctgtttgacaagctgagcctgcgcttcaacggccgggtgctcttcatcaaggatgtgattggagatgagatctgctgctggagcttctacggccagggcaggaagattgctgaggtgtgctgcaccagcatcgtgtatgccacagagaagaagcagaccaaggtggagttccctgaggcccgcatctatgaggagaccctgaacatcctgctgtatgaggcccaggacggccggggccctgacaatgccctgctggaggccactggaggagctgctggccgcagccaccacctggatgaagatgaggagcgggagcgcatcgagcgggtgcggcgcatccacatcaagaggccagatgaccgggcccacctgcaccagtag

SEQ ID NO: 164745 - DNA, 990 bp, synthetic construct
  misc_feature 1..990: note = Description of Artificial Sequence: Synthetic coding sequence
  source 1..990: mol_type = other DNA
atgtctgctgaggccagcggccctgctgctgctgctgcccccagcctggaggcccccaagcccagcggcctggagcccggccctgctgcctacggcctgaagcccctgacccccaacagcaaatatgtgaagctgaatgtgggcggcagcctgcactacaccaccctgcggaccctgaccggccaggacaccatgctgaaggccatgttttctggccgggtggaggtgctgacagatgctgggggctgggtgctgattgacagaagtggccgccacttcggcaccatcctgaactacctgagagatggctctgtgcccctgcctgagagcacccgggagctgggggagctgctgggggaggcccgctactacctggtgcagggcctgattgaggactgccagctggccctgcagcagaagcgggagaccctgagccccctgtgcctgatccccatggtgaccagcccccgggaggagcagcagctgctggccagcaccagcaagcctgtggtgaagctgctgcacaacagaagcaacaacaagtacagctacaccagcaccagtgatgacaacctgctgaagaacatcgagctgtttgacaagctggccctgcgcttccacggccgcctgctcttcctgaaggatgtgctgggagatgagatctgctgctggagcttctacggccagggcaggaagattgctgaggtgtgctgcaccagcatcgtgtatgccacagagaagaagcagaccaaggtggagttccctgaggcccgcatctttgaggagaccctgaacatcctgatctatgagaccccccggggccctgaccctgccctgctggaggccactggaggagctgctggagctggaggagctggccgcggggaggatgaagaaaatcgggagcaccgggtgcggcgcatccacgtgagaagacacatcacccatgatgagcggccccacggccagcagatcgtgttcaaggactag

SEQ ID NO: 164746 - DNA, 990 bp, synthetic construct; identical to SEQ ID NO: 164745
  misc_feature 1..990: note = Description of Artificial Sequence: Synthetic coding sequence
  source 1..990: mol_type = other DNA

SEQ ID NO: 164747 - DNA, 1287 bp, synthetic construct
  misc_feature 1..1287: note = Description of Artificial Sequence: Synthetic coding sequence
  source 1..1287: mol_type = other DNA
atggccctgagcggcaactgcagccgctactacccccgggagcagggcagcgctgtgcccaacagcttccctgaggtggtggagctgaatgtgggcggccaggtgtacttcaccaggcacagcaccctcatcagcatcccccacagcctgctgtggaagatgttcagccccaagagggacacagccaatgacctggccaaggacagcaagggccgcttcttcatcgacagagatggcttcctgttccgctacatcctggactacctgcgggaccggcaggtggtgctgcctgaccacttccctgagaagggccgcctgaagcgggaggccgagtacttccagctgcctgacctggtgaagctgctgaccccagatgagatcaagcagagcccagatgagttctgccacagcgactttgaagatgccagccagggcagtgacacccgcatctgcccccccagcagcctgctgcctgctgacaggaagtggggcttcatcaccgtgggctaccggggcagctgcaccctgggccgggagggccaggctgatgccaagttcagaagagtgccccgcatcctggtgtgtggccgcatcagcctggccaaggaggtgtttggagagaccctgaatgaaagccgggaccctgaccgggcccctgagcgctacaccagccgcttctacctgaagttcaagcacctggagcgggcctttgacatgctgtctgaatgtggcttccacatggtggcctgcaacagctctgtgacagccagcttcatcaaccagtacacagatgacaagatctggagcagctacacagaatatgtgttctaccgggagcccagccgctggagccccagccactgtgactgctgctgcaagaatggcaagggggacaaggagggggagagcggcaccagctgcaatgacctgagcaccagcagctgtgacagccagagcgaggccagcagcccccaggagaccgtcatctgtggccctgtgacccggcagaccaacatccagaccctggaccggcccatcaagaagggccctgtgcagctgatccagcagagcgagatgaggaggaagagtgacctgctgcggaccctgaccagcggcagccgggagagcaacatgagcagcaagaagaaggctgtgaaggagaagctgagcattgaggaggagctggagaagtgcatccaggacttcctgaagatcaagatcccagaccgcttccctgagaggaagcacccctggcagagcgagctgctgaggaagtaccacctgtag

SEQ ID NO: 164748 - DNA, 1287 bp, synthetic construct; identical to SEQ ID NO: 164747
  misc_feature 1..1287: note = Description of Artificial Sequence: Synthetic coding sequence
  source 1..1287: mol_type = other DNA

SEQ ID NO: 164749 - DNA, 792 bp, synthetic construct
  misc_feature 1..792: note = Description of Artificial Sequence: Synthetic coding sequence
  source 1..792: mol_type = other DNA
atggccgagctgcagctggaccctgccatggccggcctgggcggcggcggcggcagcggcgtgggagatggcggcggccctgtgcggggcccccccagccccaggcctgctggccccaccccccggggccacggccggcctgctgctgctgtggcccagcccctggagcccggccctggccccccagagagagctgggggcggcggggccgcccgctgggtgcggctgaatgtgggcggcacctactttgtgaccacccggcagaccctgggccgggagcccaagagcttcctgtgccgcctgtgctgccaggaggaccctgagctggacagcgacaaggatgagaccggggcctacctgattgaccgggaccccacctacttcggccccatcctgaactacctgcggcacggcaagctgatcatcaccaaggagctggccgaggagggcgtgctggaggaggccgagttctacaacatcgccagcctggtgcggctggtgaaggagcgcatccgggacaatgaaaatagaaccagccagggccctgtgaagcacgtgtacagagtgctgcagtgccaggaggaggagctgacccagatggtgtccaccatgtctgatggctggaagtttgagcagctgatcagcatcggcagcagctacaactatggaaatgaagaccaggccgagttcctgtgtgtggtgtcccgggagctgaacaacagcaccaatggaattgtgattgagcccagcgagaaggccaagatcctgcaggagcggggcagcaggatgtag

SEQ ID NO: 164750 - DNA, 738 bp, synthetic construct
  misc_feature 1..738: note = Description of Artificial Sequence: Synthetic coding sequence
  source 1..738: mol_type = other DNA
agcctgcccagaaatggacctgcccggctgcgggccggcagcagcggcggcggcggcggcccccgctggaggaactgctcctggacccggcgctggaggggctgggagggcgcccctggccctggccccccagagagagctgggggcggcggggccgcccgctgggtgcggctgaatgtgggcggcacctactttgtgaccacccggcagaccctgggccgggagcccaagagcttcctgtgccgcctgtgctgccaggaggaccctgagctggacagcgacaaggatgagaccggggcctacctgattgaccgggaccccacctacttcggccccatcctgaactacctgcggcacggcaagctgatcatcaccaaggagctggccgaggagggcgtgctggaggaggccgagttctacaacatcgccagcctggtgcggctggtgaaggagcgcatccgggacaatgaaaatagaaccagccagggccctgtgaagcacgtgtacagagtgctgcagtgccaggaggaggagctgacccagatggtgtccaccatgtctgatggctggaagtttgagcagctgatcagcatcggcagcagctacaactatggaaatgaagaccaggccgagttcctgtgtgtggtgtcccgggagctgaacaacagcaccaatggaattgtgattgagcccagcgagaaggccaagatcctgcaggagcggggcagcaggatgtag

SEQ ID NO: 164751 - DNA, 2448 bp, synthetic construct
  misc_feature 1..2448: note = Description of Artificial Sequence: Synthetic coding sequence
  source 1..2448: mol_type = other DNA
atggccggcggccactgcggcagcttccctgctgctgctgctggcagcggggagatcgtgcagctgaatgtgggcggcacccgcttcagcaccagccggcagaccctgatgtggatcccagacagcttcttcagcagcctgctgagcggccgcatcagcaccctgagagatgaaacaggagccatcttcatcgaccgggaccctgctgcctttgcccccatcctgaacttcctgcggaccaaggagctggacctgcggggcgtgtccatcaacgtgctgcggcatgaagctgagttctacggcatcacccccctggtgcggcggctgctgctgtgtgaggagctggagaggagcagctgtggctctgtgctcttccacggctacctgcccccacctggcatccccagcaggaagatcaacaacacagtgcgctctgctgacagcagaaatggcctgaacagcacagaaggagaggcccggggaaatggcacccagcctgtgctgtctggaactggagaggagaccgtgcggctgggcttccctgtggaccccaggaaggtgctgattgtggccggccaccacaactggatcgtggccgcctatgcccactttgctgtgtgctaccgcatcaaggagagcagcggctggcagcaggtgttcaccagcccctacctggactggaccatcgagcgggtggccctgaatgccaaggtggtgggcggcccccatggagacaaggacaagatggtggccgtggccagcgagagcagcatcatcctgtggagcgtgcaggacggcggcagcggcagcgagattggagtcttcagcctgggcgtgcctgtggatgccctcttcttcatcggcaaccagctggtggccaccagccacacaggcaaggtgggcgtgtggaatgctgtgacccagcactggcaggtgcaggatgtggtgcccatcaccagctatgacacagctggcagcttcctgctgctgggctgcaacaacggcagcatctactacatcgacatgcagaagttccccctgaggatgaaggacaatgacctgctggtgacagagctgtaccatgaccccagcaatgatgccatcacagccctgtctgtgtacctgacccccaagacctctgtgtctggcaactggattgagatcgcctacggcaccagcagcggggctgtgcgggtcatcgtgcagcaccctgagaccgtgggcagcggcccccagctgttccagaccttcaccgtgcacaggagccctgtgaccaagatcatgctgtctgagaagcacctggtgtctgtgtgtgccgacaacaaccacgtgaggacctggacagtgacccgcttccggggcatgatcagcacccagcccggcagcacccccctggccagcttcaagatcctgagcctggaggagacagagagccacggcagctacagcagtggaaatgacatcggcccctttggagagagagatgaccagcaggtgttcatccagaaggtggtgcccatcaccaacaagctgtttgtgcggctgagcagcacaggcaagaggatctgtgagatccaggccgtggactgcaccaccatcagcagcttcaccgtgcgggagtgtgagggcagcagcaggatgggcagccggccccggcgctacctgttcaccggccacaccaacggcagcatccagatgtgggacctgaccacagccatggacatggtgaacaagtctgaggacaaggatgtgggcggccccacagaggaggagctgctgaagctgctggaccagtgtgacctgagcaccagccgctgtgccacccccaacatcagccctgccacctctgtggtgcagcacagccacctgcgggagagcaacagcagcctgcagctgcagcaccacgacaccacccatgaagctgccacctacggctccatgaggccctaccgggagagccccctgctggcccgggcccggaggacagagagcttccacagctacagagacttccagaccatcaacctgaacagaaatgtggagagagctgtgcctgaaaatggaaacctgggccccatccaggccgaggtgaagggggccactggagagtgcaacatcagcgagaggaagagccctggggtggagatcaagagcctgcgggagctggacagcggcctggaggtgcacaagattgctgagggcttcagcgagagcaagaagaggagcagtgaagatgaaaatgaaaacaagattgagttcaggaagaagggcggctttgaaggaggcggcttcctgggcaggaagaaggtgccctacctggccagcagccccagcaccagtgatggcggcacagacagccctggaacagccagccccagccccaccaagaccacccccagccccaggcacaagaagagtgacagcagcggccaggagtacagcctgtag

SEQ ID NO: 164752 - DNA, 723 bp, synthetic construct
  misc_feature 1..723: note = Description of Artificial Sequence: Synthetic coding sequence
  source 1..723: mol_type = other DNA
atggccggcggccactgcggcagcttccctgctgctgctgctggcagcggggagatcgtgcagctgaatgtgggcggcacccgcttcagcaccagccggcagaccctgatgtggatcccagacagcttcttcagcagcctgctgagcggccgcatcagcaccctgagagatgaaacaggagccatcttcatcgaccgggaccctgctgcctttgcccccatcctgaacttcctgcggaccaaggagctggacctgcggggcgtgtccatcaacgtgctgcggcatgaagctgagttctacggcatcacccccctggtgcggcggctgctgctgtgtgaggagctggagaggagcagctgtggctctgtgctcttccacggctacctgcccccacctggcatccccagcaggaagatcaacaacacagtgcgctctgctgacagcagaaatggcctgaacagcacagaaggagaggcccggggaaatggcacccagcctgtgctgtctggaactggagaggagaccgtgcggctgggcttccctgtggaccccaggaaggtgctgattgtggccggccaccacaactggatcgtggccgcctatgcccactttgctgtgtgctacagagtcttctggctgggcaccgtgggccacgcctgcaaccccagcaccctgggcggcagagatggctggagcagccgcagcgcccggcccacctggtag

SEQ ID NO: 164753 - DNA, 567 bp, synthetic construct
  misc_feature 1..567: note = Description of Artificial Sequence: Synthetic coding sequence
  source 1..567: mol_type = other DNA
atgaaggacaatgacctgctggtgacagagctgtaccatgaccccagcaatgatgccatcacagccctgtctgtgtacctgacccccaagacctctgtgtctggcaactggattgagatcgcctacggcaccagcagcggggctgtgcgggtcatcgtgcagcaccctgagaccgtgggcagcggcccccagctgttccagaccttcaccgtgcacaggagccctgtgaccaagatcatgctgtctgagaagcacctggtgtctgtgtgtgccgacaacaaccacgtgaggacctggacagtgacccgcttccggggcatgatcagcacccagcccggcagcacccccctggccagcttcaagatcctgagcctggaggagacagagagccacggcagctacagcagtggaaatgacatcggcccctttggagagagagatgaccagcaggtgttcatccagaaggtggtgcccatcaccaacaagctgtttgtgcggctgagcagcacaggcaagagcctgtgtggggtgtccctggtgagccgcagcagccaggagcccacctag

SEQ ID NO: 164754 - DNA, 642 bp, synthetic construct
  misc_feature 1..642: note = Description of Artificial Sequence: Synthetic coding sequence
  source 1..642: mol_type = other DNA
tgattcagcaccagccggcagaccctgatgtggatcccagacagcttcttcagcagcctgctgagcggccgcatcagcaccctgagagatgagaccggggccatcttcatcgaccgggaccctgctgcctttgcccccatcctgaacttcctgcggaccaaggagctggacctgcggggcgtgtccatcaacgtgctgcggcatgaggccgagttctacggcatcacccccctggtgcggcggctgctgctgtgtgaggagctggagaggagcagctgtggctctgtgctcttccacggctacctgcccccacctggcatccccagcaggaagatcaacaacacagtgcgctctgctgacagcagaaatggcctgaacagcacagaaggagaggcccggggaaatggcacccagcctgtgctgagcggcaccggggaggagaccgtgcggctgggcttccctgtggaccccaggaaggtgctgattgtggccggccaccacaactggatcgtggccgcctatgcccactttgctgtgtgctacagagtcttctggctgggcaccgtgggccacgcctgcaaccccagcaccctgggcggcagagatggctggagcagccgcagcgcccggcccacctggtag

SEQ ID NO: 164755 - DNA, 507 bp, synthetic construct
  misc_feature 1..507: note = Description of Artificial Sequence: Synthetic coding sequence
  source 1..507: mol_type = other DNA
tgagccctgtctgtgtacctgacccccaagacctctgtgtctggcaactggattgagatcgcctacggcaccagcagcggggctgtgcgggtcatcgtgcagcaccctgagaccgtgggcagcggcccccagctgttccagaccttcaccgtgcacaggagccctgtgaccaagatcatgctgtctgagaagcacctggtgtctgtgtgtgccgacaacaaccacgtgaggacctggacagtgacccgcttccggggcatgatcagcacccagcccggcagcacccccctggccagcttcaagatcctgagcctggaggagacagagagccacggcagctacagcagtggaaatgacatcggcccctttggagagagagatgaccagcaggtgttcatccagaaggtggtgcccatcaccaacaagctgtttgtgcggctgagcagcacaggcaagagcctgtgtggggtgtccctggtgagccgcagcagccaggagcccacctag

SEQ ID NO: 164756 - DNA, 870 bp, synthetic construct
  misc_feature 1..870: note = Description of Artificial Sequence: Synthetic coding sequence
  source 1..870: mol_type = other DNA
atggtggtggtgacaggccgggagccagacagccggcggcaggatggagccatgagcagcagtgatgctgaagatgacttcctggagcccgccacccccacagccacccaggccggccacgccctgcccctgctgccccaggagttccctgaggtggtgcccctgaacattggaggagcccacttcaccacccggctgagcaccctgcgctgctatgaggacaccatgctggccgccatgttcagcggccgccactacatccccacagattctgagggccgctacttcatcgacagagatggcacccactttggagatgtgctgaacttcctgcggagcggggacctgcccccccgggagcgggtgcgggctgtgtacaaggaggcccagtactatgccatcggccccctgctggagcagctggagaacatgcagcccctgaagggggagaaggtgcggcaggccttcctgggcctgatgccctactacaaggaccacctggagcgcatcgtggagatcgcccggctgcgggctgtgcagaggaaggccaggtttgccaagctgaaggtgtgtgtgttcaaggaggagatgcccatcaccccctatgaatgtcccctgctgaacagcctgcgctttgagaggtctgagagtgatggccagctgtttgagcaccactgtgaggtggatgtgtcctttggcccctgggaggccgtggctgatgtgtatgacctgctgcactgcctggtgacagacctgagcgcccagggcctgactgtggaccaccagtgcatcggcgtgtgtgacaagcacctggtgaaccactactactgcaagaggcccatctatgagttcaagatcacctggtggtag

SEQ ID NO: 164757 - DNA, 1728 bp, synthetic construct
  misc_feature 1..1728: note = Description of Artificial Sequence: Synthetic coding sequence
  source 1..1728: mol_type = other DNA
gtgtccaggaagaagatgagcctgaagtctgagcggcggggcatccacgtggaccagagcgacctgctgtgcaagaagggctgcggctactacggcaacccagcctggcagggcttctgcagcaagtgctggagggaggagtaccacaaggcccggcagaagcagatccaggaggactgggagctggccgagcgggtgctgctgtgctacccaggctggagcgccatggtgcagttccagctgacagccaccagcgcctcctgggcccaggtgatcctgctgctgcagcccccaaatgtgctgggcctgcaggccctgcagcgggaggaggaggaggcctttgccagcagccagagcagccagggcgcccagagcctgaccttcagcaagtttgaggagaagaagaccaatgagaagaccaggaaggtgaccaccgtgaagaagttcttcagcgccagcagccgggtgggcagcaagaaggagatccaggaggccaaggcccccagccccagcatcaaccggcagaccagcattgaaacagacagagtgtccaaggagttcatcgagttcctgaagaccttccacaagacaggccaggagatctacaagcagaccaagctgttcctggagggcatgcactacaagagggacctgagcattgaggagcagagtgaatgtgcccaggacttctaccacaacgtggccgagaggatgcagacccggggcaaggagcggcgcttccaccacgtgggccaggccggcctggagctgctgaccagcggggaccccccagccagcgccagccagagcgctggcaacacaggagtggagcccccccaccctgctgtgcccccagagcgggtggagaagatcatggaccagatcgagaagtacatcatgacccggctgtacaagtatgtgttctgcccagagaccacagatgatgagaagaaggacctggccatccagaagaggatccgggccctgcgctgggtgaccccccagatgctgtgtgtgcctgtgaatgaagacatccctgaggtgtctgacatggtggtgaaggccatcacagacatcatcgagatggacagcaagagggtgccccgggacaagctggcctgcatcaccaagtgcagcaagcacatcttcaatgccatcaagatcaccaagaatgaaccagccagcgcagatgacttcctgcccaccctcatctacatcgtgctgaagggcaaccccccccggctgcagagcaacatccagtacatcacccgcttctgcaaccccagccggctgatgactggagaagatggctactacttcaccaacctgtgctgtgctgtggccttcatcgagaagctggatgcccagagcctgaacctgagccaggaggactttgaccgctacatgagcggccagaccagccccaggaagcaggaggccgagagctggagcccagatgcctgcctgggcgtgaagcagatgtacaagaacctggacctgctgagccagctgaatgaaaggcaggagcgcatcatgaatgaggccaagaagctggagaaggacctgattgactggacagatggcatcgcccgggaggtgcaggacatcgtggagaagtaccccctggagatcaagccacccaaccagcccctggccgccatcgacagtgaaaatgtggagaatgacaagctgcccccacccctgcagccccaggtgtatgccggctag

SEQ ID NO: 164758 - DNA, 1596 bp, synthetic construct
  misc_feature 1..1596: note = Description of Artificial Sequence: Synthetic coding sequence
  source 1..1596: mol_type = other DNA
atgagcctgaagtcagaaagaagaggcatccacgtggaccagagcgacctgctgtgcaagaagggctgcggctactacggcaacccagcctggcagggcttctgcagcaagtgctggagggaggagtaccacaaggcccggcagaagcagatccaggaggactgggagctggccgagcgggtgctgctgtgctacccaggctggagcgccatggtgcagttccagctgacagccaccagcgcctcctgggcccaggtgatcctgctgctgcagccccccaacgtgctgggcctgcaggccctgcagcgggaggaggaggaggcctttgccagcagccagagcagccagggcgcccagagcctgaccttcagcaagtttgaggagaagaagaccaatgagaagaccaggaaggtgaccaccgtgaagaagttcttcagcgccagcagccgggtgggcagcaagaaggagatccaggaggccaaggcccccagccccagcatcaaccggcagaccagcattgaaacagacagagtgtccaaggagttcatcgagttcctgaagaccttccacaagacaggccaggagatctacaagcagaccaagctgttcctggagggcatgcactacaagagggacctgagcattgaggagcagagtgaatgtgcccaggacttctaccacaacgtggccgagaggatgcagacccggggcaaggtgcccccagagcgggtggagaagatcatggaccagatcgagaagtacatcatgacccggctgtacaagtatgtgttctgcccagagaccacagatgatgagaagaaggacctggccatccagaagaggatccgggccctgcgctgggtgaccccccagatgctgtgtgtgcctgtgaatgaagacatccctgaggtgtctgacatggtggtgaaggccatcacagacatcatcgagatggacagcaagagggtgccccgggacaagctggcctgcatcaccaagtgcagcaagcacatcttcaatgccatcaagatcaccaagaatgaaccagccagcgcagatgacttcctgcccaccctcatctacatcgtgctgaagggcaaccccccccggctgcagagcaacatccagtacatcacccgcttctgcaaccccagccggctgatgactggagaagatggctactacttcaccaacctgtgctgtgctgtggccttcatcgagaagctggatgcccagagcctgaacctgagccaggaggactttgaccgctacatgagcggccagaccagccccaggaagcaggaggccgagagctggagcccagatgcctgcctgggcgtgaagcagatgtacaagaacctggacctgctgagccagctgaatgaaaggcaggagcgcatcatgaatgaggccaagaagctggagaaggacctgattgactggacagatggcatcgcccgggaggtgcaggacatcgtggagaagtaccccctggagatcaagccacccaaccagcccctggccgccatcgacagtgaaaatgtggagaatgacaagctgcccccacccctgcagccccaggtgtatgccggctag

SEQ ID NO: 164759 - DNA, 1476 bp, synthetic construct
  misc_feature 1..1476: note = Description of Artificial Sequence: Synthetic coding sequence
  source 1..1476: mol_type = other DNA
atgagcctgaagtcagaaagaagaggcatccacgtggaccagagcgacctgctgtgcaagaagggctgcggctactacggcaacccagcctggcagggcttctgcagcaagtgctggagggaggagtaccacaaggcccggcagaagcagatccaggaggactgggagctggccgagcggctgcagcgggaggaggaggaggcctttgccagcagccagagcagccagggcgcccagagcctgaccttcagcaagtttgaggagaagaagaccaatgagaagaccaggaaggtgaccaccgtgaagaagttcttcagcgccagcagccgggtgggcagcaagaaggagatccaggaggccaaggcccccagccccagcatcaaccggcagaccagcattgaaacagacagagtgtccaaggagttcatcgagttcctgaagaccttccacaagacaggccaggagatctacaagcagaccaagctgttcctggagggcatgcactacaagagggacctgagcattgaggagcagagtgaatgtgcccaggacttctaccacaacgtggccgagaggatgcagacccggggcaaggtgcccccagagcgggtggagaagatcatggaccagatcgagaagtacatcatgacccggctgtacaagtatgtgttctgcccagagaccacagatgatgagaagaaggacctggccatccagaagaggatccgggccctgcgctgggtgaccccccagatgctgtgtgtgcctgtgaatgaagacatccctgaggtgtctgacatggtggtgaaggccatcacagacatcatcgagatggacagcaagagggtgccccgggacaagctggcctgcatcaccaagtgcagcaagcacatcttcaatgccatcaagatcaccaagaatgaaccagccagcgcagatgacttcctgcccaccctcatctacatcgtgctgaagggcaaccccccccggctgcagagcaacatccagtacatcacccgcttctgcaaccccagccggctgatgactggagaagatggctactacttcaccaacctgtgctgtgctgtggccttcatcgagaagctggatgcccagagcctgaacctgagccaggaggactttgaccgctacatgagcggccagaccagccccaggaagcaggaggccgagagctggagcccagatgcctgcctgggcgtgaagcagatgtacaagaacctggacctgctgagccagctgaatgaaaggcaggagcgcatcatgaatgaggccaagaagctggagaaggacctgattgactggacagatggcatcgcccgggaggtgcaggacatcgtggagaagtaccccctggagatcaagccacccaaccagcccctggccgccatcgacagtgaaaatgtggagaatgacaagctgcccccacccctgcagccccaggtgtatgccggctag

SEQ ID NO: 164760 - DNA, 1476 bp, synthetic construct; identical to SEQ ID NO: 164759
  misc_feature 1..1476: note = Description of Artificial Sequence: Synthetic coding sequence
  source 1..1476: mol_type = other DNA

SEQ ID NO: 164761 - DNA, 1224 bp, synthetic construct
  misc_feature 1..1224: note = Description of Artificial Sequence: Synthetic coding sequence
  source 1..1224: mol_type = other DNA
atgagcctgaagtcagaaagaagaggcatccacgtggaccagagcgacctgctgtgcaagaagggctgcggctactacggcaacccagcctggcagggcttctgcagcaagtgctggagggaggagtaccacaaggcccggcagaagcagatccaggaggactgggagctggccgagcggctgcagcgggaggaggaggaggcctttgccagcagccagagcagccagggcgcccagagcctgaccttcagcaagtttgaggagaagaagaccaatgagaagaccaggaaggtgaccaccgtgaagaagttcttcagcgccagcagccgggtgggcagcaagaagcccccagagcgggtggagaagatcatggaccagatcgagaagtacatcatgacccggctgtacaagtatgtgttctgcccagagaccacagatgatgagaagaaggacctggccatccagaagaggatccgggccctgcgctgggtgaccccccagatgctgtgtgtgcctgtgaatgaagacatccctgaggtgtctgacatggtggtgaaggccatcacagacatcatcgagatggacagcaagagggtgccccgggacaagctggcctgcatcaccaagtgcagcaagcacatcttcaatgccatcaagatcaccaagaatgaaccagccagcgcagatgacttcctgcccaccctcatctacatcgtgctgaagggcaaccccccccggctgcagagcaacatccagtacatcacccgcttctgcaaccccagccggctgatgactggagaagatggctactacttcaccaacctgtgctgtgctgtggccttcatcgagaagctggatgcccagagcctgaacctgagccaggaggactttgaccgctacatgagcggccagaccagccccaggaagcaggaggccgagagctggagcccagatgcctgcctgggcgtgaagcagatgtacaagaacctggacctgctgagccagctgaatgaaaggcaggagcgcatcatgaatgaggccaagaagctggagaaggacctgattgactggacagatggcatcgcccgggaggtgcaggacatcgtggagaagtaccccctggagatcaagccacccaaccagcccctggccgccatcgacagtgaaaatgtggagaatgacaagctgcccccacccctgcagccccaggtgtatgccggctag

SEQ ID NO: 164762 - DNA, 867 bp, synthetic construct
  misc_feature 1..867: note = Description of Artificial Sequence: Synthetic coding sequence
  source 1..867: mol_type = other DNA
atggtggtggtgacaggccgggagccagacagccggcggcaggatggagccatgagcagcagtgatgctgaagatgacttcctggagcccgccacccccacagccacccaggccggccacgccctgcccctgctgccccaggagttccctgaggtggtgcccctgaacattggaggagcccacttcaccacccggctgagcaccctgcgctgctatgaggacaccatgctggccgccatgttcagcggccgccactacatccccacagattctgagggccgctacttcatcgacagagatggcacccactttggagatgtgctgaacttcctgcggagcggggacctgcccccccgggagcgggtgcgggctgtgtacaaggaggcccagtactatgccatcggccccctgctggagcagctggagaacatgcagcccctgaagggggagaaggtgcggcaggccttcctgggcctgatgccctactacaaggaccacctggagcgcatcgtggagatcgcccggctgcgggctgtgcagaggaaggccaggtttgccaagctgaaggtgtgtgtgttcaaggaggagatgcccatcaccccctatgaatgtcccctgctgaacagcctgcgctttgagaggtctgagagtgatggccagctgtttgagcaccactgtgaggtggatgtgtcctttggcccctgggaggccgtggctgatgtgtatgacctgctgcactgcctggtgacagacctgagcgcccagggcctgactgtggaccaccagtgcatcggcgtgtgtgacaagcacctggtgaaccactactactgcaagaggcccatctatgagttcaagatcacctggtag

SEQ ID NO: 164763 - DNA, 663 bp, synthetic construct
  misc_feature 1..663: note = Description of Artificial Sequence: Synthetic coding sequence
  source 1..663: mol_type = other DNA
atgaagggctacggccacacagtgcccctgagtgatggcggcaaggccttctgcatcatctacagcgtcatcggcatccccttcaccctgctcttcctgacagctgtggtgcagaggatcaccgtgcacgtgacccggcggcctgtgctgtacttccacatccgctggggcttcagcaagcaggtggtggccatcgtgcatgctgtgctgctgggctttgtgacagtgtcctgcttcttcttcatcccagctgctgtgttttctgtgctggaggatgactggaacttcctggagagcttctacttctgcttcatcagcctgagcaccatcggcctgggggactatgtgcctggagagggctacaaccagaagttccgggagctgtacaagattggcatcacctgctacctgctgctgggcctcatcgccatgctggtggtgctggagaccttctgtgagctgcacgagctgaagaagttcaggaagatgttttatgtgaagaaggacaaggatgaggaccaggtgcacatcatcgagcatgaccagctgtccttcagcagcatcacagaccaggccgccggcatgaaggaggaccagaagcagaatgagccctttgtggccacccagagcagcgcctgtgtggatggccctgccaaccactag

SEQ ID NO: 164764 - DNA, 1011 bp, synthetic construct
  misc_feature 1..1011: note = Description of Artificial Sequence: Synthetic coding sequence
  source 1..1011: mol_type = other DNA
atgctgcagagcctggccggcagcagctgtgtgcggctggtggagcggcacaggtctgcctggtgcttcggcttcctggtgctgggctacctgctgtacctggtgtttggagctgtggtgttcagctctgtggagctgccctatgaggacctgctgcggcaggagctgaggaagctgaagaggcgcttcctggaggagcacgagtgcctgtctgagcagcagctggagcagttcctgggccgggtgctggaggccagcaactacggcgtgtctgtgctgagcaatgccagcggcaactggaactgggacttcaccagcgccctcttctttgccagcacagtgctgagcaccaccggctacggccacacagtgcccctgagtgatggcggcaaggccttctgcatcatctacagcgtcatcggcatccccttcaccctgctcttcctgacagctgtggtgcagaggatcaccgtgcacgtgacccggcggcctgtgctgtacttccacatccgctggggcttcagcaagcaggtggtggccatcgtgcatgctgtgctgctgggctttgtgacagtgtcctgcttcttcttcatcccagctgctgtgttttctgtgctggaggatgactggaacttcctggagagcttctacttctgcttcatcagcctgagcaccatcggcctgggggactatgtgcctggagagggctacaaccagaagttccgggagctgtacaagattggcatcacctgctacctgctgctgggcctcatcgccatgctggtggtgctggagaccttctgtgagctgcacgagctgaagaagttcaggaagatgttttatgtgaagaaggacaaggatgaggaccaggtgcacatcatcgagcatgaccagctgtccttcagcagcatcacagaccaggccgccggcatgaaggaggaccagaagcagaatgagccctttgtggccacccagagcagcgcctgtgtggatggccctgccaaccactag

SEQ ID NO: 164765 - DNA, 729 bp, synthetic construct
  misc_feature 1..729: note = Description of Artificial Sequence: Synthetic coding sequence
  source 1..729: mol_type = other DNA
gtgctgcgggtgctgagcccagacctggtgcggcggctgctgaacctggccgtgcgggccttccaggtgcccaagggggagagcctgaacttccctgagagcaccccaggctacggccacacagtgcccctgagtgatggcggcaaggccttctgcatcatctacagcgtcatcggcatccccttcaccctgctcttcctgacagctgtggtgcagaggatcaccgtgcacgtgacccggcggcctgtgctgtacttccacatccgctggggcttcagcaagcaggtggtggccatcgtgcatgctgtgctgctgggctttgtgacagtgtcctgcttcttcttcatcccagctgctgtgttttctgtgctggaggatgactggaacttcctggagagcttctacttctgcttcatcagcctgagcaccatcggcctgggggactatgtgcctggagagggctacaaccagaagttccgggagctgtacaagattggcatcacctgctacctgctgctgggcctcatcgccatgctggtggtgctggagaccttctgtgagctgcacgagctgaagaagttcaggaagatgttttatgtgaagaaggacaaggatgaggaccaggtgcacatcatcgagcatgaccagctgtccttcagcagcatcacagaccaggccgccggcatgaaggaggaccagaagcagaatgagccctttgtggccacctag

SEQ ID NO: 164766 - DNA, 1632 bp, synthetic construct
  misc_feature 1..1632: note = Description of Artificial Sequence: Synthetic coding sequence
  source 1..1632: mol_type = other DNA
atggaggatggcttcaagggggacagaacagagggctgccgcagtgacagcgtggccgtgcctgctgctgcccctgtgtgccagcccaagagcgccaccaacggccagcccccagccccagcccccacccccaccccccggctgagcatcagcagccgggccaccgtggtggccaggatggagggcaccagccagggcggcctgcagacagtgatgaagtggaagacagtggtggccatctttgtggtggtggtggtgtacctggtgactggaggcctggtgttccgggccctggagcagccctttgagagcagccagaagaacaccatcgccctggagaaggccgagttcctgcgggaccacgtgtgtgtgagcccccaggagctggagaccctcatccagcacgccctggatgctgacaatgctggggtgagccccatcggcaacagcagcaacaacagcagccactgggacctgggcagcgccttcttctttgctggcaccgtcatcaccaccatcggctacggcaacatcgcccccagcacagagggcggcaagatcttctgcatcctgtatgccatcttcggcatccccctgtttggcttcctgctggccggcattggagaccagctgggcaccatctttgggaagagcatcgcccgggtggagaaggtgttcaggaagaagcaggtgtcccagaccaagatccgggtcatcagcaccatcctcttcatcctggccggctgcatcgtgtttgtgaccatcccagctgtgatcttcaagtacatcgagggctggacagccctggagagcatctactttgtggtggtgaccctgaccaccgtgggctttggagactttgtggccggcggcaatgccggcatcaactaccgggagtggtacaagcccctggtgtggttctggatcctggtgggcctggcctactttgctgctgtgctgtccatgattggagactggctgcgggtgctgagcaagaagaccaaggaggaggtgggggagatcaaggcccatgctgctgagtggaaggccaacgtgacagctgagttccgggagacccggcggcggctgtctgtggagatccatgacaagctgcagagagctgccaccatccgctccatggagcggcggcggctgggcctggaccagagggcccacagcctggacatgctgagccctgagaagaggtctgtgtttgctgccctggacaccggccgcttcaaggccagcagccaggagagcatcaacaaccggcccaacaacctgcggctgaagggccctgagcagctgaacaagcacggccagggcgccagcgaggacaacatcatcaacaagtttggcagcaccagccggctgaccaagaggaagaacaaggacctgaagaagaccctgcctgaagatgtgcagaagatctacaagaccttcaggaactacagcctggatgaggagaagaaggaggaggagacagagaagatgtgcaacagcgacaacagcagcacagccatgctgacagactgcatccagcagcacgccgagctggagaatggcatgatccccacagacaccaaggaccgggagcctgagaacaacagcctgctggaggacaggaactag

SEQ ID NO: 164767 - DNA, 1632 bp, synthetic construct
  misc_feature 1..1632: note = Description of Artificial Sequence: Synthetic coding sequence
  source 1..1632: mol_type = other DNA
atgaagttccccatcgagacccccaggaagcaggtgaactgggaccccaaggtggccgtgcctgctgctgcccctgtgtgccagcccaagagcgccaccaacggccagcccccagccccagcccccacccccaccccccggctgagcatcagcagccgggccaccgtggtggccaggatggagggcaccagccagggcggcctgcagacagtgatgaagtggaagacagtggtggccatctttgtggtggtggtggtgtacctggtgactggaggcctggtgttccgggccctggagcagccctttgagagcagccagaagaacaccatcgccctggagaaggccgagttcctgcgggaccacgtgtgtgtgagcccccaggagctggagaccctcatccagcacgccctggatgctgacaatgctggggtgagccccatcggcaacagcagcaacaacagcagccactgggacctgggcagcgccttcttctttgctggcaccgtcatcaccaccatcggctacggcaacatcgcccccagcacagagggcggcaagatcttctgcatcctgtatgccatcttcggcatccccctgtttggcttcctgctggccggcattggagaccagctgggcaccatctttgggaagagcatcgcccgggtggagaaggtgttcaggaagaagcaggtgtcccagaccaagatccgggtcatcagcaccatcctcttcatcctggccggctgcatcgtgtttgtgaccatcccagctgtgatcttcaagtacatcgagggctggacagccctggagagcatctactttgtggtggtgaccctgaccaccgtgggctttggagactttgtggccggcggcaatgccggcatcaactaccgggagtggtacaagcccctggtgtggttctggatcctggtgggcctggcctactttgctgctgtgctgtccatgattggagactggctgcgggtgctgagcaagaagaccaaggaggaggtgggggagatcaaggcccatgctgctgagtggaaggccaacgtgacagctgagttccgggagacccggcggcggctgtctgtggagatccatgacaagctgcagagagctgccaccatccgctccatggagcggcggcggctgggcctggaccagagggcccacagcctggacatgctgagccctgagaagaggtctgtgtttgctgccctggacaccggccgcttcaaggccagcagccaggagagcatcaacaaccggcccaacaacctgcggctgaagggccctgagcagctgaacaagcacggccagggcgccagcgaggacaacatcatcaacaagtttggcagcaccagccggctgaccaagaggaagaacaaggacctgaagaagaccctgcctgaagatgtgcagaagatctacaagaccttcaggaactacagcctggatgaggagaagaaggaggaggagacagagaagatgtgcaacagcgacaacagcagcacagccatgctgacagactgcatccagcagcacgccgagctggagaatggcatgatccccacagacaccaaggaccgggagcctgagaacaacagcctgctggaggacaggaactag

SEQ ID NO: 164768 - DNA, 1617 bp, synthetic construct
  misc_feature 1..1617: note = Description of Artificial Sequence: Synthetic coding sequence
  source 1..1617: mol_type = other DNA
atgttcttcctgtacacagacttcttcctgagcctggtggccgtgcctgctgctgcccctgtgtgccagcccaagagcgccaccaacggccagcccccagccccagcccccacccccaccccccggctgagcatcagcagccgggccaccgtggtggccaggatggagggcaccagccagggcggcctgcagacagtgatgaagtggaagacagtggtggccatctttgtggtggtggtggtgtacctggtgactggaggcctggtgttccgggccctggagcagccctttgagagcagccagaagaacaccatcgccctggagaaggccgagttcctgcgggaccacgtgtgtgtgagcccccaggagctggagaccctcatccagcacgccctggatgctgacaatgccggcgtgagccccatcggcaacagcagcaacaacagcagccactgggacctgggcagcgccttcttctttgctggcaccgtcatcaccaccatcggctacggcaacatcgcccccagcacagaaggaggcaagatcttctgcatcctgtatgccatcttcggcatccccctgtttggcttcctgctggccggcatcggggaccagctgggcaccatctttgggaagagcatcgcccgggtggagaaggtgttcaggaagaagcaggtgtcccagaccaagatccgggtcatcagcaccatcctcttcatcctggccggctgcatcgtgtttgtgaccatcccagctgtgatcttcaagtacatcgagggctggacagccctggagagcatctactttgtggtggtgaccctgaccaccgtgggctttggagactttgtggccggcggcaatgccggcatcaactaccgggagtggtacaagcccctggtgtggttctggatcctggtgggcctggcctactttgctgctgtgctgtccatgattggagactggctgcgggtgctgagcaagaagaccaaggaggaggtgggggagatcaaggcccacgccgctgagtggaaggccaacgtgacagctgagttccgggagacccggcggcggctgtctgtggagatccatgacaagctgcagagagctgccaccatccgctccatggagcggcggcggctgggcctggaccagagggcccacagcctggacatgctgagccctgagaagaggtctgtgtttgctgccctggacaccggccgcttcaaggccagcagccaggagagcatcaacaaccggcccaacaacctgcggctgaagggccctgagcagctgaacaagcacggccagggcgccagcgaggacaacatcatcaacaagtttggcagcaccagccggctgaccaagaggaagaacaaggacctgaagaagaccctgcctgaagatgtgcagaagatctacaagaccttcaggaactacagcctggatgaggagaagaaggaggaggagacagagaagatgtgcaacagcgacaacagcagcacagccatgctgacagactgcatccagcagcacgccgagctggagaatggcatgatccccacagacaccaaggaccgggagcctgagaacaacagcctgctggaggacagaaattag

SEQ ID NO: 164769 - DNA, 1293 bp, synthetic construct
  misc_feature 1..1293: note = Description of Artificial Sequence: Synthetic coding sequence
  source 1..1293: mol_type = other DNA
atgagcagccgcagcccccggcccccaccaagaagaagcagaagaaggctgccccggcccagctgctgctgctgctgctgccgccgcagccacctgaatgaagacaccggccgctttgtgctgctggccgccctgattggcctgtacctggtggccggggccaccgtcttcagcgccctggagagccctggagaggccgaggcccgggcccgctggggcgccaccctgaggaacttctctgctgcccatggagtggccgagcctgagctgcgggccttcctgcggcactatgaagctgccctggccgccggcgtgcgggcagatgccctgcggccccgctgggacttccctggggccttctactttgtgggcaccgtggtgtccaccatcggcttcggcatgaccaccccagccaccgtgggcggcaaggccttcctgattgcctacggcctgtttggctgtgccggcaccatcctcttcttcaacctcttcctggagcgcatcatcagcctgctggccttcatcatgagggcctgccgggagcggcagctgcggcgcagcggcctgctgcctgccaccttcagaagaggcagcgccctgtctgaggccgacagcctggccggctggaagcccagcgtgtaccacgtgctgctgatcctgggcctgtttgctgtgctgctgagctgctgtgccagcgccatgtacacctctgtggagggctgggactatgtggacagcctgtacttctgctttgtgaccttcagcaccatcggctttggagacctggtgagcagccagcacgccgcctacagaaaccagggcctgtaccgcctgggcaacttcctgttcatcctgctgggcgtgtgctgcatctacagcctcttcaacgtcatcagcatcctgatcaagcaggtgctgaactggatgctgaggaagctgagctgccgctgctgtgcccgctgctgcccagcccctggggcccccctggccaggagaaatgccatcaccccaggcagccggctgcggcggcggctggccgccctgggcgctgaccctgctgcccgggacagtgatgctgagggccggcggctgtctggagagctgatctccatgagggacctgacagccagcaacaaggtgtccctggccctgctgcagaagcagctgtctgaaacagccaacggctaccccaggtctgtgtgtgtgaacacccggcagaatggcttcagcggcggcgtgggcgccctgggcatcatgaacaaccggctggccgagaccagcgccagcaggtag

SEQ ID NO: 164770 - DNA, 1227 bp, synthetic construct
  misc_feature 1..1227: note = Description of Artificial Sequence: Synthetic coding sequence
  source 1..1227: mol_type = other DNA
atggccggccggggcttctcctggggccctggccacctgaatgaagataatgcccgcttcctgctgctggccgccctgattgtgctgtacctgctgggcggcgctgctgtgttttctgccctggagctggcccacgagcggcaggccaagcagcgctgggaggagcggctggccaacttcagccggggccacaacctgagcagagatgagctgcggggcttcctgcggcactatgaggaggccacccgggccggcatccgggtggacaacgtgcggccccgctgggacttcaccggggccttctactttgtgggcaccgtggtgtccaccatcggcttcggcatgaccaccccagccaccgtgggcggcaagatcttcctgatcttctacggcctggtgggctgcagcagcaccatcctcttcttcaacctcttcctggagcggctcatcaccatcatcgcctacatcatgaagagctgccaccagaggcagctgcggaggagaggagccctgccccaggagagcctgaaggatgctggccagtgtgaggtggacagcctggccggctggaagcccagcgtgtactacgtgatgctgatcctgtgcacagccagcatcctgatcagctgctgtgccagcgccatgtacacccccatcgagggctggagctactttgacagcctgtacttctgctttgtggccttcagcaccatcggctttggagacctggtgagcagccagaatgcccactatgagagccagggcctgtacagatttgccaactttgtgttcatcctgatgggcgtgtgctgcatctacagcctcttcaacgtcatcagcatcctgatcaagcagagcctgaactggatcctgaggaagatggacagcggctgctgcccccagtgccagaggggcctgctgcggagcagaagaaatgtggtgatgcctggctctgtgaggaaccgctgcaacatcagcattgaaacagatggagtggccgagagtgacacagatggccggcggctgtctggagagatgatctccatgaaggacctgctggccgccaacaaggccagcctggccatcctgcagaagcagctgtctgagatggccaacggctgcccccaccagaccagcaccctggcccgggacaatgagttcagcggcggcgtgggcgcctttgccatcatgaacaaccggctggccgagaccagcggggacagatag

SEQ ID NO: 164771 - DNA, 993 bp, synthetic construct
  misc_feature 1..993: note = Description of Artificial Sequence: Synthetic coding sequence
  source 1..993: mol_type = other DNA
atgaggcggcccagcgtgcgggctgctggcctggtgctgtgcaccctgtgctacctgctggtgggcgctgctgtgtttgatgccctggagagcgaggccgagagcggccggcagaggctgctggtgcagaagagaggagccctgcggaggaagtttggcttctctgctgaggactaccgggagctggagcggctggccctgcaggccgagccccaccgggccggccggcagtggaagtttcctggcagcttctactttgccatcaccgtcatcaccaccatcgagtatggccatgctgcccctggaacagattctgggaaggtgttctgcatgttttatgccctgctgggcatccccctgaccctggtgaccttccagagcctgggggagcggctgaatgctgtggtgcggcggctgctgctggccgccaagtgctgcctgggcctgcgctggacctgtgtgtccacagagaacctggtggtggccggcctgctggcctgtgccgccaccctggccctgggcgctgtggccttcagccactttgagggctggaccttcttccacgcctactactactgcttcatcaccctgaccaccatcggctttggagactttgtggccctgcagagcggggaggccctgcagaggaagctgccctacgtggccttctccttcctgtacatcctgctgggcctgactgtgattggagccttcctgaacctggtggtgctgcgcttcctggtggccagcgctgactggccagagagagctgcccggacccccagccccaggcctcctggggcccctgagagccggggcctgtggctgccccggcggcctgcccggtctgtgggcagcgccagcgtcttctgccacgtgcacaagctggagcgctgtgcccgggacaacctgggcttcagcccccccagcagccctggggtggtgcggggcggccaggccccccggctgggcgcccgctggaagagcatctag

SEQ ID NO: 164772 - DNA, 789 bp, synthetic construct
  misc_feature 1..789: note = Description of Artificial Sequence: Synthetic coding sequence
  source 1..789: mol_type = other DNA
atgcccagcgctggcctgtgcagctgctggggcggccgggtgctgcccctgctgctggcctacgtgtgctacctgctgctgggcgccaccatcttccagctgctggagcggcaggccgaggcccagagccgggaccagttccagctggagaagctgcgcttcctggagaactacacctgcctggaccagtgggccatggagcagtttgtgcaggtgatcatggaggcctgggtgaagggcgtgaaccccaagggcaacagcaccaaccccagcaactgggactttggcagcagcttcttctttgctggcaccgtggtgaccaccatcggctacggcaacctggcccccagcacagaggccggccaggtgttctgtgtgttctacgccctgctgggcatccccctgaatgtcatcttcctgaaccacctgggcaccggcctgcgggcccacctggccgccatcgagcgctgggaggaccggccccggcgcagccaggtgctgcaggtgctgggcctggccctcttcctgaccctgggcaccctggtgatcctgatcttcccccccatggtgttcagccacgtggagggctggagcttcagcgagggcttctactttgccttcatcaccctgagcaccatcggctttggagactatgtggtgggcctgcggcagggctgtggggccaaggccgcccctggccggcggccccggcggggcagcacagctgcccggggcgtgcaggtgaccccccaggacttccccatcagcaagaagggcctgggcagctag

SEQ ID NO: 164773 - DNA, 930 bp, synthetic construct
  misc_feature 1..930: note = Description of Artificial Sequence: Synthetic coding sequence
  source 1..930: mol_type = other DNA
atgcccagcgctggcctgtgcagctgctggggcggccgggtgctgcccctgctgctggcctacgtgtgctacctgctgctgggcgccaccatcttccagctgctggagcggcaggccgaggcccagagccgggaccagttccagctggagaagctgcgcttcctggagaactacacctgcctggaccagtgggccatggagcagtttgtgcaggtgatcatggaggcctgggtgaagggcgtgaaccccaagggcaacagcaccaaccccagcaactgggactttggcagcagcttcttctttgctggcaccgtggtgaccaccatcggctacggcaacctggcccccagcacagaggccggccaggtgttctgtgtgttctacgccctgctgggcatccccctgaatgtcatcttcctgaaccacctgggcaccggcctgcgggcccacctggccgccatcgagcgctgggaggaccggccccggcgcagccaggtgctgcaggtgctgggcctggccctcttcctgaccctgggcaccctggtgatcctgatcttcccccccatggtgttcagccacgtggagggctggagcttcagcgagggcttctactttgccttcatcaccctgagcaccatcggctttggagactatgtggtgggcacagaccccagcaagcactacatctctgtgtaccgcagcctggccgccatctggatcctgctgggcctggcctggctggccctgatcctgcccctgggccccctgctgctgcaccgctgctgccagctgtggctgctgagcctgcggcagggctgtggggccaaggccgcccctggaagaagaccccggcggggcagcacagctgcccggggcgtgcaggtgaccccccaggacttccccatcagcaagaagggcctgggcagctag

SEQ ID NO: 164774 - DNA, 969 bp, synthetic construct
  misc_feature 1..969: note = Description of Artificial Sequence: Synthetic coding sequence
  source 1..969: mol_type = other DNA
atgcccagcgctggcctgtgcagctgctggggcggccgggtgctgcccctgctgctggcctacgtgtgctacctgctgctgggcgccaccatcttccagctgctggagcggcaggccgaggcccagagccgggaccagttccagctggagaagctgcgcttcctggagaactacacctgcctggaccagtgggccatggagcagtttgtgcaggtgatcatggaggcctgggtgaagggcgtgaaccccaagggcaacagcaccaaccccagcaactgggactttggcagcagcttcttctttgctggcaccgtggtgaccaccatcggctacggcaacctggcccccagcacagaggccggccaggtgttctgtgtgttctacgccctgctgggcatccccctgaatgtcatcttcctgaaccacctgggcaccggcctgcgggcccacctggccgccatcgagcgctgggaggaccggccccggcgcagccaggtgctgcaggtgctgggcctggccctcttcctgaccctgggcaccctggtgatcctgatcttcccccccatggtgttcagccacgtggagggctggagcttcagcgagggcttctactttgccttcatcaccctgagcaccatcggctttggagactatgtggtgggccaccccctgaacttcatcacccccagcggcctgctgcccagccaggagcccttccagacccctcatggcaagccagagagccagcagatccctggcagcttccagaaggtgtcctccatgaatgtgtggcccctgagcggcatgcacagccctggcctggccttccccctgcctgactgcaacatcccagaccaggagcgcttccggcccctgcaccctggggcctggaagttctggcccctgcccctgcccagcagcaacagcaagtgggcccccatgtggctgggcagcagcgcccaggtgtag

SEQ ID NO: 164775 - DNA, 885 bp, synthetic construct
  misc_feature 1..885: note = Description of Artificial Sequence: Synthetic coding sequence
  source 1..885: mol_type = other DNA
atgcccagcgctggcctgtgcagctgctggggcggccgggtgctgcccctgctgctggcctacgtgtgctacctgctgctgggcgccaccatcttccagctgctggagcggcaggccgaggcccagagccgggaccagttccagctggagaagctgcgcttcctggagaactacacctgcctggaccagtgggccatggagcagtttgtgcaggtgatcatggaggcctgggtgaagggcgtgaaccccaagggcaacagcaccaaccccagcaactgggactttggcagcagcttcttctttgctggcaccgtggtgaccaccatcggctacggcaacctggcccccagcacagaggccggccaggtgttctgtgtgttctacgccctgctgggcatccccctgaatgtcatcttcctgaaccacctgggcaccggcctgcgggcccacctggccgccatcgagcgctgggaggaccggccccggcgcagccaggtgctgcaggtgctgggcctggccctcttcctgaccctgggcaccctggtgatcctgatcttcccccccatggtgttcagccacgtggagggctggagcttcagcgagggcttctactttgccttcatcaccctgagcaccatcggctttggagactatgtggtgggcacagaccccagcaagcactacatctctgtgtaccgcagcctggccgccatctggatcctgctgggcctggcctggctggccctgatcctgcccctgggccccctgctgctgcaccgctgctgccagctgtggctgctgagccggggcctgggcgtgaaggatggagctgccagtgaccccagcggcctgccccggccccagaagatccccatcagcgcctag

SEQ ID NO: 164776 - DNA, 594 bp, synthetic construct
  misc_feature 1..594: note = Description of Artificial Sequence: Synthetic coding sequence
  source 1..594: mol_type = other DNA
atggagcagtttgtgcaggtgatcatggaggcctgggtgaagggcgtgaaccccaagggcaacagcaccaaccccagcaactgggactttggcagcagcttcttctttgctggcaccgtggtgaccaccatcggctacggcaacctggcccccagcacagaagctggccaggtgttctgtgtgttctacgccctgctgggcatccccctgaatgtcatcttcctgaaccacctgggcaccggcctgcgggcccacctggccgccatcgagcgctgggaggaccggcccaggaggagccaggtgctgcaggtgctgggcctggccctcttcctgaccctgggcaccctggtgatcctgatcttcccccccatggtgttcagccacgtggagggctggagcttcagcgagggcttctactttgccttcatcaccctgagcaccatcggctttggagactatgtggtgggcctgcggcagggctgtggggccaaggccgcccctggaagaagaccccggcggggcagcacagctgcccggggcgtgcaggtgaccccccaggacttccccatcagcaagaagggcctgggcagctag

SEQ ID NO: 164777 - DNA, 999 bp, synthetic construct
  misc_feature 1..999: note = Description of Artificial Sequence: Synthetic coding sequence
  source 1..999: mol_type = other DNA
atgtaccggccccgggcccgggccgcccctgagggccgggtgcggggctgtgctgtgcccagcacagtgctgctgctgctggcctacctggcctacctggccctgggcactggagtcttctggaccctggagggccgggccgcccaggacagcagccgctccttccagagggacaagtgggagctgctgcagaacttcacctgcctggacaggcctgccctggacagcctcatcagagatgtggtgcaggcctacaagaatggagccagcctgctgagcaacaccacctccatgggccgctgggagctggtgggcagcttcttcttctctgtgtccaccatcaccaccatcggctacggcaacctgagccccaacaccatggccgcccggctcttctgcatcttctttgccctggtgggcatccccctgaacctggtggtgctgaaccggctgggccacctgatgcagcagggcgtgaaccactgggccagccggctgggcggcacctggcaggaccctgacaaggcccgctggctggccggcagcggggccctgctgagcggcctgctgctcttcctgctgctgccccccctgctcttcagccacatggagggctggagctacacagagggcttctactttgccttcatcaccctgagcacagtgggctttggagactatgtgattggcatgaaccccagccagcgctaccccctgtggtacaagaacatggtgtccctgtggatcctgtttggcatggcctggctggccctgatcatcaagctgatcctgagccagctggagaccccaggccgggtgtgcagctgctgccaccacagcagcaaagaagacttcaagagccagagctggaggcagggccctgaccgggagcctgagagccacagcccccagcagggctgctacccagagggccccatgggcatcatccagcacctggagcccagcgcccatgctgctggctgtgggaaggacagctag

SEQ ID NO: 164778 - DNA, 816 bp, synthetic construct
  misc_feature 1..816: note = Description of Artificial Sequence: Synthetic coding sequence
  source 1..816: mol_type = other DNA
atgtaccggccccgggcccgggccgcccctgagggccgggtgcggggctgtgctgtgcccagcacagtgctgctgctgctggcctacctggcctacctggccctgggcactggagtcttctggaccctggagggccgggccgcccaggacagcagccgctccttccagagggacaagtgggagctgctgcagaacttcacctgcctggacaggcctgccctggacagcctcatcagagatgtggtgcaggcctacaagaatggagccagcctgctgagcaacaccacctccatgggccgctgggagctggtgggcagcttcttcttctctgtgtccaccatcaccaccatcggctacggcaacctgagccccaacaccatggccgcccggctcttctgcatcttctttgccctggtgggcatccccctgaacctggtggtgctgaaccggctgggccacctgatgcagcagggcgtgaaccactgggccagccggctgggcggcacctggcaggaccctgacaaggcccgctggctggccggcagcggggccctgctgagcggcctgctgctcttcctgctgctgccccccctgctcttcagccacatggagggctggagctacacagagggcttctactttgccttcatcaccctgagcacagtgggctttggagactatgtgattgccagctgcctgatcagtgacaccaggaagcccaacagagactggcagaccctggagaggaccagcaagagcagcggcggcctgctgaagtaccgcttcctggccggccacggcggcagccacctgtag

SEQ ID NO: 164779 - DNA, 1155 bp, synthetic construct
  misc_feature 1..1155: note = Description of Artificial Sequence: Synthetic coding sequence
  source 1..1155: mol_type = other DNA
atggaggtgtctggccacccccaggcccggcgctgctgcccagaggccctgggcaagctgtttcctggcctgtgcttcctgtgcttcctggtgacctacgccctggtgggcgctgtggtgttcagcgccattgaagatggccaggtgctggtggccgcagatgatggagaatttgagaagttcctggaggagctgtgccgcatcctgaactgcagcgagaccgtggtggaggacaggaagcaggacctgcagggccacctgcagaaggtgaagccccagtggttcaacagaaccacccactggagcttcctgagcagcctcttcttctgctgcaccgtcttcagcacagtgggctacggctacatctaccctgtgacccggctgggcaagtacctgtgcatgctgtatgccctgtttggcatccccctgatgttcctggtgctgacagacacaggagacatcctggccaccatcctgagcaccagctacaaccgcttcaggaagttccccttcttcacccggcccctgctgagcaagtggtgccccaagagcctcttcaagaagaagccagaccccaagccagcagatgaggccgtgccccagatcatcatctctgctgaggagctgcccggccccaagctgggcacctgccccagccggcccagctgcagcatggagctgtttgagaggagccacgccctggagaagcagaacaccctgcagctgcccccccaggccatggagaggagcaacagctgcccagagctggtgctgggccgcctgagctacagcatcatcagcaacctggatgaggtgggccagcaggtggagcggctggacatccccctgcccatcatcgccctgattgtgtttgcctacatcagctgtgccgccgccatcctgcccttctgggagacccagctggactttgaaaatgccttctacttctgctttgtgaccctgaccaccatcggctttggagacacagtgctggagcaccccaacttcttcctgttcttcagcatctacatcatcgtgggcatggagatcgtgttcatcgccttcaagctggtgcagaaccggctgattgacatctacaagaatgtgatgctgttctttgccaagggcaagttctaccacctggtgaagaagtag

SEQ ID NO: 164780 - DNA, 459 bp, synthetic construct
  misc_feature 1..459: note = Description of Artificial Sequence: Synthetic coding sequence
  source 1..459: mol_type = other DNA
atgatgaacccccgggccaagagggacttctacctggccgccccagacctgctggaccccaagtctgctgcccagaacagcaagccccggctgtccttcagcaccaagcccaccgtgctggccagccgggtggagagtgacaccaccatcaacgtgatgaagtggaagacagtgtccaccatcttcctggtggtggtgctgtacctgatcattggagccaccgtcttcaaggccctggagcagccccatgagatcagccagaggaccaccatcgtcatccagaagcagaccttcatcagccagcacagctgtgtgaacagcacagagctggatgagctgatccaggacctggagaccagccaccacgcccagaaggccgccaagtacagcgtgtcctccatgccctactgggagttccccagcctggtgttctcctggctggagctggagatctcctag

SEQ ID NO: 164781 - DNA, 1236 bp, synthetic construct
  misc_feature 1..1236: note = Description of Artificial Sequence: Synthetic coding sequence
  source 1..1236: mol_type = other DNA
atggccgccccagacctgctggaccccaagtctgctgcccagaacagcaagccccggctgtccttcagcaccaagcccaccgtgctggccagccgggtggagagtgacaccaccatcaacgtgatgaagtggaagacagtgtccaccatcttcctggtggtggtgctgtacctgatcatcggggccaccgtcttcaaggccctggagcagccccatgagatcagccagaggaccaccatcgtcatccagaagcagaccttcatcagccagcacagctgtgtgaacagcacagagctggatgagctgatccagcagatcgtggccgccatcaatgccggcatcatccccctgggcaacaccagcaaccagatcagccactgggacctgggcagcagcttcttctttgctggcaccgtcatcaccaccatcggctttggaaacatcagccccaggacagagggcggcaagatcttctgcatcatctatgccctgctgggcatccccctgtttggcttcctgctggccggcgtgggggaccagctgggcaccatctttggaaaaggaattgccaaggtggaggacaccttcatcaagtggaatgtgtcccagaccaagatccgcatcatcagcaccatcatcttcatcctgtttggctgtgtgctgtttgtggccctgcctgccatcatcttcaagcacatcgagggctggagcgccctggatgccatctactttgtggtgatcaccctgaccaccatcggctttggagactatgtggccggcggcagtgacatcgagtacctggacttctacaagcctgtggtgtggttctggatcctggtgggcctggcctactttgctgctgtgctgtccatgattggagactggctgcgggtcatcagcaagaagaccaaggaggaggtgggggagttccgggcccacgccgctgagtggacagccaacgtgacagctgagttcaaggagacccggcggcggctgtctgtggagatctatgacaagttccagagggccaccagcatcaagaggaagctgtctgctgagctggccggcaaccacaaccaggagctgaccccctgcaggaggaccctgtctgtgaaccacctgaccagcgagagagatgtgctgccccccctgctgaagacagagagcatctacctgaatggcctgaccccccactgtgccggggaggagattgctgtgattgagaacatcaagtag

SEQ ID NO: 164782 - DNA, 1269 bp, synthetic construct
  misc_feature 1..1269: note = Description of Artificial Sequence: Synthetic coding sequence
  source 1..1269: mol_type = other DNA
atgatgaacccccgggccaagagggacttctacctggccgccccagacctgctggaccccaagtctgctgcccagaacagcaagccccggctgtccttcagcaccaagcccaccgtgctggccagccgggtggagagtgacaccaccatcaacgtgatgaagtggaagacagtgtccaccatcttcctggtggtggtgctgtacctgatcattggagccaccgtcttcaaggccctggagcagccccatgagatcagccagaggaccaccatcgtcatccagaagcagaccttcatcagccagcacagctgtgtgaacagcacagagctggatgagctgatccagcagatcgtggccgccatcaatgccggcatcatccccctgggcaacaccagcaaccagatcagccactgggacctgggcagcagcttcttctttgctggcaccgtcatcaccaccatcggcttcggcaacatcagccccaggacagaaggaggcaagatcttctgcatcatctatgccctgctgggcatccccctgtttggcttcctgctggccggcgtgggggaccagctgggcaccatctttgggaagggcatcgccaaggtggaggacaccttcatcaagtggaatgtgtcccagaccaagatccgcatcatcagcaccatcatcttcatcctgtttggctgtgtgctgtttgtggccctgcctgccatcatcttcaagcacatcgagggctggagcgccctggatgccatctactttgtggtgatcaccctgaccaccatcggctttggagactatgtggccggcggcagtgacatcgagtacctggacttctacaagcctgtggtgtggttctggatcctggtgggcctggcctactttgctgctgtgctgtccatgattggagactggctgcgggtcatcagcaagaagaccaaggaggaggtgggggagttccgggcccatgctgctgagtggacagccaacgtgacagctgagttcaaggagacccggcggcggctgtctgtggagatctatgacaagttccagagggccaccagcatcaagaggaagctgtctgctgagctggccggcaaccacaaccaggagctgaccccctgcaggaggaccctgtctgtgaaccacctgaccagcgagagagatgtgctgccccccctgctgaagacagagagcatctacctgaatggcctgaccccccactgtgccggggaggagattgctgtgattgagaacatcaagtag

SEQ ID NO: 164783 - DNA, 1281 bp, synthetic construct
  misc_feature 1..1281: note = Description of Artificial Sequence: Synthetic coding sequence
  source 1..1281: mol_type = other DNA
atgctgcccagcgccagccgggagcggcccggctaccgggccggcgtggccgccccagacctgctggaccccaagtctgctgcccagaacagcaagccccggctgtccttcagcaccaagcccaccgtgctggccagccgggtggagagtgacaccaccatcaacgtgatgaagtggaagacagtgtccaccatcttcctggtggtggtgctgtacctgatcattggagccaccgtcttcaaggccctggagcagccccatgagatcagccagaggaccaccatcgtcatccagaagcagaccttcatcagccagcacagctgtgtgaacagcacagagctggatgagctgatccagcagatcgtggccgccatcaatgccggcatcatccccctgggcaacaccagcaaccagatcagccactgggacctgggcagcagcttcttctttgctggcaccgtcatcaccaccatcggcttcggcaacatcagccccaggacagaaggaggcaagatcttctgcatcatctatgccctgctgggcatccccctgtttggcttcctgctggccggcgtgggggaccagctgggcaccatctttgggaagggcatcgccaaggtggaggacaccttcatcaagtggaatgtgtcccagaccaagatccgcatcatcagcaccatcatcttcatcctgtttggctgtgtgctgtttgtggccctgcctgccatcatcttcaagcacatcgagggctggagcgccctggatgccatctactttgtggtgatcaccctgaccaccatcggctttggagactatgtggccggcggcagtgacatcgagtacctggacttctacaagcctgtggtgtggttctggatcctggtgggcctggcctactttgctgctgtgctgtccatgattggagactggctgcgggtcatcagcaagaagaccaaggaggaggtgggggagttccgggcccatgctgctgagtggacagccaacgtgacagctgagttcaaggagacccggcggcggctgtctgtggagatctatgacaagttccagagggccaccagcatcaagaggaagctgtctgctgagctggccggcaaccacaaccaggagctgaccccctgcaggaggaccctgtctgtgaaccacctgaccagcgagagagatgtgctgccccccctgctgaagacagagagcatctacctgaatggcctgaccccccactgtgccggggaggagattgctgtgattgagaacatcaagtag

SEQ ID NO: 164784 - DNA, 687 bp, synthetic construct
  misc_feature 1..687: note = Description of Artificial Sequence: Synthetic coding sequence
  source 1..687: mol_type = other DNA
atgatgaacccccgggccaagagggacttctacctggccgccccagacctgctggaccccaagtctgctgcccagaacagcaagccccggctgtccttcagcaccaagcccaccgtgctggccagccgggtggagagtgacaccaccatcaacgtgatgaagtggaagacagtgtccaccatcttcctggtggtggtgctgtacctgatcattggagccaccgtcttcaaggccctggagcagccccatgagatcagccagaggaccaccatcgtcatccagaagcagaccttcatcagccagcacagctgtgtgaacagcacagagctggatgagctgatccagcagatcgtggccgccatcaatgccggcatcatccccctgggcaacaccagcaaccagatcagccactgggacctgggcagcagcttcttctttgctggcaccgtcatcaccaccatcggcttcggcaacatcagccccaggacagaaggaggcaagatcttctgcatcatctatgccctgctgggcatccccctgtttggcttcctgctggccggcgtgggggaccagctgggcaccatctttgggaagggcatcgccaaggtggaggacaccttcatcgtggaccccatcctgaacatctggaccagcatcagcctgagctgtggcagcggcagcctgtag

SEQ ID NO: 164785 - DNA, 471 bp, synthetic construct
  misc_feature 1..471: note = Description of Artificial Sequence: Synthetic coding sequence
  source 1..471: mol_type = other DNA
atgctgcccagcgccagccgggagcggcccggctaccgggccggcgtggccgccccagacctgctggaccccaagtctgctgcccagaacagcaagccccggctgtccttcagcaccaagcccaccgtgctggccagccgggtggagagtgacaccaccatcaacgtgatgaagtggaagacagtgtccaccatcttcctggtggtggtgctgtacctgatcattggagccaccgtcttcaaggccctggagcagccccatgagatcagccagaggaccaccatcgtcatccagaagcagaccttcatcagccagcacagctgtgtgaacagcacagagctggatgagctgatccaggacctggagaccagccaccacgcccagaaggccgccaagtacagcgtgtcctccatgccctactgggagttccccagcctggtgttctcctggctggagctggagatctcctag

SEQ ID NO: 164786 - DNA, 459 bp, synthetic construct; identical to SEQ ID NO: 164780
  misc_feature 1..459: note = Description of Artificial Sequence: Synthetic coding sequence
  source 1..459: mol_type = other DNA

SEQ ID NO: 164787 - DNA, 1185 bp, synthetic construct
  misc_feature 1..1185: note = Description of Artificial Sequence: Synthetic coding sequence
  source 1..1185: mol_type = other DNA
atgaagaggcagaatgtgaggaccctggccctgattgtgtgcaccttcacctacctgctggtgggcgctgctgtgtttgatgccctggagagcgagcctgagctgattgaaaggcagaggctggagctgcggcagcaggagctgcgggcccgctacaacctgagccagggcggctatgaggagctggagcgggtggtgctgcggctgaagccccacaaggccggcgtgcagtggaggtttgctggcagcttctactttgccatcaccgtcatcaccaccatcggctacggccatgctgcccccagcacagatggcggcaaggtgttctgcatgttttatgccctgctgggcatccccctgaccctggtgatgttccagagcctgggggagcgcatcaacaccctggtgcgctacctgctgcaccgggccaagaagggcctgggcatgagaagagcagatgtgtccatggccaacatggtgctgattggcttcttcagctgcatcagcaccctgtgcattggagctgctgccttcagccactatgagcactggaccttcttccaggcctactactactgcttcatcaccctgaccaccatcggctttggagactatgtggccctgcagaaggaccaggccctgcagacccagccccagtatgtggccttctcctttgtgtacatcctgaccggcctgactgtgattggagccttcctgaacctggtggtgctgcgcttcatgaccatgaatgcagaagatgagaagagagatgctgagcaccgggccctgctgaccagaaatggccaggccggcggcggcggcggcggcggcagcgcccacaccacagacacagccagcagcacagctgctgctgggggcggcggcttcagaaatgtgtatgcagaggtgctgcacttccagagcatgtgcagctgcctgtggtacaagagccgggagaagctgcagtacagcatccccatgatcatcccccgggacctgagcaccagtgacacctgtgtggagcagagccacagcagccctgggggcggcggccgctacagcgacacccccagccgccgctgcctgtgcagcggggcccccaggtctgccatcagctctgtgtccacaggcctgcacagcctgagcaccttccggggcctgatgaagaggaggagctctgtgtag

SEQ ID NO: 164788 - DNA, 816 bp, synthetic construct
  misc_feature 1..816: note = Description of Artificial Sequence: Synthetic coding sequence
  source 1..816: mol_type = other DNA
atgttccagagcctgggggagcgcatcaacaccctggtgcgctacctgctgcaccgggccaagaagggcctgggcatgagaagagcagatgtgtccatggccaacatggtgctgattggcttcttcagctgcatcagcaccctgtgcatcggggctgctgccttcagccactatgagcactggaccttcttccaggcctactactactgcttcatcaccctgaccaccatcggctttggagactatgtggccctgcagaaggaccaggccctgcagacccagccccagtatgtggccttctcctttgtgtacatcctgaccggcctgaccgtcatcggggccttcctgaacctggtggtgctgcgcttcatgaccatgaatgcagaagatgagaagagagatgctgagcaccgggccctgctgaccagaaatggccaggccggcggcggcggcggcggcggcagcgcccacaccacagacacagccagcagcacagctgctgctgggggcggcggcttcagaaatgtgtatgcagaggtgctgcacttccagagcatgtgcagctgcctgtggtacaagagccgggagaagctgcagtacagcatccccatgatcatcccccgggacctgagcaccagtgacacctgtgtggagcagagccacagcagccctgggggcggcggccgctacagcgacacccccagccgccgctgcctgtgcagcggggcccccaggtctgccatcagctctgtgtccacaggcctgcacagcctgagcaccttccggggcctgatgaagagaagaagctctgtgtag

SEQ ID NO: 164789 - DNA, 1182 bp, synthetic construct
  misc_feature 1..1182: note = Description of Artificial Sequence: Synthetic coding sequence
  source 1..1182: mol_type = other DNA
atgaggagcaccaccctgctggccctgctggccctggtgctgctgtacctggtgtctggggccctggtgttccgggccctggagcagccccatgagcagcaggcccagcgggagctgggggaggtgcgggagaagttcctgcgggcccacccctgtgtgtctgaccaggagctgggcctgctgatcaaggaggtggctgatgccctgggcggcggcgctgaccctgagaccaacagcaccagcaacagcagccacagcgcctgggacctgggcagcgccttcttcttcagcggcaccatcatcaccaccatcggctatggaaatgtggccctgaggacagatgctggccgcctcttctgcatcttctacgccctggtgggcatccccctgtttggcatcctgctggccggcgtgggggaccggctgggcagcagcctgcggcacggcatcggccacatcgaggccatcttcctgaagtggcacgtgcccccagagctggtgcgggtgctgagcgccatgctgttcctgctgattggctgcctgctgtttgtgctgacccccacctttgtgttctgctacatggaggactggagcaagctggaggccatctactttgtgattgtgaccctgaccaccgtgggctttggagactatgtggccggggctgacccccggcaggacagccctgcctaccagcccctggtgtggttctggatcctgctgggcctggcctactttgcctctgtgctgaccaccatcggcaactggctgcgggtggtgtccaggaggaccagggctgagatgggcggcctgacagcccaggccgcctcctggacaggaacagtgacagcccgggtgacccagagagctggccctgctgcccctcctcctgagaaggagcagcccctgctgcccccaccaccctgcccagcccagcccctgggccggcccaggagccccagccccccagagaaggcccagccccccagccccccaacagccagcgccctggactaccccagcgagaacctggccttcattgatgagagcagtgacacccagagcgagcggggctgccccctgccccgggccccccggggcagaagaagacccaacccccccaggaagcctgtgcggccccggggccctggccggccccgggacaagggcgtgcctgtgtag

SEQ ID NO: 164790 - DNA, 1182 bp, synthetic construct; identical to SEQ ID NO: 164789
  misc_feature 1..1182: note = Description of Artificial Sequence: Synthetic coding sequence
  source 1..1182: mol_type = other DNA

SEQ ID NO: 164791 - DNA, 1182 bp, synthetic construct; identical to SEQ ID NO: 164789
  misc_feature 1..1182: note = Description of Artificial Sequence: Synthetic coding sequence
  source 1..1182: mol_type = other DNA

SEQ ID NO: 164792 - DNA, 1257 bp, synthetic construct
  misc_feature 1..1257: note = Description of Artificial Sequence: Synthetic coding sequence
  source 1..1257: mol_type = other DNA
accacagccccccaggagcccccagcccggcccctgcaggccggcagcggggccggccctgcccctggccgggccatgaggagcaccaccctgctggccctgctggccctggtgctgctgtacctggtgtctggggccctggtgttccgggccctggagcagccccatgagcagcaggcccagcgggagctgggggaggtgcgggagaagttcctgcgggcccacccctgtgtgtctgaccaggagctgggcctgctgatcaaggaggtggctgatgccctgggcggcggcgctgaccctgagaccaacagcaccagcaacagcagccacagcgcctgggacctgggcagcgccttcttcttcagcggcaccatcatcaccaccatcggctatggaaatgtggccctgaggacagatgctggccgcctcttctgcatcttctacgccctggtgggcatccccctgtttggcatcctgctggccggcgtgggggaccggctgggcagcagcctgcggcatggaattggccacatcgaggccatcttcctgaagtggcacgtgcccccagagctggtgcgggtgctgagcgccatgctgttcctgctgattggctgcctgctgtttgtgctgacccccacctttgtgttctgctacatggaggactggagcaagctggaggccatctacttcgtcatcgtgaccctgaccaccgtgggctttggagactatgtggccggggctgacccccggcaggacagccctgcctaccagcccctggtgtggttctggatcctgctgggcctggcctactttgcctctgtgctgaccaccatcggcaactggctgcgggtggtgtccaggaggaccagggctgagatgggcggcctgacagcccaggccgcctcctggacaggcaccgtgacagcccgggtgacccagagagctggccctgctgcccctcctcctgagaaggagcagcccctgctgcccccaccaccctgcccagcccagcccctgggccggcccaggagccccagccccccagagaaggcccagccccccagccccccaacagccagcgccctggactaccccagcgagaacctggccttcattgatgagagcagtgacacccagagcgagcggggctgccccctgccccgggccccccggggcagaagaagacccaacccccccaggaagcctgtgcggccccggggccctggccggccccgggacaagggcgtgcctgtgtag

SEQ ID NO: 164793 - DNA, 1368 bp, synthetic construct
  misc_feature 1..1368: note = Description of Artificial Sequence: Synthetic coding sequence
  source 1..1368: mol_type = other DNA
gtgcacgcctctgtgcacaccagggtgcggggcctgtgggtgccctggagaggaagacatgcccacggcggccggggctgccggggcgtgtgtggagaatgtcgctgggtgaccacagccccccaggagcccccagcccggcccctgcaggccggcagcggggccggccctgcccctggccgggccatgaggagcaccaccctgctggccctgctggccctggtgctgctgtacctggtgtctggggccctggtgttccgggccctggagcagccccatgagcagcaggcccagcgggagctgggggaggtgcgggagaagttcctgcgggcccacccctgtgtgtctgaccaggagctgggcctgctgatcaaggaggtggctgatgccctgggcggcggcgctgaccctgagaccaacagcaccagcaacagcagccacagcgcctgggacctgggcagcgccttcttcttcagcggcaccatcatcaccaccatcggctatggaaatgtggccctgaggacagatgctggccgcctcttctgcatcttctacgccctggtgggcatccccctgtttggcatcctgctggccggcgtgggggaccggctgggcagcagcctgcggcacggcatcggccacatcgaggccatcttcctgaagtggcacgtgcccccagagctggtgcgggtgctgagcgccatgctgttcctgctgattggctgcctgctgtttgtgctgacccccacctttgtgttctgctacatggaggactggagcaagctggaggccatctactttgtgattgtgaccctgaccaccgtgggctttggagactatgtggccggggctgacccccggcaggacagccctgcctaccagcccctggtgtggttctggatcctgctgggcctggcctactttgcctctgtgctgaccaccatcggcaactggctgcgggtggtgtccaggaggaccagggctgagatgggcggcctgacagcccaggccgcctcctggacaggaacagtgacagcccgggtgacccagagagctggccctgctgcccctcctcctgagaaggagcagcccctgctgcccccaccaccctgcccagcccagcccctgggccggcccaggagccccagccccccagagaaggcccagccccccagccccccaacagccagcgccctggactaccccagcgagaacctggccttcattgatgagagcagtgacacccagagcgagcggggctgccccctgccccgggccccccggggcagaagaagacccaacccccccaggaagcctgtgcggccccggggccctggccggccccgggacaagggcgtgcctgtgtag

SEQ ID NO: 164794 - DNA, 1500 bp, synthetic construct
  misc_feature 1..1500: note = Description of Artificial Sequence: Synthetic coding sequence
  source 1..1500: mol_type = other DNA
atggtggaccggggccccctgctgaccagcgccatcatcttctacctggccatcggggccgccatctttgaggtgctggaggagccccactggaaggaggccaagaagaactactacacccagaagctgcacctgctgaaggagttcccctgcctgggccaggagggcctggacaagatcctggaggtggtgtctgatgctgctggccagggcgtggccatcactggaaaccagaccttcaacaactggaactggcccaatgccatgatctttgctgccaccgtcatcaccaccatcggctatggaaatgtggcccccaagaccccagctggccgcctcttctgtgtgttctacggcctgtttggagtgcccctgtgcctgacctggatcagcgccctgggcaagttctttggaggccgggccaagaggctgggccagttcctgaccaagaggggcgtgtccctgaggaaggcccagatcacctgcaccgtcatcttcatcgtgtggggcgtgctggtgcacctggtgatccccccatttgtgttcatggtgacagagggctggaactacatcgagggcctgtactacagcttcatcaccatcagcaccatcggctttggagactttgtggccggcgtgaaccccagcgccaactaccacgccctgtaccgctactttgtggagctgtggatctacctgggcctggcctggctgagcctgtttgtgaactggaaggtgtccatgtttgtggaggtgcacaaggccatcaagaagagaagaagaagaaggaaggagagctttgagagcagcccccacagcaggaaggccctgcaggtgaagggcagcacagccagcaaggatgtgaacatcttctccttcctgagcaagaaggaggagacctacaatgacctgatcaagcagatcggcaagaaggccatgaagaccagcggcggcggggagactggacctggccctggcctgggcccccagggcggcggcctgcctgccctgccccccagcctggtgcccctggtggtgtacagcaagaacagagtgcccaccctggaggaggtgtcccagaccctgcggagcaaaggacatgtgagccgcagcccagatgaggaggccgtggcccgggcccctgaggacagcagccctgcccctgaggtgttcatgaaccagctggaccgcatcagtgaagaatgtgagccctgggatgcccaggactaccaccccctcatcttccaggatgccagcatcacctttgtgaacacagaagctggcctgagtgatgaggagaccagcaagagcagcctggaggacaacctggccggggaggagagcccccagcagggcgctgaggccaaggcccccctgaacatgggagagttccccagcagcagcgagagcaccttcaccagcacagaaagtgagctgtctgtgccctatgagcagctgatgaatgagtacaacaaggccaacagccccaagggcacctag

SEQ ID NO: 164795 - DNA, 942 bp, synthetic construct
  misc_feature 1..942: note = Description of Artificial Sequence: Synthetic coding sequence
  source 1..942: mol_type = other DNA
atgagaagaggagccctgctggccggggccctggccgcctatgctgcctacctggtgctgggcgccctgctggtggcccggctggagggcccccatgaggcccggctgcgggcagagctggagaccctgcgggcccagctgctgcagaggagcccctgtgtggccgccccagccctggatgcctttgtggagcgggtgctggccgccggccgcctgggccgggtggtgctggccaatgccagcggcagcgccaatgccagtgaccctgcctgggactttgccagcgccctcttctttgccagcaccctcatcaccaccgtgggctacggctacaccacccccctgacagatgctgggaaggccttcagcatcgcctttgccctgctgggcgtgcccaccaccatgctgctgctgacagccagcgcccagaggctgagcctgctgctgacccacgtgcccctgtcctggctgtccatgcgctggggctgggacccccggcgggccgcctgctggcacctggtggccctgctgggcgtggtggtgacagtgtgcttcctggtgcctgctgtgatctttgcccacctggaggaggcctggagcttcctggatgccttctacttctgcttcatcagcctgagcaccatcggcctgggggactatgtgcctggagaggcccctggccagccctaccgggccctgtacaaggtgctggtgacagtgtacctgttcctgggcctggtggccatggtgctggtgctgcagaccttccgccacgtgtctgacctgcacggcctgacagagctgatcctgctgcccccaccctgcccagccagcttcaatgctgatgaagatgacagagtggacatcctgggcccccagcctgagagccaccagcagctgagcgccagcagccacacagattatgccagcatccccaggtag

SEQ ID NO: 164796 - DNA, 924 bp, synthetic construct
  misc_feature 1..924: note = Description of Artificial Sequence: Synthetic coding sequence
  source 1..924: mol_type = other DNA
atgggcggcctgcggccctggagccgctatggcctgctggtggtggcccacctgctggccctgggcctgggcgctgtggtgttccaggccctggagggccccccagcctgccgcctgcaggccgagctgcgggcagagctggccgccttccaggccgagcaccgggcctgcctgcccccaggggccctggaggagctgctgggcacagccctggccacccaggcccacggcgtgtccaccctgggcaacagcagcgagggccgcacctgggacctgcccagcgccctgctgtttgctgccagcatcctgaccaccaccggctacggccacatggcccccctgagccctgggggcaaggccttctgcatggtgtatgctgccctgggcctgcctgccagcctggccctggtggccaccctgcggcactgcctgctgcctgtgctgagccggccccgggcctgggtggccgtgcactggcagctgagccctgcccgggccgccctgctgcaggccgtggccctgggcctgctggtggccagcagctttgtgctgctgcctgccctggtgctgtggggcctgcagggcgactgcagcctgctgggcgctgtgtacttctgcttcagcagcctgagcaccatcggcctggaggacctgctgcccggccggggccgcagcctgcaccctgtgatctaccacctgggccagctggccctgctgggctacctgctgctgggcctgctggccatgctgctggccgtggagaccttcagcgagctgccccaggtgcgggccatgggcaagttcttccggcccagcggccctgtgacagctgaggaccagggcggcatcctgggccaggatgagctggccctgagcaccctgcccccagctgccccagccagcggccaggccccagcctgctag

SEQ ID NO: 164797 - DNA, 759 bp, synthetic construct
  misc_feature 1..759: note = Description of Artificial Sequence: Synthetic coding sequence
  source 1..759: mol_type = other DNA
atgggcggcctgcggccctggagccgctatggcctgctggtggtggcccacctgctggccctgggcctgggcgctgtggtgttccaggccctggagggccccccagcctgccgcctgcaggccgagctgcgggcagagctggccgccttccaggccgagcaccgggcctgcctgcccccaggggccctggaggagctgctgggcacagccctggccacccaggcccacggcgtgtccaccctgggcaacagcagcgagggccgcacctgggacctgcccagcgccctgctgtttgctgccagcatcctgaccaccaccggctacggccacatggcccccctgagccctgggggcaaggccttctgcatggtgtatgctgccctgggcctgcctgccagcctggccctggtggccaccctgcggcactgcctgctgcctgtgctgagccggccccgggcctgggtggccgtgcactggcagctgagccctgcccgggccgccctgctgcaggccgtggccctgggcctgctggtggccagcagctttgtgctgctgcctgccctggtgctgtggggcctgcagggcgactgcagcctgctgggcgctgtgtacttctgcttcagcagcctgagcaccatcggcctggaggacctgctgcccggccggggccgcagcctgcaccctgtgatctaccacctgggccagctggccctgctgggcggcggcaccagcctgcagggcacagcctgggagggctag

SEQ ID NO: 164798 - DNA, 774 bp, synthetic construct
  misc_feature 1..774: note = Description of Artificial Sequence: Synthetic coding sequence
  source 1..774: mol_type = other DNA
atgggcggcctgcggccctggagccgctatggcctgctggtggtggcccacctgctggccctgggcctgggcgctgtggtgttccaggccctggagggccccccagcctgccgcctgcaggccgagctgcgggcagagctggccgccttccaggccgagcaccgggcctgcctgcccccaggggccctggaggagctgctgggcacagccctggccacccaggcccacggcgtgtccaccctgggcaacagcagcgagggccgcacctgggacctgcccagcgccctgctgtttgctgccagcatcctgaccaccaccggctacggccacatggcccccctgagccctgggggcaaggccttctgcatggtgtatgctgccctgggcctgcctgccagcctggccctggtggccaccctgcggcactgcctgctgcctgtgctgagccggccccgggcctgggtggccgtgcactggcagctgagccctgcccgggccgccctgctgcaggccgtggccctgggcctgctggtggccagcagctttgtgctgctgcctgccctggtgctgtggggcctgcagggcgactgcagcctgctgggcgctgtgtacttctgcttcagcagcctgagcaccatcggcctggaggacctgctgcccggccggggccgcagcctgcaccctgtgatctaccacctgggccagctggccctgctgggcaagagcagccacctgacagcctgtggcggccggggcaagaggagcctggactag

SEQ ID NO: 164799 - DNA, 759 bp, synthetic construct; identical to SEQ ID NO: 164797
  misc_feature 1..759: note = Description of Artificial Sequence: Synthetic coding sequence
  source 1..759: mol_type = other DNA

SEQ ID NO: 164800 - DNA, 87 bp, synthetic construct
  misc_feature 1..87: note = Description of Artificial Sequence: Synthetic coding sequence
  source 1..87: mol_type = other DNA
tgactgcaccctgtgatctaccacctgggccagctggccctgctgggcggcggcaccagcctgcagggcacagcctgggagggctag

SEQ ID NO: 164801 - DNA, 1125 bp, synthetic construct
  misc_feature 1..1125: note = Description of Artificial Sequence: Synthetic coding sequence
  source 1..1125: mol_type = other DNA
atgaagaggcagaatgtgaggaccctgagcctcatcgtgtgcaccttcacctacctgctggtgggcgctgctgtgtttgatgccctggagagtgaccacgagatgagggaggaggagaagctgaaggccgaggagatccgcatcaagggcaagtacaacatcagcagcgaggactaccggcagctggagctggtgatcctgcagagcgagccccaccgggccggcgtgcagtggaagtttgctggcagcttctactttgccatcaccgtcatcaccaccatcggctacggccatgctgcccctggaacagatgctgggaaggccttctgcatgttttatgctgtgctgggcatccccctgaccctggtgatgttccagagcctgggggagaggatgaacacctttgtgcgctacctgctgaagaggatcaagaagtgctgcggcatgaggaacacagatgtgtccatggagaacatggtgacagtgggcttcttcagctgcatgggcaccctgtgcattggagctgctgccttcagccagtgtgaggagtggagcttcttccacgcctactactactgcttcatcaccctgaccaccatcggctttggagactatgtggccctgcagaccaagggggccctgcagaagaagcccctgtatgtggccttctccttcatgtacatcctggtgggcctgactgtgattggagccttcctgaacctggtggtgctgcgcttcctgaccatgaacagtgaagatgaaagaagagatgctgaggagcgggccagcctggccggcaacagaaacagcatggtgatccacatccctgaggagccccggcccagccggccccgctacaaggcagatgtgcctgacctgcagagcgtgtgcagctgcacctgctaccgcagccaggactatggaggccgctctgtggccccccagaacagcttcagcgccaagctggccccccactacttccacagcatctcctacaagattgaggagatcagccccagcaccctgaagaacagcctcttccccagccccatcagcagcatcagccctggcctgcacagcttcacagaccaccagaggctgatgaagaggaggaagtctgtgtag

SEQ ID NO: 164802 - DNA, 1125 bp, synthetic construct; identical to SEQ ID NO: 164801
  misc_feature 1..1125: note = Description of Artificial Sequence: Synthetic coding sequence
  source 1..1125: mol_type = other DNA

SEQ ID NO: 164803 - DNA, 1125 bp, synthetic construct; identical to SEQ ID NO: 164801
  misc_feature 1..1125: note = Description of Artificial Sequence: Synthetic coding sequence
  source 1..1125: mol_type = other DNA

SEQ ID NO: 164804 - DNA, 3693 bp, synthetic construct
  misc_feature 1..3693: note = Description of Artificial Sequence: Synthetic coding sequence
  source 1..3693: mol_type = other DNA
atggcccgggccaagctgcccaggagccccagcgagggcaaggccggccctggaggagccccagctggagctgctgcccctgaggagccccacggcctgagccccctgctgcctgcccggggcggcggctctgtgggcagtgatgtgggccagaggctgcctgtggaggacttcagcctggacagcagcctgagccaggtgcaggtggagttctacgtgaatgaaaacaccttcaaggagcggctgaagctgttcttcatcaagaaccagaggagcagcctgcgcatccgcctcttcaacttcagcctgaagctgctgacctgcctgctgtacatcgtgcgggtgctgctggatgatcctgccctgggcatcggctgctggggctgccccaagcagaactacagcttcaatgacagcagcagcgagatcaactgggcccccatcctgtgggtggagaggaagatgaccctgtgggccatccaggtgattgtggccatcatctccttcctggagaccatgctgctgatctacctgagctacaagggcaacatctgggagcagatcttccgggtgtcctttgtgctggagatgatcaacaccctgcccttcatcatcaccatcttctggccacccctgaggaacctcttcatccctgtgttcctgaactgctggctggccaagcacgccctggagaacatgatcaatgacttccaccgggccatcctgcggacccagagcgccatgttcaaccaggtgctgatcctcttctgcaccctgctgtgcctggtgttcaccggcacctgtggcatccagcacctggagcgggccggggagaacctgagcctgctgaccagcttctacttctgcatcgtgaccttcagcacagtgggctatggagatgtgacccccaagatctggcccagccagctgctggtggtgatcatgatctgtgtggccctggtggtgctgcccctgcagtttgaggagctggtgtacctgtggatggagcggcagaagagcggcggcaactacagccgccaccgggcccagacagagaagcacgtggtgctgtgtgtgagcagcctgaagattgacctgctgatggacttcctgaatgagttctacgcccacccccggctgcaggactactacgtggtgatcctgtgccccacagagatggatgtgcaggtgcggcgggtgctgcagatccccctgtggagccagagggtcatctacctgcagggcagcgccctgaaggaccaggacctgatgagggccaagatggacaacggggaggcctgcttcatcctgagcagcagaaatgaggtggacagaacagctgctgaccaccagaccatcctgcgggcctgggccgtgaaggactttgcccccaactgccccctgtatgtgcagatcctgaagccagagaacaagttccacgtgaagtttgctgaccacgtggtgtgtgaggaggagtgcaagtatgccatgctggccctgaactgcatctgcccagccaccagcaccctcatcaccctgctggtgcacaccagccggggccaggagggccaggagagccctgagcagtggcagaggatgtatggccgctgcagcggaaatgaggtgtaccacatccgcatgggagacagcaagttcttccgggagtatgagggcaagagcttcacctacgccgccttccacgcccacaagaagtatggagtgtgcctgattggcctgaagcgggaggacaacaagagcatcctgctgaaccctggccccaggcacatcctggccgccagtgacacctgcttctacatcaacatcaccaaggaggagaacagcgccttcatcttcaagcaggaggagaagaggaagaagagggccttcagcggccagggcctgcacgagggccctgcccggctgcctgtgcacagcatcatcgcctccatgggcaccgtggccatggacctgcagggcacagagcaccggcccacccagagcggcggcggcggcggcggcagcaagctggccctgcccacagaaaatggcagcggcagcagaagacccagcatcgcccctgtgctggagctggccgacagcagcgccctgctgccctgtgacctgctgagtgaccagagtgaagatgaggtgacccccagtgatgatgagggcctgtctgtggtggagtatgtgaagggctacccacccaacagcccctacatcggcagcagccccaccctgtgccacctgctgcctgtgaaggcccccttctgctgcctgcggctggacaagggctgcaagcacaacagctatgaagatgccaaggcctacggcttcaagaacaagctgatcatcgtgtctgctgagacagctggaaatggcctgtacaacttcatcgtgcccctgcgggcctactaccgcagcaggaaggagctgaaccccatcgtgctgctgctggacaacaagccagaccaccacttcctggaggccatctgctgcttccccatggtgtactacatggagggctctgtggacaacctggacagcctgctgcagtgtggcatcatctatgctgacaacctggtggtggtggacaaggagagcaccatgtctgctgaggaggactacatggctgatgccaagaccatcgtgaatgtgcagaccatgttccgcctcttccccagcctgagcatcaccacagagctgacccaccccagcaacatgaggttcatgcagttccgggccaaggacagctacagcctggccctgagcaagctggagaagcgggagcgggagaatggcagcaacctggccttcatgttccggctgccctttgctgctggccgggtcttcagcatctccatgctggacaccctgctgtaccagagctttgtgaaggactacatgatcaccatcacccggctgctgctgggcctggacaccaccccaggcagcggctacctgtgtgccatgaagatcacagaaggagacctgtggatccgcacctacggccgcctcttccagaagctgtgcagcagcagcgctgagatccccatcggcatctacagaacagagagccacgtgttcagcaccagcgagagccagatctctgtgaatgtggaggactgtgaggacacccgggaggtgaagggcccctggggcagcagagctggcactggaggcagcagccagggccgccacactggaggaggagaccctgctgagcaccccctgctgcggaggaagagcctgcagtgggcccggcggctgagcaggaaggcccccaagcaggccggccgggctgctgctgctgagtggatcagccagcagaggctgagcctgtaccgccgctctgagcggcaggagctgtctgagctggtgaagaacaggatgaagcacctgggcctgcccaccaccggctatgaagatgtggccaacctgacagccagtgatgtgatgaacagagtgaacctgggctacctgcaggatgagatgaatgaccaccagaacaccctgtcctatgtgctgatcaaccccccaccagacacccggctggagcccagcgacatcgtgtacctgatccgcagtgaccccctggcccacgtggccagcagcagccagagcaggaagagcagctgcagccacaagctgagcagctgcaaccctgagaccagagatgagacccagctgtag

SEQ ID NO: 164805 - DNA, 3771 bp, synthetic construct
  misc_feature 1..3771: note = Description of Artificial Sequence: Synthetic coding sequence
  source 1..3771: mol_type = other DNA
atgcccctgcctgatggagcccggacccctgggggcgtgtgccgggaggcccggggcggcggctacaccaacagaacatttgaatttgatgatggccagtgtgccccccggcggccctgtgctggagatggagccctgctggacacagctggcttcaagatgtctgacctggacagcgaggtgctgcccctgcccccacgctaccgcttccgggacctgctgctgggggaccccagcttccagaatgatgacagagtgcaggtggagttctacgtgaatgaaaacaccttcaaggagcggctgaagctgttcttcatcaagaaccagaggagcagcctgcgcatccgcctcttcaacttcagcctgaagctgctgacctgcctgctgtacatcgtgcgggtgctgctggatgatcctgccctgggcatcggctgctggggctgccccaagcagaactacagcttcaatgacagcagcagcgagatcaactgggcccccatcctgtgggtggagaggaagatgaccctgtgggccatccaggtgattgtggccatcatctccttcctggagaccatgctgctgatctacctgagctacaagggcaacatctgggagcagatcttccgggtgtcctttgtgctggagatgatcaacaccctgcccttcatcatcaccatcttctggccacccctgaggaacctcttcatccctgtgttcctgaactgctggctggccaagcacgccctggagaacatgatcaatgacttccaccgggccatcctgcggacccagagcgccatgttcaaccaggtgctgatcctcttctgcaccctgctgtgcctggtgttcaccggcacctgtggcatccagcacctggagagagctggggagaacctgagcctgctgaccagcttctacttctgcatcgtgaccttcagcacagtgggctatggagatgtgacccccaagatctggcccagccagctgctggtggtgatcatgatctgtgtggccctggtggtgctgcccctgcagtttgaggagctggtgtacctgtggatggagcggcagaagagcggcggcaactacagccgccaccgggcccagacagagaagcacgtggtgctgtgtgtgagcagcctgaagattgacctgctgatggacttcctgaatgagttctacgcccacccccggctgcaggactactacgtggtgatcctgtgccccacagagatggatgtgcaggtgagaagagtgctgcagatccccctgtggagccagagggtcatctacctgcagggcagcgccctgaaggaccaggacctgatgagggccaagatggacaatggagaggcctgcttcatcctgagcagcagaaatgaggtggacagaacagctgctgaccaccagaccatcctgcgggcctgggccgtgaaggactttgcccccaactgccccctgtatgtgcagatcctgaagccagagaacaagttccacgtgaagtttgctgaccacgtggtgtgtgaggaggagtgcaagtatgccatgctggccctgaactgcatctgcccagccaccagcaccctcatcaccctgctggtgcacaccagccggggccaggagggccaggagagccctgagcagtggcagaggatgtatggccgctgcagcggaaatgaggtgtaccacatccgcatgggagacagcaagttcttccgggagtatgagggcaagagcttcacctatgctgccttccacgcccacaagaagtatggagtgtgcctgattggcctgaagcgggaggacaacaagagcatcctgctgaaccctggccccaggcacatcctggccgccagtgacacctgcttctacatcaacatcaccaaggaggagaacagcgccttcatcttcaagcaggaggagaagaggaagaagagggccttcagcggccagggcctgcacgagggccctgcccggctgcctgtgcacagcatcatcgcctccatgggcaccgtggccatggacctgcagggcacagagcaccggcccacccagagcggcggcggcggcggcggcagcaagctggccctgcccacagaaaatggaagtggcagccggcggcccagcatcgcccctgtgctggagctggccgacagcagcgccctgctgccctgtgacctgctgagtgaccagagtgaagatgaggtgacccccagtgatgatgagggcctgtctgtggtggagtatgtgaagggctacccacccaacagcccctacatcggcagcagccccaccctgtgccacctgctgcctgtgaaggcccccttctgctgcctgcggctggacaagggctgcaagcacaacagctatgaagatgccaaggcctacggcttcaagaacaagctgatcatcgtgtctgctgagacagctggaaatggcctgtacaacttcatcgtgcccctgcgggcctactaccgcagcaggaaggagctgaaccccatcgtgctgctgctggacaacaagccagaccaccacttcctggaggccatctgctgcttccccatggtgtactacatggagggctctgtggacaacctggacagcctgctgcagtgtggcatcatctatgctgacaacctggtggtggtggacaaggagagcaccatgtctgctgaggaggactacatggctgatgccaagaccatcgtgaatgtgcagaccatgttccgcctcttccccagcctgagcatcaccacagagctgacccaccccagcaacatgaggttcatgcagttccgggccaaggacagctacagcctggccctgagcaagctggagaagcgggagagagaaaatggcagcaacctggccttcatgttccggctgccctttgctgctggccgggtcttcagcatctccatgctggacaccctgctgtaccagagctttgtgaaggactacatgatcaccatcacccggctgctgctgggcctggacaccaccccaggcagcggctacctgtgtgccatgaagatcacagaaggagacctgtggatccgcacctacggccgcctcttccagaagctgtgcagcagcagcgctgagatccccatcggcatctacagaacagagagccacgtgttcagcaccagcgagccccatgacctgcgggcccagagccagatctctgtgaatgtggaggactgtgaggacacccgggaggtgaagggcccctggggcagcagagctggcactggaggcagcagccagggccgccacactggaggaggagaccctgctgagcaccccctgctgcggaggaagagcctgcagtgggcccggcggctgagcaggaaggcccccaagcaggccggccgggctgctgctgctgagtggatcagccagcagaggctgagcctgtaccgccgctctgagcggcaggagctgtctgagctggtgaagaacaggatgaagcacctgggcctgcccaccaccggctatgaagatgtggccaacctgacagccagtgatgtgatgaacagagtgaacctgggctacctgcaggatgagatgaatgaccaccagaacaccctgtcctatgtgctgatcaaccccccaccagacacccggctggagcccagcgacatcgtgtacctgatccgcagtgaccccctggcccacgtggccagcagcagccagagcaggaagagcagctgcagccacaagctgagcagctgcaaccctgagaccagagatgagacccagctgtag

SEQ ID NO: 164806 - DNA, 3708 bp, synthetic construct
  misc_feature 1..3708: note = Description of Artificial Sequence: Synthetic coding sequence
  source 1..3708: mol_type = other DNA
atgcccctgcctgatggagcccggacccctgggggcgtgtgccgggaggcccggggcggcggctacaccaacagaacatttgaatttgatgatggccagtgtgccccccggcggccctgtgctggagatggagccctgctggacacagctggcttcaagatgtctgacctggacagcgaggtgctgcccctgcccccacgctaccgcttccgggacctgctgctgggggaccccagcttccagaatgatgacagagtgcaggtggagttctacgtgaatgaaaacaccttcaaggagcggctgaagctgttcttcatcaagaaccagaggagcagcctgcgcatccgcctcttcaacttcagcctgaagctgctgacctgcctgctgtacatcgtgcgggtgctgctggatgatcctgccctgggcatcggctgctggggctgccccaagcagaactacagcttcaatgacagcagcagcgagatcaactgggcccccatcctgtgggtggagaggaagatgaccctgtgggccatccaggtgattgtggccatcatctccttcctggagaccatgctgctgatctacctgagctacaagggcaacatctgggagcagatcttccgggtgtcctttgtgctggagatgatcaacaccctgcccttcatcatcaccatcttctggccacccctgaggaacctcttcatccctgtgttcctgaactgctggctggccaagcacgccctggagaacatgatcaatgacttccaccgggccatcctgcggacccagagcgccatgttcaaccaggtgctgatcctcttctgcaccctgctgtgcctggtgttcaccggcacctgtggcatccagcacctggagagagctggggagaacctgagcctgctgaccagcttctacttctgcatcgtgaccttcagcacagtgggctatggagatgtgacccccaagatctggcccagccagctgctggtggtgatcatgatctgtgtggccctggtggtgctgcccctgcagtttgaggagctggtgtacctgtggatggagcggcagaagagcggcggcaactacagccgccaccgggcccagacagagaagcacgtggtgctgtgtgtgagcagcctgaagattgacctgctgatggacttcctgaatgagttctacgcccacccccggctgcaggactactacgtggtgatcctgtgccccacagagatggatgtgcaggtgagaagagtgctgcagatccccctgtggagccagagggtcatctacctgcagggcagcgccctgaaggaccaggacctgatgagggccaagatggacaatggagaggcctgcttcatcctgagcagcagaaatgaggtggacagaacagctgctgaccaccagaccatcctgcgggcctgggccgtgaaggactttgcccccaactgccccctgtatgtgcagatcctgaagccagagaacaagttccacgtgaagtttgctgaccacgtggtgtgtgaggaggagtgcaagtatgccatgctggccctgaactgcatctgcccagccaccagcaccctcatcaccctgctggtgcacaccagccggggccaggagggccaggagagccctgagcagtggcagaggatgtatggccgctgcagcggaaatgaggtgtaccacatccgcatgggagacagcaagttcttccgggagtatgagggcaagagcttcacctatgctgccttccacgcccacaagaagtatggagtgtgcctgattggcctgaagcgggaggacaacaagagcatcctgctgaaccctggccccaggcacatcctggccgccagtgacacctgcttctacatcaacatcaccaaggaggagaacagcgccttcatcttcaagcaggaggagaagaggaagaagagggccttcagcggccagggcctgcacgagggccctgcccggctgcctgtgcacagcatcatcgcctccatgggcaccgtggccatggacctgcagggcacagagcaccggcccacccagagcggcggcggcggcggcggcagcaagctggccctgcccacagaaaatggaagtggcagccggcggcccagcatcgcccctgtgctggagctggccgacagcagcgccctgctgccctgtgacctgctgagtgaccagagtgaagatgaggtgacccccagtgatgatgagggcctgtctgtggtggagtatgtgaagggctacccacccaacagcccctacatcggcagcagccccaccctgtgccacctgctgcctgtgaaggcccccttctgctgcctgcggctggacaagggctgcaagcacaacagctatgaagatgccaaggcctacggcttcaagaacaagctgatcatcgtgtctgctgagacagctggaaatggcctgtacaacttcatcgtgcccctgcgggcctactaccgcagcaggaaggagctgaaccccatcgtgctgctgctggacaacaagccagaccaccacttcctggaggccatctgctgcttccccatggtgtactacatggagggctctgtggacaacctggacagcctgctgcagtgtggcatcatctatgctgacaacctggtggtggtggacaaggagagcaccatgtctgctgaggaggactacatggctgatgccaagaccatcgtgaatgtgcagaccatgttccgcctcttccccagcctgagcatcaccacagagctgacccaccccagcaacatgaggttcatgcagttccgggccaaggacagctacagcctggccctgagcaagctggagaagcgggagagagaaaatggcagcaacctggccttcatgttccggctgccctttgctgctggccgggtcttcagcatctccatgctggacaccctgctgtaccagagctttgtgaaggactacatgatcaccatcacccggctgctgctgggcctggacaccaccccaggcagcggctacctgtgtgccatgaagatcacagaaggagacctgtggatccgcacctacggccgcctcttccagaagctgtgcagcagcagcgctgagatccccatcggcatctacagaacagagagccacgtgttcagcaccagcgagccccatgacctgcgggcccagagccagatctctgtgaatgtggaggactgtgaggacacccgggaggtgaagggcccctggggcagcagagctggcactggaggcagcagccagggccgccacactggaggaggagaccctgctgagcaccccctgctgcggaggaagagcctgcagtgggcccggcggctgagcaggaaggcccccaagcaggccggccgggctgctgctgctgagtggatcagccagcagaggctgagcctgtaccgccgctctgagcggcaggagctgtctgagctggtgaagaacaggatgaagcacctgggcctgcccaccaccggctatgatgagatgaatgaccaccagaacaccctgtcctatgtgctgatcaaccccccaccagacacccggctggagcccagcgacatcgtgtacctgatccgcagtgaccccctggcccacgtggccagcagcagccagagcaggaagagcagctgcagccacaagctgagcagctgcaaccctgagaccagagatgagacccagctgtag

SEQ ID NO: 164807 - DNA, 3408 bp, synthetic construct
  misc_feature 1..3408: note = Description of Artificial Sequence: Synthetic coding sequence
  source 1..3408: mol_type = other DNA
atggtggacctggagagcgaggtgccccccctgcccccacgctaccgcttccgggacctgctgctgggggaccagggctggcagaatgatgacagagtgcaggtggagttctacatgaatgaaaacaccttcaaggagcggctgaagctgttcttcatcaagaaccagaggagcagcctgcgcatccgcctcttcaacttcagcctgaagctgctgagctgcctgctgtacatcatccgggtgctgctggagaaccccagccagggcaatgagtggagccacatcttctgggtgaacagaagcctgcccctgtggggcctgcaggtgtctgtggccctgatcagcctgtttgagaccatcctgctgggctacctgagctacaagggcaacatctgggagcagatcctgcgcatccccttcatcctggagatcatcaatgctgtgcccttcatcatcagcatcttctggcccagcctgaggaacctgtttgtgcctgtgttcctgaactgctggctggccaagcacgccctggagaacatgatcaatgacctgcaccgggccatccagaggacccagagcgccatgttcaaccaggtgctgatcctgatcagcaccctgctgtgcctgatcttcacctgcatctgtggcatccagcacctggagagaattggcaagaagctgaacctgtttgacagcctgtacttctgcatcgtgaccttcagcacagtgggctttggagatgtgaccccagagacctggagcagcaagctgtttgtggtggccatgatctgtgtggccctggtggtgctgcccatccagtttgagcagctggcctacctgtggatggagcggcagaagagcggcggcaactacagccgccaccgggcccagacagagaagcacgtggtgctgtgtgtgagcagcctgaagattgacctgctgatggacttcctgaatgagttctacgcccacccccggctgcaggactactacgtggtgatcctgtgccccacagagatggatgtgcaggtgagaagagtgctgcagatccccatgtggagccagagggtcatctacctgcagggcagcgccctgaaggaccaggacctgctgcgggccaagatggatgatgctgaggcctgcttcatcctgagcagccgctgtgaggtggacaggaccagcagtgaccaccagaccatcctgcgggcctgggccgtgaaggactttgcccccaactgccccctgtatgtgcagatcctgaagccagagaacaagttccacatcaagtttgctgaccacgtggtgtgtgaggaggagttcaagtatgccatgctggccctgaactgcatctgcccagccaccagcaccctcatcaccctgctggtgcacaccagccggggccaggagggccagcagagccctgagcagtggcagaagatgtatggccgctgcagcggaaatgaggtgtaccacatcgtgctggaggagagcaccttctttgctgaatatgagggcaagagcttcacctacgccagcttccacgcccacaagaagtttggagtgtgcctgattggagtgagaagagaggacaacaagaacatcctgctgaaccctggcccccgctacatcatgaacagcacagacatctgcttctacatcaacatcaccaaggaggagaacagcgccttcaagaaccaggaccagcagaggaagagcaatgtgagccgctccttctaccacggccccagccggctgcctgtgcacagcatcatcgcctccatgggcaccgtggccatcgacctgcaggacaccagctgccgcagcgccagcggccccaccctgagcctgcccacagagggcagcaaggagatcagaagacccagcatcgcccctgtgctggaggtggccgacaccagcagcatccagacctgtgacctgctgagtgaccagagtgaagatgagaccaccccagatgaggagatgagcagcaacctggagtatgccaagggctacccaccctacagcccctacatcggcagcagccccaccttctgccacctgctgcacgagaaggtgcccttctgctgcctgcggctggacaagagctgccagcacaactactatgaagatgccaaggcctacggcttcaagaacaagctgatcatcgtggccgctgagacagctggaaatggcctgtacaacttcatcgtgcccctgcgggcctactaccggcccaagaaggagctgaaccccatcgtgctgctgctggacaaccccccagacatgcacttcctggatgccatctgctggttccccatggtgtactacatggtgggcagcattgacaacctggatgacctgctgcgctgtggggtgacctttgctgccaacatggtggtggtggacaaggagagcaccatgtctgctgaggaggactacatggctgatgccaagaccatcgtgaatgtgcagaccctcttccgcctcttcagcagcctgagcatcatcacagagctgacccacccagccaacatgaggttcatgcagttccgggccaaggactgctacagcctggccctgagcaagctggagaagaaggagcgggagcggggcagcaacctggccttcatgttccggctgccctttgctgctggccgggtcttcagcatctccatgctggacaccctgctgtaccagagctttgtgaaggactacatgatcagcatcacccggctgctgctgggcctggacaccaccccaggcagcggcttcctgtgcagcatgaagatcacagcagatgacctgtggatccgcacctacgcccggctgtaccagaagctgtgcagcagcactggagatgtgcccatcggcatctacagaacagagagccagaagctgaccaccagcgagagccagatcagcatctctgtggaggagtgggaggacaccaaggacagcaaggagcagggccaccacaggagcaaccacaggaacagcaccagcagtgaccagagcgaccaccccctgctgcggaggaagtccatgcagtgggcccggcggctgagcaggaagggccccaagcacagcggcaagacagctgagaagatcacccagcagaggctgaacctgtacagaagaagtgagcggcaggagctggccgagctggtgaagaacaggatgaagcacctgggcctgagcacagtgggctatgatgagatgaatgaccaccagagcaccctgagctacatcctgatcaaccccagcccagacaccagaattgagctgaatgatgtggtgtacctgatccggccagaccccctggcctacctgcccaacagcgagcccagcagaagaaacagcatctgcaatgtgacaggccaggacagccgggaggagacccagctgtag

SEQ ID NO: 164808 - DNA, 3210 bp, synthetic construct
  misc_feature 1..3210: note = Description of Artificial Sequence: Synthetic coding sequence
  source 1..3210: mol_type = other DNA
atggtggacctggagagcgaggtgccccccctgcccccacgctaccgcttccgggacctgctgctgggggaccagggctggcagaatgatgacagagtgcaggtggagttctacatgaatgaaaacaccttcaaggagcggctgaagctgttcttcatcaagaaccagaggagcagcctgcgcatccgcctcttcaacttcagcctgaagctgctgagctgcctgctgtacatcatccgggtgctgctggagaaccccagccagggcaatgagtggagccacatcttctgggtgaacagaagcctgcccctgtggggcctgcaggtgtctgtggccctgatcagcctgtttgagaccatcctgctgggctacctgagctacaagggcaacatctgggagcagatcctgcgcatccccttcatcctggagatcatcaatgctgtgcccttcatcatcagcatcttctggcccagcctgaggaacctgtttgtgcctgtgttcctgaactgctggctggccaagcacgccctggagaacatgatcaatgacctgcaccgggccatccagaggacccagagcgccatgttcaaccaggtgctgatcctgatcagcaccctgctgtgcctgatcttcacctgcatctgtggcatccagcacctggagagaattggcaagaagctgaacctgtttgacagcctgtacttctgcatcgtgaccttcagcacagtgggctttggagatgtgaccccagagacctggagcagcaagctgtttgtggtggccatgatctgtgtggccctggtggtgctgcccatccagtttgagcagctggcctacctgtggatggagcggcagaagagcggcggcaactacagccgccaccgggcccagacagagaagcacgtggtgctgtgtgtgagcagcctgaagattgacctgctgatggacttcctgaatgagttctacgcccacccccggctgcaggactactacgtggtgatcctgtgccccacagagatggatgtgcaggtgagaagagtgctgcagatccccatgtggagccagagggtcatctacctgcagggcagcgccctgaaggaccaggacctgctgcgggccaagatggatgatgctgaggcctgcttcatcctgagcagccgctgtgaggtggacaggaccagcagtgaccaccagaccatcctgcgggcctgggccgtgaaggactttgcccccaactgccccctgtatgtgcagatcctgaagccagagaacaagttccacatcaagtttgctgaccacgtggtgtgtgaggaggagttcaagtatgccatgctggccctgaactgcatctgcccagccaccagcaccctcatcaccctgctggtgcacaccagccggggccagtttggagtgtgcctgattggagtgagaagagaggacaacaagaacatcctgctgaaccctggcccccgctacatcatgaacagcacagacatctgcttctacatcaacatcaccaaggaggagaacagcgccttcaagaaccaggaccagcagaggaagagcaatgtgagccgctccttctaccacggccccagccggctgcctgtgcacagcatcatcgcctccatgggcaccgtggccatcgacctgcaggacaccagctgccgcagcgccagcggccccaccctgagcctgcccacagagggcagcaaggagatcagaagacccagcatcgcccctgtgctggaggtggccgacaccagcagcatccagacctgtgacctgctgagtgaccagagtgaagatgagaccaccccagatgaggagatgagcagcaacctggagtatgccaagggctacccaccctacagcccctacatcggcagcagccccaccttctgccacctgctgcacgagaaggtgcccttctgctgcctgcggctggacaagagctgccagcacaactactatgaagatgccaaggcctacggcttcaagaacaagctgatcatcgtggccgctgagacagctggaaatggcctgtacaacttcatcgtgcccctgcgggcctactaccggcccaagaaggagctgaaccccatcgtgctgctgctggacaaccccctggatgacctgctgcgctgtggggtgacctttgctgccaacatggtggtggtggacaaggagagcaccatgtctgctgaggaggactacatggctgatgccaagaccatcgtgaatgtgcagaccctcttccgcctcttcagcagcctgagcatcatcacagagctgacccacccagccaacatgaggttcatgcagttccgggccaaggactgctacagcctggccctgagcaagctggagaagaaggagcgggagcggggcagcaacctggccttcatgttccggctgccctttgctgctggccgggtcttcagcatctccatgctggacaccctgctgtaccagagctttgtgaaggactacatgatcagcatcacccggctgctgctgggcctggacaccaccccaggcagcggcttcctgtgcagcatgaagatcacagcagatgacctgtggatccgcacctacgcccggctgtaccagaagctgtgcagcagcactggagatgtgcccatcggcatctacagaacagagagccagaagctgaccaccagcgaggagacctacatcctgatcttcctgagccagatcagcatctctgtggaggagtgggaggacaccaaggacagcaaggagcagggccaccacaggagcaaccacaggaacagcaccagcagtgaccagagcgaccaccccctgctgcggaggaagtccatgcagtgggcccggcggctgagcaggaagggccccaagcacagcggcaagacagctgagaagatcacccagcagaggctgaacctgtacagaagaagtgagcggcaggagctggccgagctggtgaagaacaggatgaagcacctgggcctgagcacagtgggctatgatgagatgaatgaccaccagagcaccctgagctacatcctgatcaaccccagcccagacaccagaattgagctgaatgatgtggtgtacctgatccggccagaccccctggcctacctgcccaacagcgagcccagcagaagaaacagcatctgcaatgtgacaggccaggacagccgggaggagacccagctgtag

SEQ ID NO: 164809 - DNA, 3336 bp, synthetic construct
  misc_feature 1..3336: note = Description of Artificial Sequence: Synthetic coding sequence
  source 1..3336: mol_type = other DNA
atggtggacctggagagcgaggtgccccccctgcccccacgctaccgcttccgggacctgctgctgggggaccagggctggcagaatgatgacagagtgcaggtggagttctacatgaatgaaaacaccttcaaggagcggctgaagctgttcttcatcaagaaccagaggagcagcctgcgcatccgcctcttcaacttcagcctgaagctgctgagctgcctgctgtacatcatccgggtgctgctggagaaccccagccagggcaatgagtggagccacatcttctgggtgaacagaagcctgcccctgtggggcctgcaggtgtctgtggccctgatcagcctgtttgagaccatcctgctgggctacctgagctacaagggcaacatctgggagcagatcctgcgcatccccttcatcctggagatcatcaatgctgtgcccttcatcatcagcatcttctggcccagcctgaggaacctgtttgtgcctgtgttcctgaactgctggctggccaagcacgccctggagaacatgatcaatgacctgcaccgggccatccagaggacccagagcgccatgttcaaccaggtgctgatcctgatcagcaccctgctgtgcctgatcttcacctgcatctgtggcatccagcacctggagagaattggcaagaagctgaacctgtttgacagcctgtacttctgcatcgtgaccttcagcacagtgggctttggagatgtgaccccagagacctggagcagcaagctgtttgtggtggccatgatctgtgtggccctggtggtgctgcccatccagtttgagcagctggcctacctgtggatggagcggcagaagagcggcggcaactacagccgccaccgggcccagacagagaagcacgtggtgctgtgtgtgagcagcctgaagattgacctgctgatggacttcctgaatgagttctacgcccacccccggctgcaggactactacgtggtgatcctgtgccccacagagatggatgtgcaggtgagaagagtgctgcagatccccatgtggagccagagggtcatctacctgcagggcagcgccctgaaggaccaggacctgctgcgggccaagatggatgatgctgaggcctgcttcatcctgagcagccgctgtgaggtggacaggaccagcagtgaccaccagaccatcctgcgggcctgggccgtgaaggactttgcccccaactgccccctgtatgtgcagatcctgaagccagagaacaagttccacatcaagtttgctgaccacgtggtgtgtgaggaggagttcaagtatgccatgctggccctgaactgcatctgcccagccaccagcaccctcatcaccctgctggtgcacaccagccggggccaggagggccagcagagccctgagcagtggcagaagatgtatggccgctgcagcggaaatgaggtgtaccacatcgtgctggaggagagcaccttctttgctgaatatgagggcaagagcttcacctacgccagcttccacgcccacaagaagtttggagtgtgcctgattggagtgagaagagaggacaacaagaacatcctgctgaaccctggcccccgctacatcatgaacagcacagacatctgcttctacatcaacatcaccaaggaggagaacagcgccttcaagaaccaggaccagcagaggaagagcaatgtgagccgctccttctaccacggccccagccggctgcctgtgcacagcatcatcgcctccatgggcaccgtggccatcgacctgcaggacaccagctgccgcagcgccagcggccccaccctgagcctgcccacagagggcagcaaggagatcagaagacccagcatcgcccctgtgctggaggtggccgacaccagcagcatccagacctgtgacctgctgagtgaccagagtgaagatgagaccaccccagatgaggagatgagcagcaacctggagtatgccaagggctacccaccctacagcccctacatcggcagcagccccaccttctgccacctgctgcacgagaaggtgcccttctgctgcctgcggctggacaagagctgccagcacaactactatgaagatgccaaggcctacggcttcaagaacaagctgatcatcgtggccgctgagacagctggaaatggcctgtacaacttcatcgtgcccctgcgggcctactaccggcccaagaaggagctgaaccccatcgtgctgctgctggacaaccccctggatgacctgctgcgctgtggggtgacctttgctgccaacatggtggtggtggacaaggagagcaccatgtctgctgaggaggactacatggctgatgccaagaccatcgtgaatgtgcagaccctcttccgcctcttcagcagcctgagcatcatcacagagctgacccacccagccaacatgaggttcatgcagttccgggccaaggactgctacagcctggccctgagcaagctggagaagaaggagcgggagcggggcagcaacctggccttcatgttccggctgccctttgctgctggccgggtcttcagcatctccatgctggacaccctgctgtaccagagctttgtgaaggactacatgatcagcatcacccggctgctgctgggcctggacaccaccccaggcagcggcttcctgtgcagcatgaagatcacagcagatgacctgtggatccgcacctacgcccggctgtaccagaagctgtgcagcagcactggagatgtgcccatcggcatctacagaacagagagccagaagctgaccaccagcgagagccagatcagcatctctgtggaggagtgggaggacaccaaggacagcaaggagcagggccaccacaggagcaaccacaggaacagcaccagcagtgaccagagcgaccaccccctgctgcggaggaagtccatgcagtgggcccggcggctgagcaggaagggccccaagcacagcggcaagacagctgagaagatcacccagcagaggctgaacctgtacagaagaagtgagcggcaggagctggccgagctggtgaagaacaggatgaagcacctgggcctgagcacagtgggctatgatgagatgaatgaccaccagagcaccctgagctacatcctgatcaaccccagcccagacaccagaattgagctgaatgatgtggtgtacctgatccggccagaccccctggcctacctgcccaacagcgagcccagcagaagaaacagcatctgcaatgtgacaggccaggacagccgggaggagacccagctgtag

SEQ ID NO: 164810 - DNA, 1113 bp, synthetic construct
  misc_feature 1..1113: note = Description of Artificial Sequence: Synthetic coding sequence
  source 1..1113: mol_type = other DNA
atgccctacctgcacctggaccaccagaccatcctgcgggcctgggccgtgaaggactttgcccccaactgccccctgtatgtgcagatcctgaagccagagaacaagttccacatcaagtttgctgaccacgtggtgtgtgaggaggagttcaagtatgccatgctggccctgaactgcatctgcccagccaccagcaccctcatcaccctgctggtgcacaccagccggggccaggagggccagcagagccctgagcagtggcagaagatgtatggccgctgcagcggaaatgaggtgtaccacatcgtgctggaggagagcaccttctttgctgaatatgagggcaagagcttcacctacgccagcttccacgcccacaagaagtttggagtgtgcctgattggagtgcggcgggaggacaacaagaacatcctgctgaaccctggcccccgctacatcatgaacagcacagacatctgcttctacatcaacatcaccaaggaggagaacagcgccttcaagaaccaggaccagcagaggaagagcaatgtgagccgctccttctaccacggccccagccggctgcctgtgcacagcatcatcgcctccatgggcaccgtggccatcgacctgcaggacaccagctgccgcagcgccagcggccccaccctgagcctgcccacagagggcagcaaggagatccggcggcccagcatcgcccctgtgctggaggtggccgacaccagcagcatccagacctgtgacctgctgagtgaccagagtgaagatgagaccaccccagatgaggagatgagcagcaacctggagtatgccaagggctacccaccctacagcccctacatcggcagcagccccaccttctgccacctgctgcacgagaaggtgcccttctgctgcctgcggctggacaagagctgccagcacaactactatgaagatgccaaggcctacggcttcaagaacaagctgatcatcgtggccgctgagacagctggaaatggcctgtacaacttcatcgtgcccctgcgggcctactaccggcccaagaaggagctgaaccccatcgtgctgctgctggacaacccctag

SEQ ID NO: 164811 - DNA, 1572 bp, synthetic construct
  misc_feature 1..1572: note = Description of Artificial Sequence: Synthetic coding sequence
  source 1..1572: mol_type = other DNA
atcatcaatgacctgcaccgggccatccagaggacccagagcgccatgttcaaccaggtgctgatcctgatcagcaccctgctgtgcctgatcttcacctgcatctgtggcatccagcacctggagcgcatcggcaagaagctgaacctgtttgacagcctgtacttctgcatcgtgaccttcagcacagtgggctttggagatgtgaccccagagacctggagcagcaagctgtttgtggtggccatgatctgtgtggccctggtggtgctgcccatccagtttgagcagctggcctacctgtggatggagcggcagaagagcggcggcaactacagccgccaccgggcccagacagagaagcacgtggtgctgtgtgtgagcagcctgaagattgacctgctgatggacttcctgaatgagttctacgcccacccccggctgcaggactactacgtggtgatcctgtgccccacagagatggatgtgcaggtgcggcgggtgctgcagatccccatgtggagccagagggtcatctacctgcagggcagcgccctgaaggaccaggacctgctgcgggccaagatggatgatgctgaggcctgcttcatcctgagcagccgctgtgaggtggacaggaccagcagtgaccaccagaccatcctgcgggcctgggccgtgaaggactttgcccccaactgccccctgtatgtgcagatcctgaagccagagaacaagttccacatcaagtttgctgaccacgtggtgtgtgaggaggagttcaagtatgccatgctggccctgaactgcatctgcccagccaccagcaccctcatcaccctgctggtgcacaccagccggggccaggagggccagcagagccctgagcagtggcagaagatgtatggccgctgcagcggaaatgaggtgtaccacatcgtgctggaggagagcaccttctttgctgaatatgagggcaagagcttcacctacgccagcttccacgcccacaagaagtttggagtgtgcctgattggagtgcggcgggaggacaacaagaacatcctgctgaaccctggcccccgctacatcatgaacagcacagacatctgcttctacatcaacatcaccaaggaggagaacagcgccttcaagaaccaggaccagcagaggaagagcaatgtgagccgctccttctaccacggccccagccggctgcctgtgcacagcatcatcgcctccatgggcaccgtggccatcgacctgcaggacaccagctgccgcagcgccagcggccccaccctgagcctgcccacagagggcagcaaggagatccggcggcccagcatcgcccctgtgctggaggtggccgacaccagcagcatccagacctgtgacctgctgagtgaccagagtgaagatgagaccaccccagatgaggagatgagcagcaacctggagtatgccaagggctacccaccctacagcccctacatcggcagcagccccaccttctgccacctgctgcacgagaaggtgcccttctgctgcctgcggctggacaagttctag

SEQ ID NO: 164812 - DNA, 1503 bp, synthetic construct
  misc_feature 1..1503: note = Description of Artificial Sequence: Synthetic coding sequence
  source 1..1503: mol_type = other DNA
atgcccagcagcggccgggccctgctggacagccccctggacagcggcagcctgaccagcctggacagcagcgtcttctgcagcgagggggagggggagcccctggccctgggggactgcttcaccgtgaatgtgggcggcagcagatttgtgctgagccagcaggccctgagctgcttcccccacacccggctgggcaagctggccgtggtggtggccagctacagaagacctggggccctggccgctgtgcccagccccctggagctgtgtgatgatgccaaccctgtggacaatgagtacttctttgacaggagcagccaggccttccgctacgtgctgcactactacagaacaggccgcctgcacgtgatggagcagctgtgtgccctgtccttcctgcaggagatccagtactggggcattgatgagctgagcattgacagctgctgccgggaccgctacttccggaggaaggagctgtctgagaccctggacttcaagaaggacacagaggaccaggagagccagcacgagagcgagcaggacttcagccagggcccctgccccaccgtgcggcagaagctgtggaacatcctggagaagccaggcagcagcacagctgcccgcatctttggagtcatcagcatcatctttgtggtggtgtccatcatcaacatggccctgatgtctgctgagctgtcctggctggacctgcagctgctggagatcctggagtatgtgtgcatctcctggttcaccggggagtttgtgctgcgcttcctgtgtgtgcgggaccgctgccgcttcctgaggaaggtgcccaacatcatcgacctgctggccatcctgcccttctacatcaccctgctggtggagagcctgagcggcagccagaccacccaggagctggagaatgtgggccgcatcgtgcaggtgctgcggctgctgcgggccctgaggatgctgaagctgggccgccacagcacaggcctgcggagcctgggcatgaccatcacccagtgctatgaggaggtgggcctgctgctgctcttcctgtctgtgggcatcagcatcttcagcacagtggagtactttgctgagcagagcatcccagacaccaccttcacctctgtgccctgtgcctggtggtgggccaccacctccatgaccaccgtgggctatggagacatccggccagacaccaccaccgggaagatcgtggccttcatgtgcatcctgagcggcatcctggtgctggccctgcccatcgccatcatcaatgaccgcttcagcgcctgctacttcaccctgaagctgaaggaggccgctgtgcggcagcgggaggccctgaagaagctgaccaagaacatcgccacagacagctacatctctgtgaacctgagagatgtgtatgcccggagcatcatggagatgctgcggctgaagggccgggagcgggccagcaccaggagcagtggaggagatgacttctggttctag

SEQ ID NO: 164813 - DNA, 1503 bp, synthetic construct; identical to SEQ ID NO: 164812
  misc_feature 1..1503: note = Description of Artificial Sequence: Synthetic coding sequence
  source 1..1503: mol_type = other DNA

SEQ ID NO: 164814 - DNA, 1131 bp, synthetic construct
  misc_feature 1..1131: note = Description of Artificial Sequence: Synthetic coding sequence
  source 1..1131: mol_type = other DNA
atggagcagctgtgtgccctgtccttcctgcaggagatccagtactggggcattgatgagctgagcattgacagctgctgccgggaccgctacttccggaggaaggagctgtctgagaccctggacttcaagaaggacacagaggaccaggagagccagcacgagagcgagcaggacttcagccagggcccctgccccaccgtgcggcagaagctgtggaacatcctggagaagccaggcagcagcacagctgcccgcatctttggagtcatcagcatcatctttgtggtggtgtccatcatcaacatggccctgatgtctgctgagctgtcctggctggacctgcagctgctggagatcctggagtatgtgtgcatctcctggttcaccggggagtttgtgctgcgcttcctgtgtgtgcgggaccgctgccgcttcctgaggaaggtgcccaacatcatcgacctgctggccatcctgcccttctacatcaccctgctggtggagagcctgagcggcagccagaccacccaggagctggagaatgtgggccgcatcgtgcaggtgctgcggctgctgcgggccctgaggatgctgaagctgggccgccacagcacaggcctgcggagcctgggcatgaccatcacccagtgctatgaggaggtgggcctgctgctgctcttcctgtctgtgggcatcagcatcttcagcacagtggagtactttgctgagcagagcatcccagacaccaccttcacctctgtgccctgtgcctggtggtgggccaccacctccatgaccaccgtgggctatggagacatccggccagacaccaccaccgggaagatcgtggccttcatgtgcatcctgagcggcatcctggtgctggccctgcccatcgccatcatcaatgaccgcttcagcgcctgctacttcaccctgaagctgaaggaggccgctgtgcggcagcgggaggccctgaagaagctgaccaagaacatcgccacagacagctacatctctgtgaacctgagagatgtgtatgcccggagcatcatggagatgctgcggctgaagggccgggagcgggccagcaccaggagcagtggaggagatgacttctggttctag

SEQ ID NO: 164815 - DNA, 1638 bp, synthetic construct
  misc_feature 1..1638: note = Description of Artificial Sequence: Synthetic coding sequence
  source 1..1638: mol_type = other DNA
atgctgaagcagagcgagcggcggcgctcctggagctaccggccctggaacaccacagaaaatgaaggcagccagcacagaagaagcatctgcagcctgggcgcccggagcggcagccaggccagcatccacggctggacagagggcaactacaactactacattgaagaagatgaagatggagaggaggaggaccagtggaaggatgacctggccgaggaggaccagcaggccggggaggtgaccacagccaagccagagggccccagcgaccccccagccctgctgagcaccctgaatgtgaatgtgggcggccacagctaccagctggactactgtgagctggccggcttccccaagacccggctgggccgcctggccaccagcaccagccgcagccggcagctgagcctgtgtgatgattatgaggagcagacagatgagtacttctttgaccgggaccctgctgtgttccagctggtgtacaacttctacctgtctggagtgctgctggtgctggatggcctgtgcccccggcgcttcctggaggagctgggctactggggcgtgcggctgaagtacaccccccgctgctgccgcatctgctttgaggagaggagagatgagctgtctgagcggctgaagatccagcacgagctgcgggcccaggcccaggtggaggaggccgaggagctgttccgggacatgaggttctacggcccccagaggcggcggctgtggaacctgatggagaagcccttcagctctgtggccgccaaggccatcggcgtggccagcagcacctttgtgctggtgtctgtggtggccctggccctgaacacagtggaggagatgcagcagcacagcggccagggcgagggcggccctgacctgcggcccatcctggagcacgtggagatgctgtgcatgggcttcttcaccctggagtacctgctgcggctggccagcaccccagacctgcggagatttgcccggagcgccctgaacctggtggacctggtggccatcctgcccctgtacctgcagctgctgctggagtgcttcaccggggagggccaccagaggggccagacagtgggctctgtgggcaaggtgggccaggtgctgcgggtgatgaggctgatgaggatcttccgcatcctgaagctggcccggcacagcacaggcctgcgggccttcggcttcaccctgcggcagtgctaccagcaggtgggctgcctgctgctcttcatcgccatgggcatcttcaccttctctgctgctgtgtacagcgtggagcatgatgtgcccagcaccaacttcaccaccatcccccacagctggtggtgggccgctgtgtccatcagcacagtgggctacggggacatgtacccagagacccacctgggccgcttctttgccttcctgtgcatcgccttcggcatcatcctgaatggcatgcccatcagcatcctgtacaacaagttcagtgactactacagcaagctgaaggcctatgagtacaccaccatccggcgggagcggggggaggtgaacttcatgcagagggccaggaagaagattgctgagtgcctgctgggcagcaacccccagctgaccccccggcaggagaactag

SEQ ID NO: 164816 - DNA, 963 bp, synthetic construct
  misc_feature 1..963: note = Description of Artificial Sequence: Synthetic coding sequence
  source 1..963: mol_type = other DNA
atgctgaagcagagcgagcggcggcgctcctggagctaccggccctggaacaccacagaaaatgaaggcagccagcacagaagaagcatctgcagcctgggcgcccggagcggcagccaggccagcatccacggctggacagagggcaactacaactactacattgaagaagatgaagatggagaggaggaggaccagtggaaggatgacctggccgaggaggaccagcaggccggggaggtgaccacagccaagccagagggccccagcgaccccccagccctgctgagcaccctgaatgtgaatgtgggcggccacagctaccagctggactactgtgagctggccggcttccccaagacccggctgggccgcctggccaccagcaccagccgcagccggcagctgagcctgtgtgatgattatgaggagcagacagatgagtacttctttgaccgggaccctgctgtgttccagctggtgtacaacttctacctgtctggagtgctgctggtgctggatggcctgtgcccccggcgcttcctggaggagctgggctactggggcgtgcggctgaagtacaccccccgctgctgccgcatctgctttgaggagaggagagatgagctgtctgagcggctgaagatccagcacctgcgggcccggctgcggggcggggccggggcccagcacagaggaggagatgctgctgccctgggcgccggccggggccggcccaggcctgctgcccaccctggggcccggggagatgctgtgcacggcctgctgcacgcccgggtgcctgctgcccccagcctgcacgcccggcctgaggccctgcgggcccagaggccccagcccggcggccctgggggccaccctgctgccctgcccagcgctgctgcccgggtgctgcacggccggggcccccccaccaggccagatggcggccagaggggctag

SEQ ID NO: 164817 - DNA, 1740 bp, synthetic construct
  misc_feature 1..1740: note = Description of Artificial Sequence: Synthetic coding sequence
  source 1..1740: mol_type = other DNA
atgagcagctgccgctacaatggaggagtgatgaggcccctgagcaacctgagcgccagcagaagaaacctgcacgagatggattctgaggcccagcccctgcagcccccagcctctgtgggcggcggcggcggggccagcagccccagcgctgctgctgctgctgctgctgctgtgagcagcagcgcccctgagatcgtggtgtccaagccagagcacaacaacagcaacaacctggccctgtatggcaccggcggcggcggcagcactggaggcggcggcggcggcggcggcagcggccacggcagcagcagcggcaccaagagcagcaagaagaagaaccagaacatcggctacaagctgggccaccggcgggccctgtttgagaagaggaagaggctgagtgactatgccctgatcttcggcatgtttggcatcgtggtgatggtgattgaaacagagctgtcctggggcgcctatgacaaggccagcctgtacagcctggccctgaagtgcctgatcagcctgagcaccatcatcctgctgggcctcatcatcgtgtaccacgcccgggagatccagctgttcatggtggacaacggggctgatgactggagaattgccatgacctatgagcgcatcttcttcatctgcctggagatcctggtgtgtgccatccaccccatccctggcaactacaccttcacctggacagcccggctggccttctcctatgcccccagcaccaccacagcagatgtggacatcatcctgagcatccccatgttcctgcggctgtacctgattgcccgggtgatgctgctgcacagcaagctgttcacagatgccagcagccgcagcatcggggccctgaacaagatcaacttcaacaccaggtttgtgatgaagaccctgatgaccatctgccccggcaccgtgctgctggtgttcagcatcagcctgtggatcatcgccgcctggacagtgcgggcctgtgagcgctaccatgaccagcaggatgtgaccagcaacttcctgggcgccatgtggctgatcagcatcaccttcctgagcatcggctatggagacatggtgcccaacacctactgtgggaagggcgtgtgcctgctgaccggcatcatgggcgccggctgcacagccctggtggtggccgtggtggccaggaagctggagctgaccaaggccgagaagcacgtgcacaacttcatgatggacacccagctgaccaagagggtgaagaatgctgctgccaacgtgctgcgggagacctggctgatctacaagaacaccaagctggtgaagaagattgaccacgccaaggtgaggaagcaccagaggaagttcctgcaggccatccaccagctgcggtctgtgaagatggagcagaggaagctgaatgaccaggccaacaccctggtggacctggccaagacccagaacatcatgtatgacatgatcagtgacctgaatgaaagaagtgaagattttgagaagagaattgtgaccctggagaccaagctggagaccctcatcggcagcatccacgccctgcccggcctcatcagccagaccatccggcagcagcagagggacttcatcgaggcccagatggagagctatgacaagcacgtgacctacaatgctgagaggagccgcagcagcagcagaagaagaagaagcagcagcacagccccacccaccagcagcgagagcagctag

SEQ ID NO: 164818 - DNA, 696 bp, synthetic construct
  misc_feature 1..696: note = Description of Artificial Sequence: Synthetic coding sequence
  source 1..696: mol_type = other DNA
atgtggctgatcagcatcaccttcctgagcatcggctatggagacatggtgcccaacacctactgtgggaagggcgtgtgcctgctgaccggcatcatgggcgccggctgcacagccctggtggtggccgtggtggccaggaagctggagctgaccaaggccgagaagcacgtgcacaacttcatgatggacacccagctgaccaagagggtgaagaatgctgctgccaacgtgctgcgggagacctggctgatctacaagaacaccaagctggtgaagaagattgaccacgccaaggtgaggaagcaccagaggaagttcctgcaggccatccaccagctgcggtctgtgaagatggagcagaggaagctgaatgaccaggccaacaccctggtggacctggccaagacccagaacatcatgtatgacatgatcagtgacctgaatgaaagaagtgaagattttgagaagagaattgtgaccctggagaccaagctggagaccctcatcggcagcatccacgccctgcccggcctcatcagccagaccatccggcagcagcagagggacttcatcgaggcccagatggagagctatgacaagcacgtgacctacaatgctgagaggagccgcagcagcagcagaagaagaagaagcagcagcacagccccacccaccagcagcgagagcagctag

SEQ ID NO: 164819 - DNA, 1326 bp, synthetic construct
  misc_feature 1..1326: note = Description of Artificial Sequence: Synthetic coding sequence
  source 1..1326: mol_type = other DNA
atgagcagctgccgctacaatggaggagtgatgaggcccctgagcaacctgagcgccagcagaagaaacctgcacgagatggattctgaggcccagcccctgcagcccccagcctctgtgggcggcggcggcggggccagcagccccagcgctgctgctgctgctgctgctgctgtgagcagcagcgcccctgagatcgtggtgtccaagccagagcacaacaacagcaacaacctggccctgtatggcaccggcggcggcggcagcactggaggcggcggcggcggcggcggcagcggccacggcagcagcagcggcaccaagagcagcaagaagaagaaccagaacatcggctacaagctgggccaccggcgggccctgtttgagaagaggaagaggctgagtgactatgccctgatcttcggcatgtttggcatcgtggtgatggtgattgaaacagagctgtcctggggcgcctatgacaaggccagcctgtacagcctggccctgaagtgcctgatcagcctgagcaccatcatcctgctgggcctcatcatcgtgtaccacgcccgggagatccagctgttcatggtggacaacggggctgatgactggagaattgccatgacctatgagcgcatcttcttcatctgcctggagatcctggtgtgtgccatccaccccatccctggcaactacaccttcacctggacagcccggctggccttctcctatgcccccagcaccaccacagcagatgtggacatcatcctgagcatccccatgttcctgcggctgtacctgattgcccgggtgatgctgctgcacagcaagctgttcacagatgccagcagccgcagcatcggggccctgaacaagatcaacttcaacaccaggtttgtgatgaagaccctgatgaccatctgccccggcaccgtgctgctggtgttcagcatcagcctgtggatcatcgccgcctggacagtgcgggcctgtgagcgctaccatgaccagcaggatgtgaccagcaacttcctgggcgccatgtggctgatcagcatcaccttcctgagcatcggctatggagacatggtgcccaacacctactgtgggaagggcgtgtgcctgctgaccggcatcatgggcgccggctgcacagccctggtggtggccgtggtggccaggaagctggagctgaccaaggccgagaagcacgtgcacaacttcatgatggacacccagctgaccaagagggtgtcctactacccctacatcttcaaggagaacatcatcgtcatcttctctgtgctgggcaacatggcctag

SEQ ID NO: 164820 - DNA, 2196 bp, synthetic construct
  misc_feature 1..2196: note = Description of Artificial Sequence: Synthetic coding sequence
  source 1..2196: mol_type = other DNA
atggacaccagcggccacttccatgacagcggcgtgggggacctggatgaggaccccaagtgcccctgccccagcagtggagatgagcagcagcagcagcagcagcagcagcagcagcagcagcccccacctccagcccctcctgctgccccccagcagcccctgggccccagcctgcagccccagcccccccagctgcagcagcagcagcagcagcagcagcagcagcagcagcagcagcccccccaccccctgagccagctggcccagctgcagagccagcctgtgcaccctggcctgctgcacagcagccccacagccttccgggccccacccagcagcaacagcacagccatcctgcaccccagcagccggcagggcagccagctgaacctgaatgaccacctgctgggccacagccccagcagcacagccaccagcggccctgggggcggcagccgccaccggcaggccagccccctggtgcaccggcgggacagcaaccccttcacagaaattgccatgagcagctgcaagtacagcggaggagtgatgaagcccctgagccggctgagcgccagcagaagaaacctgattgaagctgagacagagggccagcccctgcagctgttcagccccagcaaccccccagaaattgtcatcagcagccgggaggacaaccacgcccaccagaccctgctgcaccaccccaatgccacccacaaccaccagcacgccggcaccacagccagcagcaccaccttccccaaggccaacaagaggaagaaccagaacatcggctacaagctgggccacagaagagccctgtttgagaagaggaagaggctgagtgactatgccctgatcttcggcatgtttggaattgtggtgatggtgattgaaacagagctgtcctggggcctgtacagcaaggacagcatgttcagcctggccctgaagtgcctgatcagcctgagcaccatcatcctgctgggcctcatcatcgcctaccacacccgggaggtgcagctgtttgtgattgacaatggagcagatgactggagaattgccatgacctatgaaagaatcctgtacatcagcctggagatgctggtgtgtgccatccaccccatccctggagagtacaagttcttctggacagcccggctggccttctcctacacccccagcagagctgaggctgatgtggacatcatcctgagcatccccatgttcctgcggctgtacctgattgcccgggtgatgctgctgcacagcaagctgttcacagatgccagcagccgcagcattggagccctgaacaagatcaacttcaacaccaggtttgtgatgaagaccctgatgaccatctgccccggcaccgtgctgctggtgttcagcatcagcctgtggatcatcgccgcctggacagtgcgggtgtgtgagcgctaccatgaccagcaggatgtgaccagcaacttcctgggcgccatgtggctgatcagcatcaccttcctgagcatcggctacggggacatggtgccccacacctactgtgggaaaggagtgtgcctgctgaccggcatcatgggcgccggctgcacagccctggtggtggccgtggtggccaggaagctggagctgaccaaggccgagaagcacgtgcacaacttcatgatggacacccagctgaccaagaggatcaagaatgctgctgccaacgtgctgcgggagacctggctgatctacaagcacaccaagctgctgaagaagattgaccacgccaaggtgaggaagcaccagaggaagttcctgcaggccatccaccagctgcggtctgtgaagatggagcagaggaagctgagtgaccaggccaacaccctggtggacctgagcaagatgcagaatgtgatgtatgacctgatcacagagctgaatgacagaagtgaggacctggagaagcagatcggcagcctggagagcaagctggagcacctgacagccagcttcaacagcctgcccctgctgattgctgacaccctgcggcagcagcagcagcagctgctgagcgccatcatcgaggcccggggcgtgtctgtggccgtgggcaccacccacacccccatcagtgacagccccatcggcgtgagcagcaccagcttccccaccccctacaccagcagcagcagctgctag

SEQ ID NO: 164821 - DNA, 1257 bp, synthetic construct
  misc_feature 1..1257: note = Description of Artificial Sequence: Synthetic coding sequence
  source 1..1257: mol_type = other DNA
atgttcagcctggccctgaagtgcctgatcagcctgagcaccatcatcctgctgggcctcatcatcgcctaccacacccgggaggtgcagctgtttgtgattgacaacggggctgatgactggagaattgccatgacctatgagcgcatcctgtacatcagcctggagatgctggtgtgtgccatccaccccatccctggagagtacaagttcttctggacagcccggctggccttctcctacacccccagcagagctgaggctgatgtggacatcatcctgagcatccccatgttcctgcggctgtacctgattgcccgggtgatgctgctgcacagcaagctgttcacagatgccagcagccgcagcatcggggccctgaacaagatcaacttcaacaccaggtttgtgatgaagaccctgatgaccatctgccccggcaccgtgctgctggtgttcagcatcagcctgtggatcatcgccgcctggacagtgcgggtgtgtgagcgctaccatgaccagcaggatgtgaccagcaacttcctgggcgccatgtggctgatcagcatcaccttcctgagcatcggctatggagacatggtgccccacacctactgtgggaagggcgtgtgcctgctgaccggcatcatgggcgccggctgcacagccctggtggtggccgtggtggccaggaagctggagctgaccaaggccgagaagcacgtgcacaacttcatgatggacacccagctgaccaagaggatcaagaatgctgctgccaacgtgctgcgggagacctggctgatctacaagcacaccaagctgctgaagaagattgaccacgccaaggtgaggaagcaccagaggaagttcctgcaggccatccaccagctgcggtctgtgaagatggagcagaggaagctgagtgaccaggccaacaccctggtggacctgagcaagatgcagaatgtgatgtatgacctgatcacagagctgaatgacagaagtgaggacctggagaagcagatcggcagcctggagagcaagctggagcacctgacagccagcttcaacagcctgcccctgctgattgctgacaccctgcggcagcagcagcagcagctgctgagcgccatcatcgaggcccggggcgtgtctgtggccgtgggcaccacccacacccccatcagtgacagccccatcggcgtgagcagcaccagcttccccaccccctacaccagcagcagcagctgctag

SEQ ID NO: 164822 - DNA, 1281 bp, synthetic construct
  misc_feature 1..1281: note = Description of Artificial Sequence: Synthetic coding sequence
  source 1..1281: mol_type = other DNA
atggagcggcccatcaaggacagcatgttcagcctggccctgaagtgcctgatcagcctgagcaccatcatcctgctgggcctcatcatcgcctaccacacccgggaggtgcagctgtttgtgattgacaacggggctgatgactggagaattgccatgacctatgagcgcatcctgtacatcagcctggagatgctggtgtgtgccatccaccccatccctggagagtacaagttcttctggacagcccggctggccttctcctacacccccagcagagctgaggctgatgtggacatcatcctgagcatccccatgttcctgcggctgtacctgattgcccgggtgatgctgctgcacagcaagctgttcacagatgccagcagccgcagcatcggggccctgaacaagatcaacttcaacaccaggtttgtgatgaagaccctgatgaccatctgccccggcaccgtgctgctggtgttcagcatcagcctgtggatcatcgccgcctggacagtgcgggtgtgtgagcgctaccatgaccagcaggatgtgaccagcaacttcctgggcgccatgtggctgatcagcatcaccttcctgagcatcggctatggagacatggtgccccacacctactgtgggaagggcgtgtgcctgctgaccggcatcatgggcgccggctgcacagccctggtggtggccgtggtggccaggaagctggagctgaccaaggccgagaagcacgtgcacaacttcatgatggacacccagctgaccaagaggatcaagaatgctgctgccaacgtgctgcgggagacctggctgatctacaagcacaccaagctgctgaagaagattgaccacgccaaggtgaggaagcaccagaggaagttcctgcaggccatccaccagctgcggtctgtgaagatggagcagaggaagctgagtgaccaggccaacaccctggtggacctgagcaagatgcagaatgtgatgtatgacctgatcacagagctgaatgacagaagtgaggacctggagaagcagatcggcagcctggagagcaagctggagcacctgacagccagcttcaacagcctgcccctgctgattgctgacaccctgcggcagcagcagcagcagctgctgagcgccatcatcgaggcccggggcgtgtctgtggccgtgggcaccacccacacccccatcagtgacagccccatcggcgtgagcagcaccagcttccccaccccctacaccagcagcagcagctgctag

SEQ ID NO: 164823 - DNA, 684 bp, synthetic construct
  misc_feature 1..684: note = Description of Artificial Sequence: Synthetic coding sequence
  source 1..684: mol_type = other DNA
ccccacaccctgctggaggaccacctgctgcgggagttcttccaccccctcttcttcctgcaggcccccctgctgctgagcctgcctgcccagtacaatgccttcctgagcggctctgtgtggaccccaggcagcccccgggagcccaagcaggccaaggagaggactggagccaagatcctggtgggggagatcggctgcctggccttctttgaggacatctttggagcccgggtggccctgggctggggcctggtgctgcagggcatccagcccggccccaagatggacaccagcggccacttccatgattctggagtgggggacctggatgaggaccccaagtgcccctgccccagcagtggagatgagcagcagcagcagcagcagcagcagcagcagcagcagcccccacctccagcccccccagctgccccccagcagcccctgggccccagcctgcagccccagcccccccagctgcagcagcagcagcagcagcagcagcagcagcagcagcagcagcccccccaccccctgagccagctggcccagctgcagagccagcctgtgcaccctggcctgctgcacagcagccccacagccttccggcccccatttgtgcagctgcaccgccaccccccacccttcctgcaggcccggcagcctgcccagagccagtag

SEQ ID NO: 164824 - DNA, 1284 bp, synthetic construct
  misc_feature 1..1284: note = Description of Artificial Sequence: Synthetic coding sequence
  source 1..1284: mol_type = other DNA
atgggcggggacctggtgctgggcctgggcgccctgcggcggaggaagaggctgctggagcaggagaagagcctggccggctgggccctggtgctggccggcactggaattggcctgatggtgctgcacgccgagatgctgtggtttggaggctgctcctgggccctgtacctgttcctggtgaagtgcaccatcagcatcagcaccttcctgctgctgtgcctgattgtggccttccacgccaaggaggtgcagctgttcatgacagacaatggcctgcgggactggagggtggccctgaccggccggcaggccgcccagatcgtgctggagctggtggtgtgtggcctgcacccagcccctgtgcggggccccccctgtgtgcaggacctgggcgcccccctgaccagcccccagccctggccaggcttcctgggccagggcgaggccctgctgagcctggccatgctgctgcggctgtacctggtgcccagggctgtgctgctgcggtctggagtgctgctgaatgccagctaccgcagcatcggggccctgaaccaggtgcgcttccgccactggtttgtggccaagctgtacatgaacacccaccctggccgcctgctgctgggcctgaccctgggcctgtggctgaccacagcctgggtgctgtctgtggccgagcggcaggccgtgaatgccaccggccacctgagtgacaccctgtggctgatccccatcaccttcctgaccatcggctatggagatgtggtgcccggcaccatgtggggcaagatcgtgtgcctgtgcaccggggtgatgggcgtgtgctgcacagccctgctggtggccgtggtggccaggaagctggagttcaacaaggccgagaagcacgtgcacaacttcatgatggacatccagtacaccaaggagatgaaggagagcgctgcccgggtgctgcaggaggcctggatgttctacaagcacaccaggaggaaggagagccacgccgcccggcggcaccagaggaagctgctggccgccatcaatgccttccggcaggtgcggctgaagcacaggaagctgcgggagcaggtgaacagcatggtggacatcagcaagatgcacatgatcctgtatgacctgcagcagaacctgagcagcagccaccgggccctggagaagcagattgacaccctggccggcaagctggatgccctgacagagctgctgagcacagccctgggcccccggcagctgcctgagcccagccagcagagcaagtag

SEQ ID NO: 164825 - DNA, 888 bp, synthetic construct
  misc_feature 1..888: note = Description of Artificial Sequence: Synthetic coding sequence
  source 1..888: mol_type = other DNA
atgcatgaccagcacttccacctgctgacccccctgccccaccggggcctgagctgccagaggggccctgctgtgcatgaccggcagagagctgctggcctggcccggggagctgacagagctgctggaaatgccagctaccgcagcatcggggccctgaaccaggtgcgcttccgccactggtttgtggccaagctgtacatgaacacccaccctggccgcctgctgctgggcctgaccctgggcctgtggctgaccacagcctgggtgctgtctgtggccgagcggcaggccgtgaatgccaccggccacctgagtgacaccctgtggctgatccccatcaccttcctgaccatcggctatggagatgtggtgcccggcaccatgtggggcaagatcgtgtgcctgtgcaccggggtgatgggcgtgtgctgcacagccctgctggtggccgtggtggccaggaagctggagttcaacaaggccgagaagcacgtgcacaacttcatgatggacatccagtacaccaaggagatgaaggagagcgctgcccgggtgctgcaggaggcctggatgttctacaagcacaccaggaggaaggagagccacgccgcccggcggcaccagaggaagctgctggccgccatcaatgccttccggcaggtgcggctgaagcacaggaagctgcgggagcaggtgaacagcatggtggacatcagcaagatgcacatgatcctgtatgacctgcagcagaacctgagcagcagccaccgggccctggagaagcagattgacaccctggccggcaagctggatgccctgacagagctgctgagcacagccctgggcccccggcagctgcctgagcccagccagcagagcaagtag

SEQ ID NO: 164826 - DNA, 1119 bp, synthetic construct
  misc_feature 1..1119: note = Description of Artificial Sequence: Synthetic coding sequence
  source 1..1119: mol_type = other DNA
atgttcaagcacctgaggaagtgggtggtgacccgcttcttcggccacagccggcagagggcccggctggtgtccaaggatggccgctgcaacatcgagtttggaaatgtggaggcccagagccgcttcatcttctttgtggacatctggaccaccgtgctggacctgaagtggagatacaagatgaccatcttcatcacagccttcctgggctcctggttcttcttcggcctgctgtggtatgctgtggcctacatccacaaggacctgcctgagttccaccccagcgccaaccacaccccctgtgtggagaacatcaatggcctgaccagcgccttcctgttcagcctggagacccaggtgaccatcggctacggcttccgctgtgtgacagagcagtgtgccacagccatcttcctgctgatcttccagagcatcctgggcgtcatcatcaacagcttcatgtgtggggccatcctggccaagatcagccggcccaagaagagggccaagaccatcaccttcagcaagaatgctgtgatcagcaagagaggaggcaagctgtgcctgctgatccgggtggccaacctgaggaagagcctgctgattggcagccacatctacggcaagctgctgaagaccaccgtgaccccagagggggagaccatcatcctggaccagatcaacatcaactttgtggtggatgctggaaatgaaaatctcttcttcatcagccccctgaccatctaccacgtgattgaccacaacagccccttcttccacatggctgctgagaccctgctgcagcaggactttgagctggtggtgttcctggatggcaccgtggagagcaccagcgccacctgccaggtgaggaccagctatgtgcctgaggaggtgctgtggggctacagatttgcccccatcgtgtccaagaccaaggagggcaagtacagagtggacttccacaacttcagcaagacagtggaggtggagaccccccactgtgccatgtgcctgtacaatgagaaggatgtgcgggccaggatgaagaggggctatgacaaccccaacttcatcctgtctgaggtgaatgaaacagatgacaccaagatgtag

SEQ ID NO: 164827 - DNA, 1119 bp, synthetic construct; identical to SEQ ID NO: 164826
  misc_feature 1..1119: note = Description of Artificial Sequence: Synthetic coding sequence
  source 1..1119: mol_type = other DNA

SEQ ID NO: 164828 - DNA, 912 bp, synthetic construct
  misc_feature 1..912: note = Description of Artificial Sequence: Synthetic coding sequence
  source 1..912: mol_type = other DNA
atggcctggtggctgattgcctttgcccacggggacctggcccccagcgagggcacagctgagccctgtgtgaccagcatccacagcttcagcagcgccttcctgttcagcattgaggtgcaggtgaccatcggctttggaggccgcatggtgacagaggagtgccccctggccatcctgatcctgattgtgcagaacatcgtgggcctgatgatcaatgccatcatgctgggctgcatcttcatgaagacagcccaggcccacagaagagctgagaccctcatcttcagcaagcacgccgtcatcgccctgcggcacggccgcctgtgcttcatgctgcgggtgggggacctgaggaagtccatgatcatcagcgccaccatccacatgcaggtggtgaggaagaccaccagccctgagggggaggtggtgcccctgcaccaggtggacatccccatggagaatggagtgggcggcaacagcatcttcctggtggcccccctcatcatctaccacgtgattgatgccaacagccccctgtatgacctggcccccagcgacctgcaccaccaccaggacctggagatcatcgtcatcctggagggcgtggtggagaccaccggcatcaccacccaggcccggaccagctacctggctgatgagatcctgtggggccagagatttgtgcccatcgtggccgaggaggatggccgctacagcgtggactacagcaagtttggaaacacagtgaaggtgcccacccccctgtgcacagcccggcagctggatgaggaccacagcctgctggaggccctgaccctggccagcgcccggggccccctgaggaagaggtctgtgcccatggccaaggccaagcccaagttcagcatcagcccagacagcctgtcctag

SEQ ID NO: 164829 - DNA, 1302 bp, synthetic construct
  misc_feature 1..1302: note = Description of Artificial Sequence: Synthetic coding sequence
  source 1..1302: mol_type = other DNA
atgacagctgccagccgggccaacccctacagcatcgtgtccagtgaagaagatggcctgcacctggtgaccatgtctggggccaatggatttggaaatggcaaggtgcacacccggcggcgctgcaggaacagatttgtgaagaagaatggccagtgcaacattgaatttgccaacatggatgagaagagccagcgctacctggccgacatgttcaccacctgtgtggacatccgctggagatacatgctgctgatcttcagcctggccttcctggcctcctggctgctgtttggcatcatcttctgggtgattgctgtggcccatggagacctggagcctgctgagggccggggccgcaccccctgtgtgatgcaggtgcacggcttcatggccgccttcctgttcagcattgagacccagaccaccatcggctacggcctgcgctgtgtgacagaggagtgccctgtggccgtgttcatggtggtggcccagagcatcgtgggctgcatcatcgacagcttcatgattggagccatcatggccaagatggcccggcccaagaagagggcccagaccctgctcttcagccacaatgctgtggtggccctgagagatggcaagctgtgcctgatgtggagggtgggcaacctgaggaagagccacatcgtggaggcccacgtgcgggcccagctgatcaagccccgggtgacagaggagggggagtacatccccctggaccagattgatattgatgtgggctttgataaaggcctggaccgcatcttcctggtgagccccatcaccatcctgcacgagattgatgaggccagccccctgtttggcatcagccggcaggacctggagacagatgactttgaaattgtggtgatcctggagggcatggtggaggccacagccatgaccacccaggcccggagcagctacctggccaatgagatcctgtggggccacagatttgagcctgtgctgtttgaggagaagaaccagtacaagattgactacagccacttccacaagacctatgaggtgcccagcaccccccgctgcagcgccaaggacctggtggagaacaagttcctgctgcccagcgccaacagcttctgctatgaaaatgagctggccttcctgagcagagatgaagaagatgaagcagatggagaccaggacggccgcagcagagatggcctgagcccccaggcccggcatgactttgaccggctgcaggccggcggcggcgtgctggagcagaggccctaccgccgggagagcgagatctag

SEQ ID NO: 164830 - DNA, 1257 bp, synthetic construct
  misc_feature 1..1257: note = Description of Artificial Sequence: Synthetic coding sequence
  source 1..1257: mol_type = other DNA
atgagctactacggcagcagctaccacatcatcaatgctgatgccaagtacccaggctacccacctgagcacatcatcgccgagaagaggcgggcccggcggcggctgctgcacaaggatggcagctgcaatgtgtacttcaagcacatctttggagagtggggcagctatgtggtggacatcttcaccaccctggtggacaccaagtggaggcacatgtttgtgatcttcagcctgagctacatcctgtcctggctgatcttcggcagcgtcttctggctgattgccttccaccacggggacctgctgaatgaccctgacatcaccccctgtgtggacaacgtgcacagcttcaccggggccttcctgttcagcctggagacccagaccaccatcggctacggctaccgctgtgtgacagaggagtgcagcgtggccgtgctgatggtgatcctgcagagcatcctgagctgcatcatcaacaccttcatcattggagctgccctggccaagatggccacagccaggaagagggcccagaccatccgcttctcctactttgccctgattggcatgagagatggcaagctgtgcctgatgtggagaattggagacttccggcccaaccacgtggtggagggcaccgtgcgggcccagctgctgcgctacacagaagattctgagggccgcatgaccatggccttcaaggacctgaagctggtgaatgaccagatcatcctggtgacccctgtgaccatcgtgcatgaaattgaccacgagagccccctgtatgccctggacaggaaggctgtggccaaggacaactttgagatcctggtgaccttcatctacacaggagacagcacaggcaccagccaccagagccgcagcagctatgtgccccgggagatcctgtggggccaccgcttcaatgatgtgctggaggtgaagaggaagtactacaaggtgaactgcctgcagtttgagggctctgtggaggtgtatgcccccttctgcagcgccaagcagctggactggaaggaccagcagctgcacatcgagaaggcccctcctgtgcgggagagctgcaccagtgacaccaaggccaggagaagaagcttctctgctgtggccatcgtgagcagctgtgagaaccctgaggagaccaccaccagcgccacccatgagtaccgggagaccccctaccagaaggccctgctgaccctgaaccgcatctctgtggagagccagatgtag

SEQ ID NO: 164831 - DNA, 1119 bp, synthetic construct; identical to SEQ ID NO: 164826
  misc_feature 1..1119: note = Description of Artificial Sequence: Synthetic coding sequence
  source 1..1119: mol_type = other DNA

SEQ ID NO: 164832 - DNA, 1176 bp, synthetic construct
  misc_feature 1..1176: note = Description of Artificial Sequence: Synthetic coding sequence
  source 1..1176: mol_type = other DNA
atgaatgccagcagcagaaatgtgtttgacaccctcatccgggtgctgacagagagcatgttcaagcacctgaggaagtgggtggtgacccgcttcttcggccacagccggcagagggcccggctggtgtccaaggatggccgctgcaacattgaatttggaaatgtggaggcccagagccgcttcatcttctttgtggacatctggaccaccgtgctggacctgaagtggagatacaagatgaccatcttcatcacagccttcctgggctcctggttcttcttcggcctgctgtggtatgctgtggcctacatccacaaggacctgcctgagttccaccccagcgccaaccacaccccctgtgtggagaacatcaatggcctgaccagcgccttcctgttcagcctggagacccaggtgaccatcggctacggcttccgctgtgtgacagagcagtgtgccacagccatcttcctgctgatcttccagagcatcctgggcgtcatcatcaacagcttcatgtgtggggccatcctggccaagatcagccggcccaagaagagggccaagaccatcaccttcagcaagaatgctgtgatcagcaagaggggcggcaagctgtgcctgctgatccgggtggccaacctgaggaagagcctgctgattggcagccacatctacggcaagctgctgaagaccaccgtgaccccagagggggagaccatcatcctggaccagatcaacatcaactttgtggtggatgctggaaatgaaaatctcttcttcatcagccccctgaccatctaccacgtgattgaccacaacagccccttcttccacatggctgctgagaccctgctgcagcaggactttgagctggtggtgttcctggatggcaccgtggagagcaccagcgccacctgccaggtgaggaccagctatgtgcctgaggaggtgctgtggggctacagatttgcccccatcgtgtccaagaccaaggagggcaagtacagagtggacttccacaacttcagcaagacagtggaggtggagaccccccactgtgccatgtgcctgtacaatgagaaggatgtgcgggccaggatgaagaggggctatgacaaccccaacttcatcctgtctgaggtgaatgaaacagatgacaccaagatgtag

SEQ ID NO: 164833 - DNA, 1119 bp, synthetic construct; identical to SEQ ID NO: 164826
  misc_feature 1..1119: note = Description of Artificial Sequence: Synthetic coding sequence
  source 1..1119: mol_type = other DNA

SEQ ID NO: 164834 - DNA, 1140 bp, synthetic construct
  misc_feature 1..1140: note = Description of Artificial Sequence: Synthetic coding sequence
  source 1..1140: mol_type = other DNA
atgacctctgtggccaaggtgtactacagccagaccacccagacagagagccggcccctgatgggccctggcatcagaagaagaagagtgctgaccaaggatggccgcagcaatgtgaggatggagcacatcgctgacaagcgcttcctgtacctgaaggacctgtggaccaccttcatcgacatgcagtggagatacaagctgctgctcttcagcgccacctttgctggcacctggttcctgtttggagtggtgtggtacctggtggccgtggcccatggagacctgctggagctggaccccccagccaaccacaccccctgtgtggtgcaggtgcacaccctgaccggggccttcctgttcagcctggagagccagaccaccatcggctacggcttccgctacatcagtgaagaatgtcccctggccatcgtgctgctgattgcccagctggtgctgaccaccatcctggagatcttcatcaccggcaccttcctggccaagatcgcccggcccaagaagagagctgagaccatccgcttcagccagcacgctgtggtggccagccacaacgggaagccctgcctgatgatccgggtggccaacatgaggaagagcctgctgattggctgccaggtgacaggcaagctgctgcagacccaccagaccaaggagggggagaacatccggctgaaccaggtgaatgtgaccttccaggtggacacagccagtgacagccccttcctgatcctgcccctgaccttctaccacgtggtggatgagaccagccccctgaaggacctgcccctgcggagcggggagggggactttgagctggtgctgatcctgagcggcaccgtggagagcaccagcgccacctgccaggtgaggaccagctacctgcctgaggagatcctgtggggctatgagttcaccccagccatcagcctgagcgccagcggcaagtacatcgctgacttcagcctgtttgaccaggtggtgaaggtggccagccccagcggcctgcgggacagcacagtgcgctatggagaccctgagaagctgaagctggaggagagcctgcgggagcaggccgagaaggagggcagcgccctgtctgtgcgcatcagcaatgtgtag

SEQ ID NO: 164835 - DNA, 1173 bp, synthetic construct
  misc_feature 1..1173: note = Description of Artificial Sequence: Synthetic coding sequence
  source 1..1173: mol_type = other DNA
atgctgagcaggaagggcatcatccctgaggagtatgtgctgacccggctggctgaagatcctgccaagccccgctaccgggcccggcagaggcgggccaggtttgtgtccaagaagggcaactgcaatgtggcccacaagaacatccgggagcagggccgcttcctgcaggatgtgttcaccaccctggtggacctgaagtggccccacaccctgctgatcttcaccatgtccttcctgtgctcctggctgctgtttgccatggcctggtggctgattgcctttgcccatggagacctggcccccagcgagggcacagctgagccctgtgtgaccagcatccacagcttcagcagcgccttcctgttcagcattgaggtgcaggtgaccatcggctttggaggccgcatggtgacagaagaatgtcccctggccatcctgatcctgattgtgcagaacatcgtgggcctgatgatcaatgccatcatgctgggctgcatcttcatgaagacagcccaggcccaccggcgggcagagaccctcatcttcagcaagcatgctgtgattgccctgcggcacggccgcctgtgcttcatgctgcgggtgggggacctgaggaagtccatgatcatcagcgccaccatccacatgcaggtggtgaggaagaccaccagccctgagggggaggtggtgcccctgcaccaggtggacatccccatggagaatggagtgggcggcaacagcatcttcctggtggcccccctcatcatctaccacgtgattgatgccaacagccccctgtatgacctggcccccagcgacctgcaccaccaccaggacctggagatcatcgtcatcctggagggcgtggtggagaccaccggcatcaccacccaggcccggaccagctacctggctgatgagatcctgtggggccagagatttgtgcccatcgtggccgaggaggatggccgctacagcgtggactacagcaagtttggaaacacagtgaaggtgcccacccccctgtgcacagcccggcagctggatgaggaccacagcctgctggaggccctgaccctggccagcgcccggggccccctgaggaagaggtctgtgcccatggccaaggccaagcccaagttcagcatcagcccagacagcctgtcctag

SEQ ID NO: 164836 - DNA, 1302 bp, synthetic construct; identical to SEQ ID NO: 164829
  misc_feature 1..1302: note = Description of Artificial Sequence: Synthetic coding sequence
  source 1..1302: mol_type = other DNA

SEQ ID NO: 164837 - DNA, 819 bp, synthetic construct
  misc_feature 1..819: note = Description of Artificial Sequence: Synthetic coding sequence
  source 1..819: mol_type = other DNA
atggtgctgctgacagctgtgctgctgctgctggccgcctatgccggccctgcccagagcctgggcagctttgtgcactgtgagccctgtgatgagaaggccctgtccatgtgcccccccagccccctgggctgtgagctggtgaaggagcccggctgcggctgctgcatgacctgtgccctggccgagggccagagctgtggggtgtacacagagcgctgtgcccagggcctgcgctgcctgccccggcaggatgaggagaagcccctgcacgccctgctgcacggccggggcgtgtgcctgaatgagaagagctaccgggagcaggtgaagattgaaagagacagccgggagcacgaggagcccaccaccagcgagatggccgaggagacctacagccccaagatcttccggcccaagcacacccgcatcagcgagctgaaggccgaggccgtgaagaaggacaggaggaagaagctgacccagagcaagtttgtgggcggcgctgagaacacagcccacccccgcatcatcagcgcccctgagatgaggcaggagagcgagcagggcccctgcagaagacacatggaggccagcctgcaggagctgaaggccagccccaggatggtgcccagggctgtgtacctgcccaactgtgacaggaagggcttctacaagaggaagcagtgcaagcccagccggggcaggaagaggggcatctgctggtgtgtggacaagtatggcatgaagctgcccggcatggagtatgtggatggagacttccagtgccacacctttgacagcagcaatgtggagtag

SEQ ID NO: 164838 - DNA, 285 bp, synthetic construct
  misc_feature 1..285: note = Description of Artificial Sequence: Synthetic coding sequence
  source 1..285: mol_type = other DNA
atggacagcagcaactgcaaggtgattgcccccctgctgagccagcgctacagaaggatggtgaccaaggatggccacagcaccctgcagatggatggagcccagaggggcctggcctacctgagagatgcctggggcatcctgatggacatgcgctggcgctggatgatgctggtgttttctgccagctttgtggtgcactggctggtgtttgctgtgctgtggtgcttctgtggggaggactgcccagccaagaagagcagcttcttcaacagcctgtactag

SEQ ID NO: 164839 - DNA, 1083 bp, synthetic construct; identical to SEQ ID NO: 153481
  misc_feature 1..1083: note = Description of Artificial Sequence: Synthetic coding sequence
  source 1..1083: mol_type = other DNA

SEQ ID NO: 164840 - DNA, 1128 bp, synthetic construct
  misc_feature 1..1128: note = Description of Artificial Sequence: Synthetic coding sequence
  source 1..1128: mol_type = other DNA
atggatgccatccacatcggcatgagcagcacccccctggtgaagcacacagctggggccggcctgaaggccaaccggccccgggtgatgagcaagagcggccacagcaatgtgagaattgacaaggtggatggcatctacctgctgtacctgcaggacctgtggaccaccgtgattgacatgaagtggagatacaagctgaccctgtttgctgccacctttgtgatgacctggttcctgtttggagtcatctactatgccatcgccttcatccacggggacctggagcctggagagcccatcagcaaccacaccccctgcatcatgaaggtggacagcctgactggagccttcctgttcagcctggagagccagaccaccatcggctacggcgtgcgcagcatcacagaggagtgcccccacgccatcttcctgctggtggcccagctggtgatcaccaccctcatcgagatcttcatcaccggcaccttcctggccaagatcgcccggcccaagaagagagctgagaccatcaagttcagccactgtgccgtcatcaccaagcagaatggcaagctgtgcctggtgatccaggtggccaacatgaggaagagcctgctgatccagtgccagctgagcggcaagctgctgcagacccacgtgaccaaggagggggagcgcatcctgctgaaccaggccaccgtgaagttccacgtggacagcagcagcgagagccccttcctgatcctgcccatgaccttctaccacgtgctggatgagaccagccccctgcgggacctgaccccccagaacctgaaggagaaggagtttgagctggtggtgctgctgaatgccaccgtggagagcaccagcgctgtgtgccagagcaggaccagctacatccctgaggagatctactggggctttgaatttgtgcctgtggtgtccctgagcaagaatggcaagtatgtggccgacttcagccagtttgagcagatcaggaagagcccagactgcaccttctactgtgccgacagcgagaagcagcagctggaggagaagtaccggcaggaggaccagcgggagcgggagctgcggaccctgctgctgcagcagagcaatgtgtag

SEQ ID NO: 164841 - DNA, 186 bp, synthetic construct
  misc_feature 1..186: note = Description of Artificial Sequence: Synthetic coding sequence
  source 1..186: mol_type = other DNA
atggatgccatccacatcggcatgagcagcacccccctggtgaagcacacagctggggccggcctgaaggccaaccggccccgggtgatgagcaagagcggccacagcaatgtgagaattgacaaggtggatggcatctacctgctgtacctgcaggacctgtggaccaccgtgattgacatgtag

SEQ ID NO: 164842 - DNA, 471 bp, synthetic construct
  misc_feature 1..471: note = Description of Artificial Sequence: Synthetic coding sequence
  source 1..471: mol_type = other DNA
atggatgccatccacatcggcatgagcagcacccccctggtgaagcacacagctggggccggcctgaaggccaaccggccccgggtgatgagcaagagcggccacagcaatgtgagaattgacaaggtggatggcatctacctgctgtacctgcaggacctgtggaccaccgtgattgacatgaagtggagatacaagctgaccctgtttgctgccacctttgtgatgacctggttcctgtttggagtcatctactatgccatcgccttcatccacggggacctggagcctggagagcccatcagcaaccacaccccctgcatcatgaaggtggacagcctgactggagccttcctgttcagcctggagagccagaccaccatcggctacggcgtgcgcagcatcacagaggagtgcccccacgccatcttcctgctggtggcccagctggtgatcaccaccctcatctag

SEQ ID NO: 164843 - DNA, 471 bp, synthetic construct; identical to SEQ ID NO: 164842
  misc_feature 1..471: note = Description of Artificial Sequence: Synthetic coding sequence
  source 1..471: mol_type = other DNA

SEQ ID NO: 164844 - DNA, 1128 bp, synthetic construct; identical to SEQ ID NO: 164840
  misc_feature 1..1128: note = Description of Artificial Sequence: Synthetic coding sequence
  source 1..1128: mol_type = other DNA

SEQ ID NO: 164845 - DNA, 1128 bp, synthetic construct; identical to SEQ ID NO: 164840
  misc_feature 1..1128: note = Description of Artificial Sequence: Synthetic coding sequence
  source 1..1128: mol_type = other DNA

SEQ ID NO: 164846 - DNA, 1128 bp, synthetic construct; identical to SEQ ID NO: 164840
  misc_feature 1..1128: note = Description of Artificial Sequence: Synthetic coding sequence
  source 1..1128: mol_type = other DNA

SEQ ID NO: 164847 - DNA, 1128 bp, synthetic construct; identical to SEQ ID NO: 164840
  misc_feature 1..1128: note = Description of Artificial Sequence: Synthetic coding sequence
  source 1..1128: mol_type = other DNA

SEQ ID NO: 164848 - DNA, 60 bp, synthetic construct
  misc_feature 1..60: note = Description of Artificial Sequence: Synthetic coding sequence
  source 1..60: mol_type = other DNA
atggatgccatccacatcggcatgagcagcacccccctggtgaagcacacagctggatag

SEQ ID NO: 164849 - DNA, 420 bp, synthetic construct
  misc_feature 1..420: note = Description of Artificial Sequence: Synthetic coding sequence
  source 1..420: mol_type = other DNA
atggatgccatccacatcggcatgagcagcacccccctggtgaagcacacagctggggccggcctgaaggccaaccggccccgggtgatgagcaagagcggccacagcaatgtgagaattgacaaggtggatggcatctacctgctgtacctgcaggacctgtggaccaccgtgattgacatgaagtggagatacaagctgaccctgtttgctgccacctttgtgatgacctggttcctgtttggagtcatctactatgccatcgccttcatccacggggacctggagcctggagagcccatcagcaaccacaccccctgcatcatgaaggtggacagcctgactggagccttcctgttcagcctggagagccagaccaccatcggctacggcgtgcgcagcatcacagaggagtgctag

SEQ ID NO: 164850 - DNA, 738 bp, synthetic construct
  misc_feature 1..738: note = Description of Artificial Sequence: Synthetic coding sequence
  source 1..738: mol_type = other DNA
atggatgccatccacatcggcatgagcagcacccccctggtgaagcacacagctggggccggcctgaaggccaaccggccccgggtgatgagcaagagcggccacagcaatgtgagaattgacaaggtggatggcatctacctgctgtacctgcaggacctgtggaccaccgtgattgacatgaagtggagatacaagctgaccctgtttgctgccacctttgtgatgacctggttcctgtttggagtcatctactatgccatcgccttcatccacggggacctggagcctggagagcccatcagcaaccacaccccctgcatcatgaaggtggacagcctgactggagccttcctgttcagcctggagagccagaccaccatcggctacggcgtgcgcagcatcacagaggagtgcccccacgccatcttcctgctggtggcccagctggtgatcaccaccctcatcgagatcttcatcaccggcaccttcctggccaagatcgcccggcccaagaagagagctgagaccatcaagttcagccactgtgccgtcatcaccaagcagaatggcaagctgtgcctggtgatccaggtggccaacatgaggaagagcctgctgatccagtgccagctgagcggcaagctgctgcagacccacgtgaccaaggagggggagcgcatcctgctgaaccaggccaccgtgaagttccacgtggacagcagcagcgagagctag

SEQ ID NO: 164851 - DNA, 120 bp, synthetic construct
  misc_feature 1..120: note = Description of Artificial Sequence: Synthetic coding sequence
  source 1..120: mol_type = other DNA
atggatgccatccacatcggcatgagcagcacccccctggtgaagcacacagctggggccggcctgaaggccaaccggccccgggtgatgagcaagagcggccacagcaatgtgaggtag

SEQ ID NO: 164852 - DNA, 147 bp, synthetic construct
  misc_feature 1..147: note = Description of Artificial Sequence: Synthetic coding sequence
  source 1..147: mol_type = other DNA
atggatgccatccacatcggcatgagcagcacccccctggtgaagcacacagctggggccggcctgaaggccaaccggccccgggtgatgagcaagagcggccacagcaatgtgagaattgacaaggtggatggcatctacctgtag

SEQ ID NO: 164853 - DNA, 147 bp, synthetic construct; identical to SEQ ID NO: 164852
  misc_feature 1..147: note = Description of Artificial Sequence: Synthetic coding sequence
  source 1..147: mol_type = other DNA

SEQ ID NO: 164854 - DNA, 147 bp, synthetic construct; identical to SEQ ID NO: 164852
  misc_feature 1..147: note = Description of Artificial Sequence: Synthetic coding sequence
  source 1..147: mol_type = other DNA

SEQ ID NO: 164855 - DNA, 78 bp, synthetic construct
  misc_feature 1..78: note = Description of Artificial Sequence: Synthetic coding sequence
  source 1..78: mol_type = other DNA
atggatgccatccacatcggcatgagcagcacccccctggtgaagcacacagctggggccggcctgaaggccaactag

SEQ ID NO: 164856 - DNA, 147 bp, synthetic construct; identical to SEQ ID NO: 164852
  misc_feature 1..147: note = Description of Artificial Sequence: Synthetic coding sequence
  source 1..147: mol_type = other DNA

SEQ ID NO: 164857 - DNA, 147 bp, synthetic construct; identical to SEQ ID NO: 164852
  misc_feature 1..147: note = Description of Artificial Sequence: Synthetic coding sequence
  source 1..147: mol_type = other DNA

SEQ ID NO: 164858 - DNA, 147 bp, synthetic construct; identical to SEQ ID NO: 164852
  misc_feature 1..147: note = Description of Artificial Sequence: Synthetic coding sequence
  source 1..147: mol_type = other DNA

SEQ ID NO: 164859 - DNA, 1257 bp, synthetic construct; identical to SEQ ID NO: 164830
  misc_feature 1..1257: note = Description of Artificial Sequence: Synthetic coding sequence
  source 1..1257: mol_type = other DNA

SEQ ID NO: 164860 - DNA, 1257 bp, synthetic construct; identical to SEQ ID NO: 164830
  misc_feature 1..1257: note = Description of Artificial Sequence: Synthetic coding sequence
  source 1..1257: mol_type = other DNA

SEQ ID NO: 164861 - DNA, 1257 bp, synthetic construct; identical to SEQ ID NO: 164830
  misc_feature 1..1257: note = Description of Artificial Sequence: Synthetic coding sequence
  source 1..1257: mol_type = other DNA

SEQ ID NO: 164862 - DNA, 1284 bp, synthetic construct
  misc_feature 1..1284: note = Description of Artificial Sequence: Synthetic coding sequence
  source 1..1284: mol_type = other DNA
atgggctctgtgaggaccaaccgctacagcatcgtgagcagcgaggaggatggcatgaagctggccaccatggctgtggccaacggctttggaaatggcaagagcaaggtgcacacccggcagcagtgccgcagcagatttgtgaagaaggatggccactgcaatgtgcagttcatcaacgtgggggagaagggccagcgctacctggccgacatcttcaccacctgtgtggacatccgctggcgctggatgctggtgatcttctgcctggcctttgtgctgtcctggctgttcttcggctgtgtgttctggctgattgccctgctgcacggggacctggatgccagcaaggagggcaaggcctgtgtgtctgaggtgaacagcttcaccgctgccttcctgttcagcattgagacccagaccaccatcggctacggcttccgctgtgtgacagatgaatgtcccatcgctgtgttcatggtggtgttccagagcatcgtgggctgcatcattgatgccttcatcatcggggctgtgatggccaagatggccaagcccaagaagagaaatgagaccctggtgttcagccacaatgctgtgattgccatgagagatggcaagctgtgcctgatgtggagggtgggcaacctgaggaagagccacctggtggaggcccacgtgcgggcccagctgctgaagagccgcatcaccagcgagggggagtacatccccctggaccagattgacatcaacgtgggctttgacagcggcatcgaccgcatcttcctggtgagccccatcaccatcgtgcatgaaattgatgaggacagccccctgtatgacctgagcaagcaggacatcgacaatgctgactttgagatcgtggtgatcctggagggcatggtggaggccacagccatgaccacccagtgccgcagcagctacctggccaatgagatcctgtggggccacagatatgagcctgtgctgtttgaggagaagcactactacaaggtggactacagccgcttccacaagacctatgaggtgcccaacacccccctgtgcagcgcccgggacctggccgagaagaagtacatcctgagcaatgccaacagcttctgctatgaaaatgaggtggccctgaccagcaaggaggaggatgacagtgaaaatggagtgcctgagagcaccagcacagacaccccaccagacatcgacctgcacaaccaggcctctgtgcccctggagccccggcccctgcggcgggagagcgagatctag

SEQ ID NO: 164863 - DNA, 1284 bp, synthetic construct; identical to SEQ ID NO: 164862
  misc_feature 1..1284: note = Description of Artificial Sequence: Synthetic coding sequence
  source 1..1284: mol_type = other DNA

SEQ ID NO: 164864 - DNA, 1506 bp, synthetic construct
  misc_feature 1..1506: note = Description of Artificial Sequence: Synthetic coding sequence
  source 1..1506: mol_type = other DNA
atgtctgccctgcggaggaagtttggagatgactaccaggtggtgaccaccagcagcagcggcagcggcctgcagccccagggccctggccaggacccccagcagcagctggtgcccaagaagaagaggcagagatttgtggacaagaatggccgctgcaatgtgcagcacggcaacctgggcagcgagaccagccgctacctgagtgacctcttcaccaccctggtggacctgaagtggcgctggaacctcttcatcttcatcctgacctacacagtggcctggctgttcatggcctccatgtggtgggtgattgcctacaccaggggggacctgaacaaggcccacgtgggcaactacaccccctgtgtggccaacgtgtacaacttccccagcgccttcctgttcttcatcgagacagaggccaccatcggctacggctaccgctacatcacagacaagtgcccagagggcatcatcctcttcctgttccagagcatcctgggcagcatcgtggatgccttcctgattggctgcatgttcatcaagatgagccagcccaagaagagagctgagaccctgatgttttctgaacatgctgtgatctccatgagagatggcaagctgaccctgatgttccgggtgggcaacctgaggaacagccacatggtgtctgcccagatccgctgcaagctgctgaagagccggcagaccccagagggggagttcctgcccctggaccagctggagctggatgtgggcttcagcactggagctgaccagctgttcctggtgagccccctgaccatctgccacgtgattgatgccaagagccccttctatgacctgagccagaggtccatgcagacagagcagtttgaaattgtggtgatcctggagggcatcgtggagaccaccggcatgacctgccaggcccggaccagctacacagaagatgaggtgctgtggggccaccgcttcttccctgtgatcagcctggaggagggcttcttcaaggtggactacagccagttccacgccacctttgaggtgcccaccccaccctacagcgtgaaggagcaggaggagatgctgctgatgagcagccccctcatcgccccagccatcaccaacagcaaggagcggcacaacagcgtggagtgcctggatggcctggatgacatcaccaccaagctgcccagcaagctgcagaagatcaccggccgggaggacttccccaagaagctgctgaggatgagcagcaccaccagcgagaaggcctacagcctgggggacctgcccatgaagctgcagaggatcagctctgtgcccggcaacagcgaggagaagctggtgtccaagaccaccaagatgctgagtgaccccatgagccagagcgtggccgacctgccccccaagctgcagaagatggccggcggggccgccaggatggagggcaacctgcctgccaagctgaggaagatgaacagcgaccgcttcacctag

SEQ ID NO: 164865 - DNA, 708 bp, synthetic construct
  misc_feature 1..708: note = Description of Artificial Sequence: Synthetic coding sequence
  source 1..708: mol_type = other DNA
atgtctgccctgcggaggaagtttggagatgactaccaggtggtgaccaccagcagcagcggcagcggcctgcagccccagggccctggccaggacccccagcagcagctggtgcccaagaagaagaggcagagatttgtggacaagaatggccgctgcaatgtgcagcacggcaacctgggcagcgagaccagccgctacctgagtgacctcttcaccaccctggtggacctgaagtggcgctggaacctcttcatcttcatcctgacctacacagtggcctggctgttcatggcctccatgtggtgggtgattgcctacaccaggggggacctgaacaaggcccacgtgggcaactacaccccctgtgtggccaacgtgtacaacttccccagcgccttcctgttcttcatcgagacagaggccaccatcggctacggctaccgctacatcacagacaagtgcccagagggcatcatcctcttcctgttccagagcatcctgggcagcatcgtggatgccttcctgattggctgcatgttcatcaagatgagccagcccaagaagagagctgagaccctgatgttttctgaacatgctgtgatctccatgagagatggcaagctgaccctgatgttccgggtgggcaacctgaggaacagccacatggtgtctgcccagatccgctgcaagctgctgaagggctag

SEQ ID NO: 164866 - DNA, 1338 bp, synthetic construct
  misc_feature 1..1338: note = Description of Artificial Sequence: Synthetic coding sequence
  source 1..1338: mol_type = other DNA
atgcacggccacagcagaaatggccaggcccacgtgcccaggaggaagagaagaaacagatttgtgaagaagaatggccagtgcaatgtgtactttgccaacctgagcaacaagagccagcgctacatggctgacatcttcaccacctgtgtggacacccgctggagatacatgctgatgatcttctctgctgccttcctggtgtcctggctgttcttcggcctgctcttctggtgcatcgccttcttccacggggacctggaggccagccctggggtgcctgctgctgggggccctgctgctgggggcggcggggccgcccctgtggcccccaagccctgcatcatgcacgtgaatggcttcctgggcgccttcctgttctctgtggagacccagaccaccatcggctacggcttccgctgtgtgacagaagaatgtcccctggccgtgattgctgtggtggtgcagagcatcgtgggctgtgtgattgacagcttcatgattggcaccatcatggccaagatggcccggcccaagaagagggcccagaccctgctcttcagccaccacgctgtgatctctgtgagagatggcaagctgtgcctgatgtggagggtgggcaacctgaggaagagccacatcgtggaggcccacgtgcgggcccagctgatcaagccctacatgacccaggagggggagtacctgcccctggaccagagggacctgaatgtgggctatgacatcggcctggaccgcatcttcctggtgagccccatcatcatcgtgcatgaaattgatgaggacagccccctgtatggcatgggcaaggaggagctggagagcgaggactttgagatcgtggtgatcctggagggcatggtggaggccacagccatgaccacccaggcccggagcagctacctggccagcgagatcctgtggggccacagatttgagcctgtggtgtttgaggagaagagccactacaaggtggactacagccgcttccacaagacctatgaggtggccggcaccccctgctgcagcgcccgggagctgcaggagagcaagatcaccgtgctgcctgcccctcctcctcctccttctgccttctgctatgaaaatgagctggccctgatgagccaggaggaggaggagatggaggaggaggccgctgctgctgctgctgtggccgccggcctgggcctggaggccggcagcaaggaggaggccggcatcatccgcatgctggagtttggcagccacctggacctggagaggatgcaggccagcctgcccctggacaacatctcctaccgccgggagagcgccatctag

SEQ ID NO: 164867 - DNA, 1260 bp, synthetic construct
  misc_feature 1..1260: note = Description of Artificial Sequence: Synthetic coding sequence
  source 1..1260: mol_type = other DNA
atggccggggacagcagaaatgccatgaaccaggacatggagattggagtgaccccctgggaccccaagaagatccccaagcaggcccgggactatgtgcccatcgccacagacaggacccggctgctggccgagggcaagaagccccggcagcgctacatggagaagtctggaaaatgtaatgtgcaccacggcaatgtgcaggagacctaccgctacctgagtgacctcttcaccaccctggtggacctgaagtggaggttcaacctgctggtgttcaccatggtgtacacagtgacctggctgttcttcggcttcatctggtggctgattgcctacatccggggggacctggaccacgtgggggaccaggagtggatcccctgtgtggagaacctgagcggctttgtgtctgccttcctgttcagcattgaaacagagaccaccatcggctacggcttccgggtcatcacagagaagtgcccagagggcatcatcctgctgctggtgcaggccatcctgggcagcatcgtgaatgccttcatggtgggctgcatgtttgtgaagatcagccagcccaagaagagagctgagaccctgatgttcagcaacaatgctgtgatctccatgagagatgagaagctgtgcctgatgttccgggtgggggacctgaggaacagccacatcgtggaggccagcatccgggccaagctgatcaagagccggcagaccaaggagggggagttcatccccctgaaccagacagacatcaacgtgggctttgacacaggagatgacaggctcttcctggtgagccccctcatcatcagccatgagatcaaccagaagagccccttctgggagatgagccaggcccagctgcaccaggaggagtttgaggtggtggtgatcctggagggcatggtggaggccaccggcatgacctgccaggcccggagcagctacatggacacagaggtgctgtggggccaccgcttcacccctgtgctgaccctggagaagggcttctatgaggtggactacaacaccttccatgacacctatgagaccaacacccccagctgctgtgccaaggagctggccgagatgaagcgggagggccgcctgctgcagtacctgcccagcccccccctgctgggcggctgtgccgaggccggcctggatgctgaggccgagcagaatgaagaagatgagcccaagggcctgggcggcagccgggaggcccggggctctgtgtag

SEQ ID NO: 164868 - DNA, 1260 bp, synthetic construct; identical to SEQ ID NO: 164867
  misc_feature 1..1260: note = Description of Artificial Sequence: Synthetic coding sequence
  source 1..1260: mol_type = other DNA

SEQ ID NO: 164869 - DNA, 1260 bp, synthetic construct; identical to SEQ ID NO: 164867
  misc_feature 1..1260: note = Description of Artificial Sequence: Synthetic coding sequence
  source 1..1260: mol_type = other DNA

SEQ ID NO: 164870 - DNA, 1272 bp, synthetic construct
  misc_feature 1..1272: note = Description of Artificial Sequence: Synthetic coding sequence
  source 1..1272: mol_type = other DNA
atggccaagctgacagagagcatgaccaacgtgctggagggggacagcatggaccaggatgtggagagccctgtggccatccaccagcccaagctgcccaagcaggccagagatgacctgcccaggcacatcagccgggacaggaccaagaggaagatccagcgctacgtgaggaaggatggcaagtgcaatgtgcaccacggcaatgtgcgggagacctaccgctacctgacagacatcttcaccaccctggtggacctgaagtggaggttcaacctgctgatctttgtgatggtgtacacagtgacctggctgttcttcggcatgatctggtggctgattgcctacatccggggggacatggaccacatcgaggaccccagctggaccccctgtgtgaccaacctgaatggatttgtgtctgccttcctgttcagcattgaaacagagaccaccatcggctacggctacagagtcatcacagacaagtgcccagagggcatcatcctgctgctgatccagagcgtgctgggcagcatcgtgaatgccttcatggtgggctgcatgtttgtgaagatcagccagcccaagaagagagctgagaccctggtgttcagcacccatgctgtgatctccatgagagatggcaagctgtgcctgatgttccgggtgggggacctgaggaacagccacatcgtggaggccagcatccgggccaagctgatcaagagcaagcagaccagcgagggggagttcatccccctgaaccagacagacatcaacgtgggctactacacaggagatgacaggctcttcctggtgagccccctcatcatcagccatgagatcaaccagcagagccccttctgggagatcagcaaggcccagctgcccaaggaggagctggagatcgtggtgatcctggagggcatggtggaggccaccggcatgacctgccaggcccggagcagctacatcaccagcgagatcctgtggggctaccgcttcacccctgtgctgaccctggaggatggcttctatgaggtggactacaacagcttccacgagacctatgagaccagcacccccagcctgagcgccaaggagctggccgagctggccagcagagctgagctgcccctgtcctggagcgtgagcagcaagctgaaccagcacgccgagctggagacagaggaggaggagaagaacctggaggagcagacagaaagaaatggagatgtggccaacctggagaatgaaagcaaggtgtag

SEQ ID NO: 164871 - DNA, 1272 bp, synthetic construct; identical to SEQ ID NO: 164870
  misc_feature 1..1272: note = Description of Artificial Sequence: Synthetic coding sequence
  source 1..1272: mol_type = other DNA

SEQ ID NO: 164872 - DNA, 1275 bp, synthetic construct
  misc_feature 1..1275: note = Description of Artificial Sequence: Synthetic coding sequence
  source 1..1275: mol_type = other DNA
atgctggccaggaagagcatcatccctgaggagtatgtgctggccagaattgctgctgagaacctgaggaagccccgcatccgggaccggctgcccaaggcccgcttcatcgccaagagcggggcctgcaacctggcccacaagaacatccgggagcagggccgcttcctgcaggacatcttcaccaccctggtggacctgaagtggaggcacaccctggtgatcttcaccatgtccttcctgtgctcctggctgctgtttgccatcatgtggtggctggtggcctttgcccacggggacatctatgcctacatggagaagagcggcatggagaagagcggcctggagagcacagtgtgtgtgaccaacgtgcgctccttcaccagcgccttcctgttcagcattgaggtgcaggtgaccatcggctttggaggccgcatgatgacagaagaatgtcccctggccatcaccgtgctgatcctgcagaacatcgtgggcctcatcatcaatgctgtgatgctgggctgcatcttcatgaagacagcccaggcccaccggcgggcagagaccctcatcttcagcagacatgctgtgattgctgtgagaaatggcaagctgtgcttcatgttccgggtgggggacctgaggaagtccatgatcatcagcgcctctgtgcgcatccaggtggtgaagaagaccaccaccccagagggggaggtggtgcccatccaccagctggacatccctgtggacaaccccatcgagagcaacaacatcttcctggtggcccccctcatcatctgccacgtgattgacaagaggagccccctgtatgacatcagcgccacagacctggccaaccaggacctggaggtgattgtcatcctggagggcgtggtggagaccaccggcatcaccacccaggcccggaccagctacatcgccgaggagatccagtggggccacagatttgtgtccatcgtgacagaggaggagggcgtgtacagcgtggactacagcaagtttggaaacacagtgaaggtggccgccccccgctgcagcgcccgggagctggatgagaagcccagcatcctgatccagaccctgcagaagtctgagctgagccaccagaacagcctgaggaagagaaattccatgagaagaaacaacagcatgagaagaaacaacagcatcagaagaaacaacagcagcctgatggtgcccaaggtgcagttcatgaccccagagggcaaccagaacaccagcgagagctag

SEQ ID NO: 164873 - DNA, 345 bp, synthetic construct
  misc_feature 1..345: note = Description of Artificial Sequence: Synthetic coding sequence
  source 1..345: mol_type = other DNA
atgctggccaggaagagcatcatccctgaggagtatgtgctggccagaattgctgctgagaacctgaggaagccccgcatccgggaccggctgcccaaggcccgcttcatcgccaagagcggggcctgcaacctggcccacaagaacatccgggagcagggccgcttcctgcaggacatcttcaccaccctggtggacctgaagtggaggcacaccctggtgatcttcaccatgtccttcctgtgctcctggctgctgtttgccatcatgtggtggctggtggcctttgcccacggggacatctatgcctacatggagaagagcggcatggagaagtctggatag

SEQ ID NO: 164874 - DNA, 1275 bp, synthetic construct; identical to SEQ ID NO: 164872
  misc_feature 1..1275: note = Description of Artificial Sequence: Synthetic coding sequence
  source 1..1275: mol_type = other DNA

SEQ ID NO: 164875 - DNA, 774 bp, synthetic construct
  misc_feature 1..774: note = Description of Artificial Sequence: Synthetic coding sequence
  source 1..774: mol_type = other DNA
atgacagccttccctgccagcggcaagaagcgggagacagactacagtgatggagaccccctggatgtgcacaagaggctgcccagcagcgctggagaagatagagctgtgatgctgggctttgccatgatgggcttctctgtgctgatgttcttcctgctgggcaccaccatcctgaagcccttcatgctgagcatccagcgggaggagagcacctgcacagccatccacacagacatcatggatgactggctggactgtgccttcacctgtggggtgcactgccacggccagggcaagtacccctgcctgcaggtgtttgtgaacctgagccaccctggccagaaggccctgctgcactacaatgaggaggccgtgcagatcaaccccaagtgcttctacacccccaagtgccaccaggacagaaatgacctgctgaacagcgccctggacatcaaggagttctttgaccacaagaatggcacccccttcagctgcttctacagccctgccagccagagtgaagatgtgatcctgatcaagaagtatgaccagatggccatcttccactgcctcttctggcccagcctgaccctgctgggcggggccctgattgtgggcatggtgcggctgacccagcacctgagcctgctgtgtgagaagtacagcacagtggtgagagatgaggtgggcggcaaggtgccctacatcgagcagcaccagttcaagctgtgcatcatgaggaggagcaagggccgggcagagaagagctag

SEQ ID NO: 164876 - DNA, 522 bp, synthetic construct
  misc_feature 1..522: note = Description of Artificial Sequence: Synthetic coding sequence
  source 1..522: mol_type = other DNA
atgcagcccttcagcatccctgtgcagatcaccctgcagggcagcagaagacggcagggccgcacagccttccctgccagcggcaagaagcgggagacagactacagtgatggagaccccctggatgtgcacaagaggctgcccagcagcgctggagaagatagagctgtgatgctgggctttgccatgatgggcttctctgtgctgatgttcttcctgctgggcaccaccatcctgaagcccttcatgctgagcatccagcgggaggagagcacctgcacagccatccacacagacatcatggatgactggctggactgtgccttcacctgtggggtgcactgccacggccagggcaagtacccctgcctgcaggtgtttgtgaacctgagccaccctggccagaaggccctgctgcactacaatgaggaggccgtgcagatcaaccccaagagagatgtgacagactgccgggtgaaggagaagcagaccctgactgtgtctgatgagcacaagcagtag

SEQ ID NO: 164877 - DNA, 840 bp, synthetic construct
  misc_feature 1..840: note = Description of Artificial Sequence: Synthetic coding sequence
  source 1..840: mol_type = other DNA
atggacttcagccccagcagcgagctgggcttccactttgtggccttcatcctgctgaccaggcacaggacagccttccctgccagcggcaagaagcgggagacagactacagtgatggagaccccctggatgtgcacaagaggctgcccagcagcgctggagaagatagagctgtgatgctgggctttgccatgatgggcttctctgtgctgatgttcttcctgctgggcaccaccatcctgaagcccttcatgctgagcatccagcgggaggagagcacctgcacagccatccacacagacatcatggatgactggctggactgtgccttcacctgtggggtgcactgccacggccagggcaagtacccctgcctgcaggtgtttgtgaacctgagccaccctggccagaaggccctgctgcactacaatgaggaggccgtgcagatcaaccccaagtgcttctacacccccaagtgccaccaggacagaaatgacctgctgaacagcgccctggacatcaaggagttctttgaccacaagaatggcacccccttcagctgcttctacagccctgccagccagagtgaagatgtgatcctgatcaagaagtatgaccagatggccatcttccactgcctcttctggcccagcctgaccctgctgggcggggccctgattgtgggcatggtgcggctgacccagcacctgagcctgctgtgtgagaagtacagcacagtggtgagagatgaggtgggcggcaaggtgccctacatcgagcagcaccagttcaagctgtgcatcatgaggaggagcaagggccgggcagagaagagctag

SEQ ID NO: 164878 - DNA, 834 bp, synthetic construct
  misc_feature 1..834: note = Description of Artificial Sequence: Synthetic coding sequence
  source 1..834: mol_type = other DNA
atgcagcccttcagcatccctgtgcagatcaccctgcagggcagcagaagacggcagggccgcacagccttccctgccagcggcaagaagcgggagacagactacagtgatggagaccccctggatgtgcacaagaggctgcccagcagcgctggagaagatagagctgtgatgctgggctttgccatgatgggcttctctgtgctgatgttcttcctgctgggcaccaccatcctgaagcccttcatgctgagcatccagcgggaggagagcacctgcacagccatccacacagacatcatggatgactggctggactgtgccttcacctgtggggtgcactgccacggccagggcaagtacccctgcctgcaggtgtttgtgaacctgagccaccctggccagaaggccctgctgcactacaatgaggaggccgtgcagatcaaccccaagtgcttctacacccccaagtgccaccaggacagaaatgacctgctgaacagcgccctggacatcaaggagttctttgaccacaagaatggcacccccttcagctgcttctacagccctgccagccagagtgaagatgtgatcctgatcaagaagtatgaccagatggccatcttccactgcctcttctggcccagcctgaccctgctgggcggggccctgattgtgggcatggtgcggctgacccagcacctgagcctgctgtgtgagaagtacagcacagtggtgagagatgaggtgggcggcaaggtgccctacatcgagcagcaccagttcaagctgtgcatcatgaggaggagcaagggccgggcagagaagagctag

SEQ ID NO: 164879 - DNA, 828 bp, synthetic construct
  misc_feature 1..828: note = Description of Artificial Sequence: Synthetic coding sequence
  source 1..828: mol_type = other DNA
atgttccccctgctgtatgagctgacagctgtgagccccagccccttcccccagaggacagccttccctgccagcggcaagaagcgggagacagactacagtgatggagaccccctggatgtgcacaagaggctgcccagcagcgctggagaagatagagctgtgatgctgggctttgccatgatgggcttctctgtgctgatgttcttcctgctgggcaccaccatcctgaagcccttcatgctgagcatccagcgggaggagagcacctgcacagccatccacacagacatcatggatgactggctggactgtgccttcacctgtggggtgcactgccacggccagggcaagtacccctgcctgcaggtgtttgtgaacctgagccaccctggccagaaggccctgctgcactacaatgaggaggccgtgcagatcaaccccaagtgcttctacacccccaagtgccaccaggacagaaatgacctgctgaacagcgccctggacatcaaggagttctttgaccacaagaatggcacccccttcagctgcttctacagccctgccagccagagtgaagatgtgatcctgatcaagaagtatgaccagatggccatcttccactgcctcttctggcccagcctgaccctgctgggcggggccctgattgtgggcatggtgcggctgacccagcacctgagcctgctgtgtgagaagtacagcacagtggtgagagatgaggtgggcggcaaggtgccctacatcgagcagcaccagttcaagctgtgcatcatgaggaggagcaagggccgggcagagaagagctag

SEQ ID NO: 164880 - DNA, 774 bp, synthetic construct; identical to SEQ ID NO: 164875
  misc_feature 1..774: note = Description of Artificial Sequence: Synthetic coding sequence
  source 1..774: mol_type = other DNA

SEQ ID NO: 164881 - DNA, 3537 bp, synthetic construct
  misc_feature 1..3537: note = Description of Artificial Sequence: Synthetic coding sequence
  source 1..3537: mol_type = other DNA
atggccaatggaggcggcggcggcggcggcagcagcggcggcggcggcggcggcggcggcagcagcctgaggatgagcagcaacatccacgccaaccacctgagcctggatgccagcagcagcagcagcagcagcagcagcagcagcagcagcagcagcagcagcagcagcagcagctctgtgcatgagcccaagatggatgccctgatcatccctgtgaccatggaggtgccctgtgacagccggggccagaggatgtggtgggccttcctggccagctccatggtgaccttctttggaggcctcttcatcatcctgctgtggaggaccctgaagtacctgtggacagtgtgctgccactgcggcggcaagaccaaggaggcccagaagatcaacaacggcagcagccaggctgatggcaccctgaagcctgtggatgagaaggaggaggccgtggccgctgaggtgggctggatgacctctgtgaaggactgggccggcgtgatgatcagcgcccagaccctgaccggccgggtgctggtggtgctggtgtttgccctgagcattggagccctggtgatctacttcatcgacagcagcaaccccatcgagagctgccagaacttctacaaggacttcaccctgcagattgacatggccttcaacgtgttcttcctgctgtacttcggcctgcgcttcatcgccgccaatgacaagctgtggttctggctggaggtgaacagcgtggtggacttcttcaccgtgccccctgtgtttgtgtctgtgtacctgaacagatcctggctgggcctgcgcttcctgcgggccctgcggctcatccagttcagcgagatcctgcagttcctgaacatcctgaagaccagcaacagcatcaagctggtgaacctgctgagcatcttcatcagcacctggctgacagctgctggcttcatccacctggtggagaacagcggggacccctgggagaacttccagaacaaccaggccctgacctactgggagtgtgtgtacctgctgatggtgaccatgagcacagtgggctatggagatgtgtatgccaagaccaccctgggccgcctcttcatggtgttcttcatcctgggcggcctggccatgtttgccagctatgtgcctgagatcatcgagctgattggcaacaggaagaagtatggaggcagctacagcgctgtgtctggcaggaagcacatcgtggtgtgtggccacatcaccctggagagcgtgagcaacttcctgaaggacttcctgcacaaggacagagatgatgtgaatgtggagatcgtgttcctgcacaacatcagccccaacctggagctggaggccctcttcaagaggcacttcacccaggtggagttctaccagggctctgtgctgaacccccatgacctggcccgggtgaagattgaatctgcagatgcctgcctgatcctggccaacaagtactgtgccgaccctgatgctgaagatgccagcaacatcatgagggtcatcagcatcaagaactaccaccccaagatccgcatcatcacccagatgctgcagtaccacaacaaggcccacctgctgaacatccccagctggaactggaaggagggagatgatgccatctgcctggccgagctgaagctgggcttcatcgcccagagctgcctggcccagggcctgagcaccatgctggccaacctcttctccatgaggagcttcatcaagattgaggaggacacctggcagaagtactacctggagggcgtgtccaatgagatgtacacagagtacctgagcagcgcctttgtgggcctgtccttccccaccgtgtgtgagctgtgctttgtgaagctgaagctgctgatgattgccatcgagtacaagagcgccaaccgggagagccgcatcctgatcaaccctggcaaccacctgaagatccaggagggcaccctgggcttcttcatcgccagtgatgccaaggaggtgaagagggccttcttctactgcaaggcctgccatgatgacatcacagaccccaagaggatcaagaagtgtggctgcaagaggctggaggatgagcagcccagcaccctgagccccaagaagaagcagagaaatggaggcatgaggaacagccccaacaccagccccaagctgatgagacatgaccccctgctgatccctggaaatgaccagattgacaacatggacagcaatgtgaagaagtatgacagcacaggcatgttccactggtgtgcccccaaggagattgagaaggtgatcctgaccaggtctgaggccgccatgacagtgctgagcggccacgtggtggtgtgcatctttggagatgtgagcagcgccctgattggcctgaggaacctggtgatgcccctgcgggccagcaacttccactaccacgagctgaagcacatcgtgtttgtgggcagcattgagtacctgaagcgggagtgggagaccctgcacaacttccccaaggtgtccatcctgcccggcacccccctgagcagagctgacctgcgggctgtgaacatcaacctgtgtgacatgtgtgtgatcctgagcgccaaccagaacaacattgatgacaccagcctgcaggacaaggagtgcatcctggccagcctgaacatcaagtccatgcagtttgatgacagcattggagtgctgcaggccaacagccagggcttcaccccacctggcatggacaggagcagcccagacaacagccctgtgcacggcatgctgcggcagcccagcatcaccactggagtgaacatccccatcatcacagagctggtgaatgacaccaacgtgcagttcctggaccaggatgatgatgatgatcctgacacagagctgtacctgacccagccctttgcctgtggcacagcctttgctgtgtctgtgctggacagcctgatgtctgccacctacttcaatgacaacatcctgaccctcatccgcaccctggtgactggaggagccaccccagagctggaggccctgattgctgaagaaaatgccctgcggggcggctacagcaccccccagaccctggccaacagagaccgctgccgggtggcccagctggccctgctggatggcccctttgctgacctgggagatggcggctgctatggagacctcttctgcaaggccctgaagacctacaacatgctgtgcttcggcatctaccgcctgagagatgcccacctgagcacccccagccagtgcaccaagagatatgtgatcaccaaccccccctatgaatttgagctggtgcccacagacctgatcttctgcctgatgcagtttgaccacaatgccggccagagccgggccagcctgagccacagcagccacagcagccagagcagcagcaagaagagcagctctgtgcacagcatccccagcacagccaaccggcagaaccggcccaagagccgggagagccgggacaagcagaagtatgtgcaggaggagcggctgtag

SEQ ID NO: 164882 - DNA, 3633 bp, synthetic construct
  misc_feature 1..3633: note = Description of Artificial Sequence: Synthetic coding sequence
  source 1..3633: mol_type = other DNA
agcaacatccacgccaaccacctgagcctggatgccagcagcagcagcagcagcagcagcagcagcagcagcagcagcagcagcagcagcagcagcagctctgtgcatgagcccaagatggatgccctgatcatccctgtgaccatggaggtgccctgtgacagccggggccagaggatgtggtgggccttcctggccagctccatggtgaccttctttggaggcctcttcatcatcctgctgtggaggaccctgaagtacctgtggacagtgtgctgccactgcggcggcaagaccaaggaggcccagaagatcaacaacggcagcagccaggctgatggcaccctgaagcctgtggatgagaaggaggaggccgtggccgctgaggtgggctggatgacctctgtgaaggactgggccggcgtgatgatcagcgcccagaccctgaccggccgggtgctggtggtgctggtgtttgccctgagcattggagccctggtgatctacttcatcgacagcagcaaccccatcgagagctgccagaacttctacaaggacttcaccctgcagattgacatggccttcaacgtgttcttcctgctgtacttcggcctgcgcttcatcgccgccaatgacaagctgtggttctggctggaggtgaacagcgtggtggacttcttcaccgtgccccctgtgtttgtgtctgtgtacctgaacagatcctggctgggcctgcgcttcctgcgggccctgcggctcatccagttcagcgagatcctgcagttcctgaacatcctgaagaccagcaacagcatcaagctggtgaacctgctgagcatcttcatcagcacctggctgacagctgctggcttcatccacctggtggagaacagcggggacccctgggagaacttccagaacaaccaggccctgacctactgggagtgtgtgtacctgctgatggtgaccatgagcacagtgggctatggagatgtgtatgccaagaccaccctgggccgcctcttcatggtgttcttcatcctgggcggcctggccatgtttgccagctatgtgcctgagatcatcgagctgattggcaacaggaagaagtatggaggcagctacagcgctgtgtctggcaggaagcacatcgtggtgtgtggccacatcaccctggagagcgtgagcaacttcctgaaggacttcctgcacaaggacagagatgatgtgaatgtggagatcgtgttcctgcacaacatcagccccaacctggagctggaggccctcttcaagaggcacttcacccaggtggagttctaccagggctctgtgctgaacccccatgacctggcccgggtgaagattgaatctgcagatgcctgcctgatcctggccaacaagtactgtgccgaccctgatgctgaagatgccagcaacatcatgagggtcatcagcatcaagaactaccaccccaagatccgcatcatcacccagatgctgcagtaccacaacaaggcccacctgctgaacatccccagctggaactggaaggagggagatgatgccatctgcctggccgagctgaagctgggcttcatcgcccagagctgcctggcccagggcctgagcaccatgctggccaacctcttctccatgaggagcttcatcaagattgaggaggacacctggcagaagtactacctggagggcgtgtccaatgagatgtacacagagtacctgagcagcgcctttgtgggcctgtccttccccaccgtgtgtgagctgtgctttgtgaagctgaagctgctgatgattgccatcgagtacaagagcgccaaccgggagagccgcatcctgatcaaccctggcaaccacctgaagatccaggagggcaccctgggcttcttcatcgccagtgatgccaaggaggtgaagagggccttcttctactgcaaggcctgccatgatgacatcacagaccccaagaggatcaagaagtgtggctgcaagaggcccaagatgagcatctacaagaggatgagaagagcctgctgctttgactgtggccgctctgagcgggactgcagctgcatgagcggccgggtgagaggaaatgtggacaccctggagcgggccttccccctgagctctgtgtctgtgaatgactgcagcaccagcttccgggcctttgaagatgagcagcccagcaccctgagccccaagaagaagcagagaaatggaggcatgaggaacagccccaacaccagccccaagctgatgagacatgaccccctgctgatccctggaaatgaccagattgacaacatggacagcaatgtgaagaagtatgacagcacaggcatgttccactggtgtgcccccaaggagattgagaaggtgatcctgaccaggtctgaggccgccatgacagtgctgagcggccacgtggtggtgtgcatctttggagatgtgagcagcgccctgattggcctgaggaacctggtgatgcccctgcgggccagcaacttccactaccacgagctgaagcacatcgtgtttgtgggcagcattgagtacctgaagcgggagtgggagaccctgcacaacttccccaaggtgtccatcctgcccggcacccccctgagcagagctgacctgcgggctgtgaacatcaacctgtgtgacatgtgtgtgatcctgagcgccaaccagaacaacattgatgacaccagcctgcaggacaaggagtgcatcctggccagcctgaacatcaagtccatgcagtttgatgacagcattggagtgctgcaggccaacagccagggcttcaccccacctggcatggacaggagcagcccagacaacagccctgtgcacggcatgctgcggcagcccagcatcaccactggagtgaacatccccatcatcacagagctggtgaatgacaccaacgtgcagttcctggaccaggatgatgatgatgatcctgacacagagctgtacctgacccagccctttgcctgtggcacagcctttgctgtgtctgtgctggacagcctgatgtctgccacctacttcaatgacaacatcctgaccctcatccgcaccctggtgactggaggagccaccccagagctggaggccctgattgctgaagaaaatgccctgcggggcggctacagcaccccccagaccctggccaacagagaccgctgccgggtggcccagctggccctgctggatggcccctttgctgacctgggagatggcggctgctatggagacctcttctgcaaggccctgaagacctacaacatgctgtgcttcggcatctaccgcctgagagatgcccacctgagcacccccagccagtgcaccaagagatatgtgatcaccaaccccccctatgaatttgagctggtgcccacagacctgatcttctgcctgatgcagtttgaccacaatgccggccagagccgggccagcctgagccacagcagccacagcagccagagcagcagcaagaagagcagctctgtgcacagcatccccagcacagccaaccggcagaaccggcccaagagccgggagagccgggacaagcagaagtatgtgcaggaggagcggctgtag

SEQ ID NO: 164883 - DNA, 3720 bp, synthetic construct
  misc_feature 1..3720: note = Description of Artificial Sequence: Synthetic coding sequence
  source 1..3720: mol_type = other DNA
atggccaatggaggcggcggcggcggcggcagcagcggcggcggcggcggcggcggcggcagcagcctgaggatgagcagcaacatccacgccaaccacctgagcctggatgccagcagcagcagcagcagcagcagcagcagcagcagcagcagcagcagcagcagcagcagcagctctgtgcatgagcccaagatggatgccctgatcatccctgtgaccatggaggtgccctgtgacagccggggccagaggatgtggtgggccttcctggccagctccatggtgaccttctttggaggcctcttcatcatcctgctgtggaggaccctgaagtacctgtggacagtgtgctgccactgcggcggcaagaccaaggaggcccagaagatcaacaacggcagcagccaggctgatggcaccctgaagcctgtggatgagaaggaggaggccgtggccgctgaggtgggctggatgacctctgtgaaggactgggccggcgtgatgatcagcgcccagaccctgaccggccgggtgctggtggtgctggtgtttgccctgagcattggagccctggtgatctacttcatcgacagcagcaaccccatcgagagctgccagaacttctacaaggacttcaccctgcagattgacatggccttcaacgtgttcttcctgctgtacttcggcctgcgcttcatcgccgccaatgacaagctgtggttctggctggaggtgaacagcgtggtggacttcttcaccgtgccccctgtgtttgtgtctgtgtacctgaacagatcctggctgggcctgcgcttcctgcgggccctgcggctcatccagttcagcgagatcctgcagttcctgaacatcctgaagaccagcaacagcatcaagctggtgaacctgctgagcatcttcatcagcacctggctgacagctgctggcttcatccacctggtggagaacagcggggacccctgggagaacttccagaacaaccaggccctgacctactgggagtgtgtgtacctgctgatggtgaccatgagcacagtgggctatggagatgtgtatgccaagaccaccctgggccgcctcttcatggtgttcttcatcctgggcggcctggccatgtttgccagctatgtgcctgagatcatcgagctgattggcaacaggaagaagtatggaggcagctacagcgctgtgtctggcaggaagcacatcgtggtgtgtggccacatcaccctggagagcgtgagcaacttcctgaaggacttcctgcacaaggacagagatgatgtgaatgtggagatcgtgttcctgcacaacatcagccccaacctggagctggaggccctcttcaagaggcacttcacccaggtggagttctaccagggctctgtgctgaacccccatgacctggcccgggtgaagattgaatctgcagatgcctgcctgatcctggccaacaagtactgtgccgaccctgatgctgaagatgccagcaacatcatgagggtcatcagcatcaagaactaccaccccaagatccgcatcatcacccagatgctgcagtaccacaacaaggcccacctgctgaacatccccagctggaactggaaggagggagatgatgccatctgcctggccgagctgaagctgggcttcatcgcccagagctgcctggcccagggcctgagcaccatgctggccaacctcttctccatgaggagcttcatcaagattgaggaggacacctggcagaagtactacctggagggcgtgtccaatgagatgtacacagagtacctgagcagcgcctttgtgggcctgtccttccccaccgtgtgtgagctgtgctttgtgaagctgaagctgctgatgattgccatcgagtacaagagcgccaaccgggagagccgcatcctgatcaaccctggcaaccacctgaagatccaggagggcaccctgggcttcttcatcgccagtgatgccaaggaggtgaagagggccttcttctactgcaaggcctgccatgatgacatcacagaccccaagaggatcaagaagtgtggctgcaagaggcgctgggaggagcactgcagcctgtggaggctggagagcaaaggaaatgtgcggcggctgaactactgccggggccagcagaccttctctgtgaaggtgaaggtggccgcccggagccgctacagcaaggacccctttgagttcaagaaggagacccccaacagccggctggtgacagagcctgtggaggatgagcagcccagcaccctgagccccaagaagaagcagagaaatggaggcatgaggaacagccccaacaccagccccaagctgatgagacatgaccccctgctgatccctggaaatgaccagattgacaacatggacagcaatgtgaagaagtatgacagcacaggcatgttccactggtgtgcccccaaggagattgagaaggtgatcctgaccaggtctgaggccgccatgacagtgctgagcggccacgtggtggtgtgcatctttggagatgtgtcctctgccctgattggcctgaggaacctggtgatgcccctgcgggccagcaacttccactaccacgagctgaagcacatcgtgtttgtgggcagcattgagtacctgaagcgggagtgggagaccctgcacaacttccccaaggtgtccatcctgcccggcacccccctgagcagagctgacctgcgggctgtgaacatcaacctgtgtgacatgtgtgtgatcctgagcgccaaccagaacaacattgatgacaccagcctgcaggacaaggagtgcatcctggccagcctgaacatcaagtccatgcagtttgatgacagcattggagtgctgcaggccaacagccagggcttcaccccacctggcatggacaggagcagcccagacaacagccctgtgcacggcatgctgcggcagcccagcatcaccaccggggtgaacatccccatcatcacagagctggtgaatgacaccaacgtgcagttcctggaccaggatgatgatgatgatcctgacacagagctgtacctgacccagccctttgcctgtggcacagcctttgctgtgtctgtgctggacagcctgatgtctgccacctacttcaatgacaacatcctgaccctcatccgcaccctggtgactggaggagccaccccagagctggaggccctgattgctgaggagaatgccctgcggggcggctacagcaccccccagaccctggccaacagagaccgctgccgggtggcccagctggccctgctggatggcccctttgctgacctgggagatggcggctgctacggggacctcttctgcaaggccctgaagacctacaacatgctgtgcttcggcatctaccgcctgagagatgcccacctgagcacccccagccagtgcaccaagcgctacgtgatcaccaaccccccctatgaatttgagctggtgcccacagacctgatcttctgcctgatgcagtttgaccacaatgccggccagagccgggccagcctgagccacagcagccacagcagccagagcagcagcaagaagagcagctctgtgcacagcatccccagcacagccaaccggcagaaccggcccaagagccgggagagccgggacaagcagaagtatgtgcaggaggagcggctgtag

SEQ ID NO: 164884 - DNA, 3549 bp, synthetic construct
  misc_feature 1..3549: note = Description of Artificial Sequence: Synthetic coding sequence
  source 1..3549: mol_type = other DNA
tgaagcagcagcagcagcagcagcagcagctctgtgcatgagcccaagatggatgccctgatcatccctgtgaccatggaggtgccctgtgacagccggggccagaggatgtggtgggccttcctggccagctccatggtgaccttcttcggcggcctcttcatcatcctgctgtggaggaccctgaagtacctgtggacagtgtgctgccactgcggcggcaagaccaaggaggcccagaagatcaacaacggcagcagccaggctgatggcaccctgaagcctgtggatgagaaggaggaggccgtggccgctgaggtgggctggatgacctctgtgaaggactgggccggcgtgatgatcagcgcccagaccctgaccggccgggtgctggtggtgctggtgtttgccctgagcatcggggccctggtgatctacttcatcgacagcagcaaccccatcgagagctgccagaacttctacaaggacttcaccctgcagattgacatggccttcaacgtgttcttcctgctgtacttcggcctgcgcttcatcgccgccaatgacaagctgtggttctggctggaggtgaacagcgtggtggacttcttcaccgtgccccctgtgtttgtgtctgtgtacctgaacagatcctggctgggcctgcgcttcctgcgggccctgcggctcatccagttcagcgagatcctgcagttcctgaacatcctgaagaccagcaacagcatcaagctggtgaacctgctgagcatcttcatcagcacctggctgacagctgctggcttcatccacctggtggagaacagcggggacccctgggagaacttccagaacaaccaggccctgacctactgggagtgtgtgtacctgctgatggtgaccatgagcacagtgggctatggagatgtgtatgccaagaccaccctgggccgcctcttcatggtgttcttcatcctgggcggcctggccatgtttgccagctatgtgcctgagatcatcgagctgattggcaacaggaagaagtatggaggcagctacagcgctgtgtctggcaggaagcacatcgtggtgtgtggccacatcaccctggagagcgtgagcaacttcctgaaggacttcctgcacaaggacagagatgatgtgaatgtggagatcgtgttcctgcacaacatcagccccaacctggagctggaggccctcttcaagaggcacttcacccaggtggagttctaccagggctctgtgctgaacccccatgacctggcccgggtgaagattgagagcgcagatgcctgcctgatcctggccaacaagtactgtgccgaccctgatgctgaagatgccagcaacatcatgagggtcatcagcatcaagaactaccaccccaagatccgcatcatcacccagatgctgcagtaccacaacaaggcccacctgctgaacatccccagctggaactggaaggagggagatgatgccatctgcctggccgagctgaagctgggcttcatcgcccagagctgcctggcccagggcctgagcaccatgctggccaacctcttctccatgaggagcttcatcaagattgaggaggacacctggcagaagtactacctggagggcgtgtccaatgagatgtacacagagtacctgagcagcgcctttgtgggcctgtccttccccaccgtgtgtgagctgtgctttgtgaagctgaagctgctgatgattgccatcgagtacaagagcgccaaccgggagagccgcatcctgatcaaccctggcaaccacctgaagatccaggagggcaccctgggcttcttcatcgccagtgatgccaaggaggtgaagagggccttcttctactgcaaggcctgccatgatgacatcacagaccccaagaggatcaagaagtgtggctgcaagaggctggaggatgagcagcccagcaccctgagccccaagaagaagcagagaaatggaggcatgaggaacagccccaacaccagccccaagctgatgagacatgaccccctgctgatccctggaaatgaccagattgacaacatggacagcaatgtgaagaagtatgacagcacaggcatgttccactggtgtgcccccaaggagattgagaaggtgatcctgaccaggtctgaggccgccatgacagtgctgagcggccacgtggtggtgtgcatctttggagatgtgtcctctgccctgattggcctgaggaacctggtgatgcccctgcgggccagcaacttccactaccacgagctgaagcacatcgtgtttgtgggcagcattgagtacctgaagcgggagtgggagaccctgcacaacttccccaaggtgtccatcctgcccggcacccccctgagcagagctgacctgcgggctgtgaacatcaacctgtgtgacatgtgtgtgatcctgagcgccaaccagaacaacattgatgacaccagcctgcaggacaaggagtgcatcctggccagcctgaacatcaagtccatgcagtttgatgacagcattggagtgctgcaggccaacagccagggcttcaccccacctggcatggacaggagcagcccagacaacagccctgtgcacggcatgctgcggcagcccagcatcaccaccggggtgaacatccccatcatcacagagctggtgaatgacaccaacgtgcagttcctggaccaggatgatgatgatgatcctgacacagagctgtacctgacccagccctttgcctgtggcacagcctttgctgtgtctgtgctggacagcctgatgtctgccacctacttcaatgacaacatcctgaccctcatccgcaccctggtgactggaggagccaccccagagctggaggccctgattgctgaggagaatgccctgcggggcggctacagcaccccccagaccctggccaacagagaccgctgccgggtggcccagctggccctgctggatggcccctttgctgacctgggagatggcggctgctacggggacctcttctgcaaggccctgaagacctacaacatgctgtgcttcggcatctaccgcctgagagatgcccacctgagcacccccagccagtgcaccaagcgctacgtgatcaccaaccccccctatgaatttgagctggtgcccacagacctgatcttctgcctgatgcagtttgaccacaatgccggccagagccgggccagcctgagccacagcagccacagcagccagagcagcagcaagaagagcagctctgtgcacagcatccccagcacagccaaccggcagaaccggcccaagagccgggagagccgggacaagcagaatgccaccaggatgaacaggatgggccaggccgagaagaagtggttcacagatgagccagacaatgcctaccccaggaacatccagatcaagcccatgagcacccacatggccaaccagatcaaccagtacaagagcaccagcagcctcatcccccccatccgggaggtggaggatgaatgttag

SEQ ID NO: 164885 - DNA, 3504 bp, synthetic construct
  misc_feature 1..3504: note = Description of Artificial Sequence: Synthetic coding sequence
  source 1..3504: mol_type = other DNA
cccaagatggatgccctgatcatccctgtgaccatggaggtgccctgtgacagccggggccagaggatgtggtgggccttcctggccagctccatggtgaccttcttcggcggcctcttcatcatcctgctgtggaggaccctgaagtacctgtggacagtgtgctgccactgcggcggcaagaccaaggaggcccagaagatcaacaacggcagcagccaggctgatggcaccctgaagcctgtggatgagaaggaggaggccgtggccgctgaggtgggctggatgacctctgtgaaggactgggccggcgtgatgatcagcgcccagaccctgaccggccgggtgctggtggtgctggtgtttgccctgagcatcggggccctggtgatctacttcatcgacagcagcaaccccatcgagagctgccagaacttctacaaggacttcaccctgcagattgacatggccttcaacgtgttcttcctgctgtacttcggcctgcgcttcatcgccgccaatgacaagctgtggttctggctggaggtgaacagcgtggtggacttcttcaccgtgccccctgtgtttgtgtctgtgtacctgaacagatcctggctgggcctgcgcttcctgcgggccctgcggctcatccagttcagcgagatcctgcagttcctgaacatcctgaagaccagcaacagcatcaagctggtgaacctgctgagcatcttcatcagcacctggctgacagctgctggcttcatccacctggtggagaacagcggggacccctgggagaacttccagaacaaccaggccctgacctactgggagtgtgtgtacctgctgatggtgaccatgagcacagtgggctatggagatgtgtatgccaagaccaccctgggccgcctcttcatggtgttcttcatcctgggcggcctggccatgtttgccagctatgtgcctgagatcatcgagctgattggcaacaggaagaagtatggaggcagctacagcgctgtgtctggcaggaagcacatcgtggtgtgtggccacatcaccctggagagcgtgagcaacttcctgaaggacttcctgcacaaggacagagatgatgtgaatgtggagatcgtgttcctgcacaacatcagccccaacctggagctggaggccctcttcaagaggcacttcacccaggtggagttctaccagggctctgtgctgaacccccatgacctggcccgggtgaagattgagagcgcagatgcctgcctgatcctggccaacaagtactgtgccgaccctgatgctgaagatgccagcaacatcatgagggtcatcagcatcaagaactaccaccccaagatccgcatcatcacccagatgctgcagtaccacaacaaggcccacctgctgaacatccccagctggaactggaaggagggagatgatgccatctgcctggccgagctgaagctgggcttcatcgcccagagctgcctggcccagggcctgagcaccatgctggccaacctcttctccatgaggagcttcatcaagattgaggaggacacctggcagaagtactacctggagggcgtgtccaatgagatgtacacagagtacctgagcagcgcctttgtgggcctgtccttccccaccgtgtgtgagctgtgctttgtgaagctgaagctgctgatgattgccatcgagtacaagagcgccaaccgggagagccgcatcctgatcaaccctggcaaccacctgaagatccaggagggcaccctgggcttcttcatcgccagtgatgccaaggaggtgaagagggccttcttctactgcaaggcctgccatgatgacatcacagaccccaagaggatcaagaagtgtggctgcaagaggctggaggatgagcagcccagcaccctgagccccaagaagaagcagagaaatggaggcatgaggaacagccccaacaccagccccaagctgatgagacatgaccccctgctgatccctggaaatgaccagattgacaacatggacagcaatgtgaagaagtatgacagcacaggcatgttccactggtgtgcccccaaggagattgagaaggtgatcctgaccaggtctgaggccgccatgacagtgctgagcggccacgtggtggtgtgcatctttggagatgtgtcctctgccctgattggcctgaggaacctggtgatgcccctgcgggccagcaacttccactaccacgagctgaagcacatcgtgtttgtgggcagcattgagtacctgaagcgggagtgggagaccctgcacaacttccccaaggtgtccatcctgcccggcacccccctgagcagagctgacctgcgggctgtgaacatcaacctgtgtgacatgtgtgtgatcctgagcgccaaccagaacaacattgatgacaccagcctgcaggacaaggagtgcatcctggccagcctgaacatcaagtccatgcagtttgatgacagcattggagtgctgcaggccaacagccagggcttcaccccacctggcatggacaggagcagcccagacaacagccctgtgcacggcatgctgcggcagcccagcatcaccaccggggtgaacatccccatcatcacagagctggtgaatgacaccaacgtgcagttcctggaccaggatgatgatgatgatcctgacacagagctgtacctgacccagccctttgcctgtggcacagcctttgctgtgtctgtgctggacagcctgatgtctgccacctacttcaatgacaacatcctgaccctcatccgcaccctggtgactggaggagccaccccagagctggaggccctgattgctgaggagaatgccctgcggggcggctacagcaccccccagaccctggccaacagagaccgctgccgggtggcccagctggccctgctggatggcccctttgctgacctgggagatggcggctgctacggggacctcttctgcaaggccctgaagacctacaacatgctgtgcttcggcatctaccgcctgagagatgcccacctgagcacccccagccagtgcaccaagcgctacgtgatcaccaaccccccctatgaatttgagctggtgcccacagacctgatcttctgcctgatgcagtttgaccacaatgccggccagagccgggccagcctgagccacagcagccacagcagccagagcagcagcaagaagagcagctctgtgcacagcatccccagcacagccaaccggcagaaccggcccaagagccgggagagccgggacaagcagaatgccaccaggatgaacaggatgggccaggagaagaagtggttcacagatgagccagacaatgcctaccccaggaacatccagatcaagcccatgagcacccacatggccaaccagatcaaccagtacaagagcaccagcagcctcatcccccccatccgggaggtggaggatgagtgctag

SEQ ID NO: 164886 - DNA, 3504 bp, synthetic construct
  misc_feature 1..3504: note = Description of Artificial Sequence: Synthetic coding sequence
  source 1..3504: mol_type = other DNA
tgaggaggcggcggcggcggcggcggcagcagcctgaggatgagcagcaacatccacgccaaccacctgagcctggatgccagcagcagcagcagcagcagcagcagcagcagcagcagcagcagcagcagcagcagcagcagctctgtgcatgagcccaagatggatgccctgatcatccctgtgaccatggaggtgccctgtgacagccggggccagaggatgtggtgggccttcctggccagctccatggtgaccttcttcggcggcctcttcatcatcctgctgtggaggaccctgaagtacctgtggacagtgtgctgccactgcggcggcaagaccaaggaggcccagaagatcaacaacggcagcagccaggctgatggcaccctgaagcctgtggatgagaaggaggaggccgtggccgctgaggtgggctggatgacctctgtgaaggactgggccggcgtgatgatcagcgcccagaccctgaccggccgggtgctggtggtgctggtgtttgccctgagcatcggggccctggtgatctacttcatcgacagcagcaaccccatcgagagctgccagaacttctacaaggacttcaccctgcagattgacatggccttcaacgtgttcttcctgctgtacttcggcctgcgcttcatcgccgccaatgacaagctgtggttctggctggaggtgaacagcgtggtggacttcttcaccgtgccccctgtgtttgtgtctgtgtacctgaacagatcctggctgggcctgcgcttcctgcgggccctgcggctcatccagttcagcgagatcctgcagttcctgaacatcctgaagaccagcaacagcatcaagctggtgaacctgctgagcatcttcatcagcacctggctgacagctgctggcttcatccacctggtggagaacagcggggacccctgggagaacttccagaacaaccaggccctgacctactgggagtgtgtgtacctgctgatggtgaccatgagcacagtgggctatggagatgtgtatgccaagaccaccctgggccgcctcttcatggtgttcttcatcctgggcggcctggccatgtttgccagctatgtgcctgagatcatcgagctgattggcaacaggaagaagtatggaggcagctacagcgctgtgtctggcaggaagcacatcgtggtgtgtggccacatcaccctggagagcgtgagcaacttcctgaaggacttcctgcacaaggacagagatgatgtgaatgtggagatcgtgttcctgcacaacatcagccccaacctggagctggaggccctcttcaagaggcacttcacccaggtggagttctaccagggctctgtgctgaacccccatgacctggcccgggtgaagattgagagcgcagatgcctgcctgatcctggccaacaagtactgtgccgaccctgatgctgaagatgccagcaacatcatgagggtcatcagcatcaagaactaccaccccaagatccgcatcatcacccagatgctgcagtaccacaacaaggcccacctgctgaacatccccagctggaactggaaggagggagatgatgccatctgcctggccgagctgaagctgggcttcatcgcccagagctgcctggcccagggcctgagcaccatgctggccaacctcttctccatgaggagcttcatcaagattgaggaggacacctggcagaagtactacctggagggcgtgtccaatgagatgtacacagagtacctgagcagcgcctttgtgggcctgtccttccccaccgtgtgtgagctgtgctttgtgaagctgaagctgctgatgattgccatcgagtacaagagcgccaaccgggagagccgcatcctgatcaaccctggcaaccacctgaagatccaggagggcaccctgggcttcttcatcgccagtgatgccaaggaggtgaagagggccttcttctactgcaaggcctgccatgatgacatcacagaccccaagaggatcaagaagtgtggctgcaagaggctggaggatgagcagcccagcaccctgagccccaagaagaagcagagaaatggaggcatgaggaacagccccaacaccagccccaagctgatgagacatgaccccctgctgatccctggaaatgaccagattgacaacatggacagcaatgtgaagaagtatgacagcacaggcatgttccactggtgtgcccccaaggagattgagaaggtgatcctgaccaggtctgaggccgccatgacagtgctgagcggccacgtggtggtgtgcatctttggagatgtgtcctctgccctgattggcctgaggaacctggtgatgcccctgcgggccagcaacttccactaccacgagctgaagcacatcgtgtttgtgggcagcattgagtacctgaagcgggagtgggagaccctgcacaacttccccaaggtgtccatcctgcccggcacccccctgagcagagctgacctgcgggctgtgaacatcaacctgtgtgacatgtgtgtgatcctgagcgccaaccagaacaacattgatgacaccagcctgcaggacaaggagtgcatcctggccagcctgaacatcaagtccatgcagtttgatgacagcattggagtgctgcaggccaacagccagggcttcaccccacctggcatggacaggagcagcccagacaacagccctgtgcacggcatgctgcggcagcccagcatcaccaccggggtgaacatccccatcatcacagagctggtgaatgacaccaacgtgcagttcctggaccaggatgatgatgatgatcctgacacagagctgtacctgacccagccctttgcctgtggcacagcctttgctgtgtctgtgctggacagcctgatgtctgccacctacttcaatgacaacatcctgaccctcatccgcaccctggtgactggaggagccaccccagagctggaggccctgattgctgaggagaatgccctgcggggcggctacagcaccccccagaccctggccaacagagaccgctgccgggtggcccagctggccctgctggatggcccctttgctgacctgggagatggcggctgctacggggacctcttctgcaaggccctgaagacctacaacatgctgtgcttcggcatctaccgcctgagagatgcccacctgagcacccccagccagtgcaccaagcgctacgtgatcaccaaccccccctatgaatttgagctggtgcccacagacctgatcttctgcctgatgcagtttgaccacaatgccggccagagccgggccagcctgagccacagcagccacagcagccagagcagcagcaagaagagcagctctgtgcacagcatccccagcacagccaaccggcagaaccggcccaagagccgggagagccgggacaagcagaacaggaaggagatggtgtacagatag

SEQ ID NO: 164887 - DNA, 3516 bp, synthetic construct
  misc_feature 1..3516: note = Description of Artificial Sequence: Synthetic coding sequence
  source 1..3516: mol_type = other DNA
atggatgccctgatcatccctgtgaccatggaggtgccctgtgacagccggggccagaggatgtggtgggccttcctggccagctccatggtgaccttcttcggcggcctcttcatcatcctgctgtggaggaccctgaagtacctgtggacagtgtgctgccactgcggcggcaagaccaaggaggcccagaagatcaacaacggcagcagccaggctgatggcaccctgaagcctgtggatgagaaggaggaggccgtggccgctgaggtgggctggatgacctctgtgaaggactgggccggcgtgatgatcagcgcccagaccctgaccggccgggtgctggtggtgctggtgtttgccctgagcatcggggccctggtgatctacttcatcgacagcagcaaccccatcgagagctgccagaacttctacaaggacttcaccctgcagattgacatggccttcaacgtgttcttcctgctgtacttcggcctgcgcttcatcgccgccaatgacaagctgtggttctggctggaggtgaacagcgtggtggacttcttcaccgtgccccctgtgtttgtgtctgtgtacctgaacagatcctggctgggcctgcgcttcctgcgggccctgcggctcatccagttcagcgagatcctgcagttcctgaacatcctgaagaccagcaacagcatcaagctggtgaacctgctgagcatcttcatcagcacctggctgacagctgctggcttcatccacctggtggagaacagcggggacccctgggagaacttccagaacaaccaggccctgacctactgggagtgtgtgtacctgctgatggtgaccatgagcacagtgggctatggagatgtgtatgccaagaccaccctgggccgcctcttcatggtgttcttcatcctgggcggcctggccatgtttgccagctatgtgcctgagatcatcgagctgattggcaacaggaagaagtatggaggcagctacagcgctgtgtctggcaggaagcacatcgtggtgtgtggccacatcaccctggagagcgtgagcaacttcctgaaggacttcctgcacaaggacagagatgatgtgaatgtggagatcgtgttcctgcacaacatcagccccaacctggagctggaggccctcttcaagaggcacttcacccaggtggagttctaccagggctctgtgctgaacccccatgacctggcccgggtgaagattgagagcgcagatgcctgcctgatcctggccaacaagtactgtgccgaccctgatgctgaagatgccagcaacatcatgagggtcatcagcatcaagaactaccaccccaagatccgcatcatcacccagatgctgcagtaccacaacaaggcccacctgctgaacatccccagctggaactggaaggagggagatgatgccatctgcctggccgagctgaagctgggcttcatcgcccagagctgcctggcccagggcctgagcaccatgctggccaacctcttctccatgaggagcttcatcaagattgaggaggacacctggcagaagtactacctggagggcgtgtccaatgagatgtacacagagtacctgagcagcgcctttgtgggcctgtccttccccaccgtgtgtgagctgtgctttgtgaagctgaagctgctgatgattgccatcgagtacaagagcgccaaccgggagagccgcatcctgatcaaccctggcaaccacctgaagatccaggagggcaccctgggcttcttcatcgccagtgatgccaaggaggtgaagagggccttcttctactgcaaggcctgccatgatgacatcacagaccccaagaggatcaagaagtgtggctgcaagaggcccaagatgagcatctacaagaggatgaggcgggcctgctgctttgactgtggccgctctgagcgggactgcagctgcatgagcggccgggtgagaggaaatgtggacaccctggagcgggccttccccctgagctctgtgtctgtgaatgactgcagcaccagcttccgggcctttgaagatgagcagcccagcaccctgagccccaagaagaagcagagaaatggaggcatgaggaacagccccaacaccagccccaagctgatgagacatgaccccctgctgatccctggaaatgaccagattgacaacatggacagcaatgtgaagaagtatgacagcacaggcatgttccactggtgtgcccccaaggagattgagaaggtgatcctgaccaggtctgaggccgccatgacagtgctgagcggccacgtggtggtgtgcatctttggagatgtgtcctctgccctgattggcctgaggaacctggtgatgcccctgcgggccagcaacttccactaccacgagctgaagcacatcgtgtttgtgggcagcattgagtacctgaagcgggagtgggagaccctgcacaacttccccaaggtgtccatcctgcccggcacccccctgagcagagctgacctgcgggctgtgaacatcaacctgtgtgacatgtgtgtgatcctgagcgccaaccagaacaacattgatgacaccagcctgcaggacaaggagtgcatcctggccagcctgaacatcaagtccatgcagtttgatgacagcattggagtgctgcaggccaacagccagggcttcaccccacctggcatggacaggagcagcccagacaacagccctgtgcacggcatgctgcggcagcccagcatcaccaccggggtgaacatccccatcatcacagagctggtgaatgacaccaacgtgcagttcctggaccaggatgatgatgatgatcctgacacagagctgtacctgacccagccctttgcctgtggcacagcctttgctgtgtctgtgctggacagcctgatgtctgccacctacttcaatgacaacatcctgaccctcatccgcaccctggtgactggaggagccaccccagagctggaggccctgattgctgaggagaatgccctgcggggcggctacagcaccccccagaccctggccaacagagaccgctgccgggtggcccagctggccctgctggatggcccctttgctgacctgggagatggcggctgctacggggacctcttctgcaaggccctgaagacctacaacatgctgtgcttcggcatctaccgcctgagagatgcccacctgagcacccccagccagtgcaccaagcgctacgtgatcaccaaccccccctatgaatttgagctggtgcccacagacctgatcttctgcctgatgcagtttgaccacaatgccggccagagccgggccagcctgagccacagcagccacagcagccagagcagcagcaagaagagcagctctgtgcacagcatccccagcacagccaaccggcagaaccggcccaagagccgggagagccgggacaagcagaacaggaaggagatggtgtacagatag

SEQ ID NO: 164888 - DNA, 3534 bp, synthetic construct
  misc_feature 1..3534: note = Description of Artificial Sequence: Synthetic coding sequence
  source 1..3534: mol_type = other DNA
atggccaatggaggcggcggcggcggcggcagcagcggcggcggcggcggcggcggcggcagcagcctgaggatgagcagcaacatccacgccaaccacctgagcctggatgccagcagcagcagcagcagcagcagcagcagcagcagcagcagcagcagcagcagcagcagcagctctgtgcatgagcccaagatggatgccctgatcatccctgtgaccatggaggtgccctgtgacagccggggccagaggatgtggtgggccttcctggccagctccatggtgaccttctttggaggcctcttcatcatcctgctgtggaggaccctgaagtacctgtggacagtgtgctgccactgcggcggcaagaccaaggaggcccagaagatcaacaacggcagcagccaggctgatggcaccctgaagcctgtggatgagaaggaggaggccgtggccgctgaggtgggctggatgacctctgtgaaggactgggccggcgtgatgatcagcgcccagaccctgaccggccgggtgctggtggtgctggtgtttgccctgagcattggagccctggtgatctacttcatcgacagcagcaaccccatcgagagctgccagaacttctacaaggacttcaccctgcagattgacatggccttcaacgtgttcttcctgctgtacttcggcctgcgcttcatcgccgccaatgacaagctgtggttctggctggaggtgaacagcgtggtggacttcttcaccgtgccccctgtgtttgtgtctgtgtacctgaacagatcctggctgggcctgcgcttcctgcgggccctgcggctcatccagttcagcgagatcctgcagttcctgaacatcctgaagaccagcaacagcatcaagctggtgaacctgctgagcatcttcatcagcacctggctgacagctgctggcttcatccacctggtggagaacagcggggacccctgggagaacttccagaacaaccaggccctgacctactgggagtgtgtgtacctgctgatggtgaccatgagcacagtgggctatggagatgtgtatgccaagaccaccctgggccgcctcttcatggtgttcttcatcctgggcggcctggccatgtttgccagctatgtgcctgagatcatcgagctgattggcaacaggaagaagtatggaggcagctacagcgctgtgtctggcaggaagcacatcgtggtgtgtggccacatcaccctggagagcgtgagcaacttcctgaaggacttcctgcacaaggacagagatgatgtgaatgtggagatcgtgttcctgcacaacatcagccccaacctggagctggaggccctcttcaagaggcacttcacccaggtggagttctaccagggctctgtgctgaacccccatgacctggcccgggtgaagattgaatctgcagatgcctgcctgatcctggccaacaagtactgtgccgaccctgatgctgaagatgccagcaacatcatgagggtcatcagcatcaagaactaccaccccaagatccgcatcatcacccagatgctgcagtaccacaacaaggcccacctgctgaacatccccagctggaactggaaggagggagatgatgccatctgcctggccgagctgaagctgggcttcatcgcccagagctgcctggcccagggcctgagcaccatgctggccaacctcttctccatgaggagcttcatcaagattgaggaggacacctggcagaagtactacctggagggcgtgtccaatgagatgtacacagagtacctgagcagcgcctttgtgggcctgtccttccccaccgtgtgtgagctgtgctttgtgaagctgaagctgctgatgattgccatcgagtacaagagcgccaaccgggagagccgcatcctgatcaaccctggcaaccacctgaagatccaggagggcaccctgggcttcttcatcgccagtgatgccaaggaggtgaagagggccttcttctactgcaaggcctgccatgatgacatcacagaccccaagaggatcaagaagtgtggctgcaagaggctggaggatgagcagcccagcaccctgagccccaagaagaagcagagaaatggaggcatgaggaacagccccaacaccagccccaagctgatgagacatgaccccctgctgatccctggaaatgaccagattgacaacatggacagcaatgtgaagaagtatgacagcacaggcatgttccactggtgtgcccccaaggagattgagaaggtgatcctgaccaggtctgaggccgccatgacagtgctgagcggccacgtggtggtgtgcatctttggagatgtgagcagcgccctgattggcctgaggaacctggtgatgcccctgcgggccagcaacttccactaccacgagctgaagcacatcgtgtttgtgggcagcattgagtacctgaagcgggagtgggagaccctgcacaacttccccaaggtgtccatcctgcccggcacccccctgagcagagctgacctgcgggctgtgaacatcaacctgtgtgacatgtgtgtgatcctgagcgccaaccagaacaacattgatgacaccagcctgcaggacaaggagtgcatcctggccagcctgaacatcaagtccatgcagtttgatgacagcattggagtgctgcaggccaacagccagggcttcaccccacctggcatggacaggagcagcccagacaacagccctgtgcacggcatgctgcggcagcccagcatcaccactggagtgaacatccccatcatcacagagctggtgaatgacaccaacgtgcagttcctggaccaggatgatgatgatgatcctgacacagagctgtacctgacccagccctttgcctgtggcacagcctttgctgtgtctgtgctggacagcctgatgtctgccacctacttcaatgacaacatcctgaccctcatccgcaccctggtgactggaggagccaccccagagctggaggccctgattgctgaagaaaatgccctgcggggcggctacagcaccccccagaccctggccaacagagaccgctgccgggtggcccagctggccctgctggatggcccctttgctgacctgggagatggcggctgctatggagacctcttctgcaaggccctgaagacctacaacatgctgtgcttcggcatctaccgcctgagagatgcccacctgagcacccccagccagtgcaccaagagatatgtgatcaccaaccccccctatgaatttgagctggtgcccacagacctgatcttctgcctgatgcagtttgaccacaatgccggccagagccgggccagcctgagccacagcagccacagcagccagagcagcagcaagaagagcagctctgtgcacagcatccccagcacagccaaccggcagaaccggcccaagagccgggagagccgggacaagcagaagaaggagatggtgtacagatag

SEQ ID NO: 164889 - DNA, 3618 bp, synthetic construct
  misc_feature 1..3618: note = Description of Artificial Sequence: Synthetic coding sequence
  source 1..3618: mol_type = other DNA
atggccaatggaggcggcggcggcggcggcagcagcggcggcggcggcggcggcggcggcagcagcctgaggatgagcagcaacatccacgccaaccacctgagcctggatgccagcagcagcagcagcagcagcagcagcagcagcagcagcagcagcagcagcagcagcagcagctctgtgcatgagcccaagatggatgccctgatcatccctgtgaccatggaggtgccctgtgacagccggggccagaggatgtggtgggccttcctggccagctccatggtgaccttctttggaggcctcttcatcatcctgctgtggaggaccctgaagtacctgtggacagtgtgctgccactgcggcggcaagaccaaggaggcccagaagatcaacaacggcagcagccaggctgatggcaccctgaagcctgtggatgagaaggaggaggccgtggccgctgaggtgggctggatgacctctgtgaaggactgggccggcgtgatgatcagcgcccagaccctgaccggccgggtgctggtggtgctggtgtttgccctgagcattggagccctggtgatctacttcatcgacagcagcaaccccatcgagagctgccagaacttctacaaggacttcaccctgcagattgacatggccttcaacgtgttcttcctgctgtacttcggcctgcgcttcatcgccgccaatgacaagctgtggttctggctggaggtgaacagcgtggtggacttcttcaccgtgccccctgtgtttgtgtctgtgtacctgaacagatcctggctgggcctgcgcttcctgcgggccctgcggctcatccagttcagcgagatcctgcagttcctgaacatcctgaagaccagcaacagcatcaagctggtgaacctgctgagcatcttcatcagcacctggctgacagctgctggcttcatccacctggtggagaacagcggggacccctgggagaacttccagaacaaccaggccctgacctactgggagtgtgtgtacctgctgatggtgaccatgagcacagtgggctatggagatgtgtatgccaagaccaccctgggccgcctcttcatggtgttcttcatcctgggcggcctggccatgtttgccagctatgtgcctgagatcatcgagctgattggcaacaggaagaagtatggaggcagctacagcgctgtgtctggcaggaagcacatcgtggtgtgtggccacatcaccctggagagcgtgagcaacttcctgaaggacttcctgcacaaggacagagatgatgtgaatgtggagatcgtgttcctgcacaacatcagccccaacctggagctggaggccctcttcaagaggcacttcacccaggtggagttctaccagggctctgtgctgaacccccatgacctggcccgggtgaagattgaatctgcagatgcctgcctgatcctggccaacaagtactgtgccgaccctgatgctgaagatgccagcaacatcatgagggtcatcagcatcaagaactaccaccccaagatccgcatcatcacccagatgctgcagtaccacaacaaggcccacctgctgaacatccccagctggaactggaaggagggagatgatgccatctgcctggccgagctgaagctgggcttcatcgcccagagctgcctggcccagggcctgagcaccatgctggccaacctcttctccatgaggagcttcatcaagattgaggaggacacctggcagaagtactacctggagggcgtgtccaatgagatgtacacagagtacctgagcagcgcctttgtgggcctgtccttccccaccgtgtgtgagctgtgctttgtgaagctgaagctgctgatgattgccatcgagtacaagagcgccaaccgggagagccgcatcctgatcaaccctggcaaccacctgaagatccaggagggcaccctgggcttcttcatcgccagtgatgccaaggaggtgaagagggccttcttctactgcaaggcctgccatgatgacatcacagaccccaagaggatcaagaagtgtggctgcaagaggctggaggatgagcagcccagcaccctgagccccaagaagaagcagagaaatggaggcatgaggaacagccccaacaccagccccaagctgatgagacatgaccccctgctgatccctggaaatgaccagattgacaacatggacagcaatgtgaagaagtatgacagcacaggcatgttccactggtgtgcccccaaggagattgagaaggtgatcctgaccaggtctgaggccgccatgacagtgctgagcggccacgtggtggtgtgcatctttggagatgtgagcagcgccctgattggcctgaggaacctggtgatgcccctgcgggccagcaacttccactaccacgagctgaagcacatcgtgtttgtgggcagcattgagtacctgaagcgggagtgggagaccctgcacaacttccccaaggtgtccatcctgcccggcacccccctgagcagagctgacctgcgggctgtgaacatcaacctgtgtgacatgtgtgtgatcctgagcgccaaccagaacaacattgatgacaccagcctgcaggacaaggagtgcatcctggccagcctgaacatcaagtccatgcagtttgatgacagcattggagtgctgcaggccaacagccagggcttcaccccacctggcatggacaggagcagcccagacaacagccctgtgcacggcatgctgcggcagcccagcatcaccactggagtgaacatccccatcatcacagagctggccaagccaggcaagctgcccctggtgtctgtgaaccaggagaagaacagcggcacccacatcctgatgatcacagagctggtgaatgacaccaacgtgcagttcctggaccaggatgatgatgatgatcctgacacagagctgtacctgacccagccctttgcctgtggcacagcctttgctgtgtctgtgctggacagcctgatgtctgccacctacttcaatgacaacatcctgaccctcatccgcaccctggtgactggaggagccaccccagagctggaggccctgattgctgaggagaatgccctgcggggcggctacagcaccccccagaccctggccaacagagaccgctgccgggtggcccagctggccctgctggatggcccctttgctgacctgggagatggcggctgctacggggacctcttctgcaaggccctgaagacctacaacatgctgtgcttcggcatctaccgcctgagagatgcccacctgagcacccccagccagtgcaccaagcgctacgtgatcaccaaccccccctatgaatttgagctggtgcccacagacctgatcttctgcctgatgcagtttgaccacaatgccggccagagccgggccagcctgagccacagcagccacagcagccagagcagcagcaagaagagcagctctgtgcacagcatccccagcacagccaaccggcagaaccggcccaagagccgggagagccgggacaagcagaacaggaaggagatggtgtacagatag

SEQ ID NO: 164890 - DNA, 3678 bp, synthetic construct
  misc_feature 1..3678: note = Description of Artificial Sequence: Synthetic coding sequence
  source 1..3678: mol_type = other DNA
cccaagatggatgccctgatcatccctgtgaccatggaggtgccctgtgacagccggggccagaggatgtggtgggccttcctggccagctccatggtgaccttcttcggcggcctcttcatcatcctgctgtggaggaccctgaagtacctgtggacagtgtgctgccactgcggcggcaagaccaaggaggcccagaagatcaacaacggcagcagccaggctgatggcaccctgaagcctgtggatgagaaggaggaggccgtggccgctgaggtgggctggatgacctctgtgaaggactgggccggcgtgatgatcagcgcccagaccctgaccggccgggtgctggtggtgctggtgtttgccctgagcatcggggccctggtgatctacttcatcgacagcagcaaccccatcgagagctgccagaacttctacaaggacttcaccctgcagattgacatggccttcaacgtgttcttcctgctgtacttcggcctgcgcttcatcgccgccaatgacaagctgtggttctggctggaggtgaacagcgtggtggacttcttcaccgtgccccctgtgtttgtgtctgtgtacctgaacagatcctggctgggcctgcgcttcctgcgggccctgcggctcatccagttcagcgagatcctgcagttcctgaacatcctgaagaccagcaacagcatcaagctggtgaacctgctgagcatcttcatcagcacctggctgacagctgctggcttcatccacctggtggagaacagcggggacccctgggagaacttccagaacaaccaggccctgacctactgggagtgtgtgtacctgctgatggtgaccatgagcacagtgggctatggagatgtgtatgccaagaccaccctgggccgcctcttcatggtgttcttcatcctgggcggcctggccatgtttgccagctatgtgcctgagatcatcgagctgattggcaacaggaagaagtatggaggcagctacagcgctgtgtctggcaggaagcacatcgtggtgtgtggccacatcaccctggagagcgtgagcaacttcctgaaggacttcctgcacaaggacagagatgatgtgaatgtggagatcgtgttcctgcacaacatcagccccaacctggagctggaggccctcttcaagaggcacttcacccaggtggagttctaccagggctctgtgctgaacccccatgacctggcccgggtgaagattgagagcgcagatgcctgcctgatcctggccaacaagtactgtgccgaccctgatgctgaagatgccagcaacatcatgagggtcatcagcatcaagaactaccaccccaagatccgcatcatcacccagatgctgcagtaccacaacaaggcccacctgctgaacatccccagctggaactggaaggagggagatgatgccatctgcctggccgagctgaagctgggcttcatcgcccagagctgcctggcccagggcctgagcaccatgctggccaacctcttctccatgaggagcttcatcaagattgaggaggacacctggcagaagtactacctggagggcgtgtccaatgagatgtacacagagtacctgagcagcgcctttgtgggcctgtccttccccaccgtgtgtgagctgtgctttgtgaagctgaagctgctgatgattgccatcgagtacaagagcgccaaccgggagagccgcatcctgatcaaccctggcaaccacctgaagatccaggagggcaccctgggcttcttcatcgccagtgatgccaaggaggtgaagagggccttcttctactgcaaggcctgccatgatgacatcacagaccccaagaggatcaagaagtgtggctgcaagaggcccaagatgagcatctacaagaggatgaggcgggcctgctgctttgactgtggccgctctgagcgggactgcagctgcatgagcggccgggtgagaggaaatgtggacaccctggagcgggccttccccctgagctctgtgtctgtgaatgactgcagcaccagcttccgggcctttgaagatgagcagcccagcaccctgagccccaagaagaagcagagaaatggaggcatgaggaacagccccaacaccagccccaagctgatgagacatgaccccctgctgatccctggaaatgaccagattgacaacatggacagcaatgtgaagaagtatgacagcacaggcatgttccactggtgtgcccccaaggagattgagaaggtgatcctgaccaggtctgaggccgccatgacagtgctgagcggccacgtggtggtgtgcatctttggagatgtgtcctctgccctgattggcctgaggaacctggtgatgcccctgcgggccagcaacttccactaccacgagctgaagcacatcgtgtttgtgggcagcattgagtacctgaagcgggagtgggagaccctgcacaacttccccaaggtgtccatcctgcccggcacccccctgagcagagctgacctgcgggctgtgaacatcaacctgtgtgacatgtgtgtgatcctgagcgccaaccagaacaacattgatgacaccagcctgcaggacaaggagtgcatcctggccagcctgaacatcaagtccatgcagtttgatgacagcattggagtgctgcaggccaacagccagggcttcaccccacctggcatggacaggagcagcccagacaacagccctgtgcacggcatgctgcggcagcccagcatcaccaccggggtgaacatccccatcatcacagagctggtgaatgacaccaacgtgcagttcctggaccaggatgatgatgatgatcctgacacagagctgtacctgacccagccctttgcctgtggcacagcctttgctgtgtctgtgctggacagcctgatgtctgccacctacttcaatgacaacatcctgaccctcatccgcaccctggtgactggaggagccaccccagagctggaggccctgattgctgaggagaatgccctgcggggcggctacagcaccccccagaccctggccaacagagaccgctgccgggtggcccagctggccctgctggatggcccctttgctgacctgggagatggcggctgctacggggacctcttctgcaaggccctgaagacctacaacatgctgtgcttcggcatctaccgcctgagagatgcccacctgagcacccccagccagtgcaccaagcgctacgtgatcaccaaccccccctatgaatttgagctggtgcccacagacctgatcttctgcctgatgcagtttgaccacaatgccggccagagccgggccagcctgagccacagcagccacagcagccagagcagcagcaagaagagcagctctgtgcacagcatccccagcacagccaaccggcagaaccggcccaagagccgggagagccgggacaagcagaatgccaccaggatgaacaggatgggccaggagaagaagtggttcacagatgagccagacaatgcctaccccaggaacatccagatcaagcccatgagcacccacatggccaaccagatcaaccagtacaagagcaccagcagcctcatcccccccatccgggaggtggaggatgagtgctag

SEQ ID NO: 164891 - DNA, 3660 bp, synthetic construct
  misc_feature 1..3660: note = Description of Artificial Sequence: Synthetic coding sequence
  source 1..3660: mol_type = other DNA
atggccaatggaggcggcggcggcggcggcagcagcggcggcggcggcggcggcggcggcagcagcctgaggatgagcagcaacatccacgccaaccacctgagcctggatgccagcagcagcagcagcagcagcagcagcagcagcagcagcagcagcagcagcagcagcagcagctctgtgcatgagcccaagatggatgccctgatcatccctgtgaccatggaggtgccctgtgacagccggggccagaggatgtggtgggccttcctggccagctccatggtgaccttctttggaggcctcttcatcatcctgctgtggaggaccctgaagtacctgtggacagtgtgctgccactgcggcggcaagaccaaggaggcccagaagatcaacaacggcagcagccaggctgatggcaccctgaagcctgtggatgagaaggaggaggccgtggccgctgaggtgggctggatgacctctgtgaaggactgggccggcgtgatgatcagcgcccagaccctgaccggccgggtgctggtggtgctggtgtttgccctgagcattggagccctggtgatctacttcatcgacagcagcaaccccatcgagagctgccagaacttctacaaggacttcaccctgcagattgacatggccttcaacgtgttcttcctgctgtacttcggcctgcgcttcatcgccgccaatgacaagctgtggttctggctggaggtgaacagcgtggtggacttcttcaccgtgccccctgtgtttgtgtctgtgtacctgaacagatcctggctgggcctgcgcttcctgcgggccctgcggctcatccagttcagcgagatcctgcagttcctgaacatcctgaagaccagcaacagcatcaagctggtgaacctgctgagcatcttcatcagcacctggctgacagctgctggcttcatccacctggtggagaacagcggggacccctgggagaacttccagaacaaccaggccctgacctactgggagtgtgtgtacctgctgatggtgaccatgagcacagtgggctatggagatgtgtatgccaagaccaccctgggccgcctcttcatggtgttcttcatcctgggcggcctggccatgtttgccagctatgtgcctgagatcatcgagctgattggcaacaggaagaagtatggaggcagctacagcgctgtgtctggcaggaagcacatcgtggtgtgtggccacatcaccctggagagcgtgagcaacttcctgaaggacttcctgcacaaggacagagatgatgtgaatgtggagatcgtgttcctgcacaacatcagccccaacctggagctggaggccctcttcaagaggcacttcacccaggtggagttctaccagggctctgtgctgaacccccatgacctggcccgggtgaagattgaatctgcagatgcctgcctgatcctggccaacaagtactgtgccgaccctgatgctgaagatgccagcaacatcatgagggtcatcagcatcaagaactaccaccccaagatccgcatcatcacccagatgctgcagtaccacaacaaggcccacctgctgaacatccccagctggaactggaaggagggagatgatgccatctgcctggccgagctgaagctgggcttcatcgcccagagctgcctggcccagggcctgagcaccatgctggccaacctcttctccatgaggagcttcatcaagattgaggaggacacctggcagaagtactacctggagggcgtgtccaatgagatgtacacagagtacctgagcagcgcctttgtgggcctgtccttccccaccgtgtgtgagctgtgctttgtgaagctgaagctgctgatgattgccatcgagtacaagagcgccaaccgggagagccgcatcctgatcaaccctggcaaccacctgaagatccaggagggcaccctgggcttcttcatcgccagtgatgccaaggaggtgaagagggccttcttctactgcaaggcctgccatgatgacatcacagaccccaagaggatcaagaagtgtggctgcaagaggctggaggatgagcagcccagcaccctgagccccaagaagaagcagagaaatggaggcatgaggaacagccccaacaccagccccaagctgatgagacatgaccccctgctgatccctggaaatgaccagattgacaacatggacagcaatgtgaagaagtatgacagcacaggcatgttccactggtgtgcccccaaggagattgagaaggtgatcctggtgacaggctggatgccctacctgggcccccgggtgctgatgacctgcctggacattggagtggtgtgcatgcccacagacatccagagcaccagccctgccagcatcaagaagttcaaggagaccaggtctgaggccgccatgacagtgctgagcggccacgtggtggtgtgcatctttggagatgtgtcctctgccctgattggcctgaggaacctggtgatgcccctgcgggccagcaacttccactaccacgagctgaagcacatcgtgtttgtgggcagcattgagtacctgaagcgggagtgggagaccctgcacaacttccccaaggtgtccatcctgcccggcacccccctgagcagagctgacctgcgggctgtgaacatcaacctgtgtgacatgtgtgtgatcctgagcgccaaccagaacaacattgatgacaccagcctgcaggacaaggagtgcatcctggccagcctgaacatcaagtccatgcagtttgatgacagcattggagtgctgcaggccaacagccagggcttcaccccacctggcatggacaggagcagcccagacaacagccctgtgcacggcatgctgcggcagcccagcatcaccaccggggtgaacatccccatcatcacagagctggtgaatgacaccaacgtgcagttcctggaccaggatgatgatgatgatcctgacacagagctgtacctgacccagccctttgcctgtggcacagcctttgctgtgtctgtgctggacagcctgatgtctgccacctacttcaatgacaacatcctgaccctcatccgcaccctggtgactggaggagccaccccagagctggaggccctgattgctgaggagaatgccctgcggggcggctacagcaccccccagaccctggccaacagagaccgctgccgggtggcccagctggccctgctggatggcccctttgctgacctgggagatggcggctgctacggggacctcttctgcaaggccctgaagacctacaacatgctgtgcttcggcatctaccgcctgagagatgcccacctgagcacccccagccagtgcaccaagcgctacgtgatcaccaaccccccctatgaatttgagctggtgcccacagacctgatcttctgcctgatgcagtttgaccacaatgccggccagagccgggccagcctgagccacagcagccacagcagccagagcagcagcaagaagagcagctctgtgcacagcatccccagcacagccaaccggcagaaccggcccaagagccgggagagccgggacaagcagaagtatgtgcaggaggagcggctgtag

SEQ ID NO: 164892 - DNA, 3723 bp, synthetic construct
  misc_feature 1..3723: note = Description of Artificial Sequence: Synthetic coding sequence
  source 1..3723: mol_type = other DNA
atggccaatggaggcggcggcggcggcggcagcagcggcggcggcggcggcggcggcggcagcagcctgaggatgagcagcaacatccacgccaaccacctgagcctggatgccagcagcagcagcagcagcagcagcagcagcagcagcagcagcagcagcagcagcagcagcagctctgtgcatgagcccaagatggatgccctgatcatccctgtgaccatggaggtgccctgtgacagccggggccagaggatgtggtgggccttcctggccagctccatggtgaccttctttggaggcctcttcatcatcctgctgtggaggaccctgaagtacctgtggacagtgtgctgccactgcggcggcaagaccaaggaggcccagaagatcaacaacggcagcagccaggctgatggcaccctgaagcctgtggatgagaaggaggaggccgtggccgctgaggtgggctggatgacctctgtgaaggactgggccggcgtgatgatcagcgcccagaccctgaccggccgggtgctggtggtgctggtgtttgccctgagcattggagccctggtgatctacttcatcgacagcagcaaccccatcgagagctgccagaacttctacaaggacttcaccctgcagattgacatggccttcaacgtgttcttcctgctgtacttcggcctgcgcttcatcgccgccaatgacaagctgtggttctggctggaggtgaacagcgtggtggacttcttcaccgtgccccctgtgtttgtgtctgtgtacctgaacagatcctggctgggcctgcgcttcctgcgggccctgcggctcatccagttcagcgagatcctgcagttcctgaacatcctgaagaccagcaacagcatcaagctggtgaacctgctgagcatcttcatcagcacctggctgacagctgctggcttcatccacctggtggagaacagcggggacccctgggagaacttccagaacaaccaggccctgacctactgggagtgtgtgtacctgctgatggtgaccatgagcacagtgggctatggagatgtgtatgccaagaccaccctgggccgcctcttcatggtgttcttcatcctgggcggcctggccatgtttgccagctatgtgcctgagatcatcgagctgattggcaacaggaagaagtatggaggcagctacagcgctgtgtctggcaggaagcacatcgtggtgtgtggccacatcaccctggagagcgtgagcaacttcctgaaggacttcctgcacaaggacagagatgatgtgaatgtggagatcgtgttcctgcacaacatcagccccaacctggagctggaggccctcttcaagaggcacttcacccaggtggagttctaccagggctctgtgctgaacccccatgacctggcccgggtgaagattgaatctgcagatgcctgcctgatcctggccaacaagtactgtgccgaccctgatgctgaagatgccagcaacatcatgagggtcatcagcatcaagaactaccaccccaagatccgcatcatcacccagatgctgcagtaccacaacaaggcccacctgctgaacatccccagctggaactggaaggagggagatgatgccatctgcctggccgagctgaagctgggcttcatcgcccagagctgcctggcccagggcctgagcaccatgctggccaacctcttctccatgaggagcttcatcaagattgaggaggacacctggcagaagtactacctggagggcgtgtccaatgagatgtacacagagtacctgagcagcgcctttgtgggcctgtccttccccaccgtgtgtgagctgtgctttgtgaagctgaagctgctgatgattgccatcgagtacaagagcgccaaccgggagagccggggccgcctgagcatcctgatcaaccctggcaaccacctgaagatccaggagggcaccctgggcttcttcatcgccagtgatgccaaggaggtgaagagggccttcttctactgcaaggcctgccatgatgacatcacagaccccaagaggatcaagaagtgtggctgcaagaggcccaagatgagcatctacaagaggatgagaagagcctgctgctttgactgtggccgctctgagcgggactgcagctgcatgagcggccgggtgagaggaaatgtggacaccctggagcgggccttccccctgagctctgtgtctgtgaatgactgcagcaccagcttccgggcctttgaagatgagcagcccagcaccctgagccccaagaagaagcagagaaatggaggcatgaggaacagccccaacaccagccccaagctgatgagacatgaccccctgctgatccctggaaatgaccagattgacaacatggacagcaatgtgaagaagtatgacagcacaggcatgttccactggtgtgcccccaaggagattgagaaggtgatcctgaccaggtctgaggccgccatgacagtgctgagcggccacgtggtggtgtgcatctttggagatgtgagcagcgccctgattggcctgaggaacctggtgatgcccctgcgggccagcaacttccactaccacgagctgaagcacatcgtgtttgtgggcagcattgagtacctgaagcgggagtgggagaccctgcacaacttccccaaggtgtccatcctgcccggcacccccctgagcagagctgacctgcgggctgtgaacatcaacctgtgtgacatgtgtgtgatcctgagcgccaaccagaacaacattgatgacaccagcctgcaggacaaggagtgcatcctggccagcctgaacatcaagtccatgcagtttgatgacagcattggagtgctgcaggccaacagccagggcttcaccccacctggcatggacaggagcagcccagacaacagccctgtgcacggcatgctgcggcagcccagcatcaccactggagtgaacatccccatcatcacagagctggtgaatgacaccaacgtgcagttcctggaccaggatgatgatgatgatcctgacacagagctgtacctgacccagccctttgcctgtggcacagcctttgctgtgtctgtgctggacagcctgatgtctgccacctacttcaatgacaacatcctgaccctcatccgcaccctggtgactggaggagccaccccagagctggaggccctgattgctgaagaaaatgccctgcggggcggctacagcaccccccagaccctggccaacagagaccgctgccgggtggcccagctggccctgctggatggcccctttgctgacctgggagatggcggctgctatggagacctcttctgcaaggccctgaagacctacaacatgctgtgcttcggcatctaccgcctgagagatgcccacctgagcacccccagccagtgcaccaagagatatgtgatcaccaaccccccctatgaatttgagctggtgcccacagacctgatcttctgcctgatgcagtttgaccacaatgccggccagagccgggccagcctgagccacagcagccacagcagccagagcagcagcaagaagagcagctctgtgcacagcatccccagcacagccaaccggcagaaccggcccaagagccgggagagccgggacaagcagaagtatgtgcaggaggagcggctgtag

SEQ ID NO: 164893 - DNA, 2970 bp, synthetic construct
  misc_feature 1..2970: note = Description of Artificial Sequence: Synthetic coding sequence
  source 1..2970: mol_type = other DNA
atggccttcaacgtgttcttcctgctgtacttcggcctgcgcttcatcgccgccaatgacaagctgtggttctggctggaggtgaacagcgtggtggacttcttcaccgtgccccctgtgtttgtgtctgtgtacctgaacagatcctggctgggcctgcgcttcctgcgggccctgcggctcatccagttcagcgagatcctgcagttcctgaacatcctgaagaccagcaacagcatcaagctggtgaacctgctgagcatcttcatcagcacctggctgacagctgctggcttcatccacctggtggagaacagcggggacccctgggagaacttccagaacaaccaggccctgacctactgggagtgtgtgtacctgctgatggtgaccatgagcacagtgggctatggagatgtgtatgccaagaccaccctgggccgcctcttcatggtgttcttcatcctgggcggcctggccatgtttgccagctatgtgcctgagatcatcgagctgattggcaacaggaagaagtatggaggcagctacagcgctgtgtctggcaggaagcacatcgtggtgtgtggccacatcaccctggagagcgtgagcaacttcctgaaggacttcctgcacaaggacagagatgatgtgaatgtggagatcgtgttcctgcacaacatcagccccaacctggagctggaggccctcttcaagaggcacttcacccaggtggagttctaccagggctctgtgctgaacccccatgacctggcccgggtgaagattgaatctgcagatgcctgcctgatcctggccaacaagtactgtgccgaccctgatgctgaagatgccagcaacatcatgagggtcatcagcatcaagaactaccaccccaagatccgcatcatcacccagatgctgcagtaccacaacaaggcccacctgctgaacatccccagctggaactggaaggagggagatgatgccatctgcctggccgagctgaagctgggcttcatcgcccagagctgcctggcccagggcctgagcaccatgctggccaacctcttctccatgaggagcttcatcaagattgaggaggacacctggcagaagtactacctggagggcgtgtccaatgagatgtacacagagtacctgagcagcgcctttgtgggcctgtccttccccaccgtgtgtgagctgtgctttgtgaagctgaagctgctgatgattgccatcgagtacaagagcgccaaccgggagagccgcatcctgatcaaccctggcaaccacctgaagatccaggagggcaccctgggcttcttcatcgccagtgatgccaaggaggtgaagagggccttcttctactgcaaggcctgccatgatgacatcacagaccccaagaggatcaagaagtgtggctgcaagaggctgaaggtggccgcccggagccgctacagcaaggacccctttgagttcaagaaggagacccccaacagccggctggtgacagagcctgtggaggatgagcagcccagcaccctgagccccaagaagaagcagagaaatggaggcatgaggaacagccccaacaccagccccaagctgatgagacatgaccccctgctgatccctggaaatgaccagattgacaacatggacagcaatgtgaagaagtatgacagcacaggcatgttccactggtgtgcccccaaggagattgagaaggtgatcctgaccaggtctgaggccgccatgacagtgctgagcggccacgtggtggtgtgcatctttggagatgtgtcctctgccctgattggcctgaggaacctggtgatgcccctgcgggccagcaacttccactaccacgagctgaagcacatcgtgtttgtgggcagcattgagtacctgaagcgggagtgggagaccctgcacaacttccccaaggtgtccatcctgcccggcacccccctgagcagagctgacctgcgggctgtgaacatcaacctgtgtgacatgtgtgtgatcctgagcgccaaccagaacaacattgatgacaccagcctgcaggacaaggagtgcatcctggccagcctgaacatcaagtccatgcagtttgatgacagcattggagtgctgcaggccaacagccagggcttcaccccacctggcatggacaggagcagcccagacaacagccctgtgcacggcatgctgcggcagcccagcatcaccaccggggtgaacatccccatcatcacagagctggtgaatgacaccaacgtgcagttcctggaccaggatgatgatgatgatcctgacacagagctgtacctgacccagccctttgcctgtggcacagcctttgctgtgtctgtgctggacagcctgatgtctgccacctacttcaatgacaacatcctgaccctcatccgcaccctggtgactggaggagccaccccagagctggaggccctgattgctgaggagaatgccctgcggggcggctacagcaccccccagaccctggccaacagagaccgctgccgggtggcccagctggccctgctggatggcccctttgctgacctgggagatggcggctgctacggggacctcttctgcaaggccctgaagacctacaacatgctgtgcttcggcatctaccgcctgagagatgcccacctgagcacccccagccagtgcaccaagcgctacgtgatcaccaaccccccctatgaatttgagctggtgcccacagacctgatcttctgcctgatgcagtttgaccacaatgccggccagagccgggccagcctgagccacagcagccacagcagccagagcagcagcaagaagagcagctctgtgcacagcatccccagcacagccaaccggcagaaccggcccaagagccgggagagccgggacaagcagaagtatgtgcaggaggagcggctgtag

SEQ ID NO: 164894 - DNA, 543 bp, synthetic construct
  misc_feature 1..543: note = Description of Artificial Sequence: Synthetic coding sequence
  source 1..543: mol_type = other DNA
tgaaaaatccgcatcatcacccagatgctgcagtaccacaacaaggcccacctgctgaacatccccagctggaactggaaggagggagatgatgccatctgcctggccgagctgaagctgggcttcatcgcccagagctgcctggcccagggcctgagcaccatgctggccaacctcttctccatgaggagcttcatcaagattgaggaggacacctggcagaagtactacctggagggcgtgtccaatgagatgtacacagagtacctgagcagcgcctttgtgggcctgtccttccccaccgtgtgtgagctgtgctttgtgaagctgaagctgctgatgattgccatcgagtacaagagcgccaaccgggagagccgcatcctgatcaaccctggcaaccacctgaagatccaggagggcaccctgggcttcttcatcgccagtgatgccaaggaggtgaagaggcctccccagctgtgcctgcccctggccgcccagaagcgctgcttccagagcgacaagctggacatcttcatctag

SEQ ID NO: 164895 - DNA, 2661 bp, synthetic construct
  misc_feature 1..2661: note = Description of Artificial Sequence: Synthetic coding sequence
  source 1..2661: mol_type = other DNA
tgaaattctggggacccctgggagaacttccagaacaaccaggccctgacctactgggagtgtgtgtacctgctgatggtgaccatgagcacagtgggctatggagatgtgtatgccaagaccaccctgggccgcctcttcatggtgttcttcatcctgggcggcctggccatgtttgccagctatgtgcctgagatcatcgagctgattggcaacaggaagaagtatggaggcagctacagcgctgtgtctggcaggaagcacatcgtggtgtgtggccacatcaccctggagagcgtgagcaacttcctgaaggacttcctgcacaaggacagagatgatgtgaatgtggagatcgtgttcctgcacaacatcagccccaacctggagctggaggccctcttcaagaggcacttcacccaggtggagttctaccagggctctgtgctgaacccccatgacctggcccgggtgaagattgagagcgcagatgcctgcctgatcctggccaacaagtactgtgccgaccctgatgctgaagatgccagcaacatcatgagggtcatcagcatcaagaactaccaccccaagatccgcatcatcacccagatgctgcagtaccacaacaaggcccacctgctgaacatccccagctggaactggaaggagggagatgatgccatctgcctggccgagctgaagctgggcttcatcgcccagagctgcctggcccagggcctgagcaccatgctggccaacctcttctccatgaggagcttcatcaagattgaggaggacacctggcagaagtactacctggagggcgtgtccaatgagatgtacacagagtacctgagcagcgcctttgtgggcctgtccttccccaccgtgtgtgagctgtgctttgtgaagctgaagctgctgatgattgccatcgagtacaagagcgccaaccgggagagccgcatcctgatcaaccctggcaaccacctgaagatccaggagggcaccctgggcttcttcatcgccagtgatgccaaggaggtgaagagggccttcttctactgcaaggcctgccatgatgacatcacagaccccaagaggatcaagaagtgtggctgcaagaggctgaaggtggccgcccggagccgctacagcaaggacccctttgagttcaagaaggagacccccaacagccggctggtgacagagcctgtggaggatgagcagcccagcaccctgagccccaagaagaagcagagaaatggaggcatgaggaacagccccaacaccagccccaagctgatgagacatgaccccctgctgatccctggaaatgaccagattgacaacatggacagcaatgtgaagaagtatgacagcacaggcatgttccactggtgtgcccccaaggagattgagaaggtgatcctgaccaggtctgaggccgccatgacagtgctgagcggccacgtggtggtgtgcatctttggagatgtgagcagcgccctgattggcctgaggaacctggtgatgcccctgcgggccagcaacttccactaccacgagctgaagcacatcgtgtttgtgggcagcattgagtacctgaagcgggagtgggagaccctgcacaacttccccaaggtgtccatcctgcccggcacccccctgagcagagctgacctgcgggctgtgaacatcaacctgtgtgacatgtgtgtgatcctgagcgccaaccagaacaacattgatgacaccagcctgcaggacaaggagtgcatcctggccagcctgaacatcaagtccatgcagtttgatgacagcattggagtgctgcaggccaacagccagggcttcaccccacctggcatggacaggagcagcccagacaacagccctgtgcacggcatgctgcggcagcccagcatcaccactggagtgaacatccccatcatcacagagctggtgaatgacaccaacgtgcagttcctggaccaggatgatgatgatgatcctgacacagagctgtacctgacccagccctttgcctgtggcacagcctttgctgtgtctgtgctggacagcctgatgtctgccacctacttcaatgacaacatcctgaccctcatccgcaccctggtgactggaggagccaccccagagctggaggccctgattgctgaagaaaatgccctgcggggcggctacagcaccccccagaccctggccaacagagaccgctgccgggtggcccagctggccctgctggatggcccctttgctgacctgggagatggcggctgctatggagacctcttctgcaaggccctgaagacctacaacatgctgtgcttcggcatctaccgcctgagagatgcccacctgagcacccccagccagtgcaccaagagatatgtgatcaccaaccccccctatgaatttgagctggtgcccacagacctgatcttctgcctgatgcagtttgaccacaatgccggccagagccgggccagcctgagccacagcagccacagcagccagagcagcagcaagaagagcagctctgtgcacagcatccccagcacagccaaccggcagaaccggcccaagagccgggagagccgggacaagcagaagtatgtgcaggaggagcggctgtag

SEQ ID NO: 164896 - DNA, 795 bp, synthetic construct
  misc_feature 1..795: note = Description of Artificial Sequence: Synthetic coding sequence
  source 1..795: mol_type = other DNA
tgagtcatcagcatcaagaactaccaccccaagatccgcatcatcacccagatgctgcagtaccacaacaaggcccacctgctgaacatccccagctggaactggaaggagggagatgatgccatctgcctggccgagctgaagctgggcttcatcgcccagagctgcctggcccagggcctgagcaccatgctggccaacctcttctccatgaggagcttcatcaagattgaggaggacacctggcagaagtactacctggagggcgtgtccaatgagatgtacacagagtacctgagcagcgcctttgtgggcctgtccttccccaccgtgtgtgagctgtgctttgtgaagctgaagctgctgatgattgccatcgagtacaagagcgccaaccgggagagccgcatcctgatcaaccctggcaaccacctgaagatccaggagggcaccctgggcttcttcatcgccagtgatgccaaggaggtgaagagggccttcttctactgcaaggcctgccatgatgacatcacagaccccaagaggatcaagaagtgtggctgcaagaggctggccggcagccaggacacccacccagacagcttctaccaccaggccgtgaatgccagcagctacctgcacggcggcggccagatgtggcctgtgagcagcagcagcagcatcctgctgcactacctgcggcggcagatgcctggccctgcccggctgcccctggagctgagctgccagggcagcgccctgagccccaacccagacctgtactgcatgaagtag

SEQ ID NO: 164897 - DNA, 3630 bp, synthetic construct
  misc_feature 1..3630: note = Description of Artificial Sequence: Synthetic coding sequence
  source 1..3630: mol_type = other DNA
agcaacatccacgccaaccacctgagcctggatgccagcagcagcagcagcagcagcagcagcagcagcagcagcagcagcagcagcagcagcagcagctctgtgcatgagcccaagatggatgccctgatcatccctgtgaccatggaggtgccctgtgacagccggggccagaggatgtggtgggccttcctggccagctccatggtgaccttctttggaggcctcttcatcatcctgctgtggaggaccctgaagtacctgtggacagtgtgctgccactgcggcggcaagaccaaggaggcccagaagatcaacaacggcagcagccaggctgatggcaccctgaagcctgtggatgagaaggaggaggccgtggccgctgaggtgggctggatgacctctgtgaaggactgggccggcgtgatgatcagcgcccagaccctgaccggccgggtgctggtggtgctggtgtttgccctgagcattggagccctggtgatctacttcatcgacagcagcaaccccatcgagagctgccagaacttctacaaggacttcaccctgcagattgacatggccttcaacgtgttcttcctgctgtacttcggcctgcgcttcatcgccgccaatgacaagctgtggttctggctggaggtgaacagcgtggtggacttcttcaccgtgccccctgtgtttgtgtctgtgtacctgaacagatcctggctgggcctgcgcttcctgcgggccctgcggctcatccagttcagcgagatcctgcagttcctgaacatcctgaagaccagcaacagcatcaagctggtgaacctgctgagcatcttcatcagcacctggctgacagctgctggcttcatccacctggtggagaacagcggggacccctgggagaacttccagaacaaccaggccctgacctactgggagtgtgtgtacctgctgatggtgaccatgagcacagtgggctatggagatgtgtatgccaagaccaccctgggccgcctcttcatggtgttcttcatcctgggcggcctggccatgtttgccagctatgtgcctgagatcatcgagctgattggcaacaggaagaagtatggaggcagctacagcgctgtgtctggcaggaagcacatcgtggtgtgtggccacatcaccctggagagcgtgagcaacttcctgaaggacttcctgcacaaggacagagatgatgtgaatgtggagatcgtgttcctgcacaacatcagccccaacctggagctggaggccctcttcaagaggcacttcacccaggtggagttctaccagggctctgtgctgaacccccatgacctggcccgggtgaagattgaatctgcagatgcctgcctgatcctggccaacaagtactgtgccgaccctgatgctgaagatgccagcaacatcatgagggtcatcagcatcaagaactaccaccccaagatccgcatcatcacccagatgctgcagtaccacaacaaggcccacctgctgaacatccccagctggaactggaaggagggagatgatgccatctgcctggccgagctgaagctgggcttcatcgcccagagctgcctggcccagggcctgagcaccatgctggccaacctcttctccatgaggagcttcatcaagattgaggaggacacctggcagaagtactacctggagggcgtgtccaatgagatgtacacagagtacctgagcagcgcctttgtgggcctgtccttccccaccgtgtgtgagctgtgctttgtgaagctgaagctgctgatgattgccatcgagtacaagagcgccaaccgggagagccgcatcctgatcaaccctggcaaccacctgaagatccaggagggcaccctgggcttcttcatcgccagtgatgccaaggaggtgaagagggccttcttctactgcaaggcctgccatgatgacatcacagaccccaagaggatcaagaagtgtggctgcaagaggcccaagatgagcatctacaagaggatgagaagagcctgctgctttgactgtggccgctctgagcgggactgcagctgcatgagcggccgggtgagaggaaatgtggacaccctggagcgggccttccccctgagctctgtgtctgtgaatgactgcagcaccagcttccgggcctttgaagatgagcagcccagcaccctgagccccaagaagaagcagagaaatggaggcatgaggaacagccccaacaccagccccaagctgatgagacatgaccccctgctgatccctggaaatgaccagattgacaacatggacagcaatgtgaagaagtatgacagcacaggcatgttccactggtgtgcccccaaggagattgagaaggtgatcctgaccaggtctgaggccgccatgacagtgctgagcggccacgtggtggtgtgcatctttggagatgtgagcagcgccctgattggcctgaggaacctggtgatgcccctgcgggccagcaacttccactaccacgagctgaagcacatcgtgtttgtgggcagcattgagtacctgaagcgggagtgggagaccctgcacaacttccccaaggtgtccatcctgcccggcacccccctgagcagagctgacctgcgggctgtgaacatcaacctgtgtgacatgtgtgtgatcctgagcgccaaccagaacaacattgatgacaccagcctgcaggacaaggagtgcatcctggccagcctgaacatcaagtccatgcagtttgatgacagcattggagtgctgcaggccaacagccagggcttcaccccacctggcatggacaggagcagcccagacaacagccctgtgcacggcatgctgcggcagcccagcatcaccactggagtgaacatccccatcatcacagagctggtgaatgacaccaacgtgcagttcctggaccaggatgatgatgatgatcctgacacagagctgtacctgacccagccctttgcctgtggcacagcctttgctgtgtctgtgctggacagcctgatgtctgccacctacttcaatgacaacatcctgaccctcatccgcaccctggtgactggaggagccaccccagagctggaggccctgattgctgaagaaaatgccctgcggggcggctacagcaccccccagaccctggccaacagagaccgctgccgggtggcccagctggccctgctggatggcccctttgctgacctgggagatggcggctgctatggagacctcttctgcaaggccctgaagacctacaacatgctgtgcttcggcatctaccgcctgagagatgcccacctgagcacccccagccagtgcaccaagagatatgtgatcaccaaccccccctatgaatttgagctggtgcccacagacctgatcttctgcctgatgcagtttgaccacaatgccggccagagccgggccagcctgagccacagcagccacagcagccagagcagcagcaagaagagcagctctgtgcacagcatccccagcacagccaaccggcagaaccggcccaagagccgggagagccgggacaagcagaagaaggagatggtgtacagatag

SEQ ID NO: 164898 - DNA, 576 bp, synthetic construct
  misc_feature 1..576: note = Description of Artificial Sequence: Synthetic coding sequence
  source 1..576: mol_type = other DNA
atggtgaagaagctggtgatggcccagaagagaggagagacccgggccctgtgcctgggcgtgaccatggtggtgtgtgctgtgatcacctactacatcctggtgaccaccgtgctgcccctgtaccagaagtctgtgtggacccaggagagcaagtgccacctgattgagaccaacatccgggaccaggaggagctgaagggcaagaaggtgccccagtacccctgcctgtgggtgaatgtgtctgctgctggccgctgggccgtgctgtaccacacagaggacacccgggaccagaaccagcagtgcagctacatccctggctctgtggacaactaccagacagcccgggcagatgtggagaaggtgcgggccaagttccaggagcagcaggtgttctactgcttcagcgcccccagaggaaatgagacctctgtgctcttccagaggctgtatggcccccaggccctgctcttcagcctcttctggcccaccttcctgctgactggaggcctgctgatcatcgccatggtgaagagcaaccagtacctgagcatcctggccgcccagaagtag

SEQ ID NO: 164899 - DNA, 393 bp, synthetic construct
  misc_feature 1..393: note = Description of Artificial Sequence: Synthetic coding sequence
  source 1..393: mol_type = other DNA
atggtgaagaagctggtgatggcccagaagagaggagagacccgggccctgtgcctgggcgtgaccatggtggtgtgtgctgtgatcacctactacatcctggtgaccaccgtgctgcccctgtaccagaagtctgtgtggacccaggagagcaagtgccacctgattgagaccaacatccgggaccaggaggagctgaagggcaagaaggtgccccagtacccctgcctgtgggtgaatgtgtctgctgctggccgctgggccgtgctgtaccacacagaggacacccgggaccagaaccagcaggtgctgaactggagagatggagacaccagcctgtacccctgccaggtgtgtgagcctgtgcccaactgcccctgcccccggggctag

SEQ ID NO: 164900 - DNA, 633 bp, synthetic construct
  misc_feature 1..633: note = Description of Artificial Sequence: Synthetic coding sequence
  source 1..633: mol_type = other DNA
atggccaagctgcgggtggcctatgagtacacagaagctgaggacaagagcatccggctgggcctcttcctgatcatctctggagtggtgtccctcttcatcttcggcttctgctggctgagccctgccctgcaggacctgcaggccacagaggccaactgcaccgtgctgtctgtgcagcagatcggggaggtgtttgaatgtaccttcacctgtggggctgactgccggggcaccagccagtacccctgtgtgcaggtgtatgtgaacaacagcgagagcaacagccgggccctgctgcacagtgatgagcaccagctgctgaccaaccccaagtgcagctacatccccccctgcaagcgggagaaccagaagaacctggagagcgtgatgaactggcagcagtactggaaggatgaaattggcagccagcccttcacctgctacttcaaccagcaccagaggccagatgatgtgctgctgcacaggacccatgatgagatcgtgctgctgcactgcttcctgtggcccctggtgacctttgtggtgggcgtgctgattgtggtgctgaccatctgtgccaagagcctggccgtgaaggccgaggccatgaagaagaggaagttctcctag

SEQ ID NO: 164901 - DNA, 2259 bp, synthetic construct
  misc_feature 1..2259: note = Description of Artificial Sequence: Synthetic coding sequence
  source 1..2259: mol_type = other DNA
atgaagccagctgagcacgccaccatgttcctgattgtgctgggctgcctgatcctggccgtgctgaccaccttcaaggagtatgagaccgtgtctggggactggctgctgctgctggagacctttgccatcttcatctttggagctgagtttgccctgcgcatctgggccgccggctgctgctgccgctacaagggctggaggggccgcctgaagtttgccaggaagcccctgtgcatgctggacatctttgtgctgattgcctctgtgcctgtggtggccgtgggcaaccagggcaatgtgctggccaccagcctgcggagcctgcgcttcctgcagatcctgaggatgctgaggatggaccggcggggcggcacctggaagctgctgggcagcgccatctgtgcccacagcaaggagctgatcacagcctggtacatcggcttcctgaccctcatcctgagcagcttcctggtgtacctggtggagaaggatgtgcctgaggtggatgcccagggcgaggagatgaaggaggagtttgagacctatgcagatgccctgtggtggggcctcatcaccctggccaccatcggctatggagacaagacccccaagacctgggagggccgcctgattgctgccaccttcagcctgattggagtgtccttctttgccctgcctgctggcatcctgggcagcggcctggccctgaaggtgcaggagcagcaccggcagaagcactttgagaagaggaggaagccagctgctgagctgatccaggccgcctggagatactatgccaccaaccccaacagaattgacctggtggccacctggaggttctatgagagcgtggtgtccttccccttcttcaggaaggagcagctggaggccgccagcagccagaagctgggcctgctggacagagtgcggctgagcaacccccggggcagcaacaccaagggcaagctgttcacccccctgaatgtggatgccatcgaggagagccccagcaaggagcccaagcctgtgggcctgaacaacaaggagcgcttcagaacagccttcaggatgaaggcctatgccttctggcagagcagtgaagatgctggcaccggggaccccatggccgaggaccggggctatggaaatgacttccccatcgaggacatgatccccaccctgaaggccgccatccgggctgtgcgcatcctgcagttccggctgtacaagaagaagttcaaggagaccctgcggccctatgatgtgaaggatgtgattgagcagtacagcgctggccacctggacatgctgagccgcatcaagtacctgcagaccagaattgacatgatcttcaccccaggcccccccagcacccccaagcacaagaagagccagaagggcagcgccttcaccttccccagccagcagagccccagaaatgagccctacgtggcccggcccagcaccagcgagattgaggaccagagcatgatgggcaagtttgtgaaggtggagcggcaggtgcaggacatgggcaagaagctggacttcctggtggacatgcacatgcagcacatggagcggctgcaggtgcaggtgacagagtactaccccaccaagggcaccagcagccctgctgaggccgagaagaaggaggacaaccgctacagcgacctgaagaccatcatctgcaactacagcgagaccggccccccagagcccccctacagcttccaccaggtgaccatcgacaaggtgagcccctacggcttctttgcccatgaccctgtgaacctgccccggggcggccccagcagcggcaaggtgcaggccaccccacccagcagcgccaccacctacgtggagcggcccaccgtgctgcccatcctgaccctgctggacagccgggtgtcctgccacagccaggccgacctgcagggcccctacagcgaccgcatcagcccccggcagaggaggagcatcacccgggacagcgacacccccctgagcctgatgtctgtgaaccacgaggagctggagaggagccccagcggcttcagcatcagccaggacagagatgattatgtgtttggccccaatggaggcagctcctggatgagggagaagcgctacctggccgagggggagacagacacagacacagaccccttcacccccagcggctccatgcccctgagcagcactggagatggcatcagtgacagcgtgtggacccccagcaacaagcccatctag

SEQ ID NO: 164902 - DNA, 1434 bp, synthetic construct
  misc_feature 1..1434: note = Description of Artificial Sequence: Synthetic coding sequence
  source 1..1434: mol_type = other DNA
atgacaggccagagcctgtgggatgtgtctgaggccaacgtggaggatggagagatccgcatcaacgtgggcggcttcaagaggcggctgcggagccacaccctgctgcgcttccctgagacccggctgggccgcctgctgctgtgccacagccgggaggccatcctggagctgtgtgatgattatgatgatgtgcagcgggagttctactttgacagaaatcctgagctgttcccctacgtgctgcacttctaccacacaggcaagctgcacgtgatggccgagctgtgtgtgttctccttcagccaggagattgagtactggggcatcaatgagttcttcatcgacagctgctgcagctacagctaccacggcaggaaggtggagcctgagcaggagaagtgggatgagcagagcgaccaggagagcaccaccagcagctttgatgagatcctggccttctacaatgatgccagcaagtttgatggccagcccctgggcaacttccggcggcagctgtggctggccctggacaaccctggctacagcgtgctgagcagggtcttcagcatcctgagcatcctggtggtgatgggcagcatcatcaccatgtgcctgaacagcctgcctgacttccagatcccagacagccagggcaaccctggagaggaccccaggtttgaaattgtggagcactttggaattgcctggttcacctttgagctggtggccaggtttgctgtggccccagacttcctgaagttcttcaagaatgccctgaacctgattgacctgatgagcatcgtgcccttctacatcaccctggtggtgaacctggtggtggagagcacccccaccctggccaacctgggccgggtggcccaggtgctgcggctgatgaggatcttccgcatcctgaagctggcccggcacagcacaggcctgcggagcctgggcgccaccctgaagtacagctacaaggaggtgggcctgctgctgctgtacctgtctgtgggcatcagcatcttctctgtggtggcctacaccatcgagaaggaggagaatgaaggcctggccaccatcccagcctgctggtggtgggccaccgtgtccatgaccaccgtgggctatggagatgtggtgcccggcaccacagctgggaagctgacagccagcgcctgcatcctggccggcatcctggtggtggtgctgcccatcaccctcatcttcaacaagttcagccacttctaccgccggcagaagcagctggagagcgccatgaggagctgtgactttggagatggcatgaaggaggtgcccagcgtgaacctgcgggactactatgcccacaaggtgaagagcctgatggccagcctgaccaacatgagccgcagcagccccagcgagctgagcctgaatgacagcctgaggtag

SEQ ID NO: 164903 - DNA, 1434 bp, synthetic construct; identical to SEQ ID NO: 164902
  misc_feature 1..1434: note = Description of Artificial Sequence: Synthetic coding sequence
  source 1..1434: mol_type = other DNA

SEQ ID NO: 164904 - DNA, 1476 bp, synthetic construct
  misc_feature 1..1476: note = Description of Artificial Sequence: Synthetic coding sequence
  source 1..1476: mol_type = other DNA
atggtgtttggagagttcttccaccggcccggccaggatgaggagctggtgaacctgaatgtgggcggcttcaagcagagcgtggaccagagcaccctgctgcgcttcccccacacccggctgggcaagctgctgacctgccacagcgaggaggccatcctggagctgtgtgatgactacagcgtggccgacaaggagtactactttgacaggaaccccagcctcttccgctacgtgctgaacttctactacacaggcaagctgcacgtgatggaggagctgtgtgtgttctccttctgccaggagattgagtactggggcatcaatgaactcttcatcgacagctgctgcagcaaccgctaccaggagaggaaggaggagaaccacgagaaggactgggaccagaagagccatgatgtgtccacagacagcagctttgaggagagcagcctgtttgagaaggagctggagaagtttgacaccctgcgcttcggccagctgaggaagaagatctggatccgcatggagaacccagcctactgcctgagcgccaagctgattgccatcagcagcctgtctgtggtgctggccagcatcgtggccatgtgtgtgcacagcatgtctgagttccagaatgaagatggagaggtggatgatcctgtgctggagggcgtggagatcgcctgcatcgcctggttcaccggggagctggccgtgcggctggccgccgccccctgccagaagaagttctggaagaaccccctgaacatcatcgactttgtgtccatcatccccttctacgccaccctggccgtggacaccaaggaggaggagagcgaggacatcgagaacatgggcaaggtggtgcagatcctgcggctgatgaggatcttccgcatcctgaagctggcccggcacagcgtgggcctgcggagcctgggcgccaccctgcggcacagctaccacgaggtgggcctgctgctgctcttcctgtctgtgggcatcagcatcttctctgtgctgatctacagcgtggagaaggatgaccacaccagcagcctgaccagcatccccatctgctggtggtgggccaccatctccatgaccaccgtgggctatggagacacccaccctgtgaccctggccggcaagctgattgccagcacctgcatcatctgtggcatcctggtggtggccctgcccatcaccatcatcttcaacaagttcagcaagtactaccagaagcagaaggacattgatgtggaccagtgcagtgaagatgcccctgagaagtgccacgagctgccctacttcaacatccgggacatctatgcccagaggatgcacaccttcatcaccagcctgagctctgtgggcatcgtggtgtctgaccctgacagcacagatgccagcagcattgaggacaatgaagacatctgcaacaccaccagcctggagaactgcacagccaagtag

SEQ ID NO: 164905 - DNA, 1476 bp, synthetic construct; identical to SEQ ID NO: 164904
  misc_feature 1..1476: note = Description of Artificial Sequence: Synthetic coding sequence
  source 1..1476: mol_type = other DNA

SEQ ID NO: 164906 - DNA, 225 bp, synthetic construct
  misc_feature 1..225: note = Description of Artificial Sequence: Synthetic coding sequence
  source 1..225: mol_type = other DNA
atggtgtttggagagttcttccaccggcccggccaggatgaggagctggtgaacctgaatgtgggcggcttcaagcagagcgtggaccagagcaccctgctgcgcttcccccacacccggctgggcaagctgctgacctgccacagcgaggaggccatcctggagctgtgtgatgactacagcgtggccgacaaggagtactactttgacaggaaccccagctag

SEQ ID NO: 164907 - DNA, 390 bp, synthetic construct
  misc_feature 1..390: note = Description of Artificial Sequence: Synthetic coding sequence
  source 1..390: mol_type = other DNA
atgatcctgagcaacaccacagctgtgacccccttcctgaccaagctgtggcaggagaccgtgcagcagggcggcaacatgagcggcctggcccggcgcagccccaggagcagtgatggcaagctggaggccctgtatgtgctgatggtgctgggcttcttcggcttcttcaccctgggcatcatgctgagctacatccgcagcaagaagctggagcacagcaatgaccccttcaacgtgtacatcgagagtgatgcctggcaggagaaggacaaggcctacgtgcaggcccgggtgctggagagctaccgcagctgctacgtggtggagaaccacctggccatcgagcagcccaacacccacctgcctgagaccaagcccagcccctag

SEQ ID NO: 164908 - DNA, 390 bp, synthetic construct; identical to SEQ ID NO: 164907
  misc_feature 1..390: note = Description of Artificial Sequence: Synthetic coding sequence
  source 1..390: mol_type = other DNA

SEQ ID NO: 164909 - DNA, 390 bp, synthetic construct; identical to SEQ ID NO: 164907
  misc_feature 1..390: note = Description of Artificial Sequence: Synthetic coding sequence
  source 1..390: mol_type = other DNA

SEQ ID NO: 164910 - DNA, 390 bp, synthetic construct; identical to SEQ ID NO: 164907
  misc_feature 1..390: note = Description of Artificial Sequence: Synthetic coding sequence
  source 1..390: mol_type = other DNA

SEQ ID NO: 164911 - DNA, 390 bp, synthetic construct; identical to SEQ ID NO: 164907
  misc_feature 1..390: note = Description of Artificial Sequence: Synthetic coding sequence
  source 1..390: mol_type = other DNA

SEQ ID NO: 164912 - DNA, 390 bp, synthetic construct; identical to SEQ ID NO: 164907
  misc_feature 1..390: note = Description of Artificial Sequence: Synthetic coding sequence
  source 1..390: mol_type = other DNA

SEQ ID NO: 164913 - DNA, 372 bp, synthetic construct
  misc_feature 1..372: note = Description of Artificial Sequence: Synthetic coding sequence
  source 1..372: mol_type = other DNA
atgagcaccctgagcaacttcacccagaccctggaggatgtgttccgccgcatcttcatcacctacatggacaactggaggcagaacaccacagctgagcaggaggccctgcaggccaaggtggatgctgagaacttctactacgtgatcctgtacctgatggtgatgattggcatgttctccttcatcatcgtggccatcctggtgtccacagtgaagagcaagaggcgggagcacagcaatgacccctaccaccagtacatcgtggaggactggcaggagaagtacaagagccagatcctgaacctggaggagagcaaggccaccatccacgagaacatcggggctgctggcttcaagatgagcccctag

SEQ ID NO: 164914 - DNA, 312 bp, synthetic construct
  misc_feature 1..312: note = Description of Artificial Sequence: Synthetic coding sequence
  source 1..312: mol_type = other DNA
atggagaccaccaatggaacagagacctggtatgagagcctgcatgctgtgctgaaggccctgaatgccaccctgcacagcaacctgctgtgcaggcctggccctggcctgggccctgacaaccagacagaggagcggcgggccagcctgcccggcagagatgacaacagctacatgtacatcctgtttgtgatgttcctgtttgctgtgacagtgggcagcctcatcctgggctacaccaggagcaggaaggtggacaagagaagtgacccctaccacgtgtacatcaagaacagagtgtccatgatctag

SEQ ID NO: 164915 - DNA, 312 bp, synthetic construct; identical to SEQ ID NO: 164914
  misc_feature 1..312: note = Description of Artificial Sequence: Synthetic coding sequence
  source 1..312: mol_type = other DNA

SEQ ID NO: 164916 - DNA, 39 bp, synthetic construct
  misc_feature 1..39: note = Description of Artificial Sequence: Synthetic coding sequence
  source 1..39: mol_type = other DNA
atggagaccaccaatggaacagagacctggtatgaatag

SEQ ID NO: 164917 - DNA, 153 bp, synthetic construct
  misc_feature 1..153: note = Description of Artificial Sequence: Synthetic coding sequence
  source 1..153: mol_type = other DNA
atggagaccaccaatggaacagagacctggtatgagagcctgcatgctgtgctgaaggccctgaatgccaccctgcacagcaacctgctgtgcaggcctggccctggcctgggccctgacaaccagacagaggagcggcgggccagcctgtag

SEQ ID NO: 164918 - DNA, 162 bp, synthetic construct
  misc_feature 1..162: note = Description of Artificial Sequence: Synthetic coding sequence
  source 1..162: mol_type = other DNA
atggagaccaccaatggaacagagacctggtatgagagcctgcatgctgtgctgaaggccctgaatgccaccctgcacagcaacctgctgtgcaggcctggccctggcctgggccctgacaaccagacagaggagcggcgggccagcctgcctggaagatag

SEQ ID NO: 164919 - DNA, 300 bp, synthetic construct
  misc_feature 1..300: note = Description of Artificial Sequence: Synthetic coding sequence
  source 1..300: mol_type = other DNA
atggagaccaccaatggaacagagacctggtatgagagcctgcatgctgtgctgaaggccctgaatgccaccctgcacagcaacctgctgtgcaggcctggccctggcctgggccctgacaaccagacagaggagcggcgggccagcctgcccggcagagatgacaacagctacatgtacatcctgtttgtgatgttcctgtttgctgtgacagtgggcagcctcatcctgggctacaccaggagcaggaaggtggacaagagaagtgacccctaccacgtgtacatcaagaacagatag

SEQ ID NO: 164920 - DNA, 513 bp, synthetic construct
  misc_feature 1..513: note = Description of Artificial Sequence: Synthetic coding sequence
  source 1..513: mol_type = other DNA
atgctgaagatggagcccctgaacagcacccaccctggaacagctgccagcagcagccccctggagagcagagctgctgggggcggcagcggaaatggaaatgagtacttctacatcctggtggtgatgtccttctacggcatcttcctgattggcatcatgctgggctacatgaagagcaagaggcgggagaagaagagcagcctgctgctgctgtacaaggatgaggagcggctgtggggcgaggccatgaagcccctgcctgtggtgtctggcctgcggtctgtgcaggtgcccctgatgctgaacatgctgcaggagagcgtggccccagccctgagctgcaccctgtgcagcatggagggggacagcgtgtcctctgagagcagcagcccagatgtgcacctgaccatccaggaggagggcgcagatgatgagctggaggagaccagcgagacccccctgaatgaatcttctgagggcagcagcgagaacatccaccagaacagctag

SEQ ID NO: 164921 - DNA, 2031 bp, synthetic construct
  misc_feature 1..2031: note = Description of Artificial Sequence: Synthetic coding sequence
  source 1..2031: mol_type = other DNA
atggctgctgccagcagcccccccagggctgagaggaagcgctggggctggggccgcctgcccggggcccggcggggcagcgctggcctggccaagaagtgccccttcagcctggagctggccgagggcggccctgctgggggcgccctgtatgcccccatcgcccctggggcccctggccctgcccccccagccagccctgctgccccagctgcccctcctgtggccagtgacctgggccccaggcctcctgtgtccctggacccccgggtgtccatctacagcaccaggaggcctgtgctggcccggacccacgtgcagggccgggtgtacaacttcctggagcggcccaccggctggaagtgctttgtgtaccactttgctgtgttcctgattgtgctggtgtgcctgatcttctctgtgctgagcaccatcgagcagtatgctgccctggccaccggcaccctcttctggatggagatcgtgctggtggtgttctttggaacagaatatgtggtgcggctgtggagcgctggctgccgcagcaaatatgtgggcctgtggggccgcctgcgctttgccaggaagcccatcagcatcatcgacctgattgtggtggtggcctccatggtggtgctgtgtgtgggcagcaagggccaggtgtttgccaccagcgccatccggggcatccgcttcctgcagatcctgaggatgctgcacgtggaccggcagggcggcacctggaggctgctgggctctgtggtgttcatccaccggcaggagctgatcaccaccctgtacatcggcttcctgggcctcatcttcagcagctactttgtgtacctggccgagaaggatgctgtgaatgaaagtggccgggtggagtttggcagctatgcagatgccctgtggtggggcgtggtgacagtgaccaccatcggctatggagacaaggtgccccagacctgggtgggcaagaccatcgccagctgcttctctgtgtttgccatctccttctttgccctgcctgctggcatcctgggcagcggctttgccctgaaggtgcagcagaagcagaggcagaagcacttcaaccggcagatcccagctgctgccagcctcatccagacagcctggcgctgctatgctgctgaaaatccagacagcagcacctggaagatctacatcaggaaggcccccaggagccacaccctgctgagccccagccccaagcccaagaagtctgtggtggtgaagaagaagaagttcaagctggacaaggacaatggagtgaccccaggagagaagatgctgactgtgccccacatcacctgtgaccccccagaggagcggcggctggaccacttctctgtggatggctatgacagctctgtgaggaagagccccaccctgctggaggtgtccatgccccacttcatgaggaccaacagctttgctgaggacctggacctggagggggagaccctgctgacccccatcacccacatcagccagctgcgggagcaccaccgggccaccatcaaggtgatccggaggatgcagtactttgtggccaagaagaagttccagcaggccaggaagccctatgatgtgagagatgtgattgagcagtacagccagggccacctgaacctgatggtgcgcatcaaggagctgcagaggcggctggaccagagcatcggcaagcccagcctcttcatctctgtgtctgagaagagcaaggaccggggcagcaacaccatcggggcccggctgaacagagtggaggacaaggtgacccagctggaccagaggctggccctgatcacagacatgctgcaccagctgctgagcctgcacggcggcagcaccccaggcagcggcggccccccccgggagggcggggcccacatcacccagccctgtggcagcggcggctctgtggaccctgagctgttcctgcccagcaacaccctgcccacctatgagcagctgactgtgccccggcggggcccagatgagggcagctag

SEQ ID NO: 164922 - DNA, 1650 bp, synthetic construct
  misc_feature 1..1650: note = Description of Artificial Sequence: Synthetic coding sequence
  source 1..1650: mol_type = other DNA
atggacttcctgattgtgctggtgtgcctgatcttctctgtgctgagcaccatcgagcagtatgctgccctggccaccggcaccctcttctggatggagatcgtgctggtggtgttcttcggcacagaatatgtggtgcggctgtggagcgctggctgccgcagcaaatatgtgggcctgtggggccgcctgcgctttgccaggaagcccatcagcatcatcgacctgattgtggtggtggcctccatggtggtgctgtgtgtgggcagcaagggccaggtgtttgccaccagcgccatccggggcatccgcttcctgcagatcctgaggatgctgcacgtggaccggcagggcggcacctggaggctgctgggctctgtggtgttcatccaccggcaggagctgatcaccaccctgtacatcggcttcctgggcctcatcttcagcagctactttgtgtacctggccgagaaggatgctgtgaatgaaagtggccgggtggagtttggcagctatgcagatgccctgtggtggggcgtggtgacagtgaccaccatcggctacggggacaaggtgccccagacctgggtgggcaagaccatcgccagctgcttctctgtgtttgccatctccttctttgccctgcctgctggcatcctgggcagcggctttgccctgaaggtgcagcagaagcagaggcagaagcacttcaaccggcagatcccagctgctgccagcctcatccagacagcctggcgctgctacgccgctgagaacccagacagcagcacctggaagatctacatcaggaaggcccccaggagccacaccctgctgagccccagccccaagcccaagaagtctgtggtggtgaagaagaagaagttcaagctggacaaggacaacggggtgaccccaggagagaagatgctgactgtgccccacatcacctgtgaccccccagaggagcggcggctggaccacttctctgtggatggctatgacagctctgtgaggaagagccccaccctgctggaggtgtccatgccccacttcatgaggaccaacagctttgctgaggacctggacctggagggggagaccctgctgacccccatcacccacatcagccagctgcgggagcaccaccgggccaccatcaaggtgatccggaggatgcagtactttgtggccaagaagaagttccagcaggccaggaagccctatgatgtgagagatgtgattgagcagtacagccagggccacctgaacctgatggtgcgcatcaaggagctgcagaggcggctggaccagagcatcggcaagcccagcctcttcatctctgtgtctgagaagagcaaggaccggggcagcaacaccatcggggcccggctgaacagagtggaggacaaggtgacccagctggaccagaggctggccctgatcacagacatgctgcaccagctgctgagcctgcatggaggcagcaccccaggcagcggcggccccccccgggagggcggggcccacatcacccagccctgtggcagcggcggctctgtggaccctgagctgttcctgcccagcaacaccctgcccacctatgagcagctgactgtgccccggcggggcccagatgagggcagctag

SEQ ID NO: 164923 - DNA, 1182 bp, synthetic construct
  misc_feature 1..1182: note = Description of Artificial Sequence: Synthetic coding sequence
  source 1..1182: mol_type = other DNA
atggtgcagaagagcagaaatggaggagtgtacccaggccccagcggggagaagaagctgaaggtgggctttgtgggcctggaccccggggccccagacagcaccagagatggagccctgctgattgctggcagcgaggcccccaagaggggcagcatcctgagcaagcccagggctggaggagctggggccggcaagccacccaagagaaatgccttctacaggaagctgcagaacttcctgtacaacgtgctggagcggccccggggctgggccttcatctaccacgcctacgtgttcctgctggtgttcagctgcctggtgctgagcgtcttcagcaccatcaaggagtatgagaagagcagcgagggcgccctgtacatcctggagatcgtgaccatcgtggtgtttggagtggagtactttgtgcgcatctgggccgccggctgctgctgccgctaccggggctggaggggccgcctgaagtttgccaggaagcccttctgtgtgattgacatcatggtgctgattgccagcattgctgtgctggccgccggcagccagggcaatgtgtttgccaccagcgccctgcggagcctgcgcttcctgcagatcctgaggatgatccgcatggacagaagaggaggcacctggaagctgctgggctctgtggtgtatgcccacagcaaggagctggtgacagcctggtacatcggcttcctgtgcctgatcctggccagcttcctggtgtacctggccgagaagggagaaaatgaccactttgacacctatgcagatgccctgtggtggggcctcatcaccctgaccaccatcggctacggggacaagtacccccagacctggaatggccgcctgctggccgccaccttcaccctcatcggcgtgtccttctttgccctgcctgctggcatcctgggcagcggctttgccctgaaggtgcaggagcagcaccggcagaagcactttgagaagagaagaaatcctgctgctggcctcatccagagcgcctggaggttctacgccaccaacctgagcaggacagacctgcacagcacctggcagtactatgaaagaacagtgacagtgcccatgtaccgctacagaagaagagccccagccaccaagcagctgttccacttcctgttcagcatctgcagctag

SEQ ID NO: 164924 - DNA, 2607 bp, synthetic construct
  misc_feature 1..2607: note = Description of Artificial Sequence: Synthetic coding sequence
  source 1..2607: mol_type = other DNA
atggtgcagaagagcagaaatggaggagtgtacccaggccccagcggggagaagaagctgaaggtgggctttgtgggcctggaccccggggccccagacagcaccagagatggagccctgctgattgctggcagcgaggcccccaagaggggcagcatcctgagcaagcccagggctggaggagctggggccggcaagccacccaagagaaatgccttctacaggaagctgcagaacttcctgtacaacgtgctggagcggccccggggctgggccttcatctaccacgcctacgtgttcctgctggtgttcagctgcctggtgctgagcgtcttcagcaccatcaaggagtatgagaagagcagcgagggcgccctgtacatcctggagatcgtgaccatcgtggtgtttggagtggagtactttgtgcgcatctgggccgccggctgctgctgccgctaccggggctggaggggccgcctgaagtttgccaggaagcccttctgtgtgattgacatcatggtgctgattgccagcattgctgtgctggccgccggcagccagggcaatgtgtttgccaccagcgccctgcggagcctgcgcttcctgcagatcctgaggatgatccgcatggacagaagaggaggcacctggaagctgctgggctctgtggtgtatgcccacagcaaggagctggtgacagcctggtacatcggcttcctgtgcctgatcctggccagcttcctggtgtacctggccgagaagggagaaaatgaccactttgacacctatgcagatgccctgtggtggggcctcatcaccctgaccaccatcggctacggggacaagtacccccagacctggaatggccgcctgctggccgccaccttcaccctcatcggcgtgtccttctttgccctgcctgctggcatcctgggcagcggctttgccctgaaggtgcaggagcagcaccggcagaagcactttgagaagagaagaaatcctgctgctggcctcatccagagcgcctggaggttctacgccaccaacctgagcaggacagacctgcacagcacctggcagtactatgaaagaacagtgacagtgcccatgtaccgcctcatcccccccctgaaccagctggagctgctgaggaacctgaagagcaagagcggcctggccttcaggaaggaccccccacctgagcccagccccagcccccggggcgtggccgccaagggcaagggcagcccccaggcccagacagtgcggcgcagccccagcgctgaccagagcctggaggacagccccagcaaggtgcccaagtcctggagctttggagacaggagccgggcccggcaggccttccgcatcaagggagctgccagccggcagaacagcgaggaggccagcctgcctggagaagatattgtggatgacaagagctgcccctgtgaatttgtgacagaggacctgaccccaggcctgaaggtgtccatccgggctgtgtgtgtgatgaggttcctggtgtccaagaggaagttcaaggagagcctgcggccctatgatgtgatggatgtgattgagcagtacagcgctggccacctggacatgctgagccgcatcaagagcctgcagagcagaattgacatgattgtgggccccccaccacccagcacccccaggcacaagaagtaccccaccaagggccccacagccccaccccgggagagcccccagtacagcccccgggtggaccagatcgtgggccggggccctgccatcacagacaaggacaggaccaagggccctgctgaggccgagctgcctgaggaccccagcatgatgggccgcctgggcaaggtggagaagcaggtgctgtccatggagaagaagctggacttcctggtgaacatctacatgcagaggatgggcatccccccaacagaaacagaggcctactttggagccaaggagcctgagcccgccccaccctaccacagccctgaggacagccgggagcacgtggacagacatggctgcatcgtgaagatcgtgcgcagcagcagcagcacaggccagaagaacttcagcgcccccccagctgcccctcctgtgcagtgcccccccagcacctcctggcagccccagagccacccccggcagggccacggcaccagccctgtgggggaccacggcagcctggtgcgcatccccccacctccagcccacgagaggagcctgagcgcctatggaggcggcaacagagcctccatggagttcctgcggcaggaggacaccccaggctgccggcccccagagggcaacctgcgggacagcgacaccagcatcagcatccccagcgtggaccacgaggagctggagaggagcttcagcggcttcagcatcagccagagcaaggagaacctggatgccctgaacagctgctacgccgctgtggccccctgtgccaaggtgcggccctacatcgccgagggggagagtgacacagacagcgacctgtgcaccccctgtggccccccacccaggtctgccactggagagggcccctttggagatgtgggctgggccggccccaggaagtag

SEQ ID NO: 164925 - DNA, 2643 bp, synthetic construct
  misc_feature 1..2643: note = Description of Artificial Sequence: Synthetic coding sequence
  source 1..2643: mol_type = other DNA
atggtgcagaagagcagaaatggaggagtgtacccaggccccagcggggagaagaagctgaaggtgggctttgtgggcctggaccccggggccccagacagcaccagagatggagccctgctgattgctggcagcgaggcccccaagaggggcagcatcctgagcaagcccagggctggaggagctggggccggcaagccacccaagagaaatgccttctacaggaagctgcagaacttcctgtacaacgtgctggagcggccccggggctgggccttcatctaccacgcctacgtgttcctgctggtgttcagctgcctggtgctgagcgtcttcagcaccatcaaggagtatgagaagagcagcgagggcgccctgtacatcctggagatcgtgaccatcgtggtgtttggagtggagtactttgtgcgcatctgggccgccggctgctgctgccgctaccggggctggaggggccgcctgaagtttgccaggaagcccttctgtgtgattgacatcatggtgctgattgccagcattgctgtgctggccgccggcagccagggcaatgtgtttgccaccagcgccctgcggagcctgcgcttcctgcagatcctgaggatgatccgcatggacagaagaggaggcacctggaagctgctgggctctgtggtgtatgcccacagcaaggagctggtgacagcctggtacatcggcttcctgtgcctgatcctggccagcttcctggtgtacctggccgagaagggagaaaatgaccactttgacacctatgcagatgccctgtggtggggcctcatcaccctgaccaccatcggctacggggacaagtacccccagacctggaatggccgcctgctggccgccaccttcaccctcatcggcgtgtccttctttgccctgcctgctggcatcctgggcagcggctttgccctgaaggtgcaggagcagcaccggcagaagcactttgagaagagaagaaatcctgctgctggcctcatccagagcgcctggaggttctacgccaccaacctgagcaggacagacctgcacagcacctggcagtactatgaaagaacagtgacagtgcccatgtaccgcctcatcccccccctgaaccagctggagctgctgaggaacctgaagagcaagagcggcctggccttcaggaaggaccccccacctgagcccagccccagccagaaggtgtccctgaaggacagagtcttcagcagcccccggggcgtggccgccaagggcaagggcagcccccaggcccagacagtgcggcgcagccccagcgctgaccagagcctggaggacagccccagcaaggtgcccaagtcctggagctttggagacaggagccgggcccggcaggccttccgcatcaagggagctgccagccggcagaacagcgaggaggccagcctgcctggagaagatattgtggatgacaagagctgcccctgtgaatttgtgacagaggacctgaccccaggcctgaaggtgtccatccgggctgtgtgtgtgatgaggttcctggtgtccaagaggaagttcaaggagagcctgcggccctatgatgtgatggatgtgattgagcagtacagcgctggccacctggacatgctgagccgcatcaagagcctgcagacaggaattgacatgattgtgggccccccaccacccagcacccccaggcacaagaagtaccccaccaagggccccacagccccaccccgggagagcccccagtacagcccccgggtggaccagatcgtgggccggggccctgccatcacagacaaggacaggaccaagggccctgctgaggccgagctgcctgaggaccccagcatgatgggccgcctgggcaaggtggagaagcaggtgctgtccatggagaagaagctggacttcctggtgaacatctacatgcagaggatgggcatccccccaacagaaacagaggcctactttggagccaaggagcctgagcccgccccaccctaccacagccctgaggacagccgggagcacgtggacagacatggctgcatcgtgaagatcgtgcgcagcagcagcagcacaggccagaagaacttcagcgcccccccagctgcccctcctgtgcagtgcccccccagcacctcctggcagccccagagccacccccggcagggccacggcaccagccctgtgggggaccacggcagcctggtgcgcatccccccacctccagcccacgagaggagcctgagcgcctatggaggcggcaacagagcctccatggagttcctgcggcaggaggacaccccaggctgccggcccccagagggcaacctgcgggacagcgacaccagcatcagcatccccagcgtggaccacgaggagctggagaggagcttcagcggcttcagcatcagccagagcaaggagaacctggatgccctgaacagctgctacgccgctgtggccccctgtgccaaggtgcggccctacatcgccgagggggagagtgacacagacagcgacctgtgcaccccctgtggccccccacccaggtctgccactggagagggcccctttggagatgtgggctgggccggccccaggaagtag

SEQ ID NO: 164926 - DNA, 2565 bp, synthetic construct
  misc_feature 1..2565: note = Description of Artificial Sequence: Synthetic coding sequence
  source 1..2565: mol_type = other DNA
atggtgcagaagagcagaaatggaggagtgtacccaggccccagcggggagaagaagctgaaggtgggctttgtgggcctggaccccggggccccagacagcaccagagatggagccctgctgattgctggcagcgaggcccccaagaggggcagcatcctgagcaagcccagggctggaggagctggggccggcaagccacccaagagaaatgccttctacaggaagctgcagaacttcctgtacaacgtgctggagcggccccggggctgggccttcatctaccacgcctacgtgttcctgctggtgttcagctgcctggtgctgagcgtcttcagcaccatcaaggagtatgagaagagcagcgagggcgccctgtacatcctggagatcgtgaccatcgtggtgtttggagtggagtactttgtgcgcatctgggccgccggctgctgctgccgctaccggggctggaggggccgcctgaagtttgccaggaagcccttctgtgtgattgacatcatggtgctgattgccagcattgctgtgctggccgccggcagccagggcaatgtgtttgccaccagcgccctgcggagcctgcgcttcctgcagatcctgaggatgatccgcatggacagaagaggaggcacctggaagctgctgggctctgtggtgtatgcccacagcaaggagctggtgacagcctggtacatcggcttcctgtgcctgatcctggccagcttcctggtgtacctggccgagaagggagaaaatgaccactttgacacctatgcagatgccctgtggtggggcctcatcaccctgaccaccatcggctacggggacaagtacccccagacctggaatggccgcctgctggccgccaccttcaccctcatcggcgtgtccttctttgccctgcctgctggcatcctgggcagcggctttgccctgaaggtgcaggagcagcaccggcagaagcactttgagaagagaagaaatcctgctgctggcctcatccagagcgcctggaggttctacgccaccaacctgagcaggacagacctgcacagcacctggcagtactatgaaagaacagtgacagtgcccatgtacagcagccagacccagacctatggagccagccgcctcatcccccccctgaaccagctggagctgctgaggaacctgaagagcaagagcggcctggccttcaggaaggaccccccacctgagcccagccccagccagaaggtgtccctgaaggacagagtcttcagcagcccccggggcgtggccgccaagggcaagggcagcccccaggcccagacagtgcggcgcagccccagcgctgaccagagcctggaggacagccccagcaaggtgcccaagtcctggagctttggagacaggagccgggcccggcaggccttccgcatcaagggagctgccagccggcagaacagcgaggaggccagcctgcctggagaagatattgtggatgacaagagctgcccctgtgaatttgtgacagaggacctgaccccaggcctgaaggtgtccatccgggctgtgtgtgtgatgaggttcctggtgtccaagaggaagttcaaggagagcctgcggccctatgatgtgatggatgtgattgagcagtacagcgctggccacctggacatgctgagccgcatcaagagcctgcagagccgggtggaccagatcgtgggccggggccctgccatcacagacaaggacaggaccaagggccctgctgaggccgagctgcctgaggaccccagcatgatgggccgcctgggcaaggtggagaagcaggtgctgtccatggagaagaagctggacttcctggtgaacatctacatgcagaggatgggcatccccccaacagaaacagaggcctactttggagccaaggagcctgagcccgccccaccctaccacagccctgaggacagccgggagcacgtggacagacatggctgcatcgtgaagatcgtgcgcagcagcagcagcacaggccagaagaacttcagcgcccccccagctgcccctcctgtgcagtgcccccccagcacctcctggcagccccagagccacccccggcagggccacggcaccagccctgtgggggaccacggcagcctggtgcgcatccccccacctccagcccacgagaggagcctgagcgcctatggaggcggcaacagagcctccatggagttcctgcggcaggaggacaccccaggctgccggcccccagagggcaacctgcgggacagcgacaccagcatcagcatccccagcgtggaccacgaggagctggagaggagcttcagcggcttcagcatcagccagagcaaggagaacctggatgccctgaacagctgctacgccgctgtggccccctgtgccaaggtgcggccctacatcgccgagggggagagtgacacagacagcgacctgtgcaccccctgtggccccccacccaggtctgccactggagagggcccctttggagatgtgggctgggccggccccaggaagtag

SEQ ID NO: 164927 - DNA, 2619 bp, synthetic construct
  misc_feature 1..2619: note = Description of Artificial Sequence: Synthetic coding sequence
  source 1..2619: mol_type = other DNA
atggtgcagaagagcagaaatggaggagtgtacccaggccccagcggggagaagaagctgaaggtgggctttgtgggcctggaccccggggccccagacagcaccagagatggagccctgctgattgctggcagcgaggcccccaagaggggcagcatcctgagcaagcccagggctggaggagctggggccggcaagccacccaagagaaatgccttctacaggaagctgcagaacttcctgtacaacgtgctggagcggccccggggctgggccttcatctaccacgcctacgtgttcctgctggtgttcagctgcctggtgctgagcgtcttcagcaccatcaaggagtatgagaagagcagcgagggcgccctgtacatcctggagatcgtgaccatcgtggtgtttggagtggagtactttgtgcgcatctgggccgccggctgctgctgccgctaccggggctggaggggccgcctgaagtttgccaggaagcccttctgtgtgattgacatcatggtgctgattgccagcattgctgtgctggccgccggcagccagggcaatgtgtttgccaccagcgccctgcggagcctgcgcttcctgcagatcctgaggatgatccgcatggacagaagaggaggcacctggaagctgctgggctctgtggtgtatgcccacagcaaggagctggtgacagcctggtacatcggcttcctgtgcctgatcctggccagcttcctggtgtacctggccgagaagggagaaaatgaccactttgacacctatgcagatgccctgtggtggggcctcatcaccctgaccaccatcggctacggggacaagtacccccagacctggaatggccgcctgctggccgccaccttcaccctcatcggcgtgtccttctttgccctgcctgctggcatcctgggcagcggctttgccctgaaggtgcaggagcagcaccggcagaagcactttgagaagagaagaaatcctgctgctggcctcatccagagcgcctggaggttctacgccaccaacctgagcaggacagacctgcacagcacctggcagtactatgaaagaacagtgacagtgcccatgtacagcagccagacccagacctatggagccagccgcctcatcccccccctgaaccagctggagctgctgaggaacctgaagagcaagagcggcctggccttcaggaaggaccccccacctgagcccagccccagcaagggcagcccctgccggggccccctgtgtggctgctgccccggccgcagcagccagaaggtgtccctgaaggacagagtcttcagcagcccccggggcgtggccgccaagggcaagggcagcccccaggcccagacagtgcggcgcagccccagcgctgaccagagcctggaggacagccccagcaaggtgcccaagtcctggagctttggagacaggagccgggcccggcaggccttccgcatcaagggagctgccagccggcagaacagcgaggaggccagcctgcctggagaagatattgtggatgacaagagctgcccctgtgaatttgtgacagaggacctgaccccaggcctgaaggtgtccatccgggctgtgtgtgtgatgaggttcctggtgtccaagaggaagttcaaggagagcctgcggccctatgatgtgatggatgtgattgagcagtacagcgctggccacctggacatgctgagccgcatcaagagcctgcagagccgggtggaccagatcgtgggccggggccctgccatcacagacaaggacaggaccaagggccctgctgaggccgagctgcctgaggaccccagcatgatgggccgcctgggcaaggtggagaagcaggtgctgtccatggagaagaagctggacttcctggtgaacatctacatgcagaggatgggcatccccccaacagaaacagaggcctactttggagccaaggagcctgagcccgccccaccctaccacagccctgaggacagccgggagcacgtggacagacatggctgcatcgtgaagatcgtgcgcagcagcagcagcacaggccagaagaacttcagcgcccccccagctgcccctcctgtgcagtgcccccccagcacctcctggcagccccagagccacccccggcagggccacggcaccagccctgtgggggaccacggcagcctggtgcgcatccccccacctccagcccacgagaggagcctgagcgcctatggaggcggcaacagagcctccatggagttcctgcggcaggaggacaccccaggctgccggcccccagagggcaacctgcgggacagcgacaccagcatcagcatccccagcgtggaccacgaggagctggagaggagcttcagcggcttcagcatcagccagagcaaggagaacctggatgccctgaacagctgctacgccgctgtggccccctgtgccaaggtgcggccctacatcgccgagggggagagtgacacagacagcgacctgtgcaccccctgtggccccccacccaggtctgccactggagagggcccctttggagatgtgggctgggccggccccaggaagtag

SEQ ID NO: 164928 - DNA, 2619 bp, synthetic construct
  misc_feature 1..2619: note = Description of Artificial Sequence: Synthetic coding sequence
  source 1..2619: mol_type = other DNA
atggtgcagaagagcagaaatggaggagtgtacccaggccccagcggggagaagaagctgaaggtgggctttgtgggcctggaccccggggccccagacagcaccagagatggagccctgctgattgctggcagcgaggcccccaagaggggcagcatcctgagcaagcccagggctggaggagctggggccggcaagccacccaagagaaatgccttctacaggaagctgcagaacttcctgtacaacgtgctggagcggccccggggctgggccttcatctaccacgcctacgtgttcctgctggtgttcagctgcctggtgctgagcgtcttcagcaccatcaaggagtatgagaagagcagcgagggcgccctgtacatcctggagatcgtgaccatcgtggtgtttggagtggagtactttgtgcgcatctgggccgccggctgctgctgccgctaccggggctggaggggccgcctgaagtttgccaggaagcccttctgtgtgattgacatcatggtgctgattgccagcattgctgtgctggccgccggcagccagggcaatgtgtttgccaccagcgccctgcggagcctgcgcttcctgcagatcctgaggatgatccgcatggacagaagaggaggcacctggaagctgctgggctctgtggtgtatgcccacagcaaggagctggtgacagcctggtacatcggcttcctgtgcctgatcctggccagcttcctggtgtacctggccgagaagggagaaaatgaccactttgacacctatgcagatgccctgtggtggggcctcatcaccctgaccaccatcggctacggggacaagtacccccagacctggaatggccgcctgctggccgccaccttcaccctcatcggcgtgtccttctttgccctgcctgctggcatcctgggcagcggctttgccctgaaggtgcaggagcagcaccggcagaagcactttgagaagagaagaaatcctgctgctggcctcatccagagcgcctggaggttctacgccaccaacctgagcaggacagacctgcacagcacctggcagtactatgaaagaacagtgacagtgcccatgtacagcagccagacccagacctatggagccagccgcctcatcccccccctgaaccagctggagctgctgaggaacctgaagagcaagagcggcctggccttcaggaaggaccccccacctgagcccagccccagcaagggcagcccctgccggggccccctgtgtggctgctgccccggccgcagcagccagaaggtgtccctgaaggacagagtcttcagcagcccccggggcgtggccgccaagggcaagggcagcccccaggcccagacagtgcggcgcagccccagcgctgaccagagcctggaggacagccccagcaaggtgcccaagtcctggagctttggagacaggagccgggcccggcaggccttccgcatcaagggagctgccagccggcagaacagcgaggaggccagcctgcctggagaagatattgtggatgacaagagctgcccctgtgaatttgtgacagaggacctgaccccaggcctgaaggtgtccatccgggctgtgtgtgtgatgaggttcctggtgtccaagaggaagttcaaggagagcctgcggccctatgatgtgatggatgtgattgagcagtacagcgctggccacctggacatgctgagccgcatcaagagcctgcagagccaggtggaccagatcgtgggccggggccctgccatcacagacaaggacaggaccaagggccctgctgaggccgagctgcctgaggaccccagcatgatgggccgcctgggcaaggtggagaagcaggtgctgtccatggagaagaagctggacttcctggtgaacatctacatgcagaggatgggcatccccccaacagaaacagaggcctactttggagccaaggagcctgagcccgccccaccctaccacagccctgaggacagccgggagcacgtggacagacatggctgcatcgtgaagatcgtgcgcagcagcagcagcacaggccagaagaacttcagcgcccccccagctgcccctcctgtgcagtgcccccccagcacctcctggcagccccagagccacccccggcagggccacggcaccagccctgtgggggaccacggcagcctggtgcgcatccccccacctccagcccacgagaggagcctgagcgcctatggaggcggcaacagagcctccatggagttcctgcggcaggaggacaccccaggctgccggcccccagagggcaacctgcgggacagcgacaccagcatcagcatccccagcgtggaccacgaggagctggagaggagcttcagcggcttcagcatcagccagagcaaggagaacctggatgccctgaacagctgctacgccgctgtggccccctgtgccaaggtgcggccctacatcgccgagggggagagtgacacagacagcgacctgtgcaccccctgtggccccccacccaggtctgccactggagagggcccctttggagatgtgggctgggccggccccaggaagtag

SEQ ID NO: 164929 - DNA, 2535 bp, synthetic construct
  misc_feature 1..2535: note = Description of Artificial Sequence: Synthetic coding sequence
  source 1..2535: mol_type = other DNA
atggtgcagaagagcagaaatggaggagtgtacccaggccccagcggggagaagaagctgaaggtgggctttgtgggcctggaccccggggccccagacagcaccagagatggagccctgctgattgctggcagcgaggcccccaagaggggcagcatcctgagcaagcccagggctggaggagctggggccggcaagccacccaagagaaatgccttctacaggaagctgcagaacttcctgtacaacgtgctggagcggccccggggctgggccttcatctaccacgcctacgtgttcctgctggtgttcagctgcctggtgctgagcgtcttcagcaccatcaaggagtatgagaagagcagcgagggcgccctgtacatcctggagatcgtgaccatcgtggtgtttggagtggagtactttgtgcgcatctgggccgccggctgctgctgccgctaccggggctggaggggccgcctgaagtttgccaggaagcccttctgtgtgattgacatcatggtgctgattgccagcattgctgtgctggccgccggcagccagggcaatgtgtttgccaccagcgccctgcggagcctgcgcttcctgcagatcctgaggatgatccgcatggacagaagaggaggcacctggaagctgctgggctctgtggtgtatgcccacagcaaggagctggtgacagcctggtacatcggcttcctgtgcctgatcctggccagcttcctggtgtacctggccgagaagggagaaaatgaccactttgacacctatgcagatgccctgtggtggggcctcatcaccctgaccaccatcggctacggggacaagtacccccagacctggaatggccgcctgctggccgccaccttcaccctcatcggcgtgtccttctttgccctgcctgctggcatcctgggcagcggctttgccctgaaggtgcaggagcagcaccggcagaagcactttgagaagagaagaaatcctgctgctggcctcatccagagcgcctggaggttctacgccaccaacctgagcaggacagacctgcacagcacctggcagtactatgaaagaacagtgacagtgcccatgtaccgcctcatcccccccctgaaccagctggagctgctgaggaacctgaagagcaagagcggcctggccttcaggaaggaccccccacctgagcccagccccagccagaaggtgtccctgaaggacagagtcttcagcagcccccggggcgtggccgccaagggcaagggcagcccccaggcccagacagtgcggcgcagccccagcgctgaccagagcctggaggacagccccagcaaggtgcccaagtcctggagctttggagacaggagccgggcccggcaggccttccgcatcaagggagctgccagccggcagaacagcgaggaggccagcctgcctggagaagatattgtggatgacaagagctgcccctgtgaatttgtgacagaggacctgaccccaggcctgaaggtgtccatccgggctgtgtgtgtgatgaggttcctggtgtccaagaggaagttcaaggagagcctgcggccctatgatgtgatggatgtgattgagcagtacagcgctggccacctggacatgctgagccgcatcaagagcctgcagagccgggtggaccagatcgtgggccggggccctgccatcacagacaaggacaggaccaagggccctgctgaggccgagctgcctgaggaccccagcatgatgggccgcctgggcaaggtggagaagcaggtgctgtccatggagaagaagctggacttcctggtgaacatctacatgcagaggatgggcatccccccaacagaaacagaggcctactttggagccaaggagcctgagcccgccccaccctaccacagccctgaggacagccgggagcacgtggacagacatggctgcatcgtgaagatcgtgcgcagcagcagcagcacaggccagaagaacttcagcgcccccccagctgcccctcctgtgcagtgcccccccagcacctcctggcagccccagagccacccccggcagggccacggcaccagccctgtgggggaccacggcagcctggtgcgcatccccccacctccagcccacgagaggagcctgagcgcctatggaggcggcaacagagcctccatggagttcctgcggcaggaggacaccccaggctgccggcccccagagggcaacctgcgggacagcgacaccagcatcagcatccccagcgtggaccacgaggagctggagaggagcttcagcggcttcagcatcagccagagcaaggagaacctggatgccctgaacagctgctacgccgctgtggccccctgtgccaaggtgcggccctacatcgccgagggggagagtgacacagacagcgacctgtgcaccccctgtggccccccacccaggtctgccactggagagggcccctttggagatgtgggctgggccggccccaggaagtag

SEQ ID NO: 164930 - DNA, 1311 bp, synthetic construct
  misc_feature 1..1311: note = Description of Artificial Sequence: Synthetic coding sequence
  source 1..1311: mol_type = other DNA
atggtgcagaagagcagaaatggaggagtgtacccaggccccagcggggagaagaagctgaaggtgggctttgtgggcctggaccccggggccccagacagcaccagagatggagccctgctgattgctggcagcgaggcccccaagaggggcagcatcctgagcaagcccagggctggaggagctggggccggcaagccacccaagagaaatgccttctacaggaagctgcagaacttcctgtacaacgtgctggagcggccccggggctgggccttcatctaccacgcctacgtgttcctgctggtgttcagctgcctggtgctgagcgtcttcagcaccatcaaggagtatgagaagagcagcgagggcgccctgtacatcctggagatcgtgaccatcgtggtgtttggagtggagtactttgtgcgcatctgggccgccggctgctgctgccgctaccggggctggaggggccgcctgaagtttgccaggaagcccttctgtgtgattgacatcatggtgctgattgccagcattgctgtgctggccgccggcagccagggcaatgtgtttgccaccagcgccctgcggagcctgcgcttcctgcagatcctgaggatgatccgcatggacagaagaggaggcacctggaagctgctgggctctgtggtgtatgcccacagcaaggagctggtgacagcctggtacatcggcttcctgtgcctgatcctggccagcttcctggtgtacctggccgagaagggagaaaatgaccactttgacacctatgcagatgccctgtggtggggcctcatcaccctgaccaccatcggctacggggacaagtacccccagacctggaatggccgcctgctggccgccaccttcaccctcatcggcgtgtccttctttgccctgcctgctggcatcctgggcagcggctttgccctgaaggtgcaggagcagcaccggcagaagcactttgagaagagaagaaatcctgctgctggcctcatccagagcgcctggaggttctacgccaccaacctgagcaggacagacctgcacagcacctggcagtactatgaaagaacagtgacagtgcccatgtaccgcctcatcccccccctgaaccagctggagctgctgaggaacctgaagagcaagagcggcctggccttcaggaaggaccccccacctgagcccagccccaggtctgtgcccccagctgccaccctggtgtctgctgtgtgcacagctgtgtggagcctgagccacacctgtgcccagcctgtgatggagatgtag

SEQ ID NO: 164931 - DNA, 1848 bp, synthetic construct
  misc_feature 1..1848: note = Description of Artificial Sequence: Synthetic coding sequence
  source 1..1848: mol_type = other DNA
atggtgcagaagagcagaaatggaggagtgtacccaggccccagcggggagaagaagctgaaggtgggctttgtgggcctggaccccggggccccagacagcaccagagatggagccctgctgattgctggcagcgaggcccccaagaggggcagcatcctgagcaagcccagggctggaggagctggggccggcaagccacccaagagaaatgccttctacaggaagctgcagaacttcctgtacaacgtgctggagcggccccggggctgggccttcatctaccacgcctacgtgttcctgctggtgttcagctgcctggtgctgagcgtcttcagcaccatcaaggagtatgagaagagcagcgagggcgccctgtacatcctggagatcgtgaccatcgtggtgtttggagtggagtactttgtgcgcatctgggccgccggctgctgctgccgctaccggggctggaggggccgcctgaagtttgccaggaagcccttctgtgtgattgacatcatggtgctgattgccagcattgctgtgctggccgccggcagccagggcaatgtgtttgccaccagcgccctgcggagcctgcgcttcctgcagatcctgaggatgatccgcatggacagaagaggaggcacctggaagctgctgggctctgtggtgtatgcccacagcaaggagctggtgacagcctggtacatcggcttcctgtgcctgatcctggccagcttcctggtgtacctggccgagaagggagaaaatgaccactttgacacctatgcagatgccctgtggtggggcctcatcaccctgaccaccatcggctacggggacaagtacccccagacctggaatggccgcctgctggccgccaccttcaccctcatcggcgtgtccttctttgccctgcctgctggcatcctgggcagcggctttgccctgaaggtgcaggagcagcaccggcagaagcactttgagaagagaagaaatcctgctgctggcctcatccagagcgcctggaggttctacgccaccaacctgagcaggacagacctgcacagcacctggcagtactatgaaagaacagtgacagtgcccatgtaccgcctcatcccccccctgaaccagctggagctgctgaggaacctgaagagcaagagcggcctggccttcaggaaggaccccccacctgagcccagccccagccagaaggtgtccctgaaggacagagtcttcagcagcccccggggcgtggccgccaagggcaagggcagcccccaggcccagacagtgcggcgcagccccagcgctgaccagagcctggaggacagccccagcaaggtgcccaagtcctggagctttggagacaggagccgggcccggcaggccttccgcatcaagggagctgccagccggcagaacagcgaggaggccagcctgcctggagaagatattgtggatgacaagagctgcccctgtgaatttgtgacagaggacctgaccccaggcctgaaggtgtccatccgggctgtgtgtgtgatgaggttcctggtgtccaagaggaagttcaaggagagcctgcggccctatgatgtgatggatgtgattgagcagtacagcgctggccacctggacatgctgagccgcatcaagagcctgcagagccggcaggagccccggctgcctgtgcagcagggcaccaggacaggctgggccagcggcaccaagcccaccgtggcccatggaggcagcgctggaggagtgtgggccggccccccaccccacccccggcggcccctgagcgcctctgtggtgagcagccagagcctcttctag

SEQ ID NO: 164932 - DNA, 2643 bp, synthetic construct
  misc_feature 1..2643: note = Description of Artificial Sequence: Synthetic coding sequence
  source 1..2643: mol_type = other DNA
atggtgcagaagagcagaaatggaggagtgtacccaggccccagcggggagaagaagctgaaggtgggctttgtgggcctggaccccggggccccagacagcaccagagatggagccctgctgattgctggcagcgaggcccccaagaggggcagcatcctgagcaagcccagggctggaggagctggggccggcaagccacccaagagaaatgccttctacaggaagctgcagaacttcctgtacaacgtgctggagcggccccggggctgggccttcatctaccacgcctacgtgttcctgctggtgttcagctgcctggtgctgagcgtcttcagcaccatcaaggagtatgagaagagcagcgagggcgccctgtacatcctggagatcgtgaccatcgtggtgtttggagtggagtactttgtgcgcatctgggccgccggctgctgctgccgctaccggggctggaggggccgcctgaagtttgccaggaagcccttctgtgtgattgacatcatggtgctgattgccagcattgctgtgctggccgccggcagccagggcaatgtgtttgccaccagcgccctgcggagcctgcgcttcctgcagatcctgaggatgatccgcatggacagaagaggaggcacctggaagctgctgggctctgtggtgtatgcccacagcaaggagctggtgacagcctggtacatcggcttcctgtgcctgatcctggccagcttcctggtgtacctggccgagaagggagaaaatgaccactttgacacctatgcagatgccctgtggtggggcctcatcaccctgaccaccatcggctacggggacaagtacccccagacctggaatggccgcctgctggccgccaccttcaccctcatcggcgtgtccttctttgccctgcctgctggcatcctgggcagcggctttgccctgaaggtgcaggagcagcaccggcagaagcactttgagaagagaagaaatcctgctgctggcctcatccagagcgcctggaggttctacgccaccaacctgagcaggacagacctgcacagcacctggcagtactatgaaagaacagtgacagtgcccatgtaccgcctcatcccccccctgaaccagctggagctgctgaggaacctgaagagcaagagcggcctggccttcaggaaggaccccccacctgagcccagccccagccagaaggtgtccctgaaggacagagtcttcagcagcccccggggcgtggccgccaagggcaagggcagcccccaggcccagacagtgcggcgcagccccagcgctgaccagagcctggaggacagccccagcaaggtgcccaagtcctggagctttggagacaggagccgggcccggcaggccttccgcatcaagggagctgccagccggcagaacagcgaggaggccagcctgcctggagaagatattgtggatgacaagagctgcccctgtgaatttgtgacagaggacctgaccccaggcctgaaggtgtccatccgggctgtgtgtgtgatgaggttcctggtgtccaagaggaagttcaaggagagcctgcggccctatgatgtgatggatgtgattgagcagtacagcgctggccacctggacatgctgagccgcatcaagagcctgcagagcagaattgacatgattgtgggccccccaccacccagcacccccaggcacaagaagtaccccaccaagggccccacagccccaccccgggagagcccccagtacagcccccgggtggaccagatcgtgggccggggccctgccatcacagacaaggacaggaccaagggccctgctgaggccgagctgcctgaggaccccagcatgatgggccgcctgggcaaggtggagaagcaggtgctgtccatggagaagaagctggacttcctggtgaacatctacatgcagaggatgggcatccccccaacagaaacagaggcctactttggagccaaggagcctgagcccgccccaccctaccacagccctgaggacagccgggagcacgtggacagacatggctgcatcgtgaagatcgtgcgcagcagcagcagcacaggccagaagaacttcagcgcccccccagctgcccctcctgtgcagtgcccccccagcacctcctggcagccccagagccacccccggcagggccacggcaccagccctgtgggggaccacggcagcctggtgcgcatccccccacctccagcccacgagaggagcctgagcgcctatggaggcggcaacagagcctccatggagttcctgcggcaggaggacaccccaggctgccggcccccagagggcaacctgcgggacagcgacaccagcatcagcatccccagcgtggaccacgaggagctggagaggagcttcagcggcttcagcatcagccagagcaaggagaacctggatgccctgaacagctgctacgccgctgtggccccctgtgccaaggtgcggccctacatcgccgagggggagagtgacacagacagcgacctgtgcaccccctgtggccccccacccaggtctgccactggagagggcccctttggagatgtgggctgggccggccccaggaagtag

SEQ ID NO: 164933 - DNA, 2529 bp, synthetic construct
  misc_feature 1..2529: note = Description of Artificial Sequence: Synthetic coding sequence
  source 1..2529: mol_type = other DNA
atggtgcagaagagcagaaatggaggagtgtacccaggccccagcggggagaagaagctgaaggtgggctttgtgggcctggaccccggggccccagacagcaccagagatggagccctgctgattgctggcagcgaggcccccaagaggggcagcatcctgagcaagcccagggctggaggagctggggccggcaagccacccaagagaaatgccttctacaggaagctgcagaacttcctgtacaacgtgctggagcggccccggggctgggccttcatctaccacgcctacgtgttcctgctggtgttcagctgcctggtgctgagcgtcttcagcaccatcaaggagtatgagaagagcagcgagggcgccctgtacatcctggagatcgtgaccatcgtggtgtttggagtggagtactttgtgcgcatctgggccgccggctgctgctgccgctaccggggctggaggggccgcctgaagtttgccaggaagcccttctgtgtgattgacatcatggtgctgattgccagcattgctgtgctggccgccggcagccagggcaatgtgtttgccaccagcgccctgcggagcctgcgcttcctgcagatcctgaggatgatccgcatggacagaagaggaggcacctggaagctgctgggctctgtggtgtatgcccacagcaaggagctggtgacagcctggtacatcggcttcctgtgcctgatcctggccagcttcctggtgtacctggccgagaagggagaaaatgaccactttgacacctatgcagatgccctgtggtggggcctcatcaccctgaccaccatcggctacggggacaagtacccccagacctggaatggccgcctgctggccgccaccttcaccctcatcggcgtgtccttctttgccctgcctgctggcatcctgggcagcggctttgccctgaaggtgcaggagcagcaccggcagaagcactttgagaagagaagaaatcctgctgctggcctcatccagagcgcctggaggttctacgccaccaacctgagcaggacagacctgcacagcacctggcagtactatgaaagaacagtgacagtgcccatgtacagcagccagacccagacctatggagccagccgcctcatcccccccctgaaccagctggagctgctgaggaacctgaagagcaagagcggcctggccttcaggaaggaccccccacctgagcccagccccagcccccggggcgtggccgccaagggcaagggcagcccccaggcccagacagtgcggcgcagccccagcgctgaccagagcctggaggacagccccagcaaggtgcccaagtcctggagctttggagacaggagccgggcccggcaggccttccgcatcaagggagctgccagccggcagaacagcgaggaggccagcctgcctggagaagatattgtggatgacaagagctgcccctgtgaatttgtgacagaggacctgaccccaggcctgaaggtgtccatccgggctgtgtgtgtgatgaggttcctggtgtccaagaggaagttcaaggagagcctgcggccctatgatgtgatggatgtgattgagcagtacagcgctggccacctggacatgctgagccgcatcaagagcctgcagagccgggtggaccagatcgtgggccggggccctgccatcacagacaaggacaggaccaagggccctgctgaggccgagctgcctgaggaccccagcatgatgggccgcctgggcaaggtggagaagcaggtgctgtccatggagaagaagctggacttcctggtgaacatctacatgcagaggatgggcatccccccaacagaaacagaggcctactttggagccaaggagcctgagcccgccccaccctaccacagccctgaggacagccgggagcacgtggacagacatggctgcatcgtgaagatcgtgcgcagcagcagcagcacaggccagaagaacttcagcgcccccccagctgcccctcctgtgcagtgcccccccagcacctcctggcagccccagagccacccccggcagggccacggcaccagccctgtgggggaccacggcagcctggtgcgcatccccccacctccagcccacgagaggagcctgagcgcctatggaggcggcaacagagcctccatggagttcctgcggcaggaggacaccccaggctgccggcccccagagggcaacctgcgggacagcgacaccagcatcagcatccccagcgtggaccacgaggagctggagaggagcttcagcggcttcagcatcagccagagcaaggagaacctggatgccctgaacagctgctacgccgctgtggccccctgtgccaaggtgcggccctacatcgccgagggggagagtgacacagacagcgacctgtgcaccccctgtggccccccacccaggtctgccactggagagggcccctttggagatgtgggctgggccggccccaggaagtag

SEQ ID NO: 164934 - DNA, 2526 bp, synthetic construct
  misc_feature 1..2526: note = Description of Artificial Sequence: Synthetic coding sequence
  source 1..2526: mol_type = other DNA
atggtgcagaagagcagaaatggaggagtgtacccaggccccagcggggagaagaagctgaaggtgggctttgtgggcctggaccccggggccccagacagcaccagagatggagccctgctgattgctggcagcgaggcccccaagaggggcagcatcctgagcaagcccagggctggaggagctggggccggcaagccacccaagagaaatgccttctacaggaagctgcagaacttcctgtacaacgtgctggagcggccccggggctgggccttcatctaccacgcctacgtgttcctgctggtgttcagctgcctggtgctgagcgtcttcagcaccatcaaggagtatgagaagagcagcgagggcgccctgtacatcctggagatcgtgaccatcgtggtgtttggagtggagtactttgtgcgcatctgggccgccggctgctgctgccgctaccggggctggaggggccgcctgaagtttgccaggaagcccttctgtgtgattgacatcatggtgctgattgccagcattgctgtgctggccgccggcagccagggcaatgtgtttgccaccagcgccctgcggagcctgcgcttcctgcagatcctgaggatgatccgcatggacagaagaggaggcacctggaagctgctgggctctgtggtgtatgcccacagcaaggagctggtgacagcctggtacatcggcttcctgtgcctgatcctggccagcttcctggtgtacctggccgagaagggagaaaatgaccactttgacacctatgcagatgccctgtggtggggcctcatcaccctgaccaccatcggctacggggacaagtacccccagacctggaatggccgcctgctggccgccaccttcaccctcatcggcgtgtccttctttgccctgcctgctggcatcctgggcagcggctttgccctgaaggtgcaggagcagcaccggcagaagcactttgagaagagaagaaatcctgctgctggcctcatccagagcgcctggaggttctacgccaccaacctgagcaggacagacctgcacagcacctggcagtactatgaaagaacagtgacagtgcccatgtacagcagccagacccagacctatggagccagccgcctcatcccccccctgaaccagctggagctgctgaggaacctgaagagcaagagcggcctggccttcaggaaggaccccccacctgagcccagccccagcccccggggcgtggccgccaagggcaagggcagcccccaggcccagacagtgcggcgcagccccagcgctgaccagagcctggaggacagccccagcaaggtgcccaagtcctggagctttggagacaggagccgggcccggcaggccttccgcatcaagggagctgccagccggcagaacagcgaggccagcctgcccggggaggacatcgtggatgacaagagctgcccctgtgaatttgtgacagaggacctgaccccaggcctgaaggtgtccatccgggctgtgtgtgtgatgaggttcctggtgtccaagaggaagttcaaggagagcctgcggccctatgatgtgatggatgtgattgagcagtacagcgctggccacctggacatgctgagccgcatcaagagcctgcagagccgggtggaccagatcgtgggccggggccctgccatcacagacaaggacaggaccaagggccctgctgaggccgagctgcctgaggaccccagcatgatgggccgcctgggcaaggtggagaagcaggtgctgtccatggagaagaagctggacttcctggtgaacatctacatgcagaggatgggcatccccccaacagaaacagaggcctactttggagccaaggagcctgagcccgccccaccctaccacagccctgaggacagccgggagcacgtggacagacatggctgcatcgtgaagatcgtgcgcagcagcagcagcacaggccagaagaacttcagcgcccctcctgctgcccctcctgtgcagtgcccccccagcacctcctggcagccccagagccacccccggcagggccacggcaccagccctgtgggggaccacggcagcctggtgcgcatccccccacctccagcccacgagaggagcctgagcgcctacggcggcggcaacagagcctccatggagttcctgcggcaggaggacaccccaggctgcaggcctcctgagggcaacctgcgggacagcgacaccagcatcagcatccccagcgtggaccacgaggagctggagaggagcttcagcggcttcagcatcagccagagcaaagaaaacctggatgccctgaacagctgctatgctgctgtggccccctgtgccaaggtgcggccctacatcgccgagggggagagtgacacagacagcgacctgtgcaccccctgtggccccccacccaggtctgccaccggggagggcccctttggagatgtgggctgggccggccccaggaagtag

SEQ ID NO: 164935 - DNA, 2619 bp, synthetic construct
  misc_feature 1..2619: note = Description of Artificial Sequence: Synthetic coding sequence
  source 1..2619: mol_type = other DNA
atgggcctgaaggcccggcgggctgctggagctgctgggggcggcggagatggcggcggcggcggcggcggggccgccaacccagctggaggagatgctgctgctgctggagatgaggagaggaaggtgggcctggcccctggagatgtggagcaggtgaccctggccctgggcgctggagctgacaaggatggcaccctgctgctggagggcggcggcagagatgagggccagaggaggaccccccagggcatcggcctgctggccaagacccccctgagcaggcctgtgaagagaaataatgccaagtaccgccgcatccagaccctcatctatgatgccctggagcggccccggggctgggccctgctgtaccacgccctggtgttcctgattgtgctgggctgcctgatcctggccgtgctgaccaccttcaaggagtatgagaccgtgtctggggactggctgctgctgctggagacctttgccatcttcatctttggagctgagtttgccctgcgcatctgggccgccggctgctgctgccgctacaagggctggaggggccgcctgaagtttgccaggaagcccctgtgcatgctggacatctttgtgctgattgcctctgtgcctgtggtggccgtgggcaaccagggcaatgtgctggccaccagcctgcggagcctgcgcttcctgcagatcctgaggatgctgaggatggaccggcggggcggcacctggaagctgctgggcagcgccatctgtgcccacagcaaggagctgatcacagcctggtacatcggcttcctgaccctcatcctgagcagcttcctggtgtacctggtggagaaggatgtgcctgaggtggatgcccagggcgaggagatgaaggaggagtttgagacctatgcagatgccctgtggtggggcctcatcaccctggccaccatcggctatggagacaagacccccaagacctgggagggccgcctgattgctgccaccttcagcctgattggagtgtccttctttgccctgcctgctggcatcctgggcagcggcctggccctgaaggtgcaggagcagcaccggcagaagcactttgagaagaggaggaagccagctgctgagctgatccaggccgcctggagatactatgccaccaaccccaacagaattgacctggtggccacctggaggttctatgagagcgtggtgtccttccccttcttcaggaaggagcagctggaggccgccagcagccagaagctgggcctgctggacagagtgcggctgagcaacccccggggcagcaacaccaagggcaagctgttcacccccctgaatgtggatgccatcgaggagagccccagcaaggagcccaagcctgtgggcctgaacaacaaggagcgcttcagaacagccttcaggatgaaggcctatgccttctggcagagcagtgaagatgctggcaccggggaccccatggccgaggaccggggctatggaaatgacttccccatcgaggacatgatccccaccctgaaggccgccatccgggctgtgcgcatcctgcagttccggctgtacaagaagaagttcaaggagaccctgcggccctatgatgtgaaggatgtgattgagcagtacagcgctggccacctggacatgctgagccgcatcaagtacctgcagaccagaattgacatgatcttcaccccaggcccccccagcacccccaagcacaagaagagccagaagggcagcgccttcaccttccccagccagcagagccccagaaatgagccctacgtggcccggcccagcaccagcgagattgaggaccagagcatgatgggcaagtttgtgaaggtggagcggcaggtgcaggacatgggcaagaagctggacttcctggtggacatgcacatgcagcacatggagcggctgcaggtgcaggtgacagagtactaccccaccaagggcaccagcagccctgctgaggccgagaagaaggaggacaaccgctacagcgacctgaagaccatcatctgcaactacagcgagaccggccccccagagcccccctacagcttccaccaggtgaccatcgacaaggtgagcccctacggcttctttgcccatgaccctgtgaacctgccccggggcggccccagcagcggcaaggtgcaggccaccccacccagcagcgccaccacctacgtggagcggcccaccgtgctgcccatcctgaccctgctggacagccgggtgtcctgccacagccaggccgacctgcagggcccctacagcgaccgcatcagcccccggcagaggaggagcatcacccgggacagcgacacccccctgagcctgatgtctgtgaaccacgaggagctggagaggagccccagcggcttcagcatcagccaggacagagatgattatgtgtttggccccaatggaggcagctcctggatgagggagaagcgctacctggccgagggggagacagacacagacacagaccccttcacccccagcggctccatgcccctgagcagcactggagatggcatcagtgacagcgtgtggacccccagcaacaagcccatctag

SEQ ID NO: 164936 - DNA, 2256 bp, synthetic construct
  misc_feature 1..2256: note = Description of Artificial Sequence: Synthetic coding sequence
  source 1..2256: mol_type = other DNA
aagcccaagaagcacggccccatgttcctgattgtgctgggctgcctgatcctggccgtgctgaccaccttcaaggagtatgaaacagtgtctggggactggctgctgctgctggagacctttgccatcttcatctttggagctgagtttgccctgcgcatctgggccgccggctgctgctgccgctacaagggctggaggggccgcctgaagtttgccaggaagcccctgtgcatgctggacatctttgtgctgattgcctctgtgcctgtggtggccgtgggcaaccagggcaatgtgctggccaccagcctgcggagcctgcgcttcctgcagatcctgaggatgctgaggatggacagaagaggaggcacctggaagctgctgggcagcgccatctgtgcccacagcaaggagctgatcacagcctggtacatcggcttcctgaccctcatcctgagcagcttcctggtgtacctggtggagaaggatgtgcctgaggtggatgcccagggcgaggagatgaaggaggagtttgagacctatgcagatgccctgtggtggggcctcatcaccctggccaccatcggctacggggacaagacccccaagacctgggagggccgcctgattgctgccaccttcagcctcatcggcgtgtccttctttgccctgcctgctggcatcctgggcagcggcctggccctgaaggtgcaggagcagcaccggcagaagcactttgagaagaggaggaagccagctgctgagctgatccaggccgcctggagatactatgccaccaaccccaacagaattgacctggtggccacctggaggttctatgaatctgtggtgtccttccccttcttcaggaaggagcagctggaggccgccagcagccagaagctgggcctgctggacagagtgcggctgagcaacccccggggcagcaacaccaagggcaagctgttcacccccctgaatgtggatgccatcgaggagagccccagcaaggagcccaagcctgtgggcctgaacaacaaggagcgcttcagaacagccttcaggatgaaggcctatgccttctggcagagcagtgaagatgctggcactggagaccccatggctgaagatcggggctatggaaatgacttccccatcgaggacatgatccccaccctgaaggccgccatccgggctgtgcgcatcctgcagttccggctgtacaagaagaagttcaaggagaccctgcggccctatgatgtgaaggatgtgattgagcagtacagcgctggccacctggacatgctgagccgcatcaagtacctgcagaccagaattgacatgatcttcaccccaggcccccccagcacccccaagcacaagaagagccagaagggcagcgccttcaccttccccagccagcagagccccagaaatgagccctacgtggcccggcccagcaccagcgagattgaggaccagagcatgatgggcaagtttgtgaaggtggagcggcaggtgcaggacatgggcaagaagctggacttcctggtggacatgcacatgcagcacatggagcggctgcaggtgcaggtgacagagtactaccccaccaagggcaccagcagccctgctgaggccgagaagaaggaggacaaccgctacagcgacctgaagaccatcatctgcaactacagcgagactggacctcctgagcccccctacagcttccaccaggtgaccatcgacaaggtgagcccctacggcttctttgcccatgaccctgtgaacctgccccggggcggccccagcagcggcaaggtgcaggccaccccacccagcagcgccaccacctacgtggagcggcccaccgtgctgcccatcctgaccctgctggacagccgggtgtcctgccacagccaggccgacctgcagggcccctacagcgaccgcatcagcccccggcagaggaggagcatcacccgggacagcgacacccccctgagcctgatgtctgtgaaccacgaggagctggagaggagccccagcggcttcagcatcagccaggacagagatgattatgtgtttggccccaacggcggcagctcctggatgagggagaagcgctacctggccgagggggagacagacacagacacagaccccttcaccccatctggctccatgcccctgagcagcactggagatggcatcagtgacagcgtgtggacccccagcaacaagcccatctag

SEQ ID NO: 164937 - DNA, 2550 bp, synthetic construct
  misc_feature 1..2550: note = Description of Artificial Sequence: Synthetic coding sequence
  source 1..2550: mol_type = other DNA
cgggctgctgctgagaaggccaagaggcctgctggggcccggcagatgggcctgaaggccaggagagctgctgctggagatgaggagaggaaggtgggcctggcccctggagatgtggagcaggtgaccctggccctgggcgctggagctgacaaggatggcaccctgctgctggagggcggcggcagagatgagggccagaggaggaccccccagggcatcggcctgctggccaagacccccctgagcaggcctgtgaagaggaacaatgccaagtaccgccgcatccagaccctcatctatgatgccctggagcggccccggggctgggccctgctgtaccacgccctggtgttcctgattgtgctgggctgcctgatcctggccgtgctgaccaccttcaaggagtatgaaacagtgtctggggactggctgctgctgctggagacctttgccatcttcatctttggagctgagtttgccctgcgcatctgggccgccggctgctgctgccgctacaagggctggaggggccgcctgaagtttgccaggaagcccctgtgcatgctggacatctttgtgctgattgcctctgtgcctgtggtggccgtgggcaaccagggcaatgtgctggccaccagcctgcggagcctgcgcttcctgcagatcctgaggatgctgaggatggacagaagaggaggcacctggaagctgctgggcagcgccatctgtgcccacagcaaggagctgatcacagcctggtacatcggcttcctgaccctcatcctgagcagcttcctggtgtacctggtggagaaggatgtgcctgaggtggatgcccagggcgaggagatgaaggaggagtttgagacctatgcagatgccctgtggtggggcctcatcaccctggccaccatcggctacggggacaagacccccaagacctgggagggccgcctgattgctgccaccttcagcctcatcggcgtgtccttctttgccctgcctgctggcatcctgggcagcggcctggccctgaaggtgcaggagcagcaccggcagaagcactttgagaagaggaggaagccagctgctgagctgatccaggccgcctggagatactatgccaccaaccccaacagaattgacctggtggccacctggaggttctatgaatctgtggtgtccttccccttcttcaggaaggagcagctggaggccgccagcagccagaagctgggcctgctggacagagtgcggctgagcaacccccggggcagcaacaccaagggcaagctgttcacccccctgaatgtggatgccatcgaggagagccccagcaaggagcccaagcctgtgggcctgaacaacaaggagcgcttcagaacagccttcaggatgaaggcctatgccttctggcagagcagtgaagatgctggcactggagaccccatggctgaagatcggggctatggaaatgacttccccatcgaggacatgatccccaccctgaaggccgccatccgggctgtgcgcatcctgcagttccggctgtacaagaagaagttcaaggagaccctgcggccctatgatgtgaaggatgtgattgagcagtacagcgctggccacctggacatgctgagccgcatcaagtacctgcagaccagaattgacatgatcttcaccccaggcccccccagcacccccaagcacaagaagagccagaagggaaatgagccctacgtggcccggcccagcaccagcgagattgaggaccagagcatgatgggcaagtttgtgaaggtggagcggcaggtgcaggacatgggcaagaagctggacttcctggtggacatgcacatgcagcacatggagcggctgcaggtgcaggtgacagagtactaccccaccaagggcaccagcagccctgctgaggccgagaagaaggaggacaaccgctacagcgacctgaagaccatcatctgcaactacagcgagactggacctcctgagcccccctacagcttccaccaggtgaccatcgacaaggtgagcccctacggcttctttgcccatgaccctgtgaacctgccccggggcggccccagcagcggcaaggtgcaggccaccccacccagcagcgccaccacctacgtggagcggcccaccgtgctgcccatcctgaccctgctggacagccgggtgtcctgccacagccaggccgacctgcagggcccctacagcgaccgcatcagcccccggcagaggaggagcatcacccgggacagcgacacccccctgagcctgatgtctgtgaaccacgaggagctggagaggagccccagcggcttcagcatcagccaggacagagatgattatgtgtttggccccaacggcggcagctcctggatgagggagaagcgctacctggccgagggggagacagacacagacacagaccccttcaccccatctggctccatgcccctgagcagcactggagatggcatcagtgacagcgtgtggacccccagcaacaagcccatctag

SEQ ID NO: 164938 - DNA, 2088 bp, synthetic construct
  misc_feature 1..2088: note = Description of Artificial Sequence: Synthetic coding sequence
  source 1..2088: mol_type = other DNA
atggccgaggccccaccccggcggctgggcctgggccccccacctggagatgcccccagggctgagctggtggccctgacagctgtgcagagcgagcagggcgaggccggcggcggcggcagcccccggcggctgggcctgctgggcagccccctgcccccaggggcccccctgcccggccctggcagcggcagcggcagcgcctgtggccagaggagcagcgctgcccacaagcgctacagaaggctgcagaactgggtgtacaacgtgctggagcggccccggggctgggcctttgtgtaccacgtgttcatcttcctgctggtgttcagctgcctggtgctgtctgtgctgagcaccatccaggagcaccaggagctggccaatgaatgtctgctgatcctggagtttgtgatgattgtggtgtttggcctggagtacatcgtgcgggtgtggagcgctggctgctgctgccgctaccggggctggcagggccgcttccgctttgccaggaagcccttctgtgtgattgacttcatcgtgtttgtggcctctgtggccgtgattgctgctggcacccagggcaacatctttgccaccagcgccctgcgctccatgaggttcctgcagatcctgaggatggtgaggatggacagaagaggaggcacctggaagctgctgggctctgtggtgtatgcccacagcaaggagctgatcacagcctggtacatcggcttcctggtgctgatctttgccagcttcctggtgtacctggccgagaaggatgccaacagcgacttcagcagctatgctgacagcctgtggtggggcaccatcaccctgaccaccatcggctacggggacaagaccccccacacctggctgggccgggtgctggccgccggctttgccctgctgggcatctccttctttgccctgcctgctggcatcctgggcagcggctttgccctgaaggtgcaggagcagcaccggcagaagcactttgagaagaggaggatgcctgctgccaacctgatccaggccgcctggaggctgtacagcacagacatgagccgggcctacctgacagccacctggtactactatgacagcatcctgcccagcttccgggagctggccctgctgtttgaacatgtgcagagggccagaaatggaggcctgcggcccctggaggtgcggcgggcccctgtgcctgatggagcccccagccgctacccacctgtggccacctgccacaggcctggcagcaccagcttctgccctggagagagcagcaggatgggcatcaaggaccgcatccgcatgggcagcagccagaggagaacaggccccagcaagcagcacctggccccacccaccatgcccaccagccccagcagcgagcaggtgggggaggccaccagccccaccaaggtgcagaagtcctggagcttcaatgacaggacccgcttccgggccagcctgcggctgaagcccaggaccagcgcagaagatgcccccagcgaggaggtggccgaggagaagagctaccagtgtgagctgactgtggatgacatcatgcctgctgtgaagacagtcatccgcagcatccgcatcctgaagttcctggtggccaagaggaagttcaaggagaccctgcggccctatgatgtgaaggatgtgattgagcagtacagcgctggccacctggacatgctgggccgcatcaagagcctgcagaccagggtggaccagatcgtgggccggggccctggggacaggaaggcccgggagaagggggacaagggccccagtgatgctgaggtggtggatgagatctccatgatgggccgggtggtgaaggtggagaagcaggtgcagagcattgagcacaagctggacctgctgctgggcttctacagccgctgcctgcggagcggcaccagcgccagcctgggcgctgtgcaggtgcccctgtttgatcctgacatcaccagtgactaccacagccctgtggaccacgaggacatctctgtgtctgcccagaccctgagcatcagccgctctgtgtccaccaacatggactag

SEQ ID NO: 164939 - DNA, 2856 bp, synthetic construct
  misc_feature 1..2856: note = Description of Artificial Sequence: Synthetic coding sequence
  source 1..2856: mol_type = other DNA
atgcccaggcaccacgccggcggggaggagggcggggccgccggcctgtgggtgaagagcggggctgctgctgctgctgctgggggcggccgcctgggcagcggcatgaaggatgtggagagcggccggggccgggtgctgctgaacagcgctgctgcccggggagatggcctgctgctgctgggcaccagggctgccaccctgggcggcggcggcggcggcctgcgggagagcagaagaggcaagcagggcgccaggatgagcctgctgggcaagcccctgagctacaccagcagccagagctgcagaagaaatgtgaagtacagaagagtgcagaactacctgtacaacgtgctggagcggccccggggctgggccttcatctaccacgcctttgtgttcctgctggtgtttggctgcctgatcctgagcgtcttcagcaccatccctgagcacaccaagctggccagcagctgcctgctgatcctggagtttgtgatgattgtggtgtttggcctggagttcatcatccgcatctggagcgctggctgctgctgccgctaccggggctggcagggccgcctgcgctttgccaggaagcccttctgtgtgattgacaccatcgtgctgattgccagcattgctgtggtgtctgccaagacccagggcaacatctttgccaccagcgccctgcggagcctgcgcttcctgcagatcctgaggatggtgaggatggacagaagaggaggcacctggaagctgctgggctctgtggtgtatgcccacagcaaggagctgatcacagcctggtacatcggcttcctggtgctgatcttcagcagcttcctggtgtacctggtggagaaggatgccaacaaggagttcagcacctatgcagatgccctgtggtggggcaccatcaccctgaccaccatcggctacggggacaagacccccctgacctggctgggccgcctgctgtctgctggctttgccctgctgggcatctccttctttgccctgcctgctggcatcctgggcagcggctttgccctgaaggtgcaggagcagcaccggcagaagcactttgagaagagaagaaatcctgctgccaacctgatccagtgtgtgtggaggagctatgctgctgatgagaagtctgtgtccatcgccacctggaagccccacctgaaggccctgcacacctgcagccccaccaagaaggagcagggcgaggccagcagcagcaagttctgcagcaacaagcagaagctgttcaggatgtacaccagcaggaagcagagccagaagctgtccttcaaggagcgggtgaggatggccagcccccggggccagagcatcaagagccggcaggcctctgtgggggaccggcgcagccccagcacagacatcacagctgagggcagccccaccaaggtgcagaagtcctggagcttcaatgacaggacccgcttccggcccagcctgcggctgaagagcagccagcccaagcctgtgattgatgctgacacagccctgggcacagatgatgtgtatgatgagaagggctgccagtgtgatgtgtctgtggaggacctgaccccacccctgaagacagtcatccgggccatccgcatcatgaagttccacgtggccaagaggaagttcaaggagaccctgcggccctatgatgtgaaggatgtgattgagcagtacagcgctggccacctggacatgctgtgccgcatcaagagcctgcagaccagggtggaccagatcctgggcaagggccagatcaccagtgacaagaagagccgggagaagatcacagctgagcacgagaccacagatgacctgtccatgctgggccgggtggtgaaggtggagaagcaggtgcagagcattgagagcaagctggactgcctgctggacatctaccagcaggtgctgaggaagggcagcgccagcgccctggccctggccagcttccagatccccccatttgaatgtgagcagaccagtgactaccagagccctgtggacagcaaggacctgagcggcagcgcccagaacagcggctgcctgagccgcagcaccagcgccaacatcagccggggcctgcagttcatcctgaccccaaatgagttcagcgcccagaccttctacgccctgagccccaccatgcacagccaggccacccaggtgcccatcagccagagtgatggcagcgctgtggccgccaccaacaccatcgccaaccagatcaacacagcccccaagccagctgcccccaccaccctgcagatccccccacccctgcctgccatcaagcacctgcccaggcctgagaccctgcaccccaacccagctggcctgcaggagagcatcagtgatgtgaccacctgcctggtggccagcaaagaaaatgtgcaggtggcccagagcaacctgaccaaggaccgctccatgaggaagagctttgacatgggcggggagaccctgctgtctgtgtgccccatggtgcccaaggacctgggcaagagcctgtctgtgcagaacctgatccgcagcacagaggagctgaacatccagctgagcggcagcgagagcagcggcagccggggcagccaggacttctaccccaagtggagggagagcaagctgttcatcacagatgaggaggtgggccctgaggagacagaaacagacacctttgatgctgccccccagcctgcccgggaggccgcctttgccagtgacagcctgaggacaggccgcagccgcagcagccagagcatctgcaaggccggggagagcacagatgccctgagcctgccccacgtgaagctgaagtag

SEQ ID NO: 164940 - DNA, 2799 bp, synthetic construct
  misc_feature 1..2799: note = Description of Artificial Sequence: Synthetic coding sequence
  source 1..2799: mol_type = other DNA
atgcccaggcaccacgccggcggggaggagggcggggccgccggcctgtgggtgaagagcggggctgctgctgctgctgctgggggcggccgcctgggcagcggcatgaaggatgtggagagcggccggggccgggtgctgctgaacagcgctgctgcccggggagatggcctgctgctgctgggcaccagggctgccaccctgggcggcggcggcggcggcctgcgggagagcagaagaggcaagcagggcgccaggatgagcctgctgggcaagcccctgagctacaccagcagccagagctgcagaagaaatgtgaagtacagaagagtgcagaactacctgtacaacgtgctggagcggccccggggctgggccttcatctaccacgcctttgtgttcctgcctgtgtttggctgcctgatcctgagcgtcttcagcaccatccctgagcacaccaagctggccagcagctgcctgctgatcctggagtttgtgatgattgtggtgtttggcctggagttcatcatccgcatctggagcgctggctgctgctgccgctaccggggctggcagggccgcctgcgctttgccaggaagcccttctgtgtgattgacaccatcgtgctgattgccagcattgctgtggtgtctgccaagacccagggcaacatctttgccaccagcgccctgcggagcctgcgcttcctgcagatcctgaggatggtgaggatggacagaagaggaggcacctggaagctgctgggctctgtggtgtatgcccacagcaaggagctgatcacagcctggtacatcggcttcctggtgctgatcttcagcagcttcctggtgtacctggtggagaaggatgccaacaaggagttcagcacctatgcagatgccctgtggtggggcaccatcaccctgaccaccatcggctacggggacaagacccccctgacctggctgggccgcctgctgtctgctggctttgccctgctgggcatctccttctttgccctgcctgctggcatcctgggcagcggctttgccctgaaggtgcaggagcagcaccggcagaagcactttgagaagagaagaaatcctgctgccaacctgatccagtgtgtgtggaggagctatgctgctgatgagaagtctgtgtccatcgccacctggaagccccacctgaaggccctgcacacctgcagccccaccaagaaggagcagggcgaggccagcagcagccagaagctgtccttcaaggagcgggtgaggatggccagcccccggggccagagcatcaagagccggcaggcctctgtgggggacagaagaagccccagcacagacatcacagctgagggcagccccaccaaggtgcagaagtcctggagcttcaatgacaggacccgcttccggcccagcctgcggctgaagagcagccagcccaagcctgtgattgatgctgacacagccctgggcacagatgatgtgtatgatgagaagggctgccagtgtgatgtgtctgtggaggacctgaccccacccctgaagacagtcatccgggccatccgcatcatgaagttccacgtggccaagaggaagttcaaggagaccctgcggccctatgatgtgaaggatgtgattgagcagtacagcgctggccacctggacatgctgtgccgcatcaagagcctgcagaccagggtggaccagatcctgggcaagggccagatcaccagtgacaagaagagccgggagaagatcacagctgagcacgagaccacagatgacctgtccatgctgggccgggtggtgaaggtggagaagcaggtgcagagcattgagagcaagctggactgcctgctggacatctaccagcaggtgctgaggaaaggaagtgccagcgccctggccctggccagcttccagatccccccatttgaatgtgagcagaccagtgactaccagagccctgtggacagcaaggacctgagcggcagcgcccagaacagcggctgcctgagccgcagcaccagcgccaacatcagccggggcctgcagttcatcctgaccccaaatgagttcagcgcccagaccttctacgccctgagccccaccatgcacagccaggccacccaggtgcccatcagccagagtgatggcagcgctgtggccgccaccaacaccatcgccaaccagatcaacacagcccccaagccagctgcccccaccaccctgcagatccccccacccctgcctgccatcaagcacctgcccaggcctgagaccctgcaccccaacccagctggcctgcaggagagcatcagtgatgtgaccacctgcctggtggccagcaaagaaaatgtgcaggtggcccagagcaacctgaccaaggaccgctccatgaggaagagctttgacatgggcggggagaccctgctgtctgtgtgccccatggtgcccaaggacctgggcaagagcctgtctgtgcagaacctgatccgcagcacagaggagctgaacatccagctgagcggcagcgagagcagcggcagccggggcagccaggacttctaccccaagtggagggagagcaagctgttcatcacagatgaggaggtgggccctgaggagacagaaacagacacctttgatgctgccccccagcctgcccgggaggccgcctttgccagtgacagcctgaggacaggccgcagccgcagcagccagagcatctgcaaggccggggagagcacagatgccctgagcctgccccacgtgaagctgaagtag

SEQ ID NO: 164941 - DNA, 2802 bp, synthetic construct
  misc_feature 1..2802: note = Description of Artificial Sequence: Synthetic coding sequence
  source 1..2802: mol_type = other DNA
atgcccaggcaccacgccggcggggaggagggcggggccgccggcctgtgggtgaagagcggggctgctgctgctgctgctgggggcggccgcctgggcagcggcatgaaggatgtggagagcggccggggccgggtgctgctgaacagcgctgctgcccggggagatggcctgctgctgctgggcaccagggctgccaccctgggcggcggcggcggcggcctgcgggagagcagaagaggcaagcagggcgccaggatgagcctgctgggcaagcccctgagctacaccagcagccagagctgcagaagaaatgtgaagtacagaagagtgcagaactacctgtacaacgtgctggagcggccccggggctgggccttcatctaccacgcctttgtgttcctgctggtgtttggctgcctgatcctgagcgtcttcagcaccatccctgagcacaccaagctggccagcagctgcctgctgatcctggagtttgtgatgattgtggtgtttggcctggagttcatcatccgcatctggagcgctggctgctgctgccgctaccggggctggcagggccgcctgcgctttgccaggaagcccttctgtgtgattgacaccatcgtgctgattgccagcattgctgtggtgtctgccaagacccagggcaacatctttgccaccagcgccctgcggagcctgcgcttcctgcagatcctgaggatggtgaggatggacagaagaggaggcacctggaagctgctgggctctgtggtgtatgcccacagcaaggagctgatcacagcctggtacatcggcttcctggtgctgatcttcagcagcttcctggtgtacctggtggagaaggatgccaacaaggagttcagcacctatgcagatgccctgtggtggggcaccatcaccctgaccaccatcggctacggggacaagacccccctgacctggctgggccgcctgctgtctgctggctttgccctgctgggcatctccttctttgccctgcctgctggcatcctgggcagcggctttgccctgaaggtgcaggagcagcaccggcagaagcactttgagaagagaagaaatcctgctgccaacctgatccagtgtgtgtggaggagctatgctgctgatgagaagtctgtgtccatcgccacctggaagccccacctgaaggccctgcacacctgcagccccaccaagcagaaccagcagggcgagagccagagctgccagaagctgtccttcaaggagcgggtgaggatggccagcccccggggccagagcatcaagagccggcaggcctctgtgggggaccggcgcagccccagcacagacatcacagctgagggcagccccaccaaggtgcagaagtcctggagcttcaatgacaggacccgcttccggcccagcctgcggctgaagagcagccagcccaagcctgtgattgatgctgacacagccctgggcacagatgatgtgtatgatgagaagggctgccagtgtgatgtgtctgtggaggacctgaccccacccctgaagacagtcatccgggccatccgcatcatgaagttccacgtggccaagaggaagttcaaggagaccctgcggccctatgatgtgaaggatgtgattgagcagtacagcgctggccacctggacatgctgtgccgcatcaagagcctgcagaccagggtggaccagatcctgggcaagggccagatcaccagtgacaagaagagccgggagaagatcacagctgagcacgagaccacagatgacctgtccatgctgggccgggtggtgaaggtggagaagcaggtgcagagcattgagagcaagctggactgcctgctggacatctaccagcaggtgctgaggaagggcagcgccagcgccctggccctggccagcttccagatccccccatttgaatgtgagcagaccagtgactaccagagccctgtggacagcaaggacctgagcggcagcgcccagaacagcggctgcctgagccgcagcaccagcgccaacatcagccggggcctgcagttcatcctgaccccaaatgagttcagcgcccagaccttctacgccctgagccccaccatgcacagccaggccacccaggtgcccatcagccagagtgatggcagcgctgtggccgccaccaacaccatcgccaaccagatcaacacagcccccaagccagctgcccccaccaccctgcagatccccccacccctgcctgccatcaagcacctgcccaggcctgagaccctgcaccccaacccagctggcctgcaggagagcatcagtgatgtgaccacctgcctggtggccagcaaagaaaatgtgcaggtggcccagagcaacctgaccaaggaccgctccatgaggaagagctttgacatgggcggggagaccctgctgtctgtgtgccccatggtgcccaaggacctgggcaagagcctgtctgtgcagaacctgatccgcagcacagaggagctgaacatccagctgagcggcagcgagagcagcggcagccggggcagccaggacttctaccccaagtggagggagagcaagctgttcatcacagatgaggaggtgggccctgaggagacagaaacagacacctttgatgctgccccccagcctgcccgggaggccgcctttgccagtgacagcctgaggacaggccgcagccgcagcagccagagcatctgcaaggccggggagagcacagatgccctgagcctgccccacgtgaagctgaagtag

SEQ ID NO: 164942 - DNA, 1284 bp, synthetic construct
  misc_feature 1..1284: note = Description of Artificial Sequence: Synthetic coding sequence
  source 1..1284: mol_type = other DNA
atgcccaggcaccacgccggcggggaggagggcggggccgccggcctgtgggtgaagagcggggctgctgctgctgctgctgggggcggccgcctgggcagcggcatgaaggatgtggagagcggccggggccgggtgctgctgaacagcgctgctgcccggggagatggcctgctgctgctgggcaccagggctgccaccctgggcggcggcggcggcggcctgcgggagagcagaagaggcaagcagggcgccaggatgagcctgctgggcaagcccctgagctacaccagcagccagagctgcagaagaaatgtgaagtacagaagagtgcagaactacctgtacaacgtgctggagcggccccggggctgggccttcatctaccacgcctttgtgttcctgctggtgtttggctgcctgatcctgagcgtcttcagcaccatccctgagcacaccaagctggccagcagctgcctgctgatcctggagtttgtgatgattgtggtgtttggcctggagttcatcatccgcatctggagcgctggctgctgctgccgctaccggggctggcagggccgcctgcgctttgccaggaagcccttctgtgtgattgacaccatcgtgctgattgccagcattgctgtggtgtctgccaagacccagggcaacatctttgccaccagcgccctgcggagcctgcgcttcctgcagatcctgaggatggtgaggatggacagaagaggaggcacctggaagctgctgggctctgtggtgtatgcccacagcaaggagctgatcacagcctggtacatcggcttcctggtgctgatcttcagcagcttcctggtgtacctggtggagaaggatgccaacaaggagttcagcacctatgcagatgccctgtggtggggcaccatcaccctgaccaccatcggctacggggacaagacccccctgacctggctgggccgcctgctgtctgctggctttgccctgctgggcatctccttctttgccctgcctgctggcatcctgggcagcggctttgccctgaaggtgcaggagcagcaccggcagaagcactttgagaagagaagaaatcctgctgccaacctgatccagtgtgtgtggaggagctatgctgctgatgagaagtctgtgtccatcgccacctggaagccccacctgaaggccctgcacacctgcagccccaccaagaaggagcagggcgaggccagcagcagatttgtgatcagcctgctgctgcacgtgtgcctgtag

SEQ ID NO: 164943 - DNA, 2799 bp, synthetic construct
  misc_feature 1..2799: note = Description of Artificial Sequence: Synthetic coding sequence
  source 1..2799: mol_type = other DNA
atgcccaggcaccacgccggcggggaggagggcggggccgccggcctgtgggtgaagagcggggctgctgctgctgctgctgggggcggccgcctgggcagcggcatgaaggatgtggagagcggccggggccgggtgctgctgaacagcgctgctgcccggggagatggcctgctgctgctgggcaccagggctgccaccctgggcggcggcggcggcggcctgcgggagagcagaagaggcaagcagggcgccaggatgagcctgctgggcaagcccctgagctacaccagcagccagagctgcagaagaaatgtgaagtacagaagagtgcagaactacctgtacaacgtgctggagcggccccggggctgggccttcatctaccacgcctttgtgttcctgctggtgtttggctgcctgatcctgagcgtcttcagcaccatccctgagcacaccaagctggccagcagctgcctgctgatcctggagtttgtgatgattgtggtgtttggcctggagttcatcatccgcatctggagcgctggctgctgctgccgctaccggggctggcagggccgcctgcgctttgccaggaagcccttctgtgtgattgacaccatcgtgctgattgccagcattgctgtggtgtctgccaagacccagggcaacatctttgccaccagcgccctgcggagcctgcgcttcctgcagatcctgaggatggtgaggatggacagaagaggaggcacctggaagctgctgggctctgtggtgtatgcccacagcaaggagctgatcacagcctggtacatcggcttcctggtgctgatcttcagcagcttcctggtgtacctggtggagaaggatgccaacaaggagttcagcacctatgcagatgccctgtggtggggcaccatcaccctgaccaccatcggctacggggacaagacccccctgacctggctgggccgcctgctgtctgctggctttgccctgctgggcatctccttctttgccctgcctgctggcatcctgggcagcggctttgccctgaaggtgcaggagcagcaccggcagaagcactttgagaagagaagaaatcctgctgccaacctgatccagtgtgtgtggaggagctatgctgctgatgagaagtctgtgtccatcgccacctggaagccccacctgaaggccctgcacacctgcagccccaccaagaaggagcagggcgaggccagcagcagccagaagctgtccttcaaggagcgggtgaggatggccagcccccggggccagagcatcaagagccggcaggcctctgtgggggacagaagaagccccagcacagacatcacagctgagggcagccccaccaaggtgcagaagtcctggagcttcaatgacaggacccgcttccggcccagcctgcggctgaagagcagccagcccaagcctgtgattgatgctgacacagccctgggcacagatgatgtgtatgatgagaagggctgccagtgtgatgtgtctgtggaggacctgaccccacccctgaagacagtcatccgggccatccgcatcatgaagttccacgtggccaagaggaagttcaaggagaccctgcggccctatgatgtgaaggatgtgattgagcagtacagcgctggccacctggacatgctgtgccgcatcaagagcctgcagaccagggtggaccagatcctgggcaagggccagatcaccagtgacaagaagagccgggagaagatcacagctgagcacgagaccacagatgacctgtccatgctgggccgggtggtgaaggtggagaagcaggtgcagagcattgagagcaagctggactgcctgctggacatctaccagcaggtgctgaggaaaggaagtgccagcgccctggccctggccagcttccagatccccccatttgaatgtgagcagaccagtgactaccagagccctgtggacagcaaggacctgagcggcagcgcccagaacagcggctgcctgagccgcagcaccagcgccaacatcagccggggcctgcagttcatcctgaccccaaatgagttcagcgcccagaccttctacgccctgagccccaccatgcacagccaggccacccaggtgcccatcagccagagtgatggcagcgctgtggccgccaccaacaccatcgccaaccagatcaacacagcccccaagccagctgcccccaccaccctgcagatccccccacccctgcctgccatcaagcacctgcccaggcctgagaccctgcaccccaacccagctggcctgcaggagagcatcagtgatgtgaccacctgcctggtggccagcaaagaaaatgtgcaggtggcccagagcaacctgaccaaggaccgctccatgaggaagagctttgacatgggcggggagaccctgctgtctgtgtgccccatggtgcccaaggacctgggcaagagcctgtctgtgcagaacctgatccgcagcacagaggagctgaacatccagctgagcggcagcgagagcagcggcagccggggcagccaggacttctaccccaagtggagggagagcaagctgttcatcacagatgaggaggtgggccctgaggagacagaaacagacacctttgatgctgccccccagcctgcccgggaggccgcctttgccagtgacagcctgaggacaggccgcagccgcagcagccagagcatctgcaaggccggggagagcacagatgccctgagcctgccccacgtgaagctgaagtag

SEQ ID NO: 164944 - DNA, 2829 bp, synthetic construct
  misc_feature 1..2829: note = Description of Artificial Sequence: Synthetic coding sequence
  source 1..2829: mol_type = other DNA
atgcccaggcaccacgccggcggggaggagggcggggccgccggcctgtgggtgaagagcggggctgctgctgctgctgctgggggcggccgcctgggcagcggcatgaaggatgtggagagcggccggggccgggtgctgctgaacagcgctgctgcccggggagatggcctgctgctgctgggcaccagggctgccaccctgggcggcggcggcggcggcctgcgggagagcagaagaggcaagcagggcgccaggatgagcctgctgggcaagcccctgagctacaccagcagccagagctgcagaagaaatgtgaagtacagaagagtgcagaactacctgtacaacgtgctggagcggccccggggctgggccttcatctaccacgcctttgtgttcctgctggtgtttggctgcctgatcctgagcgtcttcagcaccatccctgagcacaccaagctggccagcagctgcctgctgatcctggagtttgtgatgattgtggtgtttggcctggagttcatcatccgcatctggagcgctggctgctgctgccgctaccggggctggcagggccgcctgcgctttgccaggaagcccttctgtgtgattgacaccatcgtgctgattgccagcattgctgtggtgtctgccaagacccagggcaacatctttgccaccagcgccctgcggagcctgcgcttcctgcagatcctgaggatggtgaggatggacagaagaggaggcacctggaagctgctgggctctgtggtgtatgcccacagcaaggagctgatcacagcctggtacatcggcttcctggtgctgatcttcagcagcttcctggtgtacctggtggagaaggatgccaacaaggagttcagcacctatgcagatgccctgtggtggggcaccatcaccctgaccaccatcggctacggggacaagacccccctgacctggctgggccgcctgctgtctgctggctttgccctgctgggcatctccttctttgccctgcctgctggcatcctgggcagcggctttgccctgaaggtgcaggagcagcaccggcagaagcactttgagaagagaagaaatcctgctgccaacctgatccagtgtgtgtggaggagctatgctgctgatgagaagtctgtgtccatcgccacctggaagccccacctgaaggccctgcacacctgcagccccaccaacaagttctgcagcaacaagcagaagctgttcaggatgtacaccagcaggaagcagagccagaagctgtccttcaaggagcgggtgaggatggccagcccccggggccagagcatcaagagccggcaggcctctgtgggggacagaagaagccccagcacagacatcacagctgagggcagccccaccaaggtgcagaagtcctggagcttcaatgacaggacccgcttccggcccagcctgcggctgaagagcagccagcccaagcctgtgattgatgctgacacagccctgggcacagatgatgtgtatgatgagaagggctgccagtgtgatgtgtctgtggaggacctgaccccacccctgaagacagtcatccgggccatccgcatcatgaagttccacgtggccaagaggaagttcaaggagaccctgcggccctatgatgtgaaggatgtgattgagcagtacagcgctggccacctggacatgctgtgccgcatcaagagcctgcagaccagggtggaccagatcctgggcaagggccagatcaccagtgacaagaagagccgggagaagatcacagctgagcacgagaccacagatgacctgtccatgctgggccgggtggtgaaggtggagaagcaggtgcagagcattgagagcaagctggactgcctgctggacatctaccagcaggtgctgaggaaaggaagtgccagcgccctggccctggccagcttccagatccccccatttgaatgtgagcagaccagtgactaccagagccctgtggacagcaaggacctgagcggcagcgcccagaacagcggctgcctgagccgcagcaccagcgccaacatcagccggggcctgcagttcatcctgaccccaaatgagttcagcgcccagaccttctacgccctgagccccaccatgcacagccaggccacccaggtgcccatcagccagagtgatggcagcgctgtggccgccaccaacaccatcgccaaccagatcaacacagcccccaagccagctgcccccaccaccctgcagatccccccacccctgcctgccatcaagcacctgcccaggcctgagaccctgcaccccaacccagctggcctgcaggagagcatcagtgatgtgaccacctgcctggtggccagcaaagaaaatgtgcaggtggcccagagcaacctgaccaaggaccgctccatgaggaagagctttgacatgggcggggagaccctgctgtctgtgtgccccatggtgcccaaggacctgggcaagagcctgtctgtgcagaacctgatccgcagcacagaggagctgaacatccagctgagcggcagcgagagcagcggcagccggggcagccaggacttctaccccaagtggagggagagcaagctgttcatcacagatgaggaggtgggccctgaggagacagaaacagacacctttgatgctgccccccagcctgcccgggaggccgcctttgccagtgacagcctgaggacaggccgcagccgcagcagccagagcatctgcaaggccggggagagcacagatgccctgagcctgccccacgtgaagctgaagtag

SEQ ID NO: 164945 - DNA, 2772 bp, synthetic construct
  misc_feature 1..2772: note = Description of Artificial Sequence: Synthetic coding sequence
  source 1..2772: mol_type = other DNA
atgcccaggcaccacgccggcggggaggagggcggggccgccggcctgtgggtgaagagcggggctgctgctgctgctgctgggggcggccgcctgggcagcggcatgaaggatgtggagagcggccggggccgggtgctgctgaacagcgctgctgcccggggagatggcctgctgctgctgggcaccagggctgccaccctgggcggcggcggcggcggcctgcgggagagcagaagaggcaagcagggcgccaggatgagcctgctgggcaagcccctgagctacaccagcagccagagctgcagaagaaatgtgaagtacagaagagtgcagaactacctgtacaacgtgctggagcggccccggggctgggccttcatctaccacgcctttgtgttcctgctggtgtttggctgcctgatcctgagcgtcttcagcaccatccctgagcacaccaagctggccagcagctgcctgctgatcctggagtttgtgatgattgtggtgtttggcctggagttcatcatccgcatctggagcgctggctgctgctgccgctaccggggctggcagggccgcctgcgctttgccaggaagcccttctgtgtgattgacaccatcgtgctgattgccagcattgctgtggtgtctgccaagacccagggcaacatctttgccaccagcgccctgcggagcctgcgcttcctgcagatcctgaggatggtgaggatggacagaagaggaggcacctggaagctgctgggctctgtggtgtatgcccacagcaaggagctgatcacagcctggtacatcggcttcctggtgctgatcttcagcagcttcctggtgtacctggtggagaaggatgccaacaaggagttcagcacctatgcagatgccctgtggtggggcaccatcaccctgaccaccatcggctacggggacaagacccccctgacctggctgggccgcctgctgtctgctggctttgccctgctgggcatctccttctttgccctgcctgctggcatcctgggcagcggctttgccctgaaggtgcaggagcagcaccggcagaagcactttgagaagagaagaaatcctgctgccaacctgatccagtgtgtgtggaggagctatgctgctgatgagaagtctgtgtccatcgccacctggaagccccacctgaaggccctgcacacctgcagccccaccaaccagaagctgtccttcaaggagcgggtgaggatggccagcccccggggccagagcatcaagagccggcaggcctctgtgggggaccggcgcagccccagcacagacatcacagctgagggcagccccaccaaggtgcagaagtcctggagcttcaatgacaggacccgcttccggcccagcctgcggctgaagagcagccagcccaagcctgtgattgatgctgacacagccctgggcacagatgatgtgtatgatgagaagggctgccagtgtgatgtgtctgtggaggacctgaccccacccctgaagacagtcatccgggccatccgcatcatgaagttccacgtggccaagaggaagttcaaggagaccctgcggccctatgatgtgaaggatgtgattgagcagtacagcgctggccacctggacatgctgtgccgcatcaagagcctgcagaccagggtggaccagatcctgggcaagggccagatcaccagtgacaagaagagccgggagaagatcacagctgagcacgagaccacagatgacctgtccatgctgggccgggtggtgaaggtggagaagcaggtgcagagcattgagagcaagctggactgcctgctggacatctaccagcaggtgctgaggaagggcagcgccagcgccctggccctggccagcttccagatccccccatttgaatgtgagcagaccagtgactaccagagccctgtggacagcaaggacctgagcggcagcgcccagaacagcggctgcctgagccgcagcaccagcgccaacatcagccggggcctgcagttcatcctgaccccaaatgagttcagcgcccagaccttctacgccctgagccccaccatgcacagccaggccacccaggtgcccatcagccagagtgatggcagcgctgtggccgccaccaacaccatcgccaaccagatcaacacagcccccaagccagctgcccccaccaccctgcagatccccccacccctgcctgccatcaagcacctgcccaggcctgagaccctgcaccccaacccagctggcctgcaggagagcatcagtgatgtgaccacctgcctggtggccagcaaagaaaatgtgcaggtggcccagagcaacctgaccaaggaccgctccatgaggaagagctttgacatgggcggggagaccctgctgtctgtgtgccccatggtgcccaaggacctgggcaagagcctgtctgtgcagaacctgatccgcagcacagaggagctgaacatccagctgagcggcagcgagagcagcggcagccggggcagccaggacttctaccccaagtggagggagagcaagctgttcatcacagatgaggaggtgggccctgaggagacagaaacagacacctttgatgctgccccccagcctgcccgggaggccgcctttgccagtgacagcctgaggacaggccgcagccgcagcagccagagcatctgcaaggccggggagagcacagatgccctgagcctgccccacgtgaagctgaagtag

SEQ ID NO: 164946 - DNA, 2469 bp, synthetic construct
  misc_feature 1..2469: note = Description of Artificial Sequence: Synthetic coding sequence
  source 1..2469: mol_type = other DNA
atgcccaggcaccacgccggcggggaggagggcggggccgccggcctgtgggtgaagagcggggctgctgctgctgctgctgggggcggccgcctgggcagcggcatgaaggatgtggagagcggccggggccgggtgctgctgaacagcgctgctgcccggggagatggcctgctgctgctgggcaccagggctgccaccctgggcggcggcggcggcggcctgcgggagagcagaagaggcaagcagggcgccaggatgagcctgctgggcaagcccctgagctacaccagcagccagagctgcagaagaaatgtgaagtacagaagagtgcagaactacctgtacaacgtgctggagcggccccggggctgggccttcatctaccacgcctttgtgttcctgctggtgtttggctgcctgatcctgagcgtcttcagcaccatccctgagcacaccaagctggccagcagctgcctgctgatcctggagtttgtgatgattgtggtgtttggcctggagttcatcatccgcatctggagcgctggctgctgctgccgctaccggggctggcagggccgcctgcgctttgccaggaagcccttctgtgtgattgacaccatcgtgctgattgccagcattgctgtggtgtctgccaagacccagggcaacatctttgccaccagcgccctgcggagcctgcgcttcctgcagatcctgaggatggtgaggatggacagaagaggaggcacctggaagctgctgggctctgtggtgtatgcccacagcaaggagctgatcacagcctggtacatcggcttcctggtgctgatcttcagcagcttcctggtgtacctggtggagaaggatgccaacaaggagttcagcacctatgcagatgccctgtggtggggcaccatcaccctgaccaccatcggctacggggacaagacccccctgacctggctgggccgcctgctgtctgctggctttgccctgctgggcatctccttctttgccctgcctgctggcatcctgggcagcggctttgccctgaaggtgcaggagcagcaccggcagaagcactttgagaagagaagaaatcctgctgccaacctgatccagtgtgtgtggaggagctatgctgctgatgagaagtctgtgtccatcgccacctggaagccccacctgaaggccctgcacacctgcagccccaccaagaaggagcagggcgaggccagcagccgcatcatgaagttccacgtggccaagaggaagttcaaggagaccctgcggccctatgatgtgaaggatgtgattgagcagtacagcgctggccacctggacatgctgtgccgcatcaagagcctgcagaccagggtggaccagatcctgggcaagggccagatcaccagtgacaagaagagccgggagaagatcacagctgagcacgagaccacagatgacctgtccatgctgggccgggtggtgaaggtggagaagcaggtgcagagcattgagagcaagctggactgcctgctggacatctaccagcaggtgctgaggaaaggaagtgccagcgccctggccctggccagcttccagatccccccatttgaatgtgagcagaccagtgactaccagagccctgtggacagcaaggacctgagcggcagcgcccagaacagcggctgcctgagccgcagcaccagcgccaacatcagccggggcctgcagttcatcctgaccccaaatgagttcagcgcccagaccttctacgccctgagccccaccatgcacagccaggccacccaggtgcccatcagccagagtgatggcagcgctgtggccgccaccaacaccatcgccaaccagatcaacacagcccccaagccagctgcccccaccaccctgcagatccccccacccctgcctgccatcaagcacctgcccaggcctgagaccctgcaccccaacccagctggcctgcaggagagcatcagtgatgtgaccacctgcctggtggccagcaaagaaaatgtgcaggtggcccagagcaacctgaccaaggaccgctccatgaggaagagctttgacatgggcggggagaccctgctgtctgtgtgccccatggtgcccaaggacctgggcaagagcctgtctgtgcagaacctgatccgcagcacagaggagctgaacatccagctgagcggcagcgagagcagcggcagccggggcagccaggacttctaccccaagtggagggagagcaagctgttcatcacagatgaggaggtgggccctgaggagacagaaacagacacctttgatgctgccccccagcctgcccgggaggccgcctttgccagtgacagcctgaggacaggccgcagccgcagcagccagagcatctgcaaggccggggagagcacagatgccctgagcctgccccacgtgaagctgaagtag

SEQ ID NO: 164947 - DNA, 2856 bp, synthetic construct
  misc_feature 1..2856: note = Description of Artificial Sequence: Synthetic coding sequence
  source 1..2856: mol_type = other DNA
atgcccaggcaccacgccggcggggaggagggcggggccgccggcctgtgggtgaagagcggggctgctgctgctgctgctgggggcggccgcctgggcagcggcatgaaggatgtggagagcggccggggccgggtgctgctgaacagcgctgctgcccggggagatggcctgctgctgctgggcaccagggctgccaccctgggcggcggcggcggcggcctgcgggagagcagaagaggcaagcagggcgccaggatgagcctgctgggcaagcccctgagctacaccagcagccagagctgcagaagaaatgtgaagtacagaagagtgcagaactacctgtacaacgtgctggagcggccccggggctgggccttcatctaccacgcctttgtgttcctgcctgtgtttggctgcctgatcctgagcgtcttcagcaccatccctgagcacaccaagctggccagcagctgcctgctgatcctggagtttgtgatgattgtggtgtttggcctggagttcatcatccgcatctggagcgctggctgctgctgccgctaccggggctggcagggccgcctgcgctttgccaggaagcccttctgtgtgattgacaccatcgtgctgattgccagcattgctgtggtgtctgccaagacccagggcaacatctttgccaccagcgccctgcggagcctgcgcttcctgcagatcctgaggatggtgaggatggacagaagaggaggcacctggaagctgctgggctctgtggtgtatgcccacagcaaggagctgatcacagcctggtacatcggcttcctggtgctgatcttcagcagcttcctggtgtacctggtggagaaggatgccaacaaggagttcagcacctatgcagatgccctgtggtggggcaccatcaccctgaccaccatcggctacggggacaagacccccctgacctggctgggccgcctgctgtctgctggctttgccctgctgggcatctccttctttgccctgcctgctggcatcctgggcagcggctttgccctgaaggtgcaggagcagcaccggcagaagcactttgagaagagaagaaatcctgctgccaacctgatccagtgtgtgtggaggagctatgctgctgatgagaagtctgtgtccatcgccacctggaagccccacctgaaggccctgcacacctgcagccccaccaagaaggagcagggcgaggccagcagcagcaagttctgcagcaacaagcagaagctgttcaggatgtacaccagcaggaagcagagccagaagctgtccttcaaggagcgggtgaggatggccagcccccggggccagagcatcaagagccggcaggcctctgtgggggaccggcgcagccccagcacagacatcacagctgagggcagccccaccaaggtgcagaagtcctggagcttcaatgacaggacccgcttccggcccagcctgcggctgaagagcagccagcccaagcctgtgattgatgctgacacagccctgggcacagatgatgtgtatgatgagaagggctgccagtgtgatgtgtctgtggaggacctgaccccacccctgaagacagtcatccgggccatccgcatcatgaagttccacgtggccaagaggaagttcaaggagaccctgcggccctatgatgtgaaggatgtgattgagcagtacagcgctggccacctggacatgctgtgccgcatcaagagcctgcagaccagggtggaccagatcctgggcaagggccagatcaccagtgacaagaagagccgggagaagatcacagctgagcacgagaccacagatgacctgtccatgctgggccgggtggtgaaggtggagaagcaggtgcagagcattgagagcaagctggactgcctgctggacatctaccagcaggtgctgaggaagggcagcgccagcgccctggccctggccagcttccagatccccccatttgaatgtgagcagaccagtgactaccagagccctgtggacagcaaggacctgagcggcagcgcccagaacagcggctgcctgagccgcagcaccagcgccaacatcagccggggcctgcagttcatcctgaccccaaatgagttcagcgcccagaccttctacgccctgagccccaccatgcacagccaggccacccaggtgcccatcagccagagtgatggcagcgctgtggccgccaccaacaccatcgccaaccagatcaacacagcccccaagccagctgcccccaccaccctgcagatccccccacccctgcctgccatcaagcacctgcccaggcctgagaccctgcaccccaacccagctggcctgcaggagagcatcagtgatgtgaccacctgcctggtggccagcaaagaaaatgtgcaggtggcccagagcaacctgaccaaggaccgctccatgaggaagagctttgacatgggcggggagaccctgctgtctgtgtgccccatggtgcccaaggacctgggcaagagcctgtctgtgcagaacctgatccgcagcacagaggagctgaacatccagctgagcggcagcgagagcagcggcagccggggcagccaggacttctaccccaagtggagggagagcaagctgttcatcacagatgaggaggtgggccctgaggagacagaaacagacacctttgatgctgccccccagcctgcccgggaggccgcctttgccagtgacagcctgaggacaggccgcagccgcagcagccagagcatctgcaaggccggggagagcacagatgccctgagcctgccccacgtgaagctgaagtag

SEQ ID NO: 164948 - DNA, 2577 bp, synthetic construct
  misc_feature 1..2577: note = Description of Artificial Sequence: Synthetic coding sequence
  source 1..2577: mol_type = other DNA
atgcctgctggcatgaccaagcacggcagccgcagcaccagcagcctgcccccagagcccatggagatcgtgcgcagcaaggcctgcagcagaagagtgcggctgaatgtgggcggcctggcccacgaggtgctgtggaggaccctggaccggctgcccaggacccggctgggcaagctgcgggactgcaacacccatgacagcctgctggaggtgtgtgatgactacagcctggatgacaatgagtacttctttgacagacaccctggggccttcaccagcatcctgaacttctacagaacaggccgcctgcacatgatggaggagatgtgtgccctgtccttcagccaggagctggactactggggcattgatgagatctacctggagagctgctgccaggcccgctaccaccagaagaaggagcagatgaatgaggagctgaagcgggaggccgagaccctgcgggagcgggagggggaggagtttgacaacacctgctgtgccgagaagaggaagaagctgtgggacctgctggagaagcccaacagctctgtggccgccaagatcctggccatcatcagcatcatgtttattgtgctgagcaccatcgccctgagcctgaacaccctgcctgagctgcagagcctggatgaatttggccagagcacagacaacccccagctggcccacgtggaggccgtgtgcatcgcctggttcaccatggagtacctgctgcgcttcctgagcagccccaagaagtggaagttcttcaagggccccctgaatgccatcgacctgctggccatcctgccctactacgtgaccatcttcctgacagagagcaacaagtctgtgctgcagttccagaatgtgagaagagtggtgcagatcttccgcatcatgaggatcctgcgcatcctgaagctggcccggcacagcacaggcctgcagagcctgggcttcaccctgcggcgcagctacaatgagctgggcctgctgatcctcttcctggccatgggcatcatgatcttcagcagcctggtgttctttgctgagaaggatgaagatgacaccaagttcaagagcatcccagccagcttctggtgggccaccatcaccatgaccaccgtgggctacggggacatctaccccaagaccctgctgggcaagatcgtgggcggcctgtgctgcatcgccggcgtgctggtgattgccctgcccatccccatcatcgtgaacaacttcagcgagttctacaaggagcagaagaggcaggagaaggccatcaagaggcgggaggccctggagcgggccaagagaaatggcagcatcgtgtccatgaacatgaaggatgcctttgcccggagcattgagatgatggacatcgtggtggagaagaatggagagaacatgggcaagaaggacaaggtgcaggacaaccacctgagccccaacaagtggaagtggaccaagaggaccctgtctgagaccagcagcagcaagagctttgagaccaaggagcagggcagccctgagaaggcccggagcagcagcagcccccagcacctgaatgtgcagcagctggaggacatgtacaacaagatggccaagacccagagccagcccatcctgaacaccaaggagagcgctgcccagagcaagcccaaggaggagctggagatggagagcatccccagccctgtggcccccctgcccaccaggacagagggcgtcatcgacatgaggtccatgagcagcattgacagcttcatcagctgtgccacagacttccctgaggccacccgcttcagccacagccccctgaccagcctgcccagcaagacaggaggcagcacagcccctgaggtgggctggaggggggccctgggcgccagcggcggccgctttgtggaggccaaccccagcccagatgccagccagcacagcagcttcttcatcgagagccccaagagctccatgaagaccaacaaccccctgaagctgcgggccctgaaggtgaacttcatggagggggaccccagccccctgctgcctgtgctgggcatgtaccatgaccccctgaggaacagaggcagcgctgctgctgctgtggccggcctggagtgtgccaccctgctggacaaggctgtgctgagccctgagagcagcatctacaccacagccagcgccaagaccccacccaggagccctgagaagcacacagccatcgccttcaactttgaggccggcgtgcaccagtacattgatgctgacacagatgatgagggccagctgctgtacagcgtggacagcagcccccccaagagcctgcccggcagcaccagccccaagttcagcacaggcaccaggtctgagaagaaccactttgagagcagccccctgcccaccagccccaagttcctgcggcagaactgcatctacagcacagaggccctgaccgggaagggccccagcggccaggagaagtgcaagctggagaaccacatcagcccagatgtgcgggtgctgcccggcggcggggcccacggcagcacccgggaccagagcatctag

SEQ ID NO: 164949 - DNA, 2442 bp, synthetic construct
  misc_feature 1..2442: note = Description of Artificial Sequence: Synthetic coding sequence
  source 1..2442: mol_type = other DNA
cgggatggaggagagaagacagctgtgacccggctgggcaagctgcgggactgcaacacccatgacagcctgctggaggtgtgtgatgactacagcctggatgacaatgagtacttctttgacagacaccctggggccttcaccagcatcctgaacttctacagaacaggccgcctgcacatgatggaggagatgtgtgccctgtccttcagccaggagctggactactggggcattgatgagatctacctggagagctgctgccaggcccgctaccaccagaagaaggagcagatgaatgaggagctgaagcgggaggccgagaccctgcgggagcgggagggggaggagtttgacaacacctgctgtgccgagaagaggaagaagctgtgggacctgctggagaagcccaacagctctgtggccgccaagatcctggccatcatcagcatcatgttcatcgtgctgagcaccatcgccctgagcctgaacaccctgcctgagctgcagagcctggatgaatttggccagagcacagacaacccccagctggcccacgtggaggccgtgtgcatcgcctggttcaccatggagtacctgctgcgcttcctgagcagccccaagaagtggaagttcttcaagggccccctgaatgccatcgacctgctggccatcctgccctactacgtgaccatcttcctgacagagagcaacaagtctgtgctgcagttccagaatgtgcggcgggtggtgcagatcttccgcatcatgaggatcctgcgcatcctgaagctggcccggcacagcacaggcctgcagagcctgggcttcaccctgcggcgcagctacaatgagctgggcctgctgatcctcttcctggccatgggcatcatgatcttcagcagcctggtgttctttgctgagaaggatgaagatgacaccaagttcaagagcatcccagccagcttctggtgggccaccatcaccatgaccaccgtgggctatggagacatctaccccaagaccctgctgggcaagatcgtgggcggcctgtgctgcatcgccggcgtgctggtgattgccctgcccatccccatcatcgtgaacaacttcagcgagttctacaaggagcagaagaggcaggagaaggccatcaagagaagagaggccctggagcgggccaagagaaatggcagcatcgtgtccatgaacatgaaggatgcctttgcccggagcattgagatgatggacatcgtggtggagaagaatggagagaacatgggcaagaaggacaaggtgcaggacaaccacctgagccccaacaagtggaagtggaccaagaggaccctgtctgagaccagcagcagcaagagctttgagaccaaggagcagggcagccctgagaaggcccggagcagcagcagcccccagcacctgaatgtgcagcagctggaggacatgtacaacaagatggccaagacccagagccagcccatcctgaacaccaaggagagcgctgcccagagcaagcccaaggaggagctggagatggagagcatccccagccctgtggcccccctgcccaccaggacagaaggagtgattgacatgaggtccatgagcagcattgacagcttcatcagctgtgccacagacttccctgaggccacccgcttcagccacagccccctgaccagcctgcccagcaagacaggaggcagcacagcccctgaggtgggctggaggggggccctgggcgccagcggcggccgctttgtggaggccaaccccagcccagatgccagccagcacagcagcttcttcatcgagagccccaagagctccatgaagaccaacaaccccctgaagctgcgggccctgaaggtgaacttcatggagggggaccccagccccctgctgcctgtgctgggcatgtaccatgaccccctgaggaacagaggcagcgctgctgctgctgtggccggcctggagtgtgccaccctgctggacaaggctgtgctgagccctgagagcagcatctacaccacagccagcgccaagaccccacccaggagccctgagaagcacacagccatcgccttcaactttgaagctggggtgcaccagtacattgatgctgacacagatgatgagggccagctgctgtacagcgtggacagcagcccccccaagagcctgcccggcagcaccagccccaagttcagcacaggcaccaggtctgagaagaaccactttgagagcagccccctgcccaccagccccaagttcctgcggcagaactgcatctacagcacagaggccctgaccgggaagggccccagcggccaggagaagtgcaagctggagaaccacatcagcccagatgtgcgggtgctgcccggcggcggggcccacggcagcacccgggaccagagcatctag

SEQ ID NO: 164950 - DNA, 2736 bp, synthetic construct
  misc_feature 1..2736: note = Description of Artificial Sequence: Synthetic coding sequence
  source 1..2736: mol_type = other DNA
atggccgagaaggcccctcctggcctgaacaggaagaccagccgcagcaccctgagcctgcccccagagcctgtggacatcatccgcagcaagacctgcagcagaagagtgaagatcaacgtgggcggcctgaaccacgaggtgctgtggaggaccctggaccggctgcccaggacccggctgggcaagctgcgggactgcaacacccatgagagcctgctggaggtgtgtgatgactacaacctgaatgaaaatgagtacttctttgacagacaccctggggccttcaccagcatcctgaacttctacagaacaggcaagctgcacatgatggaggagatgtgtgccctgagctttggccaggagctggactactggggcattgatgagatctacctggagagctgctgccaggcccgctaccaccagaagaaggagcagatgaatgaggagctgcggcgggaggccgagaccatgagggagcgggagggggaggagtttgacaacacctgctgcccagacaagaggaagaagctgtgggacctgctggagaagcccaacagctctgtggccgccaagatcctggccatcgtgtccatcctcttcatcgtgctgagcaccatcgccctgagcctgaacaccctgcctgagctgcaggagacagatgaatttggccagctgaatgacaaccggcagctggcccacgtggaggccgtgtgcatcgcctggttcaccatggagtacctgctgcgcttcctgagcagccccaacaagtggaagttcttcaagggccccctgaatgtgattgacctgctggccatcctgccctactacgtgaccatcttcctgacagagagcaacaagtctgtgctgcagttccagaatgtgagaagagtggtgcagatcttccgcatcatgaggatcctgcgcatcctgaagctggcccggcacagcacaggcctgcagagcctgggcttcaccctgcggcgcagctacaatgagctgggcctgctgatcctcttcctggccatgggcatcatgatcttcagcagcctggtgttctttgctgagaaggatgaagatgccaccaagttcaccagcatcccagccagcttctggtgggccaccatcaccatgaccaccgtgggctacggggacatctaccccaagaccctgctgggcaagatcgtgggcggcctgtgctgcatcgccggcgtgctggtgattgccctgcccatccccatcatcgtgaacaacttcagcgagttctacaaggagcagaagaggcaggagaaggccatcaagaggcgggaggccctggagcgggccaagagaaatggcagcatcgtgtccatgaacctgaaggatgcctttgcccgctccatggagctgattgatgtggccgtggagaaggccggggagagcgccaacaccaaggacagcgcagatgacaaccacctgagccccagccgctggaagtgggccaggaaggccctgtctgagaccagcagcaacaagagctttgagaacaagtaccaggaggtgtcccagaaggacagccatgagcagctgaacaacaccagcagcagcagcccccagcacctgagcgcccagaagctggagatgctgtacaatgagatcaccaagacccagccccacagccaccccaacccagactgccaggagaagccagagcggcccagcgcctatgaggaggagattgagatggaggaggtggtgtgcccccaggagcagctggccgtggcccagacagaggtgattgtggacatgaagagcaccagcagcattgacagcttcaccagctgtgccacagacttcacagaaacagagaggagccccctgcccccaccttctgccagccacctgcagatgaagttccccacagacctgcccggcacagaggagcaccagagggcccggggcccccccttcctgaccctgagccgggagaagggccctgctgccagagatggcaccctggagtatgcccctgtggacatcaccgtgaacctggatgccagcggcagccagtgtggcctgcacagccccctgcagagcgacaatgccacagacagccccaagagcagcctgaagggcagcaaccccctgaagagccgcagcctgaaggtgaacttcaaggaaaatagaggcagcgccccccagaccccacccagcacagcccggcccctgcctgtgaccacagctgacttcagcctgaccaccccccagcacatcagcaccatcctgctggaggagacccccagccagggcgaccggcccctgctgggcacagaggtgtctgccccctgccagggccccagcaagggcctgagcccccgcttccccaagcagaagctgttccccttcagcagccgggagaggaggagcttcacagaaattgacacaggagatgatgaggacttcctggagctgcccggggcccgggaggagaagcaggtggacagcagccccaactgctttgctgacaagcccagtgatggccgggaccccctgcgggaggagggctctgtgggcagcagcagcccccaggacaccggccacaactgccggcaggacatctaccacgctgtgtctgaggtgaagaaggacagcagccaggagggctgcaagatggagaaccacctgtttgcccctgagatccacagcaaccctggggacaccggctactgccccacccgggagacctccatgtag

SEQ ID NO: 164951 - DNA, 1206 bp, synthetic construct
  misc_feature 1..1206: note = Description of Artificial Sequence: Synthetic coding sequence
  source 1..1206: mol_type = other DNA
atgcaggtgtccatcgcctgcacagagcacaacctgaagagcagaaatggagaggaccggctgctgagcaagcagagcagcacagccccaaatgtggtgaatgctgcccgggccaagttcagaacagtggccatcatcgcccggagcctgggcaccttcaccccccagcaccacatcagcctgaaggagagcacagccaagcagacaggcatgaagtacagaaacctgggcaagagcggcctgcgggtgtcctgcctgggcctgggcacctgggtgaccttcggcggccagatcagtgatgaggtggccgagcggctgatgaccatcgcctatgaaagtggagtgaacctgtttgacacagctgaggtgtatgctgctgggaaggccgaggtgatcctgggcagcatcatcaagaagaagggctggaggaggagcagcctggtgatcaccaccaagctgtactggggcggcaaggccgagacagagcggggcctgagcaggaagcacatcatcgagggcctgaagggcagcctgcagaggctgcagctggagtatgtggatgtggtgtttgccaacagaccagacagcaacacccccatggaggagatcgtgcgggccatgacccacgtgatcaaccagggcatggccatgtactggggcaccagccgctggagcgccatggagatcatggaggcctacagcgtggcccggcagttcaacatgatcccccctgtgtgtgagcaggccgagtaccacctgttccagcgggagaaggtggaggtgcagctgcctgagctgtaccacaagattggagtgggcgccatgacctggagccccctggcctgtggcatcatcagcggcaagtatggaaatggagtgcctgagagcagccgggccagcctgaagtgctaccagtggctgaaggagagaattgtgtctgaggagggcaggaagcagcagaacaagctgaaggacctgagccccatcgccgagcggctgggctgcaccctgccccagctggccgtggcctggtgcctgagaaatgaaggagtgtcctctgtgctgctgggcagcagcaccccagagcagctgattgagaacctgggcgccatccaggtgctgcccaagatgaccagccacgtggtgaatgaaattgacaacatcctgaggaacaagccctacagcaagaaggactaccgctcctag

SEQ ID NO: 164952 - DNA, 1173 bp, synthetic construct
  misc_feature 1..1173: note = Description of Artificial Sequence: Synthetic coding sequence
  source 1..1173: mol_type = other DNA
atgctggccgccaggactggagctgctggcagccagatcagcgaggagaacaccaagctgcggcggcagagcggcttctctgtggccggcaaggacaagagccccaagaaggcctctgaaaatgccaaggacagcagcctgagccccagcggggagagccagctgcgggcccggcagctggccctgctgcgggaggtggagatgaactggtacctgaagctgtgtgacctgagcagcgagcacaccaccgtgtgcaccaccggcatgccccacaggaacctgggcaagagcggcctgcgggtgtcctgcctgggcctgggcacctgggtgaccttcggcggccagatcagtgatgaggtggccgagcggctgatgaccatcgcctatgaaagtggagtgaacctgtttgacacagctgaggtgtatgctgctgggaaggccgaggtgatcctgggcagcatcatcaagaagaagggctggaggaggagcagcctggtgatcaccaccaagctgtactggggcggcaaggccgagacagagcggggcctgagcaggaagcacatcatcgaggagatcgtgcgggccatgacccacgtgatcaaccagggcatggccatgtactggggcaccagccgctggagcgccatggagatcatggaggcctacagcgtggcccggcagttcaacatgatcccccctgtgtgtgagcaggccgagtaccacctgttccagcgggagaaggtggaggtgcagctgcctgagctgtaccacaagattggagtgggcgccatgacctggagccccctggcctgtggcatcatcagcggcaagtatggaaatggagtgcctgagagcagccgggccagcctgaagtgctaccagtggctgaaggagcgcatcgtgtctgaggagggcaggaagcagcagaacaagctgaaggacctgagccccatcgccgagcggctgggctgcaccctgccccagctggccgtggcctggtgcctgagaaatgaaggagtgtcctctgtgctgctgggcagcagcaccccagagcagctgattgagaacctgggcgccatccaggtgctgcccaagatgaccagccacgtggtgaatgaaattgacaacatcctgaggaacaagccctacagcaagaaggactaccgctcctag

SEQ ID NO: 164953 - DNA, 1227 bp, synthetic construct
  misc_feature 1..1227: note = Description of Artificial Sequence: Synthetic coding sequence
  source 1..1227: mol_type = other DNA
atgcacctgtacaagccagcctgtgccgacatccccagccccaagctgggcctgcccaagagcagcgagagcgccctgaagtgccgctggcacctggccgtgaccaagacccagccccaggccgcctgcaagcctgtgcggcccagcggggctgctgagcagaagtatgtggagaagttcctgcgggtgcacggcatcagcctgcaggagaccaccagggctgagaccggcatggcctacagaaacctgggcaagagcggcctgcgggtgtcctgcctgggcctgggcacctgggtgacctttggaggccagatcagtgatgaggtggccgagcggctgatgaccatcgcctatgagagcggcgtgaacctgtttgacacagctgaggtgtatgctgctgggaaggccgaggtgatcctgggcagcatcatcaagaagaagggctggaggaggagcagcctggtgatcaccaccaagctgtactggggcggcaaggccgagacagagcggggcctgagcaggaagcacatcatcgagggcctgaagggcagcctgcagaggctgcagctggagtatgtggatgtggtgtttgccaacagaccagacagcaacacccccatggaggagatcgtgcgggccatgacccacgtgatcaaccagggcatggccatgtactggggcaccagccgctggagcgccatggagatcatggaggcctacagcgtggcccggcagttcaacatgatcccccctgtgtgtgagcaggccgagtaccacctgttccagcgggagaaggtggaggtgcagctgcctgagctgtaccacaagattggagtgggcgccatgacctggagccccctggcctgtggcatcatcagcggcaagtatggaaatggagtgcctgagagcagccgggccagcctgaagtgctaccagtggctgaaggagcgcatcgtgtctgaggagggcaggaagcagcagaacaagctgaaggacctgagccccatcgccgagcggctgggctgcaccctgccccagctggccgtggcctggtgcctgagaaatgaaggagtgtcctctgtgctgctgggcagcagcaccccagagcagctgattgagaacctgggcgccatccaggtgctgcccaagatgaccagccacgtggtgaatgaaattgacaacatcctgaggaacaagccctacagcaagaaggactaccgctcctag

SEQ ID NO: 164954 - DNA, 1260 bp, synthetic construct
  misc_feature 1..1260: note = Description of Artificial Sequence: Synthetic coding sequence
  source 1..1260: mol_type = other DNA
atgctggccgccaggactggagctgctggcagccagatcagcgaggagaacaccaagctgcggcggcagagcggcttctctgtggccggcaaggacaagagccccaagaaggcctctgaaaatgccaaggacagcagcctgagccccagcggggagagccagctgcgggcccggcagctggccctgctgcgggaggtggagatgaactggtacctgaagctgtgtgacctgagcagcgagcacaccaccgtgtgcaccaccggcatgccccacaggaacctgggcaagagcggcctgcgggtgtcctgcctgggcctgggcacctgggtgaccttcggcggccagatcagtgatgaggtggccgagcggctgatgaccatcgcctatgaaagtggagtgaacctgtttgacacagctgaggtgtatgctgctgggaaggccgaggtgatcctgggcagcatcatcaagaagaagggctggaggaggagcagcctggtgatcaccaccaagctgtactggggcggcaaggccgagacagagcggggcctgagcaggaagcacatcatcgagggcctgaagggcagcctgcagaggctgcagctggagtatgtggatgtggtgtttgccaacagaccagacagcaacacccccatggaggagatcgtgcgggccatgacccacgtgatcaaccagggcatggccatgtactggggcaccagccgctggagcgccatggagatcatggaggcctacagcgtggcccggcagttcaacatgatcccccctgtgtgtgagcaggccgagtaccacctgttccagcgggagaaggtggaggtgcagctgcctgagctgtaccacaagattggagtgggcgccatgacctggagccccctggcctgtggcatcatcagcggcaagtatggaaatggagtgcctgagagcagccgggccagcctgaagtgctaccagtggctgaaggagagaattgtgtctgaggagggcaggaagcagcagaacaagctgaaggacctgagccccatcgccgagcggctgggctgcaccctgccccagctggccgtggcctggtgcctgagaaatgaaggagtgtcctctgtgctgctgggcagcagcaccccagagcagctgattgagaacctgggcgccatccaggtgctgcccaagatgaccagccacgtggtgaatgaaattgacaacatcctgaggaacaagccctacagcaagaaggactaccgctcctag

SEQ ID NO: 164955 - DNA, 1104 bp, synthetic construct
  misc_feature 1..1104: note = Description of Artificial Sequence: Synthetic coding sequence
  source 1..1104: mol_type = other DNA
atgtacccagagagcaccaccggcagccctgcccggctgagcctgcggcagacaggcagccctggcatgatctacagcaccaggtatggcagccccaagaggcagctgcagttctacagaaacctgggcaagagcggcctgcgggtgtcctgcctgggcctgggcacctgggtgaccttcggcggccagatcacagatgagatggccgagcagctgatgaccctggcctatgacaatggcatcaacctgtttgacacagctgaggtgtatgctgctgggaaggccgaggtggtgctgggcaacatcatcaagaagaagggctggaggaggagcagcctggtgatcaccaccaagatcttctggggcggcaaggccgagacagagcggggcctgagcaggaagcacatcatcgagggcctgaaggccagcctggagcggctgcagctggagtatgtggatgtggtgtttgccaacagaccagaccccaacacccccatggaggagaccgtgcgggccatgacccacgtgatcaaccagggcatggccatgtactggggcaccagccgctggagctccatggagatcatggaggcctacagcgtggcccggcagttcaacctgaccccacccatctgtgagcaggccgagtaccacatgttccagcgggagaaggtggaggtgcagctgcctgagctgttccacaagattggagtgggcgccatgacctggagccccctggcctgtggcatcgtgtctgggaagtatgattctggcatccccccctacagccgggccagcctgaagggctaccagtggctgaaggacaagatcctgtctgaggagggccggcggcagcaggccaagctgaaggagctgcaggccatcgccgagcggctgggctgcaccctgccccagctggccatcgcctggtgcctgagaaatgaaggagtgtcctctgtgctgctgggcgccagcaatgctgaccagctgatggagaacatcggggccatccaggtgctgcccaagctgagcagcagcatcatccatgaaattgacagcatcctgggcaacaagccctacagcaagaaggactaccgctcctag

SEQ ID NO: 164956 - DNA, 1104 bp, synthetic construct; identical to SEQ ID NO: 164955
  misc_feature 1..1104: note = Description of Artificial Sequence: Synthetic coding sequence
  source 1..1104: mol_type = other DNA

SEQ ID NO: 164957 - DNA, 1062 bp, synthetic construct
  misc_feature 1..1062: note = Description of Artificial Sequence: Synthetic coding sequence
  source 1..1062: mol_type = other DNA
atgtacccagagagcaccaccggcagccctgcccggctgagcctgcggcagacaggcagccctggcatgatctacagaaacctgggcaagagcggcctgcgggtgtcctgcctgggcctgggcacctgggtgaccttcggcggccagatcacagatgagatggccgagcagctgatgaccctggcctatgacaatggcatcaacctgtttgacacagctgaggtgtatgctgctgggaaggccgaggtggtgctgggcaacatcatcaagaagaagggctggaggaggagcagcctggtgatcaccaccaagatcttctggggcggcaaggccgagacagagcggggcctgagcaggaagcacatcatcgagggcctgaaggccagcctggagcggctgcagctggagtatgtggatgtggtgtttgccaacagaccagaccccaacacccccatggaggagaccgtgcgggccatgacccacgtgatcaaccagggcatggccatgtactggggcaccagccgctggagctccatggagatcatggaggcctacagcgtggcccggcagttcaacctgaccccacccatctgtgagcaggccgagtaccacatgttccagcgggagaaggtggaggtgcagctgcctgagctgttccacaagattggagtgggcgccatgacctggagccccctggcctgtggcatcgtgtctgggaagtatgattctggcatccccccctacagccgggccagcctgaagggctaccagtggctgaaggacaagatcctgtctgaggagggccggcggcagcaggccaagctgaaggagctgcaggccatcgccgagcggctgggctgcaccctgccccagctggccatcgcctggtgcctgagaaatgaaggagtgtcctctgtgctgctgggcgccagcaatgctgaccagctgatggagaacatcggggccatccaggtgctgcccaagctgagcagcagcatcatccatgaaattgacagcatcctgggcaacaagccctacagcaagaaggactaccgctcctag

SEQ ID NO: 164958 - DNA, 1248 bp, synthetic construct
  misc_feature 1..1248: note = Description of Artificial Sequence: Synthetic coding sequence
  source 1..1248: mol_type = other DNA
atgctgtccatgacctacagcgagagcctgcggtctgtgagcagccgctgccacagcgagtgggccctgcaccctgtgcggcagacagacaccctggagctgcagaggctgcgggaggtgcgggctgctgcccaggccaggaacatggagagcttcctgaggatgcacggcctgagcctggatggctgcacagcccagaggacaggcatgaagtacagaaacctgggcaagagcggcctgcgggtgtcctgcctgggcctgggcacctgggtgacctttggaggccagatcacagatgagatggccgagcagctgatgaccctggcctatgacaatggcatcaacctgtttgacacagctgaggtgtatgctgctgggaaggccgaggtggtgctgggcaacatcatcaagaagaagggctggaggaggagcagcctggtgatcaccaccaagatcttctggggcggcaaggccgagacagagcggggcctgagcaggaagcacatcatcgagggcctgaaggccagcctggagcggctgcagctggagtatgtggatgtggtgtttgccaacagaccagaccccaacacccccatggagggggaccccttcagcagcagcaagagcaggaccttcatcatcgaggagaccgtgcgggccatgacccacgtgatcaaccagggcatggccatgtactggggcaccagccgctggagctccatggagatcatggaggcctacagcgtggcccggcagttcaacctgaccccacccatctgtgagcaggccgagtaccacatgttccagcgggagaaggtggaggtgcagctgcctgagctgttccacaagattggagtgggcgccatgacctggagccccctggcctgtggcatcgtgtctgggaagtatgattctggcatccccccctacagccgggccagcctgaagggctaccagtggctgaaggacaagatcctgtctgaggagggccggcggcagcaggccaagctgaaggagctgcaggccatcgccgagcggctgggctgcaccctgccccagctggccatcgcctggtgcctgagaaatgaaggagtgtcctctgtgctgctgggcgccagcaatgctgaccagctgatggagaacatcggggccatccaggtgctgcccaagctgagcagcagcatcatccatgaaattgacagcatcctgggcaacaagccctacagcaagaaggactaccgctcctag

SEQ ID NO: 164959 - DNA, 522 bp, synthetic construct
  misc_feature 1..522: note = Description of Artificial Sequence: Synthetic coding sequence
  source 1..522: mol_type = other DNA
atgtacccagagagcaccaccggcagccctgcccggctgagcctgcggcagacaggcagccctggcatgatctacagcaccaggtatggcagccccaagaggcagctgcagttctacagaaacctgggcaagagcggcctgcgggtgtcctgcctgggcctgggcacctgggtgaccttcggcggccagatcacagatgagatggccgagcagctgatgaccctggcctatgacaatggcatcaacctgtttgacacagctgaggtgtatgctgctgggaaggccgaggtggtgctgggcaacatcatcaagaagaagggctggagccagcagggcgagagagctggccaggcccgggtgaccccaccctgcagcctgggccggcgggccagagatgccagcaagtctgctggagctggctgccacctgcaggcccaggcctgtgtgcccagcagcacccaggccctgcagaccacccggggccgggcccccctgaagcccccaccacccctggccagctag

SEQ ID NO: 164960 - DNA, 1062 bp, synthetic construct; identical to SEQ ID NO: 164957
  misc_feature 1..1062: note = Description of Artificial Sequence: Synthetic coding sequence
  source 1..1062: mol_type = other DNA

SEQ ID NO: 164961 - DNA, 1104 bp, synthetic construct; identical to SEQ ID NO: 164955
  misc_feature 1..1104: note = Description of Artificial Sequence: Synthetic coding sequence
  source 1..1104: mol_type = other DNA

SEQ ID NO: 164962 - DNA, 522 bp, synthetic construct
  misc_feature 1..522: note = Description of Artificial Sequence: Synthetic coding sequence
  source 1..522: mol_type = other DNA
atgtacccagagagcaccaccggcagccctgcccggctgagcctgcggcagacaggcagccctggcatgatctacagcaccaggtatggcagccccaagaggcagctgcagttctacagaaacctgggcaagagcggcctgcgggtgtcctgcctgggcctgggcacctgggtgaccttcggcggccagatcacagatgagatggccgagcagctgatgaccctggcctatgacaatggcatcaacctgtttgacacagctgaggtgtatgctgctgggaaggccgaggtggtgctgggcaacatcatcaagaagaagggctggaggcagagaggagagagagctggccaggcccgggtgaccccaccctgcagcctgggccggcgggccagagatgccagcaagtctgctggagctggctgccacctgcaggcccaggcctgtgtgcccagcagcacccaggccctgcagaccacccggggccgggcccccctgaagcccccaccacccctggccagctag

SEQ ID NO: 164963 - DNA, 762 bp, synthetic construct
  misc_feature 1..762: note = Description of Artificial Sequence: Synthetic coding sequence
  source 1..762: mol_type = other DNA
atgtacccagagagcaccaccggcagccctgcccggctgagcctgcggcagacaggcagccctggcatgatctacagcaccaggtatggcagccccaagaggcagctgcagttctacagaaacctgggcaagagcggcctgcgggtgtcctgcctgggcctgggcacctgggtgaccttcggcggccagatcacagatgagatggccgagcagctgatgaccctggcctatgacaatggcatcaacctgtttgacacagctgaggtgtatgctgctgggaaggccgaggtggtgctgggcaacatcatcaagaagaagggctggaggaggagcagcctggtgatcaccaccaagatcttctggggcggcaaggccgagacagagcggggcctgagcaggaagcacatcatcgagggcctgaaggccagcctggagcggctgcagctggagtatgtggatgtggtgtttgccaacagaccagaccccaacacccccatggaggagaccgtgcgggccatgacccacgtgatcaaccagggcatggccatgtactggggcaccagccgctggagctccatggagatcatggaggcctacagcgtggcccggcagttcaacctgaccccacccatctgtgagcaggccgagtaccacatgttccagcgggagaaggtggaggtgcagctgcctgagctgttccacaagattggagtgggcgccatgacctggagccccctggcctgtggcatcgtgtctggatag

SEQ ID NO: 164964 - DNA, 765 bp, synthetic construct
  misc_feature 1..765: note = Description of Artificial Sequence: Synthetic coding sequence
  source 1..765: mol_type = other DNA
atgtacccagagagcaccaccggcagccctgcccggctgagcctgcggcagacaggcagccctggcatgatctacagaaacctgggcaagagcggcctgcgggtgtcctgcctgggcctgggcacctgggtgaccttcggcggccagatcacagatgagatggccgagcagctgatgaccctggcctatgacaatggcatcaacctgtttgacacagctgaggtgtatgctgctgggaaggccgaggtggtgctgggcaacatcatcaagaagaagggctggaggaggagcagcctggtgatcaccaccaagatcttctggggcggcaaggccgagacagagcggggcctgagcaggaagcacatcatcgagggcctgaaggccagcctggagcggctgcagctggagtatgtggatgtggtgtttgccaacagaccagaccccaacacccccatggaggagaccgtgcgggccatgacccacgtgatcaaccagggcatggccatgtactggggcaccagccgctggagctccatggagatcatggaggcctacagcgtggcccggcagttcaacctgaccccacccatctgtgagcaggccgagtaccacatgttccagcgggagaaggtggaggtgcagctgcctgagctgttccacaagattggagtgggcgccatgacctggagccccctggcctgtggcatcgtgtctgggaagtatgattctggcatccccccctacagccgggccagcctgaagtag

SEQ ID NO: 164965 - DNA, 288 bp, synthetic construct
  misc_feature 1..288: note = Description of Artificial Sequence: Synthetic coding sequence
  source 1..288: mol_type = other DNA
atgtacccagagagcaccaccggcagccctgcccggctgagcctgcggcagacaggcagccctggcatgatctacagaaacctgggcaagagcggcctgcgggtgtcctgcctgggcctgggcacctgggtgaccttcggcggccagatcacagatgagatggccgagcagctgatgaccctggcctatgacaatggcatcaacctgtttgacacagctgaggtgtatgctgctgggaaggccgaggtggtgctgggcaacatcatcaagaagaagggctggaggtag

SEQ ID NO: 164966 - DNA, 159 bp, synthetic construct
  misc_feature 1..159: note = Description of Artificial Sequence: Synthetic coding sequence
  source 1..159: mol_type = other DNA
atgtacccagagagcaccaccggcagccctgcccggctgagcctgcggcagacaggcagccctggcatgatctacagcaccaggtatggcagccccaagaggcagctgcagttctacagaaacctgggcaagagcggcctgcgggtgtcctgcctgtag

SEQ ID NO: 164967 - DNA, 903 bp, synthetic construct
  misc_feature 1..903: note = Description of Artificial Sequence: Synthetic coding sequence
  source 1..903: mol_type = other DNA
atggccgagcagctgatgaccctggcctatgacaatggcatcaacctgtttgacacagctgaggtgtatgctgctgggaaggccgaggtggtgctgggcaacatcatcaagaagaagggctggaggaggagcagcctggtgatcaccaccaagatcttctggggcggcaaggccgagacagagcggggcctgagcaggaagcacatcatcgagggcctgaaggccagcctggagcggctgcagctggagtatgtggatgtggtgtttgccaacagaccagaccccaacacccccatggaggagaccgtgcgggccatgacccacgtgatcaaccagggcatggccatgtactggggcaccagccgctggagctccatggagatcatggaggcctacagcgtggcccggcagttcaacctgaccccacccatctgtgagcaggccgagtaccacatgttccagcgggagaaggtggaggtgcagctgcctgagctgttccacaagattggagtgggcgccatgacctggagccccctggcctgtggcatcgtgtctgggaagtatgacagcggcatccccccctacagccgggccagcctgaagggctaccagtggctgaaggacaagatcctgtctgaggagggccggcggcagcaggccaagctgaaggagctgcaggccatcgccgagcggctgggctgcaccctgccccagctggccatcgcctggtgcctgagaaatgaaggagtgtcctctgtgctgctgggcgccagcaatgctgaccagctgatggagaacattggagccatccaggtgctgcccaagctgagcagcagcatcatccacgagattgacagcatcctgggcaacaagccctacagcaagaaggactaccgctcctag

SEQ ID NO: 164968 - DNA, 1215 bp, synthetic construct
  misc_feature 1..1215: note = Description of Artificial Sequence: Synthetic coding sequence
  source 1..1215: mol_type = other DNA
atgcaggtgtccatcgcctgcacagagcagaacctgcggagccgcagcagcgaggaccggctgtgtggcccccggcccggccctgggggcggcaatggaggccctgctgggggcggccacggcaaccccccaggcggcggcggcagcggccccaaggcccgggccgccctggtgccccggcccccagccccagctggggccctgcgggagagcacaggccggggcaccggcatgaagtacagaaacctgggcaagagcggcctgcgggtgtcctgcctgggcctgggcacctgggtgaccttcggcagccagatcagtgatgaaacagcagaagatgtgctgactgtggcctatgagcacggcgtgaacctgtttgacacagctgaggtgtatgctgctgggaaggccgagaggaccctgggcaacatcctgaagagcaagggctggaggaggagcagctatgtgatcaccaccaagatcttctggggcggccaggccgagacagagcggggcctgagcaggaagcacatcatcgagggcctgcggggcagcctggagcggctgcagctgggctacgtggacatcgtgtttgccaacagaagtgaccccaactgccccatggaggagatcgtgcgggccatgacctacgtgatcaaccagggcctggccctgtactggggcaccagccgctggggcgctgctgagatcatggaggcctacagcatggcccggcagttcaacctgatcccccctgtgtgtgagcaggccgagcaccacctgttccagcgggagaaggtggagatgcagctgcctgagctgtaccacaagattggagtgggctctgtgacctggtaccccctggcctgtggcctcatcaccagcaaatatgatggccgggtgcctgacacctgccgggccagcatcaagggctaccagtggctgaaggacaaggtgcagagtgaagatggcaagaagcagcaggccaaggtgatggacctgctgcctgtggcccaccagctgggctgcaccgtggcccagctggccatcgcctggtgcctgcggagtgaaggagtgtcctctgtgctgctgggcgtgtcctctgctgagcagctgattgagcacctgggcgccctgcaggtgctgagccagctgaccccccagacagtgatggagattgatggcctgctgggcaacaagccccacagcaagaagtag

SEQ ID NO: 164969 - DNA, 2562 bp, synthetic construct
  misc_feature 1..2562: note = Description of Artificial Sequence: Synthetic coding sequence
  source 1..2562: mol_type = other DNA
atgtctgagaaggtggactggctgcagagccagaatggagtgtgcaaggtggatgtgtacagccctggggacaaccaggcccaggactggaagatggacaccagcacagatcctgtgcgggtgctgtcctggctgcggcgggacctggagaagagcacagctgagttccaggatgtgcgcttcaagccaggagagagctttggaggagagaccagcaacagcggggacccccacaagggcttctctgtggactactacaacaccaccaccaagggcaccccagagcggctgcactttgagatgacccacaaggagatcccctgccagggcccccgggcccagctgggcaatggcagctctgtggatgaggtgtccttctacgccaaccggctgaccaacctggtgattgccatggccaggaaggagatcaatgagaagattgatggctctgaaaataaatgtgtgtaccagagcctgtacatgggaaatgagcccacccccaccaagagcctgagcaagatcgccagcgagctggtgaatgagaccgtgtctgcctgcagcagaaatgctgccccagacaaggcccctggcagcggggacagagtgtctggcagcagccagagcccccccaacctgaagtacaagagcaccctgaagatcaaggagagcaccaaggagcggcagggcccagatgacaagccacccagcaagaagagcttcttctacaaggaggtgtttgagagcagaaatggagactatgcccgggagggcggccgcttcttcccccgggagaggaagcgcttccggggccaggagaggccagatgacttcaccgcctctgtgtctgagggcatcatgacctacgccaacagcgtggtgtctgacatgatggtgtccatcatgaagaccctgaagatccaggtgaaggacaccaccatcgccaccatcctgctgaagaaggtgctgctgaagcacgccaaggaggtggtgtctgacctgattgacagcttcctgaggaacctgcacagcgtgacaggcaccctgatgacagacacccagtttgtgtctgctgtgaagaggacagtgttcagccacggcagccagaaggccacagacatcatggatgccatgctgaggaagctgtacaacgtgatgtttgccaagaaggtgcctgagcacgtgaggaaggcccaggacaaggccgagagctacagcctcatctccatgaagggcatgggagaccccaagaacagaaatgtgaactttgccatgaagtctgagaccaagctgcgggagaagatgtacagcgagcccaagtctgaggaggagacctgtgccaagaccctgggggagcacatcatcaaggagggcctgaccctgtggcacaagacccagcagaaggagtgcaagagcctgggcttccagcacgccgcctttgaggcccccaacacccagaggaagccagccagtgacatcagctttgagtacccagaggacatcggcaacctgagcctgcccccctacccacctgagaagccagagaacttcatgtatgacagcgacagctgggccgaggacctgattgtgtctgccctgctgctgatccagtaccacctggcccagggcggcagaagagatgcccggagctttgtggaggccgccggcaccaccaacttccctgccaatgagccccctgtggccccagatgagagctgcctgaagagcgcccccatcgtgggggaccaggagcaggccgagaagaaggacctgcggagcgtcttcttcaacttcatccggaacctgctgtctgagaccatcttcaagagggaccagagccctgagcccaaggtgcctgagcagcctgtgaaggaggacaggaagctgtgtgagcggcccctggccagcagccccccccggctgtatgaagatgatgagacccctggggccctgagcggcctgaccaagatggctgtgtcccagattgatggccacatgagcggccagatggtggagcacctgatgaacagcgtgatgaagctgtgtgtgatcatcgccaagagctgtgatgccagcctggccgagctgggagatgacaagtctggagatgccagccggctgaccagcgccttcccagacagcctgtatgagtgcctgcctgccaagggcactggatctgctgaggccgtgctgcagaatgcctaccaggccatccacaatgagatgaggggcaccagcggccagcccccagagggctgtgccgcccccaccgtcatcgtgagcaaccacaacctgacagacacagtgcagaacaagcagctgcaggccgtgctgcagtgggtggccgccagcgagctgaatgtgcccatcctgtactttgctggagatgatgagggcatccaggagaagctgctgcagctgtctgctgctgctgtggacaagggctgcagcgtgggggaggtgctgcagagcgtgctgcgctatgagaaggagcggcagctgaatgaggccgtgggcaatgtgacccccctgcagctgctggactggctgatggtgaacctgtag

SEQ ID NO: 164970 - DNA, 1488 bp, synthetic construct
  misc_feature 1..1488: note = Description of Artificial Sequence: Synthetic coding sequence
  source 1..1488: mol_type = other DNA
atgacagtgatgtctggagaaaatgtggatgaggccagcgctgcccctggccacccccaggacggcagctacccccggcaggccgaccatgatgaccacgagtgctgtgagcgggtggtgatcaacatcagcggcctgcgctttgagacccagctgaagaccctggcccagttccccaacaccctgctgggcaaccccaagaagaggatgagatactttgaccccctgagaaatgagtacttctttgacaggaaccggcccagctttgatgccatcctgtactactaccagagcggcggccgcctgcggcggcctgtgaatgtgcccctggacatgttcagcgaggagatcaagttctatgagctgggggaggaggccatggagaagttccgggaggatgagggcttcatcaaggaggaggagcggcccctgcctgagaaggagtaccagaggcaggtgtggctgctgtttgagtacccagagagcagcggccctgcccgggtgattgccatcgtgtctgtgatggtgatcctgatcagcatcgtcatcttctgcctggagaccctgcctgagctgaaggatgacaaggacttcaccggcaccgtgcacagaattgacaacaccaccgtcatctacaacagcaacatcttcacagaccccttcttcatcgtggagaccctgtgcatcatctggttctcctttgagctggtggtgcgcttctttgcctgccccagcaagacagacttcttcaagaacatcatgaacttcattgatattgtggccatcatcccctacttcatcaccctgggcacagaaattgctgagcaggagggcaaccagaagggggagcaggccaccagcctggccatcctgcgggtcatccggctggtgcgggtcttccgcatcttcaagctgagccgccacagcaagggcctgcagatcctgggccagaccctgaaggcctccatgagggagctgggcctgctgatcttcttcctgttcatcggggtcatcctcttcagcagcgctgtgtactttgctgaggccgaggaggccgagagccacttcagcagcatcccagatgccttctggtgggccgtggtgtccatgaccaccgtgggctatggagacatgtaccctgtgaccatcggcggcaagatcgtgggcagcctgtgtgccatcgccggcgtgctgaccatcgccctgcctgtgcctgtgattgtgagcaacttcaactacttctaccaccgggagacagaaggagaggagcaggcccagctgctgcacgtgagcagccccaacctggccagtgacagcgacctgagcagaagaagcagcagcaccatgagcaagtctgagtacatggagattgaggaggacatgaacaacagcatcgcccactaccggcaggtgaacatcagaacagccaactgcaccacagccaaccagaactgtgtgaacaagagcaagctgctgacagatgtgtag

SEQ ID NO: 164971 - DNA, 1536 bp, synthetic construct
  misc_feature 1..1536: note = Description of Artificial Sequence: Synthetic coding sequence
  source 1..1536: mol_type = other DNA
atggatgtgtgtggctggaaggagatggaggtggccctggtgaactttgacaacagtgatgagatccaggaggagcccggctacgccacagactttgacagcaccagccccaagggccggcctgggggcagcagcttcagcaatggcaagatcctgatcagcgagagcaccaaccatgaaacagccttcagcaagctgcccggggactatgctgaccccccaggccctgagcctgtggtgctgaatgaaggcaaccagagggtcatcatcaacattgctggcctgcgctttgagacccagctgcggaccctgagccagtttcctgagaccctgctgggggaccgggagaagaggatgcagttctttgacagcatgagaaatgagtacttctttgacaggaaccggcccagctttgatggcatcctgtactactaccagagcggcggcaagatccggcggcctgccaacgtgcccatcgacatctttgctgatgagatctccttctatgagctgggcagcgaggccatggaccagttcagagaagatgagggcttcatcaaggaccctgagaccctgctgcccaccaatgacatccaccggcagttctggctgctgtttgagtacccagagagcagcagcgctgcccgggctgtggccgtggtgtctgtgctggtggtggtgatcagcatcaccatcttctgcctggagaccctgcctgagttcagagaagatcgggagctgaaggtggtgcgggaccccaacctgaacatgagcaagacagtgctgagccagaccatgttcacagaccccttcttcatggtggagagcacctgcatcgtgtggttcacctttgagctggtgctgcgctttgtggtgtgccccagcaagacagacttcttcaggaacatcatgaacatcatcgacatcatcagcatcatcccctactttgccaccctcatcacagagctggtgcaggagacagagcccagcgcccagcagaacatgagcctggccatcctgcgcatcatccggctggtgcgggtcttccgcatcttcaagctgagccgccacagcaagggcctgcagatcctgggccagaccctgaaggcctccatgagggagctgggcctgctgatcttcttcctgttcatcggggtcatcctcttcagcagcgctgtgtactttgctgaggtggatgagcctgagagccacttcagcagcatcccagatggcttctggtgggccgtggtgaccatgaccaccgtgggctacggggacatgtgccccaccacccctgggggcaagatcgtgggcaccctgtgtgccatcgccggcgtgctgaccatcgccctgcctgtgcctgtgattgtgagcaacttcaactacttctaccaccgggagacagaaaatgaggagaagcagaacatccctggagaaattgaaagaatcctgaacagcgtgggcagcaggatgggcagcacagacagcctgaacaagaccaatggaggctgcagcacagagaagagcaggaagtag

SEQ ID NO: 164972 - DNA, 1728 bp, synthetic construct
  misc_feature 1..1728: note = Description of Artificial Sequence: Synthetic coding sequence
  source 1..1728: mol_type = other DNA
atggatgagcggctgagcctgctgcggagccccccacctccttctgcccggcaccgggcccaccccccccagaggcctgccagcagtggaggagcccacaccctggtgaaccacggctatgcagagcctgctgctggccgggagctgcccccagacatgacagtggtgcctggggaccacctgctggagcctgaggtggctgatggcggcggggccccaccccagggcggctgcggcggcggcggctgtgacagatatgagcccctgccccccagcctgcctgctgctggggagcaggactgctgcggggagcgggtggtgatcaacatcagcggcctgcgctttgagacccagctgaagaccctgtgccagtttcctgagaccctgctgggggaccccaagaggaggatgagatactttgaccccctgagaaatgagtacttctttgacaggaaccggcccagctttgatgccatcctgtactactaccagagcggcggccgcatccggcggcctgtgaatgtgcccatcgacatcttcagcgaggagatccgcttctaccagctgggggaggaggccatggagaagttcagagaagatgagggcttcctgcgggaggaggagcggcccctgccccggcgggacttccagaggcaggtgtggctgctgtttgagtacccagagagcagcggccctgcccggggcatcgccatcgtgtctgtgctggtgatcctgatcagcatcgtcatcttctgcctggagaccctgcctgagttcagagatgagaaggactacccagccagcaccagccaggacagctttgaggccgccggcaacagcaccagcggcagccgggccggggccagcagcttcagtgaccccttctttgtggtggagaccctgtgcatcatctggttctcctttgagctgctggtgcgcttctttgcctgccccagcaaggccaccttcagcaggaacatcatgaacctgattgatattgtggccatcatcccctacttcatcaccctgggcacagagctggccgagcggcagggcaatggccagcaggccatgagcctggccatcctgcgggtcatccggctggtgcgggtcttccgcatcttcaagctgagccgccacagcaagggcctgcagatcctgggccagaccctgaaggcctccatgagggagctgggcctgctgatcttcttcctgttcatcggggtcatcctcttcagcagcgctgtgtactttgctgaggctgatgaccccaccagcggcttcagcagcatcccagatgccttctggtgggccgtggtgaccatgaccaccgtgggctatggagacatgcaccctgtgaccatcggcggcaagatcgtgggcagcctgtgtgccatcgccggcgtgctgaccatcgccctgcctgtgcctgtgattgtgagcaacttcaactacttctaccaccgggagacagaaggagaggagcagagccagtacatgcacgtgggcagctgccagcacctgagcagcagcgctgaggagctgaggaaggcccggagcaacagcaccctgagcaagtctgagtacatggtgattgaggagggcggcatgaaccacagcgccttcccccagacccccttcaagacaggcaacagcacagccacctgcaccaccaacaacaaccccaacagctgtgtgaacatcaagaagatcttcacagatgtgtag

SEQ ID NO: 164973 - DNA, 1962 bp, synthetic construct
  misc_feature 1..1962: note = Description of Artificial Sequence: Synthetic coding sequence
  source 1..1962: mol_type = other DNA
atggaggtggccatggtgtctgctgagagcagcggctgcaacagccacatgccctacggctacgccgcccaggcccgggcccgggagcgggagcggctggcccacagcagagctgctgctgctgctgctgtggccgccgccacagctgctgtggagggcagcggcggcagcggcggcggcagccaccaccaccaccagagcagaggagcctgcaccagccatgacccccagagcagccggggcagcagaagaagaagacggcagaggtctgagaagaagaaggcccactaccggcagagcagcttcccccactgcagcgacctgatgcccagcggcagcgaggagaagatcctgcgggagctgtctgaggaggaggaggatgaggaggaggaggaggaggaggaggaggagggccgcttctactacagtgaagatgaccatggagatgagtgcagctacacagacctgctgccccaggatgagggcggcggcggctacagctctgtgcgctacagcgactgctgtgagcgggtggtgatcaacgtgtctggcctgcgctttgagacccagatgaagaccctggcccagtttcctgagaccctgctgggggaccctgagaagaggacccagtactttgaccccctgagaaatgagtacttctttgacaggaaccggcccagctttgatgccatcctgtactactaccagagcggcggccgcctgaagaggcctgtgaatgtgccctttgacatcttcacagaggaggtgaagttctaccagctgggggaggaggccctgctgaagttcagagaagatgagggctttgtgcgggaggaggaggaccgggccctgcctgaaaatgagttcaagaagcagatctggctgctgtttgagtacccagagagcagcagccctgcccggggcatcgccatcgtgtctgtgctggtgatcctgatcagcatcgtcatcttctgcctggagaccctgcctgagttcagagatgaccgggacctggtgatggccctgtctgctgggggccatggaggcctgctgaatgacaccagcgccccccacctggagaacagcggccacaccatcttcaatgaccccttcttcatcgtggagaccgtgtgcatcgtgtggttctcctttgaatttgtggtgcgctgctttgcctgccccagccaggccctcttcttcaagaacatcatgaacatcattgatattgtgtccatcctgccctacttcatcaccctgggcacagacctggcccagcagcagggcggcggcaatggccagcagcagcaggccatgagctttgccatcctgcgcatcatccggctggtgcgggtcttccgcatcttcaagctgagccgccacagcaagggcctgcagatcctgggccacaccctgcgggcctccatgagggagctgggcctgctgatcttcttcctgttcatcggggtcatcctcttcagcagcgctgtgtactttgctgaggctgatgagcccaccacccacttccagagcatcccagatgccttctggtgggccgtggtgaccatgaccaccgtgggctatggagacatgaagcccatcaccgtgggcggcaagatcgtgggcagcctgtgtgccatcgccggcgtgctgaccatcgccctgcctgtgcctgtgattgtgagcaacttcaactacttctaccaccgggagacagaaaatgaggagcagacccagctgacccagaatgctgtgtcctgcccctacctgcccagcaacctgctgaagaagttccgcagcagcaccagcagcagcctgggggacaagtctgagtacctggagatggaggagggcgtgaaggagagcctgtgtgccaaggaggagaagtgccagggcaaaggagatgacagcgagacagacaagaacaactgcagcaatgccaaggctgtggagacagatgtgtag

SEQ ID NO: 164974 - DNA, 1842 bp, synthetic construct
  misc_feature 1..1842: note = Description of Artificial Sequence: Synthetic coding sequence
  source 1..1842: mol_type = other DNA
atggagatcgccctggtgcccctggagaatggaggagccatgacagtgagaggaggagatgaggcccgggccggctgcggccaggccaccggcggggagctgcagtgccccccaacagctggcctgagtgatggccccaaggagcccgcccccaagggccgcggggcccagagagatgctgacagcggcgtgcggcccctgccccccctgcctgaccccggggtgcggcccctgccccccctgcctgaggagctgccccggcccaggaggcctcctccagaagatgaggaggaggagggggaccccggcctgggcaccgtggaggaccaggccctgggcacagccagcctgcaccaccagagggtgcacatcaacatcagcggcctgcgctttgagacccagctgggcaccctggcccagttccccaacaccctgctgggggaccctgccaagaggctgcgctactttgaccccctgagaaatgagtacttctttgacaggaaccggcccagctttgatggcatcctgtactactaccagagcggcggccgcctgcggcggcctgtgaatgtgtccctggatgtgtttgctgatgagatccgcttctaccagctgggagatgaggccatggagcgcttcagagaagatgagggcttcatcaaggaggaggagaagcccctgcccagaaatgagttccagaggcaggtgtggctgatctttgagtacccagagagcagcggcagcgcccgggccatcgccatcgtgtctgtgctggtgatcctgatcagcatcatcaccttctgcctggagaccctgcctgagttcagagatgagcgggagctgctgcggcaccccccagccccccaccagcccccagccccagcccctggggccaatggaagtggagtgatggccccacccagcggccccaccgtggcccccctgctgcccaggaccctggccgaccccttcttcatcgtggagaccacctgtgtgatctggttcacctttgagctgctggtgcgcttctttgcctgccccagcaaggccggcttcagcaggaacatcatgaacatcattgatgtggtggccatcttcccctacttcatcaccctgggcacagagctggccgagcagcagcccggcggcggcggcggcggccagaatggccagcaggccatgagcctggccatcctgcgggtcatccggctggtgcgggtcttccgcatcttcaagctgagccgccacagcaagggcctgcagatcctgggcaagaccctgcaggcctccatgagggagctgggcctgctgatcttcttcctgttcatcggggtcatcctcttcagcagcgctgtgtactttgctgaggccgacaaccagggcacccacttcagcagcatcccagatgccttctggtgggccgtggtgaccatgaccaccgtgggctatggagacatgaggcccatcaccgtgggcggcaagatcgtgggcagcctgtgtgccatcgccggcgtgctgaccatcgccctgcctgtgcctgtgattgtgagcaacttcaactacttctaccaccgggagacagaccacgaggagcctgctgtgctgaaggaggagcagggcacccagagccagggccctggcctggacagaggagtgcagaggaaggtgtctggcagccggggcagcttctgcaaggccggcggcaccctggagaatgctgacagcgcccggcggggcagctgccccctggagaagtgcaatgtgaaggccaagagcaatgtggacctgcggcgcagcctgtatgccctgtgcctggacaccagccgggagacagacctgtag

SEQ ID NO: 164975 - DNA, 1557 bp, synthetic construct
  misc_feature 1..1557: note = Description of Artificial Sequence: Synthetic coding sequence
  source 1..1557: mol_type = other DNA
atggccgcctccatggcccggcggctgtggcccctgctgacccggcggggcttccggccccggggcggctgcatcagcaatgacagccccaggaggagcttcaccacagagaagaggaacagaaacctgctgtatgaatatgcccgggagggctacagcgccctgccccagctggacatcgagcgcttctgtgcctgcccagaggaggccgcccacgccctggagctgaggaagggggagctgcggtctgctgacctgcctgccatcatcagcacctggcaggagctgcggcagctgcaggagcagatccgcagcctggaggaggagaaggctgctgtgacagaggccgtgcgggccctgctggccaaccaggacagcggggaggtgcagcaggaccccaagtaccagggcctgcgggcccggggccgggagatcaggaaggagctggtgcacctgtacccccgggaggcccagctggaggagcagttctacctgcaggccctgaagctgcccaaccagacccacccagatgtgcctgtgggagatgagagccaggcccgggtgctgcacatggtgggggacaagcctgtgttctccttccagccccggggccacctggagatcggggagaagctggacatcatccggcagaagaggctgagccacgtgtctggccacaggagctactacctgcggggggccggggccctgctgcagcacggcctggtgaacttcaccttcaacaagctgctgcggcggggcttcacccccatgacagtgcctgacctgctgcggggagctgtgtttgagggctgcggcatgaccccaaatgccaaccccagccagatctacaacatcgaccctgcccgcttcaaggacctgaacctggccggcacagctgaggtgggcctggccggctacttcatggaccacacagtggccttccgggacctgcctgtgaggatggtgtgcagcagcacctgctacagagctgagaccaacacaggccaggagccccggggcctgtacagagtgcaccacttcaccaaggtggagatgtttggagtgactggacctggcctggagcagagcagccagctgctggaggagttcctgagcctgcagatggagatcctgacagagctgggcctgcacttccgggtgctggacatgcccacccaggagctgggcctgcctgcctacaggaagtttgacatcgaggcctggatgcctggccggggccgctttggagaggtgaccagcgccagcaactgcacagacttccagagccggcggctgcacatcatgttccagacagaagctggggagctgcagtttgcccacacagtgaatgccacagcctgtgctgtgccccggctgctgattgccctgctggagagcaaccagcagaaggatggctctgtgctggtgcccccagccctgcagagctacctgggcacagaccgcatcacagcccccacccacgtgcccctgcagtacatcggccccaaccagcccaggaagccaggcctgcccggccagcctgctgtgtcctag

SEQ ID NO: 164976 - DNA, 1893 bp, synthetic construct
  misc_feature 1..1893: note = Description of Artificial Sequence: Synthetic coding sequence
  source 1..1893: mol_type = other DNA
atggctgctggggtggccgcctggctgccctttgcccgggctgctgccatcggctggatgcctgtggccagcggccccatgcctgccccaccccggcaggagaggaagaggacccaggatgccctgattgtgctgaatgtgtctggcacccgcttccagacctggcaggacaccctggagcgctacccagacaccctgctgggcagcagcgagcgggacttcttctaccaccctgagacccagcagtacttctttgaccgggaccctgacatcttccgccacatcctgaacttctacagaacaggcaagctgcactaccccaggcatgagtgcatcagcgcctatgatgaggagctggccttcttcggcctcatccctgagatcattggagactgctgctatgaggagtacaaggacagaagaagagaaaatgctgagcggctgcaggatgatgctgacacagacacagctggggagagcgccctgcccaccatgacagcccggcagagggtgtggagggcctttgagaacccccacaccagcaccatggccctggtgttctactacgtgacaggcttcttcatcgctgtgtctgtcatcgccaacgtggtggagaccgtgccctgtggcagcagccctggccacatcaaggagctgccctgtggggagagatatgctgtggccttcttctgcctggacacagcctgtgtgatgatcttcaccgtggagtacctgctgcggctggccgccgcccccagccgctacagatttgtgcgctctgtgatgagcatcattgatgtggtggccatcctgccctactacatcggcctggtgatgacagacaatgaagatgtgtctggggcctttgtgaccctgcgggtcttccgggtcttccgcatcttcaagttcagccgccacagccagggcctgcgcatcctgggctacaccctgaagagctgtgccagcgagctgggcttcctgctcttcagcctgaccatggccatcatcatctttgccaccgtgatgttttatgcagagaagggcagcagcgccagcaagttcaccagcatcccagctgccttctggtacaccatcgtgaccatgaccaccctgggctatggagacatggtgcccaagaccatcgccggcaagatcttcggcagcatctgcagcctgtctggagtgctggtgattgccctgcctgtgcctgtgattgtgagcaacttcagccgcatctaccaccagaaccagagagctgacaagaggcgggcccagaagaaggcccggctggcccgcatccgggccgccaagagcggcagcgccaatgcctacatgcagagcaagagaaatggcctgctgagcaaccagctgcagagcagtgaagatgagcaggcctttgtgtccaagagcggcagcagctttgagacccagcaccaccacctgctgcactgcctggagaagaccaccaaccatgaatttgtggatgagcaggtgtttgaggagagctgcatggaggtggccaccgtgaaccggcccagcagccacagccccagcctgagcagccagcagggcgtgaccagcacctgctgcagccgccgccacaagaagaccttccgcatccccaatgccaacgtgtctggcagccaccagggcagcatccaggagctgagcaccatccagatccgctgtgtggagaggacccccctgagcaacagccgcagcagcctgaatgccaagatggaggagtgtgtgaagctgaactgtgagcagccctacgtgaccacagccatcatcagcatccccaccccacctgtgaccaccccagaaggagatgacaggcctgagagccctgagtacagcggcggcaacatcgtgcgggtgtctgccctgtag

SEQ ID NO: 164977 - DNA, 1911 bp, synthetic construct
  misc_feature 1..1911: note = Description of Artificial Sequence: Synthetic coding sequence
  source 1..1911: mol_type = other DNA
atggctgctggggtggccgcctggctgccctttgcccgggctgctgccatcggctggatgcctgtggccaactgccccatgcccctggccccagctgacaagaacaagaggcaggatgagctgattgtgctgaatgtgtctggaagacgcttccagacctggaggaccaccctggagcgctacccagacaccctgctgggcagcacagagaaggagttcttcttcaatgaagacaccaaggagtacttctttgaccgggaccctgaggtgttccgctgtgtgctgaacttctacagaacaggcaagctgcactaccccaggtatgagtgcatcagcgcctatgatgatgagctggccttctacggcatcctgcctgagatcatcggggactgctgctatgaggagtacaaggacaggaagcgggagaatgctgagcggctgatggatgacaatgattctgagaacaaccaggagagcatgcccagcctgtccttccggcagaccatgtggagggcctttgagaacccccacaccagcaccctggccctggtgttctactacgtgacaggcttcttcatcgctgtgtctgtcatcaccaacgtggtggagaccgtgccctgtggcaccgtgcccggcagcaaggagctgccctgtggggagcgctacagcgtggccttcttctgcctggacacagcctgtgtgatgatcttcaccgtggagtacctgctgcggctgtttgctgcccccagccgctaccgcttcatccgctctgtgatgagcatcattgatgtggtggccatcatgccctactacatcggcctggtgatgaccaacaatgaagatgtgtctggggcctttgtgaccctgcgggtcttccgggtcttccgcatcttcaagttcagccgccacagccagggcctgcgcatcctgggctacaccctgaagagctgtgccagcgagctgggcttcctgctcttcagcctgaccatggccatcatcatctttgccaccgtgatgttttatgcagagaagggcagcagcgccagcaagttcaccagcatcccagccagcttctggtacaccatcgtgaccatgaccaccctgggctacggggacatggtgcccaagaccatcgccggcaagatcttcggcagcatctgcagcctgagcggcgtgctggtgattgccctgcctgtgcctgtgattgtgagcaacttcagccgcatctaccaccagaaccagagagctgacaagagaagagcccagaagaaggcccggctggcccgcatccgggtggccaagacaggcagcagcaatgcctacctgcacagcaagagaaatggcctgctgaatgaggccctggagctgaccggcaccccagaggaggagcacatgggcaagaccaccagcctcatcgagagccagcaccaccacctgctgcactgcctggagaagaccaccaaccacgagttcattgatgagcagatgtttgagcagaactgcatggagagctccatgcagaactaccccagcaccaggagccccagcctgagcagccaccctggcctgaccaccacctgctgcagccgccgcagcaagaagaccacccacctgcccaacagcaacctgcctgccacccggctgcgctccatgcaggagctgagcaccatccacatccagggcagcgagcagcccagcctgaccaccagccgcagcagcctgaacctgaaggcagatgatggcctgcggcccaactgcaagaccagccagatcaccacagccatcatcagcatccccaccccaccagccctgaccccagagggggagagccggcccccaccagccagccctggccccaacaccaacatccccagcatcgccagcaatgtggtgaaggtgtctgccctgtag

SEQ ID NO: 164978 - DNA, 1968 bp, synthetic construct
  misc_feature 1..1968: note = Description of Artificial Sequence: Synthetic coding sequence
  source 1..1968: mol_type = other DNA
atggctgctggggtggccgcctggctgccctttgcccgggctgctgccatcggctggatgcctgtggccaactgccccatgcccctggccccagctgacaagaacaagaggcaggatgagctgattgtgctgaatgtgtctggaagacgcttccagacctggaggaccaccctggagcgctacccagacaccctgctgggcagcacagagaaggagttcttcttcaatgaagacaccaaggagtacttctttgaccgggaccctgaggtgttccgctgtgtgctgaacttctacagaacaggcaagctgcactaccccaggtatgagtgcatcagcgcctatgatgatgagctggccttctacggcatcctgcctgagatcatcggggactgctgctatgaggagtacaaggacaggaagcgggagaatgctgagcggctgatggatgacaatgattctgagaacaaccaggagagcatgcccagcctgtccttccggcagaccatgtggagggcctttgagaacccccacaccagcaccctggccctggtgttctactacgtgacaggcttcttcatcgctgtgtctgtcatcaccaacgtggtggagaccgtgccctgtggcaccgtgcccggcagcaaggagctgccctgtggggagcgctacagcgtggccttcttctgcctggacacagcctgtgtgatgatcttcaccgtggagtacctgctgcggctgtttgctgcccccagccgctaccgcttcatccgctctgtgatgagcatcattgatgtggtggccatcatgccctactacatcggcctggtgatgaccaacaatgaagatgtgtctggggcctttgtgaccctgcgggtcttccgggtcttccgcatcttcaagttcagccgccacagccagggcctgcgcatcctgggctacaccctgaagagctgtgccagcgagctgggcttcctgctcttcagcctgaccatggccatcatcatctttgccaccgtgatgttttatgcagagaagggcagcagcgccagcaagttcaccagcatcccagccagcttctggtacaccatcgtgaccatgaccaccctgggctacggggacatggtgcccaagaccatcgccggcaagatcttcggcagcatctgcagcctgagcggcgtgctggtgattgccctgcctgtgcctgtgattgtgagcaacttcagccgcatctaccaccagaaccagagagctgacaagagaagagcccagaagaaggcccggctggcccgcatccgggtggccaagacaggcagcagcaatgcctacctgcacagcaagagaaatggcctgctgaatgaggccctggagctgaccggcaccccagaggaggagcacatgggcaagaccaccagcctcatcgagagccagcaccaccacctgctgcactgcctggagaagaccaccggcctgagctacctggtggatgaccccctgctgtctgtgaggaccagcaccatcaagaaccacgagttcattgatgagcagatgtttgagcagaactgcatggagagctccatgcagaactaccccagcaccaggagccccagcctgagcagccaccctggcctgaccaccacctgctgcagcagaagaagcaagaagaccacccacctgcccaacagcaacctgcctgccacccggctgcgctccatgcaggagctgagcaccatccacatccagggcagcgagcagcccagcctgaccaccagccgcagcagcctgaacctgaaggcagatgatggcctgcggcccaactgcaagaccagccagatcaccacagccatcatcagcatccccaccccaccagccctgaccccagagggggagagcaggcctcctccagccagccctggccccaacaccaacatccccagcatcgccagcaatgtggtgaaggtgtctgccctgtag

SEQ ID NO: 164979 - DNA, 1911 bp, synthetic construct; identical to SEQ ID NO: 164977
  misc_feature 1..1911: note = Description of Artificial Sequence: Synthetic coding sequence
  source 1..1911: mol_type = other DNA

SEQ ID NO: 164980 - DNA, 1758 bp, synthetic construct
  misc_feature 1..1758: note = Description of Artificial Sequence: Synthetic coding sequence
  source 1..1758: mol_type = other DNA
atgggccagggagatgaaagtgagcgcatcgtcatcaacgtgggcggcaccaggcaccagacctaccgcagcaccctgcggaccctgcccggcacccggctggcctggctggccgagccagatgcccacagccactttgattatgaccccagggcagatgagttcttctttgacagacaccctggggtgtttgcccacatcctgaactactacagaacaggcaagctgcactgcccagcagatgtgtgtggccccctgtatgaggaggagctggccttctggggcattgatgaaacagatgtggagccctgctgctggatgacctaccggcagcacagagatgctgaggaggccctggacagctttggaggagcccccctggacaacagcgcagatgatgctgatgctgatggccctggggacagcggagatggagaagatgagctggagatgaccaagaggctggccctgagtgacagcccagatggccggcctgggggcttctggaggcgctggcagccccgcatctgggccctgtttgaggacccctacagcagccgctatgcccgctacgtggcctttgccagcctcttcttcatcctggtgtccatcaccaccttctgcctggagacccatgagcgcttcaaccccatcgtgaacaagacagaaattgaaaatgtgagaaatggcacccaggtgcgctactaccgggaggccgagacagaggccttcctgacctacatcgagggcgtgtgtgtggtgtggttcacctttgagttcctgatgagggtcatcttctgccccaacaaggtggagttcatcaagaacagcctgaacatcatcgactttgtggccatcctgcccttctacctggaggtgggcctgagcggcctgagcagcaaggccgccaaggatgtgctgggcttcctgcgggtggtgcgctttgtgcgcatcctgcgcatcttcaagctgaccaggcactttgtgggcctgcgggtgctgggccacaccctgcgggccagcaccaatgagttcctgctgctgatcatcttcctggccctgggcgtgctgatctttgccaccatgatctactatgcagagagaattggagcccagcccaatgaccccagcgccagcgagcacacccacttcaagaacatccccatcggcttctggtgggccgtggtgaccatgaccaccctgggctatggagacatgtacccccagacctggagcggcatgctggtgggcgccctgtgtgccctggccggcgtgctgaccatcgccatgcctgtgcctgtgattgtgaacaactttggcatgtactacagcctggccatggccaagcagaagctgcccaagaagaagaagaagcacatccccaggcctccccagctgggcagccccaactactgcaagtctgtggtgaacagcccccaccacagcacccagagcgacacctgccccctggcccaggaggagatcctggagatcaacagagctgacagcaagctgaatggagaggtggccaaggccgccctggccaatgaagactgcccccacatcgaccaggccctgaccccagatgagggcctgcccttcaccaggagcggcacccgggagagatatggcccctgcttcctgctgagcactggagaatatgcctgccccccaggcggcggcatgaggaaggacctgtgcaaggagagccctgtgattgccaagtacatgcccacagaagctgtgcgggtgacctag

SEQ ID NO: 164981 - DNA, 1536 bp, synthetic construct
  misc_feature 1..1536: note = Description of Artificial Sequence: Synthetic coding sequence
  source 1..1536: mol_type = other DNA
atgggccagggagatgaaagtgagcgcatcgtcatcaacgtgggcggcaccaggcaccagacctaccgcagcaccctgcggaccctgcccggcacccggctggcctggctggccgagccagatgcccacagccactttgattatgaccccagggcagatgagttcttctttgacagacaccctggggtgtttgcccacatcctgaactactacagaacaggcaagctgcactgcccagcagatgtgtgtggccccctgtatgaggaggagctggccttctggggcattgatgaaacagatgtggagccctgctgctggatgacctaccggcagcacagagatgctgaggaggccctggacagctttggaggagcccccctggacaacagcgcagatgatgctgatgctgatggccctggggacagcggagatggagaagatgagctggagatgaccaagaggctggccctgagtgacagcccagatggccggcctgggggcttctggaggcgctggcagccccgcatctgggccctgtttgaggacccctacagcagccgctatgcccgctacgtggcctttgccagcctcttcttcatcctggtgtccatcaccaccttctgcctggagacccatgagcgcttcaaccccatcgtgaacaagacagaaattgaaaatgtgagaaatggcacccaggtgcgctactaccgggaggccgagacagaggccttcctgacctacatcgagggcgtgtgtgtggtgtggttcacctttgagttcctgatgagggtcatcttctgccccaacaaggtggagttcatcaagaacagcctgaacatcatcgactttgtggccatcctgcccttctacctggaggtgggcctgagcggcctgagcagcaaggccgccaaggatgtgctgggcttcctgcgggtggtgcgctttgtgcgcatcctgcgcatcttcaagctgaccaggcactttgtgggcctgcgggtgctgggccacaccctgcgggccagcaccaatgagttcctgctgctgatcatcttcctggccctgggcgtgctgatctttgccaccatgatctactatgcagagagaattggagcccagcccaatgaccccagcgccagcgagcacacccacttcaagaacatccccatcggcttctggtgggccgtggtgaccatgaccaccctgggctatggagacatgtacccccagacctggagcggcatgctggtgggcgccctgtgtgccctggccggcgtgctgaccatcgccatgcctgtgcctgtgattgtgaacaactttggcatgtactacagcctggccatggccaagcagaagctgcccaagaagaagaagaagcacatccccaggcctccccagctgggcagccccaactactgcaagtctgtggtgaacagcccccaccacagcacccagagcgacacctgccccctggcccaggaggagatcctggagatcaacagagctggcaggaagcccctgcggggcatgagcatctag

SEQ ID NO: 164982 - DNA, 1842 bp, synthetic construct
  misc_feature 1..1842: note = Description of Artificial Sequence: Synthetic coding sequence
  source 1..1842: mol_type = other DNA
atgggcaagattgaaaataatgaaagagtcatcctgaatgtgggcggcaccaggcatgagacctaccgcagcaccctgaagaccctgcccggcacccggctggccctgctggccagcagcgagcccccaggggactgcctgaccacagctggggacaagctgcagcccagccccccacccctgagccccccaccccgggccccacccctgagccctggccctgggggctgctttgagggcggggccggcaactgcagcagcagaggaggccgggccagtgaccaccctgggggcggccgggagttcttctttgacagacaccctggggtgtttgcctacgtgctgaactactacagaacaggcaagctgcactgcccagcagatgtgtgtggccccctgtttgaggaggagctggccttctggggcattgatgaaacagatgtggagccctgctgctggatgacctaccggcagcacagagatgctgaggaggccctggacatctttgagaccccagacctgattggaggagaccctggagatgatgaggacctggccgccaagaggctgggcattgaagatgctgctggcctgggcggcccagatggcaagagcggccgctggaggcggctgcagcccaggatgtgggccctgtttgaggacccctacagcagcagagctgcccgcttcatcgcctttgccagcctcttcttcatcctggtgtccatcaccaccttctgcctggagacccatgaggccttcaacatcgtgaagaacaagacagagcctgtgatcaatggcacctctgtggtgctgcagtatgaaattgaaacagatcctgccctgacctacgtggagggcgtgtgtgtggtgtggttcacctttgagttcctggtgagaattgtgttcagccccaacaagctggagttcatcaagaacctgctgaacatcatcgactttgtggccatcctgcccttctacctggaggtgggcctgagcggcctgagcagcaaggccgccaaggatgtgctgggcttcctgcgggtggtgcgctttgtgcgcatcctgcgcatcttcaagctgaccaggcactttgtgggcctgcgggtgctgggccacaccctgcgggccagcaccaatgagttcctgctgctgatcatcttcctggccctgggcgtgctgatctttgccaccatgatctactatgcagagcgggtgggcgcccagcccaatgaccccagcgccagcgagcacacccagttcaagaacatccccatcggcttctggtgggccgtggtgaccatgaccaccctgggctacggggacatgtacccccagacctggagcggcatgctggtgggcgccctgtgtgccctggccggcgtgctgaccatcgccatgcctgtgcctgtgattgtgaacaactttggcatgtactacagcctggccatggccaagcagaagctgcccaggaagaggaagaagcacatccccccagccccccaggccagcagccccaccttctgcaagacagagctgaacatggcctgcaacagcacccagagcgacacctgcctgggcaaggacaaccggctgctggagcacaacagatctgtgctgtctggagatgacagcacaggcagcgagccccccctgagccccccagagcggctgcccatcagaagaagcagcacccgggacaagaacagaagaggagagacctgcttcctgctgaccaccggggactacacctgtgccagtgatggcggcatcaggaaggacaactgcaaggaggtggtgatcaccggctacacccaggccgaggcccggagcctgacctag

SEQ ID NO: 164983 - DNA, 1890 bp, synthetic construct
  misc_feature 1..1890: note = Description of Artificial Sequence: Synthetic coding sequence
  source 1..1890: mol_type = other DNA
atgggcaagattgaaaataatgaaagagtcatcctgaatgtgggcggcaccaggcatgagacctaccgcagcaccctgaagaccctgcccggcacccggctggccctgctggccagcagcgagcccccaggggactgcctgaccacagctggggacaagctgcagcccagccccccacccctgagccccccaccccgggccccacccctgagccctggccctgggggctgctttgagggcggggccggcaactgcagcagcagaggaggccgggccagtgaccaccctgggggcggccgggagttcttctttgacagacaccctggggtgtttgcctacgtgctgaactactacagaacaggcaagctgcactgcccagcagatgtgtgtggccccctgtttgaggaggagctggccttctggggcattgatgaaacagatgtggagccctgctgctggatgacctaccggcagcacagagatgctgaggaggccctggacatctttgagaccccagacctgattggaggagaccctggagatgatgaggacctggccgccaagaggctgggcattgaagatgctgctggcctgggcggcccagatggcaagagcggccgctggaggcggctgcagcccaggatgtgggccctgtttgaggacccctacagcagcagagctgcccgcttcatcgcctttgccagcctcttcttcatcctggtgtccatcaccaccttctgcctggagacccatgaggccttcaacatcgtgaagaacaagacagagcctgtgatcaatggcacctctgtggtgctgcagtatgaaattgaaacagatcctgccctgacctacgtggagggcgtgtgtgtggtgtggttcacctttgagttcctggtgagaattgtgttcagccccaacaagctggagttcatcaagaacctgctgaacatcatcgactttgtggccatcctgcccttctacctggaggtgggcctgagcggcctgagcagcaaggccgccaaggatgtgctgggcttcctgcgggtggtgcgctttgtgcgcatcctgcgcatcttcaagctgaccaggcactttgtgggcctgcgggtgctgggccacaccctgcgggccagcaccaatgagttcctgctgctgatcatcttcctggccctgggcgtgctgatctttgccaccatgatctactatgcagagcgggtgggcgcccagcccaatgaccccagcgccagcgagcacacccagttcaagaacatccccatcggcttctggtgggccgtggtgaccatgaccaccctgggctacggggacatgtacccccagacctggagcggcatgctggtgggcgccctgtgtgccctggccggcgtgctgaccatcgccatgcctgtgcctgtgattgtgaacaactttggcatgtactacagcctggccatggccaagcagaagctgcccaggaagaggaagaagcacatccccccagccccccaggccagcagccccaccttctgcaagacagagctgaacatggcctgcaacagcacccagagcgacacctgcctgggcaaggacaaccggctgctggagcacaacagatctgtgctgtctggagatgacagcacaggcagcgagccccccctgagccccccagagcggctgcccatcagaagaagcagcacccgggacaagaacagaagaggagagacctgcttcctgctgaccaccggggactacacctgtgccagtgatggcggcatcaggaaggtgctgtaccgcatctaccacggcctgctgacagctgagaagggcaccgtggagttcagccacaccaaggactacacaggcaaccggctgctgctgctgaatgtgccctag

SEQ ID NO: 164984 - DNA, 1677 bp, synthetic construct
  misc_feature 1..1677: note = Description of Artificial Sequence: Synthetic coding sequence
  source 1..1677: mol_type = other DNA
atgggcaagattgaaaataatgaaagagtcatcctgaatgtgggcggcaccaggcatgagacctaccgcagcaccctgaagaccctgcccggcacccggctggccctgctggccagcagcgagcccccaggggactgcctgaccacagctggggacaagctgcagcccagccccccacccctgagccccccaccccgggccccacccctgagccctggccctgggggctgctttgagggcggggccggcaactgcagcagcagaggaggccgggccagtgaccaccctgggggcggccgggagttcttctttgacagacaccctggggtgtttgcctacgtgctgaactactacagaacaggcaagctgcactgcccagcagatgtgtgtggccccctgtttgaggaggagctggccttctggggcattgatgaaacagatgtggagccctgctgctggatgacctaccggcagcacagagatgctgaggaggccctggacatctttgagaccccagacctgattggaggagaccctggagatgatgaggacctggccgccaagaggctgggcattgaagatgctgctggcctgggcggcccagatggcaagagcggccgctggaggcggctgcagcccaggatgtgggccctgtttgaggacccctacagcagcagagctgcccgcttcatcgcctttgccagcctcttcttcatcctggtgtccatcaccaccttctgcctggagacccatgaggccttcaacatcgtgaagaacaagacagagcctgtgatcaatggcacctctgtggtgctgcagtatgaaattgaaacagatcctgccctgacctacgtggagggcgtgtgtgtggtgtggttcacctttgagttcctggtgagaattgtgttcagccccaacaagctggagttcatcaagaacctgctgaacatcatcgactttgtggccatcctgcccttctacctggaggtgggcctgagcggcctgagcagcaaggccgccaaggatgtgctgggcttcctgcgggtggtgcgctttgtgcgcatcctgcgcatcttcaagctgaccaggcactttgtgggcctgcgggtgctgggccacaccctgcgggccagcaccaatgagttcctgctgctgatcatcttcctggccctgggcgtgctgatctttgccaccatgatctactatgcagagcgggtgggcgcccagcccaatgaccccagcgccagcgagcacacccagttcaagaacatccccatcggcttctggtgggccgtggtgaccatgaccaccctgggctacggggacatgtacccccagacctggagcggcatgctggtgggcgccctgtgtgccctggccggcgtgctgaccatcgccatgcctgtgcctgtgattgtgaacaactttggcatgtactacagcctggccatggccaagcagaagctgcccaggaagaggaagaagcacatccccccagccccccaggccagcagccccaccttctgcaagacagagctgaacatggcctgcaacagcacccagagcgacacctgcctgggcaaggacaaccggctgctggagcacaacagaagtgacaactgcaaggaggtggtgatcaccggctacacccaggccgaggcccggagcctgacctag

SEQ ID NO: 164985 - DNA, 1842 bp, synthetic construct; identical to SEQ ID NO: 164982
  misc_feature 1..1842: note = Description of Artificial Sequence: Synthetic coding sequence
  source 1..1842: mol_type = other DNA

SEQ ID NO: 164986 - DNA, 1917 bp, synthetic construct
  misc_feature 1..1917: note = Description of Artificial Sequence: Synthetic coding sequence
  source 1..1917: mol_type = other DNA
atgggcaagattgaaaataatgaaagagtcatcctgaatgtgggcggcaccaggcatgagacctaccgcagcaccctgaagaccctgcccggcacccggctggccctgctggccagcagcgagcccccaggggactgcctgaccacagctggggacaagctgcagcccagccccccacccctgagccccccaccccgggccccacccctgagccctggccctgggggctgctttgagggcggggccggcaactgcagcagcagaggaggccgggccagtgaccaccctgggggcggccgggagttcttctttgacagacaccctggggtgtttgcctacgtgctgaactactacagaacaggcaagctgcactgcccagcagatgtgtgtggccccctgtttgaggaggagctggccttctggggcattgatgaaacagatgtggagccctgctgctggatgacctaccggcagcacagagatgctgaggaggccctggacatctttgagaccccagacctgattggaggagaccctggagatgatgaggacctggccgccaagaggctgggcattgaagatgctgctggcctgggcggcccagatggcaagagcggccgctggaggcggctgcagcccaggatgtgggccctgtttgaggacccctacagcagcagagctgcccgcttcatcgcctttgccagcctcttcttcatcctggtgtccatcaccaccttctgcctggagacccatgaggccttcaacatcgtgaagaacaagacagagcctgtgatcaatggcacctctgtggtgctgcagtatgaaattgaaacagatcctgccctgacctacgtggagggcgtgtgtgtggtgtggttcacctttgagttcctggtgagaattgtgttcagccccaacaagctggagttcatcaagaacctgctgaacatcatcgactttgtggccatcctgcccttctacctggaggtgggcctgagcggcctgagcagcaaggccgccaaggatgtgctgggcttcctgcgggtggtgcgctttgtgcgcatcctgcgcatcttcaagctgaccaggcactttgtgggcctgcgggtgctgggccacaccctgcgggccagcaccaatgagttcctgctgctgatcatcttcctggccctgggcgtgctgatctttgccaccatgatctactatgcagagcgggtgggcgcccagcccaatgaccccagcgccagcgagcacacccagttcaagaacatccccatcggcttctggtgggccgtggtgaccatgaccaccctgggctacggggacatgtacccccagacctggagcggcatgctggtgggcgccctgtgtgccctggccggcgtgctgaccatcgccatgcctgtgcctgtgattgtgaacaactttggcatgtactacagcctggccatggccaagcagaagctgcccaggaagaggaagaagcacatccccccagccccccaggccagcagccccaccttctgcaagacagagctgaacatggcctgcaacagcacccagagcgacacctgcctgggcaaggacaaccggctgctggagcacaacagatctgtgctgtctggagatgacagcacaggcagcgagccccccctgagccccccagagcggctgcccatcagaagaagcagcacccgggacaagaacagaagaggagagacctgcttcctgctgaccaccggggactacacctgtgccagtgatggcggcatcaggaagggctatgagaagagccgcagcctgaacaacattgctggcctggccggaaatgccctgcggctgagccctgtgaccagcccctacaacagcccctgccccctgcggcgcagccgcagccccatccccagcatcctgtag

SEQ ID NO: 164987 - DNA, 1890 bp, synthetic construct; identical to SEQ ID NO: 164983
  misc_feature 1..1890: note = Description of Artificial Sequence: Synthetic coding sequence
  source 1..1890: mol_type = other DNA

SEQ ID NO: 164988 - DNA, 2187 bp, synthetic construct
  misc_feature 1..2187: note = Description of Artificial Sequence: Synthetic coding sequence
  source 1..2187: mol_type = other DNA
atgctgagctctgtgtgtgtgtcctccttccggggccggcagggcgccagcaagcagcagcctgcccccccaccccagcccccagagagccccccacctccacccctgcccccccagcagcagcagcctgcccagcccggccctgctgccagccctgctggccccccagccccccggggccctggggaccggcgggcagagccctgccccggcctgcctgctgctgccatgggccgccacggcggcggcggcggggacagcggcaagatcgtcatcaacgtgggcggcgtgagacatgagacctaccgcagcaccctgcggaccctgcccggcacccggctggccggcctgacagagcctgaggccgccgccaggtttgattatgaccccggggctgatgagttcttctttgacagacaccctggggtgtttgcctacgtgctgaactactacagaacaggcaagctgcactgcccagcagatgtgtgtggccccctgtttgaggaggagctgggcttctggggcattgatgaaacagatgtggaggcctgctgctggatgacctaccggcagcacagagatgctgaggaggccctggacagctttgaggccccagaccctgctggggccgccaatgctgccaatgctgctggggcccatgatggcggcctggatgatgaggccggggccggcggcggcggcctggatggagctggaggagagctgaagaggctgtgcttccaggatgctgggggcggggccggcggccccccaggaggagctggaggagctgggggcacctggtggaggcgctggcagccccgggtgtgggccctgtttgaggacccctacagcagccgggccgcccgctacgtggcctttgccagcctcttcttcatcctgatcagcatcaccaccttctgcctggagacccatgagggcttcatccacatcagcaacaagacagtgacccaggccagccccatccctggggcccccccagagaacatcaccaacgtggaggtggagacagagcccttcctgacctacgtggagggcgtgtgtgtggtgtggttcacctttgagttcctgatgaggatcaccttctgcccagacaaggtggagttcctgaagagcagcctgaacatcatcgactgtgtggccatcctgcccttctacctggaggtgggcctgagcggcctgagcagcaaggccgccaaggatgtgctgggcttcctgcgggtggtgcgctttgtgcgcatcctgcgcatcttcaagctgaccaggcactttgtgggcctgcgggtgctgggccacaccctgcgggccagcaccaatgagttcctgctgctgatcatcttcctggccctgggcgtgctgatctttgccaccatgatctactatgcagagcgcatcggggctgaccctgatgacatcctgggcagcaaccacacctacttcaagaacatccccatcggcttctggtgggccgtggtgaccatgaccaccctgggctacggggacatgtaccccaagacctggagcggcatgctggtgggcgccctgtgtgccctggccggcgtgctgaccatcgccatgcctgtgcctgtgattgtgaacaactttggcatgtactacagcctggccatggccaagcagaagctgcccaagaagaagaacaagcacatcccccggcccccccagcccggcagccccaactactgcaagccagaccccccacctcctcctccaccccacccccaccacggcagcggcggcatcagccccccaccacccatcaccccacccagcatgggcgtgacagtggccggggcctacccagctggcccccacacccaccctggcctgctgcggggcggggccggcggcctgggcatcatgggcctgccccccctgcctgcccctggagagccctgccccctggcccaggaggaggtgattgagatcaacagagctgacccccggcccaacggggaccctgctgctgctgccctggcccacgaggactgcccagccatcgaccagcctgccatgagccctgaggacaagagccccatcaccccaggcagccggggccgctacagccgggaccgggcctgcttcctgctgacagattatgcccccagcccagatggcagcatcaggaaggccctggtgacagcctag

SEQ ID NO: 164989 - DNA, 468 bp, synthetic construct
  misc_feature 1..468: note = Description of Artificial Sequence: Synthetic coding sequence
  source 1..468: mol_type = other DNA
atgggcatccggcagcagctgcggctgcccaccaggacagcccagcccctgaccagcctgccctgccccaggaagacccgggcccccagccggctggaggccgtggccgccatcgccggcacagagcccgccagcagcagccccaccatgcccctgcccctgatggcccccagcgagaagctgctgagccccccagagaccagccgggacttccgcagccccccacccctgcccccccggctgcgggagatcccccagccccagcagcaccggggccctgagcggggcgtgcctgccccccgggccccctgccaccccccctggctgagccctggccggccccccaggagcccagaccctgccctgcaccccctggccctgcccagccccctgtggggagacagcggcgtgacaggcaagaaggtgaagggagctgggggcggcggctggggcaagggcttcttctag

SEQ ID NO: 164990 - DNA, 1629 bp, synthetic construct
  misc_feature 1..1629: note = Description of Artificial Sequence: Synthetic coding sequence
  source 1..1629: mol_type = other DNA
atgacctaccggcagcacagagatgctgaggaggccctggacagctttgaggccccagaccctgctggggccgccaatgctgccaatgctgctggggcccatgatggcggcctggatgatgaggccggggccggcggcggcggcctggatggagctggaggagagctgaagaggctgtgcttccaggatgctgggggcggggccggcggccccccaggaggagctggaggagctgggggcacctggtggaggcgctggcagccccgggtgtgggccctgtttgaggacccctacagcagccgggccgcccgctacgtggcctttgccagcctcttcttcatcctgatcagcatcaccaccttctgcctggagacccatgagggcttcatccacatcagcaacaagacagtgacccaggccagccccatccctggggcccccccagagaacatcaccaacgtggaggtggagacagagcccttcctgacctacgtggagggcgtgtgtgtggtgtggttcacctttgagttcctgatgaggatcaccttctgcccagacaaggtggagttcctgaagagcagcctgaacatcatcgactgtgtggccatcctgcccttctacctggaggtgggcctgagcggcctgagcagcaaggccgccaaggatgtgctgggcttcctgcgggtggtgcgctttgtgcgcatcctgcgcatcttcaagctgaccaggcactttgtgggcctgcgggtgctgggccacaccctgcgggccagcaccaatgagttcctgctgctgatcatcttcctggccctgggcgtgctgatctttgccaccatgatctactatgcagagcgcatcggggctgaccctgatgacatcctgggcagcaaccacacctacttcaagaacatccccatcggcttctggtgggccgtggtgaccatgaccaccctgggctacggggacatgtaccccaagacctggagcggcatgctggtgggcgccctgtgtgccctggccggcgtgctgaccatcgccatgcctgtgcctgtgattgtgaacaactttggcatgtactacagcctggccatggccaagcagaagctgcccaagaagaagaacaagcacatcccccggcccccccagcccggcagccccaactactgcaagccagaccccccacctcctcctccaccccacccccaccacggcagcggcggcatcagccccccaccacccatcaccccacccagcatgggcgtgacagtggccggggcctacccagctggcccccacacccaccctggcctgctgcggggcggggccggcggcctgggcatcatgggcctgccccccctgcctgcccctggagagccctgccccctggcccaggaggaggtgattgagatcaacagagctgacccccggcccaacggggaccctgctgctgctgccctggcccacgaggactgcccagccatcgaccagcctgccatgagccctgaggacaagagccccatcaccccaggcagccggggccgctacagccgggaccgggcctgcttcctgctgacagattatgcccccagcccagatggcagcatcaggaaggccctggtgacagcctag

SEQ ID NO: 164991 - DNA, 2274 bp, synthetic construct
  misc_feature 1..2274: note = Description of Artificial Sequence: Synthetic coding sequence
  source 1..2274: mol_type = other DNA
atgctgagctctgtgtgtgtgtcctccttccggggccggcagggcgccagcaagcagcagcctgcccccccaccccagcccccagagagccccccacctccacccctgcccccccagcagcagcagcctgcccagcccggccctgctgccagccctgctggccccccagccccccggggccctggggaccggcgggcagagccctgccccggcctgcctgctgctgccatgggccgccacggcggcggcggcggggacagcggcaagatcgtcatcaacgtgggcggcgtgagacatgagacctaccgcagcaccctgcggaccctgcccggcacccggctggccggcctgacagagcctgaggccgccgccaggtttgattatgaccccggggctgatgagttcttctttgacagacaccctggggtgtttgcctacgtgctgaactactacagaacaggcaagctgcactgcccagcagatgtgtgtggccccctgtttgaggaggagctgggcttctggggcattgatgaaacagatgtggaggcctgctgctggatgacctaccggcagcacagagatgctgaggaggccctggacagctttgaggccccagaccctgctggggccgccaatgctgccaatgctgctggggcccatgatggcggcctggatgatgaggccggggccggcggcggcggcctggatggagctggaggagagctgaagaggctgtgcttccaggatgctgggggcggggccggcggccccccaggaggagctggaggagctgggggcacctggtggaggcgctggcagccccgggtgtgggccctgtttgaggacccctacagcagccgggccgcccgctacgtggcctttgccagcctcttcttcatcctgatcagcatcaccaccttctgcctggagacccatgagggcttcatccacatcagcaacaagacagtgacccaggccagccccatccctggggcccccccagagaacatcaccaacgtggaggtggagacagagcccttcctgacctacgtggagggcgtgtgtgtggtgtggttcacctttgagttcctgatgaggatcaccttctgcccagacaaggtggagttcctgaagagcagcctgaacatcatcgactgtgtggccatcctgcccttctacctggaggtgggcctgagcggcctgagcagcaaggccgccaaggatgtgctgggcttcctgcgggtggtgcgctttgtgcgcatcctgcgcatcttcaagctgaccaggcactttgtgggcctgcgggtgctgggccacaccctgcgggccagcaccaatgagttcctgctgctgatcatcttcctggccctgggcgtgctgatctttgccaccatgatctactatgcagagcgcatcggggctgaccctgatgacatcctgggcagcaaccacacctacttcaagaacatccccatcggcttctggtgggccgtggtgaccatgaccaccctgggctacggggacatgtaccccaagacctggagcggcatgctggtgggcgccctgtgtgccctggccggcgtgctgaccatcgccatgcctgtgcctgtgattgtgaacaactttggcatgtactacagcctggccatggccaagcagaagctgcccaagaagaagaacaagcacatcccccggcccccccagcccggcagccccaactactgcaagccagaccccccacctcctcctccaccccacccccaccacggcagcggcggcatcagccccccaccacccatcaccccacccagcatgggcgtgacagtggccggggcctacccagctggcccccacacccaccctggcctgctgcggggcggggccggcggcctgggcatcatgggcctgccccccctgcctgcccctggagagccctgccccctggcccaggaggaggtgattgagatcaacagagctgacccccggcccaacggggaccctgctgctgctgccctggcccacgaggactgcccagccatcgaccagcctgccatgagccctgaggacaagagccccatcaccccaggcagccggggccgctacagccgggaccgggcctgcttcctgctgacagattatgcccccagcccagatggcagcatcaggaaggccactggagccccacccctgcccccccaggactggaggaagccaggcccccccagcttcctgcctgacctgaatgccaatgctgctgcctggatcagcccctag

SEQ ID NO: 164992 - DNA, 1908 bp, synthetic construct
  misc_feature 1..1908: note = Description of Artificial Sequence: Synthetic coding sequence
  source 1..1908: mol_type = other DNA
atgatcagctctgtgtgtgtgtcctcctaccggggcaggaagagcggcaacaagccacccagcaagacctgcctgaaggaggagatggccaagggggaggccagcgagaagatcatcatcaacgtgggcggcaccaggcatgagacctaccgcagcaccctgcggaccctgcccggcacccggctggcctggctggccgaccctgatggcggcggccggcctgagacagatggcggcggcgtgggcagcagcggcagcagcggcggcggcggctgtgagttcttctttgacagacaccctggggtgtttgcctacgtgctgaactactacagaacaggcaagctgcactgcccagcagatgtgtgtggccccctgtttgaggaggagctgaccttctggggcattgatgaaacagatgtggagccctgctgctggatgacctaccggcagcacagagatgctgaggaggccctggacatctttgagagcccagatggcggcggcagcggggccggccccagtgatgaagctggagatgatgagcgggagctggccctgcagaggctgggcccccatgagggcggggccggccacggggccggcagcggcggctgccggggctggcagcccaggatgtgggccctgtttgaggacccctacagcagccgggccgcccgggtggtggcctttgccagcctcttcttcatcctggtgtccatcaccaccttctgcctggagacccatgaggccttcaacatcgacagaaatgtgacagagatcctgcgggtgggcaacatcacctctgtgcacttccggcgggaggtggagacagagcccatcctgacctacatcgagggcgtgtgtgtgctgtggttcaccctggagttcctggtgcgcatcgtgtgctgcccagacaccctggactttgtgaagaacctgctgaacatcatcgactttgtggccatcctgcccttctacctggaggtgggcctgagcggcctgagcagcaaggccgccagagatgtgctgggcttcctgcgggtggtgcgctttgtgcgcatcctgcgcatcttcaagctgaccaggcactttgtgggcctgcgggtgctgggccacaccctgcgggccagcaccaatgagttcctgctgctgatcatcttcctggccctgggcgtgctgatctttgccaccatgatctactatgcagagagaattggagcccggcccagcgaccccagaggaaatgaccacacagacttcaagaacatccccatcggcttctggtgggccgtggtgaccatgaccaccctgggctatggagacatgtaccccaagacctggagcggcatgctggtgggcgccctgtgtgccctggccggcgtgctgaccatcgccatgcctgtgcctgtgattgtgaacaactttggcatgtactacagcctggccatggccaagcagaagctgcccaagaagaggaagaagcacgtgcccaggcctgcccagctggagagccccatgtactgcaagtctgaggagaccagcccccgggacagcacctgcagcgacaccagccccccagcccgggaggagggcatgattgaaaggaagagagctgacagcaagcagaatggagatgccaatgctgtgctgagtgatgaggagggcgccggcctgacccagcccctggccagcagccccaccccagaggagcggcgggccctgcggcgcagcaccacccgggacaggaacaagaaggctgctgcctgcttcctgctgagcactggagactatgcctgtgctgatggctctgtgaggaagggcacctttgtgctgcgggacctgcccctgcagcacagccctgaggccgcctgccccccaacagctggcaccctcttcctgccccactag

SEQ ID NO: 164993 - DNA, 1881 bp, synthetic construct
  misc_feature 1..1881: note = Description of Artificial Sequence: Synthetic coding sequence
  source 1..1881: mol_type = other DNA
atgatcagctctgtgtgtgtgtcctcctaccggggcaggaagagcggcaacaagccacccagcaagacctgcctgaaggaggagatggccaagggggaggccagcgagaagatcatcatcaacgtgggcggcaccaggcatgagacctaccgcagcaccctgcggaccctgcccggcacccggctggcctggctggccgaccctgatggcggcggccggcctgagacagatggcggcggcgtgggcagcagcggcagcagcggcggcggcggctgtgagttcttctttgacagacaccctggggtgtttgcctacgtgctgaactactacagaacaggcaagctgcactgcccagcagatgtgtgtggccccctgtttgaggaggagctgaccttctggggcattgatgaaacagatgtggagccctgctgctggatgacctaccggcagcacagagatgctgaggaggccctggacatctttgagagcccagatggcggcggcagcggggccggccccagtgatgaagctggagatgatgagcgggagctggccctgcagaggctgggcccccatgagggcggggccggccacggggccggcagcggcggctgccggggctggcagcccaggatgtgggccctgtttgaggacccctacagcagccgggccgcccgggtggtggcctttgccagcctcttcttcatcctggtgtccatcaccaccttctgcctggagacccatgaggccttcaacatcgacagaaatgtgacagagatcctgcgggtgggcaacatcacctctgtgcacttccggcgggaggtggagacagagcccatcctgacctacatcgagggcgtgtgtgtgctgtggttcaccctggagttcctggtgcgcatcgtgtgctgcccagacaccctggactttgtgaagaacctgctgaacatcatcgactttgtggccatcctgcccttctacctggaggtgggcctgagcggcctgagcagcaaggccgccagagatgtgctgggcttcctgcgggtggtgcgctttgtgcgcatcctgcgcatcttcaagctgaccaggcactttgtgggcctgcgggtgctgggccacaccctgcgggccagcaccaatgagttcctgctgctgatcatcttcctggccctgggcgtgctgatctttgccaccatgatctactatgcagagagaattggagcccggcccagcgaccccagaggaaatgaccacacagacttcaagaacatccccatcggcttctggtgggccgtggtgaccatgaccaccctgggctatggagacatgtaccccaagacctggagcggcatgctggtgggcgccctgtgtgccctggccggcgtgctgaccatcgccatgcctgtgcctgtgattgtgaacaactttggcatgtactacagcctggccatggccaagcagaagctgcccaagaagaggaagaagcacgtgcccaggcctgcccagctggagagccccatgtactgcaagtctgaggagaccagcccccgggacagcacctgcagcgacaccagccccccagcccgggaggagggcatgattgaaaggaagagagctgacagcaagcagaatggagatgccaatgctgtgctgagtgatgaggagggcgccggcctgacccagcccctggccagcagccccaccccagaggagcggcgggccctgcggcgcagcaccacccgggacaggaacaagaaggctgctgcctgcttcctgctgagcactggagactatgcctgtgctgatggctctgtgaggaaggagacctgccaggatgccctgagcagcaactatgcccaggccgaggtgctgaccctgtcctag

SEQ ID NO: 164994 - DNA, 1908 bp, synthetic construct; identical to SEQ ID NO: 164992
  misc_feature 1..1908: note = Description of Artificial Sequence: Synthetic coding sequence
  source 1..1908: mol_type = other DNA

SEQ ID NO: 164995 - DNA, 1485 bp, synthetic construct
  misc_feature 1..1485: note = Description of Artificial Sequence: Synthetic coding sequence
  source 1..1485: mol_type = other DNA
atggatggcagcggggagaggagcctgcctgagcccggcagccagagcagcgctgccagtgatgacattgaaattgtggtgaatgtgggcggcgtgcggcaggtgctgtatggagacctgctgagccagtacccagagacccggctggccgagctgatcaactgcctggccggcggctatgacaccatcttcagcctgtgtgatgattatgaccccgggaagcgggagttctactttgaccgggaccctgatgccttcaagtgtgtgattgaggtgtactactttggagaggtgcacatgaagaagggcatctgccccatctgcttcaagaatgagatggacttctggaaggtggacctgaagttcctggatgactgctgcaagagccacctgtctgagaagcgggaggagctggaggagatcgccaggagagtgcagctgatcctggatgacctgggcgtggatgctgctgagggccgctggaggcgctgccagaagtgtgtgtggaagttcctggagaagccagagagcagctgcccagcccgggtggtggccgtgctgtccttcctgctgatcctggtgtcctctgtggtgatgtgcatgggcaccatccctgagctgcaggtgctggatgctgagggcaacagagtggagcaccccaccctggagaatgtggagacagcctgcatcggctggttcaccctggagtacctgctgcggctcttcagcagccccaacaagctgcactttgccctgtccttcatgaacatcgtggatgtgctggccatcctgcccttctacgtgtccctgaccctgacccacctgggcgccaggatgatggagctgaccaacgtgcagcaggccgtgcaggccctgcgcatcatgagaattgcccgcatcttcaagctggcccggcacagcagcggcctgcagaccctgacctacgccctgaagaggagcttcaaggagctgggcctgctgctgatgtacctggccgtgggcatctttgtgttttctgccctgggctacaccatggagcagagccaccctgagaccctcttcaagagcatcccccagagcttctggtgggccatcatcaccatgaccaccgtgggctatggagacatctaccccaagaccaccctgggcaagctgaatgctgccatctccttcctgtgtggggtcatcgccatcgccctgcccatccaccccatcatcaacaactttgtgcgctactacaacaagcagagggtgctggagacagctgccaagcatgagctggagctgatggagctgaacagcagcagcggcggggagggcaagacaggaggcagcagaagtgacctggacaacctgcccccagagcctgctgggaaggaggcccccagctgcagcagccggctgaagctgagccacagcgacaccttcatccccctgctgacagaggagaagcaccacaggacccggctgcagagctgcaagtag

SEQ ID NO: 164996 - DNA, 1542 bp, synthetic construct
  misc_feature 1..1542: note = Description of Artificial Sequence: Synthetic coding sequence
  source 1..1542: mol_type = other DNA
atgaccctgctgcccggggacaacagcgactatgactacagcgccctgagctgcaccagtgatgccagcttccacccagccttcctgccccagaggcaggccatcaagggggccttctacagaagagcccagaggctgcggccccaggatgagccccggcagggctgccagccagaagatagaagaagacgcatcatcatcaacgtgggcggcatcaagtacagcctgccctggaccaccctggatgagttccccctgacccggctgggccagctgaaggcctgcaccaactttgatgacatcctgaatgtgtgtgatgattatgatgtgacctgcaatgagttcttctttgacagaaatcctggggccttcggcaccatcctgaccttcctgcgggccggcaagctgcggctgctgcgggagatgtgtgccctgtccttccaggaggagctgctgtactggggcattgctgaggaccacctggatggctgctgcaagaggcgctacctgcagaagattgaggagtttgctgagatggtggagcgggaggaggaggatgatgccctggacagcgagggccgggacagcgagggccctgctgagggggagggccgcctgggccgctgcatgaggcggctgcgggacatggtggagcggccccacagcggcctgcccgggaaggtgtttgcctgcctgtctgtgctgtttgtgacagtgacagctgtgaacctgtctgtgtccaccctgcccagcctgcgggaggaggaggagcagggccactgcagccagatgtgccacaacgtgttcatcgtggagagcgtgtgtgtgggctggttcagcctggagttcctgctgcggctcatccaggcccccagcaagtttgccttcctgcggagccccctgaccctgattgacctggtggccatcctgccctactacatcaccctgctggtggatggagctgctgctggaagaaggaagccaggggccggcaacagctacctggacaaggtgggcctggtgctgcgggtgctgcgggccctgcgcatcctgtatgtgatgaggctggcccggcacagcctgggcctgcagaccctgggcctgacagcccggcgctgcacccgggagtttggcctgctgctgctcttcctgtgtgtggccatcgccctgtttgcccccctgctgtatgtgattgaaaatgagatggctgacagccctgagttcaccagcatcccagcctgctactggtgggccgtcatcaccatgaccaccgtgggctatggagacatggtgcccaggagcaccccaggccaggtggtggccctgagcagcatcctgagcggcatcctgctgatggccttccctgtgaccagcatcttccacaccttcagccgcagctacctggagctgaagcaggagcaggagcgggtgatgttccggcgggcccagttcctgatcaagaccaagagccagctgtctgtgtcccaggacagcgacatcctgtttggcagcgccagcagtgacacccgggacaacaactag

SEQ ID NO: 164997 - DNA, 828 bp, synthetic construct
  misc_feature 1..828: note = Description of Artificial Sequence: Synthetic coding sequence
  source 1..828: mol_type = other DNA
atgaccctgctgcccggggacaacagcgactatgactacagcgccctgagctgcaccagtgatgccagcttccacccagccttcctgccccagaggcaggccatcaagggggccttctacagaagagcccagaggctgcggccccaggatgagccccggcagggctgccagccagaagatagaagaagacgcatcatcatcaacgtgggcggcatcaagtacagcctgccctggaccaccctggatgagttccccctgacccggctgggccagctgaaggcctgcaccaactttgatgacatcctgaatgtgtgtgatgattatgatgtgacctgcaatgagttcttctttgacagaaatcctggggccttcggcaccatcctgaccttcctgcgggccggcaagctgcggctgctgcgggagatgtgtgccctgtccttccaggaggagctgctgtactggggcattgctgaggaccacctggatggctgctgcaagaggcgctacctgcagaagattgaggagtttgctgagatggtggagcgggaggaggaggatgatgccctggacagcgagggccgggacagcgagggccctgctgagggggagggccgcctgggccgctgcatgaggcggctgcgggacatggtggagcggccccacagcggcctgcccgggaaggtgtttgcctgcctgtctgtgctgtttgtgacagtgacagctgtgaacctgtctgtgtccaccctgcccagcctgcgggaggaggaggagcaggtgcgggcccacgcccccagaggaaatgccccaccccggggcaagggcctgtag

SEQ ID NO: 164998 - DNA, 543 bp, synthetic construct
  misc_feature 1..543: note = Description of Artificial Sequence: Synthetic coding sequence
  source 1..543: mol_type = other DNA
atgaccctgctgcccggggacaacagcgactatgactacagcgccctgagctgcaccagtgatgccagcttccacccagccttcctgccccagaggcaggccatcaagggggccttctacagaagagcccagaggctgcggccccaggatgagccccggcagggctgccagccagaagatagaagaagacgcatcatcatcaacgtgggcggcatcaagtacagcctgccctggaccaccctggatgagttccccctgacccggctgggccagctgaaggcctgcaccaactttgatgacatcctgaatgtgtgtgatgattatgatgtgacctgcaatgagttcttctttgacagaaatcctggggccttcggcaccatcctgaccttcctgcgggccggcaagctgcggctgctgcgggagatgtgtgccctgtccttccaggaggagctgctgtactggggcattgctgaggaccacctggatggctgctgcaagaggcgctacctgcagaagattgaggagtttgctgagatggtgtag

SEQ ID NO: 164999 - DNA, 291 bp, synthetic construct
  misc_feature 1..291: note = Description of Artificial Sequence: Synthetic coding sequence
  source 1..291: mol_type = other DNA
atgaccctgctgcccggggacaacagcgactatgactacagcgccctgagctgcaccagtgatgccagcttccacccagccttcctgccccagaggcaggccatcaagggggccttctacagaagagcccagaggctgcggccccaggatgagccccggcagggctgccagccagaagatagaagaagacgcatcatcatcaacgtgggcggcatcaagtacagcctgccctggaccaccctggatgagttccccctgacccggctgggccagctgaaggcctgcacctag

SEQ ID NO: 165000 - DNA, 777 bp, synthetic construct
  misc_feature 1..777: note = Description of Artificial Sequence: Synthetic coding sequence
  source 1..777: mol_type = other DNA
atgaccctgctgcccggggacaacagcgactatgactacagcgccctgagctgcaccagtgatgccagcttccacccagccttcctgccccagaggcaggccatcaagggggccttctacagaagagcccagaggctgcggccccaggatgagccccggcagggctgccagccagaagatagaagaagacgcatcatcatcaacgtgggcggcatcaagtacagcctgccctggaccaccctggatgagttccccctgacccggctgggccagctgaaggcctgcaccaactttgatgacatcctgaatgtgtgtgatgattatgatgtgacctgcaatgagttcttctttgacagaaatcctggggccttcggcaccatcctgaccttcctgcgggccggcaagctgcggctgctgcgggagatgtgtgccctgtccttccaggaggagctgctgtactggggcattgctgaggaccacctggatggctgctgcaagaggcgctacctgcagaagattgaggagtttgctgagatggtggagcgggaggaggaggatgatgccctggacagcgagggccgggacagcgagggccctgctgagggggagggccgcctgggccgctgcatgaggcggctgcgggacatggtggagcggccccacagcggcctgcccgggaaggtgtttgcctgcctgtctgtgctgtttgtgacagtgacagctgtgaacctgtctgtgtccaccctgcccagcctgcgggaggaggaggagcagtag

SEQ ID NO: 165001 - DNA, 147 bp, synthetic construct
  misc_feature 1..147: note = Description of Artificial Sequence: Synthetic coding sequence
  source 1..147: mol_type = other DNA
atgaccctgctgcccggggacaacagcgactatgactacagcgccctgagctgcaccagtgatgccagcttccacccagccttcctgccccagaggcaggccatcaagggggccttctacagaagagcccagaggctgcggccctag

SEQ ID NO: 165002 - DNA, 1311 bp, synthetic construct
  misc_feature 1..1311: note = Description of Artificial Sequence: Synthetic coding sequence
  source 1..1311: mol_type = other DNA
atgaccttcggccgcagcggggccgcctctgtggtgctgaatgtgggcggggcccgctacagcctgagccgggagctgctgaaggacttccccctgcggcgggtgtcccggctgcacggctgccgctcagaaagagatgtgctggaggtgtgtgatgattatgaccgggagagaaatgagtacttctttgacagacattctgaggccttcggcttcatcctgctgtatgtgcggggccacggcaagctgcgctttgcccccaggatgtgtgagctgtccttctacaatgagatgatctactggggcctggagggcgcccacctggagtactgctgccagaggcggctggatgacaggatgtctgacacctacaccttctacagcgcagatgagcccggggtgctgggcagagatgaggcccggcctgggggcgctgaggccgcccccagccgccgctggctggagaggatgaggaggacctttgaggagcccaccagcagcctggccgcccagatcctggcctctgtgtctgtggtgtttgtgattgtgtccatggtggtgctgtgtgccagcaccctgcctgactggagaaatgctgctgctgacaacagaagcctggatgacaggagccgctacagcgctggccctggccgggagcccagcggcatcatcgaggccatctgcatcggctggttcaccgcagaatgtattgtgcgcttcatcgtgtccaagaacaagtgtgaatttgtgaagaggcccctgaacatcatcgacctgctggccatcaccccctactacatctctgtgctgatgaccgtcttcaccggggagaacagccagctgcagagagctggggtgaccctgcgggtgctgaggatgatgaggatcttctgggtgatcaagctggcccggcacttcatcggcctgcagaccctgggcctgaccctgaagcgctgctaccgggagatggtgatgctgctggtgttcatctgtgtggccatggccatcttcagcgccctgagccagctgctggagcacggcctggacctggagaccagcaacaaggacttcaccagcatcccagctgcctgctggtgggtgatcatctccatgaccaccgtgggctacggggacatgtaccccatcaccgtgcccggccgcatcctgggcggcgtgtgtgtggtgtctggcatcgtgctgctggccctgcccatcaccttcatctaccacagctttgtgcagtgctaccacgagctgaagttccgcagcgcccgctacagccgcagcctgagcacagagttcctgaactag

SEQ ID NO: 165003 - DNA, 1278 bp, synthetic construct
  misc_feature 1..1278: note = Description of Artificial Sequence: Synthetic coding sequence
  source 1..1278: mol_type = other DNA
atgaccttcggccgcagcggggccgcctctgtggtgctgaatgtgggcggggcccgctacagcctgagccgggagctgctgaaggacttccccctgcggcgggtgtcccggctgcacggctgccgctcagaaagagatgtgctggaggtgtgtgatgattatgaccgggagagaaatgagtacttctttgacagacattctgaggccttcggcttcatcctgctgtatgtgcggggccacggcaagctgcgctttgcccccaggatgtgtgagctgtccttctacaatgagatgatctactggggcctggagggcgcccacctggagtactgctgccagaggcggctggatgacaggatgtctgacacctacaccttctacagcgcagatgagcccggggtgctgggcagagatgaggcccggcctgggggcgctgaggccgcccccagccgccgctggctggagaggatgaggaggacctttgaggagcccaccagcagcctggccgcccagatcctggcctctgtgtctgtggtgtttgtgattgtgtccatggtggtgctgtgtgccagcaccctgcctgactggagaaatgctgctgctgacaacagaagcctggatgacaggagccgcatcatcgaggccatctgcatcggctggttcaccgctgagtgcatcgtgcgcttcatcgtgtccaagaacaagtgtgaatttgtgaagaggcccctgaacatcatcgacctgctggccatcaccccctactacatctctgtgctgatgacagtgttcaccggggagaacagccagctgcagagagctggggtgaccctgcgggtgctgaggatgatgaggatcttctgggtgatcaagctggcccggcacttcatcggcctgcagaccctgggcctgaccctgaagcgctgctaccgggagatggtgatgctgctggtgttcatctgtgtggccatggccatcttcagcgccctgagccagctgctggagcacggcctggacctggagaccagcaacaaggacttcaccagcatcccagctgcctgctggtgggtgatcatctccatgaccaccgtgggctatggagacatgtaccccatcaccgtgcccggccgcatcctgggcggcgtgtgtgtggtgtctggaattgtgctgctggccctgcccatcaccttcatctaccacagctttgtgcagtgctaccacgagctgaagttccgcagcgcccgctacagccgcagcctgagcacagagttcctgaactag

SEQ ID NO: 165004 - DNA, 1560 bp, synthetic construct
  misc_feature 1..1560: note = Description of Artificial Sequence: Synthetic coding sequence
  source 1..1560: mol_type = other DNA
atgcccatgcccagcagagatggcggcctgcaccccaggcaccaccactacggcagccacagcccctggagccagctgctgagcagccccatggagacccccagcatcaagggcctgtactaccgccgggtgaggaaggtgggcgccctggatgccagccctgtggacctgaagaaggagatcctgatcaacgtgggcggccgccgctacctgctgccctggagcaccctggaccgcttccccctgagccggctgagcaagctgcggctgtgccgctcctatgaggagatcgtgcagctgtgtgatgattatgatgaggacagccaggagttcttctttgacaggagccccagcgccttcggcgtgattgtgtccttcctggccgccggcaagctggtgctgctgcaggagatgtgtgccctgtccttccaggaggagctggcctactggggcatcgaggaggcccacctggagcgctgctgcctgaggaagctgctgaggaagctggaggagctggaggagctggccaagctgcacagagaagatgtgctgcggcagcagcgggagaccaggaggcctgccagccacagcagccgctggggcctgtgcatgaaccggctgcgggagatggtggagaacccccagagcggcctgcccgggaaggtgtttgcctgcctgagcatcctgtttgtggccaccacagctgtgtccctgtgtgtgtccaccatgccagacctgcgggcagaggaggaccagggcgagtgcagcaggaagtgctactacatcttcatcgtggagaccatctgtgtggcctggttcagcctggagttctgcctgcgctttgtgcaggcccaggacaagtgccagttcttccagggccccctgaacatcatcgacatcctggccatcagcccctactacgtgtccctggccgtgtctgaggagcccccagaagatggagagcggcccagcggcagcagctacctggagaaggtgggcctggtgctgcgggtgctgcgggccctgcgcatcctgtatgtgatgaggctggcccggcacagcctgggcctgcagaccctgggcctgactgtgcggcgctgcacccgggagtttggcctgctgctgctcttcctggccgtggccatcaccctcttcagccccctggtgtatgtggccgagaaggagagcggccgggtgctggagttcaccagcatcccagccagctactggtgggccatcatctccatgaccaccgtgggctatggagacatggtgcccaggtctgtgcccggccagatggtggccctgagcagcatcctgagcggcatcctgatcatggccttccctgccaccagcatcttccacaccttcagccacagctacctggagctgaagaaggagcaggagcagctgcaggcccggctgcggcacctgcagaacacaggccctgcctctgaatgtgagctgctggacccccacgtggccagcgagcacgagctgatgaatgatgtgaatgacctgatcctggagggccctgccctgcccatcatgcacatgtag

SEQ ID NO: 165005 - DNA, 2970 bp, synthetic construct
  misc_feature 1..2970: note = Description of Artificial Sequence: Synthetic coding sequence
  source 1..2970: mol_type = other DNA
atgaccatggccggcggcagaagaggcctggtggccccccagaacaccttcctggagaacatcgtgagaagaagcaatgacaccaactttgtgctgggcaatgcccagatcgtggactggcccatcgtgtacagcaatgatggcttctgcaagctgagcggctaccacagagctgaggtgatgcagaagagcagcacctgcagcttcatgtatggagagctgacagacaaggacaccatcgagaaggtgcggcagacctttgagaactatgagatgaacagctttgagatcctgatgtacaagaagaacagaacacctgtgtggttctttgtgaagatcgcccccatcagaaatgagcaggacaaggtggtgctcttcctgtgcaccttcagtgacatcacagccttcaagcagcccattgaagatgacagctgcaagggctggggcaagtttgcccggctgacccgggccctgaccagcagcagaggagtgctgcagcagctggcccccagcgtgcagaagggggagaatgtgcacaagcacagccggctggccgaggtgctgcagctgggcagtgacatcctgccccagtacaagcaggaggcccccaagaccccaccccacatcatcctgcactactgtgtgttcaagaccacctgggactggatcatcctgatcctgaccttctacacagccatcctggtgccctacaacgtgtccttcaagacccggcagaacaacgtggcctggctggtggtggacagcatcgtggatgtgatcttcctggtggacatcgtgctgaacttccacaccacctttgtgggccctgctggggaggtgatcagtgaccccaagctgatccgcatgaactacctgaagacctggtttgtgattgacctgctgagctgcctgccctatgatgtgatcaatgcctttgaaaatgtggatgaggtgtctgccttcatgggagaccccgggaagattggatttgctgaccagatccccccacccctggagggccgggagagccagggcatcagcagcctcttcagcagcctgaaggtggtgcggctgctgcggctgggccgggtggccaggaagctggaccactacatcgagtatggagctgctgtgctggtgctgctggtgtgtgtgtttggcctggccgcccactggatggcctgcatctggtacagcatcggggactatgagatctttgatgaggacaccaagaccatccggaacaacagctggctgtaccagctggccatggacatcggcaccccctaccagttcaatggaagtggcagcggcaagtgggagggcggccccagcaagaacagcgtgtacatcagcagcctgtacttcaccatgaccagcctgacctctgtgggcttcggcaacatcgcccccagcacagacatcgagaagatctttgctgtggccatcatgatgattggcagcctgctgtatgccaccatctttggaaatgtgaccaccatcttccagcagatgtatgccaacaccaaccgctaccacgagatgctgaacagcgtgcgggacttcctgaagctgtaccaggtgcccaagggcctgtctgagcgggtgatggactacatcgtgtccacctggagcatgagccggggcatcgacacagagaaggtgctgcagatctgccccaaggacatgagagctgacatctgtgtgcacctgaacaggaaggtgttcaaggagcacccagccttccggctggccagtgatggctgcctgcgggccctggccatggagttccagacagtgcactgtgcccctggggacctgatctaccacgccggggagagcgtggacagcctgtgctttgtggtgtctggcagcctggaggtgatccaggatgatgaggtggtggccatcctgggcaaaggagatgtgtttggagatgtgttctggaaggaggccaccctggcccagagctgtgccaacgtgcgggccctgacctactgtgacctgcacgtgatcaagagagatgccctgcagaaggtgctggagttctacacagccttcagccacagcttcagcaggaacctgatcctgacctacaacctgaggaagagaattgtgttcaggaagatcagtgatgtgaagcgggaggaggaggagaggatgaagaggaagaatgaggcccccctcatcctgcccccagaccaccctgtgcggcggctcttccagcgcttccggcagcagaaggaggcccggctggccgctgagcggggcggccgggacctggatgacctggatgtggagaagggaaatgtgctgacagaacatgccagcgccaaccacagcctggtgaaggcctctgtggtgacagtgcgggagagccctgccacccctgtgtccttccaggccgccagcaccagcggcgtgcctgaccacgccaagctgcaggcccctggcagcgagtgcctgggccccaagggcggcggcggggactgtgccaagaggaagtcctgggcccgcttcaaggatgcctgtgggaagtctgaggactggaacaaggtgtccaaggccgagagcatggagaccctgcctgagaggaccaaggccagcggggaggccaccctgaagaagacagacagctgtgacagcggcatcaccaagagtgacctgcggctggacaacgtgggggaggcccggagcccccaggacaggagccccatcctggccgaggtgaagcacagcttctaccccatccctgagcagaccctgcaggccaccgtgctggaggtgagacatgagctgaaggaggacatcaaggccctgaatgccaagatgaccaacatcgagaagcagctgtctgagatcctgcgcatcctgaccagcagaagaagcagccagagcccccaggagctgtttgagatcagccggccccagagccctgagagcgagcgggacatctttggagccagctag

SEQ ID NO: 165006 - DNA, 2889 bp, synthetic construct
  misc_feature 1..2889: note = Description of Artificial Sequence: Synthetic coding sequence
  source 1..2889: mol_type = other DNA
atgaccatggccggcggcagaagaggcctggtggccccccagaacaccttcctggagaacatcgtgagaagaagcaatgacaccaactttgtgctgggcaatgcccagatcgtggactggcccatcgtgtacagcaatgatggcttctgcaagctgagcggctaccacagagctgaggtgatgcagaagagcagcacctgcagcttcatgtatggagagctgacagacaaggacaccatcgagaaggtgcggcagacctttgagaactatgagatgaacagctttgagatcctgatgtacaagaagaacagaacacctgtgtggttctttgtgaagatcgcccccatcagaaatgagcaggacaaggtggtgctcttcctgtgcaccttcagtgacatcacagccttcaagcagcccattgaagatgacagctgcaagggctggggcaagtttgcccggctgacccgggccctgaccagcagcagaggagtgctgcagcagctggcccccagcgtgcagaagggggagaatgtgcacaagcacagccggctggccgaggtgctgcagctgggcagtgacatcctgccccagtacaagcaggaggcccccaagaccccaccccacatcatcctgcactactgtgtgttcaagaccacctgggactggatcatcctgatcctgaccttctacacagccatcctggtgccctacaacgtgtccttcaagacccggcagaacaacgtggcctggctggtggtggacagcatcgtggatgtgatcttcctggtggacatcgtgctgaacttccacaccacctttgtgggccctgctggggaggtgatcagtgaccccaagctgatccgcatgaactacctgaagacctggtttgtgattgacctgctgagctgcctgccctatgatgtgatcaatgcctttgaaaatgtggatgagggcatcagcagcctcttcagcagcctgaaggtggtgcggctgctgcggctgggccgggtggccaggaagctggaccactacattgaatatggagctgctgtgctggtgctgctggtgtgtgtgtttggcctggccgcccactggatggcctgcatctggtacagcattggagactatgagatctttgatgaggacaccaagaccatccggaacaacagctggctgtaccagctggccatggacatcggcaccccctaccagttcaacggcagcggcagcggcaagtgggagggcggccccagcaagaacagcgtgtacatcagcagcctgtacttcaccatgaccagcctgacctctgtgggctttggaaacatcgcccccagcacagacatcgagaagatctttgctgtggccatcatgatgattggcagcctgctgtatgccaccatctttggaaatgtgaccaccatcttccagcagatgtatgccaacaccaaccgctaccacgagatgctgaacagcgtgcgggacttcctgaagctgtaccaggtgcccaagggcctgtctgagcgggtgatggactacatcgtgtccacctggagcatgagccggggcatcgacacagagaaggtgctgcagatctgccccaaggacatgagagctgacatctgtgtgcacctgaacaggaaggtgttcaaggagcacccagccttccggctggccagtgatggctgcctgcgggccctggccatggagttccagacagtgcactgtgcccctggggacctgatctaccacgccggggagagcgtggacagcctgtgctttgtggtgtctggcagcctggaggtgatccaggatgatgaggtggtggccatcctgggcaaaggagatgtgtttggagatgtgttctggaaggaggccaccctggcccagagctgtgccaacgtgcgggccctgacctactgtgacctgcacgtgatcaagagagatgccctgcagaaggtgctggagttctacacagccttcagccacagcttcagcaggaacctgatcctgacctacaacctgaggaagagaattgtgttcaggaagatcagtgatgtgaagcgggaggaggaggagaggatgaagaggaagaatgaggcccccctcatcctgcccccagaccaccctgtgagaagactcttccagcgcttccggcagcagaaggaggcccggctggccgctgagcggggcggccgggacctggatgacctggatgtggagaagggaaatgtgctgacagagcacgccagcgccaaccacagcctggtgaaggcctctgtggtgacagtgcgggagagccctgccacccctgtgtccttccaggccgccagcaccagcggcgtgcctgaccacgccaagctgcaggcccctggctctgaatgtctgggccccaagggcggcggcggggactgtgccaagaggaagtcctgggcccgcttcaaggatgcctgtgggaagtctgaggactggaacaaggtgtccaaggccgagagcatggagaccctgcctgagaggaccaaggccagcggggaggccaccctgaagaagacagacagctgtgacagcggcatcaccaagagtgacctgcggctggacaacgtgggggaggcccggagcccccaggacaggagccccatcctggccgaggtgaagcacagcttctaccccatccctgagcagaccctgcaggccaccgtgctggaggtgagacatgagctgaaggaggacatcaaggccctgaatgccaagatgaccaacatcgagaagcagctgtctgagatcctgcgcatcctgaccagccgccgcagcagccagagcccccaggagctgtttgagatcagccggccccagagccctgagagcgagcgggacatctttggagccagctag

SEQ ID NO: 165007 - DNA, 3480 bp, synthetic construct
  misc_feature 1..3480: note = Description of Artificial Sequence: Synthetic coding sequence
  source 1..3480: mol_type = other DNA
atgcctgtgcggcggggccacgtggccccccagaacaccttcctggacaccatcatcaggaagtttgagggccagagcaggaagttcatcatcgccaatgcccgggtggagaactgtgccgtcatctactgcaatgatggcttctgtgagctgtgtggctacagcagagctgaggtgatgcagaggccctgcacctgtgacttcctgcacggccccaggacccagaggagagctgctgcccagatcgcccaggccctgctgggcgctgaggagaggaaggtggagatcgccttctacaggaaggatggcagctgcttcctgtgcctggtggatgtggtgcctgtgaagaatgaagatggagctgtgatcatgttcatcctgaactttgaggtggtgatggagaaggacatggtgggcagccctgcccatgacaccaaccaccggggcccccccacctcctggctggcccctggccgggccaagaccttccggctgaagctgcctgccctgctggccctgacagcccgggagagctctgtgcgcagcggcggggccggcggggccggggcccctggagctgtggtggtggatgtggacctgaccccagctgcccccagcagcgagagcctggccctggatgaggtgacagccatggacaaccacgtggccggcctgggccctgctgaggagcggcgggccctggtgggccctggcagcccccccaggtctgcccctggccagctgcccagcccccgggcccacagcctgaacccagatgccagcggcagcagctgcagcctggcccggaccaggagccgggagagctgtgcctctgtgcggcgggccagcagcgcagatgacatcgaggccatgagagctggggtgctgcccccaccacccaggcatgccagcactggagccatgcaccccctgcggagcggcctgctgaacagcaccagtgacagcgacctggtgcgctaccgcaccatcagcaagatcccccagatcaccctgaactttgtggacctgaagggggaccccttcctggccagccccaccagtgaccgggagatcatcgcccccaagatcaaggagaggacccacaacgtgacagagaaggtgacccaggtgctgagcctgggcgcagatgtgctgcctgagtacaagctgcaggccccccgcatccaccgctggaccatcctgcactacagccccttcaaggctgtgtgggactggctgatcctgctgctggtgatctacacagctgtgttcaccccctacagcgctgccttcctgctgaaggagacagaggagggccccccagccacagaatgtggctacgcctgccagcccctggccgtggtggacctgattgtggacatcatgttcatcgtggacatcctgatcaacttccgcaccacctacgtgaatgccaatgaggaggtggtgagccaccctggaagaattgctgtgcactacttcaagggctggttcctgattgacatggtggccgccatcccctttgacctgctgatctttggaagtggcagcgaggagctgattggcctgctgaagacagcccggctgctgcggctggtgcgggtggccaggaagctggaccgctacagtgaatatggagctgctgtgctcttcctgctgatgtgcacctttgccctgattgcccactggctggcctgcatctggtacgccatcggcaacatggagcagccccacatggacagcagaattggctggctgcacaacctgggggaccagatcggcaagccctacaacagcagcggcctgggcggccccagcatcaaggacaagtatgtgacagccctgtacttcaccttcagcagcctgacctctgtgggctttggaaatgtgagccccaacaccaacagcgagaagatcttcagcatctgtgtgatgctgattggcagcctgatgtatgccagcatctttggaaatgtgtctgccatcatccagaggctgtacagcggcacagcccgctaccacacccagatgctgcgggtgcgggagttcatccgcttccaccagatccccaaccccctgcggcagaggctggaggagtacttccagcacgcctggagctacaccaatggaattgacatgaatgctgtgctgaagggcttccctgagtgcctgcaggccgacatctgcctgcacctgaacagaagcctgctgcagcactgcaagcccttccggggggccaccaagggctgcctgcgggccctggccatgaagttcaagaccacccacgcccctcctggggacaccctggtgcacgccggggacctgctgacagccctgtacttcatcagccggggcagcattgagatcctgcggggagatgtggtggtggccatcctgggcaagaatgacatctttggagagcccctgaacctgtatgcccggcctgggaagagcaatggagatgtgcgggccctgacctactgtgacctgcacaagatccacagagatgacctgctggaggtgctggacatgtacccagagttcagtgaccacttctggagcagcctggagatcaccttcaacctgcgggacaccaacatgatccctggcagccctggcagcacagagctggagggcggcttcagccggcagaggaagaggaagctgtccttcagaagaagaacagacaaggacacagagcagcccggggaggtgtctgccctgggccctggccgggccggggccggccccagcagccggggccggcctgggggcccctggggcgagagccccagcagcggccccagcagccctgagagcagtgaagatgagggccctggccgcagcagcagccccctgcggctggtgcccttcagcagccccaggcctcctggagagcccccaggaggagagcccctgatggaggactgtgagaagagcagtgacacctgcaaccccctgagcggggccttcagcggcgtgagcaacatcttctccttctggggagacagccggggccggcagtaccaggagctgccccgctgcccagcccccacccccagcctgctgaacatccccctgagcagccctggccggcggcccagaggagatgtggagagccggctggatgccctgcagaggcagctgaaccggctggagacccggctgtctgctgacatggccaccgtgctgcagctgctgcagaggcagatgaccctggtgcccccagcctacagcgctgtgaccaccccaggccctggccccaccagcaccagccccctgctgcctgtgagccccctgcccaccctgaccctggacagcctgagccaggtgtcccagttcatggcctgtgaggagctgcccccaggggcccctgagctgccccaggagggccccacccggcggctgagcctgcccggccagctgggcgccctgaccagccagcccctgcacagacatggcagtgaccccggcagctag

SEQ ID NO: 165008 - DNA, 2460 bp, synthetic construct
  misc_feature 1..2460: note = Description of Artificial Sequence: Synthetic coding sequence
  source 1..2460: mol_type = other DNA
atggccgccccagctgggaaggccagcaggactggagccctgcggccccgggcccagaagggccgggtgcggcgggctgtgcgcatcagcagcctggtggcccaggaggtgctgagcctgggcgcagatgtgctgcctgagtacaagctgcaggccccccgcatccaccgctggaccatcctgcactacagccccttcaaggctgtgtgggactggctgatcctgctgctggtgatctacacagctgtgttcaccccctacagcgctgccttcctgctgaaggagacagaggagggccccccagccacagaatgtggctacgcctgccagcccctggccgtggtggacctgattgtggacatcatgttcatcgtggacatcctgatcaacttccgcaccacctacgtgaatgccaatgaggaggtggtgagccaccctggaagaattgctgtgcactacttcaagggctggttcctgattgacatggtggccgccatcccctttgacctgctgatctttggaagtggcagcgaggagctgattggcctgctgaagacagcccggctgctgcggctggtgcgggtggccaggaagctggaccgctacagtgaatatggagctgctgtgctcttcctgctgatgtgcacctttgccctgattgcccactggctggcctgcatctggtacgccatcggcaacatggagcagccccacatggacagcagaattggctggctgcacaacctgggggaccagatcggcaagccctacaacagcagcggcctgggcggccccagcatcaaggacaagtatgtgacagccctgtacttcaccttcagcagcctgacctctgtgggctttggaaatgtgagccccaacaccaacagcgagaagatcttcagcatctgtgtgatgctgattggcagcctgatgtatgccagcatctttggaaatgtgtctgccatcatccagaggctgtacagcggcacagcccgctaccacacccagatgctgcgggtgcgggagttcatccgcttccaccagatccccaaccccctgcggcagaggctggaggagtacttccagcacgcctggagctacaccaatggaattgacatgaatgctgtgctgaagggcttccctgagtgcctgcaggccgacatctgcctgcacctgaacagaagcctgctgcagcactgcaagcccttccggggggccaccaagggctgcctgcgggccctggccatgaagttcaagaccacccacgcccctcctggggacaccctggtgcacgccggggacctgctgacagccctgtacttcatcagccggggcagcattgagatcctgcggggagatgtggtggtggccatcctgggcaagaatgacatctttggagagcccctgaacctgtatgcccggcctgggaagagcaatggagatgtgcgggccctgacctactgtgacctgcacaagatccacagagatgacctgctggaggtgctggacatgtacccagagttcagtgaccacttctggagcagcctggagatcaccttcaacctgcgggacaccaacatgatccctggcagccctggcagcacagagctggagggcggcttcagccggcagaggaagaggaagctgtccttcagaagaagaacagacaaggacacagagcagcccggggaggtgtctgccctgggccctggccgggccggggccggccccagcagccggggccggcctgggggcccctggggcgagagccccagcagcggccccagcagccctgagagcagtgaagatgagggccctggccgcagcagcagccccctgcggctggtgcccttcagcagccccaggcctcctggagagcccccaggaggagagcccctgatggaggactgtgagaagagcagtgacacctgcaaccccctgagcggggccttcagcggcgtgagcaacatcttctccttctggggagacagccggggccggcagtaccaggagctgccccgctgcccagcccccacccccagcctgctgaacatccccctgagcagccctggccggcggcccagaggagatgtggagagccggctggatgccctgcagaggcagctgaaccggctggagacccggctgtctgctgacatggccaccgtgctgcagctgctgcagaggcagatgaccctggtgcccccagcctacagcgctgtgaccaccccaggccctggccccaccagcaccagccccctgctgcctgtgagccccctgcccaccctgaccctggacagcctgagccaggtgtcccagttcatggcctgtgaggagctgcccccaggggcccctgagctgccccaggagggccccacccggcggctgagcctgcccggccagctgggcgccctgaccagccagcccctgcacagacatggcagtgaccccggcagctag

SEQ ID NO: 165009 - DNA, 1182 bp, synthetic construct
  misc_feature 1..1182: note = Description of Artificial Sequence: Synthetic coding sequence
  source 1..1182: mol_type = other DNA
atggccgccccagctgggaaggccagcaggactggagccctgcggccccgggcccagaagggccgggtgcggcgggctgtgcgcatcagcagcctggtggcccaggaggtgctgagcctgggcgcagatgtgctgcctgagtacaagctgcaggccccccgcatccaccgctggaccatcctgcactacagccccttcaaggctgtgtgggactggctgatcctgctgctggtgatctacacagctgtgttcaccccctacagcgctgccttcctgctgaaggagacagaggagggccccccagccacagaatgtggctacgcctgccagcccctggccgtggtggacctgattgtggacatcatgttcatcgtggacatcctgatcaacttccgcaccacctacgtgaatgccaatgaggaggtggtgagccaccctggaagaattgctgtgcactacttcaagggctggttcctgattgacatggtggccgccatcccctttgacctgctgatctttggaagtggcagcgaggagctgattggcctgctgaagacagcccggctgctgcggctggtgcgggtggccaggaagctggaccgctacagtgaatatggagctgctgtgctcttcctgctgatgtgcacctttgccctgattgcccactggctggcctgcatctggtacgccatcggcaacatggagcagccccacatggacagcagaattggctggctgcacaacctgggggaccagatcggcaagccctacaacagcagcggcctgggcggccccagcatcaaggacaagtatgtgacagccctgtacttcaccttcagcagcctgacctctgtgggctttggaaatgtgagccccaacaccaacagcgagaagatcttcagcatctgtgtgatgctgattggcagcctgatgtatgccagcatctttggaaatgtgtctgccatcatccagaggctgtacagcggcacagcccgctaccacacccagatgctgcgggtgcgggagttcatccgcttccaccagatccccaaccccctgcggcagtgctgtgaccaccctggggcctggccccacttccacatcccagctgtggcccggcagcccccaccccacccccacctgggcctggccttcagcggcttccctgtgcatggagtgtag

SEQ ID NO: 165010 - DNA, 3192 bp, synthetic construct
  misc_feature 1..3192: note = Description of Artificial Sequence: Synthetic coding sequence
  source 1..3192: mol_type = other DNA
atgagcagccacagcgctggcagctgcttcctgtgcctggtggatgtggtgcctgtgaagaatgaagatggagctgtgatcatgttcatcctgaactttgaggtggtgatggagaaggacatggtgggcagccctgcccatgacaccaaccaccggggcccccccacctcctggctggcccctggccgggccaagaccttccggctgaagctgcctgccctgctggccctgacagcccgggagagctctgtgcgcagcggcggggccggcggggccggggcccctggagctgtggtggtggatgtggacctgaccccagctgcccccagcagcgagagcctggccctggatgaggtgacagccatggacaaccacgtggccggcctgggccctgctgaggagcggcgggccctggtgggccctggcagcccccccaggtctgcccctggccagctgcccagcccccgggcccacagcctgaacccagatgccagcggcagcagctgcagcctggcccggaccaggagccgggagagctgtgcctctgtgcggcgggccagcagcgcagatgacatcgaggccatgagagctggggtgctgcccccaccacccaggcatgccagcactggagccatgcaccccctgcggagcggcctgctgaacagcaccagtgacagcgacctggtgcgctaccgcaccatcagcaagatcccccagatcaccctgaactttgtggacctgaagggggaccccttcctggccagccccaccagtgaccgggagatcatcgcccccaagatcaaggagaggacccacaacgtgacagagaaggtgacccaggtgctgagcctgggcgcagatgtgctgcctgagtacaagctgcaggccccccgcatccaccgctggaccatcctgcactacagccccttcaaggctgtgtgggactggctgatcctgctgctggtgatctacacagctgtgttcaccccctacagcgctgccttcctgctgaaggagacagaggagggccccccagccacagaatgtggctacgcctgccagcccctggccgtggtggacctgattgtggacatcatgttcatcgtggacatcctgatcaacttccgcaccacctacgtgaatgccaatgaggaggtggtgagccaccctggaagaattgctgtgcactacttcaagggctggttcctgattgacatggtggccgccatcccctttgacctgctgatctttggaagtggcagcgaggagctgattggcctgctgaagacagcccggctgctgcggctggtgcgggtggccaggaagctggaccgctacagtgaatatggagctgctgtgctcttcctgctgatgtgcacctttgccctgattgcccactggctggcctgcatctggtacgccatcggcaacatggagcagccccacatggacagcagaattggctggctgcacaacctgggggaccagatcggcaagccctacaacagcagcggcctgggcggccccagcatcaaggacaagtatgtgacagccctgtacttcaccttcagcagcctgacctctgtgggctttggaaatgtgagccccaacaccaacagcgagaagatcttcagcatctgtgtgatgctgattggcagcctgatgtatgccagcatctttggaaatgtgtctgccatcatccagaggctgtacagcggcacagcccgctaccacacccagatgctgcgggtgcgggagttcatccgcttccaccagatccccaaccccctgcggcagaggctggaggagtacttccagcacgcctggagctacaccaatggaattgacatgaatgctgtgctgaagggcttccctgagtgcctgcaggccgacatctgcctgcacctgaacagaagcctgctgcagcactgcaagcccttccggggggccaccaagggctgcctgcgggccctggccatgaagttcaagaccacccacgcccctcctggggacaccctggtgcacgccggggacctgctgacagccctgtacttcatcagccggggcagcattgagatcctgcggggagatgtggtggtggccatcctgggcaagaatgacatctttggagagcccctgaacctgtatgcccggcctgggaagagcaatggagatgtgcgggccctgacctactgtgacctgcacaagatccacagagatgacctgctggaggtgctggacatgtacccagagttcagtgaccacttctggagcagcctggagatcaccttcaacctgcgggacaccaacatgatccctggcagccctggcagcacagagctggagggcggcttcagccggcagaggaagaggaagctgtccttcagaagaagaacagacaaggacacagagcagcccggggaggtgtctgccctgggccctggccgggccggggccggccccagcagccggggccggcctgggggcccctggggcgagagccccagcagcggccccagcagccctgagagcagtgaagatgagggccctggccgcagcagcagccccctgcggctggtgcccttcagcagccccaggcctcctggagagcccccaggaggagagcccctgatggaggactgtgagaagagcagtgacacctgcaaccccctgagcggggccttcagcggcgtgagcaacatcttctccttctggggagacagccggggccggcagtaccaggagctgccccgctgcccagcccccacccccagcctgctgaacatccccctgagcagccctggccggcggcccagaggagatgtggagagccggctggatgccctgcagaggcagctgaaccggctggagacccggctgtctgctgacatggccaccgtgctgcagctgctgcagaggcagatgaccctggtgcccccagcctacagcgctgtgaccaccccaggccctggccccaccagcaccagccccctgctgcctgtgagccccctgcccaccctgaccctggacagcctgagccaggtgtcccagttcatggcctgtgaggagctgcccccaggggcccctgagctgccccaggagggccccacccggcggctgagcctgcccggccagctgggcgccctgaccagccagcccctgcacagacatggcagtgaccccggcagctag

SEQ ID NO: 165011 - DNA, 2667 bp, synthetic construct
  misc_feature 1..2667: note = Description of Artificial Sequence: Synthetic coding sequence
  source 1..2667: mol_type = other DNA
atgcctgtgcggcggggccacgtggccccccagaacaccttcctggacaccatcatcaggaagtttgagggccagagcaggaagttcatcatcgccaatgcccgggtggagaactgtgccgtcatctactgcaatgatggcttctgtgagctgtgtggctacagcagagctgaggtgatgcagaggccctgcacctgtgacttcctgcacggccccaggacccagaggagagctgctgcccagatcgcccaggccctgctgggcgctgaggagaggaaggtggagatcgccttctacaggaaggatggcagctgcttcctgtgcctggtggatgtggtgcctgtgaagaatgaagatggagctgtgatcatgttcatcctgaactttgaggtggtgatggagaaggacatggtgggcagccctgcccatgacaccaaccaccggggcccccccacctcctggctggcccctggccgggccaagaccttccggctgaagctgcctgccctgctggccctgacagcccgggagagctctgtgcgcagcggcggggccggcggggccggggcccctggagctgtggtggtggatgtggacctgaccccagctgcccccagcagcgagagcctggccctggatgaggtgacagccatggacaaccacgtggccggcctgggccctgctgaggagcggcgggccctggtgggccctggcagcccccccaggtctgcccctggccagctgcccagcccccgggcccacagcctgaacccagatgccagcggcagcagctgcagcctggcccggaccaggagccgggagagctgtgcctctgtgcggcgggccagcagcgcagatgacatcgaggccatgagagctggggtgctgcccccaccacccaggcatgccagcactggagccatgcaccccctgcggagcggcctgctgaacagcaccagtgacagcgacctggtgcgctaccgcaccatcagcaagatcccccagatcaccctgaactttgtggacctgaagggggaccccttcctggccagccccaccagtgaccgggagatcatcgcccccaagatcaaggagaggacccacaacgtgacagagaaggtgacccaggtgctgagcctgggcgcagatgtgctgcctgagtacaagctgcaggccccccgcatccaccgctggaccatcctgcactacagccccttcaaggctgtgtgggactggctgatcctgctgctggtgatctacacagctgtgttcaccccctacagcgctgccttcctgctgaaggagacagaggagggccccccagccacagaatgtggctacgcctgccagcccctggccgtggtggacctgattgtggacatcatgttcatcgtggacatcctgatcaacttccgcaccacctacgtgaatgccaatgaggaggtggtgagccaccctggaagaattgctgtgcactacttcaagggctggttcctgattgacatggtggccgccatcccctttgacctgctgatctttggaagtggcagcgaggagctgattggcctgctgaagacagcccggctgctgcggctggtgcgggtggccaggaagctggaccgctacagtgaatatggagctgctgtgctcttcctgctgatgtgcacctttgccctgattgcccactggctggcctgcatctggtacgccatcggcaacatggagcagccccacatggacagcagaattggctggctgcacaacctgggggaccagatcggcaagccctacaacagcagcggcctgggcggccccagcatcaaggacaagtatgtgacagccctgtacttcaccttcagcagcctgacctctgtgggctttggaaatgtgagccccaacaccaacagcgagaagatcttcagcatctgtgtgatgctgattggcagcctgatgtatgccagcatctttggaaatgtgtctgccatcatccagaggctgtacagcggcacagcccgctaccacacccagatgctgcgggtgcgggagttcatccgcttccaccagatccccaaccccctgcggcagaggctggaggagtacttccagcacgcctggagctacaccaatggaattgacatgaatgctgtgctgaagggcttccctgagtgcctgcaggccgacatctgcctgcacctgaacagaagcctgctgcagcactgcaagcccttccggggggccaccaagggctgcctgcgggccctggccatgaagttcaagaccacccacgcccctcctggggacaccctggtgcacgccggggacctgctgacagccctgtacttcatcagccggggcagcattgagatcctgcggggagatgtggtggtggccatcctgggcatgggctggggcgccggcaccggcctggagatgcccagcgctgccagcagaggagccagcctgctgaacatgcagagcctgggcctgtggacctgggactgcctgcagggccactgggcccccctcatccacctgaacagcggccccccatctggggccatggagaggagccccacctggggcgaggccgctgagctgtggggcagccacatcctgctgcccttccgcatccgccacaagcagaccctgtttgccagcctgaagtag

SEQ ID NO: 165012 - DNA, 3252 bp, synthetic construct
  misc_feature 1..3252: note = Description of Artificial Sequence: Synthetic coding sequence
  source 1..3252: mol_type = other DNA
atgcctgccatgaggggcctgctggccccccagaacaccttcctggacaccatcgccaccaggtttgatggcacccacagcaactttgtgctgggcaatgcccaggtggccggcctcttccctgtggtgtactgcagtgatggcttctgtgacctgaccggcttcagcagagctgaggtgatgcagaggggctgtgcctgcagcttcctgtatggccctgacaccagcgagctggtgcggcagcagatcaggaaggccctggatgagcacaaggagttcaaggccgagctgatcctgtacaggaagagcggcctgcccttctggtgcctgctggatgtgatccccatcaagaatgagaagggggaggtggccctcttcctggtgagccacaaggacatcagcgagaccaagaacagaggaggccctgaccgctggaaggagaccggcggcggcagaagaagatatggccgggcccggagcaagggcttcaatgccaacagaagaagaagcagagctgtgctgtaccacctgagcggccacctgcagaagcagcccaagggcaagcacaagctgaacaagggcgtgtttggagagaagcccaacctgcctgagtacaaggtggccgccatcaggaagagccccttcatcctgctgcactgtggggccctgcgggccacctgggatggcttcatcctgctggccaccctgtatgtggccgtgacagtgccctacagcgtgtgtgtgtccacagcccgggagcccagcgctgcccggggcccccccagcgtgtgtgacctggccgtggaggtgctcttcatcctggacatcgtgctgaacttccgcaccacctttgtgtccaagagcggccaggtggtgtttgcccccaagagcatctgcctgcactacgtgaccacctggttcctgctggatgtgattgctgccctgccctttgacctgctgcacgccttcaaggtgaatgtgtactttggagcccacctgctgaagacagtgcggctgctgcggctgctgcggctgctgccccggctggaccgctacagccagtacagcgctgtggtgctgaccctgctgatggctgtgtttgccctgctggcccactgggtggcctgtgtgtggttctacatcggccagcgggagattgagagcagcgagagcgagctgcctgagatcggctggctgcaggagctggcccggcggctggagaccccctactacctggtgggcagaagacctgctgggggcaacagcagcggccagagcgacaactgcagcagcagcagcgaggccaacggcaccggcctggagctgctgggcggccccagcctgcggagcgcctacatcaccagcctgtactttgccctgagcagcctgacctctgtgggctttggaaatgtgtctgccaacacagacacagagaagatcttcagcatctgcaccatgctgattggagccctgatgcatgctgtggtgtttggaaatgtgacagccatcatccagaggatgtatgcccggcgcttcctgtaccacagcaggacccgggacctgcgggactacatccgcatccaccgcatccccaagcccctgaagcagaggatgctggagtacttccaggccacctgggccgtgaacaacggcatcgacaccacagagctgctgcagagcctgcctgatgagctgcgggctgacatcgccatgcacctgcacaaggaggtgctgcagctgcccctgtttgaagctgccagccggggctgcctgcgggccctgagcctggccctgcggcctgccttctgcaccccaggagagtacctgatccaccagggagatgccctgcaggccctgtactttgtgtgcagcggctccatggaggtgctgaagggcggcaccgtgctggccatcctgggcaaaggagacctgattggctgtgagctgccccggcgggagcaggtggtgaaggccaatgctgatgtgaagggcctgacctactgtgtgctgcagtgcctgcagctggccggcctgcatgacagcctggccctgtacccagagtttgccccccgcttcagccggggcctgcggggggagctgagctacaacctgggcgctgggggcggcagcgctgaggtggacaccagcagcctgagcggggacaacaccctgatgagcaccctggaggagaaggagacagatggagagcagggccccaccgtgtccccagccccagcagatgagcccagcagccccctgctgagccctggctgcaccagcagcagcagcgctgccaagctgctgagccccaggagaacagccccccggccccggctgggcggccggggccggcccggccgggccggggccctgaaggccgaggccggccccagcgccccaccccgggccctggagggcctgcggctgccccccatgccctggaatgtgcccccagacctgagcccccgggtggtggatggcattgaagatggctgcggcagtgaccagcccaagttctccttccgggtgggccagagcggcccagaatgtagcagcagccccagccctggccctgagagcggcctgctgactgtgccccacggccccagcgaggccaggaacacagacaccctggacaagctgcggcaggccgtgacagagctgtctgagcaggtgctgcagatgagggagggcctgcagagcctgcggcaggccgtgcagctggtgctggccccccaccgggagggcccctgcccccgggccagcggggagggcccctgcccagccagcaccagcggcctgctgcagcccctgtgtgtggacaccggggccagcagctactgcctgcagcccccagctggctctgtgctgagcggcacctggccccacccccggcccggccccccacccctgatggccccctggccctggggccccccagccagccagagcagcccctggccccgggccacagccttctggaccagcaccagtgacagcgagcccccagccagcggggacctgtgcagcgagcccagcaccccagccagccccccaccttctgaggagggcgccaggactggacctgctgagcctgtgtcccaggccgaggccaccagcactggagagcccccacctggcagcggcggcctggccctgccctgggacccccacagcctggagatggtgctgattggctgccacggcagcggcaccgtgcagtggacccaggaggagggcactggagtgtag

SEQ ID NO: 165013 - DNA, 2967 bp, synthetic construct
  misc_feature 1..2967: note = Description of Artificial Sequence: Synthetic coding sequence
  source 1..2967: mol_type = other DNA
atgcctgggggcaagaggggcctggtggccccccagaacaccttcctggagaacatcgtgagaagaagcagcgagagcagcttcctgctgggcaatgcccagatcgtggactggcctgtggtgtacagcaatgatggcttctgcaagctgagcggctaccacagagcagatgtgatgcagaagagcagcacctgcagcttcatgtatggagagctgacagacaagaagaccatcgagaaggtgcggcagacctttgacaactatgagagcaactgctttgaggtgctgctgtacaagaagaacagaacacctgtgtggttctacatgcagatcgcccccatcagaaatgagcacgagaaggtggtgctcttcctgtgcaccttcaaggacatcaccctcttcaagcagcccattgaagatgacagcaccaagggctggaccaagtttgcccggctgacccgggccctgaccaacagccgctctgtgctgcagcagctgacccccatgaacaagacagaggtggtgcacaagcacagccggctggccgaggtgctgcagctgggcagtgacatcctgccccagtacaagcaggaggcccccaagaccccaccccacatcatcctgcactactgtgccttcaagaccacctgggactgggtgatcctgatcctgaccttctacacagccatcatggtgccctacaacgtgtccttcaagaccaagcagaacaacatcgcctggctggtgctggacagcgtggtggatgtgatcttcctggtggacatcgtgctgaacttccacaccacctttgtgggccctggaggagaggtgatcagtgaccccaagctgatccgcatgaactacctgaagacctggtttgtgattgacctgctgagctgcctgccctatgacatcatcaatgcctttgaaaatgtggatgagggcatcagcagcctcttcagcagcctgaaggtggtgcggctgctgcggctgggccgggtggccaggaagctggaccactacctggagtatggagctgctgtgctggtgctgctggtgtgtgtgtttggcctggtggcccactggctggcctgcatctggtacagcatcggggactatgaggtgattgatgaggtgaccaacaccatccagattgacagctggctgtaccagctggccctgagcatcggcaccccctaccgctacaacaccagcgctggcatctgggagggcggccccagcaaggacagcctgtatgtgagcagcctgtacttcaccatgaccagcctgaccaccatcggctttggaaacatcgcccccaccacagatgtggagaagatgttttctgtggccatgatgatggtgggcagcctgctgtatgccaccatctttggaaatgtgaccaccatcttccagcagatgtatgccaacaccaaccgctaccacgagatgctgaacaacgtgcgggacttcctgaagctgtaccaggtgcccaagggcctgtctgagcgggtgatggactacatcgtgtccacctggagcatgagcaaaggaattgacacagagaaggtgctgagcatctgccccaaggacatgagagctgacatctgtgtgcacctgaacaggaaggtgttcaatgagcacccagccttccggctggccagtgatggctgcctgcgggccctggccgtggagttccagaccatccactgtgcccctggggacctgatctaccacgccggggagagcgtggatgccctgtgctttgtggtgtctggcagcctggaggtgatccaggatgatgaggtggtggccatcctgggcaaaggagatgtgtttggagacatcttctggaaggagaccaccctggcccacgcctgtgccaacgtgcgggccctgacctactgtgacctgcacatcatcaagcgggaggccctgctgaaggtgctggacttctacacagcctttgccaacagcttcagcaggaacctgaccctgacctgcaacctgaggaagaggatcatcttcaggaagatcagtgatgtgaagaaggaggaggaggagcggctgcggcagaagaatgaggtgaccctgagcatccctgtggaccaccctgtgaggaagctgttccagaagttcaagcagcagaaggagctgaggaaccagggcagcacccagggcgaccctgagaggaaccagctgcaggtggagagccgcagcctgcagaatggagccagcatcaccggcacctctgtggtgacagtgtcccagatcacccccatccagaccagcctggcctacgtgaagaccagcgagagcctgaagcagaacaacagagatgccatggagctgaagcccaatggaggagctgaccagaagtgcctgaaggtgaacagccccatccgcatgaagaatggaaatggcaagggctggctgcggctgaagaacaacatgggcgcccacgaggagaagaaggaggactggaacaacgtgaccaaggccgagagcatgggcctgctgtctgaggaccccaagagcagtgacagcgagaacagcgtgaccaagaaccccctgaggaagacagacagctgtgacagcggcatcaccaagagtgacctgcggctggacaaggccggggaggcccggagccccctggagcacagccccatccaggctgatgccaagcaccccttctaccccatccctgagcaggccctgcagaccaccctgcaggaggtgaagcatgagctgaaggaggacatccagctgctgagctgcaggatgacagccctggagaagcaggtggccgagatcctgaagatcctgtctgagaagtctgtgccccaggccagcagccccaagagccagatgcccctgcaggtgcccccccagatcccctgccaggacatcttctctgtgtccaggcctgagagccctgagagtgacaaggatgagatccacttctag

SEQ ID NO: 165014 - DNA, 1269 bp, synthetic construct
  misc_feature 1..1269: note = Description of Artificial Sequence: Synthetic coding sequence
  source 1..1269: mol_type = other DNA
atgcagaagagcagcacctgcagcttcatgtatggagagctgacagacaagaagaccatcgagaaggtgcggcagacctttgacaactatgagagcaactgctttgaggtgctgctgtacaagaagaacagaacacctgtgtggttctacatgcagatcgcccccatcagaaatgagcacgagaaggtggtgctcttcctgtgcaccttcaaggacatcaccctcttcaagcagcccattgaagatgacagcaccaagggctggaccaagtttgcccggctgacccgggccctgaccaacagccgctctgtgctgcagcagctgacccccatgaacaagacagaggtggtgcacaagcacagccggctggccgaggtgctgcagctgggcagtgacatcctgccccagtacaagcaggaggcccccaagaccccaccccacatcatcctgcactactgtgccttcaagaccacctgggactgggtgatcctgatcctgaccttctacacagccatcatggtgccctacaacgtgtccttcaagaccaagcagaacaacatcgcctggctggtgctggacagcgtggtggatgtgatcttcctggtggacatcgtgctgaacttccacaccacctttgtgggccctggaggagaggtgatcagtgaccccaagctgatccgcatgaactacctgaagacctggtttgtgattgacctgctgagctgcctgccctatgacatcatcaatgcctttgaaaatgtggatgagggcatcagcagcctcttcagcagcctgaaggtggtgcggctgctgcggctgggccgggtggccaggaagctggaccactacctggagtatggagctgctgtgctggtgctgctggtgtgtgtgtttggcctggtggcccactggctggcctgcatctggtacagcatcggggactatgaggtgattgatgaggtgaccaacaccatccagattgacagctggctgtaccagctggccctgagcatcggcaccccctaccgctacaacaccagcgctggcatctgggagggcggccccagcaaggacagcctgtatgtgagcagcctgtacttcaccatgaccagcctgaccaccatcggctttggaaacatcgcccccaccacagatgtggagaagatgttttctgtggccatgatgatggtgggctgcaagtacttcaacttcttcatcgagaactactgctactggcagttctcctggctgcagagccagattggatag

SEQ ID NO: 165015 - DNA, 2199 bp, synthetic construct
  misc_feature 1..2199: note = Description of Artificial Sequence: Synthetic coding sequence
  source 1..2199: mol_type = other DNA
atgcctgtgcggcggggccacgtggccccccagaacaccttcctgggcaccatcatcaggaagtttgagggccagaacaagaagttcatcatcgccaatgcccgggtgcagaactgtgccatcatctactgcaatgatggcttctgtgagatgacaggcttcagcaggccagatgtgatgcagaagccctgcacctgtgacttcctgcacggccctgagaccaagagacatgacatcgcccagatcgcccaggccctgctgggcagcgaggagaggaaggtggaggtgacctactaccacaagaatggcagcaccttcatctgcaacacccacatcatccctgtgaagaaccaggagggcgtggccatgatgttcatcatcaactttgaatatgtgacagacaatgaaaatgctgccaccccagagcgggtgaaccccatcctgcccatcaagacagtgaacaggaagttcttcggcttcaagtttcctggcctgcgggtgctgacctacaggaagcagagcctgccccaggaggaccctgatgtggtggtgattgacagcagcaagcacagtgatgacagcgtggccatgaagcacttcaagagccccaccaaggagagctgcagccccagcgaggctgatgacaccaaggccctgatccagcccagcaagtgcagccccctggtgaacatcagcggccccctggaccacagcagccccaagaggcagtgggaccggctgtacccagacatgctgcagagcagcagccagctgagccacagccgcagccgggagagcctgtgcagcatcagaagagccagctctgtgcatgacatcgagggcttcggcgtgcaccccaagaacatcttccgggacagacatgccagcgagggccccttcaaccacatcaagagcagcctgctgggcagcaccagtgacagcaacctgaacaagtacagcaccatcaacaagatcccccagctgaccctgaacttcagcgaggtgaagacagagaagaagaacagcagcccccccagcagtgacaagaccatcatcgcccccaaggtgaaggacaggacccacaacgtgacagagaaggtgacccaggtgctgagcctgggcgcagatgtgctgcctgagtacaagctgcagaccccccgcatcaacaagttcaccatcctgcactacagccccttcaaggctgtgtgggactggctgatcctgctgctggtgatctacacagccatcttcaccccctacagcgctgccttcctgctgaatgaccgggaggagcagaagaggcgggagtgtggctacagctgcagccccctgaatgtggtggacctgattgtggacatcatgttcatcatcgacatcctgatcaacttccgcaccacctacgtgaaccagaatgaggaggtggtgtctgaccctgccaagatcgccatccactacttcaagggctggttcctgattgacatggtggccgccatcccctttgacctgctgatctttggaagtggcagtgatgagaccaccaccctcatcggcctgctgaagacagcccggctgctgcggctggtgcgggtggccaggaagctggaccgctacagtgaatatggagctgctgtgctgatgctgctgatgtgcatctttgccctgattgcccactggctggcctgcatctggtacgccatcggaaatgtggagcggccctacctgacagacaagattggctggctggacagcctgggccagcagatcggcaagcgctacaatgacagcgacagcagcagcggccccagcatcaaggacaagtatgtgacagccctgtacttcaccttcagcagcctgacctctgtgggctttggaaatgtgagccccaacaccaacagcgagaagatcttcagcatctgtgtgatgctgattggcagcctgatgtatgccagcatctttggaaatgtgtctgccatcatccagaggctgtacagcggcacagcccgctaccacatgcagatgctgcgggtgaaggagttcatccgcttccaccagatccccaaccccctgcggcagaggctggaggagtacttccagcacgcctggacctacaccaatggaattgacatgaacatggtgtgcatgtctgtgttccagaatgaatctgctgctggcatcatcgtcatcgccaagatggagtag

SEQ ID NO: 165016 - DNA, 3591 bp, synthetic construct
  misc_feature 1..3591: note = Description of Artificial Sequence: Synthetic coding sequence
  source 1..3591: mol_type = other DNA
atgcctgtgcggcggggccacgtggccccccagaacaccttcctgggcaccatcatcaggaagtttgagggccagaacaagaagttcatcatcgccaatgcccgggtgcagaactgtgccatcatctactgcaatgatggcttctgtgagatgacaggcttcagcaggccagatgtgatgcagaagccctgcacctgtgacttcctgcacggccctgagaccaagagacatgacatcgcccagatcgcccaggccctgctgggcagcgaggagaggaaggtggaggtgacctactaccacaagaatggcagcaccttcatctgcaacacccacatcatccctgtgaagaaccaggagggcgtggccatgatgttcatcatcaactttgaatatgtgacagacaatgaaaatgctgccaccccagagcgggtgaaccccatcctgcccatcaagacagtgaacaggaagttcttcggcttcaagtttcctggcctgcgggtgctgacctacaggaagcagagcctgccccaggaggaccctgatgtggtggtgattgacagcagcaagcacagtgatgacagcgtggccatgaagcacttcaagagccccaccaaggagagctgcagccccagcgaggctgatgacaccaaggccctgatccagcccagcaagtgcagccccctggtgaacatcagcggccccctggaccacagcagccccaagaggcagtgggaccggctgtacccagacatgctgcagagcagcagccagctgagccacagccgcagccgggagagcctgtgcagcatcagaagagccagctctgtgcatgacatcgagggcttcggcgtgcaccccaagaacatcttccgggacagacatgcctctgaagataatggaagaaatgtgaagggccccttcaaccacatcaagagcagcctgctgggcagcaccagtgacagcaacctgaacaagtacagcaccatcaacaagatcccccagctgaccctgaacttcagcgaggtgaagacagagaagaagaacagcagcccccccagcagtgacaagaccatcatcgcccccaaggtgaaggacaggacccacaacgtgacagagaaggtgacccaggtgctgagcctgggcgcagatgtgctgcctgagtacaagctgcagaccccccgcatcaacaagttcaccatcctgcactacagccccttcaaggctgtgtgggactggctgatcctgctgctggtgatctacacagccatcttcaccccctacagcgctgccttcctgctgaatgaccgggaggagcagaagagaagagaatgtggctacagctgcagccccctgaatgtggtggacctgattgtggacatcatgttcatcatcgacatcctgatcaacttccgcaccacctacgtgaaccagaatgaggaggtggtgtctgaccctgccaagatcgccatccactacttcaagggctggttcctgattgacatggtggccgccatcccctttgacctgctgatcttcggcagcggcagtgatgagaccaccaccctgattggcctgctgaagacagcccggctgctgcggctggtgcgggtggccaggaagctggaccgctacagtgaatatggagctgctgtgctgatgctgctgatgtgcatctttgccctgattgcccactggctggcctgcatctggtacgccatcggaaatgtggagcggccctacctgacagacaagattggctggctggacagcctgggccagcagatcggcaagcgctacaatgacagcgacagcagcagcggccccagcatcaaggacaagtatgtgacagccctgtacttcaccttcagcagcctgacctctgtgggctttggaaatgtgagccccaacaccaacagcgagaagatcttcagcatctgtgtgatgctgattggcagcctgatgtatgccagcatctttggaaatgtgtctgccatcatccagaggctgtacagcggcacagcccgctaccacatgcagatgctgcgggtgaaggagttcatccgcttccaccagatccccaaccccctgcggcagaggctggaggagtacttccagcacgcctggacctacaccaacggcatcgacatgaacatggtgctgaagggcttcccagaatgtctgcaggccgacatctgcctgcacctgaaccagaccctgctgcagaactgcaaggccttccggggggccagcaagggctgcctgcgggccctggccatgaagttcaagaccacccacgcccctcctggggacaccctggtgcactgtggagatgtgctgacagccctgtacttcctgagccggggcagcattgagatcctgaaggatgacatcgtggtggccatcctgggcaagaatgacatctttggagagatggtgcacctgtatgccaagccaggcaagagcaatgctgatgtgcgggccctgacctactgtgacctgcacaagatccagcgggaggacctgctggaggtgctggacatgtacccagagttcagtgaccacttcctgaccaacctggagctgaccttcaacctgcggcatgaaagtgccaaggctgacctgctgcggagccagagcatgaatgattctgagggggacaactgcaagctgcggcggaggaagctgagctttgaaagtgaaggagagaaggagaacagcaccaatgaccctgaagattctgctgacaccatccgccactaccagagcagcaagaggcactttgaggagaagaagagccgcagcagcagcttcatcagcagcattgatgatgagcagaagcccctcttcagcggcatcgtggacagcagccctggcatcggcaaggccagcggcctggactttgaggagaccgtgcccaccagcggccgcatgcacatcgacaagaggagccacagctgcaaggacatcacagacatgaggtcctgggagcgggagaatgcccacccccagcctgaggacagcagccccagcgccctgcagagagctgcctggggcatcagcgagacagaaagtgacctgacctacggggaggtggagcagaggctggacctgctgcaggagcagctgaaccggctggagagccagatgaccacagacatccagaccatcctgcagctgctgcagaagcagaccaccgtggtgcccccagcctacagcatggtgacagctggcagcgagtaccagaggcccatcatccagctgatgaggaccagccagcctgaggccagcatcaagacagacaggagcttcagccccagcagccagtgcccagagttcctggacctggagaagagcaagctgaagagcaaggagagcctgagcagcggcgtgcacctgaacacagccagcgaggacaacctgaccagcctgctgaagcaggacagcgacctgagcctggagctgcacctgcggcagaggaagacctacgtgcaccccatccgccaccccagcctgcctgacagcagcctgagcacagtgggcatcgtgggcctgcacagacatgtgtctgaccccggcctgcccgggaagtag

SEQ ID NO: 165017 - DNA, 1755 bp, synthetic construct
  misc_feature 1..1755: note = Description of Artificial Sequence: Synthetic coding sequence
  source 1..1755: mol_type = other DNA
atggtggccgaggtgtgcagcatgcccacagccagcacagtgaagaagccctttgacctgcggagcaagatgggcaagtggtgccaccaccgcttcccctgctgccggggcagcggcaagagcaacatgggcaccagcggggaccatgatgacagcttcatgaagatgctgcggagcaagatgggcaagtgctgccgccactgcttcccctgctgccggggcagcggcaccagcaatgtgggcaccagcggggaccatgaaaattccttcatgaagatgctgcggagcaagatgggcaagtggtgctgccactgcttcccctgctgccggggcagcggcaagagcaatgtgggcgcctggggagactatgaccacagcgccttcatggagccccgctaccacatccggcgggaggacctggacaagctgcaccgggccgcctggtggggcaaggtgcccaggaaggacctgattgtgatgctgcgggacacagacatgaacaagagggacaaggagaagaggacagccctgcacctggccagcgccaatggaaacagcgaggtggtgcagctgctgctggaccggcgctgccagctgaatgtgctggacaacaagaagaggacagccctgatcaaggccatccagtgccaggaggatgaatgtgtgctgatgctgctggagcacggggctgacaggaacatcccagatgaatatggcaacacagccctgcactacgccatctacaatgaagacaagctgatggccaaggccctgctgctgtatggagctgacatcgagagcaagaacaagtgtggcctgacccccctgctgctgggcgtgcatgagcagaagcagcaggtggtgaagttcctgatcaagaagaaggccaacctgaatgtgctggacagatatggccgcacagccctgatcctggccgtgtgctgcggcagcgccagcatcgtgaacctgctgctggagcagaatgtggatgtgagcagccaggacctgagcggccagacagcccgggagtatgctgtgagcagccaccaccacgtgatctgtgagctgctgagtgactacaaggagaagcagatgctgaagatcagcagcgagaacagcaaccctgagcaggacctgaagctgaccagcgaggaggagagccagaggctgaaggtgtctgagaacagccagcctgagaagatgagccaggagcctgagatcaacaaggactgtgaccgggaggtggaggaggagatcaagaagcacggcagcaaccctgtgggcctgcctgagaacctgaccaatggagccagcgctggaaatggagatgatggcctcatcccccagaggaggagcaggaagccagagaaccagcagttcccagacacagaaaatgaggagtaccacagtgatgagcagaatgacaccaggaagcagctgtctgaggagcagaacacaggcatcagccaggatgagatcctgaccaacaagcagaagcagatcgaggtggccgagcagaagatgaacagcgagctgagcctgagccacaagaaggaggaggacctgctgagagaaaattctgtgctgcaggaggagatcgccatgctgcggctggagctggatgagaccaagcaccagaaccagctgcgggagaacaagatcctggaggagattgagagcgtgaaggagaagacagacaagctgctgcgggccatgcagctgaatgaggaggccctgaccaagaccaacatctag

SEQ ID NO: 165018 - DNA, 1638 bp, synthetic construct
  misc_feature 1..1638: note = Description of Artificial Sequence: Synthetic coding sequence
  source 1..1638: mol_type = other DNA
atggtggccgaggccggctccatgcctgctgccagctctgtgaagaagcccttcggcctgcggagcaagatgggcaagtggtgccgccactgctttgcctggtgccggggcagcggcaagagcaatgtgggcaccagcggggaccatgatgacagcgccatgaagaccctgcggagcaagatgggcaagtggtgctgccactgcttcccctggtgccggggcagcggcaagagcaatgtgggcaccagcggggaccatgatgattctgccatgaagaccctgcggagcaagatgggcaagtggtgctgccactgcttcccctgctgccggggcagcggcaagagcaatgtgggcaccagcggggaccatgatgacagcgccatgaagaccctgcggagcaagatgggcaagtggtgctgccactgcttcccctgctgccggggcagcggcaagaacaaggtgggcccctggggagactatgatgattctgccttcatggagccccgctaccacgtgagaagagaggacctggacaagctgcacagagctgcctggtggggcaaggtgcccaggaaggacctgattgtgatgctgaaggacacagacatgaacaagaaggacaagcagaagaggacagccctgcacctggccagcgccaacggcaacagcgaggtggtgaagctgctgctggaccggcgctgccagctgaacatcctggacaacaagaagaggacagccctgaccaaggctgtgcagtgccaggaggatgaatgtgccctgatgctgctggagcacggcacagaccccaacatcccagatgaatatggcaacacagccctgcactacgccatctacaatgaagacaagctgatggccaaggccctgctgctgtatggagctgacatcgagagcaagaacaagcacggcctgacccccctgctgctgggcgtgcatgagcagaagcagcaggtggtgaagttcctgatcaagaagaaggccaacctgaatgccctggacagatatggccgcacagccctgatcctggccgtgtgctgcggcagcgccagcatcgtgtccctgctgctggagcagaacattgatgtgagcagccaggacctgagcggccagacagcccgggagtatgctgtgagcagccgccacaacgtcatctgccagctgctgagtgactacaaggagaagcagatcctgaaggtgtcctctgagaacagcaaccctgagcaggacctgaagctgaccagcgaggaggagagccagaggctgaagggcagcgagaacagccagcctgaggagatgagccaggagcctgagatcaacaagggcggggacaggaaggtggaggaggagatgaagaagcacggcagcacccacatgggcttccctgagaacctgaccaacggggccacagctgacaatggagatgatggcctcatcccccccaggaagagcaggaccccagagagccagcagttcccagacacagaaaatgagcagtaccacagtgatgagcagaatgacacccagaagcagctgtctgaggagcagaacacaggcatcctgcaggatgagatcctgattcatgaggagaagcagatcgaggtggccgagaatgagttctag

SEQ ID NO: 165019 - DNA, 867 bp, synthetic construct
  misc_feature 1..867: note = Description of Artificial Sequence: Synthetic coding sequence
  source 1..867: mol_type = other DNA
atggtggccgaggccggctccatgcctgctgccagctctgtgaagaagcccttcggcctgcggagcaagatgggcaagtggtgccgccactgctttgcctggtgccggggcagcggcaagagcaatgtgggcaccagcggggaccatgatgacagcgccatgaagaccctgcggagcaagatgggcaagtggtgctgccactgcttcccctggtgccggggcagcggcaagagcaatgtgggcaccagcggggaccatgatgattctgccatgaagaccctgcggagcaagatgggcaagtggtgctgccactgcttcccctgctgccggggcagcggcaagagcaatgtgggcaccagcggggaccatgatgacagcgccatgaagaccctgcggagcaagatgggcaagtggtgctgccactgcttcccctgctgccggggcagcggcaagaacaaggtgggcccctggggagactatgatgattctgccttcatggagccccgctaccacgtgagaagagaggacctggacaagctgcacagagctgcctggtggggcaaggtgcccaggaaggacctgattgtgatgctgaaggacacagacatgaacaagaaggacaagcagaagaggacagccctgcacctggccagcgccaacggcaacagcgaggtggtgaagctgctgctggaccggcgctgccagctgaacatcctggacaacaagaagaggacagccctgaccaaggctgtgcagtgccaggaggatgaatgtgccctgatgctgctggagcacggcacagaccccaacatcccagatgaatatggcaacacagccctgcactacgccatctacaatgaagattag

SEQ ID NO: 165020 - DNA, 1527 bp, synthetic construct
  misc_feature 1..1527: note = Description of Artificial Sequence: Synthetic coding sequence
  source 1..1527: mol_type = other DNA
atggtggccgaggccggctccatgcctgctgccagctctgtgaagaagcccttcggcctgcggagcaagatgggcaagtggtgccgccactgctttgcctggtgccggggcagcggcaagagcaatgtgggcaccagcggggaccatgatgacagcgccatgaagaccctgcggagcaagatgggcaagtggtgctgccactgcttcccctggtgccggggcagcggcaagagcaatgtgggcaccagcggggaccatgatgattctgccatgaagaccctgcggagcaagatgggcaagtggtgctgccactgcttcccctgctgccggggcagcggcaagaacaaggtgggcccctggggagactatgatgacagcgccttcatggagccccgctaccacgtgcggcgggaggacctggacaagctgcaccgggccgcctggtggggcaaggtgcccaggaaggacctgattgtgatgctgaaggacacagacatgaacaagaaggacaagcagaagaggacagccctgcacctggccagcgccaatggaaacagcgaggtggtgaagctgctgctggaccggcgctgccagctgaacatcctggacaacaagaagaggacagccctgaccaaggctgtgcagtgccaggaggatgaatgtgccctgatgctgctggagcacggcacagaccccaacatcccagatgaatatggcaacacagccctgcactacgccatctacaatgaagacaagctgatggccaaggccctgctgctgtatggagctgacatcgagagcaagaacaagcacggcctgacccccctgctgctgggcgtgcatgagcagaagcagcaggtggtgaagttcctgatcaagaagaaggccaacctgaatgccctggacagatatggccgcacagccctgatcctggccgtgtgctgcggcagcgccagcatcgtgtccctgctgctggagcagaacattgatgtgagcagccaggacctgagcggccagacagcccgggagtatgctgtgagcagccgccacaacgtcatctgccagctgctgagtgactacaaggagaagcagatcctgaaggtgtcctctgagaacagcaaccctgagcaggacctgaagctgaccagcgaggaggagagccagaggctgaagggcagcgagaacagccagcctgaggagatgagccaggagcctgagatcaacaagggcggggacaggaaggtggaggaggagatgaagaagcacggcagcacccacatgggcttccctgagaacctgaccaatggagccacagctgacaatggagatgatggcctcatcccccccaggaagagcaggaccccagagagccagcagttcccagacacagaaaatgagcagtaccacagtgatgagcagaatgacacccagaagcagctgtctgaggagcagaacacaggcatcctgcaggatgagatcctgatccacgaggagaagcagatcgaggtggctgaaaatgagttctag

SEQ ID NO: 165021 - DNA, 954 bp, synthetic construct
  misc_feature 1..954: note = Description of Artificial Sequence: Synthetic coding sequence
  source 1..954: mol_type = other DNA
atgagctgccaggccttcaccagcgctgacaccttcatccccctgaacagtgatgccagcgccaccctgcccctcatcatgcaccacagcgctgctgaatgtctgcctgtgagcaaccacgccaccaacgtgatgagcacagtgcccagcatcctgagcctcatccagacccccaagtgcctgtgcacccacttctctgtgaccaccctgggcaacacagccaccggcctgcactacagcgtgcccagctgccactacggcaaccagcccagcacctatggagtgatggccggcagcctgaccccctgcctgtacaagttcccagaccacaccctgagccacggcttcccccccatccaccagcccctgctggccgaggaccccacagctgctgacttcaagcaggagctgcggaggaagagcaagctggtggaggagcccatcgacatggacagccctgagatccgggagctggagaagtttgccaatgagttcaaggtgcggcgcatcaagctgggctacacccagaccaacgtgggggaggccctggccgctgtgcacggcagcgagttcagccagaccaccatctgccgctttgagaacctgcagctgtccttcaagaatgcctgcaagctgaaggccatcctgagcaagtggctggaggaggccgagcaggtgggcgccctgtacaatgagaaggtgggcgccaatgaaaggaagaggaagaggaggaccaccatcagcattgctgccaaggatgccctggagcggcactttggagagcagaacaagcccagcagccaggagatcatgaggatggccgaggagctgaacctggagaaggaggtggtgcgggtgtggttctgcaacagacggcagcgggagaagagggtgaagaccagcctgaaccagagcctcttcagcatcagcaaggagcacctggagtgcaggtag

SEQ ID NO: 165022 - DNA, 876 bp, synthetic construct
  misc_feature 1..876: note = Description of Artificial Sequence: Synthetic coding sequence
  source 1..876: mol_type = other DNA
atgagctgccaggccttcaccagcgctgacaccttcatccccctgaacagtgatgccagcgccaccctgcccctcatcatgcaccacagcgctgctgaatgtctgcctgtgagcaaccacgccaccaacgtgatgagcacagccaccggcctgcactacagcgtgcccagctgccactacggcaaccagcccagcacctatggagtgatggccggcagcctgaccccctgcctgtacaagttcccagaccacaccctgagccacggcttcccccccatccaccagcccctgctggccgaggaccccacagctgctgacttcaagcaggagctgcggaggaagagcaagctggtggaggagcccatcgacatggacagccctgagatccgggagctggagaagtttgccaatgagttcaaggtgcggcgcatcaagctgggctacacccagaccaacgtgggggaggccctggccgctgtgcacggcagcgagttcagccagaccaccatctgccgctttgagaacctgcagctgtccttcaagaatgcctgcaagctgaaggccatcctgagcaagtggctggaggaggccgagcaggtgggcgccctgtacaatgagaaggtgggcgccaatgaaaggaagaggaagaggaggaccaccatcagcattgctgccaaggatgccctggagcggcactttggagagcagaacaagcccagcagccaggagatcatgaggatggccgaggagctgaacctggagaaggaggtggtgcgggtgtggttctgcaacagacggcagcgggagaagagggtgaagaccagcctgaaccagagcctcttcagcatcagcaaggagcacctggagtgcaggtag

SEQ ID NO: 165023 - DNA, 771 bp, synthetic construct
  misc_feature 1..771: note = Description of Artificial Sequence: Synthetic coding sequence
  source 1..771: mol_type = other DNA
atgctgtggcagaagcccacagcccctgagcaggccccagccccagcccggccctaccagggcgtgcgggtgaaggagcctgtgaaggagctgctgcggaggaagaggggccacgccagcagtggagctgccccagcccccacagctgtggtgctgccccaccagcccctggccacctacaccaccgtgggccccagctgcctggacatggagggctctgtgtctgctgtgacagaggaggccgccctgtgtgccggctggctgagccagcccaccccagccaccctgcagcccctggccccctggaccccctacacagaatatgtgccccatgaagctgtgtcctgcccctacagcgctgacatgtatgtgcagcctgtgtgccccagctacacagtggtgggccccagctctgtgctgacctacgccagccccccactcatcaccaacgtgaccaccaggagcagcgccaccccagctgtgggcccccccctggagggccctgagcaccaggcccccctgacctacttcccctggccccagcccctgagcaccctgcccaccagcaccctgcagtaccagcccccagccccagccctgcccggcccccagtttgtgcagctgcccatcagcatccctgagcctgtgctgcaggacatggaggacccccggcgggccgccagcagcctgaccatcgacaagctgctgctggaggaggaggacagtgatgcctatgccctgaaccacaccctgtctgtggagggcttctag

SEQ ID NO: 165024 - DNA, 1440 bp, synthetic construct
  misc_feature 1..1440: note = Description of Artificial Sequence: Synthetic coding sequence
  source 1..1440: mol_type = other DNA
atggtgcacagctccatgggcgcccctgagatccgcatgagcaagcccctggaggccgagaagcagggcctggacagccccagcgagcacacagacacagaaagaaatggaccagacaccaaccaccagaacccccagaacaagaccagccccttctctgtgagccccaccggccccagcaccaagatcaaggccgaggaccccagcggggacagcgccccagctgcccccctgcccccccagcctgcccagccccacctgccccaggcccagctgatgctgaccggcagccagctggccggggacatccagcagctgctgcagctgcagcagctggtgctggtgcccggccaccacctgcagcccccagcccagttcctgctgccccaggcccagcagagccagcccggcctgctgcccacccccaacctcttccagctgccccagcagacccagggcgccctgctgaccagccagccccgggccggcctgcccacccaggccgtgacccggcccaccctgcctgacccccacctgagccacccccagccccccaagtgcctggagccccccagccaccctgaggagcccagcgacctggaggagctggagcagtttgcccggaccttcaagcagaggcgcatcaagctgggcttcacccagggagatgtgggcctggccatgggcaagctgtatggaaatgacttcagccagaccaccatcagcagatttgaggccctgaacctgtccttcaagaacatgtgcaagctgaagcccctgctggagaagtggctgaatgatgctgagaccatgtctgtggacagcagcctgcccagccccaaccagctgagcagccccagcctgggctttgatggcctgcccggcagaagaaggaagaagaggaccagcattgagaccaacgtgcgctttgccctggagaagagcttcctggccaaccagaagcccaccagcgaggagatcctgctgattgctgagcagctgcacatggagaaggaggtgatccgggtgtggttctgcaacagacggcagaaggagaagaggatcaacccctgcagcgctgcccccatgctgcccagccctgggaagccagccagctacagcccccacatggtgaccccccagggcggggccggcaccctgcccctgagccaggccagcagcagcctgagcaccaccgtgaccaccctgagcagcgctgtgggcaccctgcaccccagcaggacagctgggggcggcggcggcggcggcggggccgccccacccctgaacagcatccccagcgtgaccccacctcctccagccaccaccaacagcaccaaccccagcccccagggcagccacagcgccatcggcctgagcggcctgaaccccagcacaggccctggcctgtggtggaacccagccccctaccagccctag

SEQ ID NO: 165025 - DNA, 1809 bp, synthetic construct
  misc_feature 1..1809: note = Description of Artificial Sequence: Synthetic coding sequence
  source 1..1809: mol_type = other DNA
atggtgcacagctccatgggcgcccctgagatccgcatgagcaagcccctggaggccgagaagcagggcctggacagccccagcgagcacacagacacagaaagaaatggaccagacaccaaccaccagaacccccagaacaagaccagccccttctctgtgagccccaccggccccagcaccaagatcaaggccgaggaccccagcggggacagcgccccagctgcccccctgcccccccagcctgcccagccccacctgccccaggcccagctgatgctgaccggcagccagctggccggggacatccagcagctgctgcagctgcagcagctggtgctggtgcccggccaccacctgcagcccccagcccagttcctgctgccccaggcccagcagagccagcccggcctgctgcccacccccaacctcttccagctgccccagcagacccagggcgccctgctgaccagccagccccgggccggcctgcccacccaggccgtgacccggcccaccctgcctgacccccacctgagccacccccagccccccaagtgcctggagccccccagccaccctgaggagcccagcgacctggaggagctggagcagtttgcccggaccttcaagcagaggcgcatcaagctgggcttcacccagggagatgtgggcctggccatgggcaagctgtatggaaatgacttcagccagaccaccatcagcagatttgaggccctgaacctgtccttcaagaacatgtgcaagctgaagcccctgctggagaagtggctgaatgatgctgagaccatgtctgtggacagcagcctgcccagccccaaccagctgagcagccccagcctgggctttgatggcctgcccggcagaagaaggaagaagaggaccagcattgagaccaacgtgcgctttgccctggagaagagcttcctggccaaccagaagcccaccagcgaggagatcctgctgattgctgagcagctgcacatggagaaggaggtgatccgggtgtggttctgcaacagacggcagaaggagaagaggatcaacccctgcagcgctgcccccatgctgcccagccctgggaagccagccagctacagcccccacatggtgaccccccagggcggggccggcaccctgcccctgagccaggccagcagcagcctgagcaccaccgtgaccaccctgagcagcgctgtgggcaccctgcaccccagcaggacagctgggggcggcggcggcggcggcggggccgccccacccctgaacagcatccccagcgtgaccccacctcctccagccaccaccaacagcaccaaccccagcccccagggcagccacagcgccatcggcctgagcggcctgaaccccagcacaggcagcaccatggtgggcctgagcagcggcctgagccctgccctgatgagcaacaaccccctggccaccatccaggccctggccagcggcggcaccctgcccctgaccagcctggatggcagcggcaacctggtgctgggcgctgctggagctgcccctggcagccctggcctggtgaccagccccctcttcctgaaccacgccggcctgcccctgctgagcaccccacctggggtgggcctggtgtctgctgctgctgctgctgtggccgccagcatcagcagcaagagccctggcctgagcagcagcagcagcagcagcagcagcagcagcagcagcacctgcagcgagacagctgcccagaccccaggcggccctgggggccctgaggccggcagcaagccagagtag

SEQ ID NO: 165026 - DNA, 1392 bp, synthetic construct
  misc_feature 1..1392: note = Description of Artificial Sequence: Synthetic coding sequence
  source 1..1392: mol_type = other DNA
atggtgcacagctccatgggcgcccctgagatccgcatgagcaagcccctggaggccgagaagcagggcctggacagccccagcgagcacacagacacagaaagaaatggaccagacaccaaccaccagaacccccagaacaagaccagccccttctctgtgagccccaccggccccagcaccaagatcaaggccgaggaccccagcggggacagcgccccagctgcccccctgcccccccagcctgcccagccccacctgccccaggcccagctgatgctgaccggcagccagctggccggggacatccagcagctgctgcagctgcagcagctggtgctggtgcccggccaccacctgcagcccccagcccagttcctgctgccccaggcccagcagagccagcccggcctgctgcccacccccaacctcttccagctgccccagcagacccagggcgccctgctgaccagccagccccgggccggcctgcccacccagccccccaagtgcctggagccccccagccaccctgaggagcccagcgacctggaggagctggagcagtttgcccggaccttcaagcagaggcgcatcaagctgggcttcacccagggagatgtgggcctggccatgggcaagctgtatggaaatgacttcagccagaccaccatcagcagatttgaggccctgaacctgtccttcaagaacatgtgcaagctgaagcccctgctggagaagtggctgaatgatgctgagaccatgtctgtggacagcagcctgcccagccccaaccagctgagcagccccagcctgggctttgatggcctgcccggcagaagaaggaagaagaggaccagcattgagaccaacgtgcgctttgccctggagaagagcttcctggccaaccagaagcccaccagcgaggagatcctgctgattgctgagcagctgcacatggagaaggaggtgatccgggtgtggttctgcaacagacggcagaaggagaagaggatcaacccctgcagcgctgcccccatgctgcccagccctgggaagccagccagctacagcccccacatggtgaccccccagggcggggccggcaccctgcccctgagccaggccagcagcagcctgagcaccaccgtgaccaccctgagcagcgctgtgggcaccctgcaccccagcaggacagctgggggcggcggcggcggcggcggggccgccccacccctgaacagcatccccagcgtgaccccacctcctccagccaccaccaacagcaccaaccccagcccccagggcagccacagcgccatcggcctgagcggcctgaaccccagcacaggccctggcctgtggtggaacccagccccctaccagccctag

SEQ ID NO: 165027 - DNA, 1425 bp, synthetic construct
  misc_feature 1..1425: note = Description of Artificial Sequence: Synthetic coding sequence
  source 1..1425: mol_type = other DNA
atgggcgcccctgagatccgcatgagcaagcccctggaggccgagaagcagggcctggacagccccagcgagcacacagacacagaaagaaatggaccagacaccaaccaccagaacccccagaacaagaccagccccttctctgtgagccccaccggccccagcaccaagatcaaggccgaggaccccagcggggacagcgccccagctgcccccctgcccccccagcctgcccagccccacctgccccaggcccagctgatgctgaccggcagccagctggccggggacatccagcagctgctgcagctgcagcagctggtgctggtgcccggccaccacctgcagcccccagcccagttcctgctgccccaggcccagcagagccagcccggcctgctgcccacccccaacctcttccagctgccccagcagacccagggcgccctgctgaccagccagcccagggctggcctgcccacccaggccgtgacccggcccaccctgcctgacccccacctgagccacccccagccccccaagtgcctggagccccccagccaccctgaggagcccagcgacctggaggagctggagcagtttgcccggaccttcaagcagaggcgcatcaagctgggcttcacccagggagatgtgggcctggccatgggcaagctgtatggaaatgacttcagccagaccaccatcagcagatttgaggccctgaacctgtccttcaagaacatgtgcaagctgaagcccctgctggagaagtggctgaatgatgctgagaccatgtctgtggacagcagcctgcccagccccaaccagctgagcagccccagcctgggctttgatggcctgcctggaagaagaaggaagaagaggaccagcattgagaccaacgtgcgctttgccctggagaagagcttcctggccaaccagaagcccaccagcgaggagatcctgctgattgctgagcagctgcacatggagaaggaggtgatccgggtgtggttctgcaacagacggcagaaggagaagaggatcaacccctgcagcgctgcccccatgctgcccagccctgggaagccagccagctacagcccccacatggtgaccccccagggcggggccggcaccctgcccctgagccaggccagcagcagcctgagcaccaccgtgaccaccctgagcagcgctgtgggcaccctgcaccccagcaggacagctgggggcggcggcggcggcggcggggccgccccacccctgaacagcatccccagcgtgaccccacctcctccagccaccaccaacagcaccaaccccagcccccagggcagccacagcgccatcggcctgagcggcctgaaccccagcactggacctggcctgtggtggaacccagccccctaccagccctag

SEQ ID NO: 165028 - DNA, 1203 bp, synthetic construct
  misc_feature 1..1203: note = Description of Artificial Sequence: Synthetic coding sequence
  source 1..1203: mol_type = other DNA
atggtgcacagctccatgggcgcccctgagatccgcatgagcaagcccctggaggccgagaagcagggcctggacagccccagcgagcacacagacacagaaagaaatggaccagacaccaaccaccagaacccccagaacaagaccagccccttctctgtgagccccaccggccccagcaccaagatcaaggccgaggaccccagcggggacagcgccccagctgcccccctgcccccccagcctgcccagccccacctgccccaggcccagctgatgctgaccggcagccagctggccggggacatccagcagctgctgcagctgcagcagctggtgctggtgcccggccaccacctgcagcccccagcccagttcctgctgccccaggcccagcagagccagcccggcctgctgcccacccccaacctcttccagctgccccagcagacccagggcgccctgctgaccagccagccccgggccggcctgcccacccagccccccaagtgcctggagccccccagccaccctgaggagcccagcgacctggaggagctggagcagtttgcccggaccttcaagcagaggcgcatcaagctgggcttcacccagggagatgtgggcctggccatgggcaagctgtatggaaatgacttcagccagaccaccatcagcagatttgaggccctgaacctgtccttcaagaacatgtgcaagctgaagcccctgctggagaagtggctgaatgatgctgagaccatgtctgtggacagcagcctgcccagccccaaccagctgagcagccccagcctgggctttgatggcctgcccggcagaagaaggaagaagaggaccagcattgagaccaacgtgcgctttgccctggagaagagcttcctggccaaccagaagcccaccagcgaggagatcctgctgattgctgagcagctgcacatggagaaggaggtgatccgggtgtggttctgcaacagacggcagaaggagaagaggatcaacccctgcagcgctgcccccatgctgcccagccctgggaagccagccagctacagcccccacatggtgaccccccagggcggggccggcaccctgcccctgagccaggccagcagcagcctgagcaccacagcccagaccccagccctgaaggccgccacccggctgagcgcctgccaggcctag

SEQ ID NO: 165029 - DNA, 1404 bp, synthetic construct
  misc_feature 1..1404: note = Description of Artificial Sequence: Synthetic coding sequence
  source 1..1404: mol_type = other DNA
atggtgcacagctccatgggcgcccctgagatccgcatgagcaagcccctggaggccgagaagcagggcctggacagccccagcgagcacacagacacagaaagaaatggaccagacaccaaccaccagaacccccagaacaagaccagccccttctctgtgagccccaccggccccagcaccaagatcaaggccgaggaccccagcggggacagcgccccagctgcccccctgcccccccagcctgcccagccccacctgccccaggcccagctgatgctgaccggcagccagctggccggggacatccagcagctgctgcagctgcagcagctggtgctggtgcccggccaccacctgcagcccccagcccagttcctgctgccccaggcccagcagagccagcccggcctgctgcccacccccaacctcttccagctgccccagcagacccagggcgccctgctgaccagccagccccgggccggcctgcccacccaggccgtgacccggcccaccctgcctgacccccacctgagccacccccagccccccaagtgcctggagccccccagccaccctgaggagcccagcgacctggaggagctggagcagtttgcccggaccttcaagcagaggcgcatcaagctgggcttcacccagggagatgtgggcctggccatgggcaagctgtatggaaatgacttcagccagaccaccatcagcagatttgaggccctgaacctgtccttcaagaacatgtgcaagctgaagcccctgctggagaagtggctgaatgatgctgagaccatgtctgtggacagcagcctgcccagccccaaccagctgagcagccccagcctgggctttgatggcctgcccggcagaagaaggaagaagaggaccagcattgagaccaacgtgcgctttgccctggagaagagcttcctggccaaccagaagcccaccagcgaggagatcctgctgattgctgagcagctgcacatggagaaggaggtgatccgggtgtggttctgcaacagacggcagaaggagaagaggatcaacccctgcagcgctgcccccatgctgcccagccctgggaagccagccagctacagcccccacatggtgaccccccagggcggggccggcaccctgcccctgagccaggccagcagcagcctgagcaccaccgtgaccaccctgagcagcgctgtgggcaccctgcaccccagcaggacagctgggggcggcggcggcggcggcggggccgccccacccctgaacagcatccccagcgtgaccccacctcctccagccaccaccaacagcaccaaccccagcccccagggcagccacagcgccatcggcctgagcggcctgaaccccagcactggatag

SEQ ID NO: 165030 - DNA, 1761 bp, synthetic construct
  misc_feature 1..1761: note = Description of Artificial Sequence: Synthetic coding sequence
  source 1..1761: mol_type = other DNA
atggtgcacagctccatgggcgcccctgagatccgcatgagcaagcccctggaggccgagaagcagggcctggacagccccagcgagcacacagacacagaaagaaatggaccagacaccaaccaccagaacccccagaacaagaccagccccttctctgtgagccccaccggccccagcaccaagatcaaggccgaggaccccagcggggacagcgccccagctgcccccctgcccccccagcctgcccagccccacctgccccaggcccagctgatgctgaccggcagccagctggccggggacatccagcagctgctgcagctgcagcagctggtgctggtgcccggccaccacctgcagcccccagcccagttcctgctgccccaggcccagcagagccagcccggcctgctgcccacccccaacctcttccagctgccccagcagacccagggcgccctgctgaccagccagccccgggccggcctgcccacccagccccccaagtgcctggagccccccagccaccctgaggagcccagcgacctggaggagctggagcagtttgcccggaccttcaagcagaggcgcatcaagctgggcttcacccagggagatgtgggcctggccatgggcaagctgtatggaaatgacttcagccagaccaccatcagcagatttgaggccctgaacctgtccttcaagaacatgtgcaagctgaagcccctgctggagaagtggctgaatgatgctgagaccatgtctgtggacagcagcctgcccagccccaaccagctgagcagccccagcctgggctttgatggcctgcccggcagaagaaggaagaagaggaccagcattgagaccaacgtgcgctttgccctggagaagagcttcctggccaaccagaagcccaccagcgaggagatcctgctgattgctgagcagctgcacatggagaaggaggtgatccgggtgtggttctgcaacagacggcagaaggagaagaggatcaacccctgcagcgctgcccccatgctgcccagccctgggaagccagccagctacagcccccacatggtgaccccccagggcggggccggcaccctgcccctgagccaggccagcagcagcctgagcaccaccgtgaccaccctgagcagcgctgtgggcaccctgcaccccagcaggacagctgggggcggcggcggcggcggcggggccgccccacccctgaacagcatccccagcgtgaccccacctcctccagccaccaccaacagcaccaaccccagcccccagggcagccacagcgccatcggcctgagcggcctgaaccccagcacaggcagcaccatggtgggcctgagcagcggcctgagccctgccctgatgagcaacaaccccctggccaccatccaggccctggccagcggcggcaccctgcccctgaccagcctggatggcagcggcaacctggtgctgggcgctgctggagctgcccctggcagccctggcctggtgaccagccccctcttcctgaaccacgccggcctgcccctgctgagcaccccacctggggtgggcctggtgtctgctgctgctgctgctgtggccgccagcatcagcagcaagagccctggcctgagcagcagcagcagcagcagcagcagcagcagcagcagcacctgcagcgagacagctgcccagaccccaggcggccctgggggccctgaggccggcagcaagccagagtag

SEQ ID NO: 165031 - DNA, 1311 bp, synthetic construct
  misc_feature 1..1311: note = Description of Artificial Sequence: Synthetic coding sequence
  source 1..1311: mol_type = other DNA
atggtgaacctggagagcatgcacacagacatcaagatgtctggagatgtggccgacagcacagatgcccggagcaccctgagccaggtggagcctggaaatgacagaaatggcctggacttcaaccggcagatcaagacagaggacctgagtgacagcctgcagcagaccctgagccaccggccctgccacctgagccagggccctgccatgatgagcggcaaccagatgagcggcctgaatgccagcccctgccaggacatggccagcctgcaccccctgcagcagctggtgctggtgcccggccacctgcagagcgtgtcccagttcctgctgagccagacccagcccggccagcagggcctgcagcccaacctgctgcccttcccccagcagcagagcggcctgctgctgccccagacaggccctggcctggccagccaggccttcggccaccctggcctgcccggcagcagcctggagccccacctggaggccagccagcacctgcctgtgcccaagcacctgcccagcagtggaggagcagatgagcccagcgacctggaggagctggagaagtttgccaagaccttcaagcagaggcgcatcaagctgggcttcacccagggagatgtgggcctggccatgggcaagctgtatggaaatgacttcagccagaccaccatcagcagatttgaggccctgaacctgtccttcaagaacatgtgcaagctgaagcccctgctggagaagtggctgaatgatgctgagagcagccccagcgaccccagcgtgtccacccccagcagctaccccagcctgtctgaggtgtttggaaggaagaggaagaagaggaccagcattgagaccaacatccggctgaccctggagaagcgcttccaggacaaccccaagcccagcagcgaggagatctccatgattgctgagcagctgtccatggagaaggaggtggtgcgggtgtggttctgcaacagacggcagaaggagaagaggatcaactgccctgtggccacccccatcaagccccctgtgtacaacagccggctggtgagccccagcggcagcctgggccccctgtctgtgccccctgtgcacagcaccatgcctggcaccgtgaccagcagctgcagccctggcaacaacagccggcccagcagccctggcagcggcctgcacgccagcagccccacagccagccagaacaacagcaaggctgctgtgaacagcgccagcagcttcaacagcagcggctcctggtaccgctggaaccacagcacctacctgcactag

SEQ ID NO: 165032 - DNA, 1317 bp, synthetic construct
  misc_feature 1..1317: note = Description of Artificial Sequence: Synthetic coding sequence
  source 1..1317: mol_type = other DNA
atggagagccccaggacagccaagggcggccgggacatcaagatgtctggagatgtggccgacagcacagatgcccggagcaccctgagccaggtggagcctggaaatgacagaaatggcctggacttcaaccggcagatcaagacagaggacctgagtgacagcctgcagcagaccctgagccaccggccctgccacctgagccagggccctgccatgatgagcggcaaccagatgagcggcctgaatgccagcccctgccaggacatggccagcctgcaccccctgcagcagctggtgctggtgcccggccacctgcagagcgtgtcccagttcctgctgagccagacccagcccggccagcagggcctgcagcccaacctgctgcccttcccccagcagcagagcggcctgctgctgccccagacaggccctggcctggccagccaggccttcggccaccctggcctgcccggcagcagcctggagccccacctggaggccagccagcacctgcctgtgcccaagcacctgcccagcagtggaggagcagatgagcccagcgacctggaggagctggagaagtttgccaagaccttcaagcagaggcgcatcaagctgggcttcacccagggagatgtgggcctggccatgggcaagctgtatggaaatgacttcagccagaccaccatcagcagatttgaggccctgaacctgtccttcaagaacatgtgcaagctgaagcccctgctggagaagtggctgaatgatgctgagagcagccccagcgaccccagcgtgtccacccccagcagctaccccagcctgtctgaggtgtttggaaggaagaggaagaagaggaccagcattgagaccaacatccggctgaccctggagaagcgcttccaggacaaccccaagcccagcagcgaggagatctccatgattgctgagcagctgtccatggagaaggaggtggtgcgggtgtggttctgcaacagacggcagaaggagaagaggatcaactgccctgtggccacccccatcaagccccctgtgtacaacagccggctggtgagccccagcggcagcctgggccccctgtctgtgccccctgtgcacagcaccatgcctggcaccgtgaccagcagctgcagccctggcaacaacagccggcccagcagccctggcagcggcctgcacgccagcagccccacagccagccagaacaacagcaaggctgctgtgaacagcgccagcagcttcaacagcagcggctcctggtaccgctggaaccacagcacctacctgcactag

SEQ ID NO: 165033 - DNA, 1356 bp, synthetic construct
  misc_feature 1..1356: note = Description of Artificial Sequence: Synthetic coding sequence
  source 1..1356: mol_type = other DNA
atggccaccacagcccagtacctgccccggggccctgggggcggggccggcggcaccggccccctgatgcacccagatgctgctgctgctgctgctgctgctgctgctgctgagcggctgcacgccggggccgcctaccgggaggtgcagaagctgatgcaccacgagtggctgggcgctggggccggccaccctgtgggcctggcccacccccagtggctgcccaccggcggcggcggcggcggggactgggccggcggcccccacctggagcacggcaaggccggcggcggcggcaccggccgggcagatgatggcggcggcggcggcggcttccacgcccggctggtgcaccagggcgccgcccacgccggggccgcctgggcccagggcagcacagcccaccacctgggccctgccatgagccccagccctggggccagcggcggccaccagccccagcccctgggcctgtatgcccaggccgcctacccaggcggcggcggcggcggcctggccggcatgctggccgccggcggcggcggggccggccctggcctgcaccacgccctgcatgaagatggccacgaggcccagctggagcccagccccccaccccacctgggcgcccacggccacgcccacggccacgcccacgccggcggcctgcatgctgctgctgcccacctgcaccctggggccggcggcggcggcagctctgtgggggagcacagtgatgaagatgcccccagcagtgatgacctggagcagtttgccaagcagttcaagcagaggcgcatcaagctgggcttcacccaggctgatgtgggcctggccctgggcaccctgtatggaaatgtgttcagccagaccaccatctgccgctttgaggccctgcagctgtccttcaagaacatgtgcaagctgaagcccctgctgaacaagtggctggaggagacagacagcagcagcggcagccccaccaacctggacaagattgctgcccagggcaggaagaggaagaagaggaccagcattgaggtgggcgtgaagggggccctggagagccacttcctgaagtgccccaagcccagcgcccacgagatcaccggcctggccgacagcctgcagctggagaaggaggtggtgcgggtgtggttctgcaacagacggcagaaggagaagaggatgaccccagctgctggagctggccacccccccatggatgatgtgtatgcccctggagagctgggccctgggggcggcggggccagcccccccagcgcccctcctcctcctcctcctgctgccctgcaccaccaccaccaccacaccctgcccggctctgtgcagtag

SEQ ID NO: 165034 - DNA, 1332 bp, synthetic construct
  misc_feature 1..1332: note = Description of Artificial Sequence: Synthetic coding sequence
  source 1..1332: mol_type = other DNA
atggccacagctgccagcaaccactacagcctgctgaccagcagcgccagcatcgtgcatgctgagcccccaggcggcatgcagcagggcgccggcggctaccgggaggcccagagcctggtgcagggcgactatggagccctgcagagcaatggccaccccctgagccacgcccaccagtggatcacagccctgagccatggaggcggcggcggcggcggcggcggcggcggcggcggcggcggcggcggcggcggcggcggagatggcagcccctggagcaccagccccctgggccagcctgacatcaagcccagcgtggtggtgcagcagggcggcagaggagatgagctgcacggccctggggccctgcagcagcagcaccagcagcagcagcagcagcagcagcagcagcagcagcagcagcagcagcagcagcagcagcagaggcctccccacctggtgcaccacgccgccaaccaccaccctggccctggggcctggaggtctgctgctgctgctgcccacctgccccccagcatgggcgccagcaatggaggcctgctgtacagccagcccagcttcaccgtgaatggcatgctgggcgccggcggccagcctgctggcctgcaccaccacggcctgagagatgcccatgatgagccccaccacgccgaccaccacccccacccccacagccacccccaccagcagcccccacctcctcctccaccccagggccccccaggccaccctggggcccaccacgacccccacagtgatgaggacacccccaccagtgatgacctggagcagtttgccaagcagttcaagcagaggcgcatcaagctgggcttcacccaggctgatgtgggcctggccctgggcaccctgtatggaaatgtgttcagccagaccaccatctgccgctttgaggccctgcagctgtccttcaagaacatgtgcaagctgaagcccctgctgaacaagtggctggaggaggccgacagcagcagcggcagccccaccagcattgacaagattgctgcccagggcaggaagaggaagaagaggaccagcattgaggtgtctgtgaagggggccctggagagccacttcctgaagtgccccaagcccagcgcccaggagatcaccagcctggccgacagcctgcagctggagaaggaggtggtgcgggtgtggttctgcaacagacggcagaaggagaagaggatgaccccacctgggggcaccctgcccggggctgaagatgtgtatggaggcagccgggacaccccaccccaccacggcgtgcagacccctgtgcagtag

SEQ ID NO: 165035 - DNA, 1131 bp, synthetic construct
  misc_feature 1..1131: note = Description of Artificial Sequence: Synthetic coding sequence
  source 1..1131: mol_type = other DNA
atggccacagctgccagcaaccactacagcctgctgaccagcagcgccagcatcgtgcatgctgagcccccaggcggcatgcagcagggcgccggcggctaccgggaggcccagagcctggtgcagggcgactatggagccctgcagagcaatggccaccccctgagccacgcccaccagtggatcacagccctgagccatggaggagatggcagcccctggagcaccagccccctgggccagcctgacatcaagcccagcgtggtggtgcagcagggcggcagaggagatgagctgcacggccctggggccctgcagcagcagcaccagcagcagcagcagcagcagcagcagcagcagcagcagcagcagcagcagcagcagcagcagaggcctccccacctggtgcaccacgccgccaaccaccaccctggccctggggcctggaggtctgctgctgctgctgcccacctgcccccatccatgggcgccagcaatggaggcctgctgtacagccagcccccacctccaccccagggccccccaggccaccctggggcccaccacgacccccacagtgatgaggacacccccaccagtgatgacctggagcagtttgccaagcagttcaagcagaggcgcatcaagctgggcttcacccaggctgatgtgggcctggccctgggcaccctgtatggaaatgtgttcagccagaccaccatctgccgctttgaggccctgcagctgtccttcaagaacatgtgcaagctgaagcccctgctgaacaagtggctggaggaggccgacagcagcagcggcagccccaccagcattgacaagattgctgcccagggcaggaagaggaagaagaggaccagcattgaggtgtctgtgaagggggccctggagagccacttcctgaagtgccccaagcccagcgcccaggagatcaccagcctggccgacagcctgcagctggagaaggaggtggtgcgggtgtggttctgcaacagacggcagaaggagaagaggatgaccccacctgggggcaccctgcctggagcagaagatgtgtatggaggcagccgggacaccccaccccaccacggcgtgcagacccctgtgcagtag

SEQ ID NO: 165036 - DNA, 1503 bp, synthetic construct
  misc_feature 1..1503: note = Description of Artificial Sequence: Synthetic coding sequence
  source 1..1503: mol_type = other DNA
atggccacagctgccagcaacccctacctgcccggcaacagcctgctggccgccggcagcatcgtgcacagtgatgctgctggagctgggggcggcggcggcggcggcggcggcggcggcggcggcggggccggcggcggcggcggcggcatgcagcccggcagcgctgctgtgaccagcggggcctacagaggagaccccagctctgtgaagatggtgcagagcgacttcatgcagggcgccatggccgccagcaatggaggccacatgctgagccacgcccaccagtgggtgacagccctgccccacgccgctgctgctgctgctgctgctgctgctgctgctgtggaggccagcagcccctggagcggcagcgctgtgggcatggccggcagcccccagcagcccccccagcccccacctcctccaccccagggcccagatgtgaagggcggggccggcagagatgacctgcacgccggcacagccctgcaccaccggggccccccccacctgggccccccacctcctccaccccaccagggccaccctgggggctggggcgctgctgctgctgctgctgctgctgctgctgctgctgctgctgctgcccacctgcccagcatggccggcggccagcagcccccaccccagagcctgctgtacagccagcccggcggcttcaccgtgaatggcatgctgagcgcccctcctggccctgggggcggcggcggcggggccggcggcggggcccagagcctggtgcaccctggcctggtgcggggggacaccccagagctggccgagcaccaccaccaccaccaccaccacgcccacccccaccccccccacccccaccacgcccagggccccccccaccacggcggcggcggcggcggggccggccctggcctgaacagccatgacccccacagtgatgaggacacccccaccagtgatgacctggagcagtttgccaagcagttcaagcagaggcgcatcaagctgggcttcacccaggctgatgtgggcctggccctgggcaccctgtatggaaatgtgttcagccagaccaccatctgccgctttgaggccctgcagctgtccttcaagaacatgtgcaagctgaagcccctgctgaacaagtggctggaggaggccgacagcagcacaggcagccccaccagcattgacaagattgctgcccagggcaggaagaggaagaagaggaccagcattgaggtgtctgtgaagggggccctggagagccacttcctgaagtgccccaagcccagcgcccaggagatcaccaacctggccgacagcctgcagctggagaaggaggtggtgcgggtgtggttctgcaacagacggcagaaggagaagaggatgaccccacctggcatccagcagcagaccccagatgatgtgtacagccaggtgggcaccgtgtctgctgacaccccaccaccccaccacggcctgcagacctctgtgcagtag

SEQ ID NO: 165037 - DNA, 1086 bp, synthetic construct
  misc_feature 1..1086: note = Description of Artificial Sequence: Synthetic coding sequence
  source 1..1086: mol_type = other DNA
atggccacagctgccagcaacccctacagcatcctgagcagcaccagcctggtgcacgccgacagcgctggcatgcagcagggcagccccttcaggaacccccagaagctgctgcagagcgactacctgcagggcgtgcccagcaatggccaccccctgggccaccactgggtgaccagcctgagtgatggcggcccctggagcagcaccctggccaccagccccctggaccagcaggatgtgaagccaggccgggaggacctgcagctgggcgccatcatccaccacaggagcccccacgtggcccaccacagcccccacaccaaccaccccaatgcctggggcgccagccctgcccccaaccccagcatcaccagcagcggccagcccctgaatgtgtacagccagcccggcttcaccgtgtctggcatgctggagcacggcggcctgaccccacctcctgctgctgccagcgcccagagcctgcaccctgtgctgcgggagcccccagaccacggggagctgggcagccaccactgccaggaccacagtgatgaggagacccccaccagtgatgagctggagcagtttgccaagcagttcaagcagaggcgcatcaagctgggcttcacccaggctgatgtgggcctggccctgggcaccctgtatggaaatgtgttcagccagaccaccatctgccgctttgagggcctgcagctgtccttcaagaacatgtgcaagctgaagcccctgctgaacaagtggctggaggaggccgacagcagcacaggcagccccaccagcattgacaagattgctgcccagggcaggaagaggaagaagaggaccagcattgaggtgtctgtgaagggcgtgctggagacccacttcctgaagtgccccaagccagctgcccaggagatcagcagcctggccgacagcctgcagctggagaaggaggtggtgcgggtgtggttctgcaacagacggcagaaggagaagaggatgaccccacctggggaccagcagccccatgaggtgtacagccacacagtgaagacagacaccagctgccacgacctgtag

SEQ ID NO: 165038 - DNA, 1260 bp, synthetic construct
  misc_feature 1..1260: note = Description of Artificial Sequence: Synthetic coding sequence
  source 1..1260: mol_type = other DNA
atgatgtccatgaacagcaagcagccccactttgccatgcaccccaccctgcctgagcacaagtaccccagcctgcacagcagcagcgaggccatcagaagagcctgcctgcccaccccacccctgcagagcaacctgtttgccagcctggatgagaccctgctggcccgggcagaggccctggccgctgtggacattgctgtgtcccagggcaagagccaccccttcaagccagatgccacctaccacaccatgaacagcgtgccctgcaccagcaccagcacagtgcccctggcccaccaccaccaccaccaccaccaccaccaggccctggagcccggggacctgctggaccacatcagcagccccagcctggccctgatggccggggccggcggggccggggctgctgctgggggcggcggggcccatgatggccctgggggcggcggcggccctgggggcggcggcggccctgggggcggccctgggggcggcggcggcggcggccctgggggcggcggcggcggccctgggggcggcctgctgggcggcagcgcccacccccacccccacatgcacagcctgggccacctgagccaccctgctgctgctgctgccatgaacatgcccagcggcctgccccaccctggcctggtggccgctgctgcccaccacggggctgctgctgctgctgctgctgctgctgctggccaggtggccgccgccagcgctgctgctgctgtggtgggcgctgctggcctggccagcatctgtgacagcgacacagacccccgggagctggaggcctttgctgagcgcttcaagcagaggcgcatcaagctgggcgtgacccaggctgatgtgggcagcgccctggccaacctgaagatccctggggtgggcagcctgagccagagcaccatctgccgctttgagagcctgaccctgagccacaacaacatgattgccctgaagcccatcctgcaggcctggctggaggaggccgagggcgcccagcgggagaagatgaacaagccagagctgttcaatggaggagagaagaagaggaagaggaccagcattgctgcccctgagaagaggagcctggaggcctactttgctgtgcagccccggcccagcagcgagaagattgctgccatcgccgagaagctggacctgaagaagaatgtggtgcgggtgtggttctgcaaccagaggcagaagcagaagaggatgaagttcagcgccacctactag

SEQ ID NO: 165039 - DNA, 1911 bp, synthetic construct
  misc_feature 1..1911: note = Description of Artificial Sequence: Synthetic coding sequence
  source 1..1911: mol_type = other DNA
atgaagaagctgcagggcgcccacctgaggaagcctgtgaccccagacctgctgatgacccccagcgaccagggagatgtggacctggatgtggactttgctgcccaccggggcaactggacaggcaagctggacttcctgctgagctgcatcggctactgtgtgggcctgggcaatgtgtggaggttcccctaccgggcctacaccaacggcggcggggccttcctggtgccctacttcctgatgctggccatctgtggcatccccctcttcttcctggagctgagcctgggccagttcagcagcctgggccccctggccgtgtggaagatcagccccctcttcaagggggccggggccgccatgctgctgattgtgggcctggtggccatctactacaacatgatcatcgcctacgtgctcttctacctgtttgccagcctgaccagtgacctgccctgggagcactgcggcaactggtggaacacagagctgtgcctggagcaccgggtgtccaaggatggaaatggagccctgcccctgaacctgacctgcaccgtgagccccagcgaggagtactggagccgctacgtgctgcacatccagggcagccagggcatcggcagccctggagagatccgctggaacctgtgcctgtgcctgctgctggcctgggtgattgtgttcctgtgcatcctgaagggcgtgaagagcagcggcaaggtggtgtacttcaccgccaccttcccctacctgatcctgctgatgctgctggtgcggggcgtgaccctgcccggggcctggaagggcatccagttctacctgaccccccagttccaccacctgctgagcagcaaggtgtggattgaagctgccctgcagatcttctacagcctgggcgtgggctttggaggcctgctgacctttgccagctacaacaccttccaccagaacatctacagagacaccttcatcgtgaccctgggcaatgccatcaccagcatcctggccggctttgccatcttctctgtgctgggctacatgagccaggagctgggcgtgcctgtggaccaggtggccaaggccggccctggcctggcctttgtggtgtacccccaggccatgaccatgctgcccctgagccccttctggagcttcctgttcttcttcatgctgctgaccctgggcctggacagccagtttgccttcctggagaccatcgtgacagctgtgacagatgagttcccctactacctgcggcccaagaaggctgtgttttctggcctcatctgtgtggccatgtacctgatgggcctcatcctgaccacagatggcggcatgtactggctggtgctgctggatgactacagcgccagctttggcctgatggtggtggtgatcaccacctgcctggccgtgaccagggtgtatggcatccagcgcttctgccgggacatccacatgatgctgggcttcaagccaggcctgtacttccgggcctgctggctgttcctgagccctgccaccctgctggccctgatggtgtacagcatcgtgaagtaccagcccagtgaatatggcagctaccgcttccccccctgggccgagctgctgggcatcctgatgggcctgctgagctgcctgatgatcccagctggcatgctggtggccgtgctgcgggaggagggcagcctgtgggagcggctgcagcaggccagcaggcctgccatggactggggccccagcctggaggagaacagaacaggcatgtatgtggccaccctggccggcagccagagccccaagcccctgatggtgcacatgaggaaatatggaggcatcaccagctttgagaacacagccatcgaggtggaccgggagattgctgaggaggaggagagcatgatgtag

SEQ ID NO: 165040 - DNA, 798 bp, synthetic construct
  misc_feature 1..798: note = Description of Artificial Sequence: Synthetic coding sequence
  source 1..798: mol_type = other DNA
atgcacttctaccgcctcttcctgggcgccacccggcgcttcctgaaccctgagtggaagggggagattgacaactggtgtgtgtatgtgctgaccagcctgctgcccttcaagatccagagccaggacatcaaggccctgcagaaggagctggagcagtttgccaagctgctgaagcagaagaggatcaccctgggctacacccaggctgatgtgggcctgaccctgggcgtgctgtttgggaaggtgttcagccagaccaccatctgccgctttgaggccctgcagctgtccttcaagaacatgtgcaagctgcggcccctgctgcagaagtgggtggaggaggccgacaacaatgaaaacctgcaggagatctgcaaggccgagaccctggtgcaggccaggaagaggaagaggaccagcattgaaaatagagtgcggggcaacctggagaacctcttcctgcagtgccccaagcccaccctgcagcagatcagccacatcgcccagcagctgggcctggagaaggatgtggtgcgggtgtggttctgcaacagacggcagaagggcaagaggagcagcagtgactatgcccagagagaagattttgaagctgctggcagccccttcagcggcggccctgtgtccttccccctggcccctggcccccacttcggcaccccaggctacggcagcccccacttcaccgccctgtacagctctgtgcccttccctgagggggaggccttcccccctgtgtctgtgaccaccctgggcagccccatgcacagcaactag

SEQ ID NO: 165041 - DNA, 1083 bp, synthetic construct
  misc_feature 1..1083: note = Description of Artificial Sequence: Synthetic coding sequence
  source 1..1083: mol_type = other DNA
atggccggccacctggccagtgactttgccttcagccccccacctgggggcggcggagatggccctgggggccctgagcccggctgggtggaccccaggacctggctgtccttccagggccccccaggcggccctggcatcggccctggggtgggccctggcagcgaggtgtggggcatccccccctgccccccaccctatgagttctgtggcggcatggcctactgcggcccccaggtgggcgtgggcctggtgccccagggcggcctggagaccagccagcctgagggggaggccggcgtgggcgtggagagcaacagtgatggagccagccctgagccctgcaccgtgaccccaggagctgtgaagctggagaaggagaagctggagcagaaccctgaggagagccaggacatcaaggccctgcagaaggagctggagcagtttgccaagctgctgaagcagaagaggatcaccctgggctacacccaggctgatgtgggcctgaccctgggcgtgctgtttgggaaggtgttcagccagaccaccatctgccgctttgaggccctgcagctgtccttcaagaacatgtgcaagctgcggcccctgctgcagaagtgggtggaggaggccgacaacaatgaaaacctgcaggagatctgcaaggccgagaccctggtgcaggccaggaagaggaagaggaccagcattgagaacagagtgcggggcaacctggagaacctcttcctgcagtgccccaagcccaccctgcagcagatcagccacatcgcccagcagctgggcctggagaaggatgtggtgcgggtgtggttctgcaacagacggcagaagggcaagaggagcagcagtgactatgcccagcgggaggactttgaggccgccggcagccccttcagcggcggccctgtgtccttccccctggcccctggcccccacttcggcaccccaggctacggcagcccccacttcaccgccctgtacagctctgtgcccttccctgagggggaggccttcccccctgtgtctgtgaccaccctgggcagccccatgcacagcaactag

SEQ ID NO: 165042 - DNA, 372 bp, synthetic construct
  misc_feature 1..372: note = Description of Artificial Sequence: Synthetic coding sequence
  source 1..372: mol_type = other DNA
atggccggccacctggccagtgactttgccttcagccccccacctgggggcggcggagatggccctgggggccctgagcccggctgggtggaccccaggacctggctgtccttccagggccccccaggcggccctggcatcggccctggggtgggccctggcagcgaggtgtggggcatccccccctgccccccaccctatgagttctgtggcggcatggcctactgcggcccccaggtgggcgtgggcctggtgccccagggcggcctggagaccagccagcctgagggggaggccggcgtgggcgtggagacccccatgggccccccaagaagccctgccccccaccccttccccttccccctgctgtag

SEQ ID NO: 165043 - DNA, 558 bp, synthetic construct
  misc_feature 1..558: note = Description of Artificial Sequence: Synthetic coding sequence
  source 1..558: mol_type = other DNA
atggccggccacctggccagtgactttgccttcagccccccacctgggggcggcggagatggccctgggggccctgagcccggctgggtggaccccaggacctggctgtccttccagggccccccaggcggccctggcatcggccctggggtgggccctggcagcgaggtgtggggcatccccccctgccccccaccctatgagttctgtggcggcatggcctactgcggcccccaggtgggcgtgggcctggtgccccagggcggcctggagaccagccagcctgagggggaggccggcgtgggcgtggagagcaacagtgatggagccagccctgagccctgcaccgtgaccccaggagctgtgaagctggagaaggagaagctggagcagaaccctgaggagagccaggacatcaaggccctgcagaaggagctggagcagtttgccaagctgctgaagcagaagaggatcaccctgggctacacccaggctgatgtgcaccctgggggcagcatctgggagggcatccagcccaatgaccacctgcccctgtag

SEQ ID NO: 165044 - DNA, 558 bp, synthetic construct; identical to SEQ ID NO: 165043
  misc_feature 1..558: note = Description of Artificial Sequence: Synthetic coding sequence
  source 1..558: mol_type = other DNA

SEQ ID NO: 165045 - DNA, 495 bp, synthetic construct
  misc_feature 1..495: note = Description of Artificial Sequence: Synthetic coding sequence
  source 1..495: mol_type = other DNA
atgtgcaagctgcggcccctgctgcagaagtgggtggaggaggccgacaacaatgaaaacctgcaggagatctgcaaggccgagaccctggtgcaggccaggaagaggaagaggaccagcattgagaacagagtgcggggcaacctggagaacctcttcctgcagtgccccaagcccaccctgcagcagatcagccacatcgcccagcagctgggcctggagaaggatgtggtgcgggtgtggttctgcaacagacggcagaagggcaagaggagcagcagtgactatgcccagcgggaggactttgaggccgccggcagccccttcagcggcggccctgtgtccttccccctggcccctggcccccacttcggcaccccaggctacggcagcccccacttcaccgccctgtacagctctgtgcccttccctgagggggaggccttcccccctgtgtctgtgaccaccctgggcagccccatgcacagcaactag

SEQ ID NO: 165046 - DNA, 495 bp, synthetic construct; identical to SEQ ID NO: 165045
  misc_feature 1..495: note = Description of Artificial Sequence: Synthetic coding sequence
  source 1..495: mol_type = other DNA

SEQ ID NO: 165047 - DNA, 2076 bp, synthetic construct
  misc_feature 1..2076: note = Description of Artificial Sequence: Synthetic coding sequence
  source 1..2076: mol_type = other DNA
atgtctgccctgctgcaggaccccatgattgctggccaggtgtccaagcccctgctgtctgtgcgctctgagatgaatgctgagctgcggggggaggacaaggccgccaccagtgacagcgagctgaatgagcccctgctggcccctgtggagagcaatgattctgaggacacccccagcaagctgtttggagcccggggcaacccagccctgagtgaccccggcaccccagaccagcaccaggccagccagacccacccccccttccctgtgggcccccagcccctgctgacagcccagcagctggccagcgctgtggccggcgtgatgcctgggggccccccagccctgaaccagcccatcctgatccccttcaacatggccggccagctgggcggccagcagggcctggtgctgaccctgcccacagccaacctgaccaacatccagggcctggtggccgctgctgctgctgggggcatcatgaccctgcccctgcagaacctgcaggccaccagcagcctgaacagccagctgcagcagctgcagctgcagctgcagcagcagcagcagcagcagcagcagcagcccccacccagcaccaaccagcacccccagcctgccccccaggcccccagccagagccagcagcagcccctgcagcccaccccaccccagcagcccccaccagccagccagcagcccccagcccccaccagccagctgcagcaggccccccagccccagcagcaccagccccacagccacagccagaaccagaaccagcccagccccacccagcagagcagcagccccccccagaagcccagccagagccctggccacggcctgcccagccccctgaccccacccaaccccctgcagctggtgaacaaccccctggccagccaggccgctgctgctgctgctgccatgagcagcatcgccagcagccaggcctttggaaatgccctgagcagcctgcagggcgtgacaggccagctggtgaccaatgcccagggccagatcatcggcaccatccccctgatgcccaaccctggccccagcagccaggccgccagcggcacccagggcctgcaggtgcagcccatcaccccccagctgctgaccaatgcccagggccagatcatcgccaccgtcatcggcaaccagatcctgcccgtcatcaacacccagggcatcaccctgagccccatcaagccaggccagcagctgcaccagcccagccagacctctgtgggccaggccgccagccagggcaacctgctgcacctggcccacagccaggcctccatgagccagagccctgtgcggcaggccagcagcagcagcagcagcagcagcagcagcagcgccctgtctgtgggccagctggtgagcaacccccagacagctgctggggaggtggatggagtgaacctggaggagatccgggagtttgccaaggccttcaagatccggcggctgagcctgggcctgacccagacccaggtgggccaggccctgagcgccacagagggccctgcctacagccagagcgccatctgccgccacaccatcctgcggagccacttcttcctgccccaggaggcccaggagaacaccatcgccagcagcctgacagccaagctgaaccctggcctgctgtacccagccaggtttgagaagctggacatcacccccaagagcgcccagaagatcaagcctgtgctggagcgctggatggccgaggccgaggcccggcacagagctggcatgcagaacctgacagagttcatcggcagcgagcccagcaagaagaggaagaggaggaccagcttcaccccccaggccctggagatcctgaatgcccactttgagaagaacacccaccccagcggccaggagatgacagaaattgctgagaagctgaactatgaccgggaggtggtgcgggtgtggttctgcaacaagaggcaggccctgaagaacaccatcaagaggctgaagcagcacgagcccgccacagctgtgcccctggagcccctgacagacagcctggaggagaacagctag

SEQ ID NO: 165048 - DNA, 1968 bp, synthetic construct
  misc_feature 1..1968: note = Description of Artificial Sequence: Synthetic coding sequence
  source 1..1968: mol_type = other DNA
atgtctgccctgctgcaggaccccatgattgctggccaggtgtccaagcccctgctgtctgtgcgctctgagatgaatgctgagctgcggggggaggacaaggccgccaccagtgacagcgagctgaatgagcccctgctggcccctgtggagagcaatgattctgaggacacccccagcaagctgtttggagcccggggcaacccagccctgagtgaccccggcaccccagaccagcaccaggccagccagacccacccccccttccctgtgggcccccagcccctgctgacagcccagcagctggccagcgctgtggccggcgtgatgcctgggggccccccagccctgaaccagcccatcctgatccccttcaacatggccggccagctgggcggccagcagggcctggtgctgaccctgcccacagccaacctgaccaacatccagggcctggtggccgctgctgctgctgggggcatcatgaccctgcccctgcagaacctgcaggccaccagcagcctgaacagccagctgcagcagctgcagctgcagctgcagcagcagcagcagcagcagcagcagcagcccccacccagcaccaaccagcacccccagcctgccccccaggcccccagccagagccagcagcagcccctgcagcccaccccaccccagcagcccccaccagccagccagcagcccccagcccccaccagccagctgcagcaggccccccagccccagcagcaccagccccacagccacagccagaaccagaaccagcccagccccacccagcagagcagcagccccccccagaagcccagccagagccctggccacggcctgcccagccccctgaccccacccaaccccctgcagctggtgaacaaccccctggccagccaggccgctgctgctgctgctgccatgagcagcatcgccagcagccaggcctttggaaatgccctgagcagcctgcagggcgtgacaggccagctggtgaccaatgcccagggccagatcatcggcaccatccccctgatgcccaaccctggccccagcagccaggccgccagcggcacccagggcctgcaggtgcagcccatcaccccccagctgctgaccaatgcccagggccagatcatcgccaccgtcatcggcaaccagatcctgcccgtcatcaacacccagggcatcaccctgagccccatcaagccaggccagcagctgcaccagcccagccagacctctgtgggccaggccgccagccagggcaacctgctgcacctggcccacagccaggcctccatgagccagagccctgtgcggcaggccagcagcagcagcagcagcagcagcagcagcagcgccctgtctgtgggccagctggtgagcaacccccagacagctgctggggaggtggatggagtgaacctggaggagatccgggagtttgccaaggccttcaagatccggcggctgagcctgggcctgacccagacccaggtgggccaggccctgagcgccacagagggccctgcctacagccagagcgccatctgccgctttgagaagctggacatcacccccaagagcgcccagaagatcaagcctgtgctggagcgctggatggccgaggccgaggcccggcacagagctggcatgcagaacctgacagagttcatcggcagcgagcccagcaagaagaggaagaggaggaccagcttcaccccccaggccctggagatcctgaatgcccactttgagaagaacacccaccccagcggccaggagatgacagaaattgctgagaagctgaactatgaccgggaggtggtgcgggtgtggttctgcaacaagaggcaggccctgaagaacaccatcaagaggctgaagcagcacgagcccgccacagctgtgcccctggagcccctgacagacagcctggaggagaacagctag

SEQ ID NO: 165049 - DNA, 2076 bp, synthetic construct
  misc_feature 1..2076: note = Description of Artificial Sequence: Synthetic coding sequence
  source 1..2076: mol_type = other DNA
atggagaagatctacagcagaggagagctgcaccacttcattgatggcttcaatgaggagaagagcaactggatgagatatgtgaacccagcccacagcccccgggagcagaacctggccgcctgccagaatggcatgaacatctacttctacaccatcaagcccatcccagccaaccaggagctgctggtgtggtactgccgggactttgctgagcggctgcactacccctacccaggagagctgaccatgatgaacctgacccagacccagagcagcctgaagcagcccagcacagagaagaatgagctgtgccccaagaatgtgcccaagcgggagtacagcgtgaaggagatcctgaagctggacagcaaccccagcaagggcaaggacctgtaccgcagcaacatcagccccctgaccagcgagaaggacctggatgacttcagaagaagaggcagccctgagatgcccttctacccccgggtggtgtaccccatccgggcccccctgcctgaggacttcctgaaggccagcctggcctacggcatcgagcggcccacctacatcaccaggagccccatccccagcagcaccacccccagccccagcgcccggagcagcccagaccagagcctgaagagcagcagcccccacagcagccctggcaacacagtgtcccctgtgggccctggcagccaggagcaccgggacagctatgcctacctgaatgccagctatggaacagagggcctgggcagctacccaggctacgcccccctgccccacctgcccccagccttcatccccagctacaatgcccactaccccaagttcctgctgcccccctacggcatgaactgcaatggcctgtctgctgtgtcctccatgaatggcatcaacaactttggcctcttcccccggctgtgccctgtgtacagcaacctgctgggcggcggcagcctgccccaccccatgctgaaccccaccagcctgcccagcagcctgcccagtgatggagcccggcggctgctgcagcctgagcacccccgggaggtgctggtgcctgccccccacagcgccttctccttcaccggggccgccgcctccatgaaggacaaggcctgcagccccaccagcggcagccccacagctggaacagctgccacagctgagcacgtggtgcagcccaaggccaccagcgctgccatggccgcccccagcagtgatgaggccatgaacctgatcaagaacaagaggaacatgacaggctacaagaccctgccctaccccctgaagaagcagaatggcaagatcaagtatgagtgcaatgtgtgtgccaagaccttcggccagctgagcaacctgaaggtgcacctgcgggtgcacagcggggagcggcccttcaagtgccagacctgcaacaagggcttcacccagctggcccacctgcagaagcactacctggtgcacactggagagaagccccatgagtgccaggtgtgccacaagcgcttcagcagcaccagcaacctgaagacccacctgcggctgcacagcggggagaagccctaccagtgcaaggtgtgcccagccaagttcacccagtttgtgcacctgaagctgcacaagaggctgcacacccgggagcggccccacaagtgcagccagtgccacaagaactacatccacctgtgcagcctgaaggtgcacctgaagggcaactgtgccgccgccccagcccctggcctgcccctggaggacctgacccgcatcaatgaggagattgagaagtttgacatcagtgacaatgctgaccggctggaggatgtggaggatgacatcagcgtcatctctgtggtggagaaggagatcctggccgtggtgaggaaggagaaggaggagaccggcctgaaggtgtccctgcagaggaacatgggaaatggcctgctgagcagcggctgcagcctgtatgagagcagtgacctgcccctgatgaagctgccccccagcaaccccctgcccctggtgcctgtgaaggtgaagcaggagaccgtggagcccatggacccctag

SEQ ID NO: 165050 - DNA, 2370 bp, synthetic construct
  misc_feature 1..2370: note = Description of Artificial Sequence: Synthetic coding sequence
  source 1..2370: mol_type = other DNA
atgaagatggacatggaggatgctgacatgaccctgtggacagaggccgagtttgaggagaagtgcacctacatcgtgaatgaccacccctgggacagcggggctgatggcggcacctctgtgcaggccgaggccagcctgcccaggaacctgctcttcaagtatgccaccaacagcgaggaggtgattggagtgatgagcaaggagtacatccccaagggcaccaggtttggccccctgattggagagatctacaccaatgacacagtgcccaagaatgccaacaggaagtacttctggaggatctacagcagaggagagctgcaccacttcattgatggcttcaatgaggagaagagcaactggatgagatatgtgaacccagcccacagcccccgggagcagaacctggccgcctgccagaatggcatgaacatctacttctacaccatcaagcccatcccagccaaccaggagctgctggtgtggtactgccgggactttgctgagcggctgcactacccctacccaggagagctgaccatgatgaacctgacccagacccagagcagcctgaagcagcccagcacagagaagaatgagctgtgccccaagaatgtgcccaagcgggagtacagcgtgaaggagatcctgaagctggacagcaaccccagcaagggcaaggacctgtaccgcagcaacatcagccccctgaccagcgagaaggacctggatgacttcagaagaagaggcagccctgagatgcccttctacccccgggtggtgtaccccatccgggcccccctgcctgaggacttcctgaaggccagcctggcctacggcatcgagcggcccacctacatcaccaggagccccatccccagcagcaccacccccagccccagcgcccggagcagcccagaccagagcctgaagagcagcagcccccacagcagccctggcaacacagtgtcccctgtgggccctggcagccaggagcaccgggacagctatgcctacctgaatgccagctatggaacagagggcctgggcagctacccaggctacgcccccctgccccacctgcccccagccttcatccccagctacaatgcccactaccccaagttcctgctgcccccctacggcatgaactgcaatggcctgtctgctgtgtcctccatgaatggcatcaacaactttggcctcttcccccggctgtgccctgtgtacagcaacctgctgggcggcggcagcctgccccaccccatgctgaaccccaccagcctgcccagcagcctgcccagtgatggagcccggcggctgctgcagcctgagcacccccgggaggtgctggtgcctgccccccacagcgccttctccttcaccggggccgccgcctccatgaaggacaaggcctgcagccccaccagcggcagccccacagctggaacagctgccacagctgagcacgtggtgcagcccaaggccaccagcgctgccatggccgcccccagcagtgatgaggccatgaacctgatcaagaacaagaggaacatgacaggctacaagaccctgccctaccccctgaagaagcagaatggcaagatcaagtatgagtgcaatgtgtgtgccaagaccttcggccagctgagcaacctgaaggtgcacctgcgggtgcacagcggggagcggcccttcaagtgccagacctgcaacaagggcttcacccagctggcccacctgcagaagcactacctggtgcacactggagagaagccccatgagtgccaggtgtgccacaagcgcttcagcagcaccagcaacctgaagacccacctgcggctgcacagcggggagaagccctaccagtgcaaggtgtgcccagccaagttcacccagtttgtgcacctgaagctgcacaagaggctgcacacccgggagcggccccacaagtgcagccagtgccacaagaactacatccacctgtgcagcctgaaggtgcacctgaagggcaactgtgccgccgccccagcccctggcctgcccctggaggacctgacccgcatcaatgaggagattgagaagtttgacatcagtgacaatgctgaccggctggaggatgtggaggatgacatcagcgtcatctctgtggtggagaaggagatcctggccgtggtgaggaaggagaaggaggagaccggcctgaaggtgtccctgcagaggaacatgggaaatggcctgctgagcagcggctgcagcctgtatgagagcagtgacctgcccctgatgaagctgccccccagcaaccccctgcccctggtgcctgtgaaggtgaagcaggagaccgtggagcccatggacccctag

SEQ ID NO: 165051 - DNA, 2478 bp, synthetic construct
  misc_feature 1..2478: note = Description of Artificial Sequence: Synthetic coding sequence
  source 1..2478: mol_type = other DNA
atgctggacatctgcctggagaagagggtgggcaccaccctggccgcccccaagtgcaacagcagcacagtgcgcttccagggcctggccgagggcaccaagggcaccatgaagatggacatggaggatgctgacatgaccctgtggacagaggccgagtttgaggagaagtgcacctacatcgtgaatgaccacccctgggacagcggggctgatggcggcacctctgtgcaggccgaggccagcctgcccaggaacctgctcttcaagtatgccaccaacagcgaggaggtgattggagtgatgagcaaggagtacatccccaagggcaccaggtttggccccctgattggagagatctacaccaatgacacagtgcccaagaatgccaacaggaagtacttctggaggatctacagcagaggagagctgcaccacttcattgatggcttcaatgaggagaagagcaactggatgagatatgtgaacccagcccacagcccccgggagcagaacctggccgcctgccagaatggcatgaacatctacttctacaccatcaagcccatcccagccaaccaggagctgctggtgtggtactgccgggactttgctgagcggctgcactacccctacccaggagagctgaccatgatgaacctgacccagacccagagcagcctgaagcagcccagcacagagaagaatgagctgtgccccaagaatgtgcccaagcgggagtacagcgtgaaggagatcctgaagctggacagcaaccccagcaagggcaaggacctgtaccgcagcaacatcagccccctgaccagcgagaaggacctggatgacttcagaagaagaggcagccctgagatgcccttctacccccgggtggtgtaccccatccgggcccccctgcctgaggacttcctgaaggccagcctggcctacggcatcgagcggcccacctacatcaccaggagccccatccccagcagcaccacccccagccccagcgcccggagcagcccagaccagagcctgaagagcagcagcccccacagcagccctggcaacacagtgtcccctgtgggccctggcagccaggagcaccgggacagctatgcctacctgaatgccagctatggaacagagggcctgggcagctacccaggctacgcccccctgccccacctgcccccagccttcatccccagctacaatgcccactaccccaagttcctgctgcccccctacggcatgaactgcaatggcctgtctgctgtgtcctccatgaatggcatcaacaactttggcctcttcccccggctgtgccctgtgtacagcaacctgctgggcggcggcagcctgccccaccccatgctgaaccccaccagcctgcccagcagcctgcccagtgatggagcccggcggctgctgcagcctgagcacccccgggaggtgctggtgcctgccccccacagcgccttctccttcaccggggccgccgcctccatgaaggacaaggcctgcagccccaccagcggcagccccacagctggaacagctgccacagctgagcacgtggtgcagcccaaggccaccagcgctgccatggccgcccccagcagtgatgaggccatgaacctgatcaagaacaagaggaacatgacaggctacaagaccctgccctaccccctgaagaagcagaatggcaagatcaagtatgagtgcaatgtgtgtgccaagaccttcggccagctgagcaacctgaaggtgcacctgcgggtgcacagcggggagcggcccttcaagtgccagacctgcaacaagggcttcacccagctggcccacctgcagaagcactacctggtgcacactggagagaagccccatgagtgccaggtgtgccacaagcgcttcagcagcaccagcaacctgaagacccacctgcggctgcacagcggggagaagccctaccagtgcaaggtgtgcccagccaagttcacccagtttgtgcacctgaagctgcacaagaggctgcacacccgggagcggccccacaagtgcagccagtgccacaagaactacatccacctgtgcagcctgaaggtgcacctgaagggcaactgtgccgccgccccagcccctggcctgcccctggaggacctgacccgcatcaatgaggagattgagaagtttgacatcagtgacaatgctgaccggctggaggatgtggaggatgacatcagcgtcatctctgtggtggagaaggagatcctggccgtggtgaggaaggagaaggaggagaccggcctgaaggtgtccctgcagaggaacatgggaaatggcctgctgagcagcggctgcagcctgtatgagagcagtgacctgcccctgatgaagctgccccccagcaaccccctgcccctggtgcctgtgaaggtgaagcaggagaccgtggagcccatggacccctag

SEQ ID NO: 165052 - DNA, 192 bp, synthetic construct
  misc_feature 1..192: note = Description of Artificial Sequence: Synthetic coding sequence
  source 1..192: mol_type = other DNA
atgaagatggacatggaggatgctgacatgaccctgtggacagaggccgagtttgaggagaagtgcacctacatcgtgaatgaccacccctgggacagcggggctgatggcggcacctctgtgcaggccgaggccagcctgcccaggaacctgctcttcaagtatgccaccaacagcgaggaggtgatctag

SEQ ID NO: 165053 - DNA, 2367 bp, synthetic construct
  misc_feature 1..2367: note = Description of Artificial Sequence: Synthetic coding sequence
  source 1..2367: mol_type = other DNA
atgaagatggacatggaggatgctgacatgaccctgtggacagaggccgagtttgaggagaagtgcacctacatcgtgaatgaccacccctgggacagcggggctgatggcggcacctctgtgcaggccgaggccagcctgcccaggaacctgctcttcaagtatgccaccaacagcgaggaggtgattggagtgatgagcaaggagtacatccccaagggcaccaggtttggccccctgattggagagatctacaccaatgacacagtgcccaagaatgccaacaggaagtacttctggaggatctacagcagaggagagctgcaccacttcattgatggcttcaatgaggagaagagcaactggatgagatatgtgaacccagcccacagcccccgggagcagaacctggccgcctgccagaatggcatgaacatctacttctacaccatcaagcccatcccagccaaccaggagctgctggtgtggtactgccgggactttgctgagcggctgcactacccctacccaggagagctgaccatgatgaacctgacccagacccagagcagcctgaagcagcccagcacagagaagaatgagctgtgccccaagaatgtgcccaagcgggagtacagcgtgaaggagatcctgaagctggacagcaaccccagcaagggcaaggacctgtaccgcagcaacatcagccccctgaccagcgagaaggacctggatgacttcagaagaagaggcagccctgagatgcccttctacccccgggtggtgtaccccatccgggcccccctgcctgaggacttcctgaaggccagcctggcctacggcatcgagcggcccacctacatcaccaggagccccatccccagcagcaccacccccagccccagcgcccggagcagcccagaccagagcctgaagagcagcagcccccacagcagccctggcaacacagtgtcccctgtgggccctggcagccaggagcaccgggacagctatgcctacctgaatgccagctatggaacagagggcctgggcagctacccaggctacgcccccctgccccacctgcccccagccttcatccccagctacaatgcccactaccccaagttcctgctgcccccctacggcatgaactgcaatggcctgtctgctgtgtcctccatgaatggcatcaacaactttggcctcttcccccggctgtgccctgtgtacagcaacctgctgggcggcggcagcctgcccaccccctgcagcacccccctgctgcccagcagcctgcccagtgatggagcccggcggctgctgcagcctgagcacccccgggaggtgctggtgcctgccccccacagcgccttctccttcaccggggctgctgcctccatgaaggacaaggcctgcagccccaccagcggcagccccacagctggaacagctgccacagctgagcacgtggtgcagcccaaggccaccagcgctgccatggccgcccccagcagtgatgaggccatgaacctgatcaagaacaagaggaacatgacaggctacaagaccctgccctaccccctgaagaagcagaatggcaagatcaagtatgaatgtaatgtgtgtgccaagaccttcggccagctgagcaacctgaaggtgcacctgcgggtgcacagcggggagcggcccttcaagtgccagacctgcaacaagggcttcacccagctggcccacctgcagaagcactacctggtgcacactggagagaagccccatgagtgccaggtgtgccacaagcgcttcagcagcaccagcaacctgaagacccacctgcggctgcacagcggggagaagccctaccagtgcaaggtgtgcccagccaagttcacccagtttgtgcacctgaagctgcacaagaggctgcacacccgggagcggccccacaagtgcagccagtgccacaagaactacatccacctgtgcagcctgaaggtgcacctgaagggcaactgtgccgccgccccagcccctggcctgcccctggaggacctgacccgcatcaatgaggagattgagaagtttgacatcagtgacaatgctgaccggctggaggatgtggaggatgacatcagcgtcatctctgtggtggagaaggagatcctggccgtggtgaggaaggagaaggaggagaccggcctgaaggtgtccctgcagaggaacatgggaaatggcctgctgagcagcggctgcagcctgtatgagagcagtgacctgcccctgatgaagctgccccccagcaaccccctgcccctggtgcctgtgaaggtgaagcaggagaccgtggagcccatggacccctag

SEQ ID NO: 165054 - DNA, 1716 bp, synthetic construct
  misc_feature 1..1716: note = Description of Artificial Sequence: Synthetic coding sequence
  source 1..1716: mol_type = other DNA
atggccctgccccggcccagcgaggccgtgccccaggacaaggtgtgctacccacctgagagcagcccccagaacctggccgcctactacacccccttccccagctatggccactacagaaacagcctggccaccgtggaggaggacttccagcccttccggcagctggaggccgccgccagcgctgccccagccatgccacccttccccttcaggatggccccacccctgctgagccctggcctgggcctgcagcgggagcccctgtatgacctgccctggtacagcaagctgcccccctggtaccccatcccccacgtgccccgggaggtgccccccttcctgagcagcagccatgaatatgctggggccagcagcgaggacctgggccaccagatcatcggcggggacaatgaaagtggcccctgctgcggccctgacaccctcatccccccacctccagcagatgccagcctgctgcctgagggcctgcggaccagccagctgctgccctgcagccccagcaagcagagtgaagatggccccaagcccagcaaccaggagggcaagagccctgcccgcttccagttcacagaggaggacctgcactttgtgctgtatggagtgacccccagcctggagcacccagccagcctgcaccacgccatcagcggcctgctggtgcccccagacagcagcggcagtgacagcctgccccagaccctggacaaggacagcctgcagctgcctgagggcctgtgcctgatgcagacagtgtttggagaggtgccccactttggagtcttctgcagcagcttcatcgccaagggcgtgcgcttcggccccttccagggcaaggtggtgaatgccagcgaggtgaagacctacggggacaacagcgtgatgtgggagatctttgaagatggccacctgagccacttcattgatggcaagggcggcactggaaactggatgtcctatgtgaactgtgcccgcttccccaaggagcagaacctggtggccgtgcagtgccagggccacatcttctatgagagctgcaaggagatccaccagaaccaggagctgctggtgtggtacggggactgctatgagaagttcctggacatccctgtgtccctgcaggtgacagagcccgggaagcagcccagcggccccagcgaggagagcgctgagggctaccgctgtgagcgctgtgggaaggtgttcacctacaagtactacagagacaagcacctgaagtacaccccctgtgtggacaagggggacaggaagttcccctgcagcctgtgcaagaggagctttgagaagagggaccggctgcgcatccacatcctgcacgtgcatgagaagcaccggccccacaagtgcagcacctgtgggaagtgcttcagccagagcagcagcctgaacaagcacatgagggtgcacagcggggaccggccctaccagtgtgtgtactgcaccaagcgcttcaccgccagcagcatcctgcggacccacatccggcagcacagcggggagaagcccttcaagtgcaagtactgtgggaagagctttgccagccacgccgcccatgacagccacgtgagaagaagccacaaggaggatgatggctgcagctgcagcatctgtgggaagatcttcagtgaccaggagaccttctacagccacatgaagttccacgaggactactag

SEQ ID NO: 165055 - DNA, 303 bp, synthetic construct
  misc_feature 1..303: note = Description of Artificial Sequence: Synthetic coding sequence
  source 1..303: mol_type = other DNA
atggccctgccccggcccagcgaggccgtgccccaggacaaggtgtgctacccacctgagagcagcccccagaacctggccgcctactacacccccttccccagctatggccactacagaaacagcctggccaccgtggaggaggacttccagcccttccggcagctggaggccgccgccagcgctgccccagccatgccacccttccccttcaggatggccccacccctgctgagccctggcctgggcctgcagcgggagcccctgtatgacctgccctggtacagcaagctgcccccatag

SEQ ID NO: 165056 - DNA, 3831 bp, synthetic construct
  misc_feature 1..3831: note = Description of Artificial Sequence: Synthetic coding sequence
  source 1..3831: mol_type = other DNA
atgaggagcaaggcccgggccaggaagctggccaagagtgatggagatgtggtgaacaacatgtatgagcccaacagagacctgctggccagccacagcgcagaagatgaagcagaagattctgccatgagccccatccctgtgggcccccccagccccttccccaccagcgaggacttcacccccaaggagggcagcccctatgaggcccctgtgtacatccctgaggacatccccatcccagctgactttgagctgcgggagagcagcatccctggggccggcctgggcgtgtgggccaagaggaagatggaggccggggagcggctgggcccctgtgtggtggtgcccagggctgctgccaaggagacagactttggctgggagcagatcctgacagatgtggaggtgagcccccaggagggctgcatcaccaagatcagcgaggacctgggcagcgagaagttctgtgtggatgccaaccaggccggggccggctcctggctgaagtacatccgggtggcctgcagctgtgatgaccagaacctgaccatgtgccagatcagcgagcagatctactacaaggtgatcaaggacatcgagcccggggaggagctgctggtgcacgtgaaggagggcgtgtaccccctgggcaccgtgcccccaggcctggatgaggagcccaccttccgctgtgatgaatgtgatgagctgttccagagcaagctggacctgcggcggcacaagaagtacacctgtggctctgtgggcgccgccctgtatgagggcctggccgaggagctgaagccagagggcctgggcggcggcagcggccaggcccacgagtgcaaggactgtgagaggatgttccccaacaagtacagcctggagcagcacatggtgatccacacagaggagcgggagtacaagtgtgaccagtgccccaaggccttcaactggaagagcaacctgatccgccaccagatgagccatgattctgggaagagatttgaatgtgagaactgtgtgaaggtgttcacagaccccagcaacctgcagaggcacatccgcagccagcacgtgggcgcccgggcccacgcctgcccagactgtgggaagacctttgccaccagcagcggcctgaagcagcacaagcacatccacagcacagtgaagcccttcatctgtgaggtgtgccacaagagctacacccagttcagcaacctgtgccgccacaagaggatgcatgctgactgcaggacccagatcaagtgcaaggactgtggccagatgttcagcaccaccagcagcctgaacaagcaccggcgcttctgtgagggcaagaaccactacaccccaggcggcatctttgcccctggcctgcccctgacccccagccccatgatggacaaggccaagcccagccccagcctgaaccacgccagcctgggcttcaatgagtacttccccagccggccccaccctggcagcctgcccttcagcacagccccacccaccttccctgccctgaccccaggcttccctggcatcttcccccccagcctgtacccccggccccccctgctgccccccaccagcctgctgaagagccccctgaaccacacccaggatgccaagctgcccagccccctgggcaacccagccctgcccctggtgtctgctgtgagcaacagcagccagggcaccacagctgctgctggccctgaggagaagtttgagagccggctggaggacagctgtgtggagaagctgaagaccaggagcagtgacatgtctgatggcagtgactttgaagatgtgaacaccaccactggaacagacctggacaccaccactggaactggaagtgacctggacagtgatgtggacagcgaccctgacaaggacaagggcaagggcaagtctgctgagggccagcccaagtttggaggcggcctggcccctcctggggcccccaacagcgtggccgaggtgcctgtgttctacagccagcacagcttcttccccccaccagatgagcagctgctgacagccaccggggctgctggggacagcatcaaggccatcgccagcattgctgagaagtacttcggccctggcttcatgggcatgcaggagaagaagctgggcagcctgccctaccacagcgccttccccttccagttcctgcccaacttcccccacagcctgtaccccttcacagaccgggccctggcccacaacctgctggtgaaggccgagcccaagagccccagagatgccctgaaggtgggcggccccagcgctgagtgcccctttgacctgaccaccaagcccaaggatgtgaagcccatcctgcccatgcccaagggccccagcgccccagccagcggggaggagcagcccctggacctgagcatcggcagccgggcccgggccagccagaatggaggcggccgggagcccaggaagaaccacgtgtatggagagaggaagctgggcgctggggagggcctgccccaggtgtgcccagccaggatgccccagcagccccccctgcactacgccaagcccagccccttcttcatggaccccatctacagccgggtggagaagaggaaggtgacagatcctgtgggcgccctgaaggagaagtacctgcggcccagccccctgctcttccacccccagatgtctgccatcgagaccatgacagagaagctggagagctttgctgccatgaaggctgacagcggcagcagcctgcagcccctgccccaccaccccttcaacttccgcagccccccacccaccctgagtgaccccatcctgaggaagggcaaggagcgctacacctgccgctactgtgggaagatcttccccaggtctgccaacctgaccaggcacctgcggacccacactggagagcagccctaccgctgcaagtactgtgaccgctccttcagcatcagcagcaacctgcagagacatgtgaggaacatccacaacaaggagaagcccttcaagtgccacctgtgcaaccgctgcttcggccagcagaccaacctggacagacacctgaagaagcatgaacatgaaaatgcccctgtgtcccagcaccctggggtgctgaccaaccacctgggcaccagcgccagcagccccaccagcgagagtgacaaccacgccctgctggatgagaaggaggacagctacttcagcgagatccggaacttcatcgccaacagcgagatgaaccaggccagcaccaggacagagaagagagctgacatgcagatcgtggatggcagcgcccagtgccccggcctggccagcgagaagcaggaggatgtggaggaggaggatgatgatgacctggaggaggatgatgaggacagcctggccggcaagagccaggatgacacagtgtccccagcccctgagccccaggccgcctatgaagatgaagaagatgaggagcctgctgccagcctggccgtgggctttgaccacacccggcgctgtgctgaagatcatgaaggaggcctgctggccctggagcccatgcccaccttcggcaagggcctggacctgcggcgggctgctgaggaggcctttgaggtgaaggatgtgctgaacagcaccctggacagcgaggccctgaagcacaccctgtgccggcaggccaagaaccaggcctatgccatgatgctgagcctgtctgaggacacccccctgcacacccccagccagggcagcctggatgcctggctgaaggtgactggagccaccagcgagagcggggccttccaccccatcaaccacctgtag

SEQ ID NO: 165057 - DNA, 3831 bp, synthetic construct
  misc_feature 1..3831: note = Description of Artificial Sequence: Synthetic coding sequence
  source 1..3831: mol_type = other DNA
atgaggagcaaggcccgggccaggaagctggccaagagtgatggagatgtggtgaacaacatgtatgagcccaacagagacctgctggccagccacagcgcagaagatgaagcagaagattctgccatgagccccatccctgtgggcccccccagccccttccccaccagcgaggacttcacccccaaggagggcagcccctatgaggcccctgtgtacatccctgaggacatccccatcccagctgactttgagctgcgggagagcagcatccctggggccggcctgggcgtgtgggccaagaggaagatggaggccggggagcggctgggcccctgtgtggtggtgcccagggctgctgccaaggagacagactttggctgggagcagatcctgacagatgtggaggtgagcccccaggagggctgcatcaccaagatcagcgaggacctgggcagcgagaagttctgtgtggatgccaaccaggccggggccggctcctggctgaagtacatccgggtggcctgcagctgtgatgaccagaacctgaccatgtgccagatcagcgagcaggtgatctactacaaggtgatcaaggacatcgagcctggagaggagctgctggtgcacgtgaaggagggcgtgtaccccctgggcaccgtgcccccaggcctggatgaggagcccaccttccgctgtgatgaatgtgatgagctgttccagagcaagctggacctgcggcggcacaagaagtacacctgtggctctgtgggcgccgccctgtatgagggcctggccgaggagctgaagccagagggcctgggcggcggcagcggccaggcccacgagtgcaaggactgtgagaggatgttccccaacaagtacagcctggagcagcacatggtgatccacacagaggagcgggagtacaagtgtgaccagtgccccaaggccttcaactggaagagcaacctgatccgccaccagatgagccatgacagcggcaagagatttgaatgtgagaactgtgtgaaggtgttcacagaccccagcaacctgcagaggcacatccgcagccagcacgtgggcgcccgggcccacgcctgcccagactgtgggaagacctttgccaccagcagcggcctgaagcagcacaagcacatccacagcacagtgaagcccttcatctgtgaggtgtgccacaagagctacacccagttcagcaacctgtgccgccacaagaggatgcacgccgactgcaggacccagatcaagtgcaaggactgtggccagatgttcagcaccaccagcagcctgaacaagcaccggcgcttctgtgagggcaagaaccactacacccctgggggcatctttgcccctggcctgcccctgacccccagccccatgatggacaaggccaagcccagccccagcctgaaccacgccagcctgggcttcaatgagtacttccccagccggccccaccctggcagcctgcccttcagcacagccccacccaccttccctgccctgaccccaggcttccctggcatcttcccccccagcctgtaccccaggcctcccctgctgccccccaccagcctgctgaagagccccctgaaccacacccaggatgccaagctgcccagccccctgggcaacccagccctgcccctggtgtctgctgtgagcaacagcagccagggcaccacagctgctgctggccctgaggagaagtttgagagccggctggaggacagctgtgtggagaagctgaagaccaggagcagtgacatgtctgatggcagtgactttgaagatgtgaacaccaccaccggcacagacctggacaccaccaccggcaccggcagtgacctggacagtgatgtggacagcgaccctgacaaggacaagggcaagggcaagtctgctgagggccagcccaagtttggaggcggcctggcccctcctggggcccccaacagcgtggccgaggtgcctgtgttctacagccagcacagcttcttccccccaccagatgagcagctgctgacagccactggagctgctggggacagcatcaaggccatcgccagcattgctgagaagtactttggacctggcttcatgggcatgcaggagaagaagctgggcagcctgccctaccacagcgccttccccttccagttcctgcccaacttcccccacagcctgtaccccttcacagaccgggccctggcccacaacctgctggtgaaggccgagcccaagagccccagagatgccctgaaggtgggcggccccagcgcagaatgtccctttgacctgaccaccaagcccaaggatgtgaagcccatcctgcccatgcccaagggccccagcgccccagccagcggggaggagcagcccctggacctgagcatcggcagccgggcccgggccagccagaatggaggcggccgggagcccaggaagaaccacgtgtatggagagaggaagctgggcgctggggagggcctgccccaggtgtgcccagccaggatgccccagcagccccccctgcactacgccaagcccagccccttcttcatggaccccatctacagagtggagaagaggaaggtgacagatcctgtgggcgccctgaaggagaagtacctgcggcccagccccctgctcttccacccccagatgtctgccatcgagaccatgacagagaagctggagagctttgctgccatgaaggctgacagcggcagcagcctgcagcccctgccccaccaccccttcaacttccgcagccccccacccaccctgagtgaccccatcctgaggaagggcaaggagcgctacacctgccgctactgtgggaagatcttccccaggtctgccaacctgaccaggcacctgcggacccacactggagagcagccctaccgctgcaagtactgtgaccgctccttcagcatcagcagcaacctgcagagacatgtgaggaacatccacaacaaggagaagcccttcaagtgccacctgtgcaaccgctgcttcggccagcagaccaacctggacagacacctgaagaagcatgaacatgaaaatgcccctgtgtcccagcaccctggggtgctgaccaaccacctgggcaccagcgccagcagccccaccagcgagagtgacaaccacgccctgctggatgagaaggaggacagctacttcagcgagatccggaacttcatcgccaacagcgagatgaaccaggccagcaccaggacagagaagagagctgacatgcagatcgtggatggcagcgcccagtgccccggcctggccagcgagaagcaggaggatgtggaggaggaggatgatgatgacctggaggaggatgatgaggacagcctggccggcaagagccaggatgacacagtgtccccagcccctgagccccaggccgcctatgaagatgaagaagatgaggagcctgctgccagcctggccgtgggctttgaccacacccggcgctgtgctgaagatcatgaaggaggcctgctggccctggagcccatgcccaccttcggcaagggcctggacctgcggcgggctgctgaggaggcctttgaggtgaaggatgtgctgaacagcaccctggacagcgaggccctgaagcacaccctgtgccggcaggccaagaaccaggcctatgccatgatgctgagcctgtctgaggacacccccctgcacacccccagccagggcagcctggatgcctggctgaaggtgactggagccaccagcgagagcggggccttccaccccatcaaccacctgtag

SEQ ID NO: 165058 - DNA, 3279 bp, synthetic construct
  misc_feature 1..3279: note = Description of Artificial Sequence: Synthetic coding sequence
  source 1..3279: mol_type = other DNA
ttctgtgcctacagcgccaagatctactacaaggtgatcaaggacatcgagcccggggaggagctgctggtgcacgtgaaggagggcgtgtaccccctgggcaccgtgcccccaggcctggatgaggagcccaccttccgctgtgatgaatgtgatgagctgttccagagcaagctggacctgcggcggcacaagaagtacacctgtggctctgtgggcgccgccctgtatgagggcctggccgaggagctgaagccagagggcctgggcggcggcagcggccaggcccacgagtgcaaggactgtgagaggatgttccccaacaagtacagcctggagcagcacatggtgatccacacagaggagcgggagtacaagtgtgaccagtgccccaaggccttcaactggaagagcaacctgatccgccaccagatgagccatgattctgggaagagatttgaatgtgagaactgtgtgaaggtgttcacagaccccagcaacctgcagaggcacatccgcagccagcacgtgggcgcccgggcccacgcctgcccagactgtgggaagacctttgccaccagcagcggcctgaagcagcacaagcacatccacagcacagtgaagcccttcatctgtgaggtgtgccacaagagctacacccagttcagcaacctgtgccgccacaagaggatgcatgctgactgcaggacccagatcaagtgcaaggactgtggccagatgttcagcaccaccagcagcctgaacaagcaccggcgcttctgtgagggcaagaaccactacaccccaggcggcatctttgcccctggcctgcccctgacccccagccccatgatggacaaggccaagcccagccccagcctgaaccacgccagcctgggcttcaatgagtacttccccagccggccccaccctggcagcctgcccttcagcacagccccacccaccttccctgccctgaccccaggcttccctggcatcttcccccccagcctgtacccccggccccccctgctgccccccaccagcctgctgaagagccccctgaaccacacccaggatgccaagctgcccagccccctgggcaacccagccctgcccctggtgtctgctgtgagcaacagcagccagggcaccacagctgctgctggccctgaggagaagtttgagagccggctggaggacagctgtgtggagaagctgaagaccaggagcagtgacatgtctgatggcagtgactttgaagatgtgaacaccaccactggaacagacctggacaccaccactggaactggaagtgacctggacagtgatgtggacagcgaccctgacaaggacaagggcaagggcaagtctgctgagggccagcccaagtttggaggcggcctggcccctcctggggcccccaacagcgtggccgaggtgcctgtgttctacagccagcacagcttcttccccccaccagatgagcagctgctgacagccaccggggctgctggggacagcatcaaggccatcgccagcattgctgagaagtacttcggccctggcttcatgggcatgcaggagaagaagctgggcagcctgccctaccacagcgccttccccttccagttcctgcccaacttcccccacagcctgtaccccttcacagaccgggccctggcccacaacctgctggtgaaggccgagcccaagagccccagagatgccctgaaggtgggcggccccagcgctgagtgcccctttgacctgaccaccaagcccaaggatgtgaagcccatcctgcccatgcccaagggccccagcgccccagccagcggggaggagcagcccctggacctgagcatcggcagccgggcccgggccagccagaatggaggcggccgggagcccaggaagaaccacgtgtatggagagaggaagctgggcgctggggagggcctgccccaggtgtgcccagccaggatgccccagcagccccccctgcactacgccaagcccagccccttcttcatggaccccatctacagccgggtggagaagaggaaggtgacagatcctgtgggcgccctgaaggagaagtacctgcggcccagccccctgctcttccacccccagatgtctgccatcgagaccatgacagagaagctggagagctttgctgccatgaaggctgacagcggcagcagcctgcagcccctgccccaccaccccttcaacttccgcagccccccacccaccctgagtgaccccatcctgaggaagggcaaggagcgctacacctgccgctactgtgggaagatcttccccaggtctgccaacctgaccaggcacctgcggacccacactggagagcagccctaccgctgcaagtactgtgaccgctccttcagcatcagcagcaacctgcagagacatgtgaggaacatccacaacaaggagaagcccttcaagtgccacctgtgcaaccgctgcttcggccagcagaccaacctggacagacacctgaagaagcatgaacatgaaaatgcccctgtgtcccagcaccctggggtgctgaccaaccacctgggcaccagcgccagcagccccaccagcgagagtgacaaccacgccctgctggatgagaaggaggacagctacttcagcgagatccggaacttcatcgccaacagcgagatgaaccaggccagcaccaggacagagaagagagctgacatgcagatcgtggatggcagcgcccagtgccccggcctggccagcgagaagcaggaggatgtggaggaggaggatgatgatgacctggaggaggatgatgaggacagcctggccggcaagagccaggatgacacagtgtccccagcccctgagccccaggccgcctatgaagatgaagaagatgaggagcctgctgccagcctggccgtgggctttgaccacacccggcgctgtgctgaagatcatgaaggaggcctgctggccctggagcccatgcccaccttcggcaagggcctggacctgcggcgggctgctgaggaggcctttgaggtgaaggatgtgctgaacagcaccctggacagcgaggccctgaagcacaccctgtgccggcaggccaagaaccaggcctatgccatgatgctgagcctgtctgaggacacccccctgcacacccccagccagggcagcctggatgcctggctgaaggtgactggagccaccagcgagagcggggccttccaccccatcaaccacctgtag

SEQ ID NO: 165059 - DNA, 3828 bp, synthetic construct
  misc_feature 1..3828: note = Description of Artificial Sequence: Synthetic coding sequence
  source 1..3828: mol_type = other DNA
atgaggagcaaggcccgggccaggaagctggccaagagtgatggagatgtggtgaacaacatgtatgagcccaacagagacctgctggccagccacagcgcagaagatgaagcagaagattctgccatgagccccatccctgtgggcccccccagccccttccccaccagcgaggacttcacccccaaggagggcagcccctatgaggcccctgtgtacatccctgaggacatccccatcccagctgactttgagctgcgggagagcagcatccctggggccggcctgggcgtgtgggccaagaggaagatggaggccggggagcggctgggcccctgtgtggtggtgcccagggctgctgccaaggagacagactttggctgggagcagatcctgacagatgtggaggtgagcccccaggagggctgcatcaccaagatcagcgaggacctgggcagcgagaagttctgtgtggatgccaaccaggccggggccggctcctggctgaagtacatccgggtggcctgcagctgtgatgaccagaacctgaccatgtgccagatcagcgagcagatctactacaaggtgatcaaggacatcgagcccggggaggagctgctggtgcacgtgaaggagggcgtgtaccccctgggcaccgtgcccccaggcctggatgaggagcccaccttccgctgtgatgaatgtgatgagctgttccagagcaagctggacctgcggcggcacaagaagtacacctgtggctctgtgggcgccgccctgtatgagggcctggccgaggagctgaagccagagggcctgggcggcggcagcggccaggcccacgagtgcaaggactgtgagaggatgttccccaacaagtacagcctggagcagcacatggtgatccacacagaggagcgggagtacaagtgtgaccagtgccccaaggccttcaactggaagagcaacctgatccgccaccagatgagccatgattctgggaagagatttgaatgtgagaactgtgtgaaggtgttcacagaccccagcaacctgcagaggcacatccgcagccagcacgtgggcgcccgggcccacgcctgcccagactgtgggaagacctttgccaccagcagcggcctgaagcagcacaagcacatccacagcacagtgaagcccttcatctgtgaggtgtgccacaagagctacacccagttcagcaacctgtgccgccacaagaggatgcatgctgactgcaggacccagatcaagtgcaaggactgtggccagatgttcagcaccaccagcagcctgaacaagcaccggcgcttctgtgagggcaagaaccactacaccccaggcggcatctttgcccctggcctgcccctgacccccagccccatgatggacaaggccaagcccagccccagcctgaaccacgccagcctgggcttcaatgagtacttccccagccggccccaccctggcagcctgcccttcagcacagccccacccaccttccctgccctgaccccaggcttccctggcatcttcccccccagcctgtacccccggccccccctgctgccccccaccagcctgctgaagagccccctgaaccacacccaggatgccaagctgcccagccccctgggcaacccagccctgcccctggtgtctgctgtgagcaacagcagccagggcaccacagctgctgctggccctgaggagaagtttgagagccggctggaggacagctgtgtggagaagctgaagaccaggagcagtgacatgtctgatggcagtgactttgaagatgtgaacaccaccactggaacagacctggacaccaccactggaactggaagtgacctggacagtgatgtggacagcgaccctgacaaggacaagggcaagggcaagtctgctgagggccagcccaagtttggaggcggcctggcccctcctggggcccccaacagcgtggccgaggtgcctgtgttctacagccagcacagcttcttccccccaccagatgagcagctgctgacagccaccggggctgctggggacagcatcaaggccatcgccagcattgctgagaagtacttcggccctggcttcatgggcatgcaggagaagaagctgggcagcctgccctaccacagcgccttccccttccagttcctgcccaacttcccccacagcctgtaccccttcacagaccgggccctggcccacaacctgctggtgaaggccgagcccaagagccccagagatgccctgaaggtgggcggccccagcgctgagtgcccctttgacctgaccaccaagcccaaggatgtgaagcccatcctgcccatgcccaagggccccagcgccccagccagcggggaggagcagcccctggacctgagcatcggcagccgggcccgggccagccagaatggaggcggccgggagcccaggaagaaccacgtgtatggagagaggaagctgggcgctggggagggcctgccccaggtgtgcccagccaggatgccccagcagccccccctgcactacgccaagcccagccccttcttcatggaccccatctacagagtggagaagaggaaggtgacagatcctgtgggcgccctgaaggagaagtacctgcggcccagccccctgctcttccacccccagatgtctgccatcgagaccatgacagagaagctggagagctttgctgccatgaaggctgacagcggcagcagcctgcagcccctgccccaccaccccttcaacttccgcagccccccacccaccctgagtgaccccatcctgaggaagggcaaggagcgctacacctgccgctactgcggcaagatcttccccaggtctgccaacctgaccaggcacctgcggacccacactggagagcagccctaccgctgcaagtactgtgacaggagcttcagcatcagcagcaacctgcagagacatgtgaggaacatccacaacaaggagaagcccttcaagtgccacctgtgcaaccgctgcttcggccagcagaccaacctggacagacacctgaagaagcatgaacatgaaaatgcccctgtgtcccagcaccctggggtgctgaccaaccacctgggcaccagcgccagcagccccaccagcgagagtgacaaccacgccctgctggatgagaaggaggacagctacttcagcgagatccggaacttcatcgccaacagcgagatgaaccaggccagcaccaggacagagaagagagctgacatgcagatcgtggatggcagcgcccagtgccccggcctggccagcgagaagcaggaggatgtggaggaggaggatgatgatgacctggaggaggatgatgaggacagcctggccggcaagagccaggatgacacagtgtccccagcccctgagccccaggccgcctatgaagatgaggaggatgaggagcctgctgccagcctggccgtgggctttgaccacacccggcgctgtgccgaggaccacgagggcggcctgctggccctggagcccatgcccaccttcggcaagggcctggacctgcggcgggctgctgaggaggcctttgaggtgaaggatgtgctgaacagcaccctggacagcgaggccctgaagcacaccctgtgccggcaggccaagaaccaggcctatgccatgatgctgagcctgtctgaggacacccccctgcacacccccagccagggcagcctggatgcctggctgaaggtgactggagccaccagcgagagcggggccttccaccccatcaaccacctgtag

SEQ ID NO: 165060 - DNA, 3771 bp, synthetic construct
  misc_feature 1..3771: note = Description of Artificial Sequence: Synthetic coding sequence
  source 1..3771: mol_type = other DNA
atgaggagcaaggcccgggccaggaagctggccaagagtgatggagatgtggtgaacaacatgtatgagcccaacagagacctgctggccagccacagcgcagaagatgaagcagaagattctgccatgagccccatccctgtgggcccccccagccccttccccaccagcgaggacttcacccccaaggagggcagcccctatgaggcccctgtgtacatccctgaggacatccccatcccagctgactttgagctgcgggagagcagcatccctggggccggcctgggcgtgtgggccaagaggaagatggaggccggggagcggctgggcccctgtgtggtggtgcccagggctgctgccaaggagacagactttggctgggagcagatcctgacagatgtggaggtgagcccccaggagggctgcatcaccaagatcagcgaggacctgggcagcgagaagttctgtgtggatgccaaccaggccggggccggctcctggctgaagtacatccgggtggcctgcagctgtgatgaccagaacctgaccatgtgccagatcagcgagcagatctactacaaggtgatcaaggacatcgagcccggggaggagctgctggtgcacgtgaaggagggcgtgtaccccctgggcaccgtgcccccaggcctggatgaggagcccaccttccgctgtgatgaatgtgatgagctgttccagagcaagctggacctgcggcggcacaagaagtacacctgtggctctgtgggcgccgccctgtatgagggcctggccgaggagctgaagccagagggcctgggcggcggcagcggccaggcccacgagtgcaaggactgtgagaggatgttccccaacaagtacagcctggagcagcacatggtgatccacacagaggagcgggagtacaagtgtgaccagtgccccaaggccttcaactggaagagcaacctgatccgccaccagatgagccatgattctgggaagagatttgaatgtgagaactgtgtgaaggtgttcacagaccccagcaacctgcagaggcacatccgcagccagcacgtgggcgcccgggcccacgcctgcccagactgtgggaagacctttgccaccagcagcggcctgaagcagcacaagcacatccacagcacagtgaagcccttcatctgtgaggtgtgccacaagagctacacccagttcagcaacctgtgccgccacaagaggatgcatgctgactgcaggacccagatcaagtgcaaggactgtggccagatgttcagcaccaccagcagcctgaacaagcaccggcgcttctgtgagggcaagaaccactacaccccaggcggcatctttgcccctggcctgcccctgacccccagccccatgatggacaaggccaagcccagccccagcctgaaccacgccagcctgggcttcaatgagtacttccccagccggccccaccctggcagcctgcccttcagcacagccccacccaccttccctgccctgaccccaggcttccctggcatcttcccccccagcctgtacccccggccccccctgctgccccccaccagcctgctgaagagccccctgaaccacacccaggatgccaagctgcccagccccctgggcaacccagccctgcccctggtgtctgctgtgagcaacagcagccagggcaccacagctgctgctggccctgaggagaagtttgagagccggctggaggacagctgtgtggagaagctgaagaccaggagcagtgacatgtctgatggcagtgactttgaagatgtgaacaccaccactggaacagacctggacaccaccactggaactggaagtgacctggacagtgatgtggacagcgaccctgacaaggacaagggcaagggcaagtctgctgagggccagcccaagtttggaggcggcctggcccctcctggggcccccaacagcgtggccgaggtgcctgtgttctacagccagcacagcttcttccccccaccagatgagcagctgctgacagccaccggggctgctggggacagcatcaaggccatcgccagcattgctgagaagtacttcggccctggcttcatgggcatgcaggagaagaagctgggcagcctgccctaccacagcgccttccccttccagttcctgcccaacttcccccacagcctgtaccccttcacagaccgggccctggcccacaacctgctggtgaaggccgagcccaagagccccagagatgccctgaaggtgggcggccccagcgctgagtgcccctttgacctgaccaccaagcccaaggatgtgaagcccatcctgcccatgcccaagggccccagcgccccagccagcggggaggagcagcccctggacctgagcatcggcagccgggcccgggccagccagaatggaggcggccgggagcccaggaagaaccacgtgtatggagagaggaagctgggcgctggggagggcctgccccaggtgtgcccagccaggatgccccagcagccccccctgcactacgccaagcccagccccttcttcatggaccccatctacagagtggagaagaggaaggtgacagatcctgtgggcgccctgaaggagaagtacctgcggcccagccccctgctcttccacccccagatgtctgccatcgagaccatgacagagaagctggagagctttgctgccatgaaggctgacagcggcagcagcctgcagcccctgccccaccaccccttcaacttccgcagccccccacccaccctgagtgaccccatcctgaggaagggcaaggagcgctacacctgccgctactgcggcaagatcttccccaggtctgccaacctgaccaggcacctgcggacccacactggagagcagccctaccgctgcaagtactgtgacaggagcttcagcatcagcagcaacctgcagagacatgtgaggaacatccacaacaaggagaagcccttcaagtgccacctgtgcaaccgctgcttcggccagcagaccaacctggacagacacctgaagaagcatgaacatgaaaatgcccctgtgtcccagcaccctggggtgctgaccaaccacctgggcaccagcgccagcagccccaccagcgagagtgacaaccacgccctgctggatgagaaggaggacagctacttcagcgagatccggaacttcatcgccaacagcgagatgaaccaggccagcaccaggacagagaagagagctgacatgcagatcgtggatggcagcgcccagtgccccggcctggccagcgagaagcaggaggatgtggaggaggaggatgatgatgacctggaggaggatgatgaggacagcctggccggcaagagccaggatgacacagtgtccccagcccctgagccccaggccgcctatgaagatgaggaggatgaggagcctgctgccagcctggccgtgggctttgaccacacccggcgctgtgccgaggaccacgagggcggcctgctggccctggagcccatgcccaccttcggcaagggcctggacctgcggcgggctgctgaggaggcctttgaggtgaaggatgtgctgaacagcaccctggacagcgaggccctgaagcacaccctgtgccggcaggccaagaaccagggcagcctggatgcctggctgaaggtgactggagccaccagcgagagcggggccttccaccccatcaaccacctgtag

SEQ ID NO: 165061 - DNA, 3255 bp, synthetic construct
  misc_feature 1..3255: note = Description of Artificial Sequence: Synthetic coding sequence
  source 1..3255: mol_type = other DNA
atctactacaaggtgatcaaggacatcgagcctggagaggagctgctggtgcacgtgaaggagggcgtgtaccccctgggcaccgtgcccccaggcctggatgaggagcccaccttccgctgtgatgaatgtgatgagctgttccagagcaagctggacctgcggcggcacaagaagtacacctgtggctctgtgggcgccgccctgtatgagggcctggccgaggagctgaagccagagggcctgggcggcggcagcggccaggcccacgagtgcaaggactgtgagaggatgttccccaacaagtacagcctggagcagcacatggtgatccacacagaggagcgggagtacaagtgtgaccagtgccccaaggccttcaactggaagagcaacctgatccgccaccagatgagccatgacagcggcaagagatttgaatgtgagaactgtgtgaaggtgttcacagaccccagcaacctgcagaggcacatccgcagccagcacgtgggcgcccgggcccacgcctgcccagactgtgggaagacctttgccaccagcagcggcctgaagcagcacaagcacatccacagcacagtgaagcccttcatctgtgaggtgtgccacaagagctacacccagttcagcaacctgtgccgccacaagaggatgcacgccgactgcaggacccagatcaagtgcaaggactgtggccagatgttcagcaccaccagcagcctgaacaagcaccggcgcttctgtgagggcaagaaccactacacccctgggggcatctttgcccctggcctgcccctgacccccagccccatgatggacaaggccaagcccagccccagcctgaaccacgccagcctgggcttcaatgagtacttccccagccggccccaccctggcagcctgcccttcagcacagccccacccaccttccctgccctgaccccaggcttccctggcatcttcccccccagcctgtaccccaggcctcccctgctgccccccaccagcctgctgaagagccccctgaaccacacccaggatgccaagctgcccagccccctgggcaacccagccctgcccctggtgtctgctgtgagcaacagcagccagggcaccacagctgctgctggccctgaggagaagtttgagagccggctggaggacagctgtgtggagaagctgaagaccaggagcagtgacatgtctgatggcagtgactttgaagatgtgaacaccaccaccggcacagacctggacaccaccaccggcaccggcagtgacctggacagtgatgtggacagcgaccctgacaaggacaagggcaagggcaagtctgctgagggccagcccaagtttggaggcggcctggcccctcctggggcccccaacagcgtggccgaggtgcctgtgttctacagccagcacagcttcttccccccaccagatgagcagctgctgacagccactggagctgctggggacagcatcaaggccatcgccagcattgctgagaagtactttggacctggcttcatgggcatgcaggagaagaagctgggcagcctgccctaccacagcgccttccccttccagttcctgcccaacttcccccacagcctgtaccccttcacagaccgggccctggcccacaacctgctggtgaaggccgagcccaagagccccagagatgccctgaaggtgggcggccccagcgcagaatgtccctttgacctgaccaccaagcccaaggatgtgaagcccatcctgcccatgcccaagggccccagcgccccagccagcggggaggagcagcccctggacctgagcatcggcagccgggcccgggccagccagaatggaggcggccgggagcccaggaagaaccacgtgtatggagagaggaagctgggcgctggggagggcctgccccaggtgtgcccagccaggatgccccagcagccccccctgcactacgccaagcccagccccttcttcatggaccccatctacagagtggagaagaggaaggtgacagatcctgtgggcgccctgaaggagaagtacctgcggcccagccccctgctcttccacccccagatgtctgccatcgagaccatgacagagaagctggagagctttgctgccatgaaggctgacagcggcagcagcctgcagcccctgccccaccaccccttcaacttccgcagccccccacccaccctgagtgaccccatcctgaggaagggcaaggagcgctacacctgccgctactgtgggaagatcttccccaggtctgccaacctgaccaggcacctgcggacccacactggagagcagccctaccgctgcaagtactgtgaccgctccttcagcatcagcagcaacctgcagagacatgtgaggaacatccacaacaaggagaagcccttcaagtgccacctgtgcaaccgctgcttcggccagcagaccaacctggacagacacctgaagaagcatgaacatgaaaatgcccctgtgtcccagcaccctggggtgctgaccaaccacctgggcaccagcgccagcagccccaccagcgagagtgacaaccacgccctgctggatgagaaggaggacagctacttcagcgagatccggaacttcatcgccaacagcgagatgaaccaggccagcaccaggacagagaagagagctgacatgcagatcgtggatggcagcgcccagtgccccggcctggccagcgagaagcaggaggatgtggaggaggaggatgatgatgacctggaggaggatgatgaggacagcctggccggcaagagccaggatgacacagtgtccccagcccctgagccccaggccgcctatgaagatgaagaagatgaggagcctgctgccagcctggccgtgggctttgaccacacccggcgctgtgctgaagatcatgaaggaggcctgctggccctggagcccatgcccaccttcggcaagggcctggacctgcggcgggctgctgaggaggcctttgaggtgaaggatgtgctgaacagcaccctggacagcgaggccctgaagcacaccctgtgccggcaggccaagaaccaggcctatgccatgatgctgagcctgtctgaggacacccccctgcacacccccagccagggcagcctggatgcctggctgaaggtgactggagccaccagcgagagcggggccttccaccccatcaaccacctgtag

SEQ ID NO: 165062 - DNA, 3774 bp, synthetic construct
  misc_feature 1..3774: note = Description of Artificial Sequence: Synthetic coding sequence
  source 1..3774: mol_type = other DNA
atgaggagcaaggcccgggccaggaagctggccaagagtgatggagatgtggtgaacaacatgtatgagcccaacagagacctgctggccagccacagcgcagaagatgaagcagaagattctgccatgagccccatccctgtgggcccccccagccccttccccaccagcgaggacttcacccccaaggagggcagcccctatgaggcccctgtgtacatccctgaggacatccccatcccagctgactttgagctgcgggagagcagcatccctggggccggcctgggcgtgtgggccaagaggaagatggaggccggggagcggctgggcccctgtgtggtggtgcccagggctgctgccaaggagacagactttggctgggagcagatcctgacagatgtggaggtgagcccccaggagggctgcatcaccaagatcagcgaggacctgggcagcgagaagttctgtgtggatgccaaccaggccggggccggctcctggctgaagtacatccgggtggcctgcagctgtgatgaccagaacctgaccatgtgccagatcagcgagcagatctactacaaggtgatcaaggacatcgagcccggggaggagctgctggtgcacgtgaaggagggcgtgtaccccctgggcaccgtgcccccaggcctggatgaggagcccaccttccgctgtgatgaatgtgatgagctgttccagagcaagctggacctgcggcggcacaagaagtacacctgtggctctgtgggcgccgccctgtatgagggcctggccgaggagctgaagccagagggcctgggcggcggcagcggccaggcccacgagtgcaaggactgtgagaggatgttccccaacaagtacagcctggagcagcacatggtgatccacacagaggagcgggagtacaagtgtgaccagtgccccaaggccttcaactggaagagcaacctgatccgccaccagatgagccatgattctgggaagagatttgaatgtgagaactgtgtgaaggtgttcacagaccccagcaacctgcagaggcacatccgcagccagcacgtgggcgcccgggcccacgcctgcccagactgtgggaagacctttgccaccagcagcggcctgaagcagcacaagcacatccacagcacagtgaagcccttcatctgtgaggtgtgccacaagagctacacccagttcagcaacctgtgccgccacaagaggatgcatgctgactgcaggacccagatcaagtgcaaggactgtggccagatgttcagcaccaccagcagcctgaacaagcaccggcgcttctgtgagggcaagaaccactacaccccaggcggcatctttgcccctggcctgcccctgacccccagccccatgatggacaaggccaagcccagccccagcctgaaccacgccagcctgggcttcaatgagtacttccccagccggccccaccctggcagcctgcccttcagcacagccccacccaccttccctgccctgaccccaggcttccctggcatcttcccccccagcctgtacccccggccccccctgctgccccccaccagcctgctgaagagccccctgaaccacacccaggatgccaagctgcccagccccctgggcaacccagccctgcccctggtgtctgctgtgagcaacagcagccagggcaccacagctgctgctggccctgaggagaagtttgagagccggctggaggacagctgtgtggagaagctgaagaccaggagcagtgacatgtctgatggcagtgactttgaagatgtgaacaccaccactggaacagacctggacaccaccactggaactggaagtgacctggacagtgatgtggacagcgaccctgacaaggacaagggcaagggcaagtctgctgagggccagcccaagtttggaggcggcctggcccctcctggggcccccaacagcgtggccgaggtgcctgtgttctacagccagcacagcttcttccccccaccagatgagcagctgctgacagccaccggggctgctggggacagcatcaaggccatcgccagcattgctgagaagtacttcggccctggcttcatgggcatgcaggagaagaagctgggcagcctgccctaccacagcgccttccccttccagttcctgcccaacttcccccacagcctgtaccccttcacagaccgggccctggcccacaacctgctggtgaaggccgagcccaagagccccagagatgccctgaaggtgggcggccccagcgctgagtgcccctttgacctgaccaccaagcccaaggatgtgaagcccatcctgcccatgcccaagggccccagcgccccagccagcggggaggagcagcccctggacctgagcatcggcagccgggcccgggccagccagaatggaggcggccgggagcccaggaagaaccacgtgtatggagagaggaagctgggcgctggggagggcctgccccaggtgtgcccagccaggatgccccagcagccccccctgcactacgccaagcccagccccttcttcatggaccccatctacagccgggtggagaagaggaaggtgacagatcctgtgggcgccctgaaggagaagtacctgcggcccagccccctgctcttccacccccagatgtctgccatcgagaccatgacagagaagctggagagctttgctgccatgaaggctgacagcggcagcagcctgcagcccctgccccaccaccccttcaacttccgcagccccccacccaccctgagtgaccccatcctgaggaagggcaaggagcgctacacctgccgctactgtgggaagatcttccccaggtctgccaacctgaccaggcacctgcggacccacactggagagcagccctaccgctgcaagtactgtgaccgctccttcagcatcagcagcaacctgcagagacatgtgaggaacatccacaacaaggagaagcccttcaagtgccacctgtgcaaccgctgcttcggccagcagaccaacctggacagacacctgaagaagcatgaacatgaaaatgcccctgtgtcccagcaccctggggtgctgaccaaccacctgggcaccagcgccagcagccccaccagcgagagtgacaaccacgccctgctggatgagaaggaggacagctacttcagcgagatccggaacttcatcgccaacagcgagatgaaccaggccagcaccaggacagagaagagagctgacatgcagatcgtggatggcagcgcccagtgccccggcctggccagcgagaagcaggaggatgtggaggaggaggatgatgatgacctggaggaggatgatgaggacagcctggccggcaagagccaggatgacacagtgtccccagcccctgagccccaggccgcctatgaagatgaagaagatgaggagcctgctgccagcctggccgtgggctttgaccacacccggcgctgtgctgaagatcatgaaggaggcctgctggccctggagcccatgcccaccttcggcaagggcctggacctgcggcgggctgctgaggaggcctttgaggtgaaggatgtgctgaacagcaccctggacagcgaggccctgaagcacaccctgtgccggcaggccaagaaccagggcagcctggatgcctggctgaaggtgactggagccaccagcgagagcggggccttccaccccatcaaccacctgtag

SEQ ID NO: 165063 - DNA, 600 bp, synthetic construct
  misc_feature 1..600: note = Description of Artificial Sequence: Synthetic coding sequence
  source 1..600: mol_type = other DNA
atgagcagcgagaactgctttgtggccgagaacagcagcctgcaccctgagagcggccaggagaatgatgccaccagcccccacttcagcaccaggcatgagggcagcttccaggtgcctgtgctgtgtgctgtgatgaatgtggtgttcatcaccatcctgatcatcgccctgattgccctgtctgtgggccagtacaactgccccggccagtacaccttctccatgcccagcgacagccacgtgagcagctgcagcgaggactgggtgggctaccagaggaagtgctacttcatcagcacagtgaagaggtcctggaccagcgcccagaatgcctgcagcgagcacggggccaccctggccgtgattgattctgagaaggacatgaacttcctgaagagatatgccggccgggaggagcactgggtgggcctgaagaaggagcccggccacccctggaagtggagcaatggcaaggagttcaacaactggttcaacgtgacaggcagtgacaagtgtgtgttcctgaagaacacagaggtgtcctccatggagtgtgagaagaacctgtactggatctgcaacaagccctacaagtag

SEQ ID NO: 165064 - DNA, 228 bp, synthetic construct
  misc_feature 1..228: note = Description of Artificial Sequence: Synthetic coding sequence
  source 1..228: mol_type = other DNA
atgcaccacaggatgaatgagatgaacctgagccctgtgggcatggagcagctgaccagcagctctgtgtccaatgccctgcctgtgtctggcagccacctgggcctggccgccagccccacccacagcgccatcccagcccctggcctgcctgtggccatccccaacctgggccccagcctgagcagcctgcccagcgccctgagcctgatgctgcccatgggctag

SEQ ID NO: 165065 - DNA, 1893 bp, synthetic construct
  misc_feature 1..1893: note = Description of Artificial Sequence: Synthetic coding sequence
  source 1..1893: mol_type = other DNA
atgctgggcatgtatgtgcctgaccgcttcagcctgaagagcagccgggtgcaggacggcatgggcctgtacacagccaggagagtgaggaaaggagagaagtttggcccctttgctggggagaagaggatgcctgaggacctggatgagaacatggactaccgcctgatgtgggaggtgcggggcagcaagggggaggtgctgtacatcctggatgccaccaaccccaggcacagcaactggctgcgctttgtgcatgaggcccccagccaggagcagaagaacctggccgccatccaggagggggagaacatcttctacctggccgtggaggacattgaaacagacacagagctgctgattggctacctggacagcgacatggaggccgaggaggaggagcagcagatcatgaccgtcatcaaggagggggaggtggagaacagccggcggcagagcacagctggcaggaaggaccggctgggctgcaaggaggactatgcctgcccccagtgtgagagcagcttcaccagcgaggacatcctggccgagcacctgcagaccctgcaccagaagcccacagaggagaaggagttcaagtgcaagaactgtgggaagaagtttcctgtgaagcaggccctgcagagacatgtgctgcagtgcacagccaagagcagcctgaaggagagcagccgctccttccagtgcagcgtgtgcaacagcagcttcagcagcgccagcagctttgagcagcaccaggagacctgcagaggagatgccaggtttgtgtgcaaggctgacagctgtgggaagaggctgaagagcaaggatgccctgaagaggcaccaggagaatgtgcacactggagaccccaagaagaagctgatctgcagcgtgtgcaacaagaagtgcagcagcgccagcagcctgcaggagcacaggaagatccacgagatctttgactgccaggagtgcatgaagaagttcatcagcgccaaccagctgaagaggcacatgatcacccacagcgagaagaggccctacaactgtgagatctgcaacaagagcttcaagaggctggaccaggtgggcgcccacaaggtgatccacagcgaggacaagccctacaagtgcaagctgtgtgggaaaggatttgcccacagaaatgtgtacaagaaccacaagaagacccacagcgaggagcggcccttccagtgtgaggagtgcaaggccctcttccgcacccccttcagcctgcagaggcacctgctgatccacaacagcgagaggaccttcaagtgccaccactgtgatgccaccttcaagaggaaggacaccctgaatgtgcacgtgcaggtggtgcatgagcggcacaagaagtaccgctgtgagctgtgcaacaaggcctttgtgacccccagcgtgctgcggagccacaagaagacccacactggagagaaggagaagatctgcccctactgcggccagaagtttgccagcagcggcaccctgcgggtgcacatccgcagccacactggagagcggccctaccagtgcccctactgtgagaagggcttcagcaagaatgatggcctgaagatgcacatccgcacccacacccgggagaagccctacaagtgcagtgaatgttccaaggccttcagccagaagaggggcctggatgagcacaagaggacccacactggagagaagcccttccagtgtgatgtgtgtgacctggccttcagcctgaagaagatgctgatccgccacaagatgacccacaaccccaaccggcccctggccgagtgccagttctgccacaagaagttcaccagaaatgactacctgaaggtgcacatggacaacatccatggagtggccgacagctag

SEQ ID NO: 165066 - DNA, 336 bp, synthetic construct
  misc_feature 1..336: note = Description of Artificial Sequence: Synthetic coding sequence
  source 1..336: mol_type = other DNA
atgctgggcatgtatgtgcctgaccgcttcagcctgaagagcagccgggtgcaggacggcatgggcctgtacacagccaggagagtgaggaaaggagagaagtttggcccctttgctggggagaagaggatgcctgaggacctggatgagaacatggactaccgcctgatgtgggaggtgcggggcagcaagggggaggtgctgtacatcctggatgccaccaaccccaggcacagcaactggctgcgctttgtgcatgaggcccccagccaggagcagaagaacctggccgccatccaggacaagaacctgggccctgctgagtggaggggctag

SEQ ID NO: 165067 - DNA, 1800 bp, synthetic construct
  misc_feature 1..1800: note = Description of Artificial Sequence: Synthetic coding sequence
  source 1..1800: mol_type = other DNA
atgctgggcatgtatgtgcctgaccgcttcagcctgaagagcagccgggtgcaggacggcatgggcctgtacacagccaggagagtgaggaaaggagagaagtttggcccctttgctggggagaagaggatgcctgaggacctggatgagaacatggactaccgcctgatgtgggaggtgcggggcagcaagggggaggtgctgtacatcctggatgccaccaaccccaggcacagcaactggctgcgctttgtgcatgaggcccccagccaggagcagaagaacctggccgccatccaggagggggagaacatcttctacctggccgtggaggacattgaaacagacacagagctgctgattggctacctggacagcgacatggaggccgaggaggaggagcagcagatcatgaccgtcatcaaggagggggaggtggagaacagccggcggcagagcacagctggcaggaaggaccggctgggctgcaaggaggactatgcctgcccccagtgtgagagcagcttcaccagcgaggacatcctggccgagcacctgcagaccctgcaccagaagcccacagaggagaaggagttcaagtgcaagaactgtgggaagaagtttcctgtgaagcaggccctgcagaggcactttgagcagcaccaggagacctgcagaggagatgccaggtttgtgtgcaaggctgacagctgtgggaagaggctgaagagcaaggatgccctgaagaggcaccaggagaatgtgcacactggagaccccaagaagaagctgatctgcagcgtgtgcaacaagaagtgcagcagcgccagcagcctgcaggagcacaggaagatccacgagatctttgactgccaggagtgcatgaagaagttcatcagcgccaaccagctgaagaggcacatgatcacccacagcgagaagaggccctacaactgtgagatctgcaacaagagcttcaagaggctggaccaggtgggcgcccacaaggtgatccacagcgaggacaagccctacaagtgcaagctgtgtgggaagggctttgcccacagaaatgtgtacaagaaccacaagaagacccacagcgaggagcggcccttccagtgtgaggagtgcaaggccctcttccgcacccccttcagcctgcagaggcacctgctgatccacaacagcgagaggaccttcaagtgccaccactgtgatgccaccttcaagaggaaggacaccctgaatgtgcacgtgcaggtggtgcatgagcggcacaagaagtaccgctgtgagctgtgcaacaaggcctttgtgaccccatctgtgctgcggagccacaagaagacccacactggagagaaggagaagatctgcccctactgcggccagaagtttgccagcagcggcaccctgcgggtgcacatccgcagccacactggagagcggccctaccagtgcccctactgtgagaagggcttcagcaagaatgatggcctgaagatgcacatccgcacccacacccgggagaagccctacaagtgcagcgagtgcagcaaggccttcagccagaagaggggcctggatgagcacaagaggacccacactggagagaagcccttccagtgtgatgtgtgtgacctggccttcagcctgaagaagatgctgatccgccacaagatgacccacaaccccaaccggcccctggccgagtgccagttctgccacaagaagttcaccagaaatgactacctgaaggtgcacatggacaacatccacggcgtggccgacagctag

SEQ ID NO: 165068 - DNA, 1506 bp, synthetic construct
  misc_feature 1..1506: note = Description of Artificial Sequence: Synthetic coding sequence
  source 1..1506: mol_type = other DNA
atgctgggcatgtatgtgcctgaccgcttcagcctgaagagcagccgggtgcaggacggcatgggcctgtacacagccaggagagtgaggaaaggagagaagtttggcccctttgctggggagaagaggatgcctgaggacctggatgagaacatggactaccgcctgatgtgggaggtgcggggcagcaagggggaggtgctgtacatcctggatgccaccaaccccaggcacagcaactggctgcgctttgtgcatgaggcccccagccaggagcagaagaacctggccgccatccaggagggggagaacatcttctacctggccgtggaggacattgaaacagacacagagctgctgattggctacctggacagcgacatggaggccgaggaggaggagcagcagatcatgaccgtcatcaaggagggggaggtggagaacagccggcggcagagcacagctggcaggaaggaccggctgggctgcaaggaggactatgcctgcccccagtgtgagagcagcttcaccagcgaggacatcctggccgagcacctgcagaccctgcaccagaagcccacagaggagaaggagttcaagtgcaagaactgtgggaagaagtttcctgtgaagcaggccctgcagaggcactttgagcagcaccaggagacctgcagaggagatgccaggtttgtgtgcaaggctgacagctgtgggaagaggctgaagagcaaggatgccctgaagaggcaccaggagaatgtgcacactggagaccccaagaagaagctgatctgcagcgtgtgcaacaagaagtgcagcagcgccagcagcctgcaggagcacaggaagatccacgagatctttgactgccaggagtgcatgaagaagttcatcagcgccaaccagctgaagaggcacatgatcacccacagcgagaagaggccctacaactgtgagatctgcaacaagagcttcaagaggctggaccaggtgggcgcccacaaggtgatccacagcgaggacaagccctacaagtgcaagctgtgtgggaagggctttgcccacagaaatgtgtacaagaaccacaagaagacccacagcgaggagcggcccttccagtgtgaggagtgcaaggccctcttccgcacccccttcagcctgcagaggcacctgctgatccacaacagcgagaggaccttcaagtgccaccactgtgatgccaccttcaagaggaaggacaccctgaatgtgcacgtgcaggtggtgcatgagcggcacaagaagtaccgctgtgagctgtgcaacaaggcctttgtgaccccatctgtgctgcggagccacaagaagacccacactggagagaaggagaagatctgcccctactgcggccagaagtttgccagcagcggcaccctgcgggtgcacatccgcagccacactggagaggccgtgcaggtgctgcgggtgcagcagggcctgcagcctgaggcccggcccggctag

SEQ ID NO: 165069 - DNA, 1227 bp, synthetic construct
  misc_feature 1..1227: note = Description of Artificial Sequence: Synthetic coding sequence
  source 1..1227: mol_type = other DNA
atgtgccagaacttcttcatcgacagctgtgccgcccacggcccccccacctttgtgaaggacagcgctgtggacaagggccaccccaacagaagtgccctgagcctgcccccaggcctgcgcatcggccccagcggcatcccccaggccggcctgggcgtgtggaatgaggccagtgacctgcccctgggcctgcacttcggcccctatgagggccgcatcacagaagatgaggaggccgccaacaacggctacagctggctgatcaccaagggcaggaactgctatgaatatgtggatggcaaggacaagtcctgggccaactggatgagatatgtgaactgtgccagagatgatgaggagcagaacctggtggccttccagtaccaccggcagatcttctaccgcacctgcagggtcatccggcccggctgtgagctgctggtgtggtatggagatgaatatggccaggagctgggcatcaagtggggcagcaagtggaagaaggagctgatggccggccgggagcccaagccagagatccacccctgccccagctgctgcctggccttcagcagccagaagttcctgagccagcacgtggagaggaaccacagcagccagaacttccctggccccagcgccaggaagctgctgcagcctgagaacccctgccctggggaccagaaccaggagcagcagtacccagacccccacagcagaaatgacaagaccaagggccaggagatcaaggagaggagcaagctgctgaacaagaggacctggcagcgggagatcagccgggccttcagcagcccccccaagggccagatgggcagctgccgggtgggcaagaggatcatggaggaggagagcaggacaggccagaaggtgaaccctggcaacacaggcaagctgtttgtgggcgtgggcatcagcagaattgccaaggtgaagtacggggagtgtggccagggcttctctgtgaagagtgatgtgatcacccaccagaggacccacactggagagaagccctacgtgtgccgggagtgtggccggggcttctcctggcagagcgtgctgctgacccaccagaggacccacactggagagaagccctacgtgtgccgggagtgtggccggggcttcagccggcagagcgtgctgctgacccaccagaggacccacactggagagaagccctacgtgtgccgggaggatgaatag

SEQ ID NO: 165070 - DNA, 2685 bp, synthetic construct
  misc_feature 1..2685: note = Description of Artificial Sequence: Synthetic coding sequence
  source 1..2685: mol_type = other DNA
atgagccctgagaagagccaggaggagagccctgaggaggacacagagaggacagagaggaagcccatggtgaaggatgccttcaaggacatcagcatctacttcaccaaggaggagtgggccgagatgggagactgggagaagacccgctacagaaatgtgaagaggaactacaatgccctgatcaccatcggcctgcgggccaccaggcctgccttcatgtgccaccggcggcaggccatcaagctgcaggtggatgacacagaagattctgatgaggagtggaccccccggcagcaggtgaagccaccctggatggccctgcgggtggagcagaggaagcaccagaagggcatgcccaaggccagcttcagcaatgaaagcagcctgaaggagctgagcaggacagccaacctgctgaatgccagcggcagcgagcaggcccagaagcctgtgagccccagcggggaggccagcaccagcggccagcacagccggctgaagctggagctgaggaagaaggagacagagaggaagatgtacagcctgcgggagaggaaaggacatgcctacaaggaggtgtctgagccccaggatgatgactacctgtactgtgagatgtgccagaacttcttcatcgacagctgtgccgcccacggcccccccacctttgtgaaggacagcgctgtggacaagggccaccccaacagaagtgccctgagcctgcccccaggcctgcgcatcggccccagcggcatcccccaggccggcctgggcgtgtggaatgaggccagtgacctgcccctgggcctgcacttcggcccctatgagggccgcatcacagaagatgaggaggccgccaacaacggctacagctggctgatcaccaagggcaggaactgctatgaatatgtggatggcaaggacaagtcctgggccaactggatgagatatgtgaactgtgccagagatgatgaggagcagaacctggtggccttccagtaccaccggcagatcttctaccgcacctgcagggtcatccggcccggctgtgagctgctggtgtggtatggagatgaatatggccaggagctgggcatcaagtggggcagcaagtggaagaaggagctgatggccggccgggagcccaagccagagatccacccctgccccagctgctgcctggccttcagcagccagaagttcctgagccagcacgtggagaggaaccacagcagccagaacttccctggccccagcgccaggaagctgctgcagcctgagaacccctgccctggggaccagaaccaggagcagcagtacccagacccccacagcagaaatgacaagaccaagggccaggagatcaaggagaggagcaagctgctgaacaagaggacctggcagcgggagatcagccgggccttcagcagcccccccaagggccagatgggcagctgccgggtgggcaagaggatcatggaggaggagagcaggacaggccagaaggtgaaccctggcaacacaggcaagctgtttgtgggcgtgggcatcagcagaattgccaaggtgaagtacggggagtgtggccagggcttctctgtgaagagtgatgtgatcacccaccagaggacccacactggagagaagctgtatgtgtgccgggagtgtggccggggcttctcctggaagagccacctgctgatccaccagaggatccacactggagagaagccctacgtgtgccgggagtgtggccggggcttctcctggcagagcgtgctgctgacccaccagaggacccacactggagagaagccctacgtgtgccgggagtgtggccggggcttcagccggcagagcgtgctgctgacccaccagaggaggcacactggagagaagccctacgtgtgccgggagtgtggccggggcttcagccggcagagcgtgctgctgacccaccagaggaggcacactggagagaagccctacgtgtgccgggagtgtggccggggcttctcctggcagagcgtgctgctgacccaccagaggacccacactggagagaagccctacgtgtgccgggagtgtggccggggcttctcctggcagagcgtgctgctgacccaccagaggacccacactggagagaagccctacgtgtgccgggagtgtggccggggcttcagcaacaagagccacctgctgcggcaccagaggacccacactggagagaagccctacgtgtgccgggagtgtggccggggcttccgggacaagagccacctgctgcggcaccagaggacccacactggagagaagccctacgtgtgccgggagtgtggccggggcttccgggacaagagcaacctgctgagccaccagaggacccacactggagagaagccctacgtgtgccgggagtgtggccggggcttcagcaacaagagccacctgctgcggcaccagaggacccacactggagagaagccctacgtgtgccgggagtgtggccggggcttcaggaacaagagccacctgctgcggcaccagaggacccacactggagagaagccctacgtgtgccgggagtgtggccggggcttcagtgacaggagcagcctgtgctaccaccagaggacccacactggagagaagccctacgtgtgccgggaggatgaatag

SEQ ID NO: 165071 - DNA, 303 bp, synthetic construct
  misc_feature 1..303: note = Description of Artificial Sequence: Synthetic coding sequence
  source 1..303: mol_type = other DNA
atgagccctgagaagagccaggaggagagccctgaggaggacacagagaggacagagaggaagcccatggtgaaggatgccttcaaggacatcagcatctacttcaccaaggaggagtgggccgagatgggagactgggagaagacccgctacagaaatgtgaagaggaactacaatgccctgatcaccatcggcctgcgggccaccaggcctgccttcatgtgccaccggcggcaggccatcaagctgcaggtggatgacacagaagattctgatgaggagtggaccccccggcagcagtag

SEQ ID NO: 165072 - DNA, 537 bp, synthetic construct
  misc_feature 1..537: note = Description of Artificial Sequence: Synthetic coding sequence
  source 1..537: mol_type = other DNA
atgtctgaggtgcggctgccccccctgcgggccctggatgactttgtgctgggcagcgcccggctggccgccccagacccctgtgacccccagcgctggtgccacagggtcatcaacaacctgctgtactaccagaccaactacctgctgtgcttcggcatcggcctggccctggccggctacgtgcggcccctgcacaccctgctgagcgccctggtggtggccgtggccctgggcgtgctggtgtgggccgctgagaccagggctgctgtgcggcgctgcagaagaagccaccctgctgcctgcctggccgctgtgctggccgtgggcctgctggtgctgtgggtggccggcggggcctgcaccttcctgttcagcattgctggccctgtgctgctgatcctggtgcacgccagcctgcggctgaggaacctgaagaacaagattgagaacaagattgagagcatcggcctgaagaggacccccatgggcctgctgctggaggccctgggccaggagcaggaggccggcagctag

SEQ ID NO: 165073 - DNA, 846 bp, synthetic construct
  misc_feature 1..846: note = Description of Artificial Sequence: Synthetic coding sequence
  source 1..846: mol_type = other DNA
atggccggcacctggctgctgctgctgctggccctgggctgcccagccctgcccactggagtgggcggcacccccttccccagcctggccccacccatcatgctgctggtggatggcaagcagcagatggtggtggtgtgcctggtgctggatgtggcccctcctggcctggacagccccatctggttctctgctggaaatggaagtgccctggatgccttcacctacggccccagccctgccacagatggcacctggaccaacctggcccacctgagcctgcccagcgaggagctggcctcctgggagcccctggtgtgccacactggacctggagctgagggccacagccgcagcacccagcccatgcacctgagcggggaggccagcacagcccggacctgcccccaggagcccctgcggggcacccctgggggcgccctgtggctgggcgtgctgcggctgctgctcttcaagctgctgctgtttgacctgctgctgacctgcagctgcctgtgtgaccctgctggccccctgcccagccctgccaccaccacccggctgcgggccctgggcagccaccggctgcacccagccacagagaccggcggccgggaggccaccagcagcccccggccccagccccgggaccggcgctggggagacaccccacctggcaggaagccaggcagccctgtgtggggcgagggcagctacctgagcagctaccccacctgcccagcccaggcctggtgcagccgcagcgccctgcgggcccccagcagcagcctgggcgccttctttgctggggacctgcccccacccctgcaggccggggccgcctag

SEQ ID NO: 165074 - DNA, 384 bp, synthetic construct
  misc_feature 1..384: note = Description of Artificial Sequence: Synthetic coding sequence
  source 1..384: mol_type = other DNA
atggccgccaccagccctggcccctgggtgagcagccccacccacaggagctgcttcctgcccttcctgacccggggctgccacaacagagtgtgggccgcccaccccttcctgctgtggccccaccagagctgctgctggtggatggagagcagccgctggtggtggagcgcctggagcctgatgctgcaccccctggccctgacagcccctggcaggaagccaggcagccctgtgtggggcgagggcagctacctgagcagctaccccacctgcccagcccaggcctggtgcagccgcagcgccctgcgggcccccagcagcagcctgggcgccttctttgctggggacctgcccccacccctgcaggccggggccgcctag

SEQ ID NO: 165075 - DNA, 771 bp, synthetic construct
  misc_feature 1..771: note = Description of Artificial Sequence: Synthetic coding sequence
  source 1..771: mol_type = other DNA
atggccggcacctggctgctgctgctgctggccctgggctgcccagccctgcccactggacctgtgtccttccccagcagccctgaggccgccaccaccggccccatctggttctctgctggaaatggcagcgccctggatgccttcacctacggccccagccctgccacagatggcacctggaccaacctggcccacctgagcctgcccagcgaggagctggcctcctgggagcccctggtgtgccacacaggccctggagctgagggccacagccgcagcacccagcccatgcacctgtctggagaggccagcacagcccggacctgcccccaggagcccctgcggggcaccccaggaggagccctgtggctgggcgtgctgcggctgctgctcttcaagctgctgctgtttgacctgctgctgacctgcagctgcctgtgtgaccctgctggccccctgcccagccctgccaccaccacccggctgcgggccctgggcagccaccggctgcacccagccacagaaacaggaggccgggaggccaccagcagcccccggccccagccccgggaccggcgctggggagacaccccacctggcaggaagccaggcagccctgtgtggggcgagggcagctacctgagcagctaccccacctgcccagcccaggcctggtgcagccgcagcgccctgcgggcccccagcagcagcctgggcgccttctttgctggggacctgcccccacccctgcaggccggggccgcctag

SEQ ID NO: 165076 - DNA, 525 bp, synthetic construct
  misc_feature 1..525: note = Description of Artificial Sequence: Synthetic coding sequence
  source 1..525: mol_type = other DNA
atggccggcacctggctgctgctgctgctggccctgggctgcccagccctgcccactggagaggccagcacagcccggacctgcccccaggagcccctgcggggcaccccaggaggagccctgtggctgggcgtgctgcggctgctgctcttcaagctgctgctgtttgacctgctgctgacctgcagctgcctgtgtgaccctgctggccccctgcccagccctgccaccaccacccggctgcgggccctgggcagccaccggctgcacccagccacagaaacaggaggccgggaggccaccagcagcccccggccccagccccgggaccggcgctggggagacaccccacctggcaggaagccaggcagccctgtgtggggcgagggcagctacctgagcagctaccccacctgcccagcccaggcctggtgcagccgcagcgccctgcgggcccccagcagcagcctgggcgccttctttgctggggacctgcccccacccctgcaggccggggccgcctag

SEQ ID NO: 165077 - DNA, 438 bp, synthetic construct
  misc_feature 1..438: note = Description of Artificial Sequence: Synthetic coding sequence
  source 1..438: mol_type = other DNA
atgtcctgggcccctgtgctgctgatgctgtttgtgtactgcaccggctgcggcccccagcctgtgctgcaccagcccccagccatgagcagcgccctgggcaccaccatccggctgacctgcaccctgagaaatgaccatgacattggagtgtacagcgtgtactggtaccagcagaggcctggccaccccccacgcttcctgctgcgctacttcagccagagcgacaagagccagggcccccaggtgcccccacgcttcagcggcagcaaggatgtggccaggaacagaggctacctgagcatcagcgagctgcagccagaagatgaggccatgtactactgtgccatgggcgcccggagcagcgagaaggaggagcgggagcgggagtgggaggaggagatggagcccacagctgcccggaccagggtgccctag

SEQ ID NO: 165078 - DNA, 372 bp, synthetic construct
  misc_feature 1..372: note = Description of Artificial Sequence: Synthetic coding sequence
  source 1..372: mol_type = other DNA
atggcctgccgctgcctgtccttcctgctgatgggcaccttcctgtctgtgtcccagacagtgctggcccagctggatgccctgctggtgtttcctggccaggtggcccagctgagctgcaccctgagcccccagcacgtgaccatccgggactatggagtgtcctggtaccagcagagagctggcagcgccccccgctacctgctgtactacagaagtgaggaggaccaccacaggcctgctgacatcccagaccgcttctctgctgccaaggatgaggcccacaatgcctgtgtgctgaccatcagccctgtgcagccagaagatgatgctgactactactgcagcgtgggctacggcttcagcccctag

SEQ ID NO: 165079 - DNA, 513 bp, synthetic construct
  misc_feature 1..513: note = Description of Artificial Sequence: Synthetic coding sequence
  source 1..513: mol_type = other DNA
atggatgagcagccccggctgatgcacagccacgccggcgtgggcatggccggccaccctggcctgagccagcacctgcaggatggagctgggggcacagaaggagagggcggcaggaagcaggacattggagacatcctgcagcagatcatgaccatcacagaccagagcctggatgaggcccaggccaggaagcacgccctgaactgccacaggatgaagccagccctcttcaacgtgctgtgtgagatcaaggagaagacagtgctgagcatccggggggcccaggaggaggagcccacagacccccagctgatgaggctggacaacatgctgctggccgagggcgtggccggccctgagaagggcggcggcagcgctgctgctgctgctgctgctgctgccagcggcggggccggcagtgacaacagcgtggagcacagcgactaccgggccaagctgagccagatccggcagatctaccacacagagctggagaagtatgagcagtag

SEQ ID NO: 165080 - DNA, 1044 bp, synthetic construct
  misc_feature 1..1044: note = Description of Artificial Sequence: Synthetic coding sequence
  source 1..1044: mol_type = other DNA
atggatgagcagccccggctgatgcacagccacgccggcgtgggcatggccggccaccctggcctgagccagcacctgcaggatggagctgggggcacagaaggagagggcggcaggaagcaggacattggagacatcctgcagcagatcatgaccatcacagaccagagcctggatgaggcccaggccaggaagcacgccctgaactgccacaggatgaagccagccctcttcaacgtgctgtgtgagatcaaggagaagacagtgctgagcatccggggggcccaggaggaggagcccacagacccccagctgatgaggctggacaacatgctgctggccgagggcgtggccggccctgagaagggcggcggcagcgctgctgctgctgctgctgctgctgccagcggcggggccggcagtgacaacagcgtggagcacagcgactaccgggccaagctgagccagatccggcagatctaccacacagagctggagaagtatgagcaggcctgcaatgagttcaccacccacgtgatgaacctgctgcgggagcagagcaggacccggcccatcagccccaaggagattgaaagaatggtgtccatcatccacaggaagttcagcagcatccagatgcagctgaagcagagcacctgtgaggccgtgatgatcctgcggagccgcttcctggatgcccggaggaagagaagaaacttcaacaagcaggccacagagatcctgaatgagtacttctacagccacctgagcaacccctaccccagcgaggaggccaaggaggagctggccaagaagtgtggcatcaccgtgtcccaggtgagcaactggtttggaaacaagaggatccgctacaagaagaacatcggcaagttccaggaggaggccaacatctatgctgccaagacagctgtgacagccaccaacgtgtctgcccacggcagccaggccaacagccccagcacccccaacagcgctgggggctaccccagcccctgctaccagcctgaccggcgcatccagtag

SEQ ID NO: 165081 - DNA, 1044 bp, synthetic construct; identical to SEQ ID NO: 165080
  misc_feature 1..1044: note = Description of Artificial Sequence: Synthetic coding sequence
  source 1..1044: mol_type = other DNA

SEQ ID NO: 165082 - DNA, 1293 bp, synthetic construct
  misc_feature 1..1293: note = Description of Artificial Sequence: Synthetic coding sequence
  source 1..1293: mol_type = other DNA
atggatgagcagccccggctgatgcacagccacgccggcgtgggcatggccggccaccctggcctgagccagcacctgcaggatggagctgggggcacagaaggagagggcggcaggaagcaggacattggagacatcctgcagcagatcatgaccatcacagaccagagcctggatgaggcccaggccaggaagcacgccctgaactgccacaggatgaagccagccctcttcaacgtgctgtgtgagatcaaggagaagacagtgctgagcatccggggggcccaggaggaggagcccacagacccccagctgatgaggctggacaacatgctgctggccgagggcgtggccggccctgagaagggcggcggcagcgctgctgctgctgctgctgctgctgccagcggcggggccggcagtgacaacagcgtggagcacagcgactaccgggccaagctgagccagatccggcagatctaccacacagagctggagaagtatgagcaggcctgcaatgagttcaccacccacgtgatgaacctgctgcgggagcagagcaggacccggcccatcagccccaaggagattgaaagaatggtgtccatcatccacaggaagttcagcagcatccagatgcagctgaagcagagcacctgtgaggccgtgatgatcctgcggagccgcttcctggatgcccggaggaagagaagaaacttcaacaagcaggccacagagatcctgaatgagtacttctacagccacctgagcaacccctaccccagcgaggaggccaaggaggagctggccaagaagtgtggcatcaccgtgtcccaggtgagcaactggtttggaaacaagaggatccgctacaagaagaacatcggcaagttccaggaggaggccaacatctatgctgccaagacagctgtgacagccaccaacgtgtctgcccacggcagccaggccaacagccccagcacccccaacagcgctggcagcagcagcagcttcaacatgagcaacagcggggacctcttcatgtctgtgcagagcctgaatggagacagctaccagggcgcccaggtgggcgccaacgtgcagagccaggtggacaccctgcggcacgtgatcagccagacaggaggctacagtgatggcctggccgccagccagatgtacagcccccagggcatcagcgccaacggcggctggcaggatgccaccacccccagctctgtgaccagccccacagagggccctggctctgtgcacagcgacaccagcaactag

SEQ ID NO: 165083 - DNA, 978 bp, synthetic construct
  misc_feature 1..978: note = Description of Artificial Sequence: Synthetic coding sequence
  source 1..978: mol_type = other DNA
atgaggctggacaacatgctgctggccgagggcgtggccggccctgagaagggcggcggcagcgctgctgctgctgctgctgctgctgccagcggcggggccggcagtgacaacagcgtggagcacagcgactaccgggccaagctgagccagatccggcagatctaccacacagagctggagaagtatgagcaggcctgcaatgagttcaccacccacgtgatgaacctgctgcgggagcagagcaggacccggcccatcagccccaaggagattgaaagaatggtgtccatcatccacaggaagttcagcagcatccagatgcagctgaagcagagcacctgtgaggccgtgatgatcctgcggagccgcttcctggatgcccggaggaagagaagaaacttcaacaagcaggccacagagatcctgaatgagtacttctacagccacctgagcaacccctaccccagcgaggaggccaaggaggagctggccaagaagtgtggcatcaccgtgtcccaggtgagcaactggtttggaaacaagaggatccgctacaagaagaacatcggcaagttccaggaggaggccaacatctatgctgccaagacagctgtgacagccaccaacgtgtctgcccacggcagccaggccaacagccccagcacccccaacagcgctggcagcagcagcagcttcaacatgagcaacagcggggacctcttcatgtctgtgcagagcctgaatggagacagctaccagggcgcccaggtgggcgccaacgtgcagagccaggtggacaccctgcggcacgtgatcagccagacaggaggctacagtgatggcctggccgccagccagatgtacagcccccagggcatcagcgccaatggaggctggcaggatgccaccacccccagctctgtgaccagccccacagagggccctggctctgtgcacagcgacaccagcaactag

SEQ ID NO: 165084 - DNA, 1113 bp, synthetic construct
  misc_feature 1..1113: note = Description of Artificial Sequence: Synthetic coding sequence
  source 1..1113: mol_type = other DNA
atgctgctggtgttctttgtgctgtggacctgcagcctggccctgctggccagcagccagagccccccaccaccctgtgcctctgtgctgagcatccggggggcccaggaggaggagcccacagacccccagctgatgaggctggacaacatgctgctggccgagggcgtggccggccctgagaagggcggcggcagcgctgctgctgctgctgctgctgctgccagcggcggggccggcagtgacaacagcgtggagcacagcgactaccgggccaagctgagccagatccggcagatctaccacacagagctggagaagtatgagcaggcctgcaatgagttcaccacccacgtgatgaacctgctgcgggagcagagcaggacccggcccatcagccccaaggagattgaaagaatggtgtccatcatccacaggaagttcagcagcatccagatgcagctgaagcagagcacctgtgaggccgtgatgatcctgcggagccgcttcctggatgcccggaggaagagaagaaacttcaacaagcaggccacagagatcctgaatgagtacttctacagccacctgagcaacccctaccccagcgaggaggccaaggaggagctggccaagaagtgtggcatcaccgtgtcccaggtgagcaactggtttggaaacaagaggatccgctacaagaagaacatcggcaagttccaggaggaggccaacatctatgctgccaagacagctgtgacagccaccaacgtgtctgcccacggcagccaggccaacagccccagcacccccaacagcgctggcagcagcagcagcttcaacatgagcaacagcggggacctcttcatgtctgtgcagagcctgaatggagacagctaccagggcgcccaggtgggcgccaacgtgcagagccaggtggacaccctgcggcacgtgatcagccagacaggaggctacagtgatggcctggccgccagccagatgtacagcccccagggcatcagcgccaacggcggctggcaggatgccaccacccccagctctgtgaccagccccacagagggccctggctctgtgcacagcgacaccagcaactag

SEQ ID NO: 165085 - DNA, 1263 bp, synthetic construct
  misc_feature 1..1263: note = Description of Artificial Sequence: Synthetic coding sequence
  source 1..1263: mol_type = other DNA
atggatgagcagccccggctgatgcacagccacgccggcgtgggcatggccggccaccctggcctgagccagcacctgcaggatggagctgggggcacagaaggagagggcggcaggaagcaggacattggagacatcctgcagcagatcatgaccatcacagaccagagcctggatgaggcccaggccaggaagcacgccctgaactgccacaggatgaagccagccctcttcaacgtgctgtgtgagatcaaggagaagacagtgctgagcatccggggggcccaggaggaggagcccacagacccccagctgatgaggctggacaacatgctgctggccgagggcgtggccggccctgagaagggcggcggcagcgctgctgctgctgctgctgctgctgccagcggcggggccggcagtgacaacagcgtggagcacagcgactaccgggccaagctgagccagatccggcagatctaccacacagagctggagaagtatgagcaggcctgcaatgagttcaccacccacgtgatgaacctgctgcgggagcagagcaggacccggcccatcagccccaaggagattgaaagaatggtgtccatcatccacaggaagttcagcagcatccagatgcagctgaagcagagcacctgtgaggccgtgatgatcctgcggagccgcttcctggatgcccggaggaagagaagaaacttcaacaagcaggccacagagatcctgaatgagtacttctacagccacctgagcaacccctaccccagcgaggaggccaaggaggagctggccaagaagtgtggcatcaccgtgtcccaggtgagcaactggtttggaaacaagaggatccgctacaagaagaacatcggcaagttccaggaggaggccaacatctatgctgccaagacagctgtgacagccaccaacgtgtctgcccacggcagccaggccaacagccccagcacccccaacagcgctggcagcagcagcagcttcaacatgagcaacagcggggacctcttcatgtctgtgcagagcctgaatggagacagctaccagggcgcccaggtgggcgccaacgtgcagagccaggtggacaccctgcggcacgtgatcagccagacaggaggctacagtgatggcctggccgccagccagatgtacagcccccagggcatcagccacctgcccaggcacccccggcaggcccactaccacttccggctgcccacctggcacccctag

SEQ ID NO: 165086 - DNA, 906 bp, synthetic construct
  misc_feature 1..906: note = Description of Artificial Sequence: Synthetic coding sequence
  source 1..906: mol_type = other DNA
atgaggctggacaacatgctgctggccgagggcgtggccggccctgagaagggcggcggcagcgctgctgctgctgctgctgctgctgccagcggcggggccggcagtgacaacagcgtggagcacagcgactaccgggccaagctgagccagatccggcagatctaccacacagagctggagaagtatgagcaggcctgcaatgagttcaccacccacgtgatgaacctgctgcgggagcagagcaggacccggcccatcagccccaaggagattgaaagaatggtgtccatcatccacaggaagttcagcagcatccagatgcagctgaagcagagcacctgtgaggccgtgatgatcctgcggagccgcttcctggatgcccggaggaagagaagaaacttcaacaagcaggccacagagatcctgaatgagtacttctacagccacctgagcaacccctaccccagcgaggaggccaaggaggagctggccaagaagtgtggcatcaccgtgtcccaggtgagcaactggtttggaaacaagaggatccgctacaagaagaacatcggcaagttccaggaggaggccaacatctatgctgccaagacagctgtgacagccaccaacgtgtctgcccacggcagccaggccaacagccccagcacccccaacagcgctggcagcagcagcagcttcaacatgagcaacagcggggacctcttcatgtctgtgcagagcctgaatggagacagctaccagggcgcccaggtgggcgccaacgtgcagagccaggtggacaccctgcggcacgtgatcagccagacaggaggctacagtgatggcctggccgccagccagatgtacagcccccagggcatcagcgagatcgcccggacctactag

SEQ ID NO: 165087 - DNA, 1020 bp, synthetic construct
  misc_feature 1..1020: note = Description of Artificial Sequence: Synthetic coding sequence
  source 1..1020: mol_type = other DNA
atggatgagcagccccggctgatgcacagccacgccggcgtgggcatggccggccaccctggcctgagccagcacctgcaggatggagctgggggcacagaaggagagggcggcaggaagcaggacattggagacatcctgcagcagatcatgaccatcacagaccagagcctggatgaggcccaggccaggaagcacgccctgaactgccacaggatgaagccagccctcttcaacgtgctgtgtgagatcaaggagaagacagtgctgagcatccggggggcccaggaggaggagcccacagacccccagctgatgaggctggacaacatgctgctggccgagggcgtggccggccctgagaagggcggcggcagcgctgctgctgctgctgctgctgctgccagcggcggggccggcagtgacaacagcgtggagcacagcgactaccgggccaagctgagccagatccggcagatctaccacacagagctggagaagtatgagcaggcctgcaatgagttcaccacccacgtgatgaacctgctgcgggagcagagcaggacccggcccatcagccccaaggagattgaaagaatggtgtccatcatccacaggaagttcagcagcatccagatgcagctgaagcagagcacctgtgaggccgtgatgatcctgcggagccgcttcctggatgcccggaggaagagaagaaacttcaacaagcaggccacagagatcctgaatgagtacttctacagccacctgagcaacccctaccccagcgaggaggccaaggaggagctggccaagaagtgtggcatcaccgtgtcccaggtggacaccctgcggcacgtgatcagccagacaggaggctacagtgatggcctggccgccagccagatgtacagcccccagggcatcagcgccaatggaggctggcaggatgccaccacccccagctctgtgaccagccccacagagggccctggctctgtgcacagcgacaccagcaactag

SEQ ID NO: 165088 - DNA, 978 bp, synthetic construct; identical to SEQ ID NO: 165083
  misc_feature 1..978: note = Description of Artificial Sequence: Synthetic coding sequence
  source 1..978: mol_type = other DNA

SEQ ID NO: 165089 - DNA, 978 bp, synthetic construct; identical to SEQ ID NO: 165083
  misc_feature 1..978: note = Description of Artificial Sequence: Synthetic coding sequence
  source 1..978: mol_type = other DNA

SEQ ID NO: 165090 - DNA, 1293 bp, synthetic construct
  misc_feature 1..1293: note = Description of Artificial Sequence: Synthetic coding sequence
  source 1..1293: mol_type = other DNA
atggatgagcggctgctgggccccccacctcctgggggcggccggggcggcctgggcctggtgtctggagagcccggcggccctggagagcccccaggcggcggggaccccggcggcggcagcggaggagtgcctgggggccggggcaagcaggacattggagacatcctgcagcagatcatgaccatcacagaccagagcctggatgaggcccaggccaagaagcacgccctgaactgccacaggatgaagccagccctcttctctgtgctgtgtgagatcaaggagaagacaggcctgagcatccgcagcagccaggaggaggagcctgtggacccccagctgatgaggctggacaacatgctgctggccgagggcgtggccggccctgagaagggcggcggcagcgctgctgctgctgctgctgctgctgccagcggcggcggcgtgtccccagacaacagcattgagcacagcgactaccgcagcaagctggcccagatccgccacatctaccacagcgagctggagaagtatgagcaggcctgcaatgagttcaccacccacgtgatgaacctgctgcgggagcagagcaggaccaggcctgtggcccccaaggagatggagaggatggtgtccatcatccacaggaagttcagcgccatccagatgcagctgaagcagagcacctgtgaggccgtgatgatcctgcggagccgcttcctggatgcccggaggaagagaagaaacttcagcaagcaggccacagaggtgctgaatgagtacttctacagccacctgagcaacccctaccccagcgaggaggccaaggaggagctggccaagaagtgtggcatcaccgtgtcccaggtgagcaactggtttggaaacaagaggatccgctacaagaagaacatcggcaagttccaggaggaggccaacatctatgctgtgaagacagctgtgtctgtgacccagggcggccacagcaggaccagcagccccaccccacccagcagcgctggcagcggcggcagcttcaacctgagcggcagcggggacatgttcctgggcatgcctggcctgaatggagacagctacagcgccagccaggtggagagcctgcggcacagcatgggccctgggggctacggggacaacctgggcggcggccagatgtacagcccccgggagatgagggccaacggctcctggcaggaggccgtgacccccagctctgtgaccagccccacagagggccctggctctgtgcacagcgacaccagcaactag

SEQ ID NO: 165091 - DNA, 1293 bp, synthetic construct; identical to SEQ ID NO: 165090
  misc_feature 1..1293: note = Description of Artificial Sequence: Synthetic coding sequence
  source 1..1293: mol_type = other DNA

SEQ ID NO: 165092 - DNA, 1293 bp, synthetic construct; identical to SEQ ID NO: 165090
  misc_feature 1..1293: note = Description of Artificial Sequence: Synthetic coding sequence
  source 1..1293: mol_type = other DNA

SEQ ID NO: 165093 - DNA, 1293 bp, synthetic construct; identical to SEQ ID NO: 165090
  misc_feature 1..1293: note = Description of Artificial Sequence: Synthetic coding sequence
  source 1..1293: mol_type = other DNA

SEQ ID NO: 165094 - DNA, 1293 bp, synthetic construct; identical to SEQ ID NO: 165090
  misc_feature 1..1293: note = Description of Artificial Sequence: Synthetic coding sequence
  source 1..1293: mol_type = other DNA

SEQ ID NO: 165095 - DNA, 1293 bp, synthetic construct; identical to SEQ ID NO: 165090
  misc_feature 1..1293: note = Description of Artificial Sequence: Synthetic coding sequence
  source 1..1293: mol_type = other DNA

SEQ ID NO: 165096 - DNA, 1293 bp, synthetic construct; identical to SEQ ID NO: 165090
  misc_feature 1..1293: note = Description of Artificial Sequence: Synthetic coding sequence
  source 1..1293: mol_type = other DNA

SEQ ID NO: 165097 - DNA, 1392 bp, synthetic construct
  misc_feature 1..1392: note = Description of Artificial Sequence: Synthetic coding sequence
  source 1..1392: mol_type = other DNA
atggatgagcggctgctgggccccccacctcctgggggcggccggggcggcctgggcctggtgtctggagagcccggcggccctggagagcccccaggcggcggggaccccggcggcggcagcggaggagtgcctgggggccggggcaagcaggacattggagacatcctgcagcagatcatgaccatcacagaccagagcctggatgaggcccaggccaagaagcacgccctgaactgccacaggatgaagccagccctcttctctgtgctgtgtgagatcaaggagaagacaggcctgagcatccgcagcagccaggaggaggagcctgtggacccccagctgatgaggctggacaacatgctgctggccgagggcgtggccggccctgagaagggcggcggcagcgctgctgctgctgctgctgctgctgccagcggcggcggcgtgtccccagacaacagcattgagcacagcgactaccgcagcaagctggcccagatccgccacatctaccacagcgagctggagaagtatgagcaggcctgcaatgagttcaccacccacgtgatgaacctgctgcgggagcagagcaggaccaggcctgtggcccccaaggagatggagaggatggtgtccatcatccacaggaagttcagcgccatccagatgcagctgaagcagagcacctgtgaggccgtgatgatcctgcggagccgcttcctggatgcccggaggaagagaagaaacttcagcaagcaggccacagaggtgctgaatgagtacttctacagccacctgagcaacccctaccccagcgaggaggccaaggaggagctggccaagaagtgtggcatcaccgtgtcccaggtgctgtggaggctgcgggaggagctgagcggcaaggtgcacgccagccagctgggcgctgtggtgagcaactggtttggaaacaagaggatccgctacaagaagaacatcggcaagttccaggaggaggccaacatctatgctgtgaagacagctgtgatcatcgccgagcggggcccctttggagtgcggggcacagagctgagcctgcccagcctgcccccccagggcagcggcggcagcttcaacctgagcggcagcggggacatgttcctgggcatgcctggcctgaatggagacagctacagcgccagccaggtgcgctgccccagccccctgcaggtggagagcctgcggcacagcatgggccctgggggctatggagacaacctgggcggcggccagatgtacagcccccgggagatgagggccaacggctcctggcaggaggccgtgacccccagctctgtgaccagccccacagagggccctggctctgtgcacagcgacaccagcaactag

SEQ ID NO: 165098 - DNA, 1392 bp, synthetic construct; identical to SEQ ID NO: 165097
  misc_feature 1..1392: note = Description of Artificial Sequence: Synthetic coding sequence
  source 1..1392: mol_type = other DNA

SEQ ID NO: 165099 - DNA, 1317 bp, synthetic construct
  misc_feature 1..1317: note = Description of Artificial Sequence: Synthetic coding sequence
  source 1..1317: mol_type = other DNA
atggatgagcggctgctgggccccccacctcctgggggcggccggggcggcctgggcctggtgtctggagagcccggcggccctggagagcccccaggcggcggggaccccggcggcggcagcggaggagtgcctgggggccggggcaagcaggacattggagacatcctgcagcagatcatgaccatcacagaccagagcctggatgaggcccaggccaagaagcacgccctgaactgccacaggatgaagccagccctcttctctgtgctgtgtgagatcaaggagaagacaggcctgagcatccgcagcagccaggaggaggagcctgtggacccccagctgatgaggctggacaacatgctgctggccgagggcgtggccggccctgagaagggcggcggcagcgctgctgctgctgctgctgctgctgccagcggcggcggcgtgtccccagacaacagcattgagcacagcgactaccgcagcaagctggcccagatccgccacatctaccacagcgagctggagaagtatgagcaggcctgcaatgagttcaccacccacgtgatgaacctgctgcgggagcagagcaggaccaggcctgtggcccccaaggagatggagaggatggtgtccatcatccacaggaagttcagcgccatccagatgcagctgaagcagagcacctgtgaggccgtgatgatcctgcggagccgcttcctggatgcccggaggaagagaagaaacttcagcaagcaggccacagaggtgctgaatgagtacttctacagccacctgagcaacccctaccccagcgaggaggccaaggaggagctggccaagaagtgtggcatcaccgtgtcccaggtgagcaactggtttggaaacaagaggatccgctacaagaagaacatcggcaagttccaggaggaggccaacatctatgctgtgaagacagctgtgtctgtgacccagggcggccacagcaggaccagcagccccaccccacccagcagcgctggcagcggcggcagcttcaacctgagcggcagcggggacatgttcctgggcatgcctggcctgaatggagacagctacagcgccagccaggtgcgctgccccagccccctgcaggtggagagcctgcggcacagcatgggccctgggggctacggggacaacctgggcggcggccagatgtacagcccccgggagatgagggccaacggctcctggcaggaggccgtgacccccagctctgtgaccagccccacagagggccctggctctgtgcacagcgacaccagcaactag

SEQ ID NO: 165100 - DNA, 1317 bp, synthetic construct; identical to SEQ ID NO: 165099
  misc_feature 1..1317: note = Description of Artificial Sequence: Synthetic coding sequence
  source 1..1317: mol_type = other DNA

SEQ ID NO: 165101 - DNA, 1392 bp, synthetic construct; identical to SEQ ID NO: 165097
  misc_feature 1..1392: note = Description of Artificial Sequence: Synthetic coding sequence
  source 1..1392: mol_type = other DNA

SEQ ID NO: 165102 - DNA, 1392 bp, synthetic construct; identical to SEQ ID NO: 165097
  misc_feature 1..1392: note = Description of Artificial Sequence: Synthetic coding sequence
  source 1..1392: mol_type = other DNA

SEQ ID NO: 165103 - DNA, 1332 bp, synthetic construct
  misc_feature 1..1332: note = Description of Artificial Sequence: Synthetic coding sequence
  source 1..1332: mol_type = other DNA
ggggctgagcagggcggcggcctgcgggccccaccccagctgtggaccaacggctactggggccggcccctgcaggccggggccggcggcctgggcctggtgtctggagagcccggcggccctggagagcccccaggcggcggggaccccggcggcggcagcggcggcgtgcctgggggccggggcaagcaggacatcggggacatcctgcagcagatcatgaccatcacagaccagagcctggatgaggcccaggccaagaagcacgccctgaactgccacaggatgaagccagccctcttctctgtgctgtgtgagatcaaggagaagacaggcctgagcatccgcagcagccaggaggaggagcctgtggacccccagctgatgaggctggacaacatgctgctggccgagggcgtggccggccctgagaagggcggcggcagcgctgctgctgctgctgctgctgctgccagcggcggcggcgtgtccccagacaacagcattgagcacagcgactaccgcagcaagctggcccagatccgccacatctaccacagcgagctggagaagtatgagcaggcctgcaatgagttcaccacccacgtgatgaacctgctgcgggagcagagcaggaccaggcctgtggcccccaaggagatggagaggatggtgtccatcatccacaggaagttcagcgccatccagatgcagctgaagcagagcacctgtgaggccgtgatgatcctgcggagccgcttcctggatgcccggaggaagagaagaaacttcagcaagcaggccacagaggtgctgaatgagtacttctacagccacctgagcaacccctaccccagcgaggaggccaaggaggagctggccaagaagtgtggcatcaccgtgtcccaggtgagcaactggtttggaaacaagaggatccgctacaagaagaacatcggcaagttccaggaggaggccaacatctatgctgtgaagacagctgtgtctgtgacccagggcggccacagcaggaccagcagccccaccccacccagcagcgctggcagcggcggcagcttcaacctgagcggcagcggggacatgttcctgggcatgcctggcctgaatggagacagctacagcgccagccaggtggagagcctgcggcacagcatgggccctgggggctatggagacaacctgggcggcggccagatgtacagcccccgggagatgagggccaacggctcctggcaggaggccgtgacccccagctctgtgaccagccccacagagggccctggctctgtgcacagcgacaccagcaactag

SEQ ID NO: 165104 - DNA, 1332 bp, synthetic construct; identical to SEQ ID NO: 165103
  misc_feature 1..1332: note = Description of Artificial Sequence: Synthetic coding sequence
  source 1..1332: mol_type = other DNA

SEQ ID NO: 165105 - DNA, 1317 bp, synthetic construct; identical to SEQ ID NO: 165099
  misc_feature 1..1317: note = Description of Artificial Sequence: Synthetic coding sequence
  source 1..1317: mol_type = other DNA

SEQ ID NO: 165106 - DNA, 1380 bp, synthetic construct
  misc_feature 1..1380: note = Description of Artificial Sequence: Synthetic coding sequence
  source 1..1380: mol_type = other DNA
atggatgagcggctgctgggccccccacctcctgggggcggccggggcggcctgggcctggtgtctggagagcccggcggccctggagagcccccaggcggcggggaccccggcggcggcagcggaggagtgcctgggggccggggcaagcaggacattggagacatcctgcagcagatcatgaccatcacagaccagagcctggatgaggcccaggccaagaagcacgccctgaactgccacaggatgaagccagccctcttctctgtgctgtgtgagatcaaggagaagacaggcctgagcatccgcagcagccaggaggaggagcctgtggacccccagctgatgaggctggacaacatgctgctggccgagggcgtggccggccctgagaagggcggcggcagcgctgctgctgctgctgctgctgctgccagcggcggcggcgtgtccccagacaacagcattgagcacagcgactaccgcagcaagctggcccagatccgccacatctaccacagcgagctggagaagtatgagcaggcctgcaatgagttcaccacccacgtgatgaacctgctgcgggagcagagcaggaccaggcctgtggcccccaaggagatggagaggatggtgtccatcatccacaggaagttcagcgccatccagatgcagctgaagcagagcacctgtgaggccgtgatgatcctgcggagccgcttcctggatgcccggaggaagagaagaaacttcagcaagcaggccacagaggtgctgaatgagtacttctacagccacctgagcaacccctaccccagcgaggaggccaaggaggagctggccaagaagtgtggcatcaccgtgtcccaggtgctgtggaggctgcgggaggagctgagcggcaaggtgcacgccagccagctgggcgctgtggtgagcaactggtttggaaacaagaggatccgctacaagaagaacatcggcaagttccaggaggaggccaacatctatgctgtgaagacagctgtgtctgtgacccagggcggccacagcaggaccagcagccccaccccacccagcagcgctggcagcggcggcagcttcaacctgagcggcagcggggacatgttcctgggcatgcctggcctgaatggagacagctacagcgccagccaggtgcgctgccccagccccctgcaggtggagagcctgcggcacagcatgggccctgggggctatggagacaacctgggcggcggccagatgtacagcccccgggagatgagggccaacggctcctggcaggaggccgtgacccccagctctgtgaccagccccacagagggccctggctctgtgcacagcgacaccagcaactag

SEQ ID NO: 165107 - DNA, 1332 bp, synthetic construct; identical to SEQ ID NO: 165103
  misc_feature 1..1332: note = Description of Artificial Sequence: Synthetic coding sequence
  source 1..1332: mol_type = other DNA

SEQ ID NO: 165108 - DNA, 1317 bp, synthetic construct; identical to SEQ ID NO: 165099
  misc_feature 1..1317: note = Description of Artificial Sequence: Synthetic coding sequence
  source 1..1317: mol_type = other DNA

SEQ ID NO: 165109 - DNA, 1317 bp, synthetic construct; identical to SEQ ID NO: 165099
  misc_feature 1..1317: note = Description of Artificial Sequence: Synthetic coding sequence
  source 1..1317: mol_type = other DNA

SEQ ID NO: 165110 - DNA, 1332 bp, synthetic construct; identical to SEQ ID NO: 165103
  misc_feature 1..1332: note = Description of Artificial Sequence: Synthetic coding sequence
  source 1..1332: mol_type = other DNA

SEQ ID NO: 165111 - DNA, 1392 bp, synthetic construct; identical to SEQ ID NO: 165097
  misc_feature 1..1392: note = Description of Artificial Sequence: Synthetic coding sequence
  source 1..1392: mol_type = other DNA

SEQ ID NO: 165112 - DNA, 1332 bp, synthetic construct; identical to SEQ ID NO: 165103
  misc_feature 1..1332: note = Description of Artificial Sequence: Synthetic coding sequence
  source 1..1332: mol_type = other DNA

SEQ ID NO: 165113 - DNA, 1332 bp, synthetic construct; identical to SEQ ID NO: 165103
  misc_feature 1..1332: note = Description of Artificial Sequence: Synthetic coding sequence
  source 1..1332: mol_type = other DNA

SEQ ID NO: 165114 - DNA, 1056 bp, synthetic construct
  misc_feature 1..1056: note = Description of Artificial Sequence: Synthetic coding sequence
  source 1..1056: mol_type = other DNA
atggatgaccagagcaggatgctgcagaccctggccggcgtgaacctggccggccacagcgtgcagggcggcatggccctgcccccaccaccccacggccacgagggcgcagatggagatggcaggaagcaggacatcggggacatcctgcaccagatcatgaccatcacagaccagagcctggatgaggcccaggccaagaagcacgccctgaactgccacaggatgaagccagccctcttctctgtgctgtgtgagatcaaggagaagacaggcctgagcatccggggggcccaggaggaggaccccccagacccccagctgatgaggctggacaacatgctgctggccgagggcgtgtctggccctgagaagggcggcggcagcgctgctgctgctgctgctgctgctgccagcggcggcagcagtgacaacagcattgagcacagcgactaccgggccaagctgacccagatccggcagatctaccacacagagctggagaagtatgagcaggcctgcaatgagttcaccacccacgtgatgaacctgctgcgggagcagagcaggacccggcccatcagccccaaggagattgaaagaatggtgggcatcatccacaggaagttcagcagcatccagatgcagctgaagcagagcacctgtgaggccgtgatgatcctgcggagccgcttcctggatgcccggaggaagagaagaaacttcagcaagcaggccacagagatcctgaatgagtacttctacagccacctgagcaacccctaccccagcgaggaggccaaggaggagctggccaagaagtgcagcatcaccgtgtcccaggtgagcaactggtttggaaacaagaggatccgctacaagaagaacatcggcaagttccaggaggaggccaacctgtatgctgccaagacagctgtgacagctgcccatgctgtggccgctgctgtgcagaacaaccagaccaacagccccaccacccccaacagcggcggctacccacccagctgctaccagagtgatggccgcctgcagtag

SEQ ID NO: 165115 - DNA, 762 bp, synthetic construct
  misc_feature 1..762: note = Description of Artificial Sequence: Synthetic coding sequence
  source 1..762: mol_type = other DNA
atgaacctgctgcgggagcagagcaggacccggcccatcagccccaaggagattgaaagaatggtgggcatcatccacaggaagttcagcagcatccagatgcagctgaagcagagcacctgtgaggccgtgatgatcctgcggagccgcttcctggatgcccggaggaagagaagaaacttcagcaagcaggccacagagatcctgaatgagtacttctacagccacctgagcaacccctaccccagcgaggaggccaaggaggagctggccaagaagtgcagcatcaccgtgtcccaggtgagcaactggtttggaaacaagaggatccgctacaagaagaacatcggcaagttccaggaggaggccaacctgtatgctgccaagacagctgtgacagctgcccatgctgtggccgctgctgtgcagaacaaccagaccaacagccccaccacccccaacagcggcagcagcggcagcttcaacctgcccaacagcggggacatgttcatgaacatgcagagcctgaatggagacagctaccagggcagccaggtgggcgccaacgtgcagagccaggtggacaccctgcggcacgtgatcaaccagacaggaggctacagtgatggcctgggcggcaacagcctgtacagcccccacaacctgaatgccaatggaggctggcaggatgccaccacccccagctctgtgaccagccccacagagggccctggctctgtgcacagcgacaccagcaactag

SEQ ID NO: 165116 - DNA, 1368 bp, synthetic construct
  misc_feature 1..1368: note = Description of Artificial Sequence: Synthetic coding sequence
  source 1..1368: mol_type = other DNA
atggatgaccagagcaggatgctgcagaccctggccggcgtgaacctggccggccacagcgtgcagggcggcatggccctgcccccaccaccccacggccacgagggcgcagatggagatggcaggaagcaggacatcggggacatcctgcaccagatcatgaccatcacagaccagagcctggatgaggcccaggccaagaagcacgccctgaactgccacaggatgaagccagccctcttctctgtgctgtgtgagatcaaggagaagacaggcctgagcatccggggggcccaggaggaggaccccccagacccccagctgatgaggctggacaacatgctgctggccgagggcgtgtctggccctgagaagggcggcggcagcgctgctgctgctgctgctgctgctgccagcggcggcagcagtgacaacagcattgagcacagcgactaccgggccaagctgacccagatccggcagatctaccacacagagctggagaagtatgagcaggcctgcaatgagttcaccacccacgtgatgaacctgctgcgggagcagagcaggacccggcccatcagccccaaggagattgaaagaatggtgggcatcatccacaggaagttcagcagcatccagatgcagctgaagcagagcacctgtgaggccgtgatgatcctgcggagccgcttcctggatgcccggaggaagagaagaaacttcagcaagcaggccacagagatcctgaatgagtacttctacagccacctgagcaacccctaccccagcgaggaggccaaggaggagctggccaagaagtgcagcatcaccgtgtcccagagcctggtgaaggaccccaaggagcggggcagcaaaggaagtgacatccagcccacctctgtggtgagcaactggtttggaaacaagaggatccgctacaagaagaacatcggcaagttccaggaggaggccaacctgtatgctgccaagacagctgtgacagctgcccatgctgtggccgctgctgtgcagaacaaccagaccaacagccccaccacccccaacagcggcagcagcggcagcttcaacctgcccaacagcggggacatgttcatgaacatgcagagcctgaatggagacagctaccagggcagccaggtgggcgccaacgtgcagagccaggtggacaccctgcggcacgtgatcaaccagacaggaggctacagtgatggcctgggcggcaacagcctgtacagcccccacaacctgaatgccaatggaggctggcaggatgccaccacccccagctctgtgaccagccccacagagggccctggctctgtgcacagcgacaccagcaactag

SEQ ID NO: 165117 - DNA, 1305 bp, synthetic construct
  misc_feature 1..1305: note = Description of Artificial Sequence: Synthetic coding sequence
  source 1..1305: mol_type = other DNA
atggatgaccagagcaggatgctgcagaccctggccggcgtgaacctggccggccacagcgtgcagggcggcatggccctgcccccaccaccccacggccacgagggcgcagatggagatggcaggaagcaggacatcggggacatcctgcaccagatcatgaccatcacagaccagagcctggatgaggcccaggccaagaagcacgccctgaactgccacaggatgaagccagccctcttctctgtgctgtgtgagatcaaggagaagacaggcctgagcatccggggggcccaggaggaggaccccccagacccccagctgatgaggctggacaacatgctgctggccgagggcgtgtctggccctgagaagggcggcggcagcgctgctgctgctgctgctgctgctgccagcggcggcagcagtgacaacagcattgagcacagcgactaccgggccaagctgacccagatccggcagatctaccacacagagctggagaagtatgagcaggcctgcaatgagttcaccacccacgtgatgaacctgctgcgggagcagagcaggacccggcccatcagccccaaggagattgaaagaatggtgggcatcatccacaggaagttcagcagcatccagatgcagctgaagcagagcacctgtgaggccgtgatgatcctgcggagccgcttcctggatgcccggaggaagagaagaaacttcagcaagcaggccacagagatcctgaatgagtacttctacagccacctgagcaacccctaccccagcgaggaggccaaggaggagctggccaagaagtgcagcatcaccgtgtcccaggtgagcaactggtttggaaacaagaggatccgctacaagaagaacatcggcaagttccaggaggaggccaacctgtatgctgccaagacagctgtgacagctgcccatgctgtggccgctgctgtgcagaacaaccagaccaacagccccaccacccccaacagcggcagcagcggcagcttcaacctgcccaacagcggggacatgttcatgaacatgcagagcctgaatggagacagctaccagggcagccaggtgggcgccaacgtgcagagccaggtggacaccctgcggcacgtgatcaaccagacaggaggctacagtgatggcctgggcggcaacagcctgtacagcccccacaacctgaatgccaacggcggctggcaggatgccaccacccccagctctgtgaccagccccacagagggccctggctctgtgcacagcgacaccagcaactag

SEQ ID NO: 165118 - DNA, 789 bp, synthetic construct
  misc_feature 1..789: note = Description of Artificial Sequence: Synthetic coding sequence
  source 1..789: mol_type = other DNA
atgaggggcctgagcatccggggggcccaggaggaggaccccccagacccccagctgatgaggctggacaacatgctgctggccgagggcgtgtctggccctgagaagggcggcggcagcgctgctgctgctgctgctgctgctgccagcggcggcagcagtgacaacagcattgagcacagcgactaccgggccaagctgacccagatccggcagatctaccacacagagctggagaagtatgagcaggcctgcaatgagttcaccacccacgtgatgaacctgctgcgggagcagagcaggacccggcccatcagccccaaggagattgaaagaatggtgggcatcatccacaggaagttcagcagcatccagatgcagctgaagcagagcacctgtgaggccgtgatgatcctgcggagccgcttcctggatgcccggaggaagagaagaaacttcagcaagcaggccacagagatcctgaatgagtacttctacagccacctgagcaacccctaccccagcgaggaggccaaggaggagctggccaagaagtgcagcatcaccgtgtcccaggtgagcaactggtttggaaacaagaggatccgctacaagaagaacatcggcaagttccaggaggaggccaacctgtatgctgccaagacagctgtgacagctgcccatgctgtggccgctgctgtgcagaacaaccagaccaacagccccaccacccccaacagcggcggctacccacccagctgctaccagagtgatggccgcctgcagtag

SEQ ID NO: 165119 - DNA, 1080 bp, synthetic construct
  misc_feature 1..1080: note = Description of Artificial Sequence: Synthetic coding sequence
  source 1..1080: mol_type = other DNA
atgaagccagccctcttctctgtgctgtgtgagatcaaggagaagacaggcctgagcatccggggggcccaggaggaggaccccccagacccccagctgatgaggctggacaacatgctgctggccgagggcgtgtctggccctgagaagggcggcggcagcgctgctgctgctgctgctgctgctgccagcggcggcagcagtgacaacagcattgagcacagcgactaccgggccaagctgacccagatccggcagatctaccacacagagctggagaagtatgagcaggcctgcaatgagttcaccacccacgtgatgaacctgctgcgggagcagagcaggacccggcccatcagccccaaggagattgaaagaatggtgggcatcatccacaggaagttcagcagcatccagatgcagctgaagcagagcacctgtgaggccgtgatgatcctgcggagccgcttcctggatgcccggaggaagagaagaaacttcagcaagcaggccacagagatcctgaatgagtacttctacagccacctgagcaacccctaccccagcgaggaggccaaggaggagctggccaagaagtgcagcatcaccgtgtcccaggtgagcaactggtttggaaacaagaggatccgctacaagaagaacatcggcaagttccaggaggaggccaacctgtatgctgccaagacagctgtgacagctgcccatgctgtggccgctgctgtgcagaacaaccagaccaacagccccaccacccccaacagcggcagcagcggcagcttcaacctgcccaacagcggggacatgttcatgaacatgcagagcctgaatggagacagctaccagggcagccaggtgggcgccaacgtgcagagccaggtggacaccctgcggcacgtgatcaaccagacaggaggctacagtgatggcctgggcggcaacagcctgtacagcccccacaacctgaatgccaatggaggctggcaggatgccaccacccccagctctgtgaccagccccacagagggccctggctctgtgcacagcgacaccagcaactag

SEQ ID NO: 165120 - DNA, 1530 bp, synthetic construct
  misc_feature 1..1530: note = Description of Artificial Sequence: Synthetic coding sequence
  source 1..1530: mol_type = other DNA
atggagcggcggcggctgtggggcagcatccagagccgctacatctccatgtctgtgtggaccagcccccggcggctggtggagctggccggccagagcctgctgaaggatgaggccctggccatcgccgccctggagctgctgccccgggagctgttccccccactcttcatggccgcctttgatggccgccacagccagaccctgaaggccatggtgcaggcctggcccttcacctgcctgcccctgggcgtgctgatgaagggccagcacctgcacctggagaccttcaaggctgtgctggatggcctggatgtgctgctggcccaggaggtgcggccccggcgctggaagctgcaggtgctggacctgaggaagaacagccaccaggacttctggacagtgtggagcggcaacagagccagcctgtacagcttccctgagcctgaggccgcccagcccatgaccaagaagaggaaggtggatggcctgagcacagaggccgagcagcccttcatccctgtggaggtgctggtggacctcttcctgaaggagggcgcctgtgatgagctgttctcctacctgattgagaaggtgaagaggaagaagaatgtgctgcggctgtgctgcaagaagctgaagatctttgccatgcccatgcaggacatcaagatgatcctgaagatggtgcagctggacagcattgaggacctggaggtgacctgcacctggaagctgcccaccctggccaagttcagcccctacctgggccagatgatcaacctgcggcggctgctgctgagccacatccacgccagcagctacatcagccctgagaaggaggagcagtacatcgcccagttcaccagccagttcctgagcctgcagtgcctgcaggccctgtatgtggacagcctcttcttcctgcggggccgcctggaccagctgctgcggcacgtgatgaaccccctggagaccctgagcatcaccaactgccgcctgtctgaaggagatgtgatgcacctgagccagagccccagcgtgtcccagctgtctgtgctgagcctgtctggagtgatgctgacagatgtgtccccagagcccctgcaggccctgctggagcgggccagcgccaccctgcaggacctggtgtttgatgaatgtggcatcacagatgaccagctgctggccctgctgcccagcctgagccactgcagccagctgaccaccctgtccttctacggcaacagcatcagcatcagcgccctgcagagcctgctgcagcacctgattggcctgagcaacctgacccacgtgctgtaccctgtgcccctggagagctatgaggacatccacggcaccctgcacctggagcggctggcctacctgcacgcccggctgcgggagctgctgtgtgagctgggccggcccagcatggtgtggctgagcgccaacccctgcccccactgtggggacaggaccttctatgaccctgagcccatcctgtgcccctgcttcatgcccaactag

SEQ ID NO: 165121 - DNA, 1530 bp, synthetic construct; identical to SEQ ID NO: 165120
  misc_feature 1..1530: note = Description of Artificial Sequence: Synthetic coding sequence
  source 1..1530: mol_type = other DNA

SEQ ID NO: 165122 - DNA, 1530 bp, synthetic construct; identical to SEQ ID NO: 165120
  misc_feature 1..1530: note = Description of Artificial Sequence: Synthetic coding sequence
  source 1..1530: mol_type = other DNA

SEQ ID NO: 165123 - DNA, 261 bp, synthetic construct
  misc_feature 1..261: note = Description of Artificial Sequence: Synthetic coding sequence
  source 1..261: mol_type = other DNA
atggagcggcggcggctgtggggcagcatccagagccgctacatctccatgtctgtgtggaccagcccccggcggctggtggagctggccggccagagcctgctgaaggatgaggccctggccatcgccgccctggagctgctgccccgggagctgttccccccactcttcatggccgcctttgatggccgccacagccagaccctgaaggccatggtgcaggcctggcccttcacctgcctgcccctgggcgtgctgtag

SEQ ID NO: 165124 - DNA, 1530 bp, synthetic construct; identical to SEQ ID NO: 165120
  misc_feature 1..1530: note = Description of Artificial Sequence: Synthetic coding sequence
  source 1..1530: mol_type = other DNA

SEQ ID NO: 165125 - DNA, 348 bp, synthetic construct
  misc_feature 1..348: note = Description of Artificial Sequence: Synthetic coding sequence
  source 1..348: mol_type = other DNA
atggagcggcggcggctgtggggcagcatccagagccgctacatctccatgtctgtgtggaccagcccccggcggctggtggagctggccggccagagcctgctgaaggatgaggccctggccatcgccgccctggagctgctgccccgggagctgttccccccactcttcatggccgcctttgatggccgccacagccagaccctgaaggccatggtgcaggcctggcccttcacctgcctgcccctgggcgtgctgatgaagggccagcacctgcacctggagaccttcaaggctgtgctggatggcctggatgtgctgctggcccaggaggtgcggcccaggtag

SEQ ID NO: 165126 - DNA, 459 bp, synthetic construct
  misc_feature 1..459: note = Description of Artificial Sequence: Synthetic coding sequence
  source 1..459: mol_type = other DNA
atggagcggcggcggctgtggggcagcatccagagccgctacatctccatgtctgtgtggaccagcccccggcggctggtggagctggccggccagagcctgctgaaggatgaggccctggccatcgccgccctggagctgctgccccgggagctgttccccccactcttcatggccgcctttgatggccgccacagccagaccctgaaggccatggtgcaggcctggcccttcacctgcctgcccctgggcgtgctgatgaagggccagcacctgcacctggagaccttcaaggctgtgctggatggcctggatgtgctgctggcccaggaggtgcggccccggcgctggaagctgcaggtgctggacctgaggaagaacagccaccaggacttctggacagtgtggagcggcaacagagccagcctgtacagcttccctgagcctgaggccgcctag

SEQ ID NO: 165127 - DNA, 1482 bp, synthetic construct
  misc_feature 1..1482: note = Description of Artificial Sequence: Synthetic coding sequence
  source 1..1482: mol_type = other DNA
atgtctgtgtggaccagcccccggcggctggtggagctggccggccagagcctgctgaaggatgaggccctggccatcgccgccctggagctgctgccccgggagctgttccccccactcttcatggccgcctttgatggccgccacagccagaccctgaaggccatggtgcaggcctggcccttcacctgcctgcccctgggcgtgctgatgaagggccagcacctgcacctggagaccttcaaggctgtgctggatggcctggatgtgctgctggcccaggaggtgcggccccggcgctggaagctgcaggtgctggacctgaggaagaacagccaccaggacttctggacagtgtggagcggcaacagagccagcctgtacagcttccctgagcctgaggccgcccagcccatgaccaagaagaggaaggtggatggcctgagcacagaggccgagcagcccttcatccctgtggaggtgctggtggacctcttcctgaaggagggcgcctgtgatgagctgttctcctacctgattgagaaggtgaagaggaagaagaatgtgctgcggctgtgctgcaagaagctgaagatctttgccatgcccatgcaggacatcaagatgatcctgaagatggtgcagctggacagcattgaggacctggaggtgacctgcacctggaagctgcccaccctggccaagttcagcccctacctgggccagatgatcaacctgcggcggctgctgctgagccacatccacgccagcagctacatcagccctgagaaggaggagcagtacatcgcccagttcaccagccagttcctgagcctgcagtgcctgcaggccctgtatgtggacagcctcttcttcctgcggggccgcctggaccagctgctgcggcacgtgatgaaccccctggagaccctgagcatcaccaactgccgcctgtctgaaggagatgtgatgcacctgagccagagccccagcgtgtcccagctgtctgtgctgagcctgtctggagtgatgctgacagatgtgtccccagagcccctgcaggccctgctggagcgggccagcgccaccctgcaggacctggtgtttgatgaatgtggcatcacagatgaccagctgctggccctgctgcccagcctgagccactgcagccagctgaccaccctgtccttctacggcaacagcatcagcatcagcgccctgcagagcctgctgcagcacctgattggcctgagcaacctgacccacgtgctgtaccctgtgcccctggagagctatgaggacatccacggcaccctgcacctggagcggctggcctacctgcacgcccggctgcgggagctgctgtgtgagctgggccggcccagcatggtgtggctgagcgccaacccctgcccccactgtggggacaggaccttctatgaccctgagcccatcctgtgcccctgcttcatgcccaactag

SEQ ID NO: 165128 - DNA, 606 bp, synthetic construct
  misc_feature 1..606: note = Description of Artificial Sequence: Synthetic coding sequence
  source 1..606: mol_type = other DNA
atggagcggcggcggctgtggggcagcatccagagccgctacatctccatgtctgtgtggaccagcccccggcggctggtggagctggccggccagagcctgctgaaggatgaggccctggccatcgccgccctggagctgctgccccgggagctgttccccccactcttcatggccgcctttgatggccgccacagccagaccctgaaggccatggtgcaggcctggcccttcacctgcctgcccctgggcgtgctgatgaagggccagcacctgcacctggagaccttcaaggctgtgctggatggcctggatgtgctgctggcccaggaggtgcggccccggcgctggaagctgcaggtgctggacctgaggaagaacagccaccaggacttctggacagtgtggagcggcaacagagccagcctgtacagcttccctgagcctgaggccgcccagcccatgaccaagaagaggaaggtggatggcctgagcacagaggccgagcagcccttcatccctgtggaggtgctggtggacctcttcctgaaggagggcgcctgtgatgagctgttctcctacctgattgagaaggtgaagaggtag

SEQ ID NO: 165129 - DNA, 1482 bp, synthetic construct; identical to SEQ ID NO: 165127
  misc_feature 1..1482: note = Description of Artificial Sequence: Synthetic coding sequence
  source 1..1482: mol_type = other DNA

SEQ ID NO: 165130 - DNA, 1530 bp, synthetic construct; identical to SEQ ID NO: 165120
  misc_feature 1..1530: note = Description of Artificial Sequence: Synthetic coding sequence
  source 1..1530: mol_type = other DNA

SEQ ID NO: 165131 - DNA, 369 bp, synthetic construct
  misc_feature 1..369: note = Description of Artificial Sequence: Synthetic coding sequence
  source 1..369: mol_type = other DNA
atggccgcccctgtggacctggagctgaagaaggccttcacagagctgcaggccaaggtgattgacacccagcagaaggtgaagctggccgacatccagatcgagcagctgaacagaaccaagaagcacgcccacctgacagacacagagatcatgaccctggtggatgagaccaacatgtatgaaggagtgggccgcatgttcatcctgcagagcaaggaggccatccacagccagctgctggagaagcagaagattgctgaggagaagatcaaggagctggagcagaagaagagctacctggagaggtctgtgaaggaggccgaggacaacatccgggagatgctgatggcccggcgggcccagtag

SEQ ID NO: 165132 - DNA, 465 bp, synthetic construct
  misc_feature 1..465: note = Description of Artificial Sequence: Synthetic coding sequence
  source 1..465: mol_type = other DNA
atggctgaaaattctggccgggccggcaagagcagcggcagcggggccgggaaaggagctgtgtctgctgagcaggtgattgctggcttcaaccggctgcggcaggagcagaggggcctggccagcaaggctgctgagctggagatggagctgaatgagcacagcctggtgattgacaccctgaaggaggtggatgagaccaggaagtgctacaggatggtgggcggcgtgctggtggagaggacagtgaaggaggtgctgcctgccctggagaacaacaaggagcagatccagaagatcatcgagaccctgacccagcagctgcaggccaagggcaaggagctgaatgagttccgggagaagcacaacatccggctgatgggagaagatgagaagccagctgccaaggaaaattctgagggcgctggggccaaggccagcagcgctggggtgctggtgtcctag

SEQ ID NO: 165133 - DNA, 405 bp, synthetic construct
  misc_feature 1..405: note = Description of Artificial Sequence: Synthetic coding sequence
  source 1..405: mol_type = other DNA
atggccgccaccatgaagaaggctgctgctgaagatgtgaatgtgacctttgaggaccagcagaagatcaacaagtttgccaggaacaccagccgcatcacagagctgaaggaggagattgaggtgaagaagaagcagctgcagaacctggaggatgcctgtgatgacatcatgctggctgatgatgactgcctgatgatcccctaccagattggagatgtgttcatcagccacagccaggaggagacccaggagatgctggaggaggccaagaagaacctgcaggaggagattgatgccctggagagccgggtggagagcatccagagggtgctggccgacctgaaggtgcagctgtatgccaagtttggcagcaacatcaacctggaggctgatgagagctag

SEQ ID NO: 165134 - DNA, 465 bp, synthetic construct
  misc_feature 1..465: note = Description of Artificial Sequence: Synthetic coding sequence
  source 1..465: mol_type = other DNA
atggcccagagcatcaacatcacagagctgaacctgccccagctggagatgctgaagaaccagctggaccaggaggtggagttcctgagcaccagcatcgcccagctgaaggtggtgcagaccaagtatgtggaggccaaggactgcctgaatgtgctgaacaagagcaatgaaggcaaggagctgctggtgcccctgaccagctccatgtatgtgcctgggaagctgcatgatgtggagcacgtgctgattgatgtgggcaccggctactacgtggagaagacagcagaagatgccaaggacttcttcaagaggaagattgacttcctgaccaagcagatggagaagatccagcctgccctgcaggagaagcacgccatgaagcaggccgtgatggagatgatgagccagaagatccagcagctgacagccctgggcgccgcccaggccacagccaaggcctag

SEQ ID NO: 165135 - DNA, 330 bp, synthetic construct
  misc_feature 1..330: note = Description of Artificial Sequence: Synthetic coding sequence
  source 1..330: mol_type = other DNA
atggcccagagcatcaacatcacagagctgaacctgccccagctggagatgctgaagaaccagctggaccagatgtatgtgcctgggaagctgcatgatgtggagcacgtgctgattgatgtgggcaccggctactacgtggagaagacagcagaagatgccaaggacttcttcaagaggaagattgacttcctgaccaagcagatggagaagatccagcctgccctgcaggagaagcacgccatgaagcaggccgtgatggagatgatgagccagaagatccagcagctgacagccctgggcgccgcccaggccacagccaaggcctag

SEQ ID NO: 165136 - DNA, 465 bp, synthetic construct; identical to SEQ ID NO: 165134
  misc_feature 1..465: note = Description of Artificial Sequence: Synthetic coding sequence
  source 1..465: mol_type = other DNA

SEQ ID NO: 165137 - DNA, 1281 bp, synthetic construct
  misc_feature 1..1281: note = Description of Artificial Sequence: Synthetic coding sequence
  source 1..1281: mol_type = other DNA
atgggcaccctgagcgccccaccctgcacccagaggatcaagtggaagggcctgctgctgacagccagcctgctgaacttctggaacctgcccaccacagcccaggtgaccatcgaggccgagcccaccaaggtgtctgagggcaaggatgtgctgctgctggtgcacaacctgccccagaacctgaccggctacatctggtacaagggccagatgagggacctgtaccactacatcaccagctatgtggtggatggagagatcatcatctacggccctgcctacagcggccgggagacagcctacagcaatgccagcctgctgatccagaatgtgaccagagaagatgctggcagctacaccctgcacatcatcaagggagatgatggcacccggggcgtgacaggccgcttcaccttcaccctgcacctggagacccccaagcccagcatcagcagcagcaacctgaacccccgggagaccatggaggccgtgtccctgacctgtgaccctgagaccccagatgccagctacctgtggtggatgaatggccagagcctgcccatgacccacagcctgaagctgtctgagaccaacagaaccctcttcctgctgggcgtgaccaagtacacagctggcccctatgaatgtgagatccggaaccctgtgtctgccagcagaagtgaccctgtgaccctgaacctgctgcccaagctgcccaagccctacatcaccatcaacaacctgaacccccgggagaacaaggatgtgctgaacttcacctgtgagcccaagtctgagaactacacctacatctggtggctgaatggccagagcctgcctgtgagcccccgggtgaagaggcccattgaaaatcgcatcctgatcctgcccagcgtgaccagaaatgaaacaggcccctaccagtgtgagatccgggacagatatggaggcatccgcagtgaccctgtgaccctgaatgtgctgtatggccctgacctgccccgcatctaccccagcttcacctactaccgcagcggggaggtgctgtacctgagctgcagcgctgacagcaaccccccagcccagtacagctggaccatcaatgagaagttccagctgcccggccagaagctgttcatccgccacatcaccaccaagcacagcggcctgtatgtgtgcagcgtgagaaattctgccaccgggaaggagagcagcaagtccatgacagtggaggtgtctgggaagtggatcccagccagcctggccatcggcttctag

SEQ ID NO: 165138 - DNA, 432 bp, synthetic construct
  misc_feature 1..432: note = Description of Artificial Sequence: Synthetic coding sequence
  source 1..432: mol_type = other DNA
atgggcaccctgagcgccccaccctgcacccagaggatcaagtggaagggcctgctgctgacagccagcctgctgaacttctggaacctgcccaccacagcccaggtgaccatcgaggccgagcccaccaaggtgtctgagggcaaggatgtgctgctgctggtgcacaacctgccccagaacctgaccggctacatctggtacaagggccagatgagggacctgtaccactacatcaccagctatgtggtggatggagagatcatcatctacggccctgcctacagcggccgggagacagcctacagcaatgccagcctgctgatccagaatgtgaccagagaagatgctggcagctacaccctgcacatcatcaagggagatgatggcacccggggcgtgacaggccgcttcaccttcaccctgcactag

SEQ ID NO: 165139 - DNA, 1287 bp, synthetic construct
  misc_feature 1..1287: note = Description of Artificial Sequence: Synthetic coding sequence
  source 1..1287: mol_type = other DNA
atgggcaccctgagcgccccaccctgcacccagaggatcaagtggaagggcctgctgctgacagccagcctgctgaacttctggaacctgcccaccacagcccaggtgaccatcgaggccgagcccaccaaggtgtctgagggcaaggatgtgctgctgctggtgcacaacctgccccagaacctgaccggctacatctggtacaagggccagatgagggacctgtaccactacatcaccagctatgtggtggatggagagatcatcatctacggccctgcctacagcggccgggagacagcctacagcaatgccagcctgctgatccagaatgtgaccagagaagatgctggcagctacaccctgcacatcatcaagggagatgatggcacccggggcgtgacaggccgcttcaccttcaccctgcacctggagacccccaagcccagcatcagcagcagcaacctgaacccccgggagaccatggaggccgtgtccctgacctgtgaccctgagaccccagatgccagctacctgtggtggatgaatggccagagcctgcccatgacccacagcctgaagctgtctgagaccaacagaaccctcttcctgctgggcgtgaccaagtacacagctggcccctatgaatgtgagatccggaaccctgtgtctgccagcagaagtgaccctgtgaccctgaacctgctgcccaagctgcccaagccctacatcaccatcaacaacctgaacccccgggagaacaaggatgtgctgaacttcacctgtgagcccaagtctgagaactacacctacatctggtggctgaatggccagagcctgcctgtgagcccccgggtgaagaggcccattgaaaatcgcatcctgatcctgcccagcgtgaccagaaatgaaacaggcccctaccagtgtgagatccgggacagatatggaggcatccgcagtgaccctgtgaccctgaatgtgctgtatggccctgacctgccccgcatctaccccagcttcacctactaccgcagcggggaggtgctgtacctgagctgcagcgctgacagcaaccccccagcccagtacagctggaccatcaatgagaagttccagctgcccggccagaagctgttcatccgccacatcaccaccaagcacagcggcctgtatgtgtgcagcgtgagaaattctgccaccgggaaggagagcagcaagtccatgacagtggaggtgtctgcctacagcagcagcatcaactacaccagcggcaacagaaattag

SEQ ID NO: 165140 - DNA, 1260 bp, synthetic construct
  misc_feature 1..1260: note = Description of Artificial Sequence: Synthetic coding sequence
  source 1..1260: mol_type = other DNA
atgggcaccctgagcgccccaccctgcacccagaggatcaagtggaagggcctgctgctgacagccagcctgctgaacttctggaacctgcccaccacagcccaggtgaccatcgaggccgagcccaccaaggtgtctgagggcaaggatgtgctgctgctggtgcacaacctgccccagaacctgaccggctacatctggtacaagggccagatgagggacctgtaccactacatcaccagctatgtggtggatggagagatcatcatctacggccctgcctacagcggccgggagacagcctacagcaatgccagcctgctgatccagaatgtgaccagagaagatgctggcagctacaccctgcacatcatcaagggagatgatggcacccggggcgtgacaggccgcttcaccttcaccctgcacctggagacccccaagcccagcatcagcagcagcaacctgaacccccgggagaccatggaggccgtgtccctgacctgtgaccctgagaccccagatgccagctacctgtggtggatgaatggccagagcctgcccatgacccacagcctgaagctgtctgagaccaacagaaccctcttcctgctgggcgtgaccaagtacacagctggcccctatgaatgtgagatccggaaccctgtgtctgccagcagaagtgaccctgtgaccctgaacctgctgcccaagctgcccaagccctacatcaccatcaacaacctgaacccccgggagaacaaggatgtgctgaacttcacctgtgagcccaagtctgagaactacacctacatctggtggctgaatggccagagcctgcctgtgagcccccgggtgaagaggcccattgaaaatcgcatcctgatcctgcccagcgtgaccagaaatgaaacaggcccctaccagtgtgagatccgggacagatatggaggcatccgcagtgaccctgtgaccctgaatgtgctgtatggccctgacctgccccgcatctaccccagcttcacctactaccgcagcggggaggtgctgtacctgagctgcagcgctgacagcaaccccccagcccagtacagctggaccatcaatgagaagttccagctgcccggccagaagctgttcatccgccacatcaccaccaagcacagcggcctgtatgtgtgcagcgtgagaaattctgccaccgggaaggagagcagcaagtccatgacagtggaggtgtctgactggacagtgccctag

SEQ ID NO: 165141 - DNA, 1254 bp, synthetic construct
  misc_feature 1..1254: note = Description of Artificial Sequence: Synthetic coding sequence
  source 1..1254: mol_type = other DNA
atgggcaccctgagcgccccaccctgcacccagaggatcaagtggaagggcctgctgctgacagccagcctgctgaacttctggaacctgcccaccacagcccaggtgaccatcgaggccgagcccaccaaggtgtctgagggcaaggatgtgctgctgctggtgcacaacctgccccagaacctgaccggctacatctggtacaagggccagatgagggacctgtaccactacatcaccagctatgtggtggatggagagatcatcatctacggccctgcctacagcggccgggagacagcctacagcaatgccagcctgctgatccagaatgtgaccagagaagatgctggcagctacaccctgcacatcatcaagggagatgatggcacccggggcgtgacaggccgcttcaccttcaccctgcacctggagacccccaagcccagcatcagcagcagcaacctgaacccccgggagaccatggaggccgtgtccctgacctgtgaccctgagaccccagatgccagctacctgtggtggatgaatggccagagcctgcccatgacccacagcctgaagctgtctgagaccaacagaaccctcttcctgctgggcgtgaccaagtacacagctggcccctatgaatgtgagatccggaaccctgtgtctgccagcagaagtgaccctgtgaccctgaacctgctgcccaagctgcccaagccctacatcaccatcaacaacctgaacccccgggagaacaaggatgtgctgaacttcacctgtgagcccaagtctgagaactacacctacatctggtggctgaatggccagagcctgcctgtgagcccccgggtgaagaggcccattgaaaatcgcatcctgatcctgcccagcgtgaccagaaatgaaacaggcccctaccagtgtgagatccgggacagatatggaggcatccgcagtgaccctgtgaccctgaatgtgctgtatggccctgacctgccccgcatctaccccagcttcacctactaccgcagcggggaggtgctgtacctgagctgcagcgctgacagcaaccccccagcccagtacagctggaccatcaatgagaagttccagctgcccggccagaagctgttcatccgccacatcaccaccaagcacagcggcctgtatgtgtgcagcgtgagaaattctgccaccgggaaggagagcagcaagtccatgacagtggaggtgtctgaggccctgtag

SEQ ID NO: 165142 - DNA, 642 bp, synthetic construct
  misc_feature 1..642: note = Description of Artificial Sequence: Synthetic coding sequence
  source 1..642: mol_type = other DNA
atgggccccctgagcgccccaccctgcacagagcacatcaagtggaagggcctgctgctgactgtggagacccccaagcccagcatcagcagcagcaacctgaacccccgggaggccatggagaccgtcatcctgacctgcaaccctgagaccccagatgccagctacctgtggtggatgaatggccagagcctgcccatgacccacaggatgcagctgtctgagaccaacagaaccctcttcctgtttggagtgaccaagtacacagctggcccctatgaatgtgagatctggaacagcggcagcgccagcagaagtgaccctgtgaccctgaacctgctgcacggccctgacctgccccgcatcttccccagcgtgaccagctactacagcggggagaacctggacctgagctgctttgccaacagcaaccccccagcccagtacagctggaccatcaacgggaagttccagctgagcggccagaagctgttcatcccccagatcacccccaagcacaacggcctgtatgcctgcagcgccaggaacagcgccaccggggaggagagcagcaccagcctgaccatccgggtgattgcccctcctggcctgggcacctttgccttcaacaaccccacctag

SEQ ID NO: 165143 - DNA, 1008 bp, synthetic construct
  misc_feature 1..1008: note = Description of Artificial Sequence: Synthetic coding sequence
  source 1..1008: mol_type = other DNA
atgggccccctgagcgccccaccctgcacagagcacatcaagtggaagggcctgctgctgacagccctgctgctgaacttctggaacctgcccaccacagcccaggtgatgattgaggcccagccccccaaggtgtctgagggcaaggatgtgctgctgctggtgcacaacctgccccagaacctgaccggctacatctggtacaagggccagatccgggacctgtaccactacatcaccagctatgtggtggatggccagatcatcatctacggccctgcctacagcggccgggagaccgtgtacagcaatgccagcctgctgatccagaatgtgaccagagaagatgctggcagctacaccctgcacatcatcaagagaggagatggcacccggggcgtgacaggctacttcaccttcaccctgtacctggagacccccaagcccagcatcagcagcagcaacctgaacccccgggaggccatggagaccgtcatcctgacctgcaaccctgagaccccagatgccagctacctgtggtggatgaatggccagagcctgcccatgacccacaggatgcagctgtctgagaccaacagaaccctcttcctgtttggagtgaccaagtacacagctggcccctatgaatgtgagatctggaacagcggcagcgccagcagaagtgaccctgtgaccctgaacctgctgcacggccctgacctgccccgcatcttccccagcgtgaccagctactacagcggggagaacctggacctgagctgctttgccaacagcaaccccccagcccagtacagctggaccatcaacgggaagttccagctgagcggccagaagctgttcatcccccagatcacccccaagcacaacggcctgtatgcctgcagcgccaggaacagcgccaccggggaggagagcagcaccagcctgaccatccgggtgattgcccctcctggcctgggcacctttgccttcaacaaccccacctag

SEQ ID NO: 165144 - DNA, 1008 bp, synthetic construct; identical to SEQ ID NO: 165143
  misc_feature 1..1008: note = Description of Artificial Sequence: Synthetic coding sequence
  source 1..1008: mol_type = other DNA

SEQ ID NO: 165145 - DNA, 642 bp, synthetic construct; identical to SEQ ID NO: 165142
  misc_feature 1..642: note = Description of Artificial Sequence: Synthetic coding sequence
  source 1..642: mol_type = other DNA

SEQ ID NO: 165146 - DNA, 1008 bp, synthetic construct
  misc_feature 1..1008: note = Description of Artificial Sequence: Synthetic coding sequence
  source 1..1008: mol_type = other DNA
atgggccccctgagcgccccaccctgcacagagcacatcaagtggaagggcctgctggtgacagccagcctgctgaacttctggaacctgcccaccacagcccaggtgaccatcgaggcccagccccccaaggtgtctgagggcaaggatgtgctgctgctggtgcacaacctgccccagaacctgaccggctacatctggtacaagggccagatccgggacctgtaccactacatcaccagctatgtggtggatggccagatcatcatctacggccctgcctacagcggccgggagacagcctacagcaatgccagcctgctgatccagaatgtgaccagagaagatgctggcagctacaccctgcacatcatcaagagaggagatggcacccggggcgtgacaggctacttcaccttcaccctgtacctggagacccccaagcccagcatcagcagcagcaacctgaacccccgggaggccatggagaccgtcatcctgacctgtgaccctgagaccccagacaccagctaccagtggtggatgaatggccagagcctgcccatgacccaccgcttccagctgtctgagaccaacagaaccctcttcctgtttggagtgaccaagtacacagctggcccctatgaatgtgagatccggaacagcggcagcgccagcagaagtgaccctgtgaccctgaacctgctgcacggccctgacctgccccgcatccaccccagctacaccaactacagaagtggggacaacctgtacctgagctgctttgccaacagcaaccccccagcccagtacagctggaccatcaacgggaagttccagcagagcggccagaacctcttcatcccccagatcaccaccaagcacagcggcctgtatgtgtgcagcgtgaggaacagcgccaccggggaggagagcagcaccagcctgactgtgaaggtgtctgccagcacccgcatcggcctgctgcccctgctgaaccccacctag

SEQ ID NO: 165147 - DNA, 1008 bp, synthetic construct; identical to SEQ ID NO: 165146
  misc_feature 1..1008: note = Description of Artificial Sequence: Synthetic coding sequence
  source 1..1008: mol_type = other DNA

SEQ ID NO: 165148 - DNA, 1008 bp, synthetic construct; identical to SEQ ID NO: 165146
  misc_feature 1..1008: note = Description of Artificial Sequence: Synthetic coding sequence
  source 1..1008: mol_type = other DNA

SEQ ID NO: 165149 - DNA, 1287 bp, synthetic construct
  misc_feature 1..1287: note = Description of Artificial Sequence: Synthetic coding sequence
  source 1..1287: mol_type = other DNA
atgggccccctgagcgccccaccctgcacccagaggatcacctggaagggcctgctgctgacagccctgctgctgaacttctggaacctgcccaccacagcccaggtgaccatcgaggccgagcccaccaaggtgtccaagggcaaggatgtgctgctgctggtgcacaacctgccccagaacctggccggctacatctggtacaagggccagatgaaggacctgtaccactacatcaccagctatgtggtggatggccagatcatcatctacggccctgcctacagcggccgggagaccgtgtacagcaatgccagcctgctgatccagaatgtgaccagagaagatgctggcagctacaccctgcacatcgtgaagagaggagatggcaccagaggagaaacaggccacttcaccttcaccctgtacctggagacccccaagcccagcatcagcagcagcaacctgtacccccgggaggacatggaggccgtgtccctgacctgtgaccctgagaccccagatgccagctacctgtggtggatgaatggccagagcctgcccatgacccacagcctgcagctgagcaagaacaagaggaccctcttcctgtttggagtgaccaagtacacagctggcccctatgaatgtgagatccggaaccctgtgtctgccagcagaagtgaccctgtgaccctgaacctgctgcccaagctgcccaagccctacatcaccatcaacaacctgaacccccgggagaacaaggatgtgctggccttcacctgtgagcccaagtctgagaactacacctacatctggtggctgaatggccagagcctgcctgtgagcccccgggtgaagaggcccattgaaaatcgcatcctgatcctgcccagcgtgaccagaaatgaaacaggcccctaccagtgtgagatccaggacagatatggaggcatccgcagctaccctgtgaccctgaatgtgctgtatggccctgacctgccccgcatctaccccagcttcacctactaccacagcggggagaacctgtacctgagctgctttgctgacagcaaccccccagctgagtacagctggaccatcaatggcaagttccagctgagcggccagaagctgttcatcccccagatcaccaccaagcacagcggcctgtatgcctgcagcgtgagaaattctgccaccggcatggagagcagcaagtccatgacagtgaaggtgtctgcccccagcggcaccggccacctgcccggcctgaaccccctgtag

SEQ ID NO: 165150 - DNA, 981 bp, synthetic construct
  misc_feature 1..981: note = Description of Artificial Sequence: Synthetic coding sequence
  source 1..981: mol_type = other DNA
atgggccccctgagcgccccaccctgcacccagaggatcacctggaagggcgtgctgctgacagccagcctgctgaacttctggaacccccccaccacagcccaggtgaccatcgaggcccagccccccaaggtgtctgagggcaaggatgtgctgctgctggtgcacaacctgccccagaacctggccggctacatctggtacaagggccagatgacctacctgtaccactacatcaccagctatgtggtggatggccagaggatcatctacggccctgcctacagcggccgggagcgggtgtacagcaatgccagcctgctgatccagaatgtgacccaggaggatgctggcagctacaccctgcacatcatcaagagaagagatggcactggaggagtgacaggccacttcaccttcaccctgcacctggagacccccaagcccagcatcagcagcagcaacctgaacccccgggaggccatggaggccgtcatcctgacctgtgaccctgccaccccagctgccagctaccagtggtggatgaatggccagagcctgcccatgacccaccggctgcagctgagcaagaccaacagaaccctcttcatctttggagtgaccaagtacatcgccggcccctatgaatgtgagatccggaaccctgtgtctgccagcagaagtgaccctgtgaccctgaacctgctgcacggccctgacctgcccagcatctaccccagcttcacctactacagaagtggagaaaatctctacctgagctgctttgctgagagcaacccccgggcccagtacagctggaccatcaacgggaagttccagctgagcggccagaagctgagcatcccccagatcaccaccaagcacagcggcctgtatgcctgcagcgtgaggaacagcgccaccgggaaggagagcagcaagagcatcaccgtgaaggtgtctgactggatcctgccctag

SEQ ID NO: 165151 - DNA, 1260 bp, synthetic construct
  misc_feature 1..1260: note = Description of Artificial Sequence: Synthetic coding sequence
  source 1..1260: mol_type = other DNA
atgggccccctgagcgccccaccctgcacccagaggatcacctggaagggcgtgctgctgacagccagcctgctgaacttctggaacccccccaccacagcccaggtgaccatcgaggcccagccccccaaggtgtctgagggcaaggatgtgctgctgctggtgcacaacctgccccagaacctggccggctacatctggtacaagggccagatgacctacctgtaccactacatcaccagctatgtggtggatggccagaggatcatctacggccctgcctacagcggccgggagcgggtgtacagcaatgccagcctgctgatccagaatgtgacccaggaggatgctggcagctacaccctgcacatcatcaagagaagagatggcactggaggagtgacaggccacttcaccttcaccctgcacctggagacccccaagcccagcatcagcagcagcaacctgaacccccgggaggccatggaggccgtcatcctgacctgtgaccctgccaccccagctgccagctaccagtggtggatgaatggccagagcctgcccatgacccaccggctgcagctgagcaagaccaacagaaccctcttcatctttggagtgaccaagtacatcgccggcccctatgaatgtgagatccggaaccctgtgtctgccagcagaagtgaccctgtgaccctgaacctgctgcccaagctgagcaagccctacatcaccatcaacaacctgaacccccgggagaacaaggatgtgctgaccttcacctgtgagcccaagagcaagaactacacctacatctggtggctgaatggccagagcctgcctgtgagcccccgggtgaagaggcccattgaaaatcgcatcctgatcctgcccaacgtgaccagaaatgaaacaggcccctaccagtgtgagatccgggacagatatggaggcatccgcagtgaccctgtgaccctgaatgtgctgtatggccctgacctgcccagcatctaccccagcttcacctactaccgcagcggggagaacctgtacctgagctgctttgctgagagcaacccccgggcccagtacagctggaccatcaatggcaagttccagctgagcggccagaagctgagcatcccccagatcaccaccaagcacagcggcctgtatgcctgcagcgtgagaaattctgccaccgggaaggagagcagcaagagcatcaccgtgaaggtgtctgactggatcctgccctag

SEQ ID NO: 165152 - DNA, 981 bp, synthetic construct
  misc_feature 1..981: note = Description of Artificial Sequence: Synthetic coding sequence
  source 1..981: mol_type = other DNA
atgggccccctgagcgccccaccctgcacccagaggatcacctggaagggcgtgctgctgacagccagcctgctgaacttctggaacccccccaccacagcccaggtgaccatcgaggcccagccccccaaggtgtctgagggcaaggatgtgctgctgctggtgcacaacctgccccagaacctggccggctacatctggtacaagggccagatgacctacctgtaccactacatcaccagctatgtggtggatggccagaggatcatctacggccctgcctacagcggccgggagcgggtgtacagcaatgccagcctgctgatccagaatgtgacccaggaggatgctggcagctacaccctgcacatcatcaagagaagagatggcactggaggagtgacaggccacttcaccttcaccctgcaccccaagctgagcaagccctacatcaccatcaacaacctgaacccccgggagaacaaggatgtgctgaccttcacctgtgagcccaagagcaagaactacacctacatctggtggctgaatggccagagcctgcctgtgagcccccgggtgaagaggcccatcgagaaccgcatcctgatcctgcccaacgtgaccagaaatgagaccggcccctaccagtgtgagatccgggacagatatggaggcatccgcagtgaccctgtgaccctgaatgtgctgtatggccctgacctgcccagcatctaccccagcttcacctactacagaagtggagaaaatctctacctgagctgctttgctgagagcaacccccgggcccagtacagctggaccatcaacgggaagttccagctgagcggccagaagctgagcatcccccagatcaccaccaagcacagcggcctgtatgcctgcagcgtgaggaacagcgccaccgggaaggagagcagcaagagcatcaccgtgaaggtgtctgactggatcctgccctag

SEQ ID NO: 165153 - DNA, 1008 bp, synthetic construct
  misc_feature 1..1008: note = Description of Artificial Sequence: Synthetic coding sequence
  source 1..1008: mol_type = other DNA
atgggccccctgagcgccccaccctgcacccagcacatcacctggaagggcctgctgctgacagccagcctgctgaacttctggaacctgcccatcacagcccaggtgaccatcgaggccctgccccccaaggtgtctgagggcaaggatgtgctgctgctggtgcacaacctgccccagaacctggccggctacatctggtacaagggccagctgatggacctgtaccactacatcaccagctatgtggtggatggccagatcaacatctacggccctgcctacacaggccgggagaccgtgtacagcaatgccagcctgctgatccagaatgtgaccagagaagatgctggcagctacaccctgcacatcatcaagagaggagacaggacccggggcgtgacaggctacttcaccttcaacctgtacctgaagctgcccaagccctacatcaccatcaacaacagcaagccccgggagaacaaggatgtgctggccttcacctgtgagcccaagtctgagaactacacctacatctggtggctgaatggccagagcctgcctgtgagcccccgggtgaagaggcccatcgagaaccgcatcctgatcctgcccagcgtgaccagaaatgagaccggcccctatgaatgtgagatccgggacagagatggcggcatgagaagtgaccctgtgaccctgaatgtgctgtatggccctgacctgcccagcatctaccccagcttcacctactacagaagtggagaaaatctctacctgagctgctttgctgagagcaaccccccagctgagtacttctggaccatcaacgggaagttccagcagagcggccagaagctgagcatcccccagatcaccaccaagcaccggggcctgtacacctgcagcgtgaggaacagcgccaccgggaaggagagcagcaagtccatgacagtggaggtgtctgcccccagcggcatcggccgcctgcccctgctgaaccccatctag

SEQ ID NO: 165154 - DNA, 1008 bp, synthetic construct; identical to SEQ ID NO: 165153
  misc_feature 1..1008: note = Description of Artificial Sequence: Synthetic coding sequence
  source 1..1008: mol_type = other DNA

SEQ ID NO: 165155 - DNA, 1008 bp, synthetic construct; identical to SEQ ID NO: 165153
  misc_feature 1..1008: note = Description of Artificial Sequence: Synthetic coding sequence
  source 1..1008: mol_type = other DNA

SEQ ID NO: 165156 - DNA, 1275 bp, synthetic construct
  misc_feature 1..1275: note = Description of Artificial Sequence: Synthetic coding sequence
  source 1..1275: mol_type = other DNA
atgggccccctgagcgccccaccctgcacccagcacatcacctggaagggcctgctgctgacagccagcctgctgaacttctggaacctgcccaccacagcccaggtgatcatcgaggccaagccacccaaggtgtctgagggcaaggatgtgctgctgctggtgcacaacctgccccagaacctgaccggctacatctggtacaagggccagatgacagacctgtaccactacatcaccagctatgtggtgcacggccagatcatctacggccctgcctacagcggccgggagaccgtgtacagcaatgccagcctgctgatccagaatgtgacccaggaggatgctggcagctacaccctgcacatcatcaagagaggagatggcaccggcggcgtgacaggctacttcaccgtgaccctgtacagcgagacccccaagcccagcatcagcagcagcaacctgaacccccgggaggtgatggaggccgtgcggctcatctgtgaccctgagaccccagatgccagctacctgtggctgctgaatggccagaacctgcccatgacccaccggctgcagctgagcaagaccaacagaaccctgtacctgtttggagtgaccaagtacatcgccggcccctatgaatgtgagatcagaaatcctgtgtctgccagcagaagtgaccctgtgaccctgaacctgctgcccaagctgcccatgccctacatcaccatcaacaacctgaacccccgggagaagaaggatgtgctggccttcacctgtgagcccaagagcaggaactacacctacatctggtggctgaatggccagagcctgcctgtgagcccccgggtgaagaggcccatcgagaaccgcatcctgatcctgcccagcgtgaccagaaatgagaccggcccctaccagtgtgagatccgggacagatatggaggcatccgcagcaaccctgtgaccctgaatgtgctgtatggccctgacctgccccgcatctaccccagcttcacctactacagaagtggagagaacctggacctgagctgctttgctgacagcaaccccccagctgagtacagctggaccatcaacgggaagttccagctgagcggccagaagctgttcatcccccagatcaccaccaaccacagcggcctgtatgcctgcagcgtgaggaacagcgccaccgggaaggagatcagcaagtccatgattgtgaaggtgtctggcccctgccacggcaaccagacagagagccactag

SEQ ID NO: 165157 - DNA, 1308 bp, synthetic construct
  misc_feature 1..1308: note = Description of Artificial Sequence: Synthetic coding sequence
  source 1..1308: mol_type = other DNA
atgggccccctgagcgccccaccctgcacccagcacatcacctggaagggcctgctgctgacagccagcctgctgaacttctggaacctgcccaccacagcccaggtgatcatcgaggccaagccacccaaggtgtctgagggcaaggatgtgctgctgctggtgcacaacctgccccagaacctgaccggctacatctggtacaagggccagatgacagacctgtaccactacatcaccagctatgtggtgcacggccagatcatctacggccctgcctacagcggccgggagaccgtgtacagcaatgccagcctgctgatccagaatgtgacccaggaggatgctggcagctacaccctgcacatcatcaagagaggagatggcaccggcggcgtgacaggctacttcaccgtgaccctgtacagcgagacccccaagcccagcatcagcagcagcaacctgaacccccgggaggtgatggaggccgtgcggctcatctgtgaccctgagaccccagatgccagctacctgtggctgctgaatggccagaacctgcccatgacccaccggctgcagctgagcaagaccaacagaaccctgtacctgtttggagtgaccaagtacatcgccggcccctatgaatgtgagatcagaaatcctgtgtctgccagcagaagtgaccctgtgaccctgaacctgctgcccaagctgcccatgccctacatcaccatcaacaacctgaacccccgggagaagaaggatgtgctggccttcacctgtgagcccaagagcaggaactacacctacatctggtggctgaatggccagagcctgcctgtgagcccccgggtgaagaggcccatcgagaaccgcatcctgatcctgcccagcgtgaccagaaatgagaccggcccctaccagtgtgagatccgggacagatatggaggcatccgcagcaaccctgtgaccctgaatgtgctgtatggccctgacctgccccgcatctaccccagcttcacctactacagaagtggagagaacctggacctgagctgctttgctgacagcaaccccccagctgagtacagctggaccatcaacgggaagttccagctgagcggccagaagctgttcatcccccagatcaccaccaaccacagcggcctgtatgcctgcagcgtgaggaacagcgccaccgggaaggagatcagcaagtccatgattgtgaaggtgtctgaaacagccagcccccaggtgacctacgccggccccaacacctggttccaggagatcctgctgctgtag

SEQ ID NO: 165158 - DNA, 606 bp, synthetic construct
  misc_feature 1..606: note = Description of Artificial Sequence: Synthetic coding sequence
  source 1..606: mol_type = other DNA
atgggaggagatgaaaatagaggagtgacaggccacttcaccttcaccctgtacctggagacccccaagcccagcatcagcagcagcaagctgaacccccgggaggccatggaggccgtgtccctgacctgtgaccctgagaccccagatgccagctacctgtggtggatgaatggccagagcctgcccatgagccaccggctgcagctgtctgagaccaacagaaccctcttcctgctgggcgtgaccaagtacacagctggcccctatgaatgtgagatcagaaatcctgtgtctgccagcagaagtgaccccttcaccctgaacctgctgcacggccctgacctgccccgcatctaccccagcttcacctactaccgcagcggggaggtgctgtacctgagctgcagcgctgacagcaaccccccagcccagtacagctggaccatcaatggcaagttccagctgagcggccagaagctgttcatcccccagatcaccaccaagcacagcggcctgtatgcctgcagcgtgagaaattctgccaccgggaaggagagcagcaagtccatgacagtgaaggtgtctgactggaccctgccctag

SEQ ID NO: 165159 - DNA, 1281 bp, synthetic construct
  misc_feature 1..1281: note = Description of Artificial Sequence: Synthetic coding sequence
  source 1..1281: mol_type = other DNA
atgggcctgctgagcgccccaccctgcacccagaggatcacctggaagggcctgctgctgacagccagcctgctgaacttctggaacccccccaccacagcccaggtgaccatcgaggcccagcccaccaaggtgtctgagggcaaggatgtgctgctgctggtgcacaacctgccccagaacctgaccggctacatctggtacaagggccagatccgggacctgtaccactacatcaccagctatgtggtggatggccagatcatcatctacggccctgcctacagcggccgggagaccatctacagcaatgccagcctgctgatccagaatgtgacccaggaggatgctggcagctacaccctgcacatcatcatgggaggagatgagaacagaggagtgacaggccacttcaccttcaccctgtacctggagacccccaagcccagcatcagcagcagcaagctgaacccccgggaggccatggaggccgtgtccctgacctgtgaccctgagaccccagatgccagctacctgtggtggatgaatggccagagcctgcccatgagccaccggctgcagctgtctgagaccaacagaaccctcttcctgctgggcgtgaccaagtacacagctggcccctatgaatgtgagatccggaaccctgtgtctgccagcagaagtgaccccttcaccctgaacctgctgcccaagctgcccaagccctacatcaccatcaacaacctgaagccccgggagaacaaggatgtgctgaacttcacctgtgagcccaagtctgagaactacacctacatctggtggctgaatggccagagcctgcctgtgagcccccgggtgaagaggcccattgaaaatcgcatcctgatcctgcccagcgtgaccagaaatgaaacaggcccctaccagtgtgagatccgggaccagtatggaggcatccgcagctaccctgtgaccctgaatgtgctgtatggccctgacctgccccgcatctaccccagcttcacctactaccgcagcggggaggtgctgtacctgagctgcagcgctgacagcaaccccccagcccagtacagctggaccatcaatggcaagttccagctgagcggccagaagctgttcatcccccagatcaccaccaagcacagcggcctgtatgcctgcagcgtgagaaattctgccaccgggaaggagagcagcaagtccatgacagtgaaggtgtctgggaagagaattcctgtgtccctggccatcggcatctag

SEQ ID NO: 165160 - DNA, 717 bp, synthetic construct
  misc_feature 1..717: note = Description of Artificial Sequence: Synthetic coding sequence
  source 1..717: mol_type = other DNA
atgagccaccggctgcagctgtctgagaccaacagaaccctcttcctgctgggcgtgaccaagtacacagctggcccctatgaatgtgagatccggaaccctgtgtctgccagcagaagtgaccccttcaccctgaacctgctgcccaagctgcccaagccctacatcaccatcaacaacctgaagccccgggagaacaaggatgtgctgaacttcacctgtgagcccaagtctgagaactacacctacatctggtggctgaatggccagagcctgcctgtgagcccccgggtgaagaggcccattgaaaatcgcatcctgatcctgcccagcgtgaccagaaatgaaacaggcccctaccagtgtgagatccgggaccagtatggaggcatccgcagctaccctgtgaccctgaatgtgctgtatggccctgacctgccccgcatctaccccagcttcacctactaccgcagcggggaggtgctgtacctgagctgcagcgctgacagcaaccccccagcccagtacagctggaccatcaatggcaagttccagctgagcggccagaagctgttcatcccccagatcaccaccaagcacagcggcctgtatgcctgcagcgtgagaaattctgccaccgggaaggagagcagcaagtccatgacagtgaaggtgtctgcctacagcagcagcatcaactacacagctgtgtactag

SEQ ID NO: 165161 - DNA, 1260 bp, synthetic construct
  misc_feature 1..1260: note = Description of Artificial Sequence: Synthetic coding sequence
  source 1..1260: mol_type = other DNA
atgggcctgctgagcgccccaccctgcacccagaggatcacctggaagggcctgctgctgacagccagcctgctgaacttctggaacccccccaccacagcccaggtgaccatcgaggcccagcccaccaaggtgtctgagggcaaggatgtgctgctgctggtgcacaacctgccccagaacctgaccggctacatctggtacaagggccagatccgggacctgtaccactacatcaccagctatgtggtggatggccagatcatcatctacggccctgcctacagcggccgggagaccatctacagcaatgccagcctgctgatccagaatgtgacccaggaggatgctggcagctacaccctgcacatcatcatgggaggagatgagaacagaggagtgacaggccacttcaccttcaccctgtacctggagacccccaagcccagcatcagcagcagcaagctgaacccccgggaggccatggaggccgtgtccctgacctgtgaccctgagaccccagatgccagctacctgtggtggatgaatggccagagcctgcccatgagccaccggctgcagctgtctgagaccaacagaaccctcttcctgctgggcgtgaccaagtacacagctggcccctatgaatgtgagatccggaaccctgtgtctgccagcagaagtgaccccttcaccctgaacctgctgcccaagctgcccaagccctacatcaccatcaacaacctgaagccccgggagaacaaggatgtgctgaacttcacctgtgagcccaagtctgagaactacacctacatctggtggctgaatggccagagcctgcctgtgagcccccgggtgaagaggcccattgaaaatcgcatcctgatcctgcccagcgtgaccagaaatgaaacaggcccctaccagtgtgagatccgggaccagtatggaggcatccgcagctaccctgtgaccctgaatgtgctgtatggccctgacctgccccgcatctaccccagcttcacctactaccgcagcggggaggtgctgtacctgagctgcagcgctgacagcaaccccccagcccagtacagctggaccatcaatggcaagttccagctgagcggccagaagctgttcatcccccagatcaccaccaagcacagcggcctgtatgcctgcagcgtgagaaattctgccaccgggaaggagagcagcaagtccatgacagtgaaggtgtctgactggaccctgccctag

SEQ ID NO: 165162 - DNA, 894 bp, synthetic construct
  misc_feature 1..894: note = Description of Artificial Sequence: Synthetic coding sequence
  source 1..894: mol_type = other DNA
atgggcctgctgagcgccccaccctgcacccagaggatcacctggaagggcctgctgctgactgtggagacccccaagcccagcatcagcagcagcaagctgaacccccgggaggccatggaggccgtgtccctgacctgtgaccctgagaccccagatgccagctacctgtggtggatgaatggccagagcctgcccatgagccaccggctgcagctgtctgagaccaacagaaccctcttcctgctgggcgtgaccaagtacacagctggcccctatgaatgtgagatccggaaccctgtgtctgccagcagaagtgaccccttcaccctgaacctgctgcccaagctgcccaagccctacatcaccatcaacaacctgaagccccgggagaacaaggatgtgctgaacttcacctgtgagcccaagtctgagaactacacctacatctggtggctgaatggccagagcctgcctgtgagcccccgggtgaagaggcccattgaaaatcgcatcctgatcctgcccagcgtgaccagaaatgaaacaggcccctaccagtgtgagatccgggaccagtatggaggcatccgcagctaccctgtgaccctgaatgtgctgtatggccctgacctgccccgcatctaccccagcttcacctactaccgcagcggggaggtgctgtacctgagctgcagcgctgacagcaaccccccagcccagtacagctggaccatcaatggcaagttccagctgagcggccagaagctgttcatcccccagatcaccaccaagcacagcggcctgtatgcctgcagcgtgagaaattctgccaccgggaaggagagcagcaagtccatgacagtgaaggtgtctgactggaccctgccctag

SEQ ID NO: 165163 - DNA, 1209 bp, synthetic construct
  misc_feature 1..1209: note = Description of Artificial Sequence: Synthetic coding sequence
  source 1..1209: mol_type = other DNA
atgggccccctgcctgcccccagctgcacccagaggatcacctggaagggcctgctgctgacagccagcctgctgaacttctggaacccccccaccacagctgaggtgaccatcgaggcccagccccccaaggtgtctgagggcaaggatgtgctgctgctggtgcacaacctgccccagaacctgcccggctacttctggtacaagggggagatgacagacctgtaccactacatcatctcctacatcgtggatggcaagatcatcatctacggccctgcctacagcggccgggagaccgtgtacagcaatgccagcctgctgatccagaatgtgaccaggaaggatgctggcacctacaccctgcacatcatcaagagaggagatgagacccgggaggagatccgccacttcaccttcaccctgtacctggagacccccaagccctacatcagcagcagcaacctgaacccccgggaggccatggaggccgtgcggctcatctgtgaccctgagaccctggatgccagctacctgtggtggatgaatggccagagcctgcctgtgacccaccggctgcagctgagcaagaccaacagaaccctgtacctgtttggagtgaccaagtacatcgccggcccctatgaatgtgagatccggaaccctgtgtctgccagcagaagtgaccctgtgaccctgaacctgctgcacggccctgacctgccccgcatctaccccagcttcacctactacagaagtggagagaacctggacctgagctgcttcacagagagcaaccccccagctgagtacttctggaccatcaacgggaagttccagcagagcggccagaagctgttcatcccccagatcaccaggaaccacagcggcctgtatgcctgcagcgtgcacaacagcgccaccgggaaggagatcagcaagtccatgacagtgaaggtgtctgggaagtggatcccagccagcctggccgtgggcttctacgtggagagcatctggctgtctgagaagagccaggagaacatcttcatccccagcctgtgccccatgggcaccagcaagagccagatcctgctgctgaacccccccaacctgagcctgcagaccctcttcagcctcttcttctgcttcctgatggctgacctggtgtctggcctgaagaaggtgggccggggcctgtaccagccctag

SEQ ID NO: 165164 - DNA, 1281 bp, synthetic construct
  misc_feature 1..1281: note = Description of Artificial Sequence: Synthetic coding sequence
  source 1..1281: mol_type = other DNA
atgggccccctgcctgcccccagctgcacccagaggatcacctggaagggcctgctgctgacagccagcctgctgaacttctggaacccccccaccacagctgaggtgaccatcgaggcccagccccccaaggtgtctgagggcaaggatgtgctgctgctggtgcacaacctgccccagaacctgcccggctacttctggtacaagggggagatgacagacctgtaccactacatcatctcctacatcgtggatggcaagatcatcatctacggccctgcctacagcggccgggagaccgtgtacagcaatgccagcctgctgatccagaatgtgaccaggaaggatgctggcacctacaccctgcacatcatcaagagaggagatgagacccgggaggagatccgccacttcaccttcaccctgtacctggagacccccaagccctacatcagcagcagcaacctgaacccccgggaggccatggaggccgtgcggctcatctgtgaccctgagaccctggatgccagctacctgtggtggatgaatggccagagcctgcctgtgacccaccggctgcagctgagcaagaccaacagaaccctgtacctgtttggagtgaccaagtacatcgccggcccctatgaatgtgagatccggaaccctgtgtctgccagcagaagtgaccctgtgaccctgaacctgctgcccaagctgcccatcccctacatcaccatcaacaacctgaacccccgggagaacaaggatgtgctggccttcacctgtgagcccaagtctgagaactacacctacatctggtggctgaatggccagagcctgcctgtgtcccctggggtgaagaggcccattgaaaatcgcatcctgatcctgcccagcgtgaccagaaatgaaacaggcccctaccagtgtgagatccgggacagatatggaggcctgcggagcaaccctgtgatcctgaatgtgctgtatggccctgacctgccccgcatctaccccagcttcacctactaccgcagcggggagaacctggacctgagctgcttcacagagagcaaccccccagctgagtacttctggaccatcaatggcaagttccagcagagcggccagaagctgttcatcccccagatcaccaggaaccacagcggcctgtatgcctgcagcgtgcacaacagcgccaccgggaaggagatcagcaagtccatgacagtgaaggtgtctggcccctgccacggggacctgacagagagccagagctag

SEQ ID NO: 165165 - DNA, 723 bp, synthetic construct
  misc_feature 1..723: note = Description of Artificial Sequence: Synthetic coding sequence
  source 1..723: mol_type = other DNA
atgggccccctgcctgcccccagctgcacccagaggatcacctggaagggcctgctgctgacagccagcctgctgaacttctggaacccccccaccacagctgaggtgaccatcgaggcccagccccccaaggtgtctgagggcaaggatgtgctgctgctggtgcacaacctgccccagaacctgcccggctacttctggtacaagggggagatgacagacctgtaccactacatcatctcctacatcgtggatggcaagatcatcatctacggccctgcctacagcggccgggagaccgtgtacagcaatgccagcctgctgatccagaatgtgaccaggaaggatgctggcacctacaccctgcacatcatcaagagaggagatgagacccgggaggagatccgccacttcaccttcaccctgtactacggccctgacctgccccgcatctaccccagcttcacctactaccgcagcggggagaacctggacctgagctgcttcacagagagcaaccccccagctgagtacttctggaccatcaatggcaagttccagcagagcggccagaagctgttcatcccccagatcaccaggaaccacagcggcctgtatgcctgcagcgtgcacaacagcgccaccgggaaggagatcagcaagtccatgacagtgaaggtgtctggcccctgccacggggacctgacagagagccagagctag

SEQ ID NO: 165166 - DNA, 1164 bp, synthetic construct
  misc_feature 1..1164: note = Description of Artificial Sequence: Synthetic coding sequence
  source 1..1164: mol_type = other DNA
atgggccccctgcctgcccccagctgcacccagaggatcacctggaagggcctgctgctgacagccagcctgctgaacttctggtacaagggggagatgacagacctgtaccactacatcatctcctacatcgtggatggcaagatcatcatctacggccctgcctacagcggccgggagaccgtgtacagcaatgccagcctgctgatccagaatgtgaccaggaaggatgctggcacctacaccctgcacatcatcaagagaggagatgagacccgggaggagatccgccacttcaccttcaccctgtacctggagacccccaagccctacatcagcagcagcaacctgaacccccgggaggccatggaggccgtgcggctcatctgtgaccctgagaccctggatgccagctacctgtggtggatgaatggccagagcctgcctgtgacccaccggctgcagctgagcaagaccaacagaaccctgtacctgtttggagtgaccaagtacatcgccggcccctatgaatgtgagatcagaaatcctgtgtctgccagcagaagtgaccctgtgaccctgaacctgctgcccaagctgcccatcccctacatcaccatcaacaacctgaacccccgggagaacaaggatgtgctggccttcacctgtgagcccaagtctgagaactacacctacatctggtggctgaatggccagagcctgcctgtgtccccaggagtgaagaggcccatcgagaaccgcatcctgatcctgcccagcgtgaccagaaatgagaccggcccctaccagtgtgagatccgggacagatatggaggcctgcggagcaaccctgtgatcctgaatgtgctgtatggccctgacctgccccgcatctaccccagcttcacctactacagaagtggagagaacctggacctgagctgcttcacagagagcaaccccccagctgagtacttctggaccatcaacgggaagttccagcagagcggccagaagctgttcatcccccagatcaccaggaaccacagcggcctgtatgcctgcagcgtgcacaacagcgccaccgggaaggagatcagcaagtccatgacagtgaaggtgtctggcccctgccacggggacctgacagagagccagagctag

SEQ ID NO: 165167 - DNA, 1002 bp, synthetic construct
  misc_feature 1..1002: note = Description of Artificial Sequence: Synthetic coding sequence
  source 1..1002: mol_type = other DNA
atgggccccctgcctgcccccagctgcacccagaggatcacctggaagggcctgctgctgacagccagcctgctgaacttctggaacccccccaccacagctgaggtgaccatcgaggcccagccccccaaggtgtctgagggcaaggatgtgctgctgctggtgcacaacctgccccagaacctgcccggctacttctggtacaagggggagatgacagacctgtaccactacatcatctcctacatcgtggatggcaagatcatcatctacggccctgcctacagcggccgggagaccgtgtacagcaatgccagcctgctgatccagaatgtgaccaggaaggatgctggcacctacaccctgcacatcatcaagagaggagatgagacccgggaggagatccgccacttcaccttcaccctgtacagcaagctgcccatcccctacatcaccatcaacaacctgaacccccgggagaacaaggatgtgctggccttcacctgtgagcccaagtctgagaactacacctacatctggtggctgaatggccagagcctgcctgtgtccccaggagtgaagaggcccatcgagaaccgcatcctgatcctgcccagcgtgaccagaaatgagaccggcccctaccagtgtgagatccgggacagatatggaggcctgcggagcaaccctgtgatcctgaatgtgctgtatggccctgacctgccccgcatctaccccagcttcacctactacagaagtggagagaacctggacctgagctgcttcacagagagcaaccccccagctgagtacttctggaccatcaacgggaagttccagcagagcggccagaagctgttcatcccccagatcaccaggaaccacagcggcctgtatgcctgcagcgtgcacaacagcgccaccgggaaggagatcagcaagtccatgacagtgaaggtgtctggcccctgccacggggacctgacagagagccagagctag

SEQ ID NO: 165168 - DNA, 1032 bp, synthetic construct
  misc_feature 1..1032: note = Description of Artificial Sequence: Synthetic coding sequence
  source 1..1032: mol_type = other DNA
atgctgctgctgaagaagcacacagaggacatcagctctgtgtatgagatccgggagcggctgggcagcggggccttcagcgaggtggtgctggcccaggagcggggcagcgcccacctggtggccctgaagtgcatccccaagaaggccctgcggggcaaggaggccctggtggagaatgaaattgctgtgctgcggcgcatcagccaccccaacatcgtggccctggaggatgtgcatgagagccccagccacctgtacctggccatggagctggtgactggaggagagctgtttgaccgcatcatggagcggggcagctacacagagaaggatgccagccacctggtgggccaggtgctgggcgctgtgtcctacctgcacagcctgggcatcgtgcaccgggacctgaagccagagaacctgctgtatgccaccccatttgaggacagcaagatcatggtgtctgactttggcctgagcaagatccaggccggcaacatgctgggcacagcctgtggcaccccaggctacgtggcccctgagctgctggagcagaagccctacggcaaggctgtggatgtgtgggccctgggcgtcatctcctacatcctgctgtgtggctacccacccttctatgatgaaagtgaccctgagctgttcagccagatcctgcgggccagctatgaatttgacagccccttctgggatgacatcagcgagagcgccaaggacttcatccgccacctgctggagcgggacccccagaagcgcttcacctgccagcaggccctgcggcacctgtggatcagcggggacacagcctttgaccgggacatcctgggctctgtgtctgagcagatcaggaagaactttgcccggacccactggaagagggccttcaatgccaccagcttcctgcggcacatcaggaagctgggccagatccctgagggggagggcgccagcgagcagggcatggcccggcacagccacagcggcctgcgggccggccagccccccaagtggtag

SEQ ID NO: 165169 - DNA, 1101 bp, synthetic construct
  misc_feature 1..1101: note = Description of Artificial Sequence: Synthetic coding sequence
  source 1..1101: mol_type = other DNA
atgctgctgctgaagaagcacacagaggacatcagctctgtgtatgagatccgggagcggctgggcagcggggccttcagcgaggtggtgctggcccaggagcggggcagcgcccacctggtggccctgaagtgcatccccaagaaggccctgcggggcaaggaggccctggtggagaatgaaattgctgtgctgcggcgcatcagccaccccaacatcgtggccctggaggatgtgcatgagagccccagccacctgtacctggccatggagctggtgactggaggagagctgtttgaccgcatcatggagcggggcagctacacagagaaggatgccagccacctggtgggccaggtgctgggcgctgtgtcctacctgcacagcctgggcatcgtgcaccgggacctgaagccagagaacctgctgtatgccaccccatttgaggacagcaagatcatggtgtctgactttggcctgagcaagatccaggccggcaacatgctgggcacagcctgtggcaccccaggctatgcagagcctgtgaccctgagcggcatggccgcctgtgtgcctgtgcgggcctctgtgtgcctgtggcccccagcccctgagctgctggagcagaagccctacggcaaggctgtggatgtgtgggccctgggcgtcatctcctacatcctgctgtgtggctacccacccttctatgatgaaagtgaccctgagctgttcagccagatcctgcgggccagctatgaatttgacagccccttctgggatgacatcagcgagagcgccaaggacttcatccgccacctgctggagcgggacccccagaagcgcttcacctgccagcaggccctgcggcacctgtggatcagcggggacacagcctttgaccgggacatcctgggctctgtgtctgagcagatcaggaagaactttgcccggacccactggaagagggccttcaatgccaccagcttcctgcggcacatcaggaagctgggccagatccctgagggggagggcgccagcgagcagggcatggcccggcacagccacagcggcctgcgggccggccagccccccaagtggtag

SEQ ID NO: 165170 - DNA, 1083 bp, synthetic construct
  misc_feature 1..1083: note = Description of Artificial Sequence: Synthetic coding sequence
  source 1..1083: mol_type = other DNA
atgtggaggagagtgtgtggcggcctggccggccggcggcccagcggggacatgctgctgctgaagaagcacacagaggacatcagctctgtgtatgagatccgggagcggctgggcagcggggccttcagcgaggtggtgctggcccaggagcggggcagcgcccacctggtggccctgaagtgcatccccaagaaggccctgcggggcaaggaggccctggtggagaatgaaattgctgtgctgcggcgcatcagccaccccaacatcgtggccctggaggatgtgcatgagagccccagccacctgtacctggccatggagctggtgactggaggagagctgtttgaccgcatcatggagcggggcagctacacagagaaggatgccagccacctggtgggccaggtgctgggcgctgtgtcctacctgcacagcctgggcatcgtgcaccgggacctgaagccagagaacctgctgtatgccaccccatttgaggacagcaagatcatggtgtctgactttggcctgagcaagatccaggccggcaacatgctgggcacagcctgtggcaccccaggctacgtggcccctgagctgctggagcagaagccctacggcaaggctgtggatgtgtgggccctgggcgtcatctcctacatcctgctgtgtggctacccacccttctatgatgaaagtgaccctgagctgttcagccagatcctgcgggccagctatgaatttgacagccccttctgggatgacatcagcgagagcgccaaggacttcatccgccacctgctggagcgggacccccagaagcgcttcacctgccagcaggccctgcggcacctgtggatcagcggggacacagcctttgaccgggacatcctgggctctgtgtctgagcagatcaggaagaactttgcccggacccactggaagagggccttcaatgccaccagcttcctgcggcacatcaggaagctgggccagatccctgagggggagggcgccagcgagcagggcatggcccggcacagccacagcggcctgcgggccggccagccccccaagtggtag

SEQ ID NO: 165171 - DNA, 1032 bp, synthetic construct; identical to SEQ ID NO: 165168
  misc_feature 1..1032: note = Description of Artificial Sequence: Synthetic coding sequence
  source 1..1032: mol_type = other DNA

SEQ ID NO: 165172 - DNA, 1101 bp, synthetic construct; identical to SEQ ID NO: 165169
  misc_feature 1..1101: note = Description of Artificial Sequence: Synthetic coding sequence
  source 1..1101: mol_type = other DNA

SEQ ID NO: 165173 - DNA, 132 bp, synthetic construct
  misc_feature 1..132: note = Description of Artificial Sequence: Synthetic coding sequence
  source 1..132: mol_type = other DNA
atgctgctgctgaagaagcacacagaggacatcagctctgtgtatgagatccgggagcggctgggcagcggggccttcagcgaggtggtgctggcccaggagcggggcagcgcccacctggtggccctgtag

SEQ ID NO: 165174 - DNA, 675 bp, synthetic construct
  misc_feature 1..675: note = Description of Artificial Sequence: Synthetic coding sequence
  source 1..675: mol_type = other DNA
atgctgctgctgaagaagcacacagaggacatcagctctgtgtatgagatccgggagcggctgggcagcggggccttcagcgaggtggtgctggcccaggagcggggcagcgcccacctggtggccctgaagtgcatccccaagaaggccctgcggggcaaggaggccctggtggagaatgaaattgctgtgctgcggcgcatcagccaccccaacatcgtggccctggaggatgtgcatgagagccccagccacctgtacctggccatggagctggtgactggaggagagctgtttgaccgcatcatggagcggggcagctacacagagaaggatgccagccacctggtgggccaggtgctgggcgctgtgtcctacctgcacagcctgggcatcgtgcaccgggacctgaagccagagaacctgctgtatgccaccccatttgaggacagcaagatcatggtgtctgactttggcctgagcaagatccaggccggcaacatgctgggcacagcctgtggcaccccaggctacgtggcccctgagctgctggagcagaagccctacggcaaggctgtggatgtgtgggccctgggcgtcatctcctacatcctgctgtgtggctacccacccttctatgatgaaagtgaccctgagctgttcagccagatctag

SEQ ID NO: 165175 - DNA, 132 bp, synthetic construct; identical to SEQ ID NO: 165173
  misc_feature 1..132: note = Description of Artificial Sequence: Synthetic coding sequence
  source 1..132: mol_type = other DNA

SEQ ID NO: 165176 - DNA, 132 bp, synthetic construct; identical to SEQ ID NO: 165173
  misc_feature 1..132: note = Description of Artificial Sequence: Synthetic coding sequence
  source 1..132: mol_type = other DNA

SEQ ID NO: 165177 - DNA, 261 bp, synthetic construct
  misc_feature 1..261: note = Description of Artificial Sequence: Synthetic coding sequence
  source 1..261: mol_type = other DNA
atgctgctgctgaagaagcacacagaggacatcagctctgtgtatgagatccgggagcggctgggcagcggggccttcagcgaggtggtgctggcccaggagcggggcagcgcccacctggtggccctgaagtgcatccccaagaaggccctgcggggcaaggaggccctggtggagaatgaaattgctgtgctgcggcgcatcagccaccccaacatcgtggccctggaggatgtgcatgagagccccagccacctgtag

SEQ ID NO: 165178 - DNA, 246 bp, synthetic construct
  misc_feature 1..246: note = Description of Artificial Sequence: Synthetic coding sequence
  source 1..246: mol_type = other DNA
tgaatttctggggacacagcctttgaccgggacatcctgggctctgtgtctgagcagatcaggaagaactttgcccggacccactggaagagggccttcaatgccaccagcttcctgcggcacatcaggaagctgggccagatccctgagggggagggcgccagcgagcagggcatggcccggcacagccacagcggcggcccccagggcctgtccttcctgcacggctgctgcgtgctgaggtag

SEQ ID NO: 165179 - DNA, 681 bp, synthetic construct
  misc_feature 1..681: note = Description of Artificial Sequence: Synthetic coding sequence
  source 1..681: mol_type = other DNA
atgctgctgctgaagaagcacacagaggacatcagctctgtgtatgagatccgggagcggctgggcagcggggccttcagcgaggtggtgctggcccaggagcggggcagcgcccacctggtggccctgaagtgcatccccaagaaggccctgcggggcaaggaggccctggtggagaatgaaattgctgtgctgcggcgcatcagccaccccaacatcgtggccctggaggatgtgcatgagagccccagccacctgtacctggccatggagctggtgactggaggagagctgtttgaccgcatcatggagcggggcagctacacagagaaggatgccagccacctggtgggccaggtgctgggcgctgtgtcctacctgcacagcctgggcatcgtgcaccgggacctgaagccagagaacctgctgtatgccaccccatttgaggacagcaagatcatggtgtctgactttggcctgagcaagatccaggccggcaacatgctgggcacagcctgtggcaccccaggctacgtggcccctgagctgctggagcagaagccctacggcaaggctgtggatgtgtgggccctgggcgtcatctcctacatcctgctgtgtggctacccacccttctatgatgaaagtgaccctgagctgttcagccagatcctgaggtag

SEQ ID NO: 165180 - DNA, 1281 bp, synthetic construct
  misc_feature 1..1281: note = Description of Artificial Sequence: Synthetic coding sequence
  source 1..1281: mol_type = other DNA
atggaggccgccttcggccaggtggccggcagcgcctgccccaggagaggaggagagggccgggactggaaggccgagagcctggccgacctgtggcccaagagcagccctggggacagccaccgctggtgcaagggccctggagctggccctgctggcccccagctgcgggaggccgcccgggccagcagcggcctgggcggcggcggccgccaccccagccgcatcccagccatcgccctgcaggacatgctgctgctgaagaagcacacagaggacatcagctctgtgtatgagatccgggagcggctgggcagcggggccttcagcgaggtggtgctggcccaggagcggggcagcgcccacctggtggccctgaagtgcatccccaagaaggccctgcggggcaaggaggccctggtggagaatgaaattgctgtgctgcggcgcatcagccaccccaacatcgtggccctggaggatgtgcatgagagccccagccacctgtacctggccatggagctggtgactggaggagagctgtttgaccgcatcatggagcggggcagctacacagagaaggatgccagccacctggtgggccaggtgctgggcgctgtgtcctacctgcacagcctgggcatcgtgcaccgggacctgaagccagagaacctgctgtatgccaccccatttgaggacagcaagatcatggtgtctgactttggcctgagcaagatccaggccggcaacatgctgggcacagcctgtggcaccccaggctacgtggcccctgagctgctggagcagaagccctacggcaaggctgtggatgtgtgggccctgggcgtcatctcctacatcctgctgtgtggctacccacccttctatgatgaaagtgaccctgagctgttcagccagatcctgcgggccagctatgaatttgacagccccttctgggatgacatcagcgagagcgccaaggacttcatccgccacctgctggagcgggacccccagaagcgcttcacctgccagcaggccctgcggcacctgtggatcagcggggacacagcctttgaccgggacatcctgggctctgtgtctgagcagatcaggaagaactttgcccggacccactggaagagggccttcaatgccaccagcttcctgcggcacatcaggaagctgggccagatccctgagggggagggcgccagcgagcagggcatggcccggcacagccacagcggcctgcgggccggccagccccccaagtggtag

SEQ ID NO: 165181 - DNA, 132 bp, synthetic construct; identical to SEQ ID NO: 165173
  misc_feature 1..132: note = Description of Artificial Sequence: Synthetic coding sequence
  source 1..132: mol_type = other DNA

SEQ ID NO: 165182 - DNA, 4884 bp, synthetic construct
  misc_feature 1..4884: note = Description of Artificial Sequence: Synthetic coding sequence
  source 1..4884: mol_type = other DNA
atgaggctgtggagctgggtgctgcacctgggcctgctgtctgctgccctgggctgcggcctggccgagcggccccggcgggcccggcgggacccccgggccggccggccccccaggcctgctgctggccctgccacctgtgccaccagggctgcccggggcagaagagccagccccccacctcctcctcctcctggaggagcctgggaggccgtgcgggtgccccggcggcggcagcagcgggaggcccggggggccacagaggagcccagcccccccagccgggccctgtacttcagcggccgcggggagcagctgcggctgcgggctgacctggagctgcccagagatgccttcaccctgcaggtgtggctgcgggcagagggcggccagaggagccctgctgtgatcaccggcctgtatgacaagtgcagctacatcagccgggaccggggctgggtggtgggcatccacaccatcagtgaccaggacaacaaggacccccgctacttcttcagcctgaagacagaccgggcccggcaggtgaccaccatcaatgcccacaggagctacctgcccggccagtgggtgtacctggccgccacctatgatggccagttcatgaagctgtatgtgaatggagcccaggtggccaccagcggggagcaggtgggcggcatcttcagccccctgacccagaagtgcaaggtgctgatgctgggcggcagcgccctgaaccacaactaccggggctacatcgagcacttcagcctgtggaaggtggcccggacccagcgggagatcctgagtgacatggagacccatggagcccacacagccctgccccagctgctgctgcaggagaactgggacaacgtgaagcacgcctggagccccatgaaggatggcagcagccccaaggtggagttcagcaatgcccacggcttcctgctggacaccagcctggagccccccctgtgtggccagaccctgtgtgacaacacagaggtgattgccagctacaaccagctgagcagcttccggcagcccaaggtggtgcgctacagagtggtgaacctgtatgaagatgaccacaagaaccccaccgtgacccgggagcaggtggacttccagcaccaccagctggccgaggccttcaagcagtacaacatctcctgggagctggatgtgctggaggtgagcaacagcagcctgcggcggcggctcatcctggccaactgtgacatcagcaagattggagatgagaactgtgaccctgagtgcaaccacaccctgactggacatgatggaggagactgccgccacctgcggcacccagcctttgtgaagaagcagcacaacggggtgtgtgacatggactgcaactatgagcgcttcaactttgatggaggagagtgctgtgaccctgagatcaccaacgtgacccagacctgctttgatcctgacagcccccaccgggcctacctggatgtgaatgagctgaagaacatcctgaagctggatggcagcacccacctgaacatcttctttgccaagagcagcgaggaggagctggccggcgtggccacctggccctgggacaaggaggccctgatgcacctgggcggcatcgtgctgaaccccagcttctacggcatgcctggccacacccacaccatgatccacgagatcggccacagcctgggcctgtaccacgtgttccggggcatcagcgagatccagagctgcagcgacccctgcatggagacagagcccagctttgagaccggggacctgtgcaatgacaccaacccagcccccaagcacaagagctgtggggaccccggccctggaaatgacacctgtggcttccacagcttcttcaacaccccctacaacaacttcatgtcctatgcagatgatgactgcacagacagcttcacccccaaccaggtggccaggatgcactgctacctggacctggtgtaccagggctggcagcccagcaggaagccagcccctgtggccctggccccccaggtgctgggccacaccacagacagcgtgaccctggagtggttcccccccattgatggccacttctttgagcgggagctgggcagcgcctgccacctgtgcctggagggccgcatcctggtgcagtatgccagcaatgccagcagccccatgccctgcagccccagcggccactggagcccccgggaggccgagggccacccagatgtggagcagccctgcaagagctctgtgaggacctggagccccaacagcgctgtgaacccccacacagtgcccccagcctgcccagagccccagggctgctacctggagctggagttcctgtaccccctggtgcctgagagcctgaccatctgggtgacctttgtgtccacagactgggacagcagcggggctgtgaatgacatcaagctgctggccgtgtctgggaagaacatcagcctgggcccccagaatgtgttctgtgatgtgcccctgaccatccggctgtgggatgtgggggaggaggtgtatggcatccagatctacaccctggatgagcacctggagattgatgctgccatgctgaccagcacagctgacacccccctgtgcctgcagtgcaagcccctgaagtacaaggtggtgcgggacccccccctgcagatggatgtggccagcatcctgcacctgaacaggaagtttgtggacatggacctgaacctgggctctgtgtaccagtactgggtgatcaccatctctggaacagaggagagcgagcccagccctgctgtgacctacatccacggcagcggctactgtggagatggcatcatccagaaggaccagggcgagcagtgtgatgacatgaacaagatcaatggagatggctgcagcctcttctgccggcaggaggtgtccttcaactgcattgatgagcccagccgctgctacttccatgatggagatggagtgtgtgaggagtttgagcagaagaccagcatcaaggactgtggggtgtacaccccccagggcttcctggaccagtgggccagcaatgcctctgtgagccaccaggaccagcagtgccccggctgggtgatcatcggccagcctgctgccagccaggtgtgcaggaccaaggtgattgacctgtctgagggcatcagccagcacgcctggtacccctgcaccatctcctacccctacagccagctggcccagaccaccttctggctgcgggcctacttcagccagcccatggtggccgccgccgtcatcgtgcacctggtgacagatggcacctactacggggaccagaagcaggagaccatctctgtgcagctgctggacaccaaggaccagagccatgacctgggcctgcacgtgctgagctgcaggaacaaccccctcatcatccctgtggtgcatgacctgagccagcccttctaccacagccaggccgtgcgggtgtccttcagcagccccctggtggccatcagcggcgtggccctgcggagctttgacaactttgatcctgtgaccctgagcagctgccagagaggagagacctacagccctgctgagcagagctgtgtgcactttgcctgtgagaagacagactgcccagagctggccgtggagaatgccagcctgaactgcagcagcagtgaccgctaccacggggcccagtgcaccgtgtcctgcaggacaggctacgtgctgcagatcagaagagatgatgagctgatcaagagccagacaggccccagcgtgacagtgacctgcacagagggcaagtggaacaagcaggtggcctgtgagcctgtggactgcagcatcccagaccaccaccaggtgtatgctgccagcttcagctgcccagagggcaccaccttcggcagccagtgcagcttccagtgccgccacccagcccagctgaagggcaacaacagcctgctgacctgcatggaggatggcctgtggagcttccctgaggccctgtgtgagctgatgtgcctggcccctcctcctgtgcccaatgctgacctgcagacagcccgctgccgggagaacaagcacaaggtgggcagcttctgcaagtacaagtgcaagccaggctaccacgtgcccggcagcagcaggaagagcaagaagagggccttcaagacccagtgcacccaggacggctcctggcaggagggcgcctgtgtgcctgtgacctgtgaccccccaccacccaagttccacggcctgtaccagtgcaccaacggcttccagttcaacagtgaatgtcgcatcaagtgtgaagattctgatgccagccagggcctgggcagcaatgtcatccactgcaggaaggatggcacctggaatggcagcttccacgtgtgccaggagatgcagggccagtgcagcgtgcccaatgagctgaacagcaacctgaagctgcagtgcccagatggctacgccatcggctctgaatgtgccaccagctgcctggaccacaacagcgagagcatcatcctgcccatgaatgtgacagtgcgggacatcccccactggctgaaccccaccagggtggagcgggtggtgtgcacagctggcctgaagtggtacccccacccagccctgatccactgtgtgaagggctgtgagcccttcatgggagacaactactgtgatgccatcaacaacagagccttctgcaactatgatggaggagactgctgcaccagcacagtgaagaccaagaaggtgacccccttccccatgagctgtgacctgcagggcgactgtgcctgccgggacccccaggcccaggagcacagcaggaaggacctgcggggctacagccacggctag

SEQ ID NO: 165183 - DNA, 1701 bp, synthetic construct
  misc_feature 1..1701: note = Description of Artificial Sequence: Synthetic coding sequence
  source 1..1701: mol_type = other DNA
atggactgcaactatgagcgcttcaactttgatggaggagagtgctgtgaccctgagatcaccaacgtgacccagacctgctttgatcctgacagcccccaccgggcctacctggatgtgaatgagctgaagaacatcctgaagctggatggcagcacccacctgaacatcttctttgccaagagcagcgaggaggagctggccggcgtggccacctggccctgggacaaggaggccctgatgcacctggatgatgactgcacagacagcttcacccccaaccaggtggccaggatgcactgctacctggacctggtgtaccagggctggcagcccagcaggaagccagcccctgtggccctggccccccaggtgctgggccacaccacagacagcgtgaccctggagtggttcccccccattgatggccacttctttgagcgggagctgggcagcgcctgccacctgtgcctggagggccgcatcctggtgcagtatgccagcaatgccagcagccccatgccctgcagccccagcggccactggagcccccgggaggccgagggccacccagatgtggagcagccctgcaagagctctgtgaggacctggagccccaacagcgctgtgaacccccacacagtgcccccagcctgcccagagccccagggctgctacctggagctggagttcctgtaccccctggtgcctgagagcctgaccatctgggtgacctttgtgtccacagactgggacagcagcggggctgtgaatgacatcaagctgctggccgtgtctgggaagaacatcagcctgggcccccagaatgtgttctgtgatgtgcccctgaccatccggctgtgggatgtgggggaggaggtgtatggcatccagatctacaccctggatgagcacctggagattgatgctgccatgctgaccagcacagctgacacccccctgtgcctgcagtgcaagcccctgaagtacaaggtggtgcgggacccccccctgcagatggatgtggccagcatcctgcacctgaacaggaagtttgtggacatggacctgaacctgggctctgtgtaccagtactgggtgatcaccatctctggaacagaggagagcgagcccagccctgctgtgacctacatccacggcagcggctactgtggagatggcatcatccagaaggaccagggcgagcagtgtgatgacatgaacaagatcaatggagatggctgcagcctcttctgccggcaggaggtgtccttcaactgcattgatgagcccagccgctgctacttccatgatggagatggagtgtgtgaggagtttgagcagaagaccagcatcaaggactgtggggtgtacaccccccagggcttcctggaccagtgggccagcaatgcctctgtgagccaccaggaccagcagtgccccggctgggtgatcatcggccagcctgctgccagccaggtgtgcaggaccaaggtgattgacctgtctgagggcatcagcgcctgcctggtgcccctgcaccaccagctgcccatcttccctgctggcagtgaccacttcctggcccctggggtcttcttcagcaccaacggctgccgcagctgccactgccccccaggagatggctgggacatcctgtggggccccaaggccggggaccaccagagagctgctgcctag

SEQ ID NO: 165184 - DNA, 1998 bp, synthetic construct
  misc_feature 1..1998: note = Description of Artificial Sequence: Synthetic coding sequence
  source 1..1998: mol_type = other DNA
atgaacaagatcaatggagatggctgcagcctcttctgccggcaggaggtgtccttcaactgcattgatgagcccagccgctgctacttccatgatggagatggagtgtgtgaggagtttgagcagaagaccagcatcaaggactgtggggtgtacaccccccagggcttcctggaccagtgggccagcaatgcctctgtgagccaccaggaccagcagtgccccggctgggtgatcatcggccagcctgctgccagccaggtgtgcaggaccaaggtgattgacctgtctgagggcatcagccagcacgcctggtacccctgcaccatctcctacccctacagccagctggcccagaccaccttctggctgcgggcctacttcagccagcccatggtggccgccgccgtcatcgtgcacctggtgacagatggcacctactacggggaccagaagcaggagaccatctctgtgcagctgctggacaccaaggaccagagccatgacctgggcctgcacgtgctgagctgcaggaacaaccccctcatcatccctgtggtgcatgacctgagccagcccttctaccacagccaggccgtgcgggtgtccttcagcagccccctggtggccatcagcggcgtggccctgcggagctttgacaactttgatcctgtgaccctgagcagctgccagagaggagagacctacagccctgctgagcagagctgtgtgcactttgcctgtgagaagacagactgcccagagctggccgtggagaatgccagcctgaactgcagcagcagtgaccgctaccacggggcccagtgcaccgtgtcctgcaggacaggctacgtgctgcagatcagaagagatgatgagctgatcaagagccagacaggccccagcgtgacagtgacctgcacagagggcaagtggaacaagcaggtggcctgtgagcctgtggactgcagcatcccagaccaccaccaggtgtatgctgccagcttcagctgcccagagggcaccaccttcggcagccagtgcagcttccagtgccgccacccagcccagctgaagggcaacaacagcctgctgacctgcatggaggatggcctgtggagcttccctgaggccctgtgtgagctgatgtgcctggcccctcctcctgtgcccaatgctgacctgcagacagcccgctgccgggagaacaagcacaaggtgggcagcttctgcaagtacaagtgcaagccaggctaccacgtgcccggcagcagcaggaagagcaagaagagggccttcaagacccagtgcacccaggacggctcctggcaggagggcgcctgtgtgcctgtgacctgtgaccccccaccacccaagttccacggcctgtaccagtgcaccaacggcttccagttcaacagtgaatgtcgcatcaagtgtgaagattctgatgccagccagggcctgggcagcaatgtcatccactgcaggaaggatggcacctggaatggcagcttccacgtgtgccaggagatgcagggccagtgcagcgtgcccaatgagctgaacagcaacctgaagctgcagtgcccagatggctacgccatcggctctgaatgtgccaccagctgcctggaccacaacagcgagagcatcatcctgcccatgaatgtgacagtgcgggacatcccccactggctgaaccccaccagggtggagcgggtggtgtgcacagctggcctgaagtggtacccccacccagccctgatccactgtgtgaagggctgtgagcccttcatgggagacaactactgtgatgccatcaacaacagagccttctgcaactatgatggaggagactgctgcaccagcacagtgaagaccaagaaggtgacccccttccccatgagctgtgacctgcagggcgactgtgcctgccgggacccccaggcccaggagcacagcaggaaggacctgcggggctacagccacggctag

SEQ ID NO: 165185 - DNA, 4449 bp, synthetic construct
  misc_feature 1..4449: note = Description of Artificial Sequence: Synthetic coding sequence
  source 1..4449: mol_type = other DNA
atgaggaaggaccggctgctgcacctgtgcctggtgctgctgctgatcctgctgagcgccagtgacagcaacagcacagagccccagtacatggtgctggtgcccagcctgctgcacacagaggcccccaagaagggctgtgtgctgctgagccacctgaatgagaccgtgacagtgtctgccagcctggagagcggccgggagaacagaagcctcttcacagacctggtggccgagaaggacctcttccactgtgtgtccttcaccctgccccgcatcagcgccagcagcgaggtggccttcctgagcatccagatcaagggccccacccaggacttcaggaagaggaacacagtgctggtgctgaacacccagagcctggtgtttgtgcagacagacaagcccatgtacaagccaggccagacagtgcgcttccgggtggtgtctgtggatgagaacttccggcccagaaatgagctgatccccctcatctacctggagaaccccaggaggaaccgcatcgcccagtggcagagcctgaagctggaggccggcatcaaccagctgtccttccccctgagcagcgagcccatccagggcagctacagagtggtggtgcagacagagagcggcggccgcatccagcaccccttcaccgtggaggagtttgtgctgcccaagtttgaggtgaaggtgcaggtgcccaagatcatcagcatcatggatgagaaggtgaacatcaccgtgtgtggggagtacacctacggcaagcctgtgcccggcctggccaccgtgtccctgtgcaggaagctgagccgggtgctgaactgtgacaagcaggaggtgtgtgaggagttcagccagcagctgaacagcaatggctgcatcacccagcaggtgcacaccaagatgctgcagatcaccaacacaggctttgagatgaagctgcgggtggaggcccgcatccgggaggagggcacagacctggaggtgacagccaaccgcatcagcgagatcaccaacatcgtgtccaagctgaagtttgtgaaggtggacagccacttccggcagggcatccccttctttgcccaggtgctgctggtggatggaaaaggagtgcccatccccaacaagctgttcttcatctctgtgaatgatgccaactactacagcaatgccaccaccaatgagcagggcctggcccagttcagcatcaacaccaccagcatctctgtgaacaagctgtttgtgcgggtcttcaccgtgcaccccaacctgtgcttccactacagctgggtggccgaggaccaccagggcgcccagcacacagccaacagagtcttcagcctgagcggcagctacatccacctggagcctgtggccggcaccctgccctgtggccacacagagaccatcacagcccactacaccctgaaccggcaggccatgggagagctgtctgagctgtccttccactacctgatcatggccaagggcgtgattgtgcgcagcggcacccacaccctgcctgtggagagcggggacatgaagggcagctttgccctgtccttccctgtggagagtgatgtggcccccatcgccaggatgttcatctttgccatcctgcctgatggagaggtggtgggggacagcgagaagtttgaaattgagaactgcctggccaacaaggtggacctgtccttcagccctgcccagagccccccagccagccacgcccacctgcaggtggccgccgccccccagagcctgtgtgccctgcgggctgtggaccagagcgtgctgctgatgaagccagaggccgagctgtctgtgtcctctgtgtacaacctgctgactgtgaaggacctgaccaacttcccagacaacgtggaccagcaggaggaggagcagggccactgcccccggcccttcttcatccacaacggggccatctacgtgcccctgagcagcaatgaggccgacatctacagcttcctgaagggcatgggcctgaaggtgttcaccaacagcaagatcaggaagcccaagagctgcagcgtcatccccagcgtgtctgctggagctgtgggccagggctactatggagctggcctgggcgtggtggagcggccctacgtgccccagctgggcacctacaacgtcatccccctgaacaatgagcagagcagcggccctgtgcctgagaccgtgcgcagctacttccctgagacctggatctgggagctggtggccgtgaacagcagtggagtggccgaggtgggcgtgacagtgcctgacaccatcacagagtggaaggccggggccttctgcctgtctgaagatgctggcctgggcatcagcagcacagccagcctgcgggccttccagcccttctttgtggagctgaccatgccctacagcgtcatccggggggaggtgttcaccctgaaggccaccgtgctgaactacctgcccaagtgcatccgggtgtctgtgcagctgaaggccagccctgccttcctggccagccagaacaccaagggggaggagagctactgcatctgtggaaatgaaaggcagaccctgtcctggacagtgacccccaagaccctgggcaatgtgaacttctctgtgtctgctgaggccatgcagagcctggagctgtgtggaaatgaggtggtggaggtgcctgagatcaagaggaaggacaccgtcatcaagaccctgctggtggaggccgagggcatcgagcaggagaagaccttcagctccatgacctgtgccagcggggccaacgtgtctgagcagctgagcctgaagctgcccagcaatgtggtgaaggagagcgcccgggccagcttctctgtgctgggggacatcctgggcagcgccatgcagaacatccagaacctgctgcagatgccctacggctgtggggagcagaacatggtgctgtttgcccccaacatctacgtgctgaactacctgaatgagacccagcagctgacccaggagatcaaggccaaggctgtgggctacctgatcaccggctaccagaggcagctgaactacaagcaccaggacggcagctacagcaccttcggggagagatatggcaggaaccagggcaacacctggctgacagcctttgtgctgaagacctttgcccaggcccggagctacatcttcattgatgaggcccacatcacccagagcctgacctggctgagccagatgcagaaggacaatggctgcttccgcagcagcggcagcctgctgaacaatgccatcaagggcggcgtggaggatgaggccaccctgagcgcctacgtgaccatcgccctgctggagatccccctgcctgtgaccaaccccatcgtgagaaatgccctcttctgcctggagagcgcctggaatgtggccaaggagggcacccacggcagccacgtgtacaccaaggccctgctggcctatgccttcagcctgctgggcaagcagaaccagaaccgggagatcctgaacagcctggacaaggaggccgtgaaggaggacaacctggtgcactgggagcggccccagaggcccaaggcccctgtgggccacctgtaccagacccaggcccccagcgctgaggtggagatgaccagctatgtgctgctggcctacctgacagcccagcctgcccccaccagcggggacctgaccagcgccaccaacatcgtgaagtggatcatgaagcagcagaatgcccagggcggcttcagcagcacccaggacacagtggtggccctgcacgccctgagccgctacggggccgccaccttcaccaggacagagaagacagcccaggtgacagtgcaggacagccagaccttcagcaccaacttccaggtggacaacaacaacctgctgctgctgcagcagatcagcctgcctgagctgcctggagaatatgtgatcaccgtgactggagagcgctgtgtgtacctgcagacctccatgaagtacaacatcctgcctgagaaggaggacagcccctttgccctgaaggtgcagacagtgccccagacctgtgatggccacaaggcccacaccagcttccagatcagcctgaccatctcctacacaggcaacagacctgccagcaacatggtgattgtggatgtgaagatggtgtctggcttcatccccctgaagcccaccgtgaagatgctggagaggagcagctctgtgtccaggacagaggtgagcaacaaccacgtgctgatctacgtggagcaggtgaccaaccagaccctgtccttctccttcatggtgctgcaggacatccctgtgggggacctgaagccagccatcgtgaaggtgtatgactactatgaaacagatgagagcgtggtggccgagtacatcgccccctgcagcacagacacagaacatggaaatgtgtag

SEQ ID NO: 165186 - DNA, 3807 bp, synthetic construct
  misc_feature 1..3807: note = Description of Artificial Sequence: Synthetic coding sequence
  source 1..3807: mol_type = other DNA
atgtctgagagctacagaaggaccaccttccctgtgcgcttccgggtggtgtctgtggatgagaacttccggcccagaaatgaactcatccccctcatctacctggagaaccccaggaggaacagaattgcccagtggcagagcctgaagctggaggccggcatcaaccagctgtccttccccctgagcagcgagcccatccagggcagctacagagtggtggtgcagacagaaagtggcggccgcatccagcaccccttcaccgtggaggagtttgtgctgcccaagtttgaggtgaaggtgcaggtgcccaagatcatcagcatcatggatgagaaggtgaacatcaccgtgtgtggggagtacacctacggcaagcctgtgcccggcctggccaccgtgtccctgtgcaggaagctgagccgggtgctgaactgtgacaagcaggaggtgtgtgaggagttcagccagcagctgaacagcaatggctgcatcacccagcaggtgcacaccaagatgctgcagatcaccaacacaggctttgagatgaagctgcgggtggaggcccgcatccgggaggagggcacagacctggaggtgacagccaaccgcatcagcgagatcaccaacatcgtgtccaagctgaagtttgtgaaggtggacagccacttccggcagggcatccccttctttgcccaggtgctgctggtggatggcaagggcgtgcccatccccaacaagctgttcttcatctctgtgaatgatgccaactactacagcaatgccaccaccaatgagcagggcctggcccagttcagcatcaacaccaccagcatctctgtgaacaagctgtttgtgcgggtcttcaccgtgcaccccaacctgtgcttccactacagctgggtggccgaggaccaccagggcgcccagcacacagccaacagagtcttcagcctgagcggcagctacatccacctggagcctgtggccggcaccctgccctgtggccacacagagaccatcacagcccactacaccctgaaccggcaggccatgggagagctgtctgagctgtccttccactacctgatcatggccaagggcgtcatcgtgcgcagcggcacccacaccctgcctgtggagagcggggacatgaagggcagctttgccctgtccttccctgtggagagtgatgtggcccccatcgccaggatgttcatctttgccatcctgcctgatggagaggtggtgggggacagcgagaagtttgaaattgagaactgcctggccaacaaggtggacctgtccttctccccagcccagagccccccagccagccacgcccacctgcaggtggccgccgccccccagagcctgtgtgccctgcgggctgtggaccagagcgtgctgctgatgaagccagaggccgagctgtctgtgtcctctgtgtacaacctgctgactgtgaaggacctgaccaacttcccagacaacgtggaccagcaggaggaggagcagggccactgcccccggcccttcttcatccacaatggagccatctacgtgcccctgagcagcaatgaagctgacatctacagcttcctgaagggcatgggcctgaaggtgttcaccaacagcaagatcaggaagcccaagagctgcagcgtcatccccagcgtgtctgctggagctgtgggccagggctactacggggccggcctgggcgtggtggagcggccctacgtgccccagctgggcacctacaacgtcatccccctgaacaatgagcagagcagcggccctgtgcctgagaccgtgcgcagctacttccctgagacctggatctgggagctggtggccgtgaacagcagcggcgtggccgaggtgggcgtgacagtgcctgacaccatcacagagtggaaggccggggccttctgcctgtctgaagatgctggcctgggcatcagcagcacagccagcctgcgggccttccagcccttctttgtggagctgaccatgccctacagcgtcatccggggggaggtgttcaccctgaaggccaccgtgctgaactacctgcccaagtgcatccgggcagagggcatcgagcaggagaagaccttcagctccatgacctgtgccagcggggccaacgtgtctgagcagctgagcctgaagctgcccagcaatgtggtgaaggagagcgcccgggccagcttctctgtgctgggggacatcctgggcagcgccatgcagaacatccagaacctgctgcagatgccctacggctgtggggagcagaacatggtgctgtttgcccccaacatctacgtgctgaactacctgaatgagacccagcagctgacccaggagatcaaggccaaggctgtgggctacctgatcaccggctaccagaggcagctgaactacaagcaccaggacggcagctacagcaccttcggggagagatatggcaggaaccagggcaacacctggctgacagcctttgtgctgaagacctttgcccaggcccggagctacatcttcattgatgaggcccacatcacccagagcctgacctggctgagccagatgcagaaggacaatggctgcttccgcagcagcggcagcctgctgaacaatgccatcaagggcggcgtggaggatgaggccaccctgagcgcctacgtgaccatcgccctgctggagatccccctgcctgtgaccaaccccatcgtgagaaatgccctcttctgcctggagagcgcctggaatgtggccaaggagggcacccacggcagccacgtgtacaccaaggccctgctggcctatgccttcagcctgctgggcaagcagaaccagaaccgggagatcctgaacagcctggacaaggaggccgtgaaggaggacaacctggtgcactgggagcggccccagaggcccaaggcccctgtgggccacctgtaccagacccaggcccccagcgctgaggtggagatgaccagctatgtgctgctggcctacctgacagcccagcctgcccccaccagcggggacctgaccagcgccaccaacatcgtgaagtggatcatgaagcagcagaatgcccagggcggcttcagcagcacccaggacacagtggtggccctgcacgccctgagccgctacggggccgccaccttcaccaggacagagaagacagcccaggtgacagtgcaggacagccagaccttcagcaccaacttccaggtggacaacaacaacctgctgctgctgcagcagatcagcctgcctgagctgcctggagaatatgtgatcaccgtgactggagagcgctgtgtgtacctgcagacctccatgaagtacaacatcctgcctgagaaggaggacagcccctttgccctgaaggtgcagacagtgccccagacctgtgatggccacaaggcccacaccagcttccagatcagcctgaccatctcctacacaggcaacagacctgccagcaacatggtgattgtggatgtgaagatggtgtctggcttcatccccctgaagcccaccgtgaagatgctggagaggagcagctctgtgtccaggacagaggtgagcaacaaccacgtgctgatctacgtggagcaggtgaccaaccagaccctgtccttctccttcatggtgctgcaggacatccctgtgggggacctgaagccagccatcgtgaaggtgtatgactactatgaaacagatgagagcgtggtggccgagtacatcgccccctgcagcacagacacagaacatggaaatgtgtag

SEQ ID NO: 165187 - DNA, 660 bp, synthetic construct
  misc_feature 1..660: note = Description of Artificial Sequence: Synthetic coding sequence
  source 1..660: mol_type = other DNA
atggtgaagtacttcctgggccagagcgtgctgcggagctcctgggaccaggtgtttgctgccttctggcagcgctaccccaacccctacagcaagcacgtgctgacagaagatattgtgcaccgggaggtgaccccagaccagaagctgctgagccggcggctgctgaccaagaccaacaggatgccccgctgggccgagcggctcttccctgccaacgtggcccacagcgtgtatgtgctggaggacagcatcgtggacccccagaaccagaccatgaccaccttcacctggaacatcaaccacgcccggctgatggtggtggaggagcgctgtgtgtactgtgtgaacagcgacaacagcggctggacagagatcagaagagaggcctgggtgagcagcagcctgtttggagtgtccagagctgtgcaggagtttggcctggcccgcttcaagagcaatgtgaccaagaccatgaagggctttgagtacatcctggccaagctgcagggcgaggcccccagcaagaccctggtggagacagccaaggaggccaaggagaaggccaaggagacagccctggccgccacagagaaggccaaggacctggccagcaaggccgccaccaagaagcagcagcagcagcagcagtttgtgtag

SEQ ID NO: 165188 - DNA, 1770 bp, synthetic construct
  misc_feature 1..1770: note = Description of Artificial Sequence: Synthetic coding sequence
  source 1..1770: mol_type = other DNA
atgagcagcagctactggagcgagaccagcagcagcagctgtggcacccagcagctgcctgaggtgctgcagtgccagccccagcactaccactgctaccaccagagcagccaggcccagcagcccccagagaagaatgtggtgtatgagcgggtgaggacctacagcggccccatgaacaaggtggtgcaggccctggaccccttcaacagccgggaggtgctgagccccctgaagaccaccagcagctaccagaacctggtgtggagcgaccacagccaggagctgcacagccccaccctgaagatcagcacctgtgcccccagcaccctgcacatcacccagaacacagagcaggagctgcacagccccaccgtgaagctgaccacctacccccagaccaccatcagaaaatatgtggtgcagaaccctgagcaggagcccctgagccagttcctgcggggcagccacttcttccctggcaacaacgtcatctatgagaagaccatcaggaaggtggagaagctgaacacagaccagggctgccacccccaggcccagtgccaccaccacatcatccagcagccccaggtgatccacagcgcccactggcagcagcctgacagcagccagcagatccaggccatcactggaaacaaccccatcagcacccacatcggaaatgagctgtgccacagcggcagcagccagatctgtgagcaggtgatcatccaggatgatggccctgagaagctggacccccgctactttggagagctgctggccgacctgagcaggaagaacacagacctgtaccactgcctgctggagcacctgcagagaattggaggcagcaagcaggactttgagagcacagatgaaagtgaggacatcgagagcctcatccccaagggcctgtctgagttcaccaagcagcagatccgctacatcctgcagatgaggggcatgtctgacaagagcctgcggctggtgctgagcaccttcagcaacatccgggaggagctgggccacctgcagaatgacatgaccagcctggagaatgacaagatgaggctggagaaggacctgtccttcaaggacacccagctgaaggagtatgaggagctgctggcctctgtgcgggccaacaaccaccagcagcagcagggcctgcaggacagcagcagcaagtgccaggccctggaggagaacaacctgagcctgcggcacaccctgagtgacatggagtaccgcctgaaggagctggagtactgcaagaggaacctggagcaggagaaccagaacctgaggatgcaggtgtctgagacctgcaccggccccatgctgcaggccaagatggatgagatcggcaaccactacacagagatggtgaagaacctgaggatggagaaggaccgggagatctgccgcctgcggagccagctgaaccagtaccacaaggatgtgtccaagcgggagggcagctgcagcgacttccagttcaagctgcacgagctgaccagcctgctggaggagaaggacagcctcatcaagaggcagagcgaggagctgagcaagctgcggcaggagatctacagcagccacaaccagcccagcactggaggccgcaccaccatcaccaccaagaagtaccgcacccagtaccccatcctgggcctgctgtatgatgattatgagtacatccccccaggcagcgagacccagaccatcgtgattgagaagacagaggacaagtacacctgcccctag

SEQ ID NO: 165189 - DNA, 921 bp, synthetic construct
  misc_feature 1..921: note = Description of Artificial Sequence: Synthetic coding sequence
  source 1..921: mol_type = other DNA
atgagcagcagctactggagcgagaccagcagcagcagctgtggcacccagcagctgcctgaggtgctgcagtgccagccccagcactaccactgctaccaccagagcagccaggcccagcagcccccagagaagaatgtggtgtatgagcgggtgaggacctacagcggccccatgaacaaggtggtgcaggccctggaccccttcaacagccgggaggtgctgagccccctgaagaccaccagcagctaccagaacctggtgtggagcgaccacagccaggagctgcacagccccaccctgaagatcagcacctgtgcccccagcaccctgcacatcacccagaacacagagcaggagctgcacagccccaccgtgaagctgaccacctacccccagaccaccatcagaaaatatgtggtgcagaaccctgagcaggagcccctgagccagttcctgcggggcagccacttcttccctggcaacaacgtcatctatgagaagaccatcaggaaggtggagaagctgaacacagaccagggctgccacccccaggcccagtgccaccaccacatcatccagcagccccaggtgatccacagcgcccactggcagcagcctgacagcagccagcagatccaggccatcactggaaacaaccccatcagcacccacatcggaaatgagctgtgccacagcggcagcagccagatctgtgagcaggtgatcatccaggatgatggccctgagaagctggacccccgctactttggagagctgctggccgacctgagcaggaagaacacagacctgtaccactgcctgctggagcacctgcagagaattggaaggaagcagagcctgagcagcacctacaccatccgccacggcatccagaccaagaggacaggcatcctgtag

SEQ ID NO: 165190 - DNA, 1788 bp, synthetic construct
  misc_feature 1..1788: note = Description of Artificial Sequence: Synthetic coding sequence
  source 1..1788: mol_type = other DNA
atgagcagcagctactggagcgagaccagcagcagcagctgtggcacccagcagctgcctgaggtgctgcagtgccagccccagcactaccactgctaccaccagagcagccaggcccagcagcccccagagaagaatgtggtgtatgagcgggtgaggacctacagcggccccatgaacaaggtggtgcaggccctggaccccttcaacagccgggaggtgctgagccccctgaagaccaccagcagctaccagaacctggtgtggagcgaccacagccaggagctgcacagccccaccctgaagatcagcacctgtgcccccagcaccctgcacatcacccagaacacagagcaggagctgcacagccccaccgtgaagctgaccacctacccccagaccaccatcagaaaatatgtggtgcagaaccctgagcaggagcccctgagccagttcctgcggggcagccacttcttccctggcaacaacgtcatctatgagaagaccatcaggaaggtggagaagctgaacacagaccagggctgccacccccaggcccagtgccaccaccacatcatccagcagccccaggtgatccacagcgcccactggcagcagcctgacagcagccagcagatccaggccatcactggaaacaaccccatcagcacccacatcggaaatgagctgtgccacagcggcagcagccagatctgtgagcaggtgatcatccaggatgatggccctgagaagctggacccccgctactttggagagctgctggccgacctgagcaggaagaacacagacctgtaccactgcctgctggagcacctgcagagaattggaggcagcaagcaggactttgagagcacagatgaaagtgaggacatcgagagcctcatccccaagggcctgtctgagttcaccaagcagcagatccgctacatcctgcagatgaggggcatgtctgacaagagcctgcggctggtgctgagcaccttcagcaacatccgggaggagctgggccacctgcagaatgacatgaccagcctggagaatgacaagatgaggctggagaaggacctgtccttcaaggacacccagctgaaggagtatgaggagctgctggcctctgtgcgggccaacaaccaccagcagcagcagggcctgcaggacagcagcagcaagtgccaggccctggaggagaacaacctgagcctgcggcacaccctgagtgacatggagtaccgcctgaaggagctggagtactgcaagaggaacctggagcaggagaaccagaacctgaggatgcaggtgtctgagacctgcaccggccccatgctgcaggccaagatggatgagatcggcaaccactacacagagatggtgaagaacctgaggatggagaaggaccgggagatctgccgcctgcggagccagctgaaccagtaccacaaggatgtgtccaagcgggagggcagctgcagcgacttccagttcaagctgcacgagctgaccagcctgctggaggagaaggacagcctcatcaagaggcagagcgaggagctgagcaagctgcggcaggagatctacagcagccacaaccagcccagcactggaggccgcaccaccatcaccaccaagaagtaccgcacccagtaccccatcctgggcctgctgtatgatgattatgagtacatccccccaggcagcgagacccagaccatcgtgattgagaagacagaggacaagtacacctgtgtgagcagcctgggccacttctag

SEQ ID NO: 165191 - DNA, 921 bp, synthetic construct
  misc_feature 1..921: note = Description of Artificial Sequence: Synthetic coding sequence
  source 1..921: mol_type = other DNA
atggccagccgctggtggcgctggaggcggggctgctcctggaagccagctgcccggagccctggccctggcagccctggccgggccggccccctgggccccagcgctgctgctgaggtgcgggcccaggtgcacaggaggaagggcctggacctgagccagatcccctacatcaacctggtgaagcacctgaccagcgcctgccccaacgtgtgccgcatcagccgcttccaccacaccaccccagacagcaagacccacagcggggagaagtacacagaccccttcaagctgggctggagggacctgaagggcctgtatgaggacatcaggaaggagctgctgatcagcaccagcgagctgaaggagatgtctgagtactactttgatggcaagggcaaggccttccggcccatcatcgtggccctgatggcccgggcctgcaacatccaccacaacaacagcagacatgtgcaggccagccagagggccatcgccctgattgctgagatgatccacacagccagcctggtgcatgatgatgtgattgatgatgccagcagcagaagaggcaagcacacagtgaacaagatctggggcgagaagaaggctgtgctggccggggacctgatcctgtctgctgccagcatcgccctggcccgcatcggcaacaccaccgtcatcagcatcctgacccaggtgattgaggacctggtgcggggggagttcctgcagctgggcagcaaagaaaatgaaaatgaaagatttgcccactacctggagaagaccttcaagaagacagccagcctgattgccaacagctgcaaggctgtgttccccagaaatgaatgttatgaccacgccaccgtgcagtttgcctggcgctgccggcagagcagcacagtgtgcaccacagaatag

SEQ ID NO: 165192 - DNA, 1248 bp, synthetic construct
  misc_feature 1..1248: note = Description of Artificial Sequence: Synthetic coding sequence
  source 1..1248: mol_type = other DNA
atggccagccgctggtggcgctggaggcggggctgctcctggaagccagctgcccggagccctggccctggcagccctggccgggccggccccctgggccccagcgctgctgctgaggtgcgggcccaggtgcacaggaggaagggcctggacctgagccagatcccctacatcaacctggtgaagcacctgaccagcgcctgccccaacgtgtgccgcatcagccgcttccaccacaccaccccagacagcaagacccacagcggggagaagtacacagaccccttcaagctgggctggagggacctgaagggcctgtatgaggacatcaggaaggagctgctgatcagcaccagcgagctgaaggagatgtctgagtactactttgatggcaagggcaaggccttccggcccatcatcgtggccctgatggcccgggcctgcaacatccaccacaacaacagcagacatgtgcaggccagccagagggccatcgccctgattgctgagatgatccacacagccagcctggtgcatgatgatgtgattgatgatgccagcagcagaagaggcaagcacacagtgaacaagatctggggcgagaagaaggctgtgctggccggggacctgatcctgtctgctgccagcatcgccctggcccgcatcggcaacaccaccgtcatcagcatcctgacccaggtgattgaggacctggtgcggggggagttcctgcagctgggcagcaaagaaaatgaaaatgaaagatttgcccactacctggagaagaccttcaagaagacagccagcctgattgccaacagctgcaaggctgtgtctgtgctgggctgcccagaccctgtggtgcatgaaattgcctaccagtatggcaagaatgtgggcatcgccttccagctgattgatgatgtgctggacttcaccagctgcagcgaccagatgggcaagcccaccagcgctgacctgaagctgggcctggccactggacctgtgctgtttgcctgccagcagtttcctgagatgaatgccatgatcatgaggcgcttcagcctgcctggagatgtggaccgggcccggcagtatgtgctgcagagtgatggagtgcagcagaccacctacctggcccagcagtactgccacgaggccatccgggagatcagcaagctgcggcccagccctgagagagatgccctgatccagctgtctgaaattgtgctgacccgggacaagtag

SEQ ID NO: 165193 - DNA, 1131 bp, synthetic construct
  misc_feature 1..1131: note = Description of Artificial Sequence: Synthetic coding sequence
  source 1..1131: mol_type = other DNA
atgcctgcccacgtgcacaggaggaagggcctggacctgagccagatcccctacatcaacctggtgaagcacctgaccagcgcctgccccaacgtgtgccgcatcagccgcttccaccacaccaccccagacagcaagacccacagcggggagaagtacacagaccccttcaagctgggctggagggacctgaagggcctgtatgaggacatcaggaaggagctgctgatcagcaccagcgagctgaaggagatgtctgagtactactttgatggcaagggcaaggccttccggcccatcatcgtggccctgatggcccgggcctgcaacatccaccacaacaacagccgccacgtgcaggccagccagagggccatcgccctgattgctgagatgatccacacagccagcctggtgcatgatgatgtgattgatgatgccagcagccggcggggcaagcacacagtgaacaagatctggggcgagaagaaggctgtgctggccggggacctgatcctgtctgctgccagcatcgccctggccagaattggcaacaccaccgtcatcagcatcctgacccaggtgattgaggacctggtgcggggggagttcctgcagctgggcagcaaagaaaatgaaaatgaaagatttgcccactacctggagaagaccttcaagaagacagccagcctcatcgccaacagctgcaaggctgtgtctgtgctgggctgcccagaccctgtggtgcatgagatcgcctaccagtatggcaagaatgtgggcatcgccttccagctgattgatgatgtgctggacttcaccagctgcagcgaccagatgggcaagcccaccagcgctgacctgaagctgggcctggccaccggccctgtgctgtttgcctgccagcagtttcctgagatgaatgccatgatcatgaggcgcttcagcctgcctggagatgtggaccgggcccggcagtatgtgctgcagagtgatggagtgcagcagaccacctacctggcccagcagtactgccacgaggccatccgggagatcagcaagctgcggcccagccctgagagagatgccctgatccagctgtctgagatcgtgctgacccgggacaagtag

SEQ ID NO: 165194 - DNA, 723 bp, synthetic construct
  misc_feature 1..723: note = Description of Artificial Sequence: Synthetic coding sequence
  source 1..723: mol_type = other DNA
atgaacttccggcagctgctgctgcacctgccccgctacctgggcgccagcggcagcccccggcggctgtggtggagccccagcctggacaccatcagctctgtgggctcctggaggggccgcagcagcaagagccctgcccactggaaccaggtggtgtctgaggccgagaagatcgtgggctaccccaccagcttcatgagcctgcgctgcctgctgagtgatgagctgagcaacatcgccatgcaggtgaggaagctggtgggcacccagcaccccctgctgaccacagcccggggcctggtgcatgacagctggaacagcctgcagctgcggggcctggtggtgctgctgatcagcaaggctgctggccccagctctgtgaacaccagctgccagaactatgacatggtgtctggcatctacagctgccagaggagcctggccgagatcacagagctgatccacatcgccctgctggtgcaccggggcatcgtgaacctgaatgagctgcagagcagtgatggccccctgaaggacatgcagtttggaaacaagatcgccatcctgagcggggacttcctgctggccaatgcctgcaatggcctggccctgctgcagaacaccaagagcttctccttcaacggccccatcgccatctaccagatgggagactgtgagagcgcctggatcctgagcaagcacccccgggccctgtcctag

SEQ ID NO: 165195 - DNA, 270 bp, synthetic construct
  misc_feature 1..270: note = Description of Artificial Sequence: Synthetic coding sequence
  source 1..270: mol_type = other DNA
atggagctggccaagcatgatgctgaggtgcagaacatggccttccagtatggcaagcacatggccatgagccacaagatcaacagtgatgtgcagcccttcatcaaggagaagaccagtgacagcatgaccttcaacctgaacagcgcccctgtggtgctgcaccaggagttcctgggccgggacctgtggatcaagcagatcggggagagcagcagcacagaggtgcagctgagcaacttccagcagatgctgctgagcaccctgtag

SEQ ID NO: 165196 - DNA, 1200 bp, synthetic construct
  misc_feature 1..1200: note = Description of Artificial Sequence: Synthetic coding sequence
  source 1..1200: mol_type = other DNA
atgaacttccggcagctgctgctgcacctgccccgctacctgggcgccagcggcagcccccggcggctgtggtggagccccagcctggacaccatcagctctgtgggctcctggaggggccgcagcagcaagagccctgcccactggaaccaggtggtgtctgaggccgagaagatcgtgggctaccccaccagcttcatgagcctgcgctgcctgctgagtgatgagctgagcaacatcgccatgcaggtgaggaagctggtgggcacccagcaccccctgctgaccacagcccggggcctggtgcatgacagctggaacagcctgcagctgcggggcctggtggtgctgctgatcagcaaggctgctggccccagctctgtgaacaccagctgccagaactatgacatggtgtctggcatctacagctgccagaggagcctggccgagatcacagagctgatccacatcgccctgctggtgcaccggggcatcgtgaacctgaatgagctgcagagcagtgatggccccctgaaggacatgcagtttggaaacaagatcgccatcctgagcggggacttcctgctggccaatgcctgcaatggcctggccctgctgcagaacaccaaggtggtggagctgctggccagcgccctgatggacctggtgcagggcgtgtaccacgagaacagcaccagcaaggagagctacatcacagatgacatcggcatcagcacctggaaggagcagaccttcctgagccatggagccctgctggccaagagctgccaggccgccatggagctggccaagcatgatgctgaggtgcagaacatggccttccagtatggcaagcacatggccatgagccacaagatcaacagtgatgtgcagcccttcatcaaggagaagaccagtgacagcatgaccttcaacctgaacagcgcccctgtggtgctgcaccaggagttcctgggccgggacctgtggatcaagcagatcggggaggcccaggagaagggccgcctggactatgccaagctgcgggagcgcatcaaggccggcaagggcgtgaccagcgccatcgacctgtgccgctaccacggcaacaaggccctggaggccctggagagcttcccccccagcgaggcccggagcgccctggagaacatcgtgtttgctgtgacccgcttctcctag

SEQ ID NO: 165197 - DNA, 243 bp, synthetic construct
  misc_feature 1..243: note = Description of Artificial Sequence: Synthetic coding sequence
  source 1..243: mol_type = other DNA
gtgcagaacatggccttccagtatggcaagcacatggccatgagccacaagatcaacagtgatgtgcagcccttcatcaaggagaagaccagtgacagcatgaccttcaacctgaacagcgcccctgtggtgctgcaccaggagttcctgggccgggacctgtggatcaagcagattggagagagcagcagcacagaggtgcagctgagcaacttccagcagatgctgctgagcaccctgtag

SEQ ID NO: 165198 - DNA, 894 bp, synthetic construct
  misc_feature 1..894: note = Description of Artificial Sequence: Synthetic coding sequence
  source 1..894: mol_type = other DNA
atgaacttccggcagctgctgctgcacctgccccgctacctgggcgccagcggcagcccccggcggctgtggtggagccccagcctggacaccatcagctctgtgggctcctggaggggccgcagcagcaagagccctgcccactggaaccaggtggtgtctgaggccgagaagatcgtgggctaccccaccagcttcatgagcctgcgctgcctgctgagtgatgagctgagcaacatcgccatgcaggtgaggaagctggtgggcacccagcaccccctgctgaccacagcccggggcctggtgcatgacagctggaacagcctgcagctgcggggcctggtggtgctgctgatcagcaaggctgctggccccagctctgtgaacaccagctgccagaactatgacatggtgtctggcatctacagctgccagaggagcctggccgagatcacagagctgatccacatcgccctgctggtgcaccggggcatcgtgaacctgaatgagctgcagagcagtgatggccccctgaaggacatgcagtttggaaacaagatcgccatcctgagcggggacttcctgctggccaatgcctgcaatggcctggccctgctgcagaacaccaaggtggtggagctgctggccagcgccctgatggacctggtgcagggcgtgtaccacgagaacagcaccagcaaggcccaggagaagggccgcctggactatgccaagctgcgggagcgcatcaaggccggcaagggcgtgaccagcgccatcgacctgtgccgctaccacggcaacaaggccctggaggccctggagagcttcccccccagcgaggcccggagcgccctggagaacatcgtgtttgctgtgacccgcttctcctag

SEQ ID NO: 165199 - DNA, 882 bp, synthetic construct
  misc_feature 1..882: note = Description of Artificial Sequence: Synthetic coding sequence
  source 1..882: mol_type = other DNA
atgggccgggtggtggccgagctggtgagcagcctgctgggcctgtggctgctgctgtgcagctgtggctgcccagagggcgctgagctgcgggcccccccagacaagatcgccatcatcggggccggcatcggcggcaccagcgctgcctactacctgcggcagaagtttgggaaggatgtgaagattgacctgtttgagcgggaggaggtgggcggccgcctggccaccatgatggtgcagggccaggagtatgaagctgggggcagcgtcatccaccccctgaacctgcacatgaagagatttgtgaaggacctgggcctgtctgctgtgcaggccagcggcggcctgctgggcatctacaacggggagaccctggtgtttgaggagagcaactggttcatcatcaacgtcatcaagctggtgtggaggtatggcttccagagcctgaggatgcacatgtgggtggaggatgtgctggacaagttcatgaggatctaccgctaccagagccatgactatgccttcagctctgtggagaagctgctgcacgccctgggcggagatgacttcctgggcatgctgaacagaaccctgctggagaccctgcagaaggccggcttcagcgagaagttcctgaatgagatgattgcccctgtgatgagggtgaactacggccagagcacagacatcaatgcctttgtgggcgctgtgtccctgagctgcagcgacagcggcctgtgggccgtggagggcggcaacaagctggtgtgcagcggcctgctgcaggccagcaagagcaacctgatcagcggctctgtgatgtacatcgaggagaagaccaagaccaagtacacagtgctgggcctgtgccccctgtag

SEQ ID NO: 165200 - DNA, 1518 bp, synthetic construct
  misc_feature 1..1518: note = Description of Artificial Sequence: Synthetic coding sequence
  source 1..1518: mol_type = other DNA
atgggccgggtggtggccgagctggtgagcagcctgctgggcctgtggctgctgctgtgcagctgtggctgcccagagggcgctgagctgcgggcccccccagacaagatcgccatcatcggggccggcatcggcggcaccagcgctgcctactacctgcggcagaagtttgggaaggatgtgaagattgacctgtttgagcgggaggaggtgggcggccgcctggccaccatgatggtgcagggccaggagtatgaagctgggggcagcgtcatccaccccctgaacctgcacatgaagagatttgtgaaggacctgggcctgtctgctgtgcaggccagcggcggcctgctgggcatctacaacggggagaccctggtgtttgaggagagcaactggttcatcatcaacgtcatcaagctggtgtggaggtatggcttccagagcctgaggatgcacatgtgggtggaggatgtgctggacaagttcatgaggatctaccgctaccagagccatgactatgccttcagctctgtggagaagctgctgcacgccctgggcggagatgacttcctgggcatgctgaacagaaccctgctggagaccctgcagaaggccggcttcagcgagaagttcctgaatgagatgattgcccctgtgatgagggtgaactacggccagagcacagacatcaatgcctttgtgggcgctgtgtccctgagctgcagcgacagcggcctgtgggccgtggagggcggcaacaagctggtgtgcagcggcctgctgcaggccagcaagagcaacctgatcagcggctctgtgatgtacatcgaggagaagaccaagaccaagtacacaggcaaccccaccaagatgtatgaggtggtgtaccagattggaacagagaccaggagtgacttctatgacatcgtgctggtggccacccccctgaacaggaagatgagcaacatcaccttcctgaactttgatcctcccatcgaggagttccaccagtactaccagcacatcgtgaccaccctggtgaagggggagctgaacaccagcatcttcagcagccggcccatcgacaagtttggcctgaacacagtgctgaccacagacaacagcgacctcttcatcaacagcattggaattgtgcccagcgtgcgggagaaggaggaccctgagcccagcacagatggcacctacgtgtggaagatcttcagccaggagaccctgaccaaggcccagatcctgaagctgttcctgtcctatgactatgctgtgaagaagccctggctggcctacccccactacaagcccccagagaagtgccccagcatcatcctgcatgaccggctgtactacctgaatggaattgaatgtgccgccagcgccatggagatgtctgccatcgccgcccacaatgctgccctgctggcctaccaccgctggaatggccacacagacatgattgaccaggacggcctgtatgagaagctgaagacagagctgtag

SEQ ID NO: 165201 - DNA, 1287 bp, synthetic construct
  misc_feature 1..1287: note = Description of Artificial Sequence: Synthetic coding sequence
  source 1..1287: mol_type = other DNA
atgatggtgcagggccaggagtatgaggccggcggcagcgtcatccaccccctgaacctgcacatgaagagatttgtgaaggacctgggcctgtctgctgtgcaggccagcggcggcctgctgggcatctacaatggagagaccctggtgtttgaggagagcaactggttcatcatcaacgtcatcaagctggtgtggaggtatggcttccagagcctgaggatgcacatgtgggtggaggatgtgctggacaagttcatgaggatctaccgctaccagagccatgactatgccttcagctctgtggagaagctgctgcacgccctgggcggagatgacttcctgggcatgctgaacagaaccctgctggagaccctgcagaaggccggcttcagcgagaagttcctgaatgagatgattgcccctgtgatgagggtgaactacggccagagcacagacatcaatgcctttgtgggcgctgtgtccctgagctgcagcgacagcggcctgtgggccgtggagggcggcaacaagctggtgtgcagcggcctgctgcaggccagcaagagcaacctgatcagcggctctgtgatgtacatcgaggagaagaccaagaccaagtacacaggcaaccccaccaagatgtatgaggtggtgtaccagatcggcacagagaccaggagtgacttctatgacatcgtgctggtggccacccccctgaacaggaagatgagcaacatcaccttcctgaactttgacccccccatcgaggagttccaccagtactaccagcacatcgtgaccaccctggtgaagggggagctgaacaccagcatcttcagcagccggcccatcgacaagtttggcctgaacacagtgctgaccacagacaacagcgacctcttcatcaacagcatcggcatcgtgcccagcgtgcgggagaaggaggaccctgagcccagcacagatggcacctacgtgtggaagatcttcagccaggagaccctgaccaaggcccagatcctgaagctgttcctgtcctatgactatgctgtgaagaagccctggctggcctacccccactacaagcccccagagaagtgccccagcatcatcctgcatgaccggctgtactacctgaatggaattgaatgtgccgccagcgccatggagatgtctgccatcgccgcccacaatgctgccctgctggcctaccaccgctggaatggccacacagacatgattgaccaggacggcctgtatgagaagctgaagacagagctgtag

SEQ ID NO: 165202 - DNA, 1284 bp, synthetic construct
  misc_feature 1..1284: note = Description of Artificial Sequence: Synthetic coding sequence
  source 1..1284: mol_type = other DNA
atggtgcagggccaggagtatgaagctgggggcagcgtcatccaccccctgaacctgcacatgaagagatttgtgaaggacctgggcctgtctgctgtgcaggccagcggcggcctgctgggcatctacaacggggagaccctggtgtttgaggagagcaactggttcatcatcaacgtcatcaagctggtgtggaggtatggcttccagagcctgaggatgcacatgtgggtggaggatgtgctggacaagttcatgaggatctaccgctaccagagccatgactatgccttcagctctgtggagaagctgctgcacgccctgggcggagatgacttcctgggcatgctgaacagaaccctgctggagaccctgcagaaggccggcttcagcgagaagttcctgaatgagatgattgcccctgtgatgagggtgaactacggccagagcacagacatcaatgcctttgtgggcgctgtgtccctgagctgcagcgacagcggcctgtgggccgtggagggcggcaacaagctggtgtgcagcggcctgctgcaggccagcaagagcaacctgatcagcggctctgtgatgtacatcgaggagaagaccaagaccaagtacacaggcaaccccaccaagatgtatgaggtggtgtaccagattggaacagagaccaggagtgacttctatgacatcgtgctggtggccacccccctgaacaggaagatgagcaacatcaccttcctgaactttgatcctcccatcgaggagttccaccagtactaccagcacatcgtgaccaccctggtgaagggggagctgaacaccagcatcttcagcagccggcccatcgacaagtttggcctgaacacagtgctgaccacagacaacagcgacctcttcatcaacagcattggaattgtgcccagcgtgcgggagaaggaggaccctgagcccagcacagatggcacctacgtgtggaagatcttcagccaggagaccctgaccaaggcccagatcctgaagctgttcctgtcctatgactatgctgtgaagaagccctggctggcctacccccactacaagcccccagagaagtgccccagcatcatcctgcatgaccggctgtactacctgaatggaattgaatgtgccgccagcgccatggagatgtctgccatcgccgcccacaatgctgccctgctggcctaccaccgctggaatggccacacagacatgattgaccaggacggcctgtatgagaagctgaagacagagctgtag

SEQ ID NO: 165203 - DNA, 1485 bp, synthetic construct
  misc_feature 1..1485: note = Description of Artificial Sequence: Synthetic coding sequence
  source 1..1485: mol_type = other DNA
atggcccgggccgcccccctgctggccgccctgacagccctgctggccgctgctgctgctggaggagatgcccctcctgggaagattgctgtggtgggcgccggcatcggcggcagcgctgtggcccacttcctgcagcagcacttcggcccccgggtgcagattgatgtgtatgagaagggcaccgtgggcggccgcctggccaccatctctgtgaacaagcagcactatgaaagtggagctgccagcttccacagcctgagcctgcacatgcaggactttgtgaagctgctgggcctgcggcacagaagagaggtggtgggccgcagcgccatctttggaggagagcacttcatgctggaggagacagactggtacctgctgaacctcttccggctgtggtggcactacggcatctccttcctgcggctgcagatgtgggtggaggaggtgatggagaagttcatgaggatctacaagtaccaggcccacggctacgccttctctggagtggaggagctgctgtacagcctgggggagagcacctttgtgaacatgacccagcacagcgtggccgagagcctgctgcaggtgggcgtgacccagcgcttcattgatgatgtggtgtctgctgtgctgcgggccagctatggccagagcgctgccatgcctgcctttgctggggccatgagcctggccggggcccagggcagcctgtggagcgtggagggcggcaacaagctggtgtgcagcggcctgctgaagctgaccaaggccaacgtcatccacgccaccgtgacctctgtgaccctgcacagcacagagggcaaggccctgtaccaggtggcctatgaaaatgaggtgggcaacagcagtgacttctatgacatcgtggtgattgccacccccctgcacctggacaacagcagcagcaacctgacctttgctggcttccacccccccattgatgatgtgcagggcagcttccagcccaccgtggtgtccctggtgcacggctacctgaacagcagctacttcggcttcccagaccccaagctgttcccctttgccaacatcctgaccacagacttccccagcttcttctgcaccctggacaacatctgccctgtgaacatcagcgccagcttccggaggaagcagccccaggaggccgctgtgtggagggtgcagagccccaagcccctcttccgcacccagctgaagaccctcttccgcagctactacagcgtgcagacagctgagtggcaggcccaccccctgtatggcagccggcccaccctgcccaggtttgccctgcatgaccagctgttctacctgaatgccctggagtgggccgccagctctgtggaggtgatggctgtggccgccaagaatgtggccctgctggcctacaaccgctggtaccaggacctggacaagattgaccagaaggacctgatgcacaaggtgaagacagagctgtag

SEQ ID NO: 165204 - DNA, 531 bp, synthetic construct
  misc_feature 1..531: note = Description of Artificial Sequence: Synthetic coding sequence
  source 1..531: mol_type = other DNA
atgaaggtgctgctgtgtgacctgctgctgctgagcctcttcagcagcgtcttcagcagctgccagagggactgcctgacctgccaggagaagctgcacccagccctggacagctttgacctggaggtgtgcatcctggagtgtgaggagaaggtgttccccagccccctgtggaccccctgcaccaaggtgatggcccggagctcctggcagctgagccctgctgcccctgagcacgtggccgccgccctgtaccagccccgggccagcgagatgcagcacctgcggaggatgccccgggtgcgcagcctcttccaggagcaggaggagcctgagcccggcatggaggaggccggggagatggagcagaagcagctgcagaagagatttggaggcttcaccggggccaggaagagcgccaggaagctggccaaccagaagcgcttcagcgagttcatgaggcagtacctggtgctgtccatgcagagcagccagaggaggaggaccctgcaccagaatggaaatgtgtag

SEQ ID NO: 165205 - DNA, 465 bp, synthetic construct
  misc_feature 1..465: note = Description of Artificial Sequence: Synthetic coding sequence
  source 1..465: mol_type = other DNA
atgaaggtgctgctgtgtgacctgctgctgctgagcctcttcagcagcgtcttcagcagctgccagagggactgcctgacctgccaggagaagctgcacccagccctggacagctttgacctggaggtgtgcatcctggagtgtgaggagaaggtgttccccagccccctgtggaccccctgcaccaaggtgatggcccggagctcctggcagctgagccctgctgcccctgagcacgtggccgccgccctgtaccagccccgggccagcgagatgcagcacctgcggaggatgccccgggtgcgcagcctcttccaggagcaggaggagcctgagcccggcatggaggaggccggggagatggagcagaagcagctgcagaagagatttggaggcttcaccggggccaggaagagcgccaggaagctggccaaccagaagcgcttcagcgagttcatgaggtag

SEQ ID NO: 165206 - DNA, 1230 bp, synthetic construct
  misc_feature 1..1230: note = Description of Artificial Sequence: Synthetic coding sequence
  source 1..1230: mol_type = other DNA
atgacagagctgcctgcccccctgagctacttccagaatgcccagatgtctgaggacaaccacctgagcaacacagtgcgcagccagaatgacaaccgggagcggcaggagcacaatgacagaagaagcctgggccaccctgagcccctgagcaatggccggccccagggcaacagccggcaggtggtggagcaggatgaggaggaggatgaggagctgaccctgaagtatggagccaagcacgtgatcatgctgtttgtgcctgtgaccctgtgcatggtggtggtggtggccaccatcaagtctgtgtccttctacaccaggaaggatggccagctgatctacacccccttcacagaggacacagagaccgtgggccagagggccctgcacagcatcctgaatgctgccatcatgatctctgtgattgtggtgatgaccatcctgctggtggtgctgtacaagtaccgctgctacaaggtgattcatgcctggctgatcatcagcagcctgctgctgctcttcttcttctccttcatctacctgggggaggtgttcaagacctacaacgtggccgtggactacatcaccgtggccctgctgatctggaactttggagtggtgggcatgatcagcatccactggaagggccccctgcggctgcagcaggcctacctgatcatgatcagcgccctgatggccctggtgttcatcaagtacctgcctgagtggacagcctggctgatcctggccgtcatctctgtgtatgacctggtggccgtgctgtgccccaagggccccctgaggatgctggtggagacagcccaggagagaaatgagaccctcttccctgccctgatctacagcagcaccatggtgtggctggtgaacatggccgagggggaccctgaggcccagaggagagtgtccaagaacagcaagtacaatgctgagcggggcgtgaagctgggcctgggggacttcatcttctacagcgtgctggtgggcaaggccagcgccacagccagcggggactggaacaccaccatcgcctgctttgtggccatcctgattggcctgtgcctgaccctgctgctgctggccatcttcaagaaggccctgcctgccctgcccatcagcatcaccttcggcctggtgttctactttgccacagactacctggtgcagcccttcatggaccagctggccttccaccagttctacatctag

SEQ ID NO: 165207 - DNA, 1404 bp, synthetic construct
  misc_feature 1..1404: note = Description of Artificial Sequence: Synthetic coding sequence
  source 1..1404: mol_type = other DNA
atgacagagctgcctgcccccctgagctacttccagaatgcccagatgtctgaggacaaccacctgagcaacacagtgcgcagccagaatgacaaccgggagcggcaggagcacaatgacagaagaagcctgggccaccctgagcccctgagcaatggccggccccagggcaacagccggcaggtggtggagcaggatgaggaggaggatgaggagctgaccctgaagtatggagccaagcacgtgatcatgctgtttgtgcctgtgaccctgtgcatggtggtggtggtggccaccatcaagtctgtgtccttctacaccaggaaggatggccagctgatctacacccccttcacagaggacacagagaccgtgggccagagggccctgcacagcatcctgaatgctgccatcatgatctctgtgattgtggtgatgaccatcctgctggtggtgctgtacaagtaccgctgctacaaggtgattcatgcctggctgatcatcagcagcctgctgctgctcttcttcttctccttcatctacctgggggaggtgttcaagacctacaacgtggccgtggactacatcaccgtggccctgctgatctggaactttggagtggtgggcatgatcagcatccactggaagggccccctgcggctgcagcaggcctacctgatcatgatcagcgccctgatggccctggtgttcatcaagtacctgcctgagtggacagcctggctgatcctggccgtcatctctgtgtatgacctggtggccgtgctgtgccccaagggccccctgaggatgctggtggagacagcccaggagagaaatgagaccctcttccctgccctgatctacagcagcaccatggtgtggctggtgaacatggccgagggggaccctgaggcccagaggagagtgtccaagaacagcaagtacaatgctgagagcacagagcgggagagccaggacacagtggccgagaatgatgatggcggcttcagcgaggagtgggaggcccagagggacagccacctgggcccccacaggagcaccccagagagcagagctgctgtgcaggagctgagcagcagcatcctggccggggaggaccctgaggagcggggcgtgaagctgggcctgggggacttcatcttctacagcgtgctggtgggcaaggccagcgccacagccagcggggactggaacaccaccatcgcctgctttgtggccatcctgattggcctgtgcctgaccctgctgctgctggccatcttcaagaaggccctgcctgccctgcccatcagcatcaccttcggcctggtgttctactttgccacagactacctggtgcagcccttcatggaccagctggccttccaccagttctacatctag

SEQ ID NO: 165208 - DNA, 1137 bp, synthetic construct
  misc_feature 1..1137: note = Description of Artificial Sequence: Synthetic coding sequence
  source 1..1137: mol_type = other DNA
atgacagagctgcctgcccccctgagctacttccagaatgcccagatgtctgaggacaaccacctgagcaacacagtgcgcagccagaatgacaaccgggagcggcaggagcacaatgacagaagaagcctgggccaccctgagcccctgagcaatggccggccccagggcaacagccggcaggtggtggagcaggatgaggaggaggatgaggagctgaccctgaagtatggagccaagcacgtgatcatgctgtttgtgcctgtgaccctgtgcatggtggtggtggtggccaccatcaagtctgtgtccttctacaccaggaaggatggccagctgatctacacccccttcacagaggacacagagaccgtgggccagagggccctgcacagcatcctgaatgctgccatcatgatctctgtgattgtggtgatgaccatcctgctggtggtgctgtacaagtaccgctgctacaaggtgattcatgcctggctgatcatcagcagcctgctgctgctcttcttcttctccttcatctacctgggggaggtgttcaagacctacaacgtggccgtggactacatcaccgtggccctgctgatctggaactttggagtggtgggcatgatcagcatccactggaagggccccctgcggctgcagcaggcctacctgatcatgatcagcgccctgatggccctggtgttcatcaagtacctgcctgagtggacagcctggctgatcctggccgtcatctctgtgtatgacctggtggccgtgctgtgccccaagggccccctgaggatgctggtggagacagcccaggagagaaatgagaccctcttccctgccctgatctacagcagcaccatggtgtggctggtgaacatggccgagggggaccctgaggcccagaggagagtgtccaagaacagcaagtacaatgctgagcgggcctgcctgcccccagctgccatcaacctgctgagcatcgcccccatggcccccaggctcttcatgcccaagggggcctgccggcccacagcccagaagggcagccacaagaccctgctgcagaggatgatgatggccggctctgtgagaaatggcaagccccggggcaccgtcatctag

SEQ ID NO: 165209 - DNA, 1392 bp, synthetic construct
  misc_feature 1..1392: note = Description of Artificial Sequence: Synthetic coding sequence
  source 1..1392: mol_type = other DNA
atgacagagctgcctgcccccctgagctacttccagaatgcccagatgtctgaggacaaccacctgagcaacaccaatgacaaccgggagcggcaggagcacaatgacagaagaagcctgggccaccctgagcccctgagcaatggccggccccagggcaacagccggcaggtggtggagcaggatgaggaggaggatgaggagctgaccctgaagtatggagccaagcacgtgatcatgctgtttgtgcctgtgaccctgtgcatggtggtggtggtggccaccatcaagtctgtgtccttctacaccaggaaggatggccagctgatctacacccccttcacagaggacacagagaccgtgggccagagggccctgcacagcatcctgaatgctgccatcatgatctctgtgattgtggtgatgaccatcctgctggtggtgctgtacaagtaccgctgctacaaggtgattcatgcctggctgatcatcagcagcctgctgctgctcttcttcttctccttcatctacctgggggaggtgttcaagacctacaacgtggccgtggactacatcaccgtggccctgctgatctggaactttggagtggtgggcatgatcagcatccactggaagggccccctgcggctgcagcaggcctacctgatcatgatcagcgccctgatggccctggtgttcatcaagtacctgcctgagtggacagcctggctgatcctggccgtcatctctgtgtatgacctggtggccgtgctgtgccccaagggccccctgaggatgctggtggagacagcccaggagagaaatgagaccctcttccctgccctgatctacagcagcaccatggtgtggctggtgaacatggccgagggggaccctgaggcccagaggagagtgtccaagaacagcaagtacaatgctgagagcacagagcgggagagccaggacacagtggccgagaatgatgatggcggcttcagcgaggagtgggaggcccagagggacagccacctgggcccccacaggagcaccccagagagcagagctgctgtgcaggagctgagcagcagcatcctggccggggaggaccctgaggagcggggcgtgaagctgggcctgggggacttcatcttctacagcgtgctggtgggcaaggccagcgccacagccagcggggactggaacaccaccatcgcctgctttgtggccatcctgattggcctgtgcctgaccctgctgctgctggccatcttcaagaaggccctgcctgccctgcccatcagcatcaccttcggcctggtgttctactttgccacagactacctggtgcagcccttcatggaccagctggccttccaccagttctacatctag

SEQ ID NO: 165210 - DNA, 555 bp, synthetic construct
  misc_feature 1..555: note = Description of Artificial Sequence: Synthetic coding sequence
  source 1..555: mol_type = other DNA
atgacagagctgcctgcccccctgagctacttccagaatgcccagatgtctgaggacaaccacctgagcaacacagtgcgcagccagaatgacaaccgggagcggcaggagcacaatgacagaagaagcctgggccaccctgagcccctgagcaatggccggccccagggcaacagccggcaggtggtggagcaggatgaggaggaggatgaggagctgaccctgaagtatggagccaagcacgtgatcatgctgtttgtgcctgtgaccctgtgcatggtggtggtggtggccaccatcaagtctgtgtccttctacaccaggaaggatggccagctgatctacacccccttcacagaggacacagagaccgtgggccagagggccctgcacagcatcctgaatgctgccatcatgatctctgtgattgtggtgatgaccatcctgctggtggtgctgtacaagtaccgctgctacaaggtgtccatgaggcacaggagcctgctgagcaccctcttcttcctgtggctgggcatcctggtgacagtgacctag

SEQ ID NO: 165211 - DNA, 1392 bp, synthetic construct; identical to SEQ ID NO: 165209
  misc_feature 1..1392: note = Description of Artificial Sequence: Synthetic coding sequence
  source 1..1392: mol_type = other DNA

SEQ ID NO: 165212 - DNA, 279 bp, synthetic construct
  misc_feature 1..279: note = Description of Artificial Sequence: Synthetic coding sequence
  source 1..279: mol_type = other DNA
atgacagagctgcctgcccccctgagctacttccagaatgcccagatgtctgaggacaaccacctgagcaacaccaatgacaaccgggagcggcaggagcacaatgacagaagaagcctgggccaccctgagcccctgagcaatggccggccccagggcaacagccggcaggtggtggagcaggatgaggaggaggatgaggagctgaccctgaagtatggagccaagcacgtgatcatgctgtttgtgcctgtgaccctgtgcatggtggtggtgtag

SEQ ID NO: 165213 - DNA, 444 bp, synthetic construct
  misc_feature 1..444: note = Description of Artificial Sequence: Synthetic coding sequence
  source 1..444: mol_type = other DNA
atgacagagctgcctgcccccctgagctacttccagaatgcccagatgtctgaggacaaccacctgagcaacaccaatgacaaccgggagcggcaggagcacaatgacagaagaagcctgggccaccctgagcccctgagcaatggccggccccagggcaacagccggcaggtggtggagcaggatgaggaggaggatgaggagctgaccctgaagtatggagccaagcacgtgatcatgctgtttgtgcctgtgaccctgtgcatggtggtggtggtggccaccatcaagtctgtgtccttctacaccaggaaggatggccagctgatctacacccccttcacagaggacacagagaccgtgggccagagggccctgcacagcatcctgaatgctgccatcatgatctctgtgattgtggtgatgaccatcctgctggtgtag

SEQ ID NO: 165214 - DNA, 330 bp, synthetic construct
  misc_feature 1..330: note = Description of Artificial Sequence: Synthetic coding sequence
  source 1..330: mol_type = other DNA
atgacagagctgcctgcccccctgagctacttccagaatgcccagatgtctgaggacaaccacctgagcaacacagtgcgcagccagaatgacaaccgggagcggcaggagcacaatgacagaagaagcctgggccaccctgagcccctgagcaatggccggccccagggcaacagccggcaggtggtggagcaggatgaggaggaggatgaggagctgaccctgaagtatggagccaagcacgtgatcatgctgtttgtgcctgtgaccctgtgcatggtggtggtggtggccaccatcaagtctgtgtccttctacaccaggaagtag

SEQ ID NO: 165215 - DNA, 468 bp, synthetic construct
  misc_feature 1..468: note = Description of Artificial Sequence: Synthetic coding sequence
  source 1..468: mol_type = other DNA
atgacagagctgcctgcccccctgagctacttccagaatgcccagatgtctgaggacaaccacctgagcaacacagtgcgcagccagaatgacaaccgggagcggcaggagcacaatgacagaagaagcctgggccaccctgagcccctgagcaatggccggccccagggcaacagccggcaggtggtggagcaggatgaggaggaggatgaggagctgaccctgaagtatggagccaagcacgtgatcatgctgtttgtgcctgtgaccctgtgcatggtggtggtggtggccaccatcaagtctgtgtccttctacaccaggaaggatggccagctgatctacacccccttcacagaggacacagagaccgtgggccagagggccctgcacagcatcctgaatgctgccatcatgatctctgtgattgtggtgatgaccatcctgctggtggtgctgtacaagtag

SEQ ID NO: 165216 - DNA, 177 bp, synthetic construct
  misc_feature 1..177: note = Description of Artificial Sequence: Synthetic coding sequence
  source 1..177: mol_type = other DNA
atgacagagctgcctgcccccctgagctacttccagaatgcccagatgtctgaggacaaccacctgagcaacaccaatgacaaccgggagcggcaggagcacaatgacagaagaagcctgggccaccctgagcccctgagcaatggccggccccagggcaacagccggcaggtgtag

SEQ ID NO: 165217 - DNA, 279 bp, synthetic construct; identical to SEQ ID NO: 165212
  misc_feature 1..279: note = Description of Artificial Sequence: Synthetic coding sequence
  source 1..279: mol_type = other DNA

SEQ ID NO: 165218 - DNA, 192 bp, synthetic construct
  misc_feature 1..192: note = Description of Artificial Sequence: Synthetic coding sequence
  source 1..192: mol_type = other DNA
atgacagagctgcctgcccccctgagctacttccagaatgcccagatgtctgaggacaaccacctgagcaacaccaatgacaaccgggagcggcaggagcacaatgacagaagaagcctgggccaccctgagcccctgagcaatggccggccccagggcaacagccggcaggtggtggagcaggatgaatag

SEQ ID NO: 165219 - DNA, 276 bp, synthetic construct
  misc_feature 1..276: note = Description of Artificial Sequence: Synthetic coding sequence
  source 1..276: mol_type = other DNA
atgacagagctgcctgcccccctgagctacttccagaatgcccagatgtctgaggacaaccacctgagcaacaccaatgacaaccgggagcggcaggagcacaatgacagaagaagcctgggccaccctgagcccctgagcaatggccggccccagggcaacagccggcaggtggtggagcaggatgaggaggaggatgaggagctgaccctgaagtatggagccaagcacgtgatcatgctgtttgtgcctgtgaccctgtgcatggtggtgtag

SEQ ID NO: 165220 - DNA, 189 bp, synthetic construct
  misc_feature 1..189: note = Description of Artificial Sequence: Synthetic coding sequence
  source 1..189: mol_type = other DNA
atgacagagctgcctgcccccctgagctacttccagaatgcccagatgtctgaggacaaccacctgagcaacaccaatgacaaccgggagcggcaggagcacaatgacagaagaagcctgggccaccctgagcccctgagcaatggccggccccagggcaacagccggcaggtggtggagcaggactag

SEQ ID NO: 165221 - DNA, 300 bp, synthetic construct
  misc_feature 1..300: note = Description of Artificial Sequence: Synthetic coding sequence
  source 1..300: mol_type = other DNA
atgacagagctgcctgcccccctgagctacttccagaatgcccagatgtctgaggacaaccacctgagcaacacagtgcgcagccagaatgacaaccgggagcggcaggagcacaatgacagaagaagcctgggccaccctgagcccctgagcaatggccggccccagggcaacagccggcaggtggtggagcaggatgaggaggaggatgaggagctgaccctgaagtatggagccaagcacgtgatcatgctgtttgtgcctgtgaccctgtgcatggtggtggtggtggccacctag

SEQ ID NO: 165222 - DNA, 408 bp, synthetic construct
  misc_feature 1..408: note = Description of Artificial Sequence: Synthetic coding sequence
  source 1..408: mol_type = other DNA
atgacagagctgcctgcccccctgagctacttccagaatgcccagatgtctgaggacaaccacctgagcaacaccaatgacaaccgggagcggcaggagcacaatgacagaagaagcctgggccaccctgagcccctgagcaatggccggccccagggcaacagccggcaggtggtggagcaggatgaggaggaggatgaggagctgaccctgaagtatggagccaagcacgtgatcatgctgtttgtgcctgtgaccctgtgcatggtggtggtggtggccaccatcaagtctgtgtccttctacaccaggaaggatggccagctgatctacacccccttcacagaggacacagagaccgtgggccagagggccctgcacagcatcctgaatgctgccatcatgtag

SEQ ID NO: 165223 - DNA, 330 bp, synthetic construct
  misc_feature 1..330: note = Description of Artificial Sequence: Synthetic coding sequence
  source 1..330: mol_type = other DNA
atgacagagctgcctgcccccctgagctacttccagaatgcccagatgtctgaggacaaccacctgagcaacaccaatgacaaccgggagcggcaggagcacaatgacagaagaagcctgggccaccctgagcccctgagcaatggccggccccagggcaacagccggcaggtggtggagcaggatgaggaggaggatgaggagctgaccctgaagtatggagccaagcacgtgatcatgctgtttgtgcctgtgaccctgtgcatggtggtggtggtggccaccatcaagtctgtgtccttctacaccaggaaggatggccagctgtag

SEQ ID NO: 165224 - DNA, 1248 bp, synthetic construct
  misc_feature 1..1248: note = Description of Artificial Sequence: Synthetic coding sequence
  source 1..1248: mol_type = other DNA
atgctgaccttcatggccagtgacagcgaggaggaggtgtgtgatgagaggaccagcctgatgtctgctgagagccccacccccaggagctgccaggagggccggcagggcccagaagatggagagaacacagcccagtggaggagccaggagaatgaggaggatggagaggaggaccctgacagatatgtgtgcagcggcgtgcccggccggcccccaggcctggaggaggagctgaccctgaagtatggagccaagcacgtgatcatgctgtttgtgcctgtgaccctgtgcatgattgtggtggtggccaccatcaagtctgtgcgcttctacacagagaagaatggccagctgatctacacccccttcacagaggacacccccagcgtgggccagaggctgctgaacagcgtgctgaacaccctcatcatgatctctgtgattgtggtgatgaccatcttcctggtggtgctgtacaagtaccgctgctacaagttcatccacggctggctgatcatgagcagcctgatgctgctcttcctgttcacctacatctacctgggggaggtgctgaagacctacaacgtggccatggactaccccaccctgctgctgactgtgtggaactttggagctgtgggcatggtgtgcatccactggaagggccccctggtgctgcagcaggcctacctgatcatgatcagcgccctgatggccctggtgttcatcaagtacctgcctgagtggagcgcctgggtgatcctgggcgccatctctgtgtatgctgccatggtgtggacagtgggcatggccaagctggaccccagcagccagggcgccctgcagctgccctatgaccctgagatggaggaggacagctatgacagctttggagagcccagctacccagaggtgtttgagccccccctgaccggctacccaggagaggagctggaggaggaggaggagcggggcgtgaagctgggcctgggggacttcatcttctacagcgtgctggtgggcaaggctgctgccactggaagtggggactggaacaccaccctggcctgctttgtggccatcctgattggcctgtgcctgaccctgctgctgctggccgtgttcaagaaggccctgcctgccctgcccatcagcatcaccttcggcctcatcttctacttcagcacagacaacctggtgcggcccttcatggacaccctggccagccaccagctgtacatctag

SEQ ID NO: 165225 - DNA, 1446 bp, synthetic construct
  misc_feature 1..1446: note = Description of Artificial Sequence: Synthetic coding sequence
  source 1..1446: mol_type = other DNA
atgctggccggcaccgtgcgctttgcccggcactgcctgaagttcttccctgcccagaagccagcctgtgtggactttggagccagccggggccgggccatgctgaccttcatggccagtgacagcgaggaggaggtgtgtgatgagaggaccagcctgatgtctgctgagagccccacccccaggagctgccaggagggccggcagggcccagaagatggagaaaatacagcccagtggaggagccaggagaatgaagaagatggagaagaagatcctgaccgctacgtgtgcagcggcgtgcccggccggcccccaggcctggaggaggagctgaccctgaagtacggggccaagcacgtgatcatgctgtttgtgcctgtgaccctgtgcatgattgtggtggtggccaccatcaagtctgtgcgcttctacacagagaagaatggccagctgatctacacccccttcacagaggacaccccatctgtgggccagaggctgctgaacagcgtgctgaacaccctcatcatgatcagcgtcatcgtggtgatgaccatcttcctggtggtgctgtacaagtaccgctgctacaagttcatccacggctggctgatcatgagcagcctgatgctgctcttcctgttcacctacatctacctgggggaggtgctgaagacctacaacgtggccatggactaccccaccctgctgctgactgtgtggaactttggagctgtgggcatggtgtgcatccactggaagggccccctggtgctgcagcaggcctacctgatcatgatcagcgccctgatggccctggtgttcatcaagtacctgcctgagtggagcgcctgggtgatcctgggcgccatctctgtgtatgacctggtggccgtgctgtgccccaagggccccctgaggatgctggtggagacagcccaggagagaaatgagcccatcttccctgccctgatctacagcagcgccatggtgtggacagtgggcatggccaagctggaccccagcagccagggcgccctgcagctgccctatgaccctgagatggaggaggacagctatgacagctttggagagcccagctacccagaggtgtttgagccccccctgaccggctacccaggagaggagctggaggaggaggaggagcggggcgtgaagctgggcctgggggacttcatcttctacagcgtgctggtgggcaaggctgctgccactggaagtggggactggaacaccaccctggcctgctttgtggccatcctgattggcctgtgcctgaccctgctgctgctggccgtgttcaagaaggccctgcctgccctgcccatcagcatcaccttcggcctcatcttctacttcagcacagacaacctggtgcggcccttcatggacaccctggccagccaccagctgtacatctag

SEQ ID NO: 165226 - DNA, 1347 bp, synthetic construct
  misc_feature 1..1347: note = Description of Artificial Sequence: Synthetic coding sequence
  source 1..1347: mol_type = other DNA
atgctgaccttcatggccagtgacagcgaggaggaggtgtgtgatgagaggaccagcctgatgtctgctgagagccccacccccaggagctgccaggagggccggcagggcccagaagatggagagaacacagcccagtggaggagccaggagaatgaggaggatggagaggaggaccctgacagatatgtgtgcagcggcgtgcccggccggcccccaggcctggaggaggagctgaccctgaagtatggagccaagcacgtgatcatgctgtttgtgcctgtgaccctgtgcatgattgtggtggtggccaccatcaagtctgtgcgcttctacacagagaagaatggccagctgatctacacccccttcacagaggacacccccagcgtgggccagaggctgctgaacagcgtgctgaacaccctcatcatgatctctgtgattgtggtgatgaccatcttcctggtggtgctgtacaagtaccgctgctacaagttcatccacggctggctgatcatgagcagcctgatgctgctcttcctgttcacctacatctacctgggggaggtgctgaagacctacaacgtggccatggactaccccaccctgctgctgactgtgtggaactttggagctgtgggcatggtgtgcatccactggaagggccccctggtgctgcagcaggcctacctgatcatgatcagcgccctgatggccctggtgttcatcaagtacctgcctgagtggagcgcctgggtgatcctgggcgccatctctgtgtatgacctggtggccgtgctgtgccccaagggccccctgaggatgctggtggagacagcccaggagagaaatgagcccatcttccctgccctgatctacagcagcgccatggtgtggacagtgggcatggccaagctggaccccagcagccagggcgccctgcagctgccctatgaccctgagatggaggaggacagctatgacagctttggagagcccagctacccagaggtgtttgagccccccctgaccggctacccaggagaggagctggaggaggaggaggagcggggcgtgaagctgggcctgggggacttcatcttctacagcgtgctggtgggcaaggccgccgccaccggcagcggggactggaacaccaccctggcctgctttgtggccatcctgattggcctgtgcctgaccctgctgctgctggccgtgttcaagaaggccctgcctgccctgcccatcagcatcaccttcggcctcatcttctacttcagcacagacaacctggtgcggcccttcatggacaccctggccagccaccagctgtacatctag

SEQ ID NO: 165227 - DNA, 1446 bp, synthetic construct; identical to SEQ ID NO: 165225
  misc_feature 1..1446: note = Description of Artificial Sequence: Synthetic coding sequence
  source 1..1446: mol_type = other DNA

SEQ ID NO: 165228 - DNA, 1344 bp, synthetic construct
  misc_feature 1..1344: note = Description of Artificial Sequence: Synthetic coding sequence
  source 1..1344: mol_type = other DNA
atgctgaccttcatggccagtgacagcgaggaggaggtgtgtgatgagaggaccagcctgatgtctgctgagagccccacccccaggagctgccaggagggccggcagggcccagaagatggagagaacacagcccagtggaggagccaggagaatgaggaggatggagaggaggaccctgacagatatgtgtgcagcggcgtgcccggccggcccccaggcctggaggaggagctgaccctgaagtatggagccaagcacgtgatcatgctgtttgtgcctgtgaccctgtgcatgattgtggtggtggccaccatcaagtctgtgcgcttctacacagagaagaatggccagctgatctacacccccttcacagaggacacccccagcgtgggccagaggctgctgaacagcgtgctgaacaccctcatcatgatctctgtgattgtggtgatgaccatcttcctggtggtgctgtacaagtaccgctgctacaagttcatccacggctggctgatcatgagcagcctgatgctgctcttcctgttcacctacatctacctgggggaggtgctgaagacctacaacgtggccatggactaccccaccctgctgctgactgtgtggaactttggagctgtgggcatggtgtgcatccactggaagggccccctggtgctgcagcaggcctacctgatcatgatcagcgccctgatggccctggtgttcatcaagtacctgcctgagtggagcgcctgggtgatcctgggcgccatctctgtgtatgacctggtggccgtgctgtgccccaagggccccctgaggatgctggtggagacagcccaggagagaaatgagcccatcttccctgccctgatctacagcagcgccatggtgtggacagtgggcatggccaagctggaccccagcagccagggcgccctgcagctgccctatgaccctgagatggaggacagctatgacagctttggagagcccagctacccagaggtgtttgagccccccctgaccggctacccaggagaggagctggaggaggaggaggagcggggcgtgaagctgggcctgggggacttcatcttctacagcgtgctggtgggcaaggctgctgccactggaagtggggactggaacaccaccctggcctgctttgtggccatcctgattggcctgtgcctgaccctgctgctgctggccgtgttcaagaaggccctgcctgccctgcccatcagcatcaccttcggcctcatcttctacttcagcacagacaacctggtgcggcccttcatggacaccctggccagccaccagctgtacatctag

SEQ ID NO: 165229 - DNA, 390 bp, synthetic construct
  misc_feature 1..390: note = Description of Artificial Sequence: Synthetic coding sequence
  source 1..390: mol_type = other DNA
atgctgaccttcatggccagtgacagcgaggaggaggtgtgtgatgagaggaccagcctgatgtctgctgagagccccacccccaggagctgccaggagggccggcagggcccagaagatggagagaacacagcccagtggaggagccaggagaatgaggaggatggagaggaggaccctgacagatatgtgtgcagcggcgtgcccggccggcccccaggcctggaggaggagctgaccctgaagtatggagccaagcacgtgatcatgctgtttgtgcctgtgaccctgtgcatgattgtggtggtggccaccatcaagtctgtgcgcttctacacagagaagaatggccagctgatctacacccccttcacagaggacaccccctag

SEQ ID NO: 165230 - DNA, 66 bp, synthetic construct
  misc_feature 1..66: note = Description of Artificial Sequence: Synthetic coding sequence
  source 1..66: mol_type = other DNA
atgctgaccttcatggccagtgacagcgaggaggaggtgtgtgatgagaggaccagcctgatgtag

SEQ ID NO: 165231 - DNA, 990 bp, synthetic construct
  misc_feature 1..990: note = Description of Artificial Sequence: Synthetic coding sequence
  source 1..990: mol_type = other DNA
atggcctggaggggctgggcccagaggggctggggctgcggccaggcctggggcgcctctgtgggcggccgcagctgtgaggagctgacagctgtgctgaccccaccccagctgctgggccgccgcttcaacttcttcatccagcagaagtgtggcttcaggaaggcccccaggaaggtggagcccaggagaagtgaccccggcaccagcggggaggcctacaagaggtctgccctgatcccccctgtggaggagaccgtcttctaccccagcccctaccccatccgcagcctcatcaagcccctcttcttcaccgtgggcttcaccggctgtgcctttggatctgctgccatctggcagtatgagagcctgaagagccgggtgcagagctactttgatggcatcaaggctgactggctggacagcatccggccccagaaggagggggacttcaggaaggagatcaacaagtggtggaacaacctgagtgatggccagaggacagtgacaggcatcatcgccgccaacgtgctggtgttctgcctgtggagggtgcccagcctgcagaggaccatgatccgctacttcaccagcaacccagccagcagcgtcatcagcaactttgtgtcctatgtgggcaaggtggccaccggccgctatggccccagcctgggcgccagcggggccatcatgacagtgctggccgctgtgtgcaccaagatccctgagggccgcctggccatcatcttcctgcccatgttcaccttcaccgctggaaatgccctgaaggccatcatcgccatggacacagctggcatgatcctgggctggaagttctttgaccatgctgcccacctgggcggggccctgtttggcatctggtacgtgacctacggccacgagctgatctggaagaaccgggagcccctggtgaagatctggcatgagatccgcaccaacggccccaagaagggcggcggcagcaagtag

SEQ ID NO: 165232 - DNA, 1140 bp, synthetic construct
  misc_feature 1..1140: note = Description of Artificial Sequence: Synthetic coding sequence
  source 1..1140: mol_type = other DNA
atggcctggaggggctgggcccagaggggctggggctgcggccaggcctggggcgcctctgtgggcggccgcagctgtgaggagctgacagctgtgctgaccccaccccagctgctgggccgccgcttcaacttcttcatccagcagaagtgtggcttcaggaaggcccccaggaaggtggagcccaggagaagtgaccccggcaccagcggggaggcctacaagaggtctgccctgatcccccctgtggaggagaccgtcttctaccccagcccctaccccatccgcagcctcatcaagcccctcttcttcaccgtgggcttcaccggctgtgcctttggatctgctgccatctggcagtatgagagcctgaagagccgggtgcagagctactttgatggcatcaaggctgactggctggacagcatccggccccagaaggagggggacttcaggaaggagatcaacaagtggtggaacaacctgagtgatggccagaggacagtgacaggcatcatcgccgccaacgtgctggtgttctgcctgtggagggtgcccagcctgcagaggaccatgatccgctacttcaccagcaacccagccagcaaggtgctgtgcagccccatgctgctgagcaccttcagccacttcagcctcttccacatggccgccaacatgtatgtgctgtggagcttcagcagcagcatcgtgaacatcctgggccaggagcagttcatggctgtgtacctgtctgctggggtcatcagcaactttgtgtcctatgtgggcaaggtggccaccggccgctatggccccagcctgggcgccagcggggccatcatgacagtgctggccgctgtgtgcaccaagatccctgagggccgcctggccatcatcttcctgcccatgttcaccttcaccgctggaaatgccctgaaggccatcatcgccatggacacagctggcatgatcctgggctggaagttctttgaccatgctgcccacctgggcggggccctgtttggcatctggtacgtgacctacggccacgagctgatctggaagaaccgggagcccctggtgaagatctggcatgagatccgcaccaacggccccaagaagggcggcggcagcaagtag

SEQ ID NO: 165233 - DNA, 663 bp, synthetic construct
  misc_feature 1..663: note = Description of Artificial Sequence: Synthetic coding sequence
  source 1..663: mol_type = other DNA
atggccagcgccacagacagccgctatggccagaaggagagcagtgaccagaactttgactacatgttcaagatcctgatcatcggcaacagctctgtgggcaagaccagcttcctgttccgctatgcagatgacagcttcaccccagcctttgtgtccacagtgggcatcgacttcaaggtgaagaccatctacagaaatgacaagaggatcaagctgcagatctgggacacagctggccaggagcgctaccgcaccatcaccacagcctactacagaggagccatgggcttcatcctgatgtatgacatcaccaatgaggagagcttcaatgctgtgcaggactggagcacccagatcaagacctacagctgggacaatgcccaggtgctgctggtgggcaacaagtgtgacatggaggatgagcgggtggtgtcctctgagcggggccggcagctggccgaccacctgggctttgagttctttgaggccagcgccaaggacaacatcaacgtgaagcagacctttgagcggctggtggatgtgatctgtgagaagatgtctgagagcctggacacagctgaccctgctgtgactggagccaagcagggcccccagctgagtgaccagcaggtgcccccccaccaggactgtgcctgctag

SEQ ID NO: 165234 - DNA, 306 bp, synthetic construct
  misc_feature 1..306: note = Description of Artificial Sequence: Synthetic coding sequence
  source 1..306: mol_type = other DNA
atgaacctggagcgggtgtccaatgaggagaagctgaacctgtgcaggaagtactacctgggcggctttgccttcctgcccttcctgtggctggtgaacatcttctggttcttccgggaggccttcctggtgcctgcctacacagagcagagccagatcaagggctacgtgtggaggtctgctgtgggcttcctgttctgggtgattgtgctgacctcctggatcaccatcttccagatctaccggccccgctggggcgccctgggggactacctgtccttcaccatccccctgggcaccccctag

SEQ ID NO: 165235 - DNA, 378 bp, synthetic construct
  misc_feature 1..378: note = Description of Artificial Sequence: Synthetic coding sequence
  source 1..378: mol_type = other DNA
atggccaagtacctggcccagatcatcgtgatgggcgtgcaggtggtgggccgggcctttgcccgggccctgcggcaggagtttgctgccagcagagctgctgctgatgcccggggccgggccggccacaggtctgctgctgccagcaacctgagcggcctgagcctgcaggaggcccagcagatcctgaatgtgtccaagctgagccctgaggaggtgcagaagaactatgagcacctgttcaaggtgaatgacaagtctgtgggcggcagcttctacctgcagagcaaggtggtgcgggccaaggagcggctggatgaggagctgaagatccaggcccaggaggaccgggagaagggccagatgccccacacctag

SEQ ID NO: 165236 - DNA, 2496 bp, synthetic construct
  misc_feature 1..2496: note = Description of Artificial Sequence: Synthetic coding sequence
  source 1..2496: mol_type = other DNA
atgcccctggagatggagcccaagatgagcaagctggccttcggctgccagaggagcagcaccagtgatgatgacagcggctgtgccctggaggagtatgcctgggtgcccccaggcctgcggcctgagcagatccagctgtactttgcctgcctgcctgaggagaaggtgccctacgtgaacagccctggagagaagcaccgcatcaagcagctgctgtaccagctgccccctcatgacaatgaggtgcgctactgccagagcctgtctgaggaggagaagaaggagctgcaggtgttttctgcccagaggaagaaggaggccctgggccggggcaccatcaagctgctgagcagagctgtgatgcatgctgtgtgtgagcagtgtggcctgaagatcaatggaggagaggtggccgtgtttgccagcagagctggccctggggtgtgctggcaccccagctgctttgtgtgcttcacctgcaatgagctgctggtggacctgatctacttctaccaggacggcaagatccactgcggccgccaccacgccgagctgctgaagccccgctgcagcgcctgtgatgagatcatctttgctgatgagtgcacagaggccgagggccgccactggcacatgaagcacttctgctgcctggagtgtgaaacagtgctgggcggccagcgctacatcatgaaggatggccggcccttctgctgcggctgctttgagagcctgtatgcagagtactgtgagacctgtggggagcacatcggcgtggaccacgcccagatgacctatgatggccagcactggcacgccacagaggcctgcttcagctgtgcccagtgcaaggccagcctgctgggctgccccttcctgcccaagcagggccagatctactgcagcaagacctgcagcctgggggaggatgtgcacgccagtgacagcagtgacagcgccttccagagcgcccggagccgggacagcagaagatctgtgaggatgggcaagagcagccgctctgctgaccagtgccggcagagcctgctgctgagccctgccctgaactacaagtttcctggcctgtctggaaatgctgatgacaccctgagcaggaagctggatgacctgagcctgagccggcagggcaccagctttgccagcgaggagttctggaagggccgggtggagcaggagaccccagaagatcctgaggagtgggccgaccacgaggactacatgacccagctgctgctgaagtttggagacaagagcctcttccagccccagcccaatgagatggacatccgggccagcgagcactggatcagtgacaacatggtgaagagcaagacagagctgaagcagaacaaccagagcctggccagcaagaagtaccagagcgacatgtactgggcccagagccaggacggcctgggggacagcgcctacggcagccaccctggccctgccagcagccggcggctgcaggagctggagctggaccacggggccagcggctacaaccatgatgagacccagtggtatgaggacagcctggagtgcctgagtgacctgaagccagagcagagcgtgcgggacagcatggacagcctggccctgagcaacatcaccggggcctctgtggatggagagaacaagccccggcccagcctgtacagcctgcagaactttgaggagatggagacagaggactgtgagaagatgagcaacatgggcaccctgaacagctccatgctgcacaggtctgctgagagcctgaagagcctgagcagcgagctgtgcccagagaagatcctgcctgaggagaagcctgtgcacctgcctgtgctgcggcgcagcaagagccagagccggccccagcaggtgaagttcagtgatgatgtgattgacaatggaaattatgacatcgagatccggcagccccccatgtctgagaggacccggcggcgggtgtacaactttgaggagcggggcagccgcagccaccaccacagaagaagaagaagcaggaagagcagaagtgacaatgccctgaacctggtgacagagaggaagtacagccccaaggaccggctgcggctgtacaccccagacaactatgagaagttcatccagaacaagagcgcccgggagatccaggcctacatccagaatgctgacctgtatggccagtatgcccacgccaccagtgactatggcctgcagaaccctggcatgaaccgcttcctgggcctgtatggagaagatgatgacagctggtgcagcagcagcagcagcagcagtgacagcgaggaggagggctacttcctgggccagcccatcccccagccccggccccagagatttgcctactacacagatgacctgagcagccccccatctgccctgcccaccccccagtttggccagaggaccaccaagagcaagaagaagaagggccacaagggcaagaactgcatcatctcctag

SEQ ID NO: 165237 - DNA, 2496 bp, synthetic construct; identical to SEQ ID NO: 165236
  misc_feature 1..2496: note = Description of Artificial Sequence: Synthetic coding sequence
  source 1..2496: mol_type = other DNA

SEQ ID NO: 165238 - DNA, 2496 bp, synthetic construct; identical to SEQ ID NO: 165236
  misc_feature 1..2496: note = Description of Artificial Sequence: Synthetic coding sequence
  source 1..2496: mol_type = other DNA

SEQ ID NO: 165239 - DNA, 333 bp, synthetic construct
  misc_feature 1..333: note = Description of Artificial Sequence: Synthetic coding sequence
  source 1..333: mol_type = other DNA
atgcccctggagatggagcccaagatgagcaagctggccttcggctgccagaggagcagcaccagtgatgatgacagcggctgtgccctggaggagtatgcctgggtgcccccaggcctgcggcctgagcagatccagctgtactttgcctgcctgcctgaggagaaggtgccctacgtgaacagccctggagagaagcaccgcatcaagcagctgctgtaccagctgccccctcatgacaatgaggtgcgctactgccagagcctgtctgaggaggagaagaaggagctgcaggtgttttctgcccagaggaagaaggaggccctgggctag

SEQ ID NO: 165240 - DNA, 2496 bp, synthetic construct; identical to SEQ ID NO: 165236
  misc_feature 1..2496: note = Description of Artificial Sequence: Synthetic coding sequence
  source 1..2496: mol_type = other DNA

SEQ ID NO: 165241 - DNA, 360 bp, synthetic construct
  misc_feature 1..360: note = Description of Artificial Sequence: Synthetic coding sequence
  source 1..360: mol_type = other DNA
atgcccctggagatggagcccaagatgagcaagctggccttcggctgccagaggagcagcaccagtgatgatgacagcggctgtgccctggaggagtatgcctgggtgcccccaggcctgcggcctgagcagatccagctgtactttgcctgcctgcctgaggagaaggtgccctacgtgaacagccctggagagaagcaccgcatcaagcagctgctgtaccagctgccccctcatgacaatgaggtgcgctactgccagagcctgtctgaggaggagaagaaggagctgcaggtgttttctgcccagaggaagaaggaggccctgggccggggcaccatcaagctgctgagcaggtag

SEQ ID NO: 165242 - DNA, 480 bp, synthetic construct
  misc_feature 1..480: note = Description of Artificial Sequence: Synthetic coding sequence
  source 1..480: mol_type = other DNA
atgcccctggagatggagcccaagatgagcaagctggccttcggctgccagaggagcagcaccagtgatgatgacagcggctgtgccctggaggagtatgcctgggtgcccccaggcctgcggcctgagcagatccagctgtactttgcctgcctgcctgaggagaaggtgccctacgtgaacagccctggagagaagcaccgcatcaagcagctgctgtaccagctgccccctcatgacaatgaggtgcgctactgccagagcctgtctgaggaggagaagaaggagctgcaggtgttttctgcccagaggaagaaggaggccctgggccggggcaccatcaagctgctgagcagagctgtgatgcatgctgtgtgtgagcagtgtggcctgaagatcaatggaggagaggtggccgtgtttgccagcagagctggccctggggtgtgctggcaccccagctgctttgtgtgcttctag

SEQ ID NO: 165243 - DNA, 2496 bp, synthetic construct; identical to SEQ ID NO: 165236
  misc_feature 1..2496: note = Description of Artificial Sequence: Synthetic coding sequence
  source 1..2496: mol_type = other DNA

SEQ ID NO: 165244 - DNA, 2535 bp, synthetic construct
  misc_feature 1..2535: note = Description of Artificial Sequence: Synthetic coding sequence
  source 1..2535: mol_type = other DNA
atggtgacagtgatgcccctggagatggagaagaccatcagcaagctgatgtttgacttccagaggaacagcaccagtgatgatgacagcggctgtgccctggaggagtatgcctgggtgcccccaggcctgaagccagagcaggtgcaccagtactacagctgcctgcctgaggagaaggtgccctacgtgaacagccctggagagaagctgcgcatcaagcagctgctgcaccagctgccccctcatgacaatgaggtgcgctactgcaacagcctggatgaggaggagaagcgggagctgaagctgttcagcagccagaggaagcgggagaacctgggcagaggaaatgtgcggcccttccctgtgaccatgaccggggccatctgtgagcagtgtggcggccagatcaatggaggagacattgctgtgtttgccagcagagctggccatggagtgtgctggcaccccccctgctttgtgtgcaccgtgtgcaatgagctgctggtggacctgatctacttctaccaggacggcaagatctactgcggccgccaccacgcagaatgtctgaagccccgctgtgccgcctgtgatgagatcatctttgctgatgagtgcacagaggccgagggccgccactggcacatgaagcacttctgctgctttgaatgtgaaacagtgctgggcggccagcgctacatcatgaaggagggccggccctactgctgccactgctttgagagcctgtatgcagagtactgtgacacctgtgcccagcacatcggcatcgaccagggccagatgacctatgatggccagcactggcacgccacagagacctgcttctgctgtgcccactgcaagaagagcctgctgggccggcccttcctgcccaagcagggccagatcttctgcagccgggcctgcagcgctggggaggaccccaatggaagtgacagcagtgacagcgccttccagaatgcccgggccaaggagagcagaagaagtgccaagattggcaagaacaagggcaagacagaggagcccatgctgaaccagcacagccagctgcaggtgagcagcaaccggctgtctgcagatgtggaccccctgagcctgcagatggacatgctgagcctgagcagccagacccccagcctgaacagagaccccatctggaggagccgggaggagccctaccactacggcaacaagatggagcagaaccagacccagagccccctgcagctgctgagccagtgcaacatccgcaccagctacagccctgggggccagggcgctggggcccagcctgagatgtggggcaagcacttcagcaaccccaagaggagcagcagcctggccatgacaggccatgctggcagcttcatcaaggaatgtcgggaggactactacccaggccgcctgcggagccaggagagctacagcgacatgagcagccagagcttcagcgagacccggggcagcatccaggtgcccaagtatgaggaggaggaggaggaggagggcggcctgagcacccagcagtgcaggaccaggcaccccatcagcagcctgaagtacacagaggacatgacccccacagagcagaccccccggggctccatggagagcctggccctgagcaatgccaccggcctgtctgcagatggaggagccaagaggcaggagcacctgagccgcttctccatgccagacctgagcaaggacagcggcatgaatgtgtctgagaagctgagcaacatgggcaccctgaacagctccatgcagttccgctctgctgagagcgtgcgcagcctgctgagcgcccagcagtaccaggagatggagggcaacctgcaccagctgagcaaccccatcggctacagagacctgcagagccacggccgcatgcaccagagctttgattttgatggcggcatggccggcagcaagctgcccggccaggagggcgtgcgcatccagcccatgtctgagaggaccaggagaagagccaccagcagagatgacaacagacgcttccggccccacaggagccgccgcagcagaagaagcagaagtgacaatgccctgcacctggccagcgagcgggaggccatcagccggctgaaggacaggcctcccctgcgggccagagaagattatgaccagttcatgaggcagaggagcttccaggagagcatgggccacggcagcagaagagacctgtatggccagtgccccaggacagtgtctgacctggccctgcagaatgcctttggagaccgctggggcccctactttgctgaatatgactggtgcagcacctgcagcagcagcagcgagagtgacaatgaaggctacttcctgggggagcccatcccccagcctgcccggctgcgctacgtgaccagtgatgagctgctgcacaagtacagcagctatggcctgcccaagagcagcaccctgggcggccggggccagctgcacagcaggaagaggcagaagagcaagaactgcatcatctcctag

SEQ ID NO: 165245 - DNA, 453 bp, synthetic construct
  misc_feature 1..453: note = Description of Artificial Sequence: Synthetic coding sequence
  source 1..453: mol_type = other DNA
atggtgacagtgatgcccctggagatggagaagaccatcagcaagctgatgtttgacttccagaggaacagcaccagtgatgatgacagcggctgtgccctggaggagtatgcctgggtgcccccaggcctgaagccagagcaggtgcaccagtactacagctgcctgcctgaggagaaggtgccctacgtgaacagccctggagagaagctgcgcatcaagcagctgctgcaccagctgccccctcatgacaatgaggtgcgctactgcaacagcctggatgaggaggagaagcgggagctgaagctgttcagcagccagaggaagcgggagaacctgggcagaggaaatgtgcggcccttccctgtgaccatgaccggggccatctgtgagcagtgtggcggccagatcaatggaggagacattgctgtgtttgccagcagagctggatag

SEQ ID NO: 165246 - DNA, 1263 bp, synthetic construct
  misc_feature 1..1263: note = Description of Artificial Sequence: Synthetic coding sequence
  source 1..1263: mol_type = other DNA
atggagacctttgaccccacagagctgcctgagctgctgaagctgtactaccgccgcctcttcccctacagccagtactaccgctggctgaactacggcggcgtcatcaagaactacttccagcaccgggagttctccttcaccctgaaggatgacatctacatccgctaccagagcttcaacaaccagagcgacctggagaaggagatgcagaagatgaacccctacaagattgacatcggggctgtgtacagccaccggcccaaccagcacaacacagtgaagctgggcgccttccaggcccaggagaaggagctggtgtttgacatcgacatgacagattatgatgatgtgcggcgctgctgcagcagcgctgacatctgccccaagtgctggaccctgatgaccatggccatccgcatcatcgaccgggccctgaaggaggactttggcttcaagcaccggctgtgggtgtacagcggccggcggggcgtgcactgctgggtgtgtgatgaatctgtgaggaagctgagcagcgctgtgcgctctggaattgtggagtacctgagcctggtgaagggcggccaggatgtgaagaagaaggtgcacctgtctgagaagatccaccccttcatcaggaagagcatcaacatcatcaagaagtactttgaggagtatgccctggtgaaccaggacatcctggagaacaaggagagctgggacaagatcctggccctggtgcctgagaccatccatgatgagctgcagcagagcttccagaagagccacaacagcctgcagcgctgggagcacctgaagaaggtggccagccgctaccagaacaacatcaagaatgacaagtatggcccctggctggagtgggagatcatgctgcagtactgcttcccccggctggacatcaacgtgtccaagggcatcaaccacctgctgaagagccccttctctgtgcaccccaagacaggccgcatctctgtgcccatcgacctgcagaaggtggaccagtttgaccccttcaccgtgcccaccatctccttcatctgccgggagctggatgccatcagcaccaatgaggaggagaaggaggagaatgaggccgagagtgatgtgaagcacaggacccgggactacaagaagaccagcctggccccctacgtgaaggtgtttgagcacttcctggagaacctggacaagagcaggaaaggagagctgctgaagaagagtgacctgcagaaggacttctag

SEQ ID NO: 165247 - DNA, 1284 bp, synthetic construct
  misc_feature 1..1284: note = Description of Artificial Sequence: Synthetic coding sequence
  source 1..1284: mol_type = other DNA
atggagacctttgaccccacagagctgcctgagctgctgaagctgtactaccgccgcctcttcccctacagccagtactaccgctggctgaactacggcggcgtcatcaagaactacttccagcaccgggagttctccttcaccctgaaggatgacatctacatccgctaccagagcttcaacaaccagagcgacctggagaaggagatgcagaagatgaacccctacaagattgacatcggggctgtgtacagccaccggcccaaccagcacaacacagtgaagctgggcgccttccaggcccaggagaaggagctggtgtttgacatcgacatgacagattatgatgatgtgcggcgctgctgcagcagcgctgacatctgccccaagtgctggaccctgatgaccatggccatccgcatcatcgaccgggccctgaagggcaaggactttggcttcaagcaccggctgtgggtgtacagcggcagaagaggagtgcactgctgggtgtgtgatgagagcgtgaggaagctgagcagcgctgtgcgcagcggcatcgtggagtacctgagcctggtgaagggcggccaggatgtgaagaagaaggtgcacctgtctgagaagatccaccccttcatcaggaagagcatcaacatcatcaagaagtactttgaggagtatgccctggtgaaccaggacatcctggagaacaaggagagctgggacaagatcctggccctgatgggcctcttcctgaatgaccccagccccatccatgatgagctgcagcagagcttccagaagagccacaacagcctgcagcgctgggagcacctgaagaaggtggccagccgctaccagaacaacatcaagaatgacaagtatggcccctggctggagtgggagatcatgctgcagtactgcttcccccggctggacatcaacgtgtccaagggcatcaaccacctgctgaagagccccttctctgtgcaccccaagacaggccgcatctctgtgcccatcgacctgcagaaggtggaccagtttgaccccttcaccgtgcccaccatctccttcatctgccgggagctggatgccatcagcaccaatgaggaggagaaggaggagaatgaagctgagagtgatgtgaagcacaggacccgggactacaagaagaccagcctggccccctacgtgaaggtgtttgagcacttcctggagaacctggacaagagcaggaagggggagctgctgaagaagagtgacctgcagaaggacttctag

SEQ ID NO: 165248 - DNA, 762 bp, synthetic construct
  misc_feature 1..762: note = Description of Artificial Sequence: Synthetic coding sequence
  source 1..762: mol_type = other DNA
atggccaacctgggctgctggatgctggtgctgtttgtggccacctggagcgacctgggcctgtgcaagaagaggcccaagccaggcggctggaacacaggaggcagccgctacccaggccagggcagccctgggggcaaccgctacccaccccagggcggcggcggctggggccagccccatggaggcggctggggccagccccatggaggcggctggggccagccccatggaggcggctggggccagccccatggaggcggctggggccagggcggcggcacccacagccagtggaacaagcccagcaagcccaagaccaacatgaagcacatggccggggctgctgctgctggagctgtggtgggcggcctgggcggctacatgctgggcagcgccatgagccggcccatcatccactttggaagtgactatgaggaccgctactaccgggagaacatgcaccgctaccccaaccaggtgtactaccggcccatggatgagtacagcaaccagaacaactttgtgcatgactgtgtgaacatcaccatcaagcagcacacagtgaccaccaccaccaagggggagaacttcacagaaacagatgtgaagatgatggagcgggtggtggagcagatgtgcatcacccagtatgaaagagagagccaggcctactaccagaggggcagctccatggtgctcttcagcagcccccctgtgatcctgctgatctccttcctgatcttcctgattgtgggctag

SEQ ID NO: 165249 - DNA, 750 bp, synthetic construct
  misc_feature 1..750: note = Description of Artificial Sequence: Synthetic coding sequence
  source 1..750: mol_type = other DNA
atggccaacctgggctgctggatgctggtgctgtttgtggccacctggagcgacctgggcctgtgcaagaagaggcccaagccaggcggctggaacacaggaggcagccgctacccaggccagggcagccctgggggcaaccgctacccaccccagggcggcggcggctggggccagccccatggaggcggctggggccagccccatggaggcggctggggccagccccatggaggcggctggggccagccccatggaggcggctggggccagggcggcggcacccacagccagtggaacaagcccagcaagcccaagaccaacatgaagcacatggccggggctgctgctgctggagctgtggtgggcggcctgggcggctacatgctgggcagcgccatgagccggcccatcatccactttggaagtgactatgaggaccgctactaccgggagaacatgcaccgctaccccaaccaggtgtactaccggcccatggatgagtacagcaaccagaacaactttgtgcatgactgtgtgaacatcaccatcaagcagcacacagtgaccaccaccaccaagggggagaacttcacagaaacagatgtgaagatgatggagcgggtggtggagcagatgtgcatcacccagtatgaaagagagagccaggcctactaccagaggggcagctccatggtgctcttcagcagcccccctgtgatcctgctgatctccttcctgatcttctag

SEQ ID NO: 165250 - DNA, 762 bp, synthetic construct; identical to SEQ ID NO: 165248
  misc_feature 1..762: note = Description of Artificial Sequence: Synthetic coding sequence
  source 1..762: mol_type = other DNA

SEQ ID NO: 165251 - DNA, 579 bp, synthetic construct
  misc_feature 1..579: note = Description of Artificial Sequence: Synthetic coding sequence
  source 1..579: mol_type = other DNA
atggagcactggggccagccccacggcggcggctggggccagccccacggcggcggctggggccagccccacggcggcggctggggccagggcggcggcacccacagccagtggaacaagcccagcaagcccaagaccaacatgaagcacatggccggggctgctgctgctggagctgtggtgggcggcctgggcggctacatgctgggcagcgccatgagccggcccatcatccacttcggcagtgactatgaagatcgctactaccgggagaacatgcaccgctaccccaaccaggtgtactaccggcccatggatgagtacagcaaccagaacaactttgtgcatgactgtgtgaacatcaccatcaagcagcacacagtgaccaccaccaccaagggggagaacttcacagaaacagatgtgaagatgatggagcgggtggtggagcagatgtgcatcacccagtatgagcgggagagccaggcctactaccagaggggcagctccatggtgctcttcagcagcccccctgtgatcctgctgatctccttcctgatcttcctgattgtgggctag

SEQ ID NO: 165252 - DNA, 654 bp, synthetic construct
  misc_feature 1..654: note = Description of Artificial Sequence: Synthetic coding sequence
  source 1..654: mol_type = other DNA
atggccaacctgggctgctggatgctggtgctgtttgtggccacctggagcgacctgggcctgtgcaagaagaggcccaagccaggcggctggaacacaggaggcagccgctacccaggccagggcagccctgggggcaaccgctacccaccccagggcggcggcggctggggccagccccatggaggcggctggggccagccccatggaggcggctggggccagccccatggaggcggctggggccagccccatggaggcggctggggccagggcggcggcacccacagccagtggaacaagcccagcaagcccaagaccaacatgaagcacatggccggggctgctgctgctggagctgtggtgggcggcctgggcggctacatgctgggcagcgccatgagccggcccatcatccactttggaagtgactatgaggaccgctactaccgggagaacatgcaccgctaccccaaccaggtgtactaccggcccatggatgagtacagcaaccagaacaactttgtgcatgactgtgtgaacatcaccatcaagcagcacacagtgaccaccaccaccaagggggagaacttcacagaaacagatgtgaagatgatggagcgggtggtggagcagatgtgcatcacccagtag

SEQ ID NO: 165253 - DNA, 531 bp, synthetic construct
  misc_feature 1..531: note = Description of Artificial Sequence: Synthetic coding sequence
  source 1..531: mol_type = other DNA
atgaggaagcacctgtcctggtggtggctggccaccgtgtgcatgctgctcttcagccacctgtctgctgtgcagacccggggcatcaagcaccgcatcaagtggaacaggaaggccctgcccagcacagcccagatcacagaggcccaggtggctgaaaatagacctggggccttcatcaagcagggcaggaagctggacatcgactttggagctgagggcaaccgctactatgaggccaactactggcagttcccagatggcatccactacaacggctgcagcgaggccaacgtgaccaaggaggcctttgtgacaggctgcatcaatgccacccaggccgccaaccagggcgagttccagaagccagacaacaagctgcaccagcaggtgctgtggaggctggtgcaggagctgtgcagcctgaagcactgtgagttctggctggagagaggagctggcctgcgggtgaccatgcaccagcctgtgctgctgtgcctgctggccctgatctggctgactgtgaagtag

SEQ ID NO: 165254 - DNA, 1023 bp, synthetic construct
  misc_feature 1..1023: note = Description of Artificial Sequence: Synthetic coding sequence
  source 1..1023: mol_type = other DNA
atggccactggaggctaccgcaccagcagcggcctgggcggcagcaccacagacttcctggaggagtggaaggccaagcgggagaagatgagggccaagcagaaccccccaggccctgcccctcctgggggcggcagcagtgatgctgctgggaagcccccagctggggccctgggcaccccagctgctgctgctgccaatgagctgaacaacaacctgcccggcggggccccagctgccccagctgtgcccggccctgggggcgtgaactgtgctgtgggcagcgccatgctgaccagggctgcccctggcccccggcggagtgaagatgagcccccagctgccagcgccagcgctgcccccccaccccagagagatgaggaggagccagatggagtgcctgagaagggcaagagcagcggccccagcgccaggaagggcaagggccagatcgagaagaggaagctgcgggagaagaggaggagcactggagtggtgaacatcccagctgctgagtgcctggatgaatatgaagatgatgaggccggccagaaggagaggaagcgggaggatgccatcacccagcagaacaccatccagaatgaagctgtgaacctgctggaccccggcagcagctacctgctgcaggagccccccaggacagtgtctggccgctacaagagcaccacctctgtgtctgaagaagatgtgagcagccgctacagcaggacagacagaagtggcttcccccgctacaacagagatgccaacgtgtctggcaccctggtgagcagcagcaccctggagaagaagattgaggacctggagaaggaggtggtgcgggagcggcaggagaacctgcggctggtgcggctgatgcaggacaaggaggagatgattggcaagctgaaggaggagattgacctgctgaacagagacctggatgacattgaagatgaaaatgagcagctgaagcaggagaacaagaccctgctgaaggtggtgggccagctgaccaggtag

SEQ ID NO: 165255 - DNA, 231 bp, synthetic construct
  misc_feature 1..231: note = Description of Artificial Sequence: Synthetic coding sequence
  source 1..231: mol_type = other DNA
atggccactggaggctaccgcaccagcagcggcctgggcggcagcaccacagacttcctggaggagtggaaggccaagcgggagaagatgagggccaagcagaaccccccaggccctgcccctcctgggggcggcagcagtgatgctgctgggaagcccccagctggggccctgggcaccccagctgctgctgctgccaatgagctgaacaacaacctgcccggcggctag

SEQ ID NO: 165256 - DNA, 195 bp, synthetic construct
  misc_feature 1..195: note = Description of Artificial Sequence: Synthetic coding sequence
  source 1..195: mol_type = other DNA
atggccactggaggctaccgcaccagcagcggcctgggcggcagcaccacagacttcctggaggagtggaaggccaagcgggagaagatgagggccaagcagaaccccccaggccctgcccctcctgggggcggcagcagtgatgctgctgggaagcccccagctggggccctgggcaccccagctgctgcctag

SEQ ID NO: 165257 - DNA, 663 bp, synthetic construct
  misc_feature 1..663: note = Description of Artificial Sequence: Synthetic coding sequence
  source 1..663: mol_type = other DNA
atgaagagcgtcatctaccacgccctgagccagaaggaggccaatgacagtgatgtgcagcccagcggggcccagagagctgaggcctttgtgcgggccttcctgaagaggagcacccccaggatgagcccccaggcccgggaggaccagctgcagaggaaggctgtggtgctggagtacttcaccaggcacaagaggaaggagaagaagaagaaggccaagggcctgagcgcccggcagaggcgggagctgcggctgtttgacatcaagccagagcagcagcgctacagcctcttcctgcccctgcacgagctgtggaagcagtacatccgggacctgtgcagcggcctgaagccagacacccagccccagatgatccaggccaagctgctgaaggctgacctgcacggggccatcatctctgtgaccaagagcaagtgccccagctatgtgggcatcaccggcatcctgctgcaggagaccaagcacatcttcaagatcatcaccaaggaggaccggctgaaggtgatccccaagctgaactgtgtgttcaccgtggagacagatggcttcatctcctacatctacggcagcaagttccagctgcggagcagcgagaggtctgccaagaagttcaaggccaagggcaccatcgacctgtag

SEQ ID NO: 165258 - DNA, 1695 bp, synthetic construct
  misc_feature 1..1695: note = Description of Artificial Sequence: Synthetic coding sequence
  source 1..1695: mol_type = other DNA
atgagcagccacggcaacagcctcttcctgcgggagagcggccagaggctgggccgggtgggctggctgcagaggctgcaggagagcctgcagcagagggccctgcggacccggctgcggctgcagaccatgaccctggagcacgtgctgcgcttcctgcggagaaatgccttcatcctgctgactgtgtctgctgtggtgattggagtgtccctggcctttgccctgcggccctaccagctgacctaccggcagatcaagtacttctccttccctggagagctgctgatgaggatgctgcagatgctggtgctgcccctcatcgtgagcagcctggtgacaggcatggccagcctggacaacaaggccaccggccgcatgggcatgagagctgctgtgtactacatggtgaccaccatcatcgctgtgttcatcggcatcctgatggtgaccatcatccaccctgggaagggcagcaaggagggcctgcaccgggagggcagaattgagaccatccccacagcagatgccttcatggacctgatccggaacatgtttcctcccaacctggtggaggcctgcttcaagcagttcaagacccagtacagcaccagggtggtgaccaggaccatggtgaggacagaaaatggcagcgagcccggggcctccatgcccccacccttctctgtggagaatggcaccagcttcctggagaatgtgacccgggccctgggcaccctgcaggagatgctgagctttgaggagaccgtgcctgtgcccggcagcgccaacggcatcaatgccctgggcctggtggtgttttctgtggccttcggcctggtgattggaggcatgaagcacaagggccgggtgctgcgggacttctttgacagcctgaatgaggccatcatgaggctggtgggcatcatcatctggtacgcccctgtgggcatcctcttcctgattgctgggaagatcctggagatggaggacatggctgtgctgggcggccagctgggcatgtacaccctgactgtgattgtgggcctcttcctgcacgccggcatcgtgctgcccctcatctacttcctggtgacccacaggaaccccttccccttcatcggcggcatgctgcaggccctgatcacagccatgggcaccagcagcagcagcgccaccctgcccatcaccttccgctgcctggaggagggcctgggcgtggaccggcgcatcaccaggtttgtgctgcctgtgggcgccaccgtgaacatggatggaacagccctgtatgaggccctggccgccatcttcatcgcccaggtgaacaactatgagctgaacctgggccagatcaccaccatcagcatcacagccacagctgcctctgtgggcgccgccggcatcccccaggccggcctggtgaccatggtgattgtgctgacctctgtgggcctgcccacagaggacatcaccctcatcatcgctgtggactggttcctggaccggctgcggaccatgaccaacgtgctgggggacagcatcggggctgctgtgattgagcacctgagccagcgggagctggagctgcaggaggccgagctgaccctgcccagcctgggcaagccctacaagagcctgatggcccaggagaagggggccagccggggccggggcggcaatgaaagtgccatgtag

SEQ ID NO: 165259 - DNA, 420 bp, synthetic construct
  misc_feature 1..420: note = Description of Artificial Sequence: Synthetic coding sequence
  source 1..420: mol_type = other DNA
atgcactgcctgaggaagaggaggatgacccccatgagccgctacagcctcttcctgcccctgcacgagctgtggaagcagtacatccgggacctgtgcagcggcctgaagccagacacccagccccagatgatccaggccaagctgctgaaggctgacctgcatggagccatcatctctgtgaccaagagcaaatgtcccagctatgtgggcatcaccggcatcctgctgcaggagaccaagcacatcttcaagatcatcaccaaggaggaccggctgaaggtgatccccaagctgaactgtgtgttcaccgtggagacagatggcttcatctcctacatctacggcagcaagttccagctgcggagcagcgagaggtctgccaagaagttcaaggccaagggcaccatcgacctgtag

SEQ ID NO: 165260 - DNA, 342 bp, synthetic construct
  misc_feature 1..342: note = Description of Artificial Sequence: Synthetic coding sequence
  source 1..342: mol_type = other DNA
atggtgcgcttcaagcaccgctacctgctgtgtgagctggtgtctgatgacccccgctgccgcctgagcctggatgacagagtgctgagcagcctggtgcgggacaccatcgcccgggtgcacggcaccttcggggctgctgcctgcagcattggatttgctggcaccatccgcacctgccagaagttcctgatccagtacaacagacggcagctgctgatcctgctgcagaactgcacagatgaaggagagcgggaggccatccagaagtctgtgaccaggagctgcctgctggaggaggaggaggagagcggggaggaggccgctgaggccatggagtag

SEQ ID NO: 165261 - DNA, 492 bp, synthetic construct
  misc_feature 1..492: note = Description of Artificial Sequence: Synthetic coding sequence
  source 1..492: mol_type = other DNA
atggtgcgcttcaagcaccgctacctgctgtgtgagctggtgtctgatgacccccgctgccgcctgagcctggatgacagagtgctgagcagcctggtgcgggacaccatcgcccgggtgcacggcaccttcggggctgctgcctgcagcattggatttgctgtgcgctacctgaatgcctacacaggcatcgtgctgctgcgctgcaggaaggagttctaccagctggtgtggagcgccctgcccttcatcacctacctggagaacaagggccaccgctacccctgcttcttcaacaccctgcacgtgggcggcaccatccgcacctgccagaagttcctgatccagtacaacagacggcagctgctgatcctgctgcagaactgcacagatgaaggagagcgggaggccatccagaagtctgtgaccaggagctgcctgctggaggaggaggaggagagcggggaggaggccgctgaggccatggagtag

SEQ ID NO: 165262 - DNA, 423 bp, synthetic construct
  misc_feature 1..423: note = Description of Artificial Sequence: Synthetic coding sequence
  source 1..423: mol_type = other DNA
atggctgaaaatcgggagcccagaggagctgtggaggccgagctggaccctgtggagtacaccctgaggaagaggctgcccagccggctgccccggcggcccaatgacatctacgtgaacatgaagacagacttcaaggcccagctggcccgctgccagaagctgctggatggaggagcccggggccagaatgcctgcagcgagatctacatccacggcctgggcctggccatcaacagagccatcaacatcgccctgcagctgcaggccggcagctttggcagcctgcaggtggccgccaacaccagcacagtggagctggtggatgagctggagcctgagacagacacccgggagcccctgacccgcatccggaacaacagcgccatccacatccgggtcttccgggtgacccccaagtag

SEQ ID NO: 165263 - DNA, 414 bp, synthetic construct
  misc_feature 1..414: note = Description of Artificial Sequence: Synthetic coding sequence
  source 1..414: mol_type = other DNA
atggctgaaaatcgggagcccagaggagctgtggaggccgagctggaccctgtggagtacaccctgaggaagaggctgcccagccggctgccccggcggcccaatgacatctacgtgaacatgaagacagacttcaaggcccagctggcccgctgccagaagctgctggatggaggagcccggggccagaatgcctgcagcgagatctacatccacggcctgggcctggccatcaacagagccatcaacatcgccctgcagctgcaggccggcagctttggcagcctgcaggtggccgccaacaccagcacagtggagctggtggatgagctggagcctgagacagacacccgggagcccctgacccgcatccggaacaacagcgccatccacatccgggtcttccgggtgtag

SEQ ID NO: 165264 - DNA, 708 bp, synthetic construct
  misc_feature 1..708: note = Description of Artificial Sequence: Synthetic coding sequence
  source 1..708: mol_type = other DNA
atgagaagaggagccccccaggaccaggagctggtgggccctggccccccaggccggggcagcagaggagcccccccacccctgggccctgtggtgcctgtgctggtgttccccccagacctggtgttccgggctgaccagaggagcggcccccggcagctgctgaccctgtacaaccccactggaacagccctgcgcttccgggtgctgtgcacagccccagccaagtacacagtgtttgatgctgagggctacgtgaagccccagagctgcatcgacatcgtcatccgccacgtggcccccatccccagccactatgatgtgcaggaccgcttccgcatcgagctgtctgaggagggcgctgagggccgggtggtgggcaggaaggacatcaccagcatcctgcgggccccagcctaccccctggagctgcagggccagcctgaccctgccccccggcccggccccccagctggcaccccaccacccacagcccggcacttccaggagcacccccggcagcagctggccaccagcagcttcctgctcttcctgctgactggaattgtgtctgtggccttcctgctgctgcccctgcctgatgagctgggcagccagctgccccaggtgctgcacgtgtccctgggccagaagctggtggccgcctacgtgctgggcctgctgaccatggtgttcctgcggacctag

SEQ ID NO: 165265 - DNA, 1248 bp, synthetic construct
  misc_feature 1..1248: note = Description of Artificial Sequence: Synthetic coding sequence
  source 1..1248: mol_type = other DNA
atgagaggagccaatgcctgggcccccctgtgcctgctgctggccgccgccacccagctgagccggcagcagagccctgagaggcctgtgttcacctgtggcggcatcctgaccggggagagcggcttcatcggcagcgagggcttccctggggtgtacccacccaacagcaagtgcacctggaagatcaccgtgcctgagggcaaggtggtggtgctgaacttccgcttcatcgacctggagagtgacaacctgtgccgctatgactttgtggatgtgtacaatggacatgccaacggccagagaattggccgcttctgtggcaccttccggcctggggccctggtgagcagcggcaacaagatgatggtgcagatgatcagtgatgccaacacagctggaaatggcttcatggccatgttttctgctgctgagcccaatgaaagaggagaccagtactgcggcggcctgctggaccggcccagcggcagcttcaagacccccaactggccagaccgggactacccagctggggtgacctgtgtgtggcacatcgtggcccccaagaaccagctgattgagctgaagtttgagaagtttgatgtggagcgggacaactactgccgctatgactatgtggccgtgttcaatggaggagaggtgaatgatgccaggagaattggcaagtactgtggggacagccccccagcccccatcgtgtctgaaagaaatgagctgctgatccagttcctgagtgacctgagcctgacagcagatggcttcatcggccactacatcttccggcccaagaagctgcccaccaccacagagcagcctgtgaccaccaccttccctgtgaccaccggcctgaagcccaccgtggccctgtgccagcagaagtgcagaagaacaggcaccctggagggcaactactgcagcagtgactttgtgctggccggcaccgtcatcaccaccatcaccagagatggcagcctgcacgccaccgtgtccatcatcaacatctacaaggagggcaacctggccatccagcaggccggcaagaacatgtctgcccggctgactgtggtgtgcaagcagtgccccctgctgcggcggggcctgaactacatcatcatgggccaggtgggggaggatggccggggcaagatcatgcccaacagcttcatcatgatgttcaagaccaagaaccagaagctgctggatgccctgaagaacaagcagtgctag

SEQ ID NO: 165266 - DNA, 2184 bp, synthetic construct
  misc_feature 1..2184: note = Description of Artificial Sequence: Synthetic coding sequence
  source 1..2184: mol_type = other DNA
atgaggcccctgctgctgctggccctgctgggctggctgctgctggccgaggccaagggagatgccaagccagaggacaacctgctggtgctgactgtggccaccaaggagacagagggcttccgccgcttcaagaggtctgcccagttcttcaactacaagatccaggccctgggcctgggggaggactggaatgtggagaagggcaccagcgctgggggcggccagaaggtgcggctgctgaagaaggccctggagaagcatgctgacaaggaggacctggtgatcctgtttgctgacagctatgatgtgctgtttgccagcggcccccgggagctgctgaagaagttccggcaggcccggagccaggtggtgttttctgctgaggagctgatctacccagaccggcggctggagaccaagtaccctgtggtgtctgatggcaagcgcttcctgggcagcggcggcttcatcggctacgcccccaacctgagcaagctggtggccgagtgggagggccaggacagcgacagcgaccagctgttctacaccaagatcttcctggaccctgagaagcgggagcagatcaacatcaccctggaccaccgctgccgcatcttccagaacctggatggagccctggatgaggtggtgctgaagtttgagatgggccacgtgcgggccaggaacctggcctatgacaccctgcctgtgctgattcatggaaatggccccaccaagctgcagctgaactacctgggcaactacatcccccgcttctggacctttgaaacaggctgcaccgtgtgtgatgagggcctgcggagcctgaagggcattggagatgaggccctgcccaccgtgctggtgggcgtcttcatcgagcagcccaccccatttgtgtccctcttcttccagaggctgctgcggctgcactacccccagaagcacatgaggctcttcatccacaaccacgagcagcaccacaaggcccaggtggaggagttcctggcccagcacggcagcgagtaccagagcgtgaagctggtgggccctgaggtgaggatggccaatgctgatgccaggaacatgggcgctgacctgtgccggcaggacaggagctgcacctactacttctctgtggatgctgatgtggccctgacagagcccaacagcctgcggctgctgatccagcagaacaagaatgtcatcgcccccctgatgaccaggcatggccgcctgtggagcaacttctggggcgccctgtctgcagatggctactatgcccggtctgaggactatgtggacatcgtgcagggcagaagagtgggcgtgtggaatgtgccctacatcagcaacatctacctgatcaagggcagcgccctgcggggggagctgcagagcagtgacctcttccaccacagcaagctggaccctgacatggccttctgtgccaacatccggcagcaggatgtgttcatgttcctgaccaacagacacaccctgggccacctgctgagcctggacagctaccgcaccacccacctgcacaatgacctgtgggaggtgttcagcaaccctgaggactggaaggagaagtacatccaccagaactacaccaaggccctggccggcaagctggtggagaccccctgcccagatgtgtactggttccccatcttcacagaggtggcctgtgatgagctggtggaggagatggagcacttcggccagtggagcctgggcaacaacaaggacaaccgcatccagggcggctatgaaaatgtgcccaccatcgacatccacatgaaccagatcggctttgagcgggagtggcacaagttcctgctggagtacatcgcccccatgacagagaagctgtacccaggctactacacccgggcccagtttgacctggcctttgtggtgcgctacaagccagatgagcagcccagcctgatgccccaccatgatgccagcaccttcaccatcaacatcgccctgaacagagtgggcgtggactatgaaggaggcggctgccgcttcctgcgctacaactgcagcatccgggcccccaggaagggctggaccctgatgcaccctggccgcctgacccactaccacgagggcctgcccaccacccggggcacccgctacatcgctgtgtcctttgtggacccctag

SEQ ID NO: 165267 - DNA, 600 bp, synthetic construct
  misc_feature 1..600: note = Description of Artificial Sequence: Synthetic coding sequence
  source 1..600: mol_type = other DNA
atgaggcccctgctgctgctggccctgctgggctggctgctgctggccgaggccaagggagatgccaagccagaggacaacctgctggtgctgactgtggccaccaaggagacagagggcttccgccgcttcaagaggtctgcccagttcttcaactacaagatccaggccctgggcctgggggaggactggaatgtggagaagggcaccagcgctgggggcggccagaaggtgcggctgctgaagaaggccctggagaagcatgctgacaaggaggacctggtgatcctgtttgctgacagctatgatgtgctgtttgccagcggcccccgggagctgctgaagaagttccggcaggcccggagccaggtggtgttttctgctgaggagctgatctacccagaccggcggctggagaccaagtaccctgtggtgtctgatggcaagcgcttcctgggcagcggcggcttcatcggctacgcccccaacctgagcaagctggtggccgagtgggagggccaggacagcgacagcgaccagctgttctacaccaagatcttcctggaccctgagaagagggtgtcccggctgcacagctag

SEQ ID NO: 165268 - DNA, 2325 bp, synthetic construct
  misc_feature 1..2325: note = Description of Artificial Sequence: Synthetic coding sequence
  source 1..2325: mol_type = other DNA
atgaggcccctgctgctgctggccctgctgggctggctgctgctggccgaggccaagggagatgccaagccagaggccccctgctgccaggagggcctgcgggccggcggcagcggcagcctgcacctgggccgggacttcaccgtgctggccggggcccggggcagccccagccccagcgtgagcagcatcccccgcttctggatccctggcagtgacaacctgctggtgctgactgtggccaccaaggagacagagggcttccgccgcttcaagaggtctgcccagttcttcaactacaagatccaggccctgggcctgggggaggactggaatgtggagaagggcaccagcgctgggggcggccagaaggtgcggctgctgaagaaggccctggagaagcacgccgacaaggaggacctggtgatcctgtttgctgacagctatgatgtgctgtttgccagcggcccccgggagctgctgaagaagttccggcaggcccggagccaggtggtgttttctgctgaggagctgatctacccagaccggcggctggagaccaagtaccctgtggtgtctgatggcaagcgcttcctgggcagcggcggcttcatcggctacgcccccaacctgagcaagctggtggccgagtgggagggccaggacagcgacagcgaccagctgttctacaccaagatcttcctggaccctgagaagcgggagcagatcaacatcaccctggaccaccgctgccgcatcttccagaacctggatggagccctggatgaggtggtgctgaagtttgagatgggccacgtgcgggccaggaacctggcctatgacaccctgcctgtgctgatccacggcaatggccccaccaagctgcagctgaactacctgggcaactacatcccccgcttctggacctttgagaccggctgcaccgtgtgtgatgagggcctgcggagcctgaagggcattggagatgaggccctgcccaccgtgctggtgggcgtcttcatcgagcagcccaccccatttgtgtccctcttcttccagaggctgctgcggctgcactacccccagaagcacatgaggctcttcatccacaaccacgagcagcaccacaaggcccaggtggaggagttcctggcccagcacggcagcgagtaccagagcgtgaagctggtgggccctgaggtgaggatggccaatgctgatgccaggaacatgggcgctgacctgtgccggcaggacaggagctgcacctactacttctctgtggatgctgatgtggccctgacagagcccaacagcctgcggctgctgatccagcagaacaagaatgtgattgcccccctgatgaccaggcatggccgcctgtggagcaacttctggggcgccctgtctgcagatggctactatgcccggagtgaagattatgtggacatcgtgcagggccggcgggtgggcgtgtggaatgtgccctacatcagcaacatctacctgatcaagggcagcgccctgcggggggagctgcagagcagtgacctcttccaccacagcaagctggaccctgacatggccttctgtgccaacatccggcagcaggatgtgttcatgttcctgaccaacagacacaccctgggccacctgctgagcctggacagctaccgcaccacccacctgcacaatgacctgtgggaggtgttcagcaaccctgaggactggaaggagaagtacatccaccagaactacaccaaggccctggccggcaagctggtggagaccccctgcccagatgtgtactggttccccatcttcacagaggtggcctgtgatgagctggtggaggagatggagcacttcggccagtggagcctgggcaacaacaaggacaaccgcatccagggcggctatgaaaatgtgcccaccatcgacatccacatgaaccagattggatttgagcgggagtggcacaagttcctgctggagtacatcgcccccatgacagagaagctgtacccaggctactacacccgggcccagtttgacctggcctttgtggtgcgctacaagccagatgagcagcccagcctgatgccccaccatgatgccagcaccttcaccatcaacatcgccctgaacagagtgggcgtggactatgagggcggcggctgccgcttcctgcgctacaactgcagcatccgggcccccaggaagggctggaccctgatgcaccctggccgcctgacccactaccacgagggcctgcccaccacccggggcacccgctacatcgctgtgtcctttgtggacccctag

SEQ ID NO: 165269 - DNA, 1176 bp, synthetic construct
  misc_feature 1..1176: note = Description of Artificial Sequence: Synthetic coding sequence
  source 1..1176: mol_type = other DNA
atgaggcccctgctgctgctggccctgctgggctggctgctgctggccgaggccaagggagatgccaagccagaggacaacctgctggtgctgactgtggccaccaaggagacagagggcttccgccgcttcaagaggtctgcccagttcttcaactacaagatccaggccctgggcctgggggaggactggaatgtggagaagggcaccagcgctgggggcggccagaaggtgcggctgctgaagaaggccctggagaagcatgctgacaaggaggacctggtgatcctgtttgctgacagctatgatgtgctgtttgccagcggcccccgggagctgctgaagaagttccggcaggcccggagccaggtggtgttttctgctgaggagctgatctacccagaccggcggctggagaccaagtaccctgtggtgtctgatggcaagcgcttcctgctggaggatgtgttcatgttcctgaccaacagacacaccctgggccacctgctgagcctggacagctaccgcaccacccacctgcacaatgacctgtgggaggtgttcagcaaccctgaggactggaaggagaagtacatccaccagaactacaccaaggccctggccggcaagctggtggagaccccctgcccagatgtgtactggttccccatcttcacagaggtggcctgtgatgagctggtggaggagatggagcacttcggccagtggagcctgggcaacaacaaggacaaccgcatccagggcggctatgaaaatgtgcccaccatcgacatccacatgaaccagatcggctttgagcgggagtggcacaagttcctgctggagtacatcgcccccatgacagagaagctgtacccaggctactacacccgggcccagtttgacctggcctttgtggtgcgctacaagccagatgagcagcccagcctgatgccccaccatgatgccagcaccttcaccatcaacatcgccctgaacagagtgggcgtggactatgaaggaggcggctgccgcttcctgcgctacaactgcagcatccgggcccccaggaagggctggaccctgatgcaccctggccgcctgacccactaccacgagggcctgcccaccacccggggcacccgctacatcgctgtgtcctttgtggacccctag

SEQ ID NO: 165270 - DNA, 852 bp, synthetic construct
  misc_feature 1..852: note = Description of Artificial Sequence: Synthetic coding sequence
  source 1..852: mol_type = other DNA
atgaggcccctgctgctgctggccctgctgggctggctgctgctggccgaggccaagggagatgccaagccagaggacaacctgctggtgctgactgtggccaccaaggagacagagggcttccgccgcttcaagaggtctgcccagttcttcaactacaagatccaggccctgggcctgggggaggactggaatgtggagaagggcaccagcgctgggggcggccagaaggtgcggctgctgaagaaggccctggagaagcatgctgacaaggaggacctggtgatcctgtttgctgacagctatgatgtgctgtttgccagcggcccccgggagctgctgaagaagttccggcaggcccggagccaggtggtgttttctgctgaggagctgatctacccagaccggcggctggagaccaagtaccctgtggtgtctgatggcaagcgcttcctgggcagcggcggcttcatcggctacgcccccaacctgagcaagctggtggccgagtgggagggccaggacagcgacagcgaccagctgttctacaccaagatcttcctggaccctgagaagcgggagcagatcaacatcaccctggaccaccgctgccgcatcttccagaacctggatggagccctggtgagcccctggggccagggccacctgcccggggcctgctatgagctgacagcctctgtgctgaccagcgagctgtctgtgatgcccagcttccctgctgtggtgctgcagctgaactacctgggcaactacatcccccgcttctggacctttgaaacaggctgcaccgtgtgtgatgagggcctgcggagcctgaagggcatcggctag

SEQ ID NO: 165271 - DNA, 678 bp, synthetic construct
  misc_feature 1..678: note = Description of Artificial Sequence: Synthetic coding sequence
  source 1..678: mol_type = other DNA
atgaggcccctgctgctgctggccctgctgggctggctgctgctggccgaggccaagggagatgccaagccagaggccccctgctgccaggagggcctgcgggccggcggcagcggcagcctgcacctgggccgggacttcaccgtgctggccggggcccggggcagccccagccccagcgtgagcagcatcccccgcttctggatccctggcagtgacaacctgctggtgctgactgtggccaccaaggagacagagggcttccgccgcttcaagaggtctgcccagttcttcaactacaagatccaggccctgggcctgggggaggactggaatgtggagaagggcaccagcgctgggggcggccagaaggtgcggctgctgaagaaggccctggagaagcacgccgacaaggaggacctggtgatcctgtttgctgacagctatgatgtgctgtttgccagcggcccccgggagctgctgaagaagttccggcaggcccggagccaggtggtgttttctgctgaggagctgatctacccagaccggcggctggagaccaagtaccctgtggtgtctgatggcaagcgcttcctgggcagcggcggcttcatcggctacgcccccaacctgagcaagctggtggccgagtgggagggccaggacagcgacagctag

SEQ ID NO: 165272 - DNA, 2277 bp, synthetic construct
  misc_feature 1..2277: note = Description of Artificial Sequence: Synthetic coding sequence
  source 1..2277: mol_type = other DNA
atgggcggctgcaccgtgaagccccagctgctgctgctggccctggtgctgcacccctggaacccctgcctgggcgctgacagcgagaagcccagcagcatccccacagacaagctgctggtgatcaccgtggccaccaaggagagtgatggcttccaccgcttcatgcagagcgccaagtacttcaactacacagtgaaggtgctgggccagggcgaggagtggagaggaggagatggcatcaacagcatcggcggcggccagaaggtgcggctgatgaaggaggtgatggagcactatgctgaccaggatgacctggtggtgatgttcacagagtgctttgatgtgatctttgctgggggccctgaggaggtgctgaagaagttccagaaggccaaccacaaggtggtgtttgctgctgatggcatcctgtggccagacaagaggctggccgacaagtaccctgtggtgcacatcggcaagcgctacctgaacagcggcggcttcatcggctacgccccctacgtgaacagaattgtgcagcagtggaacctgcaggacaatgatgatgaccagctgttctacaccaaggtgtacatcgaccccctgaagcgggaggccatcaacatcaccctggaccacaagtgcaagatcttccagaccctgaatggagctgtggatgaggtggtgctgaagtttgaaaatggcaaggcccgggccaagaacaccttctatgagaccctgcctgtggccatcaatggaaatggccccaccaagatcctgctgaactactttggaaactacgtgcccaacagctggacccaggacaatggctgcaccctgtgtgaatttgacacagtggacctgtctgctgtggatgtgcaccccaacgtgtccattggagtcttcatcgagcagcccacccccttcctgccccgcttcctggacatcctgctgaccctggactaccccaaggaggccctgaagctgttcatccacaacaaggaggtgtaccacgagaaggacatcaaggtgttctttgacaaggccaagcatgagatcaagaccatcaagatcgtgggccctgaggagaacctgagccaggccgaggccaggaacatgggcatggacttctgccggcaggatgagaagtgtgactactacttctctgtggatgctgatgtggtgctgaccaaccccaggaccctgaagatcctgattgagcagaacaggaagatcatcgcccccctggtgaccaggcatggcaagctgtggagcaacttctggggcgccctgagcccagatggctactatgcccggtctgaggactatgtggacatcgtgcagggcaacagagtgggcgtgtggaatgtgccctacatggccaacgtgtacctgatcaagggcaagaccctgcggtctgagatgaatgaaagaaactactttgtgcgggacaagctggaccctgacatggccctgtgcagaaatgcccgggagatgaccctgcagcgggagaaggacagccccaccccagagaccttccagatgctgagcccccccaagggcgtcttcatgtacatcagcaacagacatgaatttggccgcctgctgagcacagccaactacaacaccagccactacaacaatgacctgtggcagatctttgagaaccctgtggactggaaggagaagtacatcaacagagactacagcaagatcttcacagagaacatcgtggagcagccctgcccagatgtgttctggttccccatcttcagcgagaaggcctgtgatgagctggtggaggagatggagcactacggcaagtggagcggcggcaagcaccacgacagccgcatcagcggcggctatgaaaatgtgcccacagatgacatccacatgaagcaggtggacctggagaatgtgtggctgcacttcatccgggagttcatcgcccctgtgaccctgaaggtgtttgctggctactacaccaagggctttgccctgctgaactttgtggtgaagtacagccctgagcggcagaggagcctgcggccccaccatgatgccagcaccttcaccatcaacatcgccctgaacaacgtgggggaggacttccagggcggcggctgcaagttcctgcgctacaactgcagcattgagagccccaggaagggctggagcttcatgcaccctggccgcctgacccacctgcacgagggcctgcctgtgaagaatggcacccgctacatcgctgtgtccttcatcgacccctag

SEQ ID NO: 165273 - DNA, 2214 bp, synthetic construct
  misc_feature 1..2214: note = Description of Artificial Sequence: Synthetic coding sequence
  source 1..2214: mol_type = other DNA
atgggcggctgcaccgtgaagccccagctgctgctgctggccctggtgctgcacccctggaacccctgcctgggcgctgacagcgagaagcccagcagcatccccacagacaagctgctggtgatcaccgtggccaccaaggagagtgatggcttccaccgcttcatgcagagcgccaagtacttcaactacacagtgaaggtgctgggccagggcgaggagtggagaggaggagatggcatcaacagcatcggcggcggccagaaggtgcggctgatgaaggaggtgatggagcactatgctgaccaggatgacctggtggtgatgttcacagagtgctttgatgtgatctttgctgggggccctgaggaggtgctgaagaagttccagaaggccaaccacaaggtggtgtttgctgctgatggcatcctgtggccagacaagaggctggccgacaagtaccctgtggtgcacatcggcaagcgctacctgaacagcggcggcttcatcggctacgccccctacgtgaacagaattgtgcagcagtggaacctgcaggacaatgatgatgaccagctgttctacaccaaggtgtacatcgaccccctgaagcgggaggccatcaacatcaccctggaccacaagtgcaagatcttccagaccctgaatggagctgtggatgaggtggtgctgaagtttgaaaatggcaaggcccgggccaagaacaccttctatgagaccctgcctgtggccatcaatggaaatggccccaccaagatcctgctgaactactttggaaactacgtgcccaacagctggacccaggacaatggctgcaccctgtgtgaatttgacacagtggacctgtctgctgtggatgtgcaccccaacgtgtccattggagtcttcatcgagcagcccacccccttcctgccccgcttcctggacatcctgctgaccctggactaccccaaggaggccctgaagctgttcatccacaacaaggaggtgtaccacgagaaggacatcaaggtgttctttgacaaggccaagcatgagatcaagaccatcaagatcgtgggccctgaggagaacctgagccaggccgaggccaggaacatgggcatggacttctgccggcaggatgagaagtgtgactactacttctctgtggatgctgatgtggtgctgaccaaccccaggaccctgaagatcctgattgagcagaacaggaagatcatcgcccccctggtgaccaggcatggcaagctgtggagcaacttctggggcgccctgagcccagatggctactatgcccggtctgaggactatgtggacatcgtgcagggcaacagagtgggcgtgtggaatgtgccctacatggccaacgtgtacctgatcaagggcaagaccctgcggtctgagatgaatgaaagaaactactttgtgcgggacaagctggaccctgacatggccctgtgcagaaatgcccgggagatgggcgtcttcatgtacatcagcaacagacatgaatttggccgcctgctgagcacagccaactacaacaccagccactacaacaatgacctgtggcagatctttgaaaatcctgtggactggaaggagaagtacatcaacagagactacagcaagatcttcacagaaaatattgtggagcagccctgcccagatgtgttctggttccccatcttcagcgagaaggcctgtgatgagctggtggaggagatggagcactacggcaagtggagcggcggcaagcaccacgacagccgcatcagcggcggctatgaaaatgtgcccacagatgacatccacatgaagcaggtggacctggagaatgtgtggctgcacttcatccgggagttcatcgcccctgtgaccctgaaggtgtttgctggctactacaccaagggctttgccctgctgaactttgtggtgaagtacagccctgagcggcagaggagcctgcggccccaccatgatgccagcaccttcaccatcaacatcgccctgaacaacgtgggggaggacttccagggcggcggctgcaagttcctgcgctacaactgcagcattgagagccccaggaagggctggagcttcatgcaccctggccgcctgacccacctgcacgagggcctgcctgtgaagaatggcacccgctacatcgctgtgtccttcatcgacccctag

SEQ ID NO: 165274 - DNA, 1257 bp, synthetic construct
  misc_feature 1..1257: note = Description of Artificial Sequence: Synthetic coding sequence
  source 1..1257: mol_type = other DNA
atgctggagaaccacatcctgcacaagaggatctacatcctgaccttcttcagccagcagatcttcatcctgtgccacgcccacttcatcttcttcttcaccgtgcgggacttctgccggcaggatgagaagtgtgactactacttctctgtggatgctgatgtggtgctgaccaaccccaggaccctgaagatcctgattgagcagaacaggaagatcatcgcccccctggtgaccaggcatggcaagctgtggagcaacttctggggcgccctgagcccagatggctactatgcccggtctgaggactatgtggacatcgtgcagggcaacagagtgggcgtgtggaatgtgccctacatggccaacgtgtacctgatcaagggcaagaccctgcggtctgagatgaatgaaagaaactactttgtgcgggacaagctggaccctgacatggccctgtgcagaaatgcccgggagatgaccctgcagcgggagaaggacagccccaccccagagaccttccagatgctgagcccccccaagggcgtcttcatgtacatcagcaacagacatgaatttggccgcctgctgagcacagccaactacaacaccagccactacaacaatgacctgtggcagatctttgagaaccctgtggactggaaggagaagtacatcaacagagactacagcaagatcttcacagagaacatcgtggagcagccctgcccagatgtgttctggttccccatcttcagcgagaaggcctgtgatgagctggtggaggagatggagcactacggcaagtggagcggcggcaagcaccacgacagccgcatcagcggcggctatgaaaatgtgcccacagatgacatccacatgaagcaggtggacctggagaatgtgtggctgcacttcatccgggagttcatcgcccctgtgaccctgaaggtgtttgctggctactacaccaagggctttgccctgctgaactttgtggtgaagtacagccctgagcggcagaggagcctgcggccccaccatgatgccagcaccttcaccatcaacatcgccctgaacaacgtgggggaggacttccagggcggcggctgcaagttcctgcgctacaactgcagcattgagagccccaggaagggctggagcttcatgcaccctggccgcctgacccacctgcacgagggcctgcctgtgaagaatggcacccgctacatcgctgtgtccttcatcgacccctag

SEQ ID NO: 165275 - DNA, 2112 bp, synthetic construct
  misc_feature 1..2112: note = Description of Artificial Sequence: Synthetic coding sequence
  source 1..2112: mol_type = other DNA
atgcagagcgccaagtacttcaactacacagtgaaggtgctgggccagggcgaggagtggagaggaggagatggcatcaacagcattggaggcggccagaaggtgcggctgatgaaggaggtgatggagcactacgccgaccaggatgacctggtggtgatgttcacagaatgttttgatgtgatctttgctgggggccctgaggaggtgctgaagaagttccagaaggccaaccacaaggtggtgtttgctgctgatggcatcctgtggccagacaagaggctggccgacaagtaccctgtggtgcacatcggcaagcgctacctgaacagcggcggcttcatcggctacgccccctacgtgaaccgcatcgtgcagcagtggaacctgcaggacaatgatgatgaccagctgttctacaccaaggtgtacatcgaccccctgaagcgggaggccatcaacatcaccctggaccacaagtgcaagatcttccagaccctgaatggagctgtggatgaggtggtgctgaagtttgaaaatggcaaggcccgggccaagaacaccttctatgagaccctgcctgtggccatcaatggaaatggccccaccaagatcctgctgaactacttcggcaactacgtgcccaacagctggacccaggacaatggctgcaccctgtgtgaatttgacacagtggacctgtctgctgtggatgtgcaccccaacgtgtccattggagtcttcatcgagcagcccacccccttcctgccccgcttcctggacatcctgctgaccctggactaccccaaggaggccctgaagctgttcatccacaacaaggaggtgtaccacgagaaggacatcaaggtgttctttgacaaggccaagcatgagatcaagaccatcaagatcgtgggccctgaggagaacctgagccaggccgaggccaggaacatgggcatggacttctgccggcaggatgagaagtgtgactactacttctctgtggatgctgatgtggtgctgaccaaccccaggaccctgaagatcctgattgagcagaacaggaagatcatcgcccccctggtgaccaggcatggcaagctgtggagcaacttctggggcgccctgagcccagatggctactatgcccggagtgaagattatgtggacatcgtgcagggcaacagagtgggcgtgtggaatgtgccctacatggccaacgtgtacctgatcaagggcaagaccctgcggtctgagatgaatgaaagaaactactttgtgcgggacaagctggaccctgacatggccctgtgcagaaatgcccgggagatgaccctgcagcgggagaaggacagccccaccccagagaccttccagatgctgagcccccccaagggcgtcttcatgtacatcagcaacagacatgaatttggccgcctgctgagcacagccaactacaacaccagccactacaacaatgacctgtggcagatctttgaaaatcctgtggactggaaggagaagtacatcaacagagactacagcaagatcttcacagaaaatattgtggagcagccctgcccagatgtgttctggttccccatcttcagcgagaaggcctgtgatgagctggtggaggagatggagcactacggcaagtggagcggcggcaagcaccacgacagccgcatcagcggcggctatgaaaatgtgcccacagatgacatccacatgaagcaggtggacctggagaatgtgtggctgcacttcatccgggagttcatcgcccctgtgaccctgaaggtgtttgctggctactacaccaagggctttgccctgctgaactttgtggtgaagtacagccctgagcggcagaggagcctgcggccccaccatgatgccagcaccttcaccatcaacatcgccctgaacaacgtgggggaggacttccagggcggcggctgcaagttcctgcgctacaactgcagcattgagagccccaggaagggctggagcttcatgcaccctggccgcctgacccacctgcacgagggcctgcctgtgaagaatggcacccgctacatcgctgtgtccttcatcgacccctag

SEQ ID NO: 165276 - DNA, 1092 bp, synthetic construct; identical to SEQ ID NO: 148441
  misc_feature 1..1092: note = Description of Artificial Sequence: Synthetic coding sequence
  source 1..1092: mol_type = other DNA

SEQ ID NO: 165277 - DNA, 231 bp, synthetic construct
  misc_feature 1..231: note = Description of Artificial Sequence: Synthetic coding sequence
  source 1..231: mol_type = other DNA
atgaccagcagcggccctggcccccgcttcctgctgctgctgcccctgctgctgcccccagctgccagcgccagtgaccggccccggggccgggaccctgtgaaccctgagaagctgctggtgatcaccgtggccacagctgagacagagggctacctgcgcttcctgcggtctgctgagttcttcaactacacagtgaggaccctgggcctgggggaggagtggaggtag

SEQ ID NO: 165278 - DNA, 732 bp, synthetic construct
  misc_feature 1..732: note = Description of Artificial Sequence: Synthetic coding sequence
  source 1..732: mol_type = other DNA
atggagaagtatgctgaccgggaggacatgatcatcatgtttgtggacagctatgatgtgatcctggccggcagccccacagagctgctgaagaagtttgtgcagagcggcagccggctgctcttctctgctgagagcttctgctggccagagtggggcctggccgagcagtacccagaggtgggcaccgggaagcgcttcctgaacagcggcggcttcatcggctttgccaccaccatccaccagatcgtgcggcagtggaagtacaaggatgatgatgatgaccagctgttctacacccggctgtacctggaccccggcctgcgggagaagctgagcctgaacctggaccacaagagccgcatcttccagaacctgaatggagccctggatgaggtggtgctgaagtttgacaggaacagagtgcgcatcagaaatgtggcctatgacaccctgcccatcgtggtgcatggaaatggccccaccaagctgcagctgaactacctgggcaactacgtgcccaacggctggaccccagagggcggctgcggcttctgcaaccaggacaggaggaccctgcccggcggccctgccagccccccaggagtgtctggccgggtgtgtggcacagcctacagcgtgtctgcccccctgcctgctgctgctgccaccccaggcctgagcccccggcagggccaccccttccctgcccagcagaggggcctgccctag

SEQ ID NO: 165279 - DNA, 1740 bp, synthetic construct
  misc_feature 1..1740: note = Description of Artificial Sequence: Synthetic coding sequence
  source 1..1740: mol_type = other DNA
atggccgccaagagtgatggagctgctgccagcgccagcccagaccctgagggcgccgccggcggggcccggggcagcgctgggggccgcggggaggccgctgctgctgctggccccccaggagtggtgggcgccggcggccctggccccaggtatgagctgcgggactgctgctgggtgctgtgtgccctgctggtgttcttcagtgatggagccacagacctgtggctggccgccagctactacctgcagaaccagcacacctacttcagcctgaccctgctgtttgtgctgctgcccagcctggtggtgcagctgctgtccttccgctggtttgtgtatgactacagcgagcccgccggcagccctggccctgctgtgtccaccaaggacagcgtggccggcggggccgccatcagcaccaaggacagcgctggggccttccgcaccaaggagggcagccctgagcccggcccccagcctgcccccagcagcgccagcgcctacagaagacgctgctgccgcctgtgcatctggctgctgcagaccctggtgcacctgctgcagctgggccaggtgtggagatacctgcgggccctgtacctgggcctgcagagccgctggagaggagagcggctgcggcggcacttctactggcagatgctgtttgaatctgcagatgtgtccatgctgcggctgctggagaccttcctgcggagcgccccccagctggtgctgcagctgagcctgctggtgcacagaggaggagccccagacctgctgcctgccctgagcaccagcgccagcctggtgtccctggcctggaccctggccagctaccagaaggtgctgcgggacagcagagatgacaagaggcccctgagctacaagggagctgtggcccaggtgctgtggcacctgttcagcattgctgcccggggcctggcctttgccctgtttgcctctgtgtacaagctgtacttcggcatcttcatcgtggcccactggtgtgtgatgaccttctgggtgatccagggcgagacagacttctgcatgagcaagtgggaggagatcatctacaacatggtggtgggcatcatctacatcttctgctggttcaacgtgaaggagggccgcagcagaagaaggatgaccctgtaccactgcatcgtgctgctggagaatgctgccctgaccggcttctggtacagcagcaggaacttcagcacagacttctacagcctcatcatggtgtgtgtggtggccagcagctttgccctgggcatcttcttcatgtgtgtgtactactgcctgctgcaccccaacggccccatgctgggcccccaggcccctggctgcatcttcaggaaggccagcgagccctgtggccccccagcagatgccatcaccagcccccccaggagcctgcccaggaccaccggggctgagagagatggagccagcgctggggagagagctggcacccccaccccacctgtgttccaggtgcggcccggcctgccccccacccctgtggcccggaccctgaggacagagggccctgtgatcagaattgacctgcccaggaagaagtacccagcctgggatgcccacttcatcgaccggcggctgaggaagaccatcctggccctggagtacagcagccctgccaccccccggctgcagtacagatctgtgggcaccagccaggagctgctggagtatgagaccaccgtgtag

SEQ ID NO: 165280 - DNA, 765 bp, synthetic construct
  misc_feature 1..765: note = Description of Artificial Sequence: Synthetic coding sequence
  source 1..765: mol_type = other DNA
atggcctggcagggcctggtgctggccgcctgcctgctgatgttccccagcaccacagctgactgcctgagccgctgcagcctgtgtgctgtgaagacccaggacggccccaagcccatcaaccccctcatctgcagcctgcagtgccaggccgccctgctgcccagcgaggagtgggagcgctgccagagcttcctgtccttcttcacccccagcaccctgggcctgaatgacaaggaggacctgggcagcaagtctgtgggggagggcccctacagcgagctggccaagctgagcggcagcttcctgaaggagctggagaagagcaagttcctgcccagcatcagcaccaaggagaacaccctgagcaagagcctggaggagaagctgcggggcctgagtgatggcttccgggagggcgctgagagcgagctgatgagagatgcccagctgaatgatggagccatggagaccggcaccctgtacctggccgaggaggaccccaaggagcaggtgaagagatatggaggcttcctgaggaagtaccccaagaggagcagcgaggtggccggggagggagatggagacagcatgggccatgaagatctctacaagagatatggaggcttcctgcggcgcatccggcccaagctgaagtgggacaaccagaagagatatggaggcttcctgcggcggcagttcaaggtggtgaccaggagccaggaggaccccaatgcctacagcggggagctgtttgatgcctag

SEQ ID NO: 165281 - DNA, 765 bp, synthetic construct; identical to SEQ ID NO: 165280
  misc_feature 1..765: note = Description of Artificial Sequence: Synthetic coding sequence
  source 1..765: mol_type = other DNA

SEQ ID NO: 165282 - DNA, 804 bp, synthetic construct
  misc_feature 1..804: note = Description of Artificial Sequence: Synthetic coding sequence
  source 1..804: mol_type = other DNA
atggcccgcttcctgaccctgtgcacctggctgctgctgctgggccctggcctgctggccaccgtgcgggcagaatgttcccaggactgtgccacctgcagctaccgcctggtgcggcctgctgacatcaacttcctggcctgtgtgatggagtgtgagggcaagctgcccagcctgaagatctgggagacctgcaaggagctgctgcagctgagcaagccagagctgccccaggacggcaccagcaccctgcgggagaacagcaagccagaggagagccacctgctggccaagagatatggaggcttcatgaagagatatggaggcttcatgaagaagatggatgagctgtaccccatggagcctgaggaggaggccaatggaagtgagatcctggccaagagatatggaggcttcatgaagaaggatgctgaggaggatgacagcctggccaacagcagtgacctgctgaaggagctgctggagactggagacaaccgggagaggagccaccaccaggacggcagtgacaatgaggaggaggtgtccaagagatatggaggcttcatgaggggcctgaagaggagcccccagctggaggatgaggccaaggagctgcagaagagatatggaggcttcatgagaagagtgggccggcctgagtggtggatggactaccagaagagatatggaggcttcctgaagagatttgctgaggccctgcccagtgatgaggagggggagagctacagcaaggaggtgcctgagatggagaagagatatggaggcttcatgaggttctag

SEQ ID NO: 165283 - DNA, 804 bp, synthetic construct; identical to SEQ ID NO: 165282
  misc_feature 1..804: note = Description of Artificial Sequence: Synthetic coding sequence
  source 1..804: mol_type = other DNA

SEQ ID NO: 165284 - DNA, 318 bp, synthetic construct
  misc_feature 1..318: note = Description of Artificial Sequence: Synthetic coding sequence
  source 1..318: mol_type = other DNA
atggcccgcttcctgaccctgtgcacctggctgctgctgctgggccctggcctgctggccaccgtgcgggcagaatgttcccaggactgtgccacctgcagctaccgcctggtgcggcctgctgacatcaacttcctggcctgtgtgatggagtgtgagggcaagctgcccagcctgaagatctgggagacctgcaaggagctgctgcagctgagcaagccagagctgccccaggacggcaccagcaccctgcgggagaacagcaagccagaggagagccacctgctggccaagagatatggaggcttcatgaagtag

SEQ ID NO: 165285 - DNA, 570 bp, synthetic construct
  misc_feature 1..570: note = Description of Artificial Sequence: Synthetic coding sequence
  source 1..570: mol_type = other DNA
atggcccgcttcctgaccctgtgcacctggctgctgctgctgggccctggcctgctggccaccgtgcgggcagaatgttcccaggactgtgccacctgcagctaccgcctggtgcggcctgctgacatcaacttcctggcctgtgtgatggagtgtgagggcaagctgcccagcctgaagatctgggagacctgcaaggagctgctgcagctgagcaagccagagctgccccaggacggcaccagcaccctgcgggagaacagcaagccagaggagagccacctgctggccaagagatatggaggcttcatgaagagatatggaggcttcatgaagaagatggatgagctgtaccccatggagcctgaggaggaggccaatggaagtgagatcctggccaagagatatggaggcttcatgaagaaggatgctgaggaggatgacagcctggccaacagcagtgacctgctgaaggagctgctggagactggagacaaccgggagaggagccaccaccaggacggcagtgacaatgaggaggagaagaagaagaagaagaggaaggagtag

SEQ ID NO: 165286 - DNA, 423 bp, synthetic construct
  misc_feature 1..423: note = Description of Artificial Sequence: Synthetic coding sequence
  source 1..423: mol_type = other DNA
atggccggctggcagagctatgtggacaacctgatgtgtgatggctgctgccaggaggccgccatcgtgggctactgtgatgccaagtatgtgtgggccgccacagctgggggcgtcttccagagcatcacccccatcgagattgacatgattgtgggcaaggaccgggagggcttcttcaccaacggcctgaccctgggcgccaagaagtgcagcgtcatccgggacagcctgtatgtggatggagactgcaccatggacatccgcaccaagagccagggcggggagcccacctacaacgtggccgtgggccgggccggccgggtgctggtgtttgtgatgggcaaggagggcgtgcacggcggcggcctgaacaagaaggcctacagcatggccaagtacctgcgggacagcggcttctag

SEQ ID NO: 165287 - DNA, 423 bp, synthetic construct
  misc_feature 1..423: note = Description of Artificial Sequence: Synthetic coding sequence
  source 1..423: mol_type = other DNA
atggccggctggcagagctatgtggacaacctgatgtgtgatggctgctgccaggaggccgccatcgtgggctactgtgatgccaagtatgtgtgggccgccacagctgggggcgtcttccagagcatcacccccatcgagattgacatgattgtgggcaaggaccgggagggcttcttcaccaacggcctgaccctgggcgccaagaagtgcagcgtcatccgggacagcctgtatgtggatggagactgcaccatggacatccgcaccaagagccagggcggggagcccacctacaacgtggccgtgggccgggccggccgggccctggtgattgtgatgggcaaggagggcgtgcacggcggcaccctgaacaagaaggcctatgagctggccctgtacctgcggcggagtgatgtgtag

SEQ ID NO: 165288 - DNA, 414 bp, synthetic construct
  misc_feature 1..414: note = Description of Artificial Sequence: Synthetic coding sequence
  source 1..414: mol_type = other DNA
atgggagactggaaggtgtacatctctgctgtgctgcgggaccagagaattgatgatgtggccatcgtgggccacgccgacaacagctgtgtgtgggccagcaggcctgggggcctgctggccgccatcagcccccaggaggtgggcgtgctgaccggccctgacagacacaccttcctgcaggccggcctgtctgtgggcggccgccgctgctgcgtcatccgggaccacctgctggccgagggagatggagtgctggatgcccggaccaagggcctggatgcccgggctgtgtgtgtgggccgggccccccgggccctgctggtgctgatgggcagaagaggagtgcatggaggcatcctgaacaagacagtgcatgagctgatccggggcctgaggatgcagggcgcctag

SEQ ID NO: 165289 - DNA, 1167 bp, synthetic construct
  misc_feature 1..1167: note = Description of Artificial Sequence: Synthetic coding sequence
  source 1..1167: mol_type = other DNA
atgaagtggatggtggtggtgctggtgtgcctgcagctgctggaggccgctgtggtgaaggtgcccctgaagaagttcaagagcatccgggagaccatgaaggagaagggcctgctgggggagttcctgcggacccacaagtatgaccctgcctggaagtacagatttggagacctgtctgtgacctatgagcccatggcctacatggatgctgcctactttggagagatcagcatcggcaccccaccccagaacttcctggtgctgtttgacaccggcagcagcaacctgtgggtgcccagcgtgtactgccagagccaggcctgcaccagccacagccgcttcaaccccagcgagagcagcacctacagcaccaacggccagaccttcagcctgcagtatggcagcggcagcctgaccggcttcttcggctatgacaccctgactgtgcagagcatccaggtgcccaaccaggagtttggcctgtctgaaaatgaacctggcaccaactttgtgtatgcccagtttgatggcatcatgggcctggcctacccagccctgtctgtggatgaggccaccacagccatgcagggcatggtgcaggagggcgccctgaccagccctgtgttttctgtgtacctgagcaaccagcagggcagcagtggaggagctgtggtgtttggaggagtggacagcagcctgtacacaggccagatctactgggcccctgtgacccaggagctgtactggcagatcggcatcgaggagttcctgattggaggccaggccagcggctggtgcagcgagggctgccaggccatcgtggacaccggcaccagcctgctgactgtgccccagcagtacatgtctgccctgctgcaggccaccggggcccaggaggatgaatatggccagttcctggtgaactgcaacagcatccagaacctgcccagcctgaccttcatcatcaacggggtggagttccccctgccccccagcagctacatcctgagcaacaacggctactgcaccgtgggcgtggagcccacctacctgagcagccagaatggccagcccctgtggatcctgggagatgtgttcctgcggagctactacagcgtgtatgacctgggcaacaacagagtgggctttgccacagctgcctag

SEQ ID NO: 165290 - DNA, 315 bp, synthetic construct
  misc_feature 1..315: note = Description of Artificial Sequence: Synthetic coding sequence
  source 1..315: mol_type = other DNA
atgaagtggatggtggtggtgctggtgtgcctgcagctgctggaggccgctgtggtgaaggtgcccctgaagaagttcaagagcatccgggagaccatgaaggagaagggcctgctgggggagttcctgcggacccacaagtatgaccctgcctggaagtacagatttggagacctgtctgtgacctatgagcccatggcctacatggatgctgcctactttggagagatcagcatcggcaccccaccccagaacttcctggtgctgtttgacaccggcagcagccccctgcccctggaccctgcccccagctag

SEQ ID NO: 165291 - DNA, 411 bp, synthetic construct
  misc_feature 1..411: note = Description of Artificial Sequence: Synthetic coding sequence
  source 1..411: mol_type = other DNA
atgaagtggatggtggtggtgctggtgtgcctgcagctgctggaggccgctgtggtgaaggtgcccctgaagaagttcaagagcatccgggagaccatgaaggagaagggcctgctgggggagttcctgcggacccacaagtatgaccctgcctggaagtacagatttggagacctgtctgtgacctatgagcccatggcctacatggatgtgcagagcatccaggtgcccaaccaggagtttggcctgtctgaaaatgagcccggcaccaactttgtgtatgcccagtttgatggcatcatgggcctggcctacccagccctgtctgtggatgaggccaccacagccatgcagggcatggtgcaggagggcgccctgaccagccctgtgttttctgtgtacctgtcctag

SEQ ID NO: 165292 - DNA, 948 bp, synthetic construct
  misc_feature 1..948: note = Description of Artificial Sequence: Synthetic coding sequence
  source 1..948: mol_type = other DNA
atgaagtggatggtggtggtgctggtgtgcctgcagctgctggaggccgctgtggtgaaggtgcccctgaagaagttcaagagcatccgggagaccatgaaggagaagggcctgctgggggagttcctgcggacccacaagtatgaccctgcctggaagtacagatttggagacctgtctgtgacctatgagcccatggcctacatggatgctgcctactttggagagatcagcatcggcaccccaccccagaacttcctggtgctgtttgacaccggcagcagcaacctgtgggtgcccagcgtgtactgccagagccaggcctgcaccagccacagccgcttcaaccccagcgagagcagcacctacagcaccaacggccagaccttcagcctgcagtatggcagcggcagcctgaccggcttcttcggctatgacaccctgactgtgcagagcatccaggtgcccaaccaggagtttggcctgtctgaaaatgaacctggcaccaactttgtgtatgcccagtttgatggcatcatgggcctggcctacccagccctgtctgtggatgaggccaccacagccatgcagggcatggtgcaggagggcgccctgaccagccctgtgttttctgtgtacctgagcaacctggtgctggagagcagcggcctgggccccctgctgacccccagcagagctgccccacccagcagcaccctgcagctgcctgagaagcccctggagcagacctggaacatcctgacccccttcaccaagaccctgcctgtgagcaacctgagcaggaaggtgacctcctgggccggcgtgggcatccctgtgacctgcctgcctgaggccggcagcggcggggagcggcgggcagaatgtggcctgggcgtgcccaccacccggggcccccccaggagccagcaccacagcggggcctag

SEQ ID NO: 165293 - DNA, 543 bp, synthetic construct
  misc_feature 1..543: note = Description of Artificial Sequence: Synthetic coding sequence
  source 1..543: mol_type = other DNA
atgctgtgcctgctgctgaccctgggcgtggccctggtgtgtggggtgcctgccatggacatcccccagaccaagcaggacctggagctgcccaagctggccggcacctggcacagcatggccatggccaccaacaacatcagcctgatggccaccctgaaggcccccctgcgggtgcacatcaccagcctgctgcccaccccagaggacaacctggagatcgtgctgcaccgctgggagaacaacagctgtgtggagaagaaggtgctgggggagaagacagagaaccccaagaagttcaagatcaactacacagtggccaatgaggccaccctgctggacacagattatgacaacttcctgttcctgtgcctgcaggacaccaccacccccatccagagcatgatgtgccagtacctggcccgggtgctggtggaggatgatgagatcatgcagggcttcatccgggccttccggcccctgcccaggcacctgtggtacctgctggacctgaagcagatggaggagccctgccgcttctag

SEQ ID NO: 165294 - DNA, 261 bp, synthetic construct
  misc_feature 1..261: note = Description of Artificial Sequence: Synthetic coding sequence
  source 1..261: mol_type = other DNA
atgctgtgcctgctgctgaccctgggcgtggccctggtgtgtggggtgcctgccatggacatcccccagaccaagcaggacctggagctgcccaaggacaccaccacccccatccagagcatgatgtgccagtacctggcccgggtgctggtggaggatgatgagatcatgcagggcttcatccgggccttccggcccctgcccaggcacctgtggtacctgctggacctgaagcagatggaggccccctgctggctgtag

SEQ ID NO: 165295 - DNA, 543 bp, synthetic construct; identical to SEQ ID NO: 165293
  misc_feature 1..543: note = Description of Artificial Sequence: Synthetic coding sequence
  source 1..543: mol_type = other DNA

SEQ ID NO: 165296 - DNA, 438 bp, synthetic construct
  misc_feature 1..438: note = Description of Artificial Sequence: Synthetic coding sequence
  source 1..438: mol_type = other DNA
atgctgtgcctgctgctgaccctgggcgtggccctggtgtgtggggtgcctgccatggacatcccccagaccaagcaggacctggagctgcccaaggcccccctgcgggtgcacatcaccagcctgctgcccaccccagaggacaacctggagatcgtgctgcaccgctgggagaacaacagctgtgtggagaagaaggtgctgggggagaagacagagaaccccaagaagttcaagatcaactgcaaggccagcggggccccccagctgtcctggaagccccagggccccaggacagatcctgccagcagcacagcccgggtgctggtggaggatgatgagatcatgcagggcttcatccgggccttccggcccctgcccaggcacctgtggtacctgctggacctgaagcagatggaggagccctgccgcttctag

SEQ ID NO: 165297 - DNA, 399 bp, synthetic construct
  misc_feature 1..399: note = Description of Artificial Sequence: Synthetic coding sequence
  source 1..399: mol_type = other DNA
ctgatggccaccctgaaggcccccctgcgggtgcacatcaccagcctgctgcccaccccagaggacaacctggagatcgtgctgcaccgctgggagaacaacagctgtgtggagaagaaggtgctgggggagaagacagagaaccccaagaagttcaagatcaactacacagtggccaatgaggccaccctgctggacacagattatgacaacttcctgttcctgtgcctgcaggacaccaccacccccatccagagcatgatgtgccagtacctggcccgggtgctggtggaggatgatgagatcatgcagggcttcatccgggccttccggcccctgcccaggcacctgtggtacctgctggacctgaagcagatggaggagccctgccgcttctag

SEQ ID NO: 165298 - DNA, 396 bp, synthetic construct
  misc_feature 1..396: note = Description of Artificial Sequence: Synthetic coding sequence
  source 1..396: mol_type = other DNA
tgagtgcctgccatggacatcccccagaccaagcaggacctggagctgcccaaggcccccctgcgggtgcacatcaccagcctgctgcccaccccagaggacaacctggagatcgtgctgcaccgctgggagaacaacagctgtgtggagaagaaggtgctgggggagaagacagagaaccccaagaagttcaagatcaactgcaaggccagcggggccccccagctgtcctggaagccccagggccccaggacagatcctgccagcagcacagcccgggtgctggtggaggatgatgagatcatgcagggcttcatccgggccttccggcccctgcccaggcacctgtggtacctgctggacctgaagcagatggaggagccctgccgcttctag

SEQ ID NO: 165299 - DNA, 381 bp, synthetic construct
  misc_feature 1..381: note = Description of Artificial Sequence: Synthetic coding sequence
  source 1..381: mol_type = other DNA
tgacccctgcgggtgcacatcaccagcctgctgcccaccccagaggacaacctggagatcgtgctgcaccgctgggagaacaacagctgtgtggagaagaaggtgctgggggagaagacagagaaccccaagaagttcaagatcaactacacagtggccaatgaggccaccctgctggacacagattatgacaacttcctgttcctgtgcctgcaggacaccaccacccccatccagagcatgatgtgccagtacctggcccgggtgctggtggaggatgatgagatcatgcagggcttcatccgggccttccggcccctgcccaggcacctgtggtacctgctggacctgaagcagatggaggagccctgccgcttctag

SEQ ID NO: 165300 - DNA, 102 bp, synthetic construct
  misc_feature 1..102: note = Description of Artificial Sequence: Synthetic coding sequence
  source 1..102: mol_type = other DNA
tgagaaatcatgcagggcttcatccgggccttccggcccctgcccaggcacctgtggtacctgctggacctgaagcagatggaggagccctgccgcttctag

SEQ ID NO: 165301 - DNA, 543 bp, synthetic construct; identical to SEQ ID NO: 165293
  misc_feature 1..543: note = Description of Artificial Sequence: Synthetic coding sequence
  source 1..543: mol_type = other DNA

SEQ ID NO: 165302 - DNA, 510 bp, synthetic construct
  misc_feature 1..510: note = Description of Artificial Sequence: Synthetic coding sequence
  source 1..510: mol_type = other DNA
atgctgtgcctgctgctgaccctgggcgtggccctggtgtgtggggtgcctgccatggacatcccccagaccaagcaggacctggagctgcccaagctggccggcacctggcacagcatggccatggccaccaacaacatcagcctgatggccaccctgaaggcccccctgcgggtgcacatcaccagcctgctgcccaccccagaggacaacctggagatcgtgctgcaccgctgggagaacaacagctgtgtggagaagaaggtgctgggggagaagacagagaaccccaagaagttcaagatcaactacacagtggccaatgaggccaccctgctggacacagattatgacaacttcctgttcctgtgcctgcaggacaccaccacccccatccagagcatgatgtgccagtacctggagagctggtggaggaccatgaggagctgccgggacagcagcggcctgagcggcccctgccccggcacctacggcacctgctggacctag

SEQ ID NO: 165303 - DNA, 2274 bp, synthetic construct
  misc_feature 1..2274: note = Description of Artificial Sequence: Synthetic coding sequence
  source 1..2274: mol_type = other DNA
atgagcaggaagatcagcaaggagagcaagaaggtgaacatcagcagcagcctggagagcgaggacatcagcctggagaccaccgtgcccacagatgacatcagcagcagcgaggagcgggagggcaaggtgcgcatcacccggcagctgattgaaaggaaggagctgctgcacaacatccagctgctgaagattgagctgagccagaagaccatgatgattgacaacctgaaggtggactacctgaccaagattgaggagctggaggagaagctgaatgatgccctgcaccagaagcagctgctgaccctgcggctggacaaccagctggccttccagcagaaggatgccagcaagtaccaggagctgatgaagcaggagatggagaccatcctgctgcggcagaagcagctggaggagaccaacctgcagctgcgggagaaggctggagatgtgagaagaaacctgcgggactttgagctgacagaggagcagtacatcaagctgaaggccttccctgaggaccagctgagcatcccagaatatgtgtctgtgcgcttctatgagctggtgaaccccctgaggaaggagatctgtgagctgcaggtgaagaagaacatcctggccgaggagctgagcaccaacaagaaccagctgaagcagctgacagagacctatgaggaggacaggaagaactacagcgaggtgcagatccgctgccagaggctggccctggagctggccgacaccaagcagctgatccagcagggcgactaccggcaggagaactatgacaaggtgaagtcagaaagagatgccctggagcaggaggtgattgagctgcggaggaagcatgagatcctggaggccagccacatgatccagaccaaggagaggtctgagctgagcaaggaggtggtgaccctggagcagacagtgaccctgctgcagaaggacaaggagtacctgaaccggcagaacatggagctgtctgtgcgctgtgcccacgaggaggaccggctggagcggctgcaggcccagctggaggagagcaagaaggcccgggaggagatgtatgagaagtatgtggccagccgggaccactacaagacagaatatgagaacaagctgcatgatgagctggagcagatccggctgaagaccaaccaggagattgaccagctgagaaatgccagccgggagatgtatgagcgggagaacagaaacctgcgggaggcccgggacaatgctgtggccgagaaggagagagctgtgatggccgagaaggatgccctggagaagcatgaccagctgctggaccgctaccgggagctgcagctgagcacagagagcaaggtgacagagttcctgcaccagagcaagctgaagagctttgaaagtgagcgggtgcagctgctgcaggaggagacagccaggaacctgacccagtgccagctggagtgtgagaagtaccagaagaagctggaggtgctgaccaaggagttctacagcctgcaggccagcagcgagaagaggatcacagagctgcaggcccagaacagcgagcaccaggcccggctggacatctatgagaagctggagaaggagctggatgagatcatcatgcagacagctgagattgaaaatgaagatgaagctgagcgggtgctcttctcctatggctacggggccaacgtgcccaccacagccaagaggcggctgaagcagagcgtgcacctggcccggcgggtgctgcagctggagaagcagaacagcctcatcctgaaggacctggagcacaggaaggaccaggtgacccagctgagccaggagctggaccgggccaacagcctgctgaaccagacccagcagccctaccgctacctgattgagagcgtgcggcagagggacagcaagattgacagcctgacagagagcatcgcccagctggagaaggatgtgagcaacctgaacaaggagaagagcgccctgctgcagaccaagaaccagatggccctggacctggagcagctgctgaaccaccgggaggagctggccgccatgaagcagatcctggtgaagatgcacagcaagcacagcgagaacagcctgctgctgaccaagacagagcccaagcacgtgacagagaaccagaagagcaagaccctgaatgtgcccaaggagcacgaggacaacatcttcacccccaagcccaccctcttcaccaagaaggaggcccctgagtggagcaagaagcagaagatgaagacctag

SEQ ID NO: 165304 - DNA, 651 bp, synthetic construct
  misc_feature 1..651: note = Description of Artificial Sequence: Synthetic coding sequence
  source 1..651: mol_type = other DNA
ttcagaacagccaaggtggagaatgaagatgaggccgagcgggtgctcttctcctatggctatggagccaacgtgcccaccacagccaagaggcggctgaagcagagcgtgcacctggccaggagagtgctgcagctggagaagcagaacagcctcatcctgaaggacctggagcacaggaaggaccaggtgacccagctgagccaggagctggaccgggccaacagcctgctgaaccagacccagcagccctaccgctacctgattgaatctgtgcggcagagggacagcaagattgacagcctgacagagagcatcgcccagctggagaaggatgtgagcaacctgaacaaggagaagagcgccctgctgcagaccaagaaccagatggccctggacctggagcagctgctgaaccaccgggaggagctggccgccatgaagcagatcctggtgaagatgcacagcaagcacagcgagaacagcctgctgctgaccaagacagagcccaagcacgtgacagagaaccagaagagcaagaccctgaatgtgcccaaggagcacgaggacaacatcttcacccccaagcccaccctcttcaccaagaaggaggcccctgagtggagcaagaagcagaagatgaagacctag

SEQ ID NO: 165305 - DNA, 1245 bp, synthetic construct
  misc_feature 1..1245: note = Description of Artificial Sequence: Synthetic coding sequence
  source 1..1245: mol_type = other DNA
atgagcaggaagatcagcaaggagagcaagaaggtgaacatcagcagcagcctggagagcgaggacatcagcctggagaccaccgtgcccacagatgacatcagcagcagcgaggagcgggagggcaaggtgcgcatcacccggcagctgattgaaaggaaggagctgctgcacaacatccagctgctgaagattgagctgagccagaagaccatgatgattgacaacctgaaggtggactacctgaccaagattgaggagctggaggagaagctgaatgatgccctgcaccagaagcagctgctgaccctgcggctggacaaccagctggccttccagcagaaggatgccagcaagtaccaggagctgatgaagcaggagatggagaccatcctgctgcggcagaagcagctggaggagaccaacctgcagctgcgggagaaggctggagatgtgagaagaaacctgcgggactttgagctgacagaggagcagtacatcaagctgaaggccttccctgaggaccagctgagcatcccagaatatgtgtctgtgcgcttctatgagctggtgaaccccctgaggaaggagatctgtgagctgcaggtgaagaagaacatcctggccgaggagctgagcaccaacaagaaccagctgaagcagctgacagagacctatgaggaggacaggaagaactacagcgaggtgcagatccgctgccagaggctggccctggagctggccgacaccaagcagctgatccagcagggcgactaccggcaggagaactatgacaaggtgaagtcagaaagagatgccctggagcaggaggtgattgagctgcggaggaagcatgagatcctggaggccagccacatgatccagaccaaggagaggtctgagctgagcaaggaggtggtgaccctggagcagacagtgaccctgctgcagaaggacaaggagtacctgaaccggcagaacatggagctgtctgtgcgctgtgcccacgaggaggaccggctggagcggctgcaggcccagctggaggagagcaagaaggcccgggaggagatgtatgagaagtatgtggccagccgggaccactacaagacagaatatgagaacaagctgcatgatgagctggagcagatccggctgaagaccaaccaggagattgaccagctgagaaatgccagccgggagatgtatgagcgggagaacaggaagaagaggaagaagaagtag

SEQ ID NO: 165306 - DNA, 1734 bp, synthetic construct
  misc_feature 1..1734: note = Description of Artificial Sequence: Synthetic coding sequence
  source 1..1734: mol_type = other DNA
atgacagagctggccggggccagcagcagctgctgccacaggcctgctggccgcggggccatgcagagcgtgctgcaccacttccagaggctgcggggccgggagggcggcagccacttcatcaacaccagcagccccagaggagaggccaagatgagcatcaccagtgatgaggtgaacttcctggtgtaccgctacctgcaggagagcggcttcagccacagcgccttcacctttggaattgagagccacatcagccagagcaacatcaatggcaccctggtgcccccagctgccctgatcagcatcctgcagaagggcctgcagtatgtggaggccgagatcagcatcaatgaagatggcaccgtgtttgatggccggcccatcgagagcctgagcctgattgatgctgtgatgccagatgtggtgcagacccggcagcaggccttccgggagaagctggcccagcagcaggccagcgctgctgctgctgctgctgctgccacagctgctgccacagctgccaccaccaccagcgctggggtgagccaccagaaccccagcaagaaccgggaggccaccgtgaatggagaagaaaatagagcccacagcgtgaacaaccacgccaagcccatggagattgatggagaggtggagatccccagcagcaaggccaccgtgctgcggggccatgaaagtgaggtgttcatctgtgcctggaaccctgtgtctgacctgctggccagcggcagcggggacagcacagcccgcatctggaacctgaatgaaaacagcaatggaggcagcacccagctggtgctgcggcactgcatccgggagggcggccatgatgtgcccagcaacaaggatgtgaccagcctggactggaacaccaacggcaccctgctggccaccggcagctatgatggctttgcccgcatctggacagaagatggcaacctggccagcaccctgggccagcacaagggccccatctttgccctgaagtggaacaggaagggcaactacatcctgtctgctggggtggacaagaccaccatcatctgggatgcccacactggagaggccaagcagcagttccccttccacagcgccccagccctggatgtggactggcagaacaacaccacctttgccagctgcagcacagacatgtgcatccacgtgtgccgcctgggctgtgacaggcctgtgaagaccttccagggccacaccaatgaggtgaatgccatcaagtgggaccccagcggcatgctgctggccagctgcagtgatgacatgaccctgaagatctggagcatgaagcaggaggtgtgcatccatgacctgcaggcccacaacaaggagatctacaccatcaagtggagccccactggacctgccaccagcaaccccaacagcaacatcatgctggccagcgccagctttgacagcacagtgcggctgtgggacatcgagcggggcgtgtgcacccacaccctgaccaagcaccaggagcctgtgtacagcgtggccttctccccagatggcaagtacctggccagcggcagctttgataaatgtgtgcacatctggaacacccagagcggcaacctggtgcacagctaccggggcaccggcggcatctttgaggtgtgctggaatgcccggggggacaaggtgggcgccagcgccagtgatggctctgtgtgtgtgctggacctgaggaagtag

SEQ ID NO: 165307 - DNA, 432 bp, synthetic construct
  misc_feature 1..432: note = Description of Artificial Sequence: Synthetic coding sequence
  source 1..432: mol_type = other DNA
atggctgctgaagatgtggtggccactggagctgaccccagcgacctggagagcggcggcctgctgcacgagatcttcaccagccccctgaacctgctgctgctgggcctgtgcatcttcctgctgtacaagatcgtgcggggggaccagcctgctgccagcggggacagtgatgatgatgagcccccacccctgccccggctgaagaggcgggacttcaccccagctgagctgcggagatttgatggagtgcaggacccccgcatcctgatggccatcaacgggaaggtgtttgatgtgaccaagggcaggaagttctacggccctgtgaagtaccaccacgtgggcaagctgctgaaggagggggaggagcccaccgtgtacagtgatgaggaggagcccaaggatgagagcgccaggaagaatgactag

SEQ ID NO: 165308 - DNA, 672 bp, synthetic construct
  misc_feature 1..672: note = Description of Artificial Sequence: Synthetic coding sequence
  source 1..672: mol_type = other DNA
atggctgctggagatggagatgtgaagctgggcaccctgggcagcggcagcgagagcagcaatgatggcggcagcgagagccctggagatgctggagctgctgctgagggcggcggctgggccgctgctgccctggccctgctgactggaggaggagagatgctgctgaatgtggccctggtggccctggtgctgctgggcgcctaccgcctgtgggtgcgctggggcagaagaggcctgggcgctggggccggggccggggaggagagccctgccaccagcctgcccaggatgaagaagagggacttcagcctggagcagctgcggcagtatgatggcagcaggaacccccgcatcctgctggccgtgaatggcaaggtgtttgatgtgaccaagggcagcaagttctacggccctgctggcccctacggcatctttgctggaagagatgccagccggggcctggccaccttctgcctggacaaggatgccctgagagatgaatatgatgacctgagtgacctgaatgctgtgcagatggagagcgtgcgggagtgggagatgcagttcaaggagaagtatgactatgtgggccgcctgctgaagccaggagaggagcccagcgagtacacagatgaggaggacaccaaggaccacaacaagcaggactag

SEQ ID NO: 165309 - DNA, 402 bp, synthetic construct
  misc_feature 1..402: note = Description of Artificial Sequence: Synthetic coding sequence
  source 1..402: mol_type = other DNA
atggctgctggagatggagatgtgaagctgggcaccctgggcagcggcagcgagagcagcaatgatggcggcagcgagagccctggagatgctggagctgctgctgagggcggcggctgggccgctgctgccctggccctgctgactggaggaggagagatgctgctgaatgtggccctggtggccctggtgctgctgggcgcctaccgcctgtgggtgcgctggggcagaagaggcctgggcgctggggccggggccggcctgcagctgggcgctgctgcccctgtgcggcggctgccccagcctgcccacccagcccggggccagtgggagagcctgcggcgggaccagaggcagcaggtgctgcggcctgggggcagcatctggaacatctgctggtag

SEQ ID NO: 165310 - DNA, 744 bp, synthetic construct
  misc_feature 1..744: note = Description of Artificial Sequence: Synthetic coding sequence
  source 1..744: mol_type = other DNA
atgggcggggccggccggggcgtgggggagggccggggccggggcggcggcggccgccgctggagggctgtgatggctgctggagatggagatgtgaagctgggcaccctgggcagcggcagcgagagcagcaatgatggcggcagcgagagccctggagatgctggagctgctgctgagggcggcggctgggccgctgctgccctggccctgctgactggaggaggagagatgctgctgaatgtggccctggtggccctggtgctgctgggcgcctaccgcctgtgggtgcgctggggcagaagaggcctgggcgctggggccggggccggggaggagagccctgccaccagcctgcccaggatgaagaagagggacttcagcctggagcagctgcggcagtatgatggcagcaggaacccccgcatcctgctggccgtgaatggcaaggtgtttgatgtgaccaagggcagcaagttctacggccctgctggcccctacggcatctttgctggaagagatgccagccggggcctggccaccttctgcctggacaaggatgccctgagagatgaatatgatgacctgagtgacctgaatgctgtgcagatggagagcgtgcgggagtgggagatgcagttcaaggagaagtatgactatgtgggccgcctgctgaagccaggagaggagcccagcgagtacacagatgaggaggacaccaaggaccacaacaagcaggactag

SEQ ID NO: 165311 - DNA, 1041 bp, synthetic construct
  misc_feature 1..1041: note = Description of Artificial Sequence: Synthetic coding sequence
  source 1..1041: mol_type = other DNA
atggccatggcccagaagctgagccacctgctgcccagcctgcggcaggtgatccaggagccccagctgagcctgcagcctgagcctgtgttcaccgtggacagagctgaggtgcccccactcttctggaagccctacatctatgccggctaccggcccctgcaccagacctggaggttctacttccgcaccctcttccagcagcacaatgaggccgtgaatgtgtggacccacctgctggccgccctggtgctgctgctgcggctggccctgtttgtggagaccgtggacttctggggagacccccacgccctgcccctcttcatcatcgtgctggccagcttcacctacctgtccttcagcgccctggcccacctgctgcaggccaagtctgagttctggcactacagcttcttcttcctggactatgtgggcgtggccgtgtaccagtttggaagtgccctggcccacttctactatgccatcgagcccgcctggcacgcccaggtgcaggccgtgttcctgcccatggccgccttcctggcctggctgagctgcatcggcagctgctacaacaagtacatccagaagccaggcctgctgggccgcacctgccaggaggtgcccagcgtgctggcctatgccctggacatcagccctgtggtgcaccgcatctttgtgtccagtgaccccaccacagatgatcctgccctgctgtaccacaagtgccaggtggtgttcttcctgctggccgccgccttcttcagcaccttcatgcctgagcgctggttccctggcagctgccacgtgtttggccagggccaccagctgttccacatcttcctggtgctgtgcaccctggcccagctggaggccgtggccctggactatgaggcccggcggcccatctatgagcccctgcacacccactggccccacaacttcagcggcctcttcctgctgactgtgggcagcagcatcctgacagccttcctgctgagccagctggtgcagaggaagctggaccagaagaccaagtag

SEQ ID NO: 165312 - DNA, 867 bp, synthetic construct
  misc_feature 1..867: note = Description of Artificial Sequence: Synthetic coding sequence
  source 1..867: mol_type = other DNA
atgcagatcccccaggccccctggcctgtggtgtgggccgtgctgcagctgggctggaggcctggctggttcctggacagcccagaccggccctggaacccccccaccttctccccagccctgctggtggtgacagaaggagacaatgccaccttcacctgcagcttcagcaacaccagcgagagctttgtgctgaactggtacaggatgagccccagcaaccagacagacaagctggccgccttccctgaggacaggagccagcccggccaggactgccgcttccgggtgacccagctgcccaacggccgggacttccacatgtctgtggtgcgggccaggagaaatgacagcggcacctacctgtgtggggccatcagcctggcccccaaggcccagatcaaggagagcctgcgggcagagctgcgggtgacagaaagaagagctgaggtgcccacagcccaccccagccccagccccaggcctgctggccagttccagaccctggtggtgggcgtggtgggcggcctgctgggcagcctggtgctgctggtgtgggtgctggccgtcatctgcagcagagctgcccggggcaccatcggggccaggagaacaggccagcccctgaaggaggaccccagcgctgtgcctgtgttttctgtggactatggagagctggacttccagtggagggagaagaccccagagccccctgtgccctgtgtgcctgagcagacagaatatgccaccatcgtgttccccagcggcatgggcaccagcagccctgcccggcggggcagcgcagatggccccaggtctgcccagcccctgcggccagaagatggccactgctcctggcccctgtag

SEQ ID NO: 165313 - DNA, 540 bp, synthetic construct
  misc_feature 1..540: note = Description of Artificial Sequence: Synthetic coding sequence
  source 1..540: mol_type = other DNA
atgcagatcccccaggccccctggcctgtggtgtgggccgtgctgcagctgggctggaggcctggctggttcctggacagcccagaccggccctggaacccccccaccttctccccagccctgctggtggtgacagaaggagacaatgccaccttcacctgcagcttcagcaacaccagcgagagctttgtgctgaactggtacaggatgagccccagcaaccagacagacaagctggccgccttccctgaggacaggagccagcccggccaggactgccgcttccgggtgacccagctgcccaacggccgggacttccacatgtctgtggtgcgggccaggagaaatgacagcggcacctacctgtgtggggccatcagcctggcccccaaggcccagatcaaggagagcctgcgggcagagctgcgggtgacaggcaccatcggggccaggagaacaggccagcccctgaaggaggaccccagcgctgtgcctgtgttttctgtggactatggagagctggacttccagtggaggtag

SEQ ID NO: 165314 - DNA, 639 bp, synthetic construct
  misc_feature 1..639: note = Description of Artificial Sequence: Synthetic coding sequence
  source 1..639: mol_type = other DNA
atgaggatgaccatggaggagatgaagaatgaggccgagaccacctccatggtgtccatgcccctgtatgctgtgatgtaccctgtgttcaatgagctggagcgggtgaacctgtctgctgcccagaccctgcgggccgccttcatcaaggccgagaaggagaaccctggcctgacccaggacatcatcatgaagatcctggagaagaagtctgtggaggtgaacttcacagagagcctgctgaggatggctgctgatgatgtggaggagtacatgattgaaagacctgagcctgagttccaggacctgaatgagaaggcccgggccctgaagcagatcctgagcaagatcccagatgagatcaatgacagagtgcgcttcctgcagaccatcaaggacatcgccagcgccatcaaggagctgctggacacagtgaacaacgtgttcaagaagtaccagtaccagaacagaagagccctggagcaccagaagaaggagtttgtgaagtacagcaagagcttcagtgacaccctgaagacctacttcaaggatggcaaggccatcaacgtgtttgtgtctgccaacagactcatccaccagaccaacctgatcctgcagaccttcaagacagtggcctag

SEQ ID NO: 165315 - DNA, 639 bp, synthetic construct; identical to SEQ ID NO: 165314
  misc_feature 1..639: note = Description of Artificial Sequence: Synthetic coding sequence
  source 1..639: mol_type = other DNA

SEQ ID NO: 165316 - DNA, 441 bp, synthetic construct
  misc_feature 1..441: note = Description of Artificial Sequence: Synthetic coding sequence
  source 1..441: mol_type = other DNA
atgaggatgaccatggaggagatgaagaatgaggccgagaccacctccatggtgtccatgcccctgtatgctgtgatgtaccctgtgttcaatgagctggagcgggtgaacctgtctgctgcccagaccctgcgggccgccttcatcaaggccgagaaggagaaccctggcctgacccaggacatcatcatgaagatcctggagaagaagtctgtggaggtgaacttcacagagagcctgctgaggatggctgctgatgatgtggaggagtacatgattgaaagacctgagcctgagttccaggacctgaatgagaaggcccgggccctgaagcagatcctgagcaagatcccagatgagatcaatgacagagtgcgcttcctgcagaccatcaaggacatcgccagcgccatcaaggagctgctggacacagtgaactag

SEQ ID NO: 165317 - DNA, 240 bp, synthetic construct
  misc_feature 1..240: note = Description of Artificial Sequence: Synthetic coding sequence
  source 1..240: mol_type = other DNA
atgaggatgaccatggaggagatgaagaatgaggccgagaccacctccatggtgtccatgcccctgtatgctgtgatgtaccctgtgttcaatgagctggagcgggtgaacctgtctgctgcccagaccctgcgggccgccttcatcaaggccgagaaggagaaccctggcctgacccaggacatcatcatgaagatcctggagaagaagtctgtggaggtgaacttcacagagagctag

SEQ ID NO: 165318 - DNA, 639 bp, synthetic construct; identical to SEQ ID NO: 165314
  misc_feature 1..639: note = Description of Artificial Sequence: Synthetic coding sequence
  source 1..639: mol_type = other DNA

SEQ ID NO: 165319 - DNA, 639 bp, synthetic construct; identical to SEQ ID NO: 165314
  misc_feature 1..639: note = Description of Artificial Sequence: Synthetic coding sequence
  source 1..639: mol_type = other DNA

SEQ ID NO: 165320 - DNA, 609 bp, synthetic construct
  misc_feature 1..609: note = Description of Artificial Sequence: Synthetic coding sequence
  source 1..609: mol_type = other DNA
atgaggatgaccatggaggagatgaagaatgaggccgagaccacctccatggtgtccatgcccctgtatgctgtgatgtaccctgtgttcaatgagctggagcgggtgaacctgtctgctgcccagaccctgcgggccgccttcatcaaggccgagaaggagaaccctggcctgacccaggacatcatcatgaagatcctggagaagaagtctgtggaggtgaacttcacagagagcctgctgaggatggctgctgatgatgtggaggagtacatgattgaaagacctgagcctgagttccaggacctgaatgagaaggcccgggccctgaagcagatcctgagcaagatcccagatgagatcaatgacagagtgcgcttcctgcagaccatcaaggacatcgccagcgccatcaaggagctgctggacacagtgaacaacgtgttcaagaagtaccagtaccagaacagaagagccctggagcaccagaagaaggagtttgtgaagtacagcaagagcttcagtgacaccctgaagacctacttcaaggatggcaaggccatcaacgtgtttgtgtctgccaacagactcatccaccagaccaactag

SEQ ID NO: 165321 - DNA, 561 bp, synthetic construct
  misc_feature 1..561: note = Description of Artificial Sequence: Synthetic coding sequence
  source 1..561: mol_type = other DNA
atgaggatgaccatggaggagatgaagaatgaggccgagaccacctccatggtgtccatgcccctgtatgctgtgatgtaccctgtgttcaatgagctggagcgggtgaacctgtctgctgcccagaccctgcgggccgccttcatcaaggccgagaaggagaaccctggcctgacccaggacatcatcatgaagatcctggagaagaagtctgtggaggtgaacttcacagagagcctgctgaggatggctgctgatgatgtggaggagtacatgattgaaagacctgagcctgagttccaggacctgaatgagaaggcccgggccctgaagcagatcctgagcaagatcccagatgagatcaatgacagagtgcgcttcctgcagaccatcaaggacatcgccagcgccatcaaggagctgctggacacagtgaacaacgtgttcaagaagtaccagtaccagaacagaagagccctggagcaccagaagaaggagtttgtgaagtacagcaagagcttcagtgacaccctgaagacctacttcaaggatggcaagtag

SEQ ID NO: 165322 - DNA, 405 bp, synthetic construct
  misc_feature 1..405: note = Description of Artificial Sequence: Synthetic coding sequence
  source 1..405: mol_type = other DNA
atgaggatgaccatggaggagatgaagaatgaggccgagaccacctccatggtgtccatgcccctgtatgctgtgatgtaccctgtgttcaatgagctggagcgggtgaacctgtctgctgcccagaccctgcgggccgccttcatcaaggccgagaaggagaaccctggcctgacccaggacatcatcatgaagatcctggagaagaagtctgtggaggtgaacttcacagagagcctgctgaggatggctgctgatgatgtggaggagtacatgattgaaagacctgagcctgagttccaggacctgaatgagaaggcccgggccctgaagcagatcctgagcaagatcccagatgagatcaatgacagagtgcgcttcctgcagaccatcaaggacatctag

SEQ ID NO: 165323 - DNA, 639 bp, synthetic construct; identical to SEQ ID NO: 165314
  misc_feature 1..639: note = Description of Artificial Sequence: Synthetic coding sequence
  source 1..639: mol_type = other DNA

SEQ ID NO: 165324 - DNA, 5616 bp, synthetic construct
  misc_feature 1..5616: note = Description of Artificial Sequence: Synthetic coding sequence
  source 1..5616: mol_type = other DNA
atggccaacctggaggagagcttcccccggggcggcaccaggaagatccacaagccagagaaggccttccagcagagcgtggagcaggacaacctgtttgacatcagcacagaggagggcagcaccaagaggaagaagagccagaagggccctgccaagaccaagaagctgaagattgagaagcgggagagcagcaagagcgcccgggagaagtttgagatcctgtctgtggagagcctgtgtgagggcatgaggatcctgggctgtgtgaaggaggtgaatgagctggagctggtgatcagcctgcccaacggcctgcagggctttgtgcaggtgacagagatctgtgatgcctacaccaagaagctgaatgagcaggtgacccaggagcagcccctgaaggacctgctgcacctgcctgagctgttcagccctggcatgctggtgcgctgtgtggtgagcagcctgggcatcacagaccggggcaagaagtctgtgaagctgagcctgaaccccaagaatgtgaacagagtgctgtctgctgaggccctgaagccaggcatgctgctgactggaacagtgagcagcctggaggaccacggctacctggtggacatcggcgtggatggcacccgggccttcctgcccctgctgaaggcccaggagtacatccggcagaagaacaagggggccaagctgaaggtgggccagtacctgaactgcatcgtggagaaggtgaagggaaatggaggagtggtgtccctgtctgtgggccacagcgaggtgtccacagccatcgccacagagcagcagagctggaacctgaacaacctgctgcccggcctggtggtgaaggcccaggtgcagaaggtgacccccttcggcctgaccctgaacttcctgaccttcttcaccggggtggtggacttcatgcacctggaccccaagaaggccggcacctacttcagcaaccaggccgtgcgggcctgcatcctgtgtgtgcaccccaggaccagggtggtgcacctgagcctgcggcccatcttcctgcagcccggccggcccctgacccggctgagctgccagaacctgggcgctgtgctggatgatgtgcctgtgcagggcttcttcaagaaggccggggccaccttccggctgaaggatggagtgctggcctatgcccggctgagccacctgagtgacagcaagaatgtgttcaaccctgaggccttcaagccaggcaacacccacaagtgccgcatcatcgactacagccagatggatgagctggccctgctgagcctgcggaccagcatcatcgaggcccagtacctgcgctaccatgacatcgagcccggggctgtggtgaagggcaccgtgctgaccatcaagagctatggcatgctggtgaaggtgggggagcagatgaggggcctggtgccccccatgcacctggccgacatcctgatgaagaaccctgagaagaagtaccacatcggagatgaggtgaagtgccgggtgctgctgtgtgaccctgaggccaagaagctgatgatgaccctgaagaagaccctcatcgagagcaagctgcctgtgatcacctgctacgcagatgccaagccaggcctgcagacccacggcttcatcatccgggtgaaggactatggctgcatcgtgaagttctacaacaacgtgcagggcctggtgcccaagcatgagctgagcacagagtacatcccagaccctgagagggtcttctacacaggccaggtggtgaaggtggtggtgctgaactgtgagcccagcaaggagaggatgctgctgtccttcaagctgagcagtgaccctgagcccaagaaggagcctgctggccacagccagaagaagggcaaggccatcaacatcggccagctggtggatgtgaaggtgctggagaagaccaaggatggcctggaggtggccgtgctgccccacaacatccgggccttcctgcccaccagccacctgagtgaccacgtggccaacggccccctgctgcaccactggctgcaggccggggacatcctgcaccgggtgctgtgcctgagccagagcgagggccgggtgctgctgtgcaggaagccagccctggtgtccacagtggagggcggccaggaccccaagaacttcagcgagatccaccctggcatgctgctgattggatttgtgaagagcatcaaggactatggagtcttcatccagttccccagcggcctgagcggcctggcccccaaggccatcatgtctgacaagtttgtgaccagcaccagtgaccactttgtggagggccagacagtggccgccaaggtgaccaacgtggatgaggagaagcagaggatgctgctgagcctgcggctgagtgactgtggcctgggggacctggccatcaccagcctgctgctgctgaaccagtgcctggaggagctgcagggcgtgcgcagcctgatgagcaacagagacagcgtgctgatccagaccctggccgagatgaccccaggcatgttcctggacctggtggtgcaggaggtgctggaggatggctctgtggtgttttctgggggccctgtgcctgacctggtgctgaaggccagccgctaccaccgggccggccaggaggtggagagcggccagaagaagaaggtggtgatcctgaatgtggacctgctgaagctggaggtgcacgtgtccctgcaccaggacctggtgaacaggaaggccaggaagctgaggaagggcagcgagcaccaggccatcgtgcagcacctggagaagagctttgccatcgccagcctggtggagaccggccacctggccgccttcagcctgaccagccacctgaatgacaccttccgctttgattctgagaagctgcaggtgggccagggcgtgtccctgaccctgaagaccacagagcccggggtgacaggcctgctgctggccgtggagggccctgctgccaagaggaccatgaggcccacccagaaggacagcgagaccgtggatgaagatgaggaggtggaccctgccctgactgtgggcaccatcaagaagcacaccctgagcattggagacatggtgacaggcaccgtgaagagcatcaagcccacccacgtggtggtgaccctggaggatggcatcatcggctgcatccacgccagccacatcctggatgatgtgcctgagggcaccagccccaccaccaagctgaaggtgggcaagacagtgacagcccgggtgattggaggccgggacatgaagaccttcaagtacctgcccatcagccaccccaggtttgtgaggaccatccctgagctgtctgtgcggcccagcgagctggaggatggccacacagccctgaacacccacagcgtgagccccatggagaagatcaagcagtaccaggccggccagacagtgacctgcttcctgaagaagtacaacgtggtgaagaagtggctggaggtggagatcgccccagacatccggggccgcatccccctgctgctgaccagcctgtccttcaaggtgctgaagcacccagacaagaagttccgggtgggccaggccctgcgggccaccgtggtgggccctgacagcagcaagaccctgctgtgcctgagcctgaccggcccccacaagctggaggagggggaggtggccatgggccgggtggtgaaggtgaccccaaatgaaggcctgactgtgtccttcccctttgggaagattggaacagtgtccatcttccacatgtctgacagctacagcgagacccccctggaggactttgtgccccagaaggtggtgcgctgctacatcctgagcacagctgacaacgtgctgaccctgagcctgcggagcagcaggaccaaccctgagaccaagagcaaggtggaggaccctgagatcaacagcatccaggacatcaaggagggccagctgctgcggggctacgtgggcagcatccagccccatggagtcttcttccggctgggccccagcgtggtgggcctggcccgctacagccacgtgtcccagcacagccccagcaagaaggccctgtacaacaagcacctgcctgagggcaagctgctgacagcccgggtgctgcggctgaaccaccagaagaacctggtggagctgtccttcctgcccggggacaccgggaagccagatgtgctgagcgccagcctggagggccagctgaccaagcaggaggagaggaagacagaggccgaggagcgggaccagaagggggagaagaagaaccagaagagaaatgagaagaagaaccagaagggccaggaggaggtggagatgcccagcaaggagaagcagcagccccagaagccccaggcccagaagagaggaggccgggagtgccgggagagcggcagcgagcaggagcgggtgtccaagaagcccaagaaggccggcctgtctgaagaagatgacagcctggtggatgtgtactaccgggagggcaaggaggaggccgaggagaccaacgtgctgcccaaggagaagcagaccaagccagctgaggccccccggctgcagctgagcagcggctttgcctggaatgtgggcctggacagcctgaccccagccctgccccccctggccgagagcagtgacagtgaagaagatgagaagccccaccaggccaccatcaagaagagcaagaaggagcgggagctggagaagcagaaggccgagaaggagctgagcagaattgaggaggccctgatggaccccggccggcagcctgagagcgcagatgactttgaccggctggtgctgagcagccccaacagcagcatcctgtggctgcagtacatggccttccacctgcaggccacagaaattgagaaggcccgggctgtggccgagcgggccctgaagaccatctccttccgggaggagcaggagaagctgaatgtgtgggtggccctgctgaacctggagaacatgtatggcagccaggagagcctgaccaaggtgtttgaaagagctgtgcagtacaatgagcccctgaaggtgttcctgcacctggccgacatctatgccaagtctgagaagttccaggaggccggggagctgtacaacaggatgctgaagcgcttccggcaggagaaggctgtgtggatcaagtatggagccttcctgctgcggcgcagccaggccgccgccagccaccgggtgctgcagagggccctggagtgcctgcccagcaaggagcacgtggatgtgattgccaagtttgcccagctggagttccagctgggagatgctgagcgggccaaggccatctttgagaacaccctgagcacctaccccaagaggacagatgtgtggagcgtgtacatcgacatgaccatcaagcacggcagccagaaggatgtgcgggacatctttgagagggtcatccacctgagcctggcccccaagaggatgaagttcttcttcaagcgctacctggactatgagaagcagcacggcacagagaaggatgtgcaggccgtgaaggccaaggccctggagtatgtggaggccaagagctctgtgctggaggactag

SEQ ID NO: 165325 - DNA, 3705 bp, synthetic construct
  misc_feature 1..3705: note = Description of Artificial Sequence: Synthetic coding sequence
  source 1..3705: mol_type = other DNA
atggccaacctggaggagagcttcccccggggcggcaccaggaagatccacaagccagagaaggccttccagcagagcgtggagcaggacaacctgtttgacatcagcacagaggagggcagcaccaagaggaagaagagccagaagggccctgccaagaccaagaagctgaagattgagaagcgggagagcagcaagagcgcccgggagaagtttgagatcctgtctgtggagagcctgtgtgagggcatgaggatcctgggctgtgtgaaggaggtgaatgagctggagctggtgatcagcctgcccaacggcctgcagggctttgtgcaggtgacagagatctgtgatgcctacaccaagaagctgaatgagcaggtgacccaggagcagcccctgaaggacctgctgcacctgcctgagctgttcagccctggcatgctggtgcgctgtgtggtgagcagcctgggcatcacagaccggggcaagaagtctgtgaagctgagcctgaaccccaagaatgtgaacagagtgctgtctgctgaggccctgaagccaggcatgctgctgactggaacagtgagcagcctggaggaccacggctacctggtggacatcggcgtggatggcacccgggccttcctgcccctgctgaaggcccaggagtacatccggcagaagaacaagggggccaagctgaaggtgggccagtacctgaactgcatcgtggagaaggtgaagggaaatggaggagtggtgtccctgtctgtgggccacagcgaggtgtccacagccatcgccacagagcagcagagctggaacctgaacaacctgctgcccggcctggtggtgaaggcccaggtgcagaaggtgacccccttcggcctgaccctgaacttcctgaccttcttcaccggggtggtggacttcatgcacctggaccccaagaaggccggcacctacttcagcaaccaggccgtgcgggcctgcatcctgtgtgtgcaccccaggaccagggtggtgcacctgagcctgcggcccatcttcctgcagcccggccggcccctgacccggctgagctgccagaacctgggcgctgtgctggatgatgtgcctgtgcagggcttcttcaagaaggccggggccaccttccggctgaaggatggagtgctggcctatgcccggctgagccacctgagtgacagcaagaatgtgttcaaccctgaggccttcaagccaggcaacacccacaagtgccgcatcatcgactacagccagatggatgagctggccctgctgagcctgcggaccagcatcatcgaggcccagtacctgcgctaccatgacatcgagcccggggctgtggtgaagggcaccgtgctgaccatcaagagctatggcatgctggtgaaggtgggggagcagatgaggggcctggtgccccccatgcacctggccgacatcctgatgaagaaccctgagaagaagtaccacatcggagatgaggtgaagtgccgggtgctgctgtgtgaccctgaggccaagaagctgatgatgaccctgaagaagaccctcatcgagagcaagctgcctgtgatcacctgctacgcagatgccaagccaggcctgcagacccacggcttcatcatccgggtgaaggactatggctgcatcgtgaagttctacaacaacgtgcagggcctggtgcccaagcatgagctgagcacagagtacatcccagaccctgagagggtcttctacacaggccaggtggtgaaggtggtggtgctgaactgtgagcccagcaaggagaggatgctgctgtccttcaagctgagcagtgaccctgagcccaagaaggagcctgctggccacagccagaagaagggcaaggccatcaacatcggccagctggtggatgtgaaggtgctggagaagaccaaggatggcctggaggtggccgtgctgccccacaacatccgggccttcctgcccaccagccacctgagtgaccacgtggccaacggccccctgctgcaccactggctgcaggccggggacatcctgcaccgggtgctgtgcctgagccagagcgagggccgggtgctgctgtgcaggaagccagccctggtgtccacagtggagggcggccaggaccccaagaacttcagcgagatccaccctggcatgctgctgattggatttgtgaagagcatcaaggactatggagtcttcatccagttccccagcggcctgagcggcctggcccccaaggccatcatgtctgacaagtttgtgaccagcaccagtgaccactttgtggagggccagacagtggccgccaaggtgaccaacgtggatgaggagaagcagaggatgctgctgagcctgcggctgagtgactgtggcctgggggacctggccatcaccagcctgctgctgctgaaccagtgcctggaggagctgcagggcgtgcgcagcctgatgagcaacagagacagcgtgctgatccagaccctggccgagatgaccccaggcatgttcctggacctggtggtgcaggaggtgctggaggatggctctgtggtgttttctgggggccctgtgcctgacctggtgctgaaggccagccgctaccaccgggccggccaggaggtggagagcggccagaagaagaaggtggtgatcctgaatgtggacctgctgaagctggaggtgcacgtgtccctgcaccaggacctggtgaacaggaaggccaggaagctgaggaagggcagcgagcaccaggccatcgtgcagcacctggagaagagctttgccatcgccagcctggtggagaccggccacctggccgccttcagcctgaccagccacctgaatgacaccttccgctttgattctgagaagctgcaggtgggccagggcgtgtccctgaccctgaagaccacagagcccggggtgacaggcctgctgctggccgtggagggccctgctgccaagaggaccatgaggcccacccagaaggacagcgagaccgtggatgaagatgaggaggtggaccctgccctgactgtgggcaccatcaagaagcacaccctgagcattggagacatggtgacaggcaccgtgaagagcatcaagcccacccacgtggtggtgaccctggaggatggcatcatcggctgcatccacgccagccacatcctggatgatgtgcctgagggcaccagccccaccaccaagctgaaggtgggcaagacagtgacagcccgggtgattggaggccgggacatgaagaccttcaagtacctgcccatcagccaccccaggtttgtgaggaccatccctgagctgtctgtgcggcccagcgagctggaggatggccacacagccctgaacacccacagcgtgagccccatggagaagatcaagcagtaccaggccggcctgtctgaagaagatgacagcctggtggatgtgtactaccgggagggcaaggaggaggccgaggagaccaacgtgctgcccaaggagaagcagaccaagccagctgaggccccccggctgcagctgagcagcggctttgcctggaatgtgggcctggacagcctgaccccagccctgccccccctggccgagagcagtgacagtgaagaagatgagaagccccaccaggccacccagatcaagaagagcaagaagtag

SEQ ID NO: 165326 - DNA, 936 bp, synthetic construct
  misc_feature 1..936: note = Description of Artificial Sequence: Synthetic coding sequence
  source 1..936: mol_type = other DNA
atggctgctgctggggcccggcctgtggagctgggctttgctgagagcgccccagcctggaggctgcggtctgagcagttccccagcaaggtgtatgcccccctgcccggccgcccagatgccttccaccgctgcatcttcctgttctgctgccgggagcagccctgctgtgccggcctgcgggtcttcaggaaccagctgcccaggaagaatgacttctacagctatgagcccccatctgaaaatcctcctcctgagactggagagagcgtgtgcctgcagctgaagagcggggcccacctgtgccgggtgtgtggctgcctgggccccaagacctgcagccgctgccacaaggcctactactgcagcaaggagcaccagaccctggactggaggctgggccacaagcaggcctgtgcccagcctgaccacctggaccacatcatcccagaccacaacttcctgtttcctgagtttgaaattgtgattgaaacagaagatgagatcatgcctgaggtggtggagaaggaggactacagcgagatcatcggctccatgggagaggccctggaggaggagctggacagcatggccaagcatgagagccgggaggacaagatcttccagaagttcaagacccagatcgccctggagcctgagcagatcctgcgctatggccggggcatcgcccccatctggatctctggagagaacatcccccaggagaaggacatcccagactgcccctgtggggccaagaggatcctggagttccaggtgatgccccagctgctgaactacctgaaggctgaccggctgggcaagagcattgactggggcatcctggccgtgttcacctgtgccgagagctgcagcctgggcaccggctacacagaggagtttgtgtggaagcaggatgtgacagacaccccctag

SEQ ID NO: 165327 - DNA, 687 bp, synthetic construct
  misc_feature 1..687: note = Description of Artificial Sequence: Synthetic coding sequence
  source 1..687: mol_type = other DNA
atggctgctgctggggcccggcctgtggagctgggctttgctgagagcgccccagcctggaggctgcggtctgagcagttccccagcaaggtgggcggccgcccagcctggctgggcgctgctggcctgcccggcccccaggccctggcctgtgagctgtgtggccggcccctgtccttcctgctgcaggtgtatgcccccctgcccggccgcccagatgccttccaccgctgcatcttcctgttctgctgccgggagcagccctgctgtgccggcctgcgggtcttcaggaaccagctgcccaggaagaatgacttctacagctatgagcccccatctgagaaccccccacctgagaccggggagagcgtgtgcctgcagctgaagagcggggcccacctgtgccgggtgtgtggctgcctgggccccaagacctgcagccgctgccacaaggcctactactgcagcaaggagcaccagaccctggactggaggctgggccacaagcaggcctgtgcccagcctgaccacctggaccacatcatcccagaccacaacttcctgtttcctgagtttgagatcgtcatcgagacagaagatgagatcatgcctgaggtggtggagaaggaggactacagcgagatcatcggctccatgggcaagcagttccaggacttcatccactag

SEQ ID NO: 165328 - DNA, 1035 bp, synthetic construct
  misc_feature 1..1035: note = Description of Artificial Sequence: Synthetic coding sequence
  source 1..1035: mol_type = other DNA
atggctgctgctggggcccggcctgtggagctgggctttgctgagagcgccccagcctggaggctgcggtctgagcagttccccagcaaggtgggcggccgcccagcctggctgggcgctgctggcctgcccggcccccaggccctggcctgtgagctgtgtggccggcccctgtccttcctgctgcaggtgtatgcccccctgcccggccgcccagatgccttccaccgctgcatcttcctgttctgctgccgggagcagccctgctgtgccggcctgcgggtcttcaggaaccagctgcccaggaagaatgacttctacagctatgagcccccatctgagaaccccccacctgagaccggggagagcgtgtgcctgcagctgaagagcggggcccacctgtgccgggtgtgtggctgcctgggccccaagacctgcagccgctgccacaaggcctactactgcagcaaggagcaccagaccctggactggaggctgggccacaagcaggcctgtgcccagcctgaccacctggaccacatcatcccagaccacaacttcctgtttcctgagtttgagatcgtcatcgagacagaagatgagatcatgcctgaggtggtggagaaggaggactacagcgagatcatcggctccatgggagaggccctggaggaggagctggacagcatggccaagcatgagagccgggaggacaagatcttccagaagttcaagacccagatcgccctggagcctgagcagatcctgcgctatggccggggcatcgcccccatctggatcagcggggagaacatcccccaggagaaggacatcccagactgcccctgtggggccaagaggatcctggagttccaggtgatgccccagctgctgaactacctgaaggctgaccggctgggcaagagcattgactggggcatcctggccgtgttcacctgtgccgagagctgcagcctgggcaccggctacacagaggagtttgtgtggaagcaggatgtgacagacaccccctag

SEQ ID NO: 165329 - DNA, 588 bp, synthetic construct
  misc_feature 1..588: note = Description of Artificial Sequence: Synthetic coding sequence
  source 1..588: mol_type = other DNA
atggctgctgctggggcccggcctgtggagctgggctttgctgagagcgccccagcctggaggctgcggtctgagcagttccccagcaaggtgtatgcccccctgcccggccgcccagatgccttccaccgctgcatcttcctgttctgctgccgggagcagccctgctgtgccggcctgcgggtcttcaggaaccagctgcccaggaagaatgacttctacagctatgagcccccatctgaaaatcctcctcctgagactggagagagcgtgtgcctgcagctgaagagcggggcccacctgtgccgggtgtgtggctgcctgggccccaagacctgcagccgctgccacaaggcctactactgcagcaaggagcaccagaccctggactggaggctgggccacaagcaggcctgtgcccagcctgaccacctggaccacatcatcccagaccacaacttcctgtttcctgagtttgaaattgtgattgaaacagaagatgagatcatgcctgaggtggtggagaaggaggactacagcgagatcatcggctccatgggcaagcagttccaggacttcatccactag

SEQ ID NO: 165330 - DNA, 567 bp, synthetic construct
  misc_feature 1..567: note = Description of Artificial Sequence: Synthetic coding sequence
  source 1..567: mol_type = other DNA
atggctgctgctggggcccggcctgtggagctgggctttgctgagagcgccccagcctggaggctgcggtctgagcagttccccagcaaggtgtatgcccccctgcccggccgcccagatgccttccaccgctgcatcttcctgttctgctgccgggagcagccctgctgtgccggcctgcgggtcttcaggaaccagctgcccaggaagaatgacttctacagctatgagcccccatctgaaaatcctcctcctgagactggagagagcgtgtgcctgcagctgaagagcggggcccacctgtgccgggtgtgtggctgcctgggccccaagacctgcagccgctgccacaaggcctactactgcagcaaggagcaccagaccctggactggaggctgggccacaagcaggcctgtgcccagcctgaccacctggaccacatcatcccagaccacaacttcctgtttcctgagtttgaaattgtgattgaaacagaagatgagatcatgcctgaggtggtggagaaggaggactacagcgagatcatcggctccatgggcatctag

SEQ ID NO: 165331 - DNA, 2607 bp, synthetic construct
  misc_feature 1..2607: note = Description of Artificial Sequence: Synthetic coding sequence
  source 1..2607: mol_type = other DNA
atggccaccttcatctctgtgcagctgaagaagaccagcgaggtggacctggccaagcccctggtgaagttcatccagcagacctaccccagcggcggggaggagcaggcccagtactgcagagctgctgaggagctgagcaagctgcggcgggctgctgtgggccggcccctggacaagcatgaaggagccctggagaccctgctgcgctactatgaccagatctgcagcattgagcccaagttccccttcagcgagaaccagatctgcctgaccttcacctggaaggatgcctttgataaaggcagcctgtttggaggctctgtgaagctggccctggccagcctgggctatgagaagagctgtgtgctcttcaactgtgccgccctggccagccagattgctgctgagcagaacctggacaatgatgagggcctgaagattgctgccaagcactaccagtttgccagcggggccttcctgcacatcaaggagaccgtgctgagcgccctgagccgggagcccaccgtggacatcagcccagacacagtgggcaccctgagcctcatcatgctggcccaggcccaggaggtgttcttcctgaaggccacccgggacaagatgaaggatgccatcatcgccaagctggccaaccaggccgctgactactttggagatgccttcaagcagtgccagtacaaggacaccctgcccaaggaggtgtttcctgtgctggccgccaagcactgcatcatgcaggccaatgctgagtaccaccagagcatcctggccaagcagcagaagaagtttggagaggagatcgcccggctgcagcacgccgctgagctgatcaagacagtggccagccgctatgatgaatatgtgaatgtgaaggacttcagtgacaagatcaacagagccctggccgccgccaagaaggacaatgacttcatctaccatgacagagtgcctgacctgaaggacctggaccccatcggcaaggccaccctggtgaagagcacccctgtgaatgtgcccatcagccagaagttcacagacctgtttgagaagatggtgcctgtgtctgtgcagcagagcctggccgcctacaaccagaggaaggctgacctggtgaacagaagcatcgcccagatgagggaggccaccaccctggccaatggagtgctggccagcctgaacctgcctgctgccattgaagatgtgtctggggacacagtgccccagagcatcctgaccaagagccgctctgtgattgagcagggcggcatccagacagtggaccagctgatcaaggagctgcctgagctgctgcagaggaaccgggagatcctggatgagagcctgcggctgctggatgaggaggaggccacagacaatgacctgcgggccaagttcaaggagcgctggcagaggacccccagcaatgagctgtacaagcccctgcgggcagagggcaccaacttcagaacagtgctggacaaggctgtgcaggctgatggccaggtgaaggagtgctaccagagccaccgggacaccatcgtgctgctgtgcaagccagagcctgagctgaatgctgccatccccagcgccaacccagccaagaccatgcagggcagcgaggtggtgaatgtgctgaagagcctgctgagcaacctggatgaggtgaagaaggagcgggagggcctggagaatgacctgaagtctgtgaactttgacatgaccagcaagttcctgacagccctggcccaggatggagtcatcaatgaggaggccctgtctgtgacagagctggacagagtgtatggaggcctgaccaccaaggtgcaggagagcctgaagaagcaggagggcctgctgaagaacatccaggtgagccaccaggagttcagcaagatgaagcagagcaacaatgaggccaacctgcgggaggaggtgctgaagaacctggccacagcctatgacaactttgtggagctggtggccaacctgaaggagggcaccaagttctacaatgagctgacagagatcctggtgcgcttccagaacaagtgcagcgacatcgtgtttgccaggaagacagaaagagatgagctgctgaaggacctgcagcagagcatcgcccgggagcccagcgcccccagcatccccaccccagcctaccagagcagccctgctgggggccacgcccccaccccacccaccccagcccccaggaccatgccacccaccaagccccagcccccagcccggcccccacctcctgtgctgcctgccaacagagcccccagcgccacagcccccagccctgtgggcgccggcacagctgccccagcccccagccagaccccaggcagcgcccccccaccccaggcccagggccccccctaccccacctacccaggctacccaggctactgccagatgcccatgcccatgggctacaacccctatgcctacggccagtacaacatgccctacccacctgtgtaccaccagagccctggccaggccccctacccaggcccccagcagcccagctaccccttcccccagcccccccagcagagctactacccccagcagtag

SEQ ID NO: 165332 - DNA, 2622 bp, synthetic construct
  misc_feature 1..2622: note = Description of Artificial Sequence: Synthetic coding sequence
  source 1..2622: mol_type = other DNA
atggccaccttcatctctgtgcagctgaagaagaccagcgaggtggacctggccaagcccctggtgaagttcatccagcagacctaccccagcggcggggaggagcaggcccagtactgcagagctgctgaggagctgagcaagctgcggcgggctgctgtgggccggcccctggacaagcatgaaggagccctggagaccctgctgcgctactatgaccagatctgcagcattgagcccaagttccccttcagcgagaaccagatctgcctgaccttcacctggaaggatgcctttgataaaggcagcctgtttggaggctctgtgaagctggccctggccagcctgggctatgagaagagctgtgtgctcttcaactgtgccgccctggccagccagattgctgctgagcagaacctggacaatgatgagggcctgaagattgctgccaagcactaccagtttgccagcggggccttcctgcacatcaaggagaccgtgctgagcgccctgagccgggagcccaccgtggacatcagcccagacacagtgggcaccctgagcctcatcatgctggcccaggcccaggaggtgttcttcctgaaggccacccgggacaagatgaaggatgccatcatcgccaagctggccaaccaggccgctgactactttggagatgccttcaagcagtgccagtacaaggacaccctgcccaagtacttctacttccaggaggtgtttcctgtgctggccgccaagcactgcatcatgcaggccaatgctgagtaccaccagagcatcctggccaagcagcagaagaagtttggagaggagatcgcccggctgcagcacgccgctgagctgatcaagacagtggccagccgctatgatgaatatgtgaatgtgaaggacttcagtgacaagatcaacagagccctggccgccgccaagaaggacaatgacttcatctaccatgacagagtgcctgacctgaaggacctggaccccatcggcaaggccaccctggtgaagagcacccctgtgaatgtgcccatcagccagaagttcacagacctgtttgagaagatggtgcctgtgtctgtgcagcagagcctggccgcctacaaccagaggaaggctgacctggtgaacagaagcatcgcccagatgagggaggccaccaccctggccaacggggtgctggccagcctgaacctgcctgctgccattgaagatgtgtctggggacacagtgccccagagcatcctgaccaagagccgcagcgtcatcgagcagggcggcatccagacagtggaccagctgatcaaggagctgcctgagctgctgcagaggaaccgggagatcctggatgagagcctgcggctgctggatgaggaggaggccacagacaatgacctgcgggccaagttcaaggagcgctggcagaggacccccagcaatgagctgtacaagcccctgcgggcagagggcaccaacttcagaacagtgctggacaaggctgtgcaggctgatggccaggtgaaggagtgctaccagagccaccgggacaccatcgtgctgctgtgcaagccagagcctgagctgaatgctgccatccccagcgccaacccagccaagaccatgcagggcagcgaggtggtgaatgtgctgaagagcctgctgagcaacctggatgaggtgaagaaggagcgggagggcctggagaatgacctgaagtctgtgaactttgacatgaccagcaagttcctgacagccctggcccaggatggagtcatcaatgaggaggccctgtctgtgacagagctggacagagtgtatggaggcctgaccaccaaggtgcaggagagcctgaagaagcaggagggcctgctgaagaacatccaggtgagccaccaggagttcagcaagatgaagcagagcaacaatgaggccaacctgcgggaggaggtgctgaagaacctggccacagcctatgacaactttgtggagctggtggccaacctgaaggagggcaccaagttctacaatgagctgacagagatcctggtgcgcttccagaacaagtgcagcgacatcgtgtttgccaggaagacagaaagagatgagctgctgaaggacctgcagcagagcatcgcccgggagcccagcgcccccagcatccccaccccagcctaccagagcagccctgctgggggccacgcccccaccccacccaccccagcccccaggaccatgccacccaccaagccccagcccccagcccggcccccacctcctgtgctgcctgccaacagagcccccagcgccacagcccccagccctgtgggcgccggcacagctgccccagcccccagccagaccccaggcagcgcccccccaccccaggcccagggccccccctaccccacctacccaggctacccaggctactgccagatgcccatgcccatgggctacaacccctatgcctacggccagtacaacatgccctacccacctgtgtaccaccagagccctggccaggccccctacccaggcccccagcagcccagctaccccttcccccagcccccccagcagagctactacccccagcagtag

SEQ ID NO: 165333 - DNA, 1458 bp, synthetic construct
  misc_feature 1..1458: note = Description of Artificial Sequence: Synthetic coding sequence
  source 1..1458: mol_type = other DNA
atggccctgccccccttcttcggccagggccggcccggccccccaccaccccagcccccacctccagcccccttcggctgccccccaccacccctgcccagccctgccttccccccacccctgccccagaggcctggccccttccctggggccagcgcccccttcctgcagccccccctggccctgcagccccgggccagcgctgaggccagcagaggaggcggcggggccggggccttctaccctgtgcccccaccacccctgcccccacctccaccccagtgccggcccttccctggaacagatgctggggagcggcccaggcctcctcctcctggccctggccccccctggagcccccgctggccagaggcccctcctcctccagcagatgtgctgggagatgctgccctgcagaggctgcgggaccggcagtggctggaggccgtgtttggcaccccaagaagagctggctgccctgtgccccagaggacccatgctggccccagcctgggggaggtgcgggcccggctgctgcgggccctgcggctggtgcggcggctgcggggcctgagccaggccctgcgggaggccgaggctgatggagctgcctgggtgctgctgtacagccagacagcccccctgcgggcagagctggccgagcggctgcagcccctgacccaggccgcctacgtgggggaggcccggcggcggctggagcgggtgagaagaagaaggctgcggctgcgggagcgggcccgggagcgggaggccgagcgggaggccgaggccgcccgggctgtggagcgggagcaggagattgaccgctggagggtgaagtgtgtgcaggaggtggaggagaagaagcgggagcaggagctgaaggctgctgctgatggagtgctgtctgaggtgaggaagaagcaggccgacaccaagaggatggtggacatcctgcgggccctggagaagctgaggaagctgaggaaggaggccgccgccaggaagggcgtgtgccccccagccagcgcagatgagaccttcacccaccacctgcagaggctgaggaagctgatcaagaagaggtctgagctgtatgaggccgaggagcgggccctgcgggtgatgctggagggggagcaggaggaggagaggaagcgggagctggagaagaagcagaggaaggagaaggagaagatcctgctgcagaagcgggagattgagagcaagctgtttggagaccctgatgagttccccctggcccacctgctggagcccttccggcagtactacctgcaggccgagcacagcctgcctgccctgatccagatcagacatgactgggaccagtacctggtgcccagcgaccaccccaagggcaactttgtgccccagggctgggtgctgccccccctgcccagcaatgacatctgggccacagctgtgaagctgcactag

SEQ ID NO: 165334 - DNA, 840 bp, synthetic construct
  misc_feature 1..840: note = Description of Artificial Sequence: Synthetic coding sequence
  source 1..840: mol_type = other DNA
ctgatgaggagccacagcgacagctgccacttcagcaagcacctgcggcgggagcacggccctgccaccatcctgcggcccggcagcccccggcccccacctcctccttccttcagcctgcggcggctgcgggagcgggcccgggagcgggaggccgagcgggaggccgaggccgcccgggctgtggagcgggagcaggagattgaccgctggagggtgaagtgtgtgcaggaggtggaggagaagaagcgggagcaggagctgaaggctgctgctgatggagtgctgtctgaggtgaggaagaagcaggccgacaccaagaggatggtggacatcctgcgggccctggagaagctgaggaagctgaggaaggaggccgccgccaggaagggcgtgtgccccccagccagcgcagatgagaccttcacccaccacctgcagaggctgaggaagctgatcaagaagaggtctgagctgtatgaggccgaggagcgggccctgcgggtgatgctggagggggagcaggaggaggagaggaagcgggagctggagaagaagcagaggaaggagaaggagaagatcctgctgcagaagcgggagattgagagcaagctgtttggagaccctgatgagttccccctggcccacctgctggagcccttccggcagtactacctgcaggccgagcacagcctgcctgccctgatccagatcagacatgactgggaccagtacctggtgcccagcgaccaccccaagggcaactttgtgccccagggctgggtgctgccccccctgcccagcaatgacatctgggccacagctgtgaagctgcactag

SEQ ID NO: 165335 - DNA, 813 bp, synthetic construct
  misc_feature 1..813: note = Description of Artificial Sequence: Synthetic coding sequence
  source 1..813: mol_type = other DNA
agccacagcgacagctgccacttcagcaagcacctgcggcgggagcacggccctgccaccatcctgcggcccggcagccccaggagaagaaggctgcggctgcgggagcgggcccgggagcgggaggccgagcgggaggccgaggccgcccgggctgtggagcgggagcaggagattgaccgctggagggtgaagtgtgtgcaggaggtggaggagaagaagcgggagcaggagctgaaggctgctgctgatggagtgctgtctgaggtgaggaagaagcaggccgacaccaagaggatggtggacatcctgcgggccctggagaagctgaggaagctgaggaaggaggccgccgccaggaaaggagtgtgccccccagccagcgcagatgagaccttcacccaccacctgcagaggctgaggaagctgatcaagaagaggtctgagctgtatgaagctgaggagcgggccctgcgggtgatgctggagggggagcaggaggaggagaggaagcgggagctggagaagaagcagaggaaggagaaggagaagatcctgctgcagaagcgggagattgagagcaagctgtttggagaccctgatgagttccccctggcccacctgctggagcccttccggcagtactacctgcaggccgagcacagcctgcctgccctgatccagatcagacatgactgggaccagtacctggtgcccagcgaccaccccaagggcaactttgtgccccagggctgggtgctgccccccctgcccagcaatgacatctgggccacagctgtgaagctgcactag

SEQ ID NO: 165336 - DNA, 165 bp, synthetic construct
  misc_feature 1..165: note = Description of Artificial Sequence: Synthetic coding sequence
  source 1..165: mol_type = other DNA
atgtgcaccaccctcttcctgctgagcaccctggccatgctgtggaggagaagatttgccaacagagtgcagcctgagcccagtgatgtggatggagctgcccggggcagcagcctggatgctgacccccagagcagcggccgggagaaggagcccctgaagtag

SEQ ID NO: 165337 - DNA, 246 bp, synthetic construct
  misc_feature 1..246: note = Description of Artificial Sequence: Synthetic coding sequence
  source 1..246: mol_type = other DNA
atgaccaggacagagagccctgccacctggatgggccagctgggcgctgctgcctggatgaggaccctgagcccccaggccgcccaggtgctggtgcggcccctggcccaggaggatgctgtgggcgctgctgctgctgcccggggccgcatgggcggcagcagcacccgggaggtgccccgggcccaccctgtgacaggctgcagcgctgagatcatcaacaagaagtgccagctggacctgtag

SEQ ID NO: 165338 - DNA, 819 bp, synthetic construct
  misc_feature 1..819: note = Description of Artificial Sequence: Synthetic coding sequence
  source 1..819: mol_type = other DNA
atggccgccaaggtgtttgagagcatcggcaagtttggcctggccctggccgtggccggcggcgtggtgaacagcgccctgtacaacgtggatgctggccaccgggccgtcatctttgaccgcttccggggcgtgcaggacatcgtggtgggggagggcacccacttcctgatcccctgggtgcagaagcccatcatctttgactgccgcagccggcccagaaatgtgcctgtgatcaccggcagcaaggacctgcagaatgtgaacatcaccctgcgcatcctcttccggcctgtggccagccagctgccccgcatcttcaccagcatcggggaggactatgatgagcgggtgctgcccagcatcaccacagagatcctgaagtctgtggtggccaggtttgatgctggggagctgatcacccagcgggagctggtgtcccggcaggtgtctgatgacctgacagagcgggccgccaccttcggcctcatcctggatgatgtgtccctgacccacctgaccttcggcaaggagttcacagaggccgtggaggccaagcaggtggcccagcaggaggccgagcgggccaggtttgtggtggagaaggccgagcagcagaagaaggccgccatcatctctgctgagggggacagcaaggctgctgagctgattgccaacagcctggccacagctggagatggcctcatcgagctgaggaagctggaggccgcagaagatattgcctaccagctgagccgcagcaggaacatcacctacctgcctgctggccagagcgtgctgctgcagctgccccagtag

SEQ ID NO: 165339 - DNA, 741 bp, synthetic construct
  misc_feature 1..741: note = Description of Artificial Sequence: Synthetic coding sequence
  source 1..741: mol_type = other DNA
atggccgccaaggtgtttgagagcatcggcaagtttggcctggccctggccgtggccggcggcgtggtgaacagcgccctgtacaacgtggatgctggccaccgggccgtcatctttgaccgcttccggggcgtgcaggacatcgtggtgggggagggcacccacttcctgatcccctgggtgcagaagcccatcatctttgactgccgcagccggcccagaaatgtgcctgtgatcaccggcagcaaggacctgcagaatgtgaacatcaccctgcgcatcctcttccggcctgtggccagccagctgccccgcatcttcaccagcatcggggaggactatgatgagcgggtgctgcccagcatcaccacagagatcctgaagtctgtggtggccaggtttgatgctggggagctgatcacccagcgggagctggtgtcccggcaggtgtctgatgacctgacagagcgggccgccaccttcggcctcatcctggatgatgtgtccctgacccacctgaccttcggcaaggagttcacagaggccgtggaggccaagcaggtggcccagcaggaggccgagcgggccaggtttgtggtggagaaggccgagcagcagaagaaggccgccatcatctctgctgagggggacagcaaggctgctgagctgattgccaacagcctggccacagctggagatggcctcatcgagctgaggaagctggaggccgcagaagattag

SEQ ID NO: 165340 - DNA, 375 bp, synthetic construct
  misc_feature 1..375: note = Description of Artificial Sequence: Synthetic coding sequence
  source 1..375: mol_type = other DNA
atggccgccaaggtgtttgagagcatcggcaagtttggcctggccctggccgtggccggcggcgtggtgaacagcgccctgtacaacgtggatgctggccaccgggccgtcatctttgaccgcttccggggcgtgcaggacatcgtggtgggggagggcacccacttcctgatcccctgggtgcagaagcccatcatctttgactgccgcagccggcccagaaatgtgcctgtgatcaccggcagcaaggacctgcagaatgtgaacatcaccctgcgcatcctcttccggcctgtggccagccagctgccccgcatcttcaccagcatcggggaggactatgatgagcgggtgctgcccagcatcaccacctag

SEQ ID NO: 165341 - DNA, 606 bp, synthetic construct
  misc_feature 1..606: note = Description of Artificial Sequence: Synthetic coding sequence
  source 1..606: mol_type = other DNA
atggccgccaaggtgtttgagagcatcggcaagtttggcctggccctggccgtggccggcggcgtggtgaacagcgccctgtacaacgtggatgctggccaccgggccgtcatctttgaccgcttccggggcgtgcaggacatcgtggtgggggagggcacccacttcctgatcccctgggtgcagaagcccatcatctttgactgccgcagccggcccagaaatgtgcctgtgatcaccggcagcaaggacctgcagaatgtgaacatcaccctgcgcatcctcttccggcctgtggccagccagctgccccgcatcttcaccagcatcggggaggactatgatgagcgggtgctgcccagcatcaccacagagatcctgaagtctgtggtggccaggtttgatgctggggagctgatcacccagcgggagctggtgtcccggcaggtgtctgatgacctgacagagcgggccgccaccttcggcctcatcctggatgatgtgtccctgacccacctgaccttcggcaaggagttcacagaggccgtggaggccaagcaggtggcccagcaggaggccgagcgggccaggtttgtggtggagtag

SEQ ID NO: 165342 - DNA, 645 bp, synthetic construct
  misc_feature 1..645: note = Description of Artificial Sequence: Synthetic coding sequence
  source 1..645: mol_type = other DNA
atggccgccaaggtgtttgagagcatcggcaagtttggcctggccctggccgtggccggcggcgtggtgaacagcgccctgtacaacgtggatgctggccaccgggccgtcatctttgaccgcttccggggcgtgcaggacatcgtggtgggggagggcacccacttcctgatcccctgggtgcagaagcccatcatctttgactgccgcagccggcccagaaatgtgcctgtgatcaccggcagcaaggacctgcagaatgtgaacatcaccctgcgcatcctcttccggcctgtggccagccagctgccccgcatcttcaccagcatcggggaggactatgatgagcgggtgctgcccagcatcaccacagagatcctgaagtctgtggtggccaggtttgatgctggggagctgatcacccagcgggagctggtgtcccggcaggtgtctgatgacctgacagagcgggccgccaccttcggcctcatcctggatgatgtgtccctgacccacctgaccttcggcaaggagttcacagaggccgtggaggccaagcaggtggcccagcaggaggccgagcgggccaggtttgtggtggagaaggccgagcagcagaagaaggccgccatcatcagcgcctag

SEQ ID NO: 165343 - DNA, 468 bp, synthetic construct
  misc_feature 1..468: note = Description of Artificial Sequence: Synthetic coding sequence
  source 1..468: mol_type = other DNA
atggccgccaaggtgtttgagagcatcggcaagtttggcctggccctggccgtggccggcggcgtggtgaacagcgccctgtacaacgtggatgctggccaccgggccgtcatctttgaccgcttccggggcgtgcaggacatcgtggtgggggagggcacccacttcctgatcccctgggtgcagaagcccatcatctttgactgccgcagccggcccagaaatgtgcctgtgatcaccggcagcaaggacctgcagaatgtgaacatcaccctgcgcatcctcttccggcctgtggccagccagctgccccgcatcttcaccagcatcggggaggactatgatgagcgggtgctgcccagcatcaccacagagatcctgaagtctgtggtggccaggtttgatgctggggagctgatcacctacctgcctgctggccagagcgtgctgctgcagctgccccagtag

SEQ ID NO: 165344 - DNA, 615 bp, synthetic construct
  misc_feature 1..615: note = Description of Artificial Sequence: Synthetic coding sequence
  source 1..615: mol_type = other DNA
atggccgccaaggtgtttgagagcatcggcaagtttggcctggccctggccgtggccggcggcgtggtgaacagcgccctgtacaacgtggatgctggccaccgggccgtcatctttgaccgcttccggggcgtgcaggacatcgtggtgggggagggcacccacttcctgatcccctgggtgcagaagcccatcatctttgactgccgcagccggcccagaaatgtgcctgtgatcaccggcagcaaggacctgcagaatgtgaacatcaccctgcgcatcctcttccggcctgtggccagccagctgccccgcatcttcaccagcatcggggaggactatgatgagcgggtgctgcccagcatcaccacagagatcctgaagtctgtggtggccaggtttgatgctggggagctgatcacccagcgggagctggtgtcccggcaggtgtctgatgacctgacagagcgggccgccaccttcggcctcatcctggatgatgtgtccctgacccacctgaccttcggcaaggagttcacagaggccgtggaggccaagcaggtggcccagcaggaggccgagcgggccaggtttgtggtggagaaggtgtcctag

SEQ ID NO: 165345 - DNA, 900 bp, synthetic construct
  misc_feature 1..900: note = Description of Artificial Sequence: Synthetic coding sequence
  source 1..900: mol_type = other DNA
atggcccagaacctgaaggacctggccggccgcctgcctgctggcccccggggcatgggcacagccctgaagctgctgctgggcgctggagctgtggcctacggcgtgcgggagagcgtcttcaccgtggagggcggccaccgggccatcttcttcaacagaattggaggagtgcagcaggacaccatcctggccgagggcctgcacttccgcatcccctggttccagtaccccatcatctatgacatccgggcccggcccaggaagatcagcagccccaccggcagcaaggacctgcagatggtgaacatcagcctgcgggtgctgagccggcccaatgcccaggagctgcccagcatgtaccagaggctgggcctggactatgaggagcgggtgctgcccagcatcgtgaatgaggtgctgaagtctgtggtggccaagttcaatgccagccagctgatcacccagagggcccaggtgtccctgctgatcagaagagagctgacagagcgggccaaggacttcagcctcatcctggatgatgtggccatcacagagctgtccttcagccgggagtacacagctgctgtggaggccaagcaggtggcccagcaggaggcccagagggcccagttcctggtggagaaggccaagcaggagcagaggcagaagatcgtgcaggccgagggggaggccgaggccgccaagatgctgggggaggccctgagcaagaaccctggctacatcaagctgaggaagatccgggccgcccagaacatcagcaagaccatcgccaccagccagaaccgcatctacctgacagctgacaacctggtgctgaacctgcaggatgagagcttcacccgctacagcgacagcctcatcaagggcaagaagtag

SEQ ID NO: 165346 - DNA, 786 bp, synthetic construct
  misc_feature 1..786: note = Description of Artificial Sequence: Synthetic coding sequence
  source 1..786: mol_type = other DNA
atggcccagaacctgaaggacctggccggccgcctgcctgctggcccccggggcatgggcacagccctgaagctgctgctgggcgctggagctgtggcctacggcgtgcgggagagcgtcttcaccgtggagggcggccaccgggccatcttcttcaacagaattggaggagtgcagcaggacaccatcctggccgagggcctgcacttccgcatcccctggttccagtaccccatcatctatgacatccgggcccggcccaggaagatcagcagccccaccggcagcaaggacctgcagatggtgaacatcagcctgcgggtgctgagccggcccaatgcccaggagctgcccagcatgtaccagaggctgggcctggactatgaggagcgggtgctgcccagcatcgtgaatgaggtgctgaagtctgtggtggccaagttcaatgccagccagctgatcacccagagggcccaggtgtccctgctgatcagaagagagctgacagagcgggccaaggacttcagcctcatcctggatgatgtggccatcacagagctgtccttcagccgggagtacacagctgctgtggaggccaagcaggtggccctgagcaagaaccctggctacatcaagctgaggaagatccgggccgcccagaacatcagcaagaccatcgccaccagccagaaccgcatctacctgacagctgacaacctggtgctgaacctgcaggatgagagcttcacccggggcagtgacagcctcatcaagggcaagaagtag

SEQ ID NO: 165347 - DNA, 900 bp, synthetic construct
  misc_feature 1..900: note = Description of Artificial Sequence: Synthetic coding sequence
  source 1..900: mol_type = other DNA
atggcccagaacctgaaggacctggccggccgcctgcctgctggcccccggggcatgggcacagccctgaagctgctgctgggcgctggagctgtggcctacggcgtgcgggagagcgtcttcaccgtggagggcggccaccgggccatcttcttcaacagaattggaggagtgcagcaggacaccatcctggccgagggcctgcacttccgcatcccctggttccagtaccccatcatctatgacatccgggcccggcccaggaagatcagcagccccaccggcagcaaggacctgcagatggtgaacatcagcctgcgggtgctgagccggcccaatgcccaggagctgcccagcatgtaccagaggctgggcctggactatgaggagcgggtgctgcccagcatcgtgaatgaggtgctgaagtctgtggtggccaagttcaatgccagccagctgatcacccagagggcccaggtgtccctgctgatcagaagagagctgacagagcgggccaaggacttcagcctcatcctggatgatgtggccatcacagagctgtccttcagccgggagtacacagctgctgtggaggccaagcaggtggcccagcaggaggcccagagggcccagttcctggtggagaaggccaagcaggagcagaggcagaagatcgtgcaggccgagggggaggccgaggccgccaagatgctgggggaggccctgagcaagaaccctggctacatcaagctgaggaagatccgggccgcccagaacatcagcaagaccatcgccaccagccagaaccgcatctacctgacagctgacaacctggtgctgaacctgcaggatgagagcttcacccggggcagtgacagcctcatcaagggcaagaagtag

SEQ ID NO: 165348 - DNA, 642 bp, synthetic construct
  misc_feature 1..642: note = Description of Artificial Sequence: Synthetic coding sequence
  source 1..642: mol_type = other DNA
atggcccagaacctgaaggacctggccggccgcctgcctgctggcccccggggcatgggcacagccctgaagctgctgctgggcgctggagctgtggcctacggcgtgcgggagagcgtcttcaccgtggagggcggccaccgggccatcttcttcaacagaattggaggagtgcagcaggacaccatcctggccgagggcctgcacttccgcatcccctggttccagtaccccatcatctatgacatccgggcccggcccaggaagatcagcagccccaccggcagcaaggacctgcagatggtgaacatcagcctgcgggtgctgagccggcccaatgcccaggagctgcccagcatgtaccagaggctgggcctggactatgaggagcgggtgctgcccagcatcgtgaatgaggtgctgaagtctgtggtggccaagttcaatgccagccagctgatcacccagagggcccaggtgtccctgctgatcagaagagagctgacagagcgggccaaggacttcagcctcatcctggatgatgtggccatcacagagctgtccttcagccgggagtacacagctgctgtggaggccaagcaggtgggggagagccaggagccctggggcgagggcttctag

SEQ ID NO: 165349 - DNA, 318 bp, synthetic construct
  misc_feature 1..318: note = Description of Artificial Sequence: Synthetic coding sequence
  source 1..318: mol_type = other DNA
atgagaggagccaccagggtgtccatcatgctgctgctggtgacagtgtctgactgtgccgtcatcactggagcctgtgaaagagatgtgcagtgtggggccggcacctgctgtgccatcagcctgtggctgcggggcctgaggatgtgcacccccctgggccgggagggggaggagtgccaccctggcagccacaaggtgcccttcttcaggaagaggaagcaccacacctgcccctgcctgcccaacctgctgtgcagccgcttcccagatggccgctaccgctgcagcatggacctgaagaacatcaacttctag

SEQ ID NO: 165350 - DNA, 390 bp, synthetic construct
  misc_feature 1..390: note = Description of Artificial Sequence: Synthetic coding sequence
  source 1..390: mol_type = other DNA
atgaggagcctgtgctgtgcccccctgctgctgctgctgctgctgccccccctgctgctgacccccagggctggagatgctgctgtgatcactggagcctgtgacaaggacagccagtgtggcggcggcatgtgctgtgctgtgtccatctgggtgaagagcatccgcatctgcacccccatgggcaagctgggggacagctgccaccccctgaccaggaagaacaactttggaaatggccggcaggagaggaggaagaggaagaggagcaagaggaagaaggaggtgcccttctttggaagaaggatgcaccacacctgcccctgcctgcccggcctggcctgcctgcggaccagcttcaaccgcttcatctgcctggcccagaagtag

SEQ ID NO: 165351 - DNA, 327 bp, synthetic construct
  misc_feature 1..327: note = Description of Artificial Sequence: Synthetic coding sequence
  source 1..327: mol_type = other DNA
atgaggagcctgtgctgtgcccccctgctgctgctgctgctgctgccccccctgctgctgacccccagggctggagatgctgctgtgatcactggagcctgtgacaaggacagccagtgtggcggcggcatgtgctgtgctgtgtccatctgggtgaagagcatccgcatctgcacccccatgggcaagctgggggacagctgccaccccctgaccaggaaggtgcccttcttcggccgcaggatgcaccacacctgcccctgcctgcccggcctggcctgcctgcggaccagcttcaaccgcttcatctgcctggcccagaagtag

SEQ ID NO: 165352 - DNA, 705 bp, synthetic construct
  misc_feature 1..705: note = Description of Artificial Sequence: Synthetic coding sequence
  source 1..705: mol_type = other DNA
atgagggcccccctgtgcctgctgctgctggtggcccatgctgtggacatgctggccctgaacagaaggaagaagcaggtgggcaccggcctgggcggcaactgcaccggctgcatcatctgcagcgaggagaatggctgcagcacctgccagcagaggctcttcctgttcatcagaagagagggcatccggcagtatggcaagtgcctgcatgactgccccccaggctacttcggcatccggggccaggaggtgaaccgctgcaagaagtgtggggccacctgtgagagctgcttcagccaggacttctgcatccgctgcaagaggcagttctacctgtacaagggcaagtgcctgcccacctgccccccaggcaccctggcccaccagaacacccgggagtgccagggagaatgtgagctgggcccctggggcggctggagcccctgcacccacaacgggaagacctgtggcagcgcctggggcctggagagccgggtgcgggaggccggccgggccggccacgaggaggccgccacctgccaggtgctgtctgagagcaggaaatgtcccatccagaggccctgccctggagagaggagccctggccagaagaagggcaggaaggacagaagacccaggaaggacaggaagctggaccggcggctggatgtgcggccccggcagcccggcctgcagccctag

SEQ ID NO: 165353 - DNA, 1155 bp, synthetic construct
  misc_feature 1..1155: note = Description of Artificial Sequence: Synthetic coding sequence
  source 1..1155: mol_type = other DNA
atggccgcccagaatggaaacaccagcttcacccccaacttcaaccccccccaggaccacgccagcagcctgtccttcaacttctcctatggagactatgacctgcccatggatgaagatgaggacatgaccaagaccaggaccttctttgctgccaagatcgtcatcggcatcgccctggccggcatcatgctggtgtgtggcatcggcaactttgtgttcatcgccgccctgacccgctacaagaagctgaggaacctgaccaacctgctgattgccaacctggccatcagtgacttcctggtggccatcatctgctgcccctttgagatggactactacgtggtgcggcagctgtcctgggagcacggccacgtgctgtgtgcctctgtgaactacctgaggacagtgtccctgtatgtgtccaccaatgccctgctggccatcgccatcgaccgctacctggccatcgtgcaccccctgaagcccaggatgaactaccagacagccagcttcctgattgccctggtgtggatggtgtccatcctgattgccatccccagcgcctactttgccacagaaacagtgctcttcatcgtgaagagccaggagaagatcttctgtggccagatctggcctgtggaccagcagctgtactacaagagctacttcctgttcatcttcggcgtggagtttgtgggccctgtggtgaccatgaccctgtgctacgcccgcatcagccgggagctgtggttcaaggctgtgcccggcttccagacagagcagatcaggaagaggctgcgctgcaggaggaagacagtgctggtgctgatgtgcatcctgacagcctacgtgctgtgctgggcccccttctacggcttcaccatcgtgcgggacttcttccccaccgtgtttgtgaaggagaagcactacctgacagccttctacgtggtggagtgcatcgccatgagcaacagcatgatcaacacagtgtgctttgtgacagtgaagaacaacaccatgaagtacttcaagaagatgatgctgctgcactggaggcccagccagaggggcagcaagagcagcgctgacctggacctgcggaccaacggggtgcccaccacagaggaggtggactgcatccggctgaagtag

SEQ ID NO: 165354 - DNA, 684 bp, synthetic construct
  misc_feature 1..684: note = Description of Artificial Sequence: Synthetic coding sequence
  source 1..684: mol_type = other DNA
atgaacatcaagggcagcccctggaagggcagcctgctgctgctgctggtgagcaacctgctgctgtgccagagcgtggcccccctgcccatctgccctggaggagctgcccgctgccaggtgaccctgcgggacctgtttgacagagctgtggtgctgagccactacatccacaacctgagcagcgagatgttcagcgagtttgacaagcgctacacccacggccggggcttcatcaccaaggccatcaacagctgccacaccagcagcctggccaccccagaggacaaggagcaggcccagcagatgaaccagaaggacttcctgagcctcatcgtgtccatcctgcgctcctggaatgagcccctgtaccacctggtgacagaggtgcggggcatgcaggaggcccctgaggccatcctgagcaaggctgtggagattgaggagcagaccaagaggctgctggagggcatggagctgattgtgtcccaggtgcaccctgagaccaaggaaaatgagatctaccctgtgtggagcggcctgcccagcctgcagatggctgatgaggagagccggctgagcgcctactacaacctgctgcactgcctgcggcgggacagccacaagattgacaactacctgaagctgctgaagtgccgcatcatccacaacaacaactgctag

SEQ ID NO: 165355 - DNA, 591 bp, synthetic construct
  misc_feature 1..591: note = Description of Artificial Sequence: Synthetic coding sequence
  source 1..591: mol_type = other DNA
atgaacatcaagggcagcccctggaagggcagcctgctgctgctgctggtgagcaacctgctgctgagccactacatccacaacctgagcagcgagatgttttctgaatttgacaagcgctacacccacggccggggcttcatcaccaaggccatcaacagctgccacaccagcagcctggccaccccagaggacaaggagcaggcccagcagatgaaccagaaggacttcctgagcctgattgtgtccatcctgcgctcctggaatgagcccctgtaccacctggtgacagaggtgcggggcatgcaggaggcccctgaggccatcctgagcaaggctgtggagattgaggagcagaccaagaggctgctggagggcatggagctgattgtgtcccaggtgcaccctgagaccaaggaaaatgagatctaccctgtgtggagcggcctgcccagcctgcagatggctgatgaggagagccggctgagcgcctactacaacctgctgcactgcctgcggcgggacagccacaagattgacaactacctgaagctgctgaagtgccgcatcatccacaacaacaactgctag

SEQ ID NO: 165356 - DNA, 1545 bp, synthetic construct
  misc_feature 1..1545: note = Description of Artificial Sequence: Synthetic coding sequence
  source 1..1545: mol_type = other DNA
atgaccctcatctggaggcacctgctgcggcccctgtgcctggtgaccagcgccccccgcatcctggagatgcaccccttcctgagcctgggcaccagcaggacctctgtgaccaagctgagcctgcacaccaagcccaggatgccaccctgtgacttcatgcctgagcgctaccagagcctgggctacaacagagtgctggagatccacaaggagcacctgagccctgtggtgacagcctacttccagaagcccctgctgctgcaccagggccacatggagtggctgtttgatgctgagggcagccgctacctggacttcttctctggaattgtgacagtgtctgtgggccactgccaccccaaggtgaatgctgtggcccagaagcagctgggccgcctgtggcacaccagcacagtgttcttccacccccccatgcatgaatatgcagagaagctggccgccctgctgcctgagcccctgaaggtgatcttcctggtgaacagcggcagcgaggccaatgagctggccatgctgatggcccgggcccacagcaacaacatcgacatcatctccttccggggggcctaccacggctgcagcccctacaccctgggcctgaccaacgtgggcacctacaagatggagctgcccggcggcaccggctgccagcccaccatgtgcccagatgtgttccggggcccctggggcggcagccactgccgggacagccctgtgcagaccatcaggaagtgcagctgtgccccagactgctgccaggccaaggaccagtacatcgagcagttcaaggacaccctgagcacctctgtggccaagagcattgctggcttctttgctgagcccatccagggcgtgaatggagtggtgcagtaccccaagggcttcctgaaggaggcctttgagctggtgcgggcccggggcggcgtgtgcatcgcagatgaggtgcagacaggcttcggccgcctgggcagccacttctggggcttccagacccatgatgtgctgcctgacatcgtgaccatggccaagggcattggaaatggcttccccatggccgccgtcatcaccaccccagaaattgccaagagcctggccaagtgcctgcagcacttcaacacctttggaggcaaccccatggcctgtgccatcggcagcgctgtgctggaggtgatcaaggaggagaacctgcaggagaacagccaggaggtgggcacctacatgctgctgaagtttgccaagctgagagatgaatttgaaattgtgggagatgtgcggggcaagggcctgatgattggcatcgagatggtgcaggacaagatcagctgccggcccctgccccgggaggaggtgaaccagatccacgaggactgcaagcacatgggcctgctggtgggccggggcagcatcttcagccagaccttcagaattgcccccagcatgtgcatcaccaagccagaggtggactttgctgtggaggtgttccgcagcgccctgacccagcacatggagcggcgggccaagtag

SEQ ID NO: 165357 - DNA, 1050 bp, synthetic construct
  misc_feature 1..1050: note = Description of Artificial Sequence: Synthetic coding sequence
  source 1..1050: mol_type = other DNA
atgaaggaaaatgtggccagcgccaccgtcttcaccctgctgctcttcctgaacacctgcctgctgaatggccagctgcccccaggcaagccagagatcttcaagtgccgcagccccaacaaggagaccttcacctgctggtggaggcctggaacagatggcggcctgcccaccaactacagcctgacctaccaccgggagggggagaccctgatgcatgagtgcccagactacatcaccggcggccccaacagctgccactttgggaagcagtacacctccatgtggaggacctacatcatgatggtgaatgccaccaaccagatgggcagcagcttcagtgatgagctgtatgtggatgtgacctacatcgtgcagcctgacccccccctggagctggccgtggaggtgaagcagcctgaggacaggaagccctacctgtggatcaagtggagcccccccaccctgattgacctgaagacaggctggttcaccctgctgtatgagatccggctgaagccagagaaggctgctgagtgggagatccactttgctggccagcagacagagttcaagatcctgagcctgcaccctggccagaagtacctggtgcaggtgcgctgcaagccagaccacggctactggagcgcctggagccctgccaccttcatccagatccccagcgacttcaccatgaatgacaccaccgtgtggatctctgtggccgtgctgtctgctgtgatctgcctgatcatcgtgtgggccgtggccctgaagggctacagcatggtgacctgcatcttcccccctgtgcccggccccaagatcaagggctttgatgcccacctgctggagaagggcaagtctgaggagctgctgagcgccctgggctgccaggacttcccccccaccagtgactatgaggacctgctggtggagtacctggaggtggatgacagcgaggaccagcacctgatgtctgtgcacagcaaggagcaccccagccaggagcgggagcagaggcaggcccaggaggcccgggacagctag

SEQ ID NO: 165358 - DNA, 1566 bp, synthetic construct
  misc_feature 1..1566: note = Description of Artificial Sequence: Synthetic coding sequence
  source 1..1566: mol_type = other DNA
atgaaggaaaatgtggccagcgccaccgtcttcaccctgctgctcttcctgaacacctgcctgctgaatgtgcagcctgacccccccctggagctggccgtggaggtgaagcagcctgaggacaggaagccctacctgtggatcaagtggagcccccccaccctgattgacctgaagacaggctggttcaccctgctgtatgagatccggctgaagccagagaaggctgctgagtgggagatccactttgctggccagcagacagagttcaagatcctgagcctgcaccctggccagaagtacctggtgcaggtgcgctgcaagccagaccacggctactggagcgcctggagccctgccaccttcatccagatccccagcgacttcaccatgaatgacaccaccgtgtggatctctgtggccgtgctgtctgctgtgatctgcctgatcatcgtgtgggccgtggccctgaagggctacagcatggtgacctgcatcttcccccctgtgcccggccccaagatcaagggctttgatgcccacctgctggagaagggcaagtctgaggagctgctgagcgccctgggctgccaggacttcccccccaccagtgactatgaggacctgctggtggagtacctggaggtggatgattctgaggaccagcacctgatgtctgtgcacagcaaggagcaccccagccagggcatgaagcccacctacctggaccctgacacagacagcggccggggcagctgtgacagccccagcctgctgtctgagaagtgtgaggagccccaggccaaccccagcaccttctatgaccctgaggtgattgagaagccagaaaatcctgagaccacccacacctgggacccccagtgcatctccatggagggcaagatcccctacttccacgccggcggcagcaagtgcagcacctggcccctgccccagcccagccagcacaaccccaggagcagctaccacaacatcacagatgtgtgtgagctggccgtgggccctgctggggccccagccaccctgctgaatgaagctgggaaggatgccctgaagagcagccagaccatcaagagccgggaggagggcaaggccacccagcagcgggaggtggagagcttccacagcgagacagaccaggacaccccctggctgctgccccaggagaagacccccttcggcagcgccaagcccctggactatgtggagatccacaaggtgaacaaggatggagccctgagcctgctgcccaagcagcgggagaacagcggcaagcccaagaagccaggcaccccagagaacaacaaggagtatgccaaggtgtctggagtgatggacaacaacatcctggtgctggtgcctgacccccacgccaagaatgtggcctgctttgaggagagcgccaaggaggccccacccagcctggagcagaaccaggccgagaaggccctggccaacttcaccgccaccagcagcaagtgccgcctgcagctgggcggcctggactacctggaccctgcctgcttcacccacagcttccactag

SEQ ID NO: 165359 - DNA, 807 bp, synthetic construct
  misc_feature 1..807: note = Description of Artificial Sequence: Synthetic coding sequence
  source 1..807: mol_type = other DNA
atgaaggaaaatgtggccagcgccaccgtcttcaccctgctgctcttcctgaacacctgcctgctgaatggccagctgcccccaggcaagccagagatcttcaagtgccgcagccccaacaaggagaccttcacctgctggtggaggcctggaacagatggcggcctgcccaccaactacagcctgacctaccaccgggagggggagaccctgatgcatgagtgcccagactacatcaccggcggccccaacagctgccactttgggaagcagtacacctccatgtggaggacctacatcatgatggtgaatgccaccaaccagatgggcagcagcttcagtgatgagctgtatgtggatgtgacctacatcgtgcagcctgacccccccctggagctggccgtggaggtgaagcagcctgaggacaggaagccctacctgtggatcaagtggagcccccccaccctgattgacctgaagacaggctggttcaccctgctgtatgagatccggctgaagccagagaaggctgctgagtgggagatccactttgctggccagcagacagagttcaagatcctgagcctgcaccctggccagaagtacctggtgcaggtgcgctgcaagccagaccacggctactggagcgcctggagccctgccaccttcatccagatccccagcggggaccccctgatgctgggcgccagccactacaagaacctgaagagctaccggcccaggaagatcagcagccagggccgcctggccgtgttcaccaaggccaccctgaccaccgtgcagtag

SEQ ID NO: 165360 - DNA, 1869 bp, synthetic construct
  misc_feature 1..1869: note = Description of Artificial Sequence: Synthetic coding sequence
  source 1..1869: mol_type = other DNA
atgaaggaaaatgtggccagcgccaccgtcttcaccctgctgctcttcctgaacacctgcctgctgaatggccagctgcccccaggcaagccagagatcttcaagtgccgcagccccaacaaggagaccttcacctgctggtggaggcctggaacagatggcggcctgcccaccaactacagcctgacctaccaccgggagggggagaccctgatgcatgagtgcccagactacatcaccggcggccccaacagctgccactttgggaagcagtacacctccatgtggaggacctacatcatgatggtgaatgccaccaaccagatgggcagcagcttcagtgatgagctgtatgtggatgtgacctacatcgtgcagcctgacccccccctggagctggccgtggaggtgaagcagcctgaggacaggaagccctacctgtggatcaagtggagcccccccaccctgattgacctgaagacaggctggttcaccctgctgtatgagatccggctgaagccagagaaggctgctgagtgggagatccactttgctggccagcagacagagttcaagatcctgagcctgcaccctggccagaagtacctggtgcaggtgcgctgcaagccagaccacggctactggagcgcctggagccctgccaccttcatccagatccccagcgacttcaccatgaatgacaccaccgtgtggatctctgtggccgtgctgtctgctgtgatctgcctgatcatcgtgtgggccgtggccctgaagggctacagcatggtgacctgcatcttcccccctgtgcccggccccaagatcaagggctttgatgcccacctgctggagaagggcaagtctgaggagctgctgagcgccctgggctgccaggacttcccccccaccagtgactatgaggacctgctggtggagtacctggaggtggatgacagcgaggaccagcacctgatgtctgtgcacagcaaggagcaccccagccagggcatgaagcccacctacctggaccctgacacagattctggccggggcagctgtgacagccccagcctgctgtctgagaagtgtgaggagccccaggccaaccccagcaccttctatgaccctgaggtgattgagaagccagagaaccctgagaccacccacacctgggacccccagtgcatctccatggagggcaagatcccctacttccacgccggcggcagcaagtgcagcacctggcccctgccccagcccagccagcacaaccccaggagcagctaccacaacatcacagatgtgtgtgagctggccgtgggccctgctggggccccagccaccctgctgaatgaggccggcaaggatgccctgaagagcagccagaccatcaagagccgggaggagggcaaggccacccagcagcgggaggtggagagcttccacagcgagacagaccaggacaccccctggctgctgccccaggagaagaccccatttggaagtgccaagcccctggactatgtggagatccacaaggtgaacaaggatggagccctgagcctgctgcccaagcagagagaaaattctgggaagcccaagaagccaggcaccccagagaacaacaaggagtatgccaaggtgtctggagtgatggacaacaacatcctggtgctggtgcctgacccccacgccaagaatgtggcctgctttgaggagagcgccaaggaggccccacccagcctggagcagaaccaggccgagaaggccctggccaacttcaccgccaccagcagcaaatgtcggctgcagctgggcggcctggactacctggaccctgcctgcttcacccacagcttccactag

SEQ ID NO: 165361 - DNA, 594 bp, synthetic construct
  misc_feature 1..594: note = Description of Artificial Sequence: Synthetic coding sequence
  source 1..594: mol_type = other DNA
atgcatgaatgtcctgactacatcactggaggccccaacagctgccactttgggaagcagtacacctccatgtggaggacctacatcatgatggtgaatgccaccaaccagatgggcagcagcttcagtgatgagctgtatgtggatgtgacctacatcgtgcagcctgacccccccctggagctggccgtggaggtgaagcagcctgaggacaggaagccctacctgtggatcaagtggagcccccccaccctgattgacctgaagacaggctggttcaccctgctgtatgagatccggctgaagccagagaaggctgctgagtgggagatccactttgctggccagcagacagagttcaagatcctgagcctgcaccctggccagaagtacctggtgcaggtgcgctgcaagccagaccacggctactggagcgcctggagccctgccaccttcatccagatccccagcggggaccccctgatgctgggcgccagccactacaagaacctgaagagctaccggcccaggaagatcagcagccagggccgcctggccgtgttcaccaaggccaccctgaccaccgtgcagtag

SEQ ID NO: 165362 - DNA, 312 bp, synthetic construct
  misc_feature 1..312: note = Description of Artificial Sequence: Synthetic coding sequence
  source 1..312: mol_type = other DNA
atgaaggaaaatgtggccagcgccaccgtcttcaccctgctgctcttcctgaacacctgcctgctgaatggccagctgcccccaggcaagccagagatcttcaagtgccgcagccccaacaaggagaccttcacctgctggtggaggcctggaacagatggcggcctgcccaccaactacagcctgacctaccaccgggagggggagaccctgatgcatgagtgcccagactacatcaccggcggccccaacagctgccactttgggaagcagtacacctccatgtggaggacctacatcatgatggtgtag

SEQ ID NO: 165363 - DNA, 189 bp, synthetic construct
  misc_feature 1..189: note = Description of Artificial Sequence: Synthetic coding sequence
  source 1..189: mol_type = other DNA
atgaaggaaaatgtggccagcgccaccgtcttcaccctgctgctcttcctgaacacctgcctgctgaatggccagctgcccccaggcaagccagagatcttcaagtgccgcagccccaacaaggagaccttcacctgctggtggaggcctggaacagatggcggcctgcccaccaactacagcctgtag

SEQ ID NO: 165364 - DNA, 336 bp, synthetic construct
  misc_feature 1..336: note = Description of Artificial Sequence: Synthetic coding sequence
  source 1..336: mol_type = other DNA
atgaaggaaaatgtggccagcgccaccgtcttcaccctgctgctcttcctgaacacctgcctgctgaatggccagctgcccccaggcaagccagagatcttcaagtgccgcagccccaacaaggagaccttcacctgctggtggaggcctggaacagatggcggcctgcccaccaactacagcctgacctaccaccgggagggggagaccctgatgcatgagtgcccagactacatcaccggcggccccaacagctgccactttgggaagcagtacacctccatgtggaggacctacatcatgatggtgaatgccaccaaccagatgggcagctag

SEQ ID NO: 165365 - DNA, 1566 bp, synthetic construct; identical to SEQ ID NO: 165358
  misc_feature 1..1566: note = Description of Artificial Sequence: Synthetic coding sequence
  source 1..1566: mol_type = other DNA

SEQ ID NO: 165366 - DNA, 867 bp, synthetic construct
  misc_feature 1..867: note = Description of Artificial Sequence: Synthetic coding sequence
  source 1..867: mol_type = other DNA
atgaaggaaaatgtggccagcgccaccgtcttcaccctgctgctcttcctgaacacctgcctgctgaatggccagctgcccccaggcaagccagagatcttcaagtgccgcagccccaacaaggagaccttcacctgctggtggaggcctggaacagatggcggcctgcccaccaactacagcctgacctaccaccgggagggggagaccctgatgcatgagtgcccagactacatcaccggcggccccaacagctgccactttgggaagcagtacacctccatgtggaggacctacatcatgatggtgaatgccaccaaccagatgggcagcagcttcagtgatgagctgtatgtggatgtgacctacatcgtgcagcctgacccccccctggagctggccgtggaggtgaagcagcctgaggacaggaagccctacctgtggatcaagtggagcccccccaccctgattgacctgaagacaggctggttcaccctgctgtatgagatccggctgaagccagagaaggctgctgagtgggagatccactttgctggccagcagacagagttcaagatcctgagcctgcaccctggccagaagtacctggtgcaggtgcgctgcaagccagaccacggctactggagcgcctggagccctgccaccttcatccagatccccagcgacttcaccatgaatgacaccaccgtgtggatctctgtggccgtgctgtctgctgtgatctgcctgatcatcgtgtgggccgtggccctgaagggctacagcatggtgacctgcatcttcccccctgtgcccggccccaagatcaagggctttgatgcccacctgctggaggtgaccccctag

SEQ ID NO: 165367 - DNA, 363 bp, synthetic construct
  misc_feature 1..363: note = Description of Artificial Sequence: Synthetic coding sequence
  source 1..363: mol_type = other DNA
atgaaggaaaatgtggccagcgccaccgtcttcaccctgctgctcttcctgaacacctgcctgctgaatggccagctgcccccaggcaagccagagatcttcaagtgccgcagccccaacaaggagaccttcacctgctggtggaggcctggaacagatggcggcctgcccaccaactacagcctgacctaccaccgggagggggagaccctgatgcatgagtgcccagactacatcaccggcggccccaacagctgccactttgggaagcagtacacctccatgtggaggacctacatcatgatggtgaatgccaccaaccagatgggcagcagcttcagtgatgagctgtatgtggactag

SEQ ID NO: 165368 - DNA, 105 bp, synthetic construct
  misc_feature 1..105: note = Description of Artificial Sequence: Synthetic coding sequence
  source 1..105: mol_type = other DNA
atgaaggaaaatgtggccagcgccaccgtcttcaccctgctgctcttcctgaacacctgcctgctgaatggccagctgcccccaggcaagccagagatcttctag

SEQ ID NO: 165369 - DNA, 930 bp, synthetic construct
  misc_feature 1..930: note = Description of Artificial Sequence: Synthetic coding sequence
  source 1..930: mol_type = other DNA
atgaaggaaaatgtggccagcgccaccgtcttcaccctgctgctcttcctgaacacctgcctgctgaatggccagctgcccccaggcaagccagagatcttcaagtgccgcagccccaacaaggagaccttcacctgctggtggaggcctggaacagatggcggcctgcccaccaactacagcctgacctaccaccgggagggggagaccctgatgcatgagtgcccagactacatcaccggcggccccaacagctgccactttgggaagcagtacacctccatgtggaggacctacatcatgatggtgaatgccaccaaccagatgggcagcagcttcagtgatgagctgtatgtggatgtgacctacatcgtgcagcctgacccccccctggagctggccgtggaggtgaagcagcctgaggacaggaagccctacctgtggatcaagtggagcccccccaccctgattgacctgaagacaggctggttcaccctgctgtatgagatccggctgaagccagagaaggctgctgagtgggagatccactttgctggccagcagacagagttcaagatcctgagcctgcaccctggccagaagtacctggtgcaggtgcgctgcaagccagaccacggctactggagcgcctggagccctgccaccttcatccagatccccagcgacttcaccatgaatgacaccaccgtgtggatctctgtggccgtgctgtctgctgtgatctgcctgatcatcgtgtgggccgtggccctgaagggctacagcatggtgacctgcatcttcccccctgtgcccggccccaagatcaagggctttgatgcccacctgctggaggaccggctgtgcaccccaggccgctgctgcgtgtccacaggcctgacagacctggactacagctgcagcacctag

SEQ ID NO: 165370 - DNA, 1254 bp, synthetic construct
  misc_feature 1..1254: note = Description of Artificial Sequence: Synthetic coding sequence
  source 1..1254: mol_type = other DNA
atgggcagaagaagagcccctgagctgtaccgggcccccttccccctgtatgccctgcaggtggaccccagcacaggcctgctgattgctgctgggggcggcggggccgccaagacaggcatcaagaatggagtgcacttcctgcagctggagctgatcaatggccgcctgagcgccagcctgctgcacagccatgacacagagacccgggccaccatgaacctggccctggccggggacatcctggccgccggccaggatgcccactgccagctgctgcgcttccaggcccaccagcagcagggcaacaaggccgagaaggccggcagcaaggagcagggcccccggcagaggaaaggagctgccccagctgagaagaagtgtggggctgagacccagcacgagggcctggagctgcgggtggagaacctgcaggccgtgcagacagacttcagcagtgaccccctgcagaaggtggtgtgcttcaaccacgacaacaccctgctggccactggaggaacagatggctacgtgcgggtgtggaaggtgcccagcctggagaaggtgctggagttcaaggcccatgaaggagaaattgaggacctggccctgggcccagatggcaagctggtgacagtgggccgggacctgaaggcctctgtgtggcagaaggaccagctggtgacccagctgcactggcaggagaatggccccaccttcagcagcaccccctaccgctaccaggcctgccgcttcggccaggtgcctgaccagcctgctggcctgcggctcttcaccgtgcagatcccccacaagaggctgcggcagcccccaccctgctacctgacagcctgggatggcagcaacttcctgcccctgcggaccaagagctgtggccacgaggtggtgtcctgcctggatgtgtctgagagcggcaccttcctgggcctgggcaccgtgactggatctgtggccatctacatcgccttcagcctgcagtgcctgtactacgtgcgggaggcccacggcatcgtggtgacagatgtggccttcctgcctgagaagggccggggccctgagctgctgggcagccatgaaacagccctcttctctgtggccgtggacagccgctgccagctgcacctgctgcccagccgccgctctgtgcctgtgtggctgctgctgctgctgtgtgtgggcctcatcatcgtgaccatcctgctgctgcagagcgccttccctggcttcctgtag

SEQ ID NO: 165371 - DNA, 1254 bp, synthetic construct; identical to SEQ ID NO: 165370
  misc_feature 1..1254: note = Description of Artificial Sequence: Synthetic coding sequence
  source 1..1254: mol_type = other DNA

SEQ ID NO: 165372 - DNA, 441 bp, synthetic construct
  misc_feature 1..441: note = Description of Artificial Sequence: Synthetic coding sequence
  source 1..441: mol_type = other DNA
atgaggctgctgcagctgctcttccgggccagccctgccaccctgctgctggtgctgtgcctgcagctgggcgccaacaaggcccaggacaacaccaggaagatcatcatcaagaactttgacatccccaagtctgtgcggcccaatgatgaggtgacagctgtgctggccgtgcagacagagctgaaggagtgcatggtggtgaagacctacctgatcagcagcatccccctgcagggcgccttcaactacaagtacacagcctgcctgtgtgatgacaaccccaagaccttctactgggacttctacaccaacagaacagtgcagattgctgctgtggtggatgtgatccgggagctgggcatctgcccagatgatgctgctgtgatccccatcaagaacaaccgcttctacaccatcgagatcctgaaggtggagtag

SEQ ID NO: 165373 - DNA, 1185 bp, synthetic construct
  misc_feature 1..1185: note = Description of Artificial Sequence: Synthetic coding sequence
  source 1..1185: mol_type = other DNA
atgtctggagaagatgagcagcaggagcagaccatcgccgaggacctggtggtgaccaagtacaagatgggcggggacatcgccaacagagtgctgcggagcctggtggaggccagcagcagtggagtgtctgtgctgagcctgtgtgagaagggagatgccatgatcatggaggagaccgggaagatcttcaagaaggagaaggagatgaagaagggcatcgccttccccaccagcatctctgtgaacaactgtgtgtgccacttcagccccctgaagagtgaccaggactacatcctgaaggagggggacctggtgaagattgacctgggcgtgcacgtggatggcttcatcgccaacgtggcccacacctttgtggtggatgtggcccagggcacccaggtgacaggcaggaaggcagatgtgatcaaggccgcccacctgtgtgccgaggccgccctgcggctggtgaagccaggcaaccagaacacccaggtgacagaggcctggaacaaggtggcccacagcttcaactgcacccccatcgagggcatgctgagccaccagctgaagcagcacgtgattgatggagagaagaccatcatccagaaccccacagaccagcagaagaaggaccacgagaaggccgagtttgaggtgcatgaggtgtatgctgtggatgtgctggtgagcagcggggagggcaaggccaaggatgctggccagaggaccaccatctacaagagggaccccagcaagcagtatggcctgaagatgaagaccagccgggccttcttcagcgaggtggagaggagatttgatgccatgcccttcaccctgcgggcctttgaagatgagaagaaggccaggatgggcgtggtggagtgtgccaagcatgagctgctgcagcccttcaacgtgctgtatgagaaggagggggagtttgtggcccagttcaagttcaccgtgctgctgatgcccaacggccccatgaggatcaccagcggcccctttgagccagacctgtacaagtctgagatggaggtgcaggatgctgagctgaaggccctgctgcagagcagcgccagcaggaagacccagaagaagaagaagaagaaggccagcaagacagcagaaaatgccaccagcggggagaccctggaggagaatgaggccggggactag

SEQ ID NO: 165374 - DNA, 1218 bp, synthetic construct
  misc_feature 1..1218: note = Description of Artificial Sequence: Synthetic coding sequence
  source 1..1218: mol_type = other DNA
gcctgcccagccccccagcctgcccggagccagctgctggccctggcctgcctgcctgcccccctgctggcccgggcctttgcccggcccctgctggaggacagaggagacagcgaccacagccctgaggacctggtggtgaccaagtacaagatgggcggggacatcgccaacagagtgctgcggagcctggtggaggccagcagcagcggcgtgtctgtgctgagcctgtgtgagaagggagatgccatgatcatggaggagaccgggaagatcttcaagaaggagaaggagatgaagaagggcatcgccttccccaccagcatctctgtgaacaactgtgtgtgccacttcagccccctgaagagtgaccaggactacatcctgaaggagggggacctggtgaagattgacctgggcgtgcacgtggatggcttcatcgccaacgtggcccacacctttgtggtggatgtggcccagggcacccaggtgactggaaggaaggcagatgtgatcaaggccgcccacctgtgtgccgaggccgccctgcggctggtgaagccaggcaaccagaacacccaggtgacagaggcctggaacaaggtggcccacagcttcaactgcacccccatcgagggcatgctgagccaccagctgaagcagcacgtgattgatggagagaagaccatcatccagaaccccacagaccagcagaagaaggaccacgagaaggccgagtttgaggtgcatgaggtgtatgctgtggatgtgctggtgtcctctggagagggcaaggccaaggatgctggccagaggaccaccatctacaagagggaccccagcaagcagtatggcctgaagatgaagaccagccgggccttcttcagcgaggtggagaggagatttgatgccatgcccttcaccctgcgggcctttgaagatgagaagaaggccaggatgggcgtggtggagtgtgccaagcatgagctgctgcagcccttcaacgtgctgtatgagaaggagggggagtttgtggcccagttcaagttcaccgtgctgctgatgcccaacggccccatgaggatcaccagcggcccctttgagccagacctgtacaagtctgagatggaggtgcaggatgctgagctgaaggccctgctgcagagcagcgccagcaggaagacccagaagaagaagaagaagaagaagaagaagtag

SEQ ID NO: 165375 - DNA, 738 bp, synthetic construct
  misc_feature 1..738: note = Description of Artificial Sequence: Synthetic coding sequence
  source 1..738: mol_type = other DNA
atgaccaggatgctgcagaggatggatgtgctggccaagaaggccacagagatgggcgtgcggctgatggtggatgctgagcagacctacttccagcctgccatcagccggctgaccctggagatgcagaggaagttcaacgtggagaagcccctcatcttcaacacctaccagtgctacctgaaggatgcctatgacaacgtgaccctggatgtggagctggcccggcgggagggctggtgcttcggggccaagctggtgcggggggcctacctggcccaggagcgggcccgggctgctgagatcggctatgaggaccccatcaaccccacctatgaggccaccaatgccatgtaccaccgctgcctggactatgtgctggaggagctgaagcacaatgccaaggccaaggtgatggtggccagccacaatgaagatactgtgcgctttgccctgcggaggatggaggagctgggcctgcaccctgctgaccaccgggtgtacttcggccagctgctgggcatgtgtgaccagatctccttccccctgggccaggccggctaccctgtgtacaagtatgtgccctacggccctgtgatggaggtgctgccctacctgagccggcgggccctggagaacagcagcctgatgaagggcacccaccgggagcggcagctgctgtggctggagctgctgcggcggctgaggactggaaacctcttccacaggcctgcctag

SEQ ID NO: 165376 - DNA, 1803 bp, synthetic construct
  misc_feature 1..1803: note = Description of Artificial Sequence: Synthetic coding sequence
  source 1..1803: mol_type = other DNA
atggccctgcggcgggccctgcctgccctgcggccctgcatccccaggtttgtgcccctgagcacagccccagccagccgggagcagcctgctgctggccctgctgctgtgcctgggggcggcagcgccacagctgtgcggccccctgtgcctgctgtggactttggaaatgcccaggaggcctaccgcagcaggaggacctgggagctggcccggagcctgctggtgctgcggctgtgtgcctggccagccctgctggcccggcatgagcagctgctgtatgtgtccaggaagctgctgggccagaggctcttcaacaagctgatgaagatgaccttctacggccactttgtggccggggaggaccaggagagcatccagcccctgctgcggcactaccgggccttcggcgtgtctgccatcctggactatggagtggaggaggacctgagccctgaggaggccgagcacaaggagatggagagctgcaccagcgctgctgagagagatggcagcggcaccaacaagagggacaagcagtaccaggcccactgggcctttggagacagaagaaatggagtcatcagcgcccggacctacttctacgccaatgaggccaagtgtgacagccacatggagaccttcctgcgctgcatcgaggccagcggccgggtgtctgatgatggcttcatcgccatcaagctgacagccctgggccggccccagttcctgctgcagttcagcgaggtgctggccaagtggcgctgcttcttccaccagatggctgtggagcagggccaggccggcctggccgccatggacaccaagctggaggtggccgtgctgcaggagagcgtggccaagctgggcatcgccagcagagctgagattgaggactggttcaccgctgagaccctgggcgtgtctggcaccatggacctgctggactggagcagcctgattgacagcaggaccaagctgagcaagcacctggtggtgcccaatgcccagacaggccagctggagcccctgctgagccgcttcacagaggaggaggagctgcagatgaccaggatgctgcagaggatggatgtgctggccaagaaggccacagagatgggcgtgcggctgatggtggatgctgagcagacctacttccagcctgccatcagccggctgaccctggagatgcagaggaagttcaacgtggagaagcccctcatcttcaacacctaccagtgctacctgaaggatgcctatgacaacgtgaccctggatgtggagctggcccggcgggagggctggtgctttggagccaagctggtgcggggggcctacctggcccaggagcgggcccgggctgctgagatcggctatgaggaccccatcaaccccacctatgaggccaccaatgccatgtaccaccgctgcctggactatgtgctggaggagctgaagcacaatgccaaggccaaggtgatggtggccagccacaatgaagacacagtgcgctttgccctgcggaggatggaggagctgggcctgcaccctgctgaccaccgggtgtacttcggccagctgctgggcatgtgtgaccagatctccttccccctgggccaggccggctaccctgtgtacaagtatgtgccctacggccctgtgatggaggtgctgccctacctgagcagaagagccctggagaacagcagcctgatgaagggcacccaccgggagcggcagctgctgtggctggagctgctgcggcggctgaggacaggcaacctcttccacaggcctgcctag

SEQ ID NO: 165377 - DNA, 1479 bp, synthetic construct
  misc_feature 1..1479: note = Description of Artificial Sequence: Synthetic coding sequence
  source 1..1479: mol_type = other DNA
atgaagatgaccttctacggccactttgtggccggggaggaccaggagagcatccagcccctgctgcggcactaccgggccttcggcgtgtctgccatcctggactatggagtggaggaggacctgagccctgaggaggccgagcacaaggagatggagagctgcaccagcgctgctgagagagatggcagcggcaccaacaagagggacaagcagtaccaggcccactgggcctttggagacagaagaaatggagtcatcagcgcccggacctacttctacgccaatgaggccaagtgtgacagccacatggagaccttcctgcgctgcatcgaggccagcggccgggtgtctgatgatggcttcatcgccatcaagctgacagccctgggccggccccagttcctgctgcagttcagcgaggtgctggccaagtggcgctgcttcttccaccagatggctgtggagcagggccaggccggcctggccgccatggacaccaagctggaggtggccgtgctgcaggagagcgtggccaagctgggcatcgccagcagagctgagattgaggactggttcaccgctgagaccctgggcgtgtctggcaccatggacctgctggactggagcagcctgattgacagcaggaccaagctgagcaagcacctggtggtgcccaatgcccagacaggccagctggagcccctgctgagccgcttcacagaggaggaggagctgcagatgaccaggatgctgcagaggatggatgtgctggccaagaaggccacagagatgggcgtgcggctgatggtggatgctgagcagacctacttccagcctgccatcagccggctgaccctggagatgcagaggaagttcaacgtggagaagcccctcatcttcaacacctaccagtgctacctgaaggatgcctatgacaacgtgaccctggatgtggagctggcccggcgggagggctggtgctttggagccaagctggtgcggggggcctacctggcccaggagcgggcccgggctgctgagatcggctatgaggaccccatcaaccccacctatgaggccaccaatgccatgtaccaccgctgcctggactatgtgctggaggagctgaagcacaatgccaaggccaaggtgatggtggccagccacaatgaagacacagtgcgctttgccctgcggaggatggaggagctgggcctgcaccctgctgaccaccgggtgtacttcggccagctgctgggcatgtgtgaccagatctccttccccctgggccaggccggctaccctgtgtacaagtatgtgccctacggccctgtgatggaggtgctgccctacctgagcagaagagccctggagaacagcagcctgatgaagggcacccaccgggagcggcagctgctgtggctggagctgctgcggcggctgaggacaggcaacctcttccacaggcctgcctag

SEQ ID NO: 165378 - DNA, 1611 bp, synthetic construct
  misc_feature 1..1611: note = Description of Artificial Sequence: Synthetic coding sequence
  source 1..1611: mol_type = other DNA
atgagcccccgggtggtgagcaacagctctgtgctggccagccagagcgtgggcatcaccaacgtgaggacagtgttcagcaatgtgttcaacaacaccacagccttccccatcctgcggggcagcaactgccacaagatcacagcccctggcctgggcaagggccagctggtgaacctgctgcccccagagaacctgccctggtgtggcggcagccagggccccaggatgctgcggacctgctacgtgctgtgcagccaggccggcccccccagccggggctggcagagcctgagctttgatggaggagccttccacctgaagggcaccggggagctgacccgggccctgctggtgctgcggctgtgtgcctggccacccctggtgacccacggcctgctgctgcaggcctggagccggcggctgctgggcagccggctgagcggggccttcctgcgggcctctgtgtatggccagtttgtggccggggagacagctgaggaggtgaagggctgtgtgcagcagctgcggaccctgagcctgcggcccctgctggccgtgcccacagaggaggagccagattctgctgccaagtctggagaggcctggtatgagggcaacctgggcgccatgctgcgctgtgtggacctgagccggggcctgctggagccccccagcctggccgaggccagcctgatgcagctgaaggtgacagccctgaccagcacccggctgtgcaaggagctggcctcctgggtgcggcggcctggggccagcctggagctgagccctgagcggctggccgaggccatggattctggccagaacctgcaggtgtcctgcctgaatgctgagcagaaccagcacctgcgggccagcctgagccggctgcaccgggtggcccagtatgcccgggcccagcacgtgcggctgctggtggatgctgagtacaccagcctgaacccagccctgagcctgctggtggccgccctggccgtgcgctggaacagccctggagagggcggcccctgggtgtggaacacctaccaggcctgcctgaaggacacctttgagcggctgggcagagatgctgaggccgcccaccgggccggcctggccttcggcgtgaagctggtgcggggggcctacctggacaaggagagagctgtggcccagctgcacggcatggaggaccccacccagcctgactatgaggccaccagccagagctacagccgctgcctggagctgatgctgacccacgtggcccggcacggccccatgtgccacctgatggtggccagccacaatgaggagagcgtgcggcaggccaccaagaggatgtgggagctgggcatccccctggatggcaccgtgtgcttcggccagctgctgggcatgtgtgaccacgtgtccctggccctgggccaggccggctacgtggtgtacaagagcatcccctacggcagcctggaggaggtgatcccctacctgatccggcgggcccaggagaacagatctgtgctgcagggcgcccggcgggagcaggagctgctgagccaggagctgtggaggcggctgctgcccggctgccgccgcatcccccactag

SEQ ID NO: 165379 - DNA, 762 bp, synthetic construct
  misc_feature 1..762: note = Description of Artificial Sequence: Synthetic coding sequence
  source 1..762: mol_type = other DNA
atgcctggccgcacagaaggaggctcctggctgagaaatgctgctgctgctgatgtgctgaggaacctgcctgaggtggagtggagggagccccagcactgctgcccccccacccccaggaagaggaagcagaacccccgggtgcccctgccccactacccacccaacccagctgctgccatcgctgctgacaccatgcccaagaggaagaagcagaaccaccaccagccccccacccagcagcagccccccctgcctgagcgggaggagactggagatgaagaagatggcagccccatcggcccccccagcctgctgggccccccacccatggccaacgggaagccaggggaccccaagagcgccctgcaccggggccccccaggcagccggggccccctcatcccccccctgctgagcctgcccccaccaccctggggccggggccccatccggcggggcctgggccccaggagcagcccctacggccggggctggtggggcgtgaatgctgagccccccttccctggccctggccacggcggccccacccggggcagcttccacaaggagcagaggaacccccggcggctgaagtcctggagcctcatcaagaacacctgcccccccaaggatgacccccaggtgatggaggacaagagtgacaggcctgtgtgccgccactttgccaagaagggccactgccgctatgaggacctgtgtgccttctaccaccctggggtgaatggaccacccctgtag

SEQ ID NO: 165380 - DNA, 504 bp, synthetic construct
  misc_feature 1..504: note = Description of Artificial Sequence: Synthetic coding sequence
  source 1..504: mol_type = other DNA
atgcccaagaggaagaagcagaaccaccaccagccccccacccagcagcagccccccctgcctgagcgggaggagactggagatgaggaggatggcagccccatcgccctgcaccggggccccccaggcagccggggccccctcatcccccccctgctgagcctgcccccaccaccctggggccggggccccatccggcggggcctgggccccaggagcagcccctacggccggggctggtggggcgtgaatgctgagccccccttccctggccctggccacggcggccccacccggggcagcttccacaaggagcagaggaacccccggcggctgaagtcctggagcctcatcaagaacacctgcccccccaaggatgacccccaggtgatggaggacaagagtgacaggcctgtgtgccgccactttgccaagaagggccactgccgctatgaggacctgtgtgccttctaccaccctggggtgaatggaccacccctgtag

SEQ ID NO: 165381 - DNA, 567 bp, synthetic construct
  misc_feature 1..567: note = Description of Artificial Sequence: Synthetic coding sequence
  source 1..567: mol_type = other DNA
atgcccaagaggaagaagcagaaccaccaccagccccccacccagcagcagccccccctgcctgagcgggaggagactggagatgaggaggatggcagccccatcggcccccccagcctgctgggccccccacccatggccaacgggaagccaggggaccccaagagcgccctgcaccggggccccccaggcagccggggccccctcatcccccccctgctgagcctgcccccaccaccctggggccggggccccatcagaagaggcctgggccccaggagcagcccctacggccggggctggtggggcgtgaatgctgagccccccttccctggccctggccatggaggccccacccggggcagcttccacaaggagcagaggaacccccggcggctgaagtcctggagcctcatcaagaacacctgcccccccaaggatgacccccaggtgatggaggacaagagtgacaggcctgtgtgccgccactttgccaagaagggccactgccgctatgaggacctgtgtgccttctaccaccctggggtgaatggcccccccctgtag

SEQ ID NO: 165382 - DNA, 567 bp, synthetic construct; identical to SEQ ID NO: 165381
  misc_feature 1..567: note = Description of Artificial Sequence: Synthetic coding sequence
  source 1..567: mol_type = other DNA

SEQ ID NO: 165383 - DNA, 504 bp, synthetic construct; identical to SEQ ID NO: 165380
  misc_feature 1..504: note = Description of Artificial Sequence: Synthetic coding sequence
  source 1..504: mol_type = other DNA

SEQ ID NO: 165384 - DNA, 504 bp, synthetic construct; identical to SEQ ID NO: 165380
  misc_feature 1..504: note = Description of Artificial Sequence: Synthetic coding sequence
  source 1..504: mol_type = other DNA

SEQ ID NO: 165385 - DNA, 504 bp, synthetic construct; identical to SEQ ID NO: 165380
  misc_feature 1..504: note = Description of Artificial Sequence: Synthetic coding sequence
  source 1..504: mol_type = other DNA

SEQ ID NO: 165386 - DNA, 567 bp, synthetic construct; identical to SEQ ID NO: 165381
  misc_feature 1..567: note = Description of Artificial Sequence: Synthetic coding sequence
  source 1..567: mol_type = other DNA

SEQ ID NO: 165387 - DNA, 567 bp, synthetic construct; identical to SEQ ID NO: 165381
  misc_feature 1..567: note = Description of Artificial Sequence: Synthetic coding sequence
  source 1..567: mol_type = other DNA

SEQ ID NO: 165388 - DNA, 504 bp, synthetic construct; identical to SEQ ID NO: 165380
  misc_feature 1..504: note = Description of Artificial Sequence: Synthetic coding sequence
  source 1..504: mol_type = other DNA

SEQ ID NO: 165389 - DNA, 504 bp, synthetic construct; identical to SEQ ID NO: 165380
  misc_feature 1..504: note = Description of Artificial Sequence: Synthetic coding sequence
  source 1..504: mol_type = other DNA

SEQ ID NO: 165390 - DNA, 504 bp, synthetic construct; identical to SEQ ID NO: 165380
  misc_feature 1..504: note = Description of Artificial Sequence: Synthetic coding sequence
  source 1..504: mol_type = other DNA

SEQ ID NO: 165391 - DNA, 567 bp, synthetic construct; identical to SEQ ID NO: 165381
  misc_feature 1..567: note = Description of Artificial Sequence: Synthetic coding sequence
  source 1..567: mol_type = other DNA

SEQ ID NO: 165392 - DNA, 567 bp, synthetic construct; identical to SEQ ID NO: 165381
  misc_feature 1..567: note = Description of Artificial Sequence: Synthetic coding sequence
  source 1..567: mol_type = other DNA

SEQ ID NO: 165393 - DNA, 567 bp, synthetic construct; identical to SEQ ID NO: 165381
  misc_feature 1..567: note = Description of Artificial Sequence: Synthetic coding sequence
  source 1..567: mol_type = other DNA

SEQ ID NO: 165394 - DNA, 762 bp, synthetic construct; identical to SEQ ID NO: 165379
  misc_feature 1..762: note = Description of Artificial Sequence: Synthetic coding sequence
  source 1..762: mol_type = other DNA

SEQ ID NO: 165395 - DNA, 762 bp, synthetic construct; identical to SEQ ID NO: 165379
  misc_feature 1..762: note = Description of Artificial Sequence: Synthetic coding sequence
  source 1..762: mol_type = other DNA

SEQ ID NO: 165396 - DNA, 762 bp, synthetic construct; identical to SEQ ID NO: 165379
  misc_feature 1..762: note = Description of Artificial Sequence: Synthetic coding sequence
  source 1..762: mol_type = other DNA

SEQ ID NO: 165397 - DNA, 762 bp, synthetic construct; identical to SEQ ID NO: 165379
  misc_feature 1..762: note = Description of Artificial Sequence: Synthetic coding sequence
  source 1..762: mol_type = other DNA

SEQ ID NO: 165398 - DNA, 762 bp, synthetic construct; identical to SEQ ID NO: 165379
  misc_feature 1..762: note = Description of Artificial Sequence: Synthetic coding sequence
  source 1..762: mol_type = other DNA

SEQ ID NO: 165399 - DNA, 762 bp, synthetic construct; identical to SEQ ID NO: 165379
  misc_feature 1..762: note = Description of Artificial Sequence: Synthetic coding sequence
  source 1..762: mol_type = other DNA

SEQ ID NO: 165400 - DNA, 1344 bp, synthetic construct
  misc_feature 1..1344: note = Description of Artificial Sequence: Synthetic coding sequence
  source 1..1344: mol_type = other DNA
atgaggtctgtgtcctatgtgcagagggtggccctggagttcagcggcagcctcttcccccacgccatctgcctgggagatgtggacaatgacaccctgaatgagctggtggtgggggacaccagcggcaaggtgtctgtgtacaagaatgatgacagccggccctggctgacctgcagctgccagggcatgctgacctgtgtgggcgtgggagatgtgtgcaacaagggcaagaacctgctggtggccgtgtctgctgagggctggttccacctgtttgacctgaccccagccaaggtgctggatgccagcggccaccacgagaccctgattggagaggagcagaggcctgtgttcaagcagcacatcccagccaacaccaaggtgatgctgatcagtgacattgatggagatggctgccgggagctggtggtgggctacacagacagagtggtgcgggccttccgctgggaggagctgggggagggccctgagcacctgaccggccagctggtgtccctgaagaagtggatgctggagggccaggtggacagcctgtctgtgaccctgggccccctgggcctgcctgagctgatggtgtcccagcccggctgtgcctatgccatcctgctgtgcacctggaagaaggacaccggcagccccccagccagcgagggccccacagatggcagccgggagaccccagctgccagagatgtggtgctgcaccagaccagcggccgcatccacaacaagaatgtgtccacccacctgattggcaacatcaagcagggccacggcacagagagcagcggcagcggcctgtttgccctgtgcaccctggatggcaccctgaagctgatggaggagatggaggaggccgacaagctgctgtggagcgtgcaggtggaccaccagctgtttgccctggagaagctggatgtgactggaaatggccacgaggaggtggtggcctgtgcctgggatggccagacctacatcatcgaccacaacagaacagtggtgcgcttccaggtggatgagaacatccgggccttctgtgccggcctgtatgcctgcaaggagggcaggaacagcccctgcctggtgtatgtgaccttcaaccagaagatctacgtgtactgggaggtgcagctggagaggatggagagcaccaacctggtgaagctgctggagaccaagccagagtaccacagcctgctgcaggagctgggcgtggaccctgatgacctgcctgtgacccgggccctgctgcaccagaccctgtaccacccagaccagcccccccagtgtgcccccagcagcctgcaggaccccacctag

SEQ ID NO: 165401 - DNA, 381 bp, synthetic construct
  misc_feature 1..381: note = Description of Artificial Sequence: Synthetic coding sequence
  source 1..381: mol_type = other DNA
atgctgctggtgctgctgtctgtggtgctgctggccctgagcagcgcccagagcacagacaatgatgtgaactatgaggacttcaccttcaccatcccagatgtggaggacagctacctggaccccctggtgattgtggtgaccaagatgatggtgctgagccgggaccaccagaaccaggaggccatcacagccatcctgccccacctgctcttcaagatcagcaatgaccacccagatgaagatactgtgaacagcctgtacccagacttcctgctgagcgcctgcaggaagcaccaccacagcagccggggcacagaccagcaggacatccccaggagcaaccacagcggcaacctggagttcagcggcaggaagtag

SEQ ID NO: 165402 - DNA, 198 bp, synthetic construct
  misc_feature 1..198: note = Description of Artificial Sequence: Synthetic coding sequence
  source 1..198: mol_type = other DNA
atgctgctggtgctgctgtctgtggtgctgctggccctgagcagcgcccagagcacagacaatgatgtgaactatgaggacttcaccttcaccatcccagcctgcaggaagcaccaccacagcagccggggcacagaccagcaggacatccccaggagcaaccacagcggcaacctggagttcagcggcaggaagtag

SEQ ID NO: 165403 - DNA, 696 bp, synthetic construct
  misc_feature 1..696: note = Description of Artificial Sequence: Synthetic coding sequence
  source 1..696: mol_type = other DNA
atggctgtgttcctggaggccaaggatgcccacagcgtgctgaagcgcttcccccgggccaatgagttcctggaggagctgcggcagggcaccatcgagcgggagtgcatggaggagatctgcagctatgaggaggtgaaggaggtgtttgagaacaaggagaagaccatggagttctggaagggctacccaaatgctgtgtacagcgtgcgggaccccagccagagcagtgatgccatgtatgtggtggtgcccctgctgggcgtggccctgctgattgtgattgccctcttcatcatctggcgctgccagctgcagaaggccaccaggcaccaccccagctatgcccagaaccgctacctggccagcagagctggccacaccctgccccgggtgatggtgtaccggggcaccgtgcacagccagggcgagcccagcggccaccgggaggccgccaacagcccccaggtggtgctgggccccagccggggcggccgcaccaccgtgcggctggagagcaccctgtacctgcctgagctgagcctgagccggctgagcagcaccaccccacctccttcctatgaggaggtgacagccccccaggagagcagcagcgaggaggcctctgtgtcctacagcgaccccccacccaagtatgaggagatcgtggccgccaaccctggagctgacaagtag

SEQ ID NO: 165404 - DNA, 309 bp, synthetic construct
  misc_feature 1..309: note = Description of Artificial Sequence: Synthetic coding sequence
  source 1..309: mol_type = other DNA
atggccggcctgagccgggccctgagcagcgtcttcctggaggccaaggatgcccacagcgtgctgaagcgcttcccccgggccaatgagttcctggaggagctgcggcagggcaccatcgagcgggagtgcatggaggagatctgcagctatgaggaggtgaaggaggtgtttgagaacaaggagaagacagcctgcaccaccctgggcctggtgctgggcgtgggcgtggccagcggcatcgccaggacaggccctggaaatgctgaccagagcgaggccaggaaggacacccagcccaaggcctag

SEQ ID NO: 165405 - DNA, 276 bp, synthetic construct
  misc_feature 1..276: note = Description of Artificial Sequence: Synthetic coding sequence
  source 1..276: mol_type = other DNA
gaccccagccagagcagtgatgccatgtatgtggtggtgcccctgctgggcgtggccctgctgattgtcatcgccctcttcatcatctggcgctgccagctgcagaaggccaccaggcaccaccccagctatgcccagaacagacgctgctttgctgtgcggctggccgcccccagctttgccagcaagtacagcaatgtgggcgccttccccttccggctgtgggccgccagcctgagcctggcccgcatctacctgaccaacatccccaagtag

SEQ ID NO: 165406 - DNA, 159 bp, synthetic construct
  misc_feature 1..159: note = Description of Artificial Sequence: Synthetic coding sequence
  source 1..159: mol_type = other DNA
atggctgtgttcctggaggccaaggatgcccacagcgtgctgaagcgcttcccccgggccaatgagttcctggaggagctgcggcagggcaccatcgagcgggagtgcatggaggagatctgcagctatgaggaggtgaaggaggtgtttgaaaattag

SEQ ID NO: 165407 - DNA, 696 bp, synthetic construct; identical to SEQ ID NO: 165403
  misc_feature 1..696: note = Description of Artificial Sequence: Synthetic coding sequence
  source 1..696: mol_type = other DNA

SEQ ID NO: 165408 - DNA, 681 bp, synthetic construct
  misc_feature 1..681: note = Description of Artificial Sequence: Synthetic coding sequence
  source 1..681: mol_type = other DNA
atgttcaccctgctggtgctgctgagccagctgcccaccgtgaccctgggcttcccccactgtgcccggggccccaaggccagcaagcatgctggggaggaggtgttcaccagcaaggaggaggccaacttcttcatccaccggcggctgctgtacaacagatttgacctggagctgttcaccccaggcaacctggagcgggagtgcaatgaggagctgtgcaactatgaggaggcccgggagatctttgtggatgaggacaagaccatcgccttctggcaggagtacagcgccaagggccccaccaccaagagtgatggcaaccgggagaagattgatgtgatgggcctgctgaccggcctgattgctgctggggtcttcctggtgatcttcggcctgctgggctactacctgtgcatcaccaagtgcaaccggctgcagcacccctgcagcagcgctgtgtatgagcggggccgccacacccccagcatcatcttcagaagacctgaggaggccgccctgagccccctgccccccagcgtggaggatgctggcctgcccagctatgagcaggccgtggccctgaccaggaagcacagcgtgtccccacctccaccctacccaggccacaccaagggcttccgggtcttcaagaagtccatgagcctgcccagccactag

SEQ ID NO: 165409 - DNA, 375 bp, synthetic construct
  misc_feature 1..375: note = Description of Artificial Sequence: Synthetic coding sequence
  source 1..375: mol_type = other DNA
atgctgctgcgggacctggtgctgcggcggggctgctgctggagcagcctgctgctgcactgtgccctgcaccccctgtggggctttgtgcaggtgacccacggggagccccagaagagctgcagcaaggtgacagacagctgccgccacgtgtgccagtgccggcccccaccacccctgcccccacctcctcctcctcctcctccaccccggctgctgagcgccccagcccccaacagcaccagctgccccacagaggagagctggtggagcggcctggtgatcatcatcgctgtgtgctgtgccagcctggtgttcctgactgtgctggtgatcatctgctacaaggccatcaagaggaaccacgccatctag

SEQ ID NO: 165410 - DNA, 462 bp, synthetic construct
  misc_feature 1..462: note = Description of Artificial Sequence: Synthetic coding sequence
  source 1..462: mol_type = other DNA
atgctgctgcgggacctggtgctgcggcggggctgctgctggagcagcctgctgctgcactgtgccctgcaccccctgtggggctttgtgcaggtgacccacggggagccccagaagagctgcagcaaggtgacagacagctgccgccacgtgtgccagtgccggcccccaccacccctgcccccacctcctcctcctcctcctccaccccggctgctgagcgccccagcccccaacagcaccagctgccccacagaggagagctggtggagcggcctggtgatcatcatcgctgtgtgctgtgccagcctggtgttcctgactgtgctggtgatcatctgctacaaggccatcaagaggaagcccctgaggaaggatgaaaatggcacctctgtggccgagtaccccatgtctgccagccagagcaacaagggcgtggatgtgaacaatgctgtggtgtag

SEQ ID NO: 165411 - DNA, 462 bp, synthetic construct; identical to SEQ ID NO: 165410
  misc_feature 1..462: note = Description of Artificial Sequence: Synthetic coding sequence
  source 1..462: mol_type = other DNA

SEQ ID NO: 165412 - DNA, 828 bp, synthetic construct
  misc_feature 1..828: note = Description of Artificial Sequence: Synthetic coding sequence
  source 1..828: mol_type = other DNA
atgtggagggctggctccatgtctgctgagctgggcgtgggctgtgccctgcgggctgtgaatgaaagagtgcagcaggccgtggcccggcggccccgggacctgcctgccatccagccccggctggtggccgtgtccaagaccaagccagctgacatggtgattgaggcctacggccacggccagaggacctttggagaaaattatgtgcaggagctgctggagaaggccagcaaccccaagatcctgagcctgtgcccagagatcaagtggcacttcatcggccacctgcagaagcagaatgtgaacaagctgatggctgtgcccaacctcttcatgctggagaccgtggacagcgtgaagctggccgacaaggtgaacagctcctggcagaggaagggcagccctgagcggctgaaggtgatggtgcagatcaacaccagcggggaggagagcaagcacggcctgcccccatctgagaccatcgccatcgtggagcacatcaatgccaagtgccccaacctggagtttgtgggcctgatgaccatcggcagctttggacatgacctgagccagggccccaacccagacttccagctgctgctgagcctgcgggaggagctgtgcaagaagctgaacatcccagctgaccaggtggagctgtccatgggcatgtctgctgacttccagcacgctgtggaggtgggcagcaccaacgtgcgcatcggcagcaccatctttggagagcgggactacagcaagaagcccaccccagacaagtgtgccgcagatgtgaaggcccccctggaggtggcccaggagcactag

SEQ ID NO: 165413 - DNA, 1149 bp, synthetic construct
  misc_feature 1..1149: note = Description of Artificial Sequence: Synthetic coding sequence
  source 1..1149: mol_type = other DNA
atgaggagccccctgtgctggctgctgcccctgctgatcctggcctctgtggcccagggccagcccacccggcggccccggcccggcaccggccctggccggcggccccggccccggccccggcccacccccagcttcccccagccagatgagcctgctgagcccacagacctgcccccacccctgcccccaggcccccccagcatcttcccagactgcccccgggagtgctactgccccccagacttccccagcgccctgtactgtgacagcaggaacctgaggaaggtgcctgtgattcctccccgcatccactacctgtacctgcagaacaacttcatcacagagctgcctgtggagagcttccagaatgccaccggcctgcgctggatcaacctggacaacaaccgcatcaggaagattgaccagagggtgctggagaagctgcccggcctggtgttcctgtacatggagaagaaccagctggaggaggtgcccagcgccctgcccaggaacctggagcagctgcggctgagccagaaccacatcagccgcatccccccaggagtcttcagcaagctggagaacctgctgctgctggacctgcagcacaaccggctgagtgatggagtcttcaagccagacaccttccacggcctgaagaacctgatgcagctgaacctggcccacaacatcctgaggaagatgccaccccgggtgcccacagccatccaccagctgtacctggacagcaacaagattgagaccatccccaacggctacttcaagagcttccccaacctggccttcatccggctgaactacaacaagctgacagaccggggcctgcccaagaacagcttcaacatcagcaacctgctggtgctgcacctgagccacaaccgcatcagctctgtgcctgccatcaacaaccggctggagcacctgtacctgaacaacaacagcattgagaagatcaatggcacccagatctgccccaatgacctggtggccttccatgacttcagcagtgacctggagaatgtgccccacctgcgctacctgcggctggatggcaactacctgaagccacccatccccctggacctgatgatgtgcttccggctgctgcagagcgtggtgatctag

SEQ ID NO: 165414 - DNA, 1002 bp, synthetic construct
  misc_feature 1..1002: note = Description of Artificial Sequence: Synthetic coding sequence
  source 1..1002: mol_type = other DNA
atggaggacctggaggaggatgtgcgcttcatcgtggatgagaccctggactttggaggcctgagccccagcgacagccgggaggaggaggacatcaccgtgctggtgaccccagagaagcccctgcggcggggcctgagccacagaagtgaccccaatgctgtggccccagccccccagggcgtgcggctgagcctgggccccctgagccctgagaagctggaggagatcctggatgaggccaaccggctggccgcccagctggagcagtgtgccctgcaggaccgggagagcgctggggagggcctgggcccccggcgggtgaagcccagcccccggcgggagacctttgtgctgaaggacagccctgtgcgggacctgctgcccaccgtgaacagcctgaccaggagcacccccagccccagcagcctgaccccccggctgcggagcaatgacaggaagggctctgtgcgggccctgcgggccaccagcggcaagaggcccagcaacatgaagcgggagagccccacctgcaacctcttccctgccagcaagagccctgccagcagccccctgaccaggagcaccccacctgtgcggggccgggccggccccagcggccgggccgccgccagcccccccacccccatccgctctgtgctggccccccagcccagcaccagcaacagccagaggctgccccggccccagggcgccgccgccaagagcagcagccagctgcccatccccagcgccatccccaggcctgccagcaggatgcccctgaccagccgctctgtgcccccaggccgcggggccctgcccccagacagcctgagcaccaggaagggcctgccccggcccagcacagctggccaccgggtgcgggagagcggccacaaggtgcctgtgtcccagaggctgaacctgcctgtgatgggcgccaccaggagcaacctgcagccccccaggaaggtggccgtgcccggccccaccaggtag

SEQ ID NO: 165415 - DNA, 933 bp, synthetic construct
  misc_feature 1..933: note = Description of Artificial Sequence: Synthetic coding sequence
  source 1..933: mol_type = other DNA
atggaggacctggaggaggatgtgcgcttcatcgtggatgagaccctggactttggaggcctgagccccagcgacagccgggaggaggaggacatcaccgtgctggtgaccccagagaagcccctgcggcggggcctgagccacagaagtgaccccaatgctgtggccccagccccccagggcgtgcggctgagcctgggccccctgagccctgagaagctggaggagatcctggatgaggccaaccggctggccgcccagctggagcagtgtgccctgcaggaccgggagagcgctggggagggcctgggcccccggcgggtgaagcccagcccccggcgggagacctttgtgctgaaggacagccctgtgcgggacctgctgcccaccgtgaacagcctgaccaggagcacccccagccccagcagcctgaccccccggctgcggagcaatgacaggaagggctctgtgcgggccctgcgggccaccagcggcaagaggcccagcaacatgaagcgggagagccccacctgcaacctcttccctgccagcaagagccctgccagcagccccctgaccaggagcaccccacctgtgcggggccgggccggccccagcggccgggccgccgccagcgaggagaccagggctgccaagctgcgggcctgccagcccaatgccacccaccagccagaatgtgccacctggcagcgctgccccaccagcggcttctctgtgaacagcaagagggccagcaagaccaagcactgcaggacccagagcgctgggaagtggacccagggcagctgcttccctgccaccaagagcagctgccacggctgccacagccagcagagcgctgccccccaggagagcggcagccccaggacctaccaggtgaagaggagcggccagcaggcccggctgcagtag

SEQ ID NO: 165416 - DNA, 1002 bp, synthetic construct; identical to SEQ ID NO: 165414
  misc_feature 1..1002: note = Description of Artificial Sequence: Synthetic coding sequence
  source 1..1002: mol_type = other DNA

SEQ ID NO: 165417 - DNA, 1002 bp, synthetic construct; identical to SEQ ID NO: 165414
  misc_feature 1..1002: note = Description of Artificial Sequence: Synthetic coding sequence
  source 1..1002: mol_type = other DNA

SEQ ID NO: 165418 - DNA, 1002 bp, synthetic construct; identical to SEQ ID NO: 165414
  misc_feature 1..1002: note = Description of Artificial Sequence: Synthetic coding sequence
  source 1..1002: mol_type = other DNA

SEQ ID NO: 165419 - DNA, 666 bp, synthetic construct
  misc_feature 1..666: note = Description of Artificial Sequence: Synthetic coding sequence
  source 1..666: mol_type = other DNA
atggaggacctggaggaggatgtgcgcttcatcgtggatgagaccctggactttggaggcctgagccccagcgacagccgggaggaggaggacatcaccgtgctggtgaccccagagaagcccctgcggcggggcctgagccacagaagtgaccccaatgctgtggccccagccccccagggcgtgcggctgagcctgggccccctgagccctgagaagctggaggagatcctggatgaggccaaccggctggccgcccagctggagcagtgtgccctgcaggaccgggagagcgctggggagggcctgggcccccggcgggtgaagcccagcccccggcgggagacctttgtgctgaaggacagccctgtgcgggacctgctgcccaccgtgaacagcctgaccaggagcacccccagccccagcagcctgaccccccggctgcggagcaatgacaggaagggctctgtgcgggccctgcgggccaccagcggcaagaggcccagcaacatgaagcgggagagccccacctgcaacctcttccctgccagcaagagccctgccagcagccccctgaccaggagcaccccacctgtgcggggccgggccggccccagcggccgggccgccgccagcgaggagaccagggctgccaagctgaggtag

SEQ ID NO: 165420 - DNA, 699 bp, synthetic construct
  misc_feature 1..699: note = Description of Artificial Sequence: Synthetic coding sequence
  source 1..699: mol_type = other DNA
atggaggacctggaggaggatgtgcgcttcatcgtggatgagaccctggactttggaggcctgagccccagcgacagccgggaggaggaggacatcaccgtgctggtgaccccagagaagcccctgcggcggggcctgagccacagaagtgaccccaatgctgtggccccagccccccagggcgtgcggctgagcctgggccccctgagccctgagaagctggaggagatcctggatgaggccaaccggctggccgcccagctggagcagtgtgccctgcaggaccgggagagcgctggggagggcctgggcccccggcgggtgaagcccagcccccggcgggagacctttgtgctgaaggacagccctgtgcgggacctgctgcccaccgtgaacagcctgaccaggagcacccccagccccagcagcctgaccccccggctgcggagcaatgacaggaagggctctgtgcgggccctgcgggccaccagcggcaagaggcccagcaacatgaagcgggagagccccacctgcaacctcttccctgccagcaagagccctgccagcagccccctgaccaggagcaccccacctgtgcggggccgggccggccccagcggccgggccgccgccagcccccccacccccatccgctctgtgctggccccccagcccagcaccagcaacagccagaggtag

SEQ ID NO: 165421 - DNA, 1092 bp, synthetic construct
  misc_feature 1..1092: note = Description of Artificial Sequence: Synthetic coding sequence
  source 1..1092: mol_type = other DNA
atggaggacctggaggaggatgtgcgcttcatcgtggatgagaccctggactttggaggcctgagccccagcgacagccgggaggaggaggacatcaccgtgctggtgaccccagagaagcccctgcggcggggcctgagccacagaagtgaccccaatgctgtggccccagccccccagggcgtgcggctgagcctgggccccctgagccctgagaagctggaggagatcctggatgaggccaaccggctggccgcccagctggagcagtgtgccctgcaggaccgggagagcgctggggagggcctgggcccccggcgggtgaagcccagcccccggcgggagacctttgtgctgaaggacagccctgtgcgggacctgctgcccaccgtgaacagcctgaccaggagcacccccagccccagcagcctgaccccccggctgcggagcaatgacaggaagggctctgtgcgggccctgcgggccaccagcggcaagaggcccagcaacatgaagcgggagagccccacctgcaacctcttccctgccagcaagagccctgccagcagccccctgaccaggagcaccccacctgtgcggggccgggccggccccagcggccgggccgccgccagcgaggagaccagggctgccaagctgcgggtgtctggcagcggggagtttgtgggcctgaccctgaagttcctgcaccccagccccccaggcccccccacccccatccgctctgtgctggccccccagcccagcaccagcaacagccagaggctgccccggccccagggcgccgccgccaagagcagcagccagctgcccatccccagcgccatccccaggcctgccagcaggatgcccctgaccagccgctctgtgcccccaggccgcggggccctgcccccagacagcctgagcaccaggaagggcctgccccggcccagcacagctggccaccgggtgcgggagagcggccacaaggtgcctgtgtcccagaggctgaacctgcctgtgatgggcgccaccaggagcaacctgcagccccccaggaaggtggccgtgcccggccccaccaggtag

SEQ ID NO: 165422 - DNA, 273 bp, synthetic construct
  misc_feature 1..273: note = Description of Artificial Sequence: Synthetic coding sequence
  source 1..273: mol_type = other DNA
atgaggcggctgctgctggtgaccagcctggtggtggtgctgctgtgggaggccggggctgtgcctgcccccaaggtgcccatcaagatgcaggtgaagcactggcccagcgagcaggaccctgagaaggcctggggcgcccgggtggtggagcccccagagaaggatgaccagctggtggtgctcttccctgtgcagaagcccaagctgctgaccacagaggagaagccccggggcaccaaggcctggatggagagccgggcccggccctag

SEQ ID NO: 165423 - DNA, 459 bp, synthetic construct
  misc_feature 1..459: note = Description of Artificial Sequence: Synthetic coding sequence
  source 1..459: mol_type = other DNA
atgaggcggctgctgctggtgaccagcctggtggtggtgctgctgtgggaggccggggctgtgcctgcccccaaggtgcccatcaagatgcaggtgaagcactggcccagcgagcaggaccctgagaacagagcctggggcgcccgggtggtggagcccccagagaaggatgaccagctggtggtgctcttccctgtgcagaagcccaagctgctgaccacagaggagaagccccggggccagggccggggccccatcctgcccggcaccaaggcctggatggagacagaggacaccctgggccacgtgctgagccctgagccagaccatgacagcctgtaccaccccccacctgaggaggaccagggcgaggagcggccccggctgtgggtgatgcccaaccaccaggtgctgctgggccctgaggaggaccaggaccacatctaccacccccagtag

SEQ ID NO: 165424 - DNA, 456 bp, synthetic construct
  misc_feature 1..456: note = Description of Artificial Sequence: Synthetic coding sequence
  source 1..456: mol_type = other DNA
atgaggcggctgctgctggtgaccagcctggtggtggtgctgctgtgggaggccggggctgtgcctgcccccaaggtgcccatcaagatgcaggtgaagcactggcccagcgagcaggaccctgagaaggcctggggcgcccgggtggtggagcccccagagaaggatgaccagctggtggtgctcttccctgtgcagaagcccaagctgctgaccacagaggagaagccccggggccagggccggggccccatcctgcccggcaccaaggcctggatggagacagaggacaccctgggccacgtgctgagccctgagccagaccatgacagcctgtaccaccccccacctgaggaggaccagggcgaggagcggccccggctgtgggtgatgcccaaccaccaggtgctgctgggccctgaggaggaccaggaccacatctaccacccccagtag

SEQ ID NO: 165425 - DNA, 429 bp, synthetic construct
  misc_feature 1..429: note = Description of Artificial Sequence: Synthetic coding sequence
  source 1..429: mol_type = other DNA
atgaggcggctgctgctggtgaccagcctggtggtggtgctgctgtgggaggccggggctgtgcctgcccccaaggtgcccatcaagatgcaggtgaagcactggcccagcgagcaggaccctgagaaggcctggggcgcccgggtggtggagcccccagagaaggatgaccagctggtggtgctcttccctgtgcagaagcccaagctgctgaccacagaggagaagccccggggcaccaaggcctggatggagacagaggacaccctgggccacgtgctgagccctgagccagaccatgacagcctgtaccaccccccacctgaggaggaccagggcgaggagcggccccggctgtgggtgatgcccaaccaccaggtgctgctgggccctgaggaggaccaggaccacatctaccacccccagtag

SEQ ID NO: 165426 - DNA, 6474 bp, synthetic construct
  misc_feature 1..6474: note = Description of Artificial Sequence: Synthetic coding sequence
  source 1..6474: mol_type = other DNA
atgtctgacagaagtggccccacagccaagggcaaggatggcaagaagtacagcagcctgaacctgtttgacacctacaagggcaagagcctggagatccagaagccagctgtggcccccaggcatggcctgcagagcctgggcaaggtggccatcgcccggaggatgcctcctccagccaacctgcccagcctgaaggccgagaacaagggaaatgaccccaacgtgtccctggtgcccaaggatggcaccggctgggccagcaagcaggagcagagcgaccccaagagcagtgatgccagcacagcccagcccccagagagccagcccctgcctgccagccagaccccagccagcaaccagcccaagaggcctcctgctgcccctgagaacacccccctggtgcccagcggcgtgaagtcctgggcccaggcctctgtgacccatggagcccatggagatggcggccgggccagcagcctgctgagccgcttcagccgggaggagttccccaccctgcaggccgccggggaccaggacaaggccgccaaggagcgggagagcgctgagcagagcagcggccctggccccagcctgcggccccagaacagcaccacctggagagatggcggcggccggggcccagatgagctggagggccctgacagcaagctgcaccacggccatgacccccggggcggcctgcagcccagcggccccccccagttccccccctaccggggcatgatgccacccttcatgtacccaccctacctgcccttccccccaccctacggcccccagggcccctaccgctaccccaccccagatggccccagccgcttcccccgggtggccggcccccggggcagcggcccccccatgaggctggtggagcctgtgggccggcccagcatcctgaaggaggacaacctgaaggagtttgaccagctggaccaggagaatgatgatggctgggccggggcccacgaggaggtggactacacagagaagctgaagttcagtgatgaagaagatggccgggacagtgatgaggagggcgctgagggccaccgggacagccagagcgccagcggggaggagcggcccccagaggctgatggcaagaagggcaacagccccaacagcgagccccccacccccaagacagcctgggccgagaccagccggcccccagagacagagcccggccccccagcccccaagccacccctgcccccaccccaccggggccctgctggcaactggggccccccaggggactacccagacagaggaggccccccctgcaagcccccagccccagaagatgaagatgaggcctggaggcagaggaggaagcagagcagcagcgagatcagcctggccgtggagcgggccaggagaagaagagaggaggaggagaggaggatgcaggaggagcggcgggccgcctgtgccgagaagctgaagaggctggatgagaagtttggagccccagacaagaggctgaaggccgagcctgctgcccctcctgctgcccccagcaccccagcccctcctcctgctgtgcccaaggagctgcctgcccccccagcccctcctccagccagcgcccccaccccagagacagagcctgaggagcccgcccaggcccccccagcccagagcacccccaccccaggagtggccgccgcccccaccctggtgtctgggggcggcagcaccagcagcaccagcagcggcagctttgaggccagccctgtggagccccagctgcccagcaaggagggccctgagcccccagaggaggtgcccccacccaccaccccacctgtgcccaaggtggagcccaagggagatggcatcggccccacccggcagccccccagccagggcctgggctaccccaagtaccagaagagcctgcccccacgcttccagaggcagcagcaggagcagctgctgaagcagcagcagcagcaccagtggcagcagcaccagcagggcagcgccccacccacccctgtgccccccagccccccccagcctgtgaccctgggcgctgtgcctgccccccaggcccctcctcctccacccaaggccctgtacccaggggccctgggccggcccccacccatgccacccatgaactttgacccccgctggatgatgatccccccctacgtggacccccggctgctgcagggccggccccccctggacttctacccacctggggtgcaccccagcggcctggtgccccgggagaggagtgacagcggcggcagcagcagcgagccctttgacagacatgccccagccatgctgcgggagcggggcaccccacctgtggaccccaagctggcctgggtgggagatgtgttcaccgccaccccagctgagccccggcccctgaccagccccctgcggcaggccgcagatgaagatgacaagggcatgaggtctgagaccccacctgtgcccccacctccaccctacctggccagctacccaggcttcccagaaaatggagcccctggcccccccatcagccgcttccccctggaggagcccggcccccggcccctgccctggcccccaggcagtgatgaggtggccaagatccagaccccaccacccaagaaggagccccccaaggaggagacagcccagctgaccggccctgaggccggcaggaagccagcccggggcgtgggcagcggcggccagggccccccacctccaagaagagagagcaggacagagacccgctggggcccccggcccggcagcagccggcggggcatccccccagaggagcccggggcccccccaagaagagctggccccatcaagaagcccccaccacccaccaaggtggaggagctgccccccaagcccctggagcagggagatgagacccccaagccacccaagccagaccccctgaagatcaccaagggcaagctgggcggccccaaggagaccccacccaacggcaacctgagccctgccccccggctgcggcgggactacagctatgagcgggtgggccccaccagctgccggggccggggccgcggggagtactttgcccggggccggggcttccggggcacctacggcggccggggccgcggggcccggagccgggagttccgcagctaccgggagttcagaggagatgatggccggggcggcggcaccggcggccccaaccaccccccagccccccggggccgcacagccagcgagaccaggtctgagggctctgaatatgaggagatccccaagagaagacggcagaggggcagcgagaccggcagcgagacccatgaaagtgacctggcccccagcgacaaggaggcccccacccccaaggagggcaccctgacccaggtgcccctggcccctcctcctcctggggccccacccagccctgccccagcccgcttcaccgcccggggcggccgggtcttcaccccccggggcgtgcccagcagaagaggccggggcggcggccggcccccaccccaggtgtgccccggctggagccccccagccaagagcctggcccccaagaagcccccaacaggccccctgccccccagcaaggagcccctgaaggagaagctgatccctggccccctgagccctgtggcccggggcggcagcaatggaggcagcaatgtgggcatggaggatggagagcggcccaggagaagaagacatggccgggcccagcagcaggacaagccaccccgcttccggcggctgaagcaggagagagaaaatgctgcccggggcagcgagggcaagcccagcctgaccctgcctgccagcgcccctggccctgaggaggccctgaccaccgtgacagtggccccagccccccggcgggctgctgccaagagcccagacctgagcaaccagaacagcgaccaggccaatgaggagtgggagacagccagcgagagcagtgacttcaccagcgagcggcggggggacaaggaggcccctcctcctgtgctgctgacccccaaggctgtgggcacccctgggggcggcggcggcggcgctgtgcccggcatcagcgccatgagcagaggagacctgagccagagggccaaggacctgagcaagaggagcttcagcagccagaggcctggcatggagcggcagaacagaagacctggccctgggggcaaggccggcagcagcggcagcagcagcggcggcggcggcggcggccctgggggccgcactggacctggccgcggggacaagaggtcctggcccagccccaagaacagaagccggcccccagaggagaggcctcctggcctgcccctgcccccacctccacccagcagcagcgctgtgttccggctggaccaggtgatccacagcaacccagctggcatccagcaggccctggcccagctgagcagccggcagggctctgtgacagcccctgggggccaccccaggcacaagccaggcctgccccaggccccccagggccccagcccccggccccccaccaggtatgagccccagagggtgaacagcggcctgagcagtgacccccactttgaggagcccggccccatggtgcggggcgtgggcggcaccccccgggacagcgctggggtgagccccttcccccccaagaggcgggagcggccccccaggaagccagagctgctgcaggaggagagcctgcccccaccccacagcagcggcttcctgggcagcaagccagagggccctggcccccaggccgagagccgggacacaggaacagaggccctgaccccccacatctggaaccggctgcacacagccaccagcaggaagagctaccggcccagctccatggagccctggatggagcccctgagcccctttgaagatgtggccggcacagagatgagccagagcgacagcggcgtggacctgagcggggacagccaggtgagcagcggcccctgcagccagaggagcagcccagatggcggcctgaagggagctgctgagggcccccccaagaggcctgggggcagcagccccctgaatgctgtgccctgtgagggccccccaggcagcgagcccccccggcggcccccaccagcccctcatgatggagacaggaaggagctgccccgggagcagcccctgcccccaggccccatcggcacagagaggagccagaggacagaccggggcacagagcccggccccatccggcccagccaccggcccggcccccctgtgcagtttggcaccagtgacaaggacagcgacctgcggctggtggtgggggacagcctgaaggccgagaaggagctgacagcctctgtgacagaggccatccctgtgtcccgggactgggagctgctgcccagcgctgctgccagcgctgagccccagagcaagaacctggacagcggccactgtgtgcctgagcccagcagcagcggccagaggctgtacccagaggtgttctacggcagcgctggccccagcagcagccagatctctggaggagccatggacagccagctgcaccccaacagcggcggcttccggcccggcacccccagcctgcacccctaccgcagccagcccctgtacctgcccccaggccctgcccctccttctgccctgctgagcggcctggccctgaagggccagttcctggacttcagcaccatgcaggccacagagctgggcaagctgcctgctggaggagtgctgtaccccccacccagcttcctgtacagccctgccttctgccccagccccctgcctgacaccagcctgctgcaggtgcggcaggacctgcccagccccagcgacttctacagcacccccctgcagcccggcggccagagcggcttcctgcccagcggggccccagcccagcagatgctgctgcccatggtggacagccagctgcctgtggtgaactttggcagcctgcccccagcccctcctccagcccccccacccctgagcctgctgcctgtgggccctgccctgcagccccccagcctggccgtgcggcccccaccagccccagccaccagggtgctgcccagccctgcccggcccttccctgccagcctgggccgggcagagctgcaccctgtggagctgaagcccttccaggactaccagaagctgagcagcaacctgggcggccctggcagcagcaggaccccacccaccggccgctccttcagcggcctgaacagccggctgaaggccacccccagcacctacagcggggtcttccgcacccagagggtggacctgtaccagcaggccagccccccagatgccctgcgctggatccccaagccctgggagaggacaggccccccaccccgggagggccccagccggcgggcagaggagcccggcagcagaggagacaaggagcccggcctgcccccaccaagatag

SEQ ID NO: 165427 - DNA, 4149 bp, synthetic construct
  misc_feature 1..4149: note = Description of Artificial Sequence: Synthetic coding sequence
  source 1..4149: mol_type = other DNA
atgctgcgggagcggggcaccccacctgtggaccccaagctggcctgggtgggagatgtgttcaccgccaccccagctgagccccggcccctgaccagccccctgcggcaggccgcagatgaagatgacaagggcatgaggtctgagaccccacctgtgcccccacctccaccctacctggccagctacccaggcttcccagaaaatggagcccctggcccccccatcagccgcttccccctggaggagcccggcccccggcccctgccctggcccccaggcagtgatgaggtggccaagatccagaccccaccacccaagaaggagccccccaaggaggagacagcccagctgactggacctgaggccggcaggaagccagcccggggcgtgggcagcggcggccagggccccccaccaccccggcgggagagcaggacagagacccgctggggccccaggcctggcagcagcagaagaggcatccccccagaggagcccggggccccaccccggcgggccggccccatcaagaagcccccaccacccaccaaggtggaggagctgccccccaagcccctggagcagggagatgagacccccaagccacccaagccagaccccctgaagatcaccaagggcaagctgggcggccccaaggagaccccaccaaatggaaacctgagccctgccccccggctgcggcgggactacagctatgaaagagtgggccccaccagctgccggggccggggccgcggggagtactttgcccggggccggggcttccggggcacctatggaggccggggccgcggggcccggagccgggagttccgcagctaccgggagttcagaggagatgatggccggggcggcggcactggaggccccaaccaccccccagccccccggggccgcacagccagcgagaccaggtctgagggctctgaatatgaggagatccccaagagaagacggcagaggggcagcgagactggaagtgagacccatgaaagtgacctggcccccagcgacaaggaggcccccacccccaaggagggcaccctgacccaggtgcccctggcccctcctcctcctggggccccacccagccctgccccagcccgcttcaccgcccggggcggccgggtcttcaccccccggggcgtgcccagccggcggggccggggcggcggccggcccccaccccaggtgtgccccggctggagccccccagccaagagcctggcccccaagaagccacccaccggccccctgccccccagcaaggagcccctgaaggagaagctgatccctggccccctgagccctgtggcccggggcggcagcaatggaggcagcaatgtgggcatggaggatggagagcggcccaggagaagaagacatggccgggcccagcagcaggacaagcccccacgcttccggcggctgaagcaggagcgggagaatgctgcccggggcagcgagggcaagcccagcctgaccctgcctgccagcgcccctggccctgaggaggccctgaccaccgtgacagtggccccagcccccaggagagctgctgccaagagcccagacctgagcaaccagaacagcgaccaggccaatgaggagtgggagacagccagcgagagcagtgacttcaccagcgagaggagaggagacaaggaggcccctcctcctgtgctgctgacccccaaggctgtgggcaccccaggcggcggcggcggcggcgctgtgcccggcatcagcgccatgagcagaggagacctgagccagagggccaaggacctgagcaagaggagcttcagcagccagaggcctggcatggagcggcagaacagaagacctggccctgggggcaaggccggcagcagcggcagcagcagcggcggcggcggcggcggccctgggggccgcacaggccctggccgcggggacaagaggtcctggcccagccccaagaacagaagcaggcctcctgaggagcggcccccaggcctgcccctgcccccacctccacccagcagcagcgctgtgttccggctggaccaggtgatccacagcaacccagctggcatccagcaggccctggcccagctgagcagccggcagggctctgtgacagcccctgggggccaccccaggcacaagccaggcctgccccaggccccccagggccccagccccaggcctcccaccaggtatgagccccagagggtgaacagcggcctgagcagtgacccccactttgaggagcccggccccatggtgcggggcgtgggcggcaccccccgggacagcgctggggtgagccccttcccccccaagagaagagagaggcctcccaggaagccagagctgctgcaggaggagagcctgcccccaccccacagcagcggcttcctgggcagcaagccagagggccctggcccccaggccgagagccgggacaccggcacagaggccctgaccccccacatctggaaccggctgcacacagccaccagcaggaagagctaccggcccagctccatggagccctggatggagcccctgagcccctttgaagatgtggccggcacagagatgagccagagcgacagcggcgtggacctgagcggggacagccaggtgagcagcggcccctgcagccagaggagcagcccagatggcggcctgaagggagctgctgagggcccccccaagaggcctgggggcagcagccccctgaatgctgtgccctgtgagggccccccaggcagcgagcccccaagaagacctcctccagcccctcatgatggagacaggaaggagctgccccgggagcagcccctgcccccaggccccatcggcacagagaggagccagaggacagaccggggcacagagcccggccccatccggcccagccacaggcctggcccccctgtgcagtttggcaccagtgacaaggacagcgacctgcggctggtggtgggggacagcctgaaggccgagaaggagctgacagcctctgtgacagaggccatccctgtgtcccgggactgggagctgctgcccagcgctgctgccagcgctgagccccagagcaagaacctggacagcggccactgtgtgcctgagcccagcagcagcggccagaggctgtacccagaggtgttctacggcagcgctggccccagcagcagccagatcagcggcggggccatggacagccagctgcaccccaacagcggcggcttccggcccggcacccccagcctgcacccctaccgcagccagcccctgtacctgcccccaggccctgccccacccagcgccctgctgagcggcctggccctgaagggccagttcctggacttcagcaccatgcaggccacagagctgggcaagctgcctgctgggggcgtgctgtacccacctccttccttcctgtacagccctgccttctgccccagccccctgcctgacaccagcctgctgcaggtgcggcaggacctgcccagccccagcgacttctacagcacccccctgcagcccggcggccagagcggcttcctgcccagcggggccccagcccagcagatgctgctgcccatggtggacagccagctgcctgtggtgaactttggcagcctgcccccagcccctcctccagcccccccacccctgagcctgctgcctgtgggccctgccctgcagccccccagcctggccgtgcggcccccaccagccccagccaccagggtgctgcccagccctgcccggcccttccctgccagcctgggccgggcagagctgcaccctgtggagctgaagcccttccaggactaccagaagctgagcagcaacctgggcggccctggcagcagcaggaccccacccaccggccgctccttcagcggcctgaacagccggctgaaggccacccccagcacctacagcggggtcttccgcacccagagggtggacctgtaccagcaggccagccccccagatgccctgcgctggatccccaagccctgggagaggactggacctccaccccgggagggccccagcagaagagctgaggagcccggcagcagaggagacaaggagcccggcctgcccccacccaggtag

SEQ ID NO: 165428 - DNA, 6474 bp, synthetic construct; identical to SEQ ID NO: 165426
  misc_feature 1..6474: note = Description of Artificial Sequence: Synthetic coding sequence
  source 1..6474: mol_type = other DNA

SEQ ID NO: 165429 - DNA, 6474 bp, synthetic construct
  misc_feature 1..6474: note = Description of Artificial Sequence: Synthetic coding sequence
  source 1..6474: mol_type = other DNA
atgtctgacagaagtggccccacagccaagggcaaggatggcaagaagtacagcagcctgaacctgtttgacacctacaagggcaagagcctggagatccagaagccagctgtggcccccaggcatggcctgcagagcctgggcaaggtggccatcgcccggaggatgcctcctccagccaacctgcccagcctgaaggccgagaacaagggaaatgaccccaacgtgtccctggtgcccaaggatggcaccggctgggccagcaagcaggagcagagcgaccccaagagcagtgatgccagcacagcccagcccccagagagccagcccctgcctgccagccagaccccagccagcaaccagcccaagaggcctcctgctgcccctgagaacacccccctggtgcccagcggcgtgaagtcctgggcccaggcctctgtgacccatggagcccatggagatggcggccgggccagcagcctgctgagccgcttcagccgggaggagttccccaccctgcaggccgccggggaccaggacaaggccgccaaggagcgggagagcgctgagcagagcagcggccctggccccagcctgcggccccagaacagcaccacctggagagatggcggcggccggggcccagatgagctggagggccctgacagcaagctgcaccacggccatgacccccggggcggcctgcagcccagcggccccccccagttccccccctaccggggcatgatgccacccttcatgtacccaccctacctgcccttccccccaccctacggcccccagggcccctaccgctaccccaccccagatggccccagccgcttcccccgggtggccggcccccggggcagcggcccccccatgaggctggtggagcctgtgggccggcccagcatcctgaaggaggacaacctgaaggagtttgaccagctggaccaggagaatgatgatggctgggccggggcccacgaggaggtggactacacagagaagctgaagttcagtgatgaagaagatggccgggacagtgatgaggagggcgctgagggccaccgggacagccagagcgccagcggggaggagcggcccccagaggctgatggcaagaagggcaacagccccaacagcgagccccccacccccaagacagcctgggccgagaccagccggcccccagagacagagcccggccccccagcccccaagccacccctgcccccaccccaccggggccctgctggcaactggggccccccaggggactacccagacagaggaggccccccctgcaagcccccagccccagaagatgaagatgaggcctggaggcagaggaggaagcagagcagcagcgagatcagcctggccgtggagcgggccaggagaagaagagaggaggaggagaggaggatgcaggaggagcggcgggccgcctgtgccgagaagctgaagaggctggatgagaagtttggagccccagacaagaggctgaaggccgagcctgctgcccctcctgctgcccccagcaccccagcccctcctcctgctgtgcccaaggagctgcctgcccccccagcccctcctccagccagcgcccccaccccagagaaggagcctgaggagcccgcccaggcccccccagcccagagcacccccaccccaggagtggccgccgcccccaccctggtgtctgggggcggcagcaccagcagcaccagcagcggcagctttgaggccagccctgtggagccccagctgcccagcaaggagggccctgagcccccagaggaggtgcccccacccaccaccccacctgtgcccaaggtggagcccaagggagatggcatcggccccacccggcagccccccagccagggcctgggctaccccaagtaccagaagagcctgcccccacgcttccagaggcagcagcaggagcagctgctgaagcagcagcagcagcaccagtggcagcagcaccagcagggcagcgccccacccacccctgtgccccccagccccccccagcctgtgaccctgggcgctgtgcctgccccccaggcccctcctcctccacccaaggccctgtacccaggggccctgggccggcccccacccatgccacccatgaactttgacccccgctggatgatgatccccccctacgtggacccccggctgctgcagggccggccccccctggacttctacccacctggggtgcaccccagcggcctggtgccccgggagaggagtgacagcggcggcagcagcagcgagccctttgacagacatgccccagccatgctgcgggagcggggcaccccacctgtggaccccaagctggcctgggtgggagatgtgttcaccgccaccccagctgagccccggcccctgaccagccccctgcggcaggccgcagatgaagatgacaagggcatgaggtctgagaccccacctgtgcccccacctccaccctacctggccagctacccaggcttcccagaaaatggagcccctggcccccccatcagccgcttccccctggaggagcccggcccccggcccctgccctggcccccaggcagtgatgaggtggccaagatccagaccccaccacccaagaaggagccccccaaggaggagacagcccagctgaccggccctgaggccggcaggaagccagcccggggcgtgggcagcggcggccagggccccccacctccaagaagagagagcaggacagagacccgctggggcccccggcccggcagcagccggcggggcatccccccagaggagcccggggcccccccaagaagagctggccccatcaagaagcccccaccacccaccaaggtggaggagctgccccccaagcccctggagcagggagatgagacccccaagccacccaagccagaccccctgaagatcaccaagggcaagctgggcggccccaaggagaccccacccaacggcaacctgagccctgccccccggctgcggcgggactacagctatgagcgggtgggccccaccagctgccggggccggggccgcggggagtactttgcccggggccggggcttccggggcacctacggcggccggggccgcggggcccggagccgggagttccgcagctaccgggagttcagaggagatgatggccggggcggcggcaccggcggccccaaccaccccccagccccccggggccgcacagccagcgagaccaggtctgagggctctgaatatgaggagatccccaagagaagacggcagaggggcagcgagaccggcagcgagacccatgaaagtgacctggcccccagcgacaaggaggcccccacccccaaggagggcaccctgacccaggtgcccctggcccctcctcctcctggggccccacccagccctgccccagcccgcttcaccgcccggggcggccgggtcttcaccccccggggcgtgcccagcagaagaggccggggcggcggccggcccccaccccaggtgtgccccggctggagccccccagccaagagcctggcccccaagaagcccccaacaggccccctgccccccagcaaggagcccctgaaggagaagctgatccctggccccctgagccctgtggcccggggcggcagcaatggaggcagcaatgtgggcatggaggatggagagcggcccaggagaagaagacatggccgggcccagcagcaggacaagccaccccgcttccggcggctgaagcaggagagagaaaatgctgcccggggcagcgagggcaagcccagcctgaccctgcctgccagcgcccctggccctgaggaggccctgaccaccgtgacagtggccccagccccccggcgggctgctgccaagagcccagacctgagcaaccagaacagcgaccaggccaatgaggagtgggagacagccagcgagagcagtgacttcaccagcgagcggcggggggacaaggaggcccctcctcctgtgctgctgacccccaaggctgtgggcacccctgggggcggcggcggcggcgctgtgcccggcatcagcgccatgagcagaggagacctgagccagagggccaaggacctgagcaagaggagcttcagcagccagaggcctggcatggagcggcagaacagaagacctggccctgggggcaaggccggcagcagcggcagcagcagcggcggcggcggcggcggccctgggggccgcactggacctggccgcggggacaagaggtcctggcccagccccaagaacagaagccggcccccagaggagaggcctcctggcctgcccctgcccccacctccacccagcagcagcgctgtgttccggctggaccaggtgatccacagcaacccagctggcatccagcaggccctggcccagctgagcagccggcagggctctgtgacagcccctgggggccaccccaggcacaagccaggccccccccaggccccccagggccccagcccccggccccccaccaggtatgagccccagagggtgaacagcggcctgagcagtgacccccactttgaggagcccggccccatggtgcggggcgtgggcggcaccccccgggacagcgctggggtgagccccttcccccccaagaggcgggagcggccccccaggaagccagagctgctgcaggaggagagcctgcccccaccccacagcagcggcttcctgggcagcaagccagagggccctggcccccaggccgagagccgggacacaggaacagaggccctgaccccccacatctggaaccggctgcacacagccaccagcaggaagagctaccggcccagctccatggagccctggatggagcccctgagcccctttgaagatgtggccggcacagagatgagccagagcgacagcggcgtggacctgagcggggacagccaggtgagcagcggcccctgcagccagaggagcagcccagatggcggcctgaagggagctgctgagggcccccccaagaggcctgggggcagcagccccctgaatgctgtgccctgtgagggccccccaggcagcgagcccccccggcggcccccaccagcccctcatgatggagacaggaaggagctgccccgggagcagcccctgcccccaggccccatcggcacagagaggagccagcacacagaccggggcacagagcccggccccatccggcccagccaccggcccggcccccctgtgcagtttggcaccagtgacaaggacagcgacctgcggctggtggtgggggacagcctgaaggccgagaaggagctgacagcctctgtgacagaggccatccctgtgtcccgggactgggagctgctgcccagcgctgctgccagcgctgagccccagagcaagaacctggacagcggccactgtgtgcctgagcccagcagcagcggccagaggctgtacccagaggtgttctacggcagcgctggccccagcagcagccagatctctggaggagccatggacagccagctgcaccccaacagcggcggcttccggcccggcacccccagcctgcacccctaccgcagccagcccctgtacctgcccccaggccctgcccctccttctgccctgctgtctggagtggccctgaagggccagttcctggacttcagcaccatgcaggccacagagctgggcaagctgcctgctggaggagtgctgtaccccccacccagcttcctgtacagccctgccttctgccccagccccctgcctgacaccagcctgctgcaggtgcggcaggacctgcccagccccagcgacttctacagcacccccctgcagcccggcggccagagcggcttcctgcccagcggggccccagcccagcagatgctgctgcccatggtggacagccagctgcctgtggtgaactttggcagcctgcccccagcccctcctccagccccacccagcctgagcctgctgcctgtgggccctgccctgcagccccccagcctggccgtgcggcccccaccagccccagccaccagggtgctgcccagccctgcccggcccttccctgccagcctgggccgggcagagctgcaccctgtggagctgaagcccttccaggactaccagaagctgagcagcaacctgggcggccctggcagcagcaggaccccacccaccggccgctccttcagcggcctgaacagccggctgaaggccacccccagcacctacagcggggtcttccgcacccagagggtggacctgtaccagcaggccagccccccagatgccctgcgctggatccccaagccctgggagaggacaggccccccaccccgggagggccccagccggcgggcagaggagcccggcagcagaggagacaaggagcccggcctgcccccaccaagatag

SEQ ID NO: 165430 - DNA, 6474 bp, synthetic construct; identical to SEQ ID NO: 165429
  misc_feature 1..6474: note = Description of Artificial Sequence: Synthetic coding sequence
  source 1..6474: mol_type = other DNA

SEQ ID NO: 165431 - DNA, 6474 bp, synthetic construct
  misc_feature 1..6474: note = Description of Artificial Sequence: Synthetic coding sequence
  source 1..6474: mol_type = other DNA
atgtctgacagaagtggccccacagccaagggcaaggatggcaagaagtacagcagcctgaacctgtttgacacctacaagggcaagagcctggagatccagaagccagctgtggcccccaggcatggcctgcagagcctgggcaaggtggccatcgcccggaggatgcctcctccagccaacctgcccagcctgaaggccgagaacaagggaaatgaccccaacgtgtccctggtgcccaaggatggcaccggctgggccagcaagcaggagcagagcgaccccaagagcagtgatgccagcacagcccagcccccagagagccagcccctgcctgccagccagaccccagccagcaaccagcccaagaggcctcctgctgcccctgagaacacccccctggtgcccagcggcgtgaagtcctgggcccaggcctctgtgacccatggagcccatggagatggcggccgggccagcagcctgctgagccgcttcagccgggaggagttccccaccctgcaggccgccggggaccaggacaaggccgccaaggagcgggagagcgctgagcagagcagcggccctggccccagcctgcggccccagaacagcaccacctggagagatggcggcggccggggcccagatgagctggagggccctgacagcaagctgcaccacggccatgacccccggggcggcctgcagcccagcggccccccccagttccccccctaccggggcatgatgccacccttcatgtacccaccctacctgcccttccccccaccctacggcccccagggcccctaccgctaccccaccccagatggccccagccgcttcccccgggtggccggcccccggggcagcggcccccccatgaggctggtggagcctgtgggccggcccagcatcctgaaggaggacaacctgaaggagtttgaccagctggaccaggagaatgatgatggctgggccggggcccacgaggaggtggactacacagagaagctgaagttcagtgatgaagaagatggccgggacagtgatgaggagggcgctgagggccaccgggacagccagagcgccagcggggaggagcggcccccagaggctgatggcaagaagggcaacagccccaacagcgagccccccacccccaagacagcctgggccgagaccagccggcccccagagacagagcccggccccccagcccccaagccacccctgcccccaccccaccggggccctgctggcaactggggccccccaggggactacccagacagaggaggccccccctgcaagcccccagccccagaagatgaagatgaggcctggaggcagaggaggaagcagagcagcagcgagatcagcctggccgtggagcgggccaggagaagaagagaggaggaggagaggaggatgcaggaggagcggcgggccgcctgtgccgagaagctgaagaggctggatgagaagtttggagccccagacaagaggctgaaggccgagcctgctgcccctcctgctgcccccagcaccccagcccctcctcctgctgtgcccaaggagctgcctgcccccccagcccctcctccagccagcgcccccaccccagagacagagcctgaggagcccgcccaggcccccccagcccagagcacccccaccccaggagtggccgccgcccccaccctggtgtctgggggcggcagcaccagcagcaccagcagcggcagctttgaggccagccctgtggagccccagctgcccagcaaggagggccctgagcccccagaggaggtgcccccacccaccaccccacctgtgcccaaggtggagcccaagggagatggcatcggccccacccggcagccccccagccagggcctgggctaccccaagtaccagaagagcctgcccccacgcttccagaggcagcagcaggagcagctgctgaagcagcagcagcagcaccagtggcagcagcaccagcagggcagcgccccacccacccctgtgccccccagccccccccagcctgtgaccctgggcgctgtgcctgccccccaggcccctcctcctccacccaaggccctgtacccaggggccctgggccggcccccacccatgccacccatgaactttgacccccgctggatgatgatccccccctacgtggacccccggctgctgcagggccggccccccctggacttctacccacctggggtgcaccccagcggcctggtgccccgggagaggagtgacagcggcggcagcagcagcgagccctttgacagacatgccccagccatgctgcgggagcggggcaccccacctgtggaccccaagctggcctgggtgggagatgtgttcaccgccaccccagctgagccccggcccctgaccagccccctgcggcaggccgcagatgaagatgacaagggcatgaggtctgagaccccacctgtgcccccacctccaccctacctggccagctacccaggcttcccagaaaatggagcccctggcccccccatcagccgcttccccctggaggagcccggcccccggcccctgccctggcccccaggcagtgatgaggtggccaagatccagaccccaccacccaagaaggagccccccaaggaggagacagcccagctgaccggccctgaggccggcaggaagccagcccggggcgtgggcagcggcggccagggccccccacctccaagaagagagagcaggacagagacccgctggggcccccggcccggcagcagccggcggggcatccccccagaggagcccggggcccccccaagaagagctggccccatcaagaagcccccaccacccaccaaggtggaggagctgccccccaagcccctggagcagggagatgagacccccaagccacccaagccagaccccctgaagatcaccaagggcaagctgggcggccccaaggagaccccacccaacggcaacctgagccctgccccccggctgcggcgggactacagctatgagcgggtgggccccaccagctgccggggccggggccgcggggagtactttgcccggggccggggcttccggggcacctacggcggccggggccgcggggcccggagccgggagttccgcagctaccgggagttcagaggagatgatggccggggcggcggcaccggcggccccaaccaccccccagccccccggggccgcacagccagcgagaccaggtctgagggctctgaatatgaggagatccccaagagaagacggcagaggggcagcgagaccggcagcgagacccatgaaagtgacctggcccccagcgacaaggaggcccccacccccaaggagggcaccctgacccaggtgcccctggcccctcctcctcctggggccccacccagccctgccccagcccgcttcaccgcccggggcggccgggtcttcaccccccggggcgtgcccagcagaagaggccggggcggcggccggcccccaccccaggtgtgccccggctggagccccccagccaagagcctggcccccaagaagcccccaacaggccccctgccccccagcaaggagcccctgaaggagaagctgatccctggccccctgagccctgtggcccggggcggcagcaatggaggcagcaatgtgggcatggaggatggagagcggcccaggagaagaagacatggccgggcccagcagcaggacaagccaccccgcttccggcggctgaagcaggagagagaaaatgctgcccggggcagcgagggcaagcccagcctgaccctgcctgccagcgcccctggccctgaggaggccctgaccaccgtgacagtggccccagccccccggcgggctgctgccaagagcccagacctgagcaaccagaacagcgaccaggccaatgaggagtgggagacagccagcgagagcagtgacttcaccagcgagcggcggggggacaaggaggcccctcctcctgtgctgctgacccccaaggctgtgggcacccctgggggcggcggcggcggcgctgtgcccggcatcagcgccatgagcagaggagacctgagccagagggccaaggacctgagcaagaggagcttcagcagccagaggcctggcatggagcggcagaacagaagacctggccctgggggcaaggccggcagcagcggcagcagcagcggcggcggcggcggcggccctgggggccgcactggacctggccgcggggacaagaggtcctggcccagccccaagaacagaagccggcccccagaggagaggcctcctggcctgcccctgcccccacctccacccagcagcagcgctgtgttccggctggaccaggtgatccacagcaacccagctggcatccagcaggccctggcccagctgagcagccggcagggctctgtgacagcccctgggggccaccccaggcacaagccaggcctgccccaggccccccagggccccagcccccggccccccaccaggtatgagccccagagggtgaacagcggcctgagcagtgacccccactttgaggagcccggccccatggtgcggggcgtgggcggcaccccccgggacagcgctggggtgagccccttcccccccaagaggcgggagcggccccccaggaagccagagctgctgcaggaggagagcctgcccccaccccacagcagcggcttcctgggcagcaagccagagggccctggcccccaggccgagagccgggacacaggaacagaggccctgaccccccacatctggaaccggctgcacacagccaccagcaggaagagctaccggcccagctccatggagccctggatggagcccctgagcccctttgaagatgtggccggcacagagatgagccagagcgacagcggcgtggacctgagcggggacagccaggtgagcagcggcccctgcagccagaggagcagcccagatggcggcctgaagggagctgctgagggcccccccaagaggcctgggggcagcagccccctgaatgctgtgccctgtgagggccccccaggcagcgagcccccccggcggcccccaccagcccctcatgatggagacaggaaggagctgccccgggagcagcccctgcccccaggccccatcggcacagagaggagccagaggacagaccggggcacagagcccggccccatccggcccagccaccggcccggcccccctgtgcagtttggcaccagtgacaaggacagcgacctgcggctggtggtgggggacagcctgaaggccgagaaggagctgacagcctctgtgacagaggccatccctgtgtcccgggactgggagctgctgcccagcgctgctgccagcgctgagccccagagcaagaacctggacagcggccactgtgtgcctgagcccagcagcagcggccagaggctgtacccagaggtgttctacggcagcgctggccccagcagcagccagatctctggaggagccatggacagccagctgcaccccaacagcggcggcttccggcccggcacccccagcctgcacccctaccgcagccagcccctgtacctgcccccaggccctgcccctccttctgccctgctgtctggagtggccctgaagggccagttcctggacttcagcaccatgcaggccacagagctgggcaagctgcctgctggaggagtgctgtaccccccacccagcttcctgtacagccctgccttctgccccagccccctgcctgacaccagcctgctgcaggtgcggcaggacctgcccagccccagcgacttctacagcacccccctgcagcccggcggccagagcggcttcctgcccagcggggccccagcccagcagatgctgctgcccatggtggacagccagctgcctgtggtgaactttggcagcctgcccccagcccctcctccagcccccccacccctgagcctgctgcctgtgggccctgccctgcagccccccagcctggccgtgcggcccccaccagccccagccaccagggtgctgcccagccctgcccggcccttccctgccagcctgggccgggcagagctgcaccctgtggagctgaagcccttccaggactaccagaagctgagcagcaacctgggcggccctggcagcagcaggaccccacccaccggccgctccttcagcggcctgaacagccggctgaaggccacccccagcacctacagcggggtcttccgcacccagagggtggacctgtaccagcaggccagccccccagatgccctgcgctggatccccaagccctgggagaggacaggccccccaccccgggagggccccagccggcgggcagaggagcccggcagcagaggagacaaggagcccggcctgcccccaccaagatag

SEQ ID NO: 165432 - DNA, 6474 bp, synthetic construct
  misc_feature 1..6474: note = Description of Artificial Sequence: Synthetic coding sequence
  source 1..6474: mol_type = other DNA
atgtctgacagaagtggccccacagccaagggcaaggatggcaagaagtacagcagcctgaacctgtttgacacctacaagggcaagagcctggagatccagaagccagctgtggcccccaggcatggcctgcagagcctgggcaaggtggccatcgcccggaggatgcctcctccagccaacctgcccagcctgaaggccgagaacaagggaaatgaccccaacgtgtccctggtgcccaaggatggcaccggctgggccagcaagcaggagcagagcgaccccaagagcagtgatgccagcacagcccagcccctggagagccagcccctgcctgccagccagaccccagccagcaaccagcccaagaggcctcctgctgcccctgagaacacccccctggtgcccagcggcgtgaagtcctgggcccaggcctctgtgacccatggagcccatggagatggcggccgggccagcagcctgctgagccgcttcagccgggaggagttccccaccctgcaggccgccggggaccaggacaaggccgccaaggagcgggagagcgctgagcagagcagcggccctggccccagcctgcggccccagaacagcaccacctggagagatggcggcggccggggcccagatgagctggagggccctgacagcaagctgcaccacggccatgacccccggggcggcctgcagcccagcggccccccccagttccccccctaccggggcatgatgccacccttcatgtacccaccctacctgcccttccccccaccctacggcccccagggcccctaccgctaccccaccccagatggccccagccgcttcccccgggtggccggcccccggggcagcggcccccccatgaggctggtggagcctgtgggccggcccagcatcctgaaggaggacaacctgaaggagtttgaccagctggaccaggagaatgatgatggctgggccggggcccacgaggaggtggactacacagagaagctgaagttcagtgatgaagaagatggccgggacagtgatgaggagggcgctgagggccaccgggacagccagagcgccagcggggaggagcggcccccagaggctgatggcaagaagggcaacagccccaacagcgagccccccacccccaagacagcctgggccgagaccagccggcccccagagacagagcccggccccccagcccccaagccacccctgcccccaccccaccggggccctgctggcaactggggccccccaggggactacccagacagaggaggccccccctgcaagcccccagccccagaagatgaagatgaggcctggaggcagaggaggaagcagagcagcagcgagatcagcctggccgtggagcgggccaggagaagaagagaggaggaggagaggaggatgcaggaggagcggcgggccgcctgtgccgagaagctgaagaggctggatgagaagtttggagccccagacaagaggctgaaggccgagcctgctgcccctcctgctgcccccagcaccccagcccctcctcctgctgtgcccaaggagctgcctgcccccccagcccctcctccagccagcgcccccaccccagagaaggagcctgaggagcccgcccaggcccccccagcccagagcacccccaccccaggagtggccgccgcccccaccctggtgtctgggggcggcagcaccagcagcaccagcagcggcagctttgaggccagccctgtggagccccagctgcccagcaaggagggccctgagcccccagaggaggtgcccccacccaccaccccacctgtgcccaaggtggagcccaagggagatggcatcggccccacccggcagccccccagccagggcctgggctaccccaagtaccagaagagcctgcccccacgcttccagaggcagcagcaggagcagctgctgaagcagcagcagcagcaccagtggcagcagcaccagcagggcagcgccccacccacccctgtgccccccagccccccccagcctgtgaccctgggcgctgtgcctgccccccaggcccctcctcctccacccaaggccctgtacccaggggccctgggccggcccccacccatgccacccatgaactttgacccccgctggatgatgatccccccctacgtggacccccggctgctgcagggccggccccccctggacttctacccacctggggtgcaccccagcggcctggtgccccgggagaggagtgacagcggcggcagcagcagcgagccctttgacagacatgccccagccatgctgcgggagcggggcaccccacctgtggaccccaagctggcctgggtgggagatgtgttcaccgccaccccagctgagccccggcccctgaccagccccctgcggcaggccgcagatgaagatgacaagggcatgaggtctgagaccccacctgtgcccccacctccaccctacctggccagctacccaggcttcccagaaaatggagcccctggcccccccatcagccgcttccccctggaggagcccggcccccggcccctgccctggcccccaggcagtgatgaggtggccaagatccagaccccaccacccaagaaggagccccccaaggaggagacagcccagctgaccggccctgaggccggcaggaagccagcccggggcgtgggcagcggcggccagggccccccacctccaagaagagagagcaggacagagacccgctggggcccccggcccggcagcagccggcggggcatccccccagaggagcccggggcccccccaagaagagctggccccatcaagaagcccccaccacccaccaaggtggaggagctgccccccaagcccctggagcagggagatgagacccccaagccacccaagccagaccccctgaagatcaccaagggcaagctgggcggccccaaggagaccccacccaacggcaacctgagccctgccccccggctgcggcgggactacagctatgagcgggtgggccccaccagctgccggggccggggccgcggggagtactttgcccggggccggggcttccggggcacctacggcggccggggccgcggggcccggagccgggagttccgcagctaccgggagttcagaggagatgatggccggggcggcggcaccggcggccccaaccaccccccagccccccggggccgcacagccagcgagaccaggtctgagggctctgaatatgaggagatccccaagagaagacggcagaggggcagcgagaccggcagcgagacccatgaaagtgacctggcccccagcgacaaggaggcccccacccccaaggagggcaccctgacccaggtgcccctggcccctcctcctcctggggccccacccagccctgccccagcccgcttcaccgcccggggcggccgggtcttcaccccccggggcgtgcccagcagaagaggccggggcggcggccggcccccaccccaggtgtgccccggctggagccccccagccaagagcctggcccccaagaagcccccaacaggccccctgccccccagcaaggagcccctgaaggagaagctgatccctggccccctgagccctgtggcccggggcggcagcaatggaggcagcaatgtgggcatggaggatggagagcggcccaggagaagaagacatggccgggcccagcagcaggacaagccaccccgcttccggcggctgaagcaggagagagaaaatgctgcccggggcagcgagggcaagcccagcctgaccctgcctgccagcgcccctggccctgaggaggccctgaccaccgtgacagtggccccagccccccggcgggctgctgccaagagcccagacctgagcaaccagaacagcgaccaggccaatgaggagtgggagacagccagcgagagcagtgacttcaccagcgagcggcggggggacaaggaggcccctcctcctgtgctgctgacccccaaggctgtgggcacccctgggggcggcggcggcggcgctgtgcccggcatcagcgccatgagcagaggagacctgagccagagggccaaggacctgagcaagaggagcttcagcagccagaggcctggcatggagcggcagaacagaagacctggccctgggggcaaggccggcagcagcggcagcagcagcggcggcggcggcggcggccctgggggccgcactggacctggccgcggggacaagaggtcctggcccagccccaagaacagaagccggcccccagaggagaggcctcctggcctgcccctgcccccacctccacccagcagcagcgctgtgttccggctggaccaggtgatccacagcaacccagctggcatccagcaggccctggcccagctgagcagccggcagggctctgtgacagcccctgggggccaccccaggcacaagccaggccccccccaggccccccagggccccagcccccggccccccaccaggtatgagccccagagggtgaacagcggcctgagcagtgacccccactttgaggagcccggccccatggtgcggggcgtgggcggcaccccccgggacagcgctggggtgagccccttcccccccaagaggcgggagcggccccccaggaagccagagctgctgcaggaggagagcctgcccccaccccacagcagcggcttcctgggcagcaagccagagggccctggcccccaggccgagagccgggacacaggaacagaggccctgaccccccacatctggaaccggctgcacacagccaccagcaggaagagctaccggcccagctccatggagccctggatggagcccctgagcccctttgaagatgtggccggcacagagatgagccagagcgacagcggcgtggacctgagcggggacagccaggtgagcagcggcccctgcagccagaggagcagcccagatggcggcctgaagggagctgctgagggcccccccaagaggcctgggggcagcagccccctgaatgctgtgccctgtgagggccccccaggcagcgagcccccccggcggcccccaccagcccctcatgatggagacaggaaggagctgccccgggagcagcccctgcccccaggccccatcggcacagagaggagccagaggacagaccggggcacagagcccggccccatccggcccagccaccggcccggcccccctgtgcagtttggcaccagtgacaaggacagcgacctgcggctggtggtgggggacagcctgaaggccgagaaggagctgacagcctctgtgacagaggccatccctgtgtcccgggactgggagctgctgcccagcgctgctgccagcgctgagccccagagcaagaacctggacagcggccactgtgtgcctgagcccagcagcagcggccagaggctgtacccagaggtgttctacggcagcgctggccccagcagcagccagatctctggaggagccatggacagccagctgcaccccaacagcggcggcttccggcccggcacccccagcctgcacccctaccgcagccagcccctgtacctgcccccaggccctgcccctccttctgccctgctgtctggagtggccctgaagggccagttcctggacttcagcaccatgcaggccacagagctgggcaagctgcctgctggaggagtgctgtaccccccacccagcttcctgtacagccctgccttctgccccagccccctgcctgacaccagcctgctgcaggtgcggcaggacctgcccagccccagcgacttctacagcacccccctgcagcccggcggccagagcggcttcctgcccagcggggccccagcccagcagatgctgctgcccatggtggacagccagctgcctgtggtgaactttggcagcctgcccccagcccctcctccagcccccccacccctgagcctgctgcctgtgggccctgccctgcagccccccagcctggccgtgcggcccccaccagccccagccaccagggtgctgcccagccctgcccggcccttccctgccagcctgggccgggcagagctgcaccctgtggagctgaagcccttccaggactaccagaagctgagcagcaacctgggcggccctggcagcagcaggaccccacccaccggccgctccttcagcggcctgaacagccggctgaaggccacccccagcacctacagcggggtcttccgcacccagagggtggacctgtaccagcaggccagccccccagatgccctgcgctggatccccaagccctgggagaggacaggccccccaccccgggagggccccagccggcgggcagaggagcccggcagcagaggagacaaggagcccggcctgcccccaccaagatag

SEQ ID NO: 165433 - DNA, 6474 bp, synthetic construct; identical to SEQ ID NO: 165429
  misc_feature 1..6474: note = Description of Artificial Sequence: Synthetic coding sequence
  source 1..6474: mol_type = other DNA

SEQ ID NO: 165434 - DNA, 6450 bp, synthetic construct
  misc_feature 1..6450: note = Description of Artificial Sequence: Synthetic coding sequence
  source 1..6450: mol_type = other DNA
atgtctgacagaagtggccccacagccaagggcaaggatggcaagaagtacagcagcctgaacctgtttgacacctacaagggcaagagcctggagatccagaagccagctgtggcccccaggcatggcctgcagagcctgggcaaggtggccatcgcccggaggatgcctcctccagccaacctgcccagcctgaaggccgagaacaagggaaatgaccccaacgtgtccctggtgcccaaggatggcaccggctgggccagcaagcaggagcagagcgaccccaagagcagtgatgccagcacagcccagcccccagagagccagcccctgcctgccagccagaccccagccagcaaccagcccaagaggcctcctgctgcccctgagaacacccccctggtgcccagcggcgtgaagtcctgggcccaggcctctgtgacccatggagcccatggagatggcggccgggccagcagcctgctgagccgcttcagccgggaggagttccccaccctgcaggccgccggggaccaggacaaggccgccaaggagcgggagagcgctgagcagagcagcggccctggccccagcctgcggccccagaacagcaccacctggagagatggcggcggccggggcccagatgagctggagggccctgacagcaagctgcaccacggccatgacccccggggcggcctgcagcccagcggccccccccagttccccccctaccggggcatgatgccacccttcatgtacccaccctacctgcccttccccccaccctacggcccccagggcccctaccgctaccccaccccagatggccccagccgcttcccccgggtggccggcccccggggcagcggcccccccatgaggctggtggagcctgtgggccggcccagcatcctgaaggaggacaacctgaaggagtttgaccagctggaccaggagaatgatgatggctgggccggggcccacgaggaggtggactacacagagaagctgaagttcagtgatgaagaagatggccgggacagtgatgaggagggcgctgagggccaccgggacagccagagcgccagcggggaggagcggcccccagaggctgatggcaagaagggcaacagccccaacagcgagccccccacccccaagacagcctgggccgagaccagccggcccccagagacagagcccggccccccagcccccaagccacccctgcccccaccccaccggggccctgctggcaactggggccccccaggggactacccagacagaggaggccccccctgcaagcccccagccccagaagatgaagatgaggcctggaggcagaggaggaagcagagcagcagcgagatcagcctggccgtggagcgggccaggagaagaagagaggaggaggagaggaggatgcaggaggagcggcgggccgcctgtgccgagaagctgaagaggctggatgagaagtttggagccccagacaagaggctgaaggccgagcctgctgcccctcctgctgcccccagcaccccagcccctcctcctgctgtgcccaaggagctgcctgcccccccagcccctcctccagccagcgcccccaccccagagacagagcctgaggagcccgcccaggcccccccagcccagagcacccccaccccaggagtggccgccgcccccaccctggtgtctgggggcggcagcaccagcagcaccagcagcggcagctttgaggccagccctgtggagccccagctgcccagcaaggagggccctgagcccccagaggaggtgcccccacccaccaccccacctgtgcccaaggtggagcccaagggagatggcatcggccccacccggcagccccccagccagggcctgggctaccccaagtaccagaagagcctgcccccacgcttccagaggcagcagcaggagcagctgctgaagcagcagcagcagcaccagtggcagcagcaccagcagggcagcgccccacccacccctgtgccccccagccccccccagcctgtgaccctgggcgctgtgcctgccccccaggcccctcctcctccacccaaggccctgtacccaggggccctgggccggcccccacccatgccacccatgaactttgacccccgctggatgatgatccccccctacgtggacccccggctgctgcagggccggccccccctggacttctacccacctggggtgcaccccagcggcctggtgccccgggagaggagtgacagcggcggcagcagcagcgagccctttgacagacatgccccagccatgctgcgggagcggggcaccccacctgtggaccccaagctggcctgggtgggagatgtgttcaccgccaccccagctgagccccggcccctgaccagccccctgcggcaggccgcagatgaagatgacaagggcatgaggtctgagaccccacctgtgcccccacctccaccctacctggccagctacccaggcttcccagaaaatggagcccctggcccccccatcagccgcttccccctggaggagcccggcccccggcccctgccctggcccccaggcagtgatgaggtggccaagatccagaccccaccacccaagaaggagccccccaaggaggagacagcccagctgaccggccctgaggccggcaggaagccagcccggggcgtgggcagcggcggccagggccccccacctccaagaagagagagcaggacagagacccgctggggcccccggcccggcagcagccggcggggcatccccccagaggagcccggggcccccccaagaagagctggccccatcaagaagcccccaccacccaccaaggtggaggagctgccccccaagcccctggagcagggagatgagacccccaagccacccaagccagaccccctgaagatcaccaagggcaagctgggcggccccaaggagaccccacccaacggcaacctgagccctgccccccggctgcggcgggactacagctatgagcgggtgggccccaccagctgccggggccggggccgcggggagtactttgcccggggccggggcttccggggcacctacggcggccggggcagaggagctgctggcaacagcgctgtgacagagagctttgaggagatgatgggcgtggaggtgggccagggcgaccagaccaccctgctgctgcctgaggccgccctgcctgcccggcacggggcccgggtgcagagcatgaggaagagccccagcggggccggcagcggggcccagaagcaggccgcccggcccatgagggtcatctggctgctgcagacccggcggctgccccacccccggcgggagcacagccccaggagccgcagccccaccaccaggagccccaccttccctgccccagcccgcttcaccccaggagtgggggagagcagcctgcctgagggcatcagccctggccccaggagaagagagcccccccaggtgtgccccggctggagccccccagccaagagcctggcccccaagaagcccccaacaggccccctgccccccagcaaggagcccctgaaggagaagctgatccctggccccctgagccctgtggcccggggcggcagcaatggaggcagcaatgtgggcatggaggatggagagcggcccaggagaagaagacatggccgggcccagcagcaggacaagccaccccgcttccggcggctgaagcaggagagagaaaatgctgcccggggcagcgagggcaagcccagcctgaccctgcctgccagcgcccctggccctgaggaggccctgaccaccgtgacagtggccccagccccccggcgggctgctgccaagagcccagacctgagcaaccagaacagcgaccaggccaatgaggagtgggagacagccagcgagagcagtgacttcaccagcgagcggcggggggacaaggaggcccctcctcctgtgctgctgacccccaaggctgtgggcacccctgggggcggcggcggcggcgctgtgcccggcatcagcgccatgagcagaggagacctgagccagagggccaaggacctgagcaagaggagcttcagcagccagaggcctggcatggagcggcagaacagaagacctggccctgggggcaaggccggcagcagcggcagcagcagcggcggcggcggcggcggccctgggggccgcactggacctggccgcggggacaagaggtcctggcccagccccaagaacagaagccggcccccagaggagaggcctcctggcctgcccctgcccccacctccacccagcagcagcgctgtgttccggctggaccaggtgatccacagcaacccagctggcatccagcaggccctggcccagctgagcagccggcagggctctgtgacagcccctgggggccaccccaggcacaagccaggcctgccccaggccccccagggccccagcccccggccccccaccaggtatgagccccagagggtgaacagcggcctgagcagtgacccccactttgaggagcccggccccatggtgcggggcgtgggcggcaccccccgggacagcgctggggtgagccccttcccccccaagaggcgggagcggccccccaggaagccagagctgctgcaggaggagagcctgcccccaccccacagcagcggcttcctgggcagcaagccagagggccctggcccccaggccgagagccgggacacaggaacagaggccctgaccccccacatctggaaccggctgcacacagccaccagcaggaagagctaccggcccagctccatggagccctggatggagcccctgagcccctttgaagatgtggccggcacagagatgagccagagcgacagcggcgtggacctgagcggggacagccaggtgagcagcggcccctgcagccagaggagcagcccagatggcggcctgaagggagctgctgagggcccccccaagaggcctgggggcagcagccccctgaatgctgtgccctgtgagggccccccaggcagcgagcccccccggcggcccccaccagcccctcatgatggagacaggaaggagctgccccgggagcagcccctgcccccaggccccatcggcacagagaggagccagaggacagaccggggcacagagcccggccccatccggcccagccaccggcccggcccccctgtgcagtttggcaccagtgacaaggacagcgacctgcggctggtggtgggggacagcctgaaggccgagaaggagctgacagcctctgtgacagaggccatccctgtgtcccgggactgggagctgctgcccagcgctgctgccagcgctgagccccagagcaagaacctggacagcggccactgtgtgcctgagcccagcagcagcggccagaggctgtacccagaggtgttctacggcagcgctggccccagcagcagccagatcagcggcggccacggcctgagcatcaccagcaagcagtggaggcggcccggcacccccagcctgcacccctaccgcagccagcccctgtacctgcccccaggccctgcccctccttctgccctgctgagcggcctggccctgaagggccagttcctggacttcagcaccatgcaggccacagagctgggcaagctgcctgctggaggagtgctgtaccccccacccagcttcctgtacagccctgccttctgccccagccccctgcctgacaccagcctgctgcaggtgcggcaggacctgcccagccccagcgacttctacagcacccccctgcagcccggcggccagagcggcttcctgcccagcggggccccagcccagcagatgctgctgcccatggtggacagccagctgcctgtggtgaactttggcagcctgcccccagcccctcctccagcccccccacccctgagcctgctgcctgtgggccctgccctgcagccccccagcctggccgtgcggcccccaccagccccagccaccagggtgctgcccagccctgcccggcccttccctgccagcctgggccgggcagagctgcaccctgtggagctgaagcccttccaggactaccagaagctgagcagcaacctgggcggccctggcagcagcaggaccccacccaccggccgctccttcagcggcctgaacagccggctgaaggccacccccagcacctacagcggggtcttccgcacccagagggtggacctgtaccagcaggccagccccccagatgccctgcgctggatccccaagccctgggagaggacaggccccccaccccgggagggccccagccggcgggcagaggagcccggcagcagaggagacaaggagcccggcctgcccccaccaagatag

SEQ ID NO: 165435 - DNA, 6474 bp, synthetic construct; identical to SEQ ID NO: 165429
  misc_feature 1..6474: note = Description of Artificial Sequence: Synthetic coding sequence
  source 1..6474: mol_type = other DNA

SEQ ID NO: 165436 - DNA, 6474 bp, synthetic construct; identical to SEQ ID NO: 165429
  misc_feature 1..6474: note = Description of Artificial Sequence: Synthetic coding sequence
  source 1..6474: mol_type = other DNA

SEQ ID NO: 165437 - DNA, 6474 bp, synthetic construct
  misc_feature 1..6474: note = Description of Artificial Sequence: Synthetic coding sequence
  source 1..6474: mol_type = other DNA
atgtctgacagaagtggccccacagccaagggcaaggatggcaagaagtacagcagcctgaacctgtttgacacctacaagggcaagagcctggagatccagaagccagctgtggcccccaggcatggcctgcagagcctgggcaaggtggccatcgcccggaggatgcctcctccagccaacctgcccagcctgaaggccgagaacaagggaaatgaccccaacgtgtccctggtgcccaaggatggcaccggctgggccagcaagcaggagcagagcgaccccaagagcagtgatgccagcacagcccagcccccagagagccagcccctgcctgccagccagaccccagccagcaaccagcccaagaggcctcctgctgcccctgagaacacccccctggtgcccagcggcgtgaagtcctgggcccaggcctctgtgacccatggagcccatggagatggcggccgggccagcagcctgctgagccgcttcagccgggaggagttccccaccctgcaggccgccggggaccaggacaaggccgccaaggagcgggagagcgctgagcagagcagcggccctggccccagcctgcggccccagaacagcaccacctggagagatggcggcggccggggcccagatgagctggagggccctgacagcaagctgcaccacggccatgacccccggggcggcctgcagcccagcggccccccccagttccccccctaccggggcatgatgccacccttcatgtacccaccctacctgcccttccccccaccctacggcccccagggcccctaccgctaccccaccccagatggccccagccgcttcccccgggtggccggcccccggggcagcggcccccccatgaggctggtggagcctgtgggccggcccagcatcctgaaggaggacaacctgaaggagtttgaccagctggaccaggagaatgatgatggctgggccggggcccacgaggaggtggactacacagagaagctgaagttcagtgatgaagaagatggccgggacagtgatgaggagggcgctgagggccaccgggacagccagagcgccagcggggaggagcggcccccagaggctgatggcaagaagggcaacagccccaacagcgagccccccacccccaagacagcctgggccgagaccagccggcccccagagacagagcccggccccccagcccccaagccacccctgcccccaccccaccggggccctgctggcaactggggccccccaggggactacccagacagaggaggccccccctgcaagcccccagccccagaagatgaagatgaggcctggaggcagaggaggaagcagagcagcagcgagatcagcctggccgtggagcgggccaggagaagaagagaggaggaggagaggaggatgcaggaggagcggcgggccgcctgtgccgagaagctgaagaggctggatgagaagtttggagccccagacaagaggctgaaggccgagcctgctgcccctcctgctgcccccagcaccccagcccctcctcctgctgtgcccaaggagctgcctgcccccccagcccctcctccagccagcgcccccaccccagagaaggagcctgaggagcccgcccaggcccccccagcccagagcacccccaccccaggagtggccgccgcccccaccctggtgtctgggggcggcagcaccagcagcaccagcagcggcagctttgaggccagccctgtggagccccagctgcccagcaaggagggccctgagcccccagaggaggtgcccccacccaccaccccacctgtgcccaaggtggagcccaagggagatggcatcggccccacccggcagccccccagccagggcctgggctaccccaagtaccagaagagcctgcccccacgcttccagaggcagcagcaggagcagctgctgaagcagcagcagcagcaccagtggcagcagcaccagcagggcagcgccccacccacccctgtgccccccagccccccccagcctgtgaccctgggcgctgtgcctgccccccaggcccctcctcctccacccaaggccctgtacccaggggccctgggccggcccccacccatgccacccatgaactttgacccccgctggatgatgatccccccctacgtggacccccggctgctgcagggccggccccccctggacttctacccacctggggtgcaccccagcggcctggtgccccgggagaggagtgacagcggcggcagcagcagcgagccctttgacagacatgccccagccatgctgcgggagcggggcaccccacctgtggaccccaagctggcctgggtgggagatgtgttcaccgccaccccagctgagccccggcccctgaccagccccctgcggcaggccgcagatgaagatgacaagggcatgaggtctgagaccccacctgtgcccccacctccaccctacctggccagctacccaggcttcccagaaaatggagcccctggcccccccatcagccgcttccccctggaggagcccggcccccggcccctgccctggcccccaggcagtgatgaggtggccaagatccagaccccaccacccaagaaggagccccccaaggaggagacagcccagctgaccggccctgaggccggcaggaagccagcccggggcgtgggcagcggcggccagggccccccacctccaagaagagagagcaggacagagacccgctggggcccccggcccggcagcagccggcggggcatccccccagaggagcccggggcccccccaagaagagctggccccatcaagaagcccccaccacccaccaaggtggaggagctgccccccaagcccctggagcagggagatgagacccccaagccacccaagccagaccccctgaagatcaccaagggcaagctgggcggccccaaggagaccccacccaacggcaacctgagccctgccccccggctgcggcgggactacagctatgagcgggtgggccccaccagctgccggggccggggccgcggggagtactttgcccggggccggggcttccggggcacctacggcggccggggccgcggggcccggagccgggagttccgcagctaccgggagttcagaggagatgatggccggggcggcggcaccggcggccccaaccaccccccagccccccggggccgcacagccagcgagaccaggtctgagggctctgaatatgaggagatccccaagagaagacggcagaggggcagcgagaccggcagcgagacccatgaaagtgacctggcccccagcgacaaggaggcccccacccccaaggagggcaccctgacccaggtgcccctggcccctcctcctcctggggccccacccagccctgccccagcccgcttcaccgcccggggcggccgggtcttcaccccccggggcgtgcccagcagaagaggccggggcggcggccggcccccaccccaggtgtgccccggctggagccccccagccaagagcctggcccccaagaagcccccaacaggccccctgccccccagcaaggagcccctgaaggagaagctgatccctggccccctgagccctgtggcccggggcggcagcaatggaggcagcaatgtgggcatggaggatggagagcggcccaggagaagaagacatggccgggcccagcagcaggacaagccaccccgcttccggcggctgaagcaggagagagaaaatgctgcccggggcagcgagggcaagcccagcctgaccctgcctgccagcgcccctggccctgaggaggccctgaccaccgtgacagtggccccagccccccggcgggctgctgccaagagcccagacctgagcaaccagaacagcgaccaggccaatgaggagtgggagacagccagcgagagcagtgacttcaccagcgagcggcggggggacaaggaggcccctcctcctgtgctgctgacccccaaggctgtgggcacccctgggggcggcggcggcggcgctgtgcccggcatcagcgccatgagcagaggagacctgagccagagggccaaggacctgagcaagaggagcttcagcagccagaggcctggcatggagcggcagaacagaagacctggccctgggggcaaggccggcagcagcggcagcagcagcggcggcggcggcggcggccctgggggccgcactggacctggccgcggggacaagaggtcctggcccagccccaagaacagaagccggcccccagaggagaggcctcctggcctgcccctgcccccacctccacccagcagcagcgctgtgttccggctggaccaggtgatccacagcaacccagctggcatccagcaggccctggcccagctgagcagccggcagggctctgtgacagcccctgggggccaccccaggcacaagccaggccccccccaggccccccagggccccagcccccggccccccaccaggtatgagccccagagggtgaacagcggcctgagcagtgacccccactttgaggagcccggccccatggtgcggggcgtgggcggcaccccccgggacagcgctggggtgagccccttcccccccaagaggcgggagcggccccccaggaagccagagctgctgcaggaggagagcctgcccccaccccacagcagcggcttcctgggcagcaagccagagggccctggcccccaggccgagagccgggacacaggaacagaggccctgaccccccacatctggaaccggctgcacacagccaccagcaggaagagctaccggcccagctccatggagccctggatggagcccctgagcccctttgaagatgtggccggcacagagatgagccagagcgacagcggcgtggacctgagcggggacagccaggtgagcagcggcccctgcagccagaggagcagcccagatggcggcctgaagggagctgctgagggcccccccaagaggcctgggggcagcagccccctgaatgctgtgccctgtgagggccccccaggcagcgagcccccccggcggcccccaccagcccctcatgatggagacaggaaggagctgccccgggagcagcccctgcccccaggccccatcggcacagagaggagccagaggacagaccggggcacagagcccggccccatccggcccagccaccggcccggcccccctgtgcagtttggcaccagtgacaaggacagcgacctgcggctggtggtgggggacagcctgaaggccgagaaggagctgacagcctctgtgacagaggccatccctgtgtcccgggactgggagctgctgcccagcgctgctgccagcgctgagccccagagcaagaacctggacagcggccactgtgtgcctgagcccagcagcagcggccagaggctgtacccagaggtgttctacggcagcgctggccccagcagcagccagatctctggaggagccatggacagccagctgcaccccaacagcggcggcttccggcccggcacccccagcctgcacccctaccgcagccagcccctgtacctgcccccaggccctgcccctccttctgccctgctgtctggagtggccctgaagggccagttcctggacttcagcaccatgcaggccacagagctgggcaagctgcctgctggaggagtgctgtaccccccacccagcttcctgtacagccctgccttctgccccagccccctgcctgacaccagcctgctgcaggtgcggcaggacctgcccagccccagcgacttctacagcacccccctgcagcccggcggccagagcggcttcctgcccagcggggccccagcccagcagatgctgctgcccatggtggacagccagctgcctgtggtgaactttggcagcctgcccccagcccctcctccagcccccccacccctgagcctgctgcctgtgggccctgccctgcagccccccagcctggccgtgcggcccccaccagccccagccaccagggtgctgcccagccctgcccggcccttccctgccagcctgggccgggcagagctgcaccctgtggagctgaagcccttccaggactaccagaagctgagcagcaacctgggcggccctggcagcagcaggaccccacccaccggccgctccttcagcggcctgaacagccggctgaaggccacccccagcacctacagcggggtcttccgcacccagagggtggacctgtaccagcaggccagccccccagatgccctgcgctggatccccaagccctgggagaggacaggccccccaccccgggagggccccagccggcgggcagaggagcccggcagcagaggagacaaggagcccggcctgcccccaccaagatag

SEQ ID NO: 165438 - DNA, 6417 bp, synthetic construct
  misc_feature 1..6417: note = Description of Artificial Sequence: Synthetic coding sequence
  source 1..6417: mol_type = other DNA
atgtctgacagaagtggccccacagccaagggcaaggatggcaagaagtacagcagcctgaacctgtttgacacctacaagggcaagagcctggagatccagaagccagctgtggcccccaggcatggcctgcagagcctgggcaaggtggccatcgcccggaggatgcctcctccagccaacctgcccagcctgaaggccgagaacaagggaaatgaccccaacgtgtccctggtgcccaaggatggcaccggctgggccagcaagcaggagcagagcgaccccaagagcagtgatgccagcacagcccagcccccagagagccagcccctgcctgccagccagaccccagccagcaaccagcccaagaggcctcctgctgcccctgagaacacccccctggtgcccagcggcgtgaagtcctgggcccaggcctctgtgacccatggagcccatggagatggcggccgggccagcagcctgctgagccgcttcagccgggaggagttccccaccctgcaggccgccggggaccaggacaaggccgccaaggagcgggagagcgctgagcagagcagcggccctggccccagcctgcggccccagaacagcaccacctggagagatggcggcggccggggcccagatgagctggagggccctgacagcaagctgcaccacggccatgacccccggggcggcctgcagcccagcggccccccccagttccccccctaccggggcatgatgccacccttcatgtacccaccctacctgcccttccccccaccctacggcccccagggcccctaccgctaccccaccccagatggccccagccgcttcccccgggtggccggcccccggggcagcggcccccccatgaggctggtggagcctgtgggccggcccagcatcctgaaggaggacaacctgaaggagtttgaccagctggaccaggagaatgatgatggctgggccggggcccacgaggaggtggactacacagagaagctgaagttcagtgatgaagaagatggccgggacagtgatgaggagggcgctgagggccaccgggacagccagagcgccagcggggaggagcggcccccagaggctgatggcaagaagggcaacagccccaacagcgagccccccacccccaagacagcctgggccgagaccagccggcccccagagacagagcccggccccccagcccccaagccacccctgcccccacctggggactacccagaccggggcggccccccctgcaagcccccagccccagaagatgaagatgaggcctggaggcagaggaggaagcagagcagcagcgagatcagcctggccgtggagcgggccaggagaagaagagaggaggaggagaggaggatgcaggaggagaggagagctgcctgtgccgagaagctgaagaggctggatgagaagtttggagccccagacaagaggctgaaggccgagcctgctgcccccccagctgcccccagcaccccagcccctcctcctgctgtgcccaaggagctgcctgcccccccagcccctcctccagccagcgcccccaccccagagacagagcctgaggagcccgcccaggcccccccagcccagagcacccccaccccaggagtggccgccgcccccaccctggtgtctgggggcggcagcaccagcagcaccagcagcggcagctttgaggccagccctgtggagccccagctgcccagcaaggagggccctgagcccccagaggaggtgcccccacccaccaccccacctgtgcccaaggtggagcccaagggagatggcatcggccccacccggcagccccccagccagggcctgggctaccccaagtaccagaagagcctgcccccacgcttccagaggcagcagcaggagcagctgctgaagcagcagcagcagcaccagtggcagcagcaccagcagggcagcgccccacccacccctgtgccccccagccccccccagcctgtgaccctgggcgctgtgcctgccccccaggcccctcctcctccacccaaggccctgtacccaggggccctgggccggcccccacccatgccacccatgaactttgacccccgctggatgatgatccccccctacgtggacccccggctgctgcagggccggccccccctggacttctacccacctggggtgcaccccagcggcctggtgccccgggagaggagtgacagcggcggcagcagcagcgagccctttgacagacatgccccagccatgctgcgggagcggggcaccccacctgtggaccccaagctggcctgggtgggagatgtgttcaccgccaccccagctgagccccggcccctgaccagccccctgcggcaggccgcagatgaagatgacaagggcatgaggtctgagaccccacctgtgcccccacctccaccctacctggccagctacccaggcttcccagaaaatggagcccctggcccccccatcagccgcttccccctggaggagcccggcccccggcccctgccctggcccccaggcagtgatgaggtggccaagatccagaccccaccacccaagaaggagccccccaaggaggagacagcccagctgactggacctgaggccggcaggaagccagcccggggcgtgggcagcggcggccagggccccccaccaccccggcgggagagcaggacagagacccgctggggccccaggcctggcagcagcagaagaggcatccccccagaggagcccggggccccaccccggcgggccggccccatcaagaagcccccaccacccaccaaggtggaggagctgccccccaagcccctggagcagggagatgagacccccaagccacccaagccagaccccctgaagatcaccaagggcaagctgggcggccccaaggagaccccaccaaatggaaacctgagccctgccccccggctgcggcgggactacagctatgaaagagtgggccccaccagctgccggggccggggccgcggggagtactttgcccggggccggggcttccggggcacctatggaggccggggccgcggggctgctggcaacagcgctgtgacagagagctttgaggagatgatgggcgtggaggtgggccagggcgaccagaccaccctgctgctgcctgaggccgccctgcctgcccggcatggagcccgggtgcagagcatgaggaagagccccagcggggccggcagcggggcccagaagcaggccgcccggcccatgagggtcatctggctgctgcagacccggcggctgccccacccccggcgggagcacagccccaggagccgcagccccaccaccaggagccccaccttccctgccccagcccgcttcaccccaggagtgggggagagcagcctgcctgagggcatcagccctggcccccggcggcgggagcccccccaggtgtgccccggctggagccccccagccaagagcctggcccccaagaagccacccaccggccccctgccccccagcaaggagcccctgaaggagaagctgatccctggccccctgagccctgtggcccggggcggcagcaatggaggcagcaatgtgggcatggaggatggagagcggcccaggagaagaagacatggccgggcccagcagcaggacaagcccccacgcttccggcggctgaagcaggagcgggagaatgctgcccggggcagcgagggcaagcccagcctgaccctgcctgccagcgcccctggccctgaggaggccctgaccaccgtgacagtggccccagcccccaggagagctgctgccaagagcccagacctgagcaaccagaacagcgaccaggccaatgaggagtgggagacagccagcgagagcagtgacttcaccagcgagaggagaggagacaaggaggcccctcctcctgtgctgctgacccccaaggctgtgggcaccccaggcggcggcggcggcggcgctgtgcccggcatcagcgccatgagcagaggagacctgagccagagggccaaggacctgagcaagaggagcttcagcagccagaggcctggcatggagcggcagaacagaagacctggccctgggggcaaggccggcagcagcggcagcagcagcggcggcggcggcggcggccctgggggccgcacaggccctggccgcggggacaagaggtcctggcccagccccaagaacagaagcaggcctcctgaggagcggcccccaggcctgcccctgcccccacctccacccagcagcagcgctgtgttccggctggaccaggtgatccacagcaacccagctggcatccagcaggccctggcccagctgagcagccggcagggctctgtgacagcccctgggggccaccccaggcacaagccaggcctgccccaggccccccagggccccagccccaggcctcccaccaggtatgagccccagagggtgaacagcggcctgagcagtgacccccactttgaggagcccggccccatggtgcggggcgtgggcggcaccccccgggacagcgctggggtgagccccttcccccccaagagaagagagaggcctcccaggaagccagagctgctgcaggaggagagcctgcccccaccccacagcagcggcttcctgggcagcaagccagagggccctggcccccaggccgagagccgggacaccggcacagaggccctgaccccccacatctggaaccggctgcacacagccaccagcaggaagagctaccggcccagctccatggagccctggatggagcccctgagcccctttgaagatgtggccggcacagagatgagccagagcgacagcggcgtggacctgagcggggacagccaggtgagcagcggcccctgcagccagaggagcagcccagatggcggcctgaagggagctgctgagggcccccccaagaggcctgggggcagcagccccctgaatgctgtgccctgtgagggccccccaggcagcgagcccccaagaagacctcctccagcccctcatgatggagacaggaaggagctgccccgggagcagcccctgcccccaggccccatcggcacagagaggagccagaggacagaccggggcacagagcccggccccatccggcccagccacaggcctggcccccctgtgcagtttggcaccagtgacaaggacagcgacctgcggctggtggtgggggacagcctgaaggccgagaaggagctgacagcctctgtgacagaggccatccctgtgtcccgggactgggagctgctgcccagcgctgctgccagcgctgagccccagagcaagaacctggacagcggccactgtgtgcctgagcccagcagcagcggccagaggctgtacccagaggtgttctacggcagcgctggccccagcagcagccagatcagcggcggccacggcctgagcatcaccagcaagcagtggaggaggcctggcacccccagcctgcacccctaccgcagccagcccctgtacctgcccccaggccctgccccacccagcgccctgctgagcggcctggccctgaagggccagttcctggacttcagcaccatgcaggccacagagctgggcaagctgcctgctgggggcgtgctgtacccacctccttccttcctgtacagccctgccttctgccccagccccctgcctgacaccagcctgctgcaggtgcggcaggacctgcccagccccagcgacttctacagcacccccctgcagcccggcggccagagcggcttcctgcccagcggggccccagcccagcagatgctgctgcccatggtggacagccagctgcctgtggtgaactttggcagcctgcccccagcccctcctccagcccccccacccctgagcctgctgcctgtgggccctgccctgcagccccccagcctggccgtgcggcccccaccagccccagccaccagggtgctgcccagccctgcccggcccttccctgccagcctgggccgggcagagctgcaccctgtggagctgaagcccttccaggactaccagaagctgagcagcaacctgggcggccctggcagcagcaggaccccacccaccggccgctccttcagcggcctgaacagccggctgaaggccacccccagcacctacagcggggtcttccgcacccagagggtggacctgtaccagcaggccagccccccagatgccctgcgctggatccccaagccctgggagaggactggacctccaccccgggagggccccagcagaagagctgaggagcccggcagcagaggagacaaggagcccggcctgcccccacccaggtag

SEQ ID NO: 165439 - DNA, 6474 bp, synthetic construct; identical to SEQ ID NO: 165429
  misc_feature 1..6474: note = Description of Artificial Sequence: Synthetic coding sequence
  source 1..6474: mol_type = other DNA

SEQ ID NO: 165440 - DNA, 6474 bp, synthetic construct; identical to SEQ ID NO: 165432
  misc_feature 1..6474: note = Description of Artificial Sequence: Synthetic coding sequence
  source 1..6474: mol_type = other DNA

SEQ ID NO: 165441 - DNA, 6474 bp, synthetic construct; identical to SEQ ID NO: 165437
  misc_feature 1..6474: note = Description of Artificial Sequence: Synthetic coding sequence
  source 1..6474: mol_type = other DNA

SEQ ID NO: 165442 - DNA, 6474 bp, synthetic construct; identical to SEQ ID NO: 165431
  misc_feature 1..6474: note = Description of Artificial Sequence: Synthetic coding sequence
  source 1..6474: mol_type = other DNA

SEQ ID NO: 165443 - DNA, 6450 bp, synthetic construct
  misc_feature 1..6450: note = Description of Artificial Sequence: Synthetic coding sequence
  source 1..6450: mol_type = other DNA
atgtctgacagaagtggccccacagccaagggcaaggatggcaagaagtacagcagcctgaacctgtttgacacctacaagggcaagagcctggagatccagaagccagctgtggcccccaggcatggcctgcagagcctgggcaaggtggccatcgcccggaggatgcctcctccagccaacctgcccagcctgaaggccgagaacaagggaaatgaccccaacgtgtccctggtgcccaaggatggcaccggctgggccagcaagcaggagcagagcgaccccaagagcagtgatgccagcacagcccagcccccagagagccagcccctgcctgccagccagaccccagccagcaaccagcccaagaggcctcctgctgcccctgagaacacccccctggtgcccagcggcgtgaagtcctgggcccaggcctctgtgacccatggagcccatggagatggcggccgggccagcagcctgctgagccgcttcagccgggaggagttccccaccctgcaggccgccggggaccaggacaaggccgccaaggagcgggagagcgctgagcagagcagcggccctggccccagcctgcggccccagaacagcaccacctggagagatggcggcggccggggcccagatgagctggagggccctgacagcaagctgcaccacggccatgacccccggggcggcctgcagcccagcggccccccccagttccccccctaccggggcatgatgccacccttcatgtacccaccctacctgcccttccccccaccctacggcccccagggcccctaccgctaccccaccccagatggccccagccgcttcccccgggtggccggcccccggggcagcggcccccccatgaggctggtggagcctgtgggccggcccagcatcctgaaggaggacaacctgaaggagtttgaccagctggaccaggagaatgatgatggctgggccggggcccacgaggaggtggactacacagagaagctgaagttcagtgatgaagaagatggccgggacagtgatgaggagggcgctgagggccaccgggacagccagagcgccagcggggaggagcggcccccagaggctgatggcaagaagggcaacagccccaacagcgagccccccacccccaagacagcctgggccgagaccagccggcccccagagacagagcccggccccccagcccccaagccacccctgcccccaccccaccggggccctgctggcaactggggccccccaggggactacccagacagaggaggccccccctgcaagcccccagccccagaagatgaagatgaggcctggaggcagaggaggaagcagagcagcagcgagatcagcctggccgtggagcgggccaggagaagaagagaggaggaggagaggaggatgcaggaggagcggcgggccgcctgtgccgagaagctgaagaggctggatgagaagtttggagccccagacaagaggctgaaggccgagcctgctgcccctcctgctgcccccagcaccccagcccctcctcctgctgtgcccaaggagctgcctgcccccccagcccctcctccagccagcgcccccaccccagagacagagcctgaggagcccgcccaggcccccccagcccagagcacccccaccccaggagtggccgccgcccccaccctggtgtctgggggcggcagcaccagcagcaccagcagcggcagctttgaggccagccctgtggagccccagctgcccagcaaggagggccctgagcccccagaggaggtgcccccacccaccaccccacctgtgcccaaggtggagcccaagggagatggcatcggccccacccggcagccccccagccagggcctgggctaccccaagtaccagaagagcctgcccccacgcttccagaggcagcagcaggagcagctgctgaagcagcagcagcagcaccagtggcagcagcaccagcagggcagcgccccacccacccctgtgccccccagccccccccagcctgtgaccctgggcgctgtgcctgccccccaggcccctcctcctccacccaaggccctgtacccaggggccctgggccggcccccacccatgccacccatgaactttgacccccgctggatgatgatccccccctacgtggacccccggctgctgcagggccggccccccctggacttctacccacctggggtgcaccccagcggcctggtgccccgggagaggagtgacagcggcggcagcagcagcgagccctttgacagacatgccccagccatgctgcgggagcggggcaccccacctgtggaccccaagctggcctgggtgggagatgtgttcaccgccaccccagctgagccccggcccctgaccagccccctgcggcaggccgcagatgaagatgacaagggcatgaggtctgagaccccacctgtgcccccacctccaccctacctggccagctacccaggcttcccagaaaatggagcccctggcccccccatcagccgcttccccctggaggagcccggcccccggcccctgccctggcccccaggcagtgatgaggtggccaagatccagaccccaccacccaagaaggagccccccaaggaggagacagcccagctgaccggccctgaggccggcaggaagccagcccggggcgtgggcagcggcggccagggccccccacctccaagaagagagagcaggacagagacccgctggggcccccggcccggcagcagccggcggggcatccccccagaggagcccggggcccccccaagaagagctggccccatcaagaagcccccaccacccaccaaggtggaggagctgccccccaagcccctggagcagggagatgagacccccaagccacccaagccagaccccctgaagatcaccaagggcaagctgggcggccccaaggagaccccacccaacggcaacctgagccctgccccccggctgcggcgggactacagctatgagcgggtgggccccaccagctgccggggccggggccgcggggagtactttgcccggggccggggcttccggggcacctacggcggccggggcagaggagctgctggcaacagcgctgtgacagagagctttgaggagatgatgggcgtggaggtgggccagggcgaccagaccaccctgctgctgcctgaggccgccctgcctgcccggcacggggcccgggtgcagagcatgaggaagagccccagcggggccggcagcggggcccagaagcaggccgcccggcccatgagggtcatctggctgctgcagacccggcggctgccccacccccggcgggagcacagccccaggagccgcagccccaccaccaggagccccaccttccctgccccagcccgcttcaccccaggagtgggggagagcagcctgcctgagggcatcagccctggccccaggagaagagagcccccccaggtgtgccccggctggagccccccagccaagagcctggcccccaagaagcccccaacaggccccctgccccccagcaaggagcccctgaaggagaagctgatccctggccccctgagccctgtggcccggggcggcagcaatggaggcagcaatgtgggcatggaggatggagagcggcccaggagaagaagacatggccgggcccagcagcaggacaagccaccccgcttccggcggctgaagcaggagagagaaaatgctgcccggggcagcgagggcaagcccagcctgaccctgcctgccagcgcccctggccctgaggaggccctgaccaccgtgacagtggccccagccccccggcgggctgctgccaagagcccagacctgagcaaccagaacagcgaccaggccaatgaggagtgggagacagccagcgagagcagtgacttcaccagcgagcggcggggggacaaggaggcccctcctcctgtgctgctgacccccaaggctgtgggcacccctgggggcggcggcggcggcgctgtgcccggcatcagcgccatgagcagaggagacctgagccagagggccaaggacctgagcaagaggagcttcagcagccagaggcctggcatggagcggcagaacagaagacctggccctgggggcaaggccggcagcagcggcagcagcagcggcggcggcggcggcggccctgggggccgcactggacctggccgcggggacaagaggtcctggcccagccccaagaacagaagccggcccccagaggagaggcctcctggcctgcccctgcccccacctccacccagcagcagcgctgtgttccggctggaccaggtgatccacagcaacccagctggcatccagcaggccctggcccagctgagcagccggcagggctctgtgacagcccctgggggccaccccaggcacaagccaggcctgccccaggccccccagggccccagcccccggccccccaccaggtatgagccccagagggtgaacagcggcctgagcagtgacccccactttgaggagcccggccccatggtgcggggcgtgggcggcaccccccgggacagcgctggggtgagccccttcccccccaagaggcgggagcggccccccaggaagccagagctgctgcaggaggagagcctgcccccaccccacagcagcggcttcctgggcagcaagccagagggccctggcccccaggccgagagccgggacacaggaacagaggccctgaccccccacatctggaaccggctgcacacagccaccagcaggaagagctaccggcccagctccatggagccctggatggagcccctgagcccctttgaagatgtggccggcacagagatgagccagagcgacagcggcgtggacctgagcggggacagccaggtgagcagcggcccctgcagccagaggagcagcccagatggcggcctgaagggagctgctgagggcccccccaagaggcctgggggcagcagccccctgaatgctgtgccctgtgagggccccccaggcagcgagcccccccggcggcccccaccagcccctcatgatggagacaggaaggagctgccccgggagcagcccctgcccccaggccccatcggcacagagaggagccagaggacagaccggggcacagagcccggccccatccggcccagccaccggcccggcccccctgtgcagtttggcaccagtgacaaggacagcgacctgcggctggtggtgggggacagcctgaaggccgagaaggagctgacagcctctgtgacagaggccatccctgtgtcccgggactgggagctgctgcccagcgctgctgccagcgctgagccccagagcaagaacctggacagcggccactgtgtgcctgagcccagcagcagcggccagaggctgtacccagaggtgttctacggcagcgctggccccagcagcagccagatcagcggcggccacggcctgagcatcaccagcaagcagtggaggcggcccggcacccccagcctgcacccctaccgcagccagcccctgtacctgcccccaggccctgcccctccttctgccctgctgtctggagtggccctgaagggccagttcctggacttcagcaccatgcaggccacagagctgggcaagctgcctgctggaggagtgctgtaccccccacccagcttcctgtacagccctgccttctgccccagccccctgcctgacaccagcctgctgcaggtgcggcaggacctgcccagccccagcgacttctacagcacccccctgcagcccggcggccagagcggcttcctgcccagcggggccccagcccagcagatgctgctgcccatggtggacagccagctgcctgtggtgaactttggcagcctgcccccagcccctcctccagcccccccacccctgagcctgctgcctgtgggccctgccctgcagccccccagcctggccgtgcggcccccaccagccccagccaccagggtgctgcccagccctgcccggcccttccctgccagcctgggccgggcagagctgcaccctgtggagctgaagcccttccaggactaccagaagctgagcagcaacctgggcggccctggcagcagcaggaccccacccaccggccgctccttcagcggcctgaacagccggctgaaggccacccccagcacctacagcggggtcttccgcacccagagggtggacctgtaccagcaggccagccccccagatgccctgcgctggatccccaagccctgggagaggacaggccccccaccccgggagggccccagccggcgggcagaggagcccggcagcagaggagacaaggagcccggcctgcccccaccaagatag

SEQ ID NO: 165444 - DNA, 1650 bp, synthetic construct
  misc_feature 1..1650: note = Description of Artificial Sequence: Synthetic coding sequence
  source 1..1650: mol_type = other DNA
atgtctgacagaagtggccccacagccaagggcaaggatggcaagaagtacagcagcctgaacctgtttgacacctacaagggcaagagcctggagatccagaagccagctgtggcccccaggcatggcctgcagagcctgggcaaggtggccatcgcccggaggatgcctcctccagccaacctgcccagcctgaaggccgagaacaagggaaatgaccccaacgtgtccctggtgcccaaggatggcaccggctgggccagcaagcaggagcagagcgaccccaagagcagtgatgccagcacagcccagcccccagagagccagcccctgcctgccagccagaccccagccagcaaccagcccaagaggcctcctgctgcccctgagaacacccccctggtgcccagcggcgtgaagtcctgggcccaggcctctgtgacccatggagcccatggagatggcggccgggccagcagcctgctgagccgcttcagccgggaggagttccccaccctgcaggccgccggggaccaggacaaggccgccaaggagcgggagagcgctgagcagagcagcggccctggccccagcctgcggccccagaacagcaccacctggagagatggcggcggccggggcccagatgagctggagggccctgacagcaagctgcaccacggccatgacccccggggcggcctgcagcccagcggccccccccagttccccccctaccggggcatgatgccacccttcatgtacccaccctacctgcccttccccccaccctacggcccccagggcccctaccgctaccccaccccagatggccccagccgcttcccccgggtggccggcccccggggcagcggcccccccatgaggctggtggagcctgtgggccggcccagcatcctgaaggaggacaacctgaaggagtttgaccagctggaccaggagaatgatgatggctgggccggggcccacgaggaggtggactacacagagaagctgaagttcagtgatgaagaagatggccgggacagtgatgaggagggcgctgagggccaccgggacagccagagcgccagcggggaggagcggcccccagaggctgatggcaagaagggcaacagccccaacagcgagccccccacccccaagacagcctgggccgagaccagccggcccccagagacagagcccggccccccagcccccaagccacccctgcccccaccccaccggggccctgctggcaactggggccccccaggggactacccagacagaggaggccccccctgcaagcccccagccccagaagatgaagatgaggcctggaggcagaggaggaagcagagcagcagcgagatcagcctggccgtggagcgggccaggagaagaagagaggaggaggagaggaggatgcaggaggagcggcgggccgcctgtgccgagaagctgaagaggctggatgagaagtttggagccccagacaagaggctgaaggccgagcctgctgcccctcctgctgcccccagcaccccagcccctcctcctgctgccagcgaggtgcccctgatggaggacagccggggccagcagagggaccccccccggggcctggaggccccccacccctag

SEQ ID NO: 165445 - DNA, 6417 bp, synthetic construct
  misc_feature 1..6417: note = Description of Artificial Sequence: Synthetic coding sequence
  source 1..6417: mol_type = other DNA
atgtctgacagaagtggccccacagccaagggcaaggatggcaagaagtacagcagcctgaacctgtttgacacctacaagggcaagagcctggagatccagaagccagctgtggcccccaggcatggcctgcagagcctgggcaaggtggccatcgcccggaggatgcctcctccagccaacctgcccagcctgaaggccgagaacaagggaaatgaccccaacgtgtccctggtgcccaaggatggcaccggctgggccagcaagcaggagcagagcgaccccaagagcagtgatgccagcacagcccagcccccagagagccagcccctgcctgccagccagaccccagccagcaaccagcccaagaggcctcctgctgcccctgagaacacccccctggtgcccagcggcgtgaagtcctgggcccaggcctctgtgacccatggagcccatggagatggcggccgggccagcagcctgctgagccgcttcagccgggaggagttccccaccctgcaggccgccggggaccaggacaaggccgccaaggagcgggagagcgctgagcagagcagcggccctggccccagcctgcggccccagaacagcaccacctggagagatggcggcggccggggcccagatgagctggagggccctgacagcaagctgcaccacggccatgacccccggggcggcctgcagcccagcggccccccccagttccccccctaccggggcatgatgccacccttcatgtacccaccctacctgcccttccccccaccctacggcccccagggcccctaccgctaccccaccccagatggccccagccgcttcccccgggtggccggcccccggggcagcggcccccccatgaggctggtggagcctgtgggccggcccagcatcctgaaggaggacaacctgaaggagtttgaccagctggaccaggagaatgatgatggctgggccggggcccacgaggaggtggactacacagagaagctgaagttcagtgatgaagaagatggccgggacagtgatgaggagggcgctgagggccaccgggacagccagagcgccagcggggaggagcggcccccagaggctgatggcaagaagggcaacagccccaacagcgagccccccacccccaagacagcctgggccgagaccagccggcccccagagacagagcccggccccccagcccccaagccacccctgcccccacctggggactacccagaccggggcggccccccctgcaagcccccagccccagaagatgaagatgaggcctggaggcagaggaggaagcagagcagcagcgagatcagcctggccgtggagcgggccaggagaagaagagaggaggaggagaggaggatgcaggaggagaggagagctgcctgtgccgagaagctgaagaggctggatgagaagtttggagccccagacaagaggctgaaggccgagcctgctgcccccccagctgcccccagcaccccagcccctcctcctgctgtgcccaaggagctgcctgcccccccagcccctcctccagccagcgcccccaccccagagaaggagcctgaggagcccgcccaggcccccccagcccagagcacccccaccccaggagtggccgccgcccccaccctggtgtctgggggcggcagcaccagcagcaccagcagcggcagctttgaggccagccctgtggagccccagctgcccagcaaggagggccctgagcccccagaggaggtgcccccacccaccaccccacctgtgcccaaggtggagcccaagggagatggcatcggccccacccggcagccccccagccagggcctgggctaccccaagtaccagaagagcctgcccccacgcttccagaggcagcagcaggagcagctgctgaagcagcagcagcagcaccagtggcagcagcaccagcagggcagcgccccacccacccctgtgccccccagccccccccagcctgtgaccctgggcgctgtgcctgccccccaggcccctcctcctccacccaaggccctgtacccaggggccctgggccggcccccacccatgccacccatgaactttgacccccgctggatgatgatccccccctacgtggacccccggctgctgcagggccggccccccctggacttctacccacctggggtgcaccccagcggcctggtgccccgggagaggagtgacagcggcggcagcagcagcgagccctttgacagacatgccccagccatgctgcgggagcggggcaccccacctgtggaccccaagctggcctgggtgggagatgtgttcaccgccaccccagctgagccccggcccctgaccagccccctgcggcaggccgcagatgaagatgacaagggcatgaggtctgagaccccacctgtgcccccacctccaccctacctggccagctacccaggcttcccagaaaatggagcccctggcccccccatcagccgcttccccctggaggagcccggcccccggcccctgccctggcccccaggcagtgatgaggtggccaagatccagaccccaccacccaagaaggagccccccaaggaggagacagcccagctgactggacctgaggccggcaggaagccagcccggggcgtgggcagcggcggccagggccccccaccaccccggcgggagagcaggacagagacccgctggggccccaggcctggcagcagcagaagaggcatccccccagaggagcccggggccccaccccggcgggccggccccatcaagaagcccccaccacccaccaaggtggaggagctgccccccaagcccctggagcagggagatgagacccccaagccacccaagccagaccccctgaagatcaccaagggcaagctgggcggccccaaggagaccccaccaaatggaaacctgagccctgccccccggctgcggcgggactacagctatgaaagagtgggccccaccagctgccggggccggggccgcggggagtactttgcccggggccggggcttccggggcacctatggaggccggggccgcggggctgctggcaacagcgctgtgacagagagctttgaggagatgatgggcgtggaggtgggccagggcgaccagaccaccctgctgctgcctgaggccgccctgcctgcccggcatggagcccgggtgcagagcatgaggaagagccccagcggggccggcagcggggcccagaagcaggccgcccggcccatgagggtcatctggctgctgcagacccggcggctgccccacccccggcgggagcacagccccaggagccgcagccccaccaccaggagccccaccttccctgccccagcccgcttcaccccaggagtgggggagagcagcctgcctgagggcatcagccctggcccccggcggcgggagcccccccaggtgtgccccggctggagccccccagccaagagcctggcccccaagaagccacccaccggccccctgccccccagcaaggagcccctgaaggagaagctgatccctggccccctgagccctgtggcccggggcggcagcaatggaggcagcaatgtgggcatggaggatggagagcggcccaggagaagaagacatggccgggcccagcagcaggacaagcccccacgcttccggcggctgaagcaggagcgggagaatgctgcccggggcagcgagggcaagcccagcctgaccctgcctgccagcgcccctggccctgaggaggccctgaccaccgtgacagtggccccagcccccaggagagctgctgccaagagcccagacctgagcaaccagaacagcgaccaggccaatgaggagtgggagacagccagcgagagcagtgacttcaccagcgagaggagaggagacaaggaggcccctcctcctgtgctgctgacccccaaggctgtgggcaccccaggcggcggcggcggcggcgctgtgcccggcatcagcgccatgagcagaggagacctgagccagagggccaaggacctgagcaagaggagcttcagcagccagaggcctggcatggagcggcagaacagaagacctggccctgggggcaaggccggcagcagcggcagcagcagcggcggcggcggcggcggccctgggggccgcacaggccctggccgcggggacaagaggtcctggcccagccccaagaacagaagcaggcctcctgaggagcggcccccaggcctgcccctgcccccacctccacccagcagcagcgctgtgttccggctggaccaggtgatccacagcaacccagctggcatccagcaggccctggcccagctgagcagccggcagggctctgtgacagcccctgggggccaccccaggcacaagccaggccccccccaggccccccagggccccagccccaggcctcccaccaggtatgagccccagagggtgaacagcggcctgagcagtgacccccactttgaggagcccggccccatggtgcggggcgtgggcggcaccccccgggacagcgctggggtgagccccttcccccccaagagaagagagaggcctcccaggaagccagagctgctgcaggaggagagcctgcccccaccccacagcagcggcttcctgggcagcaagccagagggccctggcccccaggccgagagccgggacaccggcacagaggccctgaccccccacatctggaaccggctgcacacagccaccagcaggaagagctaccggcccagctccatggagccctggatggagcccctgagcccctttgaagatgtggccggcacagagatgagccagagcgacagcggcgtggacctgagcggggacagccaggtgagcagcggcccctgcagccagaggagcagcccagatggcggcctgaagggagctgctgagggcccccccaagaggcctgggggcagcagccccctgaatgctgtgccctgtgagggccccccaggcagcgagcccccaagaagacctcctccagcccctcatgatggagacaggaaggagctgccccgggagcagcccctgcccccaggccccatcggcacagagaggagccagcacacagaccggggcacagagcccggccccatccggcccagccacaggcctggcccccctgtgcagtttggcaccagtgacaaggacagcgacctgcggctggtggtgggggacagcctgaaggccgagaaggagctgacagcctctgtgacagaggccatccctgtgtcccgggactgggagctgctgcccagcgctgctgccagcgctgagccccagagcaagaacctggacagcggccactgtgtgcctgagcccagcagcagcggccagaggctgtacccagaggtgttctacggcagcgctggccccagcagcagccagatcagcggcggccacggcctgtctgtgaccagcaagcagtggaggaggcctggcacccccagcctgcacccctaccgcagccagcccctgtacctgcccccaggccctgccccacccagcgccctgctgagcggcgtggccctgaagggccagttcctggacttcagcaccatgcaggccacagagctgggcaagctgcctgctgggggcgtgctgtacccacctccttccttcctgtacagccctgccttctgccccagccccctgcctgacaccagcctgctgcaggtgcggcaggacctgcccagccccagcgacttctacagcacccccctgcagcccggcggccagagcggcttcctgcccagcggggccccagcccagcagatgctgctgcccatggtggacagccagctgcctgtggtgaactttggcagcctgcccccagcccctcctccagccccacccagcctgagcctgctgcctgtgggccctgccctgcagccccccagcctggccgtgcggcccccaccagccccagccaccagggtgctgcccagccctgcccggcccttccctgccagcctgggccgggcagagctgcaccctgtggagctgaagcccttccaggactaccagaagctgagcagcaacctgggcggccctggcagcagcaggaccccacccaccggccgctccttcagcggcctgaacagccggctgaaggccacccccagcacctacagcggggtcttccgcacccagagggtggacctgtaccagcaggccagccccccagatgccctgcgctggatccccaagccctgggagaggactggacctccaccccgggagggccccagcagaagagctgaggagcccggcagcagaggagacaaggagcccggcctgcccccacccaggtag

SEQ ID NO: 165446 - DNA, 6450 bp, synthetic construct
  misc_feature 1..6450: note = Description of Artificial Sequence: Synthetic coding sequence
  source 1..6450: mol_type = other DNA
atgtctgacagaagtggccccacagccaagggcaaggatggcaagaagtacagcagcctgaacctgtttgacacctacaagggcaagagcctggagatccagaagccagctgtggcccccaggcatggcctgcagagcctgggcaaggtggccatcgcccggaggatgcctcctccagccaacctgcccagcctgaaggccgagaacaagggaaatgaccccaacgtgtccctggtgcccaaggatggcaccggctgggccagcaagcaggagcagagcgaccccaagagcagtgatgccagcacagcccagcccccagagagccagcccctgcctgccagccagaccccagccagcaaccagcccaagaggcctcctgctgcccctgagaacacccccctggtgcccagcggcgtgaagtcctgggcccaggcctctgtgacccatggagcccatggagatggcggccgggccagcagcctgctgagccgcttcagccgggaggagttccccaccctgcaggccgccggggaccaggacaaggccgccaaggagcgggagagcgctgagcagagcagcggccctggccccagcctgcggccccagaacagcaccacctggagagatggcggcggccggggcccagatgagctggagggccctgacagcaagctgcaccacggccatgacccccggggcggcctgcagcccagcggccccccccagttccccccctaccggggcatgatgccacccttcatgtacccaccctacctgcccttccccccaccctacggcccccagggcccctaccgctaccccaccccagatggccccagccgcttcccccgggtggccggcccccggggcagcggcccccccatgaggctggtggagcctgtgggccggcccagcatcctgaaggaggacaacctgaaggagtttgaccagctggaccaggagaatgatgatggctgggccggggcccacgaggaggtggactacacagagaagctgaagttcagtgatgaagaagatggccgggacagtgatgaggagggcgctgagggccaccgggacagccagagcgccagcggggaggagcggcccccagaggctgatggcaagaagggcaacagccccaacagcgagccccccacccccaagacagcctgggccgagaccagccggcccccagagacagagcccggccccccagcccccaagccacccctgcccccaccccaccggggccctgctggcaactggggccccccaggggactacccagacagaggaggccccccctgcaagcccccagccccagaagatgaagatgaggcctggaggcagaggaggaagcagagcagcagcgagatcagcctggccgtggagcgggccaggagaagaagagaggaggaggagaggaggatgcaggaggagcggcgggccgcctgtgccgagaagctgaagaggctggatgagaagtttggagccccagacaagaggctgaaggccgagcctgctgcccctcctgctgcccccagcaccccagcccctcctcctgctgtgcccaaggagctgcctgcccccccagcccctcctccagccagcgcccccaccccagagaaggagcctgaggagcccgcccaggcccccccagcccagagcacccccaccccaggagtggccgccgcccccaccctggtgtctgggggcggcagcaccagcagcaccagcagcggcagctttgaggccagccctgtggagccccagctgcccagcaaggagggccctgagcccccagaggaggtgcccccacccaccaccccacctgtgcccaaggtggagcccaagggagatggcatcggccccacccggcagccccccagccagggcctgggctaccccaagtaccagaagagcctgcccccacgcttccagaggcagcagcaggagcagctgctgaagcagcagcagcagcaccagtggcagcagcaccagcagggcagcgccccacccacccctgtgccccccagccccccccagcctgtgaccctgggcgctgtgcctgccccccaggcccctcctcctccacccaaggccctgtacccaggggccctgggccggcccccacccatgccacccatgaactttgacccccgctggatgatgatccccccctacgtggacccccggctgctgcagggccggccccccctggacttctacccacctggggtgcaccccagcggcctggtgccccgggagaggagtgacagcggcggcagcagcagcgagccctttgacagacatgccccagccatgctgcgggagcggggcaccccacctgtggaccccaagctggcctgggtgggagatgtgttcaccgccaccccagctgagccccggcccctgaccagccccctgcggcaggccgcagatgaagatgacaagggcatgaggtctgagaccccacctgtgcccccacctccaccctacctggccagctacccaggcttcccagaaaatggagcccctggcccccccatcagccgcttccccctggaggagcccggcccccggcccctgccctggcccccaggcagtgatgaggtggccaagatccagaccccaccacccaagaaggagccccccaaggaggagacagcccagctgaccggccctgaggccggcaggaagccagcccggggcgtgggcagcggcggccagggccccccacctccaagaagagagagcaggacagagacccgctggggcccccggcccggcagcagccggcggggcatccccccagaggagcccggggcccccccaagaagagctggccccatcaagaagcccccaccacccaccaaggtggaggagctgccccccaagcccctggagcagggagatgagacccccaagccacccaagccagaccccctgaagatcaccaagggcaagctgggcggccccaaggagaccccacccaacggcaacctgagccctgccccccggctgcggcgggactacagctatgagcgggtgggccccaccagctgccggggccggggccgcggggagtactttgcccggggccggggcttccggggcacctacggcggccggggcagaggagctgctggcaacagcgctgtgacagagagctttgaggagatgatgggcgtggaggtgggccagggcgaccagaccaccctgctgctgcctgaggccgccctgcctgcccggcacggggcccgggtgcagagcatgaggaagagccccagcggggccggcagcggggcccagaagcaggccgcccggcccatgagggtcatctggctgctgcagacccggcggctgccccacccccggcgggagcacagccccaggagccgcagccccaccaccaggagccccaccttccctgccccagcccgcttcaccccaggagtgggggagagcagcctgcctgagggcatcagccctggccccaggagaagagagcccccccaggtgtgccccggctggagccccccagccaagagcctggcccccaagaagcccccaacaggccccctgccccccagcaaggagcccctgaaggagaagctgatccctggccccctgagccctgtggcccggggcggcagcaatggaggcagcaatgtgggcatggaggatggagagcggcccaggagaagaagacatggccgggcccagcagcaggacaagccaccccgcttccggcggctgaagcaggagagagaaaatgctgcccggggcagcgagggcaagcccagcctgaccctgcctgccagcgcccctggccctgaggaggccctgaccaccgtgacagtggccccagccccccggcgggctgctgccaagagcccagacctgagcaaccagaacagcgaccaggccaatgaggagtgggagacagccagcgagagcagtgacttcaccagcgagcggcggggggacaaggaggcccctcctcctgtgctgctgacccccaaggctgtgggcacccctgggggcggcggcggcggcgctgtgcccggcatcagcgccatgagcagaggagacctgagccagagggccaaggacctgagcaagaggagcttcagcagccagaggcctggcatggagcggcagaacagaagacctggccctgggggcaaggccggcagcagcggcagcagcagcggcggcggcggcggcggccctgggggccgcactggacctggccgcggggacaagaggtcctggcccagccccaagaacagaagccggcccccagaggagaggcctcctggcctgcccctgcccccacctccacccagcagcagcgctgtgttccggctggaccaggtgatccacagcaacccagctggcatccagcaggccctggcccagctgagcagccggcagggctctgtgacagcccctgggggccaccccaggcacaagccaggccccccccaggccccccagggccccagcccccggccccccaccaggtatgagccccagagggtgaacagcggcctgagcagtgacccccactttgaggagcccggccccatggtgcggggcgtgggcggcaccccccgggacagcgctggggtgagccccttcccccccaagaggcgggagcggccccccaggaagccagagctgctgcaggaggagagcctgcccccaccccacagcagcggcttcctgggcagcaagccagagggccctggcccccaggccgagagccgggacacaggaacagaggccctgaccccccacatctggaaccggctgcacacagccaccagcaggaagagctaccggcccagctccatggagccctggatggagcccctgagcccctttgaagatgtggccggcacagagatgagccagagcgacagcggcgtggacctgagcggggacagccaggtgagcagcggcccctgcagccagaggagcagcccagatggcggcctgaagggagctgctgagggcccccccaagaggcctgggggcagcagccccctgaatgctgtgccctgtgagggccccccaggcagcgagcccccccggcggcccccaccagcccctcatgatggagacaggaaggagctgccccgggagcagcccctgcccccaggccccatcggcacagagaggagccagcacacagaccggggcacagagcccggccccatccggcccagccaccggcccggcccccctgtgcagtttggcaccagtgacaaggacagcgacctgcggctggtggtgggggacagcctgaaggccgagaaggagctgacagcctctgtgacagaggccatccctgtgtcccgggactgggagctgctgcccagcgctgctgccagcgctgagccccagagcaagaacctggacagcggccactgtgtgcctgagcccagcagcagcggccagaggctgtacccagaggtgttctacggcagcgctggccccagcagcagccagatcagcggcggccacggcctgtctgtgaccagcaagcagtggaggcggcccggcacccccagcctgcacccctaccgcagccagcccctgtacctgcccccaggccctgcccctccttctgccctgctgtctggagtggccctgaagggccagttcctggacttcagcaccatgcaggccacagagctgggcaagctgcctgctggaggagtgctgtaccccccacccagcttcctgtacagccctgccttctgccccagccccctgcctgacaccagcctgctgcaggtgcggcaggacctgcccagccccagcgacttctacagcacccccctgcagcccggcggccagagcggcttcctgcccagcggggccccagcccagcagatgctgctgcccatggtggacagccagctgcctgtggtgaactttggcagcctgcccccagcccctcctccagccccacccagcctgagcctgctgcctgtgggccctgccctgcagccccccagcctggccgtgcggcccccaccagccccagccaccagggtgctgcccagccctgcccggcccttccctgccagcctgggccgggcagagctgcaccctgtggagctgaagcccttccaggactaccagaagctgagcagcaacctgggcggccctggcagcagcaggaccccacccaccggccgctccttcagcggcctgaacagccggctgaaggccacccccagcacctacagcggggtcttccgcacccagagggtggacctgtaccagcaggccagccccccagatgccctgcgctggatccccaagccctgggagaggacaggccccccaccccgggagggccccagccggcgggcagaggagcccggcagcagaggagacaaggagcccggcctgcccccaccaagatag

SEQ ID NO: 165447 - DNA, 1650 bp, synthetic construct; identical to SEQ ID NO: 165444
  misc_feature 1..1650: note = Description of Artificial Sequence: Synthetic coding sequence
  source 1..1650: mol_type = other DNA

SEQ ID NO: 165448 - DNA, 1650 bp, synthetic construct; identical to SEQ ID NO: 165444
  misc_feature 1..1650: note = Description of Artificial Sequence: Synthetic coding sequence
  source 1..1650: mol_type = other DNA

SEQ ID NO: 165449 - DNA, 4149 bp, synthetic construct
  misc_feature 1..4149: note = Description of Artificial Sequence: Synthetic coding sequence
  source 1..4149: mol_type = other DNA
atgctgcgggagcggggcaccccacctgtggaccccaagctggcctgggtgggagatgtgttcaccgccaccccagctgagccccggcccctgaccagccccctgcggcaggccgcagatgaagatgacaagggcatgaggtctgagaccccacctgtgcccccacctccaccctacctggccagctacccaggcttcccagaaaatggagcccctggcccccccatcagccgcttccccctggaggagcccggcccccggcccctgccctggcccccaggcagtgatgaggtggccaagatccagaccccaccacccaagaaggagccccccaaggaggagacagcccagctgactggacctgaggccggcaggaagccagcccggggcgtgggcagcggcggccagggccccccaccaccccggcgggagagcaggacagagacccgctggggccccaggcctggcagcagcagaagaggcatccccccagaggagcccggggccccaccccggcgggccggccccatcaagaagcccccaccacccaccaaggtggaggagctgccccccaagcccctggagcagggagatgagacccccaagccacccaagccagaccccctgaagatcaccaagggcaagctgggcggccccaaggagaccccaccaaatggaaacctgagccctgccccccggctgcggcgggactacagctatgaaagagtgggccccaccagctgccggggccggggccgcggggagtactttgcccggggccggggcttccggggcacctatggaggccggggccgcggggcccggagccgggagttccgcagctaccgggagttcagaggagatgatggccggggcggcggcactggaggccccaaccaccccccagccccccggggccgcacagccagcgagaccaggtctgagggctctgaatatgaggagatccccaagagaagacggcagaggggcagcgagactggaagtgagacccatgaaagtgacctggcccccagcgacaaggaggcccccacccccaaggagggcaccctgacccaggtgcccctggcccctcctcctcctggggccccacccagccctgccccagcccgcttcaccgcccggggcggccgggtcttcaccccccggggcgtgcccagccggcggggccggggcggcggccggcccccaccccaggtgtgccccggctggagccccccagccaagagcctggcccccaagaagccacccaccggccccctgccccccagcaaggagcccctgaaggagaagctgatccctggccccctgagccctgtggcccggggcggcagcaatggaggcagcaatgtgggcatggaggatggagagcggcccaggagaagaagacatggccgggcccagcagcaggacaagcccccacgcttccggcggctgaagcaggagcgggagaatgctgcccggggcagcgagggcaagcccagcctgaccctgcctgccagcgcccctggccctgaggaggccctgaccaccgtgacagtggccccagcccccaggagagctgctgccaagagcccagacctgagcaaccagaacagcgaccaggccaatgaggagtgggagacagccagcgagagcagtgacttcaccagcgagaggagaggagacaaggaggcccctcctcctgtgctgctgacccccaaggctgtgggcaccccaggcggcggcggcggcggcgctgtgcccggcatcagcgccatgagcagaggagacctgagccagagggccaaggacctgagcaagaggagcttcagcagccagaggcctggcatggagcggcagaacagaagacctggccctgggggcaaggccggcagcagcggcagcagcagcggcggcggcggcggcggccctgggggccgcacaggccctggccgcggggacaagaggtcctggcccagccccaagaacagaagcaggcctcctgaggagcggcccccaggcctgcccctgcccccacctccacccagcagcagcgctgtgttccggctggaccaggtgatccacagcaacccagctggcatccagcaggccctggcccagctgagcagccggcagggctctgtgacagcccctgggggccaccccaggcacaagccaggccccccccaggccccccagggccccagccccaggcctcccaccaggtatgagccccagagggtgaacagcggcctgagcagtgacccccactttgaggagcccggccccatggtgcggggcgtgggcggcaccccccgggacagcgctggggtgagccccttcccccccaagagaagagagaggcctcccaggaagccagagctgctgcaggaggagagcctgcccccaccccacagcagcggcttcctgggcagcaagccagagggccctggcccccaggccgagagccgggacaccggcacagaggccctgaccccccacatctggaaccggctgcacacagccaccagcaggaagagctaccggcccagctccatggagccctggatggagcccctgagcccctttgaagatgtggccggcacagagatgagccagagcgacagcggcgtggacctgagcggggacagccaggtgagcagcggcccctgcagccagaggagcagcccagatggcggcctgaagggagctgctgagggcccccccaagaggcctgggggcagcagccccctgaatgctgtgccctgtgagggccccccaggcagcgagcccccaagaagacctcctccagcccctcatgatggagacaggaaggagctgccccgggagcagcccctgcccccaggccccatcggcacagagaggagccagcacacagaccggggcacagagcccggccccatccggcccagccacaggcctggcccccctgtgcagtttggcaccagtgacaaggacagcgacctgcggctggtggtgggggacagcctgaaggccgagaaggagctgacagcctctgtgacagaggccatccctgtgtcccgggactgggagctgctgcccagcgctgctgccagcgctgagccccagagcaagaacctggacagcggccactgtgtgcctgagcccagcagcagcggccagaggctgtacccagaggtgttctacggcagcgctggccccagcagcagccagatcagcggcggggccatggacagccagctgcaccccaacagcggcggcttccggcccggcacccccagcctgcacccctaccgcagccagcccctgtacctgcccccaggccctgccccacccagcgccctgctgagcggcgtggccctgaagggccagttcctggacttcagcaccatgcaggccacagagctgggcaagctgcctgctgggggcgtgctgtacccacctccttccttcctgtacagccctgccttctgccccagccccctgcctgacaccagcctgctgcaggtgcggcaggacctgcccagccccagcgacttctacagcacccccctgcagcccggcggccagagcggcttcctgcccagcggggccccagcccagcagatgctgctgcccatggtggacagccagctgcctgtggtgaactttggcagcctgcccccagcccctcctccagccccacccagcctgagcctgctgcctgtgggccctgccctgcagccccccagcctggccgtgcggcccccaccagccccagccaccagggtgctgcccagccctgcccggcccttccctgccagcctgggccgggcagagctgcaccctgtggagctgaagcccttccaggactaccagaagctgagcagcaacctgggcggccctggcagcagcaggaccccacccaccggccgctccttcagcggcctgaacagccggctgaaggccacccccagcacctacagcggggtcttccgcacccagagggtggacctgtaccagcaggccagccccccagatgccctgcgctggatccccaagccctgggagaggactggacctccaccccgggagggccccagcagaagagctgaggagcccggcagcagaggagacaaggagcccggcctgcccccacccaggtag

SEQ ID NO: 165450 - DNA, 6417 bp, synthetic construct
  misc_feature 1..6417: note = Description of Artificial Sequence: Synthetic coding sequence
  source 1..6417: mol_type = other DNA
atgtctgacagaagtggccccacagccaagggcaaggatggcaagaagtacagcagcctgaacctgtttgacacctacaagggcaagagcctggagatccagaagccagctgtggcccccaggcatggcctgcagagcctgggcaaggtggccatcgcccggaggatgcctcctccagccaacctgcccagcctgaaggccgagaacaagggaaatgaccccaacgtgtccctggtgcccaaggatggcaccggctgggccagcaagcaggagcagagcgaccccaagagcagtgatgccagcacagcccagcccctggagagccagcccctgcctgccagccagaccccagccagcaaccagcccaagaggcctcctgctgcccctgagaacacccccctggtgcccagcggcgtgaagtcctgggcccaggcctctgtgacccatggagcccatggagatggcggccgggccagcagcctgctgagccgcttcagccgggaggagttccccaccctgcaggccgccggggaccaggacaaggccgccaaggagcgggagagcgctgagcagagcagcggccctggccccagcctgcggccccagaacagcaccacctggagagatggcggcggccggggcccagatgagctggagggccctgacagcaagctgcaccacggccatgacccccggggcggcctgcagcccagcggccccccccagttccccccctaccggggcatgatgccacccttcatgtacccaccctacctgcccttccccccaccctacggcccccagggcccctaccgctaccccaccccagatggccccagccgcttcccccgggtggccggcccccggggcagcggcccccccatgaggctggtggagcctgtgggccggcccagcatcctgaaggaggacaacctgaaggagtttgaccagctggaccaggagaatgatgatggctgggccggggcccacgaggaggtggactacacagagaagctgaagttcagtgatgaagaagatggccgggacagtgatgaggagggcgctgagggccaccgggacagccagagcgccagcggggaggagcggcccccagaggctgatggcaagaagggcaacagccccaacagcgagccccccacccccaagacagcctgggccgagaccagccggcccccagagacagagcccggccccccagcccccaagccacccctgcccccacctggggactacccagaccggggcggccccccctgcaagcccccagccccagaagatgaagatgaggcctggaggcagaggaggaagcagagcagcagcgagatcagcctggccgtggagcgggccaggagaagaagagaggaggaggagaggaggatgcaggaggagaggagagctgcctgtgccgagaagctgaagaggctggatgagaagtttggagccccagacaagaggctgaaggccgagcctgctgcccccccagctgcccccagcaccccagcccctcctcctgctgtgcccaaggagctgcctgcccccccagcccctcctccagccagcgcccccaccccagagaaggagcctgaggagcccgcccaggcccccccagcccagagcacccccaccccaggagtggccgccgcccccaccctggtgtctgggggcggcagcaccagcagcaccagcagcggcagctttgaggccagccctgtggagccccagctgcccagcaaggagggccctgagcccccagaggaggtgcccccacccaccaccccacctgtgcccaaggtggagcccaagggagatggcatcggccccacccggcagccccccagccagggcctgggctaccccaagtaccagaagagcctgcccccacgcttccagaggcagcagcaggagcagctgctgaagcagcagcagcagcaccagtggcagcagcaccagcagggcagcgccccacccacccctgtgccccccagccccccccagcctgtgaccctgggcgctgtgcctgccccccaggcccctcctcctccacccaaggccctgtacccaggggccctgggccggcccccacccatgccacccatgaactttgacccccgctggatgatgatccccccctacgtggacccccggctgctgcagggccggccccccctggacttctacccacctggggtgcaccccagcggcctggtgccccgggagaggagtgacagcggcggcagcagcagcgagccctttgacagacatgccccagccatgctgcgggagcggggcaccccacctgtggaccccaagctggcctgggtgggagatgtgttcaccgccaccccagctgagccccggcccctgaccagccccctgcggcaggccgcagatgaagatgacaagggcatgaggtctgagaccccacctgtgcccccacctccaccctacctggccagctacccaggcttcccagaaaatggagcccctggcccccccatcagccgcttccccctggaggagcccggcccccggcccctgccctggcccccaggcagtgatgaggtggccaagatccagaccccaccacccaagaaggagccccccaaggaggagacagcccagctgactggacctgaggccggcaggaagccagcccggggcgtgggcagcggcggccagggccccccaccaccccggcgggagagcaggacagagacccgctggggccccaggcctggcagcagcagaagaggcatccccccagaggagcccggggccccaccccggcgggccggccccatcaagaagcccccaccacccaccaaggtggaggagctgccccccaagcccctggagcagggagatgagacccccaagccacccaagccagaccccctgaagatcaccaagggcaagctgggcggccccaaggagaccccaccaaatggaaacctgagccctgccccccggctgcggcgggactacagctatgaaagagtgggccccaccagctgccggggccggggccgcggggagtactttgcccggggccggggcttccggggcacctatggaggccggggccgcggggctgctggcaacagcgctgtgacagagagctttgaggagatgatgggcgtggaggtgggccagggcgaccagaccaccctgctgctgcctgaggccgccctgcctgcccggcatggagcccgggtgcagagcatgaggaagagccccagcggggccggcagcggggcccagaagcaggccgcccggcccatgagggtcatctggctgctgcagacccggcggctgccccacccccggcgggagcacagccccaggagccgcagccccaccaccaggagccccaccttccctgccccagcccgcttcaccccaggagtgggggagagcagcctgcctgagggcatcagccctggcccccggcggcgggagcccccccaggtgtgccccggctggagccccccagccaagagcctggcccccaagaagccacccaccggccccctgccccccagcaaggagcccctgaaggagaagctgatccctggccccctgagccctgtggcccggggcggcagcaatggaggcagcaatgtgggcatggaggatggagagcggcccaggagaagaagacatggccgggcccagcagcaggacaagcccccacgcttccggcggctgaagcaggagcgggagaatgctgcccggggcagcgagggcaagcccagcctgaccctgcctgccagcgcccctggccctgaggaggccctgaccaccgtgacagtggccccagcccccaggagagctgctgccaagagcccagacctgagcaaccagaacagcgaccaggccaatgaggagtgggagacagccagcgagagcagtgacttcaccagcgagaggagaggagacaaggaggcccctcctcctgtgctgctgacccccaaggctgtgggcaccccaggcggcggcggcggcggcgctgtgcccggcatcagcgccatgagcagaggagacctgagccagagggccaaggacctgagcaagaggagcttcagcagccagaggcctggcatggagcggcagaacagaagacctggccctgggggcaaggccggcagcagcggcagcagcagcggcggcggcggcggcggccctgggggccgcacaggccctggccgcggggacaagaggtcctggcccagccccaagaacagaagcaggcctcctgaggagcggcccccaggcctgcccctgcccccacctccacccagcagcagcgctgtgttccggctggaccaggtgatccacagcaacccagctggcatccagcaggccctggcccagctgagcagccggcagggctctgtgacagcccctgggggccaccccaggcacaagccaggccccccccaggccccccagggccccagccccaggcctcccaccaggtatgagccccagagggtgaacagcggcctgagcagtgacccccactttgaggagcccggccccatggtgcggggcgtgggcggcaccccccgggacagcgctggggtgagccccttcccccccaagagaagagagaggcctcccaggaagccagagctgctgcaggaggagagcctgcccccaccccacagcagcggcttcctgggcagcaagccagagggccctggcccccaggccgagagccgggacaccggcacagaggccctgaccccccacatctggaaccggctgcacacagccaccagcaggaagagctaccggcccagctccatggagccctggatggagcccctgagcccctttgaagatgtggccggcacagagatgagccagagcgacagcggcgtggacctgagcggggacagccaggtgagcagcggcccctgcagccagaggagcagcccagatggcggcctgaagggagctgctgagggcccccccaagaggcctgggggcagcagccccctgaatgctgtgccctgtgagggccccccaggcagcgagcccccaagaagacctcctccagcccctcatgatggagacaggaaggagctgccccgggagcagcccctgcccccaggccccatcggcacagagaggagccagaggacagaccggggcacagagcccggccccatccggcccagccacaggcctggcccccctgtgcagtttggcaccagtgacaaggacagcgacctgcggctggtggtgggggacagcctgaaggccgagaaggagctgacagcctctgtgacagaggccatccctgtgtcccgggactgggagctgctgcccagcgctgctgccagcgctgagccccagagcaagaacctggacagcggccactgtgtgcctgagcccagcagcagcggccagaggctgtacccagaggtgttctacggcagcgctggccccagcagcagccagatcagcggcggccacggcctgagcatcaccagcaagcagtggaggaggcctggcacccccagcctgcacccctaccgcagccagcccctgtacctgcccccaggccctgccccacccagcgccctgctgagcggcgtggccctgaagggccagttcctggacttcagcaccatgcaggccacagagctgggcaagctgcctgctgggggcgtgctgtacccacctccttccttcctgtacagccctgccttctgccccagccccctgcctgacaccagcctgctgcaggtgcggcaggacctgcccagccccagcgacttctacagcacccccctgcagcccggcggccagagcggcttcctgcccagcggggccccagcccagcagatgctgctgcccatggtggacagccagctgcctgtggtgaactttggcagcctgcccccagcccctcctccagcccccccacccctgagcctgctgcctgtgggccctgccctgcagccccccagcctggccgtgcggcccccaccagccccagccaccagggtgctgcccagccctgcccggcccttccctgccagcctgggccgggcagagctgcaccctgtggagctgaagcccttccaggactaccagaagctgagcagcaacctgggcggccctggcagcagcaggaccccacccaccggccgctccttcagcggcctgaacagccggctgaaggccacccccagcacctacagcggggtcttccgcacccagagggtggacctgtaccagcaggccagccccccagatgccctgcgctggatccccaagccctgggagaggactggacctccaccccgggagggccccagcagaagagctgaggagcccggcagcagaggagacaaggagcccggcctgcccccacccaggtag

SEQ ID NO: 165451 - DNA, 6417 bp, synthetic construct; identical to SEQ ID NO: 165445
  misc_feature 1..6417: note = Description of Artificial Sequence: Synthetic coding sequence
  source 1..6417: mol_type = other DNA

SEQ ID NO: 165452 - DNA, 6417 bp, synthetic construct
  misc_feature 1..6417: note = Description of Artificial Sequence: Synthetic coding sequence
  source 1..6417: mol_type = other DNA
atgtctgacagaagtggccccacagccaagggcaaggatggcaagaagtacagcagcctgaacctgtttgacacctacaagggcaagagcctggagatccagaagccagctgtggcccccaggcatggcctgcagagcctgggcaaggtggccatcgcccggaggatgcctcctccagccaacctgcccagcctgaaggccgagaacaagggaaatgaccccaacgtgtccctggtgcccaaggatggcaccggctgggccagcaagcaggagcagagcgaccccaagagcagtgatgccagcacagcccagcccccagagagccagcccctgcctgccagccagaccccagccagcaaccagcccaagaggcctcctgctgcccctgagaacacccccctggtgcccagcggcgtgaagtcctgggcccaggcctctgtgacccatggagcccatggagatggcggccgggccagcagcctgctgagccgcttcagccgggaggagttccccaccctgcaggccgccggggaccaggacaaggccgccaaggagcgggagagcgctgagcagagcagcggccctggccccagcctgcggccccagaacagcaccacctggagagatggcggcggccggggcccagatgagctggagggccctgacagcaagctgcaccacggccatgacccccggggcggcctgcagcccagcggccccccccagttccccccctaccggggcatgatgccacccttcatgtacccaccctacctgcccttccccccaccctacggcccccagggcccctaccgctaccccaccccagatggccccagccgcttcccccgggtggccggcccccggggcagcggcccccccatgaggctggtggagcctgtgggccggcccagcatcctgaaggaggacaacctgaaggagtttgaccagctggaccaggagaatgatgatggctgggccggggcccacgaggaggtggactacacagagaagctgaagttcagtgatgaagaagatggccgggacagtgatgaggagggcgctgagggccaccgggacagccagagcgccagcggggaggagcggcccccagaggctgatggcaagaagggcaacagccccaacagcgagccccccacccccaagacagcctgggccgagaccagccggcccccagagacagagcccggccccccagcccccaagccacccctgcccccacctggggactacccagaccggggcggccccccctgcaagcccccagccccagaagatgaagatgaggcctggaggcagaggaggaagcagagcagcagcgagatcagcctggccgtggagcgggccaggagaagaagagaggaggaggagaggaggatgcaggaggagaggagagctgcctgtgccgagaagctgaagaggctggatgagaagtttggagccccagacaagaggctgaaggccgagcctgctgcccccccagctgcccccagcaccccagcccctcctcctgctgtgcccaaggagctgcctgcccccccagcccctcctccagccagcgcccccaccccagagacagagcctgaggagcccgcccaggcccccccagcccagagcacccccaccccaggagtggccgccgcccccaccctggtgtctgggggcggcagcaccagcagcaccagcagcggcagctttgaggccagccctgtggagccccagctgcccagcaaggagggccctgagcccccagaggaggtgcccccacccaccaccccacctgtgcccaaggtggagcccaagggagatggcatcggccccacccggcagccccccagccagggcctgggctaccccaagtaccagaagagcctgcccccacgcttccagaggcagcagcaggagcagctgctgaagcagcagcagcagcaccagtggcagcagcaccagcagggcagcgccccacccacccctgtgccccccagccccccccagcctgtgaccctgggcgctgtgcctgccccccaggcccctcctcctccacccaaggccctgtacccaggggccctgggccggcccccacccatgccacccatgaactttgacccccgctggatgatgatccccccctacgtggacccccggctgctgcagggccggccccccctggacttctacccacctggggtgcaccccagcggcctggtgccccgggagaggagtgacagcggcggcagcagcagcgagccctttgacagacatgccccagccatgctgcgggagcggggcaccccacctgtggaccccaagctggcctgggtgggagatgtgttcaccgccaccccagctgagccccggcccctgaccagccccctgcggcaggccgcagatgaagatgacaagggcatgaggtctgagaccccacctgtgcccccacctccaccctacctggccagctacccaggcttcccagaaaatggagcccctggcccccccatcagccgcttccccctggaggagcccggcccccggcccctgccctggcccccaggcagtgatgaggtggccaagatccagaccccaccacccaagaaggagccccccaaggaggagacagcccagctgactggacctgaggccggcaggaagccagcccggggcgtgggcagcggcggccagggccccccaccaccccggcgggagagcaggacagagacccgctggggccccaggcctggcagcagcagaagaggcatccccccagaggagcccggggccccaccccggcgggccggccccatcaagaagcccccaccacccaccaaggtggaggagctgccccccaagcccctggagcagggagatgagacccccaagccacccaagccagaccccctgaagatcaccaagggcaagctgggcggccccaaggagaccccaccaaatggaaacctgagccctgccccccggctgcggcgggactacagctatgaaagagtgggccccaccagctgccggggccggggccgcggggagtactttgcccggggccggggcttccggggcacctatggaggccggggccgcggggctgctggcaacagcgctgtgacagagagctttgaggagatgatgggcgtggaggtgggccagggcgaccagaccaccctgctgctgcctgaggccgccctgcctgcccggcatggagcccgggtgcagagcatgaggaagagccccagcggggccggcagcggggcccagaagcaggccgcccggcccatgagggtcatctggctgctgcagacccggcggctgccccacccccggcgggagcacagccccaggagccgcagccccaccaccaggagccccaccttccctgccccagcccgcttcaccccaggagtgggggagagcagcctgcctgagggcatcagccctggcccccggcggcgggagcccccccaggtgtgccccggctggagccccccagccaagagcctggcccccaagaagccacccaccggccccctgccccccagcaaggagcccctgaaggagaagctgatccctggccccctgagccctgtggcccggggcggcagcaatggaggcagcaatgtgggcatggaggatggagagcggcccaggagaagaagacatggccgggcccagcagcaggacaagcccccacgcttccggcggctgaagcaggagcgggagaatgctgcccggggcagcgagggcaagcccagcctgaccctgcctgccagcgcccctggccctgaggaggccctgaccaccgtgacagtggccccagcccccaggagagctgctgccaagagcccagacctgagcaaccagaacagcgaccaggccaatgaggagtgggagacagccagcgagagcagtgacttcaccagcgagaggagaggagacaaggaggcccctcctcctgtgctgctgacccccaaggctgtgggcaccccaggcggcggcggcggcggcgctgtgcccggcatcagcgccatgagcagaggagacctgagccagagggccaaggacctgagcaagaggagcttcagcagccagaggcctggcatggagcggcagaacagaagacctggccctgggggcaaggccggcagcagcggcagcagcagcggcggcggcggcggcggccctgggggccgcacaggccctggccgcggggacaagaggtcctggcccagccccaagaacagaagcaggcctcctgaggagcggcccccaggcctgcccctgcccccacctccacccagcagcagcgctgtgttccggctggaccaggtgatccacagcaacccagctggcatccagcaggccctggcccagctgagcagccggcagggctctgtgacagcccctgggggccaccccaggcacaagccaggcctgccccaggccccccagggccccagccccaggcctcccaccaggtatgagccccagagggtgaacagcggcctgagcagtgacccccactttgaggagcccggccccatggtgcggggcgtgggcggcaccccccgggacagcgctggggtgagccccttcccccccaagagaagagagaggcctcccaggaagccagagctgctgcaggaggagagcctgcccccaccccacagcagcggcttcctgggcagcaagccagagggccctggcccccaggccgagagccgggacaccggcacagaggccctgaccccccacatctggaaccggctgcacacagccaccagcaggaagagctaccggcccagctccatggagccctggatggagcccctgagcccctttgaagatgtggccggcacagagatgagccagagcgacagcggcgtggacctgagcggggacagccaggtgagcagcggcccctgcagccagaggagcagcccagatggcggcctgaagggagctgctgagggcccccccaagaggcctgggggcagcagccccctgaatgctgtgccctgtgagggccccccaggcagcgagcccccaagaagacctcctccagcccctcatgatggagacaggaaggagctgccccgggagcagcccctgcccccaggccccatcggcacagagaggagccagaggacagaccggggcacagagcccggccccatccggcccagccacaggcctggcccccctgtgcagtttggcaccagtgacaaggacagcgacctgcggctggtggtgggggacagcctgaaggccgagaaggagctgacagcctctgtgacagaggccatccctgtgtcccgggactgggagctgctgcccagcgctgctgccagcgctgagccccagagcaagaacctggacagcggccactgtgtgcctgagcccagcagcagcggccagaggctgtacccagaggtgttctacggcagcgctggccccagcagcagccagatcagcggcggccacggcctgagcatcaccagcaagcagtggaggaggcctggcacccccagcctgcacccctaccgcagccagcccctgtacctgcccccaggccctgccccacccagcgccctgctgagcggcgtggccctgaagggccagttcctggacttcagcaccatgcaggccacagagctgggcaagctgcctgctgggggcgtgctgtacccacctccttccttcctgtacagccctgccttctgccccagccccctgcctgacaccagcctgctgcaggtgcggcaggacctgcccagccccagcgacttctacagcacccccctgcagcccggcggccagagcggcttcctgcccagcggggccccagcccagcagatgctgctgcccatggtggacagccagctgcctgtggtgaactttggcagcctgcccccagcccctcctccagcccccccacccctgagcctgctgcctgtgggccctgccctgcagccccccagcctggccgtgcggcccccaccagccccagccaccagggtgctgcccagccctgcccggcccttccctgccagcctgggccgggcagagctgcaccctgtggagctgaagcccttccaggactaccagaagctgagcagcaacctgggcggccctggcagcagcaggaccccacccaccggccgctccttcagcggcctgaacagccggctgaaggccacccccagcacctacagcggggtcttccgcacccagagggtggacctgtaccagcaggccagccccccagatgccctgcgctggatccccaagccctgggagaggactggacctccaccccgggagggccccagcagaagagctgaggagcccggcagcagaggagacaaggagcccggcctgcccccacccaggtag

SEQ ID NO: 165453 - DNA, 6417 bp, synthetic construct; identical to SEQ ID NO: 165445
  misc_feature 1..6417: note = Description of Artificial Sequence: Synthetic coding sequence
  source 1..6417: mol_type = other DNA

SEQ ID NO: 165454 - DNA, 6417 bp, synthetic construct
  misc_feature 1..6417: note = Description of Artificial Sequence: Synthetic coding sequence
  source 1..6417: mol_type = other DNA
atgtctgacagaagtggccccacagccaagggcaaggatggcaagaagtacagcagcctgaacctgtttgacacctacaagggcaagagcctggagatccagaagccagctgtggcccccaggcatggcctgcagagcctgggcaaggtggccatcgcccggaggatgcctcctccagccaacctgcccagcctgaaggccgagaacaagggaaatgaccccaacgtgtccctggtgcccaaggatggcaccggctgggccagcaagcaggagcagagcgaccccaagagcagtgatgccagcacagcccagcccccagagagccagcccctgcctgccagccagaccccagccagcaaccagcccaagaggcctcctgctgcccctgagaacacccccctggtgcccagcggcgtgaagtcctgggcccaggcctctgtgacccatggagcccatggagatggcggccgggccagcagcctgctgagccgcttcagccgggaggagttccccaccctgcaggccgccggggaccaggacaaggccgccaaggagcgggagagcgctgagcagagcagcggccctggccccagcctgcggccccagaacagcaccacctggagagatggcggcggccggggcccagatgagctggagggccctgacagcaagctgcaccacggccatgacccccggggcggcctgcagcccagcggccccccccagttccccccctaccggggcatgatgccacccttcatgtacccaccctacctgcccttccccccaccctacggcccccagggcccctaccgctaccccaccccagatggccccagccgcttcccccgggtggccggcccccggggcagcggcccccccatgaggctggtggagcctgtgggccggcccagcatcctgaaggaggacaacctgaaggagtttgaccagctggaccaggagaatgatgatggctgggccggggcccacgaggaggtggactacacagagaagctgaagttcagtgatgaagaagatggccgggacagtgatgaggagggcgctgagggccaccgggacagccagagcgccagcggggaggagcggcccccagaggctgatggcaagaagggcaacagccccaacagcgagccccccacccccaagacagcctgggccgagaccagccggcccccagagacagagcccggccccccagcccccaagccacccctgcccccacctggggactacccagaccggggcggccccccctgcaagcccccagccccagaagatgaagatgaggcctggaggcagaggaggaagcagagcagcagcgagatcagcctggccgtggagcgggccaggagaagaagagaggaggaggagaggaggatgcaggaggagaggagagctgcctgtgccgagaagctgaagaggctggatgagaagtttggagccccagacaagaggctgaaggccgagcctgctgcccccccagctgcccccagcaccccagcccctcctcctgctgtgcccaaggagctgcctgcccccccagcccctcctccagccagcgcccccaccccagagaaggagcctgaggagcccgcccaggcccccccagcccagagcacccccaccccaggagtggccgccgcccccaccctggtgtctgggggcggcagcaccagcagcaccagcagcggcagctttgaggccagccctgtggagccccagctgcccagcaaggagggccctgagcccccagaggaggtgcccccacccaccaccccacctgtgcccaaggtggagcccaagggagatggcatcggccccacccggcagccccccagccagggcctgggctaccccaagtaccagaagagcctgcccccacgcttccagaggcagcagcaggagcagctgctgaagcagcagcagcagcaccagtggcagcagcaccagcagggcagcgccccacccacccctgtgccccccagccccccccagcctgtgaccctgggcgctgtgcctgccccccaggcccctcctcctccacccaaggccctgtacccaggggccctgggccggcccccacccatgccacccatgaactttgacccccgctggatgatgatccccccctacgtggacccccggctgctgcagggccggccccccctggacttctacccacctggggtgcaccccagcggcctggtgccccgggagaggagtgacagcggcggcagcagcagcgagccctttgacagacatgccccagccatgctgcgggagcggggcaccccacctgtggaccccaagctggcctgggtgggagatgtgttcaccgccaccccagctgagccccggcccctgaccagccccctgcggcaggccgcagatgaagatgacaagggcatgaggtctgagaccccacctgtgcccccacctccaccctacctggccagctacccaggcttcccagaaaatggagcccctggcccccccatcagccgcttccccctggaggagcccggcccccggcccctgccctggcccccaggcagtgatgaggtggccaagatccagaccccaccacccaagaaggagccccccaaggaggagacagcccagctgactggacctgaggccggcaggaagccagcccggggcgtgggcagcggcggccagggccccccaccaccccggcgggagagcaggacagagacccgctggggccccaggcctggcagcagcagaagaggcatccccccagaggagcccggggccccaccccggcgggccggccccatcaagaagcccccaccacccaccaaggtggaggagctgccccccaagcccctggagcagggagatgagacccccaagccacccaagccagaccccctgaagatcaccaagggcaagctgggcggccccaaggagaccccaccaaatggaaacctgagccctgccccccggctgcggcgggactacagctatgaaagagtgggccccaccagctgccggggccggggccgcggggagtactttgcccggggccggggcttccggggcacctatggaggccggggccgcggggctgctggcaacagcgctgtgacagagagctttgaggagatgatgggcgtggaggtgggccagggcgaccagaccaccctgctgctgcctgaggccgccctgcctgcccggcatggagcccgggtgcagagcatgaggaagagccccagcggggccggcagcggggcccagaagcaggccgcccggcccatgagggtcatctggctgctgcagacccggcggctgccccacccccggcgggagcacagccccaggagccgcagccccaccaccaggagccccaccttccctgccccagcccgcttcaccccaggagtgggggagagcagcctgcctgagggcatcagccctggcccccggcggcgggagcccccccaggtgtgccccggctggagccccccagccaagagcctggcccccaagaagccacccaccggccccctgccccccagcaaggagcccctgaaggagaagctgatccctggccccctgagccctgtggcccggggcggcagcaatggaggcagcaatgtgggcatggaggatggagagcggcccaggagaagaagacatggccgggcccagcagcaggacaagcccccacgcttccggcggctgaagcaggagcgggagaatgctgcccggggcagcgagggcaagcccagcctgaccctgcctgccagcgcccctggccctgaggaggccctgaccaccgtgacagtggccccagcccccaggagagctgctgccaagagcccagacctgagcaaccagaacagcgaccaggccaatgaggagtgggagacagccagcgagagcagtgacttcaccagcgagaggagaggagacaaggaggcccctcctcctgtgctgctgacccccaaggctgtgggcaccccaggcggcggcggcggcggcgctgtgcccggcatcagcgccatgagcagaggagacctgagccagagggccaaggacctgagcaagaggagcttcagcagccagaggcctggcatggagcggcagaacagaagacctggccctgggggcaaggccggcagcagcggcagcagcagcggcggcggcggcggcggccctgggggccgcacaggccctggccgcggggacaagaggtcctggcccagccccaagaacagaagcaggcctcctgaggagcggcccccaggcctgcccctgcccccacctccacccagcagcagcgctgtgttccggctggaccaggtgatccacagcaacccagctggcatccagcaggccctggcccagctgagcagccggcagggctctgtgacagcccctgggggccaccccaggcacaagccaggccccccccaggccccccagggccccagccccaggcctcccaccaggtatgagccccagagggtgaacagcggcctgagcagtgacccccactttgaggagcccggccccatggtgcggggcgtgggcggcaccccccgggacagcgctggggtgagccccttcccccccaagagaagagagaggcctcccaggaagccagagctgctgcaggaggagagcctgcccccaccccacagcagcggcttcctgggcagcaagccagagggccctggcccccaggccgagagccgggacaccggcacagaggccctgaccccccacatctggaaccggctgcacacagccaccagcaggaagagctaccggcccagctccatggagccctggatggagcccctgagcccctttgaagatgtggccggcacagagatgagccagagcgacagcggcgtggacctgagcggggacagccaggtgagcagcggcccctgcagccagaggagcagcccagatggcggcctgaagggagctgctgagggcccccccaagaggcctgggggcagcagccccctgaatgctgtgccctgtgagggccccccaggcagcgagcccccaagaagacctcctccagcccctcatgatggagacaggaaggagctgccccgggagcagcccctgcccccaggccccatcggcacagagaggagccagaggacagaccggggcacagagcccggccccatccggcccagccacaggcctggcccccctgtgcagtttggcaccagtgacaaggacagcgacctgcggctggtggtgggggacagcctgaaggccgagaaggagctgacagcctctgtgacagaggccatccctgtgtcccgggactgggagctgctgcccagcgctgctgccagcgctgagccccagagcaagaacctggacagcggccactgtgtgcctgagcccagcagcagcggccagaggctgtacccagaggtgttctacggcagcgctggccccagcagcagccagatcagcggcggccacggcctgagcatcaccagcaagcagtggaggaggcctggcacccccagcctgcacccctaccgcagccagcccctgtacctgcccccaggccctgccccacccagcgccctgctgagcggcgtggccctgaagggccagttcctggacttcagcaccatgcaggccacagagctgggcaagctgcctgctgggggcgtgctgtacccacctccttccttcctgtacagccctgccttctgccccagccccctgcctgacaccagcctgctgcaggtgcggcaggacctgcccagccccagcgacttctacagcacccccctgcagcccggcggccagagcggcttcctgcccagcggggccccagcccagcagatgctgctgcccatggtggacagccagctgcctgtggtgaactttggcagcctgcccccagcccctcctccagcccccccacccctgagcctgctgcctgtgggccctgccctgcagccccccagcctggccgtgcggcccccaccagccccagccaccagggtgctgcccagccctgcccggcccttccctgccagcctgggccgggcagagctgcaccctgtggagctgaagcccttccaggactaccagaagctgagcagcaacctgggcggccctggcagcagcaggaccccacccaccggccgctccttcagcggcctgaacagccggctgaaggccacccccagcacctacagcggggtcttccgcacccagagggtggacctgtaccagcaggccagccccccagatgccctgcgctggatccccaagccctgggagaggactggacctccaccccgggagggccccagcagaagagctgaggagcccggcagcagaggagacaaggagcccggcctgcccccacccaggtag

SEQ ID NO: 165455 - DNA, 4149 bp, synthetic construct
  misc_feature 1..4149: note = Description of Artificial Sequence: Synthetic coding sequence
  source 1..4149: mol_type = other DNA
atgctgcgggagcggggcaccccacctgtggaccccaagctggcctgggtgggagatgtgttcaccgccaccccagctgagccccggcccctgaccagccccctgcggcaggccgcagatgaagatgacaagggcatgaggtctgagaccccacctgtgcccccacctccaccctacctggccagctacccaggcttcccagaaaatggagcccctggcccccccatcagccgcttccccctggaggagcccggcccccggcccctgccctggcccccaggcagtgatgaggtggccaagatccagaccccaccacccaagaaggagccccccaaggaggagacagcccagctgactggacctgaggccggcaggaagccagcccggggcgtgggcagcggcggccagggccccccaccaccccggcgggagagcaggacagagacccgctggggccccaggcctggcagcagcagaagaggcatccccccagaggagcccggggccccaccccggcgggccggccccatcaagaagcccccaccacccaccaaggtggaggagctgccccccaagcccctggagcagggagatgagacccccaagccacccaagccagaccccctgaagatcaccaagggcaagctgggcggccccaaggagaccccaccaaatggaaacctgagccctgccccccggctgcggcgggactacagctatgaaagagtgggccccaccagctgccggggccggggccgcggggagtactttgcccggggccggggcttccggggcacctatggaggccggggccgcggggcccggagccgggagttccgcagctaccgggagttcagaggagatgatggccggggcggcggcactggaggccccaaccaccccccagccccccggggccgcacagccagcgagaccaggtctgagggctctgaatatgaggagatccccaagagaagacggcagaggggcagcgagactggaagtgagacccatgaaagtgacctggcccccagcgacaaggaggcccccacccccaaggagggcaccctgacccaggtgcccctggcccctcctcctcctggggccccacccagccctgccccagcccgcttcaccgcccggggcggccgggtcttcaccccccggggcgtgcccagccggcggggccggggcggcggccggcccccaccccaggtgtgccccggctggagccccccagccaagagcctggcccccaagaagccacccaccggccccctgccccccagcaaggagcccctgaaggagaagctgatccctggccccctgagccctgtggcccggggcggcagcaatggaggcagcaatgtgggcatggaggatggagagcggcccaggagaagaagacatggccgggcccagcagcaggacaagcccccacgcttccggcggctgaagcaggagcgggagaatgctgcccggggcagcgagggcaagcccagcctgaccctgcctgccagcgcccctggccctgaggaggccctgaccaccgtgacagtggccccagcccccaggagagctgctgccaagagcccagacctgagcaaccagaacagcgaccaggccaatgaggagtgggagacagccagcgagagcagtgacttcaccagcgagaggagaggagacaaggaggcccctcctcctgtgctgctgacccccaaggctgtgggcaccccaggcggcggcggcggcggcgctgtgcccggcatcagcgccatgagcagaggagacctgagccagagggccaaggacctgagcaagaggagcttcagcagccagaggcctggcatggagcggcagaacagaagacctggccctgggggcaaggccggcagcagcggcagcagcagcggcggcggcggcggcggccctgggggccgcacaggccctggccgcggggacaagaggtcctggcccagccccaagaacagaagcaggcctcctgaggagcggcccccaggcctgcccctgcccccacctccacccagcagcagcgctgtgttccggctggaccaggtgatccacagcaacccagctggcatccagcaggccctggcccagctgagcagccggcagggctctgtgacagcccctgggggccaccccaggcacaagccaggcctgccccaggccccccagggccccagccccaggcctcccaccaggtatgagccccagagggtgaacagcggcctgagcagtgacccccactttgaggagcccggccccatggtgcggggcgtgggcggcaccccccgggacagcgctggggtgagccccttcccccccaagagaagagagaggcctcccaggaagccagagctgctgcaggaggagagcctgcccccaccccacagcagcggcttcctgggcagcaagccagagggccctggcccccaggccgagagccgggacaccggcacagaggccctgaccccccacatctggaaccggctgcacacagccaccagcaggaagagctaccggcccagctccatggagccctggatggagcccctgagcccctttgaagatgtggccggcacagagatgagccagagcgacagcggcgtggacctgagcggggacagccaggtgagcagcggcccctgcagccagaggagcagcccagatggcggcctgaagggagctgctgagggcccccccaagaggcctgggggcagcagccccctgaatgctgtgccctgtgagggccccccaggcagcgagcccccaagaagacctcctccagcccctcatgatggagacaggaaggagctgccccgggagcagcccctgcccccaggccccatcggcacagagaggagccagaggacagaccggggcacagagcccggccccatccggcccagccacaggcctggcccccctgtgcagtttggcaccagtgacaaggacagcgacctgcggctggtggtgggggacagcctgaaggccgagaaggagctgacagcctctgtgacagaggccatccctgtgtcccgggactgggagctgctgcccagcgctgctgccagcgctgagccccagagcaagaacctggacagcggccactgtgtgcctgagcccagcagcagcggccagaggctgtacccagaggtgttctacggcagcgctggccccagcagcagccagatcagcggcggggccatggacagccagctgcaccccaacagcggcggcttccggcccggcacccccagcctgcacccctaccgcagccagcccctgtacctgcccccaggccctgccccacccagcgccctgctgagcggcgtggccctgaagggccagttcctggacttcagcaccatgcaggccacagagctgggcaagctgcctgctgggggcgtgctgtacccacctccttccttcctgtacagccctgccttctgccccagccccctgcctgacaccagcctgctgcaggtgcggcaggacctgcccagccccagcgacttctacagcacccccctgcagcccggcggccagagcggcttcctgcccagcggggccccagcccagcagatgctgctgcccatggtggacagccagctgcctgtggtgaactttggcagcctgcccccagcccctcctccagcccccccacccctgagcctgctgcctgtgggccctgccctgcagccccccagcctggccgtgcggcccccaccagccccagccaccagggtgctgcccagccctgcccggcccttccctgccagcctgggccgggcagagctgcaccctgtggagctgaagcccttccaggactaccagaagctgagcagcaacctgggcggccctggcagcagcaggaccccacccaccggccgctccttcagcggcctgaacagccggctgaaggccacccccagcacctacagcggggtcttccgcacccagagggtggacctgtaccagcaggccagccccccagatgccctgcgctggatccccaagccctgggagaggactggacctccaccccgggagggccccagcagaagagctgaggagcccggcagcagaggagacaaggagcccggcctgcccccacccaggtag

SEQ ID NO: 165456 - DNA, 6450 bp, synthetic construct
  misc_feature 1..6450: note = Description of Artificial Sequence: Synthetic coding sequence
  source 1..6450: mol_type = other DNA
atgtctgacagaagtggccccacagccaagggcaaggatggcaagaagtacagcagcctgaacctgtttgacacctacaagggcaagagcctggagatccagaagccagctgtggcccccaggcatggcctgcagagcctgggcaaggtggccatcgcccggaggatgcctcctccagccaacctgcccagcctgaaggccgagaacaagggaaatgaccccaacgtgtccctggtgcccaaggatggcaccggctgggccagcaagcaggagcagagcgaccccaagagcagtgatgccagcacagcccagcccccagagagccagcccctgcctgccagccagaccccagccagcaaccagcccaagaggcctcctgctgcccctgagaacacccccctggtgcccagcggcgtgaagtcctgggcccaggcctctgtgacccatggagcccatggagatggcggccgggccagcagcctgctgagccgcttcagccgggaggagttccccaccctgcaggccgccggggaccaggacaaggccgccaaggagcgggagagcgctgagcagagcagcggccctggccccagcctgcggccccagaacagcaccacctggagagatggcggcggccggggcccagatgagctggagggccctgacagcaagctgcaccacggccatgacccccggggcggcctgcagcccagcggccccccccagttccccccctaccggggcatgatgccacccttcatgtacccaccctacctgcccttccccccaccctacggcccccagggcccctaccgctaccccaccccagatggccccagccgcttcccccgggtggccggcccccggggcagcggcccccccatgaggctggtggagcctgtgggccggcccagcatcctgaaggaggacaacctgaaggagtttgaccagctggaccaggagaatgatgatggctgggccggggcccacgaggaggtggactacacagagaagctgaagttcagtgatgaagaagatggccgggacagtgatgaggagggcgctgagggccaccgggacagccagagcgccagcggggaggagcggcccccagaggctgatggcaagaagggcaacagccccaacagcgagccccccacccccaagacagcctgggccgagaccagccggcccccagagacagagcccggccccccagcccccaagccacccctgcccccaccccaccggggccctgctggcaactggggccccccaggggactacccagacagaggaggccccccctgcaagcccccagccccagaagatgaagatgaggcctggaggcagaggaggaagcagagcagcagcgagatcagcctggccgtggagcgggccaggagaagaagagaggaggaggagaggaggatgcaggaggagcggcgggccgcctgtgccgagaagctgaagaggctggatgagaagtttggagccccagacaagaggctgaaggccgagcctgctgcccctcctgctgcccccagcaccccagcccctcctcctgctgtgcccaaggagctgcctgcccccccagcccctcctccagccagcgcccccaccccagagaaggagcctgaggagcccgcccaggcccccccagcccagagcacccccaccccaggagtggccgccgcccccaccctggtgtctgggggcggcagcaccagcagcaccagcagcggcagctttgaggccagccctgtggagccccagctgcccagcaaggagggccctgagcccccagaggaggtgcccccacccaccaccccacctgtgcccaaggtggagcccaagggagatggcatcggccccacccggcagccccccagccagggcctgggctaccccaagtaccagaagagcctgcccccacgcttccagaggcagcagcaggagcagctgctgaagcagcagcagcagcaccagtggcagcagcaccagcagggcagcgccccacccacccctgtgccccccagccccccccagcctgtgaccctgggcgctgtgcctgccccccaggcccctcctcctccacccaaggccctgtacccaggggccctgggccggcccccacccatgccacccatgaactttgacccccgctggatgatgatccccccctacgtggacccccggctgctgcagggccggccccccctggacttctacccacctggggtgcaccccagcggcctggtgccccgggagaggagtgacagcggcggcagcagcagcgagccctttgacagacatgccccagccatgctgcgggagcggggcaccccacctgtggaccccaagctggcctgggtgggagatgtgttcaccgccaccccagctgagccccggcccctgaccagccccctgcggcaggccgcagatgaagatgacaagggcatgaggtctgagaccccacctgtgcccccacctccaccctacctggccagctacccaggcttcccagaaaatggagcccctggcccccccatcagccgcttccccctggaggagcccggcccccggcccctgccctggcccccaggcagtgatgaggtggccaagatccagaccccaccacccaagaaggagccccccaaggaggagacagcccagctgaccggccctgaggccggcaggaagccagcccggggcgtgggcagcggcggccagggccccccacctccaagaagagagagcaggacagagacccgctggggcccccggcccggcagcagccggcggggcatccccccagaggagcccggggcccccccaagaagagctggccccatcaagaagcccccaccacccaccaaggtggaggagctgccccccaagcccctggagcagggagatgagacccccaagccacccaagccagaccccctgaagatcaccaagggcaagctgggcggccccaaggagaccccacccaacggcaacctgagccctgccccccggctgcggcgggactacagctatgagcgggtgggccccaccagctgccggggccggggccgcggggagtactttgcccggggccggggcttccggggcacctacggcggccggggcagaggagctgctggcaacagcgctgtgacagagagctttgaggagatgatgggcgtggaggtgggccagggcgaccagaccaccctgctgctgcctgaggccgccctgcctgcccggcacggggcccgggtgcagagcatgaggaagagccccagcggggccggcagcggggcccagaagcaggccgcccggcccatgagggtcatctggctgctgcagacccggcggctgccccacccccggcgggagcacagccccaggagccgcagccccaccaccaggagccccaccttccctgccccagcccgcttcaccccaggagtgggggagagcagcctgcctgagggcatcagccctggccccaggagaagagagcccccccaggtgtgccccggctggagccccccagccaagagcctggcccccaagaagcccccaacaggccccctgccccccagcaaggagcccctgaaggagaagctgatccctggccccctgagccctgtggcccggggcggcagcaatggaggcagcaatgtgggcatggaggatggagagcggcccaggagaagaagacatggccgggcccagcagcaggacaagccaccccgcttccggcggctgaagcaggagagagaaaatgctgcccggggcagcgagggcaagcccagcctgaccctgcctgccagcgcccctggccctgaggaggccctgaccaccgtgacagtggccccagccccccggcgggctgctgccaagagcccagacctgagcaaccagaacagcgaccaggccaatgaggagtgggagacagccagcgagagcagtgacttcaccagcgagcggcggggggacaaggaggcccctcctcctgtgctgctgacccccaaggctgtgggcacccctgggggcggcggcggcggcgctgtgcccggcatcagcgccatgagcagaggagacctgagccagagggccaaggacctgagcaagaggagcttcagcagccagaggcctggcatggagcggcagaacagaagacctggccctgggggcaaggccggcagcagcggcagcagcagcggcggcggcggcggcggccctgggggccgcactggacctggccgcggggacaagaggtcctggcccagccccaagaacagaagccggcccccagaggagaggcctcctggcctgcccctgcccccacctccacccagcagcagcgctgtgttccggctggaccaggtgatccacagcaacccagctggcatccagcaggccctggcccagctgagcagccggcagggctctgtgacagcccctgggggccaccccaggcacaagccaggccccccccaggccccccagggccccagcccccggccccccaccaggtatgagccccagagggtgaacagcggcctgagcagtgacccccactttgaggagcccggccccatggtgcggggcgtgggcggcaccccccgggacagcgctggggtgagccccttcccccccaagaggcgggagcggccccccaggaagccagagctgctgcaggaggagagcctgcccccaccccacagcagcggcttcctgggcagcaagccagagggccctggcccccaggccgagagccgggacacaggaacagaggccctgaccccccacatctggaaccggctgcacacagccaccagcaggaagagctaccggcccagctccatggagccctggatggagcccctgagcccctttgaagatgtggccggcacagagatgagccagagcgacagcggcgtggacctgagcggggacagccaggtgagcagcggcccctgcagccagaggagcagcccagatggcggcctgaagggagctgctgagggcccccccaagaggcctgggggcagcagccccctgaatgctgtgccctgtgagggccccccaggcagcgagcccccccggcggcccccaccagcccctcatgatggagacaggaaggagctgccccgggagcagcccctgcccccaggccccatcggcacagagaggagccagaggacagaccggggcacagagcccggccccatccggcccagccaccggcccggcccccctgtgcagtttggcaccagtgacaaggacagcgacctgcggctggtggtgggggacagcctgaaggccgagaaggagctgacagcctctgtgacagaggccatccctgtgtcccgggactgggagctgctgcccagcgctgctgccagcgctgagccccagagcaagaacctggacagcggccactgtgtgcctgagcccagcagcagcggccagaggctgtacccagaggtgttctacggcagcgctggccccagcagcagccagatcagcggcggccacggcctgagcatcaccagcaagcagtggaggcggcccggcacccccagcctgcacccctaccgcagccagcccctgtacctgcccccaggccctgcccctccttctgccctgctgtctggagtggccctgaagggccagttcctggacttcagcaccatgcaggccacagagctgggcaagctgcctgctggaggagtgctgtaccccccacccagcttcctgtacagccctgccttctgccccagccccctgcctgacaccagcctgctgcaggtgcggcaggacctgcccagccccagcgacttctacagcacccccctgcagcccggcggccagagcggcttcctgcccagcggggccccagcccagcagatgctgctgcccatggtggacagccagctgcctgtggtgaactttggcagcctgcccccagcccctcctccagcccccccacccctgagcctgctgcctgtgggccctgccctgcagccccccagcctggccgtgcggcccccaccagccccagccaccagggtgctgcccagccctgcccggcccttccctgccagcctgggccgggcagagctgcaccctgtggagctgaagcccttccaggactaccagaagctgagcagcaacctgggcggccctggcagcagcaggaccccacccaccggccgctccttcagcggcctgaacagccggctgaaggccacccccagcacctacagcggggtcttccgcacccagagggtggacctgtaccagcaggccagccccccagatgccctgcgctggatccccaagccctgggagaggacaggccccccaccccgggagggccccagccggcgggcagaggagcccggcagcagaggagacaaggagcccggcctgcccccaccaagatag

SEQ ID NO: 165457 - DNA, 6450 bp, synthetic construct
  misc_feature 1..6450: note = Description of Artificial Sequence: Synthetic coding sequence
  source 1..6450: mol_type = other DNA
atgtctgacagaagtggccccacagccaagggcaaggatggcaagaagtacagcagcctgaacctgtttgacacctacaagggcaagagcctggagatccagaagccagctgtggcccccaggcatggcctgcagagcctgggcaaggtggccatcgcccggaggatgcctcctccagccaacctgcccagcctgaaggccgagaacaagggaaatgaccccaacgtgtccctggtgcccaaggatggcaccggctgggccagcaagcaggagcagagcgaccccaagagcagtgatgccagcacagcccagcccctggagagccagcccctgcctgccagccagaccccagccagcaaccagcccaagaggcctcctgctgcccctgagaacacccccctggtgcccagcggcgtgaagtcctgggcccaggcctctgtgacccatggagcccatggagatggcggccgggccagcagcctgctgagccgcttcagccgggaggagttccccaccctgcaggccgccggggaccaggacaaggccgccaaggagcgggagagcgctgagcagagcagcggccctggccccagcctgcggccccagaacagcaccacctggagagatggcggcggccggggcccagatgagctggagggccctgacagcaagctgcaccacggccatgacccccggggcggcctgcagcccagcggccccccccagttccccccctaccggggcatgatgccacccttcatgtacccaccctacctgcccttccccccaccctacggcccccagggcccctaccgctaccccaccccagatggccccagccgcttcccccgggtggccggcccccggggcagcggcccccccatgaggctggtggagcctgtgggccggcccagcatcctgaaggaggacaacctgaaggagtttgaccagctggaccaggagaatgatgatggctgggccggggcccacgaggaggtggactacacagagaagctgaagttcagtgatgaagaagatggccgggacagtgatgaggagggcgctgagggccaccgggacagccagagcgccagcggggaggagcggcccccagaggctgatggcaagaagggcaacagccccaacagcgagccccccacccccaagacagcctgggccgagaccagccggcccccagagacagagcccggccccccagcccccaagccacccctgcccccaccccaccggggccctgctggcaactggggccccccaggggactacccagacagaggaggccccccctgcaagcccccagccccagaagatgaagatgaggcctggaggcagaggaggaagcagagcagcagcgagatcagcctggccgtggagcgggccaggagaagaagagaggaggaggagaggaggatgcaggaggagcggcgggccgcctgtgccgagaagctgaagaggctggatgagaagtttggagccccagacaagaggctgaaggccgagcctgctgcccctcctgctgcccccagcaccccagcccctcctcctgctgtgcccaaggagctgcctgcccccccagcccctcctccagccagcgcccccaccccagagaaggagcctgaggagcccgcccaggcccccccagcccagagcacccccaccccaggagtggccgccgcccccaccctggtgtctgggggcggcagcaccagcagcaccagcagcggcagctttgaggccagccctgtggagccccagctgcccagcaaggagggccctgagcccccagaggaggtgcccccacccaccaccccacctgtgcccaaggtggagcccaagggagatggcatcggccccacccggcagccccccagccagggcctgggctaccccaagtaccagaagagcctgcccccacgcttccagaggcagcagcaggagcagctgctgaagcagcagcagcagcaccagtggcagcagcaccagcagggcagcgccccacccacccctgtgccccccagccccccccagcctgtgaccctgggcgctgtgcctgccccccaggcccctcctcctccacccaaggccctgtacccaggggccctgggccggcccccacccatgccacccatgaactttgacccccgctggatgatgatccccccctacgtggacccccggctgctgcagggccggccccccctggacttctacccacctggggtgcaccccagcggcctggtgccccgggagaggagtgacagcggcggcagcagcagcgagccctttgacagacatgccccagccatgctgcgggagcggggcaccccacctgtggaccccaagctggcctgggtgggagatgtgttcaccgccaccccagctgagccccggcccctgaccagccccctgcggcaggccgcagatgaagatgacaagggcatgaggtctgagaccccacctgtgcccccacctccaccctacctggccagctacccaggcttcccagaaaatggagcccctggcccccccatcagccgcttccccctggaggagcccggcccccggcccctgccctggcccccaggcagtgatgaggtggccaagatccagaccccaccacccaagaaggagccccccaaggaggagacagcccagctgaccggccctgaggccggcaggaagccagcccggggcgtgggcagcggcggccagggccccccacctccaagaagagagagcaggacagagacccgctggggcccccggcccggcagcagccggcggggcatccccccagaggagcccggggcccccccaagaagagctggccccatcaagaagcccccaccacccaccaaggtggaggagctgccccccaagcccctggagcagggagatgagacccccaagccacccaagccagaccccctgaagatcaccaagggcaagctgggcggccccaaggagaccccacccaacggcaacctgagccctgccccccggctgcggcgggactacagctatgagcgggtgggccccaccagctgccggggccggggccgcggggagtactttgcccggggccggggcttccggggcacctacggcggccggggcagaggagctgctggcaacagcgctgtgacagagagctttgaggagatgatgggcgtggaggtgggccagggcgaccagaccaccctgctgctgcctgaggccgccctgcctgcccggcacggggcccgggtgcagagcatgaggaagagccccagcggggccggcagcggggcccagaagcaggccgcccggcccatgagggtcatctggctgctgcagacccggcggctgccccacccccggcgggagcacagccccaggagccgcagccccaccaccaggagccccaccttccctgccccagcccgcttcaccccaggagtgggggagagcagcctgcctgagggcatcagccctggccccaggagaagagagcccccccaggtgtgccccggctggagccccccagccaagagcctggcccccaagaagcccccaacaggccccctgccccccagcaaggagcccctgaaggagaagctgatccctggccccctgagccctgtggcccggggcggcagcaatggaggcagcaatgtgggcatggaggatggagagcggcccaggagaagaagacatggccgggcccagcagcaggacaagccaccccgcttccggcggctgaagcaggagagagaaaatgctgcccggggcagcgagggcaagcccagcctgaccctgcctgccagcgcccctggccctgaggaggccctgaccaccgtgacagtggccccagccccccggcgggctgctgccaagagcccagacctgagcaaccagaacagcgaccaggccaatgaggagtgggagacagccagcgagagcagtgacttcaccagcgagcggcggggggacaaggaggcccctcctcctgtgctgctgacccccaaggctgtgggcacccctgggggcggcggcggcggcgctgtgcccggcatcagcgccatgagcagaggagacctgagccagagggccaaggacctgagcaagaggagcttcagcagccagaggcctggcatggagcggcagaacagaagacctggccctgggggcaaggccggcagcagcggcagcagcagcggcggcggcggcggcggccctgggggccgcactggacctggccgcggggacaagaggtcctggcccagccccaagaacagaagccggcccccagaggagaggcctcctggcctgcccctgcccccacctccacccagcagcagcgctgtgttccggctggaccaggtgatccacagcaacccagctggcatccagcaggccctggcccagctgagcagccggcagggctctgtgacagcccctgggggccaccccaggcacaagccaggccccccccaggccccccagggccccagcccccggccccccaccaggtatgagccccagagggtgaacagcggcctgagcagtgacccccactttgaggagcccggccccatggtgcggggcgtgggcggcaccccccgggacagcgctggggtgagccccttcccccccaagaggcgggagcggccccccaggaagccagagctgctgcaggaggagagcctgcccccaccccacagcagcggcttcctgggcagcaagccagagggccctggcccccaggccgagagccgggacacaggaacagaggccctgaccccccacatctggaaccggctgcacacagccaccagcaggaagagctaccggcccagctccatggagccctggatggagcccctgagcccctttgaagatgtggccggcacagagatgagccagagcgacagcggcgtggacctgagcggggacagccaggtgagcagcggcccctgcagccagaggagcagcccagatggcggcctgaagggagctgctgagggcccccccaagaggcctgggggcagcagccccctgaatgctgtgccctgtgagggccccccaggcagcgagcccccccggcggcccccaccagcccctcatgatggagacaggaaggagctgccccgggagcagcccctgcccccaggccccatcggcacagagaggagccagaggacagaccggggcacagagcccggccccatccggcccagccaccggcccggcccccctgtgcagtttggcaccagtgacaaggacagcgacctgcggctggtggtgggggacagcctgaaggccgagaaggagctgacagcctctgtgacagaggccatccctgtgtcccgggactgggagctgctgcccagcgctgctgccagcgctgagccccagagcaagaacctggacagcggccactgtgtgcctgagcccagcagcagcggccagaggctgtacccagaggtgttctacggcagcgctggccccagcagcagccagatcagcggcggccacggcctgagcatcaccagcaagcagtggaggcggcccggcacccccagcctgcacccctaccgcagccagcccctgtacctgcccccaggccctgcccctccttctgccctgctgtctggagtggccctgaagggccagttcctggacttcagcaccatgcaggccacagagctgggcaagctgcctgctggaggagtgctgtaccccccacccagcttcctgtacagccctgccttctgccccagccccctgcctgacaccagcctgctgcaggtgcggcaggacctgcccagccccagcgacttctacagcacccccctgcagcccggcggccagagcggcttcctgcccagcggggccccagcccagcagatgctgctgcccatggtggacagccagctgcctgtggtgaactttggcagcctgcccccagcccctcctccagcccccccacccctgagcctgctgcctgtgggccctgccctgcagccccccagcctggccgtgcggcccccaccagccccagccaccagggtgctgcccagccctgcccggcccttccctgccagcctgggccgggcagagctgcaccctgtggagctgaagcccttccaggactaccagaagctgagcagcaacctgggcggccctggcagcagcaggaccccacccaccggccgctccttcagcggcctgaacagccggctgaaggccacccccagcacctacagcggggtcttccgcacccagagggtggacctgtaccagcaggccagccccccagatgccctgcgctggatccccaagccctgggagaggacaggccccccaccccgggagggccccagccggcgggcagaggagcccggcagcagaggagacaaggagcccggcctgcccccaccaagatag

SEQ ID NO: 165458 - DNA, 4149 bp, synthetic construct
  misc_feature 1..4149: note = Description of Artificial Sequence: Synthetic coding sequence
  source 1..4149: mol_type = other DNA
atgctgcgggagcggggcaccccacctgtggaccccaagctggcctgggtgggagatgtgttcaccgccaccccagctgagccccggcccctgaccagccccctgcggcaggccgcagatgaagatgacaagggcatgaggtctgagaccccacctgtgcccccacctccaccctacctggccagctacccaggcttcccagaaaatggagcccctggcccccccatcagccgcttccccctggaggagcccggcccccggcccctgccctggcccccaggcagtgatgaggtggccaagatccagaccccaccacccaagaaggagccccccaaggaggagacagcccagctgactggacctgaggccggcaggaagccagcccggggcgtgggcagcggcggccagggccccccaccaccccggcgggagagcaggacagagacccgctggggccccaggcctggcagcagcagaagaggcatccccccagaggagcccggggccccaccccggcgggccggccccatcaagaagcccccaccacccaccaaggtggaggagctgccccccaagcccctggagcagggagatgagacccccaagccacccaagccagaccccctgaagatcaccaagggcaagctgggcggccccaaggagaccccaccaaatggaaacctgagccctgccccccggctgcggcgggactacagctatgaaagagtgggccccaccagctgccggggccggggccgcggggagtactttgcccggggccggggcttccggggcacctatggaggccggggccgcggggcccggagccgggagttccgcagctaccgggagttcagaggagatgatggccggggcggcggcactggaggccccaaccaccccccagccccccggggccgcacagccagcgagaccaggtctgagggctctgaatatgaggagatccccaagagaagacggcagaggggcagcgagactggaagtgagacccatgaaagtgacctggcccccagcgacaaggaggcccccacccccaaggagggcaccctgacccaggtgcccctggcccctcctcctcctggggccccacccagccctgccccagcccgcttcaccgcccggggcggccgggtcttcaccccccggggcgtgcccagccggcggggccggggcggcggccggcccccaccccaggtgtgccccggctggagccccccagccaagagcctggcccccaagaagccacccaccggccccctgccccccagcaaggagcccctgaaggagaagctgatccctggccccctgagccctgtggcccggggcggcagcaatggaggcagcaatgtgggcatggaggatggagagcggcccaggagaagaagacatggccgggcccagcagcaggacaagcccccacgcttccggcggctgaagcaggagcgggagaatgctgcccggggcagcgagggcaagcccagcctgaccctgcctgccagcgcccctggccctgaggaggccctgaccaccgtgacagtggccccagcccccaggagagctgctgccaagagcccagacctgagcaaccagaacagcgaccaggccaatgaggagtgggagacagccagcgagagcagtgacttcaccagcgagaggagaggagacaaggaggcccctcctcctgtgctgctgacccccaaggctgtgggcaccccaggcggcggcggcggcggcgctgtgcccggcatcagcgccatgagcagaggagacctgagccagagggccaaggacctgagcaagaggagcttcagcagccagaggcctggcatggagcggcagaacagaagacctggccctgggggcaaggccggcagcagcggcagcagcagcggcggcggcggcggcggccctgggggccgcacaggccctggccgcggggacaagaggtcctggcccagccccaagaacagaagcaggcctcctgaggagcggcccccaggcctgcccctgcccccacctccacccagcagcagcgctgtgttccggctggaccaggtgatccacagcaacccagctggcatccagcaggccctggcccagctgagcagccggcagggctctgtgacagcccctgggggccaccccaggcacaagccaggccccccccaggccccccagggccccagccccaggcctcccaccaggtatgagccccagagggtgaacagcggcctgagcagtgacccccactttgaggagcccggccccatggtgcggggcgtgggcggcaccccccgggacagcgctggggtgagccccttcccccccaagagaagagagaggcctcccaggaagccagagctgctgcaggaggagagcctgcccccaccccacagcagcggcttcctgggcagcaagccagagggccctggcccccaggccgagagccgggacaccggcacagaggccctgaccccccacatctggaaccggctgcacacagccaccagcaggaagagctaccggcccagctccatggagccctggatggagcccctgagcccctttgaagatgtggccggcacagagatgagccagagcgacagcggcgtggacctgagcggggacagccaggtgagcagcggcccctgcagccagaggagcagcccagatggcggcctgaagggagctgctgagggcccccccaagaggcctgggggcagcagccccctgaatgctgtgccctgtgagggccccccaggcagcgagcccccaagaagacctcctccagcccctcatgatggagacaggaaggagctgccccgggagcagcccctgcccccaggccccatcggcacagagaggagccagaggacagaccggggcacagagcccggccccatccggcccagccacaggcctggcccccctgtgcagtttggcaccagtgacaaggacagcgacctgcggctggtggtgggggacagcctgaaggccgagaaggagctgacagcctctgtgacagaggccatccctgtgtcccgggactgggagctgctgcccagcgctgctgccagcgctgagccccagagcaagaacctggacagcggccactgtgtgcctgagcccagcagcagcggccagaggctgtacccagaggtgttctacggcagcgctggccccagcagcagccagatcagcggcggggccatggacagccagctgcaccccaacagcggcggcttccggcccggcacccccagcctgcacccctaccgcagccagcccctgtacctgcccccaggccctgccccacccagcgccctgctgagcggcgtggccctgaagggccagttcctggacttcagcaccatgcaggccacagagctgggcaagctgcctgctgggggcgtgctgtacccacctccttccttcctgtacagccctgccttctgccccagccccctgcctgacaccagcctgctgcaggtgcggcaggacctgcccagccccagcgacttctacagcacccccctgcagcccggcggccagagcggcttcctgcccagcggggccccagcccagcagatgctgctgcccatggtggacagccagctgcctgtggtgaactttggcagcctgcccccagcccctcctccagcccccccacccctgagcctgctgcctgtgggccctgccctgcagccccccagcctggccgtgcggcccccaccagccccagccaccagggtgctgcccagccctgcccggcccttccctgccagcctgggccgggcagagctgcaccctgtggagctgaagcccttccaggactaccagaagctgagcagcaacctgggcggccctggcagcagcaggaccccacccaccggccgctccttcagcggcctgaacagccggctgaaggccacccccagcacctacagcggggtcttccgcacccagagggtggacctgtaccagcaggccagccccccagatgccctgcgctggatccccaagccctgggagaggactggacctccaccccgggagggccccagcagaagagctgaggagcccggcagcagaggagacaaggagcccggcctgcccccacccaggtag

SEQ ID NO: 165459 - DNA, 4149 bp, synthetic construct; identical to SEQ ID NO: 165458
  misc_feature 1..4149: note = Description of Artificial Sequence: Synthetic coding sequence
  source 1..4149: mol_type = other DNA

SEQ ID NO: 165460 - DNA, 6450 bp, synthetic construct; identical to SEQ ID NO: 165446
  misc_feature 1..6450: note = Description of Artificial Sequence: Synthetic coding sequence
  source 1..6450: mol_type = other DNA

SEQ ID NO: 165461 - DNA, 4149 bp, synthetic construct; identical to SEQ ID NO: 165449
  misc_feature 1..4149: note = Description of Artificial Sequence: Synthetic coding sequence
  source 1..4149: mol_type = other DNA

SEQ ID NO: 165462 - DNA, 6450 bp, synthetic construct; identical to SEQ ID NO: 165446
  misc_feature 1..6450: note = Description of Artificial Sequence: Synthetic coding sequence
  source 1..6450: mol_type = other DNA

SEQ ID NO: 165463 - DNA, 1650 bp, synthetic construct; identical to SEQ ID NO: 165444
  misc_feature 1..1650: note = Description of Artificial Sequence: Synthetic coding sequence
  source 1..1650: mol_type = other DNA

SEQ ID NO: 165464 - DNA, 1650 bp, synthetic construct; identical to SEQ ID NO: 165444
  misc_feature 1..1650: note = Description of Artificial Sequence: Synthetic coding sequence
  source 1..1650: mol_type = other DNA

SEQ ID NO: 165465 - DNA, 4149 bp, synthetic construct; identical to SEQ ID NO: 165449
  misc_feature 1..4149: note = Description of Artificial Sequence: Synthetic coding sequence
  source 1..4149: mol_type = other DNA

SEQ ID NO: 165466 - DNA, 984 bp, synthetic construct
  misc_feature 1..984: note = Description of Artificial Sequence: Synthetic coding sequence
  source 1..984: mol_type = other DNA
atgacagtggtgtctgtgccccagcgggagcccctggtgctgggcggccgcctggcccccctgggcttcagcagccggggctactttggagccctgcccatggtgaccacagcccccccacccctgccccgcatcccagacccccgggccctgccccccaccctcttcctgccccacttcctgggcggagatggcccctgcctgaccccccagccccgggccccagctgccctgcccaacagaagcctggccgtggccggcggcaccccccgggccgcccccaagaagaggaggaagaagaaggtgcgggccagccctgctggccagctgcccagccgcttccaccagtaccagcagcaccggcccagcctggagggcggccgcagccctgccaccggccccagcggggcccaggaggtgcccggccctgctgctgccctggcccccagccctgctgctgctgctggaacagaaggagccagcccagacctggcccccctgcggcctgctgcccctggccagacccccctgaggaaggaggtgctgaagagcaagatgggcaagtctgagaagatcgccctgccccacggccagctggtgcacggcatccacctgtatgagcagcccaagatcaaccggcagaagagcaagtacaacctgcccctgaccaagatcaccagcgccaagagaaatgaaaacaacttctggcaggacagcgtgtccagtgaccgcatccagaagcaggagaagaagcccttcaagaacacagagaacatcaagaacagccacctgaagaagagcgccttcctgacagaggtgtcccagaaggaaaattatgctggggccaagttcagtgacccccccagccccagcgtgctgcccaagccacccagccactggatgggcagcacagtggagaacagcaaccagaaccgggagctgatggctgtgcacctgaagaccctgctgaaggtgcagacctag

SEQ ID NO: 165467 - DNA, 429 bp, synthetic construct
  misc_feature 1..429: note = Description of Artificial Sequence: Synthetic coding sequence
  source 1..429: mol_type = other DNA
atgggcaagtctgagaagatcgccctgccccacggccagctggtgcacggcatccacctgtatgagcagcccaagatcaaccggcagaagagcaagtacaacctgcccctgaccaagatcaccagcgccaagagaaatgaaaacaacttctggcaggacagcgtgtccagtgaccgcatccagaagcaggagaagaagcccttcaagaacacagagaacatcaagaacagccacctgaagaagagcgccttcctgacagaggtgtcccagaaggagaactatgctggggccaagttcagtgacccccccagccccagcgtgctgcccaagccacccagccactggatgggcagcacagtggagaacagcaaccagaaccgggagctgatggctgtgcacctgaagaccctgctgaaggtgcagacctag

SEQ ID NO: 165468 - DNA, 429 bp, synthetic construct; identical to SEQ ID NO: 165467
  misc_feature 1..429: note = Description of Artificial Sequence: Synthetic coding sequence
  source 1..429: mol_type = other DNA

SEQ ID NO: 165469 - DNA, 420 bp, synthetic construct
  misc_feature 1..420: note = Description of Artificial Sequence: Synthetic coding sequence
  source 1..420: mol_type = other DNA
atgggcggcggggagcgctacaacatcccagccccccagagcagaaatgtgtccaagaaccagcagcagctgaaccggcagaagaccaaggagcagaacagccagatgaagatcgtgcacaagaagaaggagcggggccacggctacaacagcagcgctgctgcctggcaggccatgcagaatggaggcaagaacaagaacttccccaacaaccagagctggaacagcagcctgagcggcccccggctgctcttcaagagccaggccaaccagaactatgctggggccaagttcagcgagccccccagccccagcgtgctgcccaagccacccagccactgggtgcctgtgtccttcaaccccagcgacaaggagatcatgaccttccagctgaagaccctgctgaaggtgcaggtgtag

SEQ ID NO: 165470 - DNA, 420 bp, synthetic construct; identical to SEQ ID NO: 165469
  misc_feature 1..420: note = Description of Artificial Sequence: Synthetic coding sequence
  source 1..420: mol_type = other DNA

SEQ ID NO: 165471 - DNA, 597 bp, synthetic construct
  misc_feature 1..597: note = Description of Artificial Sequence: Synthetic coding sequence
  source 1..597: mol_type = other DNA
atgctgctgatcctgctgtctgtggccctgctggccctgagcagcgcccagaacctgaatgaagatgtgtcccaggaggagagccccagcctgattgctggcaacccccagggccccagcccccagggcggcaacaagccccagggccccccacctcctcctgggaagccccagggccccccaccccagggcggcaacaagccccagggccccccacctcctgggaagccccagggccccccaccccagggcgacaagagccgcagccccaggagccccccaggcaagccccagggccccccaccccagggcggcaagccccagggccccccaccccagggcggcaacaagccccagggccccccacctcctgggaagccccagggccccccagcccagggcggcagcaagagccagagcgcccggagccccccaggcaagccccagggccccccccagcaggagggcaacaacccccagggccccccacctcctgctgggggcaacccccagcagccccaggcccccccagctggccagccccagggcccccccaggcctccccagggcggccggcccagccggcccccccagtag

SEQ ID NO: 165472 - DNA, 537 bp, synthetic construct
  misc_feature 1..537: note = Description of Artificial Sequence: Synthetic coding sequence
  source 1..537: mol_type = other DNA
atgctgctgatcctgctgtctgtggccctgctggccctgagcagcgcccagaacctgaatgaagatgtgtcccaggaggagagccccagcctgattgctggcaacccccagggccccagcccccagggcggcaacaagccccagggccccccacctcctcctgggaagccccagggccccccaccccagggcggcaacaagccccagggccccccacctcctgggaagccccagggccccccaccccagggcgacaagagccgcagccccaggagccccccaggcaagccccagggccccccaccccagggcggcaagccccagggccccccagcccagggcggcagcaagagccagagcgcccggagccccccaggcaagccccagggccccccccagcaggagggcaacaacccccagggccccccacctcctgctgggggcaacccccagcagccccaggcccccccagctggccagccccagggcccccccaggcctccccagggcggccggcccagccggcccccccagtag

SEQ ID NO: 165473 - DNA, 597 bp, synthetic construct; identical to SEQ ID NO: 165471
  misc_feature 1..597: note = Description of Artificial Sequence: Synthetic coding sequence
  source 1..597: mol_type = other DNA

SEQ ID NO: 165474 - DNA, 1251 bp, synthetic construct
  misc_feature 1..1251: note = Description of Artificial Sequence: Synthetic coding sequence
  source 1..1251: mol_type = other DNA
atgctgctgatcctgctgtctgtggccctgctggccctgagcagcgcccagaacctgaatgaagatgtgtcccaggaggagagccccagcctgattgctggcaacccccagggcgccccaccccagggcggcaacaagccccagggcccccccagccccccaggcaagccccagggccccccaccccagggcggcaaccagccccagggccccccacctcctcctgggaagccccagggccccccaccccagggcggcaacaagccccagggccccccacctcctgggaagccccagggccccccaccccagggcgacaagagccgcagccccaggagccccccaggcaagccccagggccccccaccccagggcggcaaccagccccagggccccccacctcctcctgggaagccccagggccccccaccccagggcggcaacaagccccagggccccccacctcctgggaagccccagggccccccaccccagggcgacaacaagagccgcagcagccgcagccccccaggcaagccccagggccccccaccccagggcggcaaccagccccagggccccccacctcctcctgggaagccccagggccccccaccccagggcggcaacaagccccagggccccccacctcctgggaagccccagggccccccaccccagggcgacaacaagagccagagcgcccggagccccccaggcaagccccagggccccccaccccagggcggcaaccagccccagggccccccacctcctcctgggaagccccagggccccccaccccagggcggcaacaagccccagggccccccacctcctgggaagccccagggccccccaccccagggcggcagcaagagccgcagcagccgcagccccccaggcaagccccagggccccccaccccagggcggcaaccagccccagggccccccacctcctcctgggaagccccagggccccccaccccagggcggcaacaagccccagggccccccacctcctgggaagccccagggccccccaccccagggcggcagcaagagccgcagcgcccggagccccccaggcaagccccagggccccccccagcaggagggcaacaacccccagggccccccacctcctgctgggggcaacccccagcagccccaggcccccccagctggccagccccagggcccccccaggcctccccagggcggccggcccagccggcccccccagtag

SEQ ID NO: 165475 - DNA, 744 bp, synthetic construct
  misc_feature 1..744: note = Description of Artificial Sequence: Synthetic coding sequence
  source 1..744: mol_type = other DNA
atgctgctgatcctgctgtctgtggccctgctggccctgagcagcgctgagagcagcagtgaagatgtgtcccaggaggagagcctcttcctgatcagcggcaagccagagggcagaagaccccagggcggcaaccagccccagaggcctcctcctcctcctgggaagccccagggccccccaccccagggcggcaaccagagccagggccccccacctcctcctgggaagccagagggccggcccccccagggcggcaaccagagccagggccccccaccccaccctgggaagccagagcggcccccaccccagggcggcaaccagagccagggcaccccacctcctcctgggaagccagagcggcccccaccccagggcggcaaccagagccaccggcccccacctcctcctgggaagccagagcggcccccaccccagggcggcaaccagagccagggccccccaccccaccctgggaagccagagggccccccaccccaggagggcaacaagagccgcagcgcccggagccccccaggcaagccccagggccccccccagcaggagggcaacaagccccagggccccccacctcctgggaagccccagggccccccacctgctgggggcaacccccagcagccccaggcccctcctgctgggaagccccagggccccccacctccaccccagggcggccggccccccaggcctgcccagggccagcagcccccccagtag

SEQ ID NO: 165476 - DNA, 744 bp, synthetic construct; identical to SEQ ID NO: 165475
  misc_feature 1..744: note = Description of Artificial Sequence: Synthetic coding sequence
  source 1..744: mol_type = other DNA

SEQ ID NO: 165477 - DNA, 537 bp, synthetic construct
  misc_feature 1..537: note = Description of Artificial Sequence: Synthetic coding sequence
  source 1..537: mol_type = other DNA
atgctgctgatcctgctgtctgtggccctgctggccctgagcagcgctgagagcagcagtgaagatgtgtcccaggaggagagcctcttcctgatcagcggcaagccagagggcagaagaccccagggcggcaaccagccccagaggcctcctcctcctcctgggaagccccagggccccccaccccagggcggcaaccagagccagggccccccacctcctcctgggaagccagagggccggcccccccagggcggcaaccagagccagggccccccaccccaccctgggaagccagagcggcccccaccccagggcggcaaccagagccagggcaagccccagggccccccccagcaggagggcaacaagccccagggccccccacctcctgggaagccccagggccccccacctgctgggggcaacccccagcagccccaggcccccccagctgggaagccccagggccccccacctccaccccagggcggccggccccccaggcctgcccagggccagcagcccccccagtag

SEQ ID NO: 165478 - DNA, 501 bp, synthetic construct
  misc_feature 1..501: note = Description of Artificial Sequence: Synthetic coding sequence
  source 1..501: mol_type = other DNA
atgctgctgatcctgctgtctgtggccctgctggccttcagcagcgcccaggacctgaatgaagatgtgtcccaggaggatgtgcccctggtgatcagtgatggaggagacagcgagcagttcctggatgaggagcggcagggcccccccctgggcggccagcagagccagcccagcgctggagatggcaaccaggatgatggcccccagcagggccccccccagcagggcggccagcagcagcagggccccccaccaccccagggcaagccccagggccccccccagcagggcggccaccccccaccaccccagggccggccccagggccccccccagcagggcggccacccccggcccccccggggccggccccagggccccccccagcagggcggccaccagcagggccccccacctcctcctcctgggaagccccagggccccccaccccagggcggccggccccagggccccccccagggccagagcccccagtag

SEQ ID NO: 165479 - DNA, 291 bp, synthetic construct
  misc_feature 1..291: note = Description of Artificial Sequence: Synthetic coding sequence
  source 1..291: mol_type = other DNA
atgctgctgatcctgctgtctgtggccctgctggccttcagcagcgcccaggacctggatgaagatgtgtcccaggaggatgtgcccctggtgatcagtgatggaggagacagcgagcagttcattgatgaggagggccacaaggaccaccccaaccgggaggccatcagcaaggtgctgccccacctgctgctggagagcccccgggaccacctgcccaagggggccgcccacaaggacctgcaccggggcagcctgctgagcaacctgggcttcaatgacaggaagtag

SEQ ID NO: 165480 - DNA, 501 bp, synthetic construct
  misc_feature 1..501: note = Description of Artificial Sequence: Synthetic coding sequence
  source 1..501: mol_type = other DNA
atgctgctgatcctgctgtctgtggccctgctggccttcagcagcgcccaggacctggatgaagatgtgtcccaggaggatgtgcccctggtgatcagtgatggaggagacagcgagcagttcattgatgaggagcggcagggcccccccctgggcggccagcagagccagcccagcgctggagatggcaaccagaatgatggcccccagcagggccccccccagcagggcggccagcagcagcagggccccccaccaccccagggcaagccccagggccccccccagcagggcggccaccccccaccaccccagggccggccccagggccccccccagcagggcggccacccccggcccccccggggccggccccagggccccccccagcagggcggccaccagcagggccccccacctcctcctcctgggaagccccagggccccccaccccagggcggccggccccagggccccccccagggccagagcccccagtag

SEQ ID NO: 165481 - DNA, 501 bp, synthetic construct; identical to SEQ ID NO: 165480
  misc_feature 1..501: note = Description of Artificial Sequence: Synthetic coding sequence
  source 1..501: mol_type = other DNA

SEQ ID NO: 165482 - DNA, 900 bp, synthetic construct
  misc_feature 1..900: note = Description of Artificial Sequence: Synthetic coding sequence
  source 1..900: mol_type = other DNA
atggccgccagcagcagcgagatcagcgagatgaagggcgtggaggagagccccaaggtgcctggagagggccctggccacagcgaggccgagaccggccccccccaggtgctggccggcgtgcctgaccagcctgaggccccccagcccggccccaacaccacagctgcccctgtggacagcggccccaaggccggcctggcccctgagaccacagagaccccagctggggccagcgagacagcccaggccacagacctgagcctgagccctggaggagagagcaaggccaactgcagccctgaggacccctgccaggagaccgtgtccaagccagaggtgtccaaggaggccacagctgaccagggcagccggctggagagcgctgcccctcctgagcccgcccctgagcccgccccccagcctgaccccaggccagacagccagcccacccccaagccagccctgcagcctgagctgcccacccaggaggaccccaccccagagatcctgtctgagagcgtgggggagaagcaggagaatggagctgtggtgcccctgcaggccggagatggagaggagggccctgcccctgagccccacagcccccccagcaagaagagccccccagccaacggggccccaccccgggtgctgcagcagctggtggaggaggacaggatgagaagagcccacagcggccaccctggcagcccccggggcagcctgagccgccaccccagcagccagctggccggccctggggtggagggcggggagggcacccagaagccccgggactacatcatcctggccatcctgagctgcttctgccccatgtggcctgtgaacatcgtggcctttgcctatgctgtgatggtgagccccatgggcccctag

SEQ ID NO: 165483 - DNA, 1023 bp, synthetic construct
  misc_feature 1..1023: note = Description of Artificial Sequence: Synthetic coding sequence
  source 1..1023: mol_type = other DNA
atggccgccagcagcagcgagatcagcgagatgaagggcgtggaggagagccccaaggtgcctggagagggccctggccacagcgaggccgagaccggccccccccaggtgctggccggcgtgcctgaccagcctgaggccccccagcccggccccaacaccacagctgcccctgtggacagcggccccaaggccggcctggcccctgagaccacagagaccccagctggggccagcgagacagcccaggccacagacctgagcctgagccctggaggagagagcaaggccaactgcagccctgaggacccctgccaggagaccgtgtccaagccagaggtgtccaaggaggccacagctgaccagggcagccggctggagagcgctgcccctcctgagcccgcccctgagcccgccccccagcctgaccccaggccagacagccagcccacccccaagccagccctgcagcctgagctgcccacccaggaggaccccaccccagagatcctgtctgagagcgtgggggagaagcaggagaatggagctgtggtgcccctgcaggccggagatggagaggagggccctgcccctgagccccacagcccccccagcaagaagagccccccagccaacggggccccaccccgggtgctgcagcagctggtggaggaggacaggatgagaagagcccacagcggccaccctggcagcccccggggcagcctgagccgccaccccagcagccagctggccggccctggggtggagggcggggagggcacccagaagccccgggactacatcatcctggccatcctgagctgcttctgccccatgtggcctgtgaacatcgtggcctttgcctatgctgtgatgagcaggaacagcctgcagcagggagatgtggatggagcccagaggctgggccgggtggccaagctgctgagcatcgtggccctggtgggcggcgtgctgatcatcatcgccagctgtgtgatcaacctgggcgtgtacaagtag

SEQ ID NO: 165484 - DNA, 1191 bp, synthetic construct
  misc_feature 1..1191: note = Description of Artificial Sequence: Synthetic coding sequence
  source 1..1191: mol_type = other DNA
atgccccagctgcagttcaaggatgccttctggtgccgggacttcaccgcccacacaggctatgaggtgctgctgcagaggctgctggatggcaggaagatgtgcaaggacatggaggagctgctgcggcagagggcccaggccgaggagagatatggcaaggagctggtgcagatcgccaggaaggccggcggccagacagagatcaacagcctgcgggccagctttgacagcctgaagcagcagatggagaatgtgggcagcagccacatccagctggccctgaccctgcgggaggagctgcggagcctggaggagttccgggagcggcagaaggagcagaggaagaagtatgaggccgtgatggacagagtgcagaagagcaagctgagcctgtacaagaaggccatggagagcaagaagacctatgagcagaagtgcagagatgctgatgatgctgagcaggcctttgagcgcatcagcgccaacggccaccagaagcaggtggagaagagccagaacaaggcccggcagtgcaaggacagcgccacagaggccgagcgggtgtaccggcagagcatcgcccagctggagaaggtgcgggcagagtgggagcaggagcacaggaccacctgtgaggccttccagctgcaggagtttgaccggctgaccatcctgagaaatgccctgtgggtgcacagcaaccagctgtccatgcagtgtgtgaaggatgatgagctgtatgaggaggtgcggctgaccctggagggctgcagcattgatgctgacatcgacagcttcatccaggccaagagcactggaacagagcccccaggagaggtgcggctggccgacagcgctgccagccgcttcagcggcctgctgcacggcagccccaagaccaccagcctggccgccagcgctgccagcacagagaccctgacccccaccccagagagaaatgaaggagtgtacacagccatcgctgtgcaggagatccagggcaacccagccagccctgcccaggagtaccgggccctgtatgactacacagcccagaacccagatgagctggacctgtctgctggggacatcctggaggtgatcctggagggagaagatggctggtggacagtggagagaaatggccagaggggctttgtgcccggcagctacctggagaagctgtag

SEQ ID NO: 165485 - DNA, 1251 bp, synthetic construct
  misc_feature 1..1251: note = Description of Artificial Sequence: Synthetic coding sequence
  source 1..1251: mol_type = other DNA
atgatgccccagctgcagttcaaggatgccttctggtgccgggacttcaccgcccacacaggctatgaggtgctgctgcagaggctgctggatggcaggaagatgtgcaaggacatggaggagctgctgcggcagagggcccaggccgaggagagatatggcaaggagctggtgcagatcgccaggaaggccggcggccagacagagatcaacagcctgcgggccagctttgacagcctgaagcagcagatggagaatgtgggcagcagccacatccagctggccctgaccctgcgggaggagctgcggagcctggaggagttccgggagcggcagaaggagcagaggaagaagtatgaagctgtgatggacagagtgcagaagagcaagctgagcctgtacaagaaggccatggagagcaagaagacctatgagcagaagtgcagagatgctgatgatgctgagcaggcctttgagcgcatcagcgccaacggccaccagaagcaggtggagaagagccagaacaaggcccggcagtgcaaggacagcgccacagaagctgagcgggtgtaccggcagagcatcgcccagctggagaaggtgcgggcagagtgggagcaggagcacaggaccacctgtgaggccttccagctgcaggagtttgaccggctgaccatcctgagaaatgccctgtgggtgcacagcaaccagctgtccatgcagtgtgtgaaggatgatgagctgtatgaggaggtgcggctgaccctggagggctgcagcattgatgctgacatcgacagcttcatccaggccaagagcactggaacagagcccccagcccctgtgccctaccagaactactatgaccgggaggtgacccccctgaccagcagccctggcatccagcccagctgtggcatgatcaagcgcttcagcggcctgctgcacggcagccccaagaccaccagcctggccgccagcgctgccagcacagagaccctgacccccaccccagagagaaatgaaggagtgtacacagccatcgctgtgcaggagatccagggcaacccagccagccctgcccaggagtaccgggccctgtatgactacacagcccagaacccagatgagctggacctgtctgctggggacatcctggaggtgatcctggagggagaagatggctggtggacagtggagagaaatggccagaggggctttgtgcccggcagctacctggagaagctgtag

SEQ ID NO: 165486 - DNA, 1605 bp, synthetic construct
  misc_feature 1..1605: note = Description of Artificial Sequence: Synthetic coding sequence
  source 1..1605: mol_type = other DNA
atgatctggtacatcctgatcatcggcatcctgctgccccagagcctggcccaccctggcttcttcaccagcatcggccagatgacagacctgatccacacagagaaggacctggtgaccagcctgaaggactacatcaaggccgaggaggacaagctggagcagatcaagaagtgggccgagaagctggaccggctgaccagcacagccaccaaggaccctgagggctttgtgggccaccctgtgaatgccttcaagctgatgaagaggctgaacacagagtggagcgagctggagaacctggtgctgaaggacatgtctgatggcttcatcagcaacctgaccatccagaggcagtacttccccaatgatgaggaccaggtgggcgccgccaaggccctgctgcggctgcaggacacctacaacctggacacagacaccatcagcaagggcaacctgcccggggtgaagcacaagagcttcctgacagctgaggactgctttgagctgggcaaggtggcctacacagaggccgactactaccacacagagctgtggatggagcaggccctgcggcagctggatgaaggagagatcagcaccatcgacaaggtgtctgtgctggactacctgtcctatgctgtgtaccagcagggcgacctggacaaggccctgctgctgaccaagaagctgctggagctggaccctgagcaccagagggccaacggcaacctgaagtactttgagtacatcatggccaaggagaaggatgtgaacaagagcgccagtgatgaccagagcgaccagaagaccacccccaagaagaagggcgtggccgtggactacctgcctgagcggcagaagtatgagatgctgtgccgcggggagggcatcaagatgaccccccggcggcagaagaagctgttctgccgctaccatgatggcaacagaaaccccaagttcatcctggccccagccaagcaggaggatgagtgggacaagccccgcatcatccgcttccatgacatcatcagtgatgctgagattgaaattgtgaaggacctggccaagccccggctgagccgggccaccgtgcatgaccctgagaccgggaagctgaccacagcccagtacagagtgtccaagagcgcctggctgagcggctatgagaaccctgtggtgagccgcatcaacatgaggatccaggacctgaccggcctggatgtgtccacagctgaggagctgcaggtggccaactacggcgtgggcggccagtatgagccccactttgattttgccaggaaggatgagccagatgccttcaaggagctgggcaccggcaaccgcatcgccacctggctgttctacatgtctgatgtgtctgctgggggcgccaccgtcttccctgaggtgggcgcctctgtgtggcccaagaagggcacagctgtgttctggtacaacctgtttgccagcggggagggggactacagcaccaggcatgctgcctgccctgtgctggtgggcaacaagtgggtgagcaacaagtggctgcacgagcggggccaggagttcagaagaccctgcaccctgtctgagctggagtag

SEQ ID NO: 165487 - DNA, 1605 bp, synthetic construct
  misc_feature 1..1605: note = Description of Artificial Sequence: Synthetic coding sequence
  source 1..1605: mol_type = other DNA
atgatctggtacatcctgatcatcggcatcctgctgccccagagcctggcccaccctggcttcttcaccagcatcggccagatgacagacctgatccacacagagaaggacctggtgaccagcctgaaggactacatcaaggccgaggaggacaagctggagcagatcaagaagtgggccgagaagctggaccggctgaccagcacagccaccaaggaccctgagggctttgtgggccaccctgtgaatgccttcaagctgatgaagaggctgaacacagagtggagcgagctggagaacctggtgctgaaggacatgtctgatggcttcatcagcaacctgaccatccagaggcagtacttccccaatgatgaggaccaggtgggcgccgccaaggccctgctgcggctgcaggacacctacaacctggacacagacaccatcagcaagggcaacctgcccggggtgaagcacaagagcttcctgacagctgaggactgctttgagctgggcaaggtggcctacacagaggccgactactaccacacagagctgtggatggagcaggccctgcggcagctggatgaaggagagatcagcaccatcgacaaggtgtctgtgctggactacctgtcctatgctgtgtaccagcagggcgacctggacaaggccctgctgctgaccaagaagctgctggagctggaccctgagcaccagagggccaacggcaacctgaagtactttgagtacatcatggccaaggagaaggatgtgaacaagagcgccagtgatgaccagagcgaccagaagaccacccccaagaagaagggcgtggccgtggactacctgcctgagcggcagaagtatgagatgctgtgccgcggggagggcatcaagatgaccccccggcggcagaagaagctgttctgccgctaccatgatggcaacagaaaccccaagttcatcctggccccagccaagcaggaggatgagtgggacaagccccgcatcatccgcttccatgacatcatcagtgatgctgagattgaaattgtgaaggacctggccaagccccggctgcggcgggccaccatcagcaaccccatcaccggggacctggagaccgtgcactaccgcatcagcaagagcgcctggctgagcggctatgagaaccctgtggtgagccgcatcaacatgaggatccaggacctgaccggcctggatgtgtccacagctgaggagctgcaggtggccaactacggcgtgggcggccagtatgagccccactttgattttgccaggaaggatgagccagatgccttcaaggagctgggcaccggcaaccgcatcgccacctggctgttctacatgtctgatgtgtctgctgggggcgccaccgtcttccctgaggtgggcgcctctgtgtggcccaagaagggcacagctgtgttctggtacaacctgtttgccagcggggagggggactacagcaccaggcatgctgcctgccctgtgctggtgggcaacaagtgggtgagcaacaagtggctgcacgagcggggccaggagttcagaagaccctgcaccctgtctgagctggagtag

SEQ ID NO: 165488 - DNA, 1605 bp, synthetic construct; identical to SEQ ID NO: 165486
  misc_feature 1..1605: note = Description of Artificial Sequence: Synthetic coding sequence
  source 1..1605: mol_type = other DNA

SEQ ID NO: 165489 - DNA, 1605 bp, synthetic construct; identical to SEQ ID NO: 165487
  misc_feature 1..1605: note = Description of Artificial Sequence: Synthetic coding sequence
  source 1..1605: mol_type = other DNA

SEQ ID NO: 165490 - DNA, 1605 bp, synthetic construct; identical to SEQ ID NO: 165487
  misc_feature 1..1605: note = Description of Artificial Sequence: Synthetic coding sequence
  source 1..1605: mol_type = other DNA

SEQ ID NO: 165491 - DNA, 1551 bp, synthetic construct
  misc_feature 1..1551: note = Description of Artificial Sequence: Synthetic coding sequence
  source 1..1551: mol_type = other DNA
atgatctggtacatcctgatcatcggcatcctgctgccccagagcctggcccaccctggcttcttcaccagcatcggccagatgacagacctgatccacacagagaaggacctggtgaccagcctgaaggactacatcaaggccgaggaggacaagctggagcagatcaagaagtgggccgagaagctggaccggctgaccagcacagccaccaaggaccctgagggctttgtgggccaccctgtgaatgccttcaagctgatgaagaggctgaacacagagtggagcgagctggagaacctggtgctgaaggacatgtctgatggcttcatcagcaacctgaccatccagaggcagtacttccccaatgatgaggaccaggtgggcgccgccaaggccctgctgcggctgcaggacacctacaacctggacacagacaccatcagcaagggcaacctgcccggggtgaagcacaagagcttcctgacagctgaggactgctttgagctgggcaaggtggcctacacagaggccgactactaccacacagagctgtggatggagcaggccctgcggcagctggatgaaggagagatcagcaccatcgacaaggtgtctgtgctggactacctgtcctatgctgtgtaccagcagggcgacctggacaaggccctgctgctgaccaagaagctgctggagctggaccctgagcaccagagggccaacggcaacctgaagtactttgagtacatcatggccaaggagaaggatgtgaacaagagcgccagtgatgaccagagcgaccagaagaccacccccaagaagaagggcgtggccgtggactacctgcctgagcggcagaagtatgagatgctgtgccgcggggagggcatcaagatgaccccccggcggcagaagaagctgttctgccgctaccatgatggcaacagaaaccccaagttcatcctggccccagccaagcaggaggatgagtgggacaagccccgcatcatccgcttccatgacatcatcagtgatgctgagattgaaattgtgaaggacctggccaagccccggctgagccgggccaccgtgcatgaccctgagaccgggaagctgaccacagcccagtacagagtgtccaagagcgcctggctgagcggctatgagaaccctgtggtgagccgcatcaacatgaggatccaggacctgaccggcctggatgtgtccacagctgaggagctgcagaaggatgagccagatgccttcaaggagctgggcaccggcaaccgcatcgccacctggctgttctacatgtctgatgtgtctgctgggggcgccaccgtcttccctgaggtgggcgcctctgtgtggcccaagaagggcacagctgtgttctggtacaacctgtttgccagcggggagggggactacagcaccaggcatgctgcctgccctgtgctggtgggcaacaagtgggtgagcaacaagtggctgcacgagcggggccaggagttcagaagaccctgcaccctgtctgagctggagtag

SEQ ID NO: 165492 - DNA, 1608 bp, synthetic construct
  misc_feature 1..1608: note = Description of Artificial Sequence: Synthetic coding sequence
  source 1..1608: mol_type = other DNA
atgaagctgtgggtgtctgccctgctgatggcctggtttggagtgctgagctgtgtgcaggccgagttcttcaccagcatcggccacatgacagacctgatctatgcagagaaggagctggtgcagagcctgaaggagtacatcctggtggaggaggccaagctgagcaagatcaagtcctgggccaacaagatggaggccctgaccagcaagtctgctgctgatgctgagggctacctggcccaccctgtgaatgcctacaagctggtgaagaggctgaacacagactggccagccctggaggacctggtgctgcaggacagcgctgctggcttcatcgccaacctgtctgtgcagaggcagttcttccccacagatgaagatgagatcggggccgccaaggccctgatgaggctgcaggacacctaccgcctggaccccggcaccatcagcagaggagagctgcccggcaccaagtaccaggccatgctgtctgtggatgactgcttcggcatgggccgcagcgcctacaatgaaggagactactaccacacagtgctgtggatggagcaggtgctgaagcagctggatgctggggaggaggccaccaccaccaagagccaggtgctggactacctgtcctatgctgtgttccagctgggggacctgcaccgggccctggagctgacccggcggctgctgagcctggaccccagccatgaaagagctgggggcaacctgcgctactttgagcagctgctggaggaggagcgggagaagaccctgaccaaccagacagaggccgagctggccaccccagagggcatctatgaaagacctgtggactacctgcctgagagagatgtgtatgagagcctgtgccgcggggagggcgtgaagctgaccccccggcggcagaagaggctcttctgccgctaccaccacggcaacagagccccccagctgctgattgcccccttcaaggaggaggatgagtgggacagcccccacatcgtgcgctactatgatgtgatgtctgatgaggagattgaaagaatcaaggagatcgccaagcccaagctggcccgggccaccgtgcgggaccccaagacaggagtgctgactgtggccagctacagagtgtccaagagctcctggctggaggaggatgatgatcctgtggtggcccgggtgaacagaaggatgcagcacatcaccggcctgactgtgaagacagctgagctgctgcaggtggccaactatggagtgggcggccagtatgagccccactttgacttcagcagaaatgatgagcgggacaccttcaagcacctgggcactggaaacagagtggccaccttcctgaactacatgtctgatgtggaggccggcggggccaccgtcttcccagacctgggcgccgccatctggcccaagaagggcacagctgtgttctggtacaacctgctgcggagcggggagggggactaccgcaccaggcatgctgcctgccctgtgctggtgggctgcaagtgggtgagcaacaagtggttccacgagcggggccaggagttcctgcggccctgtggcagcacagaggtggactag

SEQ ID NO: 165493 - DNA, 1602 bp, synthetic construct
  misc_feature 1..1602: note = Description of Artificial Sequence: Synthetic coding sequence
  source 1..1602: mol_type = other DNA
atgaagctgtgggtgtctgccctgctgatggcctggtttggagtgctgagctgtgtgcaggccgagttcttcaccagcatcggccacatgacagacctgatctatgcagagaaggagctggtgcagagcctgaaggagtacatcctggtggaggaggccaagctgagcaagatcaagtcctgggccaacaagatggaggccctgaccagcaagtctgctgctgatgctgagggctacctggcccaccctgtgaatgcctacaagctggtgaagaggctgaacacagactggccagccctggaggacctggtgctgcaggacagcgctgctggcttcatcgccaacctgtctgtgcagaggcagttcttccccacagatgaagatgagatcggggccgccaaggccctgatgaggctgcaggacacctaccgcctggaccccggcaccatcagcagaggagagctgcccggcaccaagtaccaggccatgctgtctgtggatgactgcttcggcatgggccgcagcgcctacaatgaaggagactactaccacacagtgctgtggatggagcaggtgctgaagcagctggatgctggggaggaggccaccaccaccaagagccaggtgctggactacctgtcctatgctgtgttccagctgggggacctgcaccgggccctggagctgacccggcggctgctgagcctggaccccagccatgaaagagctgggggcaacctgcgctactttgagcagctgctggaggaggagcgggagaagaccctgaccaaccagacagaggccgagctggccaccccagagggcatctatgaaagacctgtggactacctgcctgagagagatgtgtatgagagcctgtgccgcggggagggcgtgaagctgaccccccggcggcagaagaggctcttctgccgctaccaccacggcaacagagccccccagctgctgattgcccccttcaaggaggaggatgagtgggacagcccccacatcgtgcgctactatgatgtgatgtctgatgaggagattgaaagaatcaaggagatcgccaagcccaagctggcccgggccaccgtgcgggaccccaagacaggagtgctgactgtggccagctacagagtgtccaagagctcctggctggaggaggatgatgatcctgtggtggcccgggtgaacagaaggatgcagcacatcaccggcctgactgtgaagacagctgagctgctgcaggtggccaactatggagtgggcggccagtatgagccccactttgacttcagcagaagaccatttgacagcggcctgaagacagagggcaaccggctggccaccttcctgaactacatgtctgatgtggaggccggcggggccaccgtcttcccagacctgggcgccgccatctggcccaagaagggcacagctgtgttctggtacaacctgctgcggagcggggagggggactaccgcaccaggcatgctgcctgccctgtgctggtgggctgcaagtgggtgagcaacaagtggttccacgagcggggccaggagttcctgcggccctgtggcagcacagaggtggactag

SEQ ID NO: 165494 - DNA, 1602 bp, synthetic construct; identical to SEQ ID NO: 165493
  misc_feature 1..1602: note = Description of Artificial Sequence: Synthetic coding sequence
  source 1..1602: mol_type = other DNA

SEQ ID NO: 165495 - DNA, 1602 bp, synthetic construct; identical to SEQ ID NO: 165493
  misc_feature 1..1602: note = Description of Artificial Sequence: Synthetic coding sequence
  source 1..1602: mol_type = other DNA

SEQ ID NO: 165496 - DNA, 1608 bp, synthetic construct; identical to SEQ ID NO: 165492
  misc_feature 1..1608: note = Description of Artificial Sequence: Synthetic coding sequence
  source 1..1608: mol_type = other DNA

SEQ ID NO: 165497 - DNA, 504 bp, synthetic construct
  misc_feature 1..504: note = Description of Artificial Sequence: Synthetic coding sequence
  source 1..504: mol_type = other DNA
atgaagctgtgggtgtctgccctgctgatggcctggtttggagtgctgagctgtgtgcaggccgagttcttcaccagcatcggccacatgacagacctgatctatgcagagaaggagctggtgcagagcctgaaggagtacatcctggtggaggaggccaagctgagcaagatcaagtcctgggccaacaagatggaggccctgaccagcaagtctgctgctgatgctgagggctacctggcccaccctgtgaatgcctacaagctggtgaagaggctgaacacagactggccagccctggaggacctggtgctgcaggacagcgctgctggcttcatcgccaacctgtctgtgcagaggcagttcttccccacagatgaagatgagatcggggccgccaaggccctgatgaggctgcaggacacctaccgcctggaccccggcaccatcagcagaggagagctgcccggcaccaagtaccaggccatgctgtctgtggactag

SEQ ID NO: 165498 - DNA, 1608 bp, synthetic construct; identical to SEQ ID NO: 165492
  misc_feature 1..1608: note = Description of Artificial Sequence: Synthetic coding sequence
  source 1..1608: mol_type = other DNA

SEQ ID NO: 165499 - DNA, 306 bp, synthetic construct
  misc_feature 1..306: note = Description of Artificial Sequence: Synthetic coding sequence
  source 1..306: mol_type = other DNA
atgaagctgtgggtgtctgccctgctgatggcctggtttggagtgctgagctgtgtgcaggccgagttcttcaccagcatcggccacatgacagacctgatctatgcagagaaggagctggtgcagagcctgaaggagtacatcctggtggaggaggccaagctgagcaagatcaagtcctgggccaacaagatggaggccctgaccagcaagtctgctgctgatgctgagggctacctggcccaccctgtgaatgcctacaagctggtgaagaggctgaacacagactggccagccctggagtag

SEQ ID NO: 165500 - DNA, 615 bp, synthetic construct
  misc_feature 1..615: note = Description of Artificial Sequence: Synthetic coding sequence
  source 1..615: mol_type = other DNA
atgaagctgtgggtgtctgccctgctgatggcctggtttggagtgctgagctgtgtgcaggccgagttcttcaccagcatcggccacatgacagacctgatctatgcagagaaggagctggtgcagagcctgaaggagtacatcctggtggaggaggccaagctgagcaagatcaagtcctgggccaacaagatggaggccctgaccagcaagtctgctgctgatgctgagggctacctggcccaccctgtgaatgcctacaagctggtgaagaggctgaacacagactggccagccctggaggacctggtgctgcaggacagcgctgctggcttcatcgccaacctgtctgtgcagaggcagttcttccccacagatgaagatgagatcggggccgccaaggccctgatgaggctgcaggacacctaccgcctggaccccggcaccatcagcagaggagagctgcccggcaccaagtaccaggccatgctgtctgtggatgactgcttcggcatgggccgcagcgcctacaatgaaggagactactaccacacagtgctgtggatggagcaggtgctgaagcagctggatgctggggaggaggccaccacctag

SEQ ID NO: 165501 - DNA, 345 bp, synthetic construct
  misc_feature 1..345: note = Description of Artificial Sequence: Synthetic coding sequence
  source 1..345: mol_type = other DNA
atgaagctgtgggtgtctgccctgctgatggcctggtttggagtgctgagctgtgtgcaggccgagttcttcaccagcatcggccacatgacagacctgatctatgcagagaaggagctggtgcagagcctgaaggagtacatcctggtggaggaggccaagctgagcaagatcaagtcctgggccaacaagatggaggccctgaccagcaagtctgctgctgatgctgagggctacctggcccaccctgtgaatgcctacaagctggtgaagaggctgaacacagactggccagccctggaggacctggtgctgcaggacagcgctgctggcttcatcgcctag

SEQ ID NO: 165502 - DNA, 444 bp, synthetic construct
  misc_feature 1..444: note = Description of Artificial Sequence: Synthetic coding sequence
  source 1..444: mol_type = other DNA
atgaagctgtgggtgtctgccctgctgatggcctggtttggagtgctgagctgtgtgcaggccgagttcttcaccagcatcggccacatgacagacctgatctatgcagagaaggagctggtgcagagcctgaaggagtacatcctggtggaggaggccaagctgagcaagatcaagtcctgggccaacaagatggaggccctgaccagcaagtctgctgctgatgctgagggctacctggcccaccctgtgaatgcctacaagctggtgaagaggctgaacacagactggccagccctggaggacctggtgctgcaggacagcgctgctggcttcatcgccaacctgtctgtgcagaggcagttcttccccacagatgaagatgagatcggggccgccaaggccctgatgaggctgcaggacacctaccgcctggacccctag

SEQ ID NO: 165503 - DNA, 153 bp, synthetic construct
  misc_feature 1..153: note = Description of Artificial Sequence: Synthetic coding sequence
  source 1..153: mol_type = other DNA
atgaagctgtgggtgtctgccctgctgatggcctggtttggagtgctgagctgtgtgcaggccgagttcttcaccagcatcggccacatgacagacctgatctatgcagagaaggagctggtgcagagcctgaaggagtacatcctggtgtag

SEQ ID NO: 165504 - DNA, 555 bp, synthetic construct
  misc_feature 1..555: note = Description of Artificial Sequence: Synthetic coding sequence
  source 1..555: mol_type = other DNA
atgaagctgtgggtgtctgccctgctgatggcctggtttggagtgctgagctgtgtgcaggccgagttcttcaccagcatcggccacatgacagacctgatctatgcagagaaggagctggtgcagagcctgaaggagtacatcctggtggaggaggccaagctgagcaagatcaagtcctgggccaacaagatggaggccctgaccagcaagtctgctgctgatgctgagggctacctggcccaccctgtgaatgcctacaagctggtgaagaggctgaacacagactggccagccctggaggacctggtgctgcaggacagcgctgctggcttcatcgccaacctgtctgtgcagaggcagttcttccccacagatgaagatgagatcggggccgccaaggccctgatgaggctgcaggacacctaccgcctggaccccggcaccatcagcagaggagagctgcccggcaccaagtaccaggccatgctgtctgtggatgactgcttcggcatgggccgcagcgcctacaatgaaggagactactaccactag

SEQ ID NO: 165505 - DNA, 462 bp, synthetic construct
  misc_feature 1..462: note = Description of Artificial Sequence: Synthetic coding sequence
  source 1..462: mol_type = other DNA
atgaagctgtgggtgtctgccctgctgatggcctggtttggagtgctgagctgtgtgcaggccgagttcttcaccagcatcggccacatgacagacctgatctatgcagagaaggagctggtgcagagcctgaaggagtacatcctggtggaggaggccaagctgagcaagatcaagtcctgggccaacaagatggaggccctgaccagcaagtctgctgctgatgctgagggctacctggcccaccctgtgaatgcctacaagctggtgaagaggctgaacacagactggccagccctggaggacctggtgctgcaggacagcgctgctggcttcatcgccaacctgtctgtgcagaggcagttcttccccacagatgaagatgagatcggggccgccaaggccctgatgaggctgcaggacacctaccgcctggaccccggcaccatcagccggggctag

SEQ ID NO: 165506 - DNA, 1635 bp, synthetic construct
  misc_feature 1..1635: note = Description of Artificial Sequence: Synthetic coding sequence
  source 1..1635: mol_type = other DNA
atgggccctggggcccggctggccgccctgctggccgtgctggccctgggcaccggggaccctgagagagctgctgcccggggggacaccttcagcgccctgacctctgtggcccgggccctggcccctgagcggcggctgctgggcctgctgcggcgctacctgcggggggaggaggcccggctgcgggacctgacccgcttctatgacaaggtgctgagcctgcacgaggacagcaccacccctgtggccaaccccctgctggccttcaccctcatcaagaggctgcagagcgactggagaaatgtggtgcacagcctggaggccagcgagaacatccgggccctgaaggatggctatgagaaggtggagcaggacctgcctgcctttgaggacctggagggcgccgcccgggccctgatgaggctgcaggatgtgtacatgctgaatgtgaagggcctggcccggggcgtcttccagagggtgactggaagtgccatcacagacctgtacagccccaagaggctcttcagcctgactggagatgactgcttccaggtgggcaaggtggcctatgacatgggagactactaccacgccatcccctggctggaggaggccgtgtccctcttccggggcagctatggagagtggaagacagaagatgaggccagcctggaggatgccctggaccacctggcctttgcctacttccgggctggaaatgtgtcctgtgccctgagcctgagccgggagttcctgctgtacagcccagacaacaagaggatggccagaaatgtgctgaagtatgaaaggctgctggccgagagccccaaccacgtggtggccgaggccgtcatccagaggcccaacatcccccacctgcagacccgggacacctatgagggcctgtgccagaccctgggcagccagcccaccctgtaccagatccccagcctgtactgcagctatgagaccaacagcaatgcctacctgctgctgcagcccatcaggaaggaggtgatccacctggagccctacatcgccctgtaccatgactttgtgtctgacagcgaggcccagaagatccgggagctggccgagccctggctgcagaggtctgtggtggccagcggggagaagcagctgcaggtggagtaccgcatcagcaagagcgcctggctgaaggacacagtggaccccaagctggtgaccctgaaccacagaattgctgccctgaccggcctggatgtgcggcccccctatgcagagtacctgcaggtggtgaactatggaattggaggccactatgagccccactttgaccacgccaccagccccagcagccccctgtacaggatgaagagcggcaacagagtggccaccttcatgatctacctgagctctgtggaggccggcggggccacagccttcatctatgccaacctgtctgtgcctgtggtgagaaatgctgccctcttctggtggaacctgcacaggtctggagagggggacagcgacaccctgcatgctggctgccctgtgctggtgggggacaagtgggtggccaacaagtggatccacgagtatggccaggagttcagaagaccctgcagcagcagcccagaagattag

SEQ ID NO: 165507 - DNA, 1815 bp, synthetic construct
  misc_feature 1..1815: note = Description of Artificial Sequence: Synthetic coding sequence
  source 1..1815: mol_type = other DNA
atgggccctggggcccggctggccgccctgctggccgtgctggccctgggcaccggggaccctgagagagctgctgcccggggggacaccttcagcgccctgacctctgtggcccgggccctggcccctgagcggcggctgctgggcctgctgcggcgctacctgcggggggaggaggcccggctgcgggacctgacccgcttctatgacaaggtgctgagcctgcacgaggacagcaccacccctgtggccaaccccctgctggccttcaccctcatcaagaggctgcagagcgactggagaaatgtggtgcacagcctggaggccagcgagaacatccgggccctgaaggatggctatgagaaggtggagcaggacctgcctgcctttgaggacctggagggcgccgcccgggccctgatgaggctgcaggatgtgtacatgctgaatgtgaagggcctggcccggggcgtcttccagagggtgactggaagtgccatcacagacctgtacagccccaagaggctcttcagcctgactggagatgactgcttccaggtgggcaaggtggcctatgacatgggagactactaccacgccatcccctggctggaggaggccgtgtccctcttccggggcagctatggagagtggaagacagaagatgaggccagcctggaggatgccctggaccacctggcctttgcctacttccgggctggaaatgtgtcctgtgccctgagcctgagccgggagttcctgctgtacagcccagacaacaagaggatggccagaaatgtgctgaagtatgaaaggctgctggccgagagccccaaccacgtggtggccgaggccgtcatccagaggcccaacatcccccacctgcagacccgggacacctatgagggcctgtgccagaccctgggcagccagcccaccctgtaccagatccccagcctgtactgcagctatgagaccaacagcaatgcctacctgctgctgcagcccatcaggaaggaggtgatccacctggagccctacatcgccctgtaccatgactttgtgtctgacagcgaggcccagaagatccgggagctggccgagccctggctgcagaggtctgtggtggccagcggggagaagcagctgcaggtggagtaccgcatcagcaagagcgcctggctgaaggacacagtggaccccaagctggtgaccctgaaccacagaattgctgccctgaccggcctggatgtgcggcccccctatgcagagtacctgcaggtggtgaactatggaattggaggccactatgagccccactttgaccacgccaccagccccagcagccccctgtacaggatgaagagcggcaacagagtggccaccttcatgatctacctgagctctgtggaggccggcggggccacagccttcatctatgccaacctgtctgtgcctgtggtgcgccactgcttcggcggcacctgcacaggagtggtgaagggcaccgtgacccacttcatgctggccgtgctgtcctggtgggagatcagcggctggcccaccagcggctacatgtccatggacaggaacagcgctgaccctgctgccccagccctgaagacagagctgctggccgagaggtcctggtggagccctgtggccttccagaggagccaggagcccaaggccggcgtgggggaggagaaggccgagcagcccccaggaagaagaccctgccagctgtgcctgtgcctggccaaccagaggcagggccggggctgctaccagggcaccctgaggatgtacatctag

SEQ ID NO: 165508 - DNA, 1527 bp, synthetic construct
  misc_feature 1..1527: note = Description of Artificial Sequence: Synthetic coding sequence
  source 1..1527: mol_type = other DNA
atgctgcggcgggccctgctgtgcctggccgtggccgccctggtgcgggcagatgcccctgaggaggaggaccacgtgctggtgctgaggaagagcaactttgctgaggccctggccgcccacaagtacctgctggtggagttctacgccccctggtgtggccactgcaaggccctggccccagaatatgccaaggctgctgggaagctgaaggccgagggcagcgagatccggctggccaaggtggatgccacagaggagagtgacctggcccagcagtatggagtgcggggctaccccaccatcaagttcttcagaaatggagacacagccagccccaaggagtacacagctggccgggaggctgatgacatcgtgaactggctgaagaagaggactggacctgctgccaccaccctgcctgatggagctgctgctgagagcctggtggagagcagcgaggtggccgtcatcggcttcttcaaggatgtggagagtgacagcgccaagcagttcctgcaggccgctgaggccattgatgacatccccttcggcatcaccagcaacagtgatgtgttcagcaagtaccagctggacaaggatggagtggtgctcttcaagaagtttgatgagggcaggaacaactttgaaggagaggtgaccaaggagaacctgctggacttcatcaagcacaaccagctgcccctggtgattgagttcacagagcagacagcccccaagatctttggaggagagatcaagacccacatcctgctcttcctgcccaagtctgtgtctgactatgatggcaagctgagcaacttcaagacagctgctgagagcttcaagggcaagatcctcttcatcttcatcgacagcgaccacacagacaaccagaggatcctggagttcttcggcctgaagaaggaggagtgcccagctgtgcggctcatcaccctggaggaggagatgaccaagtacaagccagagagcgaggagctgacagctgagcgcatcacagagttctgccaccgcttcctggagggcaagatcaagccccacctgatgagccaggagctgcctgaggactgggacaagcagcctgtgaaggtgctggtgggcaagaactttgaagatgtggcctttgatgagaagaagaatgtgtttgtggagttctacgccccctggtgtggccactgcaagcagctggcccccatctgggacaagctgggggagacctacaaggaccacgagaacatcgtcatcgccaagatggacagcacagccaatgaggtggaggccgtgaaggtgcacagcttccccaccctgaagttcttccctgccagcgctgacagaacagtgattgactacaacggggagaggaccctggatggcttcaagaagttcctggagagcggcggccaggatggagctggagatgatgatgacctggaggacctggaggaggccgaggagccagacatggaggaggatgatgaccagaaggctgtgaaggatgagctgtag

SEQ ID NO: 165509 - DNA, 1479 bp, synthetic construct
  misc_feature 1..1479: note = Description of Artificial Sequence: Synthetic coding sequence
  source 1..1479: mol_type = other DNA
atgctgcggcgggccctgctgtgcctggccgtggccgccctggtgcgggcagatgcccctgaggaggaggaccacaagtacctgctggtggagttctacgccccctggtgtggccactgcaaggccctggccccagaatatgccaaggctgctgggaagctgaaggccgagggcagcgagatccggctggccaaggtggatgccacagaggagagtgacctggcccagcagtatggagtgcggggctaccccaccatcaagttcttcagaaatggagacacagccagccccaaggagtacacagctggccgggaggctgatgacatcgtgaactggctgaagaagaggactggacctgctgccaccaccctgcctgatggagctgctgctgagagcctggtggagagcagcgaggtggccgtcatcggcttcttcaaggatgtggagagtgacagcgccaagcagttcctgcaggccgctgaggccattgatgacatccccttcggcatcaccagcaacagtgatgtgttcagcaagtaccagctggacaaggatggagtggtgctcttcaagaagtttgatgagggcaggaacaactttgaaggagaggtgaccaaggagaacctgctggacttcatcaagcacaaccagctgcccctggtgattgagttcacagagcagacagcccccaagatctttggaggagagatcaagacccacatcctgctcttcctgcccaagtctgtgtctgactatgatggcaagctgagcaacttcaagacagctgctgagagcttcaagggcaagatcctcttcatcttcatcgacagcgaccacacagacaaccagaggatcctggagttcttcggcctgaagaaggaggagtgcccagctgtgcggctcatcaccctggaggaggagatgaccaagtacaagccagagagcgaggagctgacagctgagcgcatcacagagttctgccaccgcttcctggagggcaagatcaagccccacctgatgagccaggagctgcctgaggactgggacaagcagcctgtgaaggtgctggtgggcaagaactttgaagatgtggcctttgatgagaagaagaatgtgtttgtggagttctacgccccctggtgtggccactgcaagcagctggcccccatctgggacaagctgggggagacctacaaggaccacgagaacatcgtcatcgccaagatggacagcacagccaatgaggtggaggccgtgaaggtgcacagcttccccaccctgaagttcttccctgccagcgctgacagaacagtgattgactacaacggggagaggaccctggatggcttcaagaagttcctggagagcggcggccaggatggagctggagatgatgatgacctggaggacctggaggaggccgaggagccagacatggaggaggatgatgaccagaaggctgtgaaggatgagctgtag

SEQ ID NO: 165510 - DNA, 1356 bp, synthetic construct
  misc_feature 1..1356: note = Description of Artificial Sequence: Synthetic coding sequence
  source 1..1356: mol_type = other DNA
atgctgcggcgggccctgctgtgcctggccgtggccgccctggtgcgggcagatgcccctgaggaggaggaccacgtgctggtgctgaggaagagcaactttgctgaggccctggccgcccacaagtacctgctggtggagttctacgccccctggtgtggccactgcaaggccctggccccagaatatgccaaggctgctgggaagctgaaggccgagggcagcgagatccggctggccaaggtggatgccacagaggagagtgacctggcccagcagtatggagtgcggggctaccccaccatcaagttcttcagaaatggagacacagccagccccaaggagtacacagctggccgggaggctgatgacatccccttcggcatcaccagcaacagtgatgtgttcagcaagtaccagctggacaaggatggagtggtgctcttcaagaagtttgatgagggcaggaacaactttgaaggagaggtgaccaaggagaacctgctggacttcatcaagcacaaccagctgcccctggtgattgagttcacagagcagacagcccccaagatctttggaggagagatcaagacccacatcctgctcttcctgcccaagtctgtgtctgactatgatggcaagctgagcaacttcaagacagctgctgagagcttcaagggcaagatcctcttcatcttcatcgacagcgaccacacagacaaccagaggatcctggagttcttcggcctgaagaaggaggagtgcccagctgtgcggctcatcaccctggaggaggagatgaccaagtacaagccagagagcgaggagctgacagctgagcgcatcacagagttctgccaccgcttcctggagggcaagatcaagccccacctgatgagccaggagctgcctgaggactgggacaagcagcctgtgaaggtgctggtgggcaagaactttgaagatgtggcctttgatgagaagaagaatgtgtttgtggagttctacgccccctggtgtggccactgcaagcagctggcccccatctgggacaagctgggggagacctacaaggaccatgaaaatattgtgattgccaagatggacagcacagccaatgaggtggaggccgtgaaggtgcacagcttccccaccctgaagttcttccctgccagcgctgacagaactgtcatcgactacaatggagagaggaccctggatggcttcaagaagttcctggagagcggcggccaggatggagctggagatgatgatgacctggaggacctggaggaggccgaggagccagacatggaggaggatgatgaccagaaggctgtgaaggatgagctgtag

SEQ ID NO: 165511 - DNA, 2133 bp, synthetic construct
  misc_feature 1..2133: note = Description of Artificial Sequence: Synthetic coding sequence
  source 1..2133: mol_type = other DNA
atgctgagcctgcagtacccagatgtgtacagagatgaaacagctgtgcaggactaccacggccacaagatctgtgacccctatgcctggctggaggaccctgacagcgagcagaccaaggcctttgtggaggcccagaacaagatcaccgtgcccttcctggagcagtgccccatccggggcctgtacaaggagaggatgacagagctgtatgactaccccaagtacagctgccacttcaagaagggcaagcgctacttctacttctacaacacaggcctgcagaaccagagggtgctgtatgtgcaggacagcctggagggggaggcccgggtcttcctggaccccaacatcctgagtgatgatggcaccgtggccctgcggggctacgccttctctgaagatggagagtactttgcctacggcctgagcgccagcggcagtgactgggtgaccatcaagttcatgaaggtggatggagccaaggagctgcctgatgtgctggagcgggtgaagttcagctgcatggcctggacccatgatggcaagggcatgttctacaacagctacccccagcaggacggcaagagtgatggaacagagaccagcaccaacctgcaccagaagctgtactaccacgtgctgggcacagaccagagcgaggacatcctgtgtgccgagttcccagatgagcccaagtggatgggcggcgctgagctgagtgatgatggccgctacgtgctgctgagcatccgggagggctgtgaccctgtgaaccggctgtggtactgtgacctgcagcaggagagcagcggcattgctggcatcctgaagtgggtgaagctgattgacaactttgaaggagaatatgactatgtgaccaatgaaggcaccgtcttcaccttcaagaccaaccggcagagccccaactacagagtcatcaacatcgacttccgggaccctgaggagagcaagtggaaggtgctggtgcctgagcacgagaaggatgtgctggagtggatcgcctgtgtgcgcagcaacttcctggtgctgtgctacctgcatgatgtgaagaacatcctgcagctgcatgacctgaccaccggggccctgctgaagaccttccccctggatgtgggcagcatcgtgggctacagcggccagaagaaggacacagagatcttctaccagttcaccagcttcctgagccctggcatcatctaccactgtgacctgaccaaggaggagctggagcccagggtcttccgggaggtgacagtgaagggcattgatgccagtgactaccagacagtgcagatcttctaccccagcaaggatggcaccaagatccccatgttcatcgtgcacaagaagggcatcaagctggatggcagccacccagccttcctgtatggctatggaggcttcaacatcagcatcacccccaactacagcgtgagccgcctcatctttgtgcgccacatgggcggcatcctggccgtggccaacatccggggcggcggggagtatggagagacctggcacaagggcggcatcctggccaacaagcagaactgctttgatgacttccagtgtgccgctgagtacctgatcaaggagggctacaccagccccaagaggctgaccatcaatggaggcagcaatggaggcctgctggtggccgcctgtgccaaccagaggccagacctgtttggctgtgtgattgcccaggtgggcgtgatggacatgctgaagttccacaagtacaccatcggccacgcctggaccacagattatggctgcagcgacagcaagcagcactttgagtggctggtgaagtacagccccctgcacaacgtgaagctgcctgaggctgatgacatccagtaccccagcatgctgctgctgacagctgaccatgatgacagagtggtgcccctgcacagcctgaagttcatcgccaccctgcagtacatcgtgggccgcagcaggaagcagagcaaccccctgctgattcatgtggacaccaaggccggccacggggccggcaagcccacagccaaggtgattgaggaggtgtctgacatgtttgccttcatcgcccgctgcctgaatgtggactggatcccctag

SEQ ID NO: 165512 - DNA, 138 bp, synthetic construct
  misc_feature 1..138: note = Description of Artificial Sequence: Synthetic coding sequence
  source 1..138: mol_type = other DNA
tgaatcatctaccactgtgacctgaccaaggaggagctggagcccagggtcttccgggaggtgacagtgaagggcattgatgccagtgactaccagacagtgcagctgcccaagggcacagagagcagcaggaactag

SEQ ID NO: 165513 - DNA, 135 bp, synthetic construct
  misc_feature 1..135: note = Description of Artificial Sequence: Synthetic coding sequence
  source 1..135: mol_type = other DNA
atcatctaccactgtgacctgaccaaggaggagctggagcccagggtcttccgggaggtgacagtgaagggcattgatgccagtgactaccagacagtgcagctgcccaagggcacagagagcagcagaaattag

SEQ ID NO: 165514 - DNA, 2184 bp, synthetic construct
  misc_feature 1..2184: note = Description of Artificial Sequence: Synthetic coding sequence
  source 1..2184: mol_type = other DNA
atgcagcagaagaccaagctgttcctgcaggccctgaagtacagcatcccccacctgggcaagtgcatgcagaagcagcacctgaaccactacaactttgctgaccactgctacaaccgcatcaagctgaagaagtaccacctgaccaagtgcctgcagaacaagcccaagatcagcgagctggccaggaacatccccagccgctccttcagctgcaaggacctgcagcctgtgaagcaggagaatgagaagcccctgcctgagaacatggatgcctttgagaaggtgaggaccaagctggagacccagccccaggaggagtatgagatcatcaacgtggaggtgaagcatggaggctttgtgtactaccaggagggctgctgcctggtgcgcagcaaggatgaggaggccgacaatgacaactatgaggtgctcttcaacctggaggagctgaagctggaccagcccttcatcgactgcatccgggtggccccagatgagaagtatgtggccgccaagatcagaacagaagattctgaggccagcacctgtgtgatcatcaagctgagtgaccagcctgtgatggaggccagcttccccaacgtgagcagctttgagtgggtgaaggatgaggaggatgaagatgtgctcttctacaccttccagaggaacctgcgctgccatgatgtgtaccgggccacctttggagacaacaagagaaatgaacgcttctacacagagaaggaccccagctactttgtgttcctgtacctgaccaaggacagccgcttcctgaccatcaacatcatgaacaagaccaccagcgaggtgtggctgattgatggcctgagcccctgggacccccctgtgctgatccagaagagaattcatggagtgctgtactacgtggagcacagagatgatgagctgtacatcctgaccaacgtgggggagcccacagagttcaagctgatgaggacagctgctgacaccccagccatcatgaactgggacctcttcttcaccatgaagaggaacaccaaggtgattgacctggacatgttcaaggaccactgtgtgctcttcctgaagcacagcaacctgctgtatgtgaatgtcatcggcctggctgatgacagcgtgcgcagcctgaagctgcccccctgggcctgtggcttcatcatggacaccaacagcgaccccaagaactgccccttccagctgtgcagccccatccggccccccaagtactacacctacaagtttgctgagggcaagctgtttgaggagactggacatgaggaccccatcaccaagaccagccgggtgctgcggctggaggccaagagcaaggatggcaagctggtgcccatgacagtgttccacaagacagacagcgaggacctgcagaagaagcccctgctggtgcacgtgtatggagcctacggcatggacctgaagatgaacttccggcctgagcggcgggtgctggtggatgatggctggatcctggcctactgccacgtgcggggcggcggggagctgggcctgcagtggcatgctgatggccgcctgaccaagaagctgaatggcctggccgacctggaggcctgcatcaagaccctgcacggccagggcttcagccagcccagcctgaccaccctgacagccttctctgctgggggcgtgctggccggggccctgtgcaacagcaaccctgagctggtgcgggctgtgaccctggaggcccccttcctggatgtgctgaacaccatgatggacaccaccctgcccctgaccctggaggagctggaggagtggggcaaccccagcagtgatgagaagcacaagaactacatcaagcgctactgcccctaccagaacatcaagccccagcactaccccagcatccacatcacagcctatgaaaatgatgagcgggtgcccctgaagggcatcgtgtcctacacagagaagctgaaggaggccatcgccgagcacgccaaggacacaggagagggctaccagacccccaacatcatcctggacatccagcccggcggcaaccacgtgattgaggacagccacaagaagatcacagcccagatcaagttcctgtatgaggagctgggcctggacagcacctctgtgtttgaggacctgaagaagtacctgaagttctag

SEQ ID NO: 165515 - DNA, 1998 bp, synthetic construct
  misc_feature 1..1998: note = Description of Artificial Sequence: Synthetic coding sequence
  source 1..1998: mol_type = other DNA
atgcagcagaagaccaagctgttcctgcaggccctgaagtacagcatcccccacctgggcaagtgcatgcagaagcagcacctgaaccactacaactttgctgaccactgctacaaccgcatcaagctgaagaagtaccacctgaccaagtgcctgcagaacaagcccaagatcagcgagctggccaggaacatccccagccgctccttcagctgcaaggacctgcagcctgtgaagcaggagaatgagaagcccctgcctgagaacatggatgcctttgagaaggtgaggaccaagctggagacccagccccaggaggagtatgagatcatcaacgtggaggtgaagcatggaggctttgtgtactaccaggagggctgctgcctggtgcgcagcaaggatgaggaggccgacaatgacaactatgaggtgctcttcaacctggaggagctgaagctggaccagcccttcatcgactgcatccgggtggccccagatgagaagtatgtggccgccaagatcagaacagaagattctgaggccagcacctgtgtgatcatcaagctgagtgaccagcctgtgatggaggccagcttccccaacgtgagcagctttgagtgggtgaaggatgaggaggatgaagatgtgctcttctacaccttccagaggaacctgcgctgccatgatgtgtaccgggccacctttggagacaacaagagaaatgaacgcttctacacagagaaggaccccagctactttgtgttcctgtacctgaccaaggacagccgcttcctgaccatcaacatcatgaacaagaccaccagcgaggtgtggctgattgatggcctgagcccctgggacccccctgtgctgatccagaagagaattcatggagtgctgtactacgtggagcacagagatgatgagctgtacatcctgaccaacgtgggggagcccacagagttcaagctgcccccctgggcctgtggcttcatcatggacaccaacagcgaccccaagaactgccccttccagctgtgcagccccatccggccccccaagtactacacctacaagtttgctgagggcaagctgtttgaggagactggacatgaggaccccatcaccaagaccagccgggtgctgcggctggaggccaagagcaaggatggcaagctggtgcccatgacagtgttccacaagacagacagcgaggacctgcagaagaagcccctgctggtgcacgtgtatggagcctacggcatggacctgaagatgaacttccggcctgagcggcgggtgctggtggatgatggctggatcctggcctactgccacgtgcggggcggcggggagctgggcctgcagtggcatgctgatggccgcctgaccaagaagctgaatggcctggccgacctggaggcctgcatcaagaccctgcacggccagggcttcagccagcccagcctgaccaccctgacagccttctctgctgggggcgtgctggccggggccctgtgcaacagcaaccctgagctggtgcgggctgtgaccctggaggcccccttcctggatgtgctgaacaccatgatggacaccaccctgcccctgaccctggaggagctggaggagtggggcaaccccagcagtgatgagaagcacaagaactacatcaagcgctactgcccctaccagaacatcaagccccagcactaccccagcatccacatcacagcctatgaaaatgatgagcgggtgcccctgaagggcatcgtgtcctacacagagaagctgaaggaggccatcgccgagcacgccaaggacacaggagagggctaccagacccccaacatcatcctggacatccagcccggcggcaaccacgtgattgaggacagccacaagaagatcacagcccagatcaagttcctgtatgaggagctgggcctggacagcacctctgtgtttgaggacctgaagaagtacctgaagttctag

SEQ ID NO: 165516 - DNA, 1986 bp, synthetic construct
  misc_feature 1..1986: note = Description of Artificial Sequence: Synthetic coding sequence
  source 1..1986: mol_type = other DNA
atgcagcagaagaccaagctgttcctgcaggccctgaagtacagcatcccccacctgggcaagtgcatgcagaagcagcacctgaaccactacaactttgctgaccactgctacaaccgcatcaagctgaagaagtaccacctgaccaagtgcctgcagaacaagcccaagatcagcgagctggccaggaacatccccagccgctccttcagctgcaaggacctgcagcctgtgaagcaggagaatgagaagcccctgcctgagaacatggatgcctttgagaaggtgaggaccaagctggagacccagccccaggaggagtatgagatcatcaacgtggaggtgaagcatggaggctttgtgtactaccaggagggctgctgcctggtgcgcagcaaggatgaggaggccgacaatgacaactatgaggtgctcttcaacctggaggagctgaagctggaccagcccttcatcgactgcatccgggtggccccagatgagaagtatgtggccgccaagatcagaacagaagattctgaggccagcacctgtgtgatcatcaagctgagtgaccagcctgtgatggaggccagcttccccaacgtgagcagctttgagtgggtgaaggatgaggaggatgaagatgtgctcttctacaccttccagaggaacctgcgctgccatgatgtgtaccgggccacctttggagacaacaagagaaatgaacgcttctacacagagaaggaccccagctactttgtgttcctgtacctgaccaaggacagccgcttcctgaccatcaacatcatgaacaagaccaccagcgaggtgtggctgattgatggcctgagcccctgggacccccctgtgctgatccagaagagaattcatggagtgctgtactacgtggagcacagagatgatgagctgtacatcctgaccaacgtgggggagcccacagagttcaagctgatgaggacagctgctgacaccccagccatcatgaactgggacctcttcttcaccatgaagaggaacaccaaggtgattgacctggacatgttcaaggaccactgtgtgctcttcctgaagcacagcaacctgctgtatgtgaatgtcatcggcctggctgatgacagcgtgcgcagcctgaaggatggcaagctggtgcccatgacagtgttccacaagacagacagcgaggacctgcagaagaagcccctgctggtgcacgtgtatggagcctacggcatggacctgaagatgaacttccggcctgagcggcgggtgctggtggatgatggctggatcctggcctactgccacgtgcggggcggcggggagctgggcctgcagtggcatgctgatggccgcctgaccaagaagctgaatggcctggccgacctggaggcctgcatcaagaccctgcacggccagggcttcagccagcccagcctgaccaccctgacagccttctctgctgggggcgtgctggccggggccctgtgcaacagcaaccctgagctggtgcgggctgtgaccctggaggcccccttcctggatgtgctgaacaccatgatggacaccaccctgcccctgaccctggaggagctggaggagtggggcaaccccagcagtgatgagaagcacaagaactacatcaagcgctactgcccctaccagaacatcaagccccagcactaccccagcatccacatcacagcctatgaaaatgatgagcgggtgcccctgaagggcatcgtgtcctacacagagaagctgaaggaggccatcgccgagcacgccaaggacacaggagagggctaccagacccccaacatcatcctggacatccagcccggcggcaaccacgtgattgaggacagccacaagaagatcacagcccagatcaagttcctgtatgaggagctgggcctggacagcacctctgtgtttgaggacctgaagaagtacctgaagttctag

SEQ ID NO: 165517 - DNA, 2184 bp, synthetic construct; identical to SEQ ID NO: 165514
  misc_feature 1..2184: note = Description of Artificial Sequence: Synthetic coding sequence
  source 1..2184: mol_type = other DNA

SEQ ID NO: 165518 - DNA, 2184 bp, synthetic construct; identical to SEQ ID NO: 165514
  misc_feature 1..2184: note = Description of Artificial Sequence: Synthetic coding sequence
  source 1..2184: mol_type = other DNA

SEQ ID NO: 165519 - DNA, 2184 bp, synthetic construct; identical to SEQ ID NO: 165514
  misc_feature 1..2184: note = Description of Artificial Sequence: Synthetic coding sequence
  source 1..2184: mol_type = other DNA

SEQ ID NO: 165520 - DNA, 2184 bp, synthetic construct; identical to SEQ ID NO: 165514
  misc_feature 1..2184: note = Description of Artificial Sequence: Synthetic coding sequence
  source 1..2184: mol_type = other DNA

SEQ ID NO: 165521 - DNA, 2184 bp, synthetic construct; identical to SEQ ID NO: 165514
  misc_feature 1..2184: note = Description of Artificial Sequence: Synthetic coding sequence
  source 1..2184: mol_type = other DNA

SEQ ID NO: 165522 - DNA, 456 bp, synthetic construct
  misc_feature 1..456: note = Description of Artificial Sequence: Synthetic coding sequence
  source 1..456: mol_type = other DNA
atgcagcagaagaccaagctgttcctgcaggccctgaagtacagcatcccccacctgggcaagtgcatgcagaagcagcacctgaaccactacaactttgctgaccactgctacaaccgcatcaagctgaagaagtaccacctgaccaagtgcctgcagaacaagcccaagatcagcgagctggccaggaacatccccagccgctccttcagctgcaaggacctgcagcctgtgaagcaggagaatgagaagcccctgcctgagaacatggatgcctttgagaaggtgaggaccaagctggagacccagccccaggaggagtatgagatcatcaacgtggaggtgaagcatggaggctttgtgtactaccaggagggctgctgcctggtgcgcagcaaggatgaggaggccgacaatgacaactatgaggtgctcttcaacctggaggagctgtag

SEQ ID NO: 165523 - DNA, 1917 bp, synthetic construct
  misc_feature 1..1917: note = Description of Artificial Sequence: Synthetic coding sequence
  source 1..1917: mol_type = other DNA
atggatgcctttgagaaggtgaggaccaagctggagacccagccccaggaggagtatgagatcatcaacgtggaggtgaagcacggcggctttgtgtactaccaggagggctgctgcctggtgcgcagcaaggatgaggaggccgacaatgacaactatgaggtgctcttcaacctggaggagctgaagctggaccagcccttcatcgactgcatccgggtggccccagatgagaagtatgtggccgccaagatcagaacagaggacagcgaggccagcacctgtgtgatcatcaagctgagtgaccagcctgtgatggaggccagcttccccaacgtgtcctcctttgagtgggtgaaggatgaagaagatgaagatgtgctcttctacaccttccagaggaacctgcgctgccatgatgtgtaccgggccaccttcggggacaacaagagaaatgaacgcttctacacagagaaggaccccagctactttgtgttcctgtacctgaccaaggacagccgcttcctgaccatcaacatcatgaacaagaccaccagcgaggtgtggctgattgatggcctgagcccctgggacccccctgtgctgatccagaagaggatccacggcgtgctgtactacgtggagcacagagatgatgagctgtacatcctgaccaacgtgggggagcccacagagttcaagctgatgaggacagctgctgacaccccagccatcatgaactgggacctcttcttcaccatgaagaggaacaccaaggtgattgacctggacatgttcaaggaccactgtgtgctcttcctgaagcacagcaacctgctgtatgtgaatgtgattggcctggctgatgattctgtgcgcagcctgaagctgcccccctgggcctgtggcttcatcatggacaccaacagcgaccccaagaactgccccttccagctgtgcagccccatccggccccccaagtactacacctacaagtttgctgagggcaagctgtttgaggagaccggccacgaggaccccatcaccaagaccagccgggtgctgcggctggaggccaagagcaaggatggcaagctggtgcccatgaccgtcttccacaagacagattctgaggacctgcagaagaagcccctgctggtgcacgtgtatggagcctacggcatggacctgaagatgaacttccggcctgagaggagagtgctggtggatgatggctggatcctggcctactgccacgtgcggggcggcggggagctgggcctgcagtggcacgcagatggccgcctgaccaagaagctgaatggcctggccgacctggaggcctgcatcaagaccctgcacggccagggcttcagccagcccagcctgaccaccctgacagccttctctgctggaggagtgctggccggggccctgtgcaacagcaaccctgagctggtgcgggctgtgaccctggaggcccccttcctggatgtgctgaacaccatgatggacaccaccctgcccctgaccctggaggagctggaggagtggggcaaccccagcagtgatgagaagcacaagaactacatcaagcgctactgcccctaccagaacatcaagccccagcactaccccagcatccacatcacagcctatgaaaatgatgagcgggtgcccctgaagggcatcgtgtcctacacagagaagctgaaggaggccatcgccgagcacgccaaggacaccggggagggctaccagacccccaacatcatcctggacatccagcccggcggcaaccacgtgattgaggacagccacaagaagatcacagcccagatcaagttcctgtatgaggagctgggcctggacagcacctctgtgtttgaggacctgaagaagtacctgaagttctag

SEQ ID NO: 165524 - DNA, 1491 bp, synthetic construct
  misc_feature 1..1491: note = Description of Artificial Sequence: Synthetic coding sequence
  source 1..1491: mol_type = other DNA
atgggcagaagagccctgctgctgctgctgctgtccttcctggccccctgggccaccatcgccctgcggcctgccctgcgggccctgggcagcctgcacctgcccaccaaccccaccagcctgcctgctgtggccaagaactacagcgtgctgtacttccagcagaaggtggaccacttcggcttcaacacagtgaagaccttcaaccagcgctacctggtggccgacaagtactggaagaagaatggaggcagcatcctcttctacacaggaaatgaaggagacatcatctggttctgcaacaacacaggcttcatgtgggatgtggccgaggagctgaaggccatgctggtgtttgctgagcaccgctactatggagagagcctgccctttggagacaacagcttcaaggacagccgccacctgaacttcctgaccagcgagcaggccctggccgactttgctgagctgatcaagcacctgaagaggaccatccctggagctgagaaccagcccgtcatcgccatcggcggcagctatggaggcatgctggccgcctggttcaggatgaagtacccccacatggtggtgggcgccctggccgccagcgcccccatctggcagtttgaggacctggtgccctgtggggtcttcatgaagatcgtgaccacagacttcaggaagagcggcccccactgcagcgagagcatccaccgctcctgggatgccatcaaccggctgagcaacacaggcagcggcctgcagtggctgaccggggccctgcacctgtgcagccccctgaccagccaggacatccagcacctgaaggactggatcagcgagacctgggtgaacctggccatggtggactacccctatgccagcaacttcctgcagcccctgcctgcctggcccatcaaggtggtgtgccagtacctgaagaaccccaacgtgtctgacagcctgctgctgcagaacatcttccaggccctgaatgtgtactacaactacagcggccaggtgaagtgcctgaacatcagcgagacagccaccagcagcctgggcaccctgggctggagctaccaggcctgcacagaggtggtgatgcccttctgcaccaacggggtggatgacatgtttgagccccacagctggaacctgaaggagctgagtgatgactgcttccagcagtggggcgtgcggccccggcccagctggatcaccaccatgtatggaggcaagaacatcagcagccacaccaacatcgtgttcagcaatggagagctggacccctggagcggcggcggcgtgaccaaggacatcacagacaccctggtggccgtgaccatcagcgagggcgcccaccacctggacctgcggaccaagaatgccctggaccccatgtctgtgctgctggcccggagcctggaggtgcgccacatgaagaactggatccgggacttctatgattctgctgggaagcagcactag

SEQ ID NO: 165525 - DNA, 1554 bp, synthetic construct
  misc_feature 1..1554: note = Description of Artificial Sequence: Synthetic coding sequence
  source 1..1554: mol_type = other DNA
atgggcagaagagccctgctgctgctgctgctgtccttcctggccccctgggccaccatcgccctgcggcctgccctgcgggccctgggcagcctgcacctgcccaccaaccccaccagcctgcctgctgtggccaagaactacagcgtgctgtacttccagcagaaggccctggccgccggccagctgcacatctgcatcatccagctgaaccactacaagacccccctggtggaccacttcggcttcaacacagtgaagaccttcaaccagcgctacctggtggccgacaagtactggaagaagaatggaggcagcatcctcttctacacaggaaatgaaggagacatcatctggttctgcaacaacacaggcttcatgtgggatgtggccgaggagctgaaggccatgctggtgtttgctgagcaccgctactacggggagagcctgccctttggagacaacagcttcaaggacagccgccacctgaacttcctgaccagcgagcaggccctggccgactttgctgagctgatcaagcacctgaagaggaccatccctggagctgagaaccagcctgtgattgccatcggcggcagctatggaggcatgctggccgcctggttcaggatgaagtacccccacatggtggtgggcgccctggccgccagcgcccccatctggcagtttgaggacctggtgccctgtggggtcttcatgaagatcgtgaccacagacttcaggaagagcggcccccactgcagcgagagcatccaccgctcctgggatgccatcaaccggctgagcaacacaggcagcggcctgcagtggctgactggagccctgcacctgtgcagccccctgaccagccaggacatccagcacctgaaggactggatcagcgagacctgggtgaacctggccatggtggactacccctatgccagcaacttcctgcagcccctgcctgcctggcccatcaaggtggtgtgccagtacctgaagaaccccaacgtgtctgacagcctgctgctgcagaacatcttccaggccctgaatgtgtactacaactacagcggccaggtgaagtgcctgaacatcagcgagacagccaccagcagcctgggcaccctgggctggagctaccaggcctgcacagaggtggtgatgcccttctgcaccaatggagtggatgacatgtttgagccccacagctggaacctgaaggagctgagtgatgactgcttccagcagtggggcgtgcggccccggcccagctggatcaccaccatgtatggaggcaagaacatcagcagccacaccaacatcgtgttcagcaatggagagctggacccctggagcggcggcggcgtgaccaaggacatcacagacaccctggtggccgtgaccatcagcgagggcgcccaccacctggacctgcggaccaagaatgccctggaccccatgtctgtgctgctggcccggagcctggaggtgcgccacatgaagaactggatccgggacttctatgacagcgctgggaagcagcactag

SEQ ID NO: 165526 - DNA, 1176 bp, synthetic construct
  misc_feature 1..1176: note = Description of Artificial Sequence: Synthetic coding sequence
  source 1..1176: mol_type = other DNA
atgtgggatgtggccgaggagctgaaggccatgctggtgtttgctgagcaccgctactacggggagagcctgccctttggagacaacagcttcaaggacagccgccacctgaacttcctgaccagcgagcaggccctggccgactttgctgagctgatcaagcacctgaagaggaccatccctggagctgagaaccagcctgtgattgccatcggcggcagctatggaggcatgctggccgcctggttcaggatgaagtacccccacatggtggtgggcgccctggccgccagcgcccccatctggcagtttgaggacctggtgccctgtggggtcttcatgaagatcgtgaccacagacttcaggaagagcggcccccactgcagcgagagcatccaccgctcctgggatgccatcaaccggctgagcaacacaggcagcggcctgcagtggctgactggagccctgcacctgtgcagccccctgaccagccaggacatccagcacctgaaggactggatcagcgagacctgggtgaacctggccatggtggactacccctatgccagcaacttcctgcagcccctgcctgcctggcccatcaaggtggtgtgccagtacctgaagaaccccaacgtgtctgacagcctgctgctgcagaacatcttccaggccctgaatgtgtactacaactacagcggccaggtgaagtgcctgaacatcagcgagacagccaccagcagcctgggcaccctgggctggagctaccaggcctgcacagaggtggtgatgcccttctgcaccaatggagtggatgacatgtttgagccccacagctggaacctgaaggagctgagtgatgactgcttccagcagtggggcgtgcggccccggcccagctggatcaccaccatgtatggaggcaagaacatcagcagccacaccaacatcgtgttcagcaatggagagctggacccctggagcggcggcggcgtgaccaaggacatcacagacaccctggtggccgtgaccatcagcgagggcgcccaccacctggacctgcggaccaagaatgccctggaccccatgtctgtgctgctggcccggagcctggaggtgcgccacatgaagaactggatccgggacttctatgacagcgctgggaagcagcactag

SEQ ID NO: 165527 - DNA, 1428 bp, synthetic construct
  misc_feature 1..1428: note = Description of Artificial Sequence: Synthetic coding sequence
  source 1..1428: mol_type = other DNA
atggagggcctgctgacccgctgccgggccctgcctgccctggccacctgcagccggcagctgagcggctacgtgccctgccgcttccaccactgtgccccccggcggggccggcggctgctgctgagcagggtcttccagccccagaacctgagagaagatagagtgctgagcctgcaggacaagagtgatgacctgacctgcaagagccagaggctgatgctgcaggtgggcctcatctacccagccagccctggctgctaccacctgctgccctacacagtgcgggccatggagaagctggtgcgggtgattgaccaggagatgcaggccatcggcggccagaaggtgaacatgcccagcctgagccctgctgagctgtggcaggccaccaaccgctgggacctgatgggcaaggagctgctgcggctgcgggacagacatggcaaggagtactgcctgggccccacccatgaggaggccatcacagccctgattgccagccagaagaagctgagctacaagcagctgcccttcctgctgtaccaggtgaccaggaagttcagagatgagccccggccccgcttcggcctgctgcggggccgggagttctacatgaaggacatgtacacctttgacagcagccctgaggccgcccagcagacctacagcctggtgtgtgatgcctactgcagcctcttcaacaagctgggcctgccctttgtgaaggtgcaggctgatgtgggcaccatcggcggcaccgtgtcccatgagttccagctgcctgtggacattggagaagatcggctggccatctgcccccgctgcagcttcagcgccaacatggagaccctggacctgagccagatgaactgcccagcctgccagggccccctgaccaagaccaagggcatcgaggtgggccacaccttctacctgggcaccaagtacagcagcatcttcaatgcccagttcaccaacgtgtgtgggaagcccaccctggccgagatgggctgctacggcctgggcgtgacccgcatcctggccgccgccatcgaggtgctgagcacagaggactgtgtgcgctggcccagcctgctggccccctaccaggcctgcctgatcccccccaagaagggcagcaaggagcaggccgccagcgagctgattggccagctgtatgaccacatcacagaggccgtgccccagctgcatggagaggtgctgctggatgacaggacccacctgaccatcggcaaccggctgaaggatgccaacaagtttggctaccccttcgtcatcatcgccggcaagagggccctggaggaccctgcccactttgaggtgtggtgccagaacacaggagaggtggccttcctgaccaaggatggagtgatggacctgctgacccctgtgcagacagtgtag

SEQ ID NO: 165528 - DNA, 498 bp, synthetic construct
  misc_feature 1..498: note = Description of Artificial Sequence: Synthetic coding sequence
  source 1..498: mol_type = other DNA
atggccaagatgaacctgagcagctacatcctgatcctgaccttcagcctcttcagccagggcatcctgctgagcgccagcaagagcatccggaacctggatgatgacatggtgttcaacaccttccggctgggcaagggcttccagaaggaggacacagctgagaagtctgtgattgcccccagcctggagcagtacaagaatgatgagagcagcttcatgaatgaggaggagaacaaggtgtccaagaacacaggcagcaagcacaacttcctgaaccacggcctgcccctgaacctggccatcaagccctacctggccctgaagggctctgtggccttcccagcagaaaatggagtgcagaacacagagagcacccaggagaagcgggagattggagatgaggagaacagcgccaagttccccatcggcagaagagactttgacatgctgcgctgcatgctgggccgggtgtaccggccctgctggcaggtgtag

SEQ ID NO: 165529 - DNA, 2598 bp, synthetic construct
  misc_feature 1..2598: note = Description of Artificial Sequence: Synthetic coding sequence
  source 1..2598: mol_type = other DNA
atggccctggtgctgggcagcctgctgctgctgggcctgtgtggcaacagcttcagcggcggccagcccagcagcacagatgcccccaaggcctggaactatgagctgcctgccaccaactatgagacccaggacagccacaaggccggccccatcggcatcctgtttgagctggtgcacatcttcctgtatgtggtgcagccccgggacttccctgaggacaccctgaggaagttcctgcagaaggcctatgagagcaagattgattatgacaagccagagaccgtcatcctgggcctgaagatcgtgtactatgaagctggcatcatcctgtgctgcgtgctgggcctgctcttcatcatcctgatgcccctggtgggctacttcttctgcatgtgccgctgctgcaacaagtgtggcggggagatgcaccagaggcagaaggaaaatggccccttcctgaggaagtgctttgccatcagcctgctggtgatctgcatcatcatcagcatcggcatcttctacggctttgtggccaaccaccaggtgaggacccgcatcaagaggagcaggaagctggccgacagcaacttcaaggacctgcggaccctgctgaatgagaccccagagcagatcaagtacatcctggcccagtacaacaccaccaaggacaaggccttcacagacctgaacagcatcaacagcgtgctgggcggcggcatcctggaccggctgcggcccaacatcatccctgtgctggatgagatcaagtccatggccacagccatcaaggagaccaaggaggccctggagaacatgaacagcaccctgaagagcctgcaccagcagagcacccagctgagcagcagcctgacctctgtgaagaccagcctgcggagcagcctgaatgaccccctgtgcctggtgcaccccagcagcgagacctgcaacagcatccggctgagcctgagccagctgaacagcaaccctgagctgcggcagctgccccctgtggatgctgagctggacaacgtgaacaacgtgctgaggacagacctggatggcctggtgcagcagggctaccagagcctgaatgacatcccagacagagtgcagaggcagaccaccaccgtggtggccggcatcaagagggtgctgaacagcattggaagtgacatcgacaacgtgacccagaggctgcccatccaggacatcctgagcgccttctctgtgtatgtgaacaacacagagagctacatccacaggaacctgcccaccctggaggagtatgacagctactggtggctgggcggcctggtgatctgcagcctgctgaccctcatcgtcatcttctactacctgggcctgctgtgtggggtgtgtggctatgacagacatgccacccccaccacccggggctgtgtgagcaacacaggaggagtcttcctgatggtgggcgtgggcctgtccttcctgttctgctggatcctgatgatcatcgtggtgctgacctttgtgtttggagccaacgtggagaagctgatctgtgagccctacaccagcaaggagctgttccgggtgctggacaccccctacctgctgaatgaagactgggagtactacctgagcggcaagctgttcaacaagagcaagatgaagctgacctttgagcaggtgtacagcgactgcaagaagaacagaggcacctacggcaccctgcacctgcagaacagcttcaacatcagcgagcacctgaacatcaatgagcacacaggcagcatcagcagcgagctggagagcctgaaggtgaacctgaacatcttcctgctgggcgctgctggcaggaagaacctgcaggactttgctgcctgtggcatcgacaggatgaactatgacagctacctggcccagacaggcaagagccctgctggggtgaacctgctgagctttgcctatgacctggaggccaaggccaacagcctgcccccaggcaacctgaggaacagcctgaagagagatgcccagaccatcaagaccatccaccagcagagggtgctgcccatcgagcagagcctgagcaccctgtaccagagcgtgaagatcctgcagaggactggaaatggcctgctggagcgggtgacccgcatcctggccagcctggactttgcccagaacttcatcaccaacaacaccagcagcgtcatcatcgaggagaccaagaagtatggccgcaccatcatcggctactttgagcactacctgcagtggattgagttcagcatcagcgagaaggtggccagctgcaagcctgtggccacagccctggacacagctgtggatgtgttcctgtgcagctacatcatcgaccccctgaacctcttctggtttggcatcggcaaggccaccgtcttcctgctgcctgccctgatctttgctgtgaagctggccaagtactacagaaggatggacagtgaagatgtgtatgatgatgtggagaccatccccatgaagaacatggagaatggaaacaacggctaccacaaggaccacgtgtatggcatccacaaccctgtgatgaccagccccagccagcactag

SEQ ID NO: 165530 - DNA, 2571 bp, synthetic construct
  misc_feature 1..2571: note = Description of Artificial Sequence: Synthetic coding sequence
  source 1..2571: mol_type = other DNA
atggccctggtgctgggcagcctgctgctgctgggcctgtgtggcaacagcttcagcggcggccagcccagcagcacagatgcccccaaggcctggaactatgagctgcctgccaccaactatgagacccaggacagccacaaggccggccccatcggcatcctgtttgagctggtgcacatcttcctgtatgtggtgcagccccgggacttccctgaggacaccctgaggaagttcctgcagaaggcctatgagagcaagattgattatgacaagatcgtgtactatgaggccggcatcatcctgtgctgcgtgctgggcctgctcttcatcatcctgatgcccctggtgggctacttcttctgcatgtgccgctgctgcaacaagtgtggcggggagatgcaccagaggcagaaggaaaatggccccttcctgaggaaatgttttgccatcagcctgctggtgatctgcatcatcatcagcatcggcatcttctacggctttgtggccaaccaccaggtgaggacccgcatcaagaggagcaggaagctggccgacagcaacttcaaggacctgcggaccctgctgaatgagaccccagagcagatcaagtacatcctggcccagtacaacaccaccaaggacaaggccttcacagacctgaacagcatcaacagcgtgctgggcggcggcatcctggaccggctgcggcccaacatcatccctgtgctggatgagatcaagtccatggccacagccatcaaggagaccaaggaggccctggagaacatgaacagcaccctgaagagcctgcaccagcagagcacccagctgagcagcagcctgacctctgtgaagaccagcctgcggagcagcctgaatgaccccctgtgcctggtgcaccccagcagcgagacctgcaacagcatccggctgagcctgagccagctgaacagcaaccctgagctgcggcagctgccccctgtggatgctgagctggacaacgtgaacaacgtgctgaggacagacctggatggcctggtgcagcagggctaccagagcctgaatgacatcccagacagagtgcagaggcagaccaccaccgtggtggccggcatcaagagggtgctgaacagcatcggcagtgacatcgacaacgtgacccagaggctgcccatccaggacatcctgagcgccttctctgtgtatgtgaacaacacagagagctacatccacaggaacctgcccaccctggaggagtatgacagctactggtggctgggcggcctggtgatctgcagcctgctgaccctgattgtcatcttctactacctgggcctgctgtgtggggtgtgtggctatgacagacatgccacccccaccacccggggctgtgtgagcaacacaggaggagtcttcctgatggtgggcgtgggcctgtccttcctgttctgctggatcctgatgatcatcgtggtgctgacctttgtgtttggagccaacgtggagaagctgatctgtgagccctacaccagcaaggagctgttccgggtgctggacaccccctacctgctgaatgaagactgggagtactacctgagcggcaagctgttcaacaagagcaagatgaagctgacctttgagcaggtgtacagcgactgcaagaagaacagaggcacctacggcaccctgcacctgcagaacagcttcaacatcagcgagcacctgaacatcaatgagcacacaggcagcatcagcagcgagctggagagcctgaaggtgaacctgaacatcttcctgctgggcgccgccggcaggaagaacctgcaggactttgctgcctgtggcatcgacaggatgaactatgacagctacctggcccagacaggcaagagccctgctggggtgaacctgctgagctttgcctatgacctggaggccaaggccaacagcctgcccccaggcaacctgaggaacagcctgaagagagatgcccagaccatcaagaccatccaccagcagagggtgctgcccatcgagcagagcctgagcaccctgtaccagagcgtgaagatcctgcagaggactggaaatggcctgctggagcgggtgacccgcatcctggccagcctggactttgcccagaacttcatcaccaacaacaccagcagcgtcatcatcgaggagaccaagaagtatggccgcaccatcatcggctactttgagcactacctgcagtggattgagttcagcatcagcgagaaggtggccagctgcaagcctgtggccacagccctggacacagctgtggatgtgttcctgtgcagctacatcatcgaccccctgaacctcttctggtttggaattggcaaggccaccgtcttcctgctgcctgccctgatctttgctgtgaagctggccaagtactacagaaggatggattctgaagatgtgtatgatgatgtggagaccatccccatgaagaacatggagaatggaaataatggctaccacaaggaccacgtgtatggcatccacaaccctgtgatgaccagccccagccagcactag

SEQ ID NO: 165531 - DNA, 2571 bp, synthetic construct; identical to SEQ ID NO: 165530
  misc_feature 1..2571: note = Description of Artificial Sequence: Synthetic coding sequence
  source 1..2571: mol_type = other DNA

SEQ ID NO: 165532 - DNA, 177 bp, synthetic construct
  misc_feature 1..177: note = Description of Artificial Sequence: Synthetic coding sequence
  source 1..177: mol_type = other DNA
atggccctggtgctgggcagcctgctgctgctgggcctgtgtggcaacagcttcagcggcggccagcccagcagcacagatgcccccaaggcctggaactatgagctgcctgccaccaactatgagacccaggacagccacaaggccggccccatcggcatcctgtttgagctgtag

SEQ ID NO: 165533 - DNA, 123 bp, synthetic construct
  misc_feature 1..123: note = Description of Artificial Sequence: Synthetic coding sequence
  source 1..123: mol_type = other DNA
atggccctggtgctgggcagcctgctgctgctgggcctgtgtggcaacagcttcagcggcggccagcccagcagcacagatgcccccaaggcctggaactatgagctgcctgccaccaactag

SEQ ID NO: 165534 - DNA, 2598 bp, synthetic construct; identical to SEQ ID NO: 165529
  misc_feature 1..2598: note = Description of Artificial Sequence: Synthetic coding sequence
  source 1..2598: mol_type = other DNA

SEQ ID NO: 165535 - DNA, 45 bp, synthetic construct; identical to SEQ ID NO: 94739
  misc_feature 1..45: note = Description of Artificial Sequence: Synthetic coding sequence
  source 1..45: mol_type = other DNA

SEQ ID NO: 165536 - DNA, 2505 bp, synthetic construct
  misc_feature 1..2505: note = Description of Artificial Sequence: Synthetic coding sequence
  source 1..2505: mol_type = other DNA
atggccctggtgctgggcagcctgctgctgctgggcctgtgtggcaacagcttcagcggcggccagcccagcagcacagatgcccccaaggcctggaactatgagctgcctgccaccaactatgagacccaggacagccacaaggccggccccatcggcatcctgtttgagctggtgcacatcttcctgtatgtggtgcagccccgggacttccctgaggacaccctgaggaagttcctgcagaaggcctatgagagcaagattgattatgacaagccagagaccgtcatcctgggcctgaagatcgtgtactatgaagctggcatcatcctgtgctgcgtgctgggcctgctcttcatcatcctgatgcccctggtgggctacttcttctgcatgtgccgctgctgcaacaagtgtggcggggagatgcaccagaggcagaaggaaaatggccccttcctgaggaagtgctttgccatcagcctgctggtgatctgcatcatcatcagcatcggcatcttctacggctttgtggccaaccaccaggtgaggacccgcatcaagaggagcaggaagctggccgacagcaacttcaaggacctgcggaccctgctgaatgagaccccagagcagatcaagtacatcctggcccagtacaacaccaccaaggacaaggccttcacagacctgaacagcatcaacagcgtgctgggcggcggcatcctggaccggctgcggcccaacatcatccctgtgctggatgagatcaagtccatggccacagccatcaaggagaccaaggaggccctggagaacatgaacagcaccctgaagagcctgcaccagcagagcacccagctgagcagcagcctgacctctgtgaagaccagcctgcggagcagcctgaatgaccccctgtgcctggtgcaccccagcagcgagacctgcaacagcatccggctgagcctgagccagctgaacagcaaccctgagctgcggcagctgccccctgtggatgctgagctggacaacgtgaacaacgtgctgaggacagacctggatggcctggtgcagcagggctaccagagcctgaatgacatcccagacagagtgcagaggcagaccaccaccgtggtggccggcatcaagagggtgctgaacagcattggaagtgacatcgacaacgtgacccagaggctgcccatccaggacatcctgagcgccttctctgtgtatgtgaacaacacagagagctacatccacaggaacctgcccaccctggaggagtatgacagctactggtggctgggcggcctggtgatctgcagcctgctgaccctcatcgtcatcttctactacctgggcctgctgtgtggggtgtgtggctatgacagacatgccacccccaccacccggggctgtgtgagcaacacaggaggagtcttcctgatggtgggcgtgggcctgtccttcctgttctgctggatcctgatgatcatcgtggtgctgacctttgtgtttggagccaacgtggagaagctgatctgtgagccctacaccagcaaggagctgttccgggtgctggacaccccctacctgctgaatgaagactgggagtactacctgagcggcaagctgttcaacaagagcaagatgaagctgacctttgagcaggtgtacagcgactgcaagaagaacagaggcacctacggcaccctgcacctgcagaacagcttcaacatcagcgagcacctgaacatcaatgagcacacaggcagcatcagcagcgagctggagagcctgaaggtgaacctgaacatcttcctgctgggcgctgctggcaggaagaacctgcaggactttgctgcctgtggcatcgacaggatgaactatgacagctacctggcccagacaggcaagagccctgctggggtgaacctgctgagctttgcctatgacctggaggccaaggccaacagcctgcccccaggcaacctgaggaacagcctgaagagagatgcccagaccatcaagaccatccaccagcagagggtgctgcccatcgagcagagcctgagcaccctgtaccagagcgtgaagatcctgcagaggactggaaatggcctgctggagcgggtgacccgcatcctggccagcctggactttgcccagaacttcatcaccaacaacaccagcagcgtcatcatcgaggagaccaagaagtatggccgcaccatcatcggctactttgagcactacctgcagtggattgagttcagcatcagcgagaaggtggccagctgcaagcctgtggccacagccctggacacagctgtggatgtgttcctgtgcagctacatcatcgaccccctgaacctcttctggtttggcatcggcaaggccaccgtcttcctgctgcctgccctgatctttgctgtgaagctggccaagtactacagaaggatggacagtgaagatgtgtatgatgaccccagccagcactag

SEQ ID NO: 165537 - DNA, 2529 bp, synthetic construct
  misc_feature 1..2529: note = Description of Artificial Sequence: Synthetic coding sequence
  source 1..2529: mol_type = other DNA
atggccctggtgctgggcagcctgctgctgctgggcctgtgtggcaacagcttcagcggcggccagcccagcagcacagatgcccccaaggcctggaactatgagctgcctgccaccaactatgagacccaggacagccacaaggccggccccatcggcatcctgtttgagctggtgcacatcttcctgtatgtggtgcagccccgggacttccctgaggacaccctgaggaagttcctgcagaaggcctatgagagcaagattgattatgacaagccagagaccgtcatcctgggcctgaagatcgtgtactatgaagctggcatcatcctgtgctgcgtgctgggcctgctcttcatcatcctgatgcccctggtgggctacttcttctgcatgtgccgctgctgcaacaagtgtggcggggagatgcaccagaggcagaaggaaaatggccccttcctgaggaagtgctttgccatcagcctgctggtgatctgcatcatcatcagcatcggcatcttctacggctttgtggccaaccaccaggtgaggacccgcatcaagaggagcaggaagctggccgacagcaacttcaaggacctgcggaccctgctgaatgagaccccagagcagatcaagtacatcctggcccagtacaacaccaccaaggacaaggccttcacagacctgaacagcatcaacagcgtgctgggcggcggcatcctggaccggctgcggcccaacatcatccctgtgctggatgagatcaagtccatggccacagccatcaaggagaccaaggaggccctggagaacatgaacagcaccctgaagagcctgcaccagcagagcacccagctgagcagcagcctgacctctgtgaagaccagcctgcggagcagcctgaatgaccccctgtgcctggtgcaccccagcagcgagacctgcaacagcatccggctgagcctgagccagctgaacagcaaccctgagctgcggcagctgccccctgtggatgctgagctggacaacgtgaacaacgtgctgaggacagacctggatggcctggtgcagcagggctaccagagcctgaatgacatcccagacagagtgcagaggcagaccaccaccgtggtggccggcatcaagagggtgctgaacagcattggaagtgacatcgacaacgtgacccagaggctgcccatccaggacatcctgagcgccttctctgtgtatgtgaacaacacagagagctacatccacaggaacctgcccaccctggaggagtatgacagctactggtggctgggcggcctggtgatctgcagcctgctgaccctcatcgtcatcttctactacctgggcctgctgtgtggggtgtgtggctatgacagacatgccacccccaccacccggggctgtgtgagcaacacaggaggagtcttcctgatggtgggcgtgggcctgtccttcctgttctgctggatcctgatgatcatcgtggtgctgacctttgtgtttggagccaacgtggagaagctgatctgtgagccctacaccagcaaggagctgttccgggtgctggacaccccctacctgctgaatgaagactgggagtactacctgagcggcaagctgttcaacaagagcaagatgaagctgacctttgagcaggtgtacagcgactgcaagaagaacagaggcacctacggcaccctgcacctgcagaacagcttcaacatcagcgagcacctgaacatcaatgagcacacaggcagcatcagcagcgagctggagagcctgaaggtgaacctgaacatcttcctgctgggcgctgctggcaggaagaacctgcaggactttgctgcctgtggcatcgacaggatgaactatgacagctacctggcccagacaggcaagagccctgctggggtgaacctgctgagctttgcctatgacctggaggccaaggccaacagcctgcccccaggcaacctgaggaacagcctgaagagagatgcccagaccatcaagaccatccaccagcagagggtgctgcccatcgagcagagcctgagcaccctgtaccagagcgtgaagatcctgcagaggactggaaatggcctgctggagcgggtgacccgcatcctggccagcctggactttgcccagaacttcatcaccaacaacaccagcagcgtcatcatcgaggagaccaagaagtatggccgcaccatcatcggctactttgagcactacctgcagtggattgagttcagcatcagcgagaaggtggccagctgcaagcctgtggccacagccctggacacagctgtggatgtgttcctgtgcagctacatcatcgaccccctgaacctcttctggtttggcatcggcaaggccaccgtcttcctgctgcctgccctgatctttgctgtgaagctggccaagtactacagaaggatggacagtgaagatgtgtatgatgatgtggagaccatccccatgaagaaccccagccagcactag

SEQ ID NO: 165538 - DNA, 2493 bp, synthetic construct
  misc_feature 1..2493: note = Description of Artificial Sequence: Synthetic coding sequence
  source 1..2493: mol_type = other DNA
atggccctggtgctgggcagcctgctgctgctgggcctgtgtggcaacagcttcagcggcggccagcccagcagcacagatgcccccaaggcctggaactatgagctgcctgccaccaactatgagacccaggacagccacaaggccggccccatcggcatcctgtttgagctggtgcacatcttcctgtatgtggtgcagccccgggacttccctgaggacaccctgaggaagttcctgcagaaggcctatgagagcaagattgattatgacaagatcgtgtactatgaggccggcatcatcctgtgctgcgtgctgggcctgctcttcatcatcctgatgcccctggtgggctacttcttctgcatgtgccgctgctgcaacaagtgtggcggggagatgcaccagaggcagaaggaaaatggccccttcctgaggaaatgttttgccatcagcctgctggtgatctgcatcatcatcagcatcggcatcttctacggctttgtggccaaccaccaggtgaggacccgcatcaagaggagcaggaagctggccgacagcaacttcaaggacctgcggaccctgctgaatgagaccccagagcagatcaagtacatcctggcccagtacaacaccaccaaggacaaggccttcacagacctgaacagcatcaacagcgtgctgggcggcggcatcctggaccggctgcggcccaacatcatccctgtgctggatgagatcaagtccatggccacagccatcaaggagaccaaggaggccctggagaacatgaacagcaccctgaagagcctgcaccagcagagcacccagctgagcagcagcctgacctctgtgaagaccagcctgcggagcagcctgaatgaccccctgtgcctggtgcaccccagcagcgagacctgcaacagcatccggctgagcctgagccagctgaacagcaaccctgagctgcggcagctgccccctgtggatgctgagctggacaacgtgaacaacgtgctgaggacagacctggatggcctggtgcagcagggctaccagagcctgaatgacatcccagacagagtgcagaggcagaccaccaccgtggtggccggcatcaagagggtgctgaacagcatcggcagtgacatcgacaacgtgacccagaggctgcccatccaggacatcctgagcgccttctctgtgtatgtgaacaacacagagagctacatccacaggaacctgcccaccctggaggagtatgacagctactggtggctgggcggcctggtgatctgcagcctgctgaccctgattgtcatcttctactacctgggcctgctgtgtggggtgtgtggctatgacagacatgccacccccaccacccggggctgtgtgagcaacacaggaggagtcttcctgatggtgggcgtgggcctgtccttcctgttctgctggatcctgatgatcatcgtggtgctgacctttgtgtttggagccaacgtggagaagctgatctgtgagccctacaccagcaaggagctgttccgggtgctggacaccccctacctgctgaatgaagactgggagtactacctgagcggcaagctgttcaacaagagcaagatgaagctgacctttgagcaggtgtacagcgactgcaagaagaacagaggcacctacggcaccctgcacctgcagaacagcttcaacatcagcgagcacctgaacatcaatgagcacacaggcagcatcagcagcgagctggagagcctgaaggtgaacctgaacatcttcctgctgggcgccgccggcaggaagaacctgcaggactttgctgcctgtggcatcgacaggatgaactatgacagctacctggcccagacaggcaagagccctgctggggtgaacctgctgagctttgcctatgacctggaggccaaggccaacagcctgcccccaggcaacctgaggaacagcctgaagagagatgcccagaccatcaagaccatccaccagcagagggtgctgcccatcgagcagagcctgagcaccctgtaccagagcgtgaagatcctgcagaggactggaaatggcctgctggagcgggtgacccgcatcctggccagcctggactttgcccagaacttcatcaccaacaacaccagcagcgtcatcatcgaggagaccaagaagtatggccgcaccatcatcggctactttgagcactacctgcagtggattgagttcagcatcagcgagaaggtggccagctgcaagcctgtggccacagccctggacacagctgtggatgtgttcctgtgcagctacatcatcgaccccctgaacctcttctggtttggaattggcaaggccaccgtcttcctgctgcctgccctgatctttgctgtgaagctggccaagtactacagaaggatggattctgaagatgtgtatgatgacagctcctgggtgacctctgtgcagtgctag

SEQ ID NO: 165539 - DNA, 681 bp, synthetic construct
  misc_feature 1..681: note = Description of Artificial Sequence: Synthetic coding sequence
  source 1..681: mol_type = other DNA
atggaggccgagcggcggcggcaggccgagaagcccaagaagggccgggtgggcagcaacctgctgcctgagcggcacccagccaccggcacccccaccaccaccgtggacagcagcgccccaccctgccggcggctgcctggagctgggggcggccgcagccgcttcagcccccagggcggccagaggggccggccccacagcagaagaagacacaggaccaccttcagccctgtgcagctggagcagctggagagcgccttcggcaggaaccagtacccagacatctgggcccgggagagcctggcccgggacaccggcctgtctgaggcccgcatccaggtgtggttccagaacagaagagccaagcagaggaagcaggagaggagcctgctgcagcccctggcccacctgagccctgctgccttcagcagcttcctgcctgagagcacagcctgcccctacagctatgctgcccctcctcctcctgtgacctgcttcccccacccctacagccacgccctgcccagccagcccagcactggaggagcctttgccctgagccaccagagcgaggactggtaccccaccctgcacccagccccagctggccacctgccctgccccccacctccacccatgctgcccctgagcctggagcccagcaagtcctggaactag

SEQ ID NO: 165540 - DNA, 417 bp, synthetic construct
  misc_feature 1..417: note = Description of Artificial Sequence: Synthetic coding sequence
  source 1..417: mol_type = other DNA
aacatcagcctgtgcccagagatctgcttccagaagattgagagccaggtgtactttgtgcgggtggacagcggcatccagcccggcagtgacatcagcatctactatgaccccatgatcagcaagctgatcacctacggcagtgacagaacagaggccctgaagaggatggctgatgccctggacaactacgtgatccggggcgtgacccacaacatcgccctgctgcgggaggtgatcatcaacagcagatttgtgaagggggacatcagcaccaagttcctgagtgatgtgtacccagatggcttcaagggccacatgctgaccaagtctgagaagaaccagctgctggccatcgccagcagcctgtttgtggccttccagctgcgggcccagcacttccaggagaacagctag

SEQ ID NO: 165541 - DNA, 363 bp, synthetic construct
  misc_feature 1..363: note = Description of Artificial Sequence: Synthetic coding sequence
  source 1..363: mol_type = other DNA
atgagcatccagttcctgggcaccgtgtacaaggtgaacatcctgacccggctggccgctgagctgaacaagttcatgctggagaaggtgacagaggacaccagctctgtgctgcggagccccatgcctggggtggtggtggccgtgtctgtgaagccaggagatgctgccaccagcagcctgtctgtggagatctgcctcttctggaccttccaggtggccgagggccaggagatctgtgtgattgaggccatgaagatgcagaacagcatgacagctgggaagacaggcaccgtgaagtctgtgcactgccaggccggggacacagtgggggagggggacctgctggtggagctggagtag

SEQ ID NO: 165542 - DNA, 2046 bp, synthetic construct
  misc_feature 1..2046: note = Description of Artificial Sequence: Synthetic coding sequence
  source 1..2046: mol_type = other DNA
atggccggcttctgggtgggcacagcccccctggtggccgccggccggcggggccgctggccaccccagcagctgatgctgtctgctgccctgcggaccctgaagcacgtgctgtactacagccggcagtgcctgatggtgtccaggaacctgggctctgtgggctatgaccccaatgagaagacctttgacaagatcctggtggccaacagaggagagatcgcctgcagggtcatccgcacctgcaagaagatgggcatcaagacagtggccatccacagtgatgtggatgccagctctgtgcacgtgaagatggctgatgaagctgtgtgtgtgggccctgcccccaccagcaagagctacctgaacatggatgccatcatggaggccatcaagaagacccgggcccaggccgtgcaccctggctacggcttcctgtctgagaacaaggagtttgcccgctgcctggccgcagaagatgtggtgttcatcggccctgacacccacgccatccaggccatgggagacaagattgagagcaagctgctggccaagaaggccgaggtgaacaccatccctggctttgatggagtggtgaaggatgctgaggaggccgtgcgcatcgcccgggagatcggctaccctgtgatgatcaaggccagcgctgggggcggcggcaagggcatgagaattgcctgggatgatgaggagaccagagatggcttccggctgagcagccaggaggccgccagcagctttggagatgaccggctgctgattgagaagttcatcgacaaccccaggcacatcgagatccaggtgctgggggacaagcatggaaatgccctgtggctgaatgaaagagaatgttccatccagaggaggaaccagaaggtggtggaggaggcccccagcatcttcctggatgctgagacccggcgggccatgggagagcaggccgtggccctggcccgggctgtgaagtacagcagcgctggcaccgtggagttcctggtggacagcaagaagaacttctacttcctggagatgaacacccggctgcaggtggagcaccctgtgacagagtgcatcaccggcctggacctggtgcaggagatgatccgggtggccaagggctaccccctgcggcacaagcaggccgacatccgcatcaatggctgggccgtggagtgccgggtgtatgcagaggacccctacaagagctttggcctgcccagcatcggccgcctgagccagtaccaggagcccctgcacctgcccggggtgcgggtggacagcggcatccagcccggcagtgacatcagcatctactatgaccccatgatcagcaagctgatcacctacggcagtgacagaacagaggccctgaagaggatggctgatgccctggacaactacgtgatccggggcgtgacccacaacatcgccctgctgcgggaggtgatcatcaacagcagatttgtgaagggggacatcagcaccaagttcctgagtgatgtgtacccagatggcttcaagggccacatgctgaccaagtctgagaagaaccagctgctggccatcgccagcagcctgtttgtggccttccagctgcgggcccagcacttccaggagaacagcaggatgcctgtgatcaagccagacatcgccaactgggagctgtctgtgaagctgcatgacaaggtgcacacagtggtggccagcaacaatggatctgtgttttctgtggaggtggatggcagcaagctgaatgtgaccagcacctggaacctggccagccccctgctgtctgtgtctgtggatggcacccagaggacagtgcagtgcctgagccgggaggccggcggcaacatgagcatccagttcctgggcaccgtggtggccgagggccaggagatctgtgtgattgaggccatgaagatgcagaacagcatgacagctgggaagacaggaacagtgaagtctgtgcactgccaggccggggacacagtgggggagggggacctgctggtggagctggagtag

SEQ ID NO: 165543 - DNA, 2187 bp, synthetic construct
  misc_feature 1..2187: note = Description of Artificial Sequence: Synthetic coding sequence
  source 1..2187: mol_type = other DNA
atggccggcttctgggtgggcacagcccccctggtggccgccggccggcggggccgctggccaccccagcagctgatgctgtctgctgccctgcggaccctgaagcacgtgctgtactacagccggcagtgcctgatggtgtccaggaacctgggctctgtgggctatgaccccaatgagaagacctttgacaagatcctggtggccaacagaggagagatcgcctgcagggtcatccgcacctgcaagaagatgggcatcaagacagtggccatccacagtgatgtggatgccagctctgtgcacgtgaagatggctgatgaagctgtgtgtgtgggccctgcccccaccagcaagagctacctgaacatggatgccatcatggaggccatcaagaagacccgggcccaggccgtgcaccctggctacggcttcctgtctgagaacaaggagtttgcccgctgcctggccgcagaagatgtggtgttcatcggccctgacacccacgccatccaggccatgggagacaagattgagagcaagctgctggccaagaaggccgaggtgaacaccatccctggctttgatggagtggtgaaggatgctgaggaggccgtgcgcatcgcccgggagatcggctaccctgtgatgatcaaggccagcgctgggggcggcggcaagggcatgagaattgcctgggatgatgaggagaccagagatggcttccggctgagcagccaggaggccgccagcagctttggagatgaccggctgctgattgagaagttcatcgacaaccccaggcacatcgagatccaggtgctgggggacaagcatggaaatgccctgtggctgaatgaaagagaatgttccatccagaggaggaaccagaaggtggtggaggaggcccccagcatcttcctggatgctgagacccggcgggccatgggagagcaggccgtggccctggcccgggctgtgaagtacagcagcgctggcaccgtggagttcctggtggacagcaagaagaacttctacttcctggagatgaacacccggctgcaggtggagcaccctgtgacagagtgcatcaccggcctggacctggtgcaggagatgatccgggtggccaagggctaccccctgcggcacaagcaggccgacatccgcatcaatggctgggccgtggagtgccgggtgtatgcagaggacccctacaagagctttggcctgcccagcatcggccgcctgagccagtaccaggagcccctgcacctgcccggggtgcgggtggacagcggcatccagcccggcagtgacatcagcatctactatgaccccatgatcagcaagctgatcacctacggcagtgacagaacagaggccctgaagaggatggctgatgccctggacaactacgtgatccggggcgtgacccacaacatcgccctgctgcgggaggtgatcatcaacagcagatttgtgaagggggacatcagcaccaagttcctgagtgatgtgtacccagatggcttcaagggccacatgctgaccaagtctgagaagaaccagctgctggccatcgccagcagcctgtttgtggccttccagctgcgggcccagcacttccaggagaacagcaggatgcctgtgatcaagccagacatcgccaactgggagctgtctgtgaagctgcatgacaaggtgcacacagtggtggccagcaacaatggatctgtgttttctgtggaggtggatggcagcaagctgaatgtgaccagcacctggaacctggccagccccctgctgtctgtgtctgtggatggcacccagaggacagtgcagtgcctgagccgggaggccggcggcaacatgagcatccagttcctgggcaccgtgtacaaggtgaacatcctgacccggctggccgctgagctgaacaagttcatgctggagaaggtgacagaggacaccagctctgtgctgcggagccccatgcctggggtggtggtggccgtgtctgtgaagccaggagatgctgtggccgagggccaggagatctgtgtgattgaggccatgaagatgcagaacagcatgacagctgggaagacaggcaccgtgaagtctgtgcactgccaggccggggacacagtgggggagggggacctgctggtggagctggagtag

SEQ ID NO: 165544 - DNA, 2109 bp, synthetic construct
  misc_feature 1..2109: note = Description of Artificial Sequence: Synthetic coding sequence
  source 1..2109: mol_type = other DNA
atggccggcttctgggtgggcacagcccccctggtggccgccggccggcggggccgctggccaccccagcagctgatgctgtctgctgccctgcggaccctgaagacctttgacaagatcctggtggccaacagaggagagatcgcctgcagggtcatccgcacctgcaagaagatgggcatcaagacagtggccatccacagtgatgtggatgccagctctgtgcacgtgaagatggctgatgaagctgtgtgtgtgggccctgcccccaccagcaagagctacctgaacatggatgccatcatggaggccatcaagaagacccgggcccaggccgtgcaccctggctacggcttcctgtctgagaacaaggagtttgcccgctgcctggccgcagaagatgtggtgttcatcggccctgacacccacgccatccaggccatgggagacaagattgagagcaagctgctggccaagaaggccgaggtgaacaccatccctggctttgatggagtggtgaaggatgctgaggaggccgtgcgcatcgcccgggagatcggctaccctgtgatgatcaaggccagcgctgggggcggcggcaagggcatgagaattgcctgggatgatgaggagaccagagatggcttccggctgagcagccaggaggccgccagcagctttggagatgaccggctgctgattgagaagttcatcgacaaccccaggcacatcgagatccaggtgctgggggacaagcatggaaatgccctgtggctgaatgaaagagaatgttccatccagaggaggaaccagaaggtggtggaggaggcccccagcatcttcctggatgctgagacccggcgggccatgggagagcaggccgtggccctggcccgggctgtgaagtacagcagcgctggcaccgtggagttcctggtggacagcaagaagaacttctacttcctggagatgaacacccggctgcaggtggagcaccctgtgacagagtgcatcaccggcctggacctggtgcaggagatgatccgggtggccaagggctaccccctgcggcacaagcaggccgacatccgcatcaatggctgggccgtggagtgccgggtgtatgcagaggacccctacaagagctttggcctgcccagcatcggccgcctgagccagtaccaggagcccctgcacctgcccggggtgcgggtggacagcggcatccagcccggcagtgacatcagcatctactatgaccccatgatcagcaagctgatcacctacggcagtgacagaacagaggccctgaagaggatggctgatgccctggacaactacgtgatccggggcgtgacccacaacatcgccctgctgcgggaggtgatcatcaacagcagatttgtgaagggggacatcagcaccaagttcctgagtgatgtgtacccagatggcttcaagggccacatgctgaccaagtctgagaagaaccagctgctggccatcgccagcagcctgtttgtggccttccagctgcgggcccagcacttccaggagaacagcaggatgcctgtgatcaagccagacatcgccaactgggagctgtctgtgaagctgcatgacaaggtgcacacagtggtggccagcaacaatggatctgtgttttctgtggaggtggatggcagcaagctgaatgtgaccagcacctggaacctggccagccccctgctgtctgtgtctgtggatggcacccagaggacagtgcagtgcctgagccgggaggccggcggcaacatgagcatccagttcctgggcaccgtgtacaaggtgaacatcctgacccggctggccgctgagctgaacaagttcatgctggagaaggtgacagaggacaccagctctgtgctgcggagccccatgcctggggtggtggtggccgtgtctgtgaagccaggagatgctgtggccgagggccaggagatctgtgtgattgaggccatgaagatgcagaacagcatgacagctgggaagacaggcaccgtgaagtctgtgcactgccaggccggggacacagtgggggagggggacctgctggtggagctggagtag

SEQ ID NO: 165545 - DNA, 255 bp, synthetic construct
  misc_feature 1..255: note = Description of Artificial Sequence: Synthetic coding sequence
  source 1..255: mol_type = other DNA
tgaaactgggagctgtctgtgaagctgcatgacaaggtgcacacagtggtggccagcaacaatggatctgtgttttctgtggaggtggatggcagcaagctgaatgtgaccagcacctggaacctggccagccccctgctgtctgtgtctgtggatggcacccagaggacagtgcagtgcctgagccgggaggccggcggcaacatgagcatccagttcctgggcaccgtgccctggaggaagctgctggactag

SEQ ID NO: 165546 - DNA, 336 bp, synthetic construct
  misc_feature 1..336: note = Description of Artificial Sequence: Synthetic coding sequence
  source 1..336: mol_type = other DNA
tacaaggtgaacatcctgacccggctggccgctgagctgaacaagttcatgctggagaaggtgacagaggacaccagctctgtgctgcggagccccatgcctggggtggtggtggccgtgtctgtgaagccaggagatgctgccaccagcagcctgtctgtggagatctgcctcttctggaccttccaggtggccgagggccaggagatctgtgtgattgaggccatgaagatgcagaacagcatgacagctgggaagacaggaacagtgaagtctgtgcactgccaggccggggacacagtgggggagggggacctgctggtggagctggagtag

SEQ ID NO: 165547 - DNA, 405 bp, synthetic construct
  misc_feature 1..405: note = Description of Artificial Sequence: Synthetic coding sequence
  source 1..405: mol_type = other DNA
tgaatgcctgtgatcaagccagacatcgccaactgggagctgtctgtgaagctgcatgacaaggtgcacacagtggtggccagcaacaacggcagcgtcttctctgtggaggtggatggcagcaagctgaatgtgaccagcacctggaacctggccagccccctgctgtctgtgtctgtggatggcacccagaggacagtgcagtgcctgagccgggaggccggcggcaacatgagcatccagttcctgggcaccgtggtggccgagggccaggagatctgtgtgattgaggccatgaagatgcagaacagcatgacagctgggaagacaggcaccgtgaagtctgtgcactgccaggccggggacacagtgggggagggggacctgctggtggagctggagtag

SEQ ID NO: 165548 - DNA, 309 bp, synthetic construct
  misc_feature 1..309: note = Description of Artificial Sequence: Synthetic coding sequence
  source 1..309: mol_type = other DNA
agtgatgtgtacccagatggcttcaagggccacatgctgaccaagtctgagaagaaccagctgctggccatcgccagcagcctgtttgtggccttccagctgcgggcccagcacttccaggagaacagcaggatgcctgtgatcaagccagacatcgccaactgggagctgtctgtgaagctgcatgacaaggtgcacacagtggtggccagcaacaatggatctgtgttttctgtggaggtggatggcagcaagctgaatgtgaccagcacctggaacctgtttgccctgattgtgtgccagaggtag

SEQ ID NO: 165549 - DNA, 1620 bp, synthetic construct
  misc_feature 1..1620: note = Description of Artificial Sequence: Synthetic coding sequence
  source 1..1620: mol_type = other DNA
atggctgctgccctgcgggtggccgctgtgggcgcccggctgtctgtgctggccagcggcctgcgggctgctgtgcgcagcctgtgcagccaggccacctctgtgaatgaaagaattgagaacaagagaagaacagccctgctgggcggcggccagaggagaattgatgcccagcacaagaggggcaagctgacagcccgggagcgcatcagcctgctgctggaccccggcagctttgtggagagtgacatgtttgtggagcaccgctgtgccgactttggcatggctgctgacaagaacaagtttcctggggacagcgtggtgacaggccggggccgcatcaatggccgcctggtgtatgtgttcagccaggacttcaccgtgtttggaggcagcctgagcggggcccacgcccagaagatctgcaagatcatggaccaggccatcaccgtgggcgcccctgtgattggcctgaatgattctggaggagcccgcatccaggagggcgtggagagcctggccggctatgctgacatcttcctgagaaatgtgacagccagcggggtcatcccccagatcagcctcatcatgggcccctgtgccggcggcgctgtgtacagccctgccctgacagacttcaccttcatggtgaaggacaccagctacctgttcatcaccggcccagatgtggtgaagtctgtgaccaatgaagatgtgacccaggaggagctgggcggggccaagacccacaccaccatgtctggagtggcccaccgggcctttgaaaatgatgtggatgccctgtgcaacctgcgggacttcttcaactacctgcccctgagcagccaggaccctgcccctgtgcgggagtgccacgaccccagcgaccggctggtgcctgagctggacaccatcgtgcccctggagagcaccaaggcctacaacatggtggacatcatccacagcgtggtggatgagcgggagttctttgagatcatgcccaactatgccaagaacatcatcgtgggctttgccaggatgaatggccgcacagtgggcatcgtgggcaaccagcccaaggtggccagcggctgcctggacatcaacagctctgtgaagggggccaggtttgtgcgcttctgtgatgccttcaacatccccctcatcacctttgtggatgtgcccggcttcctgcctggaacagcccaggagtatggaggcatcatcagacatggagccaagctgctgtatgcctttgctgaggccaccgtgcccaaggtgaccgtcatcaccaggaaggcctatggaggagcctatgatgtgatgagcagcaagcacctgtgtggggacaccaactatgcctggcccacagctgagattgctgtgatgggcgccaagggagctgtggagatcatcttcaagggccatgaaaatgtggaggccgcccaggccgagtacatcgagaagtttgccaaccccttccctgctgctgtgcggggctttgtggatgacatcatccagcccagcagcacccgggcccgcatctgctgtgacctggatgtgctggccagcaagaaggtgcagaggccctggaggaagcacgccaacatccccctgtag

SEQ ID NO: 165550 - DNA, 1680 bp, synthetic construct
  misc_feature 1..1680: note = Description of Artificial Sequence: Synthetic coding sequence
  source 1..1680: mol_type = other DNA
atggctgctgccctgcgggtggccgctgtgggcgcccggctgtctgtgctggccagcggcctgcgggctgctgtgcgcagcctgtgcagccaggccacctctgtgaatgaaagaattgagaacaagagaagaacagccctgctgggcggcggccagaggagaattgatgcccagcacaagaggggcaagctgacagcccgggagcgcatcagcctgctgctggaccccggcagctttgtggagagtgacatgtttgtggagcaccgctgtgccgactttggcatggctgctgacaagaacaagtttcctggggacagcgtggtgacaggccggggccgcatcaatggccgcctggtgtatgtgttcagccagcagatcatcggctgggcccagtggctgcccctggtgatcagcgccctgtgggaggccgaggacttcaccgtgtttggaggcagcctgagcggggcccacgcccagaagatctgcaagatcatggaccaggccatcaccgtgggcgcccctgtgattggcctgaatgattctggaggagcccgcatccaggagggcgtggagagcctggccggctatgctgacatcttcctgagaaatgtgacagccagcggggtcatcccccagatcagcctcatcatgggcccctgtgccggcggcgctgtgtacagccctgccctgacagacttcaccttcatggtgaaggacaccagctacctgttcatcaccggcccagatgtggtgaagtctgtgaccaatgaagatgtgacccaggaggagctgggcggggccaagacccacaccaccatgtctggagtggcccaccgggcctttgaaaatgatgtggatgccctgtgcaacctgcgggacttcttcaactacctgcccctgagcagccaggaccctgcccctgtgcgggagtgccacgaccccagcgaccggctggtgcctgagctggacaccatcgtgcccctggagagcaccaaggcctacaacatggtggacatcatccacagcgtggtggatgagcgggagttctttgagatcatgcccaactatgccaagaacatcatcgtgggctttgccaggatgaatggccgcacagtgggcatcgtgggcaaccagcccaaggtggccagcggctgcctggacatcaacagctctgtgaagggggccaggtttgtgcgcttctgtgatgccttcaacatccccctcatcacctttgtggatgtgcccggcttcctgcctggaacagcccaggagtatggaggcatcatcagacatggagccaagctgctgtatgcctttgctgaggccaccgtgcccaaggtgaccgtcatcaccaggaaggcctatggaggagcctatgatgtgatgagcagcaagcacctgtgtggggacaccaactatgcctggcccacagctgagattgctgtgatgggcgccaagggagctgtggagatcatcttcaagggccatgaaaatgtggaggccgcccaggccgagtacatcgagaagtttgccaaccccttccctgctgctgtgcggggctttgtggatgacatcatccagcccagcagcacccgggcccgcatctgctgtgacctggatgtgctggccagcaagaaggtgcagaggccctggaggaagcacgccaacatccccctgtag

SEQ ID NO: 165551 - DNA, 1653 bp, synthetic construct
  misc_feature 1..1653: note = Description of Artificial Sequence: Synthetic coding sequence
  source 1..1653: mol_type = other DNA
atggctgctgccctgcgggtggccgctgtgggcgcccggctgtctgtgctggccagcggcctgcgggctgctgtgcgcagcctgtgcagccaggccacctctgtgaatgaaagaattgagaacaagagaagaacagccctgctgggcggcggccagaggagaattgatgcccagcacaagaggggcaagctgacagcccgggagcgcatcagcctgctgctggaccccggcagctttgtggagagtgacatgtttgtggagcaccgctgtgccgactttggcatggctgctgacaagaacaagtttcctggggacagcgtggtgacaggccggggccgcatcaatggccgcctggtgtatgtgttcagccaggacttcaccgtgtttggaggcagcctgagcggggcccacgcccagaagatctgcaagatcatggaccaggccatcaccgtgggcgcccctgtgattggcctgaatgattctggaggagcccgcatccaggagggcgtggagagcctggccggctatgctgacatcttcctgagaaatgtgacagccagcggggtcatcccccagatcagcctcatcatgggcccctgtgccggcggcgctgtgtacagccctgccctgacagacttcaccttcatggtgaaggacaccagctacctgttcatcaccggcccagatgtggtgaagtctgtgaccaatgaagatgtgacccaggaggagctgggcggggccaagacccacaccaccatgtctggagtggcccaccgggcctttgaaaatgatgtggatgccctgtgcaacctgcgggacttcttcaactacctgcccctgagcagccaggaccctgcccctgtgcgggagtgccacgaccccagcgaccggctggtgcctgagctggacaccatcgtgcccctggagagcaccaaggcctacaacatggtggacatcatccacagcgtggtggatgagcgggagttctttgagatcatgcccaactatgccaagaacatcatcgtgggctttgccaggatgaatggccgcacagtgggcatcgtgggcaaccagcccaaggtggccagcggctgcctggacatcaacagctctgtgaagggggccaggtttgtgcgcttctgtgatgccttcaacatccccctcatcacctttgtggatgtgcccggcttcctgcctggaacagcccaggagtatggaggcatcatcagacatggagccaagctgctgtatgcctttgctgaggccaccgtgcccaaggtgaccgtcatcaccaggaaggcctatggaggagcctatgatgtgatgagcagcaagcacctgtgtggggacaccaactatgcctggcccacagctgagattgctgtgatgggcgccaagggagctgtggagatcatcttcaagggccatgaaaatgtggaggccgcccaggccgagtacatcgagaagtttgccaaccccttccctgctgctgtgcggggctttgtggatgacatcatccagcccagcagcacccgggcccgcatctgctgtgacctggatgtgctggccagcaagaaggtgcgggtgcaggaggtgttccaccaggtggtgcagagcggccacagagatggaagaggagctgtgcgctggtag

SEQ ID NO: 165552 - DNA, 387 bp, synthetic construct
  misc_feature 1..387: note = Description of Artificial Sequence: Synthetic coding sequence
  source 1..387: mol_type = other DNA
atgagcctgcggctggacaccacccccagctgcaacagcgcccggcccctgcacgccctgcaggtgctgctgctgctgagcctgctgctgacagccctggccagcagcaccaagggccagaccaagaggaacctggccaagggcaaggaggagagcctggacagcgacctgtatgcagagctgcgctgcatgtgcatcaagaccaccagcggcatccaccccaagaacatccagagcctggaggtgattggcaagggcacccactgcaaccaggtggaggtgattgccaccctgaaggatggcaggaagatctgcctggaccctgatgccccccgcatcaagaagatcgtgcagaagaagctggccggagatgagagcgctgactag

SEQ ID NO: 165553 - DNA, 2262 bp, synthetic construct
  misc_feature 1..2262: note = Description of Artificial Sequence: Synthetic coding sequence
  source 1..2262: mol_type = other DNA
atggagcggcgggcctggagcctgcagtgcacagcctttgtgctcttctgtgcctggtgtgccctgaacagcgccaaggccaagaggcagtttgtgaatgagtgggccgctgagatccctgggggccctgaggccgccagcgccatcgccgaggagctgggctatgacctgctgggccagatcggcagcctggagaaccactacctgttcaagcacaagaaccaccccaggaggagccgccgcagcgccttccacatcaccaagaggctgagtgatgatgacagagtcatctgggccgagcagcagtatgagaaggagaggagcaagaggtctgccctgcgggacagcgccctgaacctcttcaatgaccccatgtggaaccagcagtggtacctgcaggacaccaggatgacagctgccctgcccaagctggacctgcacgtgattcctgtgtggcagaagggcatcactggaaaaggagtggtgatcaccgtgctggatgatggcctggagtggaaccacacagacatctatgccaactatgaccctgaggccagctatgacttcaatgacaatgaccatgaccccttccccaggtatgaccccaccaatgaaaacaagcacggcacccgctgtgccggggagatcgccatgcaggccaacaaccacaagtgtggggtgggcgtggcctacaacagcaaggtgggcggcatccgcatgctggatggcatcgtgacagatgccatcgaggccagcagcatcggcttcaaccctggccacgtggacatctacagcgcctcctggggccccaatgatgatggcaagacagtggagggccctggccgcctggcccagaaggcctttgaatatggagtgaagcagggccggcagggcaagggcagcatctttgtgtgggccagcggaaatggaggccggcagggcgacaactgtgactgtgatggctacacagacagcatctacaccatcagcatcagcagcgccagccagcagggcctgagcccctggtacgccgagaagtgcagcagcaccctggccaccagctacagcagcggggactacacagaccagaggatcaccagcgctgacctgcacaatgactgcacagagacccacacaggcaccagcgccagcgcccccctggccgccggcatctttgccctggccctggaggccaaccccaacctgacctggagggacatgcagcacctggtggtgtggaccagtgaatatgaccccctggccaacaaccctggctggaagaagaatggagctggcctgatggtgaacagcagatttggatttggcctgctgaatgccaaggccctggtggacctggccgaccccaggacctggaggtctgtgcctgagaagaaggaatgtgtggtgaaggacaatgactttgagccccgggccctgaaggccaacggggaggtgatcatcgagatccccacccgggcctgtgagggccaggagaatgccatcaagagcctggagcacgtgcagtttgaggccaccatcgagtacagcagaagaggagacctgcacgtgaccctgaccagcgctgctggcaccagcacagtgctgctggccgagcgggagcgggacaccagccccaacggcttcaagaactgggacttcatgtctgtgcacacctggggcgagaaccccatcggcacctggaccctgcgcatcacagacatgagcggccgcatccagaatgaaggccgcatcgtgaactggaagctgatcctgcacggcaccagcagccagcctgagcacatgaagcagccccgggtgtacaccagctacaacacagtgcagaatgacagaagaggagtggagaagatggtggaccccggggaggagcagcccacccaggagaaccccaaggagaacaccctggtgtccaagagccccagcagcagctctgtgggcggcagaagagatgagctggaggagggcgcccccagccaggccatgctgcggctgctgcagagcgccttcagcaagaacagcccccccaagcagagccccaagaagagccccagcgccaagctgaacatcccctatgagaacttctatgaggccctggagaagctgaacaagcccagccagctgaaggacagcgaggacagcctgtacaatgactatgtggatgtgttctacaacaccaagccctacaagcacagagatgaccggctgctgcaggccctggtggacatcctgaatgaggagaactag

SEQ ID NO: 165554 - DNA, 477 bp, synthetic construct
  misc_feature 1..477: note = Description of Artificial Sequence: Synthetic coding sequence
  source 1..477: mol_type = other DNA
atggagcggcgggcctggagcctgcagtgcacagcctttgtgctcttctgtgcctggtgtgccctgaacagcgccaaggccaagaggcagtttgtgaatgagtgggccgctgagatccctgggggccctgaggccgccagcgccatcgccgaggagctgggctatgacctgctgggccagatcggcagcctggagaaccactacctgttcaagcacaagaaccaccccaggaggagccgccgcagcgccttccacatcaccaagaggctgagtgatgatgacagagtcatctgggccgagcagcagtatgagaaggagaggagcaagaggtctgccctgcgggacagcgccctgaacctcttcaatgaccccatgtggaaccagcagtggtacctgcaggacaccaggatgacagctgccctgcccaagctggacctgcacgtgattcctgtgtggcagaagggcatcactggatag

SEQ ID NO: 165555 - DNA, 2121 bp, synthetic construct
  misc_feature 1..2121: note = Description of Artificial Sequence: Synthetic coding sequence
  source 1..2121: mol_type = other DNA
atgggcaagggcagcatctccttcctgttcttcagccagatcggcagcctggagaaccactacctgttcaagcacaagaaccacccccggcgcagcagaagaagtgccttccacatcaccaagaggctgagtgatgatgacagagtcatctgggccgagcagcagtatgagaaggagaggagcaagaggtctgccctgcgggacagcgccctgaacctcttcaatgaccccatgtggaaccagcagtggtacctgcaggacaccaggatgacagctgccctgcccaagctggacctgcacgtgattcctgtgtggcagaagggcatcaccgggaagggcgtggtgatcaccgtgctggatgatggcctggagtggaaccacacagacatctatgccaactatgaccctgaggccagctatgacttcaatgacaatgaccatgaccccttccccaggtatgaccccaccaatgaaaacaagcacggcacccgctgtgccggggagatcgccatgcaggccaacaaccacaagtgtggggtgggcgtggcctacaacagcaaggtgggcggcatccgcatgctggatggcatcgtgacagatgccatcgaggccagcagcatcggcttcaaccctggccacgtggacatctacagcgcctcctggggccccaatgatgatggcaagacagtggagggccctggccgcctggcccagaaggcctttgaatatggagtgaagcagggccggcagggcaagggcagcatctttgtgtgggccagcggaaatggaggccggcagggcgacaactgtgactgtgatggctacacagacagcatctacaccatcagcatcagcagcgccagccagcagggcctgagcccctggtatgcagagaagtgcagcagcaccctggccaccagctacagcagcggggactacacagaccagaggatcaccagcgctgacctgcacaatgactgcacagagacccacacaggcaccagcgccagcgcccccctggccgccggcatctttgccctggccctggaggccaaccccaacctgacctggagggacatgcagcacctggtggtgtggaccagtgaatatgaccccctggccaacaaccctggctggaagaagaatggagctggcctgatggtgaacagccgcttcggcttcggcctgctgaatgccaaggccctggtggacctggccgaccccaggacctggaggtctgtgcctgagaagaaggaatgtgtggtgaaggacaatgactttgagccccgggccctgaaggccaatggagaggtgatcatcgagatccccacccgggcctgtgagggccaggagaatgccatcaagagcctggagcacgtgcagtttgaggccaccatcgagtacagccggcggggggacctgcacgtgaccctgaccagcgctgctggcaccagcacagtgctgctggccgagcgggagcgggacaccagccccaacggcttcaagaactgggacttcatgtctgtgcacacctggggcgagaaccccatcggcacctggaccctgcgcatcacagacatgagcggccgcatccagaatgaaggaagaattgtgaactggaagctgatcctgcacggcaccagcagccagcctgagcacatgaagcagccccgggtgtacaccagctacaacacagtgcagaatgaccggcggggcgtggagaagatggtggaccctggagaggagcagcccacccaggagaaccccaaggagaacaccctggtgtccaagagccccagcagcagctctgtgggcggcagaagagatgagctggaggagggcgcccccagccaggccatgctgcggctgctgcagagcgccttcagcaagaacagcccccccaagcagagccccaagaagagccccagcgccaagctgaacatcccctatgagaacttctatgaggccctggagaagctgaacaagcccagccagctgaaggacagcgaggacagcctgtacaatgactatgtggatgtgttctacaacaccaagccctacaagcacagagatgaccggctgctgcaggccctggtggacatcctgaatgaagaaaattag

SEQ ID NO: 165556 - DNA, 798 bp, synthetic construct; identical to SEQ ID NO: 164612
  misc_feature 1..798: note = Description of Artificial Sequence: Synthetic coding sequence
  source 1..798: mol_type = other DNA

SEQ ID NO: 165557 - DNA, 1917 bp, synthetic construct
  misc_feature 1..1917: note = Description of Artificial Sequence: Synthetic coding sequence
  source 1..1917: mol_type = other DNA
atgaagggcggctgtgtgtcccagtggaaggctgctgctggcttcctgttctgtgtgatggtgtttgccagcgctgagaggcctgtgttcaccaaccacttcctggtggagctgcacaagggaggagaggacaaggcccggcaggtggccgctgagcacggctttggagtgaggaagctgccctttgctgagggcctgtaccacttctaccacaacggcctggccaaggccaagagaagaagaagcctgcaccacaagcagcagctggagcgggacccccgggtgaagatggccctgcagcaggagggctttgacaggaagaagaggggctacagagacatcaatgaaattgacatcaacatgaatgaccccctcttcaccaagcagtggtacctgatcaacacaggccaggctgatggcaccccaggcctggacctgaatgtggccgaggcctgggagctgggctacacaggaaaaggagtgaccatcggcatcatggatgatggcatcgactacctgcacccagacctggccagcaactacaatgctgaggccagctatgacttcagcagcaatgacccctacccctacccccgctacacagatgactggttcaacagccacggcacccgctgtgccggggaggtgtctgctgctgccaacaacaacatctgtggggtgggcgtggcctacaacagcaaggtggccggcatccgcatgctggaccagcccttcatgacagacatcatcgaggccagcagcatcagccacatgccccagctgattgacatctacagcgcctcctggggccccacagacaacgggaagacagtggatggcccccgggagctgaccctgcaggccatggctgatggagtgaacaagggccggggcggcaagggcagcatctacgtgtgggccagcggagatggcggcagctatgatgactgcaactgtgatggctacgccagctccatgtggaccatcagcatcaacagcgccatcaatgatggccgcacagccctgtatgatgagagctgcagcagcaccctggccagcaccttcagcaatggaaggaagagaaatcctgaggccggcgtggccaccacagacctgtatggcaactgcaccctgcggcacagcggcaccagcgctgctgcccctgaggccgccggcgtgtttgccctggccctggaggccaacctgggcctgacctggagggacatgcagcacctgactgtgctgaccagcaagaggaaccagctgcatgatgaggtgcaccagtggaggagaaatggagtgggcctggagttcaaccacctgtttggctacggcgtgctggatgctggggccatggtgaagatggccaaggactggaagacagtgcctgagcgcttccactgtgtgggcggctctgtgcaggaccctgagaagatccccagcacaggcaagctggtgctgaccctgaccacagatgcctgtgagggcaaggagaactttgtgcgctacctggagcacgtgcaggccgtcatcaccgtgaatgccaccaggagaggagacctgaacatcaacatgaccagccccatgggcaccaagagcatcctgctgagccggcggcccagagatgatgacagcaaggtgggctttgacaagtggcccttcatgaccacccacacctggggagaagatgcccggggcacctggaccctggagctgggctttgtgggcagcgccccccagaagggcgtgctgaaggagtggaccctgatgctgcacggcacccagagcgccccctacatcgaccaggtggtgcgggactaccagagcaagctggccatgagcaagaaggaggagctggaggaggagctggatgaggccgtggagaggagcctgaagagcatcctgaacaagaactag

SEQ ID NO: 165558 - DNA, 1860 bp, synthetic construct
  misc_feature 1..1860: note = Description of Artificial Sequence: Synthetic coding sequence
  source 1..1860: mol_type = other DNA
atggtgtttgccagcgctgagaggcctgtgttcaccaaccacttcctggtggagctgcacaagggcggggaggacaaggcccggcaggtggccgctgagcacggcttcggcgtgaggaagctgccctttgctgagggcctgtaccacttctaccacaacggcctggccaaggccaagagaagaagaagcctgcaccacaagcagcagctggagcgggacccccgggtgaagatggccctgcagcaggagggctttgacaggaagaagaggggctacagagacatcaatgaaattgacatcaacatgaatgaccccctcttcaccaagcagtggtacctgatcaacacaggccaggctgatggcaccccaggcctggacctgaatgtggccgaggcctgggagctgggctacaccgggaagggcgtgaccatcggcatcatggatgatggcatcgactacctgcacccagacctggccagcaactacaatgctgaggccagctatgacttcagcagcaatgacccctacccctacccccgctacacagatgactggttcaacagccacggcacccgctgtgccggggaggtgtctgctgctgccaacaacaacatctgtggggtgggcgtggcctacaacagcaaggtggccggcatccgcatgctggaccagcccttcatgacagacatcatcgaggccagcagcatcagccacatgccccagctgattgacatctacagcgcctcctggggccccacagacaatggcaagacagtggatggcccccgggagctgaccctgcaggccatggctgatggagtgaacaagggccggggcggcaagggcagcatctacgtgtgggccagcggagatggcggcagctatgatgactgcaactgtgatggctacgccagctccatgtggaccatcagcatcaacagcgccatcaatgatggccgcacagccctgtatgatgagagctgcagcagcaccctggccagcaccttcagcaatggaaggaagaggaaccctgaggccggcgtggccaccacagacctgtatggcaactgcaccctgcggcacagcggcaccagcgctgctgcccctgaggccgccggcgtgtttgccctggccctggaggccaacctgggcctgacctggagggacatgcagcacctgactgtgctgaccagcaagaggaaccagctgcatgatgaggtgcaccagtggaggagaaatggagtgggcctggagttcaaccacctgtttggctatggagtgctggatgctggggccatggtgaagatggccaaggactggaagacagtgcctgagcgcttccactgtgtgggcggctctgtgcaggaccctgagaagatccccagcacaggcaagctggtgctgaccctgaccacagatgcctgtgagggcaaggaaaattttgtgcgctacctggagcacgtgcaggccgtcatcaccgtgaatgccacccggcggggggacctgaacatcaacatgaccagccccatgggcaccaagagcatcctgctgagcagaagaccaagagatgatgacagcaaggtgggctttgacaagtggcccttcatgaccacccacacctggggagaagatgcccggggcacctggaccctggagctgggctttgtgggcagcgccccccagaagggcgtgctgaaggagtggaccctgatgctgcacggcacccagagcgccccctacatcgaccaggtggtgcgggactaccagagcaagctggccatgagcaagaaggaggagctggaggaggagctggatgaagctgtggagaggagcctgaagagcatcctgaacaagaactag

SEQ ID NO: 165559 - DNA, 1812 bp, synthetic construct
  misc_feature 1..1812: note = Description of Artificial Sequence: Synthetic coding sequence
  source 1..1812: mol_type = other DNA
atgaagggcggctgtgtgtcccagtggaaggctgctgctggcttcctgttctgtgtgatggtgtttgccagcgctgagaggcctgtgttcaccaaccacttcctggtggagctgcacaagggaggagaggacaaggcccggcaggtggccgctgagcacggctttggagtgaggaaggtgaagatggccctgcagcaggagggctttgacaggaagaagaggggctacagagacatcaatgaaattgacatcaacatgaatgaccccctcttcaccaagcagtggtacctgatcaacacaggccaggctgatggcaccccaggcctggacctgaatgtggccgaggcctgggagctgggctacaccgggaagggcgtgaccatcggcatcatggatgatggcatcgactacctgcacccagacctggccagcaactacaatgctgaggccagctatgacttcagcagcaatgacccctacccctacccccgctacacagatgactggttcaacagccacggcacccgctgtgccggggaggtgtctgctgctgccaacaacaacatctgtggggtgggcgtggcctacaacagcaaggtggccggcatccgcatgctggaccagcccttcatgacagacatcatcgaggccagcagcatcagccacatgccccagctgattgacatctacagcgcctcctggggccccacagacaatggcaagacagtggatggcccccgggagctgaccctgcaggccatggctgatggagtgaacaagggccggggcggcaagggcagcatctacgtgtgggccagcggagatggcggcagctatgatgactgcaactgtgatggctacgccagctccatgtggaccatcagcatcaacagcgccatcaatgatggccgcacagccctgtatgatgagagctgcagcagcaccctggccagcaccttcagcaatggaaggaagaggaaccctgaggccggcgtggccaccacagacctgtatggcaactgcaccctgcggcacagcggcaccagcgctgctgcccctgaggccgccggcgtgtttgccctggccctggaggccaacctgggcctgacctggagggacatgcagcacctgactgtgctgaccagcaagaggaaccagctgcatgatgaggtgcaccagtggaggagaaatggagtgggcctggagttcaaccacctgtttggctatggagtgctggatgctggggccatggtgaagatggccaaggactggaagacagtgcctgagcgcttccactgtgtgggcggctctgtgcaggaccctgagaagatccccagcacaggcaagctggtgctgaccctgaccacagatgcctgtgagggcaaggaaaattttgtgcgctacctggagcacgtgcaggccgtcatcaccgtgaatgccacccggcggggggacctgaacatcaacatgaccagccccatgggcaccaagagcatcctgctgagcagaagaccaagagatgatgacagcaaggtgggctttgacaagtggcccttcatgaccacccacacctggggagaagatgcccggggcacctggaccctggagctgggctttgtgggcagcgccccccagaagggcgtgctgaaggagtggaccctgatgctgcacggcacccagagcgccccctacatcgaccaggtggtgcgggactaccagagcaagctggccatgagcaagaaggaggagctggaggaggagctggatgaagctgtggagaggagcctgaagagcatcctgaacaagaactag

SEQ ID NO: 165560 - DNA, 2268 bp, synthetic construct
  misc_feature 1..2268: note = Description of Artificial Sequence: Synthetic coding sequence
  source 1..2268: mol_type = other DNA
atgaggcctgcccccatcgccctgtggctgcggctggtgctggccctggccctggtgcggcccagggctgtgggctgggcccctgtgcgggcccccatctacgtgtcctcctgggccgtgcaggtgtcccagggcaaccgggaggtggagcggctggccaggaagtttggatttgtgaacctgggccccatcttcccagatggccagtacttccacctgcggcacagaggagtggtgcagcagagcctgaccccccactggggccaccggctgcacctgaagaagaaccccaaggtgcagtggttccagcagcagaccctgcagaggagagtgaagaggtctgtggtggtgcccacagacccctggttcagcaagcagtggtacatgaacagcgaggcccagcctgacctgagcatcctgcaggcctggagccagggcctgagcggccagggcatcgtggtgtctgtgctggatgatggcatcgagaaggaccacccagacctgtgggccaactatgaccccctggccagctatgacttcaatgactatgaccctgacccccagccccgctacacccccagcaaggagaacagacatggcacccgctgtgccggggaggtggccgccatggccaacaacggcttctgtggggtgggcgtggccttcaatgcccgcatcggcggcgtgaggatgctggatggcaccatcacagatgtgattgaggcccagagcctgagcctgcagccccagcacatccacatctacagcgcctcctggggcccagaagatgatggccgcacagtggatggccctggcatcctgacccgggaggccttccggcggggcgtgaccaagggccggggcggcctgggcaccctcttcatctgggccagcggaaatggaggcctgcactatgacaactgcaactgtgatggctacaccaacagcatccacaccctgtctgtgggcagcaccacccagcagggccgggtgccctggtacagcgaggcctgtgccagcaccctgaccaccacctacagcagcggcgtggccacagacccccagatcgtgaccacagacctgcaccacggctgcacagaccagcacacaggcaccagcgccagcgcccccctggccgccggcatgattgccctggccctggaggccaaccccttcctgacctggagggacatgcagcacctggtggtgcgggccagcaagccagcccacctgcaggccgaggactggaggaccaatggagtgggccggcaggtgagccaccactacggctacggcctgctggatgctggcctgctggtggacacagcccggacctggctgcccacccagccccagaggaaatgtgctgtgcgggtgcagagccggcccacccccatcctgcccctcatctacatccgggagaatgtgtctgcctgtgccggcctgcacaacagcatccgcagcctggagcacgtgcaggcccagctgaccctgagctacagccggcggggggacctggagatcagcctgaccagccccatgggcaccaggagcaccctggtggccatccggcccctggatgtgtccacagagggctacaacaactgggtgttcatgagcacccacttctgggatgagaacccccagggcgtgtggaccctgggcctggagaacaagggctactacttcaacacaggcaccctgtaccgctacaccctgctgctgtatggaacagctgaggacatgacagcccggcccaccggcccccaggtgaccagcagcgcctgtgtgcagagggacacagagggcctgtgccaggcctgtgatggccctgcctacatcctgggccagctgtgcctggcctactgccccccacgcttcttcaaccacacccggctggtgacagctggccctggccacacagctgccccagccctgcgggtgtgcagcagctgccacgccagctgctacacctgccggggcggcagcccccgggactgcaccagctgcccccccagcagcaccctggaccagcagcagggcagctgcatgggccccaccaccccagacagccggccccggctgcgggccgccgcctgcccccaccaccgctgcccagccagcgccatggtgctgagcctgctggccgtgaccctgggcggccctgtgctgtgtggcatgtccatggacctgcccctgtatgcctggctgagccgggcccgggccacccccaccaagccccaggtgtggctgcctgctggcacctag

SEQ ID NO: 165561 - DNA, 1137 bp, synthetic construct
  misc_feature 1..1137: note = Description of Artificial Sequence: Synthetic coding sequence
  source 1..1137: mol_type = other DNA
atggccagcaggaggaccaccaggaccagcggccccaccaccaccccctggccagccatgacctccatgaccaccaccaggacccccagccctgccaccccaccagccaagaggactggagtgaggatgctggatggcaccatcacagatgtgattgaggcccagagcctgagcctgcagccccagcacatccacatctacagcgcctcctggggcccagaagatgatggccgcacagtggatggccctggcatcctgacccgggaggccttccggcggggcgtgaccaagggccggggcggcctgggcaccctcttcatctgggccagcggaaatggaggcctgcactatgacaactgcaactgtgatggctacaccaacagcatccacaccctgtctgtgggcagcaccacccagcagggccgggtgccctggtacagcgaggcctgtgccagcaccctgaccaccacctacagcagcggcgtggccacagacccccagatcgtgaccacagacctgcaccacggctgcacagaccagcacacaggcaccagcgccagcgcccccctggccgccggcatgattgccctggccctggaggccaaccccttcctgacctggagggacatgcagcacctggtggtgcgggccagcaagccagcccacctgcaggccgaggactggaggaccaatggagtgggccggcaggtgagccaccactacggctacggcctgctggatgctggcctgctggtggacacagcccggacctggctgcccacccagccccagaggaaatgtgctgtgcgggtgcagagccggcccacccccatcctgcccctcatctacatccgggagaatgtgtctgcctgtgccggcctgcacaacagcatccgcagcctggagcacgtgcaggcccagctgaccctgagctacagccggcggggggacctggagatcagcctgaccagccccatgggcaccaggagcaccctggtggccatcagagatgtggtgcccctgcatgctgctgccctgtgggatggccggggccatgacagcgctgcctacagacctcctggggaccagcagagggtgtgtgccgccggccacagaggagctgtgcctggggtgtag

SEQ ID NO: 165562 - DNA, 2742 bp, synthetic construct
  misc_feature 1..2742: note = Description of Artificial Sequence: Synthetic coding sequence
  source 1..2742: mol_type = other DNA
atgggctggggcagccgctgctgctgccccggccgcctggacctgctgtgtgtgctggccctgctgggcggctgcctgctgcctgtgtgcaggaccagggtgtacaccaaccactgggccgtgaagattgctgggggcttccctgaggccaacagaattgccagcaaatatggcttcatcaacatcggccagattggagccctgaaggactactaccacttctaccacagcaggaccatcaagaggagcgtcatcagcagccggggcacccacagcttcatctccatggagcccaaggtggagtggatccagcagcaggtggtgaagaagaggaccaagagggactatgacttcagccgggcccagagcacctacttcaatgaccccaagtggcccagcatgtggtacatgcactgcagcgacaacacccacccctgccagagcgacatgaacatcgagggcgcctggaagaggggctacacaggcaagaacatcgtggtgaccatcctggatgatggcatcgagaggacccacccagacctgatgcagaactatgatgccctggccagctgtgatgtgaatggaaatgacctggaccccatgcccaggtatgatgccagcaatgaaaacaagcacggcacccgctgtgccggggaggtggccgctgctgccaacaacagccactgcaccgtgggcatcgccttcaatgccaagattggaggagtgaggatgctggatggagatgtgacagacatggtggaggccaagtctgtgtccttcaacccccagcacgtgcacatctacagcgcctcctggggcccagatgatgatggcaagacagtggatggccctgcccccctgacccggcaggcctttgaaaatggagtgaggatgggccggcggggcctgggctctgtgtttgtgtgggccagcggaaatggaggccgcagcaaggaccactgcagctgtgatggctacaccaacagcatctacaccatcagcatcagcagcacagctgagagcggcaagaagccctggtacctggaggagtgcagcagcaccctggccaccacctacagcagtggagagagctatgacaagaagatcatcaccacagacctgcggcagcgctgcacagacaaccacacaggcaccagcgccagcgcccccatggctgctggcatcatcgccctggccctggaggccaaccccttcctgacctggagagatgtgcagcacgtgattgtgaggaccagcagagctggccacctgaatgccaatgactggaagaccaatgctgctggcttcaaggtgagccacctgtatggcttcggcctgatggatgctgaggccatggtgatggaggccgagaagtggaccaccgtgccccggcagcacgtgtgtgtggagagcacagaccggcagatcaagaccatccggcccaacagcgctgtgcgcagcatctacaaggccagcggctgcagcgacaaccccaacagacatgtgaactacctggagcacgtggtggtgcgcatcaccatcacccacccccggcggggggacctggccatctacctgaccagccccagcggcaccaggagccagctgctggccaacagactctttgaccacagcatggagggcttcaagaactgggagttcatgaccatccactgctggggcgagagagctgctggggactgggtgctggaggtgtatgacacccccagccagctgaggaacttcaagaccccaggcaagctgaaggagtggagcctggtgctgtatggcacctctgtgcagccctacagccccaccaatgagttccccaaggtggagcgcttccgctacagccgggtggaggaccccacagatgattatggaacagaggactatgccggcccctgtgaccctgaatgttctgaggtgggctgtgatggccctggccctgaccactgcaatgactgcctgcactactactacaagctgaagaacaacacccgcatctgtgtgagcagctgccccccaggccactaccacgccgacaagaagcgctgcaggaaatgtgcccccaactgtgagagctgcttcggcagccacggggaccagtgcatgagctgcaagtatggctacttcctgaatgaggagaccaacagctgtgtgacccactgcccagatggcagctaccaggacaccaagaagaacctgtgcaggaaatgttctgagaactgcaagacctgcacagagttccacaactgcacagaatgtagagatggcctgagcctgcagggcagccgctgcagcgtgtcctgtgaagatggccgctacttcaacggccaggactgccagccctgccaccgcttctgtgccacctgtgccggggccggggctgatggctgcatcaactgcacagagggctacttcatggaggatggccgctgtgtgcagagctgcagcatctcctactactttgaccacagcagtgaaaatggctacaagagctgcaagaagtgtgacatcagctgcctgacctgcaatggacctggcttcaagaactgcaccagctgccccagcggctacctgctggacctgggcatgtgccagatgggcgccatctgcaaggatgccacagaggagagctgggccgagggcggcttctgcatgctggtgaagaagaacaacctgtgccagaggaaggtgctgcagcagctgtgctgcaagacctgcaccttccagggctag

SEQ ID NO: 165563 - DNA, 4773 bp, synthetic construct
  misc_feature 1..4773: note = Description of Artificial Sequence: Synthetic coding sequence
  source 1..4773: mol_type = other DNA
atgggcagaagaggcctgggctctgtgtttgtgtgggccagcggaaatggaggccgcagcaaggaccactgcagctgtgatggctacaccaacagcatctacaccatcagcatcagcagcacagctgagagcggcaagaagccctggtacctggaggagtgcagcagcaccctggccaccacctacagcagcggggagagctatgacaagaagatcatcaccacagacctgcggcagcgctgcacagacaaccacacaggcaccagcgccagcgcccccatggccgccggcatcatcgccctggccctggaggccaaccccttcctgacctggagagatgtgcagcacgtgattgtgaggaccagccgggccggccacctgaatgccaatgactggaagaccaatgctgctggcttcaaggtgagccacctgtatggcttcggcctgatggatgctgaggccatggtgatggaggccgagaagtggaccaccgtgccccggcagcacgtgtgtgtggagagcacagaccggcagatcaagaccatccggcccaacagcgctgtgcgcagcatctacaaggccagcggctgcagcgacaaccccaacagacatgtgaactacctggagcacgtggtggtgcgcatcaccatcacccaccccaggagaggagacctggccatctacctgaccagccccagcggcaccaggagccagctgctggccaaccggctgtttgaccacagcatggagggcttcaagaactgggagttcatgaccatccactgctggggcgagagagctgctggggactgggtgctggaggtgtatgacacccccagccagctgaggaacttcaagacccctgggaagctgaaggagtggagcctggtgctgtatggcacctctgtgcagccctacagccccaccaatgagttccccaaggtggagcgcttccgctacagccgggtggaggaccccacagatgattatggaacagaagattatgccggcccctgtgaccctgagtgcagcgaggtgggctgtgatggccctggccctgaccactgcaatgactgcctgcactactactacaagctgaagaacaacacccgcatctgtgtgagcagctgccccccaggccactaccacgccgacaagaagcgctgcaggaaatgtgcccccaactgtgagagctgcttcggcagccatggagaccagtgcatgagctgcaagtatggctacttcctgaatgaggagaccaacagctgtgtgacccactgcccagatggcagctaccaggacaccaagaagaacctgtgcaggaagtgcagcgagaactgcaagacctgcacagagttccacaactgcacagagtgcagagatggcctgagcctgcagggcagccgctgcagcgtgtcctgtgaagatggccgctacttcaacggccaggactgccagccctgccaccgcttctgtgccacctgtgccggggccggggctgatggctgcatcaactgcacagagggctacttcatggaggatggccgctgtgtgcagagctgcagcatctcctactactttgaccacagcagtgaaaatggctacaagagctgcaagaagtgtgacatcagctgcctgacctgcaatggacctggcttcaagaactgcaccagctgccccagcggctacctgctggacctgggcatgtgccagatgggcgccatctgcaaggatggagaatatgtggatgaacatggccactgccagacctgtgaggccagctgtgccaagtgccagggccccacccaggaggactgcaccacctgccccatgacccgcatctttgatgatggccgctgtgtgagcaactgccccagctggaagtttgaatttgagaaccagtgccacccctgccaccacacctgccagcgctgccagggcagcggccccacccactgcaccagctgtggggctgacaactacggccgggagcacttcctgtaccagggagaatgtggggacagctgcccagagggccactacgccacagagggcaacacctgcctgccctgcccagacaactgtgagctgtgccacagcgtgcacgtgtgcacccgctgcatgaagggctacttcatcgcccccaccaaccacacctgccagaagctggagtgtggccagggcgaggtgcaggaccctgactatgaagaatgtgtgccctgtgaggagggctgcctgggctgcagcctggatgatcctggcacctgcaccagctgtgccatgggctactacagatttgaccaccactgctacaagacctgcccagagaagacctacagcgaggaggtggagtgcaaggcctgtgacagcaactgtggcagctgtgaccagaatggctgctactggtgtgaggagggcttcttcctgctgggcggcagctgtgtgaggaaatgtggccctggcttctatggagaccaggagatgggagaatgtgagagctgccaccgggcctgtgagacctgcaccggccctggccatgatgagtgcagcagctgccaggagggcctgcagctgctgcggggcatgtgtgtgcacgccaccaagacccaggaggagggcaagttctggaatgaagctgtgtccacagccaacctgtctgtggtgaagagcctgctgcaggagcggcggcgctggaaggtgcagatcaagagggacatcctgaggaagctgcagccctgccacagcagctgcaagacctgcaatggaagtgccaccctgtgcaccagctgccccaagggggcctacctgctggcccaggcctgtgtgagcagctgcccccagggcacctggcccagcgtgcgcagcggcagctgtgagaactgcacagaggcctgtgccatctgcagcggggctgacctgtgcaagaagtgccagatgcagcccggccaccccctcttcctgcacgagggccgctgctacagcaaatgtcctgagggcagctatgcagaagatggcatctgtgagcgctgcagcagcccctgcaggacctgtgagggcaatgccaccaactgccacagctgtgagggcggccacgtgctgcaccacggcgtgtgccaggagaactgcccagagcggcacgtggccgtgaagggcgtgtgcaagcactgcccagagatgtgccaggactgcatccacgagaagacctgcaaggaatgtaccccagagttcttcctgcatgatgacatgtgccaccagagctgcccccggggcttctatgctgacagccgccactgtgtgccctgccacaaggactgcctggagtgcagcggccccaaggcagatgactgtgagctgtgcctggagagctcctgggtgctgtatgatggcctgtgcctggaggagtgcccagctggcacctactatgagaaggagaccaaggaatgtcgggactgccacaagagctgcctgacctgcagcagcagcggcacctgcaccacctgccagaagggcctcatcatgaacccccggggcagctgcatggccaatgagaagtgcagccccagcgagtactgggatgaagatgcccctggctgcaagccctgccacgtgaagtgcttccactgcatgggccctgctgaggaccagtgccagacctgccccatgaacagcctgctgctgaacaccacctgtgtgaaggactgcccagagggctactatgcagatgaggacagcaacagatgtgcccactgccacagcagctgcaggacctgtgagggccgccacagccggcagtgccacagctgccggcccggctggttccagctgggcaaggagtgcctgctgcagtgccgggagggctactatgctgacaacagcacaggccgctgtgagcgctgcaacagaagctgcaagggctgccagggcccccggcccacagactgcctgagctgtgaccgcttcttcttcctgctgcggagcaaaggagagtgccacaggagctgcccagaccactactacgtggagcagagcacccagacctgtgagcgctgccaccccacctgtgaccagtgcaagggcaagggggccctgaactgcctgagctgtgtgtggagctaccacctgatgggcggcatctgcaccagtgactgcctggtgggggagtacagagtgggggagggggagaagttcaactgtgagaagtgccacgagagctgcatggagtgcaagggccctggggccaagaactgcaccctgtgcccagccaacctggtgctgcacatggatgacagccactgcctgcactgctgcaacaccagtgaccccccatctgcccaggagtgctgtgactgccaggacaccacagatgagtgcatcctgcggaccagcaaggtgcggcctgccacagagcacttcaagacagccctcttcatcaccagctccatgatgctggtgctgctgctgggcgctgctgtggtggtgtggaagaagagccggggccgggtgcagcctgctgccaaggccggctatgagaagctggccgaccccaacaagagctacagcagctacaagagcagctaccgggagagcaccagctttgaggaggaccaggtgattgagtacagagaccgggactatgatgaagatgatgatgatgacatcgtgtacatgggccaggacggcaccgtgtacaggaagttcaagtatggcctgctggatgatgatgacattgatgagctggagtatgatgatgagagctacagctactaccagtag

SEQ ID NO: 165564 - DNA, 2073 bp, synthetic construct
  misc_feature 1..2073: note = Description of Artificial Sequence: Synthetic coding sequence
  source 1..2073: mol_type = other DNA
atgggctggggcagccgctgctgctgccccggccgcctggacctgctgtgtgtgctggccctgctgggcggctgcctgctgcctgtgtgcaggaccagggtgtacaccaaccactgggccgtgaagattgctgggggcttccctgaggccaacagaattgccagcaaatatggcttcatcaacatcggccagattggagccctgaaggactactaccacttctaccacagcaggaccatcaagaggagcgtcatcagcagccggggcacccacagcttcatctccatggagcccaaggtggagtggatccagcagcaggtggtgaagaagaggaccaagagggactatgacttcagccgggcccagagcacctacttcaatgaccccaagtggcccagcatgtggtacatgcactgcagcgacaacacccacccctgccagagcgacatgaacatcgagggcgcctggaagaggggctacacaggcaagaacatcgtggtgaccatcctggatgatggcatcgagaggacccacccagacctgatgcagaactatgatgccctggccagctgtgatgtgaatggaaatgacctggaccccatgcccaggtatgatgccagcaatgaaaacaagcacggcacccgctgtgccggggaggtggccgctgctgccaacaacagccactgcaccgtgggcatcgccttcaatgccaagattggaggagtgaggatgctggatggagatgtgacagacatggtggaggccaagtctgtgtccttcaacccccagcacgtgcacatctacagcgcctcctggggcccagatgatgatggcaagacagtggatggccctgcccccctgacccggcaggcctttgaaaatggagtgaggatgggccggcggggcctgggctctgtgtttgtgtgggccagcggaaatggaggccgcagcaaggaccactgcagctgtgatggctacaccaacagcatctacaccatcagcatcagcagcacagctgagagcggcaagaagccctggtacctggaggagtgcagcagcaccctggccaccacctacagcagtggagagagctatgacaagaagatcatcaccacagacctgcggcagcgctgcacagacaaccacacaggcaccagcgccagcgcccccatggctgctggcatcatcgccctggccctggaggccaaccccttcctgacctggagagatgtgcagcacgtgattgtgaggaccagcagagctggccacctgaatgccaatgactggaagaccaatgctgctggcttcaaggtgagccacctgtatggcttcggcctgatggatgctgaggccatggtgatggaggccgagaagtggaccaccgtgccccggcagcacgtgtgtgtggagagcacagaccggcagatcaagaccatccggcccaacagcgctgtgcgcagcatctacaaggccagcggctgcagcgacaaccccaacagacatgtgaactacctggagcacgtggtggtgcgcatcaccatcacccacccccggcggggggacctggccatctacctgaccagccccagcggcaccaggagccagctgctggccaacagactctttgaccacagcatggagggcttcaagaactgggagttcatgaccatccactgctggggcgagagagctgctggggactgggtgctggaggtgtatgacacccccagccagctgaggaacttcaagaccccaggcaagctgaaggagtggagcctggtgctgtatggcacctctgtgcagccctacagccccaccaatgagttccccaaggtggagcgcttccgctacagccgggtggaggaccccacagatgattatggaacagaggactatgctggggagctggccagcagcggcacccaggccaagaagaggcagctgatgcaccaccccaccacctgggagaacaggatggagtggaatggcatgaagtggaatggcatgaagtggaatggcatggagtggaatggcatggagtggaaccgcatcgagagcaacagaattgaatag

SEQ ID NO: 165565 - DNA, 2073 bp, synthetic construct
  misc_feature 1..2073: note = Description of Artificial Sequence: Synthetic coding sequence
  source 1..2073: mol_type = other DNA
atgggctggggcagccgctgctgctgccccggccgcctggacctgctgtgtgtgctggccctgctgggcggctgcctgctgcctgtgtgcaggaccagggtgtacaccaaccactgggccgtgaagattgctgggggcttccctgaggccaacagaattgccagcaaatatggcttcatcaacatcggccagattggagccctgaaggactactaccacttctaccacagcaggaccatcaagaggagcgtcatcagcagccggggcacccacagcttcatctccatggagcccaaggtggagtggatccagcagcaggtggtgaagaagaggaccaagagggactatgacttcagccgggcccagagcacctacttcaatgaccccaagtggcccagcatgtggtacatgcactgcagcgacaacacccacccctgccagagcgacatgaacatcgagggcgcctggaagaggggctacacaggcaagaacatcgtggtgaccatcctggatgatggcatcgagaggacccacccagacctgatgcagaactatgatgccctggccagctgtgatgtgaatggaaatgacctggaccccatgcccaggtatgatgccagcaatgaaaacaagcacggcacccgctgtgccggggaggtggccgctgctgccaacaacagccactgcaccgtgggcatcgccttcaatgccaagattggaggagtgaggatgctggatggagatgtgacagacatggtggaggccaagtctgtgtccttcaacccccagcacgtgcacatctacagcgcctcctggggcccagatgatgatggcaagacagtggatggccctgcccccctgacccggcaggcctttgaaaatggagtgaggatgggccggcggggcctgggctctgtgtttgtgtgggccagcggaaatggaggccgcagcaaggaccactgcagctgtgatggctacaccaacagcatctacaccatcagcatcagcagcacagctgagagcggcaagaagccctggtacctggaggagtgcagcagcaccctggccaccacctacagcagtggagagagctatgacaagaagatcatcaccacagacctgcggcagcgctgcacagacaaccacacaggcaccagcgccagcgcccccatggctgctggcatcatcgccctggccctggaggccaaccccttcctgacctggagagatgtgcagcacgtgattgtgaggaccagcagagctggccacctgaatgccaatgactggaagaccaatgctgctggcttcaaggtgagccacctgtatggcttcggcctgatggatgctgaggccatggtgatggaggccgagaagtggaccaccgtgccccggcagcacgtgtgtgtggagagcacagaccggcagatcaagaccatccggcccaacagcgctgtgcgcagcatctacaaggccagcggctgcagcgacaaccccaacagacatgtgaactacctggagcacgtggtggtgcgcatcaccatcacccacccccggcggggggacctggccatctacctgaccagccccagcggcaccaggagccagctgctggccaacagactctttgaccacagcatggagggcttcaagaactgggagttcatgaccatccactgctggggcgagagagctgctggggactgggtgctggaggtgtatgacacccccagccagctgaggaacttcaagaccccaggcaagctgaaggagtggagcctggtgctgtatggcacctctgtgcagccctacagccccaccaatgagttccccaaggtggagcgcttccgctacagccgggtggaggaccccacagatgattatggaacagaggactatgctggggagctggccagcagcggcacccaggccaagaagaggcagctgatgcaccaccccaccacctgggagaacaggatggagtggaatggcatgaagtggaatggcatggagtggaatggcatggagtggaatggcatggagagcaaccgcatcgagagcaacagaattgaatag

SEQ ID NO: 165566 - DNA, 4683 bp, synthetic construct
  misc_feature 1..4683: note = Description of Artificial Sequence: Synthetic coding sequence
  source 1..4683: mol_type = other DNA
aacagcatctacaccatcagcatcagcagcacagctgagagcggcaagaagccctggtacctggaggagtgcagcagcaccctggccaccacctacagcagcggggagagctatgacaagaagatcatcaccacagacctgcggcagcgctgcacagacaaccacacaggcaccagcgccagcgcccccatggccgccggcatcatcgccctggccctggaggccaaccccttcctgacctggagagatgtgcagcacgtgattgtgaggaccagccgggccggccacctgaatgccaatgactggaagaccaatgctgctggcttcaaggtgagccacctgtatggcttcggcctgatggatgctgaggccatggtgatggaggccgagaagtggaccaccgtgccccggcagcacgtgtgtgtggagagcacagaccggcagatcaagaccatccggcccaacagcgctgtgcgcagcatctacaaggccagcggctgcagcgacaaccccaacagacatgtgaactacctggagcacgtggtggtgcgcatcaccatcacccaccccaggagaggagacctggccatctacctgaccagccccagcggcaccaggagccagctgctggccaaccggctgtttgaccacagcatggagggcttcaagaactgggagttcatgaccatccactgctggggcgagagagctgctggggactgggtgctggaggtgtatgacacccccagccagctgaggaacttcaagacccctgggaagctgaaggagtggagcctggtgctgtatggcacctctgtgcagccctacagccccaccaatgagttccccaaggtggagcgcttccgctacagccgggtggaggaccccacagatgattatggaacagaagattatgccggcccctgtgaccctgagtgcagcgaggtgggctgtgatggccctggccctgaccactgcaatgactgcctgcactactactacaagctgaagaacaacacccgcatctgtgtgagcagctgccccccaggccactaccacgccgacaagaagcgctgcaggaaatgtgcccccaactgtgagagctgcttcggcagccatggagaccagtgcatgagctgcaagtatggctacttcctgaatgaggagaccaacagctgtgtgacccactgcccagatggcagctaccaggacaccaagaagaacctgtgcaggaagtgcagcgagaactgcaagacctgcacagagttccacaactgcacagagtgcagagatggcctgagcctgcagggcagccgctgcagcgtgtcctgtgaagatggccgctacttcaacggccaggactgccagccctgccaccgcttctgtgccacctgtgccggggccggggctgatggctgcatcaactgcacagagggctacttcatggaggatggccgctgtgtgcagagctgcagcatctcctactactttgaccacagcagtgaaaatggctacaagagctgcaagaagtgtgacatcagctgcctgacctgcaatggacctggcttcaagaactgcaccagctgccccagcggctacctgctggacctgggcatgtgccagatgggcgccatctgcaaggatggagaatatgtggatgaacatggccactgccagacctgtgaggccagctgtgccaagtgccagggccccacccaggaggactgcaccacctgccccatgacccgcatctttgatgatggccgctgtgtgagcaactgccccagctggaagtttgaatttgagaaccagtgccacccctgccaccacacctgccagcgctgccagggcagcggccccacccactgcaccagctgtggggctgacaactacggccgggagcacttcctgtaccagggagaatgtggggacagctgcccagagggccactacgccacagagggcaacacctgcctgccctgcccagacaactgtgagctgtgccacagcgtgcacgtgtgcacccgctgcatgaagggctacttcatcgcccccaccaaccacacctgccagaagctggagtgtggccagggcgaggtgcaggaccctgactatgaagaatgtgtgccctgtgaggagggctgcctgggctgcagcctggatgatcctggcacctgcaccagctgtgccatgggctactacagatttgaccaccactgctacaagacctgcccagagaagacctacagcgaggaggtggagtgcaaggcctgtgacagcaactgtggcagctgtgaccagaatggctgctactggtgtgaggagggcttcttcctgctgggcggcagctgtgtgaggaaatgtggccctggcttctatggagaccaggagatgggagaatgtgagagctgccaccgggcctgtgagacctgcaccggccctggccatgatgagtgcagcagctgccaggagggcctgcagctgctgcggggcatgtgtgtgcacgccaccaagacccaggaggagggcaagttctggaatgaagctgtgtccacagccaacctgtctgtggtgaagagcctgctgcaggagcggcggcgctggaaggtgcagatcaagagggacatcctgaggaagctgcagccctgccacagcagctgcaagacctgcaatggaagtgccaccctgtgcaccagctgccccaagggggcctacctgctggcccaggcctgtgtgagcagctgcccccagggcacctggcccagcgtgcgcagcggcagctgtgagaactgcacagaggcctgtgccatctgcagcggggctgacctgtgcaagaagtgccagatgcagcccggccaccccctcttcctgcacgagggccgctgctacagcaaatgtcctgagggcagctatgcagaagatggcatctgtgagcgctgcagcagcccctgcaggacctgtgagggcaatgccaccaactgccacagctgtgagggcggccacgtgctgcaccacggcgtgtgccaggagaactgcccagagcggcacgtggccgtgaagggcgtgtgcaagcactgcccagagatgtgccaggactgcatccacgagaagacctgcaaggaatgtaccccagagttcttcctgcatgatgacatgtgccaccagagctgcccccggggcttctatgctgacagccgccactgtgtgccctgccacaaggactgcctggagtgcagcggccccaaggcagatgactgtgagctgtgcctggagagctcctgggtgctgtatgatggcctgtgcctggaggagtgcccagctggcacctactatgagaaggagaccaaggaatgtcgggactgccacaagagctgcctgacctgcagcagcagcggcacctgcaccacctgccagaagggcctcatcatgaacccccggggcagctgcatggccaatgagaagtgcagccccagcgagtactgggatgaagatgcccctggctgcaagccctgccacgtgaagtgcttccactgcatgggccctgctgaggaccagtgccagacctgccccatgaacagcctgctgctgaacaccacctgtgtgaaggactgcccagagggctactatgcagatgaggacagcaacagatgtgcccactgccacagcagctgcaggacctgtgagggccgccacagccggcagtgccacagctgccggcccggctggttccagctgggcaaggagtgcctgctgcagtgccgggagggctactatgctgacaacagcacaggccgctgtgagcgctgcaacagaagctgcaagggctgccagggcccccggcccacagactgcctgagctgtgaccgcttcttcttcctgctgcggagcaaaggagagtgccacaggagctgcccagaccactactacgtggagcagagcacccagacctgtgagcgctgccaccccacctgtgaccagtgcaagggcaagggggccctgaactgcctgagctgtgtgtggagctaccacctgatgggcggcatctgcaccagtgactgcctggtgggggagtacagagtgggggagggggagaagttcaactgtgagaagtgccacgagagctgcatggagtgcaagggccctggggccaagaactgcaccctgtgcccagccaacctggtgctgcacatggatgacagccactgcctgcactgctgcaacaccagtgaccccccatctgcccaggagtgctgtgactgccaggacaccacagatgagtgcatcctgcggaccagcaaggtgcggcctgccacagagcacttcaagacagccctcttcatcaccagctccatgatgctggtgctgctgctgggcgctgctgtggtggtgtggaagaagagccggggccgggtgcagcctgctgccaaggccggctatgagaagctggccgaccccaacaagagctacagcagctacaagagcagctaccgggagagcaccagctttgaggaggaccaggtgattgagtacagagaccgggactatgatgaagatgatgatgatgacatcgtgtacatgggccaggacggcaccgtgtacaggaagttcaagtatggcctgctggatgatgatgacattgatgagctggagtatgatgatgagagctacagctactaccagtag

SEQ ID NO: 165567 - DNA, 306 bp, synthetic construct
  misc_feature 1..306: note = Description of Artificial Sequence: Synthetic coding sequence
  source 1..306: mol_type = other DNA
tgccagccctgccaccgcttctgtgccacctgtgccggggccggggctgatggctgcatcaactgcacagagggctacttcatggaggatggccgctgtgtgcagagctgcagcatctcctactactttgaccacagcagtgaaaatggctacaagagctgcaagaagtgtgacatcagctgcctgacctgcaatggacctggcttcaagaactgcaccagctgccccagcggctacctgctggacctgggcatgtgccagatgggcgccatctgcaaggatgtgtccctcttccggggggcctag

SEQ ID NO: 165568 - DNA, 5583 bp, synthetic construct
  misc_feature 1..5583: note = Description of Artificial Sequence: Synthetic coding sequence
  source 1..5583: mol_type = other DNA
atgggctggggcagccgctgctgctgccccggccgcctggacctgctgtgtgtgctggccctgctgggcggctgcctgctgcctgtgtgcaggaccagggtgtacaccaaccactgggccgtgaagattgctgggggcttccctgaggccaacagaattgccagcaaatatggcttcatcaacatcggccagattggagccctgaaggactactaccacttctaccacagcaggaccatcaagaggagcgtcatcagcagccggggcacccacagcttcatctccatggagcccaaggtggagtggatccagcagcaggtggtgaagaagaggaccaagagggactatgacttcagccgggcccagagcacctacttcaatgaccccaagtggcccagcatgtggtacatgcactgcagcgacaacacccacccctgccagagcgacatgaacatcgagggcgcctggaagaggggctacacaggcaagaacatcgtggtgaccatcctggatgatggcatcgagaggacccacccagacctgatgcagaactatgatgccctggccagctgtgatgtgaatggaaatgacctggaccccatgcccaggtatgatgccagcaatgaaaacaagcacggcacccgctgtgccggggaggtggccgctgctgccaacaacagccactgcaccgtgggcatcgccttcaatgccaagattggaggagtgaggatgctggatggagatgtgacagacatggtggaggccaagtctgtgtccttcaacccccagcacgtgcacatctacagcgcctcctggggcccagatgatgatggcaagacagtggatggccctgcccccctgacccggcaggcctttgaaaatggagtgaggatgggccggcggggcctgggctctgtgtttgtgtgggccagcggaaatggaggccgcagcaaggaccactgcagctgtgatggctacaccaacagcatctacaccatcagcatcagcagcacagctgagagcggcaagaagccctggtacctggaggagtgcagcagcaccctggccaccacctacagcagtggagagagctatgacaagaagatcatcaccacagacctgcggcagcgctgcacagacaaccacacaggcaccagcgccagcgcccccatggctgctggcatcatcgccctggccctggaggccaaccccttcctgacctggagagatgtgcagcacgtgattgtgaggaccagcagagctggccacctgaatgccaatgactggaagaccaatgctgctggcttcaaggtgagccacctgtatggcttcggcctgatggatgctgaggccatggtgatggaggccgagaagtggaccaccgtgccccggcagcacgtgtgtgtggagagcacagaccggcagatcaagaccatccggcccaacagcgctgtgcgcagcatctacaaggccagcggctgcagcgacaaccccaacagacatgtgaactacctggagcacgtggtggtgcgcatcaccatcacccacccccggcggggggacctggccatctacctgaccagccccagcggcaccaggagccagctgctggccaacagactctttgaccacagcatggagggcttcaagaactgggagttcatgaccatccactgctggggcgagagagctgctggggactgggtgctggaggtgtatgacacccccagccagctgaggaacttcaagaccccaggcaagctgaaggagtggagcctggtgctgtatggcacctctgtgcagccctacagccccaccaatgagttccccaaggtggagcgcttccgctacagccgggtggaggaccccacagatgattatggaacagaggactatgccggcccctgtgaccctgaatgttctgaggtgggctgtgatggccctggccctgaccactgcaatgactgcctgcactactactacaagctgaagaacaacacccgcatctgtgtgagcagctgccccccaggccactaccacgccgacaagaagcgctgcaggaaatgtgcccccaactgtgagagctgcttcggcagccacggggaccagtgcatgagctgcaagtatggctacttcctgaatgaggagaccaacagctgtgtgacccactgcccagatggcagctaccaggacaccaagaagaacctgtgcaggaaatgttctgagaactgcaagacctgcacagagttccacaactgcacagaatgtagagatggcctgagcctgcagggcagccgctgcagcgtgtcctgtgaagatggccgctacttcaacggccaggactgccagccctgccaccgcttctgtgccacctgtgccggggccggggctgatggctgcatcaactgcacagagggctacttcatggaggatggccgctgtgtgcagagctgcagcatctcctactactttgaccacagcagtgaaaatggctacaagagctgcaagaagtgtgacatcagctgcctgacctgcaatggacctggcttcaagaactgcaccagctgccccagcggctacctgctggacctgggcatgtgccagatgggcgccatctgcaaggatggagaatatgtggatgagcacggccactgccagacctgtgaggccagctgtgccaagtgccagggccccacccaggaggactgcaccacctgccccatgacccgcatctttgatgatggccgctgtgtgagcaactgccccagctggaagtttgaatttgagaaccagtgccacccctgccaccacacctgccagcgctgccagggcagcggccccacccactgcaccagctgtggggctgacaactacggccgggagcacttcctgtaccagggagaatgtggggacagctgcccagagggccactacgccacagagggcaacacctgcctgccctgcccagacaactgtgagctgtgccacagcgtgcacgtgtgcacccgctgcatgaagggctacttcatcgcccccaccaaccacacctgccagaagctggagtgtggccagggcgaggtgcaggaccctgactatgaggagtgtgtgccctgtgaggagggctgcctgggctgcagcctggatgaccccggcacctgcaccagctgtgccatgggctactacagatttgaccaccactgctacaagacctgcccagagaagacctacagcgaggaggtggagtgcaaggcctgtgacagcaactgtggcagctgtgaccagaatggctgctactggtgtgaggagggcttcttcctgctgggcggcagctgtgtgaggaaatgtggccctggcttctacggggaccaggagatgggagaatgtgagagctgccaccgggcctgtgagacctgcaccggccctggccatgatgaatgtagcagctgccaggagggcctgcagctgctgcggggcatgtgtgtgcacgccaccaagacccaggaggagggcaagttctggaatgacatcctgaggaagctgcagccctgccacagcagctgcaagacctgcaatggaagtgccaccctgtgcaccagctgccccaagggggcctacctgctggcccaggcctgtgtgagcagctgcccccagggcacctggcccagcgtgcgcagcggcagctgtgagaactgcacagaggcctgtgccatctgcagcggggctgacctgtgcaagaagtgccagatgcagcccggccaccccctcttcctgcacgagggccgctgctacagcaaatgtcctgagggcagctatgcagaagatggcatctgtgagcgctgcagcagcccctgcaggacctgtgagggcaatgccaccaactgccacagctgtgagggcggccacgtgctgcaccacggcgtgtgccaggagaactgcccagagcggcacgtggccgtgaagggcgtgtgcaagcactgcccagagatgtgccaggactgcatccacgagaagacctgcaaggaatgtaccccagagttcttcctgcatgatgacatgtgccaccagagctgcccccggggcttctatgctgacagccgccactgtgtgccctgccacaaggactgcctggagtgcagcggccccaaggcagatgactgtgagctgtgcctggagagctcctgggtgctgtatgatggcctgtgcctggaggagtgcccagctggcacctactatgagaaggagaccaaggaatgtcgggactgccacaagagctgcctgacctgcagcagcagcggcacctgcaccacctgccagaagggcctcatcatgaacccccggggcagctgcatggccaatgagaagtgcagccccagcgagtactgggatgaagatgcccctggctgcaagccctgccacgtgaagtgcttccactgcatgggccctgctgaggaccagtgccagacctgccccatgaacagcctgctgctgaacaccacctgtgtgaaggactgcccagagggctactatgcagatgaggacagcaacagatgtgcccactgccacagcagctgcaggacctgtgagggccgccacagccggcagtgccacagctgccggcccggctggttccagctgggcaaggagtgcctgctgcagtgccgggagggctactatgctgacaacagcacaggccgctgtgagcgctgcaacagaagctgcaagggctgccagggcccccggcccacagactgcctgagctgtgaccgcttcttcttcctgctgcggagcaaaggagagtgccacaggagctgcccagaccactactacgtggagcagagcacccagacctgtgagcgctgccaccccacctgtgaccagtgcaagggcaagggggccctgaactgcctgagctgtgtgtggagctaccacctgatgggcggcatctgcaccagtgactgcctggtgggggagtacagagtgggggagggggagaagttcaactgtgagaagtgccacgagagctgcatggagtgcaagggccctggggccaagaactgcaccctgtgcccagccaacctggtgctgcacatggatgacagccactgcctgcactgctgcaacaccagtgaccccccatctgcccaggagtgctgtgactgccaggacaccacagatgagtgcatcctgcggaccagcaaggtgcggcctgccacagagcacttcaagacagccctcttcatcaccagctccatgatgctggtgctgctgctgggcgctgctgtggtggtgtggaagaagagccggggccgggtgcagcctgctgccaaggccggctatgagaagctggccgaccccaacaagagctacagcagctacaagagcagctaccgggagagcaccagctttgaggaggaccaggtgattgagtacagagaccgggactatgatgaagatgatgatgatgacatcgtgtacatgggccaggacggcaccgtgtacaggaagttcaagtatggcctgctggatgatgatgacattgatgagctggagtatgatgatgagagctacagctactaccagtag

SEQ ID NO: 165569 - DNA, 1497 bp, synthetic construct
  misc_feature 1..1497: note = Description of Artificial Sequence: Synthetic coding sequence
  source 1..1497: mol_type = other DNA
atctggaatgtgcaccactgtggggacaagaacagccgctgccgctctgagatgaatgtgcaggccgcctggaagaggggctacacaggcaagaatgtggtggtgaccatcctggatgatggcatcgagaggaaccacccagacctggcccccaactatgacagctatgccagctatgatgtgaatggaaatgactatgaccccagccccaggtatgatgccagcaatgaaaacaagcacggcacccgctgtgccggggaggtggccgccagcgccaacaacagctactgcatcgtgggcatcgcctacaatgccaagattggaggcatccgcatgctggatggagatgtgacagatgtggtggaggccaagagcctgggcatccggcccaactacatcgacatctacagcgcctcctggggcccagatgatgatggcaagacagtggatggccctggccgcctggccaagcaggcctttgaatatggcatcaagaagggccggcagggcctgggcagcatctttgtgtgggccagcggaaatggaggccgggagggggactactgcagctgtgatggctacaccaacagcatctacaccatctctgtgtcctctgccacagaaaatggctacaagccctggtacctggaggagtgtgccagcaccctggccaccacctacagcagcggggccttctatgaaaggaagatcgtgaccacagacctgcggcagcgctgcacagatggccacacaggcacctctgtgtctgcccccatggtggccggcatcatcgccctggccctggaggccaacagccagctgacctggagagatgtgcagcacctgctggtgaagaccagcaggcctgcccacctgaaggccagtgactggaaggtgaatggagctggccacaaggtgagccacttctacggcttcggcctggtggatgctgaggccctggtggtggaggccaagaagtggacagctgtgcccagccagcacatgtgtgtggccgccagtgacaagaggcccaggagcatccccctggtgcaggtgctgcggaccacagccctgaccagcgcctgtgccgagcacagcgaccagagggtggtgtacctggagcacgtggtggtgaggaccagcatcagccacccccggcggggggacctgcagatctacctggtgagccccagcggcaccaagagccagctgctggccaagaggctgctggacctgagcaatgaaggcttcaccaactgggagttcatgacagtgcactgctggggcgagaaggccgagggccagtggaccctggagatccaggacctgcccagccaggtgaggaaccctgagaagcagggcgacctggagacccctgtggccaaccagctgaccacagaggagagatttgtgtccaccctgagcatcctcttccactggagcgtgtacctgtcctggagccagtaccacatcgtgctgatcaccgtggccctgtag

SEQ ID NO: 165570 - DNA, 1956 bp, synthetic construct
  misc_feature 1..1956: note = Description of Artificial Sequence: Synthetic coding sequence
  source 1..1956: mol_type = other DNA
atgccaccccgggcccccccagcccctggcccccggcccccacccagggctgctgctgccacagacacagctgctggagctggaggagctgggggcgccggcggggccggcggccctggcttccggcccctggccccccggccctggcgctggctgctgctgctggccctgcctgctgcctgcagccccccacccaggcctgtgtacaccaaccactgggccgtgcaggtgctgggcggccctgctgaggccgacagagtggccgccgcccacggctacctgaacctgggccagatcggcaacctggaggactactaccacttctaccacagcaagaccttcaagaggagcaccctgagcagccggggcccccacaccttcctgaggatggacccccaggtgaagtggctgcagcagcaggaggtgaagagaagagtgaagaggcaggtgcggagtgacccccaggccctgtacttcaatgaccccatctggagcaacatgtggtacctgcactgtggggacaagaacagccgctgccgctctgagatgaatgtgcaggccgcctggaagaggggctacaccgggaagaatgtggtggtgaccatcctggatgatggcattgaaagaaaccacccagacctggcccccaactatgacagctatgccagctatgatgtgaatggaaatgactatgaccccagccccaggtatgatgccagcaatgaaaacaagcacggcacccgctgtgccggggaggtggccgccagcgccaacaacagctactgcatcgtgggcatcgcctacaatgccaagattggaggcatccgcatgctggatggagatgtgacagatgtggtggaggccaagagcctgggcatccggcccaactacatcgacatctacagcgcctcctggggcccagatgatgatggcaagacagtggatggccctggccgcctggccaagcaggcctttgaatatggcatcaagaagggccggcagggcctgggcagcatctttgtgtgggccagcggaaatggaggccgggagggggactactgcagctgtgatggctacaccaacagcatctacaccatctctgtgagcagcgccacagaaaatggctacaagccctggtacctggaggagtgtgccagcaccctggccaccacctacagcagcggggccttctatgaaaggaagatcgtgaccacagacctgcggcagcgctgcacagatggccacacaggcacctctgtgtctgcccccatggtggccggcatcatcgccctggccctggaggccaacagccagctgacctggagagatgtgcagcacctgctggtgaagaccagcaggcctgcccacctgaaggccagtgactggaaggtgaatggagctggccacaaggtgagccacttctacggcttcggcctggtggatgctgaggccctggtggtggaggccaagaagtggacagctgtgcccagccagcacatgtgtgtggccgccagtgacaagaggcccaggagcatccccctggtgcaggtgctgcggaccacagccctgaccagcgcctgtgccgagcacagcgaccagagggtggtgtacctggagcacgtggtggtgaggaccagcatcagccaccccaggagaggagacctgcagatctacctggtgagccccagcggcaccaagagccagctgctggccaagaggctgctggacctgagcaatgaaggcttcaccaactgggagttcatgacagtgcactgctggggcgagaaggccgagggccagtggaccctggagatccaggacctgcccagccaggtgagaaatcctgagaagcagggcgacctggagacccctgtggccaaccagctgaccacagaggagcgggagcccggcctgaagcacgtgttccgctggcagatcgagcaggagctgtggtag

SEQ ID NO: 165571 - DNA, 2907 bp, synthetic construct
  misc_feature 1..2907: note = Description of Artificial Sequence: Synthetic coding sequence
  source 1..2907: mol_type = other DNA
atgccaccccgggcccccccagcccctggcccccggcccccacccagggctgctgctgccacagacacagctgctggagctggaggagctgggggcgccggcggggccggcggccctggcttccggcccctggccccccggccctggcgctggctgctgctgctggccctgcctgctgcctgcagccccccacccaggcctgtgtacaccaaccactgggccgtgcaggtgctgggcggccctgctgaggccgacagagtggccgccgcccacggctacctgaacctgggccagatcggcaacctggaggactactaccacttctaccacagcaagaccttcaagaggagcaccctgagcagccggggcccccacaccttcctgaggatggacccccaggtgaagtggctgcagcagcaggaggtgaagagaagagtgaagaggcaggtgcggagtgacccccaggccctgtacttcaatgaccccatctggagcaacatgtggtacctgcactgtggggacaagaacagccgctgccgctctgagatgaatgtgcaggccgcctggaagaggggctacaccgggaagaatgtggtggtgaccatcctggatgatggcattgaaagaaaccacccagacctggcccccaactatgacagctatgccagctatgatgtgaatggaaatgactatgaccccagccccaggtatgatgccagcaatgaaaacaagcacggcacccgctgtgccggggaggtggccgccagcgccaacaacagctactgcatcgtgggcatcgcctacaatgccaagattggaggcatccgcatgctggatggagatgtgacagatgtggtggaggccaagagcctgggcatccggcccaactacatcgacatctacagcgcctcctggggcccagatgatgatggcaagacagtggatggccctggccgcctggccaagcaggcctttgaatatggcatcaagaagggccggcagggcctgggcagcatctttgtgtgggccagcggaaatggaggccgggagggggactactgcagctgtgatggctacaccaacagcatctacaccatctctgtgagcagcgccacagaaaatggctacaagccctggtacctggaggagtgtgccagcaccctggccaccacctacagcagcggggccttctatgaaaggaagatcgtgaccacagacctgcggcagcgctgcacagatggccacacaggcacctctgtgtctgcccccatggtggccggcatcatcgccctggccctggaggccaacagccagctgacctggagagatgtgcagcacctgctggtgaagaccagcaggcctgcccacctgaaggccagtgactggaaggtgaatggagctggccacaaggtgagccacttctacggcttcggcctggtggatgctgaggccctggtggtggaggccaagaagtggacagctgtgcccagccagcacatgtgtgtggccgccagtgacaagaggcccaggagcatccccctggtgcaggtgctgcggaccacagccctgaccagcgcctgtgccgagcacagcgaccagagggtggtgtacctggagcacgtggtggtgaggaccagcatcagccaccccaggagaggagacctgcagatctacctggtgagccccagcggcaccaagagccagctgctggccaagaggctgctggacctgagcaatgaaggcttcaccaactgggagttcatgacagtgcactgctggggcgagaaggccgagggccagtggaccctggagatccaggacctgcccagccaggtgagaaatcctgagaagcagggcaagctgaaggagtggagcctcatcctgtatggaacagctgagcacccctaccacaccttcagcgcccaccagagccgcagcaggatgctggagctgagcgcccctgagctggagccccccaaggccgccctgagccccagccaggtggaggtgcctgaagatgaggaggactacacagcccagagcaccccaggcagcgccaacatcctgcagacctctgtgtgccacccagaatgtggggacaagggctgtgatggccccaatgctgaccagtgcctgaactgtgtgcacttcagcctgggctctgtgaagaccagcaggaaatgtgtgtctgtgtgccccctgggctactttggagacacagctgcccggcgctgccgccgctgccacaagggctgtgagacctgcagcagcagagctgccacccagtgcctgagctgcagaagaggcttctaccaccaccaggagatgaacacctgtgtgaccctgtgcccagctggcttctatgcagatgagagccagaagaactgcctgaagtgccaccccagctgcaagaagtgtgtggatgagcctgagaagtgcaccgtgtgcaaggagggcttcagcctggcccggggcagctgcatcccagactgtgagcccggcacctactttgattctgagctgatccgctgtggggagtgccaccacacctgtggcacctgtgtgggccctggccgggaggagtgcatccactgtgccaagaacttccacttccatgactggaagtgtgtgcctgcctgtggggagggcttctacccagaggagatgcctggcctgccccacaaggtgtgccgccgctgtgatgagaactgcctgagctgtgccggcagcagcaggaactgcagccgctgcaagacaggcttcacccagctgggcaccagctgcatcaccaaccacacctgcagcaatgctgatgagaccttctgtgagatggtgaagagcaaccggctgtgtgagaggaagctgttcatccagttctgctgcaggacctgcctgctggccggctag

SEQ ID NO: 165572 - DNA, 2868 bp, synthetic construct
  misc_feature 1..2868: note = Description of Artificial Sequence: Synthetic coding sequence
  source 1..2868: mol_type = other DNA
atgccaccccgggcccccccagcccctggcccccggcccccacccagggctgctgctgccacagacacagctgctggagctggaggagctgggggcgccggcggggccggcggccctggcttccggcccctggccccccggccctggcgctggctgctgctgctggccctgcctgctgcctgcagccccccacccaggcctgtgtacaccaaccactgggccgtgcaggtgctgggcggccctgctgaggccgacagagtggccgccgcccacggctacctgaacctgggccagatcggcaacctggaggactactaccacttctaccacagcaagaccttcaagaggagcaccctgagcagccggggcccccacaccttcctgaggatggacccccaggtgaagtggctgcagcagcaggaggtgaagagaagagtgaagaggcaggtgcggagtgacccccaggccctgtacttcaatgaccccatctggagcaacatgtggtacctgcactgtggggacaagaacagccgctgccgctctgagatgaatgtgcaggccgcctggaagaggggctacaccgggaagaatgtggtggtgaccatcctggatgatggcattgaaagaaaccacccagacctggcccccaactatgacagctatgccagctatgatgtgaatggaaatgactatgaccccagccccaggtatgatgccagcaatgaaaacaagcacggcacccgctgtgccggggaggtggccgccagcgccaacaacagctactgcatcgtgggcatcgcctacaatgccaagattggaggcatccgcatgctggatggagatgtgacagatgtggtggaggccaagagcctgggcatccggcccaactacatcgacatctacagcgcctcctggggcccagatgatgatggcaagacagtggatggccctggccgcctggccaagcaggcctttgaatatggcatcaagaagggccggcagggcctgggcagcatctttgtgtgggccagcggaaatggaggccgggagggggactactgcagctgtgatggctacaccaacagcatctacaccatctctgtgagcagcgccacagaaaatggctacaagccctggtacctggaggagtgtgccagcaccctggccaccacctacagcagcggggccttctatgaaaggaagatcgtgaccacagacctgcggcagcgctgcacagatggccacacaggcacctctgtgtctgcccccatggtggccggcatcatcgccctggccctggaggccaacagccagctgacctggagagatgtgcagcacctgctggtgaagaccagcaggcctgcccacctgaaggccagtgactggaaggtgaatggagctggccacaaggtgagccacttctacggcttcggcctggtggatgctgaggccctggtggtggaggccaagaagtggacagctgtgcccagccagcacatgtgtgtggccgccagtgacaagaggcccaggagcatccccctggtgcaggtgctgcggaccacagccctgaccagcgcctgtgccgagcacagcgaccagagggtggtgtacctggagcacgtggtggtgaggaccagcatcagccaccccaggagaggagacctgcagatctacctggtgagccccagcggcaccaagagccagctgctggccaagaggctgctggacctgagcaatgaaggcttcaccaactgggagttcatgacagtgcactgctggggcgagaaggccgagggccagtggaccctggagatccaggacctgcccagccaggtgagaaatcctgagaagcagggcaagctgaaggagtggagcctcatcctgtatggaacagctgagcacccctaccacaccttcagcgcccaccagagccgcagcaggatgctggagctgagcgcccctgagctggagccccccaaggccgccctgagccccagccaggtggaggtgcctgaagatgaggaggactacacaggagtgtgccacccagaatgtggggacaagggctgtgatggccccaatgctgaccagtgcctgaactgtgtgcacttcagcctgggctctgtgaagaccagcaggaaatgtgtgtctgtgtgccccctgggctactttggagacacagctgcccggcgctgccgccgctgccacaagggctgtgagacctgcagcagccgggccgccacccagtgcctgagctgccggcggggcttctaccaccaccaggagatgaacacctgtgtgaccctgtgcccagctggcttctatgcagatgagagccagaagaactgcctgaagtgccaccccagctgcaagaagtgtgtggatgagcctgagaagtgcaccgtgtgcaaggagggcttcagcctggcccggggcagctgcatcccagactgtgagcccggcacctactttgacagcgagctgatccgctgtggggagtgccaccacacctgtggcacctgtgtgggccctggccgggaggagtgcatccactgtgccaagaacttccacttccatgactggaagtgtgtgcctgcctgtggggagggcttctacccagaggagatgcctggcctgccccacaaggtgtgcagaagatgtgatgagaactgcctgagctgtgccggcagcagcaggaactgcagccgctgcaagacaggcttcacccagctgggcaccagctgcatcaccaaccacacctgcagcaatgctgatgagaccttctgtgagatggtgaagagcaaccggctgtgtgagaggaagctgttcatccagttctgctgcaggacctgcctgctggccggctag

SEQ ID NO: 165573 - DNA, 1869 bp, synthetic construct
  misc_feature 1..1869: note = Description of Artificial Sequence: Synthetic coding sequence
  source 1..1869: mol_type = other DNA
atgccaccccgggcccccccagcccctggcccccggcccccacccagggctgctgctgccacagacacagctgctggagctggaggagctgggggcgccggcggggccggcggccctggcttccggcccctggccccccggccctggcgctggctgctgctgctggccctgcctgctgcctgcagcgccccacccaggcctgtgtacaccaaccactgggccgtgcaggtgctgggcggccctgctgaggccgacagagtggccgccgcccacggctacctgaacctgggccagatcggcaacctggaggactactaccacttctaccacagcaagaccttcaagaggagcaccctgagcagccggggcccccacaccttcctgaggatggacccccaggtgaagtggctgcagcagcaggaggtgaagagaagagtgaagaggcaggtgcggagtgacccccaggccctgtacttcaatgaccccatctggagcaacatgtggtacctgcactgtggggacaagaacagccgctgccgctctgagatgaatgtgcaggccgcctggaagaggggctacaccgggaagaatgtggtggtgaccatcctggatgatggcattgaaagaaaccacccagacctggcccccaactatgacagctatgccagctatgatgtgaatggaaatgactatgaccccagccccaggtatgatgccagcaatgaaaacaagcacggcacccgctgtgccggggaggtggccgccagcgccaacaacagctactgcatcgtgggcatcgcctacaatgccaagattggaggcatccgcatgctggatggagatgtgacagatgtggtggaggccaagagcctgggcatccggcccaactacatcgacatctacagcgcctcctggggcccagatgatgatggcaagacagtggatggccctggccgcctggccaagcaggcctttgaatatggcatcaagaagggccggcagggcctgggcagcatctttgtgtgggccagcggaaatggaggccgggagggggactactgcagctgtgatggctacaccaacagcatctacaccatctctgtgagcagcgccacagaaaatggctacaagccctggtacctggaggagtgtgccagcaccctggccaccacctacagcagcggggccttctatgaaaggaagatcgtgaccacagacctgcggcagcgctgcacagatggccacacaggcacctctgtgtctgcccccatggtggccggcatcatcgccctggccctggaggccaacagccagctgacctggagagatgtgcagcacctgctggtgaagaccagcaggcctgcccacctgaaggccagtgactggaaggtgaatggagctggccacaaggtgagccacttctacggcttcggcctggtggatgctgaggccctggtggtggaggccaagaagtggacagctgtgcccagccagcacatgtgtgtggccgccagtgacaagaggcccaggagcatccccctggtgcaggtgctgcggaccacagccctgaccagcgcctgtgccgagcacagcgaccagagggtggtgtacctggagcacgtggtggtgaggaccagcatcagccaccccaggagaggagacctgcagatctacctggtgagccccagcggcaccaagagccagctgctggccaagaggctgctggacctgagcaatgaaggcttcaccaactgggagttcatgacagtgcactgctggggcgagaaggccgagggccagtggaccctggagatccaggacctgcccagccaggtgagaaatcctgagaagcagggcaacctggactag

SEQ ID NO: 165574 - DNA, 1584 bp, synthetic construct
  misc_feature 1..1584: note = Description of Artificial Sequence: Synthetic coding sequence
  source 1..1584: mol_type = other DNA
atgtatgccctcttcctgctggccagcctgctgggcgccgccctggccggccctgtgctgggcctgaaggagtgcacccggggcagcgctgtgtggtgccagaatgtgaagacagccagtgactgtggggctgtgaagcactgcctgcagacagtgtggaacaagcccaccgtgaagagcctgccctgtgacatctgcaaggatgtggtgacagctgctggggacatgctgaaggacaatgccacagaggaggagatcctggtgtacctggagaagacctgtgactggctgcccaagcccaacatgtctgccagctgcaaggagatcgtggacagctacctgcctgtgatcctggacatcatcaagggggagatgagcaggcctggagaggtgtgcagcgccctgaacctgtgtgagagcctgcagaagcacctggccgagctgaaccaccagaagcagctggagagcaacaagatccctgagctggacatgacagaggtggtggcccccttcatggccaacatccccctgctgctgtacccccaggacggccccaggagcaagccccagcccaaggacaatggagatgtgtgccaggactgcatccagatggtgacagacatccagacagctgtgaggaccaacagcacctttgtgcaggccctggtggagcacgtgaaggaggagtgtgaccggctgggccctggcatggctgacatctgcaagaactacatcagccagtacagcgagatcgccatccagatgatgatgcacatgtctgctgagcagcccaaggagatctgtgccctggtgggcttctgtgatgaggtgaaggagatgcccatgcagaccctggtgcctgccaaggtggccagcaagaatgtcatcccagccctggagctggtggagcccatcaagaagcatgaggtgcctgccaagagtgatgtgtactgtgaggtgtgtgagttcctggtgaaggaggtgaccaagctgattgacaacaacaagacagagaaggagatcctggatgcctttgacaagatgtgcagcaagctgcccaagagcctgtctgaggagtgccaggaggtggtggacacctacggcagcagcatcctgagcatcctgctggaggaggtgtccccagagctggtgtgcagcatgctgcacctgtgcagcggcacccggctgcctgccctgactgtgcacgtgacccagcccaaggatggcggcttctgtgaggtgtgcaagaagctggtgggctacctggacaggaacctggagaagaacagcaccaagcaggagatcctggccgccctggagaagggctgcagcttcctgcctgacccctaccagaagcagtgtgaccagtttgtggccgagtatgagcctgtgctgattgagatcctggtggaggtgatggaccccagctttgtgtgcctgaagatcggggcctgccccagcgcccacaagcccctgctgggcacagagaagtgcatctggggccccagctactggtgccagaacacagaaacagctgcccagtgcaatgctgtggagcactgcaagagacatgtgtggaactag

SEQ ID NO: 165575 - DNA, 1680 bp, synthetic construct
  misc_feature 1..1680: note = Description of Artificial Sequence: Synthetic coding sequence
  source 1..1680: mol_type = other DNA
atgtatgccctcttcctgctggccagcctgctgggcgccgccctggccggccctgtgctgggcctgaaggagtgcacccggggcagcgctgtgtggtgccagaatgtgaagacagccagtgactgtggggctgtgaagcactgcctgcagacagtgtggaacaagcccaccgtgaagagcctgccctgtgacatctgcaaggatgtggtgacagctgctggggacatgctgaaggacaatgccacagaggaggagatcctggtgtacctggagaagacctgtgactggctgcccaagcccaacatgtctgccagctgcaaggagatcgtggacagctacctgcctgtgatcctggacatcatcaagggggagatgagcaggcctggagaggtgtgcagcgccctgaacctgtgtgagagcctgcagaagcacctggccgagctgaaccaccagaagcagctggagagcaacaagatccctgagctggacatgacagaggtggtggcccccttcatggccaacatccccctgctgctgtacccccaggacggccccaggagcaagccccagcccaaggacaatggagatgtgtgccaggactgcatccagatggtgacagacatccagacagctgtgaggaccaacagcacctttgtgcaggccctggtggagcacgtgaaggaggagtgtgaccggctgggccctggcatggctgacatctgcaagaactacatcagccagtacagcgagatcgccatccagatgatgatgcacatgcagcccaaggagatctgtgccctggtgggcttctgtgatgaggtgaaggagatgcccatgcagaccctggtgcctgccaaggtggccagcaagaatgtcatcccagccctggagctggtggagcccatcaagaagcatgaggtgcctgccaagagtgatgtgtactgtgaggtgtgtgagttcctggtgaaggaggtgaccaagctgattgacaacaacaagacagagaaggagatcctggatgcctttgacaagatgtgcagcaagctgcccaagagcctgtctgaggagtgccaggaggtggtggacacctacggcagcagcatcctgagcatcctgctggaggaggtgtccccagagctggtgtgcagcatgctgcacctgtgcagcggcacccggctgcctgccctgactgtgcacgtgacccagcccaaggatggcggcttctgtgaggtgtgcaagaagctggtgggctacctggacaggaacctggagaagaacagcaccaagcaggagatcctggccgccctggagaagggctgcagcttcctgcctgacccctaccagaagcagtgtgaccagtttgtggccgagtatgagcctgtgctgattgagatcctggtggaggtgatggaccccagctttgtgtgcctgaagattggagcctgccccagcgcccacaagcccctgctgggcacagagaagtgcatctggggccccagctactggtgccagaacacagaaacagctgcccagtgcaatgctgtggagcactgcaagagacatgtgtggattggctgctggggcgtgggcgtgggcagctgcctgtggcccacctgggcccccaccctgctgagcaccagcggctgccaggagacagccagcaaggccagcaggacatag

SEQ ID NO: 165576 - DNA, 723 bp, synthetic construct
  misc_feature 1..723: note = Description of Artificial Sequence: Synthetic coding sequence
  source 1..723: mol_type = other DNA
atgtatgccctcttcctgctggccagcctgctgggcgccgccctggccggccctgtgctgggcctgaaggagtgcacccggggcagcgctgtgtggtgccagaatgtgaagacagccagtgactgtggggctgtgaagcactgcctgcagacagtgtggaacaagcccaccgtgaagagcctgccctgtgacatctgcaaggatgtggtgacagctgctggggacatgctgaaggacaatgccacagaggaggagatcctggtgtacctggaggtgtccccagagctggtgtgcagcatgctgcacctgtgcagcggcacccggctgcctgccctgactgtgcacgtgacccagcccaaggatggcggcttctgtgaggtgtgcaagaagctggtgggctacctggacaggaacctggagaagaacagcaccaagcaggagatcctggccgccctggagaagggctgcagcttcctgcctgacccctaccagaagcagtgtgaccagtttgtggccgagtatgagcctgtgctgattgagatcctggtggaggtgatggaccccagctttgtgtgcctgaagattggagcctgccccagcgcccacaagcccctgctgggcacagagaagtgcatctggggccccagctactggtgccagaacacagaaacagctgcccagtgcaatgctgtggagcactgcaagagacatgtgtggaactag

SEQ ID NO: 165577 - DNA, 1581 bp, synthetic construct
  misc_feature 1..1581: note = Description of Artificial Sequence: Synthetic coding sequence
  source 1..1581: mol_type = other DNA
atgtatgccctcttcctgctggccagcctgctgggcgccgccctggccggccctgtgctgggcctgaaggagtgcacccggggcagcgctgtgtggtgccagaatgtgaagacagccagtgactgtggggctgtgaagcactgcctgcagacagtgtggaacaagcccaccgtgaagagcctgccctgtgacatctgcaaggatgtggtgacagctgctggggacatgctgaaggacaatgccacagaggaggagatcctggtgtacctggagaagacctgtgactggctgcccaagcccaacatgtctgccagctgcaaggagatcgtggacagctacctgcctgtgatcctggacatcatcaagggggagatgagcaggcctggagaggtgtgcagcgccctgaacctgtgtgagagcctgcagaagcacctggccgagctgaaccaccagaagcagctggagagcaacaagatccctgagctggacatgacagaggtggtggcccccttcatggccaacatccccctgctgctgtacccccaggacggccccaggagcaagccccagcccaaggacaatggagatgtgtgccaggactgcatccagatggtgacagacatccagacagctgtgaggaccaacagcacctttgtgcaggccctggtggagcacgtgaaggaggagtgtgaccggctgggccctggcatggctgacatctgcaagaactacatcagccagtacagcgagatcgccatccagatgatgatgcacatgctgcagcagcccaaggagatctgtgccctggtgggcttctgtgatgaggtgaaggagatgcccatgcagaccctggtgcctgccaaggtggccagcaagaatgtcatcccagccctggagctggtggagcccatcaagaagcatgaggtgcctgccaagagtgatgtgtactgtgaggtgtgtgagttcctggtgaaggaggtgaccaagctgattgacaacaacaagacagagaaggagatcctggatgcctttgacaagatgtgcagcaagctgcccaagagcctgtctgaggagtgccaggaggtggtggacacctacggcagcagcatcctgagcatcctgctggaggaggtgtccccagagctggtgtgcagcatgctgcacctgtgcagcggcacccggctgcctgccctgactgtgcacgtgacccagcccaaggatggcggcttctgtgaggtgtgcaagaagctggtgggctacctggacaggaacctggagaagaacagcaccaagcaggagatcctggccgccctggagaagggctgcagcttcctgcctgacccctaccagaagcagtgtgaccagtttgtggccgagtatgagcctgtgctgattgagatcctggtggaggtgatggaccccagctttgtgtgcctgaagattggagcctgccccagcgcccacaagcccctgctgggcacagagaagtgcatctggggccccagctactggtgccagaacacagaaacagctgcccagtgcaatgctgtggagcactgcaagagacatgtgtggaactag

SEQ ID NO: 165578 - DNA, 1575 bp, synthetic construct
  misc_feature 1..1575: note = Description of Artificial Sequence: Synthetic coding sequence
  source 1..1575: mol_type = other DNA
atgtatgccctcttcctgctggccagcctgctgggcgccgccctggccggccctgtgctgggcctgaaggagtgcacccggggcagcgctgtgtggtgccagaatgtgaagacagccagtgactgtggggctgtgaagcactgcctgcagacagtgtggaacaagcccaccgtgaagagcctgccctgtgacatctgcaaggatgtggtgacagctgctggggacatgctgaaggacaatgccacagaggaggagatcctggtgtacctggagaagacctgtgactggctgcccaagcccaacatgtctgccagctgcaaggagatcgtggacagctacctgcctgtgatcctggacatcatcaagggggagatgagcaggcctggagaggtgtgcagcgccctgaacctgtgtgagagcctgcagaagcacctggccgagctgaaccaccagaagcagctggagagcaacaagatccctgagctggacatgacagaggtggtggcccccttcatggccaacatccccctgctgctgtacccccaggacggccccaggagcaagccccagcccaaggacaatggagatgtgtgccaggactgcatccagatggtgacagacatccagacagctgtgaggaccaacagcacctttgtgcaggccctggtggagcacgtgaaggaggagtgtgaccggctgggccctggcatggctgacatctgcaagaactacatcagccagtacagcgagatcgccatccagatgatgatgcacatgcagcccaaggagatctgtgccctggtgggcttctgtgatgaggtgaaggagatgcccatgcagaccctggtgcctgccaaggtggccagcaagaatgtcatcccagccctggagctggtggagcccatcaagaagcatgaggtgcctgccaagagtgatgtgtactgtgaggtgtgtgagttcctggtgaaggaggtgaccaagctgattgacaacaacaagacagagaaggagatcctggatgcctttgacaagatgtgcagcaagctgcccaagagcctgtctgaggagtgccaggaggtggtggacacctacggcagcagcatcctgagcatcctgctggaggaggtgtccccagagctggtgtgcagcatgctgcacctgtgcagcggcacccggctgcctgccctgactgtgcacgtgacccagcccaaggatggcggcttctgtgaggtgtgcaagaagctggtgggctacctggacaggaacctggagaagaacagcaccaagcaggagatcctggccgccctggagaagggctgcagcttcctgcctgacccctaccagaagcagtgtgaccagtttgtggccgagtatgagcctgtgctgattgagatcctggtggaggtgatggaccccagctttgtgtgcctgaagattggagcctgccccagcgcccacaagcccctgctgggcacagagaagtgcatctggggccccagctactggtgccagaacacagaaacagctgcccagtgcaatgctgtggagcactgcaagagacatgtgtggaactag

SEQ ID NO: 165579 - DNA, 1353 bp, synthetic construct
  misc_feature 1..1353: note = Description of Artificial Sequence: Synthetic coding sequence
  source 1..1353: mol_type = other DNA
atgctgaaggacaatgccacagaggaggagatcctggtgtacctggagaagacctgtgactggctgcccaagcccaacatgtctgccagctgcaaggagatcgtggacagctacctgcccgtcatcctggacatcatcaagggggagatgagcaggcctggagaggtgtgcagcgccctgaacctgtgtgagagcctgcagaagcacctggccgagctgaaccaccagaagcagctggagagcaacaagatccctgagctggacatgacagaggtggtggcccccttcatggccaacatccccctgctgctgtacccccaggacggccccaggagcaagccccagcccaaggacaatggagatgtgtgccaggactgcatccagatggtgacagacatccagacagctgtgaggaccaacagcacctttgtgcaggccctggtggagcacgtgaaggaggagtgtgaccggctgggccctggcatggctgacatctgcaagaactacatcagccagtacagcgagatcgccatccagatgatgatgcacatgcagcagcccaaggagatctgtgccctggtgggcttctgtgatgaggtgaaggagatgcccatgcagaccctggtgcctgccaaggtggccagcaagaatgtcatcccagccctggagctggtggagcccatcaagaagcatgaggtgcctgccaagagtgatgtgtactgtgaggtgtgtgagttcctggtgaaggaggtgaccaagctgattgacaacaacaagacagagaaggagatcctggatgcctttgacaagatgtgcagcaagctgcccaagagcctgtctgaggagtgccaggaggtggtggacacctacggcagcagcatcctgagcatcctgctggaggaggtgtccccagagctggtgtgcagcatgctgcacctgtgcagcggcacccggctgcctgccctgactgtgcacgtgacccagcccaaggatggcggcttctgtgaggtgtgcaagaagctggtgggctacctggacaggaacctggagaagaacagcaccaagcaggagatcctggccgccctggagaagggctgcagcttcctgcctgacccctaccagaagcagtgtgaccagtttgtggccgagtatgagcctgtgctgattgagatcctggtggaggtgatggaccccagctttgtgtgcctgaagattggagcctgccccagcgcccacaagcccctgctgggcacagagaagtgcatctggggccccagctactggtgccagaacacagaaacagctgcccagtgcaatgctgtggagcactgcaagagacatgtgtggaactag

SEQ ID NO: 165580 - DNA, 1593 bp, synthetic construct
  misc_feature 1..1593: note = Description of Artificial Sequence: Synthetic coding sequence
  source 1..1593: mol_type = other DNA
gatggagccatgtatgccctcttcctgctggccagcctgctgggcgccgccctggccggccctgtgctgggcctgaaggaatgtacccggggcagcgctgtgtggtgccagaatgtgaagacagccagtgactgtggggctgtgaagcactgcctgcagacagtgtggaacaagcccaccgtgaagagcctgccctgtgacatctgcaaggatgtggtgacagctgctggggacatgctgaaggacaatgccacagaggaggagatcctggtgtacctggagaagacctgtgactggctgcccaagcccaacatgtctgccagctgcaaggagatcgtggacagctacctgcccgtcatcctggacatcatcaagggggagatgagcaggcctggagaggtgtgcagcgccctgaacctgtgtgagagcctgcagaagcacctggccgagctgaaccaccagaagcagctggagagcaacaagatccctgagctggacatgacagaggtggtggcccccttcatggccaacatccccctgctgctgtacccccaggacggccccaggagcaagccccagcccaaggacaatggagatgtgtgccaggactgcatccagatggtgacagacatccagacagctgtgaggaccaacagcacctttgtgcaggccctggtggagcacgtgaaggaggagtgtgaccggctgggccctggcatggctgacatctgcaagaactacatcagccagtacagcgagatcgccatccagatgatgatgcacatgtctgctgagcagcccaaggagatctgtgccctggtgggcttctgtgatgaggtgaaggagatgcccatgcagaccctggtgcctgccaaggtggccagcaagaatgtcatcccagccctggagctggtggagcccatcaagaagcatgaggtgcctgccaagagtgatgtgtactgtgaggtgtgtgagttcctggtgaaggaggtgaccaagctgattgacaacaacaagacagagaaggagatcctggatgcctttgacaagatgtgcagcaagctgcccaagagcctgtctgaggagtgccaggaggtggtggacacctacggcagcagcatcctgagcatcctgctggaggaggtgtccccagagctggtgtgcagcatgctgcacctgtgcagcggcacccggctgcctgccctgactgtgcacgtgacccagcccaaggatggcggcttctgtgaggtgtgcaagaagctggtgggctacctggacaggaacctggagaagaacagcaccaagcaggagatcctggccgccctggagaagggctgcagcttcctgcctgacccctaccagaagcagtgtgaccagtttgtggccgagtatgagcctgtgctgattgagatcctggtggaggtgatggaccccagctttgtgtgcctgaagattggagcctgccccagcgcccacaagcccctgctgggcacagagaagtgcatctggggccccagctactggtgccagaacacagaaacagctgcccagtgcaatgctgtggagcactgcaagagacatgtgtggaactag

SEQ ID NO: 165581 - DNA, 2214 bp, synthetic construct
  misc_feature 1..2214: note = Description of Artificial Sequence: Synthetic coding sequence
  source 1..2214: mol_type = other DNA
atgccagaccatgacagcacagccctgctgagccggcagaccaagagaagaagagtggacattggagtgaagaggacagtgggcacagccagcgccttctttgccaaggcccgggccaccttcttcagcgccatgaacccccagggcagcgagcaggatgtggagtacagcgtggtgcagcacgcagatggagagaagagcaatgtgctgaggaagctgctgaagagggccaacagctatgaagatgccatgatgcccttccctggggccaccatcatcagccagctgctgaagaacaacatgaacaagaatggaggaacagagcccagcttccaggccagcggcctgagcagcactggaagtgaggtgcaccaggaggacatctgcagcaacagcagccgggacagccccccagaatgtctgagccccttcggccggcccaccatgagccagtttgacatggaccggctgtgtgatgagcacctgcgggccaagagggcccgggtggagaacatcatccggggcatgagccacagccccagcgtggccctgcggggaaatgaaaatgaaagagagatggccccccagagcgtgagcccccgggagagctaccgggagaacaagaggaagcagaagctgccccagcagcagcagcagagcttccagcagctggtgtctgccaggaaggagcagaagcgggaggagcggcggcagctgaagcagcagctggaggacatgcagaagcagctgcggcagctgcaggagaagttctaccagatctatgacagcacagacagtgaaaatgatgaagatggcaacctgtctgaggacagcatgaggtctgagatcctggatgcccgggcccaggacagcgtgggccgcagtgacaatgagatgtgtgagctggaccccggccagttcatcgaccgggcccgggccctgatccgggagcaggagatggccgagaacaagcccaagcgggagggcaacaacaaggagcgggaccacggccccaacagcctgcagcctgagggcaagcacctggccgagaccctgaagcaggagctgaacacagccatgagccaggtggtggacacagtggtgaaggtgttcagcgccaagcccagccggcaggtgccccaggtgttcccccccctgcagatcccccaggccaggtttgctgtgaatggagagaaccacaacttccacacagccaaccagaggctgcagtgctttggagatgtgatcatccccaaccccctggacacctttggaaatgtgcagatggccagcagcacagaccagacagaggccctgcccctggtggtgaggaagaacagcagtgaccagagcgccagcggccctgctgctgggggccaccaccagcccctgcaccagagccccctgagcgccaccaccggcttcaccaccagcaccttccgccaccccttccccctgcccctgatggcctaccccttccagagccccctgggcgcccccagcggcagcttcagcggcaaggaccgggccagccctgagagcctggacctgacccgggacaccaccagcctgcggaccaagatgagcagccaccacctgagccaccacccctgcagccctgcccacccccccagcacagctgagggcctgagcctgagcctcatcaagtcagaatgtggggacctgcaggacatgtctgagatcagcccctacagcggcagcgccatgcaggagggcctgagccccaaccacctgaagaaggccaagctgatgttcttctacacccgctaccccagcagcaacatgctgaagacctacttcagtgatgtgaagttcaaccgctgcatcaccagccagctgatcaagtggttcagcaacttccgggagttctactacatccagatggagaagtatgcccggcaggccatcaatgatggagtgaccagcacagaggagctgagcatcacccgggactgtgagctgtaccgggccctgaacatgcactacaacaaggccaatgactttgaggtgcctgagcgcttcctggaggtggcccagatcaccctgcgggagttcttcaatgccatcatcgccggcaaggatgtggaccccagctggaagaaggccatctacaaggtgatctgcaagctggacagcgaggtgcctgagatcttcaagagccccaactgcctgcaggagctgctgcacgagtag

SEQ ID NO: 165582 - DNA, 2031 bp, synthetic construct
  misc_feature 1..2031: note = Description of Artificial Sequence: Synthetic coding sequence
  source 1..2031: mol_type = other DNA
atgccagaccatgacagcacagccctgctgagccggcagaccaagagaagaagagtggacattggagtgaagaggacagtgggcacagccagcgccttctttgccaaggcccgggccaccttcttcagcgccatgaacccccagggcagcgagcaggatgtggagtacagcgtggtgcagcacgcagatggagagaagagcaatgtgctgaggaagctgctgaagagggccaacagctatgaagatgccatgatgcccttccctggggccaccatcatcagccagctgctgaagaacaacatgaacaagaatggaggaacagagcccagcttccaggccagcggcctgagcagcactggaagtgaggtgcaccaggaggacatctgcagcaacagcagccgggacagccccccagaatgtctgagccccttcggccggcccaccatgagccagtttgacatggaccggctgtgtgatgagcacctgcgggccaagagggcccgggtggagaacatcatccggggcatgagccacagccccagcgtggccctgcggggaaatgaaaatgaaagagagatggccccccagagcgtgagcccccgggagagctaccgggagaacaagaggaagcagaagctgccccagcagcagcagcagagcttccagcagctggtgtctgccaggaaggagcagaagcgggaggagcggcggcagctgaagcagcagctggaggacatgcagaagcagctgcggcagctgcaggagaagttctaccagatctatgacagcacagacagtgaaaatgatgaagatggcaacctgtctgaggacagcatgaggtctgagatcctggatgcccgggcccaggacagcgtgggccgcagtgacaatgagatgtgtgagctggaccccggccagttcatcgaccgggcccgggccctgatccgggagcaggagatggccgagaacaagcccaagcgggagggcaacaacaaggagcgggaccacggccccaacagcctgcagcctgagggcaagcacctggccgagaccctgaagcaggagctgaacacagccatgagccaggtggtggacacagtggtgaaggtgttcagcgccaagcccagccggcaggtgccccaggtgttcccccccctgcagatcccccaggccaggtttgctgtgaatggagagaaccacaacttccacacagccaaccagaggctgcagtgctttggagatgtgatcatccccaaccccctggacacctttggaaatgtgcagatggccagcagcacagaccagacagaggccctgcccctggtggtgaggaagaacagcagtgaccagagcgccagcggccctgctgctgggggccaccaccagcccctgcaccagagccccctgagcgccaccaccggcttcaccaccagcaccttccgccaccccttccccctgcccctgatggcctaccccttccagagccccctgggcgcccccagcggcagcttcagcggcaaggaccgggccagccctgagagcctggacctgacccgggacaccaccagcctgcggaccaagatgagcagccaccacctgagccaccacccctgcagccctgcccacccccccagcacagctgagggcctgagcctgagcctcatcaagtcagaatgtggggacctgcaggacatgtctgagatcagcccctacagcggcagcgccatgcaggagggcctgagccccaaccacctgaagaaggccaagctgatgttcttctacacccgctaccccagcagcaacatgctgaagacctacttcagtgatgtgaagttcaaccgctgcatcaccagccagctgatcaagtggttcagcaacttccgggagttctactacatccagatggagaagtatgcccggcaggccatcaatgatggagtgaccagcacagaggagctgagcatcacccgggactgtgagctgtaccgggccctgaacatgcactacaacaaggccaatgactttgaatag

SEQ ID NO: 165583 - DNA, 2214 bp, synthetic construct; identical to SEQ ID NO: 165581
  misc_feature 1..2214: note = Description of Artificial Sequence: Synthetic coding sequence
  source 1..2214: mol_type = other DNA

SEQ ID NO: 165584 - DNA, 693 bp, synthetic construct
  misc_feature 1..693: note = Description of Artificial Sequence: Synthetic coding sequence
  source 1..693: mol_type = other DNA
atgccagaccatgacagcacagccctgctgagccggcagaccaagagaagaagagtggacattggagtgaagaggacagtgggcacagccagcgccttctttgccaaggcccgggccaccttcttcagcgccatgaacccccagggcagcgagcaggatgtggagtacagcgtggtgcagcacgcagatggagagaagagcaatgtgctgaggaagctgctgaagagggccaacagctatgaagatgccatgatgcccttccctggggccaccatcatcagccagctgctgaagaacaacatgaacaagaatggaggaacagagcccagcttccaggccagcggcctgagcagcactggaagtgaggtgcaccaggaggacatctgcagcaacagcagccgggacagccccccagaatgtctgagccccttcggccggcccaccatgagccagtttgacatggaccggctgtgtgatgagcacctgcgggccaagagggcccgggtggagaacatcatccggggcatgagccacagccccagcgtggccctgcggggaaatgaaaatgaaagagagatggccccccagagcgtgagcccccgggagagctaccgggagaacaagaggaagcagaagctgccccagcagcagcagcagagcttccagcagctggtgtctgccaggaaggagtag

SEQ ID NO: 165585 - DNA, 2214 bp, synthetic construct; identical to SEQ ID NO: 165581
  misc_feature 1..2214: note = Description of Artificial Sequence: Synthetic coding sequence
  source 1..2214: mol_type = other DNA

SEQ ID NO: 165586 - DNA, 930 bp, synthetic construct
  misc_feature 1..930: note = Description of Artificial Sequence: Synthetic coding sequence
  source 1..930: mol_type = other DNA
atggccagcagcacagaccagacagaggccctgcccctggtggtgaggaagaacagcagtgaccagagcgccagcggccctgctgctgggggccaccaccagcccctgcaccagagccccctgagcgccaccaccggcttcaccaccagcaccttccgccaccccttccccctgcccctgatggcctaccccttccagagccccctgggcgcccccagcggcagcttcagcggcaaggaccgggccagccctgagagcctggacctgacccgggacaccaccagcctgcggaccaagatgagcagccaccacctgagccaccacccctgcagccctgcccacccccccagcacagctgagggcctgagcctgagcctcatcaagtcagaatgtggggacctgcaggacatgtctgagatcagcccctacagcggcagcgccatgcaggagggcctgagccccaaccacctgaagaaggccaagctgatgttcttctacacccgctaccccagcagcaacatgctgaagacctacttcagtgatgtgaagttcaaccgctgcatcaccagccagctgatcaagtggttcagcaacttccgggagttctactacatccagatggagaagtatgcccggcaggccatcaatgatggagtgaccagcacagaggagctgagcatcacccgggactgtgagctgtaccgggccctgaacatgcactacaacaaggccaatgactttgaggtgcctgagcgcttcctggaggtggcccagatcaccctgcgggagttcttcaatgccatcatcgccggcaaggatgtggaccccagctggaagaaggccatctacaaggtgatctgcaagctggacagcgaggtgcctgagatcttcaagagccccaactgcctgcaggagctgctgcacgagtag

SEQ ID NO: 165587 - DNA, 1080 bp, synthetic construct
  misc_feature 1..1080: note = Description of Artificial Sequence: Synthetic coding sequence
  source 1..1080: mol_type = other DNA
atgaagagccccttctaccgctgccagaacaccacctctgtggagaagggcaacagcgctgtgatgggcggcgtgctcttcagcacaggcctgctgggcaacctgctggccctgggcctgctggcccggagcggcctgggctggtgcagcagaagacccctgcggcccctgcccagcgtcttctacatgctggtgtgtggcctgactgtgacagacctgctgggcaagtgcctgctgagccctgtggtgctggccgcctatgcccagaacagaagcctgcgggtgctggccccagccctggacaacagcctgtgccaggcctttgccttcttcatgtccttcttcggcctgagcagcaccctgcagctgctggccatggccctggagtgctggctgagcctgggccaccccttcttctacagaagacacatcaccctgcggctgggcgccctggtggcccctgtggtgtctgccttcagcctggccttctgtgccctgcccttcatgggctttgggaagtttgtgcagtactgccccggcacctggtgcttcatccagatggtgcatgaggagggcagcctgtctgtgctgggctacagcgtgctgtacagcagcctgatggccctgctggtgctggccaccgtgctgtgcaacctgggcgccatgaggaacctgtatgccatgcaccggcggctgcagaggcaccccaggagctgcacccgggactgtgccgagcccagggcagatggccgggaggccagcccccagcccctggaggagctggaccacctgctgctgctggccctgatgacagtgctcttcaccatgtgcagcctgcccgtcatctaccgggcctactatggagccttcaaggatgtgaaggagaagaacagaaccagcgaggaggccgaggacctgcgggccctgcgcttcctgagcgtcatcagcatcgtggacccctggatcttcatcatcttccgcagccctgtgttccgcatcttcttccacaagatcttcatccggcccctgcgctaccgcagccgctgcagcaacagcaccaacatggagagcagcctgtag

SEQ ID NO: 165588 - DNA, 8034 bp, synthetic construct
  misc_feature 1..8034: note = Description of Artificial Sequence: Synthetic coding sequence
  source 1..8034: mol_type = other DNA
atgagcacctgctgctggtgcaccccaggaggagccagcaccatcgacttcctgaagagatatgccagcaacaccccatctggagagttccagacagcagatgaggacctgtgctactgcctggagtgtgtggccgagtaccacaaggccagagatgagctgcccttcctgcacgaggtgctgtgggagctggagaccctgcggctcatcaaccactttgagaagtccatgaaggccgagattggagatgatgatgagctgtacatcgtggacaacaatggagagatgcccctgtttgacatcaccggccaggactttgagaacaagctgcgggtgcccctgctggagatcctgaagtacccctacctgctgctgcacgagcgggtgaatgagctgtgtgtggaggccctgtgcaggatggagcaggccaactgcagcttccaggtgtttgacaagcaccctggcatctacctgttcctggtgcaccccaatgagatggtgcggcgctgggccatcctgacagccaggaacctgggcaaggtggacagagatgactactatgacctgcaggaggtgctgctgtgcctcttcaaggtgattgagctgggcctgctggagagcccagacatctacaccagctctgtgctggagaagggcaagctgatcctgctgcccagccacatgtatgacaccaccaactacaagagctactggctgggcatctgcatgctgctgaccatcctggaggagcaggccatggacagcctgctgctgggcagtgacaagcagaatgacttcatgcagagcatcctgcacaccatggagcgggaggctgatgatgacagcgtggaccccttctggccagccctgcactgcttcatggtgatcctggaccggctgggcagcaaggtgtggggccagctgatggaccccatcgtggccttccagaccatcatcaacaatgccagctacaaccgggagatccgccacatccggaacagctctgtgaggaccaagctggagcctgagagctacctggatgacatggtgacctgcagccagatcgtgtacaactacaaccctgagaagaccaagaaggacagcggctggaggacagccatctgcccagactactgccccaacatgtatgaggagatggagaccctggcctctgtgctgcagagcgacatcggccaggacatgagggtgcacaacagcaccttcctgtggttcatcccctttgtgcagagcctgatggacctgaaggacctgggcgtggcctacatcgcccaggtggtgaaccacctgtacagcgaggtgaaggaggtgctgaaccagacagatgctgtgtgtgacaaggtgacagagttcttcctgctgatcctggtgtctgtcatcgagctgcacaggaacaagaagtgcctgcacctgctgtgggtgagcagccagcagtgggtggaggccgtggtgaagtgtgccaagctgcccaccacagccttcaccaggagcagcgagaagagcagcggcaactgcagcaaaggaacagccatgatcagcagcctgagcctgcacagcatgcccagcaacagcgtgcagctggcctacgtgcagctgatccgcagcctgctgaaggagggctaccagctgggccagcagagcctgtgcaagcgcttctgggacaagctgaacctcttcctgcggggcaacctgagcctgggctggcagctgaccagccaggagacccatgagctgcagagctgcctgaagcagatcatccggaacatcaagttcaaggccccaccctgcaacacctttgtggacctgaccagcgcctgcaagatcagccctgccagctacaacaaggaggagagcgagcagatgggcaagaccagcaggaaggacatgcactgcctggaggccagcagccccaccttcagcaaggagcccatgaaggtgcaggacagcgtgctgatcaaggctgacaacaccatcgagggggacaacaatgagcagaactacatcaaggatgtgaagctggaggaccacctgctggccggcagctgcctgaagcagagcagcaagaacatcttcacagaaagagctgaggaccagatcaagatcagcaccaggaagcagaagtctgtgaaggagatcagcagctacacccccaaggactgcaccagcagaaatggacctgagcggggctgtgaccggggcatcatcgtgtccacccggctgctgacagacagcagcacagatgccctggagaaggtgtccaccagcaatgaagacttcagcctgaaggatgatgccctggccaagaccagcaagaggaagaccaaggtgcagaaggatgagatctgtgccaagctgagccacgtgatcaagaagcagcacaggaagagcaccctggtggacaacaccatcaacctggatgagaacctgactgtgagcaacatcgagagcttctacagcaggaaggacacaggagtgcagaagggagatggcttcatccacaacctgagcctggaccccagcggcgtgctggatgacaagaatggagagcagaagagccagaacaacgtgctgcccaaggagaagcagctgaagaatgaggagctggtgatcttctccttccacgagaacaactgcaagatccaggagttccacgtggatggcaaggagctgatccccttcacagagatgaccaatgccagcgagaagaagagcagccccttcaaggacctgatgacagtgcctgagagcagagatgaggagatgagcaacagcaccagcgtcatctacagcaacctgacccgggagcaggccccagacatcagccccaagagtgacaccctgacagacagccagattgaccgggacctgcacaagctgagcctgctggcccaggccagcgtcatcaccttccccagcgacagcccccagaacagcagccagctgcagaggaaggtgaaggaggacaagcgctgcttcaccgccaaccagaacaacgtgggggacaccagccggggccaggtgatcatcatcagtgacagtgatgatgatgatgatgagcgcatcctgagcctggagaagctgaccaagcaggacaagatctgcctggagcgggagcaccctgagcagcacgtgtccacagtgaacagcaaggaggagaagaaccctgtgaaggaggagaagacagagaccctcttccagtttgaggagagtgacagccagtgctttgaatttgagagcagcagcgaggtgttttctgtgtggcaggaccacccagatgacaacaacagcgtgcaggatggagagaagaagtgcctggcccccatcgccaacaccaccaacggccagggctgcacagattatgtgtctgaggtggtgaagaagggagctgagggcatcgaggagcacacccggcccaggagcatctctgtggaggagttctgtgaaattgaggtgaagaagcccaagaggaagaggtctgagaagcccatggctgaagatcctgtgcggcccagcagctctgtgagaaatgaaggccagagcgacaccaacaagagggacctggtgggcaatgacttcaagagcattgacaggaggaccagcacccccaacagccgcatccagagggccaccaccgtgtcccagaagaagagcagcaagctgtgcacctgcacagagcccatcaggaaggtgcctgtgtccaagacccccaagaagacccacagtgatgccaagaagggccagaacagaagcagcaactacctgagctgcaggaccaccccagccatcgtgccccccaagaagttccggcagtgcccagagcccaccagcacagctgagaagctgggcctgaagaagggccccaggaaggcctatgagctgagccagaggagcctggactatgtggcccagctgcgggaccacggcaagacagtgggcgtggtggacaccaggaagaagaccaagctgatcagcccccagaacctgtctgtgaggaacaacaagaagctgctgaccagccaggagctgcagatgcagaggcagatccggcccaagagccagaagaacagaagaaggctgagtgactgtgagagcacagatgtgaagagagctggcagccacacagcccagaacagcgacatctttgtgcctgagagtgacagaagtgactacaactgcacaggaggaacagaggtgctggccaacagcaacaggaagcagctgatcaagtgcatgcccagcgagcctgagaccatcaaggccaagcacggcagccctgccacagatgatgcctgccccctgaaccagtgtgacagcgtggtgctgaatggcaccgtgcccaccaatgaggtgattgtgtccaccagcgaggaccccctgggcggcggggaccccacagcccggcacatcgagatggccgccctgaaggagggggagccagacagcagcagtgatgctgaggaggacaacctcttcctgacccagaatgaccctgaggacatggacctgtgcagccagatggagaatgacaactacaagctgattgagctgatccacggcaaggacacagtggaggtggaggaggacagcgtgtcccggccccagctggagagcctgagcggcaccaagtgcaagtacaaggactgcctggagaccaccaagaaccagggcgagtactgccccaagcacagcgaggtgaaggccgcagatgaagatgtgttcaggaagccaggcctgcccccaccagccagcaagcccctgcggcccaccaccaagatcttcagcagcaagagcaccagcagaattgctggcctgagcaagagcctggagaccagcagcgccctgagccccagcctgaagaacaagagcaagggcatccagagcatcctgaaggtgccccagcctgtgcccctcatcgcccagaagcctgtgggggagatgaagaacagctgcaatgtgctgcacccccagagccccaacaacagcaaccggcagggctgcaaggtgccctttggagagagcaagtacttccccagcagcagccctgtgaacatcctgctgagcagccagagcgtgtctgacacctttgtgaaggaggtgctgaagtggaagtatgagatgttcctgaactttggccagtgtggccccccagccagcctgtgccagagcatcagcaggcctgtgcctgtgcgcttccacaactacggggactacttcaacgtgttcttccccctgatggtgctgaacacctttgagaccgtggcccaggagtggctgaacagccccaaccgggagaacttctaccagctgcaggtgaggaagtttcctgctgactacatcaagtactgggagtttgctgtgtacctggaggagtgtgagctggccaagcagctgtaccccaaggaaaatgacctggtgttcctggcccctgagcgcatcaatgaggagaagaaggacacagaaagaaatgacatccaggacctgcacgagtaccacagcggctacgtgcacaagttccggaggacctctgtgatgagaaatggcaagacagagtgctacctgagcatccagacccaggagaacttccctgccaacctgaatgagctggtgaactgcatcgtcatcagcagcctggtgaccacccagaggaagctgaaggccatgagcctgctgggcagcaggaaccagctggcccgggctgtgctgaaccccaaccccatggacttctgcaccaaggacctgctgaccaccaccagcgagcgcatcatcgcctacctgcgggacttcaatgaagaccagaagaaggccatcgagacagcctatgccatggtgaagcacagccccagcgtggccaagatctgcctgatccacggccccccaggcaccgggaagagcaagaccatcgtgggcctgctgtaccgcctgctgacagagaaccagaggaagggccacagtgatgagaacagcaatgccaagatcaagcagaacagagtgctggtgtgtgcccccagcaatgctgctgtggatgagctgatgaagaagatcatcctggagttcaaggagaagtgcaaggacaagaagaaccccctgggcaactgtggggacatcaacctggtgcggctgggccctgagaagagcatcaacagcgaggtgctgaagttcagcctggacagccaggtgaaccacaggatgaagaaggagctgcccagccacgtgcaggccatgcacaagaggaaggagttcctggactaccagctggatgagctgagccggcagagggccctgtgccggggcggccgggagatccagaggcaggagctggatgagaacatcagcaaggtgtccaaggagcggcaggagctggccagcaagatcaaggaggtgcagggccggccccagaagacccagagcatcatcatcctggagagccacatcatctgctgcaccctgagcaccagcggcggcctgctgctggagagcgccttccggggccagggcggcgtgcccttcagctgtgtgattgtggatgaagctggccagagctgtgaaattgagaccctgacccccctcatccaccgctgcaacaagctgatcctggtgggggaccccaagcagctgccccccaccgtcatctccatgaaggcccaggagtatggctatgaccagagcatgatggcccgcttctgccgcctgctggaggagaatgtggagcacaacatgatcagccggctgcccatcctgcagctgactgtgcagtacaggatgcacccagacatctgcctcttccccagcaactacgtgtacaacagaaacctgaagaccaaccggcagacagaggccatccgctgcagcagtgactggcccttccagccctacctggtgtttgatgtgggagatggcagcgagcggcgggacaatgacagctacatcaacgtgcaggagatcaagctggtgatggagatcatcaagctgatcaaggacaagaggaaggatgtgtccttcaggaacatcggcatcatcacccactacaaggcccagaagaccatgatccagaaggacctggacaaggagtttgacaggaagggccctgctgaggtggacacagtggatgccttccagggccggcagaaggactgtgtgattgtgacctgtgtgcgggccaacagcatccagggcagcatcggcttcctggccagcctgcagaggctgaatgtgaccatcacccgggccaagtacagcctcttcatcctgggccacctgcggaccctgatggagaaccagcactggaaccagctgatccaggatgcccagaagagaggagccatcatcaagacctgtgacaagaactacagacatgatgctgtgaagatcctgaagctgaagcctgtgctgcagaggagcctgacccacccccccaccatcgcccctgagggcagccggccccagggcggcctgcccagcagcaagctggacagcggctttgccaagacctctgtggccgccagcctgtaccacacccccagcgacagcaaggagatcaccctgactgtgaccagcaaggaccctgagcggccccctgtgcatgaccagctgcaggacccccggctgctgaagaggatgggcatcgaggtgaagggcggcatcttcctgtgggacccccagcccagcagcccccagcaccctggggccaccccacccaccggggagcccggcttccctgtggtgcaccaggacctgagccacatccagcagcctgctgctgtggtggccgccctgagcagccacaagccccctgtgcggggggagcccccagctgccagccctgaggccagcacctgccagagcaaatgtgatgatcctgaggaggagctgtgccaccggcgggaggcccgggccttcagcgagggggagcaggagaagtgtggcagcgagacccaccacaccaggaggaacagccgctgggacaagaggaccctggagcaggaggacagcagcagcaagaagaggaagctgctgtag

SEQ ID NO: 165589 - DNA, 483 bp, synthetic construct
  misc_feature 1..483: note = Description of Artificial Sequence: Synthetic coding sequence
  source 1..483: mol_type = other DNA
atggccacccaccacaccctgtggatgggcctggccctgctgggcgtgctgggggacctgcaggccgcccctgaggcccaggtgtctgtgcagcccaacttccagcaggacaagttcctgggccgctggttctctgctggcctggccagcaacagctcctggctgcgggagaagaaggccgccctgtccatgtgcaagtctgtggtggccccagccacagatggcggcctgaacctgaccagcaccttcctgaggaagaaccagtgtgagaccaggaccatgctgctgcagcctgctggcagcctgggcagctacagctaccgcagcccccgggagtggggcctgcaccggcccccaggccccagcctgggcgccaccctggccggcaccaccctgggccagcccccagctgctgagatccatggagtgggcggagatggctgccccacctctgtgcggggcaagggccaggcctgggcctag

SEQ ID NO: 165590 - DNA, 573 bp, synthetic construct
  misc_feature 1..573: note = Description of Artificial Sequence: Synthetic coding sequence
  source 1..573: mol_type = other DNA
atggccacccaccacaccctgtggatgggcctggccctgctgggcgtgctgggggacctgcaggccgcccctgaggcccaggtgtctgtgcagcccaacttccagcaggacaagttcctgggccgctggttctctgctggcctggccagcaacagctcctggctgcgggagaagaaggccgccctgtccatgtgcaagtctgtggtggccccagccacagatggcggcctgaacctgaccagcaccttcctgaggaagaaccagtgtgagaccaggaccatgctgctgcagcctgctggcagcctgggcagctacagctaccgcagcccccactggggcagcacctacagcgtgtctgtggtggagacagattatgaccagtatgccctgctgtacagccagggcagcaaaggacctggagaggacttcaggatggccaccctgtacagcaggacccagacccccagggctgagctgaaggagaagttcaccgccttctgcaaggcccagggcttcacagaggacaccatcgtgttcctgccccagacagacaagtgcatgacagagcagtag

SEQ ID NO: 165591 - DNA, 189 bp, synthetic construct
  misc_feature 1..189: note = Description of Artificial Sequence: Synthetic coding sequence
  source 1..189: mol_type = other DNA
tgaggctaccactgcctgcctgcccccaacagagcccagggcgaggtgggcggagatggcggctctgtgcagtttggaggctctgtgaagaccagcagcgccctgcgggaggagcaggaggcccagtgggagaactggcccaagtctggagtgctgaccacagcccctggcttcttcctgggccgctag

SEQ ID NO: 165592 - DNA, 642 bp, synthetic construct
  misc_feature 1..642: note = Description of Artificial Sequence: Synthetic coding sequence
  source 1..642: mol_type = other DNA
tgactgcggggcggcggccagttcctgggccggggcgtgcggggcgtggccgcccggggcatcggccggggcggcggggccggcctggagactggaggagtggatggccgcggggccccagctggaagaagacgctgggtgcggcgggtgctggctgatgctgggggcggccgcagcccccagttcctgggccgctggttctctgctggcctggccagcaacagctcctggctgcgggagaagaaggccgccctgtccatgtgcaagtctgtggtggccccagccacagatggcggcctgaacctgaccagcaccttcctgaggaagaaccagtgtgagaccaggaccatgctgctgcagcctgctggcagcctgggcagctacagctaccgcagcccccactggggcagcacctacagcgtgtctgtggtggagacagattatgaccagtatgccctgctgtacagccagggcagcaagggccctggagaggacttcaggatggccaccctgtacagcaggacccagacccccagggctgagctgaaggagaagttcaccgccttctgcaaggcccagggcttcacagaggacaccatcgtgttcctgccccagacagacaagtgcatgacagagcagtag

SEQ ID NO: 165593 - DNA, 588 bp, synthetic construct
  misc_feature 1..588: note = Description of Artificial Sequence: Synthetic coding sequence
  source 1..588: mol_type = other DNA
atggccacccaccacaccctgtggatgggcctggccctgctgggcgtgctgggggacctgcaggccgcccctgaggcccaggtgtctgtgcagcccaacttccagcaggacaagttcctgggccgctggttctctgctggcctggccagcaacagctcctggctgcgggagaagaaggccgccctgtccatgtgcaagtctgtggtggccccagccacagatggcggcctgaacctgaccagcaccttcctgaggaagaaccagtgtgagaccaggaccatgctgctgcagcctgctggcagcctgggcagctacagctaccgcagcccccgggagtggggcctgcaccggcccccaggccccagcctgggcgccaccctggccggcaccaccctgggccagcccccagctgctgagatccatggagtgggggactggggcagcacctacagcgtgtctgtggtggagacagattatgaccagtatgccctgctgtacagccagggcagcaaaggacctggagaggacttcaggatggccaccctgtacagcaggacccagacccccagggctgagctgaaggagtag

SEQ ID NO: 165594 - DNA, 573 bp, synthetic construct; identical to SEQ ID NO: 165590
  misc_feature 1..573: note = Description of Artificial Sequence: Synthetic coding sequence
  source 1..573: mol_type = other DNA

SEQ ID NO: 165595 - DNA, 1209 bp, synthetic construct
  misc_feature 1..1209: note = Description of Artificial Sequence: Synthetic coding sequence
  source 1..1209: mol_type = other DNA
atgagcccctgtggccccctgaacctgagcctggccggggaggccaccacctgtgccgccccctgggtgcccaacaccagcgctgtgccccccagcggggccagccctgccctgcccatcttctccatgaccctgggcgctgtgagcaacctgctggccctggccctgctggcccaggccgccggccgcctgcggaggagaagatctgctgccaccttcctgctgtttgtggccagcctgctggccacagacctggccggccacgtgattcctggggccctggtgctgcggctgtacacagctggccgggccccagctgggggcgcctgccacttcctgggcggctgcatggtgttcttcggcctgtgccccctgctgctgggctgcggcatggctgtggagcgctgtgtgggcgtgacccggcccctgctgcacgccgcccgggtgtctgtggcccgggcccggctggccctggccgctgtggccgctgtggccctggccgtggccctgctgcccctggcccgggtgggccgctatgagctgcagtacccaggcacctggtgcttcatcggcctgggccccccaggcggctggaggcaggccctgctggccggcctgtttgccagcctgggcctggtggccctgctggccgccctggtgtgcaacaccctgagcggcctggccctgctgcgggcccgctggaggcggcgcagcagaagacctcctccagccagcggccctgacagcagaagacgctggggcgcccacggccccaggtctgccagcgccagcagcgccagcagcatcgccagcgccagcaccttcttcggcggcagccgcagcagcggcagcgcccggcgggcccgggcccatgatgtggagatggtgggccagctggtgggcatcatggtggtgtcctgcatctgctggagccccatgctggtgctggtggccctggccgtgggcggctggagcagcaccagcctgcagaggcccctcttcctggccgtgcggctggcctcctggaaccagatcctggacccctgggtgtacatcctgctgcggcaggccgtgctgcggcagctgctgcggctgctgcccccccgggccggggccaagggcggccctgctggcctgggcctgacccccagcgcctgggaggccagcagcctgcggagcagccgccacagcggcctgagccacttctag

SEQ ID NO: 165596 - DNA, 1077 bp, synthetic construct
  misc_feature 1..1077: note = Description of Artificial Sequence: Synthetic coding sequence
  source 1..1077: mol_type = other DNA
atgggaaatgccagcaatgacagccagagcgaggactgtgagacccggcagtggctgcccccaggagagagccctgccatcagctctgtgatgttttctgctggggtgctgggcaacctgattgccctggccctgctggcccggcgctggagaggagatgtgggctgcagcgctggccgccgcagcagcctgagcctcttccacgtgctggtgacagagctggtgttcacagacctgctgggcacctgcctgatcagccctgtggtgctggccagctatgccaggaaccagaccctggtggccctggcccctgagagccgggcctgcacctactttgcctttgccatgaccttcttcagcctggccaccatgctgatgctgtttgccatggccctggagcgctacctgagcatcggccacccctacttctaccagaggagagtgagccgcagcggcggcctggccgtgctgcccgtcatctatgctgtgtccctgctcttctgcagcctgcccctgctggactatggccagtatgtgcagtactgccccggcacctggtgcttcatcagacatggccgcacagcctacctgcagctgtatgccaccctgctgctgctgctgattgtgtctgtgctggcctgcaacttcagcgtcatcctgaacctgatccgcatgcacagaagaagccgccgcagccgctgtggccccagcctgggcagcggccggggcggccctggggccaggagaagaggagagcgggtgtccatggccgaggagacagaccacctgatcctgctggccatcatgaccatcacctttgctgtgtgcagcctgcccttcaccatctttgcctacatgaatgagaccagcagcaggaaggagaagtgggacctgcaggccctgcgcttcctgagcatcaacagcatcatcgacccctgggtgtttgccatcctgcggccccctgtgctgcggctgatgaggtctgtgctgtgctgccgcatcagcctgcggacccaggatgccacccagaccagctgcagcacccagagtgatgccagcaagcaggccgacctgtag

SEQ ID NO: 165597 - DNA, 1173 bp, synthetic construct
  misc_feature 1..1173: note = Description of Artificial Sequence: Synthetic coding sequence
  source 1..1173: mol_type = other DNA
atgaaggagacccggggctatggaggagatgcccccttctgcacccggctgaaccacagctacacaggcatgtgggcccctgagaggtctgctgaggcccggggcaacctgacccggcccccaggcagcggggaggactgtggctctgtgtctgtggccttccccatcaccatgctgctgactggatttgtgggcaatgccctggccatgctgctggtgagccgcagctacagaagaagagagagcaagaggaagaagagcttcctgctgtgcatcggctggctggccctgacagacctggtgggccagctgctgaccacccctgtggtgattgtggtgtacctgagcaagcagcgctgggagcacatcgaccccagcggccgcctgtgcaccttcttcggcctgaccatgacagtgtttggcctgagcagcctcttcatcgccagcgccatggctgtggagcgggccctggccatccgggccccccactggtacgccagccacatgaagacccgggccaccagggctgtgctgctgggcgtgtggctggccgtgctggcctttgccctgctgcctgtgctgggcgtgggccagtacacagtgcagtggccaggcacctggtgcttcatcagcacaggccggggcggcaatggcaccagcagcagccacaactggggcaacctcttctttgccagcgcctttgccttcctgggcctgctggccctgactgtgaccttcagctgcaacctggccaccatcaaggccctggtgagccgctgccgggccaaggccacagccagccagagcagcgcccagtggggccgcatcaccacagaaacagccatccagctgatgggcatcatgtgtgtgctgtctgtgtgctggagccccctgctgatcatgatgctgaagatgatcttcaaccagacctctgtggagcactgcaagacccacacagagaagcagaaggagtgcaacttcttcctgattgctgtgcggctggccagcctgaaccagatcctggacccctgggtgtacctgctgctgaggaagatcctgctgaggaagttctgccagatccgctaccacaccaacaactatgccagcagcagcaccagcctgccctgccagtgcagcagcaccctgatgtggagcgaccacctggagaggtag

SEQ ID NO: 165598 - DNA, 1260 bp, synthetic construct
  misc_feature 1..1260: note = Description of Artificial Sequence: Synthetic coding sequence
  source 1..1260: mol_type = other DNA
atgaaggagacccggggctatggaggagatgcccccttctgcacccggctgaaccacagctacacaggcatgtgggcccctgagaggtctgctgaggcccggggcaacctgacccggcccccaggcagcggggaggactgtggctctgtgtctgtggccttccccatcaccatgctgctgactggatttgtgggcaatgccctggccatgctgctggtgagccgcagctacagaagaagagagagcaagaggaagaagagcttcctgctgtgcatcggctggctggccctgacagacctggtgggccagctgctgaccacccctgtggtgattgtggtgtacctgagcaagcagcgctgggagcacatcgaccccagcggccgcctgtgcaccttcttcggcctgaccatgacagtgtttggcctgagcagcctcttcatcgccagcgccatggctgtggagcgggccctggccatccgggccccccactggtacgccagccacatgaagacccgggccaccagggctgtgctgctgggcgtgtggctggccgtgctggcctttgccctgctgcctgtgctgggcgtgggccagtacacagtgcagtggccaggcacctggtgcttcatcagcacaggccggggcggcaatggcaccagcagcagccacaactggggcaacctcttctttgccagcgcctttgccttcctgggcctgctggccctgactgtgaccttcagctgcaacctggccaccatcaaggccctggtgagccgctgccgggccaaggccacagccagccagagcagcgcccagtggggccgcatcaccacagaaacagccatccagctgatgggcatcatgtgtgtgctgtctgtgtgctggagccccctgctgatcatgatgctgaagatgatcttcaaccagacctctgtggagcactgcaagacccacacagagaagcagaaggagtgcaacttcttcctgattgctgtgcggctggccagcctgaaccagatcctggacccctgggtgtacctgctgctgaggaagatcctgctgaggaagttctgccaggtggccaatgctgtgagcagctgcagcaatgatggccagaagggccagcccatcagcctgagcaatgagatcatccagacagaggccatccgctaccacaccaacaactatgccagcagcagcaccagcctgccctgccagtgcagcagcaccctgatgtggagcgaccacctggagaggtag

SEQ ID NO: 165599 - DNA, 1290 bp, synthetic construct
  misc_feature 1..1290: note = Description of Artificial Sequence: Synthetic coding sequence
  source 1..1290: mol_type = other DNA
atgaaggagacccggggctatggaggagatgcccccttctgcacccggctgaaccacagctacacaggcatgtgggcccctgagaggtctgctgaggcccggggcaacctgacccggcccccaggcagcggggaggactgtggctctgtgtctgtggccttccccatcaccatgctgctgactggatttgtgggcaatgccctggccatgctgctggtgagccgcagctacagaagaagagagagcaagaggaagaagagcttcctgctgtgcatcggctggctggccctgacagacctggtgggccagctgctgaccacccctgtggtgattgtggtgtacctgagcaagcagcgctgggagcacatcgaccccagcggccgcctgtgcaccttcttcggcctgaccatgacagtgtttggcctgagcagcctcttcatcgccagcgccatggctgtggagcgggccctggccatccgggccccccactggtacgccagccacatgaagacccgggccaccagggctgtgctgctgggcgtgtggctggccgtgctggcctttgccctgctgcctgtgctgggcgtgggccagtacacagtgcagtggccaggcacctggtgcttcatcagcacaggccggggcggcaatggcaccagcagcagccacaactggggcaacctcttctttgccagcgcctttgccttcctgggcctgctggccctgactgtgaccttcagctgcaacctggccaccatcaaggccctggtgagccgctgccgggccaaggccacagccagccagagcagcgcccagtggggccgcatcaccacagaaacagccatccagctgatgggcatcatgtgtgtgctgtctgtgtgctggagccccctgctgatcatgatgctgaagatgatcttcaaccagacctctgtggagcactgcaagacccacacagagaagcagaaggagtgcaacttcttcctgattgctgtgcggctggccagcctgaaccagatcctggacccctgggtgtacctgctgctgaggaagatcctgctgaggaagttctgccagatgaggaagaggcggctgcgggagcagttctggaggcctgccagcagcggcagcggctgccagcagatccgctgcctgatggagagctgcagcctgacccagacaggagtgcagtggagcgacttccgcagcctgcagcccagccccccacccctgacagccatctttgcctcctgggtgcaggtgatcctgctgccccagccccccaagtag

SEQ ID NO: 165600 - DNA, 1257 bp, synthetic construct
  misc_feature 1..1257: note = Description of Artificial Sequence: Synthetic coding sequence
  source 1..1257: mol_type = other DNA
atgaaggagacccggggctatggaggagatgcccccttctgcacccggctgaaccacagctacacaggcatgtgggcccctgagaggtctgctgaggcccggggcaacctgacccggcccccaggcagcggggaggactgtggctctgtgtctgtggccttccccatcaccatgctgctgactggatttgtgggcaatgccctggccatgctgctggtgagccgcagctacagaagaagagagagcaagaggaagaagagcttcctgctgtgcatcggctggctggccctgacagacctggtgggccagctgctgaccacccctgtggtgattgtggtgtacctgagcaagcagcgctgggagcacatcgaccccagcggccgcctgtgcaccttcttcggcctgaccatgacagtgtttggcctgagcagcctcttcatcgccagcgccatggctgtggagcgggccctggccatccgggccccccactggtacgccagccacatgaagacccgggccaccagggctgtgctgctgggcgtgtggctggccgtgctggcctttgccctgctgcctgtgctgggcgtgggccagtacacagtgcagtggccaggcacctggtgcttcatcagcacaggccggggcggcaatggcaccagcagcagccacaactggggcaacctcttctttgccagcgcctttgccttcctgggcctgctggccctgactgtgaccttcagctgcaacctggccaccatcaaggccctggtgagccgctgccgggccaaggccacagccagccagagcagcgcccagtggggccgcatcaccacagaaacagccatccagctgatgggcatcatgtgtgtgctgtctgtgtgctggagccccctgctgatcatgatgctgaagatgatcttcaaccagacctctgtggagcactgcaagacccacacagagaagcagaaggagtgcaacttcttcctgattgctgtgcggctggccagcctgaaccagatcctggacccctgggtgtacctgctgctgaggaagatcctgctgaggaagttctgccagatgaggaagaggcggctgcgggagcagctgatctgcagcctgcagaacagccagatccagagggccacagcccactgcggccaggtgcagacctacagagtgctgaaccgggaggagatggaggtgctggtgagcagcatcaacgtgtacacccgcatcagcacagtgaagacagaatag

SEQ ID NO: 165601 - DNA, 1209 bp, synthetic construct
  misc_feature 1..1209: note = Description of Artificial Sequence: Synthetic coding sequence
  source 1..1209: mol_type = other DNA
atgaaggagacccggggctatggaggagatgcccccttctgcacccggctgaaccacagctacacaggcatgtgggcccctgagaggtctgctgaggcccggggcaacctgacccggcccccaggcagcggggaggactgtggctctgtgtctgtggccttccccatcaccatgctgctgactggatttgtgggcaatgccctggccatgctgctggtgagccgcagctacagaagaagagagagcaagaggaagaagagcttcctgctgtgcatcggctggctggccctgacagacctggtgggccagctgctgaccacccctgtggtgattgtggtgtacctgagcaagcagcgctgggagcacatcgaccccagcggccgcctgtgcaccttcttcggcctgaccatgacagtgtttggcctgagcagcctcttcatcgccagcgccatggctgtggagcgggccctggccatccgggccccccactggtacgccagccacatgaagacccgggccaccagggctgtgctgctgggcgtgtggctggccgtgctggcctttgccctgctgcctgtgctgggcgtgggccagtacacagtgcagtggccaggcacctggtgcttcatcagcacaggccggggcggcaatggcaccagcagcagccacaactggggcaacctcttctttgccagcgcctttgccttcctgggcctgctggccctgactgtgaccttcagctgcaacctggccaccatcaaggccctggtgagccgctgccgggccaaggccacagccagccagagcagcgcccagtggggccgcatcaccacagaaacagccatccagctgatgggcatcatgtgtgtgctgtctgtgtgctggagccccctgctgatcatgatgctgaagatgatcttcaaccagacctctgtggagcactgcaagacccacacagagaagcagaaggagtgcaacttcttcctgattgctgtgcggctggccagcctgaaccagatcctggacccctgggtgtacctgctgctgaggaagatcctgctgaggaagttctgccagatgaggaagaggcggctgcgggagcaggagatgggcccagatggccgctgcttctgccacgcctggaggcaggtgcccaggacctggtgcagcagccatgaccgggagccctgcagcgtgcagctgtcctag

SEQ ID NO: 165602 - DNA, 1167 bp, synthetic construct
  misc_feature 1..1167: note = Description of Artificial Sequence: Synthetic coding sequence
  source 1..1167: mol_type = other DNA
atgaaggagacccggggctatggaggagatgcccccttctgcacccggctgaaccacagctacacaggcatgtgggcccctgagaggtctgctgaggcccggggcaacctgacccggcccccaggcagcggggaggactgtggctctgtgtctgtggccttccccatcaccatgctgctgactggatttgtgggcaatgccctggccatgctgctggtgagccgcagctacagaagaagagagagcaagaggaagaagagcttcctgctgtgcatcggctggctggccctgacagacctggtgggccagctgctgaccacccctgtggtgattgtggtgtacctgagcaagcagcgctgggagcacatcgaccccagcggccgcctgtgcaccttcttcggcctgaccatgacagtgtttggcctgagcagcctcttcatcgccagcgccatggctgtggagcgggccctggccatccgggccccccactggtacgccagccacatgaagacccgggccaccagggctgtgctgctgggcgtgtggctggccgtgctggcctttgccctgctgcctgtgctgggcgtgggccagtacacagtgcagtggccaggcacctggtgcttcatcagcacaggccggggcggcaatggcaccagcagcagccacaactggggcaacctcttctttgccagcgcctttgccttcctgggcctgctggccctgactgtgaccttcagctgcaacctggccaccatcaaggccctggtgagccgctgccgggccaaggccacagccagccagagcagcgcccagtggggccgcatcaccacagaaacagccatccagctgatgggcatcatgtgtgtgctgtctgtgtgctggagccccctgctgatcatgatgctgaagatgatcttcaaccagacctctgtggagcactgcaagacccacacagagaagcagaaggagtgcaacttcttcctgattgctgtgcggctggccagcctgaaccagatcctggacccctgggtgtacctgctgctgaggaagatcctgctgaggaagttctgccaggtggccaatgctgtgagcagctgcagcaatgatggccagaagggccagcccatcagcctgagcaatgagatcatccagacagaggcctag

SEQ ID NO: 165603 - DNA, 1173 bp, synthetic construct; identical to SEQ ID NO: 165597
  misc_feature 1..1173: note = Description of Artificial Sequence: Synthetic coding sequence
  source 1..1173: mol_type = other DNA

SEQ ID NO: 165604 - DNA, 1098 bp, synthetic construct
  misc_feature 1..1098: note = Description of Artificial Sequence: Synthetic coding sequence
  source 1..1098: mol_type = other DNA
atgaaggagacccggggctatggaggagatgcccccttctgcacccggctgaaccacagctacacaggcatgtgggcccctgagaggtctgctgaggcccggggcaacctgacccggcccccaggcagcggggaggactgtggctctgtgtctgtggccttccccatcaccatgctgctgactggatttgtgggcaatgccctggccatgctgctggtgagccgcagctacagaagaagagagagcaagaggaagaagagcttcctgctgtgcatcggctggctggccctgacagacctggtgggccagctgctgaccacccctgtggtgattgtggtgtacctgagcaagcagcgctgggagcacatcgaccccagcggccgcctgtgcaccttcttcggcctgaccatgacagtgtttggcctgagcagcctcttcatcgccagcgccatggctgtggagcgggccctggccatccgggccccccactggtacgccagccacatgaagacccgggccaccagggctgtgctgctgggcgtgtggctggccgtgctggcctttgccctgctgcctgtgctgggcgtgggccagtacacagtgcagtggccaggcacctggtgcttcatcagcacaggccggggcggcaatggcaccagcagcagccacaactggggcaacctcttctttgccagcgcctttgccttcctgggcctgctggccctgactgtgaccttcagctgcaacctggccaccatcaaggccctggtgagccgctgccgggccaaggccacagccagccagagcagcgcccagtggggccgcatcaccacagaaacagccatccagctgatgggcatcatgtgtgtgctgtctgtgtgctggagccccctgctgatcatgatgctgaagatgatcttcaaccagacctctgtggagcactgcaagacccacacagagaagcagaaggagtgcaacttcttcctgattgctgtgcggctggccagcctgaaccagatcctggacccctgggtgtacctgctgctgaggaagatcctgctgaggaagttctgccaggaggagttctggggcaactag

SEQ ID NO: 165605 - DNA, 1365 bp, synthetic construct
  misc_feature 1..1365: note = Description of Artificial Sequence: Synthetic coding sequence
  source 1..1365: mol_type = other DNA
atgaaggagacccggggctatggaggagatgcccccttctgcacccggctgaaccacagctacacaggcatgtgggcccctgagaggtctgctgaggcccggggcaacctgacccggcccccaggcagcggggaggactgtggctctgtgtctgtggccttccccatcaccatgctgctgactggatttgtgggcaatgccctggccatgctgctggtgagccgcagctacagaagaagagagagcaagaggaagaagagcttcctgctgtgcatcggctggctggccctgacagacctggtgggccagctgctgaccacccctgtggtgattgtggtgtacctgagcaagcagcgctgggagcacatcgaccccagcggccgcctgtgcaccttcttcggcctgaccatgacagtgtttggcctgagcagcctcttcatcgccagcgccatggctgtggagcgggccctggccatccgggccccccactggtacgccagccacatgaagacccgggccaccagggctgtgctgctgggcgtgtggctggccgtgctggcctttgccctgctgcctgtgctgggcgtgggccagtacacagtgcagtggccaggcacctggtgcttcatcagcacaggccggggcggcaatggcaccagcagcagccacaactggggcaacctcttctttgccagcgcctttgccttcctgggcctgctggccctgactgtgaccttcagctgcaacctggccaccatcaaggccctggtgagccgctgccgggccaaggccacagccagccagagcagcgcccagtggggccgcatcaccacagaaacagccatccagctgatgggcatcatgtgtgtgctgtctgtgtgctggagccccctgctgatcatgatgctgaagatgatcttcaaccagacctctgtggagcactgcaagacccacacagagaagcagaaggagtgcaacttcttcctgattgctgtgcggctggccagcctgaaccagatcctggacccctgggtgtacctgctgctgaggaagatcctgctgaggaagttctgccaggtggccaatgctgtgagcagctgcagcaatgatggccagaagggccagcccatcagcctgagcaatgagatcatccagacagaggccatgaggaagaggcggctgcgggagcaggcccccctgctgcccaccagcacagtgattgaccccagccgcttctgtgcccagcccttccgctggttcctggacctgtccttccctgccatgagcagcagccacccccagctgcccctgaccctggccagcttcaagctgctgcgggagccctgcagcgtgcagctgtcctag

SEQ ID NO: 165606 - DNA, 1173 bp, synthetic construct; identical to SEQ ID NO: 165597
  misc_feature 1..1173: note = Description of Artificial Sequence: Synthetic coding sequence
  source 1..1173: mol_type = other DNA

SEQ ID NO: 165607 - DNA, 1125 bp, synthetic construct
  misc_feature 1..1125: note = Description of Artificial Sequence: Synthetic coding sequence
  source 1..1125: mol_type = other DNA
atgaaggagacccggggctatggaggagatgcccccttctgcacccggctgaaccacagctacacaggcatgtgggcccctgagaggtctgctgaggcccggggcaacctgacccggcccccaggcagcggggaggactgtggctctgtgtctgtggccttccccatcaccatgctgctgactggatttgtgggcaatgccctggccatgctgctggtgagccgcagctacagaagaagagagagcaagaggaagaagagcttcctgctgtgcatcggctggctggccctgacagacctggtgggccagctgctgaccacccctgtggtgattgtggtgtacctgagcaagcagcgctgggagcacatcgaccccagcggccgcctgtgcaccttcttcggcctgaccatgacagtgtttggcctgagcagcctcttcatcgccagcgccatggctgtggagcgggccctggccatccgggccccccactggtacgccagccacatgaagacccgggccaccagggctgtgctgctgggcgtgtggctggccgtgctggcctttgccctgctgcctgtgctgggcgtgggccagtacacagtgcagtggccaggcacctggtgcttcatcagcacaggccggggcggcaatggcaccagcagcagccacaactggggcaacctcttctttgccagcgcctttgccttcctgggcctgctggccctgactgtgaccttcagctgcaacctggccaccatcaaggccctggtgagccgctgccgggccaaggccacagccagccagagcagcgcccagtggggccgcatcaccacagaaacagccatccagctgatgggcatcatgtgtgtgctgtctgtgtgctggagccccctgctgatcatgatgctgaagatgatcttcaaccagacctctgtggagcactgcaagacccacacagagaagcagaaggagtgcaacttcttcctgattgctgtgcggctggccagcctgaaccagatcctggacccctgggtgtacctgctgctgaggaagatcctgctgaggaagttctgccagatgaggaagaggcggctgcgggagcaggaggagttctggggcaactag

SEQ ID NO: 165608 - DNA, 1467 bp, synthetic construct
  misc_feature 1..1467: note = Description of Artificial Sequence: Synthetic coding sequence
  source 1..1467: mol_type = other DNA
atgagcaccccaggagtgaacagcagcgccagcctgagcccagaccggctgaacagccctgtgaccatcccagctgtgatgttcatcttcggcgtggtgggcaacctggtggccatcgtggtgctgtgcaagagcaggaaggagcagaaggagaccaccttctacaccctggtgtgtggcctggccgtgacagacctgctgggcaccctgctggtgtcccctgtgaccatcgccacctacatgaagggccagtggccaggcggccagcccctgtgtgagtacagcaccttcatcctgctcttcttcagcctgagcggcctgagcatcatctgtgccatgtctgtggagcgctacctggccatcaaccacgcctacttctacagccactacgtggacaagaggctggccggcctgaccctgtttgctgtgtatgccagcaatgtgctcttctgtgccctgcccaacatgggcctgggcagcagccggctgcagtacccagacacctggtgcttcatcgactggaccaccaacgtgacagcccacgccgcctacagctacatgtatgccggcttcagcagcttcctgatcctggccaccgtgctgtgcaatgtgctggtgtgtggggccctgctgaggatgcaccggcagttcatgaggaggaccagcctgggcacagagcagcaccacgccgctgctgctgcctctgtggccagccggggccaccctgctgccagccctgccctgccccggctgagtgacttcagaagaagaagaagcttcagaagaattgctggagctgagatccagatggtgatcctgctgattgccaccagcctggtggtgctgatctgcagcatccccctggtggtgcgggtgtttgtgaaccagctgtaccagcccagcctggagcgggaggtgtccaagaacccagacctgcaggccatcagaattgcctctgtgaaccccatcctggacccctggatctacatcctgctgaggaagacagtgctgagcaaggccatcgagaagatcaagtgcctcttctgcagaattggaggcagcagaagagagaggagcggccagcactgcagcgacagccagaggaccagcagcgccatgagcggccacagccgctccttcatcagccgggagctgaaggagatcagcagcaccagccagaccctgctgcctgacctgagcctgcctgacctgtctgaaaatggcctgggcggcaggaacctgctgcccggggtgcccggcatgggcctggcccaggaggacaccaccagcctgcggaccctgcgcatcagcgagaccagtgacagcagccagggccaggacagcgagagcgtgctgctggtggatgaagctgggggcagcggccgggccggccctgcccccaagggcagcagcctgcaggtgaccttccccagcgagaccctgaacctgtctgagaagtgcatctag

SEQ ID NO: 165609 - DNA, 459 bp, synthetic construct
  misc_feature 1..459: note = Description of Artificial Sequence: Synthetic coding sequence
  source 1..459: mol_type = other DNA
atgcctgcccacagcctggtgatgagcagccctgccctgcctgccttcctgctgtgcagcaccctgctggtgatcaagatgtatgtggtggccatcatcaccggccaggtgcggctgaggaagaaggcctttgccaacccagaagatgccctgcggcatggaggcccccagtactgccgcagtgaccctgatgtggagcgctgcctgcgggcccacagaaatgacatggagaccatctaccccttcctgttcctgggctttgtgtacagcttcctgggccccaacccctttgtggcctggatgcacttcctggtgttcctggtgggccgggtggcccacacagtggcctacctgggcaagctgcgggcccccatccgctctgtgacctacaccctggcccagctgccctgtgcctccatggccctgcagatcctgtgggaggccgcccggcacctgtag

SEQ ID NO: 165610 - DNA, 561 bp, synthetic construct
  misc_feature 1..561: note = Description of Artificial Sequence: Synthetic coding sequence
  source 1..561: mol_type = other DNA
atgaaggctgtgaatgagcagggcaaggaggtgacagaatttggaaacaagtactggctgatgctgaatgagaaggaggcccagcaggtgtatggaggcaaggaggccaggacagaggagatgaagtggaggcagtgggcagatgactggctggtgcacctgatcagccccaacgtgtaccgcacccccacagaggccctggccagctttgactacatcgtgcgggagggcaagtttggagctgtggagggcgctgtggccaagtacatgggcgctgctgccatgtacctgatcagcaagaggctgaagagccgccaccggctgcaggacaacgtgcgggaggacctgtatgaagctgctgacaagtgggtggccgctgtgggcaaggaccggcccttcatgggcggccagaagcccaacctggccgacctggccgtgtatggagtgctgcgggtgatggagggcctggatgcctttgatgacctgatgcagcacacccacatccagccctggtacctgcgggtggagcgggccatcacagaggccagccctgcccactag

SEQ ID NO: 165611 - DNA, 1134 bp, synthetic construct
  misc_feature 1..1134: note = Description of Artificial Sequence: Synthetic coding sequence
  source 1..1134: mol_type = other DNA
atggaccctgctgcccgggtggtgcgggccctgtggccaggcggctgtgccctggcctggaggctgggcggccggccccagcccctgctgcccacccagagccgggccggctttgctggagctgctgggggccccagccctgtggccgccgccaggaagggcagcccccggctgctgggcgccgccgccctggccctgggcggggccctgggcctgtaccacacagcccgctggcacctgcgggcccaggacctgcatgctgagaggtctgctgcccagctgagcctgagcagccggctgcagctgaccctgtaccagtacaagacctgccccttctgcagcaaggtgcgggccttcctggacttccacgccctgccctaccaggtggtggaggtgaaccctgtgcggcgggcagagatcaagttcagcagctacaggaaggtgcccatcctggtggcccaggagggggagagcagccagcagctgaatgacagcagcgtcatcatcagcgccctgaagacctacctggtgtctggccagcccctggaggagatcatcacctactacccagccatgaaggctgtgaatgagcagggcaaggaggtgacagaatttggaaacaagtactggctgatgctgaatgagaaggaggcccagcaggtgtatggaggcaaggaggccaggacagaggagatgaagtggaggcagtgggcagatgactggctggtgcacctgatcagccccaacgtgtaccgcacccccacagaggccctggccagctttgactacatcgtgcgggagggcaagtttggagctgtggagggcgctgtggccaagtacatgggcgccgccgccatgtacctgatcagcaagaggctgaagagccgccaccggctgcaggacaacgtgcgggaggacctgtatgaggccgctgacaagtgggtggccgctgtgggcaaggaccggcccttcatgggcggccagaagcccaacctggccgacctggccgtgtatggagtgctgcgggtgatggagggcctggatgcctttgatgacctgatgcagcacacccacatccagccctggtacctgcgggtggagcgggccatcacagaggccagccctgcccactag

SEQ ID NO: 165612 - DNA, 894 bp, synthetic construct
  misc_feature 1..894: note = Description of Artificial Sequence: Synthetic coding sequence
  source 1..894: mol_type = other DNA
atgtccatgaacaacagcaagcagctggtgtccccagctgctgccctgctgagcaacaccacctgccagacagaaaatcggctgtctgtgttcttcagcgtcatcttcatgacagtgggcatcctgagcaacagcctggccatcgccatcctgatgaaggcctaccagcgcttccggcagaagagcaaggccagcttcctgctgctggccagcggcctggtgatcacagacttcttcggccacctgatcaacggggccatcgctgtgtttgtgtatgccagtgacaaggagtggatccgctttgaccagagcaatgtgctgtgcagcatcttcggcatctgcatggtgttcagcggcctgtgccccctgctgctgggctctgtgatggccatcgagcgctgcattggagtgaccaagcccatcttccacagcaccaagatcaccagcaagcacgtgaagatgatgctgtctggagtgtgcctgtttgctgtgttcatcgccctgctgcccatcctgggccaccgggactacaagatccaggccagcaggacctggtgcttctacaacacagaggacatcaaggactgggaggaccgcttctacctgctgctcttctccttcctgggcctgctggccctgggcgtgtccctgctgtgcaatgccatcaccggcatcaccctgctgcgggtgaagttcaagagccagcagcaccggcagggccgcagccaccacctggagatggtgatccagctgctggccatcatgtgtgtgtcctgcatctgctggagccccttcctgggctaccgcatcatcctgaatggcaaggagaagtacaaggtgtatgaggagcagagcgacttcctgcaccggctgcagtggcccaccctggagtag

SEQ ID NO: 165613 - DNA, 1080 bp, synthetic construct
  misc_feature 1..1080: note = Description of Artificial Sequence: Synthetic coding sequence
  source 1..1080: mol_type = other DNA
atgtccatgaacaacagcaagcagctggtgtccccagctgctgccctgctgagcaacaccacctgccagacagaaaatcggctgtctgtgttcttcagcgtcatcttcatgacagtgggcatcctgagcaacagcctggccatcgccatcctgatgaaggcctaccagcgcttccggcagaagagcaaggccagcttcctgctgctggccagcggcctggtgatcacagacttcttcggccacctgatcaacggggccatcgctgtgtttgtgtatgccagtgacaaggagtggatccgctttgaccagagcaatgtgctgtgcagcatcttcggcatctgcatggtgttcagcggcctgtgccccctgctgctgggctctgtgatggccatcgagcgctgcattggagtgaccaagcccatcttccacagcaccaagatcaccagcaagcacgtgaagatgatgctgtctggagtgtgcctgtttgctgtgttcatcgccctgctgcccatcctgggccaccgggactacaagatccaggccagcaggacctggtgcttctacaacacagaggacatcaaggactgggaggaccgcttctacctgctgctcttctccttcctgggcctgctggccctgggcgtgtccctgctgtgcaatgccatcaccggcatcaccctgctgcgggtgaagttcaagagccagcagcaccggcagggccgcagccaccacctggagatggtgatccagctgctggccatcatgtgtgtgtcctgcatctgctggagccccttcctggtgaccatggccaacatcggcatcaatggaaaccacagcctggagacctgtgagaccaccctgtttgccctgaggatggccacctggaaccagatcctggacccctgggtgtacatcctgctgaggaaggctgtgctgaagaacctgtacaagctggccagccagtgctgcggcgtgcacgtgatcagcctgcacatctgggagctgagcagcatcaagaacagcctgaaggtggccgccatcagcgagagccctgtggccgagaagagcgccagcacctag

SEQ ID NO: 165614 - DNA, 1080 bp, synthetic construct; identical to SEQ ID NO: 165613
  misc_feature 1..1080: note = Description of Artificial Sequence: Synthetic coding sequence
  source 1..1080: mol_type = other DNA

SEQ ID NO: 165615 - DNA, 2640 bp, synthetic construct
  misc_feature 1..2640: note = Description of Artificial Sequence: Synthetic coding sequence
  source 1..2640: mol_type = other DNA
atgggccgcctggccagccggcccctgctgctggccctgctgagcctggccctgtgccggggccgggtggtgcgggtgcccacagccaccctggtgcgggtggtgggcacagagctggtgatcccctgcaatgtgtctgactatgatggccccagcgagcagaactttgactggagcttcagcagcctgggcagcagctttgtggagctggccagcacctgggaggtgggcttccctgcccagctgtaccaggagcggctgcagagaggagagatcctgctgcggaggacagccaatgatgctgtggagctgcacatcaagaatgtgcagcccagcgaccagggccactacaagtgcagcacccccagcacagatgccaccgtgcagggcaactatgaagatactgtgcaggtgaaggtgctggccgacagcctgcacgtgggccccagcgcccggcccccacccagcctgagcctgcgggagggggagccctttgagctgcgctgcacagctgccagcgccagccccctgcacacccacctggccctgctgtgggaggtgcaccggggccctgccaggagatctgtgctggccctgacccatgagggccgcttccaccctggcctgggctatgagcagcgctaccacagcggagatgtgcggctggacacagtgggcagtgatgcctaccgcctgtctgtgtcccgggccctgtctgctgaccagggcagctaccgctgcatcgtgtctgagtggattgctgagcagggcaactggcaggagatccaggagaaggctgtggaggtggccaccgtggtgatccagcccagcgtgctgcgggctgctgtgcccaagaatgtgtctgtggccgagggcaaggagctggacctgacctgcaacatcaccacagacagagcagatgatgtgcggcctgaggtgacctggagcttcagcaggatgccagacagcaccctgcccggcagccgggtgctggcccggctggaccgggacagcctggtgcacagcagcccccacgtggccctgagccacgtggatgcccggagctaccacctgctggtgagagatgtgtccaaggagaacagcggctactactactgccacgtgtccctgtgggcccctggccacaacagatcctggcacaaggtggccgaggccgtgagcagccctgctggggtgggcgtgacctggctggagccagactaccaggtgtacctgaatgccagcaaggtgcccggctttgctgatgaccccacagagctggcctgccgggtggtggacaccaagagcggggaggccaacgtgcgcttcaccgtgtcctggtactacaggatgaacagaagaagtgacaacgtggtgaccagcgagctgctggccgtgatggatggagactggaccctgaagtatggagagaggagcaagcagagggcccaggatggagacttcatcttcagcaaggagcacacagacaccttcaacttccgcatccagaggaccacagaggaggaccggggcaactactactgtgtggtgtctgcctggaccaagcagaggaacaacagctgggtgaagagcaaggatgtgttcagcaagcctgtgaacatcttctgggccctggaggacagcgtgctggtggtgaaggcccggcagcccaagcccttctttgctgctggcaacacctttgagatgacctgcaaggtgagcagcaagaacatcaagagcccccgctacagcgtgctgatcatggccgagaagcctgtgggggacctgagcagccccaatgagaccaagtacatcatcagcctggaccaggacagcgtggtgaagctggagaactggacagatgccagccgggtggatggagtggtgctggagaaggtgcaggaggatgagttccgctacaggatgtaccagacccaggtgtctgatgctggcctgtaccgctgcatggtgacagcctggagccctgtgcggggcagcctgtggagggaggccgccaccagcctgagcaaccccattgaaattgacttccagaccagcggccccatcttcaatgcctctgtgcacagcgacacccccagcgtcatccggggggacctgatcaagctgttctgcatcatcaccgtggagggcgccgccctggaccctgatgacatggcctttgatgtgtcctggtttgctgtgcacagctttggcctggacaaggcccctgtgctgctgagcagcctggacaggaagggcatcgtgaccaccagcagaagagactggaagagtgacctgagcctggagcgggtgtctgtgctggagttcctgctgcaggtgcacggcagcgaggaccaggactttggaaactactactgcagcgtgaccccctgggtgaagagccccaccggctcctggcagaaggaggccgagatccacagcaagcctgtgttcatcaccgtgaagatggatgtgctgaatgccttcaagtaccccctgctgattggagtgggcctgagcacagtgattggcctgctgagctgcctgattggctactgcagcagccactggtgctgcaagaaggaggtgcaggagacccggcgggagcggcggcggctgatgtccatggagatggactag

SEQ ID NO: 165616 - DNA, 2217 bp, synthetic construct
  misc_feature 1..2217: note = Description of Artificial Sequence: Synthetic coding sequence
  source 1..2217: mol_type = other DNA
tctggagctgctggggccggccggggcggcggcggggaggccgccggcaaggaggaggagggggagccctttgagctgcgctgcacagctgccagcgccagccccctgcacacccacctggccctgctgtgggaggtgcaccggggccctgcccggcgctctgtgctggccctgacccatgagggccgcttccaccctggcctgggctatgagcagcgctaccacagcggagatgtgcggctggacacagtgggcagtgatgcctaccgcctgtctgtgtcccgggccctgtctgctgaccagggcagctaccgctgcatcgtgtctgagtggattgctgagcagggcaactggcaggagatccaggagaaggctgtggaggtggccaccgtggtgatccagcccagcgtgctgcgggctgctgtgcccaagaatgtgtctgtggccgagggcaaggagctggacctgacctgcaacatcaccacagacagagcagatgatgtgcggcctgaggtgacctggagcttcagcaggatgccagacagcaccctgcccggcagccgggtgctggcccggctggaccgggacagcctggtgcacagcagcccccacgtggccctgagccacgtggatgcccggagctaccacctgctggtgagagatgtgtccaaagaaaattctggctactactactgccacgtgtccctgtgggcccctggccacaacagatcctggcacaaggtggccgaggccgtgagcagccctgctggggtgggcgtgacctggctggagccagactaccaggtgtacctgaatgccagcaaggtgcccggctttgctgatgaccccacagagctggcctgccgggtggtggacaccaagtctggagaggccaacgtgcgcttcaccgtgtcctggtactacaggatgaacagaagaagtgacaacgtggtgaccagcgagctgctggccgtgatggatggagactggaccctgaagtacggggagaggagcaagcagagggcccaggatggagacttcatcttcagcaaggagcacacagacaccttcaacttccgcatccagaggaccacagaagaagatcggggcaactactactgtgtggtgtctgcctggaccaagcagaggaacaacagctgggtgaagagcaaggatgtgttcagcaagcctgtgaacatcttctgggccctggaggacagcgtgctggtggtgaaggcccggcagcccaagcccttctttgctgctggcaacacctttgagatgacctgcaaggtgagcagcaagaacatcaagagcccccgctacagcgtgctgatcatggccgagaagcctgtgggggacctgagcagccccaatgagaccaagtacatcatcagcctggaccaggacagcgtggtgaagctggagaactggacagatgccagccgggtggatggagtggtgctggagaaggtgcaggaggatgagttccgctacaggatgtaccagacccaggtgtctgatgctggcctgtaccgctgcatggtgacagcctggagccctgtgcggggcagcctgtggagggaggccgccaccagcctgagcaaccccatcgagattgacttccagaccagcggccccatcttcaatgcctctgtgcacagcgacaccccatctgtcatccggggggacctgatcaagctgttctgcatcatcaccgtggagggcgccgccctggaccctgatgacatggcctttgatgtgtcctggtttgctgtgcacagctttggcctggacaaggcccctgtgctgctgagcagcctggacagaaaaggaattgtgaccaccagccggcgggactggaagagtgacctgagcctggagcgggtgtctgtgctggagttcctgctgcaggtgcacggcagcgaggaccaggactttggaaactactactgcagcgtgaccccctgggtgaagagccccaccggctcctggcagaaggaggccgagatccacagcaagcctgtgttcatcaccgtgaagatggatgtgctgaatgccttcaagtaccccctgctgattggagtgggcctgagcaccgtcatcggcctgctgagctgcctgattggctactgcagcagccactggtgctgcaagaaggaggtgcaggagacccggcgggagcggcggcggctgatgtccatggagatggactag

SEQ ID NO: 165617 - DNA, 1161 bp, synthetic construct
  misc_feature 1..1161: note = Description of Artificial Sequence: Synthetic coding sequence
  source 1..1161: mol_type = other DNA
atggctgacagctgcaggaacctgacctacgtgcggggctctgtgggccctgccaccagcaccctgatgtttgtggccggcgtggtgggcaatggcctggccctgggcatcctgagcgcccggcggcctgcccggcccagcgcctttgctgtgctggtgacaggcctggccgccacagacctgctgggcaccagcttcctgagccctgctgtgtttgtggcctatgccaggaacagcagcctgctgggcctggcccggggcggccctgccctgtgtgatgcctttgcctttgccatgaccttcttcggcctggcctccatgctgatcctgtttgccatggctgtggagcgctgcctggccctgagccacccctacctgtatgcccagctggatggcccccgctgtgcccggctggccctgcctgccatctatgccttctgtgtgctcttctgtgccctgcccctgctgggcctgggccagcaccagcagtactgccccggctcctggtgcttcctgaggatgcgctgggcccagcctggaggagctgccttcagcctggcctatgccggcctggtggccctgctggtggccgccatcttcctgtgcaatggatctgtgaccctgagcctgtgcaggatgtaccggcagcagaagaggcaccagggcagcctgggcccccggcccaggactggagaagatgaggtggaccacctgatcctgctggccctgatgacagtggtgatggctgtgtgcagcctgcccctgaccatccgctgcttcacccaggccgtggccccagacagcagcagcgagatgggagacctgctggccttccgcttctacgccttcaaccccatcctggacccctgggtgttcatcctcttcaggaaggctgtgttccagaggctgaagctgtgggtgtgctgcctgtgcctgggccctgcccacggggacagccagacccccctgagccagctggccagcggccggcgggacccccgggcccccagcgcccctgtgggcaaggagggcagctgtgtgcccctgagcgcctggggcgagggccaggtggagcccctgccccccacccagcagagcagcggcagcgctgtgggcaccagcagcaaggccgaggcctctgtggcctgcagcctgtgctag

SEQ ID NO: 165618 - DNA, 1503 bp, synthetic construct
  misc_feature 1..1503: note = Description of Artificial Sequence: Synthetic coding sequence
  source 1..1503: mol_type = other DNA
atggcctgggccgccctgctgggcctgctggccgccctgctgctgctgctgctgctgagcagaagaaggaccaggaggcctggagagccccccctggacctgggcagcatcccctggctgggctacgccctggactttgggaaggatgctgccagcttcctgaccaggatgaaggagaagcatggagacatcttcaccatcctggtgggcggccgctacgtgacagtgctgctggacccccacagctatgatgctgtggtgtgggagcccaggacccggctggacttccacgcctatgccatcttcctgatggagcgcatctttgatgtgcagctgccccactacagccccagtgatgagaaggccaggatgaagctgaccctgctgcaccgggagctgcaggccctgacagaggccatgtacaccaacctgcatgctgtgctgctgggagatgccacagaagctggcagcggctggcatgagatgggcctgctggacttctcctacagcttcctgctgcgggccggctacctgaccctgtatggaattgaggccctgcccaggacccatgagagccaggcccaggacagagtgcacagcgcagatgtgttccacaccttccggcagctggaccggctgctgcccaagctggcccggggcagcctgtctgtgggggacaaggaccacatgtgcagcgtgaagagccggctgtggaagctgctgagccctgcccggctggcccggcgggcccacaggagcaagtggctggagagctacctgctgcacctggaggagatgggcgtgtctgaggagatgcaggcccgggccctggtgctgcagctgtgggccacccagggcaacatgggccctgctgccttctggctgctgctcttcctgctgaagaaccctgaggccctggccgctgtgcggggggagctggagagcatcctgtggcaggccgagcagcctgtgtcccagaccaccaccctgccccagaaggtgctggacagcacccctgtgctggacagcgtgctgtctgagagcctgcggctgacagctgcccccttcatcacccgggaggtggtggtggacctggccatgcccatggctgatggccgggagttcaacctgcggcggggggaccggctgctgctcttccccttcctgagcccccagagggaccctgagatctacacagatcctgaggtgttcaagtacaaccgcttcctgaacccagatggcagcgagaagaaggacttctacaaggatggcaagaggctgaagaactacaacatgccctggggcgccggccacaaccactgcctgggccgctcctatgctgtgaacagcatcaagcagtttgtgttcctggtgctggtgcacctggacctggagctgatcaatgctgatgtggagatccctgagtttgacctgagccgctatggcttcggcctgatgcagcctgagcatgatgtgcctgtgcgctaccgcatccggccctag

SEQ ID NO: 165619 - DNA, 408 bp, synthetic construct
  misc_feature 1..408: note = Description of Artificial Sequence: Synthetic coding sequence
  source 1..408: mol_type = other DNA
atgagggccttcctgaggaaccagaagtatgaggacatgcacaacatcatccacatcctgcagatcaggaagctgcggcaccggctgagcaacttcccccggctgcccggcatcctggcccctgagaccgtgctgctgcccttctgctacaaggtgttcaggaagaaggagaaggtgaagaggagccagaaggccacagagttcatcgactacagcattgagcagagccaccacgccatcctgacccccctgcagacccacctgaccatgaagggcagctccatgaagtgcagcagcctgagcagcgaggccatcctcttcaccctgaccctgcagctgacccagaccctgggcctggagtgctgcctgctgtacctgagcaagaccatccacccccagatcatctag

SEQ ID NO: 165620 - DNA, 345 bp, synthetic construct
  misc_feature 1..345: note = Description of Artificial Sequence: Synthetic coding sequence
  source 1..345: mol_type = other DNA
atggccggcctggccctgcagcccggcacagccctgctgtgctacagctgcaaggcccaggtgtccaatgaagactgcctgcaggtggagaactgcacccagctgggggagcagtgctggacagcccgcatccgggctgtgggcctgctgaccgtcatcagcaagggctgcagcctgaactgtgtggatgacagccaggactactacgtgggcaagaagaacatcacctgctgtgacacagacctgtgcaatgccagcggggcccacgccctgcagcctgctgctgccatcctggccctgctgcctgccctgggcctgctgctgtggggccctggccagctgtag

SEQ ID NO: 165621 - DNA, 714 bp, synthetic construct
  misc_feature 1..714: note = Description of Artificial Sequence: Synthetic coding sequence
  source 1..714: mol_type = other DNA
atgatggtgatggtggtggtgatcacctgcctgctgagccactacaagctgagcgcccgctccttcatcagccgccacagccagggcagaagaagagaagatgccctgagcagcgagggctgcctgtggcccagcgagagcacagtgtctggaaatggcatccctgagccccaggtgtatgccccaccccggcccacagaccggctggccgtgcccccatttgcccagcgggagcgcttccaccgcttccagcccacctacccctacctgcagcacgagattgacctgccccccaccatcagcctgagtgatggagaggagcccccaccctaccagggcccctgcaccctgcagctgcgggaccctgagcagcagctggagctgaaccgggagagcgtgcgggccccacccaacagaaccatctttgacagcgacctgatggattctgcccggctgggcggcccctgcccccccagcagcaacagcggcatcagcgccacctgctacggcagcggcggccgcatggagggccccccacccacctacagcgaggtgattggccactacccaggcagcagcttccagcaccagcagagcagcggcccccccagcctgctggagggcacccggctgcaccacacccacatcgcccccctggagagcgctgccatctggagcaaggagaaggacaagcagaagggccaccccctgtag

SEQ ID NO: 165622 - DNA, 864 bp, synthetic construct
  misc_feature 1..864: note = Description of Artificial Sequence: Synthetic coding sequence
  source 1..864: mol_type = other DNA
atgcaccggctgatgggcgtgaacagcacagctgctgctgctgctggccagcccaacgtgtcctgcacctgcaactgcaagaggagcctcttccagagcatggagatcacagagctggagtttgtgcagatcatcatcatcgtggtggtgatgatggtgatggtggtggtgatcacctgcctgctgagccactacaagctgagcgcccgctccttcatcagccgccacagccagggcagaagaagagaagatgccctgagcagcgagggctgcctgtggcccagcgagagcacagtgtctggaaatggcatccctgagccccaggtgtatgccccaccccggcccacagaccggctggccgtgcccccatttgcccagcgggagcgcttccaccgcttccagcccacctacccctacctgcagcacgagattgacctgccccccaccatcagcctgagtgatggagaggagcccccaccctaccagggcccctgcaccctgcagctgcgggaccctgagcagcagctggagctgaaccgggagagcgtgcgggccccacccaacagaaccatctttgacagcgacctgatggattctgcccggctgggcggcccctgcccccccagcagcaacagcggcatcagcgccacctgctacggcagcggcggccgcatggagggccccccacccacctacagcgaggtgattggccactacccaggcagcagcttccagcaccagcagagcagcggcccccccagcctgctggagggcacccggctgcaccacacccacatcgcccccctggagagcgctgccatctggagcaaggagaaggacaagcagaagggccaccccctgtag

SEQ ID NO: 165623 - DNA, 759 bp, synthetic construct
  misc_feature 1..759: note = Description of Artificial Sequence: Synthetic coding sequence
  source 1..759: mol_type = other DNA
atggccgagctggagtttgtgcagatcatcatcatcgtggtggtgatgatggtgatggtggtggtgatcacctgcctgctgagccactacaagctgagcgcccggagcttcatcagccgccacagccagggcagaagaagagaagatgccctgagcagcgagggctgcctgtggcccagcgagagcacagtgtctggaaatggcatccctgagccccaggtgtatgccccaccccggcccacagaccggctggccgtgcccccatttgcccagcgggagcgcttccaccgcttccagcccacctacccctacctgcagcatgaaattgacctgccccccaccatcagcctgagtgatggagaggagcccccaccctaccagggcccctgcaccctgcagctgcgggaccctgagcagcagctggagctgaaccgggagagcgtgcgggccccacccaacagaaccatctttgacagcgacctgatggacagcgcccggctgggcggcccctgcccccccagcagcaacagcggcatcagcgccacctgctacggcagcggcggccgcatggagggccccccacccacctacagcgaggtgattggccactacccaggcagcagcttccagcaccagcagagcagcggcccccccagcctgctggagggcacccggctgcaccacacccacatcgcccccctggagagcgctgccatctggagcaaggagaaggacaagcagaagggccaccccctgtag

SEQ ID NO: 165624 - DNA, 714 bp, synthetic construct; identical to SEQ ID NO: 165621
  misc_feature 1..714: note = Description of Artificial Sequence: Synthetic coding sequence
  source 1..714: mol_type = other DNA

SEQ ID NO: 165625 - DNA, 714 bp, synthetic construct; identical to SEQ ID NO: 165621
  misc_feature 1..714: note = Description of Artificial Sequence: Synthetic coding sequence
  source 1..714: mol_type = other DNA

SEQ ID NO: 165626 - DNA, 684 bp, synthetic construct
  misc_feature 1..684: note = Description of Artificial Sequence: Synthetic coding sequence
  source 1..684: mol_type = other DNA
atgcaccggctgatgggcgtgaacagcacagctgctgctgctgctggccagcccaacgtgtcctgcacctgcaactgcaagaggagcctcttccagagcatggagatcagctgccacggcttccctgtgtgcaagagccaccagcaccaggagtggaagagcctgtgctggagcctgcggagccctgggggcgccagcagcatcactggatttggctccatgaaggtgaccaacccagccatgaacctgcctgagtgccagtggctgcgcatccagaaggccgagctggagtttgtgcagatcatcatcatcgtggtggtgatgatggtgatggtggtggtgatcacctgcctgctgagccactacaagctgagcgcccggagcttcatcagccgccacagccagggcagaagaagagaagatgccctgagcagcgagggctgcctgtggcccagcgagagcacagtgtctggaaatggcatccctgagccccaggtgtatgccccaccccggcccacagaccggctggccgtgcccccatttgcccagcgggagcgcttccaccgcttccagcccacctacccctacctgcagcatgaaattgacctgccccccaccatcagcctgagtgatggagaggagcccccaccctaccagggcccctgcaccctgcagctgaggtag

SEQ ID NO: 165627 - DNA, 627 bp, synthetic construct
  misc_feature 1..627: note = Description of Artificial Sequence: Synthetic coding sequence
  source 1..627: mol_type = other DNA
atgcctgccatcccagcccatggagctgagctggagtttgtgcagatcatcatcatcgtggtggtgatgatggtgatggtggtggtgatcacctgcctgctgagccactacaagctgagcgcccgctccttcatcagccgccacagccagggcagaagaagagaagatgccctgagcagcgagggctgcctgtggcccagcgagagcacagtgtctggaaatggcatccctgagccccaggtgtatgccccaccccggcccacagaccggctggccgtgcccccatttgcccagcgggagcgcttccaccgcttccagcccacctacccctacctgcagcacgagattgacctgccccccaccatcagcctgagtgatggagaggagcccccaccctaccagggcccctgcaccctgcagctgcgggaccctgagcagcagctggagctgaaccgggagagcgtgcgggccccacccaacagaaccatctttgacagcgacctgatggattctgcccggctgggcggcccctgcccccccagcagcaacagcggcatcagcgccacctgctacggcagcggcggccgcatggagggccccccacccacctacagcgaggtgatctag

SEQ ID NO: 165628 - DNA, 156 bp, synthetic construct
  misc_feature 1..156: note = Description of Artificial Sequence: Synthetic coding sequence
  source 1..156: mol_type = other DNA
atggcccgctaccgctgctgccgcagccagagccgcagccgctactaccggcagaggcagaggagcagaagaagaagaagaagaagctgccagacccggcggcgggccatgcgctgctgccggccccgctaccggccccgctgcagaagacactag

SEQ ID NO: 165629 - DNA, 309 bp, synthetic construct
  misc_feature 1..309: note = Description of Artificial Sequence: Synthetic coding sequence
  source 1..309: mol_type = other DNA
atggtgcgctacagagtgcgcagcctgtctgagaggagccatgaggtgtaccggcagcagctgcacggccaggagcagggccaccacggccaggaggagcagggcctgagccctgagcacgtggaggtgtatgaaagaacccacggccagagccactacagaagaagacactgcagcagaagaaggctgcaccgcatccaccggcggcagcacaggagctgcagaagaaggaagagaagaagctgccgccacagaagaagacacagaagaggctgcaggaccaggaagaggacctgccgccgccactag

SEQ ID NO: 165630 - DNA, 423 bp, synthetic construct
  misc_feature 1..423: note = Description of Artificial Sequence: Synthetic coding sequence
  source 1..423: mol_type = other DNA
atggtgcgctacagagtgcgcagcctgtctgagaggagccatgaggtgtaccggcagcagctgcacggccaggagcagggccaccacggccaggaggagcagggcctgagccctgagcacgtggaggtgtatgaaagaacccacggccagagccactacagaagaagacactgcagcagaagaaggctgcaccgcatccaccggcggcagcacaggagctgcagaagaaggaagagaagaagctgccgccacagaagaagacacagaagagagagcctgggggaccccctgaaccagaacttcctgagccagaaggctgctgagcccggccgggagcacgccgagggcaccaagctgcccggccccctgacccccagctggaagctgaggaagagccggcccaagcaccaggtgcggccctag

SEQ ID NO: 165631 - DNA, 657 bp, synthetic construct
  misc_feature 1..657: note = Description of Artificial Sequence: Synthetic coding sequence
  source 1..657: mol_type = other DNA
tgactggccctgctgctggcccgggccggcctgaggaagccagagagccaggaggccgcccccctgagcggcccctgtggccggcgggtcatcaccagcagaattgtgggcggagaagatgctgagctgggccgctggccctggcagggcagcctgcggctgtgggacagccacgtgtgtggggtgtccctgctgagccaccgctgggccctgacagctgcccactgctttgaaacagacctgagtgaccccagcggctggatggtgcagtttggccagctgacctccatgcccagcttctggagcctgcaggcctactacacccgctactttgtgagcaacatctacctgagcccccgctacctgggcaacagcccctatgacatcgccctggtgaagctgagcgcccctgtgacctacaccaagcacatccagcccatctgcctgcaggccagcacctttgaatttgaaaatagaacagactgctgggtgacaggctggggctacatcaaggaggatgagggcagcagcggccgccaccacaagcagctgtatgtgcagccccccctgccccaggtgcagttcccccagggccacctgtggaggcatggcctgtgctggcagtgcccccggcgggagggctgcctgctgaggtag

SEQ ID NO: 165632 - DNA, 744 bp, synthetic construct
  misc_feature 1..744: note = Description of Artificial Sequence: Synthetic coding sequence
  source 1..744: mol_type = other DNA
atgaaccccctgctgatcctgacctttgtggccgccgccctggccgccccctttgatgatgatgacaagatcgtgggcggctacaactgtgaggagaacagcgtgccctaccaggtgtccctgaacagcggctaccacttctgtggcggcagcctcatcaatgagcagtgggtggtgtctgctggccactgctacaagagccgcatccaggtgcggctgggggagcacaacatcgaggtgctggagggcaatgagcagttcatcaatgctgccaagatcatccgccacccccagtatgacaggaagaccctgaacaatgacatcatgctgatcaagctgagcagcagagctgtgatcaatgcccgggtgtccaccatcagcctgcccacagcccccccagccaccggcaccaagtgcctgatcagcggctggggcaacacagccagcagcggggctgactacccagatgagctgcagtgcctggatgcccctgtgctgagccaggccaagtgtgaggccagctacccaggcaagatcaccagcaacatgttctgtgtgggcttcctggagggcggcaaggacagctgccagggcgacagcggcggccctgtggtgtgcaatggccagctgcagggcgtggtgtcctggggagatggctgtgcccagaagaacaagccaggagtgtacaccaaggtgtacaactacgtgaagtggatcaagaacaccatcgccgccaacagctag

SEQ ID NO: 165633 - DNA, 714 bp, synthetic construct
  misc_feature 1..714: note = Description of Artificial Sequence: Synthetic coding sequence
  source 1..714: mol_type = other DNA
atgaaccccctgctgatcctgacctttgtggccgccgccctggccgccccctttgatgatgatgacaagatcgtgggcggctacaactgtgaggagaacagcgtgccctaccaggtgtccctgaacagcggctaccacttctgtggcggcagcctcatcaatgagcagtgggtggtgtctgctggccactgctacaagagccgcatccaggtgcggctgggggagcacaacatcaatgctgccaagatcatccgccacccccagtatgacaggaagaccctgaacaatgacatcatgctgatcaagctgagcagcagagctgtgatcaatgcccgggtgtccaccatcagcctgcccacagcccccccagccaccggcaccaagtgcctgatcagcggctggggcaacacagccagcagcggggctgactacccagatgagctgcagtgcctggatgcccctgtgctgagccaggccaagtgtgaggccagctacccaggcaagatcaccagcaacatgttctgtgtgggcttcctggagggcggcaaggacagctgccagggcgacagcggcggccctgtggtgtgcaatggccagctgcagggcgtggtgtcctggggagatggctgtgcccagaagaacaagccaggagtgtacaccaaggtgtacaactacgtgaagtggatcaagaacaccatcgccgccaacagctag

SEQ ID NO: 165634 - DNA, 2628 bp, synthetic construct
  misc_feature 1..2628: note = Description of Artificial Sequence: Synthetic coding sequence
  source 1..2628: mol_type = other DNA
atgaccctggccaggtttgtgctggccctgatgctgggcgccctgcctgaggtggtgggctttgattctgtgctgaatgacagcctgcaccacagccaccgccacagccccccagctggcccccactacccctactacctgcccacccagcagaggcctcccaggacccggcccccaccacccctgccccgcttcccccggcccccccgggccctgcctgcccagaggccccacgccctgcaggccggccacaccccccggccccacccctggggctgcccagctggggagccctgggtgtctgtgacagactttggagccccctgcctgcgctgggccgaggtgccccccttcctggagaggagccccccagcctcctgggcccagctgcggggccagaggcacaacttctgccgcagcccagatggagctggccggccctggtgcttctatggagatgcccggggcaaggtggactggggctactgtgactgcagacatggctctgtgcggctgcggggcggcaagaatgaatttgagggcaccgtggaggtgtatgccagcggcgtgtggggcaccgtgtgcagcagccactgggatgacagtgatgccagcgtcatctgccaccagctgcagctgggcggcaagggcatcgccaagcagacccccttcagcggcctgggcctcatccccatctactggagcaatgtgcgctgcagaggagatgaggagaacatcctgctgtgtgagaaggacatctggcagggcggcgtgtgcccccagaagatggctgctgctgtgacctgcagcttcagccacggccccaccttccccatcatccggctggccggcggcagctctgtgcatgagggccgggtggagctgtaccacgccggccagtggggcaccgtgtgtgatgaccagtgggatgatgctgatgctgaggtgatctgccggcagctgggcctgagcggcatcgccaaggcctggcaccaggcctactttggagagggcagcggccctgtgatgctggatgaggtgcgctgcacaggaaatgagctgagcattgagcagtgccccaagagctcctggggcgagcacaactgtggccacaaggaggatgctggggtgtcctgcacccccctgacagatggagtcatccggctggccggcggcaagggcagccatgagggccgcctggaggtgtactaccggggccagtggggcaccgtgtgtgatgatggctggacagagctgaacacctacgtggtgtgccggcagctgggcttcaagtatggcaagcaggccagcgccaaccactttgaggagagcacaggccccatctggctggatgatgtgtcctgcagcggcaaggagacccgcttcctgcagtgcagccggcggcagtggggcagacatgactgcagccacagagaagatgtgtccatcgcctgctacccaggaggagagggccaccggctgagcctgggcttccctgtgcggctgatggatggagagaacaagaaggagggccgggtggaggtgttcatcaatggccagtggggcaccatctgtgatgatggctggacagacaaggatgctgctgtgatctgccggcagctgggctacaagggccctgcccgggcccggaccatggcctactttggagagggcaagggccccatccacgtggacaacgtgaagtgcacaggaaatgaaagaagcctggccgactgcatcaagcaggacatcggccgccacaactgccgccacagtgaagatgctggggtcatctgtgactactttgggaagaaggccagcggcaacagcaacaaggagagcctgagctctgtgtgtggcctgcggctgctgcaccggcggcagaagaggatcatcggcggcaagaacagcctgcggggcggctggccctggcaggtgtccctgcggctgaagagcagccatggagatggccgcctgctgtgtggggccaccctgctgagcagctgctgggtgctgacagctgcccactgcttcaagagatatggcaacagcaccaggagctatgctgtgcgggtgggggactaccacaccctggtgcctgaggagtttgaggaggagattggagtgcagcagatcgtcatccaccgggagtacagaccagacagaagtgactatgacatcgccctggtgcggctgcagggccctgaggagcagtgtgcccgcttcagcagccacgtgctgcctgcctgcctgcccctgtggagggagcggccccagaagacagccagcaactgctacatcaccggctggggagacaccggccgggcctacagcaggaccctgcagcaggccgccatccccctgctgcccaagcgcttctgtgaggagcgctacaagggccgcttcaccggccgcatgctgtgtgccggcaacctgcacgagcacaagagggtggacagctgccagggcgacagcggcggccccctgatgtgtgagaggcctggagagagctgggtggtgtatggagtgacctcctggggctacggctgcggcgtgaaggacagccctggggtgtacaccaaggtgtctgcctttgtgccctggatcaagtctgtgaccaagctgtag

SEQ ID NO: 165635 - DNA, 489 bp, synthetic construct
  misc_feature 1..489: note = Description of Artificial Sequence: Synthetic coding sequence
  source 1..489: mol_type = other DNA
atgaagggcttcaccgccaccctcttcctgtggaccctcatcttccccagctgcagcggcggcggcggcggcaaggcctggcccacccacgtggtgtgcagcgacagcggcctggaggtgctgtaccagagctgtgaccccctgcaggactttggcttctctgtggagaagtgcagcaagcagctgaagagcaacatcaacatccgcttcggcatcatcctgcgggaggacatcaaggagctgttcctggacctggccctgatgagccagggcagctctgtgctgaacttctcctaccccatctgtgaggccgccctgcccaagttctccttctgtggccgcaggaagggggagcagatctactatgccggccctgtgaacaaccctgagttcaccatcccccagggcgagtaccaggtgctgctggagctgtacacagagaagaggagcacagtggcctgtgccaatgccaccatcatgtgcagctag

SEQ ID NO: 165636 - DNA, 822 bp, synthetic construct
  misc_feature 1..822: note = Description of Artificial Sequence: Synthetic coding sequence
  source 1..822: mol_type = other DNA
atggctgtgtggctggcccagtggctgggccccctgctgctggtgtccctgtggggcctgctggccccagccagcctgctgcggcggctgggggagcacatccagcagttccaggagagcagcgcccagggcctgggcctgagcctgggccctggagctgctgccctgcccaaggtgggctggctggagcagctgctggaccccttcaacgtgtctgaccggcgctccttcctgcagcgctactgggtgaatgaccagcactgggtgggccaggacggccccatcttcctgcacctgggcggggagggcagcctgggccctggctctgtgatgaggggccaccctgctgccctggccccagcctggggcgccctggtgatcagcctggagcaccgcttctacggcctgagcatcccagctgggggcctggagatggcccagctgcgcttcctgagcagccggctggccctggctgatgtggtgtctgcccggctggccctgagccgcctcttcaacatcagcagcagcagcccctggatctgcttcggcggcagctatgccggcagcctggccgcctgggcccggctgaagttcccccacctgatctttgcctctgtggccagcagcgcccctgtgcgggctgtgctggacttcagcgagtacaatgacatcgtgctgcacagcctgggccagaagtgcctgtccttcagcagagctgagaccgtggcccagctgcggagcacagagccccagctgtctggagtgggggaccggcagtggctgtaccagacctgcacagaatttggcttctacatcacctag

SEQ ID NO: 165637 - DNA, 501 bp, synthetic construct
  misc_feature 1..501: note = Description of Artificial Sequence: Synthetic coding sequence
  source 1..501: mol_type = other DNA
atggctgtgtggctggcccagtggctgggccccctgctgctggtgtccctgtggggcctgctggccccagccagcctgctgcggcggctgggggagcacatccagcagttccaggagagcagcgcccagggcctgggcctgagcctgggccctggagctgctgccctgcccaaggtgggctggctggagcagctgctggaccccttcaacgtgtctgaccggcgctccttcctgcagcgctactgggtgaatgaccagcactgggtgggccaggacggccccatcttcctgcacctgggcggggagggcagcctgggccctggctctgtgatgaggggccaccctgctgccctggccccagcctggggcgccctggtgatcagcctggagcaccgcttctacggcctgagcatcccagctgggggcctggagatggcccagctgcgcttcctgagcagccggctggccctgagctgcacagcctgggcccggtctgtgtag

SEQ ID NO: 165638 - DNA, 498 bp, synthetic construct
  misc_feature 1..498: note = Description of Artificial Sequence: Synthetic coding sequence
  source 1..498: mol_type = other DNA
tgagtgatgaggggccaccctgctgccctggccccagcctggggcgccctggtgatcagcctggagcaccgcttctacggcctgagcatcccagctgggggcctggagatggcccagctgcgcttcctgagcagccggctggccctggctgatgtggtgtctgcccggctggccctgagccgcctcttcaacatcagcagcagcagcccctggatctgcttcggcggcagctatgccggcagcctggccgcctgggcccggctgaagttcccccacctgatctttgcctctgtggccagcagcgcccctgtgcgggctgtgctggacttcagcgagtacaatgacatcgtgctgcacagcctgggccagaagtgcctgtccttcagcagagctgagaccgtggcccagctgcggagcacagagccccagctgtctggagtgggggaccggcagtggctgtaccagacctgcacagaatttggcttctacgtgacctag

SEQ ID NO: 165639 - DNA, 945 bp, synthetic construct
  misc_feature 1..945: note = Description of Artificial Sequence: Synthetic coding sequence
  source 1..945: mol_type = other DNA
atgggcgcccggggggccctgctgctggccctgctgctggcccgggccggcctgaggaagccagagagccaggaggccgcccccctgagcggcccctgtggcagaagagtcatcaccagccgcatcgtgggcggggaggatgctgagctgggccgctggccctggcagggcagcctgcggctgtgggacagccacgtgtgtggggtgtccctgctgagccaccgctgggccctgacagctgcccactgctttgagacctacagcgacctgagtgaccccagcggctggatggtgcagtttggccagctgacctccatgcccagcttctggagcctgcaggcctactacacccgctactttgtgagcaacatctacctgagcccccgctacctgggcaacagcccctatgacatcgccctggtgaagctgagcgcccctgtgacctacaccaagcacatccagcccatctgcctgcaggccagcacctttgaatttgagaacagaacagactgctgggtgacaggctggggctacatcaaggaggatgaggccctgcccagcccccacaccctgcaggaggtgcaggtggccatcatcaacaacagcatgtgcaaccacctgttcctgaagtacagcttcaggaaggacatctttggagacatggtgtgtgctggaaatgcccagggcggcaaggatgcctgctttggagacagcggcggccccctggcctgcaacaagaatggcctgtggtaccagattggagtggtgtcctggggcgtgggctgcggccggcccaacagacctggggtgtacaccaacatcagccaccactttgagtggatccagaagctgatggcccagagcggcatgagccagcctgaccccagctggcccctgctcttcttccccctgctgtgggccctgcccctgctgggccctgtgtag

SEQ ID NO: 165640 - DNA, 903 bp, synthetic construct
  misc_feature 1..903: note = Description of Artificial Sequence: Synthetic coding sequence
  source 1..903: mol_type = other DNA
atgggcgcccggggggccctgctgctggccctgctgctggcccgggccggcctgaggaagccagagagccaggaggccgcccccctgagcggcccctgtggcagaagagtcatcaccagccgcatcgtgggcggggaggatgctgagctgggccgctggccctggcagggcagcctgcggctgtgggacagccacgtgtgtggggtgtccctgctgagccaccgctgggccctgacagctgcccactgctttgagacctacagcgacctgagtgaccccagcggctggatggtgcagtttggccagctgacctccatgcccagcttctggagcctgcaggcctactacacccgctactttgtgagcaacatctacctgagcccccgctacctgggcaacagcccctatgacatcgccctggtgaagctgagcgcccctgtgacctacaccaagcacatccagcccatctgcctgcaggccagcacctttgaatttgagaacagaacagactgctgggtgacaggctggggctacatcaaggaggatgaggccctgcccagcccccacaccctgcaggaggtgcaggtggccatcatcaacaacagcatgtgcaaccacctgttcctgaagtacagcttcaggaaggacatctttggagacatgggagacagcggcggccccctggcctgcaacaagaatggcctgtggtaccagattggagtggtgtcctggggcgtgggctgcggccggcccaacagacctggggtgtacaccaacatcagccaccactttgagtggatccagaagctgatggcccagagcggcatgagccagcctgaccccagctggcccctgctcttcttccccctgctgtgggccctgcccctgctgggccctgtgtag

SEQ ID NO: 165641 - DNA, 939 bp, synthetic construct
  misc_feature 1..939: note = Description of Artificial Sequence: Synthetic coding sequence
  source 1..939: mol_type = other DNA
atgggcgcccggggggccctgctgctggccctgctgctggcccgggccggcctgaggaagccagagagccaggaggccgcccccctgagcggcccctgtggcagaagagtcatcaccagccgcatcgtgggcggggaggatgctgagctgggccgctggccctggcagggcagcctgcggctgtgggacagccacgtgtgtggggtgtccctgctgagccaccgctgggccctgacagctgcccactgctttgaaacagacctgagtgaccccagcggctggatggtgcagtttggccagctgacctccatgcccagcttctggagcctgcaggcctactacacccgctactttgtgagcaacatctacctgagcccccgctacctgggcaacagcccctatgacatcgccctggtgaagctgagcgcccctgtgacctacaccaagcacatccagcccatctgcctgcaggccagcacctttgaatttgagaacagaacagactgctgggtgacaggctggggctacatcaaggaggatgaggccctgcccagcccccacaccctgcaggaggtgcaggtggccatcatcaacaacagcatgtgcaaccacctgttcctgaagtacagcttcaggaaggacatctttggagacatggtgtgtgctggaaatgcccagggcggcaaggatgcctgctttggagacagcggcggccccctggcctgcaacaagaatggcctgtggtaccagattggagtggtgtcctggggcgtgggctgcggccggcccaacagacctggggtgtacaccaacatcagccaccactttgagtggatccagaagctgatggcccagagcggcatgagccagcctgaccccagctggcccctgctcttcttccccctgctgtgggccctgcccctgctgggccctgtgtag

SEQ ID NO: 165642 - DNA, 954 bp, synthetic construct
  misc_feature 1..954: note = Description of Artificial Sequence: Synthetic coding sequence
  source 1..954: mol_type = other DNA
atggtggtgtctggggcccccccagccctgggcggcggctgcctgggcaccttcaccagcctgctgctgctggccagcacagccatcctgaatgctgcccgcatccctgtgcccccagcctgtgggaagccccagcagctgaacagagtggtgggcggggaggacagcacagattctgagtggccctggatcgtgtccatccagaagaatggcacccaccactgtgccggcagcctgctgaccagccgctgggtgatcacagctgcccactgcttcaaggacaacctgaacaagccctacctgttctctgtgctgctgggcgcctggcagctgggcaaccctggcagccgcagccagaaggtgggcgtggcctgggtggagccccaccctgtgtacagctggaaggagggcgcctgtgccgacatcgccctggtgcggctggagaggagcatccagttcagcgagcgggtgctgcccatctgcctgcctgatgccagcatccacctgccccccaacacccactgctggatcagcggctggggcagcatccaggatggagtgcccctgccccacccccagaccctgcagaagctgaaggtgcccatcattgattctgaggtgtgcagccacctgtactggaggggggccggccagggccccatcacagaggacatgctgtgtgccggctacctggagggggagagagatgcctgcctgggggacagcggcggccccctgatgtgccaggtggatggagcctggctgctggccggcatcatctcctggggcgagggctgtgccgagaggaacagacctggggtgtacatcagcctgagcgcccaccgctcctgggtggagaagatcgtgcagggcgtgcagctgcggggccgggcccagggcggcggggccctgcgggcccccagccagggcagcggggccgccgcccggagctag

SEQ ID NO: 165643 - DNA, 786 bp, synthetic construct
  misc_feature 1..786: note = Description of Artificial Sequence: Synthetic coding sequence
  source 1..786: mol_type = other DNA
atgcacatgagggagaccagcggcttcaccctgaagaagggccgcagcgcccccctggtgttccaccccccagatgccctgattgctgtgccctttgatgatgatgacaagatcgtgggcggctacacctgtgaggagaacagcctgccctaccaggtgtccctgaacagcggcagccacttctgtggcggcagcctcatcagcgagcagtgggtggtgtctgctgcccactgctacaagacccgcatccaggtgcggctgggggagcacaacatcaaggtgctggagggcaatgagcagttcatcaatgctgccaagatcatccgccaccccaagtacaacagagacaccctggacaatgacatcatgctgatcaagctgagcagccctgctgtgatcaatgcccgggtgtccaccatcagcctgcccaccaccccacctgctgctggaacagagtgcctgatcagcggctggggcaacaccctgagctttggagctgactacccagatgagctgaagtgcctggatgcccctgtgctgacccaggccgagtgcaaggccagctacccaggcaagatcaccaacagcatgttctgtgtgggcttcctggagggcggcaaggacagctgccagagggacagcggcggccctgtggtgtgcaatggccagctgcagggcgtggtgtcctggggccacggctgtgcctggaagaacagacctggggtgtacaccaaggtgtacaactacgtggactggatcaaggacaccatcgccgccaacagctag

SEQ ID NO: 165644 - DNA, 915 bp, synthetic construct
  misc_feature 1..915: note = Description of Artificial Sequence: Synthetic coding sequence
  source 1..915: mol_type = other DNA
atgtgtggcccagatgaccgctgcccagcccgctggccaggccctggccgggctgtgaagtgtgggaagggcctggccgccgcccggcccggccgggtggagcggggcggggcccagagaggaggagctggcctggagctgcaccccctgctgggcggccgcacctggagggctgccagagatgctgatggctgtgaggccctgggcaccgtggccgtgccctttgatgatgatgacaagatcgtgggcggctacacctgtgaggagaacagcctgccctaccaggtgtccctgaacagcggcagccacttctgtggcggcagcctcatcagcgagcagtgggtggtgtctgctgcccactgctacaagacccgcatccaggtgcggctgggggagcacaacatcaaggtgctggagggcaatgagcagttcatcaatgctgccaagatcatccgccaccccaagtacaacagagacaccctggacaatgacatcatgctgatcaagctgagcagccctgctgtgatcaatgcccgggtgtccaccatcagcctgcccaccaccccacctgctgctggaacagaatgtctcatcagcggctggggcaacaccctgagctttggagctgactacccagatgagctgaagtgcctggatgcccctgtgctgacccaggccgagtgcaaggccagctacccaggcaagatcaccaacagcatgttctgtgtgggcttcctggagggcggcaaggacagctgccagagggacagcggcggccctgtggtgtgcaatggccagctgcagggcgtggtgtcctggggccacggctgtgcctggaagaacagacctggggtgtacaccaaggtgtacaactacgtggactggatcaaggacaccatcgccgccaacagctag

SEQ ID NO: 165645 - DNA, 744 bp, synthetic construct
  misc_feature 1..744: note = Description of Artificial Sequence: Synthetic coding sequence
  source 1..744: mol_type = other DNA
atgaaccccttcctgatcctggcctttgtgggcgctgctgtggccgtgccctttgatgatgatgacaagatcgtgggcggctacacctgtgaggagaacagcctgccctaccaggtgtccctgaacagcggcagccacttctgtggcggcagcctcatcagcgagcagtgggtggtgtctgctgcccactgctacaagacccgcatccaggtgcggctgggggagcacaacatcaaggtgctggagggcaatgagcagttcatcaatgctgccaagatcatccgccaccccaagtacaacagagacaccctggacaatgacatcatgctgatcaagctgagcagccctgctgtgatcaatgcccgggtgtccaccatcagcctgcccaccaccccacctgctgctggaacagagtgcctgatcagcggctggggcaacaccctgagctttggagctgactacccagatgagctgaagtgcctggatgcccctgtgctgacccaggccgagtgcaaggccagctacccaggcaagatcaccaacagcatgttctgtgtgggcttcctggagggcggcaaggacagctgccagagggacagcggcggccctgtggtgtgcaatggccagctgcagggcgtggtgtcctggggccacggctgtgcctggaagaacagacctggggtgtacaccaaggtgtacaactacgtggactggatcaaggacaccatcgccgccaacagctag

SEQ ID NO: 165646 - DNA, 723 bp, synthetic construct
  misc_feature 1..723: note = Description of Artificial Sequence: Synthetic coding sequence
  source 1..723: mol_type = other DNA
atgggccctgctggggaggtggccgtgccctttgatgatgatgacaagatcgtgggcggctacacctgtgaggagaacagcctgccctaccaggtgtccctgaacagcggcagccacttctgtggcggcagcctcatcagcgagcagtgggtggtgtctgctgcccactgctacaagacccgcatccaggtgcggctgggggagcacaacatcaaggtgctggagggcaatgagcagttcatcaatgctgccaagatcatccgccaccccaagtacaacagagacaccctggacaatgacatcatgctgatcaagctgagcagccctgctgtgatcaatgcccgggtgtccaccatcagcctgcccaccaccccacctgctgctggaacagaatgtctcatcagcggctggggcaacaccctgagctttggagctgactacccagatgagctgaagtgcctggatgcccctgtgctgacccaggccgagtgcaaggccagctacccaggcaagatcaccaacagcatgttctgtgtgggcttcctggagggcggcaaggacagctgccagagggacagcggcggccctgtggtgtgcaatggccagctgcagggcgtggtgtcctggggccacggctgtgcctggaagaacagacctggggtgtacaccaaggtgtacaactacgtggactggatcaaggacaccatcgccgccaacagctag

SEQ ID NO: 165647 - DNA, 537 bp, synthetic construct
  misc_feature 1..537: note = Description of Artificial Sequence: Synthetic coding sequence
  source 1..537: mol_type = other DNA
atgagggagaccagcggcttcaccctgaagaagggccgcagcgcccccctggtgttccaccccccagatgccctgattgctgtgccctttgatgatgatgacaagatcgtgggcggctacacctgtgaggagaacagcctgccctaccaggtgtccctgaacagcggcagccacttctgtggcggcagcctcatcagcgagcagtgggtggtgtctgctgcccactgctacaagacccgcatccaggtgcggctgggggagcacaacatcaaggtgctggagggcaatgagcagttcatcaatgctgccaagatcatccgccaccccaagtacaacagagacaccctggacaatgacatcatgctgatcaagctgagcagccctgctgtgatcaatgcccgggtgtccaccatcagcctgcccaccaccccacctgctgctggaacagagtgcctgatcagcggctggggcaacaccctgagctttggagctgactacccagatgagctgaagtgcctggatgcccctgtgctgtag

SEQ ID NO: 165648 - DNA, 843 bp, synthetic construct
  misc_feature 1..843: note = Description of Artificial Sequence: Synthetic coding sequence
  source 1..843: mol_type = other DNA
atgagaggagtgtcctgcctgcaggtgctgctgctgctggtgctgggcgccgccggcacccagggcaggaagtctgctgcctgtggccagcccaggatgagcagcagaattgtgggcggcagagatggaagagatggagagtggccctggcaggccagcatccagcacagaggagcccacgtgtgtggcggcagcctgattgccccccagtgggtgctgacagctgcccactgcttcccccggcgggccctgcctgctgagtacagagtgcggctgggcgccctgcggctgggcagcaccagccccaggaccctgtctgtgcctgtgcggcgggtgctgctgcccccagactacagtgaagatggagcccggggggacctggccctgctgcagctgcggcggcctgtgcccctgagcgcccgggtgcagcctgtgtgcctgcctgtgcctggggcccggcccccacctggcaccccctgccgggtgacaggctggggcagcctgcggcctggggtgcccctgcctgagtggaggcccctgcagggcgtgcgggtgcccctgctggacagcaggacctgtgatggcctgtaccacgtgggcgcagatgtgccccaggccgagagaattgtgctgcccggcagcctgtgtgccggctacccccagggccacaaggatgcctgccagggcgacagcggcggccccctgacctgcctgcagagcggctcctgggtgctggtgggcgtggtgtcctggggcaagggctgtgccctgcccaacagacctggggtgtacacctctgtggccacctacagcccctggatccaggcccgggtgtccttctag

SEQ ID NO: 165649 - DNA, 1032 bp, synthetic construct
  misc_feature 1..1032: note = Description of Artificial Sequence: Synthetic coding sequence
  source 1..1032: mol_type = other DNA
atggcccagaagggcgtgctgggccctggccagctgggcgctgtggccatcctgctgtacctgggcctgctgcggagcggcaccggggctgagggcgctgaggccccctgtggggtggccccccaggcccgcatcaccggcggcagcagcgctgtggccggccagtggccctggcaggtgtccatcacctatgagggcgtgcacgtgtgtggcggcagcctggtgtctgagcagtgggtgctgtctgctgcccactgcttccccagcgagcaccacaaggaggcctatgaggtgaagctgggcgcccaccagctggacagctacagtgaagatgccaaggtgtccaccctgaaggacatcatcccccaccccagctacctgcaggagggcagccagggcgacatcgccctgctgcagctgagccggcccatcaccttcagccgctacatccggcccatctgcctgcctgctgccaatgccagcttccccaacggcctgcactgcaccgtgacaggctggggccacgtggcccccagcgtgtccctgctgacccccaagcccctgcagcagctggaggtgcccctcatcagccgggagacctgcaactgcctgtacaacattgatgccaagccagaggagccccactttgtgcaggaggacatggtgtgtgccggctacgtggagggcggcaaggatgcctgccagggcgacagcggcggccccctgagctgccctgtggagggcctgtggtacctgactggaattgtgtcctggggagatgcctgtggggccaggaacagacctggggtgtacaccctggccagcagctatgcctcctggatccagagcaaggtgacagagctgcagccccgggtggtgccccagacccaggagagccagcctgacagcaacctgtgtggcagccacctggccttcagcagcgccccagcccagggcctgctgcggcccatcctcttcctgcccctgggcctggccctgggcctgctgagcccctggctgtctgagcactag

SEQ ID NO: 165650 - DNA, 504 bp, synthetic construct
  misc_feature 1..504: note = Description of Artificial Sequence: Synthetic coding sequence
  source 1..504: mol_type = other DNA
atggcccagaagggcgtgctgggccctggccagctgggcgctgtggccatcctgctgtacctgggcctgctgcggagcggcaccgggaaggagggcgccgccgccccctgtggggtggccccccaggcccgcatcaccggcggcagcagcgctgtggccggccagtggccctggcaggtgtccatcaccttcagccgctacatccggcccatctgcctgcctgctgccaatgccagcttccccaacggcctgcactgcaccgtgacaggctggggccacgtggcccccagcgtgtccctgctgacccccaagcccctgcagcagctggaggtgcccctcatcagccgggagacctgcaactgcctgtacaacattgatgccaagccagaggagccccactttgtgcaggaggacatggtgtgtgccggctacgtggagggcgccctgctgcgggtgaccctgggcgcccacagccctgccctgtggagggtgtctggcacctag

SEQ ID NO: 165651 - DNA, 1197 bp, synthetic construct
  misc_feature 1..1197: note = Description of Artificial Sequence: Synthetic coding sequence
  source 1..1197: mol_type = other DNA
atggagctggaggagggcaaggccggcagcggcctgcggcagtactacctgagcaagattgaggagctgcagctgattgtgaatgacaagagccagaacctgcggcggctgcaggcccagagaaatgagctgaatgccaaggtgcggctgctgcgggaggagctgcagctgctgcaggagcagggcagctatgtgggggaggtggtgcgggccatggacaagaagaaggtgctggtgaaggtgcaccctgagggcaagtttgtggtggatgtggacaagaacatcgacatcaatgatgtgacccccaactgccgggtggccctgagaaatgacagctacaccctgcacaagatcctgcccaacaaggtggaccccctggtgtccctgatgatggtggagaaggtgcctgacagcacctatgagatgattggaggcctggacaagcagatcaaggagatcaaggaggtgattgagctgcctgtgaagcaccctgagctgtttgaggccctgggcatcgcccagcccaagggcgtgctgctgtatggccccccaggcaccgggaagaccctgctggcccgggctgtggcccaccacacagactgcaccttcatccgggtgtctggcagcgagctggtgcagaagttcatcggggagggcgccaggatggtgcgggagctgtttgtgatggcccgggagcacgcccccagcatcatcttcatggatgaaattgacagcatcggcagcagccggctggagggcggcagcggcggggacagcgaggtgcagaggaccatgctggagctgctgaaccagctggatggctttgaggccaccaagaacatcaaggtgatcatggccaccaacagaattgacatcctggacagcgccctgctgcggcccggcagaattgacaggaagattgagttccccccaccaaatgaggaggcccggctggacatcctgaagatccacagcaggaagatgaacctgacccggggcatcaacctgaggaagattgctgagctgatgcctggggccagcggggctgaggtgaagggcgtgtgcacagaggccggcatgtatgccctgcgggagcggcgggtgcacgtgacccaggaggactttgagatggctgtggccaaggtgatgcagaaggacagcgagaagaacatgagcatcaagaagctgtggaagtag

SEQ ID NO: 165652 - DNA, 765 bp, synthetic construct
  misc_feature 1..765: note = Description of Artificial Sequence: Synthetic coding sequence
  source 1..765: mol_type = other DNA
atggccagcctgctgaaggtggaccaggaggtgaagctgaaggtggacagcttccgggagcgcatcaccagcgaggccgaggacctggtggccaacttcttccccaagaagctgctggagctggacagcttcctgaaggagcccatcctgaacatccatgacctgacccagatccacagcgacatgaacctgcctgtgcctgaccccatcctgctgaccaacagccatgatggcctggatggccccacctacaagaagaggcggctggatgaatgtgaggaggccttccagggcaccaaggtgtttgtgatgcccaacggcatgctgaagagcaaccagcagctggtggacatcatcgagaaggtgaagccagagatccggctgctgattgagaagtgcaacacagtgaagatgtgggtgcagctgctgatccccagaattgaagatggcaacaactttggagtgtccatccaggaggagaccgtggccgagctgaggacagtggagagcgaggccgccagctacctggaccagatcagccgctactacatcacccgggccaagctggtgtccaagatcgccaagtacccccacgtggaggactacagaagaacagtgacagaaattgatgagaaggagtacatcagcctgcggctcatcatcagcgagctgaggaaccagtatgtgaccctgcatgacatgatcctgaagaacatcgagaagatcaagaggcccaggagcagcaatgctgagaccctgtactag

SEQ ID NO: 165653 - DNA, 1323 bp, synthetic construct
  misc_feature 1..1323: note = Description of Artificial Sequence: Synthetic coding sequence
  source 1..1323: mol_type = other DNA
atgggccagagccagagcggcggccacggccctgggggcggcaagaaggatgacaaggacaagaagaagaagtatgagccccctgtgcccaccagggtgggcaagaagaagaagaagaccaagggcccagatgctgccagcaagctgcccctggtgaccccccacacccagtgccgcctgaagctgctgaagctggagcgcatcaaggactacctgctgatggaggaggagttcatccggaaccaggagcagatgaagcccctggaggagaagcaggaggaggagaggagcaaggtggatgacctgcggggcacccccatgtctgtgggcaccctggaggagatcattgatgacaaccacgccatcgtgtccacctctgtgggcagcgagcactacgtgtccatcctgagctttgtggacaaggacctgctggagcccggctgcagcgtgctgctgaaccacaaggtgcacgccgtcatcggcgtgctgatggatgacacagaccccctggtgacagtgatgaaggtggagaaggccccccaggagacctatgctgacattggaggcctggacaaccagatccaggagatcaaggagagcgtggagctgcccctgacccaccctgagtactatgaggagatgggcatcaagccacccaagggcgtcatcctgtatggccccccaggcaccgggaagaccctgctggccaaggctgtggccaaccagaccagcgccaccttcctgcgggtggtgggcagcgagctgatccagaagtacctgggagatggccccaagctggtgcgggagctgttccgggtggccgaggagcacgcccccagcatcgtgttcattgatgaaattgatgccatcggcaccaagagatatgacagcaacagcggcggggagcgggagatccagaggaccatgctggagctgctgaaccagctggatggctttgacagcagaggagatgtgaaggtgatcatggccaccaaccgcatcgagaccctggaccctgccctgatccggcccggcagaattgacaggaagattgagttccccctgcctgatgagaagaccaagaagaggatcttccagatccacaccagcaggatgaccctggctgatgatgtgaccctggatgacctgatcatggccaaggatgacctgtctggagctgacatcaaggccatctgcacagaggccggcctgatggccctgcgggagaggaggatgaaggtgaccaatgaagacttcaagaagagcaaagaaaatgtgctgtacaagaagcaggagggcaccccagagggcctgtacctgtag

SEQ ID NO: 165654 - DNA, 1104 bp, synthetic construct
  misc_feature 1..1104: note = Description of Artificial Sequence: Synthetic coding sequence
  source 1..1104: mol_type = other DNA
atggaggaggagttcatccggaaccaggagcagatgaagcccctggaggagaagcaggaggaggagaggagcaaggtggatgacctgcggggcacccccatgtctgtgggcaccctggaggagatcattgatgacaaccacgccatcgtgtccacctctgtgggcagcgagcactacgtgtccatcctgagctttgtggacaaggacctgctggagcccggctgcagcgtgctgctgaaccacaaggtgcatgctgtgattggagtgctgatggatgacacagaccccctggtgacagtgatgaaggtggagaaggccccccaggagacctacgccgacatcggcggcctggacaaccagatccaggagatcaaggagagcgtggagctgcccctgacccaccctgagtactatgaggagatgggcatcaagccacccaagggcgtcatcctgtatggccccccaggcaccgggaagaccctgctggccaaggctgtggccaaccagaccagcgccaccttcctgcgggtggtgggcagcgagctgatccagaagtacctgggagatggccccaagctggtgcgggagctgttccgggtggccgaggagcacgcccccagcatcgtgttcattgatgaaattgatgccatcggcaccaagagatatgacagcaacagcggcggggagcgggagatccagaggaccatgctggagctgctgaaccagctggatggctttgacagcagaggagatgtgaaggtgatcatggccaccaacagaattgagaccctggaccctgccctgatccggcccggcagaattgacaggaagattgagttccccctgcctgatgagaagaccaagaagaggatcttccagatccacaccagcaggatgaccctggctgatgatgtgaccctggatgacctgatcatggccaaggatgacctgagcggggctgacatcaaggccatctgcacagaagctggcctgatggccctgcgggagaggaggatgaaggtgaccaatgaagacttcaagaagagcaaagaaaatgtgctgtacaagaagcaggagggcaccccagagggcctgtacctgtag

SEQ ID NO: 165655 - DNA, 1302 bp, synthetic construct
  misc_feature 1..1302: note = Description of Artificial Sequence: Synthetic coding sequence
  source 1..1302: mol_type = other DNA
atgccagactacctgggcgctgaccagaggaagaccaaggaggatgagaaggatgacaagcccatccgggccctggatgaaggagacatcgccctgctgaagacctacggccagagcacctacagccggcagatcaagcaggtggaggatgacatccagcagctgctgaagaagatcaatgagctgaccggcatcaaggagagtgacaccggcctggcccccccagccctgtgggacctggccgctgacaagcagaccctgcagagcgagcagcccctgcaggtggcccgctgcaccaagatcatcaatgctgacagcgaggaccccaagtacatcatcaacgtgaagcagtttgccaagtttgtggtggacctgagtgaccaggtggcccccacagacatcgaggagggcatgagggtgggcgtggacaggaacaagtaccagatccacatccccctgccccccaagattgaccccaccgtgaccatgatgcaggtggaggagaagccagatgtgacctacagtgatgtgggcggctgcaaggagcagatcgagaagctgcgggaggtggtggagacccccctgctgcaccctgagagatttgtgaacctgggcatcgagccccccaagggcgtgctgctgtttggacctcctggcaccgggaagaccctgtgtgcccgggctgtggccaacagaacagatgcctgcttcatccgggtgattggcagcgagctggtgcagaagtatgtgggggagggcgccaggatggtgcgggagctgtttgagatggcccggaccaagaaggcctgcctgatcttctttgatgaaattgatgccatcggcggggccaggtttgatgatggagctggaggagacaatgaggtgcagaggaccatgctggagctgatcaaccagctggatggctttgacccccggggcaacatcaaggtgctgatggccaccaacagaccagacaccctggaccctgccctgatgaggcctggccgcctggacaggaagattgagttcagcctgcctgacctggagggccgcacccacatcttcaagatccacgcccgctccatgtctgtggagcgggacatccgctttgagctgctggcccggctgtgccccaacagcactggagctgagatccgctctgtgtgcacagaggccggcatgtttgccatccgggcccggaggaagatcgccacagagaaggacttcctggaggccgtgaacaaggtgatcaagagctatgccaagttcagcgccaccccccgctacatgacctacaactag

SEQ ID NO: 165656 - DNA, 393 bp, synthetic construct
  misc_feature 1..393: note = Description of Artificial Sequence: Synthetic coding sequence
  source 1..393: mol_type = other DNA
atgccagactacctgggcgctgaccagaggaagaccaaggaggatgagaaggatgacaagcccatccgggccctggatgaaggagacatcgccctgctgaagacctacggccagagcacctacagccggcagatcaagcaggtggaggatgacatccagcagctgctgaagaagatcaatgagctgaccggcatcaaggagagtgacaccggcctggcccccccagccctgtgggacctggccgctgacaagcagaccctgcagagcgagcagcccctgcaggtggcccgctgcaccaagatcatcaatgctgacagcgaggaccccaagtacatcatcaacgtgaagcagtttgccaagtttgtggtggacctgagtgaccaggtggcctag

SEQ ID NO: 165657 - DNA, 1302 bp, synthetic construct; identical to SEQ ID NO: 165655
  misc_feature 1..1302: note = Description of Artificial Sequence: Synthetic coding sequence
  source 1..1302: mol_type = other DNA

SEQ ID NO: 165658 - DNA, 393 bp, synthetic construct; identical to SEQ ID NO: 165656
  misc_feature 1..393: note = Description of Artificial Sequence: Synthetic coding sequence
  source 1..393: mol_type = other DNA

SEQ ID NO: 165659 - DNA, 891 bp, synthetic construct
  misc_feature 1..891: note = Description of Artificial Sequence: Synthetic coding sequence
  source 1..891: mol_type = other DNA
atgagggtgggcgtggacaggaacaagtaccagatccacatccccctgccccccaagattgaccccaccgtgaccatgatgcaggtggaggagaagccagatgtgacctacagtgatgtgggcggctgcaaggagcagatcgagaagctgcgggaggtggtggagacccccctgctgcaccctgagagatttgtgaacctgggcatcgagccccccaagggcgtgctgctgtttggccccccaggcaccgggaagaccctgtgtgcccgggctgtggccaacagaacagatgcctgcttcatccgggtcatcggcagcgagctggtgcagaagtatgtgggggagggcgccaggatggtgcgggagctgtttgagatggcccggaccaagaaggcctgcctgatcttctttgatgaaattgatgccatcggcggggccaggtttgatgatggagctggaggagacaatgaggtgcagaggaccatgctggagctgatcaaccagctggatggctttgacccccggggcaacatcaaggtgctgatggccaccaacagaccagacaccctggaccctgccctgatgaggcctggccgcctggacaggaagattgagttcagcctgcctgacctggagggccgcacccacatcttcaagatccacgcccgctccatgtctgtggagcgggacatccgctttgagctgctggcccggctgtgccccaacagcactggagctgagatccgctctgtgtgcacagaagctggcatgtttgccatccgggcccggaggaagatcgccacagagaaggacttcctggaggccgtgaacaaggtgatcaagagctatgccaagttcagcgccaccccccgctacatgacctacaactag

SEQ ID NO: 165660 - DNA, 1320 bp, synthetic construct
  misc_feature 1..1320: note = Description of Artificial Sequence: Synthetic coding sequence
  source 1..1320: mol_type = other DNA
atgaacctgctgcccaacatcgagagccctgtgacccggcaggagaagatggccaccgtgtgggatgaggccgagcaggacggcattggagaggaggtgctgaagatgagcacagaggagatcatccagaggacccggctgctggacagcgagatcaagatcatgaagtctgaggtgctgcgggtgacccatgagctgcaggccatgaaggacaagatcaaggaaaattctgagaagatcaaggtgaacaagaccctgccctacctggtgtccaatgtcatcgagctgctggatgtggaccccaatgaccaggaggaggatggagccaacatcgacctggacagccagaggaagggcaaatgtgccgtcatcaagaccagcacccggcagacctacttcctgcctgtgattggcctggtggatgctgagaagctgaagccaggggacctggtgggcgtgaacaaggacagctacctgatcctggagaccctgcccacagaatatgacagccgggtgaaggccatggaggtggatgagcggcccacagagcagtacagcgacatcggcggcctggacaagcagatccaggagctggtggaggccatcgtgctgcccatgaaccacaaggagaagtttgagaacctgggcatccagccccccaagggcgtgctgatgtatggccccccaggcaccgggaagaccctgctggcccgggcctgtgccgcccagaccaaggccaccttcctgaagctggccggcccccagctggtgcagatgtttattggagatggagccaagctggtgagagatgcctttgccctggccaaggagaaggcccccagcatcatcttcattgatgagctggatgccatcggcaccaagagatttgacagcgagaaggccggggaccgggaggtgcagaggaccatgctggagctgctgaaccagctggatggcttccagcccaacacccaggtgaaggtgattgctgccaccaacagagtggacatcctggaccctgccctgctgcggagcggccgcctggacaggaagattgagttccccatgcccaatgaggaggcccgggcccgcatcatgcagatccacagcaggaagatgaatgtgtccccagatgtgaactatgaggagctggcccgctgcacagatgacttcaacggggcccagtgcaaggctgtgtgtgtggaggccggcatgattgccctgcggcggggggccacagagctgacccatgaggactacatggagggcatcctggaggtgcaggccaagaagaaggccaacctgcagtactatgcctag

SEQ ID NO: 165661 - DNA, 1257 bp, synthetic construct
  misc_feature 1..1257: note = Description of Artificial Sequence: Synthetic coding sequence
  source 1..1257: mol_type = other DNA
atggaggagatcggcatcctggtggagaaggcccaggatgagatcccagccctgtctgtgtcccggccccagacaggcctgtccttcctgggccctgagcctgaggacctggaggacctgtacagccgctacaagaagctgcagcaggagctggagttcctggaggtgcaggaggagtacatcaaggatgagcagaagaacctgaagaaggagttcctgcacgcccaggaggaggtgaagaggatccagagcatccccctggtgattggccagttcctggaggccgtggaccagaacacagccatcgtgggcagcaccaccggcagcaactactacgtgcgcatcctgagcaccatcgaccgggagctgctgaagcccaatgcctctgtggccctgcacaagcacagcaatgccctggtggatgtgctgcccccagaggccgacagcagcatcatgatgctgaccagtgaccagaagccagatgtgatgtatgctgacattggaggcatggacatccagaagcaggaggtgcgggaggccgtggagctgcccctgacccactttgagctgtacaagcagatcggcatcgaccccccccggggcgtgctgatgtatggccccccaggctgtgggaagaccatgctggccaaggctgtggcccaccacaccacagctgccttcatccgggtggtgggcagcgagtttgtgcagaagtacctgggggagggccccaggatggtgagagatgtgttccggctggccaaggaaaatgccccagccatcatcttcattgatgaaattgatgccatcgccaccaagagatttgatgcccagacaggagctgaccgggaggtgcagaggatcctgctggagctgctgaaccagatggatggctttgaccagaatgtgaatgtgaaggtgatcatggccaccaacagagctgacaccctggaccctgccctgctgcggcccggccgcctggacaggaagattgagttccccctgcctgaccggcggcagaagaggctcatcttcagcaccatcaccagcaagatgaacctgtctgaggaggtggacctggaggactatgtggcccggccagacaagatctctggagctgacatcaacagcatctgccaggagagcggcatgctggccgtgagagaaaatcgctacatcgtgctggccaaggactttgagaaggcctacaagacagtcatcaagaaggatgagcaggagcacgagttctacaagtag

SEQ ID NO: 165662 - DNA, 1164 bp, synthetic construct
  misc_feature 1..1164: note = Description of Artificial Sequence: Synthetic coding sequence
  source 1..1164: mol_type = other DNA
atggaggagatcggcatcctggtggagaaggcccaggatgagatcccagccctgtctgtgtcccggccccagacaggcctgtccttcctgggccctgagcctgaggacctggaggacctgtacagccgctacaaggaggaggtgaagaggatccagagcatccccctggtgattggccagttcctggaggccgtggaccagaacacagccatcgtgggcagcaccaccggcagcaactactacgtgcgcatcctgagcaccatcgaccgggagctgctgaagcccaatgcctctgtggccctgcacaagcacagcaatgccctggtggatgtgctgcccccagaggccgacagcagcatcatgatgctgaccagtgaccagaagccagatgtgatgtatgctgacatcggcggcatggacatccagaagcaggaggtgcgggaggccgtggagctgcccctgacccactttgagctgtacaagcagattggaattgatcctccccggggcgtgctgatgtatggccccccaggctgcggcaagaccatgctggccaaggctgtggcccaccacaccacagctgccttcatccgggtggtgggcagcgagtttgtgcagaagtacctgggggagggccccaggatggtgagagatgtgttccggctggccaaggaaaatgccccagccatcatcttcattgatgaaattgatgccatcgccaccaagagatttgatgcccagacaggagctgaccgggaggtgcagaggatcctgctggagctgctgaaccagatggatggctttgaccagaatgtgaatgtgaaggtgatcatggccaccaacagagctgacaccctggaccctgccctgctgcggcccggccgcctggacaggaagattgagttccccctgcctgaccggcggcagaagaggctcatcttcagcaccatcaccagcaagatgaacctgtctgaggaggtggacctggaggactatgtggcccggccagacaagatcagcggggctgacatcaacagcatctgccaggagagcggcatgctggccgtgcgggagaaccgctacatcgtgctggccaaggactttgagaaggcctacaagacagtcatcaagaaggatgagcaggagcacgagttctacaagtag

SEQ ID NO: 165663 - DNA, 1221 bp, synthetic construct
  misc_feature 1..1221: note = Description of Artificial Sequence: Synthetic coding sequence
  source 1..1221: mol_type = other DNA
atggccctggatggccctgagcagatggagctggaggagggcaaggccggcagcggcctgcggcagtactacctgagcaagattgaggagctgcagctgattgtgaatgacaagagccagaacctgcggcggctgcaggcccagagaaatgagctgaatgccaaggtgcggctgctgcgggaggagctgcagctgctgcaggagcagggcagctatgtgggggaggtggtgcgggccatggacaagaagaaggtgctggtgaaggtgcaccctgagggcaagtttgtggtggatgtggacaagaacatcgacatcaatgatgtgacccccaactgccgggtggccctgagaaatgacagctacaccctgcacaagatcctgcccaacaaggtggaccccctggtgtccctgatgatggtggagaaggtgcctgacagcacctatgagatgattggaggcctggacaagcagatcaaggagatcaaggaggtgattgagctgcctgtgaagcaccctgagctgtttgaggccctgggcatcgcccagcccaagggcgtgctgctgtatggccccccaggcaccgggaagaccctgctggcccgggctgtggcccaccacacagactgcaccttcatccgggtgtctggcagcgagctggtgcagaagttcatcggggagggcgccaggatggtgcgggagctgtttgtgatggcccgggagcacgcccccagcatcatcttcatggatgaaattgacagcatcggcagcagccggctggagggcggcagcggcggggacagcgaggtgcagaggaccatgctggagctgctgaaccagctggatggctttgaggccaccaagaacatcaaggtgatcatggccaccaacagaattgacatcctggacagcgccctgctgcggcccggcagaattgacaggaagattgagttccccccaccaaatgaggaggcccggctggacatcctgaagatccacagcaggaagatgaacctgacccggggcatcaacctgaggaagattgctgagctgatgcctggggccagcggggctgaggtgaagggcgtgtgcacagaggccggcatgtatgccctgcgggagcggcgggtgcacgtgacccaggaggactttgagatggctgtggccaaggtgatgcagaaggacagcgagaagaacatgagcatcaagaagctgtggaagtag

SEQ ID NO: 165664 - DNA, 1197 bp, synthetic construct; identical to SEQ ID NO: 165651
  misc_feature 1..1197: note = Description of Artificial Sequence: Synthetic coding sequence
  source 1..1197: mol_type = other DNA

SEQ ID NO: 165665 - DNA, 1212 bp, synthetic construct
  misc_feature 1..1212: note = Description of Artificial Sequence: Synthetic coding sequence
  source 1..1212: mol_type = other DNA
atggccatccctggcatcccctatgaaagaaggctgctgatcatggctgacccccgggacaaggccctgcaggactacaggaagaagctgctggagcacaaggagattgatggccgcctgaaggagctgcgggagcagctgaaggagctgaccaagcagtatgagaagtcagaaaatgacctgaaggccctgcagagcgtgggccagatcgtgggggaggtgctgaagcagctgacagaggagaagttcatcgtgaaggccaccaacggccccaggtatgtggtgggctgccggcggcagctggacaagagcaagctgaagccaggcaccagggtggccctggacatgaccaccctgaccatcatgagatacctgccccgggaggtggaccccctggtgtacaacatgagccatgaagatcctggaaatgtgtcctacagcgagattggaggcctgtctgagcagatccgggagctgcgggaggtgattgagctgcccctgaccaaccctgagctgttccagagggtgggcatcatcccccccaagggctgcctgctgtatggccccccaggcaccgggaagaccctgctggcccgggctgtggccagccagctggactgcaacttcctgaaggtggtgagcagcagcatcgtggacaagtacatcggggagagcgcccggctcatccgggagatgttcaactatgcccgggaccaccagccctgcatcatcttcatggatgaaattgatgccatcggcggccgccgcttcagcgagggcaccagcgctgaccgggagatccagaggaccctgatggagctgctgaaccagatggatggctttgacaccctgcaccgggtgaagatgatcatggccaccaacagaccagacaccctggaccctgccctgctgcggcccggccgcctggacaggaagatccacatcgacctgcccaatgagcaggcccggctggacatcctgaagatccatgctggccccatcaccaagcatggagaaattgattatgaggccatcgtgaagctgagtgatggcttcaatggagctgacctgagaaatgtgtgcacagaggccggcatgtttgccatccgggctgaccatgactttgtggtgcaggaggacttcatgaaggctgtgaggaaggtggccgacagcaagaagctggagagcaagctggactacaagcctgtgtag

SEQ ID NO: 165666 - DNA, 933 bp, synthetic construct
  misc_feature 1..933: note = Description of Artificial Sequence: Synthetic coding sequence
  source 1..933: mol_type = other DNA
atggaccggctgctgcggctgggcggcggcatgcctggcctgggccagggccccccaacagatgccccagctgtggacacagctgagcaggtgtacatcagcagcctggccctgctgaagatgctgaagcacggccgggccggcgtgcccatggaggtgatgggcctgatgctgggggagtttgtggatgactacacagtgcgggtgattgatgtgtttgccatgccccagagcggcaccggggtgtctgtggaggccgtggaccctgtgttccaggccaagatgctggacatgctgaagcagacaggccggcctgagatggtggtgggctggtaccacagccaccctggcttcggctgctggctgtctggagtggacatcaacacccagcagagctttgaggccctgtctgaaagagctgtggccgtggtggtggaccccatccagagcgtgaagggcaaggtggtgattgatgccttccgcctcatcaatgccaacatgatggtgctgggccacgagccccggcagaccaccagcaacctgggccacctgaacaagcccagcatccaggccctgatccacggcctgaacagacactactacagcatcaccatcaactacaggaagaatgagctggagcagaagatgctgctgaacctgcacaagaagtcctggatggagggcctgaccctgcaggactacagcgagcactgcaagcacaatgaatctgtggtgaaggagatgctggagctggccaagaactacaacaaggctgtggaggaggaggacaagatgaccccagagcagctggccatcaagaatgtgggcaagcaggaccccaagaggcacctggaggagcacgtggatgtgctgatgaccagcaacatcgtgcagtgcctggccgccatgctggacacagtggtgttcaagtag

SEQ ID NO: 165667 - DNA, 255 bp, synthetic construct
  misc_feature 1..255: note = Description of Artificial Sequence: Synthetic coding sequence
  source 1..255: mol_type = other DNA
atggaccggctgctgcggctgggcggcggcatgcctggcctgggccagggccccccaacagatgccccagctgtggacacagctgagcaggtgtacatcagcagcctggccctgctgaagatgctgaagcacggccgggccggcgtgcccatggaggtgatgggcctgatgctgggggagtttgtggatgactacacagtgcgggtgattgatgtgtttgccatgccccagagcggcaccggggtgtctgtgtag

SEQ ID NO: 165668 - DNA, 2727 bp, synthetic construct
  misc_feature 1..2727: note = Description of Artificial Sequence: Synthetic coding sequence
  source 1..2727: mol_type = other DNA
atggaggagggcggccgggacaaggcccctgtgcagccccagcagagccctgctgctgcccctgggggcacagatgagaagcccagcggcaaggagaggagagatgctggggacaaggacaaggagcaggagctgtctgaggaggacaagcagctgcaggatgagctggagatgctggtggagcggctgggggagaaggacaccagcctgtacagacctgccctggaggagctgcggcggcagatccgcagcagcaccacctccatgacctctgtgcccaagcccctgaagttcctgcggccccactacggcaagctgaaggagatctatgagaacatggcccctggagagaacaagagatttgctgctgacatcatctctgtgctggccatgaccatgtctggagagcgggagtgcctgaagtaccgcctggtgggcagccaggaggagctggcctcctggggccacgagtatgtgcgccacctggccggggaggtggccaaggagtggcaggagctggatgatgctgagaaggtgcagcgggagcccctgctgaccctggtgaaggagatcgtgccctacaacatggcccacaatgctgagcacgaggcctgtgacctgctgatggagattgagcaggtggacatgctggagaaggacattgatgaaaatgcctatgccaaggtgtgcctgtacctgaccagctgtgtgaactacgtgcctgagcctgagaacagcgccctgctgcgctgtgccctgggcgtcttcaggaagttcagccgcttccctgaggccctgcggctggccctgatgctgaatgacatggagctggtggaggacatcttcaccagctgcaaggatgtggtggtgcagaagcagatggccttcatgctgggcagacatggagtcttcctggagctgtctgaagatgtggaggagtatgaggacctgacagagatcatgagcaatgtgcagctgaacagcaacttcctggccctggcccgggagctggacatcatggagcccaaggtgcctgatgacatctacaagacccacctggagaacaacagatttggaggcagcggcagccaggtggacagcgccaggatgaacctggccagcagctttgtgaatggatttgtgaatgctgccttcggccaggacaagctgctgacagatgatggcaacaagtggctgtacaagaacaaggaccacggcatgctgtctgctgctgccagcctgggcatgatcctgctgtgggatgtggatggcggcctgacccagattgacaagtacctgtacagcagcgaggactacatcaagagcggggccctgctggcctgtggcatcgtgaacagcggcgtgagaaatgaatgtgaccctgccctggccctgctgagtgactatgtgctgcacaacagcaacaccatgaggctgggcagcatcttcggcctgggcctggcctatgccggcagcaacagagaagatgtgctgaccctgctgctgcctgtgatgggagacagcaagagctccatggaggtggccggcgtgacagccctggcctgtggcatgattgctgtgggcagctgcaatggagatgtgaccagcaccatcctgcagaccatcatggagaagtcagaaacagagctgaaggacacctacgcccgctggctgcccctgggcctgggcctgaaccacctgggcaaaggagaggccatcgaggccatcctggccgccctggaggtggtgtctgagcccttccgcagctttgccaacaccctggtggatgtgtgtgcctatgccggcagcggaaatgtgctgaaggtgcagcagctgctgcacatctgcagcgagcactttgacagcaaggagaaggaggaggacaaggacaagaaggagaagaaggacaaggacaagaaggaggccccagctgacatgggcgcccaccagggcgtggccgtgctgggcatcgccctgattgccatgggagaggagatcggggctgagatggccctgcggaccttcggccacctgctgcgctatggagagcccaccctgcggcgggctgtgcccctggccctggccctgatctctgtgagcaacccccggctgaacatcctggacaccctgagcaagttcagccatgatgctgaccctgaggtgtcctacaacagcatctttgccatgggcatggtgggcagcggcaccaacaatgcccggctggccgccatgctgcggcagctggcccagtaccacgccaaggaccccaacaacctcttcatggtgcggctggcccagggcctgacccacctgggcaagggcaccctgaccctgtgcccctaccacagcgaccggcagctgatgagccaggtggccgtggccggcctgctgactgtgctggtgtccttcctggatgtgaggaacatcatcctgggcaagagccactacgtgctgtatggcctggtggccgccatgcagcccaggatgctggtgacctttgatgaggagctgcggcccctgcctgtgtctgtgcgggtgggccaggccgtggatgtggtgggccaggccggcaagcccaagaccatcaccggcttccagacccacaccacccctgtgctgctggcccacggggagcgggcagagctggccacagaggagttcctgcctgtgacccccatcctggagggctttgtgatcctgaggaagaaccccaactatgacctgtag

SEQ ID NO: 165669 - DNA, 1743 bp, synthetic construct
  misc_feature 1..1743: note = Description of Artificial Sequence: Synthetic coding sequence
  source 1..1743: mol_type = other DNA
cagtgcacagcccagcagcagctgctgggcctgagcagtggagctggccaccacggggcccagctgatgctgcagaaccccccccgggagcagcaggtgtggggccagtggctgagcggcggcctgtgcccccatgagcccggcctgctcttctgtgagtggctgtgtgaatgttccttctgggacaagctgctgacagatgatggcaacaagtggctgtacaagaacaaggaccacggcatgctgtctgctgctgccagcctgggcatgatcctgctgtgggatgtggatggcggcctgacccagattgacaagtacctgtacagcagcgaggactacatcaagagcggggccctgctggcctgtggcatcgtgaacagcggcgtgagaaatgaatgtgaccctgccctggccctgctgagtgactatgtgctgcacaacagcaacaccatgaggctgggcagcatcttcggcctgggcctggcctatgccggcagcaacagagaagatgtgctgaccctgctgctgcctgtgatgggagacagcaagagctccatggaggtggccggcgtgacagccctggcctgtggcatgattgctgtgggcagctgcaatggagatgtgaccagcaccatcctgcagaccatcatggagaagtcagaaacagagctgaaggacacctacgcccgctggctgcccctgggcctgggcctgaaccacctgggcaaaggagaggccatcgaggccatcctggccgccctggaggtggtgtctgagcccttccgcagctttgccaacaccctggtggatgtgtgtgcctatgccggcagcggaaatgtgctgaaggtgcagcagctgctgcacatctgcagcgagcactttgacagcaaggagaaggaggaggacaaggacaagaaggagaagaaggacaaggacaagaaggaggccccagctgacatgggcgcccaccagggcgtggccgtgctgggccccctgctgctgtggggccgccgcctggtgcagcgctggcactatgagccctaccaccagctgcgctatggagagcccaccctgcggcgggctgtgcccctggccctggccctgatctctgtgagcaacccccggctgaacatcctggacaccctgagcaagttcagccatgatgctgaccctgaggtgtcctacaacagcatctttgccatgggcatggtgggcagcggcaccaacaatgcccggctggccgccatgctgcggcagctggcccagtaccacgccaaggaccccaacaacctcttcatggtgcggctggcccagggcctgacccacctgggcaagggcaccctgaccctgtgcccctaccacagcgaccggcagctgatgagccaggtggccgtggccggcctgctgactgtgctggtgtccttcctggatgtgaggaacatcatcctgggcaagagccactacgtgctgtatggcctggtggccgccatgcagcccaggatgctggtgacctttgatgaggagctgcggcccctgcctgtgtctgtgcgggtgggccaggccgtggatgtggtgggccaggccggcaagcccaagaccatcaccggcttccagacccacaccacccctgtgctgctggcccacggggagcgggcagagctggccacagaggagttcctgcctgtgacccccatcctggagggctttgtgtttggaagaacacccatcatgatcagcaagtag

SEQ ID NO: 165670 - DNA, 2703 bp, synthetic construct
  misc_feature 1..2703: note = Description of Artificial Sequence: Synthetic coding sequence
  source 1..2703: mol_type = other DNA
atggaggagggcggccgggacaaggcccctgtgcagccccagcagagccctgctgctgcccctgggggcacagatgagaagcccagcggcaaggacaaggagcaggagctgtctgaggaggacaagcagctgcaggatgagctggagatgctggtggagcggctgggggagaaggacaccagcctgtacagacctgccctggaggagctgcggcggcagatccgcagcagcaccacctccatgacctctgtgcccaagcccctgaagttcctgcggccccactacggcaagctgaaggagatctatgagaacatggcccctggagagaacaagagatttgctgctgacatcatctctgtgctggccatgaccatgtctggagagcgggagtgcctgaagtaccgcctggtgggcagccaggaggagctggcctcctggggccacgagtatgtgcgccacctggccggggaggtggccaaggagtggcaggagctggatgatgctgagaaggtgcagcgggagcccctgctgaccctggtgaaggagatcgtgccctacaacatggcccacaatgctgagcacgaggcctgtgacctgctgatggagattgagcaggtggacatgctggagaaggacattgatgaaaatgcctatgccaaggtgtgcctgtacctgaccagctgtgtgaactacgtgcctgagcctgagaacagcgccctgctgcgctgtgccctgggcgtcttcaggaagttcagccgcttccctgaggccctgcggctggccctgatgctgaatgacatggagctggtggaggacatcttcaccagctgcaaggatgtggtggtgcagaagcagatggccttcatgctgggcagacatggagtcttcctggagctgtctgaagatgtggaggagtatgaggacctgacagagatcatgagcaatgtgcagctgaacagcaacttcctggccctggcccgggagctggacatcatggagcccaaggtgcctgatgacatctacaagacccacctggagaacaacagatttggaggcagcggcagccaggtggacagcgccaggatgaacctggccagcagctttgtgaatggatttgtgaatgctgccttcggccaggacaagctgctgacagatgatggcaacaagtggctgtacaagaacaaggaccacggcatgctgtctgctgctgccagcctgggcatgatcctgctgtgggatgtggatggcggcctgacccagattgacaagtacctgtacagcagcgaggactacatcaagagcggggccctgctggcctgtggcatcgtgaacagcggcgtgagaaatgaatgtgaccctgccctggccctgctgagtgactatgtgctgcacaacagcaacaccatgaggctgggcagcatcttcggcctgggcctggcctatgccggcagcaacagagaagatgtgctgaccctgctgctgcctgtgatgggagacagcaagagctccatggaggtggccggcgtgacagccctggcctgtggcatgattgctgtgggcagctgcaatggagatgtgaccagcaccatcctgcagaccatcatggagaagtcagaaacagagctgaaggacacctacgcccgctggctgcccctgggcctgggcctgaaccacctgggcaaaggagaggccatcgaggccatcctggccgccctggaggtggtgtctgagcccttccgcagctttgccaacaccctggtggatgtgtgtgcctatgccggcagcggaaatgtgctgaaggtgcagcagctgctgcacatctgcagcgagcactttgacagcaaggagaaggaggaggacaaggacaagaaggagaagaaggacaaggacaagaaggaggccccagctgacatgggcgcccaccagggcgtggccgtgctgggcatcgccctgattgccatgggagaggagatcggggctgagatggccctgcggaccttcggccacctgctgcgctatggagagcccaccctgcggcgggctgtgcccctggccctggccctgatctctgtgagcaacccccggctgaacatcctggacaccctgagcaagttcagccatgatgctgaccctgaggtgtcctacaacagcatctttgccatgggcatggtgggcagcggcaccaacaatgcccggctggccgccatgctgcggcagctggcccagtaccacgccaaggaccccaacaacctcttcatggtgcggctggcccagggcctgacccacctgggcaagggcaccctgaccctgtgcccctaccacagcgaccggcagctgatgagccaggtggccgtggccggcctgctgactgtgctggtgtccttcctggatgtgaggaacatcatcctgggcaagagccactacgtgctgtatggcctggtggccgccatgcagcccaggatgctggtgacctttgatgaggagctgcggcccctgcctgtgtctgtgcgggtgggccaggccgtggatgtggtgggccaggccggcaagcccaagaccatcaccggcttccagacccacaccacccctgtgctgctggcccacggggagcgggcagagctggccacagaggagttcctgcctgtgacccccatcctggagggctttgtgatcctgaggaagaaccccaactatgacctgtag

SEQ ID NO: 165671 - DNA, 552 bp, synthetic construct
  misc_feature 1..552: note = Description of Artificial Sequence: Synthetic coding sequence
  source 1..552: mol_type = other DNA
atggatgccagccccagccccttcagcctgcccaagaagctgaatgagctgagcgcccggcggggcagtgatgagctgctgagcagcggcatcatcaatggccccttcaccatgaacagcagcacccccagcacagccaatggaaatgacagcaagaagttcaagagggacaggcctccctgcagccccagccgggtgctgcacctgaggaagatcccctgtgatgtgacagaagctgagatcatcagcctgggcctgccctttgggaaggtgaccaacctgctgatgctgaagggcaagagccaggccttcctggagatggccagcgaggaggccgctgtgaccatggtgaactactacacccccatcaccccccacctgcggagccagcctgtgtacatccagtacagcaaccaccgggagctgaagacagacaacctgcccaaccaggcccgggcccaggccgccctgcaggccgtgtctgctgtgcagagcggcagcctggccctgagcggcggccccagcaatgaaggaacagtgctgcccggctag

SEQ ID NO: 165672 - DNA, 474 bp, synthetic construct
  misc_feature 1..474: note = Description of Artificial Sequence: Synthetic coding sequence
  source 1..474: mol_type = other DNA
atggtgaccagcctggcctacacccaccacggccggcagtacctggcccaggagggcgtgattgaccagatcagcaacatcatcgtgggcgctgacagcgaccccttcagcagcttctacctgcccggctttgtgaagttcttcggcaacctggccgtgatggacagcccccagcagatctgtgagcgctaccccatctttgtggagaaggtgtttgagatgattgagagccaggaccccaccatgattggagtggccgtggacacagtgggcatcctgggcagcaatgtggagggcaagcaggtgctgcagaagacaggctggtatgacctggccctcttccgggacatcctgatctttgaccggggcagcatctgcaagttcatctgctggtgggtgaactacatcgtggagaccatcctgtgggtggccgtgctgctgaccatgaccctgtacagctgcctgaagatctag

SEQ ID NO: 165673 - DNA, 1386 bp, synthetic construct
  misc_feature 1..1386: note = Description of Artificial Sequence: Synthetic coding sequence
  source 1..1386: mol_type = other DNA
atggccgcccaggccctggccctgctgcgggaggtggcccggctggaggcccccctggaggagctgcgggccctgcacagcgtgctgcaggccgtgcccctgaatgagctgcggcagcaggccgctgagctgcggctgggccccctcttcagcctgctgaatgaaaaccaccgggagaagaccaccctgtgtgtgtccatcctggagcggctgctgcaggccatggagcctgtgcacgtggccaggaacctgcgggtggacctgcagaggggcctcatccacccagatgacagcgtgaagatcctgaccctgagccagatcggccgcatcgtggagaacagtgatgctgtgacagagatcctgaacaatgctgagctgctgaagcagatcgtgtactgcattggaggagagaacctgtctgtggccaaggccctgatcatcgagatcagctctgtgtccccagagagcctgaactactgcaccaccagcggcctggtgacccagctgctgcgggagctgaccggggaggatgtgctggtgcgggccacctgcatcgagatggtgaccagcctggcctacacccaccacggccggcagtacctggcccaggagggcgtgattgaccagatcagcaacatcatcgtgggcgctgacagcgaccccttcagcagcttctacctgcccggctttgtgaagttcttcggcaacctggccgtgatggacagcccccagcagatctgtgagcgctaccccatctttgtggagaaggtgtttgagatgattgagagccaggaccccaccatgattggagtggccgtggacacagtgggcatcctgggcagcaatgtggagggcaagcaggtgctgcagaagacaggcaccaggtttgagcggctgctgatgagaattggccaccagagcaagaatgcccctgtggagctgaagatccgctgcctggatgccatcagcagcctgctgtacctgcccccagagcagcagacagatgacctgctgaggatgacagagagctggttcagcagcctgagccgggaccccctggagctgttccggggcatcagcagccagcccttccctgagctgcactgtgccgccctgaaggtgttcaccgccatcgccaaccagccctgggcccagaagctgatgttcaacagccctggctttgtggagtatgtggtggacagatctgtggagcatgacaaggccagcaaggatgccaagtatgagctggtgaaggccctggccaacagcaagaccatcgccgagatcttcggcaaccccaactacctgcggctgcggacctacctgtctgagggcccctactacgtgaagcctgtgtccaccacagctgtggagggcgctgagtag

SEQ ID NO: 165674 - DNA, 294 bp, synthetic construct
  misc_feature 1..294: note = Description of Artificial Sequence: Synthetic coding sequence
  source 1..294: mol_type = other DNA
atgagaattggccaccagagcaagaatgcccctgtggagctgaagatccgctgcctggatgccatcagcagcctgctgtacctgcccccagagcagcagacagatgacctgctgaggatgacagagagctggttcagcagcctgagccgggaccccctggagctgttccggggcatcagcagccagcccttccctgagctgcactgtgccgccctgaaggtgttcaccggcaggaagcacctgcacctggaggagctggtgggcggcaaccaggtgaagaacacagtggagtag

SEQ ID NO: 165675 - DNA, 510 bp, synthetic construct
  misc_feature 1..510: note = Description of Artificial Sequence: Synthetic coding sequence
  source 1..510: mol_type = other DNA
atgatctgcctggtgctgaccatctttgccaacctcttccctgctgcctgcaccggggcccacgagaggaccttcctggccgtgaagccagatggagtgcagaggcggctggtgggggagatcgtgagaagatttgagaggaagggcttcaagctggtggccctgaagctggtgcaggccagcgaggagctgctgcgggagcactacgccgagctgcgggagcggcccttctacggccgcctggtgaagtacatggccagcggccctgtggtggccatggtgtggcagggcctggatgtggtgaggaccagccgggccctgattggagccaccaacccagcagatgcccctcctggcaccatccggggggacttctgcatcgaggtgggcaagaacctgattcatggcagtgacagcgtggagagcgcccggcgggagatcgccctgtggttccgggcagatgagctgctgtgctgggaggacagcgctggccactggctgtatgaatag

SEQ ID NO: 165676 - DNA, 744 bp, synthetic construct
  misc_feature 1..744: note = Description of Artificial Sequence: Synthetic coding sequence
  source 1..744: mol_type = other DNA
atgtatggcatgttcaagaaggtgaatgcccgggagcgcatcgtgggctggtaccacacaggccccaagctgcacaagaatgacatcgccatcaatgagctgatgaagcgctactgccccaacagcgtgctggtgatcattgatgtgaagcccaaggacctgggcctgcccacagaggcctacatctctgtggaggaggtgcatgatgatggcacccccaccagcaagacctttgagcacgtgaccagcgagattggagctgaggaggccgaggaggtgggcgtggagcacctgctgcgggacatcaaggacaccaccgtgggcaccctgagccagaggatcaccaaccaggtgcacggcctgaagggcctgaacagcaagctgctggacatccgcagctacctggagaaggtggccaccgggaagctgcccatcaaccaccagatcatctaccagctgcaggatgtgttcaacctgctgcctgatgtgtccctgcaggagtttgtgaaggccttctacctgaagaccaatgaccagatggtggtggtgtacctggccagcctcatccgctctgtggtggccctgcacaacctgatcaacaacaagatcgccaacagagatgctgagaagaaggagggccaggagaaggaggagagcaagaaggacagaaaagaagacaaggagaaggacaaggacaaggagaagagtgatgtgaagaaggaggagaagaaggagaagaagtag

SEQ ID NO: 165677 - DNA, 624 bp, synthetic construct
  misc_feature 1..624: note = Description of Artificial Sequence: Synthetic coding sequence
  source 1..624: mol_type = other DNA
atgtctgatgaggaggcccggcagagcggcggcagcagccaggccggcgtggtgacagtgtctgatgtgcaggagctgatgaggaggaaggaggagattgaggcccagatcaaggccaactatgatgtgctggagagccagaagggcatcggcatgaatgagcccctggtggactgtgagggctaccccaggagtgatgtggacctgtaccaggtgaggacagcccggcacaacatcatctgcctgcagaatgaccacaaggctgtgatgaagcaggtggaggaggccctgcaccagctgcacgcccgggacaaggagaagcaggcccgggacatggccgaggcccacaaggaggccatgagcaggaagctgggccagagcgagagccagggccccccccgggcctttgccaaggtgaacagcatcagccctggcagccctgccagcattgctggcctgcaggtggatgatgaaattgtggagtttggatctgtgaacacccagaacttccagagcctgcacaacatcggctctgtggtgcagcacagcgagggcgccctggcccccaccatcctgctgtctgtgtccatgaacctgaccaccccaggcaccagcagcaggtag

SEQ ID NO: 165678 - DNA, 672 bp, synthetic construct
  misc_feature 1..672: note = Description of Artificial Sequence: Synthetic coding sequence
  source 1..672: mol_type = other DNA
atgtctgatgaggaggcccggcagagcggcggcagcagccaggccggcgtggtgacagtgtctgatgtgcaggagctgatgaggaggaaggaggagattgaggcccagatcaaggccaactatgatgtgctggagagccagaagggcatcggcatgaatgagcccctggtggactgtgagggctaccccaggagtgatgtggacctgtaccaggtgaggacagcccggcacaacatcatctgcctgcagaatgaccacaaggctgtgatgaagcaggtggaggaggccctgcaccagctgcacgcccgggacaaggagaagcaggcccgggacatggccgaggcccacaaggaggccatgagcaggaagctgggccagagcgagagccagggccccccccgggcctttgccaaggtgaacagcatcagccctggcagccctgccagcattgctggcctgcaggtggatgatgaaattgtggagtttggatctgtgaacacccagaacttccagagcctgcacaacatcggctctgtggtgcagcacagcgagggcaagcccctgaatgtgaccgtcatccggcggggggagaagcaccagctgcggctggtgcccacccgctgggccggcaagggcctgctgggctgcaacatcatccccctgcagaggtag

SEQ ID NO: 165679 - DNA, 411 bp, synthetic construct
  misc_feature 1..411: note = Description of Artificial Sequence: Synthetic coding sequence
  source 1..411: mol_type = other DNA
atgctgctgaagctgaaggagaaggccagcctgaccctggccgtgggcaccctgcccttccccagccagttcaactttgtgcccccaggccgcatgtgccgggtggccggctggggccgcactggagtgctgaagccaggcagtgacaccctgcaggaggtgaagctgcggctgatggacccccaggcctgcagccacttccgggactttgaccacaacctgcagctgtgtgtgggcaaccccaggaagaccaagagcgccttcaagggggacagcggcggccccctgctgtgtgccggcgtggcccagggcatcgtgtcctatggccgcagtgatgccaagcccccagctgtgttcacccgcatcagccactaccggccctggatcaaccagatcctgcaggccaactag

SEQ ID NO: 165680 - DNA, 753 bp, synthetic construct
  misc_feature 1..753: note = Description of Artificial Sequence: Synthetic coding sequence
  source 1..753: mol_type = other DNA
atggccatgctgcgggtgcagcctgaggcccaggccaaggtggatgtgttccgggaggacctgtgcaccaagacagagaacctgctgggcagctacttccccaagaagatcagcgagctggatgccttcctgaaggagcccgccctgaatgaggccaacctgagcaacctgaaggcccccctggacatccctgtgcctgaccctgtgaaggagaaggagaaggaggagaggaagaagcagcaggagaaggaggacaaggatgagaagaagaagggagaagatgaagataaaggaccaccctgtggccctgtgaactgcaatgagaagatcgtggtgctgctgcagaggctgaagccagagatcaaggatgtgattgagcagctgaacctggtgaccacctggctgcagctgcagatccccagaattgaagatggcaacaactttggagtggccgtgcaggagaaggtgtttgagctgatgaccagcctgcacaccaagctggagggcttccacacccagatcagcaagtacttcagcgagagaggagatgctgtgaccaaggccgccaagcagccccacgtgggggactaccggcagctggtgcatgagctggatgaagctgagtacagagacatccggctgatggtgatggagatcagaaatgcctacgtgcggcggcagggccagggccggggcggccagaggcagctgagccaggccacccacagcctgaccctgcaggcccggggctag

SEQ ID NO: 165681 - DNA, 627 bp, synthetic construct
  misc_feature 1..627: note = Description of Artificial Sequence: Synthetic coding sequence
  source 1..627: mol_type = other DNA
atgggagaggtggagatcagcgccctggcctacgtgaagatgtgcctgcacgccgcccgctacccccacgccgctgtgaatggcctcttcctggccccagcccccaggtctggagaatgtctgtgcctgacagactgtgtgcccctcttccacagccacctggccctgtctgtgatgctggaggtggccctgaaccaggtggatgtgtggggcgcccaggccggcctggtggtggccggctactaccacgccaatgctgctgtgaatgaccagagccctggccccctggccctgaagattgctggaagaattgctgagttcttcccagatgctgtgctgatcatgctggacaaccagaagctggtgccccagccccgggtgccccctgtgattgtgctggagaaccagggcctgcgctgggtgcccaaggacaagaacctggtgatgtggagggactgggaggagagccggcagatggtgggcgccctgctggaggaccgggcccaccagcacctggtggactttgactgccacctggatgacatccggcaggactggaccaaccagaggctgaacacccagatcacccagtgggtgggccccaccaatggaaatggaaatgcctag

SEQ ID NO: 165682 - DNA, 804 bp, synthetic construct
  misc_feature 1..804: note = Description of Artificial Sequence: Synthetic coding sequence
  source 1..804: mol_type = other DNA
atggccagcctgctgaaggtggaccaggaggtgaagctgaaggtggacagcttccgggagcgcatcaccagcgaggccgaggacctggtggccaacttcttccccaagaagctgctggagctggacagcttcctgaaggagcccatcctgaacatccatgacctgacccagatccacagcgacatgaacctgcctgtgcctgaccccatcctgctgaccaacagccatgatggcctggatggccccacctacaagaagaggcggctggatgaatgtgaggaggccttccagggcaccaaggtgtttgtgatgcccaacggcatgctgaagagcaaccagcagctggtggacatcatcgagaaggtgaagccagagatccggctgctgattgagaagtgcaacaccccatctgggaagggcccccacatctgctttgacctgcaggtgaagatgtgggtgcagctgctgatccccagaattgaagatggcaacaactttggagtgtccatccaggaggagaccgtggccgagctgaggacagtggagagcgaggccgccagctacctggaccagatcagccgctactacatcacccgggccaagctggtgtccaagatcgccaagtacccccacgtggaggactacagaagaacagtgacagaaattgatgagaaggagtacatcagcctgcggctcatcatcagcgagctgaggaaccagtatgtgaccctgcatgacatgatcctgaagaacatcgagaagatcaagaggcccaggagcagcaatgctgagaccctgtactag

SEQ ID NO: 165683 - DNA, 765 bp, synthetic construct; identical to SEQ ID NO: 165652
  misc_feature 1..765: note = Description of Artificial Sequence: Synthetic coding sequence
  source 1..765: mol_type = other DNA

SEQ ID NO: 165684 - DNA, 48 bp, synthetic construct; identical to SEQ ID NO: 94888
  misc_feature 1..48: note = Description of Artificial Sequence: Synthetic coding sequence
  source 1..48: mol_type = other DNA

SEQ ID NO: 165685 - DNA, 393 bp, synthetic construct
  misc_feature 1..393: note = Description of Artificial Sequence: Synthetic coding sequence
  source 1..393: mol_type = other DNA
atggccagcctgctgaaggtggaccaggaggtgaagctgaaggtggacagcttccgggagcgcatcaccagcgaggccgaggacctggtggccaacttcttccccaagaagctgctggagctggacagcttcctgaaggagcccatcctgaacatccatgacctgacccagatccacagcgacatgaacctgcctgtgcctgaccccatcctgctgaccaacagccatgatggcctggatggccccacctacaagaagaggcggctggatgaatgtgaggaggccttccagggccagaatgtgggcacagccccagacagccaggaccggcgctggaagcagctgtggggcgtgcacagcggcggcaacagctgccgggccaagaactgctag

SEQ ID NO: 165686 - DNA, 582 bp, synthetic construct
  misc_feature 1..582: note = Description of Artificial Sequence: Synthetic coding sequence
  source 1..582: mol_type = other DNA
atgaacctgcctgtgcctgaccccatcctgctgaccaacagccatgatggcctggatggccccacctacaagaagaggcggctggatgaatgtgaggaggccttccagggcaccaaggtgtttgtgatgcccaacggcatgctgaagagcaaccagcagctggtggacatcatcgagaaggtgaagccagagatccggctgctgattgagaagtgcaacacagtgaagatgtgggtgcagctgctgatccccagaattgaagatggcaacaactttggagtgtccatccaggaggagaccgtggccgagctgaggacagtggagagcgaggccgccagctacctggaccagatcagccgctactacatcacccgggccaagctggtgtccaagatcgccaagtacccccacgtggaggactacagaagaacagtgacagaaattgatgagaaggagtacatcagcctgcggctcatcatcagcgagctgaggaaccagtatgtgaccctgcatgacatgatcctgaagaacatcgagaagatcaagaggcccaggagcagcaatgctgagaccctgtactag

SEQ ID NO: 165687 - DNA, 5532 bp, synthetic construct
  misc_feature 1..5532: note = Description of Artificial Sequence: Synthetic coding sequence
  source 1..5532: mol_type = other DNA
atggagcctgctgagagagctggggtgggggagcccccagagcccggcggccggcctgagcccggcccccggggctttgtgccccagaaggagatcgtgtacaacaagctgctgccctatgcagagcggctggatgctgagagtgacctgcagctggcccagatcaagtgcaacctgggccgggctgtgcagctgcaggagctgtggccaggcggcctcttctggaccaggaagctgagcacctacatccggctgtatggcaggaagttcagcaaagaagatcatgtgctcttcatcaagctgctgtatgagctggtgtccatccccaagctggagatctccatgatgcagggctttgcccggctgctgatcaacctgctgaagaagaaggagctgctgagcagagctgacctggagctgccctggaggcccctgtatgacatggtggagcgcatcctgtacagcaagacagagcacctgggcctgaactggttccccaacagcgtggagaacatcctgaagaccctggtgaagagctgccggccctacttcccagcagatgccacagctgagatgctggaggagtggaggcccctgatgtgcccctttgatgtgaccatgcagaaggccatcacctactttgagatcttcctgcccaccagcctgcccccagagctgcaccacaagggcttcaagctgtggtttgatgagctgattggcctgtgggtgtctgtgcagaacctgccccagtgggagggccagctggtgaacctgtttgcccggctggccacagacaacatcggctacatcgactgggacccctacgtgcccaagatcttcacccgcatcctgcggagcctgaacctgcctgtgggcagcagccaggtgctggtgccccgcttcctgaccaatgcctatgacatcggccatgctgtgatctggatcacagccatgatgggcggccccagcaagctggtgcagaagcacctggccggcctcttcaacagcatcaccagcttctaccaccccagcaacaacggccgctggctgaacaagctgatgaagctgctgcagaggctgcccaacagcgtggtgcggcggctgcaccgggagcgctacaagaagcccagctggctgacccctgtgcctgacagccacaagctgacagaccaggatgtgacagactttgtgcagtgcatcatccagcctgtgctgctggccatgttcagcaagacaggcagcctggaggccgcccaggccctgcagaacctggccctgatgaggcctgagctggtgatcccccctgtgctggagaggacctacccagccctggagaccctgacagagccccaccagctgacagccaccctgagctgtgtgattggagtggcccggagcctggtgtctgggggccgctggttccctgagggccccacccacatgctgcccctgctgatgagggccctgcccggggtggaccccaatgacttcagcaagtgcatgatcaccttccagttcatcgccaccttcagcaccctggtgcccctggtggactgcagctctgtgctgcaggagagaaatgacctgacagaggtggagcgggagctgtgcagcgccacagctgagtttgaggactttgtgctgcagttcatggaccgctgcttcggcctcatcgagagcagcaccctggagcagacccgggaggagacagaaacagagaagatgacccacctggagagcctggtggagctgggcctgagcagcaccttcagcaccatcctgacccagtgcagcaaggagatcttcatggtggccctgcagaaggtgttcaacttcagcaccagccacatctttgagaccagggtggccggccgcatggtggccgacatgtgcagagctgctgtgaagtgctgcccagaggagagcctgaagctgtttgtgccccactgctgcagcgtcatcacccagctgaccatgaatgatgatgtgctgaatgatgaggagctggacaaggagctgctgtggaacctgcagctgctgtctgagatcaccagggtggatggcaggaagctgctgctgtaccgggagcagctggtgaagatcctgcagaggaccctgcacctgacctgcaagcagggctacaccctgagctgcaacctgctgcaccacctgctgcggagcaccaccctcatctaccccacagagtactgcagcgtgcctgggggctttgacaagccacccagcgagtacttccccatcaaggactggggcaagccaggggacctgtggaacctgggcatccagtggcacgtgcccagcagcgaggaggtgtcctttgccttctacctgctggacagcttcctgcagcctgagctggtgaagctgcagcactgtggagatggcaagctggagatgagcagagatgacatcctgcagagcctgaccatcgtgcacaactgcctgattggcagcggcaacctgctgccccccctgaagggggagcctgtgaccaacctggtgcccagcatggtgtccctggaggagaccaagctgtacacaggcctggagtatgacctgagccgggagaaccaccgggaggtgattgccaccgtcatcaggaagctgctgaaccacatcctggacaacagtgaagatgacaccaagagcctcttcctgatcatcaagatcattggagacctgctgcagttccagggcagccacaagcatgaatttgacagccgctggaagagcttcaacctggtgaagaagtccatggagaaccggctgcacggcaagaagcagcacatccgggccctgctgattgacagagtgatgctgcagcacgagctgcggaccctgactgtggagggctgtgagtacaagaagatccaccaggacatgatccgggacctgctgcggctgagcaccagcagctacagccaggtgaggaacaaggcccagcagaccttctttgctgccctgggcgcctacaacttctgctgccgggacatcatccccctggtgctggagttcctgcggccagaccggcagggcgtgacccagcagcagttcaagggggccctgtactgcctgctgggcaaccacagcggcgtgtgcctggccaacctgcatgactgggactgcatcgtgcagacctggccagccatcgtgagcagcggcctgagccaggccatgagcctggagaagcccagcatcgtgcggctgtttgatgacctggccgagaagatccaccggcagtatgagaccatcggcctggacttcaccatccccaagagctgtgtggagattgctgagctgctgcagcagagcaagaaccccagcatcaaccagatcctgctgagccctgagaagatcaaggagggcatcaagaggcagcaggagaagaatgctgatgccctgagaaattatgagaacctggtggacaccctgctggatggagtggagcagaggaacctgccctggaagtttgagcacatcggcatcggcctgctgagcctgctgctgagagatgacagagtgctgcccctgcgggccatccgcttctttgtggagaacctgaaccatgatgccatcgtggtgaggaagatggccatctctgctgtggccggcatcctgaagcagctgaagaggacccacaagaagctgaccatcaacccctgtgagatcagcggctgccccaagcccacccagatcatcgccggggacagaccagacaaccactggctgcactatgacagcaagaccatccccaggaccaagaaggagtgggagagcagctgctttgtggagaagacccactggggctactacacctggcccaagaacatggtggtgtatgccggcgtggaggagcagcccaagctgggccgcagccgggaggacatgacagaagctgagcagatcatctttgaccacttcagtgaccccaagtttgtggagcagctgatcaccttcctgagcctggaggacaggaagggcaaggacaagttcaacccccggcgcttctgcctcttcaagggcatcttcaggaactttgatgatgccttcctgcctgtgctgaagccccacctggagcacctggtggccgacagccatgagagcacccagagatgtgtggccgagatcatcgccggcctcatccggggcagcaagcactggacctttgagaaggtggagaagctgtgggagctgctgtgccccctgctgaggacagccctgagcaacatcaccgtggagacctacaatgactggggcgcctgcatcgccaccagctgtgagagccgggaccccaggaagctgcactggctgtttgagctgctgctggagagccccctgtctggagagggcggcagctttgtggatgcctgccgcctgtatgtgctgcagggcggcctggcccagcaggagtggagggtgcctgagctgctgcaccggctgctgaagtacctggagcccaagctgacccaggtgtacaagaatgtgcgggagagaattggctctgtgctgacctacatcttcatgattgatgtgtccctgcccaacaccacccccaccatcagcccccacgtgcctgagttcaccgcccgcatcctggagaagctgaagcccctgatggatgtggatgaggagatccagaaccacgtgatggaggagaatggaattggagaggaggatgagaggacccagggcatcaagctgctgaagaccatcctgaagtggctgatggccagcgctggccgctccttcagcacagctgtgacagagcagctgcagctgctgcccctcttcttcaagatcgcccctgtggagaatgacaacagctatgatgagctgaagagagatgccaagctgtgcctgagcctgatgagccagggcctgctgtacccccaccaggtgcccctggtgctgcaggtgctgaagcagacagcccggagcagctcctggcacgcccgctacacagtgctgacctacctgcagaccatggtgttctacaacctcttcatcttcctgaacaatgaagatgctgtgaaggacatccgctggctggtgatcagcctgctggaggatgagcagctggaggtgcgggagatggccgccaccaccctgagcggcctgctgcagtgcaacttcctgaccatggacagccccatgcagatccactttgagcagctgtgcaagaccaagctgcccaagaagaggaagagggaccccggctctgtgggggacaccatccccagcgctgagctggtgaagagacatgctggggtgctgggcctgggcgcctgtgtgctgagcagcccctatgatgtgcccacctggatgccccagctgctgatgaacctgagcgcccacctgaatgacccccagcccatcgagatgacagtgaagaagaccctgagcaacttccggaggacccaccacgacaactggcaggagcacaagcagcagttcacagatgaccagctgctggtgctgacagacctgctggtgagcccctgctactatgcctag

SEQ ID NO: 165688 - DNA, 2964 bp, synthetic construct
  misc_feature 1..2964: note = Description of Artificial Sequence: Synthetic coding sequence
  source 1..2964: mol_type = other DNA
atgggagagaacctggccaagaagatcatgttcttcctgctgaccatcaagctgatcctgaaccacatcctggacaacagtgaagatgacaccaagagcctcttcctgatcatcaagatcattggagacctgctgcagttccagggcagccacaagcatgaatttgacagccgctggaagagcttcaacctggtgaagaagtccatggagaaccggctgcacggcaagaagcagcacatccgggccctgctgattgacagagtgatgctgcagcacgagctgcggaccctgactgtggagggctgtgagtacaagaagatccaccaggacatgatccgggacctgctgcggctgagcaccagcagctacagccaggtgaggaacaaggcccagcagaccttctttgctgccctgggcgcctacaacttctgctgccgggacatcatccccctggtgctggagttcctgcggccagaccggcagggcgtgacccagcagcagttcaagggggccctgtactgcctgctgggcaaccacagcggcgtgtgcctggccaacctgcatgactgggactgcatcgtgcagacctggccagccatcgtgagcagcggcctgagccaggccatgagcctggagaagcccagcatcgtgcggctgtttgatgacctggccgagaagatccaccggcagtatgagaccatcggcctggacttcaccatccccaagagctgtgtggagattgctgagctgctgcagcagagcaagaaccccagcatcaaccagatcctgctgagccctgagaagatcaaggagggcatcaagaggcagcaggagaagaatgctgatgccctgagaaattatgagaacctggtggacaccctgctggatggagtggagcagaggaacctgccctggaagtttgagcacatcggcatcggcctgctgagcctgctgctgagagatgacagagtgctgcccctgcgggccatccgcttctttgtggagaacctgaaccatgatgccatcgtggtgaggaagatggccatctctgctgtggccggcatcctgaagcagctgaagaggacccacaagaagctgaccatcaacccctgtgagatcagcggctgccccaagcccacccagatcatcgccggggacagaccagacaaccactggctgcactatgacagcaagaccatccccaggaccaagaaggagtgggagagcagctgctttgtggagaagacccactggggctactacacctggcccaagaacatggtggtgtatgccggcgtggaggagcagcccaagctgggccgcagccgggaggacatgacagaagctgagcagatcatctttgaccacttcagtgaccccaagtttgtggagcagctgatcaccttcctgagcctggaggacaggaagggcaaggacaagttcaacccccggcgcttctgcctcttcaagggcatcttcaggaactttgatgatgccttcctgcctgtgctgaagccccacctggagcacctggtggccgacagccatgagagcacccagagatgtgtggccgagatcatcgccggcctcatccggggcagcaagcactggacctttgagaaggtggagaagctgtgggagctgctgtgccccctgctgaggacagccctgagcaacatcaccgtggagacctacaatgactggggcgcctgcatcgccaccagctgtgagagccgggaccccaggaagctgcactggctgtttgagctgctgctggagagccccctgtctggagagggcggcagctttgtggatgcctgccgcctgtatgtgctgcagggcggcctggcccagcaggagtggagggtgcctgagctgctgcaccggctgctgaagtacctggagcccaagctgacccaggtgtacaagaatgtgcgggagagaattggctctgtgctgacctacatcttcatgattgatgtgtccctgcccaacaccacccccaccatcagcccccacgtgcctgagttcaccgcccgcatcctggagaagctgaagcccctgatggatgtggatgaggagatccagaaccacgtgatggaggagaatggaattggagaggaggatgagaggacccagggcatcaagctgctgaagaccatcctgaagtggctgatggccagcgctggccgctccttcagcacagctgtgacagagcagctgcagctgctgcccctcttcttcaagatcgcccctgtggagaatgacaacagctatgatgagctgaagagagatgccaagctgtgcctgagcctgatgagccagggcctgctgtacccccaccaggtgcccctggtgctgcaggtgctgaagcagacagcccggagcagctcctggcacgcccgctacacagtgctgacctacctgcagaccatggtgttctacaacctcttcatcttcctgaacaatgaagatgctgtgaaggacatccgctggctggtgatcagcctgctggaggatgagcagctggaggtgcgggagatggccgccaccaccctgagcggcctgctgcagtgcaacttcctgaccatggacagccccatgcagatccactttgagcagctgtgcaagaccaagctgcccaagaagaggaagagggaccccggctctgtgggggacaccatccccagcgctgagctggtgaagagacatgctggggtgctgggcctgggcgcctgtgtgctgagcagcccctatgatgtgcccacctggatgccccagctgctgatgaacctgagcgcccacctgaatgacccccagcccatcgagatgacagtgaagaagaccctgagcaacttccggaggacccaccacgacaactggcaggagcacaagcagcagttcacagatgaccagctgctggtgctgacagacctgctggtgagcccctgctactatgcctag

SEQ ID NO: 165689 - DNA, 867 bp, synthetic construct
  misc_feature 1..867: note = Description of Artificial Sequence: Synthetic coding sequence
  source 1..867: mol_type = other DNA
atggccgccaccttcttcggggaggtggtgaaggccccctgccgggccggcacagaagatgaggaggaggaggaggagggccggcgggagaccccagaagatcgggaggtgcggctgcagctggccaggaagcgggaggtgcggctgctgcggcggcagaccaagaccagcctggaggtgtccctgctggagaagtacccctgcagcaagttcatcatcgccatcggcaacaatgctgtggccttcctgagcagctttgtgatgaacagcggcgtgtgggaggaggtgggctgtgccaagctgtggaatgagtggtgcaggaccacagacaccacccacctgagcagcacagaggccttctgtgtgttctaccacctgaagagcaaccccagcgtcttcctgtgccagtgcagctgctacgtggccgaggaccagcagtaccagtggctggagaaggtgtttggcagctgccccaggaagaacatgcagatcaccatcctgacctgcagacatgtgacagactacaagaccagcgagagcacaggcagcctgcccagccccttcctgcgggccctgaagacccagaacttcaaggacagcgcctgctgccccctgctggagcagcccaacatcgtgcatgacctgcctgctgctgtgctgagctactgccaggtgtggaagatcccagccatcctgtacctgtgctacacagatgtgatgaagctggacctgatcaccgtggaggccttcaagcccatcctgagcaccaggagcctgaagggcctggtgaagaacatcccccagagcacagagatcctgaagaagctgatgaccaccaatgagatccagagcaacatctacacctag

SEQ ID NO: 165690 - DNA, 804 bp, synthetic construct
  misc_feature 1..804: note = Description of Artificial Sequence: Synthetic coding sequence
  source 1..804: mol_type = other DNA
atggccgccaccttcttcggggaggtggtgaaggccccctgccgggccggcacagaagatgaggaggaggaggaggagggccggcgggagaccccagaagatcgggaggtgcggctgcagctggccaggaagcgggaggtgcggctgctgcggcggcagaccaagaccagcctggaggtgtccctgctggagaagtacccctgcagcaagttcatcatcgccatcggcaacaatgctgtggccttcctgagcagctttgtgatgaacagcggcgtgtgggaggaggtgggctgtgccaagctgtggaatgagtggtgcaggaccacagacaccacccacctgagcagcacagaggccttctgtgtgttctaccacctgaagagcaaccccagcgtgtttggcagctgccccaggaagaacatgcagatcaccatcctgacctgccgccacgtgacagactacaagaccagcgagagcacaggcagcctgcccagccccttcctgcgggccctgaagacccagaacttcaaggacagcgcctgctgccccctgctggagcagcccaacatcgtgcatgacctgcctgctgctgtgctgagctactgccaggtgtggaagatcccagccatcctgtacctgtgctacacagatgtgatgaagctggacctgatcaccgtggaggccttcaagcccatcctgagcaccaggagcctgaagggcctggtgaagaacatcccccagagcacagagatcctgaagaagctgatgaccaccaatgagatccagagcaacatctacacctag

SEQ ID NO: 165691 - DNA, 795 bp, synthetic construct
  misc_feature 1..795: note = Description of Artificial Sequence: Synthetic coding sequence
  source 1..795: mol_type = other DNA
atgtttgtgccctgtggggagagcgccccagacctggccggcttcaccctgctgatgcctgctgtgtctgtgggcaatgtgggccagctggccatggacctgatcatcagcaccctgaacatgagcaagattggctacttctacacagactgcctggtgcccatggtgggcaacaacccctatgccaccacagagggcaacagcacagagctgagcatcaatgctgaggtgtacagcctgcccagcaggaagctggtggccctgcagctgcggagcatcttcatcaagtacaagagcaagcccttctgtgagaagctgctgtcctgggtgaagagcagcggctgtgcccgggtgattgtgctgagcagcagccacagctaccagagaaatgacctgcagctgcggagcacccccttccgctacctgctgacccccagcatgcagaagtctgtgcagaacaagatcaagagcctgaactgggaggagatggagaagagccgctgcatccctgagattgatgattctgagttctgcatccgcatccctgggggcggcatcaccaagaccctgtatgatgagagctgcagcaaggagatccagatggctgtgctgctgaagtttgtgtctgagggggacaacatcccagatgccctgggcctggtggagtacctgaatgagtggctgcagatcctgaagcccctgagtgatgaccccaccgtgtctgccagccgctggaagatccccagctcctggaggctgctgtttggaagtggcctgcccccagccctcttctag

SEQ ID NO: 165692 - DNA, 459 bp, synthetic construct
  misc_feature 1..459: note = Description of Artificial Sequence: Synthetic coding sequence
  source 1..459: mol_type = other DNA
atgcctgctgtgtctgtgggcaatgtgggccagctggccatggacctgatcatcagcaccctgaacatgagcaagattggctacttctacacagactgcctggtgcccatggtgggcaacaacccctatgccaccacagagggcaacagcacagagctgagcatcaatgctgaggtgtacagcctgcccagcaggaagctggtggccctgcagctgcggagcatcttcatcaagtacaagagcaagcccttctgtgagaagctgctgtcctgggtgaagagcagcggctgtgcccgggtgattgtgctgagcagcagccacagctaccagagaaatgacctgcagctgcggagcacccccttccgctacctgctgacccccagcatgcagaagtctgtgcagaacaagatcaagagcctgaactgggaggagatggagaagggggccttcctgaagtag

SEQ ID NO: 165693 - DNA, 792 bp, synthetic construct
  misc_feature 1..792: note = Description of Artificial Sequence: Synthetic coding sequence
  source 1..792: mol_type = other DNA
atgttcaggaaccagtatgacaatgatgtgacagtgtggagcccccagggccgcatccaccagatcgagtatgccatggaggccgtgaagcagggcagcgccaccgtgggcctgaagagcaagacccatgctgtgctggtggccctgaagagggcccagagcgagctggccgcccaccagaagaagatcctgcacgtggacaaccacatcggcatcagcattgctggcctgacagcagatgcccggctgctgtgcaacttcatgaggcaggagtgcctggacagcagatttgtgtttgaccggcccctgcctgtgtcccggctggtgtccctcatcggcagcaagacccagatccccacccagagatatggaagaagaccctacggcgtgggcctgctgattgctggctatgatgacatgggcccccacatcttccagacctgccccagcgccaactactttgactgccgggccatgagcattggagcccggagccagagcgcccggacctacctggagcggcacatgtctgagttcatggagtgcaacctgaatgagctggtgaagcacggcctgcgggccctgcgggagaccctgcctgctgagcaggacctgaccaccaagaatgtgtccatcggcatcgtgggcaaggacctggagttcaccatctatgatgatgatgatgtgagccccttcctggagggcctggaggagcggccccagaggaaggcccagcctgcccagcctgcagatgagcctgctgagaaggcagatgagcccatggagcactag

SEQ ID NO: 165694 - DNA, 792 bp, synthetic construct; identical to SEQ ID NO: 165693
  misc_feature 1..792: note = Description of Artificial Sequence: Synthetic coding sequence
  source 1..792: mol_type = other DNA

SEQ ID NO: 165695 - DNA, 810 bp, synthetic construct
  misc_feature 1..810: note = Description of Artificial Sequence: Synthetic coding sequence
  source 1..810: mol_type = other DNA
atgcagctgagcaaggtgaagttcaggaaccagtatgacaatgatgtgacagtgtggagcccccagggccgcatccaccagatcgagtatgccatggaggccgtgaagcagggcagcgccaccgtgggcctgaagagcaagacccatgctgtgctggtggccctgaagagggcccagagcgagctggccgcccaccagaagaagatcctgcacgtggacaaccacatcggcatcagcattgctggcctgacagcagatgcccggctgctgtgcaacttcatgaggcaggagtgcctggacagcagatttgtgtttgaccggcccctgcctgtgtcccggctggtgtccctcatcggcagcaagacccagatccccacccagagatatggaagaagaccctacggcgtgggcctgctgattgctggctatgatgacatgggcccccacatcttccagacctgccccagcgccaactactttgactgccgggccatgagcattggagcccggagccagagcgcccggacctacctggagcggcacatgtctgagttcatggagtgcaacctgaatgagctggtgaagcacggcctgcgggccctgcgggagaccctgcctgctgagcaggacctgaccaccaagaatgtgtccatcggcatcgtgggcaaggacctggagttcaccatctatgatgatgatgatgtgagccccttcctggagggcctggaggagcggccccagaggaaggcccagcctgcccagcctgcagatgagcctgctgagaaggcagatgagcccatggagcactag

SEQ ID NO: 165696 - DNA, 495 bp, synthetic construct
  misc_feature 1..495: note = Description of Artificial Sequence: Synthetic coding sequence
  source 1..495: mol_type = other DNA
atgttcaggaaccagtatgacaatgatgtgacagtgtggagcccccagggccgcatccaccagatcgagtatgccatggaggccgtgaagcagggcagcgccaccgtgggcctgaagagcaagacccatgctgtgctggtggccctgaagagggcccagagcgagctggccgcccaccagaagaagatcctgcacgtggacaaccacatcggcatcagcattgctggcctgacagcagatgcccggctgctgtgcaacttcatgaggcaggagtgcctggacagcagatttgtgtttgaccggcccctgcctgtgtcccggctggtgtccctcatcggcagcagcatcctcttcatgatctgggccctgaccttcagcaagcctgtgcacctgctgaccatcctgacagctgagccctgccccctggagcctgtgcccaaccagctggtgctgacctggagggacatctgcctgaacctgtggagcgtcatctag

SEQ ID NO: 165697 - DNA, 1014 bp, synthetic construct
  misc_feature 1..1014: note = Description of Artificial Sequence: Synthetic coding sequence
  source 1..1014: mol_type = other DNA
atggaccagaatgagcacagccactggggcccccacgccaagggccagtgtgccagccgctctgagctgcgcatcatcctggtgggcaagacaggaacaggcaagtctgctgctggcaacagcatcctgaggaagcaggcctttgagagcaagctgggcagccagaccctgaccaagacctgcagcaagagccagggctcctggggcaaccgggagatcgtcatcatcgacaccccagacatgttctcctggaaggaccactgtgaggccctgtacaaggaggtgcagcgctgctacctgctgagcgcccctggcccccacgtgctgctgctggtgacccagctgggccgctacaccagccaggaccagcaggccgcccagagggtgaaggagatctttggagaagatgccatgggccacaccatcgtgctcttcacccacaaggaggacctgaatggaggcagcctgatggactacatgcatgacagcgacaacaaggccctgagcaagctggtggccgcctgtggcggccgcatctgtgccttcaacaacagagctgagggcagcaaccaggatgaccaggtgaaggagctgatggactgcatcgaggacctgctgatggagaagaatggagaccactacaccaacggcctgtacagcctcatccagaggagcaaatgtggccctgtgggcagtgatgagcgggtgaaggagttcaagcagagcctcatcaagtacatggagacccagaggagctacacagccctggccgaggccaactgcctgaagggggccctgatcaagacccagctgtgtgtgctcttctgcatccagctgttcctgcggctcatcatcctgtggctgtgcatcctgcacagcatgtgcaacctcttctgctgcctgctcttctccatgtgcaacctcttctgcagcctgctcttcatcatccccaagaagctgatgatcttcctgaggacagtcatccggctggagaggaagaccccccggctgtag

SEQ ID NO: 165698 - DNA, 300 bp, synthetic construct
  misc_feature 1..300: note = Description of Artificial Sequence: Synthetic coding sequence
  source 1..300: mol_type = other DNA
atgggccctgactacagagtgctggtgcaccgggccaggaagctggcccagcagtactacctggtgtaccaggagcccatccccacagcccagctggtgcagagggtggcctctgtgatgcaggagtacacccagagcggcggcgtgcggcccttcggcgtgtccctgctgatctgtggctggaatgaaggccggccctacctgttccagagcgaccccagcggggcctactttgcctggaaggccacagccatgggcaagaactacgtgaatggcaagaccttcctggagaagaggtag

SEQ ID NO: 165699 - DNA, 465 bp, synthetic construct
  misc_feature 1..465: note = Description of Artificial Sequence: Synthetic coding sequence
  source 1..465: mol_type = other DNA
atgctgtactgtgaggccgagagccccccaacagtggagaaggtgaagccagcccgggagaacagcgagacagacctggagattgaaggagagcacggccacctgggcgctgtgcgggccgccagcccccagaagctggagaagagcggcttccaggagctgagcagccacagcttccctgagagcgccctgaggatggcctgtggcggcaatgtggccgagaggcctgcccgcttctgcctggagagcagcagcggcctggccggggagagcagctgcagcttcccccggctgagccctgccagcggggctgtgcccagccggcggctggtgaagagcggcatcaacacccagacccgcttcagcaacctgctgaatgtgtccacctggggcatcctgtgcaacctgtgcaacagccccaggagcttccccaagaagggcagcacagagcgggagcacctgtag

SEQ ID NO: 165700 - DNA, 747 bp, synthetic construct
  misc_feature 1..747: note = Description of Artificial Sequence: Synthetic coding sequence
  source 1..747: mol_type = other DNA
atgagcagcatcggcaccggctatgacctgagcgccagcaccttctccccagatggccgggtcttccaggtggagtatgccatgaaggctgtggagaacagcagcacagccatcggcatccgctgcaaggatggagtggtgtttggagtggagaagctggtgctgagcaagctgtatgaggagggcagcaacaagaggctcttcaacgtggacagacatgtgggcatggctgtggccggcctgctggctgatgcccggagcctggccgacatcgcccgggaggaggccagcaacttccgcagcaactttggctacaacatccccctgaagcacctggccgacagagtggccatgtatgtgcacgcctacaccctgtacagcgctgtgcggcccttcggctgcagcgtgaatgatggagcccagctgtacatgattgaccccagcggcgtgtcctatggctactggggctgtgccatcggcaaggcccggcaggccgccaagacagaaattgagaagctgcagatgaaggagatgacctgccgggacatcgtgaaggaggtggccaagatcatctacatcgtgcatgatgaggtgaaggacaaggcctttgagctggagctgtcctgggtgggggagctgaccaacggcagacatgagatcgtgcccaaggacatccgggaggaggccgagaagtatgccaaggagagcctgaaggaggaggatgaaagtgatgatgacaacatgtag

SEQ ID NO: 165701 - DNA, 786 bp, synthetic construct
  misc_feature 1..786: note = Description of Artificial Sequence: Synthetic coding sequence
  source 1..786: mol_type = other DNA
atgagcagaagatatgacagcaggaccaccatcttcagccctgagggccgcctgtaccaggtggagtatgccatggaggccatcggccatgctggcacctgcctgggcatcctggccaatgatggagtgctgctggccgctgagaggaggaacatccacaagctgctggatgaggtgttcttcagcgagaagatctacaagctgaatgaagacatggcctgcagcgtggccggcatcaccagtgatgccaacgtgctgaccaatgagctgcggctgattgcccagcgctacctgctgcagtaccaggagcccatcccctgtgagcagctggtgacagccctgtgtgacatcaagcaggcctacacccagtttggaggcaagaggcccttcggcgtgtccctgctgtacatcggctgggacaagcactacggcttccagctgtaccagagcgaccccagcggcaactacggcggctggaaggccacctgcatcggcaacaacagcgctgctgctgtgtccatgctgaagcaggactacaaggagggggagatgaccctgaagagcgccctggccctggccatcaaggtgctgaacaagaccatggatgtgtccaagctgtctgctgagaaggtggagatcgccaccctgaccagagaaaatggcaagacagtcatccgggtgctgaagcagaaggaggtggagcagctgatcaagaagcatgaggaggaggaggccaaggccgagcgggagaagaaggagaaggagcagaaggagaaggacaagtag

SEQ ID NO: 165702 - DNA, 573 bp, synthetic construct
  misc_feature 1..573: note = Description of Artificial Sequence: Synthetic coding sequence
  source 1..573: mol_type = other DNA
atggcctgcagcgtggccggcatcaccagtgatgccaacgtgctgaccaatgagctgcggctcatcgcccagcgctacctgctgcagtaccaggagcccatcccctgtgagcagctggtgacagccctgtgtgacatcaagcaggcctacacccagtttggaggcaagaggccctttggagtgtccctgctgtacatcggctgggacaagcactacggcttccagctgtaccagagcgaccccagcggcaactatggaggctggaaggccacctgcatcggcaacaacagcgctgctgctgtgtccatgctgaagcaggactacaaggagggggagatgaccctgaagagcgccctggccctggccatcaaggtgctgaacaagaccatggatgtgtccaagctgtctgctgagaaggtggagatcgccaccctgacccgggagaatggcaagacagtcatccgggtgctgaagcagaaggaggtggagcagctgatcaagaagcatgaggaggaggaggccaaggccgagcgggagaagaaggagaaggagcagaaggagaaggacaagtag

SEQ ID NO: 165703 - DNA, 786 bp, synthetic construct; identical to SEQ ID NO: 165701
  misc_feature 1..786: note = Description of Artificial Sequence: Synthetic coding sequence
  source 1..786: mol_type = other DNA

SEQ ID NO: 165704 - DNA, 666 bp, synthetic construct
  misc_feature 1..666: note = Description of Artificial Sequence: Synthetic coding sequence
  source 1..666: mol_type = other DNA
atgagcagaagatatgacagcaggaccaccatcttcagccctgagggccgcctgtaccaggtggagtatgccatggaggccatcggccatgctggcacctgcctgggcatcctggccaatgatggagtgctgctggccgctgagaggaggaacatccacaagctgctggatgaggtgttcttcagcgagaagatctacaagctgaatgaagacatggcctgcagcgtggccggcatcaccagtgatgccaacgtgctgaccaatgagctgcggctgattgcccagcgctacctgctgcagtaccaggagcccatcccctgtgagcagctggtgacagccctgtgtgacatcaagcaggcctacacccagtttggaggcaagaggcccttcggcgtgtccctgctgtacatcggctgggacaagcactacggcttccagctgtaccagagcgaccccagcggcaactacggcggctggaaggccacctgcatcggcaacaacagcgctgctgctgtgtccatgctgaagcaggactacaaggagggggagatgaccctgaagagcgccctggccctggccatcaaggtgctgaacaagaccatggatgtgtccaagctgtctgctgagaaggtggagatcgccaccctgaccagagaaaatggatag

SEQ ID NO: 165705 - DNA, 630 bp, synthetic construct
  misc_feature 1..630: note = Description of Artificial Sequence: Synthetic coding sequence
  source 1..630: mol_type = other DNA
atgagcagaagatatgacagcaggaccaccatcttcagccctgagggccgcctgtaccaggtggagtatgccatggaggccatcggccatgctggcacctgcctgggcatcctggccaatgatggagtgctgctggccgctgagaggaggaacatccacaagctgctggatgaggtgttcttcagcgagaagatctacaagctgaatgaagacatggcctgcagcgtggccggcatcaccagtgatgccaacgtgctgaccaatgagctgcggctgattgcccagcgctacctgctgcagtaccaggagcccatcccctgtgagcagctggtgacagccctgtgtgacatcaagcaggcctacacccagtttggaggcaagaggcccttcggcgtgtccctgctgtacatcggctgggacaagcactacggcttccagctgtaccagagcgaccccagcggcaactacggcggctggaaggccacctgcatcggcaacaacagcgctgctgctgtgtccatgctgaagcaggactacaaggagggggagatgaccctgaagagcgccctggccctggccatcaaggtgctgaacaagaccatggatgtgtccaagctgtctgctgagtag

SEQ ID NO: 165706 - DNA, 693 bp, synthetic construct
  misc_feature 1..693: note = Description of Artificial Sequence: Synthetic coding sequence
  source 1..693: mol_type = other DNA
atgagcagaagatatgacagcaggaccaccatcttcagccctgaggccgagaggaggaacatccacaagctgctggatgaggtgttcttcagcgagaagatctacaagctgaatgaagacatggcctgcagcgtggccggcatcaccagtgatgccaacgtgctgaccaatgagctgcggctcatcgcccagcgctacctgctgcagtaccaggagcccatcccctgtgagcagctggtgacagccctgtgtgacatcaagcaggcctacacccagtttggaggcaagaggccctttggagtgtccctgctgtacatcggctgggacaagcactacggcttccagctgtaccagagcgaccccagcggcaactatggaggctggaaggccacctgcatcggcaacaacagcgctgctgctgtgtccatgctgaagcaggactacaaggagggggagatgaccctgaagagcgccctggccctggccatcaaggtgctgaacaagaccatggatgtgtccaagctgtctgctgagaaggtggagatcgccaccctgacccgggagaatggcaagacagtcatccgggtgctgaagcagaaggaggtggagcagctgatcaagaagcatgaggaggaggaggccaaggccgagcgggagaagaaggagaaggagcagaaggagaaggacaagtag

SEQ ID NO: 165707 - DNA, 711 bp, synthetic construct
  misc_feature 1..711: note = Description of Artificial Sequence: Synthetic coding sequence
  source 1..711: mol_type = other DNA
atgagcagaagatatgacagcaggaccaccatcttcagccctgagggccgcctgtaccaggtggagtatgccatggaggccatcggccatgctggcacctgcctgggcatcctggccaatgatggagtgctgctggccgctgagaggaggaacatccacaagctgctggatgaggtgttcttcagcgagaagatctacaagctgaatgaagacatggcctgcagcgtggccggcatcaccagtgatgccaacgtgctgaccaatgagctgcggctgattgcccagcgctacctgctgcagtaccaggagcccatcccctgtgagcagctggtgacagccctgtgtgacatcaagcaggcctacacccagtttggaggcaagaggcccttcggcgtgtccctgctgtacatcggctgggacaagcactacggcttccagctgtaccagagcgaccccagcggcaactacggcggctggaaggccacctgcatcggcaacaacagcgctgctgctgtgtccatgctgaagcaggactacaaggagggggagatgaccctgaagagcgccctggccctggccatcaaggtgctgaacaagaccatggatgtgtccaagctgtctgctgagaaggtggagatcgccaccctgaccagagaaaatggcaagacagtcatccgggtgctgaagcagaaggaggtggagcagctgtag

SEQ ID NO: 165708 - DNA, 726 bp, synthetic construct
  misc_feature 1..726: note = Description of Artificial Sequence: Synthetic coding sequence
  source 1..726: mol_type = other DNA
atgttcctgaccaggagtgaatatgacagaggagtgaacaccttcagccctgagggccgcctcttccaggtggagtatgccatcgaggccatcaagctgggcagcacagccatcggcatccagaccagcgagggcgtgtgcctggccgtggagaagaggatcaccagccccctgatggagcccagcagcattgagaagatcgtggagattgatgcccacatcggctgtgccatgagcggcctgattgctgatgccaagaccctgattgacaaggcccgggtggagacccagaaccactggttcacctacaatgagaccatgacagtggagagcgtgacccaggccgtgagcaacctggccctgcagtttggagaggaggatgctgaccccggggccatgagccggccctttggagtggccctgctgtttggaggagtggatgagaagggcccccagctgttccacatggaccccagcggcacctttgtgcagtgtgatgcccgggccatcggcagcgccagcgagggcgcccagagcagcctgcaggaggtgtaccacaagtccatgaccctgaaggaggccatcaagagcagcctcatcatcctgaagcaggtgatggaggagaagctgaatgccaccaacatcgagctggccaccgtgcagcccggccagaacttccacatgttcaccaaggaggagctggaggaggtgatcaaggacatctag

SEQ ID NO: 165709 - DNA, 552 bp, synthetic construct
  misc_feature 1..552: note = Description of Artificial Sequence: Synthetic coding sequence
  source 1..552: mol_type = other DNA
atggagcccagcagcattgagaagatcgtggagattgatgcccacatcggctgtgccatgagcggcctgattgctgatgccaagaccctgattgacaaggcccgggtggagacccagaaccactggttcacctacaatgagaccatgacagtggagagcgtgacccaggccgtgagcaacctggccctgcagtttggagaggaggatgctgaccccggggccatgagccggccctttggagtggccctgctgtttggaggagtggatgagaagggcccccagctgttccacatggaccccagcggcacctttgtgcagtgtgatgcccgggccatcggcagcgccagcgagggcgcccagagcagcctgcaggaggtgtaccacaagtccatgaccctgaaggaggccatcaagagcagcctcatcatcctgaagcaggtgatggaggagaagctgaatgccaccaacatcgagctggccaccgtgcagcccggccagaacttccacatgttcaccaaggaggagctggaggaggtgatcaaggacatctag

SEQ ID NO: 165710 - DNA, 741 bp, synthetic construct
  misc_feature 1..741: note = Description of Artificial Sequence: Synthetic coding sequence
  source 1..741: mol_type = other DNA
atgagccggggcagcagcgctggctttgacagacacatcaccatcttcagccctgagggccgcctgtaccaggtggagtatgccttcaaggccatcaaccagggcggcctgacctctgtggccgtgcggggcaaggactgtgccgtcatcgtgacccagaagaaggtgcctgacaagctgctggacagcagcacagtgacccacctgttcaagatcacagagaacatcggctgtgtgatgacaggcatgacagctgacagccgcagccaggtgcagagggcccgctatgaggccgccaactggaagtacaagtatggctatgagatccctgtggacatgctgtgcaagagaattgctgacatcagccaggtgtacacccagaatgctgagatgaggcccctgggctgctgcatgatcctgattggaattgatgaggagcagggcccccaggtgtacaagtgtgaccctgctggctactactgcggcttcaaggccacagctgctggggtgaagcagacagagagcaccagcttcctggagaagaaggtgaagaagaagtttgactggacctttgagcagacagtggagacagccatcacctgcctgagcacagtgctgagcattgacttcaagcccagcgagattgaggtgggcgtggtgacagtggagaaccccaagttccgcatcctgacagaagctgagattgatgcccacctggtggccctggccgagcgggactag

SEQ ID NO: 165711 - DNA, 684 bp, synthetic construct
  misc_feature 1..684: note = Description of Artificial Sequence: Synthetic coding sequence
  source 1..684: mol_type = other DNA
atggccggcctgcggcgggagtatgccttcaaggccatcaaccagggcggcctgacctctgtggccgtgcggggcaaggactgtgctgtgattgtgacccagaagaaggtgcctgacaagctgctggacagcagcacagtgacccacctgttcaagatcacagaaaatattggctgtgtgatgacaggcatgacagctgacagccgcagccaggtgcagagggcccgctatgaagctgccaactggaagtacaagtatggctatgagatccctgtggacatgctgtgcaagagaattgctgacatcagccaggtgtacacccagaatgctgagatgaggcccctgggctgctgcatgatcctgattggaattgatgaggagcagggcccccaggtgtacaagtgtgaccctgctggctactactgcggcttcaaggccacagctgctggggtgaagcagacagagagcaccagcttcctggagaagaaggtgaagaagaagtttgactggacctttgagcagacagtggagacagccatcacctgcctgagcacagtgctgagcattgacttcaagcccagcgagattgaggtgggcgtggtgacagtggagaaccccaagttccgcatcctgacagaggccgagattgatgcccacctggtggccctggccgagcgggactag

SEQ ID NO: 165712 - DNA, 759 bp, synthetic construct
  misc_feature 1..759: note = Description of Artificial Sequence: Synthetic coding sequence
  source 1..759: mol_type = other DNA
atgagccggggcagcagcgctggctttgacagacacatcaccatcttcagccctgagggccgcctgtaccaggtggagtatgccttcaaggccatcaaccagggcggcctgacctctgtggccgtgcggggcaaggactgtgccgtcatcgtgacccagaagaaggtgcctgacaagctgctggacagcagcacagtgacccacctgttcaagatcacagagaacatcggctgtgtgatgacaggcatgacagctgacagccgcagccaggtgcagagggcccgctatgaggccgccaactggaagtacaagtatggctatgagatccctgtggacatgctgtgcaagagaattgctgacatcagccaggtgtacacccagaatgctgagatgaggcccctgggctgctggagcttcctgttcctgggcatgatcctgattggaattgatgaggagcagggcccccaggtgtacaagtgtgaccctgctggctactactgcggcttcaaggccacagctgctggggtgaagcagacagagagcaccagcttcctggagaagaaggtgaagaagaagtttgactggacctttgagcagacagtggagacagccatcacctgcctgagcacagtgctgagcattgacttcaagcccagcgagattgaggtgggcgtggtgacagtggagaaccccaagttccgcatcctgacagaagctgagattgatgcccacctggtggccctggccgagcgggactag

SEQ ID NO: 165713 - DNA, 324 bp, synthetic construct
  misc_feature 1..324: note = Description of Artificial Sequence: Synthetic coding sequence
  source 1..324: mol_type = other DNA
atgagccggggcagcagcgctggctttgacagacacatcaccatcttcagccctgagggccgcctgtaccaggtggagtatgccttcaaggccatcaaccagggcggcctgacctctgtggccgtgcggggcaaggactgtgccgtcatcgtgacccagaagaaggtgcctgacaagctgctggacagcagcacagtgacccacctgttcaagatcacagagaacatcggctgtgtgatgacaggcatgacagtgtccctgtgccggcccggctgcagcgcctcctgggtgcaggccatcctggtgccccagcccccaagatag

SEQ ID NO: 165714 - DNA, 447 bp, synthetic construct
  misc_feature 1..447: note = Description of Artificial Sequence: Synthetic coding sequence
  source 1..447: mol_type = other DNA
atgagccggggcagcagcgctggctttgacagacacatcaccatcttcagccctgagggccgcctgtaccaggtggagtatgccttcaaggccatcaaccagggcggcctgacctctgtggccgtgcggggcaaggactgtgccgtcatcgtgacccagaagaaggtgcctgacaagctgctggacagcagcacagtgacccacctgttcaagatcacagagaacatcggctgtgtgatgacaggcatgacagctgacagccgcagccaggtgcagagggcccgctatgaggccgccaactggaagtacaagtatggctatgagatccctgtggacatgctgtgcaagagaattgctgacatcagccaggtgtacacccagaatgctgagatgaggcccctgggctgctactgcaactacatgcctgtgtactgcagcatcaactag

SEQ ID NO: 165715 - DNA, 504 bp, synthetic construct
  misc_feature 1..504: note = Description of Artificial Sequence: Synthetic coding sequence
  source 1..504: mol_type = other DNA
atgacaggcatgacagctgacagccgcagccaggtgcagagggcccgctatgaagctgccaactggaagtacaagtatggctatgagatccctgtggacatgctgtgcaagagaattgctgacatcagccaggtgtacacccagaatgctgagatgaggcccctgggctgctgcatgatcctgattggaattgatgaggagcagggcccccaggtgtacaagtgtgaccctgctggctactactgcggcttcaaggccacagctgctggggtgaagcagacagagagcaccagcttcctggagaagaaggtgaagaagaagtttgactggacctttgagcagacagtggagacagccatcacctgcctgagcacagtgctgagcattgacttcaagcccagcgagattgaggtgggcgtggtgacagtggagaaccccaagttccgcatcctgacagaggccgagattgatgcccacctggtggccctggccgagcgggactag

SEQ ID NO: 165716 - DNA, 612 bp, synthetic construct
  misc_feature 1..612: note = Description of Artificial Sequence: Synthetic coding sequence
  source 1..612: mol_type = other DNA
atgagccggggcagcagcgctggctttgacagacacatcaccatcttcagccctgagggccgcctgtaccaggtggagtatgccttcaaggccatcaaccagggcggcctgacctctgtggccgtgcggggcaaggactgtgccgtcatcgtgacccagaagaaggtgcctgacaagctgctggacagcagcacagtgacccacctgttcaagatcacagagaacatcggctgtgtgatgacaggcatgacagctgacagccgcagccaggtgcagagggcccgctatgaggccgccaactggaagtacaagtatggctatgagatccctgtggacatgctgtgcaagagaattgctgacatcagccaggtgtacacccagaatgctgagatgaggcccctgggctgctgcatgatcctgattggaattgatgaggagcagggcccccaggtgtacaagtgtgaccctgctggctactactgcggcttcaaggccacagctgctggggtgaagcagacagagagcaccagcttcctggagaagaaggtgaagaagaagtttgactggacctttgagcagacagtggaggacagctaccgcagccgggactag

SEQ ID NO: 165717 - DNA, 450 bp, synthetic construct
  misc_feature 1..450: note = Description of Artificial Sequence: Synthetic coding sequence
  source 1..450: mol_type = other DNA
atgtcctatgaccgggccatcaccgtcttctccccagatggccacctgttccaggtggagtatgcccaggaggccgtgaagaagggcagcacagctgtgggcgtgcggggccgggacatcgtggtgctgggcgtggagaagaagtctgtggccaagctgcaggatgagaggacagtgaggaagatctgtgccctggatgacaacgtgtgcatggcctttgctggcctgacagcagatgcccgcatcgtcatcaacagagcccgggtggagtgccagagccaccggctgactgtggaggaccctgtgacagtggagtacatcacccgctacatcgccagcctgaagcaggtgggcgcctgccccctggcctgcagccccctggccgccggccagagccggctgcggcacggcggcagctgccacgtgaccagcggggagagcgagaactag

SEQ ID NO: 165718 - DNA, 537 bp, synthetic construct
  misc_feature 1..537: note = Description of Artificial Sequence: Synthetic coding sequence
  source 1..537: mol_type = other DNA
atggcctttgctggcctgacagcagatgcccgcatcgtcatcaacagagcccgggtggagtgccagagccaccggctgactgtggaggaccctgtgacagtggagtacatcacccgctacatcgccagcctgaagcagcgctacacccagagcaatggccggcggcccttcggcatcagcgccctgattgtgggctttgattttgatggcaccccccggctgtaccagacagaccccagcggcacctaccacgcctggaaggccaatgccatcggccgcggggccaagtctgtgcgggagttcctggagaagaactacacagatgaggccattgaaacagatgacctgaccatcaagctggtgatcaaggccctgctggaggtggtgcagagcggcggcaagaacatcgagctggccgtgatgaggcgggaccagagcctgaagatcctgaaccctgaggagattgagaagtatgtggccgagattgagaaggagaaggaggagaatgagaagaagaagcagaagaaggccagctag

SEQ ID NO: 165719 - DNA, 747 bp, synthetic construct
  misc_feature 1..747: note = Description of Artificial Sequence: Synthetic coding sequence
  source 1..747: mol_type = other DNA
atgtcctatgaccgggccatcaccgtcttctccccagatggccacctgttccaggtggagtatgcccaggaggccgtgaagaagggcagcacagctgtgggcgtgcggggccgggacatcgtggtgctgggcgtggagaagaagtctgtggccaagctgcaggatgagaggacagtgaggaagatctgtgccctggatgacaacgtgtgcatggcctttgctggcctgacagcagatgcccgcatcgtcatcaacagagcccgggtggagtgccagagccaccggctgactgtggaggaccctgtgacagtggagtacatcacccgctacatcgccagcctgaagcagcgctacacccagagcaatggccggcggcccttcggcatcagcgccctgattgtgggctttgattttgatggcaccccccggctgtaccagacagaccccagcggcacctaccacgcctggaaggccaatgccatcggccgcggggccaagtctgtgcgggagttcctggagaagaactacacagatgaggccattgaaacagatgacctgaccatcaagctggtgatcaaggccctgctggaggtggtgcagagcggcggcaagaacatcgagctggccgtgatgaggcgggaccagagcctgaagatcctgaaccctgaggagattgagaagtatgtggccgagattgagaaggagaaggaggagaatgagaagaagaagcagaagaaggccagctag

SEQ ID NO: 165720 - DNA, 564 bp, synthetic construct
  misc_feature 1..564: note = Description of Artificial Sequence: Synthetic coding sequence
  source 1..564: mol_type = other DNA
tgactgacagcagatgcccgcatcgtcatcaacagagcccgggtggagtgccagagccaccggctgactgtggaggaccctgtgacagtggagtacatcacccgctacatcgccagcctgaagcagcgctacacccagagcaatggccggcggcccttcggcatcagcgccctgattgtgggctttgattttgatggcaccccccggctgtaccagacagaccccagcggcacctaccacgcctggaaggccaatgccatcggccgcggggccaagtctgtgcgggagttcctggagaagaactacacagatgaggccattgaaacagatgacctgaccatcaagctggtgatcaaggccctgctggagggcaaggtggtgaatgcccctgtgttctgccccttcaaggtggtgcagagcggcggcaagaacatcgagctggccgtgatgagaagagaccagagcctgaagatcctgaaccctgaggagattgagaagtatgtggccgagattgagaaggagaaggaggagaatgagaagaagaagcagaagaaggccagctag

SEQ ID NO: 165721 - DNA, 726 bp, synthetic construct
  misc_feature 1..726: note = Description of Artificial Sequence: Synthetic coding sequence
  source 1..726: mol_type = other DNA
atgctgagcagcacagccatgtacagcgcccctggccgggacctgggcatggagccccacagagctgctggccccctgcagctgcgcttcagcccctacgtgttcaacggcggcaccatcctggccatcgccggggaggactttgccatcgtggccagtgacacccggctgtctgagggcttcagcatccacacccgggacagccccaagtgctacaagctgacagacaagacagtcatcggctgcagcggcttccacggggactgcctgaccctgaccaagatcatcgaggcccggctgaagatgtacaagcacagcaacaacaaggccatgaccactggagccatcgccgccatgctgagcaccatcctgtacagccgccgcttcttcccctactacgtgtacaacatcatcggcggcctggatgaggagggcaaaggagctgtgtacagctttgatcctgtgggcagctaccagagggacagcttcaaggccggcggcagcgccagcgccatgctgcagcccctgctggacaaccaggtgggcttcaagaacatgcagaatgtggagcacgtgcccctgagcctggaccgggccatgaggctggtgaaggatgtgttcatctctgctgctgagagagatgtgtacacaggagatgccctgcgcatctgcatcgtgaccaaggagggcatccgggaggagaccgtgtccctgaggaaggactag

SEQ ID NO: 165722 - DNA, 591 bp, synthetic construct
  misc_feature 1..591: note = Description of Artificial Sequence: Synthetic coding sequence
  source 1..591: mol_type = other DNA
agaagaagccgggccatgctgagcagcacagccatgtacagcgcccctggccgggacctgggcatggagccccacagagctgctggccccctgcagctgcgcttcagcccctacgtgttcaatggaggcaccatcctggccatcgctggagaagattttgccatcgtggccagtgacacccggctgtctgagggcttcagcatccacacccgggacagccccaagtgctacaagctgacagacaagacagtgattggctgcagcggcttccatggagactgcctgaccctgaccaagatcatcgaggcccggctgaagatgtacaagcacagcaacaacaaggccatgaccaccggggccatcgccgccatgctgagcaccatcctgtacagccgccgcttcttcccctactacgtgtacaacatcattggaggcctggatgaggagggcaaaggagctgtgtacagctttgatcctgtgggcagctaccagagggacagcttcaaggccggcggcagcgccagcgccatgctgcagcccctgctggacaaccagtacatcagcagcaacagcgtgtccctgtgtgtgtag

SEQ ID NO: 165723 - DNA, 822 bp, synthetic construct
  misc_feature 1..822: note = Description of Artificial Sequence: Synthetic coding sequence
  source 1..822: mol_type = other DNA
atgctgaagccagccctggagccccggggcggcttctcctttgagaactgccagagaaatgccagcctggagcgggtgctgcccggcctgaaggtgccccacgccaggaagacaggcaccaccatcgccggcctggtgttccaggatggagtcatcctgggcgctgacacccgggccaccaatgattctgtggtggccgacaagagctgtgagaagatccacttcatcgcccccaagatctactgctgcggggccggcgtggccgcagatgctgagatgaccaccaggatggtggccagcaagatggagctgcacgccctgagcacaggccgggagccccgggtggccaccgtgacccgcatcctgcggcagaccctcttccgctaccagggccacgtgggcgccagcctcatcgtgggcggcgtggacctgaccggcccccagctgtatggagtgcacccccacggcagctacagccggctgcccttcaccgccctgggcagcggccaggatgctgccctggccgtgctggaggaccgcttccagcccaacatgaccctggaggccgcccagggcctgctggtggaggccgtgacagctggcatcctgggggacctgggcagcggcggcaatgtggatgcctgtgtgatcaccaagacaggagccaagctgctgcggaccctgagcagccccacagagcctgtgaagaggagcggccgctaccactttgtgcccggcaccacagctgtgctgacccagacagtgaagcccctgaccctggagctggtggaggagaccgtgcaggccatggaggtggagtag

SEQ ID NO: 165724 - DNA, 903 bp, synthetic construct
  misc_feature 1..903: note = Description of Artificial Sequence: Synthetic coding sequence
  source 1..903: mol_type = other DNA
atggccctgcaggatgtgtgcaagtggcagagcccagacacccagggccccagcccccacctgccccgggccggcggctgggccgtgccccggggctgtgacccccagaccttcctgcagatccacggcccccggctggcccacggcaccaccaccctggccttccgcttcagacatggagtgattgctgctgctgacaccaggagcagctgtggcagctatgtggcctgcccagccagctgcaaggtgattcctgtgcaccagcacctgctgggcaccaccagcggcaccagcgctgactgtgccacctggtacagagtgctgcagcgggagctgcggctgcgggagctgcgggagggccagctgcccagcgtggccagcgctgccaagctgctgagcgccatgatgagccagtaccggggcctggacctgtgtgtggccacagccctgtgtggctgggacaggagcggccctgagctgttctacgtgtacagtgatggcacccggctgcagggcgacatcttctctgtgggcagcggcagcccctatgcctatggagtgctggaccggggctaccgctatgacatgagcacccaggaggcctatgccctggcccgctgtgctgtggcccacgccacccacagagatgcctacagcggcggctctgtggacctcttccacgtgcgggagagcggctgggagcacgtgtccagaagtgatgcctgtgtgctgtatgtggagctgcagaagctgctggagcctgagcctgaggaggatgccagccacgcccaccctgagcccgccacagcccacagagctgctgaagatcgggagctgtctgtgggccctggagaggtgacccctggggacagcaggatgcctgctggaacagaaacagtgtag

SEQ ID NO: 165725 - DNA, 606 bp, synthetic construct
  misc_feature 1..606: note = Description of Artificial Sequence: Synthetic coding sequence
  source 1..606: mol_type = other DNA
atggagtacctgattggcatccagggccctgactatgtgctggtggccagtgacagagtggccgccagcaacatcgtgcagatgaaggatgaccatgacaagatgttcaagatgtctgagaagatcctgctgctgtgtgtgggggaggccggggacacagtgcagtttgctgagtacatccagaagaatgtgcagctgtacaagatgagaaatggctatgagctgagccccacagctgctgccaacttcaccaggaggaacctggccgactgcctgcggagcaggaccccctaccacgtgaacctgctgctggccggctatgatgagcacgagggccctgccctgtactacatggactacctggccgccctggccaaggccccctttgctgcccacggctacggggccttcctgaccctgagcatcctggaccgctactacacccccaccatcagccgggagagagctgtggagctgctgaggaagtgcctggaggagctgcagaagcgcttcatcctgaacctgcccaccttctctgtgcgcatcatcgacaagaatggcatccatgacctggacaacatctccttccccaagcagggcagctag

SEQ ID NO: 165726 - DNA, 468 bp, synthetic construct
  misc_feature 1..468: note = Description of Artificial Sequence: Synthetic coding sequence
  source 1..468: mol_type = other DNA
atggccagcctgaagtgcagcacagtggtgtgtgtgatctgcctggagaagcccaagtaccgctgcccagcctgccgggtgccctactgcagcgtggtgtgcttcaggaagcacaaggagcagtgcaaccctgagaccaggcctgtggagaagaagatccgcagcgccctgcccaccaagacagtgaagcctgtggagaacaaggatgatgatgacagcattgctgacttcctgaacagtgatgaggaggaggacagagtgtccctgcagaacctgaagaacctgggggagagcgccaccctgcggagcctgctgctgaacccccacctgcggcagctgatggtgaacctggaccagggcgaggacaaggccaagctgatgagggcctacatgcaggagcccctgtttgtggagtttgctgactgctgcctgggcatcgtggagcccagccagaatgaggagagctag

SEQ ID NO: 165727 - DNA, 795 bp, synthetic construct
  misc_feature 1..795: note = Description of Artificial Sequence: Synthetic coding sequence
  source 1..795: mol_type = other DNA
atggaggccttcctgggcagccgcagcggcctgtgggccggcggccctgcccctggccagttctaccgcatccccagcaccccagacagcttcatggaccctgccagcgccctgtaccggggccccatcaccaggacccagaaccccatggtgacaggcacctctgtgctgggcgtgaagtttgaaggaggagtggtgattgctgctgacatgctgggcagctatggcagcctggcccgcttcaggaacatcagccgcatcatgagggtgaacaacagcaccatgctgggcgccagcggggactatgctgacttccagtacctgaagcaggtgctgggccagatggtgattgatgaggagctgctgggagatggccacagctacagcccccgggccatccacagctggctgacccgggccatgtacagccgccgcagcaagatgaaccccctgtggaacaccatggtgattggaggctatgcagatggagagagcttcctgggctacgtggacatgctgggcgtggcctatgaggcccccagcctggccaccggctacggggcctacctggcccagcccctgctgcgggaggtgctggagaagcagcctgtgctgagccagacagaggcccgggacctggtggagcgctgcatgagggtgctgtactacagagatgcccggagctacaaccgcttccagatcgccaccgtgacagagaagggcgtggagattgagggccccctgagcacagagaccaactgggacatcgcccacatgatcagcggctttgaatag

SEQ ID NO: 165728 - DNA, 792 bp, synthetic construct
  misc_feature 1..792: note = Description of Artificial Sequence: Synthetic coding sequence
  source 1..792: mol_type = other DNA
atggccctggcctctgtgctggagcggcccctgcctgtgaaccagaggggcttcttcggcctgggcggccgggctgacctgctggacctgggccctggcagcctgagtgatggcctgagcctggccgcccctggctggggcgtgcctgaggagcccggcatcgagatgctgcacggcaccaccaccctggccttcaagttcagacatggagtcatcgtggccgctgacagccgggccacagctggggcctacatcgccagccagacagtgaagaaggtgattgagatcaacccctacctgctgggcaccatggccggcggcgctgctgactgcagcttctgggagcggctgctggcccggcagtgccgcatctatgagctgaggaacaaggagcgcatctctgtggccgccgccagcaagctgctggccaacatggtgtaccagtacaagggcatgggcctgtccatgggcaccatgatctgtggctgggacaagaggggccctggcctgtactacgtggacagcgagggcaaccgcatcagcggggccaccttctctgtgggcagcggctctgtgtatgcctatggagtgatggaccggggctacagctatgacctggaggtggagcaggcctatgacctggcccggcgggccatctaccaggccacctacagagatgcctacagcggcggcgctgtgaacctgtaccacgtgcgggaggatggctggatccgggtgtccagtgacaacgtggccgacctgcacgagaagtacagcggcagcaccccctag

SEQ ID NO: 165729 - DNA, 483 bp, synthetic construct
  misc_feature 1..483: note = Description of Artificial Sequence: Synthetic coding sequence
  source 1..483: mol_type = other DNA
atggccggcggcgctgctgactgcagcttctgggagcggctgctggcccggcagtgccgcatctatgagctgaggaacaaggagcgcatctctgtggccgccgccagcaagctgctggccaacatggtgtaccagtacaagggcatgggcctgtccatgggcaccatgatctgtggctgggacaagaggggccctggcctgtactacgtggacagcgagggcaaccgcatcagcggggccaccttctctgtgggcagcggctctgtgtatgcctacggcgtgatggaccggggctacagctatgacctggaggtggagcaggcctatgacctggcccggcgggccatctaccaggccacctacagagatgcctacagcggcggcgctgtgaacctgtaccacgtgagagaagatggctggatccgggtgtccagtgacaacgtggccgacctgcacgagaagtacagcggcagcaccccctag

SEQ ID NO: 165730 - DNA, 612 bp, synthetic construct
  misc_feature 1..612: note = Description of Artificial Sequence: Synthetic coding sequence
  source 1..612: mol_type = other DNA
atggccctggcctctgtgctggagcggcccctgcctgtgaaccagaggggcttcttcggcctgggcggccgggctgacctgctggacctgggccctggcagcctgagtgatggcctgagcctggccgcccctggctggggcgtgcctgaggagcccggcatcgagatgctgcacggcaccaccaccctggccttcaagttcagacatggagtcatcgtggccgctgacagccgggccacagctggggcctacatcgccagccagacagtgaagaaggtgattgagatcaacccctacctgctgggcaccatggccggcggcgctgctgactgcagcttctgggagcggctgctggcccggcagtgccgcatctatgagctgaggaacaaggagcgcatctctgtggccgccgccagcaagctgctggccaacatggtgtaccagtacaagggcatgggcctgtccatgggcaccatgatctgtggctgggacaagaggggccctgtgtctgaggtgctgtgcctgaagcccaagagctttggcatgtacctgttctgtggctgtgccgagcgcatcggcaacatggcccggcccctgctgcggggccagtag

SEQ ID NO: 165731 - DNA, 834 bp, synthetic construct
  misc_feature 1..834: note = Description of Artificial Sequence: Synthetic coding sequence
  source 1..834: mol_type = other DNA
atggctgctgtgtctgtgtatgcccctcctgtgggcggcttctcctttgacaactgcagaagaaatgctgtgctggaggccgactttgccaagaggggctacaagctgcccaaggtgaggaagacaggcaccaccatcgccggcgtggtgtacaaggatggcatcgtgctgggcgctgacacccgggccacagagggcatggtggtggccgacaagaactgcagcaagatccacttcatcagccccaacatctactgctgcggggccggcacagctgctgacacagacatgaccacccagctgatcagcagcaacctggagctgcacagcctgagcacaggccgcctgccccgggtggtgacagccaacaggatgctgaagcagatgctgttccgctaccagggctacatcggggccgccctggtgctgggcggcgtggatgtgacaggcccccacctgtacagcatctacccccacggcagcacagacaagctgccctacgtgaccatgggcagcggcagcctggccgccatggctgtgtttgaggacaagttccggccagacatggaggaggaggaggccaagaacctggtgtctgaggccatcgccgccggcatcttcaatgacctgggcagcggcagcaacatcgacctgtgtgtgatcagcaagaacaagctggacttcctgcggccctacacagtgcccaacaagaagggcacccggctgggccgctaccgctgtgagaagggcaccacagctgtgctgacagagaagatcacccccctggagattgaggtgctggaggagaccgtgcagaccatggacaccagctag

SEQ ID NO: 165732 - DNA, 633 bp, synthetic construct
  misc_feature 1..633: note = Description of Artificial Sequence: Synthetic coding sequence
  source 1..633: mol_type = other DNA
atggctgctgtgtctgtgtatgcccctcctgtgggcggcttctcctttgacaactgcagaagaaatgctgtgctggaggccgactttgccaagaggggctacaagctgcccaaggtgaggaagacaggcaccaccatcgccggcgtggtgtacaaggatggcatcgtgctgggcgctgacacccgggccacagagggcatggtggtggccgacaagaactgcagcaagatccacttcatcagccccaacatctactgctgcggggccggcacagctgctgacacagacatgaccacccagctgatcagcagcaacctggagctgcacagcctgagcacaggccgcctgccccgggtggtgacagccaacaggatgctgaagcagatgctgttccgctaccagggctacatcggggccgccctggtgctgggcggcgtggatgtgacaggcccccacctgtacagcatctacccccacggcagcacagacaagctgccctacgtgaccatggtgcactgtgaggaggagctgttcacagagaacctcttcttcatccggcaggccgaggtggtgtctgaggaggcctggggccccagctttgccatcagcctggccgtgttcctggtggcctag

SEQ ID NO: 165733 - DNA, 429 bp, synthetic construct
  misc_feature 1..429: note = Description of Artificial Sequence: Synthetic coding sequence
  source 1..429: mol_type = other DNA
atggctgctgtgtctgtgtatgcccctcctgtgggcggcttctcctttgacaactgcagaagaaatgctgtgctggaggccgactttgccaagaggggctacaagctgcccaaggtgaggaagacaggcaccaccatcgccggcgtggtgtacaaggatggcatcgtgctgggcgctgacacccgggccacagagggcatggtggtggccgacaagaactgcagcaagatccacttcatcagccccaacatctactgctgcggggccggcacagctgctgacacagacatgaccacccagctgatcagcagcaacctggagctgcacagcctgagcacaggccgcctgccccgggtggtgacagccaacaggatgctgaagcagatgctgttccgcttctggctgctgggcagcaatggctgcatctag

SEQ ID NO: 165734 - DNA, 819 bp, synthetic construct
  misc_feature 1..819: note = Description of Artificial Sequence: Synthetic coding sequence
  source 1..819: mol_type = other DNA
atgctgattggcacccccaccccccgggacaccacccccagctcctggctgaccagcagcctgctggtggaggccgcccccctggatgacaccaccctgcccacccctgtgagcagcggctgccccggcctggagcccacagagttcttccagagcctgggcggagatggagagagaaatgtgcagatcgagatggcccacggcaccaccaccctggccttcaagttccagcacggcgtgattgctgctgtggacagccgggccagcgctggcagctacatcagcgccctgcgggtgaacaaggtgattgagatcaacccctacctgctgggcaccatgagcggctgtgccgctgactgccagtactgggagcggctgctggccaaggagtgccgcctgtactacctgagaaatggagagcgcatctctgtgtctgctgccagcaagctgctgagcaacatgatgtgccagtaccggggcatgggcctgtccatgggctccatgatctgtggctgggacaagaagggccctggcctgtactacgtggatgaacatggcacccggctgagcggcaacatgttcagcacaggcagcggcaacacctacgcctacggcgtgatggattctggctaccggcccaacctgagccctgaggaggcctatgacctgggcagaagagccatcgcctatgccacccaccgggacagctacagcggcggcgtggtgaacatgtaccacatgaaggaggatggctgggtgaaggtggagagcacagatgtgtctgacctgctgcaccagtaccgggaggccaaccagtag

SEQ ID NO: 165735 - DNA, 831 bp, synthetic construct
  misc_feature 1..831: note = Description of Artificial Sequence: Synthetic coding sequence
  source 1..831: mol_type = other DNA
atggccctgctggatgtgtgtggggccccccggggccagaggcctgagagcgccctgcctgtggccggcagcggccgccgcagtgaccccggccactacagcttctccatgaggagccctgagctggccctgccccggggcatgcagcccacagagttcttccagagcctgggcggagatggagagagaaatgtgcagatcgagatggcccacggcaccaccaccctggccttcaagttccagcacggcgtgattgctgctgtggacagccgggccagcgctggcagctacatcagcgccctgcgggtgaacaaggtgattgagatcaacccctacctgctgggcaccatgagcggctgtgccgctgactgccagtactgggagcggctgctggccaaggagtgccgcctgtactacctgagaaatggagagcgcatctctgtgtctgctgccagcaagctgctgagcaacatgatgtgccagtaccggggcatgggcctgtccatgggctccatgatctgtggctgggacaagaagggccctggcctgtactacgtggatgaacatggcacccggctgagcggcaacatgttcagcacaggcagcggcaacacctacgcctacggcgtgatggattctggctaccggcccaacctgagccctgaggaggcctatgacctgggcagaagagccatcgcctatgccacccaccgggacagctacagcggcggcgtggtgaacatgtaccacatgaaggaggatggctgggtgaaggtggagagcacagatgtgtctgacctgctgcaccagtaccgggaggccaaccagtag

SEQ ID NO: 165736 - DNA, 831 bp, synthetic construct; identical to SEQ ID NO: 165735
  misc_feature 1..831: note = Description of Artificial Sequence: Synthetic coding sequence
  source 1..831: mol_type = other DNA

SEQ ID NO: 165737 - DNA, 819 bp, synthetic construct; identical to SEQ ID NO: 165734
  misc_feature 1..819: note = Description of Artificial Sequence: Synthetic coding sequence
  source 1..819: mol_type = other DNA

SEQ ID NO: 165738 - DNA, 759 bp, synthetic construct
  misc_feature 1..759: note = Description of Artificial Sequence: Synthetic coding sequence
  source 1..759: mol_type = other DNA
atggccctgctggatgtgtgtggggccccccggggccagaggcctgagagcgccctgcctgtggccggcagcggccgccgcagtgaccccggccactacagcttctccatgaggagccctgagctggccctgccccggggcatgcagcccacagagttcttccagagcctgggcggagatggagagagaaatgtgcagatcgagatggcccacggcaccaccaccctggccttcaagttccagcacggcgtgattgctgctgtggacagccgggccagcgctggcagctacatcaactgccagtactgggagcggctgctggccaaggagtgccgcctgtactacctgagaaatggagagcgcatctctgtgtctgctgccagcaagctgctgagcaacatgatgtgccagtaccggggcatgggcctgtccatgggctccatgatctgtggctgggacaagaagggccctggcctgtactacgtggatgaacatggcacccggctgagcggcaacatgttcagcacaggcagcggcaacacctacgcctacggcgtgatggattctggctaccggcccaacctgagccctgaggaggcctatgacctgggcagaagagccatcgcctatgccacccaccgggacagctacagcggcggcgtggtgaacatgtaccacatgaaggaggatggctgggtgaaggtggagagcacagatgtgtctgacctgctgcaccagtaccgggaggccaaccagtag

SEQ ID NO: 165739 - DNA, 759 bp, synthetic construct; identical to SEQ ID NO: 165738
  misc_feature 1..759: note = Description of Artificial Sequence: Synthetic coding sequence
  source 1..759: mol_type = other DNA

SEQ ID NO: 165740 - DNA, 819 bp, synthetic construct; identical to SEQ ID NO: 165734
  misc_feature 1..819: note = Description of Artificial Sequence: Synthetic coding sequence
  source 1..819: mol_type = other DNA

SEQ ID NO: 165741 - DNA, 819 bp, synthetic construct; identical to SEQ ID NO: 165734
  misc_feature 1..819: note = Description of Artificial Sequence: Synthetic coding sequence
  source 1..819: mol_type = other DNA

SEQ ID NO: 165742 - DNA, 831 bp, synthetic construct; identical to SEQ ID NO: 165735
  misc_feature 1..831: note = Description of Artificial Sequence: Synthetic coding sequence
  source 1..831: mol_type = other DNA

SEQ ID NO: 165743 - DNA, 759 bp, synthetic construct; identical to SEQ ID NO: 165738
  misc_feature 1..759: note = Description of Artificial Sequence: Synthetic coding sequence
  source 1..759: mol_type = other DNA

SEQ ID NO: 165744 - DNA, 759 bp, synthetic construct; identical to SEQ ID NO: 165738
  misc_feature 1..759: note = Description of Artificial Sequence: Synthetic coding sequence
  source 1..759: mol_type = other DNA

SEQ ID NO: 165745 - DNA, 831 bp, synthetic construct; identical to SEQ ID NO: 165735
  misc_feature 1..831: note = Description of Artificial Sequence: Synthetic coding sequence
  source 1..831: mol_type = other DNA

SEQ ID NO: 165746 - DNA, 819 bp, synthetic construct; identical to SEQ ID NO: 165734
  misc_feature 1..819: note = Description of Artificial Sequence: Synthetic coding sequence
  source 1..819: mol_type = other DNA

SEQ ID NO: 165747 - DNA, 819 bp, synthetic construct; identical to SEQ ID NO: 165734
  misc_feature 1..819: note = Description of Artificial Sequence: Synthetic coding sequence
  source 1..819: mol_type = other DNA

SEQ ID NO: 165748 - DNA, 831 bp, synthetic construct; identical to SEQ ID NO: 165735
  misc_feature 1..831: note = Description of Artificial Sequence: Synthetic coding sequence
  source 1..831: mol_type = other DNA

SEQ ID NO: 165749 - DNA, 819 bp, synthetic construct; identical to SEQ ID NO: 165734
  misc_feature 1..819: note = Description of Artificial Sequence: Synthetic coding sequence
  source 1..819: mol_type = other DNA

SEQ ID NO: 165750 - DNA, 831 bp, synthetic construct
  misc_feature 1..831: note = Description of Artificial Sequence: Synthetic coding sequence
  source 1..831: mol_type = other DNA
atggccctgctggatgtgtgtggggccccccggggccagaggcctgagagcgccctgcctgtggccggcagcggccgccgcagtgaccccggccactacagcttctccatgaggagccctgagctggccctgccccggggcatgaagcccacagagttcttccagagcctgggcggagatggagagagaaatgtgcagatcgagatggcccacggcaccaccaccctggccttcaagttccagcacggcgtgattgctgctgtggacagccgggccagcgctggcagctacatcagcgccctgcgggtgaacaaggtgattgagatcaacccctacctgctgggcaccatgagcggctgtgccgctgactgccagtactgggagcggctgctggccaaggagtgccgcctgtactacctgagaaatggagagcgcatctctgtgtctgctgccagcaagctgctgagcaacatgatgtgccagtaccggggcatgggcctgtccatgggctccatgatctgtggctgggacaagaagggccctggcctgtactacgtggatgaacatggcacccggctgagcggcaacatgttcagcacaggcagcggcaacacctacgcctacggcgtgatggattctggctaccggcccaacctgagccctgaggaggcctatgacctgggcagaagagccatcgcctatgccacccaccgggacagctacagcggcggcgtggtgaacatgtaccacatgaaggaggatggctgggtgaaggtggagagcacagatgtgtctgacctgctgcaccagtaccgggaggccaaccagtag

SEQ ID NO: 165751 - DNA, 759 bp, synthetic construct; identical to SEQ ID NO: 165738
  misc_feature 1..759: note = Description of Artificial Sequence: Synthetic coding sequence
  source 1..759: mol_type = other DNA

SEQ ID NO: 165752 - DNA, 759 bp, synthetic construct; identical to SEQ ID NO: 165738
  misc_feature 1..759: note = Description of Artificial Sequence: Synthetic coding sequence
  source 1..759: mol_type = other DNA

SEQ ID NO: 165753 - DNA, 759 bp, synthetic construct
  misc_feature 1..759: note = Description of Artificial Sequence: Synthetic coding sequence
  source 1..759: mol_type = other DNA
atggccctgctggatgtgtgtggggccccccggggccagaggcctgagagcgccctgcctgtggccggcagcggccgccgcagtgaccccggccactacagcttctccatgaggagccctgagctggccctgccccggggcatgaagcccacagagttcttccagagcctgggcggagatggagagagaaatgtgcagatcgagatggcccacggcaccaccaccctggccttcaagttccagcacggcgtgattgctgctgtggacagccgggccagcgctggcagctacatcaactgccagtactgggagcggctgctggccaaggagtgccgcctgtactacctgagaaatggagagcgcatctctgtgtctgctgccagcaagctgctgagcaacatgatgtgccagtaccggggcatgggcctgtccatgggctccatgatctgtggctgggacaagaagggccctggcctgtactacgtggatgaacatggcacccggctgagcggcaacatgttcagcacaggcagcggcaacacctacgcctacggcgtgatggattctggctaccggcccaacctgagccctgaggaggcctatgacctgggcagaagagccatcgcctatgccacccaccgggacagctacagcggcggcgtggtgaacatgtaccacatgaaggaggatggctgggtgaaggtggagagcacagatgtgtctgacctgctgcaccagtaccgggaggccaaccagtag

SEQ ID NO: 165754 - DNA, 819 bp, synthetic construct; identical to SEQ ID NO: 165734
  misc_feature 1..819: note = Description of Artificial Sequence: Synthetic coding sequence
  source 1..819: mol_type = other DNA

SEQ ID NO: 165755 - DNA, 831 bp, synthetic construct; identical to SEQ ID NO: 165735
  misc_feature 1..831: note = Description of Artificial Sequence: Synthetic coding sequence
  source 1..831: mol_type = other DNA

SEQ ID NO: 165756 - DNA, 831 bp, synthetic construct; identical to SEQ ID NO: 165735
  misc_feature 1..831: note = Description of Artificial Sequence: Synthetic coding sequence
  source 1..831: mol_type = other DNA

SEQ ID NO: 165757 - DNA, 759 bp, synthetic construct; identical to SEQ ID NO: 165738
  misc_feature 1..759: note = Description of Artificial Sequence: Synthetic coding sequence
  source 1..759: mol_type = other DNA

SEQ ID NO: 165758 - DNA, 831 bp, synthetic construct; identical to SEQ ID NO: 165735
  misc_feature 1..831: note = Description of Artificial Sequence: Synthetic coding sequence
  source 1..831: mol_type = other DNA

SEQ ID NO: 165759 - DNA, 660 bp, synthetic construct
  misc_feature 1..660: note = Description of Artificial Sequence: Synthetic coding sequence
  source 1..660: mol_type = other DNA
atgctgcgggccggggcccccaccggggacctgccccgggccggggaggtgcacacaggcaccaccatcatggctgtggagtttgatggaggagtggtgatgggcagtgacagccgggtgtctgctggggaggccgtggtgaacagagtgtttgacaagctgagccccctgcacgagcgcatctactgtgccctgagcggcagcgctgctgatgcccaggccgtggccgacatggccgcctaccagctggagctgcacggcatcgagctggaggagccccccctggtgctggccgccgccaacgtggtgaggaacatctcctacaagtaccgggaggacctgagcgcccacctgatggtggccggctgggaccagcgggagggcggccaggtgtatggcaccctgggcggcatgctgacccggcagccctttgccatcggcggcagcggcagcaccttcatctacggctacgtggatgctgcctacaagccaggcatgagccctgaggagtgccgccgcttcaccacagatgccatcgccctggccatgagcagagatggcagcagtggaggagtcatctacctggtgaccatcacagctgctggggtggaccacagggtcatcctgggcaatgagctgcccaagttctatgatgaatag

SEQ ID NO: 165760 - DNA, 660 bp, synthetic construct; identical to SEQ ID NO: 165759
  misc_feature 1..660: note = Description of Artificial Sequence: Synthetic coding sequence
  source 1..660: mol_type = other DNA

SEQ ID NO: 165761 - DNA, 660 bp, synthetic construct; identical to SEQ ID NO: 165759
  misc_feature 1..660: note = Description of Artificial Sequence: Synthetic coding sequence
  source 1..660: mol_type = other DNA

SEQ ID NO: 165762 - DNA, 591 bp, synthetic construct
  misc_feature 1..591: note = Description of Artificial Sequence: Synthetic coding sequence
  source 1..591: mol_type = other DNA
atggctgtggagtttgatggcggcgtggtgatgggcagtgacagccgggtgtctgctggggaggccgtggtgaacagagtgtttgacaagctgagccccctgcacgagcgcatctactgtgccctgagcggcagcgctgctgatgcccaggccgtggccgacatggccgcctaccagctggagctgcatggaattgagctggaggagccccccctggtgctggccgccgccaacgtggtgaggaacatctcctacaagtaccgggaggacctgagcgcccacctgatggtggccggctgggaccagcgggagggcggccaggtgtatggcaccctgggcggcatgctgacccggcagccctttgccatcggcggcagcggcagcaccttcatctacggctacgtggatgctgcctacaagccaggcatgagcccagaagaatgtcgccgcttcaccacagatgccatcgccctggccatgagcagagatggcagcagcggcggcgtcatctacctggtgaccatcacagctgctggggtggaccacagggtcatcctgggcaatgagctgcccaagttctatgatgaatag

SEQ ID NO: 165763 - DNA, 537 bp, synthetic construct
  misc_feature 1..537: note = Description of Artificial Sequence: Synthetic coding sequence
  source 1..537: mol_type = other DNA
atgctgcgggccggggcccccaccggggacctgccccgggccggggaggtgcacacaggcaccaccatcatggctgtggagtttgatggaggagtggtgatgggcagtgacagccgggtgtctgctggcatcgagctggaggagccccccctggtgctggccgccgccaacgtggtgaggaacatctcctacaagtaccgggaggacctgagcgcccacctgatggtggccggctgggaccagcgggagggcggccaggtgtatggcaccctgggcggcatgctgacccggcagccctttgccatcggcggcagcggcagcaccttcatctacggctacgtggatgctgcctacaagccaggcatgagccctgaggagtgccgccgcttcaccacagatgccaccagcaccaagagaagagtgtgtggctacttcctgcggacccagaagcgggagaaccagaaccagagggtgcatgagtacatgtgcaccggggagaggagcctgagcagcagccccctgctgagctgcagctag

SEQ ID NO: 165764 - DNA, 591 bp, synthetic construct; identical to SEQ ID NO: 165762
  misc_feature 1..591: note = Description of Artificial Sequence: Synthetic coding sequence
  source 1..591: mol_type = other DNA

SEQ ID NO: 165765 - DNA, 537 bp, synthetic construct; identical to SEQ ID NO: 165763
  misc_feature 1..537: note = Description of Artificial Sequence: Synthetic coding sequence
  source 1..537: mol_type = other DNA

SEQ ID NO: 165766 - DNA, 591 bp, synthetic construct; identical to SEQ ID NO: 165762
  misc_feature 1..591: note = Description of Artificial Sequence: Synthetic coding sequence
  source 1..591: mol_type = other DNA

SEQ ID NO: 165767 - DNA, 537 bp, synthetic construct; identical to SEQ ID NO: 165763
  misc_feature 1..537: note = Description of Artificial Sequence: Synthetic coding sequence
  source 1..537: mol_type = other DNA

SEQ ID NO: 165768 - DNA, 396 bp, synthetic construct
  misc_feature 1..396: note = Description of Artificial Sequence: Synthetic coding sequence
  source 1..396: mol_type = other DNA
atggctgtggagtttgatggcggcgtggtgatgggcagtgacagccgggtgtctgctggggaggccgtggtgaacagagtgtttgacaagctgagccccctgcacgagcgcatctactgtgccctgagcggcagcgctgctgatgcccaggccgtggccgacatggccgcctaccagctggagctgcatggaattgagctggaggagccccccctggtgctggccgccgccaacgtggtgaggaacatctcctacaagtaccgggaggacctgagcgcccacctgatggtggccggctgggaccagcgggagggcggccaggtgtatggcaccctgggcggcatgctgacccggcagccctttgccatcggcggcagcggcagcaccttcatctag

SEQ ID NO: 165769 - DNA, 396 bp, synthetic construct; identical to SEQ ID NO: 165768
  misc_feature 1..396: note = Description of Artificial Sequence: Synthetic coding sequence
  source 1..396: mol_type = other DNA

SEQ ID NO: 165770 - DNA, 396 bp, synthetic construct; identical to SEQ ID NO: 165768
  misc_feature 1..396: note = Description of Artificial Sequence: Synthetic coding sequence
  source 1..396: mol_type = other DNA

SEQ ID NO: 165771 - DNA, 396 bp, synthetic construct; identical to SEQ ID NO: 165768
  misc_feature 1..396: note = Description of Artificial Sequence: Synthetic coding sequence
  source 1..396: mol_type = other DNA

SEQ ID NO: 165772 - DNA, 537 bp, synthetic construct
  misc_feature 1..537: note = Description of Artificial Sequence: Synthetic coding sequence
  source 1..537: mol_type = other DNA
atgctgcgggccggggcccccaccggggacctgccccgggccggggaggtgcacacaggcaccaccatcatggctgtggagtttgatggaggagtggtgatgggcagtgacagccgggtgtctgctggcatcgagctggaggagccccccctggtgctggccgccgccaacgtggtgaggaacatctcctacaagtaccgggaggacctgagcgcccacctgatggtggccggctgggaccagcgggagggcggccaggtgtatggcaccctgggcggcatgctgacccggcagccctttgccatcggcggcagcggcagcaccttcatctacggctacgtggatgctgcctacaagccaggcatgagccctgaggagtgccgccgcttcaccacagatgccaccagcaccaagagaagagtgtgtggctacttcctgcggacccagaagcgggagaaccagaaccagagggtgcatgagtacatgtgcaccagcgagaggagcctgagcagcagccccctgctgagctgcagctag

SEQ ID NO: 165773 - DNA, 396 bp, synthetic construct
  misc_feature 1..396: note = Description of Artificial Sequence: Synthetic coding sequence
  source 1..396: mol_type = other DNA
atggctgtggagtttgatggcggcgtggtgatgggcagtgacagccgggtgtctgctggggaggccgtggtgaacagagtgtttgacaagctgagccccctgcacgagcacatctactgtgccctgagcggcagcgctgctgatgcccaggccgtggccgacatggccgcctaccagctggagctgcatggaattgagctggaggagccccccctggtgctggccgccgccaacgtggtgaggaacatctcctacaagtaccgggaggacctgagcgcccacctgatggtggccggctgggaccagcgggagggcggccaggtgtatggcaccctgggcggcatgctgacccggcagccctttgccatcggcggcagcggcagcaccttcatctag

SEQ ID NO: 165774 - DNA, 591 bp, synthetic construct; identical to SEQ ID NO: 165762
  misc_feature 1..591: note = Description of Artificial Sequence: Synthetic coding sequence
  source 1..591: mol_type = other DNA

SEQ ID NO: 165775 - DNA, 660 bp, synthetic construct; identical to SEQ ID NO: 165759
  misc_feature 1..660: note = Description of Artificial Sequence: Synthetic coding sequence
  source 1..660: mol_type = other DNA

SEQ ID NO: 165776 - DNA, 591 bp, synthetic construct
  misc_feature 1..591: note = Description of Artificial Sequence: Synthetic coding sequence
  source 1..591: mol_type = other DNA
atggctgtggagtttgatggcggcgtggtgatgggcagtgacagccgggtgtctgctggggaggccgtggtgaacagagtgtttgacaagctgagccccctgcacgagcacatctactgtgccctgagcggcagcgctgctgatgcccaggccgtggccgacatggccgcctaccagctggagctgcatggaattgagctggaggagccccccctggtgctggccgccgccaacgtggtgaggaacatctcctacaagtaccgggaggacctgagcgcccacctgatggtggccggctgggaccagcgggagggcggccaggtgtatggcaccctgggcggcatgctgacccggcagccctttgccatcggcggcagcggcagcaccttcatctacggctacgtggatgctgcctacaagccaggcatgagcccagaagaatgtcgccgcttcaccacagatgccatcgccctggccatgagcagagatggcagcagcggcggcgtcatctacctggtgaccatcacagctgctggggtggaccacagggtcatcctgggcaatgagctgcccaagttctatgatgaatag

SEQ ID NO: 165777 - DNA, 537 bp, synthetic construct; identical to SEQ ID NO: 165772
  misc_feature 1..537: note = Description of Artificial Sequence: Synthetic coding sequence
  source 1..537: mol_type = other DNA

SEQ ID NO: 165778 - DNA, 537 bp, synthetic construct; identical to SEQ ID NO: 165772
  misc_feature 1..537: note = Description of Artificial Sequence: Synthetic coding sequence
  source 1..537: mol_type = other DNA

SEQ ID NO: 165779 - DNA, 660 bp, synthetic construct
  misc_feature 1..660: note = Description of Artificial Sequence: Synthetic coding sequence
  source 1..660: mol_type = other DNA
atgctgcgggccggggcccccaccggggacctgccccgggccggggaggtgcacacaggcaccaccatcatggctgtggagtttgatggaggagtggtgatgggcagtgacagccgggtgtctgctggggaggccgtggtgaacagagtgtttgacaagctgagccccctgcacgagcacatctactgtgccctgagcggcagcgctgctgatgcccaggccgtggccgacatggccgcctaccagctggagctgcacggcatcgagctggaggagccccccctggtgctggccgccgccaacgtggtgaggaacatctcctacaagtaccgggaggacctgagcgcccacctgatggtggccggctgggaccagcgggagggcggccaggtgtatggcaccctgggcggcatgctgacccggcagccctttgccatcggcggcagcggcagcaccttcatctacggctacgtggatgctgcctacaagccaggcatgagccctgaggagtgccgccgcttcaccacagatgccatcgccctggccatgagcagagatggcagcagtggaggagtcatctacctggtgaccatcacagctgctggggtggaccacagggtcatcctgggcaatgagctgcccaagttctatgatgaatag

SEQ ID NO: 165780 - DNA, 591 bp, synthetic construct; identical to SEQ ID NO: 165776
  misc_feature 1..591: note = Description of Artificial Sequence: Synthetic coding sequence
  source 1..591: mol_type = other DNA

SEQ ID NO: 165781 - DNA, 660 bp, synthetic construct; identical to SEQ ID NO: 165779
  misc_feature 1..660: note = Description of Artificial Sequence: Synthetic coding sequence
  source 1..660: mol_type = other DNA

SEQ ID NO: 165782 - DNA, 396 bp, synthetic construct; identical to SEQ ID NO: 165768
  misc_feature 1..396: note = Description of Artificial Sequence: Synthetic coding sequence
  source 1..396: mol_type = other DNA

SEQ ID NO: 165783 - DNA, 396 bp, synthetic construct; identical to SEQ ID NO: 165773
  misc_feature 1..396: note = Description of Artificial Sequence: Synthetic coding sequence
  source 1..396: mol_type = other DNA

SEQ ID NO: 165784 - DNA, 591 bp, synthetic construct; identical to SEQ ID NO: 165776
  misc_feature 1..591: note = Description of Artificial Sequence: Synthetic coding sequence
  source 1..591: mol_type = other DNA

SEQ ID NO: 165785 - DNA, 660 bp, synthetic construct; identical to SEQ ID NO: 165759
  misc_feature 1..660: note = Description of Artificial Sequence: Synthetic coding sequence
  source 1..660: mol_type = other DNA

SEQ ID NO: 165786 - DNA, 537 bp, synthetic construct; identical to SEQ ID NO: 165763
  misc_feature 1..537: note = Description of Artificial Sequence: Synthetic coding sequence
  source 1..537: mol_type = other DNA

SEQ ID NO: 165787 - DNA, 537 bp, synthetic construct; identical to SEQ ID NO: 165763
  misc_feature 1..537: note = Description of Artificial Sequence: Synthetic coding sequence
  source 1..537: mol_type = other DNA

SEQ ID NO: 165788 - DNA, 591 bp, synthetic construct; identical to SEQ ID NO: 165762
  misc_feature 1..591: note = Description of Artificial Sequence: Synthetic coding sequence
  source 1..591: mol_type = other DNA

SEQ ID NO: 165789 - DNA, 660 bp, synthetic construct; identical to SEQ ID NO: 165779
  misc_feature 1..660: note = Description of Artificial Sequence: Synthetic coding sequence
  source 1..660: mol_type = other DNA

SEQ ID NO: 165790 - DNA, 465 bp, synthetic construct
  misc_feature 1..465: note = Description of Artificial Sequence: Synthetic coding sequence
  source 1..465: mol_type = other DNA
atgctgcgggccggggcccccaccggggacctgccccgggccggggaggtgcacacaggcaccaccatcatggctgtggagtttgatggaggagtggtgatgggcagtgacagccgggtgtctgctggcatcgagctggaggagccccccctggtgctggccgccgccaacgtggtgaggaacatctcctacaagtaccgggaggacctgagcgcccacctgatggtggccggctgggaccagcgggagggcggccaggtgtatggcaccctgggcggcatgctgacccggcagccctttgccatcggcggcagcggcagcaccttcatctacggctacgtggatgctgcctacaagccaggcatgagccctgaggagtgccgccgcttcaccacagatggcaaccagcccagcggccgggtgcctggagagggctttgagacctgggagggcagccggctgtag

SEQ ID NO: 165791 - DNA, 396 bp, synthetic construct; identical to SEQ ID NO: 165773
  misc_feature 1..396: note = Description of Artificial Sequence: Synthetic coding sequence
  source 1..396: mol_type = other DNA

SEQ ID NO: 165792 - DNA, 465 bp, synthetic construct; identical to SEQ ID NO: 165790
  misc_feature 1..465: note = Description of Artificial Sequence: Synthetic coding sequence
  source 1..465: mol_type = other DNA

SEQ ID NO: 165793 - DNA, 465 bp, synthetic construct; identical to SEQ ID NO: 165790
  misc_feature 1..465: note = Description of Artificial Sequence: Synthetic coding sequence
  source 1..465: mol_type = other DNA

SEQ ID NO: 165794 - DNA, 465 bp, synthetic construct; identical to SEQ ID NO: 165790
  misc_feature 1..465: note = Description of Artificial Sequence: Synthetic coding sequence
  source 1..465: mol_type = other DNA

SEQ ID NO: 165795 - DNA, 465 bp, synthetic construct; identical to SEQ ID NO: 165790
  misc_feature 1..465: note = Description of Artificial Sequence: Synthetic coding sequence
  source 1..465: mol_type = other DNA

SEQ ID NO: 165796 - DNA, 465 bp, synthetic construct; identical to SEQ ID NO: 165790
  misc_feature 1..465: note = Description of Artificial Sequence: Synthetic coding sequence
  source 1..465: mol_type = other DNA

SEQ ID NO: 165797 - DNA, 465 bp, synthetic construct; identical to SEQ ID NO: 165790
  misc_feature 1..465: note = Description of Artificial Sequence: Synthetic coding sequence
  source 1..465: mol_type = other DNA

SEQ ID NO: 165798 - DNA, 465 bp, synthetic construct; identical to SEQ ID NO: 165790
  misc_feature 1..465: note = Description of Artificial Sequence: Synthetic coding sequence
  source 1..465: mol_type = other DNA

SEQ ID NO: 165799 - DNA, 426 bp, synthetic construct
  misc_feature 1..426: note = Description of Artificial Sequence: Synthetic coding sequence
  source 1..426: mol_type = other DNA
atgaatgcccggggcctgggcagcgagctgaaggacagcatccctgtgacagagctgagcgccagcggcccctttgagagccatgacctgctgaggaagggcttcagctgtgtgaagaatgagctgctgcccagccaccccctggagctgtctgagaagaacttccagctgaaccaggacaagatgaacttcagcaccctgaggaacatccagggcctgtttgcccccctgaagctgcagatggagttcaaggctgtgcagcaggtgcagaggctgcccttcctgagcagcagcaacctgagcctggatgtgctgcggggaaatgatgagaccatcggctttgaggacatcctgaatgaccccagccagagcgaggtgatgggagagccccacctgatggtggagtacaagctgggcctgctgtag

SEQ ID NO: 165800 - DNA, 471 bp, synthetic construct
  misc_feature 1..471: note = Description of Artificial Sequence: Synthetic coding sequence
  source 1..471: mol_type = other DNA
atgcccatggccggcctgctgaagggcctggtgcggcagctggagcgcttctctgtgcagcagcaggccagcaagatgccacccaagggcaagagcggcagcggcaaggccgggaaaggaggagctgccagcggcagtgacagcgctgacaagaaggcccagggccccaagggcggcggcaatgctgtgaaggtgcgccacatcctgtgtgagaagcacggcaagatcatggaggccatggagaagctgaagagcggcatgaggttcaatgaggtggccgcccagtacagcgaggacaaggcccggcagggcggggacctgggctggatgacccggggctccatggtgggccccttccaggaggccgcctttgccctgcctgtgtctggcatggacaagcctgtgttcacagatcctcctgtgaagaccaagtttggctaccacatcatcatggtggagggcaggaagtag

SEQ ID NO: 165801 - DNA, 402 bp, synthetic construct
  misc_feature 1..402: note = Description of Artificial Sequence: Synthetic coding sequence
  source 1..402: mol_type = other DNA
atgcccatggccggcctgctgaagggcctggtgcggcagctggagcgcttctctgtgcagcagcaggccagcaagatgccacccaagggcaagagcggcagcggcaaggccgggaaaggaggagctgccagcggcagtgacagcgctgacaagaaggcccagggccccaagggcggcggcaatgctgtgaaggtgcgccacatcctgtgtgagaagcacggcaagatcatggaggccatggagaagctgaagagcggcatgaggttcaatgaggtggccgcccagtacagcgaggacaaggcccggcagggcatccccagcctgcagcagcacgccggccaccaccgggacctgcggagcaccctcatcagcctggtgtcctacctgcagaccaccccctag

SEQ ID NO: 165802 - DNA, 1062 bp, synthetic construct
  misc_feature 1..1062: note = Description of Artificial Sequence: Synthetic coding sequence
  source 1..1062: mol_type = other DNA
atggctgctgctgaggccgccaactgcatcatggaggtgtcctgtggccaggccgagagcagcgagaagcccaatgctgaggacatgaccagcaaggactactactttgacagctatgcccacttcggcatccacgaggagatgctgaaggatgaggtgaggaccctgacctacagaaattccatgttccacaacagacacctgttcaaggacaaggtggtgctggatgtgggcagcggcaccggcatcctgtgcatgtttgctgccaaggccggggccaggaaggtgattggaattgagtgcagcagcatcagtgactatgctgtgaagatcgtgaaggccaacaagctggaccacgtggtgaccatcatcaagggcaaggtggaggaggtggagctgcctgtggagaaggtggacatcatcatcagcgagtggatgggctactgcctcttctatgagagcatgctgaacacagtgctgtatgcccgggacaagtggctggccccagatggcctcatcttcccagaccgggccaccctgtatgtgacagccatcgaggaccggcagtacaaggactacaagatccactggtgggagaatgtgtatggctttgacatgagctgcatcaaggatgtggccatcaaggagcccctggtggatgtggtggaccccaagcagctggtgaccaatgcctgcctgatcaaggaggtggacatctacacagtgaaggtggaggacctgaccttcaccagccccttctgcctgcaggtgaagagaaatgactatgtgcacgccctggtggcctacttcaacatcgagttcacccgctgccacaagaggacaggcttcagcaccagccctgagagcccctacacccactggaagcagacagtgttctacatggaggactacctgactgtgaagacaggagaggagatcttcggcaccatcggcatgaggcccaatgccaagaacaacagagacctggacttcaccatcgacctggacttcaagggccagctgtgtgagctgagctgcagcacagactacaggatgaggtag

SEQ ID NO: 165803 - DNA, 882 bp, synthetic construct
  misc_feature 1..882: note = Description of Artificial Sequence: Synthetic coding sequence
  source 1..882: mol_type = other DNA
atggtgggcgtggccgaggtgtcctgtggccaggccgagagcagcgagaagcccaatgctgaggacatgaccagcaaggactactactttgacagctatgcccacttcggcatccacgaggagatgctgaaggatgaggtgaggaccctgacctacagaaattccatgttccacaacagacacctgttcaaggacaaggtggtgctggatgtgggcagcggcaccggcatcctgtgcatgtttgctgccaaggccggggccaggaaggtgattggaattgagtgcagcagcatcagtgactatgctgtgaagatcgtgaaggccaacaagctggaccacgtggtgaccatcatcaagggcaaggtggaggaggtggagctgcctgtggagaaggtggacatcatcatcagcgagtggatgggctactgcctcttctatgagagcatgctgaacacagtgctgtatgcccgggacaagtggctggccccagatggcctcatcttcccagaccgggccaccctgtatgtgacagccatcgaggaccggcagtacaaggactacaagatccactggtgggagaatgtgtatggctttgacatgagctgcatcaaggatgtggccatcaaggagcccctggtggatgtggtggaccccaagcagctggtgaccaatgcctgcctgatcaaggtgcggggctgggcctggccaggggccccctgggtggagaccaaggagcggcccagccctggccctggcatgggcctgtggggccctgagtgctggccagaggtgtctgagccagacctgcctgcccggggcggggcccggggccctgggaagaccctgcggcccctgaacatctttgtgtctgctgctgtgtag

SEQ ID NO: 165804 - DNA, 1116 bp, synthetic construct
  misc_feature 1..1116: note = Description of Artificial Sequence: Synthetic coding sequence
  source 1..1116: mol_type = other DNA
atggctgctgctgaggccgccaactgcatcatggagaactttgtggccaccctggccaacggcatgagcctgcagccccccctggaggaggtgtcctgtggccaggccgagagcagcgagaagcccaatgctgaggacatgaccagcaaggactactactttgacagctatgcccacttcggcatccacgaggagatgctgaaggatgaggtgaggaccctgacctacagaaattccatgttccacaacagacacctgttcaaggacaaggtggtgctggatgtgggcagcggcaccggcatcctgtgcatgtttgctgccaaggccggggccaggaaggtgattggaattgagtgcagcagcatcagtgactatgctgtgaagatcgtgaaggccaacaagctggaccacgtggtgaccatcatcaagggcaaggtggaggaggtggagctgcctgtggagaaggtggacatcatcatcagcgagtggatgggctactgcctcttctatgagagcatgctgaacacagtgctgtatgcccgggacaagtggctggccccagatggcctcatcttcccagaccgggccaccctgtatgtgacagccatcgaggaccggcagtacaaggactacaagatccactggtgggagaatgtgtatggctttgacatgagctgcatcaaggatgtggccatcaaggagcccctggtggatgtggtggaccccaagcagctggtgaccaatgcctgcctgatcaaggaggtggacatctacacagtgaaggtggaggacctgaccttcaccagccccttctgcctgcaggtgaagagaaatgactatgtgcacgccctggtggcctacttcaacatcgagttcacccgctgccacaagaggacaggcttcagcaccagccctgagagcccctacacccactggaagcagacagtgttctacatggaggactacctgactgtgaagacaggagaggagatcttcggcaccatcggcatgaggcccaatgccaagaacaacagagacctggacttcaccatcgacctggacttcaagggccagctgtgtgagctgagctgcagcacagactacaggatgaggtag

SEQ ID NO: 165805 - DNA, 483 bp, synthetic construct
  misc_feature 1..483: note = Description of Artificial Sequence: Synthetic coding sequence
  source 1..483: mol_type = other DNA
atgaccagcaaggactactactttgacagctatgcccacttcggcatccacgaggagatgctgaaggatgaggtgaggaccctgacctacagaaattccatgttccacaacagacacctgttcaaggacaaggtggtgctggatgtgggcagcggcaccggcatcctgtgcatgtttgctgccaaggccggggccaggaaggtgattggaattgagtgcagcagcatcagtgactatgctgtgaagatcgtgaaggccaacaagctggaccacgtggtgaccatcatcaagggcaaggtggaggaggtggagctgcctgtggagaaggtggacatcatcatcagcgagtggatgggctactgcctcttctatgagagcatgctgaacacagtgctgtatgcccgggacaagtggctggccccagatggcctcatcttcccagaccgggccaccctgtatgtgacagccatcgaggacagatag

SEQ ID NO: 165806 - DNA, 618 bp, synthetic construct
  misc_feature 1..618: note = Description of Artificial Sequence: Synthetic coding sequence
  source 1..618: mol_type = other DNA
atgaccagcaaggactactactttgacagctatgcccacttcggcatccacgaggagatgctgaaggatgaggtgaggaccctgacctacagaaattccatgttccacaacagacacctgttcaaggacaaggtggtgctggatgtgggcagcggcaccggcatcctgtgcatgtttgctgccaaggccggggccaggaaggtgattggaattgagtgcagcagcatcagtgactatgctgtgaagatcgtgaaggccaacaagctggaccacgtggtgaccatcatcaagggcaaggtggaggaggtggagctgcctgtggagaaggtggacatcatcatcagcgagtggatgggctactgcctcttctatgagagcatgctgaacacagtgctgtatgcccgggacaagtggctggccccagatggcctcatcttcccagaccgggccaccctgtatgtgacagccatcgaggaccggcagtacaaggactacaagatccactggtgggagaatgtgtatggctttgacatgagctgcatcaaggatgtggccatcaaggagcccctggtggatgtggtggaccccaagcagctggtgaccaatgcctgcctgtag

SEQ ID NO: 165807 - DNA, 483 bp, synthetic construct; identical to SEQ ID NO: 165805
  misc_feature 1..483: note = Description of Artificial Sequence: Synthetic coding sequence
  source 1..483: mol_type = other DNA

SEQ ID NO: 165808 - DNA, 630 bp, synthetic construct
  misc_feature 1..630: note = Description of Artificial Sequence: Synthetic coding sequence
  source 1..630: mol_type = other DNA
atgaccagcaaggactactactttgacagctatgcccacttcggcatccacgaggagatgctgaaggatgaggtgaggaccctgacctacagaaattccatgttccacaacagacacctgttcaaggacaaggtggtgctggatgtgggcagcggcaccggcatcctgtgcatgtttgctgccaaggccggggccaggaaggtgattggaattgagtgcagcagcatcagtgactatgctgtgaagatcgtgaaggccaacaagctggaccacgtggtgaccatcatcaagggcaaggtggaggaggtggagctgcctgtggagaaggtggacatcatcatcagcgagtggatgggctactgcctcttctatgagagcatgctgaacacagtgctgtatgcccgggacaagtggctggccccagatggcctcatcttcccagaccgggccaccctgtatgtgacagccatcgaggaccggcagtacaaggactacaagatccactggtgggagaatgtgtatggctttgacatgagctgcatcaaggatgtggccatcaaggagcccctggtggatgtggtggaccccaagcagctggtgaccaatgcctgcctgatcaaggtgaggtag

SEQ ID NO: 165809 - DNA, 687 bp, synthetic construct
  misc_feature 1..687: note = Description of Artificial Sequence: Synthetic coding sequence
  source 1..687: mol_type = other DNA
atggccaccagcggggactgccccaggtctgagagccagggcgaggagccagcagaatgttctgaggccggcctgctgcaggagggcgtgcagcctgaggagtttgtggccatcgctgactatgctgccacagatgagacccagctgtccttcctgcggggggagaagatcctgatcctgcggcagaccacagctgactggtggtggggcgagagagctggctgctgcggctacatcccagccaaccacgtgggcaagcacgtggatgaatatgaccctgaggacacctggcaggatgaggagtacttcggcagctatggcaccctgaagctgcacctggagatgctggccgaccagcccaggaccaccaagtaccacagcgtcatcctgcagaacaaggagagcctgacagacaaggtgatcctggatgtgggctgcggcaccggcatcatcagcctcttctgtgcccactacgcccggcccagggctgtgtatgctgtggaggccagcgagatggcccagcacacaggccagctggtgctgcagaatggatttgctgacatcatcaccgtgtaccagcagaaggtggaggatgtggtgctgcctgagaaggtggatgtgctggtgtctgagtggatgggcacctgcctgctggtgggggagaaggtgttccccatctggaggtag

SEQ ID NO: 165810 - DNA, 855 bp, synthetic construct
  misc_feature 1..855: note = Description of Artificial Sequence: Synthetic coding sequence
  source 1..855: mol_type = other DNA
atggccaccagcggggactgccccaggtctgagagccagggcgaggagccagcagaatgttctgaggccggcctgctgcaggagggcgtgcagcctgaggagtttgtggccatcgctgactatgctgccacagatgagacccagctgtccttcctgcggggggagaagatcctgatcctgcggcagaccacagctgactggtggtggggcgagagagctggctgctgcggctacatcccagccaaccacgtgggcaagcacgtggatgaatatgaccctgaggacacctggcaggatgaggagtacttcggcagctatggcaccctgaagctgcacctggagatgctggccgaccagcccaggaccaccaagtaccacagcgtcatcctgcagaacaaggagagcctgacagacaaggtgatcctggatgtgggctgcggcaccggcatcatcagcctcttctgtgcccactacgcccggcccagggctgtgtatgctgtggaggccagcgagatggcccagcacacaggccagctggtgctgcagaatggatttgctgacatcatcaccgtgtaccagcagaaggtggaggatgtggtgctgcctgagaaggtggatgtgctggtgtctgagtggatgggcacctgcctgctggccgcccccctgctgagctgccgcatcctgccctgcacctgtgccagcggccccctgcacgtgctgctggcctgctgcctgcccctgccctgcacctgtgcctctgtgcccctgcacgtgctgctggcctgctgcctgcctgtgctgcgggccccccagcccagcggcctgcacctgtcctggcccatcttcctgctgtag

SEQ ID NO: 165811 - DNA, 1302 bp, synthetic construct
  misc_feature 1..1302: note = Description of Artificial Sequence: Synthetic coding sequence
  source 1..1302: mol_type = other DNA
atggccaccagcggggactgccccaggtctgagagccagggcgaggagccagcagaatgttctgaggccggcctgctgcaggagggcgtgcagcctgaggagtttgtggccatcgctgactatgctgccacagatgagacccagctgtccttcctgcggggggagaagatcctgatcctgcggcagaccacagctgactggtggtggggcgagagagctggctgctgcggctacatcccagccaaccacgtgggcaagcacgtggatgaatatgaccctgaggacacctggcaggatgaggagtacttcggcagctatggcaccctgaagctgcacctggagatgctggccgaccagcccaggaccaccaagtaccacagcgtcatcctgcagaacaaggagagcctgacagacaaggtgatcctggatgtgggctgcggcaccggcatcatcagcctcttctgtgcccactacgcccggcccagggctgtgtatgctgtggaggccagcgagatggcccagcacacaggccagctggtgctgcagaatggatttgctgacatcatcaccgtgtaccagcagaaggtggaggatgtggtgctgcctgagaaggtggatgtgctggtgtctgagtggatgggcacctgcctgctgtttgagttcatgattgagagcatcctgtatgccagagatgcctggctgaaggaggatggagtcatctggcccaccatggccgccctgcacctggtgccctgcagcgctgacaaggactaccgcagcaaggtgctcttctgggacaatgcctatgagttcaacctgagcgccctgaagagcctggccgtgaaggagttcttcagcaagcccaagtacaaccacatcctgaagccagaggactgcctgtctgagccctgcaccatcctgcagctggacatgaggacagtgcagatcagtgacctggagaccctgcggggggagctgcgctttgacatcaggaaggccggcaccctgcacggcttcaccgcctggttctctgtgcacttccagagcctgcaggagggccagcccccccaggtgctgagcacaggccccttccaccccaccacccactggaagcagaccctcttcatgatggatgatcctgtgcctgtgcacactggagatgtggtgacaggctctgtggtgctgcagagaaatcctgtgtggaggaggcacatgtctgtggccctgtcctgggccgtgaccagccggcaggaccccaccagccagaaggtgggggagaaggtgttccccatctggaggtag

SEQ ID NO: 165812 - DNA, 486 bp, synthetic construct
  misc_feature 1..486: note = Description of Artificial Sequence: Synthetic coding sequence
  source 1..486: mol_type = other DNA
atgctggccgaccagcccaggaccaccaagtaccacagcgtcatcctgcagaacaaggagagcctgcgcatcaagagctcctggacctgggccgtgggcctgggcagctctgtgtcctctgtgcacaccatgaggggcctggagcgggtgtatgctgtggaggccagcgagatggcccagcacacaggccagctggtgctgcagaatggatttgctgacatcatcaccgtgtaccagcagaaggtggaggatgtggtgctgcctgagaaggtggatgtgctggtgtctgagtggatgggcacctgcctgctgtttgagttcatgattgagagcatcctgtatgccagagatgcctggctgaaggagaccggcagctttggccccccctggctgcgctgcaccctgtgcccagctgtgctgatccgcatcatcgtggcccgctgcagcagcggcaccaccaggaccagcagcaccagcgccctgtag

SEQ ID NO: 165813 - DNA, 1302 bp, synthetic construct; identical to SEQ ID NO: 165811
  misc_feature 1..1302: note = Description of Artificial Sequence: Synthetic coding sequence
  source 1..1302: mol_type = other DNA

SEQ ID NO: 165814 - DNA, 1302 bp, synthetic construct; identical to SEQ ID NO: 165811
  misc_feature 1..1302: note = Description of Artificial Sequence: Synthetic coding sequence
  source 1..1302: mol_type = other DNA

SEQ ID NO: 165815 - DNA, 996 bp, synthetic construct
  misc_feature 1..996: note = Description of Artificial Sequence: Synthetic coding sequence
  source 1..996: mol_type = other DNA
atggccaccagcggggactgccccaggtctgagagccagggcgaggagccagcagaatgttctgaggccggcctgctgcaggagggcgtgcagcctgaggagtttgtggccatcgctgactatgctgccacagatgagacccagctgtccttcctgcggggggagaagatcctgatcctgcggcagaccacagctgactggtggtggggcgagagagctggctgctgcggctacatcccagccaaccacgtgggcaagcacgtggatgaatatgaccctgaggacacctggcaggatgaggagtacttcggcagctatggcaccctgaagctgcacctggagatgctggccgaccagcccaggaccaccaagtaccacagcgtcatcctgcagaacaaggagagcctgacagacaaggtgatcctggatgtgggctgcggcaccggcatcatcagcctcttctgtgcccactacgcccggcccagggctgtgtatgctgtggaggccagcgagatggcccagcacacaggccagctggtgctgcagaatggatttgctgacatcatcaccgtgtaccagcagaaggtggaggatgtggtgctgcctgagaaggtggatgtgctggtgtctgagtggatgggcacctgcctgctgaccctgcggggggagctgcgctttgacatcaggaaggccggcaccctgcacggcttcaccgcctggttctctgtgcacttccagagcctgcaggagggccagcccccccaggtgctgagcacaggccccttccaccccaccacccactggaagcagaccctcttcatgatggatgatcctgtgcctgtgcacactggagatgtggtgacaggctctgtggtgctgcagagaaatcctgtgtggaggaggcacatgtctgtggccctgtcctgggccgtgaccagccggcaggaccccaccagccagaaggtgggggagaaggtgttccccatctggaggtag

SEQ ID NO: 165816 - DNA, 870 bp, synthetic construct
  misc_feature 1..870: note = Description of Artificial Sequence: Synthetic coding sequence
  source 1..870: mol_type = other DNA
atggccaccagcggggactgccccaggtctgagagccagggcgaggagccagcagaatgttctgaggccggcctgctgcaggagggcgtgcagcctgaggagtttgtggccatcgctgactatgctgccacagatgagacccagctgtccttcctgcggggggagaagatcctgatcctgcggcagaccacagctgactggtggtggggcgagagagctggctgctgcggctacatcccagccaaccacgtgggcaagcacgtggatgaatatgaccctgaggacacctggcaggatgaggagtacttcggcagctatggcaccctgaagctgcacctggagatgctggccgaccagcccaggaccaccaagtaccacagcgtcatcctgcagaacaaggagagcctgacagacaaggtgatcctggatgtgggctgcggcaccggcatcatcagcctcttctgtgcccactacgcccggcccagggctgtgtatgctgtggaggccagcgagatggcccagcacacaggccagctggtgctgcagaatggatttgctgacatcatcaccgtgtaccagcagaaggtggaggatgtggtgctgcctgagaaggtggatgtgctggtgtctgagtggatgggcacctgcctgctgtttgagttcatgattgagagcatcctgtatgccagagatgcctggctgaaggaggatggagtcatctggcccaccatggccgccctgcacctggtgccctgcagcgctgacaaggactaccgcagcaaggtgctcttctgggacaatgcctatgagttcaacctgagcgccctgaagctggagaagaagagcagccccagcggagatgacagctag

SEQ ID NO: 165817 - DNA, 906 bp, synthetic construct
  misc_feature 1..906: note = Description of Artificial Sequence: Synthetic coding sequence
  source 1..906: mol_type = other DNA
atggccaccagcggggactgccccaggtctgagagccagggcgaggagccagcagaatgttctgaggccggcctgctgcaggagggcgtgcagcctgaggagtttgtggccatcgctgactatgctgccacagatgagacccagctgtccttcctgcggggggagaagatcctgatcctgcggcagaccacagctgactggtggtggggcgagagagctggctgctgcggctacatcccagccaaccacgtgggcaagcacgtggatgaatatgaccctgaggacacctggcaggatgaggagtacttcggcagctatggcaccctgaagctgcacctggagatgctggccgaccagcccaggaccaccaagtaccacagcgtcatcctgcagaacaaggagagcctgacagacaaggtgatcctggatgtgggctgcggcaccggcatcatcagcctcttctgtgcccactacgcccggcccagggctgtgtatgctgtggaggccagcgagatggcccagcacacaggccagctggtgctgcagaatggatttgctgacatcatcaccgtgtaccagcagaaggtggaggatgtggtgctgcctgagaaggtggatgtgctggtgtctgagtggatgggcacctgcctgctgcaccacaccctggaggctgatgctgtgcatgatggccggcccagcccctgcccctacagaagaagaggccacggcttcagctgtgtggccgagaagcccagcgtggagaaggcccacgtgtgtggcagcgagctgggctgccacttccagacccggccccacatcagcaagtcctggaggaagagcctgccccacctggagatgacagtggatgccctgtttgggaagcagtgtgcctacctggagggctag

SEQ ID NO: 165818 - DNA, 951 bp, synthetic construct
  misc_feature 1..951: note = Description of Artificial Sequence: Synthetic coding sequence
  source 1..951: mol_type = other DNA
atgattgctgacagagtgaggacagatgcctaccgcctgggcatcctgaggaactgggccgccctgcggggcaagacagtgctggatgtgggcgccggcaccggcatcctgagcatcttctgtgcccaggccggggccaggagagtgtatgctgtggaggccagcgccatctggcagcaggcccgggaggtggtgcgcttcaacggcctggaggacagagtgcacgtgctgcccggccctgtggagaccgtggagctgcctgagcaggtggatgccatcgtgtctgagtggatgggctacggcctgctgcacgagagcatgctgagctctgtgctgcacgcccggaccaagtggctgaaggagggcggcctgctgctgcctgccagcgctgagctgttcatcgcccccatcagtgaccagatgctggagtggaggctgggcttctggagccaggtgaagcagcactacggcgtggacatgagctgcctggagggctttgccacccgctgcctgatgggccacagcgagatcgtggtgcagggcctgtctggagaagatgtgctggcccggccccagagatttgcccagctggagctgagccgggccggcctggagcaggagctggaggccggcgtgggcggccgcttccgctgcagctgctacggcagcgcccccatgcacggctttgccatctggttccaggtgaccttccctggaggagagagcgagaagcccctggtgctgagcaccagccccttccacccagccacccactggaagcaggccctgctgtacctgaatgaacctgtgcaggtggagcaggacacagatgtgtctggagagatcaccctgctgcccagccgggacaacccccggcggctgcgggtgctgctgcgctacaaggtgggggaccaggaggagaagaccaaggactttgccatggaggactag

SEQ ID NO: 165819 - DNA, 1128 bp, synthetic construct
  misc_feature 1..1128: note = Description of Artificial Sequence: Synthetic coding sequence
  source 1..1128: mol_type = other DNA
atgagccagcccaagaagaggaagctggagagcggcggcggcggggagggcggggagggcacagaggaggaggatggagctgagcgggaggccgccctggagcggcccaggaggaccaagcgggagcgggaccagctgtactatgagtgctacagtgatgtgtctgtgcatgaggagatgattgctgacagagtgaggacagatgcctaccgcctgggcatcctgaggaactgggccgccctgcggggcaagacagtgctggatgtgggcgccggcaccggcatcctgagcatcttctgtgcccaggccggggcccggcgggtgtatgctgtggaggccagcgccatctggcagcaggcccgggaggtggtgcgcttcaacggcctggaggacagagtgcacgtgctgcccggccctgtggagaccgtggagctgcctgagcaggtggatgccatcgtgtctgagtggatgggctacggcctgctgcacgagagcatgctgagctctgtgctgcacgcccggaccaagtggctgaaggagggcggcctgctgctgcctgccagcgctgagctgttcatcgcccccatcagtgaccagatgctggagtggaggctgggcttctggagccaggtgaagcagcactatggagtggacatgagctgcctggagggctttgccacccgctgcctgatgggccacagcgagatcgtggtgcagggcctgagcggggaggatgtgctggcccggccccagagatttgcccagctggagctgagcagagctggcctggagcaggagctggaggccggcgtgggcggccgcttccgctgcagctgctacggcagcgcccccatgcacggctttgccatctggttccaggtgaccttccctggaggagagagcgagaagcccctggtgctgagcaccagccccttccacccagccacccactggaagcaggccctgctgtacctgaatgaacctgtgcaggtggagcaggacacagatgtgtctggagagatcaccctgctgcccagccgggacaacccccggcggctgcgggtgctgctgcgctacaaggtgggggaccaggaggagaagaccaaggactttgccatggaggactag

SEQ ID NO: 165820 - DNA, 936 bp, synthetic construct
  misc_feature 1..936: note = Description of Artificial Sequence: Synthetic coding sequence
  source 1..936: mol_type = other DNA
atggcccggagcggccggcggccctggagcgaccccggcggcctgagcggggctgtgcagagagctgggggccctggggcccggcctgctggcaccagcggggactgccgggtggccggcactggaggctgccaccgggagcgggtggatggcctgcggaccccagcccgggtgcacgccgagctgcggcccccccgggccaaccaggtggccgagggcggccgcagcagccctgctggcctgcggcgggccctgcacagcccccaccagaggccagatgctggcatggcccctggcctgctggagcctggagaggccgccctgtggtgtggccacgagctgcccggcggcctgcggcatgccctgagccacggccccctgggggacagatgtgccggcatcgtgcggcggggccgggccggccctgctgctgccctgtgcagcgcccgggccctgccccggcggctgggcgctggggccggcggccgcagcggccgggccctgcccctgcagctgctgtggctgggcgcccacgcctggctgtgccacctggtgcctggggacctgccctggaggggcgtgggggagaccccaggagctgtgcacctggccttcagccctggccacagcctggagactggagcccccctgcctgagagagctggggccagcggggcccggcacggccgcttccggcgggaccacgccgccgccctgcccggccagccccccagccctgcccgggccgccgccctgcagagcggccggcctggaggagaggaccagaggctgtgccacggcggcctgtctgtggccttcagccccagctacctgcccaagcagcctgacctgcggggccggggcgtggcccggtctgagggcaagggccgcagccacgtgcaggtgggcggcatcagcccccccttccccagctag

SEQ ID NO: 165821 - DNA, 2532 bp, synthetic construct
  misc_feature 1..2532: note = Description of Artificial Sequence: Synthetic coding sequence
  source 1..2532: mol_type = other DNA
atggccaagcccctgacagacagcgagaagaggaagcagatctctgtgcggggcctggccggcctgggagatgtggccgaggtgaggaagagcttcaacagacacctgcacttcaccctggtgaaggacagaaatgtggccaccccccgggactacttctttgccctggcccacacagtgcgggaccacctggtgggccgctggatccgcacccagcagcactactatgaaagagaccccaagaggatctactacctgagcctggagttctacatgggccgcaccctgcagaacaccatggtgaacctgggcctgcagaatgcctgtgatgaggccatctaccagctgggcctggacctggaggagctggaggagattgaggaggatgctggcctgggcaatggaggcctgggccgcctggccgcctgcttcctggacagcatggccaccctgggcctggccgcctacggctacggcatccgctatgaatttggcatcttcaaccagaagatcgtgaatggctggcaggtggaggaggctgatgactggctgcgctatggcaacccctgggagaaggcccggcctgagtacatgctgcctgtgcacttctacggccgggtggagcacaccccagatggagtgaagtggctggacacccaggtggtgctggccatgccctatgacacccctgtgcccggctacaagaacaacacagtgaacaccatgaggctgtggagcgccaaggccccaaatgacttcaagctgcaggacttcaacgtgggggactacatcgaggccgtgctggacaggaacctggccgagaacatcagccgggtgctgtacccaaatgacaacttctttgagggcaaggagctgcggctgaagcaggagtactttgtggtggccgccaccctgcaggacatcatccgccgcttcaagagcagcaagtttggctgccgggaccctgtgaggacctgctttgagaccttcccagacaaggtggccatccagctgaatgacacccacccagccctgagcatccctgagctgatgaggatcctggtggatgtggagaaggtggactgggacaaggcctgggagatcaccaagaagacctgtgcctacaccaaccacacagtgctgcctgaggccctggagcgctggcctgtgtccatgtttgagaagctgctgcccaggcacctggagatcatctatgccatcaaccagaggcacctggaccacgtggccgccctcttccctggagatgtggaccggctgcggaggatgtctgtcatcgaggagggggactgcaagaggatcaacatggcccacctgtgtgtgattggcagccatgctgtgaatggagtggcccgcatccacagcgagatcgtgaagcagagcgtcttcaaggacttctatgagctggagcctgagaagttccagaacaagaccaacggcatcaccccccggcgctggctgctgctgtgcaaccctggcctggccgacaccatcgtggagaagatcggggaggagttcctgacagacctgagccagctgaagaagctgctgcccctggtgtctgatgaggtgttcatcagagatgtggccaaggtgaagcaggagaacaagctgaagttcagcgccttcctggagaaggagtacaaggtgaagatcaaccccagctccatgtttgatgtgcacgtgaagaggatccacgagtacaagaggcagctgctgaactgcctgcacgtggtgaccctgtacaaccgcatcaagagggaccctgccaaggcctttgtgcccaggacagtgatgattggaggcaaggccgcccctggctaccacatggccaagctgatcatcaagctggtgaccagcattggagatgtggtgaaccacgaccctgtggtgggggaccggctgaaggtgatcttcctggagaactacagagtgtccctggccgagaaggtgatcccagctgctgacctgagccagcagatcagcacagctggaacagaggccagcggcactggaaacatgaagttcatgctgaatggagccctgaccatcggcaccatggatggagccaacgtggagatggccgaggaggccggggctgaaaatctcttcatcttcggcctgcgggtggaggatgtggaggccctggacaggaagggctacaatgcccgggagtactatgaccacctgcctgagctgaagcaggccgtggaccagatcagcagcggcttcttcagccccaaggagccagactgcttcaaggacatcgtgaacatgctgatgcaccacgaccgcttcaaggtgtttgctgactatgaggcctacatgcagtgccaggcccaggtggaccagctgtacagaaaccccaaggagtggaccaagaaggtgatccggaacatcgcctgcagcggcaagttcagcagtgacaggaccatcacagaatatgcccgggagatctggggcgtggagcccagcgacctgcagatccccccacccaacatcccccgggactag

SEQ ID NO: 165822 - DNA, 717 bp, synthetic construct
  misc_feature 1..717: note = Description of Artificial Sequence: Synthetic coding sequence
  source 1..717: mol_type = other DNA
atgctgaccaccctgctgcccatcctgctgctgagcggctgggccttctgcagccaggatgccagtgatggcctgcagaggctgcacatgctgcagatctcctacttccgggacccctaccacgtgtggtaccagggcaatgccagcctgggcggccacctgacccacgtgctggagggccctgacaccaacaccaccatcatccagctgcagcccctgcaggagcctgagagctgggcccggacccagagcggcctgcagagctacctgctgcagttccacggcctggtgcggctggtgcaccaggagaggaccctggccttccccctgaccatccgctgcttcctgggctgtgagctgcccccagagggcagccgggcccacgtgttctttgaggtggccgtgaatggcagcagctttgtgtccttccggcctgagcgggccctgtggcaggccgacacccaggtgaccagcggcgtggtgaccttcaccctgcagcagctgaatgcctacaacagaaccaggtatgagctgcgggagttcctggaggacacctgtgtgcagtatgtgcagaagcacatctctgctgagaacaccaagggcagccagaccagccgcagctacaccagcctggtgctgggcgtgctggtgggcagcttcatcatcgccggcgtggccgtgggcatcttcctgtgcacaggaggccgccgctgctag

SEQ ID NO: 165823 - DNA, 4551 bp, synthetic construct
  misc_feature 1..4551: note = Description of Artificial Sequence: Synthetic coding sequence
  source 1..4551: mol_type = other DNA
atggacaaccagcaggacaaggccatcgtggccagcgccaacggggagaacaccctcatcaatggagtgaaggaaaatgacagcgaggaccaggatgtggccatgaagagctttgctgccctggaggccgccgcccccatccagcccacccctgtggcccagaaggagaccctgatgtacccccggggcctgctgcccctgcccagcaagaagccctgcatgcagagcccccccagccccctgggcctcatcgaggcccctgagcacgccgccaacagcgcctctgtgaatgccatcagcctgaccagcggcatcgccaagggcctgaacacctggagcctgcccaatgaatgtgagaaggccccctttgccatcatggagcctgctggcatgtctgccctgaatggagactgcctgatgcagcccagcaggacctgcctgggctgcttcatggagagcaaggatgctgtggaccctgagcccggcatcagcctgaaggtgggggacctgaacagagattatgagacctgtgctgtgtctgacatcggcatccagtgcatcaatgctggggagaacatgaagtatggagagcagctgctgagtgaccagctgctgggcttccccctgcacaagagccgggccggggacagaagagaaacagagaagccagacatcgacctggaggaccctgcccagaagagctactatgaggccctgctgctggacaagtgcaacacagaggaggccctgctggccaacagcaaccaggactggggctactttgagaccttcatcagcgagagcaagattgagctgctggacctgtgcagcaagaatgagctgtctgtgaacctcttctctgaagaagatgtggacaactacatgtttgatgatgatgagagcaccctgggcagtgatgtgtgcagcctgaagatccgctatgagagcttccaggacaacgtgcgggacaagaccaccctgctgatgcaggaggatgcccagttcaacttcttccccagcgtcttcaccacctgccccaagcgggagagcaagagcggggccctgaagcagagcagtgacttcagccagttcaaggtgcctgatgtgtccatcatctggggcgaggaggacaagaacctggacaagaagaagggcaaggaggagggccaggaggacaagggcgtggagaagaaggatggcaaggacaatggagagaagccagccctgaacaagccctgcagcggcacagaggtggagcagctgaagaaccccaagcagggccacctggccaacagcctggagaccagcggcagcttcagtgatgacagcagcttcatcgagatctcctatgatgccatgggagagatcaaggactgcagccgctacatggcccgggacaccaacagcggcagcagcagcagccagcagaactacggcctgcgggccaagaggaaggtgcgctacagcgaggactacctgtatgatgtggacagcctggagggggagaaggtgaatgaaaggaaggagtggctgcctgtgggcagcaaggaggaggatgatgatgagtggtgccccaagaagaggaggaaggtgaccaggaaggagccccctgtgatcatcaagtacatcatcatcaaccgcttcaagggggagaagaacatgctggtgaagctgggcaaggtggatgccagcgagaccaccgtgaacctgtctgagaaccagctgaacaagtatgccaagctggcccccctgaagggcttctggcagaagaagaagaagcagaggaacaccaacacagacagcatcaagacccccttcagccagaagcagagctttgagcccggcagctttgaggtgtccttcctgcccccagccaggaagaggaagagcaagctgggcaacagacaccgcatccagaggatccccagcattgagatcagcgccagcagcaagcagatcagcctgtgcaatgaccagagacatgccagcaaccacaaggaggatggcggcctgaagggcaccctgaagagcgcccccctgggcgcccccagctgtgccaacggcagccacctgaatgacatcactggaccagattctgtgaaggtgaaggcccaggacacagagttcaagggccctgagaggaaggtgctgaacaagatcaagttcaagtctgaggcccggctgaagagcaagaaggtgaaggccgccggccaggagagcaagcccatcgtgcagatgagccccctgctggagaaccagagcagcaaggccaacctgaagaatgaagtcatccctggcaccagcaacagcagccggctgtctgagttccacgaggccaaggccgccaagagcagcaccttcctgcccaccacctgcagcagcgagatgcccctgagcagcgccaacgtgaccaccaacatccctgtgattcctgggggctacctgcagaccctgctggatgccagtgacctgagcaacaacaccagcatctcctacttcagccaccacagccctgagcagaatgaaggcagcctgacccagacagagaagagctttgtgcccctgcagcccacccaggactgtgtgctgaccagcagcagtgacagcgagctgcagcagagcagccacaacttcaagatggagagcagcaactacagaaatgtgtggcccaacaaggccaccagcggcacccaggagttcatggccgaggtgtcccgggagatcgcccccacccagagcagcgagtttggagccagccaggtggtgtccatggagaacaacctgacccccaccacctacaaccccatctgcctgaacagcggcggcagcaactgcaacaaggtgctgtatgacagcatgcaggacacccagctgcccagtgatgacagctaccagctgtgccacttcaacaatggagagatctgcttccccttccagcagggccctgtgaacatggatgatggccgcctcttctcctttgacagcatggcccccctgtctgtgagcagcagcaactactgcagcctgagcctgaagagctgtgagaaggatggagatgatgacatcacagatgacttcctggcccactgcagccccaagctggtgatccagcagagcattgatgaaattgcccccctgaaggagagcacagacctgctggacatcagcaacttcaccccagacaagttccgccacagcagcctgtctgagatgagccccccagacacccccagcctgagcccccagatcacccgctgtgagagcatgaagaccctgggcaccctgaagggcttccaggagggcgtgcccggccccctggacagcgtggagaagatcaagtgggactgcagcaccctgagccggcaggtgcagatggaggatggcttcaccctgaacaaccaccagttccagttccacatgtttaatgatgaggacagcgtgtccctgctgcagaagaacccctgcctgagcaccttcaatgaccccagcggccagatcagcaccaacaacaaggtgtccaagagcaggaagaagagcagccccagcaagagcggggccatgaaccagagcagcagccagaagaacaccaggaagaagagcctgaagggcaacaacaagggcatcgagaagcccccaggcaagaacagccggcaggtgcccaagagcaccaagaagggcaagtacatggccgccatcaatggagagaagatgcagattggaattggccggggcggcagccagaccaacaccatcagcagcacaggcaagaccctggccgagtgcatccagcacggcggccccatggcctccatgaagatgcccagccagaagggcctgagcggggactgggccctgggcaaggagagcagccctggctggagcgacatgtccatgggcaccaacaccaacagcctgctggatgatgaccagcgggagttccaggagcccagctacatcctgagcaacatcgccagcggcatggctgatgtgcagcgcttcatgatggccagcattgagcccctgtgggagcccatggagcaccacggggaccccaacatcttctacagccctgagagcaacagcctgaagctgaagaccctgaagatcctggccggcaccccccaggagagcaagaagaagatcaacagcggcagccagggcgccaccaagaaccacaggagcatcaagggcgtgtccaagagcaatggcaagacagccatcggggaccccggccgggccaacatgcctggctacaatgaagacagccgcagcaccttctttgacaagaagtacagcaacatgagcaccctgggcaacaacggccccacccacaagaagctgtaccgccacaagagcagcagcaaggccctgagagatgagaagtgcaagggcaagcacatggagcgggagcaggtgcacaaggatgaaagtggcacagccagctttgagaagctgcgggacagcgactacaacctgctgaaggccgagaccaccttctgggtgctgcctgtgtttgaggaggagacccgcatcttccagaaggacatctag

SEQ ID NO: 165824 - DNA, 1008 bp, synthetic construct
  misc_feature 1..1008: note = Description of Artificial Sequence: Synthetic coding sequence
  source 1..1008: mol_type = other DNA
atgtgggccaccctgcccctgctgtgtgccggggcctggctgctgggcgtgcctgtgtgtggggctgctgagctgtgtgtgaacagcctggagaagttccacttcaagtcctggatgagcaagcacaggaagacctacagcacagaggagtaccaccaccggctgcagacctttgccagcaactggaggaagatcaatgcccacaacaacggcaaccacaccttcaagatggccctgaaccagttcagtgacatgagctttgctgagatcaagcacaagtacctgtggagcgagccccagaactgcagcgccaccaagagcaactacctgcggggcaccggcccctacccaccttctgtggactggaggaagaagggcaactttgtgtcccctgtgaagaaccagggcgcctgtggcagctgctggaccttcagcaccactggagccctggagagcgccatcgccatcgccaccgggaagatgctgagcctggccgagcagcagctggtggactgtgcccaggacttcaacaaccacggctgccagggcggcctgcccagccaggcctttgagtacatcctgtacaacaagggcatcatgggagaggacacctacccctaccagggcaaggatggctactgcaagttccagcccgggaaggccatcggctttgtgaaggatgtggccaacatcaccatctatgatgaggaggccatggtggaggccgtggccctgtacaaccctgtgtcctttgcctttgaggtgacccaggacttcatgatgtacagaacaggcatctacagcagcaccagctgccacaagaccccagacaaggtgaaccacgctgtgctggccgtgggctacggggagaagaatggcatcccctactggatcgtgaagaacagctggggcccccagtggggcatgaatggctacttcctgattgagcggggcaagaacatgtgtggcctggccgcctgtgccagctaccccatccccctggtgtag

SEQ ID NO: 165825 - DNA, 5655 bp, synthetic construct
  misc_feature 1..5655: note = Description of Artificial Sequence: Synthetic coding sequence
  source 1..5655: mol_type = other DNA
atgcactgcaccaacccagccctgatcttcctgattgatgagctgagccctgagcagcacaacctgagcctgtacagcatggagctggtgctgaagaagagcacaggccacagcgctgcccaggtggccctgacagaaacagcccctggcagccagcacagcagccccctgcacgtgacagccccacccagcgccaccacctttgacacagccttcttcaaccagggcaagcagaccaagagcacagctgaccccagcatctttgtggccacctacgtgtctgtgaccagcaaggaggtggccgtgaatgatgatgagatggacaacttcctgcctgacacccactggaccacccccaggatggtgagccccatccagtacatcaccgtgagccccccaggcctgccccgggaggccctggagcccatgctgacccccagcctgcccatggtgtccctgcaggatgaggaggtgaccagcggctggcagaacaccacccggcagcctgctgcctatgcagagagcgccagccacttccacaccttccgcagcgccttccgcaccagcgagggcatcgtgcccaccccaggcaggaacctggtgctgtaccccacagatgcctacagccacctgagcagcaggaccctgcctgagatcgtggccagcctgacagagggcgtggagaccaccctcttcctgagcagccgcagcctgatgccccagcccctgggagatggcatcaccatccccctgcccagcctgggggaggtgtcccagcccccagaggaggtgtgggccaccagcgctgaccgctacacagatgtgaccaccgtgctgagccagagcctggaggagaccatcagccccaggacctaccccaccgtgacagccagccacgccgccctggccttcagcaggacccacagccccctgctgagcacccccctggcctttgccagcagcgccagccccacagatgtgagcagcaaccccttcctgcccagcgacagcagcaagaccagcgagctgcacagcaacagcgccctgcccggccctgtggacaacacccacatcctgagccctgtgagcagcttccggccctacacctggtgtgccgcctgcaccgtgcccagcccccagcaggtgctggccaccagcctgatggagaaggatgtgggcagcggagatggagctgagaccctgtgcatgacagtgctggaggagagcagcatcagcctgatgagctctgtggtggccgacttcagcgagtttgaggaggacccccaggtgttcaacaccctcttccccagccggcccatcgtgcccctgagcagccgctccatggagatcagcgagacctctgtgggcatctctgctgaggtggacatgagctctgtgaccaccacccaggtgcccccagcccacggccgcctgtctgtgcctgccagcctggaccccacagctggcagcctgtctgtggccgagacccaggtgacccccagctctgtgaccacagccttcttcagcgtcatcaccagcatcctgctggacagcagcttctctgtgattgccaacaagaacacccccagcctggccgtgcgggaccccagcgtcttcaccccctacagcctggtgcccagcgtggagagcagcctcttcagtgaccaggagaggagcagcttcagcgagcacaagcccaggggggccctggactttgccagcagcttcttcagcaccccacccctggagctgagcggcagcatcagcagccccagcgaggccccagccagcctgagcctgatgcccagcgacctgagccccttcaccagccagagcttcagccccctggtggagaccttcaccctgtttgacagcagtgacctgcagagcagccagctgagcctgcccagcagcaccaacctggagttcagccagctgcagcccagcagcgagctgcccctgaacaccatcatgctgctgcccagccgctctgaggtgagcccctggagcagcttccccagcgacagcctggagtttgtggaggccagcacagtgtccctgacagacagcgaggcccacttcaccagcgccttcatcgagaccaccagctacctggagagcagcctcatcagccatgagagcgctgtgacagccctggtgcccccaggcagcgagagctttgacatcctgacagctggcatccaggccaccagccccctgaccaccgtgcacaccacccccatcctgacagagagcagcctcttcagcaccctgaccccaccagatgaccagatcagcgccctggatggccacgtgtctgtgctggccagcttcagcaaggccatccccaccggcaccgtgctgatcacagatgcctacctgcccagcggcagcagctttgtgtctgaggccacccccttccccctgcccacagagctgactgtggtgggccccagcctgacccccacagaggtgcccctgaacaccagcacagaggtgtccaccaccagcactggagctgccaccggcggccccctggacagcaccctgatgggagatgctgccagccagagccccccagagagcagcgctgccccacccctgcccagcctgcggcctgtgacagccttcaccctggaggccaccgtggacacccccaccctggccacagccaagccaccctacgtgtgtgacatcaccgtgcctgatgcctacctgatcaccaccgtgctggccaggagagctgtgcaggagtacatcatcacagccatcaaggaggtgctgcgcatccacttcaacagagctgtggagctgaaggtgtatgagctgttcacagacttcaccttcctggtgaccagcggcccctttgtgtacacagccatcagcgtcatcaacgtgctgatcaacagcaagctggtgcgggaccagacccccctcatcctgtctgtgaagcccagcttcctggtgcctgagagccgcttccaggtgcagacagtgctgcagtttgtgccccccagcgtggacaccggcttctgcaacttcacccagagaattgagaagggcctgatgacagccctgtttgaggtgaggaagcaccaccagggcacctacaacctgactgtgcagatcctgaacatcaccatcagcagcagccgggtgaccccccggcggggccctgtgaacatcatctttgctgtgaagagcacccagggcttcctgaatggcagcgaggtgtctgagctgctgaggaacctgtctgtggtggagttctccttctacctgggctaccctgtgctgcagattgctgagcccttccagtacccccagctgaacctgagccagctgctgaagagctcctgggtgaggacagtgctgctgggcgtgatggagaagcagctgcagaatgaggtgttccaggccgagatggagaggaagctggcccagctgctgtctgaggtgtccaccaggaggaggatgtggaggcgggccaccgtggccgccggcaacagcgtggtgcaggtggtgaatgtgtcccggctggagggagatgacaaccctgtgcagctgatctactttgtggaggaccaggatggagagcggctgtctgctgtgaagagcagtgacctgatcaacaagatggacctgcagagagctgccatcatcctgggctaccgcatccagggcgtcatcgcccagcctgtggacagagtgaagaggcccagccctgagagccagagcaacaacctgtgggtgattgtgggcgtggtgattcctgtgctggtggtgatggtgattgtggtgatcctgtactggaagctgtgcaggacagacaagctggacttccagcctgacacagtggccaacatccagcagaggcagaagctgcagatccccagcgtgaagggctttgattttgccaagcagcacctgggccagcacaacaaggatgacatcctgatcatccacgagcccgcccccctgcccggccccctgaaggaccacaccacccccagtgaaaatggagatgtgcccagccccaagagcaagatccccagcaagaatgtgcgccaccggggccgggtgagccccagtgatgctgacagcacagtgtctgaggagagcagcgagagagatgctggggacaagaccccaggagctgtgaatgatggccgcagccaccgggccccccagagcggcccccccctgcccagcagtggaaatgagcagcacagcagcgccagcatctttgagcacgtggaccgcatcagcaggcctcctgaggccagccggcgggtgcccagcaagatccagctgattgccatgcagcccatcccagcccctcctgtgcagaggcccagccctgctgacagagtggccgagagcaacaagatcaacaaggagatccagacagccctgcggcacaagtcagaaattgagcaccacaggaacaagatccggctgcgggccaagagaagaggccactatgagttccctgtggtggatgacctgagcagcggggacaccaaggagcggcaccgggtgtaccgccgggcccagatgcagattgacaagatcctggaccccacagcctctgtgcccagcgtcttcatcgagcccaggaagagcagccgcatcaagaggagccccaagcccaggaggaagcaccaggtgaatggctgcccagcagatgctgagaaggacaggctcatcaccacagacagtgatggcacctacagaagacctcctggggtgcacaacagcgcctacatcggctgccccagcgaccctgacctgcctgcagatgtgcagacccccagctctgtggagctgggccgctacccagccctgcccttccctgccagccagtacatccccccccagcccagcattgaggaggcccggcagaccatgcacagcctgctggatgatgcctttgccctggtggcccccagcagccagcctgccagcacagctggggtgggccctggggtgcccccaggcctgcctgccaacagcacccccagccaggaggagcggcgggccacccagtggggcagcttctacagccctgcccagacagccaacaacccctgcagccgctatgaggactatggcatgaccccacccaccggccccctgccccggcccggcttcggccctggcctgctgcagagcacagagctggtgcccccagacccccagcagccccaggccagcgctgaggccccctttgctgcccggggcatctacagcgaggagatgcccagcgtggcccggcccaggcctgtgggcggcaccaccggcagccagatccagcacctgacccaggtgggcatcgccagcagaattggagcccagcctgtggagatcccccccagccggggcagccagtatggaggccctggctggcccagctatggagaagatgaagctggaagaagagaggccgtgcccaggaccagcggccgggagcccagcgcccccagcggcaacctgccccaccggggcctgcagggccctggcctgggctaccccaccagcagcacagaggacctgcagcccggccacagcagcgccagcctcatcaaggccatccgggaggagctgctgcggctgagccagaagcagagcacagtgcagaacttccacagctag

SEQ ID NO: 165826 - DNA, 1236 bp, synthetic construct
  misc_feature 1..1236: note = Description of Artificial Sequence: Synthetic coding sequence
  source 1..1236: mol_type = other DNA
atggagaccccagaggtgcctgtgggcagcctgattgactttggacctgaggcccccaccagcagccccctggaggcccctcctcctgtgctgcaggatggagatggcagcctgggagatggagccagcgagagcgagaccacagagagcgctgacagtgaaaatgacatgggagagagccccagccaccccagctgggaccaggaccggcgcagcagcagcaatgaaagcttcagcagcaaccagagcacagagagcacccaggatgaggagaccctggccctgcgggacttcatgaggggctacgtggagaagatcttctctggaggagaggacctggaccaggaggagaaggccaagtttggagagtactgcagcagtgaaaatggcaagggccgggagtggtttgcccgctacgtgtctgcccagcgctgcaacagcaaatgtgtgtctgaggccaccttctaccgcctggtgcagagctttgctgtggtgctgtttgagtgccaccagatggatgactttggacctgccaagaacctgatgaccatgtgcttcacctactaccacatcggcaagccccagctgctgcccccagagagccgggagaagccagctggcagcattgacagctacctgaagagcgccaacagctggctggccgagaagaaggacattgctgagcggctgctgaagaacaccagcgccaggacagaaaatgtgaagggcttctttggaggcctggagaccaagctgaagggccccctggccaggagaaatgaggaggatgagaacaagccccaggagaagaggcccagggctgtgacagcctacagcccagaagatgagaagaagggggagaagatctacctgtacacccacctgaagcagcagcccatctggcacaccctgcgcttctggaatgctgccttctttgatgctgtgcactgtgagaggaccaagaggagccccaccaccagaggagatgctggggaggaggaggagaagcgggagaagtggtgccacatgacccaggaggagagagatgacagcctgcgcttcaatgaaaacatcaccttcggccagctgggcaccttcacccacaacatgctggccttcggcctgaacaagaagctgtgcaatgacttcctgaagaagcaggccgtcatcggcaacctggatgaggagcagtacaagctgctgagtgaccacatcgagcagatggccacagaatag

SEQ ID NO: 165827 - DNA, 15018 bp, synthetic construct
  misc_feature 1..15018: note = Description of Artificial Sequence: Synthetic coding sequence
  source 1..15018: mol_type = other DNA
atggaccagaggaagaatgaaagcatcgtgcccagcatcacccagctggaggacttcctgacagagcacaacagcaatgtggtgtggctgctggtggccaccatcctgagctgtggctggatcatctacctgacctactacaacagcagaaatgtgggcctcatcctgaccctggtgctgaacagactctacaagcacggctacatccacatcggcagcttctccttctctgtgctgagcggcaaggtgatggtgcgggagatctactacatcacagaggacatgagcatccgcatccaggacggcttcatcatcttccgctggtggaagatgtacaaccccaagcagaagcagcacgaccccaaggccgagacccggctgtacatcaccgtgaatgactttgagttccacgtgtacaacagaagtgacctgtatggccgcctgcaggagctgtttggcctggagcccaccatcatcccccccaagaaggatgatgacaagacccgggagattggaagaaccaggacccagagcaagattgaaagagtgaaggtgaagacagagagccaggaccccaccagctcctggaggagcctcatccctgtgatcaaggtgaatgtgtccacaggccgcctggccttcggcaaccactaccagccccagaccctgtgcatcaactttgatgatgccttcctgacctacaccaccaagccacccagcagccacctggaccagttcatgcacatcgtgaagggcaagctggagaatgtgcgggtgatgctggtgcccagccccaggtatgtgggcctgcagaatgatgagcccccccggctgatgggagagggctttgtggtgatgcagagcaatgatgtggacatctactactacatggatgagcccggcctggtgcctgaggagacagaagaaaatattgaaggagagatgagcagcgaggactgcaagctgcaggacctgcccccctgctggggcctggacatcgtgtgtgggaaaggaacagacttcaactacggcccctgggccgaccggcagagggactgcctgtggaagttcttcttccccccagactaccaggtgctgaaggtgtctgaaattgcccagcccggccggccccggcagatcctggcctttgagctgaggatgaacatcatcgcagatgccaccatcgacctgctcttcaccaagaaccgggagaccaatgctgtgcacgtgaatgtgggcgccggcagctacctggagatcaacatccccatgacagtggaggagaatggctacaccccagccatcaagggccagctgctgcacgtggatgccaccacctccatgcagtaccgcaccctgctggaggccgagatgctggccttccacatcaatgccagctacccccgcatctggaacatgccccagacctggcagtgtgagctggaggtgtacaaggccacctaccacttcatctttgcccagaagaacttcttcacagacctgatccaggactggagcagtgacagccccccagacatcttctcctttgtgccctacacctggaacttcaagatcatgttccaccagtttgagatgatctgggccgccaaccagcacaactggattgactgcagcaccaagcagcaggagaatgtgtacctggccgcctgtggggagaccctgaacatcgacttcagcctgcccttcacagactttgtgcctgccacctgcaacaccaagttcagcctgcggggggaggatgtggacctgcacctgttcctgcctgactgccaccccagcaagtacagcctcttcatgctggtgaagaactgccaccccaacaagatgattcatgacaccggcatcccagctgagtgccagagcggccagaagacagtgaagcccaagtggagaaatgtgacccaggagaagagcggctgggtggagtgctggacagtgcccagcgtgatgctgaccatcgactacacctggcaccccatctacccccagaaggcagatgagcagctgaagcagagcctgtctgagatggaggagaccatgctgtctgtgctgcggcccagccagaagaccagtgacagagtggtgagcagccccagcaccagcagcaggcctcccatcgaccccagcgagctgcccccagacaagctgcacgtggagatggagctgagcccagacagccagatcaccctgtatggccccctgctgaatgccttcctgtgcatcaaggagaactactttggagaagatgacatgtacatggactttgaggaggtgatcagcagccctgtgctgagcctgagcaccagcagcagcagcggctggacagctgtgggcatggagaatgacaagaaggaaaatgaaggcagcgccaagagcatccaccccctggccctgcggccctgggacatcaccgtgctggtgaacctgtacaaggtgcacggccgcctgcctgtgcacggcaccacagatggcccagaatgtcccacagccttcctggagcggctgtgctttgagatgaagaagggcttccgggagaccatgctgcagctgatcctgagccccctgaatgtgtttgtgtctgacaactaccagcagaggcctcctgtggatgaggtgctgcgggagggccacatcaacctgagcggcctgcagctgcgggcccacgccatgttttctgctgagggcctgcccctgggcagtgacagcctggagtatgcctggctgattgatgtgcaggccggcagcctgacagccaaggtgacagccccccagctggcctgcctgctggagtggggccagacctttgtgttccacgtggtgtgccgggagtatgagctggagcggcccaagagcgtcatcatctgccagcacggcatcgaccggcgcttctgtgagagcaagctgagctgcatccctggcccctgccccaccagtgatgacctgaagtacaccatgatccggctggccgtggatggagctgacatctacatcgtggagcacggctgtgccaccaacatcaagatgggcgccatccgggtggccaactgcaacctgcacaaccagagcgtgggggagggcatctctgctgccatccaggacttccaggtgcggcagtacatcgagcagctgaacaactgcagaattggcctgcagcctgctgtgctgcggcgggcctactggctggaggccggcagcgccaacctgggcctcatcaccgtggacatcgccctggccgctgaccaccacagcaagcatgaggcccagaggcacttcctggagacccatgatgcccggaccaagaggctgtggttcctgtggccagatgacatcctgaagaacaagcgctgcaggaacaagtgtggctgcctgggcggctgccgcttcttcggcggcaccgtgacaggcctggacttcttcaagctggaggagctgacccccagcagcagcagcgccttcagcagcaccagcgctgagagtgacatgtactacggccagagcctgctgcagcctggagagtggatcatcaccaaggagatccccaagatcattgatggaaatgtgaatggcatgaagaggaaggagtgggagaacaagtctgtgggcatcgaggtggagaggaagacccagcacctgagcctgcaggtgcccctgcggagccacagcagcagcagcagcagcgaggagaacagcagcagcagcgctgcccagcccctgctggccggggagaaggagagccccagctctgtggctgatgaccacctggtgcagaaggagttcctgcacggcaccaagagagatgatggccaggccagcatccccacagagatcagcggcaacagccctgtgagccccaacacccaggacaagtctgtgggccagagccccctgcggagccccctgaagaggcaggcctctgtgtgcagcacccggctgggcagcaccaagagcctgacagctgccttctatggagacaagcagcctgtgacagtgggcgtgcagttcagcagtgatgtgtccagaagtgatgaaaatgtgctggacagccccaagcagaggaggagctttggcagcttcccctacacccccagcgctgacagcaacagcttccaccagtaccgctccatggacagctccatgtccatggctgacagcgaggcctacttctctgctgctgaggagtttgagcccatcagcagtgatgagggccctggcacctacccaggcaggaagaagaagaagaagcagacccagcagattgactacagccggggcagcatctaccacagcgtggagggccccctgaccggccacggggagagcatccaggacagcaggaccctgcccttcaagacccaccccagccaggccagctttgtgtctgccctgggcggggaggatgatgtgattgagcacctgtacatcgtggagggggagaagacagtggagagcgagcagatcaccccccagcagcctgtgatgaactgctaccagacctacctgacccagttccaggtgatcaactggagcgtgaagcaccccaccaacaagaggaccagcaagagcagcctgcaccggcccctggacctggacacccccaccagcgaggagagcagcagcagctttgagcagctgtctgtgcccaccttcaaggtgatcaagcagggcctgacagccaacagcctgctggaccggggcatgcagctgagcggcagcaccagcaacaccccctacacccccctggagaagaagctggccgacaacacagatgatgagaccctgacagaggagtggaccctggaccagcctgtgtcccagaccaggaccacagccatcgtggaggtgaagggcaccgtggacatcgtgctgacccccctggtggccgaggccctggaccgctacatcgaggccatggtgcactgtgccagcaccaggcaccctgctgccatcgtggatgacctgcacgccaaggtgctgcgggaggccgtgcagaacagcaagaccaccttcagcgagaacctgagcagcaagcaggacatccggggcaccaagacagagcagagcaccatcggcaccaccaaccagggccaggcccagaccaacctgaccatgaagcaggacaacgtgaccatcaagggcctgcagaccaacgtgtccatccccaaggtgaacctgtgcctgctgcaggcctctgtggaggagagccccaccacagcccccagccgctctgtgacccacgtgtccctggtggccctgtgctttgacagaattgccacccaggtgaggatgaacagaggagtggtggaggagaccagcaacaatgctgagcccggccgcaccagcaactttgaccgctacgtgcacgccaccaagatgcagccccagagcagcggcagcctgcggagcaatgctggagctgagaagggcaaggagattgctgccaagctgaacatccaccgggtgcacggccagctgcggggcctggacaccacagacatcggcacctgtgccatcacagccatcccctttgagaagagcaaggtgctcttcaccctggaggagctggatgagttcacctttgtggatgaaacagaccagcaggccgtgcctgatgtgaccagaattggccccagccaggagaagtggggctggatcatgtttgaatgtggcctggagaacctgaccatcaagggcggccggcagagcggggctgtgctgtacaacagctttggcatcatgggcaaggccagtgacacagagcggggcggcgtgctgaccagcaacaacagcagtgacagccccactggaagtggctacaacacagatgtgtctgatgacaacctgccctgtgacaggaccagccccagcagtgacctgaatggaaattctgtgtctgatgagcaggatgaaggagtggagagtgatgacctgaagaaggacctgcccctgatgcctcctcctccagacagctgcagcatgaagctgaccatcaaggagatctggttctcctttgctgcccccaccaacgtgcgcagccacacccacgccttcagccggcagctgaacctgctgagcacagccaccccagctgtgggcgcctggctggtgcccatcgaccagctgaagagcagcctgaacaagctggagacagagggcaccctgcgcatctgtgctgtgatgggctgcatcatgacagaggccctggagaacaagtctgtgcacttccccctgcggagcaagtacaaccggctgaccaaggtggcccgcttcctgcaggagaaccccagctgcctgctgtgcaacatcctgcaccactacctgcaccaggccaactacagcatcattgatgatgccaccatgtctgatggcctgcctgccctggtgaccctgaagaagggcctggtggccctggcccggcagtggatgaagttcatcgtggtgaccccagccttcaagggcgtgtccctgcacaggcctgcccagcccctgaagccccagatcgccatggaccatgaacatgaagatggcctgggcctggacaatggaggcggcctgcagagcgacaccagcgcagatggagctgagtttgaatttgatgctgccaccgtgtctgagcacaccatgctgctggagggcacagccaacagacctcctcctggcagcagcggccctgtgactggagctgagatcatgaggaagctgagcaagacccacacccacagcgacagcgccctgaagatcaagggcatccacccctaccacagcctgagctacaccagcggggacacagccacagacagccctgtgcacgtgggccgggccggcatgcctgtgaaggacagccccaggaaggagagcctgctgagctacctgaccggcagcttccccagcctgcacaacctgctggagggcaccccccagaggagcagcgctgctgtgaagagcagcagcctgaccaggactggaaacacagtggccacagacatgctgtctgagcaccccctgctgtctgagcccagctctgtgtccttctacaactggatgagcaatgctgtgggcaacagaggctctgtgctgcaggagagccctgtgaccaagagcggccacaacagcctgcccaccggggtggcccccaacctgcccaccatccccagcgccagtgacttcaacacagtgctgagcagtgaccagaacaccctggatggcacccacagccagcacagcaccagccaggatgatgtggccggcgtggaggaggccaaccagggcttccctgctgtgcagctggctgatgcccaggtggtgttcaagcccctgctgagccacacaggcatccagagccaggacaccatgcccttctgctacaggatgtactttggagagcacctgtccttcagcggcaccctggactgcctgcgggctgacatcgtggacagcgacacagccaaggagaggaagggcaagagggcccggcggcagggccacgtgaacctgccccccctggagttcaagccagccctgatgctgggcaccttcagcatctctgctgtggtgatggagaagtctgtgtgcaccccccagaacagcaccagcgccctgtccttccatgacctgagcaagcgctactacaacaccttccactgcaacttcaccatcagctgccagagcatcagccagcacgtggacatggccctggtgcggctcatccaccagttcagcaccatgattgatgacatcaaggccacccagacagacatcaagctgagccgctacacagctggcagcgccagccccacccccaccttcaagaccaggaagcaccgggacttccgcagcagtgacttcagccgcagcagccggggcagcctgaatggaggcaacagagtgaacaatgccaagaacaagaggaccaacaatgaaaacaacaagaaggagagcaggaacaagaacagcctgggccgctcagaaagaaggaccagcaaggtgtccaggaagggcagcaaggatgtggtggaccacatgaccatccacatggatgacagcgacagcatcaccgtgtctgagcagagcgagcccagcgctgagtgctggcagaacatgtacaagctgctgaacttctacagcctcatcagtgaccccaccggcatcctggagaagagcagcgagaccttcggccctgctggggtgcgcagccccacagagcccacctgcaaggtggtgtttgaaaatgagcaggacaacagcagcctgaccaagacccagaggaagaggagcctggtgaccagcgagccccagcacgtgaccctcatcgtgtttggcatcggcatggtgaacagaacccacctggaggccgacatcggcggcctgaccatggagagcgagctgaagagaattcatggcagcttcaccctgaaggagaagatgaaggatgtgctgcaccagaagatgacagagacctgtgccacagcccacatcggcggcgtgaacatcgtgctgctggagggcatcacccccaacatccagctggaggacttccccaccagccccaccagcacagccaagcaggagttcctgactgtggtgaagtgcagcatcgccaagagccaggccctgtacagcgcccagaggggcctgaagaccaacaatgctgctgtgttcaaggtgggcgccatcagcatcaacatcccccagcacccagccaccctgcacagcatgatggtgcgcagcagccaccagctgagcaagcagatcagtgacctgatccggcagcccagcacagccccccagcctgtgaaggaggacatcgccacccccctgcccagcgagaagacccccacctctgtgaaccagacccctgtggagaccaatgagttcccccagctgcctgagggcctggagaagaagcccatcgtgctgaagttcagcgccatgctggatggcatcgccatcggggccgccctgctgcccagcctgaaggccgagtacaagatgggccgcatgaggagccacggcatgaccggggcccagacccgcttcacctttgagctgcccaaccaccggctgcgcttcaccagcaaggtgtctgccacagacatgagcaccatcccccccagcgccagcctgaacctgccccctgtgaccatgtctgggaagtacatcatggaggagcatgacagctacagcgaccaggtgtggagcattgatgagctgcccagcaagcagggctactacctgcagggcaactacctgcgctgtgtggccgaggtgggcagctttgagcacaacctgaccacagacctgctgaaccacctggtgtttgtgcagaaggtgttcatgaaggaggtgaatgaggtgatccagaaggtgtctggaggagagcagcccatccccctgtggaatgaacatgatggaacagcagatggagacaagcccaagatcctgctgtacagcctgaacctgcagttcaagggcatccaggtgacagccaccacccccagcatgagagctgtgcgctttgagaccggcctgattgagctggagctgagcaaccggctgcagaccaaggccagccctggcagcagcagctacctgaagctgtttgggaagtgccaggtggacctgaacctggccctgggccagatcgtgaagcaccaggtgtatgaggaggccggcagtgacttccaccaggtggcctacttcaagaccagaattggcctgagaaatgccctgcgggaggagatcagcggcagcagtgaccgggaggccgtgctgatcaccctgaaccggcccatcgtgtatgcccagcctgtggcctttgacagagctgtgctcttctggctgaactacaaggccgcctatgacaactggaatgagcagaggatggccctgcacaaggacatccacatggccaccaaggaggtggtggacatgctgcccggcatccagcagaccagcgcccaggccttcggcaccctcttcctgcagctgactgtgaatgacctgggcatctgcctgcccatcaccaacacagcccagagcaaccacactggagacctggacaccggcagcgccctggtgctgaccatcgagagcaccctcatcacagcctgcagcagcgagagcctggtgtccaagggccacttcaagaacttctgcatccgctttgctgatggctttgagacctcctgggatgactggaagccagagatccacggggacctggtgatgaatgcctgtgtggtgcctgatggcacctatgaggtgtgcagcaggaccaccggccaggccgctgctgagagcagcagcgctggcacctggaccctgaatgtgctgtggaagatgtgtggcattgatgtgcacatggaccccaacatcggcaagaggctgaatgccctgggcaacaccctgaccaccctgactggagaggaggacattgatgacattgctgacctgaacagcgtgaacattgctgacctgagtgatgaagatgaggtggacaccatgagccccaccatccacacagaggccacagactaccgccggcaggccgccagcgccagccagcccggggagctgcggggcaggaagatcatgaagagaattgtggacatccgggagctgaatgagcaggccaaggtgattgatgacctgaagaagctgggcgccagcgagggcaccatcaaccaggagatccagcgctaccagcagctggagagcgtggccgtgaatgacatcagaagagatgtgaggaagaagctgcggcgcagctccatgagagctgccagcctgaaggacaagtggggcctgagctacaagcccagctacagccgcagcaagagcatcagcgccagcggccggccccccctgaagaggatggagcgggccagcagccgggtgggggagacagaggagctgcctgagatccgggtggatgctgccagccctggcccccgggtgaccttcaacatccaggacaccttccctgaggagacagagctggacctgctgtctgtgaccatcgagggccccagccactacagcagcaacagcgagggcagctgcagcgtcttcagcagccccaagacccctgggggcttcagccctggcatccccttccagacagaggagggcagaagagatgacagcctgagcagcaccagtgaagattctgagaaggatgagaaggatgaggaccacgagcgggagcgcttctacatctacaggaagcccagccacaccagcaggaagaaggccaccggctttgctgctgtgcaccagctgttcacagagcgctggcccaccacccctgtgaacagaagcctgtctggaacagccacagaaagaaatattgactttgagctggacatccgggtggagattgattctggaaaatgtgtgctgcaccccaccaccctgctgcaggagcatgatgacatcagcctgcggcgctcctatgacaggagcagccgcagcctggaccaggacagccccagcaagaagaagaagttccagaccaactatgccagcaccacccacctgatgaccgggaagaaggtgcccagcagcctgcagaccaagcccagcgacctggagaccaccgtcttctacatccctggggtggatgtgaagctgcactacaacagcaagaccctgaagacagagagccccaatgccagccggggcagcagcctgcccaggaccctgagcaaggagagcaagctgtatggcatgaaggacagcgccaccagcccccccagcccccccctgcccagcacagtgcagagcaagaccaacaccctgctgcccccccagcccccacccatcccagctgccaagggcaaaggaagtggaggagtgaagacagccaagctgtatgcctgggtggccctgcagagcctgcctgaggagatggtgatcagcccctgcctgctggacttcctggagaaggccctggagaccatccccatcacccctgtggagaggaactacacagctgtgagcagccaggatgaggacatgggccactttgagatcccagaccccatggaggagagcaccaccagcctggtgagcagcagcaccagcgcctacagcagcttccctgtggatgtggtggtgtatgtgcgggtgcagcccagccagatcaagttcagctgcctgcctgtgtcccgggtggagtgcatgctgaagctgcccagcctggacctggtgttcagcagcaacagaggagagctggagaccctgggcaccacctacccagctgagaccctgagccctggaggaaatgccacccagagcggcaccaagaccagcgccagcaagacaggcatccctggcagcagcggcctgggcagccccctgggccgcagccgccacagcagcagccagagcgacctgaccagcagcagcagcagcagcagcggcctgtccttcaccgcctgcatgtctgacttcagcctgtatgtgttccacccctatggagctgggaagcagaagacagctgtgtctggcctgaccccaggcagcggcggcctgggcaatgtggatgaggagcccacctctgtgactggaaggaaggacagcctgagcatcaacctggagtttgtgaaggtgtccctgagccgcatccgccgcagcggcggggccagcttctttgagagccagagcgtgtccaagagcgccagcaagatggacaccaccctcatcaacatctctgctgtgtgtgacatcggcagcgccagcttcaagtatgacatgaggcggctgtctgagatcctggccttcccccgggcctggtacagaagaagcatcgcccggcggctcttcctgggggaccagaccatcaacctgcccaccagcggccctggcaccccagacagcattgagggcgtgtcccagcacctgagccctgagagcagcaggaaggcctactgcaagacctgggagcagcccagccagagcgccagcttcacccacatgccccagagccccaacgtgttcaatgagcacatgaccaacagcaccatgagccctggcaccgtgggccagagcctgaagagccctgccagcatccgcagccgctctgtgtctgacagctctgtgccccggcgggacagcctgagcaagaccagcacccccttcaacaagagcaacaaggccgccagccagcagggcaccccctgggagaccctggtggtgtttgccatcaacctgaagcagctgaatgtgcagatgaacatgagcaatgtgatgggcaacaccacctggaccaccagcggcctgaagagccagggccgcctgtctgtgggcagcaacagagaccgggagatctccatgtctgtgggcctgggccgcagccagctggacagcaaaggaggagtggtgggcggcaccattgatgtgaatgccctggagatggtggcccacatcagcgagcaccccaaccagcagcccagccacaagatccagatcaccatgggcagcacagaggcccgggtggactacatgggcagcagcatcctgatgggcatcttcagcaatgctgacctgaagctgcaggatgagtggaaggtgaacctgtacaacaccctggacagcagcatcacagacaagtctgagatctttgtgcatggagacctgaagtgggacatcttccaggtgatgatcagccgcagcaccaccccagacctgatcaagattggcatgaagctgcaggagttcttcacccagcagtttgacaccagcaagagggccctgagcacctggggccctgtgccctacctgccccccaagaccatgaccagcaacctggagaagagcagccaggagcagctgctggatgctgcccaccaccgccactggccaggagtgctgaaggtggtgtctggctgccacatcagcctcttccagatccccctgcctgaagatggcatgcagtttggaggctccatgagcctgcacggcaaccacatgaccctggcctgcttccacggccccaacttccgcagcaagtcctgggccctcttccacctggaggagcccaacatcgccttctggacagaggcccagaagatctgggaggatggcagcagtgaccacagcacctacatcgtgcagaccctggacttccacctgggccacaacaccatggtgaccaagccctgtggggccctggagagccccatggccaccatcaccaagatcaccaggagaagacatgagaaccccccccacggcgtggcctctgtgaaggagtggttcaactacgtgacagccaccagaaatgaggagctgaacctgctgagaaatgtggatgccaacaacacagagaacagcaccaccgtgaagaacagcagcctgctgagcggcttccggggcggcagcagctacaaccacgagacagagaccatctttgccctgcccaggatgcagctggacttcaagagcatccacgtgcaggagccccaggagcccagcctgcaggatgccagcctgaagcccaaggtggagtgcagcgtggtgacagagttcacagaccacatctgtgtgaccatggatgctgagctgatcatgttcctgcatgacctggtgtctgcctacctgaaggagaaggagaaggccatcttccccccacgcatcctgagcacccggcccggccagaagagccccatcatcatccatgatgacaacagcagtgacaaggacagagaagattccatcacctacaccaccgtggactggagggacttcatgtgcaacacctggcacctggagcccaccctgcggctcatctcctggacaggcaggaagattgatcctgtgggcgtggactacatcctgcagaagctgggcttccaccacgcccggaccaccatccccaagtggctgcagaggggcgtgatggaccccctggacaaggtgctgtctgtgctgatcaagaagctgggcacagccctgcaggatgagaaggagaagaagggcaaggacaaggaggagcactag

SEQ ID NO: 165828 - DNA, 1287 bp, synthetic construct
  misc_feature 1..1287: note = Description of Artificial Sequence: Synthetic coding sequence
  source 1..1287: mol_type = other DNA
atgggcggcctcttcagccgctggaggaccaagcccagcacagtggaggtgctggagagcattgacaaggagatccaggccctggaggagttccgggagaagaaccagaggctgcagaagctgtgggtgggccgcctcatcctgtacagctctgtgctgtacctgttcacctgcctgattgtgtacctgtggtacctgcctgatgagttcaccgcccggctggccatgaccctgcccttctttgccttccccctcatcatctggagcatccgcaccgtcatcatcttcttcttcagcaagaggacagagaggaacaatgaggccctggatgacctgaagagccagaggaagaagatcctggaggaggtgatggagaaggagacctacaagacagccaagctgatcctggagagatttgatcctgacagcaagaaggccaaggaatgtgagcccccatctgctggagctgctgtgacagcccggcccggccaggagatccggcagaggacagctgcccagaggaacctgagccccaccccagccagccccaaccagggccccccaccccaggtgcctgtgtccccaggcccccccaaggacagcagcgcccctgggggccccccagagaggacagtgaccccagccctgagcagcaatgtgctgcccaggcacctgggcagccctgccacctctgtgcccggcatgggcctgcaccccccaggcccccccctggcccggcccatcctgccccgggagcggggggccctggacagaattgtggagtacctggtgggagatggcccccagaacagatatgccctgatctgccagcagtgcttcagccacaacggcatggccctgaaggaggagtttgagtacatcgccttccgctgtgcctactgcttcttcctgaacccagccaggaagacccggccccaggccccccggctgcctgagttctcctttgagaagaggcaggtggtggagggcagcagctctgtgggccccctgcccagcggctctgtgctgagcagtgacaaccagttcaatgaggagagcctggagcatgatgtgctggatgacaacacagagcagacagatgacaagatcccagccacagagcagaccaaccaggtgattgagaaggccagtgacagcgaggagcctgaggagaagcaggagacagaaaatgaggaggcctctgtgattgagaccaacagcacagtgcctggagctgacagcatcccagaccctgagctgtctggagagagcctgacagctgagtag

SEQ ID NO: 165829 - DNA, 2718 bp, synthetic construct
  misc_feature 1..2718: note = Description of Artificial Sequence: Synthetic coding sequence
  source 1..2718: mol_type = other DNA
atggacagcacagcctgcctgaagagcctgctgctgactgtgtcccagtacaaggctgtgaagtctgaggccaatgccacccagctgctgcggcacctggaggtgatcagcggccagaagctgaccaggctcttcaccagcaaccagatcctgaccagcgagtgcctgagctgcctggtggagctgctggaggaccccaacatcagcgccagcctcatcctgagcatcatcggcctgctgagccagctggccgtggacatcgagacccgggactgcctgcagaacacctacaacctgaacagcgtgctggccggcgtggtgtgccgcagcagccacacagattctgtgttcctgcagtgcatccagctgctgcagaagctgacctacaacgtgaagatcttctacagcggggccaacattgatgagctgatcaccttcctgattgaccacatccagagcagtgaagatgagctgaagatgccctgcctgggcctgctggccaacctgtgccgccacaacctgtctgtgcagacccacatcaagaccctgagcaatgtgaagagcttctaccgcaccctcatcaccctgctggcccacagcagcctgactgtggtggtgtttgccctgagcatcctgagcagcctgaccctgaatgaggaggtgggggagaagctgttccacgccaggaacatccaccagaccttccagctgatcttcaacatcctgatcaatggagatggcaccctgaccaggaagtacagcgtggacctgctgatggacctgctgaagaaccccaagattgctgactacctgaccaggtatgagcacttcagcagctgcctgcaccaggtgctgggcctgctgaatggcaaggaccctgacagcagcagcaaggtgctggagctgctgctggccttctgcagcgtgacccagctgcggcacatgctgacccagatgatgtttgagcagagccccccaggcagcgccaccctgggcagccacaccaagtgcctggagcccaccgtggccctgctgcgctggctgagccagcccctggatggcagcgagaactgcagcgtgctggccctggagctgttcaaggagatctttgaagatgtgattgatgctgccaactgcagcagcgctgacagatttgtgaccctgctgctgcccaccatcctggaccagctgcagttcacagagcagaacctggatgaggccctgaccaggaagaagtgtgagcgcatcgccaaggccatcgaggtgctgctgaccctgtgtggagatgacaccctgaagatgcacatcgccaagatcctgaccaccgtgaagtgcaccaccctgattgagcagcagttcacctacggcaagattgacctgggcttcggcaccaaggtggccgacagcgagctgtgcaagctggccgcagatgtgatcctgaagaccctggacctgatcaacaagctgaagcccctggtgcccggcatggaggtgtccttctacaagatcctgcaggaccccaggctcatcacccccctggcctttgccctgaccagtgacaaccgggagcaggtgcagagcggcctgcgcatcctgctggaggccgcccccctgcctgacttccctgccctggtgctgggggagagcattgctgccaacaatgcctaccggcagcaggagacagagcacatccccaggaagatgccctggcagagcagcaaccacagcttccccaccagcatcaagtgcctgaccccccacctgaaggatggagtgcccggcctgaacatcgaggagctgattgagaagctgcagagcggcatggtggtgaaggaccagatctgtgatgtgcgcatcagtgacatcatggatgtgtatgagatgaagctgagcaccctggccagcaaggagagccggctgcaggacctgctggagaccaaggccctggccctggcccaggccgacaggctcatcgcccagcaccgctgccagaggacccaggccgagacagaggcccggaccctggcctccatgctgcgggaggtggagaggaagaatgaggagctgtctgtgctgctgaaggcccagcaggtggagagcgagcgggcccagagcgacatcgagcacctgttccagcacaacaggaagctggagagcgtggccgaggagcacgagatcctgaccaagagctacatggagctgctgcagagaaatgaaagcacagagaagaagaacaaggacctgcagatcacctgtgacagcctgaacaagcagattgaaacagtgaagaagctgaatgaaagcctgaaggagcagaatgagaagagcatcgcccagctgattgagaaggaggagcagaggaaggaggtgcagaaccagctggtggaccgggagcacaagctggccaacctgcaccagaagaccaaggtgcaggaggagaagatcaagaccctgcagaaggagcgggaggacaaggaggagaccatcgacatcctgaggaaggagctgagcaggacagagcagatcaggaaggagctgagcatcaaggccagcagcctggaggtgcagaaggcccagctggagggccgcctggaggagaaggagagcctggtgaagctgcagcaggaggagctgaacaagcacagccacatgattgccatgatccacagcctgagcggcggcaagatcaaccctgagaccgtgaacctgagcatctag

SEQ ID NO: 165830 - DNA, 2370 bp, synthetic construct
  misc_feature 1..2370: note = Description of Artificial Sequence: Synthetic coding sequence
  source 1..2370: mol_type = other DNA
atgctggagggcaactaccaggtgatgctgaagagcggcaccaacatcctgtactggaggaccaccggcatcctgatgggcagcaaggctgtgaagcctgtgctggtgaagaacatcaccattgaaggagtggcctacaccagcgagtgcttcccctgcaagccaggcaccttcagcaacaagccaggcagcttcaactgccaggtgtgccccaggaacacctacagcgagaagggggccaaggagtgcatccgctgcaaggatgacagccagttcagcgaggagggcagcagtgaatgtacagagcggcccccctgcaccaccaaggactacttccagatccacaccccctgtgatgaggagggcaagacccagatcatgtacaagtggattgagcccaagatctgccgggaggacctgacagatgccatccggctgcccccatctggagagaagaaggactgccccccctgcaaccctggcttctacaacaacggcagcagcagctgccacccctgccccccaggcaccttcagtgatggcaccaaggagtgccggccctgcccagctggaacagagcccgccctgggctttgagtacaagtggtggaatgtgctgcccggcaacatgaagaccagctgcttcaacgtgggcaacagcaaatgtgatggcatgaatggctgggaggtggccggggaccacatccagagcggggccggcggcagtgacaatgactacctgatcctgaacctgcacatccctggcttcaagccacccacctccatgactggagccaccggcagcgagctgggccgcatcacctttgtgtttgagaccctgtgcagcgctgactgtgtgctgtacttcatggtggacatcaacaggaagagcaccaacgtggtggagagctggggcggcaccaaggagaagcaggcctacacccacatcatcttcaagaatgccaccttcaccttcacctgggccttccagaggaccaaccagggccaggacaacagacgcttcatcaatgacatggtgaagatctacagcatcacagccaccaatgctgtggatggagtggccagcagctgccgggcctgtgccctgggcagcgagcagagcggcagcagctgtgtgccctgccccccaggccactacatcgagaaggagaccaaccagtgcaaggagtgccccccagacacctacctgagcatccaccaggtgtatggcaaggaggcctgcatcccctgtggccctggcagcaagaacaaccaggaccacagcgtgtgctacagcgactgcttcttctaccacgagaaggagaaccagagcctgcactatgacttcagcaacctgagctctgtgggcagcctgatgaatggccccagcttcaccagcaagggcaccaagtacttccacttcttcaacatcagcctgtgtggccacgagggcaagaagatggccctgtgcaccaacaacatcacagacttcaccgtgaaggagatcgtggccggcagtgatgactacaccaacctggtgggcgcctttgtgtgccagagcaccatcatccccagcgagagcaagggcttccgggccgccctgagcagccagagcatcatcctggccgacaccttcatcggcgtgacagtggagaccaccctgaagaacatcaacatcaaggaggacatgtttcctgtgcccaccagccagatcccagatgtgcacttcttctacaagagcagcacagccaccaccagctgcatcaatggccgcagcacagctgtgaagatgcgctgcaaccccaccaagagcggggccggggtcatctctgtgcccagcaagtgcccagctggcacctgtgatggctgcaccttctacttcctgtgggagagcgctgaggcctgccccctgtgcacagaacatgacttccacgagattgagggcgcctgcaagaggggcttccaggagaccctgtatgtgtggaatgagcccaagtggtgcatcaagggcatcagcctgcctgagaagaagctggccacctgtgaaacagtggacttctggctgaaggtgggcgctggggtgggcgccttcaccgctgtgctgctggtggccctgacctgctacttctggaagaagaaccagaagctggagtacaagtacagcaagctggtgatgaccaccaacagcaaagaatgtgagctgcctgctgctgacagctgtgccatcatggagggggaggacaatgaggaggaggtggtgtacagcaacaagcagagcctgctgggcaagctgaagagcctggccaccaaggagaaggaggaccactttgagagcgtgcagctgaagaccagccgcagccccaacatctag

SEQ ID NO: 165831 - DNA, 336 bp, synthetic construct
  misc_feature 1..336: note = Description of Artificial Sequence: Synthetic coding sequence
  source 1..336: mol_type = other DNA
atggtgaggaccaaggctgacagcgtgcccggcacctacaggaaggtggtggccgcccgggcccccaggaaggtgctgggcagcagcaccagcgccaccaacagcacctctgtgagcagcaggaaggccgagaacaagtatgctgggggcaaccctgtgtgtgtgcggcccacccccaagtggcagaagggcattggagagttcttccggctgagccccaaggacagcgagaaggagaaccagatccctgaggaggccggcagcagcggcctgggcaaggccaagaggaaggcctgccccctgcagcctgaccacaccaatgatgagaaggagtag

SEQ ID NO: 165832 - DNA, 2772 bp, synthetic construct
  misc_feature 1..2772: note = Description of Artificial Sequence: Synthetic coding sequence
  source 1..2772: mol_type = other DNA
atgagccagttcaagaggcagaggatcaaccccctgcccggcggcaggaacttctctggaacagccagcaccagcctgctgggccccccacctggcctgctgaccccacctgtggccacagagctgagccagaatgcccggcacctgcagggcggggagaagcagagggtcttcaccggcatcgtgaccagcctgcatgactactttggagtggtggatgaggaggtgttcttccagctgtctgtggtgaagggccgcctgccccagctgggggagaaggtgctggtgaaggccgcctacaaccctggccaggccgtgccctggaatgctgtgaaggtgcagaccctgagcaaccagcccctgctgaagagccctgccccacccctgctgcacgtggccgccctgggccagaagcagggcatcctgggcgcccagccccagctgatcttccagccccaccgcatccccccactcttcccccagaagcccctgagcctcttccagaccagccacaccctgcacctgagccacctgaaccgcttccctgcccggggcccccacggccgcctggaccagggccgcagtgatgattatgacagcaagaagaggaagcagagagctggaggagagccctggggcgccaagaagcccaggcatgacctgcccccctacagagtgcacctgaccccctacacagtggacagccccatctgtgacttcctggagctgcagaggcgctaccgcagcctgctggtgcccagcgacttcctgtctgtgcacctgtcctggctgagcgccttccccctgagccagcccttcagcctgcaccaccccagccgcatccaggtgtcctctgagaaggaggccgccccagatgctggagctgagcccatcacagctgacagcgaccctgcctacagcagcaaggtgctgctgctgagcagccctggcctggaggagctgtaccgctgctgcatgctgtttgtggatgacatggccgagccccgggagaccccagagcaccccctgaagcagatcaagttcctgctgggcaggaaggaggaggaggccgtgctggtgggcggggagtggagccccagcctggatggcctggacccccaggccgacccccaggtgctggtgaggacagccatccgctgtgcccaggcccagacaggcatcgacctgagcggctgcaccaagtggtggaggtttgctgagttccagtacctgcagcccggccccccccggcggctgcagacagtggtggtgtacctgcctgatgtgtggaccatcatgcccaccctggaggagtgggaggccctgtgccagcagaaggctgctgaggccgccccacccacccaggaggcccagggcgagacagagcccacagagcaggccccagatgccctggagcaggccgctgacaccagcagaagaaatgctgagaccccagaggccaccacccagcaggagacagacacagacctgcctgaggcccctcctccacccctggagcctgctgtgattgcccggcccggctgtgtgaacctgagcctgcatggaattgtggaggacagaagacccaaggagcgcatcagctttgaggtgatggtgctggccgagctgttcctggagatgctgcagagggactttggctacagagtgtacaagatgctgctgagcctgcctgagaaggtggtgagccccccagagcctgagaaggaggaggccgccaaggaggaggccaccaaggaggaggaggccatcaaggaggaggtggtgaaggagcccaaggatgaggcccagaatgaaggacctgccacagaaagtgaggcccccctgaaggaggatggcctgctgcccaagcccctgagcagtggaggagaggaggaggagaagcccagaggagaggccagcgaggacctgtgtgagatggccctggaccctgagctgctgctgctgagagatgatggagaggaggagtttgctggggccaagctggaggacagcgaggtgcgctctgtggccagcaaccagagcgagatggagttcagcagcctgcaggacatgcccaaggagctggaccccagcgctgtgctgcccctggactgcctgctggcctttgtgttctttgatgccaactggtgtggctacctgcaccggcgggacctggagcgcatcctgctgaccctgggcatccggctgtctgctgagcaggccaagcagctggtgtcccgggtggtgacccagaacatctgccagtaccgcagcctgcagtacagccggcaggagggcctggatggcggcctgcctgaggaggtgctgtttggaaacctggacctgctgcccccacctgggaagagcaccaagccaggggccgcccccacagagcacaaggccctggtgagccacaacggcagcctcatcaacgtgggcagcctgctgcagagagctgagcagcaggacagcggccgcctgtacctggagaacaagatccacaccctggagctgaagctggaggagagccacaaccgcttcagcgccacagaggtgaccaacaagaccctggccgctgagatgcaggagctgcgggtgcggctggccgaggccgaggagacagccaggacagctgagcggcagaagagccagctgcagaggctgctgcaggagctgcggcggcggctgacccccctgcagctggagatccagagggtggtggagaaggctgacagctgggtggagaaggaggagcccgcccccagcaactag

SEQ ID NO: 165833 - DNA, 3480 bp, synthetic construct
  misc_feature 1..3480: note = Description of Artificial Sequence: Synthetic coding sequence
  source 1..3480: mol_type = other DNA
atgctggacttcctggccgagaacaacctgtgtggccaggccatcctgcgcatcgtgtcctgtggaaatgccatcatcgccgagctgctgcggctgtctgagttcatcccagctgtgttccggctgaaggacagagctgaccagcagaagtatggagacatcatctttgacttctcctacttcaagggccctgagctgtgggagagcaagctggatgccaagccagagctgcaggacctggatgaggagttccgggagaacaacattgaaattgtgacccgcttctacctggccttccagagcgtgcacaagtacatcgtggacctgaaccgctacctggatgacctgaatgaaggagtgtacatccagcagaccctggagaccgtgctgctgaatgaagatggcaagcagctgctgtgtgaggccctgtacctgtatggagtgatgctgctggtgattgaccagaagattgaaggagaggtgcgggagaggatgctggtgtcctactaccgctacagcgctgcccggagcagcgctgacagcaacatggatgacatctgcaagctgctgcggagcacaggctacagcagccagcccggggccaagaggcccagcaactacccagagagctacttccagagggtgcccatcaatgaaagcttcatctccatggtgattggccgcctgcggagtgatgacatctacaaccaggtgtctgcctaccccctgcctgagcacaggagcacagccctggccaaccaggccgccatgctgtatgtgatcctgtactttgagcccagcatcctgcacacccaccaggccaagatgagagaaattgtggacaagtacttcccagacaactgggtgatcagcatctacatgggcatcaccgtgaacctggtggatgcctgggagccctacaaggccgccaagacagccctgaacaacaccctggacctgagcaatgtgcgggagcaggccagccgctatgccaccgtgtctgagcgggtgcacgcccaggtgcagcagttcctgaaggagggctacctgcgggaggagatggtgctggacaacatccccaagctgctgaactgcctgcgggactgcaatgtggccatccgctggctgatgctgcacacagctgacagcgcctgtgaccccaacaacaagaggctgcggcagatcaaggaccagatcctgacagacagccgctacaacccccgcatcctcttccagctgctgctggacacagcccagtttgagttcatcctgaaggagatgttcaagcagatgctgtctgagaagcagaccaagtgggagcactacaagaaggagggcagcgagaggatgacagagctggctgatgtgttcagcggcgtgaagcccctgaccagggtggagaagaatgaaaacctgcaggcctggttccgggagatcagcaagcagatcctgagcctgaactatgatgacagcacagctgctggcaggaagacagtgcagctgatccaggccctggaggaggtgcaggagttccaccagctggagagcaacctgcaggtgtgccagttcctggccgacaccaggaagttcctgcaccagatgatccgcaccatcaacatcaaggaggaggtgctgatcaccatgcagatcgtgggggacctgagctttgcctggcagctgattgacagcttcaccagcatcatgcaggagagcatccgggtgaaccccagcatggtgaccaagctgcgggccaccttcctgaagctggccagcgccctggacctgcccctgctgcgcatcaaccaggccaacagcccagacctgctgtctgtgtcccagtactacagcggggagctggtgtcctatgtgaggaaggtgctgcagatcatccctgagagcatgttcaccagcctgctgaagatcatcaagctgcagacccatgacatcatcgaggtgcccacccggctggacaaggacaagctgcgggactatgcccagctgggccccaggtatgaggtggccaagctgacccacgccatcagcatcttcacagagggcatcctgatgatgaagaccaccctggtgggcatcatcaaggtggaccccaagcagctgctggaggatggcatcaggaaggagctggtgaagagggtggcctttgccctgcaccggggcctcatcttcaacccccgggccaagcccagcgagctgatgcccaagctgaaggagctgggcgccaccatggatggcttccacaggagctttgagtacatccaggactatgtgaacatctacggcctgaagatctggcaggaggaggtgagccgcatcatcaactacaacgtggagcaggagtgcaacaacttcctgcggaccaagatccaggactggcagagcatgtaccagagcacccacatccccatccccaagttcacccctgtggatgaatctgtgaccttcatcggccgcctgtgccgggagatcctgcgcatcacagaccccaagatgacctgccacatcgaccagctgaacacctggtatgacatgaagacccaccaggaggtgaccagcagccgcctcttcagcgagatccagaccaccctgggcaccttcggcctgaatggcctggaccggctgctgtgcttcatgattgtgaaggagctgcagaacttcctgtccatgttccagaagatcatcctgcgggacagaacagtgcaggacaccctgaagaccctgatgaatgctgtgagccccctgaagagcatcgtggccaacagcaacaagatctacttcagcgccatcgccaagacccagaagatctggacagcctacctggaggccatcatgaaggtgggccagatgcagatcctgcggcagcagatcgccaatgagctgaactacagctgccgctttgacagcaagcacctggccgccgccctggagaacctgaacaaggccctgctggccgacatcgaggcccactaccaggaccccagcctgccctaccccaaggaggacaacaccctgctgtatgagatcacagcctacctggaggccgccggcatccacaaccccctgaacaagatctacatcaccaccaagaggctgccctacttccccatcgtgaacttcctgttcctgattgcccagctgcccaagctgcagtacaacaagaacctgggcatggtgtgcaggaagcccacagatcctgtggactggccacccctggtgctgggcctgctgaccctgctgaagcagttccacagccgctacacagagcagttcctggccctgattggccagttcatctgcagcacagtggagcagtgcaccagccagaagatccctgagatcccagcagatgtggtgggcgccctgctcttcctggaggactatgtgcgctacaccaagctgccccggcgggtggccgaggcccacgtgcccaacttcatctttgatgagttcagaacagtgctgtag

SEQ ID NO: 165834 - DNA, 2424 bp, synthetic construct
  misc_feature 1..2424: note = Description of Artificial Sequence: Synthetic coding sequence
  source 1..2424: mol_type = other DNA
atgttttctgctggagctgagagcctgctgcaccaggcccgggagatccaggatgaggagctgaagaagttctgcagccgcatctgcaagctgctgcaggccgaggacctgggccctgacaccctggacagcctgcagaggctcttcctgatcatcagcgccaccaagtacagccggcggctggagaagacctgtgtggacctgctgcaggccaccctgggcctgcctgcctgcccagagcagctgcaggtgctgtgtgccgccatcctgcgggagatgagccccagcgacagcctgagcctggcctgggaccacacccagaacagccggcagctgagcctggtggcctctgtgctgctggcccagggcgacagaaatgaggaggtgcgggctgtgggccagggcgtgctgcgggccctggagagccggcagcctgagggccccagcctgcggcacctgctgcctgtgatggccaaggtggtggtgctgagccctggcaccctgcaggaggaccaggccaccctgctgagcaagaggctggtggactggctgcgctatgccagcctgcagcagggcctgccccacagcggcggcttcttcagcaccccccgggcccggcagcccggccctgtgacagaggtggatggagctgtggccacagacttcttcaccgtgctgagcagcggccaccgcttcacagatgaccagtggctgaatgtgcaggccttctccatgctgcgggcctggctgctgcacagcggccctgagggccctggcaccctggacacagatgacagaagtgagcaggagggcagcaccctgagcgtcatcagcgccaccagcagcgctggccgcctgctgcccccccgggagcggctgcgggaggtggcctttgagtactgccagaggctgattgagcagagcaacagaagagccctgaggaaaggagacagcgacctgcagaaggcctgcctggtggaggccgtgctggtgctggatgtgctgtgccggcaggaccccagcttcctgtaccgcagcctgagctgcctgaaggccctgcacggccgggtgcggggggaccctgcctctgtgcgggtgctgctgcccctggcccacttcttcctgagccatggagaggccgctgctgtggacagcgaggccgtgtaccagcacctgttcacccgcatccctgtggagcagttccacagccccatgctggcctttgagttcatccagttctgccgggacaacctgcacctgttcagcggccacctgagcaccctgcggctgtccttccccaacctcttcaagttcctggcctggaacagcccccccctgaccagcgagtttgtggccctgctgcctgccctggtggatgctggaacagccctggagatgctgcacgccctgctggacctgccctgcctgacagctgtgctggacctgcagctgcggagcgccccagctgccagcgagcggcccctgtgggacaccagcctgcgggcccccagctgcctggaggccttccgggacccccagttccagggcctcttccagtacctgctgcggcccaaggccagcggggccacagagcggctggcccccctgcaccagctgctgcagcccatggccggctgtgcccgggtggcccagtgtgcccaggccgtgcccaccctgctgcaggccttcttctctgctgtgacccaggtggctgatggcagcctcatcaaccagctggccctgctgctgctgggccgcagtgacagcctgtacccagcccctggctatgctgctggggtgcacagcgtgctgagcagccagttcctggccctgtgcaccctgaagcccagcctggtggtggagctggcccgggacctgctggagttcctgggctctgtgaatggcctgtgcagccgggccagcctggtgacctctgtggtgtgggccatcggggagtacctgtctgtgacctatgaccggcgctgcaccgtggagcagatcaacaagttctttgaggccctggaggccctgctgtttgaggtgacccagtgccggcccagcgctgccctgccccgctgccccccccaggtggtgacagtgctgatgaccaccctgaccaagctggccagccgcagccaggacctgatcccccgggccagcctgctgctgagcaagatgaggaccctggcccacagccctgccaccagcagcacccacagcgaggagggcgctgaggccatccgcacccgggccacagagctgctgaccctgctgaagatgcccagcgtggcccagtttgtgctgacccccagcacagaggtgtgcagcccccgctaccacagagatgccaacacagccctgcccctggccctgaggacagtgtcccggctggtggagcgggaggccggcctgatgcctggatag

SEQ ID NO: 165835 - DNA, 4086 bp, synthetic construct; identical to SEQ ID NO: 151019
  misc_feature 1..4086: note = Description of Artificial Sequence: Synthetic coding sequence
  source 1..4086: mol_type = other DNA

SEQ ID NO: 165836 - DNA, 1866 bp, synthetic construct
  misc_feature 1..1866: note = Description of Artificial Sequence: Synthetic coding sequence
  source 1..1866: mol_type = other DNA
atggccaacgtgccctgggccgaggtgtgtgagaagttccaggccgccctggccctgagccgggtggagctgcacaagaaccctgagaaggagccctacaagagcaagtacagcgcccgggccctgctggaggaggtgaaggccctgctgggccctgccccagaagatgaagatgagaggcctgaggccgaggatggccctggagctggggaccacgccctgggcctgcctgctgaggtggtggagcctgagggccctgtggcccagagagctgtgcggctggccgtgattgagttccacctgggcgtgaaccacatcgacacagaggagctgtctgctggggaggagcacctggtgaagtgcctgcggctgctgcggcgctaccgcctgagccatgactgcatcagcctgtgcatccaggcccagaacaacctgggcatcctgtggagcgagcgggaggagattgaaacagcccaggcctacctggagagcagcgaggccctgtacaaccagtacatgaaggaggtgggcagcccccccctggaccccacagagcgcttcctgcctgaggaggagaagctgacagagcaggagaggagcaagagatttgagaaggtgtacacccacaacctgtactacctggcccaggtgtaccagcacctggagatgtttgagaaggccgcccactactgccacagcaccctgaagaggcagctggagcacaatgcctaccaccccatcgagtgggccatcaatgctgccaccctgagccagttctacatcaacaagctgtgcttcatggaggcccggcactgcctgtctgctgccaacgtcatcttcggccagacaggcaagatcagcgccacagaggacaccccagaggccgagggggaggtgcctgagctgtaccaccagaggaaaggagagatcgcccgctgctggatcaagtactgcctgaccctgatgcagaatgcccagctgtccatgcaggacaacattggagagctggacctggacaagcagagcgagctgcgggccctgaggaagaaggagctggatgaggaggagagcatcaggaagaaggctgtgcagtttggaactggagagctgtgtgatgccatctctgctgtggaggagaaggtgtcctacctgcggcccctggactttgaggaggcccgggagctgttcctgctgggccagcactacgtgtttgaggccaaggagttcttccagattgatggctacgtgacagaccacatcgaggtggtgcaggaccacagcgccctcttcaaggtgctggccttctttgaaacagacatggagcggcgctgcaagatgcacaagagaagaattgccatgctggagcccctgactgtggacctgaacccccagtactacctgctggtgaaccggcagatccagtttgaaattgcccacgcctactatgacatgatggacctgaaggtggccatcgctgaccggctgcgggaccctgacagccacatcgtgaagaagatcaacaacctgaacaagagcgccctgaagtactaccagctgttcctggacagcctgcgggaccccaacaaggtgtttcctgagcacatcggagaagatgtgctgcggcctgccatgctggccaagttccgggtggcccggctgtatggcaagatcatcacagctgaccccaagaaggagctggagaacctggccaccagcctggagcactacaagttcatcgtggactactgtgagaagcaccctgaggccgcccaggagattgaggtggagctggagctgagcaaggagatggtgtccctgctgcccaccaagatggagcgcttccgcaccaagatggccctgacctag

SEQ ID NO: 165837 - DNA, 4551 bp, synthetic construct; identical to SEQ ID NO: 165823
  misc_feature 1..4551: note = Description of Artificial Sequence: Synthetic coding sequence
  source 1..4551: mol_type = other DNA

SEQ ID NO: 165838 - DNA, 4080 bp, synthetic construct
  misc_feature 1..4080: note = Description of Artificial Sequence: Synthetic coding sequence
  source 1..4080: mol_type = other DNA
atgtacagcgtggaggacctgctgatcagccacggctacaagctgagccgggaccccccagccagccgggaggacaaccccaagggccggcaggccgccaggacaggcaccagggctggccagggcctgcagaatggacatgaagatggccctgctgccctggcccacaggaagaccagcgctggaaaaggacatgtgtctgattctgagagccgccgcagcaccccccggggccatggagagccccagagcaccagcgccagcaggaccagcgaggccggcttctgcaaccagcccccatctgcctggagcagccaccccccaactggaaatgaccaggcctacagaagaagaggccggcaggaggcccggagccagaagccccgggagcacgagaacctggaggcccggggcatggcccaggcccacagcctgcctgtgcacgtgcgggagggcccctgggaggtgggcggccgctctgagcacgtgatgaagaagcctgtgtgggaggaggagctgaggatgagcggccctgccaagtggcagaatgtgtccctggagagctggaaccagcccaggaagctgggccggcagatgtctgatggagatggagagcggctcttccaggacctgtaccccttcatccagggcgagcacgtgctgaacagccagaacaagggcaagagccgcagcctgccccgggtgctgagccctgagagcctgagctgcacagagatccccatccccctgaatgaaagacacagccccaagatgccaccctacccacccacctgtgcccccaacctggacagcaccagaaattctgagaagagcggctgcagcgcccccttcccccggcccaagtttggccggcccctgaagcccccatcctacagcagccaccagcagagccggggcggcgctgacagcagtgacagccaggacagccagcagatggatgcctacgtgcccaggcatgagctgtgcctgagtgaccccggcctggagccccctgtgtatgtgcccccacccagctaccgcagccccccccagaacatccccaacccctacctggaggacacagtgcccatcaacgtgtgtggcggccacagccagcagcagagccccacagagaaggccggggccagcggccagccccccagcggccccccaggcactggaaatgaatatggagtgagcccccggctgccccagggcctgcctgcccaccccaggcctgtgacagcctatgatggctttgtgcagtacatcccctttgatgacccccggctgcggcacttcaagctggcccagccccagggcttctgtgaggacatcaagctggatgacaagagctacaacagcagccctgtgacagcccaggagcccgcccatggaggcatgcagccagatggagccatctggaacccccagagcctcatcccccccagcggagatgagcggggcctggtgctggccgacagcagcccccgctggctgtggggccagcccccaggagatggagaaaattctggcctgcccaaccagagggacagatgtgtggcccggggccagtggccagatgtgcggggcagccagcacggccacacaggccggcaggtgagcagcccctacagccagggcgagagcacctgtgagacccagaccaagctgaagaagttccagacaggcaccaggaccaagaagagcagcaagaagaagatgaatgagaccatcttctgcctggtgtccatccctgtgaagtctgagagccacctgcctgaccgggacatggacaacaatgacctgaagcccagcgctgaccagaagaatggaagtgacaagagccctgccctgcaggagcagagcctgctgtccatgagcagcacagacctggagctgcaggccctgaccggctccatgggcggccgcacagagttccagaagcaggacctgggggagccagaagaagatcggcagaccaatgacctgtccttcatccacctgaccaagcaccgggagctgaagcacagcggctcctggccaggccaccgctacagagaccagcagacccagaccagcttcagcgaggagccccagagcagccagctgctgcccggggccaagctgggcggccccagccgggccgccctgagccccaagtgcagcgaccctgctgccagcgaggcccagacccacacagccttccccaccggggaccacaagcagaggcccagcgccaggaacctgaagggccacaggagcctgagccccagcagcaacagcgccttcagcaggaccagcctgtctgtggaccaggcccccacccccaaggccggccgcagccagccctgtgtggatgtgcacggcctgggcgcccaccctggccccaagcgggaggtggtgaagggggagcccaccggcccctgcaacagcaagcagctgtttggccagttcctgctgaagcctgtgtcccggcggccctgggacctgatcagccagctggagagcttcaacaaggagctgcaggaggaggaggagagcagcagcagcagcagcagcagcagcagcagcagcgaggagagcgaggccgagccccagcaggagaacagagcccactgccggcaggaggatgtgggcttccggggcaacagccctgagatgagggtggagccccagcccaggatgtgggtgcctgagagccctgtgtgccgcagcggccgcggggagagcaagtctgagagctggagcgaggagctgcagcccggccacccccgggcctggccacccagccctggccgcttccgggtggaggagggcggcggggcccccttctgcagcgcagatggcagcaccagcgctgagaagaggcacctggaggtgtccaatggcatggatgagctggccggcagccccttccctgtgaccaggatgagcagccgcagcagtgatgccaagcccctgcctgccagctacccagctgagccccgggagccccaggagagccccaagatcaccagcgccttcagctctgtgaagcccagcgaggccgtgcccaggaagtttgacagcggcggggagcggggggccggcctgcccctgagcctgagcaacaagaacagaggcctgagcgccccagacctgcggtctgtgggcctgaccccaggccaggagcagggcgccagcgagctggagggcagcctgggggaggccagcaccatcgagatccccccaggagagagcctgcaggcccgggccgcccgcatcctgggcatcgaggtggccgtggagagcctgctgcccggcatccggcgggccggccagaaccagcctgctgagccagatgccagcgcctgcaccccagagagcccccaggaggagctgctgagcaggcctgccccagcagatgtgccccgggtgtccacagatgccttctacggccgcaggaaatgtggctggaccaagagccccctgtttgtgggggaccgggacagcgcccggcgggccccccaggcctttgagcacagtgatgtggatggagtggtgaccagcacagatcctgtgcctgagcctgagcccagccccctggagagcaagttctttgagcagaaggatgtggagaccaagccacccttccgcagcaccctcttccactttgtggagaggaccccatctgtggccggcagcgagaagaggctgcggagccccagcaaggtgattgagagcctgcaggagaagctggccagccccccccggcgggctgaccctgaccggctgatgaggatgaaggaggtgtcctctgtgtccaggatgagggtgctgtccttcagaaatgctgacagccaggaggatgctgaggagctgaaggccaccacccggggccaggccggcctgcccggcggcctggtgtccccaggcagcggggaccgggcccagaggctgggccacagcctgtctgtgtccaaggacagcatcagccgggaggagaaggagcaccctgctgcccagaaggagaagtccatggaccaggacttctggtgcccagacagctatgaccccagccgggtggagcgggtgtag

SEQ ID NO: 165839 - DNA, 3219 bp, synthetic construct
  misc_feature 1..3219: note = Description of Artificial Sequence: Synthetic coding sequence
  source 1..3219: mol_type = other DNA
atggcccccccaactggagtgctgagcagcctgctgctgctggtgaccatcgccggctgtgccaggaagcagtgcagcgagggccgcacctacagcaatgctgtgatcagccccaacctggagaccacccgcatcatgagggtgagccacaccttccctgtggtggactgcacagctgcctgctgtgacctgagcagctgtgacctggcctggtggtttgagggccgctgctacctggtgtcctgcccccacaaggagaactgtgagcccaagaagatgggccccatccgcagctacctgacctttgtgctgcggcctgtgcagaggcctgcccagctgctggactatggagacatgatgctgaacagaggcagccccagcggcatctggggagacagccctgaggacatcaggaaggacctgaccttcctgggcaaggactggggcctggaggagatgtctgagtacagtgatgactaccgggagctggagaaggacctgctgcagcccagcggcaagcaggagccccggggcagcgctgagtacacagactggggcctgctgcccggcagcgagggcgccttcaacagctctgtgggggacagccctgctgtgcctgctgagacccagcaggaccctgagctgcactacctgaatgaaagtgccagcaccccagcccccaagctgcctgagaggtctgtgctgctgcccctgcccaccacccccagcagcggggaggtgctggagaaggagaaggccagccagctgcaggagcagagcagcaacagcagcggcaaggaggtgctgatgcccagccacagcctgcccccagccagcctggagctgagctctgtgacagtggagaagagccctgtgctgactgtgaccccaggcagcacagagcacagcatccccaccccacccaccagcgctgcccccagcgagagcaccccatctgagctgcccatcagccccaccacagcccccaggacagtgaaggagctgactgtgtctgctggggacaacctgatcatcaccctgcctgacaatgaggtggagctgaaggcctttgtggccccagcccctcctgtggagaccacctacaactatgagtggaacctgatcagccaccccacagactaccagggcgagatcaagcagggccacaagcagaccctgaacctgagccagctgtctgtgggcctgtatgtgttcaaggtgacagtgtccagtgaaaatgcctttggagagggctttgtgaatgtgacagtgaagccagcccggcgggtgaacctgccccctgtggccgtggtgagcccccagctgcaggagctgaccctgcccctgaccagcgccctgattgatggcagccagagcacagatgacacagaaattgtgtcctaccactgggaggagatcaatggccccttcatcgaggagaagacctctgtggacagccctgtgctgcggctgagcaacctggaccccggcaactacagcttccggctgactgtgacagacagtgatggagccaccaacagcaccacagctgccctgattgtgaacaatgctgtggactacccacctgtggccaatgccggccccaaccacaccatcaccctgccccagaacagcatcaccctgaatggaaaccagagcagtgatgaccaccagatcgtgctgtatgagtggagcctgggccctggcagcgagggcaagcacgtggtgatgcagggcgtgcagaccccctacctgcacctgagcgccatgcaggagggggactacaccttccagctgaaggtgacagacagcagccggcagcagagcacagctgtggtgaccgtcatcgtgcagcctgagaacaaccggccccctgtggccgtggccggccctgacaaggagctgatcttccctgtggagagcgccaccctggatggcagcagcagcagtgatgaccatggaattgtgttctaccactgggagcacgtgcggggccccagcgctgtggagatggagaacatcgacaaggccatcgccaccgtgacaggcctgcaggtgggcacctaccacttccggctgactgtgaaggaccagcagggcctgagcagcaccagcaccctgactgtggccgtgaagaaggagaacaacagccccccccgggcccgggccggcggcagacatgtgctggtgctgcccaacaacagcatcaccctggatggcagccgcagcacagatgaccagagaattgtgtcctacctgtggatcagagatggccagagccctgctgctggagatgtgattgatggcagtgaccacagcgtggccctgcagctgaccaacctggtggagggcgtgtacaccttccacctgcgggtgacagacagccagggcgccagtgacacagacacagccaccgtggaggtgcagcctgaccccaggaagagcggcctggtggagctgaccctgcaggtgggcgtgggccagctgacagagcagaggaaggacaccctggtgcggcagctggccgtgctgctgaatgtgctggacagcgacatcaaggtgcagaagatccgggcccacagcgacctgagcacagtgattgtgttctacgtgcagagcaggcctcccttcaaggtgctgaaggctgctgaggtggccaggaacctgcacatgaggctgagcaaggagaaggctgacttcctgctcttcaaggtgctgcgggtggacacagctggctgcctgctgaagtgcagcggccacggccactgtgaccccctgaccaagcgctgcatctgcagccacctgtggatggagaacctgatccagcgctacatctgggatggagagagcaactgtgagtggagcatcttctacgtgacagtgctggccttcaccctgattgtgctgaccggcggcttcacctggctgtgcatctgctgctgcaagaggcagaagaggaccaagatcaggaagaagaccaagtacaccatcctggacaacatggatgagcaggagaggatggagctgcggcccaagtatggcatcaagcacaggagcacagagcacaacagcagcctgatggtgtctgagagcgagtttgacagcgaccaggacaccatcttcagccgggagaagatggagcggggcaaccccaaggtgtccatgaatggcagcatcagaaatggagccagcttctcctactgcagcaaggacagatag

SEQ ID NO: 165840 - DNA, 918 bp, synthetic construct
  misc_feature 1..918: note = Description of Artificial Sequence: Synthetic coding sequence
  source 1..918: mol_type = other DNA
agccagctgcctgtgcgggcagaggagaggacagagagctgcctgtggggctgctgggccagcagccgggtgcggaggaccagtgatgcctgcagcagccccctggccaccagccgcagcgcccggagctgtggggtgctgacagcccctgtgaagggggccagcagcagcctggtggtgaagctggccgacacagaccgggagcgggccctgcggaggatgcagcagatggccggccacctgggcgccttccacccagcccccctgcccctgggcgcctgtggggcctacaccacagccatcctgcagcaccaggccgccctgctggccgccgcccagggccctggcctgggccctgtggccgctgtggccgcccagatgcagcacgtggccgccttcagcctggtggccgcccccctgctgcctgctgctgctgccaacagccccccaggcagcggccctggcaccctgcccggcctgcctgcccccatcggcgtgaatggatttggccccctgaccccccagaccaacggccagcccggcagtgacaccctgtacaacaacggcctgagcccctacccagcccagagccctggggtggccgaccccctgcagcaggcctatgccggcatgcaccactacgccggccctgagggctgcaacctcttcatctaccacctgccccaggagtttggagatgctgagctgatccagaccttcctgccctttggagctgtggtgtctgccaaggtgtttgtggaccgggccaccaaccagagcaaatgttttggatttgtgtcctttgacaaccccaccagcgcccagacagccatccaggccatgaatggcttccagatcggcatgaagaggctgaaggtgcagctgaagaggcccaaggatgccaaccggccctactag

SEQ ID NO: 165841 - DNA, 198 bp, synthetic construct
  misc_feature 1..198: note = Description of Artificial Sequence: Synthetic coding sequence
  source 1..198: mol_type = other DNA
atggtgaggaccaaggctgacagcgtgcccggcacctacaggaaggtggtggccgcccgggcccccaggaaggtgctgggcagcagcaccagcgccaccaacagcacctctgtgagcagcaggaaggagcacgtgctgtgcaacctgatcacccagatgatgaagaagaacagaaccttctccttcatctttgaatag

SEQ ID NO: 165842 - DNA, 15018 bp, synthetic construct; identical to SEQ ID NO: 165827
  misc_feature 1..15018: note = Description of Artificial Sequence: Synthetic coding sequence
  source 1..15018: mol_type = other DNA

SEQ ID NO: 165843 - DNA, 2772 bp, synthetic construct; identical to SEQ ID NO: 165832
  misc_feature 1..2772: note = Description of Artificial Sequence: Synthetic coding sequence
  source 1..2772: mol_type = other DNA

SEQ ID NO: 165844 - DNA, 2982 bp, synthetic construct
  misc_feature 1..2982: note = Description of Artificial Sequence: Synthetic coding sequence
  source 1..2982: mol_type = other DNA
atgggcgccgccggccggcaggacttcctgttcaaggccatgctgaccatctcctggctgaccctgacctgcttccctggggccaccagcacagtggccgccggctgcccagaccagagccctgagctgcagccctggaaccctggccatgaccaggaccaccacgtgcacatcggccagggcaagaccctgctgctgaccagcagcgccaccgtgtacagcatccacatcagcgagggcggcaagctggtgatcaaggaccatgatgagcccatcgtgctgcggaccaggcacatcctgattgacaatggaggagagctgcatgctggcagcgccctgtgccccttccagggcaacttcaccatcatcctgtatggccgggcagatgagggcatccagcctgacccctactacggcctgaagtacatcggcgtgggcaaaggaggagccctggagctgcacggccagaagaagctgtcctggaccttcctgaacaagaccctgcaccctgggggcatggccgagggcggctacttctttgagaggtcctggggccaccggggcgtcatcgtgcacgtgattgaccccaagagcggcaccgtcatccacagcgacagatttgacacctaccgcagcaagaaggagagcgagcggctggtgcagtacctgaatgctgtgcctgatggccgcatcctgtctgtggccgtgaatgatgagggcagcaggaacctggatgacatggccaggaaggccatgaccaagctgggcagcaagcacttcctgcacctgggcttccgccacccctggagcttcctgactgtgaagggcaaccccagcagctctgtggaggaccacatcgagtaccacggccaccggggcagcgctgctgcccgggtcttcaagctgttccagacagaacatggagagtacttcaacgtgtccctgagcagcgagtgggtgcaggatgtggagtggacagagtggtttgaccatgacaaggtgtcccagaccaagggcggggagaagatcagtgacctgtggaaggcccaccctgggaagatctgcaaccggcccatcgacatccaggccaccaccatggatggagtgaacctgagcacagaggtggtgtacaagaagggccaggactacagatttgcctgctatgaccggggccgggcctgccgcagctacagagtgcgcttcctgtgtgggaagcctgtgcggcccaagctgactgtgaccatcgacaccaacgtgaacagcaccatcctgaacctggaggacaacgtgcagagctggaagccaggggacaccctggtgattgccagcacagactacagcatgtaccaggccgaggagttccaggtgctgccctgccgcagctgtgcccccaaccaggtgaaggtggccggcaagcccatgtacctgcacatcggggaggagattgatggagtggacatgagagctgaggtgggcctgctgagcaggaacatcatcgtgatgggagagatggaggacaagtgctacccctacagaaaccacatctgcaacttctttgattttgacaccttcggcggccacatcaagtttgccctgggcttcaaggccgcccacctggagggcacagagctgaagcacatgggccagcagctggtgggccagtaccccatccacttccacctggccggagatgtggatgagcggggcggctatgacccccccacctacatccgggacctgagcatccaccacaccttcagccgctgtgtgacagtgcacggcagcaatggcctgctgatcaaggatgtggtgggctacaacagcctgggccactgcttcttcacagaagatggccctgaggagaggaacacctttgaccactgcctgggcctgctggtgaagagcggcaccctgctgcccagcgaccgggacagcaagatgtgcaagatgatcacagaagattcctacccaggctacatccccaagccccggcaggactgcaatgctgtgtccaccttctggatggccaaccccaacaacaacctgatcaactgtgccgccgccggcagcgaggagaccggcttctggttcatcttccaccacgtgcccaccggccccagcgtgggcatgtacagccctggctacagcgagcacatccccctgggcaagttctacaacaacagagcccacagcaactacagagctggcatgatcatcgacaatggagtgaagaccacagaggccagcgccaaggacaagaggcccttcctgagcatcatcagcgcccgctacagcccccaccaggatgctgaccccctgaagccccgggagcccgccatcatccgccacttcatcgcctacaagaaccaggaccacggggcctggctgcggggaggagatgtgtggctggacagctgccgctttgctgacaatggaattggcctgaccctggccagcggcggcaccttcccctatgatgatggcagcaagcaggagatcaagaacagcctgtttgtgggggagagcggaaatgtgggcacagagatgatggacaaccgcatctggggccctgggggcctggaccacagcggccgcaccctgcccatcggccagaacttccccatccggggcatccagctgtatgatggccccatcaacatccagaactgcaccttcaggaagtttgtggccctggagggccgccacaccagcgccctggccttccggctgaacaatgcctggcagagctgcccccacaacaacgtgactggaattgcctttgaagatgtgcccatcaccagcagggtcttcttcggggagcccggcccctggttcaaccagctggacatggatggagacaagaccagcgtcttccatgatgtggatggctctgtgtctgagtacccaggcagctacctgaccaagaatgacaacaagtggcacagcctggccagcaaggccgccagcggccccagcggctag

SEQ ID NO: 165845 - DNA, 4086 bp, synthetic construct; identical to SEQ ID NO: 151019
  misc_feature 1..4086: note = Description of Artificial Sequence: Synthetic coding sequence
  source 1..4086: mol_type = other DNA

SEQ ID NO: 165846 - DNA, 1947 bp, synthetic construct
  misc_feature 1..1947: note = Description of Artificial Sequence: Synthetic coding sequence
  source 1..1947: mol_type = other DNA
atggaggtgaagggcaagaagcagttcaccgggaagagcaccaagacagcccaggagaagaaccgcttccacaagaacagcgacagcggcagcagcaagaccttccccaccaggaaggtggccaaggagggcggccccaaggtgaccagcaggaactttgagaagagcatcaccaagctgggcaagaagggcgtgaagcagttcaagaacaagcagcagggcgacaagagccccaagaacaagttccagcctgccaacaagttcaacaagaagaggaagttccagccagatggccgcagtgatgaatctgctgccaagaagcccaagtgggatgacttcaagaagaagaagaaggagctgaagcagagccggcagctgagtgacaagaccaactatgacatcgtggtgcgggccaagcagatgtgggagatcctgcggaggaaggactgtgacaaggagaagagggtgaagctgatgtctgacctgcagaagctgatccagggcaagatcaagaccatcgcctttgcccatgacagcaccagggtcatccagtgctacatccagtatggaaatgaggagcagaggaagcaggcctttgaggagctgagagatgacctggtggagctgagcaaggccaagtacagcaggaacatcgtgaagaagttcctgatgtatggcagcaagccccagattgctgagatcatccgctccttcaagggccacgtgaggaagatgctgcggcatgctgaggccagcgccatcgtggagtatgcctacaatgacaaggccatcctggagcagaggaacatgctgacagaggagctgtatggcaacaccttccagctgtacaagtctgctgaccacaggaccctggacaaggtgctggaggtgcagcctgagaagctggagctgatcatggatgagatgaagcagatcctgacccccatggcccagaaggaggccgtcatcaagcacagcctggtgcacaaggtgttcctggacttcttcacctacgccccacccaagctgcggtctgagatgattgaggccatccgggaggccgtggtgtacctggcccacacccatgatggagcccgggtggccatgcactgcctgtggcacggcacccccaaggacaggaaggtgattgtgaagaccatgaagacctacgtggagaaggtggccaacggccagtacagccacctggtgctgctggccgcctttgactgcattgatgacaccaagctggtgaagcagatcatcatcagcgagatcatcagcagcctgcccagcatcgtgaatgacaagtatggcaggaaggtgctgctgtacctgctgagcccccgggaccctgcccacacagtgcgggagatcatcgaggtgctgcagaagggagatggaaatgcccacagcaagaaggacacagaggtgagaagaagagagctgctggagagcatcagccctgccctgctgagctacctgcaggagcacgcccaggaggtggtgctggacaagagcgcctgtgtgctggtgtctgacatcctgggcagcgccactggagatgtgcagcccaccatgaatgccatcgccagcctggccgccaccggcctgcaccctgggggcaaggatggagagctgcacatcgccgagcaccctgctggccacctggtgctgaagtggctgattgagcaggacaagaagatgaaggaaaatggccgggagggctgctttgccaagaccctggtggagcacgtgggcatgaagaacctgaagtcctgggcctctgtgaacagaggagccatcatcctgagcagcctgctgcagagctgtgacctggaggtggccaacaaggtgaaggccgccctgaagagcctcatccccaccctggagaagaccaagagcaccagcaaaggaattgagatcctgctggagaagctgagcacctag

SEQ ID NO: 165847 - DNA, 339 bp, synthetic construct
  misc_feature 1..339: note = Description of Artificial Sequence: Synthetic coding sequence
  source 1..339: mol_type = other DNA
atgaagaaccaggtgtgcagcaaatgtggggagggcacctacagcctgggcagcggcatcaagtttgatgagtgggatgagctgcctgctggcttcagcaacatcgccaccttcatggacacagtggtgggccccagcgacagcaggccagatggctgcaacaacagctcctggatcccccggggcaactacatcgagagcaacagagatgactgcaccgtgtccctcatctatgctgtgcacctgaagaagagcggctacgtgttctttgagtaccagtatgtggacaacaacatcttctttgagttcttcatccagaatgaccagtgccaggagtag

SEQ ID NO: 165848 - DNA, 1842 bp, synthetic construct
  misc_feature 1..1842: note = Description of Artificial Sequence: Synthetic coding sequence
  source 1..1842: mol_type = other DNA
atgttttctgctggagctgagagcctgctgcaccaggcccgggagatccaggatgaggagctgaagaagttctgcagccgcatctgcaagctgctgcaggccgaggacctgggccctgacaccctggacagcctgcagaggctcttcctgatcatcagcgccaccaagtacagccggcggctggagaagacctgtgtggacctgctgcaggccaccctgggcctgcctgcctgcccagagcagctgcaggtgctgtgtgccgccatcctgcgggagatgagccccagcgacagcctgagcctggcctgggaccacacccagaacagccggcagctgagcctggtggcctctgtgctgctggcccagggcgacagaaatgaggaggtgcgggctgtgggccagggcgtgctgcgggccctggagagccggcagcctgagggccccagcctgcggcacctgctgcctgtgatggccaaggtggtggtgctgagccctggcaccctgcaggaggaccaggccaccctgctgagcaagaggctggtggactggctgcgctatgccagcctgcagcagggcctgccccacagcggcggcttcttcagcaccccccgggcccggcagcccggccctgtgacagaggtggatggagctgtggccacagacttcttcaccgtgctgagcagcggccaccgcttcacagatgaccagtggctgaatgtgcaggccttctccatgctgcgggcctggctgctgcacagcggccctgagggccctggcaccctggacacagatgacagaagtgagcaggagggcagcaccctgagcgtcatcagcgccaccagcagcgctggccgcctgctgcccccccgggagcggctgcgggaggtggcctttgagtactgccagaggctgattgagcagagcaacagaagagccctgaggaaaggagacagcgacctgcagaaggcctgcctggtggaggccgtgctggtgctggatgtgctgtgccggcaggaccccagcttcctgtaccgcagcctgagctgcctgaaggccctgcacggccgggtgcggggggaccctgcctctgtgcgggtgctgctgcccctggcccacttcttcctgagccatggagaggccgctgctgtggacagcgaggccgtgtaccagcacctgttcacccgcatccctgtggagcagttccacagccccatgctggcctttgagttcatccagttctgccgggacaacctgcacctgttcagcggccacctgagcaccctgcggctgtccttccccaacctcttcaagttcctggcctggaacagcccccccctgaccagcgagtttgtggccctgctgcctgccctggtggatgctggaacagccctggagatgctgcacgccctgctggacctgccctgcctgacagctgtgctggacctgcagctgcggagcgccccagctgccagcgagcggcccctgtgggacaccagcctgcgggcccccagctgcctggaggccttccgggacccccagttccagggcctcttccagtacctgctgcggcccaaggccagcggggccacagagcggctggcccccctgcaccagctgctgcagcccatggccggctgtgcccgggtggcccagtgtgcccaggccgtgcccaccctgctgcaggccttcttctctgctgtgacccaggtggctgatggcagcctcatcaaccagctggccctgctgctgctgggccgcagtgacagcctgtacccagcccctggctatgctgctggggtgcacaggccagatgcctgccggcccatcctggtgcccctgtag

SEQ ID NO: 165849 - DNA, 918 bp, synthetic construct
  misc_feature 1..918: note = Description of Artificial Sequence: Synthetic coding sequence
  source 1..918: mol_type = other DNA
atggagaaggagacctacaagacagccaagctgatcctggagagatttgatcctgacagcaagaaggccaaggaatgtgagccccccagcgctggagctgctgtgacagcccggcccggccaggagatccggcagaggacagctgcccagaggaacctgagccccaccccagccagccccaaccagggccccccaccccaggtgcctgtgtccccaggcccccccaaggacagcagcgcccctgggggccccccagagaggacagtgaccccagccctgagcagcaatgtgctgcccaggcacctgggcagccctgccacctctgtgcccggcatgggcctgcaccccccaggcccccccctggcccggcccatcctgccccgggagcggggggccctggaccgcatcgtggagtacctggtgggagatggcccccagaacagatatgccctgatctgccagcagtgcttcagccacaacggcatggccctgaaggaggagtttgagtacatcgccttccgctgtgcctactgcttcttcctgaacccagccaggaagacccggccccaggccccccggctgcctgagttctcctttgagaagaggcaggtggtggagggcagcagctctgtgggccccctgcccagcggctctgtgctgagcagtgacaaccagttcaatgaggagagcctggagcatgatgtgctggatgacaacacagagcagacagatgacaagatcccagccacagagcagaccaaccaggtgattgagaaggccagtgacagcgaggagcctgaggagaagcaggagacagaaaatgaggaggccagcgtcatcgagaccaacagcacagtgcctggagctgacagcatcccagaccctgagctgagcggggagagcctgacagctgagtag

SEQ ID NO: 165850 - DNA, 2589 bp, synthetic construct
  misc_feature 1..2589: note = Description of Artificial Sequence: Synthetic coding sequence
  source 1..2589: mol_type = other DNA
atgcacagctcctggatcccccggggcaactacatcgagagcaacagagatgactgcaccgtgtccctcatctatgctgtgcacctgaagaagagcggctacgtgttctttgagtaccagtatgtggacaacaacatcttctttgagttcttcatccagaatgaccagtgccaggagatggacaccaccacagacaagtgggtgaagctgacagacaatggagagtggggcagccacagcgtgatgctgaagagcggcaccaacatcctgtactggaggaccaccggcatcctgatgggcagcaaggctgtgaagcctgtgctggtgaagaacatcaccatcgagggcgtggcctacaccagcgagtgcttcccctgcaagccaggcaccttcagcaacaagccaggcagcttcaactgccaggtgtgccccaggaacacctacagcgagaagggggccaaggagtgcatccgctgcaaggatgacagccagttcagcgaggagggcagcagcgagtgcacagagaggcctccctgcaccaccaaggactacttccagatccacaccccctgtgatgaggagggcaagacccagatcatgtacaagtggattgagcccaagatctgccgggaggacctgacagatgccatccggctgccccccagcggggagaagaaggactgccccccctgcaaccctggcttctacaacaacggcagcagcagctgccacccctgccccccaggcaccttcagtgatggcaccaaggaatgtcggccctgcccagctggaacagagcccgccctgggctttgagtacaagtggtggaatgtgctgcccggcaacatgaagaccagctgcttcaacgtgggcaacagcaaatgtgatggcatgaatggctgggaggtggccggggaccacatccagagcggggccggcggcagtgacaatgactacctgatcctgaacctgcacatccctggcttcaagccacccacctccatgaccggggccactggaagtgagctgggccgcatcacctttgtgtttgagaccctgtgcagcgctgactgtgtgctgtacttcatggtggacatcaacaggaagagcaccaacgtggtggagagctggggcggcaccaaggagaagcaggcctacacccacatcatcttcaagaatgccaccttcaccttcacctgggccttccagaggaccaaccagggccaggacaacagacgcttcatcaatgacatggtgaagatctacagcatcacagccaccaatgctgtggatggagtggccagcagctgccgggcctgtgccctgggcagcgagcagagcggcagcagctgtgtgccctgccccccaggccactacatcgagaaggagaccaaccagtgcaaggaatgtcctccagacacctacctgagcatccaccaggtgtatggcaaggaggcctgcatcccctgtggccctggcagcaagaacaaccaggaccacagcgtgtgctacagcgactgcttcttctaccacgagaaggagaaccagagcctgcactatgacttcagcaacctgagctctgtgggcagcctgatgaatggccccagcttcaccagcaagggcaccaagtacttccacttcttcaacatcagcctgtgtggccacgagggcaagaagatggccctgtgcaccaacaacatcacagacttcaccgtgaaggagatcgtggccggcagtgatgactacaccaacctggtgggcgcctttgtgtgccagagcaccatcatccccagcgagagcaagggcttccgggccgccctgagcagccagagcatcatcctggccgacaccttcatcggcgtgacagtggagaccaccctgaagaacatcaacatcaaggaggacatgtttcctgtgcccaccagccagatcccagatgtgcacttcttctacaagagcagcacagccaccaccagctgcatcaatggccgcagcacagctgtgaagatgcgctgcaaccccaccaagtctggagctggggtcatctctgtgcccagcaaatgtcctgctggcacctgtgatggctgcaccttctacttcctgtgggagagcgctgaggcctgccccctgtgcacagaacatgacttccatgaaattgaaggagcctgcaagaggggcttccaggagaccctgtatgtgtggaatgagcccaagtggtgcatcaagggcatcagcctgcctgagaagaagctggccacctgtgagaccgtggacttctggctgaaggtgggcgccggcgtgggcgccttcaccgctgtgctgctggtggccctgacctgctacttctggaagaagaaccagaagctggagtacaagtacagcaagctggtgatgaccaccaacagcaaagaatgtgagctgcctgctgctgacagctgtgccatcatggagggagaagataatgaggaggaggtggtgtacagcaacaagcagagcctgctgggcaagctgaagagcctggccaccaaggagaaggaggaccactttgaatctgtgcagctgaagaccagccgcagccccaacatctag

SEQ ID NO: 165851 - DNA, 5853 bp, synthetic construct
  misc_feature 1..5853: note = Description of Artificial Sequence: Synthetic coding sequence
  source 1..5853: mol_type = other DNA
atgcctggggccaggagaagaagaagaggagctgccatggagggcaagcccagggctggggtggccctggcccctggccccagcggccggcggcccagcgcccgctgtgccaggagaagaagacctggcctgctgctgcccggcctgtggctgctgctgctggcccggcctgccagctgtgccccagatgagctgagccctgagcagcacaacctgagcctgtacagcatggagctggtgctgaagaagagcacaggccacagcgctgcccaggtggccctgacagaaacagcccctggcagccagcacagcagccccctgcacgtgacagccccacccagcgccaccacctttgacacagccttcttcaaccagggcaagcagaccaagagcacagctgaccccagcatctttgtggccacctacgtgtctgtgaccagcaaggaggtggccgtgaatgatgatgagatggacaacttcctgcctgacacccactggaccacccccaggatggtgagccccatccagtacatcaccgtgagccccccaggcctgccccgggaggccctggagcccatgctgacccccagcctgcccatggtgtccctgcaggatgaggaggtgaccagcggctggcagaacaccacccggcagcctgctgcctatgcagagagcgccagccacttccacaccttccgcagcgccttccgcaccagcgagggcatcgtgcccaccccaggcaggaacctggtgctgtaccccacagatgcctacagccacctgagcagcaggaccctgcctgagatcgtggccagcctgacagagggcgtggagaccaccctcttcctgagcagccgcagcctgatgccccagcccctgggagatggcatcaccatccccctgcccagcctgggggaggtgtcccagcccccagaggaggtgtgggccaccagcgctgaccgctacacagatgtgaccaccgtgctgagccagagcctggaggagaccatcagccccaggacctaccccaccgtgacagccagccacgccgccctggccttcagcaggacccacagccccctgctgagcacccccctggcctttgccagcagcgccagccccacagatgtgagcagcaaccccttcctgcccagcgacagcagcaagaccagcgagctgcacagcaacagcgccctgcccggccctgtggacaacacccacatcctgagccctgtgagcagcttccggccctacacctggtgtgccgcctgcaccgtgcccagcccccagcaggtgctggccaccagcctgatggagaaggatgtgggcagcggagatggagctgagaccctgtgcatgacagtgctggaggagagcagcatcagcctgatgagctctgtggtggccgacttcagcgagtttgaggaggacccccaggtgttcaacaccctcttccccagccggcccatcgtgcccctgagcagccgctccatggagatcagcgagacctctgtgggcatctctgctgaggtggacatgagctctgtgaccaccacccaggtgcccccagcccacggccgcctgtctgtgcctgccagcctggaccccacagctggcagcctgtctgtggccgagacccaggtgacccccagctctgtgaccacagccttcttcagcgtcatcaccagcatcctgctggacagcagcttctctgtgattgccaacaagaacacccccagcctggccgtgcgggaccccagcgtcttcaccccctacagcctggtgcccagcgtggagagcagcctcttcagtgaccaggagaggagcagcttcagcgagcacaagcccaggggggccctggactttgccagcagcttcttcagcaccccacccctggagctgagcggcagcatcagcagccccagcgaggccccagccagcctgagcctgatgcccagcgacctgagccccttcaccagccagagcttcagccccctggtggagaccttcaccctgtttgacagcagtgacctgcagagcagccagctgagcctgcccagcagcaccaacctggagttcagccagctgcagcccagcagcgagctgcccctgaacaccatcatgctgctgcccagccgctctgaggtgagcccctggagcagcttccccagcgacagcctggagtttgtggaggccagcacagtgtccctgacagacagcgaggcccacttcaccagcgccttcatcgagaccaccagctacctggagagcagcctcatcagccatgagagcgctgtgacagccctggtgcccccaggcagcgagagctttgacatcctgacagctggcatccaggccaccagccccctgaccaccgtgcacaccacccccatcctgacagagagcagcctcttcagcaccctgaccccaccagatgaccagatcagcgccctggatggccacgtgtctgtgctggccagcttcagcaaggccatccccaccggcaccgtgctgatcacagatgcctacctgcccagcggcagcagctttgtgtctgaggccacccccttccccctgcccacagagctgactgtggtgggccccagcctgacccccacagaggtgcccctgaacaccagcacagaggtgtccaccaccagcactggagctgccaccggcggccccctggacagcaccctgatgggagatgctgccagccagagccccccagagagcagcgctgccccacccctgcccagcctgcggcctgtgacagccttcaccctggaggccaccgtggacacccccaccctggccacagccaagccaccctacgtgtgtgacatcaccgtgcctgatgcctacctgatcaccaccgtgctggccaggagagctgtgcaggagtacatcatcacagccatcaaggaggtgctgcgcatccacttcaacagagctgtggagctgaaggtgtatgagctgttcacagacttcaccttcctggtgaccagcggcccctttgtgtacacagccatcagcgtcatcaacgtgctgatcaacagcaagctggtgcgggaccagacccccctcatcctgtctgtgaagcccagcttcctggtgcctgagagccgcttccaggtgcagacagtgctgcagtttgtgccccccagcgtggacaccggcttctgcaacttcacccagagaattgagaagggcctgatgacagccctgtttgaggtgaggaagcaccaccagggcacctacaacctgactgtgcagatcctgaacatcaccatcagcagcagccgggtgaccccccggcggggccctgtgaacatcatctttgctgtgaagagcacccagggcttcctgaatggcagcgaggtgtctgagctgctgaggaacctgtctgtggtggagttctccttctacctgggctaccctgtgctgcagattgctgagcccttccagtacccccagctgaacctgagccagctgctgaagagctcctgggtgaggacagtgctgctgggcgtgatggagaagcagctgcagaatgaggtgttccaggccgagatggagaggaagctggcccagctgctgtctgaggtgtccaccaggaggaggatgtggaggcgggccaccgtggccgccggcaacagcgtggtgcaggtggtgaatgtgtcccggctggagggagatgacaaccctgtgcagctgatctactttgtggaggaccaggatggagagcggctgtctgctgtgaagagcagtgacctgatcaacaagatggacctgcagagagctgccatcatcctgggctaccgcatccagggcgtcatcgcccagcctgtggacagagtgaagaggcccagccctgagagccagagcaacaacctgtgggtgattgtgggcgtggtgattcctgtgctggtggtgatggtgattgtggtgatcctgtactggaagctgtgcaggacagacaagctggacttccagcctgacacagtggccaacatccagcagaggcagaagctgcagatccccagcgtgaagggctttgattttgccaagcagcacctgggccagcacaacaaggatgacatcctgatcatccacgagcccgcccccctgcccggccccctgaaggaccacaccacccccagtgaaaatggagatgtgcccagccccaagagcaagatccccagcaagaatgtgcgccaccggggccgggtgagccccagtgatgctgacagcacagtgtctgaggagagcagcgagagagatgctggggacaagaccccaggagctgtgaatgatggccgcagccaccgggccccccagagcggcccccccctgcccagcagtggaaatgagcagcacagcagcgccagcatctttgagcacgtggaccgcatcagcaggcctcctgaggccagccggcgggtgcccagcaagatccagctgattgccatgcagcccatcccagcccctcctgtgcagaggcccagccctgctgacagagtggccgagagcaacaagatcaacaaggagatccagacagccctgcggcacaagtcagaaattgagcaccacaggaacaagatccggctgcgggccaagagaagaggccactatgagttccctgtggtggatgacctgagcagcggggacaccaaggagcggcaccgggtgtaccgccgggcccagatgcagattgacaagatcctggaccccacagcctctgtgcccagcgtcttcatcgagcccaggaagagcagccgcatcaagaggagccccaagcccaggaggaagcaccaggtgaatggctgcccagcagatgctgagaaggacaggctcatcaccacagacagtgatggcacctacagaagacctcctggggtgcacaacagcgcctacatcggctgccccagcgaccctgacctgcctgcagatgtgcagacccccagctctgtggagctgggccgctacccagccctgcccttccctgccagccagtacatccccccccagcccagcattgaggaggcccggcagaccatgcacagcctgctggatgatgcctttgccctggtggcccccagcagccagcctgccagcacagctggggtgggccctggggtgcccccaggcctgcctgccaacagcacccccagccaggaggagcggcgggccacccagtggggcagcttctacagccctgcccagacagccaacaacccctgcagccgctatgaggactatggcatgaccccacccaccggccccctgccccggcccggcttcggccctggcctgctgcagagcacagagctggtgcccccagacccccagcagccccaggccagcgctgaggccccctttgctgcccggggcatctacagcgaggagatgcccagcgtggcccggcccaggcctgtgggcggcaccaccggcagccagatccagcacctgacccaggtgggcatcgccagcagaattggagcccagcctgtggagatcccccccagccggggcagccagtatggaggccctggctggcccagctatggagaagatgaagctggaagaagagaggccacccacatgctgggccaccaggagtacagcagcagccccctcttccaggtgcccaggaccagcggccgggagcccagcgcccccagcggcaacctgccccaccggggcctgcagggccctggcctgggctaccccaccagcagcacagaggacctgcagcccggccacagcagcgccagcctcatcaaggccatccgggaggagctgctgcggctgagccagaagcagagcacagtgcagaacttccacagctag

SEQ ID NO: 165852 - DNA, 357 bp, synthetic construct
  misc_feature 1..357: note = Description of Artificial Sequence: Synthetic coding sequence
  source 1..357: mol_type = other DNA
tgaaaaagcaatggcaagacagccatcggggaccccggccgggccaacatgcctggctacaatgaagacagccgcagcaccttctttgacaagaagtacagcaacatgagcaccctgggcaacaacggccccacccacaagaagctgtaccgccacaagagcagcagcaaggccctgagagatgagaagtgcaagggcaagcacatggagcgggagcaggtgcacaaggatgaaagtggcacagccagctttgagaagctgcgggacagcgactacaacctgctgaaggccgagaccaccttctgggtgctgcctgtgtttgaggaggagacccgcatcttccagaaggacatctag

SEQ ID NO: 165853 - DNA, 3084 bp, synthetic construct
  misc_feature 1..3084: note = Description of Artificial Sequence: Synthetic coding sequence
  source 1..3084: mol_type = other DNA
atgagggtgagccacaccttccctgtggtggactgcacagctgcctgctgtgacctgagcagctgtgacctggcctggtggtttgagggccgctgctacctggtgtcctgcccccacaaggagaactgtgagcccaagaagatgggccccatccgcagctacctgacctttgtgctgcggcctgtgcagaggcctgcccagctgctggactatggagacatgatgctgaacagaggcagccccagcggcatctggggagacagccctgaggacatcaggaaggacctgaccttcctgggcaaggactggggcctggaggagatgtctgagtacagtgatgactaccgggagctggagaaggacctgctgcagcccagcggcaagcaggagccccggggcagcgctgagtacacagactggggcctgctgcccggcagcgagggcgccttcaacagctctgtgggggacagccctgctgtgcctgctgagacccagcaggaccctgagctgcactacctgaatgaaagtgccagcaccccagcccccaagctgcctgagaggtctgtgctgctgcccctgcccaccacccccagcagtggagaggtgctggagaaggagaaggccagccagctgcaggagcagagcagcaacagcagcggcaaggaggtgctgatgcccagccacagcctgcccccagccagcctggagctgagctctgtgacagtggagaagagccctgtgctgactgtgaccccaggcagcacagagcacagcatccccaccccacccaccagcgctgcccccagcgagagcacccccagcgagctgcccatcagccccaccacagcccccaggacagtgaaggagctgactgtgtctgctggggacaacctgatcatcaccctgcctgacaatgaggtggagctgaaggcctttgtggccccagcccctcctgtggagaccacctacaactatgagtggaacctgatcagccaccccacagactaccagggcgagatcaagcagggccacaagcagaccctgaacctgagccagctgtctgtgggcctgtatgtgttcaaggtgacagtgtccagtgaaaatgccttcggggagggctttgtgaatgtgacagtgaagccagccaggagagtgaacctgccccctgtggccgtggtgagcccccagctgcaggagctgaccctgcccctgaccagcgccctgattgatggcagccagagcacagatgacacagagatcgtgtcctaccactgggaggagatcaatggccccttcatcgaggagaagacctctgtggacagccctgtgctgcggctgagcaacctggaccccggcaactacagcttccggctgactgtgacagacagtgatggagccaccaacagcaccacagctgccctgattgtgaacaatgctgtggactacccacctgtggccaatgccggccccaaccacaccatcaccctgccccagaacagcatcaccctgaatggaaaccagagcagtgatgaccaccagatcgtgctgtatgagtggagcctgggccctggcagcgagggcaagcacgtggtgatgcagggcgtgcagaccccctacctgcacctgagcgccatgcaggagggggactacaccttccagctgaaggtgacagacagcagccggcagcagagcacagctgtggtgacagtgattgtgcagcctgagaacaacagacctcctgtggccgtggccggccctgacaaggagctgatcttccctgtggagagcgccaccctggatggcagcagcagcagtgatgaccacggcatcgtgttctaccactgggagcacgtgcggggccccagcgctgtggagatggagaacatcgacaaggccatcgccaccgtgacaggcctgcaggtgggcacctaccacttccggctgactgtgaaggaccagcagggcctgagcagcaccagcaccctgactgtggccgtgaagaaggagaacaacagccccccccgggcccgggccggcggccgccacgtgctggtgctgcccaacaacagcatcaccctggatggcagccgcagcacagatgaccagagaattgtgtcctacctgtggatcagagatggccagagccctgctgctggagatgtgattgatggcagtgaccacagcgtggccctgcagctgaccaacctggtggagggcgtgtacaccttccacctgcgggtgacagacagccagggcgccagtgacacagacacagccaccgtggaggtgcagcctgaccccaggaagagcggcctggtggagctgaccctgcaggtgggcgtgggccagctgacagagcagaggaaggacaccctggtgcggcagctggccgtgctgctgaatgtgctggacagcgacatcaaggtgcagaagatccgggcccacagcgacctgagcaccgtcatcgtgttctacgtgcagagccggccccccttcaaggtgctgaaggctgctgaggtggccaggaacctgcacatgaggctgagcaaggagaaggctgacttcctgctcttcaaggtgctgcgggtggacacagctggctgcctgctgaagtgcagcggccacggccactgtgaccccctgaccaagcgctgcatctgcagccacctgtggatggagaacctgatccagcgctacatctgggatggagagagcaactgtgagtggagcatcttctacgtgacagtgctggccttcaccctcatcgtgctgactggaggcttcacctggctgtgcatctgctgctgcaagaggcagaagaggaccaagatcaggaagaagaccaagtacaccatcctggacaacatggatgagcaggagaggatggagctgcggcccaagtatggcatcaagcacaggagcacagagcacaacagcagcctgatggtgtctgagagcgagtttgacagcgaccaggacaccatcttcagccgggagaagatggagcggggcaaccccaaggtgtccatgaatggcagcatcagaaatggagccagcttctcctactgcagcaaggacagatag

SEQ ID NO: 165854 - DNA, 1821 bp, synthetic construct
  misc_feature 1..1821: note = Description of Artificial Sequence: Synthetic coding sequence
  source 1..1821: mol_type = other DNA
atgggcaacacctgccgggtgtgctaccagctggaggccatcaagaggagcaatgagatgagcaatgtgatgggcaacaccacctggaccaccagcggcctgaagagccagggccgcctgtctgtgggcagcaacagagaccgggagatctccatgtctgtgggcctgggccgcagccagctggacagcaagggcggcgtggtgggcggcaccattgatgtgaatgccctggagatggtggcccacatcagcgagcaccccaaccagcagcccagccacaagatccagatcaccatgggcagcacagaggcccgggtggactacatgggcagcagcatcctgatgggcatcttcagcaatgctgacctgaagctgcaggatgagtggaaggtgaacctgtacaacaccctggacagcagcatcacagacaagtctgagatctttgtgcacggggacctgaagtgggacatcttccaggtgatgatcagccgcagcaccaccccagacctgatcaagattggcatgaagctgcaggagttcttcacccagcagtttgacaccagcaagagggccctgagcacctggggccctgtgccctacctgccccccaagaccatgaccagcaacctggagaagagcagccaggagcagctgctggatgctgcccaccaccgccactggccaggagtgctgaaggtggtgtctggctgccacatcagcctcttccagatccccctgcctgaagatggcatgcagtttggaggctccatgagcctgcacggcaaccacatgaccctggcctgcttccacggccccaacttccgcagcaagtcctgggccctcttccacctggaggagcccaacatcgccttctggacagaggcccagaagatctgggaggatggcagcagtgaccacagcacctacatcgtgcagaccctggacttccacctgggccacaacaccatggtgaccaagccctgtggggccctggagagccccatggccaccatcaccaagatcaccaggagaagacatgaaaatcctcctcatggagtggcctctgtgaaggagtggttcaactacgtgacagccaccagaaatgaggagctgaacctgctgagaaatgtggatgccaacaacacagagaacagcaccaccgtgaagaacagcagcctgctgagcggcttccggggcggcagcagctacaaccatgaaacagagaccatctttgccctgcccaggatgcagctggacttcaagagcatccacgtgcaggagccccaggagcccagcctgcaggatgccagcctgaagcccaaggtggagtgcagcgtggtgacagagttcacagaccacatctgtgtgaccatggatgctgagctgatcatgttcctgcatgacctggtgtctgcctacctgaaggagaaggagaaggccatcttccccccacgcatcctgagcaccaggcctggccagaagagccccatcatcatccatgatgacaacagcagtgacaaggaccgggaggacagcatcacctacaccaccgtggactggagggacttcatgtgcaacacctggcacctggagcccaccctgcggctcatctcctggacaggcaggaagattgatcctgtgggcgtggactacatcctgcagaagctgggcttccaccacgcccggaccaccatccccaagtggctgcagaggggcgtgatggaccccctggacaaggtgctgtctgtgctgatcaagaagctgggcacagccctgcaggatgagaaggagaagaagggcaaggacaaggaggagcactag

SEQ ID NO: 165855 - DNA, 5805 bp, synthetic construct
  misc_feature 1..5805: note = Description of Artificial Sequence: Synthetic coding sequence
  source 1..5805: mol_type = other DNA
atgcctggggccaggagaagaagaagaggagctgccatggagggcaagcccagggctggggtggccctggcccctggccccagcggccggcggcccagcgcccgctgtgccaggagaagaagacctggcctgctgctgcccggcctgtggctgctgctgctggcccggcctgccagctgtgccccagatgagctgagccctgagcagcacaacctgagcctgtacagcatggagctggtgctgaagaagagcacaggccacagcgctgcccaggtggccctgacagaaacagcccctggcagccagcacagcagccccctgcacgtgacagccccacccagcgccaccacctttgacacagccttcttcaaccagggcaagcagaccaagagcacagctgaccccagcatctttgtggccacctacgtgtctgtgaccagcaaggaggtggccgtgaatgatgatgagatggacaacttcctgcctgacacccactggaccacccccaggatggtgagccccatccagtacatcaccgtgagccccccaggcctgccccgggaggccctggagcccatgctgacccccagcctgcccatggtgtccctgcaggatgaggaggtgaccagcggctggcagaacaccacccggcagcctgctgcctatgcagagagcgccagccacttccacaccttccgcagcgccttccgcaccagcgagggcatcgtgcccaccccaggcaggaacctggtgctgtaccccacagatgcctacagccacctgagcagcaggaccctgcctgagatcgtggccagcctgacagagggcgtggagaccaccctcttcctgagcagccgcagcctgatgccccagcccctgggagatggcatcaccatccccctgcccagcctgggggaggtgtcccagcccccagaggaggtgtgggccaccagcgctgaccgctacacagatgtgaccaccgtgctgagccagagcctggaggagaccatcagccccaggacctaccccaccgtgacagccagccacgccgccctggccttcagcaggacccacagccccctgctgagcacccccctggcctttgccagcagcgccagccccacagatgtgagcagcaaccccttcctgcccagcgacagcagcaagaccagcgagctgcacagcaacagcgccctgcccggccctgtggacaacacccacatcctgagccctgtgagcagcttccggccctacacctggtgtgccgcctgcaccgtgcccagcccccagcaggtgctggccaccagcctgatggagaaggatgtgggcagcggagatggagctgagaccctgtgcatgacagtgctggaggagagcagcatcagcctgatgagctctgtggtggccgacttcagcgagtttgaggaggacccccaggtgttcaacaccctcttccccagccggcccatcgtgcccctgagcagccgctccatggagatcagcgagacctctgtgggcatctctgctgaggtggacatgagctctgtgaccaccacccaggtgcccccagcccacggccgcctgtctgtgcctgccagcctggaccccacagctggcagcctgtctgtggccgagacccaggtgacccccagctctgtgaccacagccttcttcagcgtcatcaccagcatcctgctggacagcagcttctctgtgattgccaacaagaacacccccagcctggccgtgcgggaccccagcgtcttcaccccctacagcctggtgcccagcgtggagagcagcctcttcagtgaccaggagaggagcagcttcagcgagcacaagcccaggggggccctggactttgccagcagcttcttcagcaccccacccctggagctgagcggcagcatcagcagccccagcgaggccccagccagcctgagcctgatgcccagcgacctgagccccttcaccagccagagcttcagccccctggtggagaccttcaccctgtttgacagcagtgacctgcagagcagccagctgagcctgcccagcagcaccaacctggagttcagccagctgcagcccagcagcgagctgcccctgaacaccatcatgctgctgcccagccgctctgaggtgagcccctggagcagcttccccagcgacagcctggagtttgtggaggccagcacagtgtccctgacagacagcgaggcccacttcaccagcgccttcatcgagaccaccagctacctggagagcagcctcatcagccatgagagcgctgtgacagccctggtgcccccaggcagcgagagctttgacatcctgacagctggcatccaggccaccagccccctgaccaccgtgcacaccacccccatcctgacagagagcagcctcttcagcaccctgaccccaccagatgaccagatcagcgccctggatggccacgtgtctgtgctggccagcttcagcaaggccatccccaccggcaccgtgctgatcacagatgcctacctgcccagcggcagcagctttgtgtctgaggccacccccttccccctgcccacagagctgactgtggtgggccccagcctgacccccacagaggtgcccctgaacaccagcacagaggtgtccaccaccagcactggagctgccaccggcggccccctggacagcaccctgatgggagatgctgccagccagagccccccagagagcagcgctgccccacccctgcccagcctgcggcctgtgacagccttcaccctggaggccaccgtggacacccccaccctggccacagccaagccaccctacgtgtgtgacatcaccgtgcctgatgcctacctgatcaccaccgtgctggccaggagagctgtgcaggagtacatcatcacagccatcaaggaggtgctgcgcatccacttcaacagagctgtggagctgaaggtgtatgagctgttcacagacttcaccttcctggtgaccagcggcccctttgtgtacacagccatcagcgtcatcaacgtgctgatcaacagcaagctggtgcgggaccagacccccctcatcctgtctgtgaagcccagcttcctggtgcctgagagccgcttccaggtgcagacagtgctgcagtttgtgccccccagcgtggacaccggcttctgcaacttcacccagagaattgagaagggcctgatgacagccctgtttgaggtgaggaagcaccaccagggcacctacaacctgactgtgcagatcctgaacatcaccatcagcagcagccgggtgaccccccggcggggccctgtgaacatcatctttgctgtgaagagcacccagggcttcctgaatggcagcgaggtgtctgagctgctgaggaacctgtctgtggtggagttctccttctacctgggctaccctgtgctgcagattgctgagcccttccagtacccccagctgaacctgagccagctgctgaagagctcctgggtgaggacagtgctgctgggcgtgatggagaagcagctgcagaatgaggtgttccaggccgagatggagaggaagctggcccagctgctgtctgaggtgtccaccaggaggaggatgtggaggcgggccaccgtggccgccggcaacagcgtggtgcaggtggtgaatgtgtcccggctggagggagatgacaaccctgtgcagctgatctactttgtggaggaccaggatggagagcggctgtctgctgtgaagagcagtgacctgatcaacaagatggacctgcagagagctgccatcatcctgggctaccgcatccagggcgtcatcgcccagcctgtggacagagtgaagaggcccagccctgagagccagagcaacaacctgtgggtgattgtgggcgtggtgattcctgtgctggtggtgatggtgattgtggtgatcctgtactggaagctgtgcaggacagacaagctggacttccagcctgacacagtggccaacatccagcagaggcagaagctgcagatccccagcgtgaagggctttgattttgccaagcagcacctgggccagcacaacaaggatgacatcctgatcatccacgagcccgcccccctgcccggccccctgaaggaccacaccacccccagtgaaaatggagatgtgcccagccccaagagcaagatccccagcaagaatgtgcgccaccggggccgggtgagccccagtgatgctgacagcacagtgtctgaggagagcagcgagagagatgctggggacaagaccccaggagctgtgaatgatggccgcagccaccgggccccccagagcggcccccccctgcccagcagtggaaatgagcagcacagcagcgccagcatctttgagcacgtggaccgcatcagcaggcctcctgaggccagccggcgggtgcccagcaagatccagctgattgccatgcagcccatcccagcccctcctgtgcagaggcccagccctgctgacagagtggccgagagcaacaagatcaacaaggagatccagacagccctgcggcacaagtcagaaattgagcaccacaggaacaagatccggctgcgggccaagagaagaggccactatgagttccctgtggtggatgacctgagcagcggggacaccaaggagcggcaccgggtgtaccgccgggcccagatgcagattgacaagatcctggaccccacagcctctgtgcccagcgtcttcatcgagcccaggaagagcagccgcatcaagaggagccccaagcccaggaggaagcaccaggtgaatggctgcccagcagatgctgagaaggacaggctcatcaccacagacagtgatggcacctacagaagacctcctggggtgcacaacagcgcctacatcggctgccccagcgaccctgacctgcctgcagatgtgcagacccccagctctgtggagctgggccgctacccagccctgcccttccctgccagccagtacatccccccccagcccagcattgaggaggcccggcagaccatgcacagcctgctggatgatgcctttgccctggtggcccccagcagccagcctgccagcacagctggggtgggccctggggtgcccccaggcctgcctgccaacagcacccccagccaggaggagcggcgggccacccagtggggcagcttctacagccctgcccagacagccaacaacccctgcagccgctatgaggactatggcatgaccccacccaccggccccctgccccggcccggcttcggccctggcctgctgcagagcacagagctggtgcccccagacccccagcagccccaggccagcgctgaggccccctttgctgcccggggcatctacagcgaggagatgcccagcgtggcccggcccaggcctgtgggcggcaccaccggcagccagatccagcacctgacccaggtgggcatcgccagcagaattggagcccagcctgtggagatcccccccagccggggcagccagtatggaggccctggctggcccagctatggagaagatgaagctggaagaagagaggccgtgcccaggaccagcggccgggagcccagcgcccccagcggcaacctgccccaccggggcctgcagggccctggcctgggctaccccaccagcagcacagaggacctgcagcccggccacagcagcgccagcctcatcaaggccatccgggaggagctgctgcggctgagccagaagcagagcacagtgcagaacttccacagctag

SEQ ID NO: 165856 - DNA, 252 bp, synthetic construct
  misc_feature 1..252: note = Description of Artificial Sequence: Synthetic coding sequence
  source 1..252: mol_type = other DNA
atgggcggcctcttcagccgctggaggaccaagcccagcacagtggaggtgctggagagcattgacaaggagatccaggccctggaggagttccgggagaagaaccagaggctgcagaagctgtgggtgggccgcctcatcctgtacagctctgtgctgtacctgttcacctgcctgattgtgtacctgtggtacctgcctgatgagttcaccgcccggctggccatgaccctgcccttctttgccttctag

SEQ ID NO: 165857 - DNA, 3090 bp, synthetic construct
  misc_feature 1..3090: note = Description of Artificial Sequence: Synthetic coding sequence
  source 1..3090: mol_type = other DNA
atgctgttccgggcccggggccctgtgcggggccggggctggggccggcctgctgaggccccccggcggggccgcagccccccctggagccctgcctggatctgctgctgggccctggccggctgccaggccgcctgggccggggacctgcccagcagcagcagccggcccctgcccccctgccaggagaaggactaccactttgagtacacagaatgtgacagcagcggcagccgctggagggtggccatccccaacagcgctgtggactgcagcggcctgcctgaccctgtgcggggcaaggagtgcaccttcagctgtgccagcggggagtacctggagatgaagaaccaggtgtgcagcaaatgtggggagggcacctacagcctgggcagcggcatcaagtttgatgagtgggatgagctgcctgctggcttcagcaacatcgccaccttcatggacacagtggtgggccccagcgacagcaggccagatggctgcaacaacagctcctggatcccccggggcaactacatcgagagcaacagagatgactgcaccgtgtccctcatctatgctgtgcacctgaagaagagcggctacgtgttctttgagtaccagtatgtggacaacaacatcttctttgagttcttcatccagaatgaccagtgccaggagatggacaccaccacagacaagtgggtgaagctgacagacaacggggagtggggcagccacagcgtgatgctgaagagcggcaccaacatcctgtactggaggaccaccggcatcctgatgggcagcaaggctgtgaagcctgtgctggtgaagaacatcaccattgaaggagtggcctacaccagcgagtgcttcccctgcaagccaggcaccttcagcaacaagccaggcagcttcaactgccaggtgtgccccaggaacacctacagcgagaagggggccaaggagtgcatccgctgcaaggatgacagccagttcagcgaggagggcagcagtgaatgtacagagcggcccccctgcaccaccaaggactacttccagatccacaccccctgtgatgaggagggcaagacccagatcatgtacaagtggattgagcccaagatctgccgggaggacctgacagatgccatccggctgcccccatctggagagaagaaggactgccccccctgcaaccctggcttctacaacaacggcagcagcagctgccacccctgccccccaggcaccttcagtgatggcaccaaggagtgccggccctgcccagctggaacagagcccgccctgggctttgagtacaagtggtggaatgtgctgcccggcaacatgaagaccagctgcttcaacgtgggcaacagcaaatgtgatggcatgaatggctgggaggtggccggggaccacatccagagcggggccggcggcagtgacaatgactacctgatcctgaacctgcacatccctggcttcaagccacccacctccatgactggagccaccggcagcgagctgggccgcatcacctttgtgtttgagaccctgtgcagcgctgactgtgtgctgtacttcatggtggacatcaacaggaagagcaccaacgtggtggagagctggggcggcaccaaggagaagcaggcctacacccacatcatcttcaagaatgccaccttcaccttcacctgggccttccagaggaccaaccagggccaggacaacagacgcttcatcaatgacatggtgaagatctacagcatcacagccaccaatgctgtggatggagtggccagcagctgccgggcctgtgccctgggcagcgagcagagcggcagcagctgtgtgccctgccccccaggccactacatcgagaaggagaccaaccagtgcaaggagtgccccccagacacctacctgagcatccaccaggtgtatggcaaggaggcctgcatcccctgtggccctggcagcaagaacaaccaggaccacagcgtgtgctacagcgactgcttcttctaccacgagaaggagaaccagagcctgcactatgacttcagcaacctgagctctgtgggcagcctgatgaatggccccagcttcaccagcaagggcaccaagtacttccacttcttcaacatcagcctgtgtggccacgagggcaagaagatggccctgtgcaccaacaacatcacagacttcaccgtgaaggagatcgtggccggcagtgatgactacaccaacctggtgggcgcctttgtgtgccagagcaccatcatccccagcgagagcaagggcttccgggccgccctgagcagccagagcatcatcctggccgacaccttcatcggcgtgacagtggagaccaccctgaagaacatcaacatcaaggaggacatgtttcctgtgcccaccagccagatcccagatgtgcacttcttctacaagagcagcacagccaccaccagctgcatcaatggccgcagcacagctgtgaagatgcgctgcaaccccaccaagagcggggccggggtcatctctgtgcccagcaagtgcccagctggcacctgtgatggctgcaccttctacttcctgtgggagagcgctgaggcctgccccctgtgcacagaacatgacttccacgagattgagggcgcctgcaagaggggcttccaggagaccctgtatgtgtggaatgagcccaagtggtgcatcaagggcatcagcctgcctgagaagaagctggccacctgtgaaacagtggacttctggctgaaggtgggcgctggggtgggcgccttcaccgctgtgctgctggtggccctgacctgctacttctggaagaagaaccagaagctggagtacaagtacagcaagctggtgatgaccaccaacagcaaagaatgtgagctgcctgctgctgacagctgtgccatcatggagggggaggacaatgaggaggaggtggtgtacagcaacaagcagagcctgctgggcaagctgaagagcctggccaccaaggagaaggaggaccactttgagagcgtgcagctgaagaccagccgcagccccaacatctag

SEQ ID NO: 165858 - DNA, 11043 bp, synthetic construct
  misc_feature 1..11043: note = Description of Artificial Sequence: Synthetic coding sequence
  source 1..11043: mol_type = other DNA
atggaccagaggaagaatgaaagcatcgtgcccagcatcacccagctggaggacttcctgacagagcacaacagcaatgtggtgtggctgctggtggccaccatcctgagctgtggctggatcatctacctgacctactacaacagcagaaatgtgggcctcatcctgaccctggtgctgaacagactctacaagcacggctacatccacatcggcagcttctccttctctgtgctgagcggcaaggtgatggtgcgggagatctactacatcacagaggacatgagcatccgcatccaggacggcttcatcatcttccgctggtggaagatgtacaaccccaagcagaagcagcacgaccccaaggccgagacccggctgtacatcaccgtgaatgactttgagttccacgtgtacaacagaagtgacctgtatggccgcctgcaggagctgtttggcctggagcccaccatcatcccccccaagaaggatgatgacaagacccgggagattggaagaaccaggacccagagcaagattgaaagagtgaaggtgaagacagagagccaggaccccaccagctcctggaggagcctcatccctgtgatcaaggtgaatgtgtccacaggccgcctggccttcggcaaccactaccagccccagaccctgtgcatcaactttgatgatgccttcctgacctacaccaccaagccacccagcagccacctggaccagttcatgcacatcgtgaagggcaagctggagaatgtgcgggtgatgctggtgcccagccccaggtatgtgggcctgcagaatgatgagcccccccggctgatgggagagggctttgtggtgatgcagagcaatgatgtggacatctactactacatggatgagcccggcctggtgcctgaggagacagaagaaaatattgaaggagagatgagcagcgaggactgcaagctgcaggacctgcccccctgctggggcctggacatcgtgtgtgggaaaggaacagacttcaactacggcccctgggccgaccggcagagggactgcctgtggaagttcttcttccccccagactaccaggtgctgaaggtgtctgaaattgcccagcccggccggccccggcagatcctggcctttgagctgaggatgaacatcatcgcagatgccaccatcgacctgctcttcaccaagaaccgggagaccaatgctgtgcacgtgaatgtgggcgccggcagctacctggagatcaacatccccatgacagtggaggagaatggctacaccccagccatcaagggccagctgctgcacgtggatgccaccacctccatgcagtaccgcaccctgctggaggccgagatgctggccttccacatcaatgccagctacccccgcatctggaacatgccccagacctggcagtgtgagctggaggtgtacaaggccacctaccacttcatctttgcccagaagaacttcttcacagacctgatccaggactggagcagtgacagccccccagacatcttctcctttgtgccctacacctggaacttcaagatcatgttccaccagtttgagatgatctgggccgccaaccagcacaactggattgactgcagcaccaagcagcaggagaatgtgtacctggccgcctgtggggagaccctgaacatcgacttcagcctgcccttcacagactttgtgcctgccacctgcaacaccaagttcagcctgcggggggaggatgtggacctgcacctgttcctgcctgactgccaccccagcaagtacagcctcttcatgctggtgaagaactgccaccccaacaagatgattcatgacaccggcatcccagctgagtgccagagcggccagaagacagtgaagcccaagtggagaaatgtgacccaggagaagagcggctgggtggagtgctggacagtgcccagcgtgatgctgaccatcgactacacctggcaccccatctacccccagaaggcagatgagcagctgaagcagagcctgtctgagatggaggagaccatgctgtctgtgctgcggcccagccagaagaccagtgacagagtggtgagcagccccagcaccagcagcaggcctcccatcgaccccagcgagctgcccccagacaagctgcacgtggagatggagctgagcccagacagccagatcaccctgtatggccccctgctgaatgccttcctgtgcatcaaggagaactactttggagaagatgacatgtacatggactttgaggaggtgatcagcagccctgtgctgagcctgagcaccagcagcagcagcggctggacagctgtgggcatggagaatgacaagaaggaaaatgaaggcagcgccaagagcatccaccccctggccctgcggccctgggacatcaccgtgctggtgaacctgtacaaggtgcacggccgcctgcctgtgcacggcaccacagatggcccagaatgtcccacagccttcctggagcggctgtgctttgagatgaagaagggcttccgggagaccatgctgcagctgatcctgagccccctgaatgtgtttgtgtctgacaactaccagcagaggcctcctgtggatgaggtgctgcgggagggccacatcaacctgagcggcctgcagctgcgggcccacgccatgttttctgctgagggcctgcccctgggcagtgacagcctggagtatgcctggctgattgatgtgcaggccggcagcctgacagccaaggtgacagccccccagctggcctgcctgctggagtggggccagacctttgtgttccacgtggtgtgccgggagtatgagctggagcggcccaagagcgtcatcatctgccagcacggcatcgaccggcgcttctgtgagagcaagctgagctgcatccctggcccctgccccaccagtgatgacctgaagtacaccatgatccggctggccgtggatggagctgacatctacatcgtggagcacggctgtgccaccaacatcaagatgggcgccatccgggtggccaactgcaacctgcacaaccagagcgtgggggagggcatctctgctgccatccaggacttccaggtgcggcagtacatcgagcagctgaacaactgcagaattggcctgcagcctgctgtgctgcggcgggcctactggctggaggccggcagcgccaacctgggcctcatcaccgtggacatcgccctggccgctgaccaccacagcaagcatgaggcccagaggcacttcctggagacccatgatgcccggaccaagaggctgtggttcctgtggccagatgacatcctgaagaacaagcgctgcaggaacaagtgtggctgcctgggcggctgccgcttcttcggcggcaccgtgacaggcctggacttcttcaagctggaggagctgacccccagcagcagcagcgccttcagcagcaccagcgctgagagtgacatgtactacggccagagcctgctgcagcctggagagtggatcatcaccaaggagatccccaagatcattgatggaaatgtgaatggcatgaagaggaaggagtgggagaacaagtctgtgggcatcgaggtggagaggaagacccagcacctgagcctgcaggtgcccctgcggagccacagcagcagcagcagcagcgaggagaacagcagcagcagcgctgcccagcccctgctggccggggagaaggagagccccagctctgtggctgatgaccacctggtgcagaaggagttcctgcacggcaccaagagagatgatggccaggccagcatccccacagagatcagcggcaacagccctgtgagccccaacacccaggacaagtctgtgggccagagccccctgcggagccccctgaagaggcaggcctctgtgtgcagcacccggctgggcagcaccaagagcctgacagctgccttctatggagacaagcagcctgtgacagtgggcgtgcagttcagcagtgatgtgtccagaagtgatgaaaatgtgctggacagccccaagcagaggaggagctttggcagcttcccctacacccccagcgctgacagcaacagcttccaccagtaccgctccatggacagctccatgtccatggctgacagcgaggcctacttctctgctgctgaggagtttgagcccatcagcagtgatgagggccctggcacctacccaggcaggaagaagaagaagaagcagacccagcagattgactacagccggggcagcatctaccacagcgtggagggccccctgaccggccacggggagagcatccaggacagcaggaccctgcccttcaagacccaccccagccaggccagctttgtgtctgccctgggcggggaggatgatgtgattgagcacctgtacatcgtggagggggagaagacagtggagagcgagcagatcaccccccagcagcctgtgatgaactgctaccagacctacctgacccagttccaggtgatcaactggagcgtgaagcaccccaccaacaagaggaccagcaagagcagcctgcaccggcccctggacctggacacccccaccagcgaggagagcagcagcagctttgagcagctgtctgtgcccaccttcaaggtgatcaagcagggcctgacagccaacagcctgctggaccggggcatgcagctgagcggcagcaccagcaacaccccctacacccccctggagaagaagctggccgacaacacagatgatgagaccctgacagaggagtggaccctggaccagcctgtgtcccagaccaggaccacagccatcgtggaggtgaagggcaccgtggacatcgtgctgacccccctggtggccgaggccctggaccgctacatcgaggccatggtgcactgtgccagcaccaggcaccctgctgccatcgtggatgacctgcacgccaaggtgctgcgggaggccgtgcagaacagcaagaccaccttcagcgagaacctgagcagcaagcaggacatccggggcaccaagacagagcagagcaccatcggcaccaccaaccagggccaggcccagaccaacctgaccatgaagcaggacaacgtgaccatcaagggcctgcagaccaacgtgtccatccccaaggtgaacctgtgcctgctgcaggcctctgtggaggagagccccaccacagcccccagccgctctgtgacccacgtgtccctggtggccctgtgctttgacagaattgccacccaggtgaggatgaacagaggagtggtggaggagaccagcaacaatgctgagcccggccgcaccagcaactttgaccgctacgtgcacgccaccaagatgcagccccagagcagcggcagcctgcggagcaatgctggagctgagaagggcaaggagattgctgccaagctgaacatccaccgggtgcacggccagctgcggggcctggacaccacagacatcggcacctgtgccatcacagccatcccctttgagaagagcaaggtgctcttcaccctggaggagctggatgagttcacctttgtggatgaaacagaccagcaggccgtgcctgatgtgaccagaattggccccagccaggagaagtggggctggatcatgtttgaatgtggcctggagaacctgaccatcaagggcggccggcagagcggggctgtgctgtacaacagctttggcatcatgggcaaggccagtgacacagagcggggcggcgtgctgaccagcaacaacagcagtgacagccccactggaagtggctacaacacagatgtgtctgatgacaacctgccctgtgacaggaccagccccagcagtgacctgaatggaaattctgtgtctgatgagcaggatgaaggagtggagagtgatgacctgaagaaggacctgcccctgatgcctcctcctccagacagctgcagcatgaagctgaccatcaaggagatctggttctcctttgctgcccccaccaacgtgcgcagccacacccacgccttcagccggcagctgaacctgctgagcacagccaccccagctgtgggcgcctggctggtgcccatcgaccagctgaagagcagcctgaacaagctggagacagagggcaccctgcgcatctgtgctgtgatgggctgcatcatgacagaggccctggagaacaagtctgtgcacttccccctgcggagcaagtacaaccggctgaccaaggtggcccgcttcctgcaggagaaccccagctgcctgctgtgcaacatcctgcaccactacctgcaccaggccaactacagcatcattgatgatgccaccatgtctgatggcctgcctgccctggtgaccctgaagaagggcctggtggccctggcccggcagtggatgaagttcatcgtggtgaccccagccttcaagggcgtgtccctgcacaggcctgcccagcccctgaagccccagatcgccatggaccatgaacatgaagatggcctgggcctggacaatggaggcggcctgcagagcgacaccagcgcagatggagctgagtttgaatttgatgctgccaccgtgtctgagcacaccatgctgctggagggcacagccaacagacctcctcctggcagcagcggccctgtgactggagctgagatcatgaggaagctgagcaagacccacacccacagcgacagcgccctgaagatcaagggcatccacccctaccacagcctgagctacaccagcggggacacagccacagacagccctgtgcacgtgggccgggccggcatgcctgtgaaggacagccccaggaaggagagcctgctgagctacctgaccggcagcttccccagcctgcacaacctgctggagggcaccccccagaggagcagcgctgctgtgaagagcagcagcctgaccaggactggaaacacagtggccacagacatgctgtctgagcaccccctgctgtctgagcccagctctgtgtccttctacaactggatgagcaatgctgtgggcaacagaggctctgtgctgcaggagagccctgtgaccaagagcggccacaacagcctgcccaccggggtggcccccaacctgcccaccatccccagcgccagtgacttcaacacagtgctgagcagtgaccagaacaccctggatggcacccacagccagcacagcaccagccaggatgatgtggccggcgtggaggaggccaaccagggcttccctgctgtgcagctggctgatgcccaggtggtgttcaagcccctgctgagccacacaggcatccagagccaggacaccatgcccttctgctacaggatgtactttggagagcacctgtccttcagcggcaccctggactgcctgcgggctgacatcgtggacagcgacacagccaaggagaggaagggcaagagggcccggcggcagggccacgtgaacctgccccccctggagttcaagccagccctgatgctgggcaccttcagcatctctgctgtggtgatggagaagtctgtgtgcaccccccagaacagcaccagcgccctgtccttccatgacctgagcaagcgctactacaacaccttccactgcaacttcaccatcagctgccagagcatcagccagcacgtggacatggccctggtgcggctcatccaccagttcagcaccatgattgatgacatcaaggccacccagacagacatcaagctgagccgctacacagctggcagcgccagccccacccccaccttcaagaccaggaagcaccgggacttccgcagcagtgacttcagccgcagcagccggggcagcctgaatggaggcaacagagtgaacaatgccaagaacaagaggaccaacaatgaaaacaacaagaaggagagcaggaacaagaacagcctgggccgctcagaaagaaggaccagcaaggtgtccaggaagggcagcaaggatgtggtggaccacatgaccatccacatggatgacagcgacagcatcaccgtgtctgagcagagcgagcccagcgctgagtgctggcagaacatgtacaagctgctgaacttctacagcctcatcagtgaccccaccggcatcctggagaagagcagcgagaccttcggccctgctggggtgcgcagccccacagagcccacctgcaaggtggtgtttgaaaatgagcaggacaacagcagcctgaccaagacccagaggaagaggagcctggtgaccagcgagccccagcacgtgaccctcatcgtgtttggcatcggcatggtgaacagaacccacctggaggccgacatcggcggcctgaccatggagagcgagctgaagagaattcatggcagcttcaccctgaaggagaagatgaaggatgtgctgcaccagaagatgacagagacctgtgccacagcccacatcggcggcgtgaacatcgtgctgctggagggcatcacccccaacatccagctggaggacttccccaccagccccaccagcacagccaagcaggagttcctgactgtggtgaagtgcagcatcgccaagagccaggccctgtacagcgcccagaggggcctgaagaccaacaatgctgctgtgttcaaggtgggcgccatcagcatcaacatcccccagcacccagccaccctgcacagcatgatggtgcgcagcagccaccagctgagcaagcagatcagtgacctgatccggcagcccagcacagccccccagcctgtgaaggaggacatcgccacccccctgcccagcgagaagacccccacctctgtgaaccagacccctgtggagaccaatgagttcccccagctgcctgagggcctggagaagaagcccatcgtgctgaagttcagcgccatgctggatggcatcgccatcggggccgccctgctgcccagcctgaaggccgagtacaagatgggccgcatgaggagccacggcatgaccggggcccagacccgcttcacctttgagctgcccaaccaccggctgcgcttcaccagcaaggtgtctgccacagacatgagcaccatcccccccagcgccagcctgaacctgccccctgtgaccatgtctgggaagtacatcatggaggagcatgacagctacagcgaccaggtgtggagcattgatgagctgcccagcaagcagggctactacctgcagggcaactacctgcgctgtgtggccgaggtgggcagctttgagcacaacctgaccacagacctgctgaaccacctggtgtttgtgcagaaggtgttcatgaaggaggtgaatgaggtgatccagaaggtgtctggaggagagcagcccatccccctgtggaatgaacatgatggaacagcagatggagacaagcccaagatcctgctgtacagcctgaacctgcagttcaagggcatccaggtgacagccaccacccccagcatgagagctgtgcgctttgagaccggcctgattgagctggagctgagcaaccggctgcagaccaaggccagccctggcagcagcagctacctgaagctgtttgggaagtgccaggtggacctgaacctggccctgggccagatcgtgaagcaccaggtgtatgaggaggccggcagtgacttccaccaggtggcctacttcaagaccagaattggcctgagaaatgccctgcgggaggagatcagcggcagcagtgaccgggaggccgtgctgatcaccctgaaccggcccatcgtgtatgcccagcctgtggcctttgacagagctgtgctcttctggctgaactacaaggccgcctatgacaactggaatgagcagaggatggccctgcacaaggacatccacatggccaccaaggaggtggtggacatgctgcccggcatccagcagaccagcgcccaggccttcggcaccctcttcctgcagctgactgtgaatgacctgggcatctgcctgcccatcaccaacacagcccagagcaaccacactggagacctggacaccggcagcgccctggtgctgaccatcgagagcaccctcatcacagcctgcagcagcgagagcctggtgtccaagggccacttcaagaacttctgcatccgctttgctgatggctttgagacctcctgggatgactggaagccagagatccacggggacctggtgatgaatgcctgtgtggtgcctgatggcacctatgaggtgtgcagcaggaccaccggccaggccgctgctgagagcagcagcgctggcacctggaccctgaatgtgctgtggaagatgtgtggcattgatgtgcacatggaccccaacatcggcaagaggctgaatgccctgggcaacaccctgaccaccctgactggagaggaggacattgatgacattgctgacctgaacagcgtgaacattgctgacctgagtgatgaagatgaggtggacaccatgagccccaccatccacacagaggccacagactaccgccggcaggccgccagcgccagccagcccggggagctgcggggcaggaagatcatgaagagaattgtggacatccgggagctgaatgagcaggccaaggtgattgatgacctgaagaagctgggcgccagcgagggcaccatcaaccaggagatccagcgctaccagcagctggagagcgtggccgtgaatgacatcagaagagatgtgaggaagaagctgcggcgcagctccatgagagctgccagcctgaaggacaagtggggcctgagctacaagcccagctacagccgcagcaagagcatcagcgccagcggccggccccccctgaagaggatggagcgggccagcagccgggtgggggagacagaggagctgcctgagatccgggtggatgctgccagccctggcccccgggtgaccttcaacatccaggacaccatcgccgagatccggaggaagaagatctccttcaaggtggtgttctag

SEQ ID NO: 165859 - DNA, 2241 bp, synthetic construct
  misc_feature 1..2241: note = Description of Artificial Sequence: Synthetic coding sequence
  source 1..2241: mol_type = other DNA
atgccctgcctgggcctgctggccaacctgtgccgccacaacctgtctgtgcagacccacatcaagaccctgagcaatgtgaagagcttctaccgcaccctcatcaccctgctggcccacagcagcctgactgtggtggtgtttgccctgagcatcctgagcagcctgaccctgaatgaggaggtgggggagaagctgttccacgccaggaacatccaccagaccttccagctgatcttcaacatcctgatcaatggagatggcaccctgaccaggaagtacagcgtggacctgctgatggacctgctgaagaaccccaagattgctgactacctgaccaggtatgagcacttcagcagctgcctgcaccaggtgctgggcctgctgaatggcaaggaccctgacagcagcagcaaggtgctggagctgctgctggccttctgcagcgtgacccagctgcggcacatgctgacccagatgatgtttgagcagagccccccaggcagcgccaccctgggcagccacaccaagtgcctggagcccaccgtggccctgctgcgctggctgagccagcccctggatggcagcgagaactgcagcgtgctggccctggagctgttcaaggagatctttgaagatgtgattgatgctgccaactgcagcagcgctgacagatttgtgaccctgctgctgcccaccatcctggaccagctgcagttcacagagcagaacctggatgaggccctgaccaggaagaagtgtgaaagaattgccaaggccatcgaggtgctgctgaccctgtgtggagatgacaccctgaagatgcacatcgccaagatcctgaccaccgtgaagtgcaccaccctcatcgagcagcagttcacctacggcaagattgacctgggcttcggcaccaaggtggccgacagcgagctgtgcaagctggccgcagatgtgatcctgaagaccctggacctgatcaacaagctgaagcccctggtgcccggcatggaggtgtccttctacaagatcctgcaggaccccaggctcatcacccccctggcctttgccctgaccagtgacaaccgggagcaggtgcagagcggcctgcgcatcctgctggaggccgcccccctgcctgacttccctgccctggtgctgggggagagcattgctgccaacaatgcctaccggcagcaggagacagagcacatccccaggaagatgccctggcagagcagcaaccacagcttccccaccagcatcaagtgcctgaccccccacctgaaggatggagtgcccggcctgaacatcgaggagctgattgagaagctgcagagcggcatggtggtgaaggaccagatctgtgatgtgcgcatcagtgacatcatggatgtgtatgagatgaagctgagcaccctggccagcaaggagagccggctgcaggacctgctggagaccaaggccctggccctggcccaggccgaccggctgattgcccagcaccgctgccagaggacccaggccgagacagaggcccggaccctggcctccatgctgcgggaggtggagaggaagaatgaggagctgtctgtgctgctgaaggcccagcaggtggagagcgagcgggcccagagcgacatcgagcacctgttccagcacaacaggaagctggagagcgtggccgaggagcacgagatcctgaccaagagctacatggagctgctgcagagaaatgaaagcacagagaagaagaacaaggacctgcagatcacctgtgacagcctgaacaagcagatcgagaccgtgaagaagctgaatgaaagcctgaaggagcagaatgagaagagcatcgcccagctgattgagaaggaggagcagaggaaggaggtgcagaaccagctggtggaccgggagcacaagctggccaacctgcaccagaagaccaaggtgcaggaggagaagatcaagaccctgcagaaggagcgggaggacaaggaggagaccatcgacatcctgaggaaggagctgagcaggacagagcagatcaggaaggagctgagcatcaaggccagcagcctggaggtgcagaaggcccagctggagggccgcctggaggagaaggagagcctggtgaagctgcagcaggaggagctgaacaagcacagccacatgattgccatgatccacagcctgagcggcggcaagatcaaccctgagaccgtgaacctgagcatctag

SEQ ID NO: 165860 - DNA, 840 bp, synthetic construct
  misc_feature 1..840: note = Description of Artificial Sequence: Synthetic coding sequence
  source 1..840: mol_type = other DNA
atgaccctgcccttctttgccttccccctcatcatctggagcatcagaactgtcatcatcttcttcttcagcaagaggacagaaagaaataatgaggccctggatgacctgaagagccagaggaagaagatcctggaggaggtgatggagaaggagacctacaagacagccaagctgatcctggagagatttgatcctgacagcaagaaggccaaggaatgtgagccccccagcgctggagctgctgtgacagcccggcccggccaggagatccggcagaggacagctgcccagaggaacctgagccccaccccagccagccccaaccagggccccccaccccaggtgcctgtgtccccaggcccccccaaggacagcagcgcccctgggggccccccagagaggacagtgaccccagccctgagcagcaatgtgctgcccaggcacctgggcagccctgccacctctgtgcccggcatgggcctgcaccccccaggcccccccctggcccggcccatcctgccccgggagcggggggccctggaccgcatcgtggagtacctggtgggagatggcccccagaacagatatgccctgatctgccagcagtgcttcagccacaacggcatggccctgaaggaggagtttgagtacatcgccttccgctgtgcctactgcttcttcctgaacccagccaggaagacccggccccaggccccccggctgcctgagttctcctttgagaagaggcaggtggtggagggcagcagctctgtgggccccctgcccagcggctctgtgctgagcagtgacaaccagttcaatgaggtgcagtactag

SEQ ID NO: 165861 - DNA, 3192 bp, synthetic construct
  misc_feature 1..3192: note = Description of Artificial Sequence: Synthetic coding sequence
  source 1..3192: mol_type = other DNA
atgacccggctgggctggcccagcccctgctgtgccaggaagcagtgcagcgagggccgcacctacagcaatgctgtgatcagccccaacctggagaccacccgcatcatgagggtgagccacaccttccctgtggtggactgcacagctgcctgctgtgacctgagcagctgtgacctggcctggtggtttgagggccgctgctacctggtgtcctgcccccacaaggagaactgtgagcccaagaagatgggccccatccgcagctacctgacctttgtgctgcggcctgtgcagaggcctgcccagctgctggactatggagacatgatgctgaacagaggcagccccagcggcatctggggagacagccctgaggacatcaggaaggacctgaccttcctgggcaaggactggggcctggaggagatgtctgagtacagtgatgactaccgggagctggagaaggacctgctgcagcccagcggcaagcaggagccccggggcagcgctgagtacacagactggggcctgctgcccggcagcgagggcgccttcaacagctctgtgggggacagccctgctgtgcctgctgagacccagcaggaccctgagctgcactacctgaatgaaagtgccagcaccccagcccccaagctgcctgagaggtctgtgctgctgcccctgcccaccacccccagcagtggagaggtgctggagaaggagaaggccagccagctgcaggagcagagcagcaacagcagcggcaaggaggtgctgatgcccagccacagcctgcccccagccagcctggagctgagctctgtgacagtggagaagagccctgtgctgactgtgaccccaggcagcacagagcacagcatccccaccccacccaccagcgctgcccccagcgagagcacccccagcgagctgcccatcagccccaccacagcccccaggacagtgaaggagctgactgtgtctgctggggacaacctgatcatcaccctgcctgacaatgaggtggagctgaaggcctttgtggccccagcccctcctgtggagaccacctacaactatgagtggaacctgatcagccaccccacagactaccagggcgagatcaagcagggccacaagcagaccctgaacctgagccagctgtctgtgggcctgtatgtgttcaaggtgacagtgtccagtgaaaatgccttcggggagggctttgtgaatgtgacagtgaagccagccaggagagtgaacctgccccctgtggccgtggtgagcccccagctgcaggagctgaccctgcccctgaccagcgccctgattgatggcagccagagcacagatgacacagagatcgtgtcctaccactgggaggagatcaatggccccttcatcgaggagaagacctctgtggacagccctgtgctgcggctgagcaacctggaccccggcaactacagcttccggctgactgtgacagacagtgatggagccaccaacagcaccacagctgccctgattgtgaacaatgctgtggactacccacctgtggccaatgccggccccaaccacaccatcaccctgccccagaacagcatcaccctgaatggaaaccagagcagtgatgaccaccagatcgtgctgtatgagtggagcctgggccctggcagcgagggcaagcacgtggtgatgcagggcgtgcagaccccctacctgcacctgagcgccatgcaggagggggactacaccttccagctgaaggtgacagacagcagccggcagcagagcacagctgtggtgacagtgattgtgcagcctgagaacaacagacctcctgtggccgtggccggccctgacaaggagctgatcttccctgtggagagcgccaccctggatggcagcagcagcagtgatgaccacggcatcgtgttctaccactgggagcacgtgcggggccccagcgctgtggagatggagaacatcgacaaggccatcgccaccgtgacaggcctgcaggtgggcacctaccacttccggctgactgtgaaggaccagcagggcctgagcagcaccagcaccctgactgtggccgtgaagaaggagaacaacagccccccccgggcccgggccggcggccgccacgtgctggtgctgcccaacaacagcatcaccctggatggcagccgcagcacagatgaccagagaattgtgtcctacctgtggatcagagatggccagagccctgctgctggagatgtgattgatggcagtgaccacagcgtggccctgcagctgaccaacctggtggagggcgtgtacaccttccacctgcgggtgacagacagccagggcgccagtgacacagacacagccaccgtggaggtgcagcctgaccccaggaagagcggcctggtggagctgaccctgcaggtgggcgtgggccagctgacagagcagaggaaggacaccctggtgcggcagctggccgtgctgctgaatgtgctggacagcgacatcaaggtgcagaagatccgggcccacagcgacctgagcaccgtcatcgtgttctacgtgcagagccggccccccttcaaggtgctgaaggctgctgaggtggccaggaacctgcacatgaggctgagcaaggagaaggctgacttcctgctcttcaaggtgctgcgggtggacacagctggctgcctgctgaagtgcagcggccacggccactgtgaccccctgaccaagcgctgcatctgcagccacctgtggatggagaacctgatccagcgctacatctgggatggagagagcaactgtgagtggagcatcttctacgtgacagtgctggccttcaccctcatcgtgctgactggaggcttcacctggctgtgcatctgctgctgcaagaggcagaagaggaccaagatcaggaagaagaccaagtacaccatcctggacaacatggatgagcaggagaggatggagctgcggcccaagtatggcatcaagcacaggagcacagagcacaacagcagcctgatggtgtctgagagcgagtttgacagcgaccaggacaccatcttcagccgggagaagatggagcggggcaaccccaaggtgtccatgaatggcagcatcagaaatggagccagcttctcctactgcagcaaggacagatag

SEQ ID NO: 165862 - DNA, 1293 bp, synthetic construct
  misc_feature 1..1293: note = Description of Artificial Sequence: Synthetic coding sequence
  source 1..1293: mol_type = other DNA
atgggccgctcctggccaggcctgagcctgtgccagtggaggctgctgcctgccctggaggccggctgggccgtggccgctgagactggaggcggcggccggcccggccgggccgccccagccagctgcagctgtgagttcctgtggaccattgatgacatctaccactgtgcccagttcctgcagatcaaggatggctggatcatcttctccatggaggcccggctggccatgaccctgcccttctttgccttccccctcatcatctggagcatccgcaccgtcatcatcttcttcttcagcaagaggacagagaggaacaatgaggccctggatgacctgaagagccagaggaagaagatcctggaggaggtgatggagaaggagacctacaagacagccaagctgatcctggagagatttgatcctgacagcaagaaggccaaggaatgtgagcccccatctgctggagctgctgtgacagcccggcccggccaggagatccggcagaggacagctgcccagaggaacctgagccccaccccagccagccccaaccagggccccccaccccaggtgcctgtgtccccaggcccccccaaggacagcagcgcccctgggggccccccagagaggacagtgaccccagccctgagcagcaatgtgctgcccaggcacctgggcagccctgccacctctgtgcccggcatgggcctgcaccccccaggcccccccctggcccggcccatcctgccccgggagcggggggccctggacagaattgtggagtacctggtgggagatggcccccagaacagatatgccctgatctgccagcagtgcttcagccacaacggcatggccctgaaggaggagtttgagtacatcgccttccgctgtgcctactgcttcttcctgaacccagccaggaagacccggccccaggccccccggctgcctgagttctcctttgagaagaggcaggtggtggagggcagcagctctgtgggccccctgcccagcggctctgtgctgagcagtgacaaccagttcaatgaggagagcctggagcatgatgtgctggatgacaacacagagcagacagatgacaagatcccagccacagagcagaccaaccaggtgattgagaaggccagtgacagcgaggagcctgaggagaagcaggagacagaaaatgaggaggcctctgtgattgagaccaacagcacagtgcctggagctgacagcatcccagaccctgagctgtctggagagagcctgacagctgagtag

SEQ ID NO: 165863 - DNA, 3036 bp, synthetic construct
  misc_feature 1..3036: note = Description of Artificial Sequence: Synthetic coding sequence
  source 1..3036: mol_type = other DNA
atggcccccccaactggagtgctgagcagcctgctgctgctggtgaccatcgccggctgtgccaggaagcagtgcagcgagggccgcacctacagcaatgctgtgatcagccccaacctggagaccacccgcatcatgagggtgagccacaccttccctgtggtggactgcacagctgcctgctgtgacctgagcagctgtgacctggcctggtggtttgagggccgctgctacctggtgtcctgcccccacaaggagaactgtgagcccaagaagatgggccccatccgcagctacctgacctttgtgctgcggcctgtgcagaggcctgcccagctgctggactatggagacatgatgctgaacagaggcagccccagcggcatctggggagacagccctgaggacatcaggaaggacctgaccttcctgggcaaggactggggcctggaggagatgtctgagtacagtgatgactaccgggagctggagaaggacctgctgcagcccagcggcaagcaggagccccggggcagcgctgagtacacagactggggcctgctgcccggcagcgagggcgccttcaacagctctgtgggggacagccctgctgtgcctgctgagacccagcaggaccctgagctgcactacctgaatgaaagtgccagcaccccagcccccaagctgcctgagaggtctgtgctgctgcccctgcccaccacccccagcagcggggaggtgctggagaaggagaaggccagccagctgcaggagcagagcagcaacagcagcggcaaggaggtgctgatgcccagccacagcctgcccccagccagcctggagctgagctctgtgacagtggagaagagccctgtgctgactgtgaccccaggcagcacagagcacagcatccccaccccacccaccagcgctgcccccagcgagagcaccccatctgagctgcccatcagccccaccacagcccccaggacagtgaaggagctgactgtgtctgctggggacaacctgatcatcaccctgcctgacaatgaggtggagctgaaggcctttgtggccccagcccctcctgtggagaccacctacaactatgagtggaacctgatcagccaccccacagactaccagggcgagatcaagcagggccacaagcagaccctgaacctgagccagctgtctgtgggcctgtatgtgttcaaggtgacagtgtccagtgaaaatgcctttggagagggctttgtgaatgtgacagtgaagccagcccggcgggtgaacctgccccctgtggccgtggtgagcccccagctgcaggagctgaccctgcccctgaccagcgccctgattgatggcagccagagcacagatgacacagaaattgtgtcctaccactgggaggagatcaatggccccttcatcgaggagaagacctctgtggacagccctgtgctgcggctgagcaacctggaccccggcaactacagcttccggctgactgtgacagacagtgatggagccaccaacagcaccacagctgccctgattgtgaacaatgctgtggactacccacctgtggccaatgccggccccaaccacaccatcaccctgccccagaacagcatcaccctgaatggaaaccagagcagtgatgaccaccagatcgtgctgtatgagtggagcctgggccctggcagcgagggcaagcacgtggtgatgcagggcgtgcagaccccctacctgcacctgagcgccatgcaggagggggactacaccttccagctgaaggtgacagacagcagccggcagcagagcacagctgtggtgaccgtcatcgtgcagcctgagaacaaccggccccctgtggccgtggccggccctgacaaggagctgatcttccctgtggagagcgccaccctggatggcagcagcagcagtgatgaccatggaattgtgttctaccactgggagcacgtgcggggccccagcgctgtggagatggagaacatcgacaaggccatcgccaccgtgacaggcctgcaggtgggcacctaccacttccggctgactgtgaaggaccagcagggcctgagcagcaccagcaccctgactgtggccgtgaagaaggagaacaacagccccccccgggcccgggccggcggcagacatgtgctggtgctgcccaacaacagcatcaccctggatggcagccgcagcacagatgaccagagaattgtgtcctacctgtggatcagagatggccagagccctgctgctggagatgtgattgatggcagtgaccacagcgtggccctgcagctgaccaacctggtggagggcgtgtacaccttccacctgcgggtgacagacagccagggcgccagtgacacagacacagccaccgtggaggtgcagcctgaccccaggaagagcggcctggtggagctgaccctgcaggtgggcgtgggccagctgacagagcagaggaaggacaccctggtgcggcagctggccgtgctgctgaatgtgctggacagcgacatcaaggtgcagaagatccgggcccacagcgacctgagcacagtgattgtgttctacgtgcagagcaggcctcccttcaaggtgctgaaggctgctgaggtggccaggaacctgcacatgaggctgagcaaggagaaggctgacttcctgctcttcaaggtgctgcgggtggacacagctggctgcctgctgaagtgcagcggccacggccactgtgaccccctgaccaagcgctgcatctgcagccacctgtggatggagaacctgatccagcgctacatctgggatggagagagcaactgtggcatcaagcacaggagcacagagcacaacagcagcctgatggtgtctgagagcgagtttgacagcgaccaggacaccatcttcagccgggagaagatggagcggggcaaccccaaggtgtccatgaatggcagcatcagaaatggagccagcttctcctactgcagcaaggacagatag

SEQ ID NO: 165864 - DNA, 1206 bp, synthetic construct
  misc_feature 1..1206: note = Description of Artificial Sequence: Synthetic coding sequence
  source 1..1206: mol_type = other DNA
atggagaccccagaggtgcctgtgggcagcctgattgactttggacctgaggcccccaccagcagccccctggaggcccctcctcctgtgctgcaggatggagatggcagcctgggagatggagccagcgagagcgagaccacagagagcgctgacagtgaaaatgacatgggagagagccccagccaccccagctgggaccaggaccggcgcagcagcagcaatgaaagcttcagcagcaaccagagcacagagagcacccaggatgaggagaccctggccctgcgggacttcatgaggggctacgtggagaagatcttctctggaggagaggacctggaccaggaggagaaggccaagtttggagagtactgcagcagtgaaaatggcaagggccgggagtggtttgcccgctacgtgtctgcccagcgctgcaacagcaaatgtgtgtctgaggccaccttctaccgcctggtgcagagctttgctgtggtgctgtttgagtgccaccagatggatgactttggacctgccaagaacctgatgaccatgtgcttcacctactaccacatcggcaagccccagctgctgcccccagagagccgggagaagccagctggcagcattgacagctacctgaagagcgccaacagctggctggccgagaagaaggacattgctgagcggctgctgaagaacaccagcgccaggacagaaaatgtgaagggcttctttggaggcctggagaccaagctgaagggccccctggccaggagaaatgaggaggatgagaacaagccccaggagaagaggcccagggctgtgacagcctacagcccagaagatgagaagaagggggagaagatctacctgtacacccacctgaagcagcagcccatctggcacaccctgcgcttctggaatgctgccttctttgatgctgtgcactgtgagaggaccaagaggagccccaccacccgggagaagtggtgccacatgacccaggaggagagagatgacagcctgcgcttcaatgaaaacatcaccttcggccagctgggcaccttcacccacaacatgctggccttcggcctgaacaagaagctgtgcaatgacttcctgaagaagcaggccgtcatcggcaacctggatgaggagcagtacaagctgctgagtgaccacatcgagcagatggccacagaatag

SEQ ID NO: 165865 - DNA, 3219 bp, synthetic construct; identical to SEQ ID NO: 165839
  misc_feature 1..3219: note = Description of Artificial Sequence: Synthetic coding sequence
  source 1..3219: mol_type = other DNA

SEQ ID NO: 165866 - DNA, 1380 bp, synthetic construct
  misc_feature 1..1380: note = Description of Artificial Sequence: Synthetic coding sequence
  source 1..1380: mol_type = other DNA
atgggcggcctcttcagccgctggaggaccaagcccagcacagtggaggtgctggagagcattgacaaggagatccaggccctggaggagttccgggagaagaaccagaggctgcagaagctgtgggtgggccgcctcatcctgtacagctctgtgctgtacctgttcacctgcctgattgtgtacctgtggtacctgcctgatgagttcaccgcccggctggccatgaccctgcccttctttgccttccccctcatcatctggagcatccgcaccgtcatcatcttcttcttcagcaagaggacagagaggaacaatgaggccctggatgacctgaagagccagaggaagaagatcctggaggaggtgatggagaaggagacctacaagacagccaagctgatcctggagagatttgatcctgacagcaagaaggccaaggaatgtgagcccccatctgctggagctgctgtgacagcccggcccggccaggagatccggcagaggacagctgcccagaggaacctgagccccaccccagccagccccaaccagggccccccaccccaggtgcctgtgtccccaggcccccccaaggacagcagcgcccctgggggccccccagagaggacagtgaccccagccctgagcagcaatgtgctgcccaggcacctgggcagccctgccacctctgtgcccggcatggagatgggcctgccccacatcgcccaggccggcctggagcacctgagcagcagtgacctgagcaccagcaccagccagagcgctggcatcaccggcctgcaccccccaggcccccccctggcccggcccatcctgccccgggagcggggggccctggaccgcatcgtggagtacctggtgggagatggcccccagaacagatatgccctgatctgccagcagtgcttcagccacaacggcatggccctgaaggaggagtttgagtacatcgccttccgctgtgcctactgcttcttcctgaacccagccaggaagacccggccccaggccccccggctgcctgagttctcctttgagaagaggcaggtggtggagggcagcagctctgtgggccccctgcccagcggctctgtgctgagcagtgacaaccagttcaatgaggagagcctggagcatgatgtgctggatgacaacacagagcagacagatgacaagatcccagccacagagcagaccaaccaggtgattgagaaggccagtgacagcgaggagcctgaggagaagcaggagacagaaaatgaggaggccagcgtcatcgagaccaacagcacagtgcctggagctgacagcatcccagaccctgagctgagcggggagagcctgacagctgagtag

SEQ ID NO: 165867 - DNA, 240 bp, synthetic construct
  misc_feature 1..240: note = Description of Artificial Sequence: Synthetic coding sequence
  source 1..240: mol_type = other DNA
atgcacccagacctgagcccccacctgcacacagaagaatgtaatgtgctgatcaacctgctgaaggagtgccacaagaaccacaacatcctgaagttcttcggctactgcaatgatgtggaccgggagctgaggaagtgcctgaagaatgaatatgtggagaacagaaccaagagccgggagcacggcatcgccatgaggaagaagctgttcaaccccccagaggagagcgagaagtag

SEQ ID NO: 165868 - DNA, 1569 bp, synthetic construct
  misc_feature 1..1569: note = Description of Artificial Sequence: Synthetic coding sequence
  source 1..1569: mol_type = other DNA
atgagccggcagctgctgcctgtgctgctgctgctgctgctgcgggccagctgcccctggggccaggagcagggcgcccggagccccagcgaggagcccccagaggaggagatccccaaggaggatggcatcctggtgctgagccgccacaccctgggcctggccctgcgggagcacccagccctgctggtggagttctacgccccctggtgtggccactgccaggccctggcccctgagtacagcaaggctgctgctgtgctggccgctgagagcatggtggtgaccctggccaaggtggatggccctgcccagcgggagctggccgaggagtttggagtgacagagtaccccaccctgaagttcttcagaaatggaaacagaacccaccctgaggagtacacaggccccagagatgctgagggcattgctgagtggctgcggaggagagtgggccccagcgccatgaggctggaggatgaggccgccgcccaggccctgattggaggccgggacctggtggtgattggcttcttccaggatgaagatgtggccaccttcctggccctggcccaggatgccctggacatgaccttcggcctgacagaccggcccaggctcttccagcagtttggcctgaccaaggacacagtggtgctcttcaagaagtttgatgagggccgggctgacttccctgtggatgaggagctgggcctggacctgggggacctgagccgcttcctggtgacccacagcatgaggctggtgacagagttcaacagccagaccagcgccaagatctttgctgcccgcatcctgaaccacctgctgctgtttgtgaaccagaccctggccgcccaccgggagctgctggccggctttggagaggccgccccccgcttccggggccaggtgctgtttgtggtggtggatgtggccgctgacaatgagcacgtgctgcagtacttcggcctgaaggccgaggccgcccccaccctgcggctggtgaacctggagaccaccaagaagtatgcccctgtggatggcggccctgtgacagctgccagcatcacagccttctgccacgctgtgctgaatggccaggtgaagccctacctgctgagccaggagatccccccagactgggaccagaggcctgtgaagaccctggtgggcaagaactttgagcaggtggcctttgatgagaccaagaatgtgtttgtgaagttctacgccccctggtgcacccactgcaaggagatggccccagcctgggaggccctggccgagaagtaccaggaccacgaggacatcatcatcgccgagctggatgccacagccaatgagctggatgcctttgctgtgcacggcttccccaccctgaagtacttccctgctggccctggcaggaaggtgattgagtacaagagcacccgggacctggagaccttcagcaagttcctggacaatggaggagtgctgcccacagaggagcccccagaggagcctgctgcccccttccctgagcccccagccaacagcaccatgggcagcaaggaggagctgtag

SEQ ID NO: 165869 - DNA, 1485 bp, synthetic construct
  misc_feature 1..1485: note = Description of Artificial Sequence: Synthetic coding sequence
  source 1..1485: mol_type = other DNA
atgggcagcggcactggaagtgaggagcccctgggcggggccagcagaggaggcaacccccagggcggctgggacctgggcgctgagcccccccaccctggccctggccctgctggggccccctgcccagctgggggcatcctgtgccctgtggtgtgggccctgcccggccctggcccccgggtgcagcagggcagctgccgggcccggggccgggtgaatggaggccacgccgaggagtttggagtgacagagtaccccaccctgaagttcttcagaaatggaaacagaacccaccctgaggagtacacaggccccagagatgctgagggcattgctgagtggctgcggcggcgggtgggccccagcgccatgaggctggaggatgaagctgctgcccaggccctgattggaggccgggacctggtggtgattggcttcttccaggacctgcaggatgaagatgtggccaccttcctggccctggcccaggatgccctggacatgaccttcggcctgacagaccggcccaggctcttccagcagtttggcctgaccaaggacacagtggtgctcttcaagaagtttgatgagggccgggctgacttccctgtggatgaggagctgggcctggacctgggggacctgagccgcttcctggtgacccacagcatgaggctggtgacagagttcaacagccagaccagcgccaagatctttgctgcccgcatcctgaaccacctgctgctgtttgtgaaccagaccctggccgcccaccgggagctgctggccggctttggagaggccgccccccgcttccggggccaggtgctgtttgtggtggtggatgtggccgctgacaatgagcacgtgctgcagtacttcggcctgaaggccgaggccgcccccaccctgcggctggtgaacctggagaccaccaagaagtatgcccctgtggatggcggccctgtgacagctgccagcatcacagccttctgccacgctgtgctgaatggccaggtgaagccctacctgctgagccaggagatccccccagactgggaccagaggcctgtgaagaccctggtgggcaagaactttgagcaggtggcctttgatgagaccaagaatgtgtttgtgaagttctacgccccctggtgcacccactgcaaggagatggccccagcctgggaggccctggccgagaagtaccaggaccacgaggacatcatcatcgccgagctggatgccacagccaatgagctggatgcctttgctgtgcacggcttccccaccctgaagtacttccctgctggccctggcaggaaggtgattgagtacaagagcacccgggacctggagaccttcagcaagttcctggacaatggaggagtgctgcccacagaggagcccccagaggagcctgctgcccccttccctgagcccccagccaacagcaccatgggcagcaaggaggagctgtag

SEQ ID NO: 165870 - DNA, 1323 bp, synthetic construct
  misc_feature 1..1323: note = Description of Artificial Sequence: Synthetic coding sequence
  source 1..1323: mol_type = other DNA
atggccctgctggtgctgggcctggtgtcctgcaccttcttcctggccgtgaatggcctgtacagcagcagtgatgatgtgattgagctgacccccagcaacttcaaccgggaggtgatccagagcgacagcctgtggctggtggagttctacgccccctggtgtggccactgccagaggctgaccccagagtggaagaaggccgccacagccctgaaggatgtggtgaaggtgggcgctgtggatgctgacaagcaccacagcctgggcggccagtatggagtgcagggcttccccaccatcaagatcttcggcagcaacaagaacagacctgaggactaccagggcggccgcactggagaggccatcgtggatgctgccctgagcgccctgcggcagctggtgaaggaccggctgggcggccgcagcggcggctacagcagcggcaagcagggccgcagtgacagcagcagcaagaaggatgtgattgagctgacagatgacagctttgacaagaatgtgctggacagtgaagatgtgtggatggtggagttctacgccccctggtgtggccactgcaagaacctggagcctgagtgggccgctgctgccagcgaggtgaaggagcagaccaagggcaaggtgaagctggccgctgtggatgccaccgtgaaccaggtgctggccagccgctatggcatccggggcttccccaccatcaagatcttccagaagggggagagccctgtggactatgatggcggccgcaccaggagtgacatcgtgtcccgggccctggacctcttcagtgacaatgcccctcctcctgagctgctggagatcatcaatgaagacatcgccaagaggacctgtgaggagcaccagctgtgtgtggtggccgtgctgccccacatcctggacaccggggctgctggaagaaattcctacctggaggtgctgctgaagctggccgacaagtacaagaagaagatgtggggctggctgtggacagaagctggggcccagagcgagctggagacagccctgggcattggaggcttcggctacccagccatggccgccatcaatgccaggaagatgaagtttgccctgctgaagggcagcttcagcgagcagggcatcaatgagttcctgcgggagctgagctttggccggggcagcacagcccctgtgggcggcggggccttccccaccatcgtggagcgggagccctgggatggaagagatggagagctgcctgtggaggatgacatcgacctgagtgatgtggagctggatgacctgggcaaggatgagctgtag

SEQ ID NO: 165871 - DNA, 1338 bp, synthetic construct
  misc_feature 1..1338: note = Description of Artificial Sequence: Synthetic coding sequence
  source 1..1338: mol_type = other DNA
atgtaccccagcaccaccatggccaatgcccctggcctggtgtcctgcaccttcttcctggccgtgaatggcctgtacagcagcagtgatgatgtgattgagctgacccccagcaacttcaaccgggaggtgatccagagcgacagcctgtggctggtggagttctacgccccctggtgtggccactgccagaggctgaccccagagtggaagaaggccgccacagccctgaaggatgtggtgaaggtgggcgctgtggatgctgacaagcaccacagcctgggcggccagtatggagtgcagggcttccccaccatcaagatcttcggcagcaacaagaacagacctgaggactaccagggcggccgcactggagaggccatcgtggatgctgccctgagcgccctgcggcagctggtgaaggaccggctgggcggccgcagcggcggctacagcagcggcaagcagggccgcagtgacagcagcagcaagaaggatgtgattgagctgacagatgacagctttgacaagaatgtgctggacagtgaagatgtgtggatggtggagttctacgccccctggtgtggccactgcaagaacctggagcctgagtgggccgccgccgccagcgaggtgaaggagcagaccaagggcaaggtgaagctggccgctgtggatgccaccgtgaaccaggtgctggccagccgctatggcatccggggcttccccaccatcaagatcttccagaagggggagagccctgtggactatgatggcggccgcaccaggagtgacatcgtgtcccgggccctggacctcttcagtgacaatgcccctcctcctgagctgctggagatcatcaatgaagatattgccaagaggacctgtgaggagcaccagctgtgtgtggtggccgtgctgccccacatcctggacacaggagctgctggcaggaacagctacctggaggtgctgctgaagctggccgacaagtacaagaagaagatgtggggctggctgtggacagaggccggggcccagagcgagctggagacagccctgggcatcggcggcttcggctacccagccatggccgccatcaatgccaggaagatgaagtttgccctgctgaagggcagcttcagcgagcagggcatcaatgagttcctgcgggagctgagctttggccggggcagcacagcccctgtgggcggcggggccttccccaccatcgtggagcgggagccctgggatggaagagatggagagctgcctgtggaggatgacatcgacctgagtgatgtggagctggatgacctgggcaaggatgagctgtag

SEQ ID NO: 165872 - DNA, 36 bp, synthetic construct
  misc_feature 1..36: note = Description of Artificial Sequence: Synthetic coding sequence
  source 1..36: mol_type = other DNA
atgtaccccagcaccaccatggccaatgccccctag

SEQ ID NO: 165873 - DNA, 1314 bp, synthetic construct
  misc_feature 1..1314: note = Description of Artificial Sequence: Synthetic coding sequence
  source 1..1314: mol_type = other DNA
atgatcctgggcctggtgtcctgcaccttcttcctggccgtgaatggcctgtacagcagcagtgatgatgtgattgagctgacccccagcaacttcaaccgggaggtgatccagagcgacagcctgtggctggtggagttctacgccccctggtgtggccactgccagaggctgaccccagagtggaagaaggccgccacagccctgaaggatgtggtgaaggtgggcgctgtggatgctgacaagcaccacagcctgggcggccagtatggagtgcagggcttccccaccatcaagatcttcggcagcaacaagaacagacctgaggactaccagggcggccgcactggagaggccatcgtggatgctgccctgagcgccctgcggcagctggtgaaggaccggctgggcggccgcagcggcggctacagcagcggcaagcagggccgcagtgacagcagcagcaagaaggatgtgattgagctgacagatgacagctttgacaagaatgtgctggacagtgaagatgtgtggatggtggagttctacgccccctggtgtggccactgcaagaacctggagcctgagtgggccgccgccgccagcgaggtgaaggagcagaccaagggcaaggtgaagctggccgctgtggatgccaccgtgaaccaggtgctggccagccgctatggcatccggggcttccccaccatcaagatcttccagaagggggagagccctgtggactatgatggcggccgcaccaggagtgacatcgtgtcccgggccctggacctcttcagtgacaatgcccctcctcctgagctgctggagatcatcaatgaagatattgccaagaggacctgtgaggagcaccagctgtgtgtggtggccgtgctgccccacatcctggacacaggagctgctggcaggaacagctacctggaggtgctgctgaagctggccgacaagtacaagaagaagatgtggggctggctgtggacagaggccggggcccagagcgagctggagacagccctgggcatcggcggcttcggctacccagccatggccgccatcaatgccaggaagatgaagtttgccctgctgaagggcagcttcagcgagcagggcatcaatgagttcctgcgggagctgagctttggccggggcagcacagcccctgtgggcggcggggccttccccaccatcgtggagcgggagccctgggatggaagagatggagagctgcctgtggaggatgacatcgacctgagtgatgtggagctggatgacctgggcaaggatgagctgtag

SEQ ID NO: 165874 - DNA, 1956 bp, synthetic construct
  misc_feature 1..1956: note = Description of Artificial Sequence: Synthetic coding sequence
  source 1..1956: mol_type = other DNA
atggctgacagcgctgagctgaagcagatggtgatgagcctgcgggtgtctgagctgcaggtgctgctgggctacgccggcaggaacaagcacggcaggaagcatgagctgctgaccaaggccctgcacctgctgaaggccggctgcagccctgctgtgcagatgaagatcaaggagctgtacagaagacgcttcccccagaagatcatgaccccagctgacctgagcatccccaacgtgcacagcagccccatgcctgccaccctgagccccagcaccatcccccagctgacctatgatggccacccagccagcagccccctgctgcctgtgtccctgctgggccccaagcatgagctggagctgccccacctgaccagcgccctgcaccctgtgcacccagacatcaagctgcagaagctgcccttctatgacctgctggatgagctgatcaagcccaccagcctggccagtgacaacagccagcgcttccgggagacctgctttgcctttgccctgaccccccagcaggtgcagcagatcagcagctccatggacatcagcggcaccaagtgtgacttcaccgtgcaggtgcagctgcgcttctgcctgtctgagaccagctgcccccaggaggaccacttcccccccaacctgtgtgtgaaggtgaacaccaagccctgcagcctgcccggctacctgccccccaccaagaatggagtggagcccaagaggcccagccggcccatcaacatcaccagcctggtgcggctgagcaccaccgtgcccaacaccatcgtggtgtcctggacagctgagatcggcaggaactacagcatggctgtgtacctggtgaagcagctgagcagcacagtgctgctgcagaggctgcgggccaagggcatcagaaatccagaccacagccgggccctgatcaaggagaagctgacagctgaccctgacagcgagatcgccaccaccagcctgcgggtgtccctgctgtgccccctgggcaagatgaggctgaccatcccctgccgggccctgacctgcagccacctgcagtgctttgatgccaccctgtacatccagatgaatgagaagaagcccacctgggtgtgccctgtgtgtgacaagaaggccccctatgagcacctgatcattgatggcctcttcatggagatcctgaagtactgcacagactgtgatgagatccagttcaaggaggatggcacctgggcccccatgaggagcaagaaggaggtgcaggaggtgtctgccagctacaacggggtggatggctgcctgagcagcaccctggagcaccaggtggccagccaccaccagagcagcaacaagaacaagaaggtggaggtgattgacctgaccatcgacagcagcagtgatgaggaggaggaggagcccagcgccaagaggacctgccccagcctgagccccaccagccccctgaacaacaagggcatcctgagcctgccccaccaggccagccctgtgtccaggacccccagcctgcctgctgtggacaccagctacatcaacaccagcctcatccaggactaccgccaccccttccacatgacccccatgccctatgacctgcagggcctggacttcttccccttcctgagcggggacaaccagcactacaacaccagcctgctggccgctgctgctgctgctgtgtctgatgaccaggacctgctgcacagcagccgcttcttcccctacaccagcagccagatgttcctggaccagctgtctgctgggggcagcaccagcctgcccaccaccaacggcagcagcagcggcagcaacagcagcctggtgagcagcaacagcctgcgggagagccacagccacacagtgaccaacagaagcagcacagacacagccagcatcttcggcatcatcccagacatcatcagcctggactag

SEQ ID NO: 165875 - DNA, 1962 bp, synthetic construct
  misc_feature 1..1962: note = Description of Artificial Sequence: Synthetic coding sequence
  source 1..1962: mol_type = other DNA
atgttcaccctgcaggacagctatgtgaagcagatggtgatgagcctgcgggtgtctgagctgcaggtgctgctgggctacgccggcaggaacaagcacggcaggaagcatgagctgctgaccaaggccctgcacctgctgaaggccggctgcagccctgctgtgcagatgaagatcaaggagctgtacagaagacgcttcccccagaagatcatgaccccagctgacctgagcatccccaacgtgcacagcagccccatgcctgccaccctgagccccagcaccatcccccagctgacctatgatggccacccagccagcagccccctgctgcctgtgtccctgctgggccccaagcatgagctggagctgccccacctgaccagcgccctgcaccctgtgcacccagacatcaagctgcagaagctgcccttctatgacctgctggatgagctgatcaagcccaccagcctggccagtgacaacagccagcgcttccgggagacctgctttgcctttgccctgaccccccagcaggtgcagcagatcagcagctccatggacatcagcggcaccaagtgtgacttcaccgtgcaggtgcagctgcgcttctgcctgtctgagaccagctgcccccaggaggaccacttcccccccaacctgtgtgtgaaggtgaacaccaagccctgcagcctgcccggctacctgccccccaccaagaatggagtggagcccaagaggcccagccggcccatcaacatcaccagcctggtgcggctgagcaccaccgtgcccaacaccatcgtggtgtcctggacagctgagatcggcaggaactacagcatggctgtgtacctggtgaagcagctgagcagcacagtgctgctgcagaggctgcgggccaagggcatcagaaatccagaccacagccgggccctgatcaaggagaagctgacagctgaccctgacagcgagatcgccaccaccagcctgcgggtgtccctgctgtgccccctgggcaagatgaggctgaccatcccctgccgggccctgacctgcagccacctgcagtgctttgatgccaccctgtacatccagatgaatgagaagaagcccacctgggtgtgccctgtgtgtgacaagaaggccccctatgagcacctgatcattgatggcctcttcatggagatcctgaagtactgcacagactgtgatgagatccagttcaaggaggatggcacctgggcccccatgaggagcaagaaggaggtgcaggaggtgtctgccagctacaacggggtggatggctgcctgagcagcaccctggagcaccaggtggccagccaccaccagagcagcaacaagaacaagaaggtggaggtgattgacctgaccatcgacagcagcagtgatgaggaggaggaggagcccagcgccaagaggacctgccccagcctgagccccaccagccccctgaacaacaagggcatcctgagcctgccccaccaggccagccctgtgtccaggacccccagcctgcctgctgtggacaccagctacatcaacaccagcctcatccaggactaccgccaccccttccacatgacccccatgccctatgacctgcagggcctggacttcttccccttcctgagcggggacaaccagcactacaacaccagcctgctggccgctgctgctgctgctgtgtctgatgaccaggacctgctgcacagcagccgcttcttcccctacaccagcagccagatgttcctggaccagctgtctgctgggggcagcaccagcctgcccaccaccaacggcagcagcagcggcagcaacagcagcctggtgagcagcaacagcctgcgggagagccacagccacacagtgaccaacagaagcagcacagacacagccagcatcttcggcatcatcccagacatcatcagcctggactag

SEQ ID NO: 165876 - DNA, 1782 bp, synthetic construct
  misc_feature 1..1782: note = Description of Artificial Sequence: Synthetic coding sequence
  source 1..1782: mol_type = other DNA
atggccgagctgggggagctgaagcacatggtgatgtccttccgggtgtctgagctgcaggtgctgctgggctttgctggcaggaacaagagcggcaggaagcatgagctgctggccaaggccctgcacctgctgaagagcagctgtgcccccagcgtgcagatgaagatcaaggagctgtacagaagacgcttccccaggaagaccctgggccccagcgacctgagcctgctgagcctgcccccaggcaccagcccccctgtgcacccagatgtgaccatgaagcccctgcccttctatgaggtgtatggagagctgatccggcccaccaccctggccagcaccagcagccagagatttgaggaggcccacttcacctttgccctgaccccccagcaggtgcagcagatcctgaccagccgggaggtgctgcccggggccaagtgtgactacaccatccaggtgcagctgcgcttctgcctgtgtgagaccagctgcccccaggaggactacttcccccccaacctgtttgtgaaggtgaatggcaagctgtgccccctgcccggctacctgccccccaccaagaatggagctgagcccaagaggcccagccggcccatcaacatcacccccctggcccggctgagcgccaccgtgcccaacaccatcgtggtgaactggagcagcgagtttggaagaaactacagcctgtctgtgtacctggtgcggcagctgacagctggcaccctgctgcagaagctgcgggccaagggcatccggaacccagaccacagccgggccctgatcaaggagaagctgacagctgaccctgattctgaggtggccaccaccagcctgcgggtgtccctgatgtgccccctgggcaagatgaggctgactgtgccctgccgggccctgacctgtgcccacctgcagagctttgatgctgccctgtacctgcagatgaatgagaagaagcccacctggacctgccctgtgtgtgacaagaaggccccctatgagagcctcatcattgatggcctcttcatggagatcctgagcagctgcagcgactgtgatgagatccagttcatggaggatggctcctggtgccccatgaagcccaagaaggaggccagcgaggtgtgccccccacctggctacggcctggatggcctgcagtacagccctgtgcagggcggggaccccagcgagaacaagaagaaggtggaggtgattgacctgaccatcgagagcagcagtgatgaggaggacctgccccccaccaagaagcactgcagcgtgaccagcgctgccatcccagccctgcccggcagcaaaggagtgctgaccagcggccaccagcccagctctgtgctgcggagccctgccatgggcaccctgggcggggacttcctgagcagcctgcccctgcacgagtaccccccagccttccccctgggcgctgacatccagggcctggacctcttctccttcctgcagacagagagccagcactacggccccagcgtcatcaccagcctggatgagcaggatgccctgggccacttcttccagtaccggggcacccccagccacttcctgggccccctggcccccaccctgggcagcagccactgcagcgccaccccagcccctcctcctggccgggtgagcagcatcgtggcccctgggggcgccctgcgggagggccacggcggccccctgcccagcggccccagcctgaccggctgccgcagtgacatcatcagcctggactag

SEQ ID NO: 165877 - DNA, 873 bp, synthetic construct
  misc_feature 1..873: note = Description of Artificial Sequence: Synthetic coding sequence
  source 1..873: mol_type = other DNA
atggtgatgtccttccgggtgtctgagctgcaggtgctgctgggctttgctggaagaaacaagagcggcaggaagcatgagctgctggccaaggccctgcacctgctgaagagcagctgtgcccccagcgtgcagatgaagatcaaggagctgtacagaagacgcttccccaggaagaccctgggccccagcgacctgagcctgctgagcctgcccccaggcaccagccctgtgggcagccctggccccctggcccccatcccccccaccctgctggcccctggcaccctgctgggccccaagcgggaggtggacatgcacccccccctgccccagcctgtgcacccagatgtgaccatgaagcccctgcccttctatgaggtgtatggagagctgatccggcccaccaccctggccagcaccagcagccagagatttgaggaggcccacttcacctttgccctgaccccccagcaggtgcagcagatcctgaccagccgggaggtgctgcccggggccaagtgtgactacaccatccaggtgcagctgcgcttctgcctgtgtgagaccagctgcccccaggaggactacttcccccccaacctgtttgtgaaggtgaatggcaagctgtgccccctgcccggctacctgccccccaccaagaatggagctgagcccaagaggcccagccggcccatcaacatcacccccctggcccggctgagcgccaccgtgcccaacaccatcgtggtgaactggagcagcgagtttggccgggtgtccacagccaaggccggggcctggaagagcctgctgcgggtgaagggcaaccaccctgtgtcctgggtgggggaggccttcagcagcctgtag

SEQ ID NO: 165878 - DNA, 1887 bp, synthetic construct
  misc_feature 1..1887: note = Description of Artificial Sequence: Synthetic coding sequence
  source 1..1887: mol_type = other DNA
atggccgagctgggggagctgaagcacatggtgatgtccttccgggtgtctgagctgcaggtgctgctgggctttgctggcaggaacaagagcggcaggaagcatgagctgctggccaaggccctgcacctgctgaagagcagctgtgcccccagcgtgcagatgaagatcaaggagctgtacagaagacgcttccccaggaagaccctgggccccagcgacctgagcctgctgagcctgcccccaggcaccagccctgtgggcagccctggccccctggcccccatcccccccaccctgctggcccctggcaccctgctgggccccaagcgggaggtggacatgcacccccccctgccccagcctgtgcacccagatgtgaccatgaagcccctgcccttctatgaggtgtatggagagctgatccggcccaccaccctggccagcaccagcagccagagatttgaggaggcccacttcacctttgccctgaccccccagcaggtgcagcagatcctgaccagccgggaggtgctgcccggggccaagtgtgactacaccatccaggtgcagctgcgcttctgcctgtgtgagaccagctgcccccaggaggactacttcccccccaacctgtttgtgaaggtgaatggcaagctgtgccccctgcccggctacctgccccccaccaagaatggagctgagcccaagaggcccagccggcccatcaacatcacccccctggcccggctgagcgccaccgtgcccaacaccatcgtggtgaactggagcagcgagtttggaagaaactacagcctgtctgtgtacctggtgcggcagctgacagctggcaccctgctgcagaagctgcgggccaagggcatcagaaatccagaccacagccgggccctgatcaaggagaagctgacagctgaccctgacagcgaggtggccaccaccagcctgcgggtgtccctgatgtgccccctgggcaagatgaggctgactgtgccctgccgggccctgacctgtgcccacctgcagagctttgatgctgccctgtacctgcagatgaatgagaagaagcccacctggacctgccctgtgtgtgacaagaaggccccctatgagagcctcatcattgatggcctcttcatggagatcctgagcagctgcagcgactgtgatgagatccagttcatggaggatggctcctggtgccccatgaagcccaagaaggaggccagcgaggtgtgccccccacctggctacggcctggatggcctgcagtacagccctgtgcagggcggggaccccagcgagaacaagaagaaggtggaggtgattgacctgaccatcgagagcagcagtgatgaggaggacctgccccccaccaagaagcactgcagcgtgaccagcgctgccatcccagccctgcccggcagcaagggcgtgctgaccagcggccaccagcccagctctgtgctgcggagccctgccatgggcaccctgggcggggacttcctgagcagcctgcccctgcacgagtaccccccagccttccccctgggcgctgacatccagggcctggacctcttctccttcctgcagacagagagccagcactacggccccagcgtcatcaccagcctggatgagcaggatgccctgggccacttcttccagtaccggggcacccccagccacttcctgggccccctggcccccaccctgggcagcagccactgcagcgccaccccagcccctcctcctggccgggtgagcagcatcgtggcccctggaggagccctgcgggagggccatggaggccccctgcccagcggccccagcctgaccggctgccgcagtgacatcatcagcctggactag

SEQ ID NO: 165879 - DNA, 780 bp, synthetic construct
  misc_feature 1..780: note = Description of Artificial Sequence: Synthetic coding sequence
  source 1..780: mol_type = other DNA
atggtgatgtccttccgggtgtctgagctgcaggtgctgctgggctttgctggaagaaacaagagcggcaggaagcatgagctgctggccaaggccctgcacctgctgaagagcagctgtgcccccagcgtgcagatgaagatcaaggagctgtacagaagacgcttccccaggaagaccctgggccccagcgacctgagcctgctgagcctgcccccaggcaccagccctgtgggcagccctggccccctggcccccatcccccccaccctgctggcccctggcaccctgctgggccccaagcgggaggtggacatgcacccccccctgccccagcctgtgcacccagatgtgaccatgaagcccctgcccttctatgaggtgtatggagagctgatccggcccaccaccctggccagcaccagcagccagagatttgaggaggcccacttcacctttgccctgaccccccagcaggtgcagcagatcctgaccagccgggaggtgctgcccggggccaagtgtgactacaccatccaggtgcagctgcgcttctgcctgtgtgagaccagctgcccccaggaggactacttcccccccaacctgtttgtgaaggtgaatggcaagctgtgccccctgcccggctacctgccccccaccaagaatggagctgagcccaagaggcccagccggcccatcaacatcacccccctggcccggctgagcgccaccgtgcccaacaccatcgtggtgaactggagcagcgagtttggaagatag

SEQ ID NO: 165880 - DNA, 1248 bp, synthetic construct
  misc_feature 1..1248: note = Description of Artificial Sequence: Synthetic coding sequence
  source 1..1248: mol_type = other DNA
atgtttgctgacctggactatgacatcgaggaggacaagctgggcatccccaccgtgcctgggaaggtgaccctgcagaaggatgcccagaacctgattggcatcagcattggaggaggagcccagtactgcccctgcctgtacatcgtgcaggtgtttgacaacaccccagctgccctggatggcaccgtggccgctggagatgagatcactggagtgaatggccgcagcatcaagggcaagaccaaggtggaggtggccaagatgatccaggaggtgaagggggaggtgaccatccactacaacaagctgcaggccgaccccaagcagggcatgagcctggacatcgtgctgaagaaggtgaagcaccggctggtggagaacatgagcagcggcacagcagatgccctgggcctgagccgggccatcctgtgcaatgatggcctggtgaagaggctggaggagctggagaggacagctgagctgtacaagggcatgacagagcacaccaagaacctgctgcgggccttctatgagctgagccagacccaccgggcctttggagatgtgttcagcgtcatcggcgtgcgggagccccagcctgctgccagcgaggcctttgtgaagtttgctgatgcccacaggagcattgagaagtttggcatccggctgctgaagaccatcaagcccatgctgacagacctgaacacctacctgaacaaggccatcccagacacccggctgaccatcaagaagtacctggatgtgaagtttgagtacctgagctactgcctgaaggtgaaggagatggatgatgaggagtacagctgcatcgccctgggggagcccctgtacagagtgtccactggaaattatgagtaccgcctcatcctgcgctgccggcaggaggcccgggcccgcttcagccagatgaggaaggatgtgctggagaagatggagctgctggaccagaagcacgtgcaggacatcgtgttccagctgcagaggctggtgtccaccatgagcaagtactacaatgactgctatgctgtgctgagagatgctgatgtgttccccatcgaggtggacctggcccacaccaccctggcctacggcctgaaccaggaggagttcacagatggagaggaggaggaggaggaggaggacacagctgctggggagcccagccgggacaccagaggagctgctggccccctggacaagggcggctcctggtgtgacagctag

SEQ ID NO: 165881 - DNA, 1248 bp, synthetic construct; identical to SEQ ID NO: 165880
  misc_feature 1..1248: note = Description of Artificial Sequence: Synthetic coding sequence
  source 1..1248: mol_type = other DNA

SEQ ID NO: 165882 - DNA, 690 bp, synthetic construct
  misc_feature 1..690: note = Description of Artificial Sequence: Synthetic coding sequence
  source 1..690: mol_type = other DNA
atgtttgctgacctggactatgacatcgaggaggacaagctgggcatccccaccgtgcctgggaaggtgaccctgcagaaggatgcccagaacctgattggcatcagcattggaggaggagcccagtactgcccctgcctgtacatcgtgcaggtgtttgacaacaccccagctgccctggatggcaccgtggccgctggagatgagatcactggagtgaatggccgcagcatcaagggcaagaccaaggtggaggtggccaagatgatccaggaggtgaagggggaggtgaccatccactacaacaagctgcaggccgaccccaagcagggcatgagcctggacatcgtgctgaagaaggtgaagcaccggctggtggagaacatgagcagcggcacagcagatgccctgggcctgagccgggccatcctgtgcaatgatggcctggtgaagaggctggaggagctggagaggacagctgagctgtacaagggcatgacagagcacaccaagaacctgctgcgggccttctatgagctgagccagacccaccgggcctttggagatgtgttcagcgtcatcggcgtgcgggagccccagcctgctgccagcgaggcctttgtgaagtttgctgatgcccacaggagcattgagaagtttggcatccggctgctgaagaccatcaagtag

SEQ ID NO: 165883 - DNA, 405 bp, synthetic construct
  misc_feature 1..405: note = Description of Artificial Sequence: Synthetic coding sequence
  source 1..405: mol_type = other DNA
atgtttgctgacctggactatgacatcgaggaggacaagctgggcatccccaccgtgcctgggaaggtgaccctgcagaaggatgcccagaacctgattggcatcagcattggaggaggagcccagtactgcccctgcctgtacatcgtgcaggtgtttgacaacaccccagctgccctggatggcaccgtggccgctggagatgagatcactggagtgaatggccgcagcatcaagggcaagaccaaggtggaggtggccaagatgatccaggaggtgaagggggaggtgaccatccactacaacaagctgcaggccgaccccaagcagggcatgagcctggacatcgtgctgaagaaggtgaagcaccggctggtggagaacatgagcagcggcacagcctag

SEQ ID NO: 165884 - DNA, 393 bp, synthetic construct
  misc_feature 1..393: note = Description of Artificial Sequence: Synthetic coding sequence
  source 1..393: mol_type = other DNA
atgtttgctgacctggactatgacatcgaggaggacaagctgggcatccccaccgtgcctgggaaggtgaccctgcagaaggatgcccagaacctgattggcatcagcattggaggaggagcccagtactgcccctgcctgtacatcgtgcaggtgtttgacaacaccccagctgccctggatggcaccgtggccgctggagatgagatcactggagtgaatggccgcagcatcaagggcaagaccaaggtggaggtggccaagatgatccaggaggtgaagggggaggtgaccatccactacaacaagctgcaggccgaccccaagcagggcatgagcctggacatcggccagaggctgggcttccacggccctggcccccacagcagctag

SEQ ID NO: 165885 - DNA, 117 bp, synthetic construct
  misc_feature 1..117: note = Description of Artificial Sequence: Synthetic coding sequence
  source 1..117: mol_type = other DNA
atgtttgctgacctggactatgacatcgaggaggacaagctgggcatccccaccgtgcctgggaaggtgaccctgcagaaggatgcccagaacctgattggcatcagcattggatag

SEQ ID NO: 165886 - DNA, 231 bp, synthetic construct
  misc_feature 1..231: note = Description of Artificial Sequence: Synthetic coding sequence
  source 1..231: mol_type = other DNA
atgacagatgtggagaccacctatgctgacttcatcgccagcggccgcactggaagaagaaatgccatccatgacatcctggtgagcagcgccagcggcaacagcaatgagctggccctgaagctggccggcctggacatcaacaagacagaaggagaggaggatgcccagaggagcagcacagagcagagcggggaggcccagggcgaggccgccaagtctgagagctag

SEQ ID NO: 165887 - DNA, 231 bp, synthetic construct; identical to SEQ ID NO: 165886
  misc_feature 1..231: note = Description of Artificial Sequence: Synthetic coding sequence
  source 1..231: mol_type = other DNA

SEQ ID NO: 165888 - DNA, 231 bp, synthetic construct; identical to SEQ ID NO: 165886
  misc_feature 1..231: note = Description of Artificial Sequence: Synthetic coding sequence
  source 1..231: mol_type = other DNA

SEQ ID NO: 165889 - DNA, 258 bp, synthetic construct
  misc_feature 1..258: note = Description of Artificial Sequence: Synthetic coding sequence
  source 1..258: mol_type = other DNA
atgagccaccaggatgtggccatgaggacagacagcagcaagatgacagatgtggagagcggcgtggccaactttgccagcagcgcccgggccggcagaagaaatgccctgcctgacatccagagcagcgctgccacagatggcaccagtgacctgcccctgaagctggaggccctgtctgtgaaggaggatgccaaggagaaggatgagaagaccacccaggaccagctggagaagccccagaatgaggagaagtag

SEQ ID NO: 165890 - DNA, 237 bp, synthetic construct
  misc_feature 1..237: note = Description of Artificial Sequence: Synthetic coding sequence
  source 1..237: mol_type = other DNA
atgaggacagacagcagcaagatgacagatgtggagagcggcgtggccaactttgccagcagcgcccgggccggcagaagaaatgccctgcctgacatccagagcagcgctgccacagatggcaccagtgacctgcccctgaagctggaggccctgtctgtgaaggaggatgccaaggagaaggatgagaagaccacccaggaccagctggagaagccccagaatgaggagaagtag

SEQ ID NO: 165891 - DNA, 264 bp, synthetic construct
  misc_feature 1..264: note = Description of Artificial Sequence: Synthetic coding sequence
  source 1..264: mol_type = other DNA
atgcacatcctgtttgtggatgtggccatgaggacagacagcagcaagatgacagatgtggagagcggcgtggccaactttgccagcagcgcccgggccggcagaagaaatgccctgcctgacatccagagcagcgctgccacagatggcaccagtgacctgcccctgaagctggaggccctgtctgtgaaggaggatgccaaggagaaggatgagaagaccacccaggaccagctggagaagccccagaatgaggagaagtag

SEQ ID NO: 165892 - DNA, 237 bp, synthetic construct; identical to SEQ ID NO: 165890
  misc_feature 1..237: note = Description of Artificial Sequence: Synthetic coding sequence
  source 1..237: mol_type = other DNA

SEQ ID NO: 165893 - DNA, 237 bp, synthetic construct; identical to SEQ ID NO: 165890
  misc_feature 1..237: note = Description of Artificial Sequence: Synthetic coding sequence
  source 1..237: mol_type = other DNA

SEQ ID NO: 165894 - DNA, 237 bp, synthetic construct; identical to SEQ ID NO: 165890
  misc_feature 1..237: note = Description of Artificial Sequence: Synthetic coding sequence
  source 1..237: mol_type = other DNA

SEQ ID NO: 165895 - DNA, 237 bp, synthetic construct; identical to SEQ ID NO: 165890
  misc_feature 1..237: note = Description of Artificial Sequence: Synthetic coding sequence
  source 1..237: mol_type = other DNA

SEQ ID NO: 165896 - DNA, 231 bp, synthetic construct
  misc_feature 1..231: note = Description of Artificial Sequence: Synthetic coding sequence
  source 1..231: mol_type = other DNA
atgatggaggtggagagcagctacagcgacttcatcagctgtgacagaactggaagaagaaatgctgtgcctgacatccagggcgacagcgaggccgtgtctgtgaggaagctggccggggacatgggagagctggccctggagggcgctgagggccaggtggagggcagcgccccagacaaggaggccggcaaccagccccagagcagtgatggcaccaccagcagctag

SEQ ID NO: 165897 - DNA, 195 bp, synthetic construct
  misc_feature 1..195: note = Description of Artificial Sequence: Synthetic coding sequence
  source 1..195: mol_type = other DNA
atgatggaggtggagagcagctacagcgacttcatcagctgtgacagaactggaagaagaaatgctgtgcctgacatccagggcgacagcgaggccgtgtctgtgaggaagctggccggggacatgggagagctggccctggagggcgctgagatggacctgaccatgctgccctggctggtgagcaacagctag

SEQ ID NO: 165898 - DNA, 231 bp, synthetic construct; identical to SEQ ID NO: 165896
  misc_feature 1..231: note = Description of Artificial Sequence: Synthetic coding sequence
  source 1..231: mol_type = other DNA

SEQ ID NO: 165899 - DNA, 231 bp, synthetic construct; identical to SEQ ID NO: 165896
  misc_feature 1..231: note = Description of Artificial Sequence: Synthetic coding sequence
  source 1..231: mol_type = other DNA

SEQ ID NO: 165900 - DNA, 231 bp, synthetic construct; identical to SEQ ID NO: 165896
  misc_feature 1..231: note = Description of Artificial Sequence: Synthetic coding sequence
  source 1..231: mol_type = other DNA

SEQ ID NO: 165901 - DNA, 231 bp, synthetic construct; identical to SEQ ID NO: 165896
  misc_feature 1..231: note = Description of Artificial Sequence: Synthetic coding sequence
  source 1..231: mol_type = other DNA

SEQ ID NO: 165902 - DNA, 231 bp, synthetic construct; identical to SEQ ID NO: 165896
  misc_feature 1..231: note = Description of Artificial Sequence: Synthetic coding sequence
  source 1..231: mol_type = other DNA

SEQ ID NO: 165903 - DNA, 1578 bp, synthetic construct
  misc_feature 1..1578: note = Description of Artificial Sequence: Synthetic coding sequence
  source 1..1578: mol_type = other DNA
atgcccctgctggatggagacctggagggcagcggcaagcacagcagcaggaaggtggacagcccctttggacctggcagccccagcaagggcttcttcagccggggcccccagccccggcccagcagccccatgtctgcccctgtgcggcccaagaccagccctggcagccccaagacagtgttccccttctcctaccaggagagcccccccaggagccccaggaggatgtccttcagcggcatcttccgcagcagcagcaaggagagcagccccaacagcaacccagccaccagccctgggggcatccgcttcttcagccgcagcaggaagaccagcggcctgagcagcagccccagcacccccacccaggtgaccaagcagcacaccttccccctggagagctacaagcatgagcctgagcggctggagaaccgcatctatgccagcagcagccccccagacaccggccagcgcttctgccccagcagcttccagagccccaccaggcctcccctggccagccccacccactacgcccccagcaaggctgctgccctggccgccgccctgggccctgctgaggccggcatgctggagaagctggagtttgaagatgaggccgtggaggacagcgagagcggcgtgtacatgaggttcatgaggagccacaagtgctatgacatcgtgcccaccagcagcaagctggtggtgtttgacaccaccctgcaggtgaagaaggccttctttgccctggtggccaatggagtgcgggccgcccccctgtgggagagcaagaagcagagctttgtgggcatgctgaccatcacagacttcatcaacatcctgcaccgctactacaagagccccatggtgcagatctatgagctggaggagcacaagattgagacctggagggagctgtacctgcaggagaccttcaagcccctggtgaacatcagcccagatgccagcctgtttgatgctgtgtacagcctcatcaagaacaagatccaccggctgcccgtcatcgaccccatctctggaaatgccctgtacatcctgacccacaagaggatcctgaagttcctgcagctgttcatgtctgacatgcccaagccagccttcatgaagcagaacctggatgagctgggcatcggcacctaccacaacatcgccttcatccacccagacacccccatcatcaaggccctgaacatctttgtggagcggcgcatcagcgccctgcctgtggtggatgagagcggcaaggtggtggacatctacagcaagtttgatgtgatcaacctggccgctgagaagacctacaacaacctggacatcaccgtgacccaggccctgcagcacaggagccagtactttgaaggagtggtgaagtgcaacaagctggagatcctggagaccatcgtggaccgcatcgtgcgggcagaggtgcaccggctggtggtggtgaatgaggccgacagcatcgtgggcatcatcagcctgagtgacatcctgcaggccctgatcctgaccccagctggggccaagcagaaggagacagaaacagaatag

SEQ ID NO: 165904 - DNA, 987 bp, synthetic construct
  misc_feature 1..987: note = Description of Artificial Sequence: Synthetic coding sequence
  source 1..987: mol_type = other DNA
atgctggagaagctggagtttgaagatgaagctgtggaggacagcgagagcggcgtgtacatgaggttcatgaggagccacaagtgctatgacatcgtgcccaccagcagcaagctggtggtgtttgacaccaccctgcaggtgaagaaggccttctttgccctggtggccaacggggtgcgggccgcccccctgtgggagagcaagaagcagagctttgtgggcatgctgaccatcacagacttcatcaacatcctgcaccgctactacaagagccccatggtgcagatctatgagctggaggagcacaagattgagacctggagggagctgtacctgcaggagaccttcaagcccctggtgaacatcagcccagatgccagcctgtttgatgctgtgtacagcctcatcaagaacaagatccaccggctgcctgtgattgaccccatctctggaaatgccctgtacatcctgacccacaagaggatcctgaagttcctgcagctgttcatgtctgacatgcccaagccagccttcatgaagcagaacctggatgagctgggcatcggcacctaccacaacatcgccttcatccacccagacacccccatcatcaaggccctgaacatctttgtggagcggcgcatcagcgccctgcctgtggtggatgaaagtggcaaggtggtggacatctacagcaagtttgatgtgatcaacctggccgctgagaagacctacaacaacctggacatcaccgtgacccaggccctgcagcacaggagccagtactttgagggcgtggtgaagtgcaacaagctggagatcctggagaccatcgtggacagaattgtgcgggcagaggtgcaccggctggtggtggtgaatgaagctgacagcatcgtgggcatcatcagcctgagtgacatcctgcaggccctgatcctgaccccagctggggccaagcagaaggagacagaaacagaatag

SEQ ID NO: 165905 - DNA, 1335 bp, synthetic construct
  misc_feature 1..1335: note = Description of Artificial Sequence: Synthetic coding sequence
  source 1..1335: mol_type = other DNA
atgagcagcagctatgatgaggccagcctggcccctgaggagaccacagacagcttctgggaggtgggcaactacaagaggacagtgaagagaattgatgatggccaccggctgtgcaatgacctgatgaactgtgtgcaggagcgggccaagattgagaaggcctacggccagcagctgacagactgggccaagcgctggaggcagctgattgagaagggcccccagtatggcagcctggagcgggcctggggcgccatcatgacagaagctgacaaggtgtctgagctgcaccaggaggtgaagaacaacctgctgaatgaagacctggagaaggtgaagaactggcagaaggatgcctaccacaagcagatcatgggcggcttcaaggagaccaaggaggccgaggatggcttcaggaaggcccagaagccctgggccaagaagatgaaggagctggaggccgccaagaaggcctaccacctggcctgcaaggaggagaagctggccatgacccgggagatgaacagcaagacagagcagagcgtgaccccagagcagcagaagaagctgcaggacaaggtggacaagtgcaagcaggatgtgcagaagacccaggagaagtatgagaaggtgctggaggatgtgggcaagaccaccccccagtacatggagaacatggagcaggtgtttgagcagtgccagcagtttgaggagaagaggctggtgttcctgaaggaggtgctgctggacatcaagaggcacctgaacctggccgagaacagcagctacatccacgtgtaccgggagctggagcaggccatcagaggagcagatgcccaggaggacctgcgctggttccgcagcaccagcggccctggcatgcccatgaactggccccagtttgaggagtggaacccagacctgccccacaccaccaccaagaaggagaagcagcccaagaaggccgagggcgtggccctgaccaatgccaccggggctgtggagagcaccagccaggccggggaccggggctctgtgtcctcctatgaccggggccagccctatgccacagagtggagcgatgatgaaagtggcaacccctttggaggcagcgagaccaatggaggagccaacccctttgaagatgacagcaagggcgtgcgggtgcgggccctgtatgactatgatggccaggagcaggatgagctgtccttcaaggctggagatgagctgaccaagctgggggaggaggatgagcagggctggtgccggggccgcctggacagcggccagctgggcctgtacccagccaactacgtggaggccatctag

SEQ ID NO: 165906 - DNA, 1281 bp, synthetic construct
  misc_feature 1..1281: note = Description of Artificial Sequence: Synthetic coding sequence
  source 1..1281: mol_type = other DNA
atgagcagcagctatgatgaggccagcctggcccctgaggagaccacagacagcttctgggaggtgggcaactacaagaggacagtgaagagaattgatgatggccaccggctgtgcaatgacctgatgaactgtgtgcaggagcgggccaagattgagaaggcctacggccagcagctgacagactgggccaagcgctggaggcagctgattgagaagggcccccagtatggcagcctggagcgggcctggggcgccatcatgacagaagctgacaaggtgtctgagctgcaccaggaggtgaagaacaacctgctgaatgaagacctggagaaggtgaagaactggcagaaggatgcctaccacaagcagatcatgggcggcttcaaggagaccaaggaggccgaggatggcttcaggaaggcccagaagccctgggccaagaagatgaaggagctggaggccgccaagaaggcctaccacctggcctgcaaggaggagaagctggccatgacccgggagatgaacagcaagacagagcagagcgtgaccccagagcagcagaagaagctgcaggacaaggtggacaagtgcaagcaggatgtgcagaagacccaggagaagtatgagaaggtgctggaggatgtgggcaagaccaccccccagtacatggagaacatggagcaggtgtttgagcagtgccagcagtttgaggagaagaggctggtgttcctgaaggaggtgctgctggacatcaagaggcacctgaacctggccgagaacagcagctacatccacgtgtaccgggagctggagcaggccatcagaggagcagatgcccaggaggacctgcgctggttccgcagcaccagcggccctggcatgcccatgaactggccccagtttgaggagtggaacccagacctgccccacaccaccaccaagaaggagaagcagcccaagaaggccgagggcgtggccctgaccaatgccaccggggctgtggagagcaccagccaggccggggaccggggctctgtgtcctcctatgaccggggccagccctatgccacagagtggagcgatgatgaaagtggcaacccctttggaggcagcgagaccaatggaggagccaacccctttgaagatgacagcaagggcgtgcgggtgcgggccctgtatgactatgatggccaggagcaggatgagctgtccttcaaggctggagatgagctgaccaagctgggcctgtacccagccaactacgtggaggccatctag

SEQ ID NO: 165907 - DNA, 1335 bp, synthetic construct; identical to SEQ ID NO: 165905
  misc_feature 1..1335: note = Description of Artificial Sequence: Synthetic coding sequence
  source 1..1335: mol_type = other DNA

SEQ ID NO: 165908 - DNA, 1275 bp, synthetic construct
  misc_feature 1..1275: note = Description of Artificial Sequence: Synthetic coding sequence
  source 1..1275: mol_type = other DNA
atggccccagaagaagatgctggaggagaggccctgggcggcagcttctgggaggccggcaactacagaagaacagtgcagagggtggaggatggccaccggctgtgtggggacctggtgtcctgcttccaggagcgggccagaattgagaaggcctatgcccagcagctggccgactgggccaggaagtggaggggcaccgtggagaagggcccccagtatggcaccctggagaaggcctggcacgccttcttcaccgctgctgagcggctgagcgccctgcacctggaggtgcgggagaagctgcagggccaggacagcgagcgggtgcgggcctggcagagaggagccttccacaggcctgtgctgggcggcttccgggagagcagagctgctgaagatggcttcaggaaggcccagaagccctggctgaagaggctgaaggaggtggaggccagcaagaagagctaccacgccgccaggaaggatgagaagacagcccagacccgggagagccacgccaaggctgacagcgctgtgtcccaggagcagctgaggaagctgcaggagcgggtggagcgctgtgccaaggaggccgagaagaccaaggcccagtatgagcagaccctggccgagctgcaccgctacaccccccgctacatggaggacatggagcaggcctttgagacctgccaggccgctgagcggcagaggctgctcttcttcaaggacatgctgctgaccctgcaccagcacctggacctgagcagcagcgagaagttccacgagctgcaccgggacctgcaccagggcatcgaggccgccagtgatgaggaggacctgcgctggtggaggagcacccacggccctggcatggccatgaactggccccagtttgaggagtggagcctggacacccagaggaccatcagcaggaaggagaagggcggccgcagcccagatgaggtgaccctgaccagcatcgtgcccaccagagatggaacagcccccccaccccagagccctggcagccctggcaccggccaggatgaggagtggagcgatgaggagagccccaggaaggccgccaccggggtgcgggtgcgggccctgtatgactatgccggccaggaggctgatgagctgtccttccgggccggggaggagctgctgaagatgtctgaggaggatgagcagggctggtgccagggccagctgcagagcggcagaattggcctgtacccagccaactacgtggagtgtgtgggcgcctag

SEQ ID NO: 165909 - DNA, 879 bp, synthetic construct
  misc_feature 1..879: note = Description of Artificial Sequence: Synthetic coding sequence
  source 1..879: mol_type = other DNA
atggccccagaagaagatgctggaggagaggccctgggcggcagcttctgggaggccggcaactacagaagaacagtgcagagggtggaggatggccaccggctgtgtggggacctggtgtcctgcttccaggagcgggccagaattgagaaggcctatgcccagcagctggccgactgggccaggaagtggaggggcaccgtggagaagggcccccagtatggcaccctggagaaggcctggcacgccttcttcaccgctgctgagcggctgagcgccctgcacctggaggtgcgggagaagctgcagggccaggacagcgagcgggtgcgggcctggcagagaggagccttccacaggcctgtgctgggcggcttccgggagagcagagctgctgaagatggcttcaggaaggcccagaagccctggctgaagaggctgaaggaggtggaggccagcaagaagagctaccacgccgccaggaaggatgagaagacagcccagacccgggagacccagaggcagacagcccccagccccaggagcagctgtgccaactgcagaaatggctggaatgctgtgccccggcggccccggcggcagaagctgtccatgagccgccgctggcagagctgcatcgccaccctgcacgccacctggaggacctggaaccggcccctgcggcctgcccggccccccagcgccagcggcttcttcagcagccgcatctgctgcagcccctacaccagcacctggaccttccctgctgtgcgcagctccatgaacagcacagtgacctgcacccgggccctgcggcagcctgtgaccaagaggatctgtgccggcggggccgcccccaccggccaggcctggccctag

SEQ ID NO: 165910 - DNA, 210 bp, synthetic construct
  misc_feature 1..210: note = Description of Artificial Sequence: Synthetic coding sequence
  source 1..210: mol_type = other DNA
atggccccagaagaagatgctggaggagaggccctgggcggcagcttctgggaggccggcaactacagaagaacagtgcagagggtggaggatggccaccggctgtgtggggacctggtgtcctgcttccaggagcgggccagaattgagaaggcctatgcccagcagctggccgactgggccaggaagtggaggggcaccgtggagtag

SEQ ID NO: 165911 - DNA, 429 bp, synthetic construct
  misc_feature 1..429: note = Description of Artificial Sequence: Synthetic coding sequence
  source 1..429: mol_type = other DNA
atggccccagaagaagatgctggaggagaggccctgggcggcagcttctgggaggccggcaactacagaagaacagtgcagagggtggaggatggccaccggctgtgtggggacctggtgtcctgcttccaggagcgggccagaattgagaaggcctatgcccagcagctggccgactgggccaggaagtggaggggcaccgtggagaagggcccccagtatggcaccctggagaaggcctggcacgccttcttcaccgctgctgagcggctgagcgccctgcacctggaggtgcgggagaagctgcagggccaggacagcgagcgggtgcgggcctggcagagaggagccttccacaggcctgtgctgggcggcttccgggagagcagagctgctgaagatggcttcaggaaggcccagaagccctag

SEQ ID NO: 165912 - DNA, 1218 bp, synthetic construct
  misc_feature 1..1218: note = Description of Artificial Sequence: Synthetic coding sequence
  source 1..1218: mol_type = other DNA
atggccccagaagaagatgctggaggagaggccctgggcggcagcttctgggaggccggcaactacagaagaacagtgcagagggtggaggatggccaccggctgtgtggggacctggtgtcctgcttccaggagcgggccagaattgagaaggcctatgcccagcagctggccgactgggccaggaagtggaggggcaccgtggagaagggcccccagtatggcaccctggagaaggcctggcacgccttcttcaccgctgctgagcggctgagcgccctgcacctggaggtgcgggagaagctgcagggccaggacagcgagcgggtgcgggcctggcagagaggagccttccacaggcctgtgctgggcggcttccgggagagcagagctgctgaagatggcttcaggaaggcccagaagccctggctgaagaggctgaaggaggtggaggccagcaagaagagctaccacgccgccaggaaggatgagaagacagcccagacccgggagagccacgccaaggctgacagcgctgtgtcccaggagcagctgaggaagctgcaggagcgggtggagcgctgtgccaaggaggccgagaagaccaaggcccagtatgagcagaccctggccgagctgcaccgctacaccccccgctacatggaggacatggagcaggcctttgagacctgccaggccgctgagcggcagaggctgctcttcttcaaggacatgctgctgaccctgcaccagcacctggacctgagcagcagcgagaagttccacgagctgcaccgggacctgcaccagggcatcgaggccgccagtgatgaggaggacctgcgctggtggaggagcacccacggccctggcatggccatgaactggccccagtttgaggagtggagcctggacacccagaggaccatcagcaggaaggagaagggcggccgcagcccagatgaggtgaccctgaccagcatcgtgcccaccagagatggaacagcccccccaccccagagccctggcagccctggcaccggccaggatgaggagtggagcgatgaggagagccccaggaaggccgccaccggggtgcgggtgcgggccctgtatgactatgccggccaggaggctgatgagctgtccttccgggccggggaggagctgctgaagatgtctgaggaggatgagcagggctggtgccagggccagtag

SEQ ID NO: 165913 - DNA, 210 bp, synthetic construct; identical to SEQ ID NO: 165910
  misc_feature 1..210: note = Description of Artificial Sequence: Synthetic coding sequence
  source 1..210: mol_type = other DNA

SEQ ID NO: 165914 - DNA, 447 bp, synthetic construct
  misc_feature 1..447: note = Description of Artificial Sequence: Synthetic coding sequence
  source 1..447: mol_type = other DNA
atggccccagaagaagatgctggaggagaggccctgggcggcagcttctgggaggccggcaactacagaagaacagtgcagagggtggaggatggccaccggctgtgtggggacctggtgtcctgcttccaggagcgggccagaattgagaaggcctatgcccagcagctggccgactgggccaggaagtggaggggcaccgtggagaagggcccccagtatggcaccctggagaaggcctggcacgccttcttcaccgctgctgagcggctgagcgccctgcacctggaggtgcgggagaagctgcagggccaggacagcgagcgggtgcgggcctggcagagaggagccttccacaggcctgtgctgggcggcttccgggagagcagagctgctgaagatggcttcaggaaggcccagaagccctggctgaagaggctgaagtag

SEQ ID NO: 165915 - DNA, 1275 bp, synthetic construct; identical to SEQ ID NO: 165908
  misc_feature 1..1275: note = Description of Artificial Sequence: Synthetic coding sequence
  source 1..1275: mol_type = other DNA

SEQ ID NO: 165916 - DNA, 1587 bp, synthetic construct
  misc_feature 1..1587: note = Description of Artificial Sequence: Synthetic coding sequence
  source 1..1587: mol_type = other DNA
atgctgctgcccctgctgctgctgctgcccatgtgctgggccgtggaggtgaagaggccccggggcgtgtccctgaccaaccaccacttctatgatgagagcaagcccttcacctgcctggatggcagcgccaccatcccctttgaccaggtgaatgatgactactgtgactgcaaggatggcagtgatgagcctggaacagctgcctgccccaacggcagcttccactgcaccaacacaggctacaagcccctgtacatccccagcaacagagtgaatgatggagtgtgtgactgctgtgatggaacagatgagtacaacagcggggtcatctgtgagaacacctgcaaggagaagggcaggaaggagcgggagagcctgcagcagatggccgaggtgacccgggagggcttccggctgaagaagatcctgattgaggactggaagaaggcccgggaggagaagcagaagaagctgattgagctgcaggccggcaagaagagcctggaggaccaggtggagatgctgaggacagtgaaggaggaggccgagaagccagagcgggaggccaaggagcagcaccagaagctgtgggaggagcagctggccgccgccaaggcccagcaggagcaggagctggccgcagatgccttcaaggagctggatgatgacatggatggcaccgtgtctgtgacagagctgcagacccaccctgagctggacacagatggagatggagccctgtctgaggccgaggcccaggccctgctgagcggggacacccagacagatgccaccagcttctatgacagagtgtgggccgccatccgggacaagtacagaagtgaggccctgcccacagacctgcctgcccccagcgccccagacctgacagagcccaaggaggagcagccccctgtgcccagcagccccacagaggaggaggaggaggaggaggaggaggaggaggaggaggccgaggaggaggaggaggaggaggacagcgaggaggcccccccacccctgagccccccccagcctgccagccctgctgaggaggacaagatgccaccctatgatgagcagacccaggccttcattgatgctgcccaggaggccaggaacaagtttgaggaggccgagaggagcctgaaggacatggaggagagcatccggaacctggagcaggagatcagctttgattttggccccaatggagaatttgcctacctgtacagccagtgctatgagctgaccaccaatgaatatgtgtaccgcctgtgccccttcaagctggtgtcccagaagcccaagctgggcggcagccccaccagcctgggcacctggggctcctggattggaccagaccatgacaagttcagcgccatgaagtatgagcagggcaccggctgctggcagggccccaacagaagcaccaccgtgcggctgctgtgtgggaaggagaccatggtgaccagcaccacagagcccagccgctgtgagtacctgatggagctgatgaccccagctgcctgcccagagcccccacctgaggcccccacagaagatgaccatgatgagctgtag

SEQ ID NO: 165917 - DNA, 1578 bp, synthetic construct
  misc_feature 1..1578: note = Description of Artificial Sequence: Synthetic coding sequence
  source 1..1578: mol_type = other DNA
atgctgctgcccctgctgctgctgctgcccatgtgctgggccgtggaggtgaagaggccccggggcgtgtccctgaccaaccaccacttctatgatgagagcaagcccttcacctgcctggatggcagcgccaccatcccctttgaccaggtgaatgatgactactgtgactgcaaggatggcagtgatgagcctggaacagctgcctgccccaacggcagcttccactgcaccaacacaggctacaagcccctgtacatccccagcaacagagtgaatgatggagtgtgtgactgctgtgatggaacagatgagtacaacagcggggtcatctgtgagaacacctgcaaggagaagggcaggaaggagcgggagagcctgcagcagatggccgaggtgacccgggagggcttccggctgaagaagatcctgattgaggactggaagaaggcccgggaggagaagcagaagaagctgattgagctgcaggccggcaagaagagcctggaggaccaggtggagatgctgaggacagtgaaggaggaggccgagaagccagagcgggaggccaaggagcagcaccagaagctgtgggaggagcagctggccgccgccaaggcccagcaggagcaggagctggccgcagatgccttcaaggagctggatgatgacatggatggcaccgtgtctgtgacagagctgcagacccaccctgagctggacacagatggagatggagccctgtctgaggccgaggcccaggccctgctgagcggggacacccagacagatgccaccagcttctatgacagagtgtgggccgccatccgggacaagtacagaagtgaggccctgcccacagacctgcctgcccccagcgccccagacctgacagagcccaaggaggagcagccccctgtgcccagcagccccacagaggaggaggaggaggaggaggaggaggaggaggaggaggccgaggaggaggaggaggaggaggacagcgaggtgcagggcgagcagcccaagccagccagccctgctgaggaggacaagatgccaccctatgatgagcagacccaggccttcattgatgctgcccaggaggccaggaacaagtttgaggaggccgagaggagcctgaaggacatggaggagagcatccggaacctggagcaggagatcagctttgattttggccccaacggggagtttgcctacctgtacagccagtgctatgagctgaccaccaatgaatatgtgtaccgcctgtgccccttcaagctggtgtcccagaagcccaagctgggcggcagccccaccagcctgggcacctggggctcctggattggccctgaccatgacaagttcagcgccatgaagtatgagcagggcaccggctgctggcagggccccaacagaagcaccaccgtgcggctgctgtgtgggaaggagaccatggtgaccagcaccacagagcccagccgctgtgagtacctgatggagctgatgaccccagctgcctgcccagagcccccacctgaggcccccacagaagatgaccatgatgagctgtag

SEQ ID NO: 165918 - DNA, 2031 bp, synthetic construct
  misc_feature 1..2031: note = Description of Artificial Sequence: Synthetic coding sequence
  source 1..2031: mol_type = other DNA
atggcccccttcctgagaattgccttcaacagctatgagctgggcagcctgcaggccgaggatgaggccaaccagcccttctgtgctgtgaagatgaaggaggccctgagcacagagcggggcaagaccctggtgcagaagaagcccaccatgtacccagagtggaagagcacctttgatgcccacatctatgagggccgggtcatccagatcgtgctgatgagagctgctgaggagcctgtgtctgaggtgacagtgggcgtgtctgtgctggccgagcgctgcaagaagaacaacgggaaggccgagttctggctggacctgcagccccaggccaaggtgctgatgtctgtgcagtacttcctggaggatgtggactgcaagcagagcatgagaagtgaagatgaggccaagttccccaccatgaacagaagaggagccatcaagcaggccaagatccactacatcaagaaccacgagttcatcgccaccttcttcggccagcccaccttctgcagcgtgtgcaaggactttgtgtggggcctgaacaagcagggctacaagtgccggcagtgcaatgctgccatccacaagaagtgcatcgacaagatcatcggccgctgcacaggaacagctgccaacagccgggacaccatcttccagaaggagcgcttcaacatcgacatgccccaccgcttcaaggtgcacaactacatgagccccaccttctgtgaccactgcggcagcctgctgtggggcctggtgaagcagggcctgaagtgtgaggactgtggcatgaatgtgcaccacaagtgccgggagaaggtggccaacctgtgtggcatcaaccagaagctgctggccgaggccctgaaccaggtgacccagagggccagccgccgcagtgacagcgccagcagcgagcctgtgggcatctaccagggctttgagaagaagacaggagtggccggggaggacatgcaggacaacagcggcacctacggcaagatctgggagggcagcagcaagtgcaacatcaacaacttcatcttccacaaggtgctgggcaagggcagctttgggaaggtgctgctgggggagctgaagggccgcggggagtactttgccatcaaggccctgaagaaggatgtggtgctgattgatgatgatgtggagtgcaccatggtggagaagagggtgctgaccctggccgctgagaaccccttcctgacccacctgatctgcaccttccagaccaaggaccacctgttctttgtgatggagttcctgaatggaggagacctgatgtaccacatccaggacaagggccgctttgagctgtaccgggccaccttctacgccgctgagatcatgtgtggcctgcagttcctgcacagcaagggcatcatctacagagacctgaagctggacaacgtgctgctggacagagatggccacatcaagattgctgactttggcatgtgcaaggagaacatctttggagagagccgggccagcaccttctgtggcaccccagactacatcgcccctgagatcctgcagggcctgaagtacaccttctctgtggactggtggagctttggagtgctgctgtatgagatgctgattggccagagccccttccatggagatgatgaagatgagctgtttgagagcatccgggtggacaccccccactacccccgctggatcaccaaggagagcaaggacatcctggagaagctgtttgagcgggagcccaccaagaggctgggcgtgacaggcaacatcaagatccaccccttcttcaagaccatcaactggaccctgctggagaagaggcggctggagccccccttccggcccaaggtgaagagcccccgggactacagcaactttgaccaggagttcctgaatgagaaggcccggctgagctacagcgacaagaacctgattgacagcatggaccagagcgcctttgctggcttctcctttgtgaaccccaagtttgagcacctgctggaggactag

SEQ ID NO: 165919 - DNA, 2031 bp, synthetic construct; identical to SEQ ID NO: 165918
  misc_feature 1..2031: note = Description of Artificial Sequence: Synthetic coding sequence
  source 1..2031: mol_type = other DNA

SEQ ID NO: 165920 - DNA, 234 bp, synthetic construct
  misc_feature 1..234: note = Description of Artificial Sequence: Synthetic coding sequence
  source 1..234: mol_type = other DNA
atggcccccttcctgagaattgccttcaacagctatgagctgggcagcctgcaggccgaggatgaggccaaccagcccttctgtgctgtgaagatgaaggaggccctgagcacagagcggggcaagaccctggtgcagaagaagcccaccatgtacccagagtggaagagcacctttgatgcccacatctatgagggccgggtcatccagatcgtgctgatgagagctgcctag

SEQ ID NO: 165921 - DNA, 378 bp, synthetic construct
  misc_feature 1..378: note = Description of Artificial Sequence: Synthetic coding sequence
  source 1..378: mol_type = other DNA
atggcccccttcctgagaattgccttcaacagctatgagctgggcagcctgcaggccgaggatgaggccaaccagcccttctgtgctgtgaagatgaaggaggccctgagcacagagcggggcaagaccctggtgcagaagaagcccaccatgtacccagagtggaagagcacctttgatgcccacatctatgagggccgggtcatccagatcgtgctgatgagagctgctgaggagcctgtgtctgaggtgacagtgggcgtgtctgtgctggccgagcgctgcaagaagaacaacgggaaggccgagttctggctggacctgcagccccaggccaaggtgctgatgtctgtgcagtacttcctggaggatgtgtag

SEQ ID NO: 165922 - DNA, 2052 bp, synthetic construct
  misc_feature 1..2052: note = Description of Artificial Sequence: Synthetic coding sequence
  source 1..2052: mol_type = other DNA
atgagcagcggcaccatgaagttcaacggctacctgcgggtgcgcatcggggaggccgtgggcctgcagcccacccgctggagcctgcggcacagcctcttcaagaagggccaccagctgctggacccctacctgactgtgtctgtggaccaggtgcgggtgggccagaccagcaccaagcagaagaccaacaagcccacctacaatgaggagttctgtgccaacgtgacagatggcggccacctggagctggccgtgttccacgagacccccctgggctatgaccactttgtggccaactgcaccctgcagttccaggagctgctgcggaccaccggggccagtgacacctttgagggctgggtggacctggagcctgagggcaaggtgtttgtggtgatcaccctgaccggcagcttcacagaggccaccctgcagagggaccgcatcttcaagcacttcaccaggaagaggcagagggccatgagaagaagagtgcaccagatcaatggccacaagttcatggccacctacctgcggcagcccacctactgcagccactgccgggagttcatctggggcgtgtttgggaagcagggctaccagtgccaggtgtgcacctgtgtggtgcacaagcgctgccaccacctgattgtgacagcctgcacctgccagaacaacatcaacaaggtggacagcaagattgctgagcagcgcttcggcatcaacatcccccacaagttcagcatccacaactacaaggtgcccaccttctgtgaccactgcggcagcctgctgtggggcatcatgaggcagggcctgcagtgcaagatctgcaagatgaatgtgcacatccgctgccaggccaacgtggcccccaactgtggggtgaatgctgtggagctggccaagaccctggccggcatgggcctgcagcccggcaacatcagccccaccagcaagctggtgagccgcagcaccctgcggcggcagggcaaggagagcagcaaggagggcaatggcatcggcgtgaacagcagcaaccggctgggcatcgacaactttgagttcatccgggtgctgggcaagggcagctttgggaaggtgatgctggcccgggtgaaggagactggagacctgtatgctgtgaaggtgctgaagaaggatgtgatcctgcaggatgatgatgtggagtgcaccatgacagagaagaggatcctgagcctggccaggaaccaccccttcctgacccagctgttctgctgcttccagaccccagacaggctcttctttgtgatggagtttgtgaatggaggagacctgatgttccacatccagaagagcagaagatttgatgaggcccgggcccgcttctacgccgctgagatcatcagcgccctgatgttcctgcatgacaagggcatcatctacagagacctgaagctggacaacgtgctgctggaccacgagggccactgcaagctggccgactttggcatgtgcaaggagggcatctgcaatggagtgaccacagccaccttctgtggcaccccagactacatcgcccctgagatcctgcaggagatgctgtatggccctgctgtggactggtgggccatgggcgtgctgctgtatgagatgctgtgtggccacgccccctttgaagcagaaaatgaagatgacctgtttgaggccatcctgaatgatgaggtggtgtaccccacctggctgcatgaagatgccaccggcatcctgaagagcttcatgaccaagaaccccaccatgaggctgggcagcctgacccagggcggggagcacgccatcctgcggcaccccttcttcaaggagattgactgggcccagctgaaccaccggcagatcgagccccccttccggccccgcatcaagagcagagaagatgtgagcaactttgatcctgacttcatcaaggaggagcctgtgctgacccccattgatgagggccacctgcccatgatcaaccaggatgagttcaggaacttctcctatgtgtccccagagctgcagccctag

SEQ ID NO: 165923 - DNA, 357 bp, synthetic construct
  misc_feature 1..357: note = Description of Artificial Sequence: Synthetic coding sequence
  source 1..357: mol_type = other DNA
atgagcagcggcaccatgaagttcaacggctacctgcgggtgcgcatcggggaggccgtgggcctgcagcccacccgctggagcctgcggcacagcctcttcaagaagggccaccagctgctggacccctacctgactgtgtctgtggaccaggtgcgggtgggccagaccagcaccaagcagaagaccaacaagcccacctacaatgaggagttctgtgccaacgtgacagatggcggccacctggagctggccgtgttccacgagacccccctgggctatgaccactttgtggccaactgcaccctgcagttccaggagctgctgcggaccaccggggccagtgacaccttctag

SEQ ID NO: 165924 - DNA, 1791 bp, synthetic construct
  misc_feature 1..1791: note = Description of Artificial Sequence: Synthetic coding sequence
  source 1..1791: mol_type = other DNA
atgcccacccagagggacagcagcaccatgagccacacagtggccggcggcggcagcggggaccacagccaccaggtgcgggtgaaggcctactacagaggagacatcatgatcacccactttgagcccagcatcagctttgagggcctgtgcaatgaggtgcgggacatgtgcagctttgacaatgagcagctgttcaccatgaagtggattgatgaggagggggacccctgcaccgtgagcagccagctggagctggaggaggccttccggctgtatgagctgaacaaggacagcgagctgctgatccacgtgttcccctgtgtgcctgagaggcctggcatgccctgccctggagaggacaagagcatctaccgccgcggggcccggcgctggaggaagctgtactgtgccaacggccacaccttccaggccaagcgcttcaacagaagagcccactgtgccatctgcacagaccgcatctggggcctgggccggcagggctacaagtgcatcaactgcaagctgctggtgcacaagaagtgccacaagctggtgaccattgaatgtggccgccacagcctgccccaggagcctgtgatgcccatggaccagagctccatgcacagcgaccacgcccagaccgtcatcccctacaaccccagcagccatgagagcctggaccaggtgggggaggagaaggaggccatgaacacccgggagagcggcaaggccagcagcagcctgggcctgcaggactttgacctgctgcgggtcatcggccggggcagctatgccaaggtgctgctggtgcggctgaagaagacagaccgcatctatgccatgaaggtggtgaagaaggagctggtgaatgatgatgaggacatcgactgggtgcagacagagaagcacgtgtttgagcaggccagcaaccaccccttcctggtgggcctgcacagctgcttccagacagagagccgcctcttcttcgtcatcgagtatgtgaatggaggagacctgatgttccacatgcagaggcagaggaagctgcctgaggagcacgcccgcttctacagcgctgagatcagcctggccctgaactacctgcacgagcggggcatcatctacagagacctgaagctggacaacgtgctgctggacagcgagggccacatcaagctgacagattatggcatgtgcaaggagggcctgcggcctggggacaccaccagcaccttctgtggcacccccaactacatcgcccctgagatcctgcggggggaggactatggcttctctgtggactggtgggccctgggcgtgctgatgtttgagatgatggccggccgcagcccctttgatattgtgggcagcagtgacaacccagaccagaacacagaggactacctgttccaggtgatcctggagaagcagatccgcatccccaggagcctgtctgtgaaggccgcctctgtgctgaagagcttcctgaacaaggaccccaaggagcggctgggctgccacccccagacaggctttgctgacatccagggccaccccttcttcagaaatgtggactgggacatgatggagcagaagcaggtggtgccccccttcaagcccaacatcagcggggagtttggcctggacaactttgacagccagttcaccaatgaacctgtgcagctgaccccagatgatgatgacatcgtgaggaagattgaccagagcgagtttgagggctttgagtacatcaaccccctgctgatgtctgctgaggagtgtgtgtag

SEQ ID NO: 165925 - DNA, 2121 bp, synthetic construct
  misc_feature 1..2121: note = Description of Artificial Sequence: Synthetic coding sequence
  source 1..2121: mol_type = other DNA
atgagccccttcctgagaattggcctgagcaactttgactgtggcagctgccagagctgccagggcgaggccgtgaacccctactgtgctgtgctggtgaaggagtatgtggagagtgaaaatggccagatgtacatccagaagaagcccaccatgtacccaccctgggacagcacctttgatgcccacatcaacaagggccgggtgatgcagatcatcgtgaagggcaagaatgtggacctgatcagcgagaccaccgtggagctgtacagcctggccgagcgctgcaggaagaacaacgggaagacagagatctggctggagctgaagccccagggccgcatgctgatgaatgcccgctacttcctggagatgtctgacaccaaggacatgaatgaatttgaaacagagggcttctttgccctgcaccagaggagaggagccatcaagcaggccaaggtgcaccacgtgaagtgccacgagttcaccgccaccttcttcccccagcccaccttctgcagcgtgtgccatgaatttgtgtggggcctgaacaagcagggctaccagtgccggcagtgcaatgctgccatccacaagaagtgcatcgacaaggtgattgccaagtgcaccggcagcgccatcaacagccgggagaccatgttccacaaggagcgcttcaagattgacatgccccaccgcttcaaggtgtacaactacaagagccccaccttctgtgagcactgcggcaccctgctgtggggcctggcccggcagggcctgaagtgtgatgcctgtggcatgaatgtgcaccaccgctgccagaccaaggtggccaacctgtgtggcatcaaccagaagctgatggccgaggccctggccatgattgagagcacccagcaggcccgctgcctgcgggacacagagcagatcttccgggagggccctgtggagatcggcctgccctgcagcatcaagaatgaggcccggcccccctgcctgcccacccctgggaagcgggagccccagggcatctcctgggagagccccctggatgaggtggacaagatgtgccacctgcctgagcctgagctgaacaaggagcggcccagcctgcagatcaagctgaagattgaggacttcatcctgcacaagatgctgggcaagggcagctttgggaaggtgttcctggccgagttcaagaagaccaaccagttctttgccatcaaggccctgaagaaggatgtggtgctgatggatgatgatgtggagtgcaccatggtggagaagagggtgctgagcctggcctgggagcaccccttcctgacccacatgttctgcaccttccagaccaaggagaacctcttctttgtgatggagtacctgaatggaggagacctgatgtaccacatccagagctgccacaagtttgacctgagccgggccaccttctatgctgctgagatcatcctgggcctgcagttcctgcacagcaagggcatcgtgtacagagacctgaagctggacaacatcctgctggacaaggatggccacatcaagattgctgactttggcatgtgcaaggagaacatgctgggagatgccaagaccaacaccttctgtggcaccccagactacatcgcccctgagatcctgctgggccagaagtacaaccacagcgtggactggtggagctttggagtgctgctgtatgagatgctgattggccagagccccttccacggccaggatgaggaggagctgttccacagcatccgcatggacaaccccttctacccccgctggctggagaaggaggccaaggacctgctggtgaagctgtttgtgcgggagcctgagaagaggctgggcgtgcggggggacatccggcagcaccccctcttccgggagatcaactgggaggagctggagaggaaggagattgatcctcccttccggcccaaggtgaagagcccctttgactgcagcaactttgacaaggagttcctgaatgagaagccccggctgagctttgctgaccgggccctgatcaacagcatggaccagaacatgttcaggaacttctccttcatgaaccctggcatggagcggctcatctcctag

SEQ ID NO: 165926 - DNA, 1932 bp, synthetic construct
  misc_feature 1..1932: note = Description of Artificial Sequence: Synthetic coding sequence
  source 1..1932: mol_type = other DNA
atgagccccttcctgagaattggcctgagcaactttgactgtggcagctgccagagctgccagggcgaggccgtgaacccctactgtgctgtgctggtgaaggagtatgtggagagtgaaaatggccagatgtacatccagaagaagcccaccatgtacccaccctgggacagcacctttgatgcccacatcaacaagggccgggtgatgcagatcatcgtgaagggcaagaatgtggacctgatcagcgagaccaccgtggagctgtacagcctggccgagcgctgcaggaagaacaacgggaagacagagatctggctggagctgaagccccagggccgcatgctgatgaatgcccgctacttcctggagatgtctgacaccaaggacatgaatgaatttgaaacagagggcttctttgccctgcaccagaggagaggagccatcaagcaggccaaggtgcaccacgtgaagtgccacgagttcaccgccaccttcttcccccagcccaccttctgcagcgtgtgccatgaatttgtgtggggcctgaacaagcagggctaccagtgccggcagtgcaatgctgccatccacaagaagtgcatcgacaaggtgattgccaagtgcaccggcagcgccatcaacagccgggagaccatgttccacaaggagcgcttcaagattgacatgccccaccgcttcaaggtgtacaactacaagagccccaccttctgtgagcactgcggcaccctgctgtggggcctggcccggcagggcctgaagtgtgatgcctgtggcatgaatgtgcaccaccgctgccagaccaaggtggccaacctgtgtggcatcaaccagaagctgatggccgaggccctggccatgattgagagcacccagcaggcccgctgcctgcgggacacagagcagatcttccgggagggccctgtggagatcggcctgccctgcagcatcaagaatgaggcccggcccccctgcctgcccacccctgggaagcgggagccccagggcatctcctgggagagccccctggatgaggtggacaagatgtgccacctgcctgagcctgagctgaacaaggagcggcccagcctgcagatcaagctgaagattgaggacttcatcctgcacaagatgctgggcaagggcagctttgggaaggtgttcctggccgagttcaagaagaccaaccagttctttgccatcaaggccctgaagaaggatgtggtgctgatggatgatgatgtggagtgcaccatggtggagaagagggtgctgagcctggcctgggagcaccccttcctgacccacatgttctgcaccttccagaccaaggagaacctcttctttgtgatggagtacctgaatggaggagacctgatgtaccacatccagagctgccacaagtttgacctgagccgggccaccttctatgctgctgagatcatcctgggcctgcagttcctgcacagcaagggcatcgtgtacagagacctgaagctggacaacatcctgctggacaaggatggccacatcaagattgctgactttggcatgtgcaaggagaacatgctgggagatgccaagaccaacaccttctgtggcaccccagactacatcgcccctgagctgtttgtgcgggagcctgagaagaggctgggcgtgcggggggacatccggcagcaccccctcttccgggagatcaactgggaggagctggagaggaaggagattgacccccccttccggcccaaggtgaagagcccctttgactgcagcaactttgacaaggagttcctgaatgagaagccccggctgagctttgctgaccgggccctgatcaacagcatggaccagaacatgttcaggaacttctccttcatgaaccctggcatggagcggctcatctcctag

SEQ ID NO: 165927 - DNA, 1440 bp, synthetic construct
  misc_feature 1..1440: note = Description of Artificial Sequence: Synthetic coding sequence
  source 1..1440: mol_type = other DNA
tgactgagcctgctgccctgcctgctcttcctgcccaccatcatccccaagaagatcgtcatccagagggacagcctgcccagcaagaagctgtcctatggcctcatcgcctgtggcatgaatgtgcaccaccgctgccagaccaaggtggccaacctgtgtggcatcaaccagaagctgatggccgaggccctggccatgattgagagcacccagcaggcccgctgcctgcgggacacagagcagatcttccgggagggccctgtggagatcggcctgccctgcagcatcaagaatgaggcccggcccccctgcctgcccaccccaggcaagcgggagccccagggcatctcctgggagagccccctggatgaggtggacaagatgtgccacctgcctgagcctgagctgaacaaggagcggcccagcctgcagatcaagctgaagattgaggacttcatcctgcacaagatgctgggcaagggcagctttgggaaggtgttcctggccgagttcaagaagaccaaccagttctttgccatcaaggccctgaagaaggatgtggtgctgatggatgatgatgtggagtgcaccatggtggagaagagggtgctgagcctggcctgggagcaccccttcctgacccacatgttctgcaccttccagaccaaggaaaatctcttctttgtgatggagtacctgaatggaggagacctgatgtaccacatccagagctgccacaagtttgacctgagccgggccaccttctacgccgctgagatcatcctgggcctgcagttcctgcacagcaaaggaattgtgtacagagacctgaagctggacaacatcctgctggacaaggatggccacatcaagattgctgactttggcatgtgcaaggagaacatgctgggagatgccaagaccaacaccttctgtggcaccccagactacatcgcccctgagatcctgctgggccagaagtacaaccacagcgtggactggtggagctttggagtgctgctgtatgagatgctgattggccagagccccttccacggccaggatgaggaggagctgttccacagcatccgcatggacaaccccttctacccccgctggctggagaaggaggccaaggacctgctggtgaagctgtttgtgcgggagcctgagaagaggctgggcgtgcggggggacatccggcagcaccccctcttccgggagatcaactgggaggagctggagaggaaggagattgacccccccttccggcccaaggtgaagagcccctttgactgcagcaactttgacaaggagttcctgaatgagaagccccggctgagctttgctgaccgggccctgatcaacagcatggaccagaacatgttcaggaacttctccttcatgaaccctggcatggagcggctcatctcctag

SEQ ID NO: 165928 - DNA, 1746 bp, synthetic construct
  misc_feature 1..1746: note = Description of Artificial Sequence: Synthetic coding sequence
  source 1..1746: mol_type = other DNA
atggacaccaaggacatgaatgaatttgaaacagagggcttctttgccctgcaccagaggagaggagccatcaagcaggccaaggtgcaccacgtgaagtgccacgagttcaccgccaccttcttcccccagcccaccttctgcagcgtgtgccacgagtttgtgtggggcctgaacaagcagggctaccagtgccggcagtgcaatgctgccatccacaagaagtgcatcgacaaggtgattgccaagtgcaccggcagcgccatcaacagccgggagaccatgttccacaaggagcgcttcaagattgacatgccccaccgcttcaaggtgtacaactacaagagccccaccttctgtgagcactgcggcaccctgctgtggggcctggcccggcagggcctgaagtgtgatgcctgtggcatgaatgtgcaccaccgctgccagaccaaggtggccaacctgtgtggcatcaaccagaagctgatggccgaggccctggccatgattgagagcacccagcaggcccgctgcctgcgggacacagagcagatcttccgggagggccctgtggagatcggcctgccctgcagcatcaagaatgaggcccggcccccctgcctgcccaccccaggcaagcgggagccccagggcatctcctgggagagccccctggatgaggtggacaagatgtgccacctgcctgagcctgagctgaacaaggagcggcccagcctgcagatcaagctgaagattgaggacttcatcctgcacaagatgctgggcaagggcagctttgggaaggtgttcctggccgagttcaagaagaccaaccagttctttgccatcaaggccctgaagaaggatgtggtgctgatggatgatgatgtggagtgcaccatggtggagaagagggtgctgagcctggcctgggagcaccccttcctgacccacatgttctgcaccttccagaccaaggaaaatctcttctttgtgatggagtacctgaatggaggagacctgatgtaccacatccagagctgccacaagtttgacctgagccgggccaccttctacgccgctgagatcatcctgggcctgcagttcctgcacagcaaaggaattgtgtacagagacctgaagctggacaacatcctgctggacaaggatggccacatcaagattgctgactttggcatgtgcaaggagaacatgctgggagatgccaagaccaacaccttctgtggcaccccagactacatcgcccctgagatcctgctgggccagaagtacaaccacagcgtggactggtggagctttggagtgctgctgtatgagatgctgattggccagagccccttccacggccaggatgaggaggagctgttccacagcatccgcatggacaaccccttctacccccgctggctggagaaggaggccaaggacctgctggtgaagctgtttgtgcgggagcctgagaagaggctgggcgtgcggggggacatccggcagcaccccctcttccgggagatcaactgggaggagctggagaggaaggagattgacccccccttccggcccaaggtgaagagcccctttgactgcagcaactttgacaaggagttcctgaatgagaagccccggctgagctttgctgaccgggccctgatcaacagcatggaccagaacatgttcaggaacttctccttcatgaaccctggcatggagcggctcatctcctag

SEQ ID NO: 165929 - DNA, 1032 bp, synthetic construct
  misc_feature 1..1032: note = Description of Artificial Sequence: Synthetic coding sequence
  source 1..1032: mol_type = other DNA
atggccagcaacagcagtgatgtgaaggagttcctggccaaggccaaggaggacttcctgaagaagtgggagagccctgcccagaacacagcccacctggaccagtttgagcgcatcaagaccctgggcaccggcagctttggccgggtgatgctggtgaagcacaaggagaccggcaaccactacgccatgaagatcctggacaagcagaaggtggtgaagctgaagcagatcgagcacaccctgaatgagaagaggatcctgcaggccgtgaacttccccttcctggtgaagctggagttctccttcaaggacaacagcaacctgtacatggtgatggagtatgtgcctggaggagagatgttcagccacctgcggcgcatcggccgcttcagcgagccccacgcccgcttctacgccgcccagatcgtgctgacctttgagtacctgcacagcctggacctgatctacagagacctgaagccagagaacctgctgattgaccagcagggctacatccaggtgacagactttggatttgccaagagggtgaagggccgcacctggaccctgtgtggcaccccagagtacctggcccctgagatcatcctgagcaagggctacaacaaggctgtggactggtgggccctgggcgtgctgatctatgagatggccgccggctacccacccttctttgctgaccagcccatccagatctatgagaagatcgtgtctgggaaggtgcgcttccccagccacttcagcagtgacctgaaggacctgctgaggaacctgctgcaggtggacctgaccaagcgcttcggcaacctgaagaatggagtgaatgacatcaagaaccacaagtggtttgccaccacagactggatcgccatctaccagaggaaggtggaggcccccttcatccccaagttcaagggccctggggacaccagcaactttgatgattatgaggaggaggagatccgggtgtccatcaatgaaaaatgtgggaaggagttcagcgagttctag

SEQ ID NO: 165930 - DNA, 1146 bp, synthetic construct
  misc_feature 1..1146: note = Description of Artificial Sequence: Synthetic coding sequence
  source 1..1146: mol_type = other DNA
atggagagcggcagcacagctgccagcgaggaggcccggagcctgagagaatgtgagctgtatgtgcagaagcacaacatccaggccctgctgaaggacagcatcgtgcagctgtgcacagcccggcctgagcggcccatggccttcctgcgggagtactttgagcggctggagaaggaggaggccaagcagatccagaacctgcagaaggccggcaccaggacagacagcagagaagatgagatcagccccccaccacccaaccctgtggtgaagggcagaagaagaagaggagccatctctgctgaggtgtacacagaggaggatgctgccagctatgtgaggaaggtgatccccaaggactacaagaccatggccgccctggccaaggccatcgagaagaatgtgctcttcagccacctggatgacaatgaaagaagtgacatctttgatgccatgttttctgtgtccttcatcgccggggagaccgtcatccagcagggagatgaaggagacaacttctacgtgattgaccagggcgagacagatgtgtatgtgaacaatgagtgggccacctctgtgggggagggcggcagctttggagagctggccctgatctacggcaccccccgggccgccaccgtgaaggccaagaccaacgtgaagctgtggggcatcgaccgggacagctaccgccgcatcctgatgggcagcaccctgaggaagaggaagatgtatgaggagttcctgagcaaggtgtccatcctggagagcctggacaagtgggagcggctgactgtggctgatgccctggagcctgtgcagtttgaagatggccagaagatcgtggtgcagggcgagcctggagatgagttcttcatcatcctggagggcagcgctgctgtgctgcagaggagaagtgaaaatgaggagtttgtggaggtgggccgcctgggccccagcgactactttggagaaattgccctgctgatgaaccggccccgggccgccaccgtggtggcccggggccccctgaagtgtgtgaagctggaccggcccaggtttgagcgggtgctgggcccctgcagcgacatcctgaagaggaacatccagcagtacaacagctttgtgtccctgtctgtgtag

SEQ ID NO: 165931 - DNA, 2739 bp, synthetic construct
  misc_feature 1..2739: note = Description of Artificial Sequence: Synthetic coding sequence
  source 1..2739: mol_type = other DNA
atgtctgcccctcctgtgctgcggccccccagccccctgctgcctgtggccgctgctgctgctgctgctgctgctgccctggtgcccggcagcggccctggccctgcccccttcctggcccctgtggccgcccctgtgggcggcatctccttccacctgcagatcggcctgagccgggagcctgtgctgctgctgcaggacagcagcggggactacagcctggcccacgtgcgggagatggcctgcagcatcgtggaccagaagttcccagaatgtggcttctacggcatgtatgacaagatcctgctcttcagacatgaccccaccagcgagaacatcctgcagctggtgaaggccgccagtgacatccaggagggggacctgattgaggtggtgctgagcgccagcgccacctttgaggacttccagatccggccccacgccctgtttgtgcacagctaccgggccccagccttctgtgaccactgtggggagatgctgtggggcctggtgcggcagggcctgaagtgtgagggctgcggcctgaactaccacaagagatgtgccttcaagatccccaacaactgcagcggcgtgagaagaagaaggctgagcaatgtgtccctgactggagtgtccaccatccgcaccagcagcgctgagctgagcaccagcgccccagatgagcccctgctgcagaagagccccagcgagagcttcatcggccgggagaagaggagcaacagccagagctacatcggccggcccatccacctggacaagatcctgatgagcaaggtgaaggtgccccacacctttgtgatccacagctacacccggcccaccgtgtgccagtactgcaagaagctgctgaagggcctcttccggcagggcctgcagtgcaaggactgccgcttcaactgccacaagagatgtgcccccaaggtgcccaacaactgcctgggggaggtgaccatcaatggagacctgctgagccctggagctgagagtgatgtggtgatggaggagggcagtgatgacaatgacagcgagaggaacagcggcctgatggatgacatggaggaggccatggtgcaggatgctgagatggccatggccgagtgccagaatgattctggagagatgcaggaccctgaccctgaccatgaagatgccaacagaaccatcagccccagcaccagcaacaacatccccctgatgagggtggtgcagagcgtgaagcacaccaagaggaagagcagcacagtgatgaaggagggctggatggtgcactacaccagcaaggacaccctgaggaagaggcactactggaggctggacagcaagtgcatcaccctcttccagaatgacaccggcagccgctactacaaggagatccccctgtctgagatcctgagcctggagcctgtgaagaccagcgccctgatccccaatggagccaacccccactgctttgagatcaccacagccaacgtggtgtactacgtgggagaaaatgtggtgaaccccagcagccccagccccaacaacagcgtgctgaccagcggcgtgggcgcagatgtggccaggatgtgggagatcgccatccagcacgccctgatgcctgtgatccccaagggcagctctgtgggcaccggcaccaacctgcaccgggacatctctgtgtccatctctgtgagcaactgccagatccaggagaatgtggacatcagcacagtgtaccagatcttcccagatgaggtgctgggcagcggccagtttggcatcgtgtatggaggcaagcacaggaagacaggaagagatgtggccatcaagatcatcgacaagctgcgcttccccaccaagcaggagagccagctgagaaatgaggtggccatcctgcagaacctgcaccaccctggggtggtgaacctggagtgcatgtttgagaccccagagcgggtgtttgtggtgatggagaagctgcatggagacatgctggagatgatcctgagcagcgagaagggccgcctgcctgagcacatcaccaagttcctgatcacccagatcctggtggccctgcggcacctgcacttcaagaacatcgtgcactgtgacctgaagccagaaaatgtgctgctggccagcgctgaccccttcccccaggtgaagctgtgtgactttggatttgcccgcatcatcggggagaagagcttccgccgctctgtggtgggcaccccagcctacctggcccctgaggtgctgaggaacaagggctacaacagaagcctggacatgtggagcgtgggcgtcatcatctacgtgtccctgagcggcaccttccccttcaatgaagatgaggacatccatgaccagatccagaatgctgccttcatgtacccacccaacccctggaaggagatcagccatgaggccatcgacctgatcaacaacctgctgcaggtgaagatgaggaagcgctacagcgtggacaagaccctgagccacccctggctgcaggactaccagacctggctggacctgcgggagctggagtgcaagattggagagcgctacatcacccatgaaagtgatgacctgcgctgggagaagtatgctggggagcagggcctgcagtaccccacccacctgatcaaccccagcgccagccacagcgacaccccagagacagaggagacagagatgaaggccctgggggagcgggtgtccatcctgtag

SEQ ID NO: 165932 - DNA, 2637 bp, synthetic construct
  misc_feature 1..2637: note = Description of Artificial Sequence: Synthetic coding sequence
  source 1..2637: mol_type = other DNA
atggccacagcccccagctacccagctggcctgcccggcagccctggccctggcagccccccacctcctgggggcctggagctgcagagccccccacccctgctgccccagatcccagcccctggcagcggcgtgtccttccacatccagatcggcctgacccgggagtttgtgctgctgcctgctgccagcgagctggcccacgtgaagcagctggcctgcagcatcgtggaccagaagttcccagaatgtggcttctacggcctgtatgacaagatcctgctcttcaagcatgaccccaccagcgccaacctgctgcagctggtgcgcagcagcggggacatccaggagggggacctggtggaggtggtgctgagcgccagcgccacctttgaggacttccagatccggccccacgccctgactgtgcacagctaccgggccccagccttctgtgaccactgtggggagatgctgtttggcctggtgcggcagggcctgaagtgtgatggctgcggcctgaactaccacaagagatgtgccttcagcatccccaacaactgcagcggggccaggaagaggcggctgagcagcaccagcctggccagcggccacagcgtgcggctgggcaccagcgagagcctgccctgcacagctgaggagctgagccgcagcaccacagagctgctgccccggcggccccccagcagcagcagcagcagcagcgccagcagctacacaggccggcccatcgagctggacaagatgctgctgagcaaggtgaaggtgccccacaccttcctgatccacagctacacccggcccaccgtgtgccaggcctgcaagaagctgctgaagggcctcttccggcagggcctgcagtgcaaggactgcaagttcaactgccacaagagatgtgccaccagggtgcccaatgactgcctgggggaggccctgatcaatggagatgtgcccatggaggaggccacagacttcagcgaggccgacaagagcgccctgatggatgaaagtgaagattctggagtcatccctggcagccacagtgaaaatgccctgcacgccagcgaggaggaggagggggagggcggcaaggcccagagcagcctgggctacatccccctgatgagggtggtgcagagcgtgcgccacaccaccaggaagagcagcaccaccctgcgggagggctgggtggtgcactacagcaacaaggacaccctgaggaagaggcactactggaggctggactgcaagtgcatcaccctcttccagaacaacaccaccaaccgctactacaaggagatccccctgtctgagatcctgactgtggagagcgcccagaacttcagcctggtgcccccaggcaccaacccccactgctttgaaattgtgacagccaatgccacctactttgtgggggagatgcctgggggcacccctgggggccccagcggccagggcgctgaggccgcccggggctgggagacagccatccggcaggccctgatgcctgtgatcctgcaggatgcccccagcgcccctggccacgccccccaccggcaggccagcctgagcatctctgtgagcaacagccagatccaggagaatgtggacatcgccaccgtgtaccagatcttcccagatgaggtgctgggcagcggccagtttggagtggtgtatggaggcaagcacaggaagacaggaagagatgtggccgtgaaggtgattgacaagctgcgcttccccaccaagcaggagagccagctgagaaatgaggtggccatcctgcagagcctgcggcaccctggcatcgtgaacctggagtgcatgtttgagaccccagagaaggtgtttgtggtgatggagaagctgcatggagacatgctggagatgatcctgagcagcgagaagggccgcctgcctgagcggctgaccaagttcctgatcacccagatcctggtggccctgcggcacctgcacttcaagaacatcgtgcactgtgacctgaagccagaaaatgtgctgctggccagcgctgaccccttcccccaggtgaagctgtgtgactttggatttgcccgcatcatcggggagaagagcttccgccgctctgtggtgggcaccccagcctacctggcccctgaggtgctgctgaaccagggctacaacagaagcctggacatgtggagcgtgggcgtcatcatgtatgtgtccctgagcggcaccttccccttcaatgaagatgaggacatcaatgaccagatccagaatgctgccttcatgtacccagccagcccctggagccacatctctgctggggccatcgacctgatcaacaacctgctgcaggtgaagatgaggaagcgctacagcgtggacaagagcctgagccacccctggctgcaggagtaccagacctggctggacctgcgggagctggagggcaagatgggagagcgctacatcacccatgaaagtgatgatgtgcgctgggagcagtttgctgctgagcaccccctgcccggcagcggcctgcccacagaccgggacctgggcggggcctgccccccccaggaccatgacatgcagggcctggccgagcgcatctctgtgctgtag

SEQ ID NO: 165933 - DNA, 2637 bp, synthetic construct; identical to SEQ ID NO: 165932
  misc_feature 1..2637: note = Description of Artificial Sequence: Synthetic coding sequence
  source 1..2637: mol_type = other DNA

SEQ ID NO: 165934 - DNA, 2166 bp, synthetic construct
  misc_feature 1..2166: note = Description of Artificial Sequence: Synthetic coding sequence
  source 1..2166: mol_type = other DNA
atgctgtttggcctggtgcggcagggcctgaagtgtgatggctgcggcctgaactaccacaagagatgtgccttcagcatccccaacaactgcagcggggccaggaagaggcggctgagcagcaccagcctggccagcggccacagcgtgcggctgggcaccagcgagagcctgccctgcacagctgaggagctgagccgcagcaccacagagctgctgcccaggaggcctcccagcagcagcagcagcagcagcgccagcagctacacaggccggcccatcgagctggacaagatgctgctgagcaaggtgaaggtgccccacaccttcctgatccacagctacacccggcccaccgtgtgccaggcctgcaagaagctgctgaagggcctcttccggcagggcctgcagtgcaaggactgcaagttcaactgccacaagagatgtgccaccagggtgcccaatgactgcctgggggaggccctgatcaatggagatgtgcccatggaggaggccacagacttcagcgaggccgacaagagcgccctgatggatgaaagtgaggacagcggggtcatccctggcagccacagtgaaaatgccctgcacgccagcgaggaggaggagggggagggcggcaaggcccagagcagcctgggctacatccccctgatgagggtggtgcagagcgtgcgccacaccaccaggaagagcagcaccaccctgcgggagggctgggtggtgcactacagcaacaaggacaccctgaggaagaggcactactggaggctggactgcaagtgcatcaccctcttccagaacaacaccaccaaccgctactacaaggagatccccctgtctgagatcctgactgtggagagcgcccagaacttcagcctggtgcccccaggcaccaacccccactgctttgagatcgtgacagccaatgccacctactttgtgggggagatgcctgggggcaccccaggcggccccagcggccagggcgctgaggccgcccggggctgggagacagccatccggcaggccctgatgcctgtgatcctgcaggatgcccccagcgcccctggccacgccccccaccggcaggccagcctgagcatctctgtgagcaacagccagatccaggagaatgtggacatcgccaccgtgtaccagatcttcccagatgaggtgctgggcagcggccagtttggagtggtgtatggaggcaagcacaggaagacaggaagagatgtggccgtgaaggtgattgacaagctgcgcttccccaccaagcaggagagccagctgagaaatgaggtggccatcctgcagagcctgcggcaccctggcatcgtgaacctggagtgcatgtttgagaccccagagaaggtgtttgtggtgatggagaagctgcacggggacatgctggagatgatcctgagcagcgagaagggccgcctgcctgagcggctgaccaagttcctgatcacccagatcctggtggccctgcggcacctgcacttcaagaacatcgtgcactgtgacctgaagccagaaaatgtgctgctggccagcgctgaccccttcccccaggtgaagctgtgtgactttggatttgcccgcatcattggagagaagagcttcagaagatctgtggtgggcaccccagcctacctggcccctgaggtgctgctgaaccagggctacaacagaagcctggacatgtggagcgtgggcgtcatcatgtatgtgtccctgagcggcaccttccccttcaatgaagatgaggacatcaatgaccagatccagaatgctgccttcatgtacccagccagcccctggagccacatctctgctggggccatcgacctgatcaacaacctgctgcaggtgaagatgaggaagcgctacagcgtggacaagagcctgagccacccctggctgcaggagtaccagacctggctggacctgcgggagctggagggcaagatgggagagcgctacatcacccatgaaagtgatgatgtgcgctgggagcagtttgctgctgagcaccccctgcccggcagcggcctgcccacagaccgggacctgggcggggcctgccccccccaggaccatgacatgcagggcctggccgagcgcatctctgtgctgtag

SEQ ID NO: 165935 - DNA, 1482 bp, synthetic construct
  misc_feature 1..1482: note = Description of Artificial Sequence: Synthetic coding sequence
  source 1..1482: mol_type = other DNA
atgagaagaagaagagctgctgtggccgccggcttctgtgccagcttcctgctgggctctgtgctgaatgtgctgtttgcccctggcagcgagccccccaggcctggccagagccctgagcccagccctgcccctggccctggaagaagaggaggccgcggggagctggcccggcagatccgggcccgctatgaggaggtgcagcgctacagcagaggaggccctggccctggagctggccggcctgagcggcggcggctgatggacctggcccctgggggccctggcctgccccggccccggcccccctgggcccggcccctgagtgatggagcccctggctggcccccagcccctggccctggcagccctggccctggcccccggctgggctgtgccgccctgagaaatgtgtctggggcccagtacatgggcagcggctacaccaaggctgtgtacagagtgcggctgcccggcggcgctgctgtggccctgaaggctgtggacttcagcggccatgacctgggcagctgtgtgcgggagtttggagtgagaagaggctgctaccgcctggccgcccacaagctgctgaaggagatggtgctgctggagcggctgcggcaccccaacgtgctgcagctgtatggctactgctaccaggacagcgaggacatcccagacaccctgaccaccatcacagagctgggcgcccctgtggagatgatccagctgctgcagacctcctgggaggaccgcttccgcatctgcctgagcctgggccgcctgctgcaccacctggcccacagccccctgggctctgtgaccctgctggacttccggccccggcagtttgtgctggtggatggagagctgaaggtgacagacctggatgatgcccgggtggaggagaccccctgtgccggcagcacagactgcatcctggagttccctgccaggaacttcaccctgccctgcagcgcccagggctggtgtgagggcatgaatgagaagaggaacctgtacaatgcctaccgcttcttcttcacctacctgctgccccacagcgccccacccagcctgcggcccctgctggacagcatcgtgaatgccactggagagctggcctggggcgtggatgagaccctggcccagctggagaaggtgctgcacctgtaccgcagcggccagtacctgcagaacagcacagccagcagcagcacagagtaccagtgcatcccagacagcaccatcccccaggaggactaccgctgctggcccagctaccaccacggcagctgcctgctgagcgtcttcaacctggccgaggccgtggatgtgtgtgagagccacgcccagtgccgggcctttgtggtgaccaaccagaccacctggacaggccggcagctggtgttcttcaagacaggctggagccaggtggtgcctgaccccaacaagaccacctacgtgaaggccagcggctag

SEQ ID NO: 165936 - DNA, 2829 bp, synthetic construct
  misc_feature 1..2829: note = Description of Artificial Sequence: Synthetic coding sequence
  source 1..2829: mol_type = other DNA
atggccagtgatgctgtgcagagcgagcccaggtcctggagcctgctggagcagctgggcctggccggggctgacctggccgcccctggggtgcagcagcagctggagctggagcgggagcggctgcggcgggagatcaggaaggagctgaagctgaaggagggcgctgagaacctgcggcgggccaccacagacctgggccgcagcctgggccctgtggagctgctgctgcggggcagcagccggcggctggacctgctgcaccagcagctgcaggagctgcacgcccacgtggtgctgcctgaccctgctgccacccatgatggcccccagagccctggagctgggggccccacctgcagcgccaccaacctgagccgggtggccggcctggagaagcagctggccatcgagctgaaggtgaagcagggcgctgagaacatgatccagacctacagcaatggcagcaccaaggacaggaagctgctgctgacagcccagcagatgctgcaggacagcaagaccaagattgacatcatccgcatgcagctgcggcgggccctgcaggccggccagctggagaaccaggccgccccagatgacacccagggcagcccagacctgggcgctgtggagctgagaattgaggagctgcggcaccacttccgggtggagcacgctgtggccgagggcgccaagaatgtgctgcggctgctgtctgctgccaaggccccagacaggaaggctgtgtctgaggcccaggagaagctgacagagagcaaccagaagctgggcctgctgcgggaggccctggagcggcggctgggggagctgcctgctgaccaccccaagggccgcctgctgcgggaggagctggccgccgccagcagcgctgccttcagcacccggctggccggccccttccctgccacccactacagcaccctgtgcaagccagcccccctgaccggcaccctggaggtgcgggtggtgggctgccgggacctgcctgagaccatcccctggaaccccacccccagcatgggcggccctggcaccccagacagccggccccccttcctgagcaggcctgcccggggcctgtacagccgcagcggcagcctgagcggccgcagcagcctgaaggccgaggccgagaacaccagcgaggtgtccacagtgctgaagctggacaacacagtggtgggccagacctcctggaagccctgtggccccaatgcctgggaccagagcttcaccctggagctggagcgggcccgggagctggagctggccgtgttctggagggaccagaggggcctgtgtgccctgaagttcctgaagctggaggacttcctggacaatgaaagacatgaggtgcagctggacatggagccccagggctgcctggtggccgaggtgaccttcagaaatcctgtgattgagcgcatcccccggctgcggcggcagaagaagatcttcagcaagcagcagggcaaggccttccagagggcccggcagatgaacattgatgtggccacctgggtgcggctgctgcggcggctcatccccaatgccactggaacaggcaccttcagccctggggccagccctggcagcgaggcccggaccactggagacatctctgtggagaagctgaacctgggcacagacagcgacagcagcccccagaagagcagccgggacccccccagcagccccagcagcctgagcagccccatccaggagagcacagcccctgagctgcccagcgagacccaggagaccccaggccctgccctgtgcagccccctgaggaagagccccctgaccctggaggacttcaagttcctggccgtgctgggccggggccactttgggaaggtgctgctgtctgagttccggcccagcggggagctgtttgccatcaaggccctgaagaagggggacatcgtggccagagatgaggtggagagcctgatgtgtgagaagaggatcctggccgctgtgaccagcgctggccaccccttcctggtgaacctgtttggctgcttccagaccccagagcacgtgtgctttgtgatggagtacagcgctggaggagacctgatgctgcacatccacagtgatgtgttttctgagccccgggccatcttctacagcgcctgtgtggtgctgggcctgcagttcctgcacgagcacaagatcgtgtacagagacctgaagctggacaacctgctgctggacacagagggctacgtgaagattgctgactttggcctgtgcaaggagggcatgggctacggggacaggaccagcaccttctgtggcaccccagagttcctggcccctgaggtgctgacagacaccagctacaccagggctgtggactggtggggcctgggcgtgctgctgtatgagatgctggtgggggagagccccttccctggagatgatgaggaggaggtgtttgacagcatcgtgaatgatgaggtgcgctacccccgcttcctgtctgctgaggccatcggcatcatgaggcggctgctgcggaggaaccctgagcggcggctgggcagcagcgagagagatgctgaagatgtgaagaagcagcccttcttccgcaccctgggctgggaggccctgctggcccggcggctgcccccaccatttgtgcccaccctgagcggccgcacagatgtgagcaactttgatgaggagttcaccggggaggcccccaccctgagccccccaagagatgcccggcccctgacagctgctgagcaggccgccttcctggactttgattttgtggccggcggctgctag

SEQ ID NO: 165937 - DNA, 2847 bp, synthetic construct
  misc_feature 1..2847: note = Description of Artificial Sequence: Synthetic coding sequence
  source 1..2847: mol_type = other DNA
atggccgaggccaacaaccccagcgagcaggagctggagagcgagcccaggtcctggagcctgctggagcagctgggcctggccggggctgacctggccgcccctggggtgcagcagcagctggagctggagcgggagcggctgcggcgggagatcaggaaggagctgaagctgaaggagggcgctgagaacctgcggcgggccaccacagacctgggccgcagcctgggccctgtggagctgctgctgcggggcagcagccggcggctggacctgctgcaccagcagctgcaggagctgcacgcccacgtggtgctgcctgaccctgctgccacccatgatggcccccagagccctggagctgggggccccacctgcagcgccaccaacctgagccgggtggccggcctggagaagcagctggccatcgagctgaaggtgaagcagggcgctgagaacatgatccagacctacagcaatggcagcaccaaggacaggaagctgctgctgacagcccagcagatgctgcaggacagcaagaccaagattgacatcatccgcatgcagctgcggcgggccctgcaggccggccagctggagaaccaggccgccccagatgacacccagggcagcccagacctgggcgctgtggagctgagaattgaggagctgcggcaccacttccgggtggagcacgctgtggccgagggcgccaagaatgtgctgcggctgctgtctgctgccaaggccccagacaggaaggctgtgtctgaggcccaggagaagctgacagagagcaaccagaagctgggcctgctgcgggaggccctggagcggcggctgggggagctgcctgctgaccaccccaagggccgcctgctgcgggaggagctggccgccgccagcagcgctgccttcagcacccggctggccggccccttccctgccacccactacagcaccctgtgcaagccagcccccctgaccggcaccctggaggtgcgggtggtgggctgccgggacctgcctgagaccatcccctggaaccccacccccagcatgggcggccctggcaccccagacagccggccccccttcctgagcaggcctgcccggggcctgtacagccgcagcggcagcctgagcggccgcagcagcctgaaggccgaggccgagaacaccagcgaggtgtccacagtgctgaagctggacaacacagtggtgggccagacctcctggaagccctgtggccccaatgcctgggaccagagcttcaccctggagctggagcgggcccgggagctggagctggccgtgttctggagggaccagaggggcctgtgtgccctgaagttcctgaagctggaggacttcctggacaatgaaagacatgaggtgcagctggacatggagccccagggctgcctggtggccgaggtgaccttcagaaatcctgtgattgagcgcatcccccggctgcggcggcagaagaagatcttcagcaagcagcagggcaaggccttccagagggcccggcagatgaacattgatgtggccacctgggtgcggctgctgcggcggctcatccccaatgccactggaacaggcaccttcagccctggggccagccctggcagcgaggcccggaccactggagacatctctgtggagaagctgaacctgggcacagacagcgacagcagcccccagaagagcagccgggacccccccagcagccccagcagcctgagcagccccatccaggagagcacagcccctgagctgcccagcgagacccaggagaccccaggccctgccctgtgcagccccctgaggaagagccccctgaccctggaggacttcaagttcctggccgtgctgggccggggccactttgggaaggtgctgctgtctgagttccggcccagcggggagctgtttgccatcaaggccctgaagaagggggacatcgtggccagagatgaggtggagagcctgatgtgtgagaagaggatcctggccgctgtgaccagcgctggccaccccttcctggtgaacctgtttggctgcttccagaccccagagcacgtgtgctttgtgatggagtacagcgctggaggagacctgatgctgcacatccacagtgatgtgttttctgagccccgggccatcttctacagcgcctgtgtggtgctgggcctgcagttcctgcacgagcacaagatcgtgtacagagacctgaagctggacaacctgctgctggacacagagggctacgtgaagattgctgactttggcctgtgcaaggagggcatgggctacggggacaggaccagcaccttctgtggcaccccagagttcctggcccctgaggtgctgacagacaccagctacaccagggctgtggactggtggggcctgggcgtgctgctgtatgagatgctggtgggggagagccccttccctggagatgatgaggaggaggtgtttgacagcatcgtgaatgatgaggtgcgctacccccgcttcctgtctgctgaggccatcggcatcatgaggcggctgctgcggaggaaccctgagcggcggctgggcagcagcgagagagatgctgaagatgtgaagaagcagcccttcttccgcaccctgggctgggaggccctgctggcccggcggctgcccccaccatttgtgcccaccctgagcggccgcacagatgtgagcaactttgatgaggagttcaccggggaggcccccaccctgagccccccaagagatgcccggcccctgacagctgctgagcaggccgccttcctggactttgattttgtggccggcggctgctag

SEQ ID NO: 165938 - DNA, 1815 bp, synthetic construct
  misc_feature 1..1815: note = Description of Artificial Sequence: Synthetic coding sequence
  source 1..1815: mol_type = other DNA
atggccagcaaccctgagcggggggagatcctgctgacagagctgcagggcgacagccgcagcctgcccttctctgaaaatgtgtctgctgtgcagaagctggacttcagtgacaccatggtgcagcagaagctggatgacatcaaggaccgcatcaagcgggagatcaggaaggagctgaagatcaaggagggcgctgagaacctgaggaaggtgaccacagacaagaagagcctggcctacgtggacaacatcctgaagaagagcaacaagaagctggaggagctgcaccacaagctgcaggagctgaatgcccacatcgtggtgtctgaccctgaggacatcacagactgccccaggaccccagacacccccaacaatgacccccgctgcagcaccagcaacaaccggctgaaggccctgcagaagcagctggacatcgagctgaaggtgaagcagggcgctgagaacatgatccagatgtacagcaatggcagcagcaaggacaggaagctgcatggaacagcccagcagctgctgcaggacagcaagaccaagattgaagtcatccgcatgcagatcctgcaggccgtgcagaccaatgagctggcctttgacaatgccaagcctgtgatcagccccctggagctgaggatggaggagctgcggcaccacttccgcatcgagtttgctgtggccgagggcgccaagaatgtgatgaagctgctgggcagcggcaaggtgacagacaggaaggccctgtctgaggcccaggcccgcttcaatgaaagcagccagaagctggacctgctgaagtacagcctggagcagaggctgaatgaggtgcccaagaaccaccccaagagccgcatcatcatcgaggagctgagcctggtggccgccagccccaccctgagcccccggcagagcatgatcagcacccagaaccagtacagcaccctgagcaagccagctgccctgaccggcaccctggaggtgcggctgatgggctgccaggacatcctggagaatgtgcccggccgcagcaaggccacctctgtggccctgcccggctggagccccagcgagaccaggagcagcttcatgagcaggaccagcaagagcaagagcggcagcagcaggaacctgctgaagacagatgacctgagcaatgatgtgtgtgctgtgctgaagctggacaacacagtggtgggccagacctcctggaagcccatcagcaaccagagctgggaccagaagttcaccctggagctggacaggagccgggagctggagatctctgtgtactggagggactggaggagcctgtgtgctgtgaagttcctgcggctggaggacttcctggacaaccagagacatggcatgtgcctgtacctggagccccagggcaccctgtttgctgaggtgaccttcttcaaccctgtgattgaaagaagacccaagctgcagaggcagaagaagatcttcagcaagcagcagggcaagaccttcctgcgggccccccagatgaacatcaacatcgccacctggggccgcctggtgcggcgggccatccccaccgtgaaccacagcggcaccttcagcccccaggcccctgtgcccaccaccgtgcctgtggtggatgtgcgcatcccccagctggcccccccagcccgctacgtgtctgagatcctgagcatctcctacaccaagctgctgggccacagctatgtgctgatcatcgccggcgtgctgagcctggccttcttccccagcagcatcctgaaggtggtgttctgcctgctgaagaagtag

SEQ ID NO: 165939 - DNA, 2484 bp, synthetic construct
  misc_feature 1..2484: note = Description of Artificial Sequence: Synthetic coding sequence
  source 1..2484: mol_type = other DNA
atgatccagatgtacagcaatggcagcagcaaggacaggaagctgcacggcacagcccagcagctgctgcaggacagcaagaccaagattgaggtgatccgcatgcagatcctgcaggccgtgcagaccaatgagctggcctttgacaatgccaagcctgtgatcagccccctggagctgaggatggaggagctgcggcaccacttcagaattgaatttgctgtggccgagggcgccaagaatgtgatgaagctgctgggcagcggcaaggtgacagacaggaaggccctgtctgaggcccaggcccgcttcaatgaaagcagccagaagctggacctgctgaagtacagcctggagcagaggctgaatgaggtgcccaagaaccaccccaagagccgcatcatcatcgaggagctgagcctggtggccgccagccccaccctgagcccccggcagagcatgatcagcacccagaaccagtacagcaccctgagcaagccagctgccctgaccggcaccctggaggtgcggctgatgggctgccaggacatcctggagaatgtgcccggccgcagcaaggccacctctgtggccctgcccggctggagccccagcgagaccaggagcagcttcatgagcaggaccagcaagagcaagagcggcagcagcaggaacctgctgaagacagatgacctgagcaatgatgtgtgtgctgtgctgaagctggacaacacagtggtgggccagacctcctggaagcccatcagcaaccagagctgggaccagaagttcaccctggagctggacaggagccgggagctggagatctctgtgtactggagggactggaggagcctgtgtgctgtgaagttcctgcggctggaggacttcctggacaaccagagacatggcatgtgcctgtacctggagccccagggcaccctgtttgctgaggtgaccttcttcaaccctgtgattgaaagaagacccaagctgcagaggcagaagaagatcttcagcaagcagcagggcaagaccttcctgcgggccccccagatgaacatcaacatcgccacctggggccgcctggtgagaagagccatccccaccgtgaaccacagcggcaccttcagcccccaggcccctgtgcccaccaccgtgcctgtggtggatgtgcgcatcccccagctggcccccccagccagtgacagcacagtgaccaagctggactttgacctggagcctgagcccccaccagccccaccccgggccagcagcctgggggagattgatgagagcagcgagctgcgggtgctggacatccctggccaggacagcgagaccgtgtttgacatccagaatgacaggaacagcatcctgcccaagagccagagcgagtacaagccagacaccccccagagcggcctggagtacagcggcatccaggagctggaggacagaagaagccagcagcgcttccagttcaacctgcaggacttccgctgctgtgctgtgctgggccggggccactttgggaaggtgctgctggccgagtacaagaacaccaatgagatgtttgccatcaaggccctgaagaagggggacatcgtggccagagatgaggtggacagcctgatgtgtgagaagaggatctttgagaccgtgaacagcgtgcgccaccccttcctggtgaacctgtttgcctgcttccagaccaaggagcacgtgtgctttgtgatggagtatgctgctggaggagacctgatgatgcacatccacacagatgtgttcagcgagcccagggctgtgttctacgccgcctgtgtggtgctgggcctgcagtacctgcacgagcacaagatcgtgtacagagacctgaagctggacaacctgctgctggacacagagggctttgtgaagattgctgactttggcctgtgcaaggagggcatgggctatggagacaggaccagcaccttctgtggcaccccagagttcctggcccctgaggtgctgacagagaccagctacaccagggctgtggactggtggggcctgggcgtgctgatctatgagatgctggtgggggagagccccttccctggagatgatgaggaggaggtgtttgacagcatcgtgaatgatgaggtgcgctacccccgcttcctgagcacagaggccatcagcatcatgaggcggctgctgcggagaaatcctgagcggcggctgggcgccagcgagaaggatgctgaagatgtgaagaagcaccccttcttccggctgattgactggagcgccctgatggacaagaaggtgaagccacccttcatccccaccatccggggccgggaggatgtgagcaactttgatgatgagttcaccagcgaggcccccatcctgaccccaccccgggagccccgcatcctgtctgaggaggagcaggagatgttccgggactttgactacatcgctgactggtgctag

SEQ ID NO: 165940 - DNA, 2811 bp, synthetic construct
  misc_feature 1..2811: note = Description of Artificial Sequence: Synthetic coding sequence
  source 1..2811: mol_type = other DNA
atggccagcaaccctgagcggggggagatcctgctgacagagctgcagggcgacagccgcagcctgcccttctctgaaaatgtgtctgctgtgcagaagctggacttcagtgacaccatggtgcagcagaagctggatgacatcaaggaccgcatcaagcgggagatcaggaaggagctgaagatcaaggagggcgctgagaacctgaggaaggtgaccacagacaagaagagcctggcctacgtggacaacatcctgaagaagagcaacaagaagctggaggagctgcaccacaagctgcaggagctgaatgcccacatcgtggtgtctgaccctgaggacatcacagactgccccaggaccccagacacccccaacaatgacccccgctgcagcaccagcaacaaccggctgaaggccctgcagaagcagctggacatcgagctgaaggtgaagcagggcgctgagaacatgatccagatgtacagcaatggcagcagcaaggacaggaagctgcatggaacagcccagcagctgctgcaggacagcaagaccaagattgaagtcatccgcatgcagatcctgcaggccgtgcagaccaatgagctggcctttgacaatgccaagcctgtgatcagccccctggagctgaggatggaggagctgcggcaccacttccgcatcgagtttgctgtggccgagggcgccaagaatgtgatgaagctgctgggcagcggcaaggtgacagacaggaaggccctgtctgaggcccaggcccgcttcaatgaaagcagccagaagctggacctgctgaagtacagcctggagcagaggctgaatgaggtgcccaagaaccaccccaagagccgcatcatcatcgaggagctgagcctggtggccgccagccccaccctgagcccccggcagagcatgatcagcacccagaaccagtacagcaccctgagcaagccagctgccctgaccggcaccctggaggtgcggctgatgggctgccaggacatcctggagaatgtgcccggccgcagcaaggccacctctgtggccctgcccggctggagccccagcgagaccaggagcagcttcatgagcaggaccagcaagagcaagagcggcagcagcaggaacctgctgaagacagatgacctgagcaatgatgtgtgtgctgtgctgaagctggacaacacagtggtgggccagacctcctggaagcccatcagcaaccagagctgggaccagaagttcaccctggagctggacagagtgaccttcttcaaccctgtgattgaaagaagacccaagctgcagaggcagaagaagatcttcagcaagcagcagggcaagaccttcctgcgggccccccagatgaacatcaacatcgccacctggggccgcctggtgcggcgggccatccccaccgtgaaccacagcggcaccttcagcccccaggcccctgtgcccaccaccgtgcctgtggtggatgtgcgcatcccccagctggcccccccagccagtgacagcacagtgaccaagctggactttgacctggagcctgagcccccaccagccccaccccgggccagcagcctgggggagattgatgagagcagcgagctgcgggtgctggacatccctggccaggacagcgagaccgtgtttgacatccagaatgacagaaattccatcctgcccaagagccagagcgagtacaagccagacaccccccagagcggcctggagtacagcggcatccaggagctggaggaccggcgcagccagcagcgcttccagttcaacctgcaggacttccgctgctgtgctgtgctgggccggggccactttgggaaggtgctgctggccgagtacaagaacaccaatgagatgtttgccatcaaggccctgaagaagggggacatcgtggccagagatgaggtggacagcctgatgtgtgagaagaggatctttgaaacagtgaacagcgtgcgccaccccttcctggtgaacctgtttgcctgcttccagaccaaggagcacgtgtgctttgtgatggagtatgctgctggaggagacctgatgatgcacatccacacagatgtgttttctgagcccagggctgtgttctatgctgcctgtgtggtgctgggcctgcagtacctgcacgagcacaagatcgtgtacagagacctgaagctggacaacctgctgctggacacagagggctttgtgaagattgctgactttggcctgtgcaaggagggcatgggctacggggacaggaccagcaccttctgtggcaccccagagttcctggcccctgaggtgctgacagagaccagctacaccagggctgtggactggtggggcctgggcgtgctgatctatgagatgctggtgggggagagccccttccctggagatgatgaggaggaggtgtttgacagcatcgtgaatgatgaggtgcgctacccccgcttcctgagcacagaggccatcagcatcatgaggcggctgctgcggaggaaccctgagcggcggctgggcgccagcgagaaggatgctgaagatgtgaagaagcaccccttcttccggctgattgactggagcgccctgatggacaagaaggtgaagccacccttcatccccaccatccggggcagagaagatgtgagcaactttgatgatgagttcaccagcgaggcccccatcctgaccccaccccgggagccccgcatcctgtctgaggaggagcaggagatgttccgggactttgactacatcgctgactggtgctag

SEQ ID NO: 165941 - DNA, 2955 bp, synthetic construct
  misc_feature 1..2955: note = Description of Artificial Sequence: Synthetic coding sequence
  source 1..2955: mol_type = other DNA
atggccagcaaccctgagcggggggagatcctgctgacagagctgcagggcgacagccgcagcctgcccttctctgaaaatgtgtctgctgtgcagaagctggacttcagtgacaccatggtgcagcagaagctggatgacatcaaggaccgcatcaagcgggagatcaggaaggagctgaagatcaaggagggcgctgagaacctgaggaaggtgaccacagacaagaagagcctggcctacgtggacaacatcctgaagaagagcaacaagaagctggaggagctgcaccacaagctgcaggagctgaatgcccacatcgtggtgtctgaccctgaggacatcacagactgccccaggaccccagacacccccaacaatgacccccgctgcagcaccagcaacaaccggctgaaggccctgcagaagcagctggacatcgagctgaaggtgaagcagggcgctgagaacatgatccagatgtacagcaatggcagcagcaaggacaggaagctgcatggaacagcccagcagctgctgcaggacagcaagaccaagattgaagtcatccgcatgcagatcctgcaggccgtgcagaccaatgagctggcctttgacaatgccaagcctgtgatcagccccctggagctgaggatggaggagctgcggcaccacttccgcatcgagtttgctgtggccgagggcgccaagaatgtgatgaagctgctgggcagcggcaaggtgacagacaggaaggccctgtctgaggcccaggcccgcttcaatgaaagcagccagaagctggacctgctgaagtacagcctggagcagaggctgaatgaggtgcccaagaaccaccccaagagccgcatcatcatcgaggagctgagcctggtggccgccagccccaccctgagcccccggcagagcatgatcagcacccagaaccagtacagcaccctgagcaagccagctgccctgaccggcaccctggaggtgcggctgatgggctgccaggacatcctggagaatgtgcccggccgcagcaaggccacctctgtggccctgcccggctggagccccagcgagaccaggagcagcttcatgagcaggaccagcaagagcaagagcggcagcagcaggaacctgctgaagacagatgacctgagcaatgatgtgtgtgctgtgctgaagctggacaacacagtggtgggccagacctcctggaagcccatcagcaaccagagctgggaccagaagttcaccctggagctggacaggagccgggagctggagatctctgtgtactggagggactggaggagcctgtgtgctgtgaagttcctgcggctggaggacttcctggacaaccagagacatggcatgtgcctgtacctggagccccagggcaccctgtttgctgaggtgaccttcttcaaccctgtgattgaaagaagacccaagctgcagaggcagaagaagatcttcagcaagcagcagggcaagaccttcctgcgggccccccagatgaacatcaacatcgccacctggggccgcctggtgcggcgggccatccccaccgtgaaccacagcggcaccttcagcccccaggcccctgtgcccaccaccgtgcctgtggtggatgtgcgcatcccccagctggcccccccagccagtgacagcacagtgaccaagctggactttgacctggagcctgagcccccaccagccccaccccgggccagcagcctgggggagattgatgagagcagcgagctgcgggtgctggacatccctggccaggacagcgagaccgtgtttgacatccagaatgacagaaattccatcctgcccaagagccagagcgagtacaagccagacaccccccagagcggcctggagtacagcggcatccaggagctggaggaccggcgcagccagcagcgcttccagttcaacctgcaggacttccgctgctgtgctgtgctgggccggggccactttgggaaggtgctgctggccgagtacaagaacaccaatgagatgtttgccatcaaggccctgaagaagggggacatcgtggccagagatgaggtggacagcctgatgtgtgagaagaggatctttgaaacagtgaacagcgtgcgccaccccttcctggtgaacctgtttgcctgcttccagaccaaggagcacgtgtgctttgtgatggagtatgctgctggaggagacctgatgatgcacatccacacagatgtgttttctgagcccagggctgtgttctatgctgcctgtgtggtgctgggcctgcagtacctgcacgagcacaagatcgtgtacagagacctgaagctggacaacctgctgctggacacagagggctttgtgaagattgctgactttggcctgtgcaaggagggcatgggctacggggacaggaccagcaccttctgtggcaccccagagttcctggcccctgaggtgctgacagagaccagctacaccagggctgtggactggtggggcctgggcgtgctgatctatgagatgctggtgggggagagccccttccctggagatgatgaggaggaggtgtttgacagcatcgtgaatgatgaggtgcgctacccccgcttcctgagcacagaggccatcagcatcatgaggcggctgctgcggaggaaccctgagcggcggctgggcgccagcgagaaggatgctgaagatgtgaagaagcaccccttcttccggctgattgactggagcgccctgatggacaagaaggtgaagccacccttcatccccaccatccggggcagagaagatgtgagcaactttgatgatgagttcaccagcgaggcccccatcctgaccccaccccgggagccccgcatcctgtctgaggaggagcaggagatgttccgggactttgactacatcgctgactggtgctag

SEQ ID NO: 165942 - DNA, 636 bp, synthetic construct
  misc_feature 1..636: note = Description of Artificial Sequence: Synthetic coding sequence
  source 1..636: mol_type = other DNA
tgagaagagctgcggcaccacttccgcatcgagtttgctgtggccgagggcgccaagaatgtgatgaagctgctgggcagcggcaaggtgacagacaggaaggccctgtctgaggcccaggcccgcttcaatgaaagcagccagaagctggacctgctgaagtacagcctggagcagaggctgaatgaggtgcccaagaaccaccccaagagccgcatcatcatcgaggagctgagcctggtggccgccagccccaccctgagcccccggcagagcatgatcagcacccagaaccagtacagcaccctgagcaagccagctgccctgacagatgatgtgtgtgctgtgctgaagctggacaacacagtggtgggccagacctcctggaagcccatcagcaaccagagctgggaccagaagttcaccctggagctggacaggagccgggagctggagatctctgtgtactggagggactggaggagcctgtgtgctgtgaagttcctgcggctggaggacttcctggacaaccagagacatggcatgtgcctgtacctggagccccagggcaccctgtttgctgaggtgaccttcttcaaccctgtgattgaaagaagacccaagctgcagaggtag

SEQ ID NO: 165943 - DNA, 198 bp, synthetic construct
  misc_feature 1..198: note = Description of Artificial Sequence: Synthetic coding sequence
  source 1..198: mol_type = other DNA
tgaggatttgtgaagattgctgactttggcctgtgcaaggagggcatgggctacggggacaggaccagcaccttctgtggcaccccagagttcctggcccctgaggtgctgacagagaccagctacaccagggctgtggactggtggggcctgggcgtgctgatctatgagatgctggtgggggagacctctgtgtag

SEQ ID NO: 165944 - DNA, 1977 bp, synthetic construct
  misc_feature 1..1977: note = Description of Artificial Sequence: Synthetic coding sequence
  source 1..1977: mol_type = other DNA
atgaacagcaccctggaggtgcggctgatgggctgccaggacatcctggagaatgtgcccggccgcagcaaggccacctctgtggccctgcccggctggagccccagcgagaccaggagcagcttcatgagcaggaccagcaagagcaagagcggcagcagcaggaacctgctgaagacagatgacctgagcaatgatgtgtgtgctgtgctgaagctggacaacacagtggtgggccagacctcctggaagcccatcagcaaccagagctgggaccagaagttcaccctggagctggacaggagccgggagctggagatctctgtgtactggagggactggaggagcctgtgtgctgtgaagttcctgcggctggaggacttcctggacaaccagagacatggcatgtgcctgtacctggagccccagggcaccctgtttgctgaggtgaccttcttcaaccctgtgattgaaagaagacccaagctgcagaggcagaagaagatcttcagcaagcagcagggcaagaccttcctgcgggccccccagatgaacatcaacatcgccacctggggccgcctggtgcggcgggccatccccaccgtgaaccacagcggcaccttcagcccccaggcccctgtgcccaccaccgtgcctgtggtggatgtgcgcatcccccagctggcccccccagccagtgacagcacagtgaccaagctggactttgacctggagcctgagcccccaccagccccaccccgggccagcagcctgggggagattgatgagagcagcgagctgcgggtgctggacatccctggccaggacagcgagaccgtgtttgacatccagaatgacagaaattccatcctgcccaagagccagagcgagtacaagccagacaccccccagagcggcctggagtacagcggcatccaggagctggaggaccggcgcagccagcagcgcttccagttcaacctgcaggacttccgctgctgtgctgtgctgggccggggccactttgggaaggtgctgctggccgagtacaagaacaccaatgagatgtttgccatcaaggccctgaagaagggggacatcgtggccagagatgaggtggacagcctgatgtgtgagaagaggatctttgaaacagtgaacagcgtgcgccaccccttcctggtgaacctgtttgcctgcttccagaccaaggagcacgtgtgctttgtgatggagtatgctgctggaggagacctgatgatgcacatccacacagatgtgttttctgagcccagggctgtgttctatgctgcctgtgtggtgctgggcctgcagtacctgcacgagcacaagatcgtgtacagagacctgaagctggacaacctgctgctggacacagagggctttgtgaagattgctgactttggcctgtgcaaggagggcatgggctacggggacaggaccagcaccttctgtggcaccccagagttcctggcccctgaggtgctgacagagaccagctacaccagggctgtggactggtggggcctgggcgtgctgatctatgagatgctggtgggggagagccccttccctggagatgatgaggaggaggtgtttgacagcatcgtgaatgatgaggtgcgctacccccgcttcctgagcacagaggccatcagcatcatgaggcggctgctgcggaggaaccctgagcggcggctgggcgccagcgagaaggatgctgaagatgtgaagaagcaccccttcttccggctgattgactggagcgccctgatggacaagaaggtgaagccacccttcatccccaccatccggggcagagaagatgtgagcaactttgatgatgagttcaccagcgaggcccccatcctgaccccaccccgggagccccgcatcctgtctgaggaggagcaggagatgttccgggactttgactacatcgctgactggtgctag

SEQ ID NO: 165945 - DNA, 336 bp, synthetic construct
  misc_feature 1..336: note = Description of Artificial Sequence: Synthetic coding sequence
  source 1..336: mol_type = other DNA
atgcacatccacacagatgtgttttctgagcccagggctgtgttctatgctgcctgtgtggtgctgggcctgcagtacctgcacgagcacaagatcgtgtacagagacctgaagctggacaacctgctgctggacacagagggctttgtgaagattgctgactttggcctgtgcaaggagggcatgggctacggggacaggaccagcaccttctgtggcaccccagagttcctggcccctgaggtgctgacagagaccagctacaccagggctgtggactggtggggcctgggcgtgctgatctatgagatgctggtgggggagacctctgtgtag

SEQ ID NO: 165946 - DNA, 2670 bp, synthetic construct
  misc_feature 1..2670: note = Description of Artificial Sequence: Synthetic coding sequence
  source 1..2670: mol_type = other DNA
atggaggagggcgccccccggcagcccggccccagccagtggcccccagaagatgagaaggaggtgatccggcgggccatccagaaggagctgaagatcaaggagggcgtggagaacctgcggcgggtggccacagacagaagacacctgggccacgtgcagcagctgctgcggagcagcaacagaaggctggagcagctgcacggggagctgcgggagctgcacgcccgcatcctgctgcccggccctggccctggccctgctgagcctgtggccagcggcccccggccctgggccgagcagctgcgggcccggcacctggaggccctgcggcggcagctgcacgtggagctgaaggtgaagcagggcgctgagaacatgacccacacctgtgccagcggcacccccaaggagaggaagctgctggccgccgcccagcagatgctgcgggacagccagctgaaggtggccctgctgaggatgaagatcagcagcctggaggccagcggcagccctgagcccggccctgagctgctggccgaggagctgcagcaccggctgcacgtggaggccgctgtggccgagggcgccaagaatgtggtgaagctgctgagcagcaggaggacccaggacaggaaggccctggccgaggcccaggcccagctgcaggagagcagccagaagctggacctgctgcggctggccctggagcagctgctggagcagctgcccccagcccaccccctgcggagccgggtgacccgggagctgcgggctgctgtgcccggctacccccagcccagcggcacccctgtgaagcccacagccctgaccggcaccctgcaggtgcggctgctgggctgtgagcagctgctgacagctgtgcccggccgcagccctgctgctgccctggccagcagccccagcgagggctggctgcggaccaaggccaagcaccagaggggccgcggggagctggccagcgaggtgctggccgtgctgaaggtggacaacagagtggtgggccagacaggctggggccaggtggccgagcagagctgggaccagaccttcgtcatccccctggagcgggcccgggagctggagattggagtgcactggagggactggaggcagctgtgtggggtggccttcctgcggctggaggacttcctggacaatgcctgccaccagctgagcctgagcctggtgccccagggcctgctgtttgcccaggtgaccttctgtgaccccgtcatcgagcggcggccccggctgcagaggcaggagcgcatcttcagcaagaggcggggccaggacttcctgcgggccagccagatgaacctgggcatggccgcctggggccgcctggtgatgaacctgctgcccccctgcagcagccccagcaccatcagcccccccaagggctgccccaggacccccaccaccctgcgggaggccagtgaccctgccacccccagcaacttcctgcccaagaagacccccctgggggaggagatgaccccaccacccaagccaccccggctgtacctgccccaggagcccaccagcgaggagacccccaggaccaagaggccccacatggagcccaggacccggcggggccccagccccccagccagccccaccaggaagccaccccggctgcaggacttccgctgcctggccgtgctgggccggggccactttgggaaggtgctgctggtgcagttcaagggcaccgggaagtactatgccatcaaggccctgaagaagcaggaggtgctgagcagagatgaaattgagagcctgtactgtgagaagaggatcctggaggccgtgggctgcaccggccaccccttcctgctgagcctgctggcctgcttccagaccagcagccacgcctgctttgtgacagaatttgtgcctggaggagacctgatgatgcagatccatgaagatgtgtttcctgagccccaggcccgcttctacgtggcctgtgtggtgctgggcctgcagttcctgcacgagaagaagatcatctacagagacctgaagctggacaacctgctgctggatgcccagggcttcctgaagattgctgactttggcctgtgcaaggagggcatcggctttggagacaggaccagcaccttctgtggcaccccagagttcctggcccctgaggtgctgacccaggaggcctacaccagggctgtggactggtggggcctgggcgtgctgctgtatgagatgctggtgggggagtgccccttccctggggacacagaggaggaggtgtttgactgcatcgtgaacatggatgccccctacccaggcttcctgtctgtgcagggcctggagttcatccagaagctgctgcagaagtgcccagagaagaggctgggcgctggggagcaggatgctgaggagatcaaggtgcagcccttcttccgcaccaccaactggcaggccctgctggcccggaccatccagcccccatttgtgcccaccctgtgtggccctgctgacctgcgctactttgaaggagagttcaccggcctgcccccagccctgaccccaccagccccccacagcctgctgacagcccggcagcaggccgccttccgggactttgattttgtgtctgagcgcttcctggagccctag

SEQ ID NO: 165947 - DNA, 1725 bp, synthetic construct
  misc_feature 1..1725: note = Description of Artificial Sequence: Synthetic coding sequence
  source 1..1725: mol_type = other DNA
atgaggcggctgagctcctggaggaagatggccacagctgagaagcagaagcatgatggccgggtgaagattggccactacatcctgggggacaccctgggcgtgggcaccttcggcaaggtgaaggtgggcaagcatgagctgaccggccacaaggtggccgtgaagatcctgaaccggcagaagatccgcagcctggatgtggtgggcaagatcagaagagagatccagaacctgaagctgttccgccacccccacatcatcaagctgtaccaggtgatcagcacccccagcgacatcttcatggtgatggagtatgtgtctggaggagagctgtttgactacatctgcaagaatggaaggaagagtgatgtgcctggggtggtgaagacaggcagcaccaaggagctggatgagaaggagagcagaagactcttccagcagatcctgtctggagtggactactgccaccgccacatggtggtgcaccgggacctgaagccagaaaatgtgctgctggatgcccacatgaatgccaagattgctgactttggcctgagcaacatgatgtctgatggagagttcctgcggaccagctgtggcagccccaactatgctgcccctgaggtgatcagcggccgcctgtatgccggccctgaggtggacatctggagcagcggggtcatcctgtatgccctgctgtgtggcaccctgccctttgatgatgaccacgtgcccaccctcttcaagaagatctgtgatggcatcttctacaccccccagtacctgaaccccagcgtcatcagcctgctgaagcacatgctgcaggtggaccccatgaagagggccaccatcaaggacatccgggagcacgagtggttcaagcaggacctgcccaagtacctgtttcctgaggaccccagctacagcagcaccatgattgatgatgaggccctgaaggaggtgtgtgagaagtttgaatgttctgaggaggaggtgctgagctgcctgtacaacagaaaccaccaggaccccctggccgtggcctaccacctgatcatcgacaacagacgcatcatgaatgaggccaaggacttctacctggccaccagccccccagacagcttcctggatgaccaccacctgacccggccccaccctgagcgggtgcccttcctggtggccgagaccccccgggcccggcacaccctggatgagctgaacccccagaagagcaagcaccagggcgtgaggaaggccaagtggcacctgggcatccgcagccagagccggcccaatgacatcatggccgaggtgtgccgggccatcaagcagctggactatgagtggaaggtggtgaacccctactacctgcgggtgcggaggaagaaccctgtgaccagcacctacagcaagatgagcctgcagctgtaccaggtggacagcaggacctacctgctggacttccgcagcattgatgatgagatcacagaggccaagtctggaacagccaccccccagaggagcggctctgtgagcaactaccgcagctgccagaggagtgacagtgatgctgaggcccagggcaagagcagcgaggtgtccctgaccagctctgtgaccagcctggacagcagccctgtggacctgaccccccggcccggcagccacaccatcgagttctttgagatgtgtgccaacctgatcaagatcctggcccagtag

SEQ ID NO: 165948 - DNA, 1680 bp, synthetic construct
  misc_feature 1..1680: note = Description of Artificial Sequence: Synthetic coding sequence
  source 1..1680: mol_type = other DNA
atgaggcggctgagctcctggaggaagatggccacagctgagaagcagaagcatgatggccgggtgaagattggccactacatcctgggggacaccctgggcgtgggcaccttcggcaaggtgaaggtgggcaagcatgagctgaccggccacaaggtggccgtgaagatcctgaaccggcagaagatccgcagcctggatgtggtgggcaagatcagaagagagatccagaacctgaagctgttccgccacccccacatcatcaagctgtaccaggtgatcagcacccccagcgacatcttcatggtgatggagtatgtgtctggaggagagctgtttgactacatctgcaagaatggccgcctggatgagaaggagagccggcggctcttccagcagatcctgagcggcgtggactactgccaccgccacatggtggtgcaccgggacctgaagccagaaaatgtgctgctggatgcccacatgaatgccaagattgctgactttggcctgagcaacatgatgtctgatggagagttcctgcggaccagctgtggcagccccaactatgctgcccctgaggtgatcagcggccgcctgtatgccggccctgaggtggacatctggagcagtggagtcatcctgtatgccctgctgtgtggcaccctgccctttgatgatgaccacgtgcccaccctcttcaagaagatctgtgatggcatcttctacaccccccagtacctgaaccccagcgtcatcagcctgctgaagcacatgctgcaggtggaccccatgaagagggccaccatcaaggacatccgggagcacgagtggttcaagcaggacctgcccaagtacctgtttcctgaggaccccagctacagcagcaccatgattgatgatgaggccctgaaggaggtgtgtgagaagtttgagtgcagcgaggaggaggtgctgagctgcctgtacaacagaaaccaccaggaccccctggccgtggcctaccacctgatcatcgacaacagacgcatcatgaatgaggccaaggacttctacctggccaccagccccccagacagcttcctggatgaccaccacctgacccggccccaccctgagcgggtgcccttcctggtggccgagaccccccgggcccggcacaccctggatgagctgaacccccagaagagcaagcaccagggcgtgaggaaggccaagtggcacctgggcatccgcagccagagccggcccaatgacatcatggccgaggtgtgccgggccatcaagcagctggactatgagtggaaggtggtgaacccctactacctgcgggtgcggaggaagaaccctgtgaccagcacctacagcaagatgagcctgcagctgtaccaggtggacagcaggacctacctgctggacttccgcagcattgatgatgagatcacagaggccaagagcggcacagccaccccccagaggagcggctctgtgagcaactaccgcagctgccagaggagtgacagtgatgctgaggcccagggcaagagcagcgaggtgtccctgaccagctctgtgaccagcctggacagcagccctgtggacctgacccccaggcctggcagccacaccatcgagttctttgagatgtgtgccaacctgatcaagatcctggcccagtag

SEQ ID NO: 165949 - DNA, 1659 bp, synthetic construct
  misc_feature 1..1659: note = Description of Artificial Sequence: Synthetic coding sequence
  source 1..1659: mol_type = other DNA
atggccgagaagcagaagcatgatggccgggtgaagattggccactacgtgctgggggacaccctgggcgtgggcaccttcggcaaggtgaagatcggggagcaccagctgaccggccacaaggtggccgtgaagatcctgaaccggcagaagatccgcagcctggatgtggtgggcaagatcaagcgggagatccagaacctgaagctgttccgccacccccacatcatcaagctgtaccaggtgatcagcacccccacagacttcttcatggtgatggagtatgtgtctggaggagagctgtttgactacatctgcaagcacggccgggtggaggagatggaggcccggcggctcttccagcagatcctgtctgctgtggactactgccaccgccacatggtggtgcaccgggacctgaagccagaaaatgtgctgctggatgcccacatgaatgccaagattgctgactttggcctgagcaacatgatgtctgatggagagttcctgcggaccagctgtggcagccccaactatgctgcccctgaggtgatcagcggccgcctgtatgccggccctgaggtggacatctggagctgtggggtcatcctgtatgccctgctgtgtggcaccctgccctttgatgatgagcacgtgcccaccctcttcaagaagatccggggcggcgtcttctacatccctgagtacctgaacagatctgtggccaccctgctgatgcacatgctgcaggtggaccccctgaagagggccaccatcaaggacatccgggagcacgagtggttcaagcaggacctgcccagctacctgtttcctgaggaccccagctatgatgccaacgtgattgatgatgaggccgtgaaggaggtgtgtgagaagtttgaatgtacagaaagtgaggtgatgaacagcctgtacagcggggacccccaggaccagctggccgtggcctaccacctgatcatcgacaacagacgcatcatgaaccaggccagcgagttctacctggccagcagcccccccagcggcagcttcatggatgattctgccatgcacatccccccaggcctgaagccccaccctgagaggatgccacccctgattgctgacagccccaaggcccgctgccccctggatgccctgaacaccaccaagcccaagagcctggccgtgaagaaggccaagtggcacctgggcatccgcagccagagcaagccctatgacatcatggccgaggtgtaccgggccatgaagcagctggactttgagtggaaggtggtgaatgcctaccacctgcgggtgcggaggaagaaccctgtgactggaaactacgtgaagatgagcctgcagctgtacctggtggacaacagaagctacctgctggacttcaagagcattgatgatgaggtggtggagcagaggagcggcagcagcaccccccagaggagctgcagcgctgctggcctgcaccggcccaggagcagctttgacagcaccacagctgagagccacagcctgagcggcagcctgaccggcagcctgaccggcagcaccctgagctctgtgagcccccggctgggcagccacaccatggacttctttgagatgtgtgccagcctcatcaccaccctggccaggtag

SEQ ID NO: 165950 - DNA, 744 bp, synthetic construct
  misc_feature 1..744: note = Description of Artificial Sequence: Synthetic coding sequence
  source 1..744: mol_type = other DNA
atgctgaccatcacagacttcatcaacatcctgcaccgctactacaagagcgccctggtgcagatctatgagctggaggagcacaagattgagacctggagggaggtgtacctgcaggacagcttcaagcccctggtgtgcatcagccccaatgccagcctgtttgatgctgtgagcagcctcatccggaacaagatccaccggctgcccgtcatcgaccctgagagcggcaacaccctgtacatcctgacccacaagaggatcctgaagttcctgaagctgttcatcacagagttccccaagccagagttcatgagcaagagcctggaggagctgcagatcggcacctacgccaacatcgccatggtgaggaccaccacccctgtgtatgtggccctgggcatctttgtgcagcaccgggtgtctgccctgcctgtggtggatgagaagggccgggtggtggacatctacagcaagtttgatgtgatcaacctggccgctgagaagacctacaacaacctggatgtgtctgtgaccaaggccctgcagcacaggagccactactttgaaggagtgctgaagtgctacctgcacgagaccctggagaccatcatcaaccggctggtggaggccgaggtgcaccggctggtggtggtggatgaaaatgatgtggtgaagggcatcgtgtccctgagtgacatcctgcaggccctggtgctgactggaggagagaagaagccctag

SEQ ID NO: 165951 - DNA, 996 bp, synthetic construct
  misc_feature 1..996: note = Description of Artificial Sequence: Synthetic coding sequence
  source 1..996: mol_type = other DNA
atggagaccgtcatcagcagtgacagcagccctgctgtggagaatgagcacccccaggagaccccagagagcaacaacagcgtgtacaccagcttcatgaagagccaccgctgctatgacctgatccccaccagcagcaagctggtggtgtttgacaccagcctgcaggtgaagaaggccttctttgccctggtgaccaatggagtgcgggccgcccccctgtgggacagcaagaagcagagctttgtgggcatgctgaccatcacagacttcatcaacatcctgcaccgctactacaagagcgccctggtgcagatctatgagctggaggagcacaagattgagacctggagggaggtgtacctgcaggacagcttcaagcccctggtgtgcatcagccccaatgccagcctgtttgatgctgtgagcagcctcatccggaacaagatccaccggctgcccgtcatcgaccctgagagcggcaacaccctgtacatcctgacccacaagaggatcctgaagttcctgaagctgttcatcacagagttccccaagccagagttcatgagcaagagcctggaggagctgcagatcggcacctacgccaacatcgccatggtgaggaccaccacccctgtgtatgtggccctgggcatctttgtgcagcaccgggtgtctgccctgcctgtggtggatgagaagggccgggtggtggacatctacagcaagtttgatgtgatcaacctggccgctgagaagacctacaacaacctggatgtgtctgtgaccaaggccctgcagcacaggagccactactttgaaggagtgctgaagtgctacctgcacgagaccctggagaccatcatcaaccggctggtggaggccgaggtgcaccggctggtggtggtggatgaaaatgatgtggtgaagggcatcgtgtccctgagtgacatcctgcaggccctggtgctgactggaggagagaagaagccctag

SEQ ID NO: 165952 - DNA, 1710 bp, synthetic construct
  misc_feature 1..1710: note = Description of Artificial Sequence: Synthetic coding sequence
  source 1..1710: mol_type = other DNA
atgggcagcgctgtgatggacaccaagaagaagaaggatgtgagcagccctgggggcagcggcggcaagaagaatgccagccagaagaggaggagcctgcgggtgcacatcccagacctgagcagctttgccatgcccctgctggatggagacctggagggcagcggcaagcacagcagcaggaaggtggacagcccctttggacctggcagccccagcaagggcttcttcagccggggcccccagccccggcccagcagccccatgtctgcccctgtgcggcccaagaccagccctggcagccccaagacagtgttccccttctcctaccaggagagcccccccaggagccccaggaggatgtccttcagcggcatcttccgcagcagcagcaaggagagcagccccaacagcaacccagccaccagccctgggggcatccgcttcttcagccgcagcaggaagaccagcggcctgagcagcagccccagcacccccacccaggtgaccaagcagcacaccttccccctggagagctacaagcatgagcctgagcggctggagaaccgcatctatgccagcagcagccccccagacaccggccagcgcttctgccccagcagcttccagagccccaccaggcctcccctggccagccccacccactacgcccccagcaaggctgctgccctggccgccgccctgggccctgctgaggccggcatgctggagaagctggagtttgaagatgaggccgtggaggacagcgagagcggcgtgtacatgaggttcatgaggagccacaagtgctatgacatcgtgcccaccagcagcaagctggtggtgtttgacaccaccctgcaggtgaagaaggccttctttgccctggtggccaatggagtgcgggccgcccccctgtgggagagcaagaagcagagctttgtgggcatgctgaccatcacagacttcatcaacatcctgcaccgctactacaagagccccatggtgcagatctatgagctggaggagcacaagattgagacctggagggagctgtacctgcaggagaccttcaagcccctggtgaacatcagcccagatgccagcctgtttgatgctgtgtacagcctcatcaagaacaagatccaccggctgcccgtcatcgaccccatctctggaaatgccctgtacatcctgacccacaagaggatcctgaagttcctgcagctgttcatgtctgacatgcccaagccagccttcatgaagcagaacctggatgagctgggcatcggcacctaccacaacatcgccttcatccacccagacacccccatcatcaaggccctgaacatctttgtggagcggcgcatcagcgccctgcctgtggtggatgagagcggcaaggtggtggacatctacagcaagtttgatgtgatcaacctggccgctgagaagacctacaacaacctggacatcaccgtgacccaggccctgcagcacaggagccagtactttgaaggagtggtgaagtgcaacaagctggagatcctggagaccatcgtggaccgcatcgtgcgggcagaggtgcaccggctggtggtggtgaatgaggccgacagcatcgtgggcatcatcagcctgagtgacatcctgcaggccctgatcctgaccccagctggggccaagcagaaggagacagaaacagaatag

SEQ ID NO: 165953 - DNA, 1335 bp, synthetic construct
  misc_feature 1..1335: note = Description of Artificial Sequence: Synthetic coding sequence
  source 1..1335: mol_type = other DNA
atgaagcgcttcggcagcctgcggagcaacaagaagcacaaggaccagaacagaagcacagagcggcggcagagcgagccccacggcctgtttgccagcggcctgagcagcagccccagcacccccacccaggtgaccaagcagcacaccttccccctggagagctacaagcatgagcctgagcggctggagaaccgcatctatgccagcagcagccccccagacaccggccagcgcttctgccccagcagcttccagagccccaccaggcctcccctggccagccccacccactacgcccccagcaaggctgctgccctggccgccgccctgggccctgctgaggccggcatgctggagaagctggagtttgaagatgaggtggaggacagcgagagcggcgtgtacatgaggttcatgaggagccacaagtgctatgacatcgtgcccaccagcagcaagctggtggtgtttgacaccaccctgcaggtgaagaaggccttctttgccctggtggccaacggggtgcgggccgcccccctgtgggagagcaagaagcagagctttgtgggcatgctgaccatcacagacttcatcaacatcctgcaccgctactacaagagccccatggtgcagatctatgagctggaggagcacaagattgagacctggagggagctgtacctgcaggagaccttcaagcccctggtgaacatcagcccagatgccagcctgtttgatgctgtgtacagcctcatcaagaacaagatccaccggctgcctgtgattgaccccatctctggaaatgccctgtacatcctgacccacaagaggatcctgaagttcctgcagctgttcatgtctgacatgcccaagccagccttcatgaagcagaacctggatgagctgggcatcggcacctaccacaacatcgccttcatccacccagacacccccatcatcaaggccctgaacatctttgtggagcggcgcatcagcgccctgcctgtggtggatgaaagtggcaaggtggtggacatctacagcaagtttgatgtgatcaacctggccgctgagaagacctacaacaacctggacatcaccgtgacccaggccctgcagcacaggagccagtactttgagggcgtggtgaagtgcaacaagctggagatcctggagaccatcgtggacagaattgtgcgggcagaggtgcaccggctggtggtggtgaatgaagctgacagcatcgtgggcatcatcagcctgagtgacatcctgcaggccctgatcctgaccccagctggggccaagcagaaggagacagaaacagaatag

SEQ ID NO: 165954 - DNA, 309 bp, synthetic construct
  misc_feature 1..309: note = Description of Artificial Sequence: Synthetic coding sequence
  source 1..309: mol_type = other DNA
atggccggccaggccttcaggaagttcctgcccctgtttgacagagtgctggtggagaggtctgctgctgagaccgtgaccaagggcggcatcatgctgcctgagaagagccagggcaaggtgctgcaggccaccgtggtggccgtgggcagcggcagcaagggcaagggcggggagatccagcctgtgtctgtgaaggtgggggacaaggtgctgctgcctgaatatggaggcaccaaggtggtgctggatgacaaggactacttcctgttcagagatggagacatcctgggcaagtatgtggactag

SEQ ID NO: 165955 - DNA, 1062 bp, synthetic construct
  misc_feature 1..1062: note = Description of Artificial Sequence: Synthetic coding sequence
  source 1..1062: mol_type = other DNA
atggagcccggcctggagcacgccctgcggaggacccccagctggagcagcctgggcggcagcgagcaccaggagatgtccttcctggagcaggagaacagcagctcctggcccagccctgctgtgaccagcagcagcgagcgcatccggggcaagagaagagccaaggccctgcgctggacccggcagaagtctgtggaggagggggagcccccaggccagggcgagggccccaggagcaggcctgctgctgagagcacaggcctggaggccaccttccccaagaccacccccctggcccaggccgaccctgctggggtgggcaccccacccaccggctgggactgcctgcccagcgactgcacagccagcgctgctggcagcagcacagatgatgtggagctggccacagagttccctgccacagaggcctgggagtgtgagctggagggcctgctggaggagaggcctgccctgtgcctgagcccccaggcccccttccccaagctgggctgggatgatgagctgaggaagccaggggcccagatctacatgaggttcatgcaggagcacacctgctatgatgccatggccaccagcagcaagctggtgatctttgacaccatgctggagatcaagaaggccttctttgccctggtggccaacggggtgcgggccgcccccctgtgggacagcaagaagcagagctttgtgggcatgctgaccatcacagacttcatcctggtgctgcaccgctactaccgcagccccctgcggagcacctgcaaggccgccagcagcctgtggagccccagcctgctgatgattgcctgcctgaagctgagcacccccagcagcaggacaggcagcatcgcctgcctcttcctgacccgctgccaggccacctacagcaccagcagccacaccaatgcctgcagcagcagctgcaccagcctggtgccctgctgccccggcccccccagcagcacagccctgagcaagatctgggccagcgcccacagcgagacctggctgtggtgctggaggcagcaccccagctag

SEQ ID NO: 165956 - DNA, 1395 bp, synthetic construct
  misc_feature 1..1395: note = Description of Artificial Sequence: Synthetic coding sequence
  source 1..1395: mol_type = other DNA
atgtccttcctggagcaggagaacagcagctcctggcccagccctgctgtgaccagcagcagcgagcgcatccggggcaagaggcgggccaaggccctgcgctggacccggcagaagtctgtggaggagggggagcccccaggccagggcgagggccccaggagcaggcctgctgctgagagcacaggcctggaggccaccttccccaagaccacccccctggcccaggccgaccctgctggggtgggcaccccacccaccggctgggactgcctgcccagcgactgcacagccagcgctgctggcagcagcacagatgatgtggagctggccacagagttccctgccacagaggcctgggagtgtgagctggagggcctgctggaggagaggcctgccctgtgcctgagcccccaggcccccttccccaagctgggctgggatgatgagctgaggaagccaggggcccagatctacatgaggttcatgcaggagcacacctgctatgatgccatggccaccagcagcaagctggtgatctttgacaccatgctggagatcaagaaggccttctttgccctggtggccaatggagtgcgggccgcccccctgtgggacagcaagaagcagagctttgtgggcatgctgaccatcacagacttcatcctggtgctgcaccgctactaccgcagccccctggtgcagatctatgaaattgagcagcacaagattgagacctggagggagatctacctgcagggctgcttcaagcccctggtgtccatcagccccaatgacagcctgtttgaagctgtgtacaccctcatcaagaaccgcatccaccggctgcctgtgctggaccctgtgtctggaaatgtgctgcacatcctgacccacaagaggctgctgaagttcctgcacatcttcggcagcctgctgccccggcccagcttcctgtaccgcaccatccaggacctgggcatcggcaccttccgggacctggccgtggtgctggagacagcccccatcctgacagccctggacatctttgtggacagaagagtgtctgccctgcctgtggtgaatgaatgtggccaggtggtgggcctgtacagcagatttgatgtgatccacctggccgcccagcagacctacaaccacctggacatgtctgtgggggaggccctgcggcagaggaccctgtgcctggagggcgtgctgagctgccagccccatgagagcctgggggaggtgattgaccgcatcgcccgggagcaggtgcaccggctggtgctggtggatgagacccagcacctgctgggcgtggtgtccctgagtgacatcctgcaggccctggtgctgagccctgctggcattgatgccctgggcgcctag

SEQ ID NO: 165957 - DNA, 1470 bp, synthetic construct
  misc_feature 1..1470: note = Description of Artificial Sequence: Synthetic coding sequence
  source 1..1470: mol_type = other DNA
atggagcccggcctggagcacgccctgcggaggacccccagctggagcagcctgggcggcagcgagcaccaggagatgtccttcctggagcaggagaacagcagctcctggcccagccctgctgtgaccagcagcagcgagcgcatccggggcaagagaagagccaaggccctgcgctggacccggcagaagtctgtggaggagggggagcccccaggccagggcgagggccccaggagcaggcctgctgctgagagcacaggcctggaggccaccttccccaagaccacccccctggcccaggccgaccctgctggggtgggcaccccacccaccggctgggactgcctgcccagcgactgcacagccagcgctgctggcagcagcacagatgatgtggagctggccacagagttccctgccacagaggcctgggagtgtgagctggagggcctgctggaggagaggcctgccctgtgcctgagcccccaggcccccttccccaagctgggctgggatgatgagctgaggaagccaggggcccagatctacatgaggttcatgcaggagcacacctgctatgatgccatggccaccagcagcaagctggtgatctttgacaccatgctggagatcaagaaggccttctttgccctggtggccaacggggtgcgggccgcccccctgtgggacagcaagaagcagagctttgtgggcatgctgaccatcacagacttcatcctggtgctgcaccgctactaccgcagccccctggtgcagatctatgaaattgagcagcacaagattgagacctggagggagatctacctgcagggctgcttcaagcccctggtgtccatcagccccaatgacagcctgtttgaggccgtgtacaccctcatcaagaaccgcatccaccggctgcctgtgctggaccctgtgtctggaaatgtgctgcacatcctgacccacaagaggctgctgaagttcctgcacatcttcggcagcctgctgccccggcccagcttcctgtaccgcaccatccaggacctgggcatcggcaccttccgggacctggccgtggtgctggagacagcccccatcctgacagccctggacatctttgtggaccggcgggtgtctgccctgcctgtggtgaatgaatgtggccaggtggtgggcctgtacagcagatttgatgtgatccacctggccgcccagcagacctacaaccacctggacatgtctgtgggggaggccctgcggcagaggaccctgtgcctggagggcgtgctgagctgccagccccatgagagcctgggggaggtgattgacagaattgcccgggagcaggtgcaccggctggtgctggtggatgagacccagcacctgctgggcgtggtgtccctgagtgacatcctgcaggccctggtgctgagccctgctggcattgatgccctgggcgcctag

SEQ ID NO: 165958 - DNA, 918 bp, synthetic construct
  misc_feature 1..918: note = Description of Artificial Sequence: Synthetic coding sequence
  source 1..918: mol_type = other DNA
atgaggttcatgcaggagcacacctgctatgatgccatggccaccagcagcaagctggtgatctttgacaccatgctggagatcaagaaggccttctttgccctggtggccaacggggtgcgggccgcccccctgtgggacagcaagaagcagagctttgtgggcatgctgaccatcacagacttcatcctggtgctgcaccgctactaccgcagccccctggtgcagatctatgaaattgagcagcacaagattgagacctggagggagatctacctgcagggctgcttcaagcccctggtgtccatcagccccaatgacagcctgtttgaggccgtgtacaccctcatcaagaaccgcatccaccggctgcctgtgctggaccctgtgtctggaaatgtgctgcacatcctgacccacaagaggctgctgaagttcctgcacatcttcggcagcctgctgccccggcccagcttcctgtaccgcaccatccaggacctgggcatcggcaccttccgggacctggccgtggtgctggagacagcccccatcctgacagccctggacatctttgtggaccggcgggtgtctgccctgcctgtggtgaatgaatgtggccaggtggtgggcctgtacagcagatttgatgtgatccacctggccgcccagcagacctacaaccacctggacatgtctgtgggggaggccctgcggcagaggaccctgtgcctggagggcgtgctgagctgccagccccatgagagcctgggggaggtgattgacagaattgcccgggagcaggtgcaccggctggtgctggtggatgagacccagcacctgctgggcgtggtgtccctgagtgacatcctgcaggccctggtgctgagccctgctggcattgatgccctgggcgcctag

SEQ ID NO: 165959 - DNA, 1056 bp, synthetic construct
  misc_feature 1..1056: note = Description of Artificial Sequence: Synthetic coding sequence
  source 1..1056: mol_type = other DNA
atgggaaatgctgctgctgccaagaagggcagcgagcaggagagcgtgaaggagttcctggccaaggccaaggaggacttcctgaagaagtgggagagccctgcccagaacacagcccacctggaccagtttgagcgcatcaagaccctgggcaccggcagctttggccgggtgatgctggtgaagcacaaggagaccggcaaccactacgccatgaagatcctggacaagcagaaggtggtgaagctgaagcagatcgagcacaccctgaatgagaagaggatcctgcaggccgtgaacttccccttcctggtgaagctggagttctccttcaaggacaacagcaacctgtacatggtgatggagtatgtgcctggaggagagatgttcagccacctgcggcgcatcggccgcttcagcgagccccacgcccgcttctacgccgcccagatcgtgctgacctttgagtacctgcacagcctggacctgatctacagagacctgaagccagagaacctgctgattgaccagcagggctacatccaggtgacagactttggatttgccaagagggtgaagggccgcacctggaccctgtgtggcaccccagagtacctggcccctgagatcatcctgagcaagggctacaacaaggctgtggactggtgggccctgggcgtgctgatctatgagatggccgccggctacccacccttctttgctgaccagcccatccagatctatgagaagatcgtgtctgggaaggtgcgcttccccagccacttcagcagtgacctgaaggacctgctgaggaacctgctgcaggtggacctgaccaagcgcttcggcaacctgaagaatggagtgaatgacatcaagaaccacaagtggtttgccaccacagactggatcgccatctaccagaggaaggtggaggcccccttcatccccaagttcaagggccctggggacaccagcaactttgatgattatgaggaggaggagatccgggtgtccatcaatgaaaaatgtgggaaggagttcagcgagttctag

SEQ ID NO: 165960 - DNA, 1032 bp, synthetic construct; identical to SEQ ID NO: 165929
  misc_feature 1..1032: note = Description of Artificial Sequence: Synthetic coding sequence
  source 1..1032: mol_type = other DNA

SEQ ID NO: 165961 - DNA, 1056 bp, synthetic construct; identical to SEQ ID NO: 165959
  misc_feature 1..1056: note = Description of Artificial Sequence: Synthetic coding sequence
  source 1..1056: mol_type = other DNA

SEQ ID NO: 165962 - DNA, 693 bp, synthetic construct
  misc_feature 1..693: note = Description of Artificial Sequence: Synthetic coding sequence
  source 1..693: mol_type = other DNA
atgctggtgaagcacaaggagaccggcaaccactacgccatgaagatcctggacaagcagaaggtggtgaagctgaagcagatcgagcacaccctgaatgagaagaggatcctgcaggccgtgaacttccccttcctggtgaagctggagttctccttcaaggacaacagcaacctgtacatggtgatggagtatgtgcctggaggagagatgttcagccacctgcggcgcatcggccgcttcagcgagccccacgcccgcttctacgccgcccagatcgtgctgacctttgagtacctgcacagcctggacctgatctacagagacctgaagccagagaacctgctgattgaccagcagggctacatccaggtgacagactttggatttgccaagagggtgaagggccgcacctggaccctgtgtggcaccccagagtacctggcccctgagatcatcctgagcaagggctacaacaaggctgtggactggtgggccctgggcgtgctgatctatgagatggccgccggctacccacccttctttgctgaccagcccatccagatctatgagaagatcgtgtctgggaaggtgcgcagcggctgtggggacacagccctggaggagacagacaggagcctgctgacccaccccatcccctggggcgccctgctggtggtgcgcatcatctag

SEQ ID NO: 165963 - DNA, 1074 bp, synthetic construct
  misc_feature 1..1074: note = Description of Artificial Sequence: Synthetic coding sequence
  source 1..1074: mol_type = other DNA
atgggcctgagcaggaagagcagtgatgccagcgcctgcagcagcagcgagatcagtgactttgtgaaggagttcctggccaaggccaaggaggacttcctgaagaagtgggagaaccccacccagaacaatgccggcctggaggactttgagaggaagaagaccctgggcaccggcagctttggccgggtgatgctggtgaagcacaaggccacagagcagtactatgccatgaagatcctggacaagcagaaggtggtgaagctgaagcagatcgagcacaccctgaatgagaagaggatcctgcaggccgtgaacttccccttcctggtgcggctggagtatgccttcaaggacaacagcaacctgtacatggtgatggagtatgtgcctggaggagagatgttcagccacctgcggcgcatcggccgcttcagcgagccccacgcccgcttctacgccgcccagatcgtgctgacctttgagtacctgcacagcctggacctgatctacagagacctgaagccagagaacctgctgattgaccaccagggctacatccaggtgacagactttggatttgccaagagggtgaagggccgcacctggaccctgtgtggcaccccagagtacctggcccctgagatcatcctgagcaagggctacaacaaggctgtggactggtgggccctgggcgtgctgatctatgagatggccgccggctacccacccttctttgctgaccagcccatccagatctatgagaagatcgtgtctgggaaggtgcgcttccccagccacttcagcagtgacctgaaggacctgctgaggaacctgctgcaggtggacctgaccaagcgcttcggcaacctgaagaatggagtgtctgacatcaagacccacaagtggtttgccaccacagactggatcgccatctaccagaggaaggtggaggcccccttcatccccaagttccggggcagcggggacaccagcaactttgatgattatgaggaggaggacatccgggtgtccatcacagagaagtgtgccaaggagtttggagagttctag

SEQ ID NO: 165964 - DNA, 795 bp, synthetic construct
  misc_feature 1..795: note = Description of Artificial Sequence: Synthetic coding sequence
  source 1..795: mol_type = other DNA
atgtctgccaggaagagcagtgatgccagcgcctgcagcagcagcgagatcagtgacagctttgtgaaggagttcctggccaaggccaaggaggacttcctgaagaagtgggagaaccccacccagaacaatgccggcctggaggactttgagaggaagaagaccctgggcaccggcagctttggccgggtgatgctggtgaagcacaaggccacagagcagtactatgccatgaagatcctggacaagcagaaggtggtgaagctgaagcagatcgagcacaccctgaatgagaagaggatcctgcaggccgtgaacttccccttcctggtgcggctggagtatgccttcaaggacaacagcaacctgtacatggtgatggagtatgtgcctggaggagagatgttcagccacctgcggcgcatcggccgcttcagcgagccccacgcccgcttctacgccgcccagatcgtgctgacctttgagtacctgcacagcctggacctgatctacagagacctgaagccagagaacctgctgattgaccaccagggctacatccaggtgacagactttggatttgccaagagggtgaagggccgcacctggaccctgtgtggcaccccagagtacctggcccctgagatcatcctgagcaagggctacaacaaggctgtggactggtgggccctgggcgtgctgatctatgagatggccgccggctacccacccttctttgctgaccagcccatccagatctatgagaagatcgtgtctgggaagcagaacttctag

SEQ ID NO: 165965 - DNA, 942 bp, synthetic construct
  misc_feature 1..942: note = Description of Artificial Sequence: Synthetic coding sequence
  source 1..942: mol_type = other DNA
atgccagacctgaagatcctgaagggcaagaccctgggcaccggcagctttggccgggtgatgctggtgaagcacaaggccacagagcagtactatgccatgaagatcctggacaagcagaaggtggtgaagctgaagcagatcgagcacaccctgaatgagaagaggatcctgcaggccgtgaacttccccttcctggtgcggctggagtatgccttcaaggacaacagcaacctgtacatggtgatggagtatgtgcctggaggagagatgttcagccacctgcggcgcatcggccgcttcagcgagccccacgcccgcttctacgccgcccagatcgtgctgacctttgagtacctgcacagcctggacctgatctacagagacctgaagccagagaacctgctgattgaccaccagggctacatccaggtgacagactttggatttgccaagagggtgaagggccgcacctggaccctgtgtggcaccccagagtacctggcccctgagatcatcctgagcaagggctacaacaaggctgtggactggtgggccctgggcgtgctgatctatgagatggccgccggctacccacccttctttgctgaccagcccatccagatctatgagaagatcgtgtctgggaaggtgcgcttccccagccacttcagcagtgacctgaaggacctgctgaggaacctgctgcaggtggacctgaccaagcgcttcggcaacctgaagaatggagtgtctgacatcaagacccacaagtggtttgccaccacagactggatcgccatctaccagaggaaggtggaggcccccttcatccccaagttccggggcagcggggacaccagcaactttgatgattatgaggaggaggacatccgggtgtccatcacagagaagtgtgccaaggagtttggagagttctag

SEQ ID NO: 165966 - DNA, 1068 bp, synthetic construct
  misc_feature 1..1068: note = Description of Artificial Sequence: Synthetic coding sequence
  source 1..1068: mol_type = other DNA
atgggcctgagcaggaagagcagtgatgccagcgcctgcagcagcagcgagatctctgtgaaggagttcctggccaaggccaaggaggacttcctgaagaagtgggagaaccccacccagaacaatgccggcctggaggactttgagaggaagaagaccctgggcaccggcagctttggccgggtgatgctggtgaagcacaaggccacagagcagtactatgccatgaagatcctggacaagcagaaggtggtgaagctgaagcagatcgagcacaccctgaatgagaagaggatcctgcaggccgtgaacttccccttcctggtgcggctggagtatgccttcaaggacaacagcaacctgtacatggtgatggagtatgtgcctggaggagagatgttcagccacctgcggcgcatcggccgcttcagcgagccccacgcccgcttctacgccgcccagatcgtgctgacctttgagtacctgcacagcctggacctgatctacagagacctgaagccagagaacctgctgattgaccaccagggctacatccaggtgacagactttggatttgccaagagggtgaagggccgcacctggaccctgtgtggcaccccagagtacctggcccctgagatcatcctgagcaagggctacaacaaggctgtggactggtgggccctgggcgtgctgatctatgagatggccgccggctacccacccttctttgctgaccagcccatccagatctatgagaagatcgtgtctgggaaggtgcgcttccccagccacttcagcagtgacctgaaggacctgctgaggaacctgctgcaggtggacctgaccaagcgcttcggcaacctgaagaatggagtgtctgacatcaagacccacaagtggtttgccaccacagactggatcgccatctaccagaggaaggtggaggcccccttcatccccaagttccggggcagcggggacaccagcaactttgatgattatgaggaggaggacatccgggtgtccatcacagagaagtgtgccaaggagtttggagagttctag

SEQ ID NO: 165967 - DNA, 738 bp, synthetic construct
  misc_feature 1..738: note = Description of Artificial Sequence: Synthetic coding sequence
  source 1..738: mol_type = other DNA
atgggcctgctgaaggagttcctggccaaggccaaggaggacttcctgaagaagtgggagaaccccacccagaacaatgccggcctggaggactttgagaggaagaagaccctgggcaccggcagctttggccgggtgatgctggtgaagcacaaggccacagagcagtactatgccatgaagatcctggacaagcagaaggtggtgaagctgaagcagatcgagcacaccctgaatgagaagaggatcctgcaggccgtgaacttccccttcctggtgcggctggagtatgccttcaaggacaacagcaacctgtacatggtgatggagtatgtgcctggaggagagatgttcagccacctgcggcgcatcggccgcttcagcgagccccacgcccgcttctacgccgcccagatcgtgctgacctttgagtacctgcacagcctggacctgatctacagagacctgaagccagagaacctgctgattgaccaccagggctacatccaggtgacagactttggatttgccaagagggtgaagggccgcacctggaccctgtgtggcaccccagagtacctggcccctgagatcatcctgagcaagggctacaacaaggctgtggactggtgggccctgggcgtgctgatctatgagatggccgccggctacccacccttctttgctgaccagcccatccagatctatgagaagatcgtgtctgggaagaacttctag

SEQ ID NO: 165968 - DNA, 1197 bp, synthetic construct
  misc_feature 1..1197: note = Description of Artificial Sequence: Synthetic coding sequence
  source 1..1197: mol_type = other DNA
atggccgcctaccgggagcccccctgcaaccagtacacaggcaccaccacagccctgcagaagctggagggctttgccagccgcctcttccaccgccacagcaaaggaacagcccatgaccagaagacagccctggagaatgacagcctgcacttcagcgagcacacagccctgtgggaccgctccatgaaggagttcctggccaaggccaaggaggacttcctgaagaagtgggagaaccccacccagaacaatgccggcctggaggactttgagaggaagaagaccctgggcaccggcagctttggccgggtgatgctggtgaagcacaaggccacagagcagtactatgccatgaagatcctggacaagcagaaggtggtgaagctgaagcagatcgagcacaccctgaatgagaagaggatcctgcaggccgtgaacttccccttcctggtgcggctggagtatgccttcaaggacaacagcaacctgtacatggtgatggagtatgtgcctggaggagagatgttcagccacctgcggagaattggccgcttcagcgagccccacgcccgcttctatgctgcccagatcgtgctgacctttgagtacctgcacagcctggacctgatctacagagacctgaagccagagaacctgctgattgaccaccagggctacatccaggtgacagactttggatttgccaagagggtgaagggccgcacctggaccctgtgtggcaccccagagtacctggcccctgagatcatcctgagcaagggctacaacaaggctgtggactggtgggccctgggcgtgctgatctatgagatggctgctggctacccacccttctttgctgaccagcccatccagatctatgagaagatcgtgtctgggaaggtgcgcttccccagccacttcagcagtgacctgaaggacctgctgaggaacctgctgcaggtggacctgaccaagagatttggaaacctgaagaatggagtgtctgacatcaagacccacaagtggtttgccaccacagactggatcgccatctaccagaggaaggtggaggcccccttcatccccaagttccggggcagcggggacaccagcaactttgatgattatgaggaggaggacatccgggtgtccatcacagagaagtgtgccaaggagtttggagagttctag

SEQ ID NO: 165969 - DNA, 774 bp, synthetic construct
  misc_feature 1..774: note = Description of Artificial Sequence: Synthetic coding sequence
  source 1..774: mol_type = other DNA
atgggaaatgctgccacagccaagaagggcagcgaggtggagagcgtgaaggagttcctggccaaggccaaggaggacttcctgaagaagtgggagaaccccacccagaacaatgccggcctggaggactttgagaggaagaagaccctgggcaccggcagctttggccgggtgatgctggtgaagcacaaggccacagagcagtactatgccatgaagatcctggacaagcagaaggtggtgaagctgaagcagatcgagcacaccctgaatgagaagaggatcctgcaggccgtgaacttccccttcctggtgcggctggagtatgccttcaaggacaacagcaacctgtacatggtgatggagtatgtgcctggaggagagatgttcagccacctgcggcgcatcggccgcttcagcgagccccacgcccgcttctacgccgcccagatcgtgctgacctttgagtacctgcacagcctggacctgatctacagagacctgaagccagagaacctgctgattgaccaccagggctacatccaggtgacagactttggatttgccaagagggtgaagggccgcacctggaccctgtgtggcaccccagagtacctggcccctgagatcatcctgagcaagggctacaacaaggctgtggactggtgggccctgggcgtgctgatctatgagatggccgccggctacccacccttctttgctgaccagcccatccagatctatgagaagatcgtgtctgggaagaacttctag

SEQ ID NO: 165970 - DNA, 1056 bp, synthetic construct
  misc_feature 1..1056: note = Description of Artificial Sequence: Synthetic coding sequence
  source 1..1056: mol_type = other DNA
atgggaaatgctgccacagccaagaagggcagcgaggtggagagcgtgaaggagttcctggccaaggccaaggaggacttcctgaagaagtgggagaaccccacccagaacaatgccggcctggaggactttgagaggaagaagaccctgggcaccggcagctttggccgggtgatgctggtgaagcacaaggccacagagcagtactatgccatgaagatcctggacaagcagaaggtggtgaagctgaagcagatcgagcacaccctgaatgagaagaggatcctgcaggccgtgaacttccccttcctggtgcggctggagtatgccttcaaggacaacagcaacctgtacatggtgatggagtatgtgcctggaggagagatgttcagccacctgcggcgcatcggccgcttcagcgagccccacgcccgcttctacgccgcccagatcgtgctgacctttgagtacctgcacagcctggacctgatctacagagacctgaagccagagaacctgctgattgaccaccagggctacatccaggtgacagactttggatttgccaagagggtgaagggccgcacctggaccctgtgtggcaccccagagtacctggcccctgagatcatcctgagcaagggctacaacaaggctgtggactggtgggccctgggcgtgctgatctatgagatggccgccggctacccacccttctttgctgaccagcccatccagatctatgagaagatcgtgtctgggaaggtgcgcttccccagccacttcagcagtgacctgaaggacctgctgaggaacctgctgcaggtggacctgaccaagcgcttcggcaacctgaagaatggagtgtctgacatcaagacccacaagtggtttgccaccacagactggatcgccatctaccagaggaaggtggaggcccccttcatccccaagttccggggcagcggggacaccagcaactttgatgattatgaggaggaggacatccgggtgtccatcacagagaagtgtgccaaggagtttggagagttctag

SEQ ID NO: 165971 - DNA, 1077 bp, synthetic construct
  misc_feature 1..1077: note = Description of Artificial Sequence: Synthetic coding sequence
  source 1..1077: mol_type = other DNA
atgggcctgagcaggaagagcagtgatgccagcgcctgcagcagcagcgagatcagtgacagctttgtgaaggagttcctggccaaggccaaggaggacttcctgaagaagtgggagaaccccacccagaacaatgccggcctggaggactttgagaggaagaagaccctgggcaccggcagctttggccgggtgatgctggtgaagcacaaggccacagagcagtactatgccatgaagatcctggacaagcagaaggtggtgaagctgaagcagatcgagcacaccctgaatgagaagaggatcctgcaggccgtgaacttccccttcctggtgcggctggagtatgccttcaaggacaacagcaacctgtacatggtgatggagtatgtgcctggaggagagatgttcagccacctgcggagaattggccgcttcagcgagccccacgcccgcttctatgctgcccagatcgtgctgacctttgagtacctgcacagcctggacctgatctacagagacctgaagccagagaacctgctgattgaccaccagggctacatccaggtgacagactttggatttgccaagagggtgaagggccgcacctggaccctgtgtggcaccccagagtacctggcccctgagatcatcctgagcaagggctacaacaaggctgtggactggtgggccctgggcgtgctgatctatgagatggctgctggctacccacccttctttgctgaccagcccatccagatctatgagaagatcgtgtctgggaaggtgcgcttccccagccacttcagcagtgacctgaaggacctgctgaggaacctgctgcaggtggacctgaccaagagatttggaaacctgaagaatggagtgtctgacatcaagacccacaagtggtttgccaccacagactggatcgccatctaccagaggaaggtggaggcccccttcatccccaagttccggggcagcggggacaccagcaactttgatgattatgaggaggaggacatccgggtgtccatcacagagaagtgtgccaaggagtttggagagttctag

SEQ ID NO: 165972 - DNA, 966 bp, synthetic construct
  misc_feature 1..966: note = Description of Artificial Sequence: Synthetic coding sequence
  source 1..966: mol_type = other DNA
atgtctgccaggaagagcagtgatgccagcgcctgcagcagcagcgagatctctgtgaaggagttcctggccaaggccaaggaggacttcctgaagaagtgggagaaccccacccagaacaatgccggcctggaggactttgagaggaagaagaccctgggcaccggcagctttggccgggtgatgctggtgaagcacaaggccacagagcagtactatgccatgaagatcctggacaagcagaaggacaacagcaacctgtacatggtgatggagtatgtgcctggaggagagatgttcagccacctgcggcgcatcggccgcttcagcgagccccacgcccgcttctacgccgcccagatcgtgctgacctttgagtacctgcacagcctggacctgatctacagagacctgaagccagagaacctgctgattgaccaccagggctacatccaggtgacagactttggatttgccaagagggtgaagggccgcacctggaccctgtgtggcaccccagagtacctggcccctgagatcatcctgagcaagggctacaacaaggctgtggactggtgggccctgggcgtgctgatctatgagatggccgccggctacccacccttctttgctgaccagcccatccagatctatgagaagatcgtgtctgggaaggtgcgcttccccagccacttcagcagtgacctgaaggacctgctgaggaacctgctgcaggtggacctgaccaagcgcttcggcaacctgaagaatggagtgtctgacatcaagacccacaagtggtttgccaccacagactggatcgccatctaccagaggaaggtggaggcccccttcatccccaagttccggggcagcggggacaccagcaactttgatgattatgaggaggaggacatccgggtgtccatcacagagaagtgtgccaaggagtttggagagttctag

SEQ ID NO: 165973 - DNA, 630 bp, synthetic construct
  misc_feature 1..630: note = Description of Artificial Sequence: Synthetic coding sequence
  source 1..630: mol_type = other DNA
atgtctgcctgcagcagcagcgagatctctgtgaaggagttcctggccaaggccaaggaggacttcctgaagaagtgggagaaccccacccagaacaatgccggcctggaggactttgagaggaagaagaccctgggcaccggcagctttggccgggtgatgctggtgaagcacaaggccacagagcagtactatgccatgaagatcctggacaagcagaaggtggtgaagctgaagcagatcgagcacaccctgaatgagaagaggatcctgcaggccgtgaacttccccttcctggtgcggctggagtatgccttcaaggacaacagcaacctgtacatggtgatggagtatgtgcctggaggagagatgttcagccacctgcggagaattggccgcttcagcgagccccacgcccgcttctatgctgcccagatcgtgctgacctttgagtacctgcacagcctggacctgatctacagagacctgaagccagagaacctgctgattgaccaccagggctacatccaggtgacagactttggatttgccaagagggtgaagggccgcacctggaccctgtgtggcaccccagagtacctggcccctgagatcatcctgagcaagtag

SEQ ID NO: 165974 - DNA, 594 bp, synthetic construct
  misc_feature 1..594: note = Description of Artificial Sequence: Synthetic coding sequence
  source 1..594: mol_type = other DNA
atgtctgtgaaggagttcctggccaaggccaaggaggacttcctgaagaagtgggagaaccccacccagaacaatgccggcctggaggactttgagaggaagaagaccctgggcaccggcagctttggccgggtgatgctggtgaagcacaaggccacagagcagtactatgccatgaagatcctggacaagcagaaggtggtgaagctgaagcagatcgagcacaccctgaatgagaagaggatcctgcaggccgtgaacttccccttcctggtgcggctggagtatgccttcaaggacaacagcaacctgtacatggtgatggagtatgtgcctggaggagagatgttcagccacctgcggagaattggccgcttcagcgagccccacgcccgcttctatgctgcccagatcgtgctgacctttgagtacctgcacagcctggacctgatctacagagacctgaagccagagaacctgctgattgaccaccagggctacatccaggtgacagactttggatttgccaagagggtgaagggccgcacctggaccctgtgtggcaccccagagtacctggcccctgagatctag

SEQ ID NO: 165975 - DNA, 645 bp, synthetic construct
  misc_feature 1..645: note = Description of Artificial Sequence: Synthetic coding sequence
  source 1..645: mol_type = other DNA
atgggcctgagctgcagcagcagcgagatctctgtgaaggagttcctggccaaggccaaggaggacttcctgaagaagtgggagaaccccacccagaacaatgccggcctggaggactttgagaggaagaagaccctgggcaccggcagctttggccgggtgatgctggtgaagcacaaggccacagagcagtactatgccatgaagatcctggacaagcagaaggtggtgaagctgaagcagatcgagcacaccctgaatgagaagaggatcctgcaggccgtgaacttccccttcctggtgcggctggagtatgccttcaaggacaacagcaacctgtacatggtgatggagtatgtgcctggaggagagatgttcagccacctgcggcgcatcggccgcttcagcgagccccacgcccgcttctacgccgcccagatcgtgctgacctttgagtacctgcacagcctggacctgatctacagagacctgaagccagagaacctgctgattgaccaccagggctacatccaggtgacagactttggatttgccaagagggtgaagggccgcacctggaccctgtgtggcaccccagagtacctggcccctgagatcatcctgagcaagggctacaacaagtag

SEQ ID NO: 165976 - DNA, 561 bp, synthetic construct
  misc_feature 1..561: note = Description of Artificial Sequence: Synthetic coding sequence
  source 1..561: mol_type = other DNA
atgggcctgagcaggaagagcagtgatgccagcgcctgcagcagcagcgagatctctgtgaaggagttcctggccaaggccaaggaggacttcctgaagaagtgggagaaccccacccagaacaatgccggcctggaggactttgagaggaagaagaccctgggcaccggcagctttggccgggtgatgctggtgaagcacaaggccacagagcagtactatgccatgaagatcctggacaagcagaaggtggtgaagctgaagcagatcgagcacaccctgaatgagaagaggatcctgcaggccgtgaacttccccttcctggtgcggctggagtatgccttcaaggacaacagcaacctgtacatggtgatggagtatgtgcctggaggagagatgttcagccacctgcggcgcatcggccgcttcagcgagccccacgcccgcttctacgccgcccagatcgtgctgacctttgagtacctgcacagcctggacctgatctacagagacctgaagccagagaacctgctgattgaccaccagggctacatccagtag

SEQ ID NO: 165977 - DNA, 528 bp, synthetic construct
  misc_feature 1..528: note = Description of Artificial Sequence: Synthetic coding sequence
  source 1..528: mol_type = other DNA
atgggcctgagcaggaagagcagtgatgccagcgcctgcagcagcagcgagatcagtgacagctttgtgaaggagttcctggccaaggccaaggaggacttcctgaagaagtgggagaaccccacccagaacaatgccggcctggaggactttgagaggaagaagaccctgggcaccggcagctttggccgggtgatgctggtgaagcacaaggccacagagcagtactatgccatgaagatcctggacaagcagaaggtggtgaagctgaagcagatcgagcacaccctgaatgagaagaggatcctgcaggccgtgaacttccccttcctggtgcggctggagtatgccttcaaggacaacagcaacctgtacatggtgatggagtatgtgcctggaggagagatgttcagccacctgcggagaattggccgcttcagcgagccccacgcccgcttctatgctgcccagatcgtgctgacctttgagtacctgcacagcctggacctgatctacagagacctgtag

SEQ ID NO: 165978 - DNA, 621 bp, synthetic construct
  misc_feature 1..621: note = Description of Artificial Sequence: Synthetic coding sequence
  source 1..621: mol_type = other DNA
atgtctgccaggaagagcagtgatgccagcgcctgcagcagcagcgagatctctgtgaaggagttcctggccaaggccaaggaggacttcctgaagaagtgggagaaccccacccagaacaatgccggcctggaggactttgagaggaagaagaccctgggcaccggcagctttggccgggtgatgctggtgaagcacaaggccacagagcagtactatgccatgaagatcctggacaagcagaaggtggtgaagctgaagcagatcgagcacaccctgaatgagaagaggatcctgcaggccgtgaacttccccttcctggtgcggctggagtatgccttcaaggacaacagcaacctgtacatggtgatggagtatgtgcctggaggagagatgttcagccacctgcggagaattggccgcttcagcgagccccacgcccgcttctatgctgcccagatcgtgctgacctttgagtacctgcacagcctggacctgatctacagagacctgaagccagagaacctgctgattgaccaccagggctacatccaggtgacagactttggatttgccaagagggtgaagggccgcacctggaccctgtgtggcaccccctag

SEQ ID NO: 165979 - DNA, 1056 bp, synthetic construct
  misc_feature 1..1056: note = Description of Artificial Sequence: Synthetic coding sequence
  source 1..1056: mol_type = other DNA
atgggaaatgccccagccaagaaggacacagagcaggaggagagcgtgaatgagttcctggccaaggcccggggggacttcctgtaccgctggggcaacccagcccagaacacagccagcagtgaccagtttgagcggctgcggaccctgggcatgggcagctttggccgggtgatgctggtgcgccaccaggagaccggcggccactacgccatgaagatcctgaacaagcagaaggtggtgaagatgaagcaggtggagcacatcctgaatgagaagaggatcctgcaggccatcgacttccccttcctggtgaagctgcagttctccttcaaggacaacagctacctgtacctggtgatggagtatgtgcctggaggagagatgttcagccggctgcagagggtgggccgcttcagcgagccccacgcctgcttctacgccgcccaggtggtgctggccgtgcagtacctgcacagcctggacctgatccaccgggacctgaagccagagaacctgctgattgaccagcagggctacctgcaggtgacagactttggatttgccaagagggtgaagggccgcacctggaccctgtgtggcaccccagagtacctggcccctgagatcatcctgagcaagggctacaacaaggctgtggactggtgggccctgggcgtgctgatctatgagatggctgtgggcttcccccccttctatgctgaccagcccatccagatctatgagaagatcgtgtctggccgggtgcgcttccccagcaagctgagcagtgacctgaagcacctgctgcggagcctgctgcaggtggacctgaccaagcgcttcggcaacctgagaaatggagtgggggacatcaagaaccacaagtggtttgccaccacctcctggatcgccatctatgagaagaaggtggaggcccccttcatccccaagtacacaggccctggagatgccagcaactttgatgattatgaggaggaggagctgcgcatcagcatcaatgaaaaatgtgccaaggagttcagcgagttctag

SEQ ID NO: 165980 - DNA, 1146 bp, synthetic construct; identical to SEQ ID NO: 165930
  misc_feature 1..1146: note = Description of Artificial Sequence: Synthetic coding sequence
  source 1..1146: mol_type = other DNA

SEQ ID NO: 165981 - DNA, 1146 bp, synthetic construct; identical to SEQ ID NO: 165930
  misc_feature 1..1146: note = Description of Artificial Sequence: Synthetic coding sequence
  source 1..1146: mol_type = other DNA

SEQ ID NO: 165982 - DNA, 1146 bp, synthetic construct; identical to SEQ ID NO: 165930
  misc_feature 1..1146: note = Description of Artificial Sequence: Synthetic coding sequence
  source 1..1146: mol_type = other DNA

SEQ ID NO: 165983 - DNA, 1146 bp, synthetic construct; identical to SEQ ID NO: 165930
  misc_feature 1..1146: note = Description of Artificial Sequence: Synthetic coding sequence
  source 1..1146: mol_type = other DNA

SEQ ID NO: 165984 - DNA, 243 bp, synthetic construct
  misc_feature 1..243: note = Description of Artificial Sequence: Synthetic coding sequence
  source 1..243: mol_type = other DNA
atgggcagcaccctgaggaagaggaagatgtatgaggagttcctgagcaaggtgtccatcctggagagcctggagaagtgggagcggctgactgtggctgatgccctggagcctgtgcagtttgaagatggagagaagatcgtggtgcagggcgagcctggagatgacttctacatcatcacagagaagaacctgcccggggtggtggcccacgcctgcaaccccagctacctgggcggctag

SEQ ID NO: 165985 - DNA, 1146 bp, synthetic construct
  misc_feature 1..1146: note = Description of Artificial Sequence: Synthetic coding sequence
  source 1..1146: mol_type = other DNA
atggccagccccccagcctgccccagtgaagaagatgagagcctgaagggctgtgagctgtatgtgcagctgcacggcatccagcaggtgctgaaggactgcatcgtgcacctgtgcatcagcaagccagagcggcccatgaagttcctgcgggagcactttgagaagctggagaaggaggagaaccggcagatcctggcccggcagaagagcaacagccagagcgacagccatgatgaggaggtgagccccaccccacccaaccctgtggtgaaggccaggagaagaagaggaggagtgtctgctgaggtgtacacagaggaggatgctgtgtcctatgtgaggaaggtgatccccaaggactacaagaccatgacagccctggccaaggccatcagcaagaatgtgctgtttgcccacctggatgacaatgaaagaagtgacatctttgatgccatgtttcctgtgacccacatcgccggggagaccgtcatccagcagggcaatgaaggagacaacttctacgtggtggaccagggcgaggtggatgtgtatgtgaatggagagtgggtgaccaacatcagcgagggcggcagctttggagagctggccctgatctacggcaccccccgggccgccaccgtgaaggccaagacagacctgaagctgtggggcatcgaccgggacagctaccgccgcatcctgatgggcagcaccctgaggaagaggaagatgtatgaggagttcctgagcaaggtgtccatcctggagagcctggagaagtgggagcggctgactgtggctgatgccctggagcctgtgcagtttgaagatggagagaagatcgtggtgcagggcgagcctggagatgacttctacatcatcacagagggcacagcctctgtgctgcagaggaggagccccaatgaggagtatgtggaggtgggccgcctgggccccagcgactactttggagaaattgccctgctgctgaaccggccccgggccgccaccgtggtggcccggggccccctgaagtgtgtgaagctggaccggcccaggtttgagcgggtgctgggcccctgcagcgagatcctgaagaggaacatccagcgctacaacagcttcatcagcctgactgtgtag

SEQ ID NO: 165986 - DNA, 1146 bp, synthetic construct; identical to SEQ ID NO: 165985
  misc_feature 1..1146: note = Description of Artificial Sequence: Synthetic coding sequence
  source 1..1146: mol_type = other DNA

SEQ ID NO: 165987 - DNA, 1146 bp, synthetic construct; identical to SEQ ID NO: 165985
  misc_feature 1..1146: note = Description of Artificial Sequence: Synthetic coding sequence
  source 1..1146: mol_type = other DNA

SEQ ID NO: 165988 - DNA, 498 bp, synthetic construct
  misc_feature 1..498: note = Description of Artificial Sequence: Synthetic coding sequence
  source 1..498: mol_type = other DNA
atggccagccccccagcctgccccagtgaagaagatgagagcctgaagggctgtgagctgtatgtgcagctgcacggcatccagcaggtgctgaaggactgcatcgtgcacctgtgcatcagcaagccagagcggcccatgaagttcctgcgggagcactttgagaagctggagaaggaggagaaccggcagatcctggcccggcagaagagcaacagccagagcgacagccatgatgaggaggtgagccccaccccacccaaccctgtggtgaaggccaggagaagaagaggaggagtgtctgctgaggtgtacacagaggaggatgctgtgtcctatgtgaggaaggtgatccccaaggactacaagaccatgacagccctggccaaggccatcagcaagaatgtgctgtttgcccacctggatgacaatgaaagaagtgacatctttgatgccatgtttcctgtgacccacatcgccggggagaccgtcatctag

SEQ ID NO: 165989 - DNA, 894 bp, synthetic construct
  misc_feature 1..894: note = Description of Artificial Sequence: Synthetic coding sequence
  source 1..894: mol_type = other DNA
atggccagccccccagcctgccccagtgaagaagatgagagcctgaagggctgtgagctgtatgtgcagctgcacggcatccagcaggtgctgaaggactgcatcgtgcacctgtgcatcagcaagccagagcggcccatgaagttcctgcgggagcactttgagaagctggagaaggaggagaaccggcagatcctggcccggcagaagagcaacagccagagcgacagccatgatgaggaggtgagccccaccccacccaaccctgtggtgaaggccaggagaagaagaggaggagtgtctgctgaggtgtacacagaggaggatgctgtgtcctatgtgaggaaggtgatccccaaggactacaagaccatgacagccctggccaaggccatcagcaagaatgtgctgtttgcccacctggatgacaatgaaagaagtgacatctttgatgccatgtttcctgtgacccacatcgccggggagaccgtcatccagcagggcaatgaaggagacaacttctacgtggtggaccagggcgaggtggatgtgtatgtgaatggagagtgggtgaccaacatcagcgagggcggcagctttggagagctggccctgatctacggcaccccccgggccgccaccgtgaaggccaagacagacctgaagctgtggggcatcgaccgggacagctaccgccgcatcctgatgggcagcaccctgaggaagaggaagatgtatgaggagttcctgagcaaggtgtccatcctggagagcctggagaagtgggagcggctgactgtggctgatgccctggagcctgtgcagtttgaagatggagagaagatcgtggtgcagggcgagcctggagatgacttctacatcatcacagaatag

SEQ ID NO: 165990 - DNA, 177 bp, synthetic construct
  misc_feature 1..177: note = Description of Artificial Sequence: Synthetic coding sequence
  source 1..177: mol_type = other DNA
atggccagccccccagcctgccccagtgaagaagatgagagcctgaagggctgtgagctgtatgtgcagctgcacggcatccagcaggtgctgaaggactgcatcgtgcacctgtgcatcagcaagccagagcggcccatgaagttcctgcgggagcactttgagaagctggagtag

SEQ ID NO: 165991 - DNA, 1146 bp, synthetic construct; identical to SEQ ID NO: 165985
  misc_feature 1..1146: note = Description of Artificial Sequence: Synthetic coding sequence
  source 1..1146: mol_type = other DNA

SEQ ID NO: 165992 - DNA, 1146 bp, synthetic construct; identical to SEQ ID NO: 165985
  misc_feature 1..1146: note = Description of Artificial Sequence: Synthetic coding sequence
  source 1..1146: mol_type = other DNA

SEQ ID NO: 165993 - DNA, 1215 bp, synthetic construct
  misc_feature 1..1215: note = Description of Artificial Sequence: Synthetic coding sequence
  source 1..1215: mol_type = other DNA
atgagccacatccagatccccccaggcctgacagagctgctgcagggctacacagtggaggtgctgcggcagcagcccccagacctggtggagtttgctgtggagtacttcacccggctgcgggaggcccgggccccagcctctgtgctgcctgctgccaccccccggcagagcctgggccaccccccacctgagcccggccctgacagagtggctgatgccaagggggacagcgagagcgaggaggatgaggacctggaggtgcctgtgcccagccgcttcaacagaagagtgtctgtgtgtgccgagacctacaacccagatgaggaggaggaggacacagaccccagggtcatccaccccaagacagatgagcagcgctgccgcctgcaggaggcctgcaaggacatcctgctcttcaagaacctggaccaggagcagctgagccaggtgctggatgccatgtttgaaagaattgtgaaggcagatgaacatgtgattgaccagggagatgatggagacaacttctacgtgattgagcggggcacctatgacatcctggtgaccaaggacaaccagaccaggtctgtgggccagtatgacaacagaggcagctttggagagctggccctgatgtacaacaccccccgggccgccaccatcgtggccaccagcgagggcagcctgtggggcctggacagagtgaccttccgccgcatcatcgtgaagaacaatgccaagaagaggaagatgtttgagagcttcatcgagagcgtgcccctgctgaagagcctggaggtgtctgagaggatgaagatcgtggatgtgattggagagaagatctacaaggatggagagcgcatcatcacccagggcgagaaggctgacagcttctacatcattgaaagtggagaggtgtccatcctgatccgcagcaggaccaagagcaacaaggatggcggcaaccaggaggtggagatcgcccgctgccacaagggccagtactttggagagctggccctggtgaccaacaagccccgggccgccagcgcctatgctgtgggagatgtgaagtgcctggtgatggatgtgcaggcctttgagcggctgctgggcccctgcatggacatcatgaagaggaacatcagccactatgaggagcagctggtgaagatgtttggcagctctgtggacctgggcaacctgggccagtag

SEQ ID NO: 165994 - DNA, 1149 bp, synthetic construct
  misc_feature 1..1149: note = Description of Artificial Sequence: Synthetic coding sequence
  source 1..1149: mol_type = other DNA
atgagccacatccagatccccccaggcctgacagagctgctgcagggctacacagtggaggtgctgcggcagcagcccccagacctggtggagtttgctgtggagtacttcacccggctgcgggaggcccgggccccagcctctgtgctgcctgctgccaccccccggcagagcctgggccaccccccacctgagcccggccctgacagagtggctgatgccaagggggacagcgagagcgaggaggatgaggacctggaggtgcctgtgcccagccgcttcaacagaagagtgtctgtgtgtgccgagacctacaacccagatgaggaggaggaggacacagaccccagggtcatccaccccaagacagatgagcagcgctgccgcctgcaggaggcctgcaaggacatcctgctcttcaagaacctggaccaggagcagctgagccaggtgctggatgccatgtttgaaagaattgtgaaggcagatgaacatgtgattgaccagggagatgatggagacaacttctacgtgattgagcggggcacctatgacatcctggtgaccaaggacaaccagaccaggtctgtgggccagtatgacaacagaggcagctttggagagctggccctgatgtacaacaccccccgggccgccaccatcgtggccaccagcgagggcagcctgtggggcctggacagagtgaccttccgccgcatcatcgtgaagaacaatgccaagaagaggaagatgtttgagagcttcatcgagagcgtgcccctgctgaagagcctggaggtgtctgagaggatgaagatcgtggatgtgattggagagaagatctacaaggatggagagcgcatcatcacccagaccaagagcaacaaggatggcggcaaccaggaggtggagatcgcccgctgccacaagggccagtactttggagagctggccctggtgaccaacaagccccgggccgccagcgcctatgctgtgggagatgtgaagtgcctggtgatggatgtgcaggcctttgagcggctgctgggcccctgcatggacatcatgaagaggaacatcagccactatgaggagcagctggtgaagatgtttggcagctctgtggacctgggcaacctgggccagtag

SEQ ID NO: 165995 - DNA, 1215 bp, synthetic construct; identical to SEQ ID NO: 165993
  misc_feature 1..1215: note = Description of Artificial Sequence: Synthetic coding sequence
  source 1..1215: mol_type = other DNA

SEQ ID NO: 165996 - DNA, 1257 bp, synthetic construct
  misc_feature 1..1257: note = Description of Artificial Sequence: Synthetic coding sequence
  source 1..1257: mol_type = other DNA
atgagcattgagatcccagctggcctgacagagctgctgcagggcttcaccgtggaggtgctgcggcaccagcctgctgacctgctggagtttgccctgcagcacttcacccggctgcagcaggagaatgaaaggaagggcacagccaggtttggacatgagggccgcacctggggagacctgggcgctgctgctgggggcggcacccccagcaagggcgtgaactttgctgaggagcccatgcagagcgacagtgaagatggagaggaggaggaggccgccccagcagatgctggggccttcaatgcccctgtgatcaaccgcttcacccggcgggcctctgtgtgtgccgaggcctacaacccagatgaggaggaggatgatgctgagagccgcatcatccaccccaagacagatgaccagaggaaccggctgcaggaggcctgcaaggacatcctgctcttcaagaacctggaccctgagcagatgagccaggtgctggatgccatgtttgagaagctggtgaaggatggagagcacgtgattgaccagggagatgatggagacaacttctacgtgattgaccggggcacctttgacatctacgtgaagtgtgatggagtgggccgctgtgtgggcaactatgacaacagaggcagctttggagagctggccctgatgtacaacacccccagggctgccaccatcacagccaccagccctggggccctgtggggcctggacagagtgaccttccgccgcatcatcgtgaagaacaatgccaagaagaggaagatgtatgagagcttcatcgagagcctgcccttcctgaagagcctggagttcagcgagcggctgaaggtggtggatgtgattggcaccaaggtgtacaatgatggagagcagatcatcgcccagggcgacagcgctgacagcttcttcatcgtggagagcggggaggtgaagatcaccatgaagaggaagggcaagtctgaggtggaggagaatggagctgtggagatcgcccgctgcagccggggccagtactttggagagctggccctggtgaccaacaagccccgggccgccagcgcccacgccatcggcaccgtgaagtgcctggccatggatgtgcaggcctttgagcggctgctgggcccctgcatggagatcatgaagaggaacatcgccacctatgaggagcagctggtggccctgtttggcaccaacatggacatcgtggagcccacagcctag

SEQ ID NO: 165997 - DNA, 1218 bp, synthetic construct
  misc_feature 1..1218: note = Description of Artificial Sequence: Synthetic coding sequence
  source 1..1218: mol_type = other DNA
atgagcattgagatcccagctggcctgacagagctgctgcagggcttcaccgtggaggtgctgcggcaccagcctgctgacctgctggagtttgccctgcagcacttcacccggctgcagcaggagaatgaaaggaagggcacagccaggtttggacatgagggccgcacctggggagacctgggcgctgctgctgggggcggcacccccagcaagggcgtgaactttgctgaggaggccgccccagcagatgctggggccttcaatgcccctgtgatcaaccgcttcacccggcgggcctctgtgtgtgccgaggcctacaacccagatgaggaggaggatgatgctgagagccgcatcatccaccccaagacagatgaccagaggaaccggctgcaggaggcctgcaaggacatcctgctcttcaagaacctggaccctgagcagatgagccaggtgctggatgccatgtttgagaagctggtgaaggatggagaacatgtgattgaccagggagatgatggagacaacttctacgtgattgaccggggcacctttgacatctacgtgaagtgtgatggagtgggccgctgtgtgggcaactatgacaacagaggcagctttggagagctggccctgatgtacaacaccccccgggccgccaccatcacagccaccagccctggggccctgtggggcctggacagagtgaccttccgccgcatcatcgtgaagaacaatgccaagaagaggaagatgtatgagagcttcatcgagagcctgcccttcctgaagagcctggagttcagcgagcggctgaaggtggtggatgtgattggcaccaaggtgtacaatgatggagagcagatcatcgcccagggcgacagcgctgacagcttcttcatcgtggagagcggggaggtgaagatcaccatgaagaggaagggcaagtctgaggtggaggagaatggagctgtggagatcgcccgctgcagccggggccagtactttggagagctggccctggtgaccaacaagcccagggctgccagcgcccacgccatcggcaccgtgaagtgcctggccatggatgtgcaggcctttgagcggctgctgggcccctgcatggagatcatgaagagaaatattgccacctatgaggagcagctggtggccctgtttggcaccaacatggacatcgtggagcccacagcctag

SEQ ID NO: 165998 - DNA, 1257 bp, synthetic construct; identical to SEQ ID NO: 165996
  misc_feature 1..1257: note = Description of Artificial Sequence: Synthetic coding sequence
  source 1..1257: mol_type = other DNA

SEQ ID NO: 165999 - DNA, 1170 bp, synthetic construct
  misc_feature 1..1170: note = Description of Artificial Sequence: Synthetic coding sequence
  source 1..1170: mol_type = other DNA
atggagaagcagaacatgttcctgcacggcagctacatcctgcgggaggatgtgaggacagccaacgtgattgctgctgaggccgtgacctgcctggtgattgaccgggacagcttcaagcacctgattggaggcctggatgatgtgagcaacaaggcctatgaagatgctgaggccaaggccaagtatgaagctgaggccgccttctttgccaacctgaagctgagtgacttcaacatcatcgacaccctgggcgtgggcggcttcggccgggtggagctggtgcagctgaagtctgaggagagcaagacctttgccatgaagatcctgaagaagaggcacatcgtggacacccggcagcaggagcacatccgctctgagaagcagatcatgcagggcgcccacagcgacttcatcgtgcggctgtaccgcaccttcaaggacagcaagtacctgtacatgctgatggaggcctgcctgggcggggagctgtggaccatcctgcgggaccggggcagctttgaggacagcaccacccgcttctacacagcctgtgtggtggaggcctttgcctacctgcacagcaagggcatcatctacagagacctgaagccagagaacctgatcctggaccaccggggctacgccaagctggtggactttggatttgccaagaagattggatttgggaagaagacctggaccttctgtggcaccccagaatatgtggcccctgagatcatcctgaacaagggccatgacatctctgctgactactggagcctgggcatcctgatgtatgagctgctgaccggcagcccccccttcagcggccctgaccccatgaagacctacaacatcatcctgcggggcatcgacatgattgagttccccaagaagatcgccaagaatgctgccaacctgatcaagaagctgtgccgggacaaccccagcgagcggctgggcaacctgaagaatggagtgaaggacatccagaagcacaagtggtttgagggcttcaactgggagggcctgaggaagggcaccctgaccccacccatcatccccagcgtggccagccccacagacaccagcaactttgacagcttccctgaggacaatgatgagcccccaccagatgacaacagcggctgggacatcgacttctag

SEQ ID NO: 166000 - DNA, 852 bp, synthetic construct
  misc_feature 1..852: note = Description of Artificial Sequence: Synthetic coding sequence
  source 1..852: mol_type = other DNA
atgaagatcctgaagaagaggcacatcgtggacacccggcagcaggagcacatccgctctgagaagcagatcatgcagggcgcccacagcgacttcatcgtgcggctgtaccgcaccttcaaggacagcaagtacctgtacatgctgatggaggcctgcctgggcggggagctgtggaccatcctgcgggaccggggcagctttgaggacagcaccacccgcttctacacagcctgtgtggtggaggcctttgcctacctgcacagcaagggcatcatctacagagacctgaagccagagaacctgatcctggaccaccggggctacgccaagctggtggactttggatttgccaagaagattggatttgggaagaagacctggaccttctgtggcaccccagaatatgtggcccctgagatcatcctgaacaagggccatgacatctctgctgactactggagcctgggcatcctgatgtatgagctgctgaccggcagcccccccttcagcggccctgaccccatgaagacctacaacatcatcctgcggggcatcgacatgattgagttccccaagaagatcgccaagaatgctgccaacctgatcaagaagctgtgccgggacaaccccagcgagcggctgggcaacctgaagaatggagtgaaggacatccagaagcacaagtggtttgagggcttcaactgggagggcctgaggaagggcaccctgaccccacccatcatccccagcgtggccagccccacagacaccagcaactttgacagcttccctgaggacaatgatgagcccccaccagatgacaacagcggctgggacatcgacttctag

SEQ ID NO: 166001 - DNA, 546 bp, synthetic construct
  misc_feature 1..546: note = Description of Artificial Sequence: Synthetic coding sequence
  source 1..546: mol_type = other DNA
agctgcatcatcaaggagggagatgtgggcagcctggtgtatgtgatggaggatggcaaggtggaggtgaccaaggagggcgtgaagctgtgcaccatgggccctgggaaggtgtttggagagctggccatcctgtacaactgcaccaggacagccaccgtgaagaccctggtgaatgtgaagctgtgggccatcgaccggcagtgcttccagaccatcatgatgaggacaggcctcatcaagcacacagagtacatggagttcctgaagtctgtgcccaccttccagagcctgcctgaggagatcctgagcaagctggctgatgtgctggaggagacccactatgaaaatggagagtacatcatccggcagggcgcccggggggacaccttcttcatcatcagcaagggcaccgtgaatgtgacccgggaggacagccccagtgaagatcctgtgttcctgcggaccctgggcaaaggagactggtttggagagaaggccctgcagggctggacctggaacctgtttgaatatgtggtggagtag

SEQ ID NO: 166002 - DNA, 2061 bp, synthetic construct
  misc_feature 1..2061: note = Description of Artificial Sequence: Synthetic coding sequence
  source 1..2061: mol_type = other DNA
atgggcaccctgcgggacctgcagtatgccctgcaggagaagattgaggagctgcggcagagagatgccctgattgatgagctggagctggagctggaccagaaggatgagctgatccagaagctgcagaatgagctggacaagtacagaagtgtcatccggcctgccacccagcaggcccagaagcagagcgccagcaccctgcagggcgagcccaggaccaagaggcaggccatctctgctgagcccacagcctttgacatccaggacctgagccacgtgaccctgcccttctaccccaagagcccccagagcaaggacctgatcaaggaggccatcctggacaatgacttcatgaagaacctggagctgagccagatccaggagatcgtggactgcatgtaccctgtggagtatggcaaggacagctgcatcatcaaggagggagatgtgggcagcctggtgtatgtgatggaggatggcaaggtggaggtgaccaaggagggcgtgaagctgtgcaccatgggccctgggaaggtgtttggagagctggccatcctgtacaactgcaccaggacagccaccgtgaagaccctggtgaatgtgaagctgtgggccatcgaccggcagtgcttccagaccatcatgatgaggacaggcctcatcaagcacacagagtacatggagttcctgaagtctgtgcccaccttccagagcctgcctgaggagatcctgagcaagctggctgatgtgctggaggagacccactatgaaaatggagagtacatcatccggcagggcgcccggggggacaccttcttcatcatcagcaagggcaccgtgaatgtgacccgggaggacagccccagtgaagatcctgtgttcctgcggaccctgggcaaaggagactggtttggagagaaggccctgcagggagaagatgtgaggacagccaacgtgattgctgctgaggccgtgacctgcctggtgattgaccgggacagcttcaagcacctgattggaggcctggatgatgtgagcaacaaggcctatgaagatgctgaggccaaggccaagtatgaggccgaggccgccttctttgccaacctgaagctgagtgacttcaacatcatcgacaccctgggcgtgggcggcttcggccgggtggagctggtgcagctgaagtctgaggagagcaagacctttgccatgaagatcctgaagaagaggcacatcgtggacacccggcagcaggagcacatccgctctgagaagcagatcatgcagggcgcccacagcgacttcatcgtgcggctgtaccgcaccttcaaggacagcaagtacctgtacatgctgatggaggcctgcctgggcggggagctgtggaccatcctgcgggaccggggcagctttgaggacagcaccacccgcttctacacagcctgtgtggtggaggcctttgcctacctgcacagcaagggcatcatctacagagacctgaagccagaaaatctcatcctggaccaccggggctacgccaagctggtggactttggatttgccaagaagattggatttgggaagaagacctggaccttctgtggcaccccagaatatgtggcccctgagatcatcctgaacaagggccatgacatctctgctgactactggagcctgggcatcctgatgtatgagctgctgaccggcagcccccccttcagcggccctgaccccatgaagacctacaacatcatcctgcggggcatcgacatgattgagttccccaagaagatcgccaagaatgctgccaacctgatcaagaagctgtgccgggacaaccccagcgagcggctgggcaacctgaagaatggagtgaaggacatccagaagcacaagtggtttgagggcttcaactgggagggcctgaggaagggcaccctgaccccacccatcatccccagcgtggccagccccacagacaccagcaactttgacagcttcccagaagataatgatgagcccccaccagatgacaacagcggctgggacatcgacttctag

SEQ ID NO: 166003 - DNA, 1980 bp, synthetic construct
  misc_feature 1..1980: note = Description of Artificial Sequence: Synthetic coding sequence
  source 1..1980: mol_type = other DNA
atgctgaaggaggagcgcatcaaggagctggagaagaggctgtctgagaaggaggaggagatccaggagctgaagaggaagctgcacaagtgccagagcgtgctgcctgtgcccagcacccacatcggccccaggaccacccgggcccagggcatctctgctgagccccagacctaccgctccttccatgacctgcggcaggccttcaggaagttcaccaagtctgagaggagcaaggacctgatcaaggaggccatcctggacaatgacttcatgaagaacctggagctgagccagatccaggagatcgtggactgcatgtaccctgtggagtatggcaaggacagctgcatcatcaaggagggagatgtgggcagcctggtgtatgtgatggaggatggcaaggtggaggtgaccaaggagggcgtgaagctgtgcaccatgggccctgggaaggtgtttggagagctggccatcctgtacaactgcaccaggacagccaccgtgaagaccctggtgaatgtgaagctgtgggccatcgaccggcagtgcttccagaccatcatgatgaggacaggcctcatcaagcacacagagtacatggagttcctgaagtctgtgcccaccttccagagcctgcctgaggagatcctgagcaagctggctgatgtgctggaggagacccactatgaaaatggagagtacatcatccggcagggcgcccggggggacaccttcttcatcatcagcaaaggaacagtgaatgtgacccgggaggacagccccagcgaggaccccgtcttcctgcggaccctgggcaagggggactggtttggagagaaggccctgcagggagaagatgtgaggacagccaacgtgattgctgctgaggccgtgacctgcctggtgattgaccgggacagcttcaagcacctgattggaggcctggatgatgtgagcaacaaggcctatgaagatgctgaggccaaggccaagtatgaagctgaggccgccttctttgccaacctgaagctgagtgacttcaacatcatcgacaccctgggcgtgggcggcttcggccgggtggagctggtgcagctgaagtctgaggagagcaagacctttgccatgaagatcctgaagaagaggcacatcgtggacacccggcagcaggagcacatccgctctgagaagcagatcatgcagggcgcccacagcgacttcatcgtgcggctgtaccgcaccttcaaggacagcaagtacctgtacatgctgatggaggcctgcctgggcggggagctgtggaccatcctgcgggaccggggcagctttgaggacagcaccacccgcttctacacagcctgtgtggtggaggcctttgcctacctgcacagcaagggcatcatctacagagacctgaagccagagaacctgatcctggaccaccggggctacgccaagctggtggactttggatttgccaagaagattggatttgggaagaagacctggaccttctgtggcaccccagaatatgtggcccctgagatcatcctgaacaagggccatgacatctctgctgactactggagcctgggcatcctgatgtatgagctgctgaccggcagcccccccttcagcggccctgaccccatgaagacctacaacatcatcctgcggggcatcgacatgattgagttccccaagaagatcgccaagaatgctgccaacctgatcaagaagctgtgccgggacaaccccagcgagcggctgggcaacctgaagaatggagtgaaggacatccagaagcacaagtggtttgagggcttcaactgggagggcctgaggaagggcaccctgaccccacccatcatccccagcgtggccagccccacagacaccagcaactttgacagcttccctgaggacaatgatgagcccccaccagatgacaacagcggctgggacatcgacttctag

SEQ ID NO: 166004 - DNA, 2016 bp, synthetic construct
  misc_feature 1..2016: note = Description of Artificial Sequence: Synthetic coding sequence
  source 1..2016: mol_type = other DNA
atgtctgagctggaggaggactttgccaagatcctgatgctgaaggaggagcgcatcaaggagctggagaagaggctgtctgagaaggaggaggagatccaggagctgaagaggaagctgcacaagtgccagagcgtgctgcctgtgcccagcacccacatcggccccaggaccacccgggcccagggcatctctgctgagccccagacctaccgctccttccatgacctgcggcaggccttcaggaagttcaccaagtctgagaggagcaaggacctgatcaaggaggccatcctggacaatgacttcatgaagaacctggagctgagccagatccaggagatcgtggactgcatgtaccctgtggagtatggcaaggacagctgcatcatcaaggagggagatgtgggcagcctggtgtatgtgatggaggatggcaaggtggaggtgaccaaggagggcgtgaagctgtgcaccatgggccctgggaaggtgtttggagagctggccatcctgtacaactgcaccaggacagccaccgtgaagaccctggtgaatgtgaagctgtgggccatcgaccggcagtgcttccagaccatcatgatgaggacaggcctcatcaagcacacagagtacatggagttcctgaagtctgtgcccaccttccagagcctgcctgaggagatcctgagcaagctggctgatgtgctggaggagacccactatgaaaatggagagtacatcatccggcagggcgcccggggggacaccttcttcatcatcagcaaaggaacagtgaatgtgacccgggaggacagccccagcgaggaccccgtcttcctgcggaccctgggcaagggggactggtttggagagaaggccctgcagggagaagatgtgaggacagccaacgtgattgctgctgaggccgtgacctgcctggtgattgaccgggacagcttcaagcacctgattggaggcctggatgatgtgagcaacaaggcctatgaagatgctgaggccaaggccaagtatgaagctgaggccgccttctttgccaacctgaagctgagtgacttcaacatcatcgacaccctgggcgtgggcggcttcggccgggtggagctggtgcagctgaagtctgaggagagcaagacctttgccatgaagatcctgaagaagaggcacatcgtggacacccggcagcaggagcacatccgctctgagaagcagatcatgcagggcgcccacagcgacttcatcgtgcggctgtaccgcaccttcaaggacagcaagtacctgtacatgctgatggaggcctgcctgggcggggagctgtggaccatcctgcgggaccggggcagctttgaggacagcaccacccgcttctacacagcctgtgtggtggaggcctttgcctacctgcacagcaagggcatcatctacagagacctgaagccagagaacctgatcctggaccaccggggctacgccaagctggtggactttggatttgccaagaagattggatttgggaagaagacctggaccttctgtggcaccccagaatatgtggcccctgagatcatcctgaacaagggccatgacatctctgctgactactggagcctgggcatcctgatgtatgagctgctgaccggcagcccccccttcagcggccctgaccccatgaagacctacaacatcatcctgcggggcatcgacatgattgagttccccaagaagatcgccaagaatgctgccaacctgatcaagaagctgtgccgggacaaccccagcgagcggctgggcaacctgaagaatggagtgaaggacatccagaagcacaagtggtttgagggcttcaactgggagggcctgaggaagggcaccctgaccccacccatcatccccagcgtggccagccccacagacaccagcaactttgacagcttccctgaggacaatgatgagcccccaccagatgacaacagcggctgggacatcgacttctag

SEQ ID NO: 166005 - DNA, 2289 bp, synthetic construct
  misc_feature 1..2289: note = Description of Artificial Sequence: Synthetic coding sequence
  source 1..2289: mol_type = other DNA
atgggaaatggatctgtgaagcccaagcacagcaagcacccagatggccacagcggcaacctgaccacagatgccctgaggaacaaggtgacagagctggagcgggagctgcggaggaaggatgctgagatccaggagcgggagtaccacctgaaggagctgcgggagcagctgagcaagcagacagtggccatcgccgagctgacagaggagctgcagaacaagtgcatccagctgaacaagctgcaggatgtggtgcacatgcagggcggcagccccctgcaggccagcccagacaaggtgcccctggaggtgcacaggaagaccagcggcctggtgtccctgcacagccggcggggggccaaggccggcgtgtctgctgagcccaccaccaggacctatgacctgaacaagcccccagagttctcctttgagaaggcccgggtgaggaaggacagcagcgagaagaagctgatcacagatgccctgaacaagaaccagttcctgaagaggctggacccccagcagatcaaggacatggtggagtgcatgtatggaagaaactaccagcagggcagctacatcatcaagcagggcgagcccggcaaccacatctttgtgctggccgagggccgcctggaggtgttccagggcgagaagctgctgagcagcatccccatgtggaccacctttggagagctggccatcctgtacaactgcaccaggacagcctctgtgaaggccatcaccaacgtgaagacctgggccctggaccgggaggtgttccagaacatcatgagaagaacagcccaggccagagatgagcagtacagaaacttcctgcggtctgtgtccctgctgaagaacctgcctgaggacaagctgaccaagatcatcgactgcctggaggtggagtactatgacaagggggactacatcatccgggagggggaggagggcagcaccttcttcatcctggccaagggcaaggtgaaggtgacccagagcacagagggccatgaccagccccagctgatcaagaccctgcagaagggggagtactttggagagaaggccctgatcagtgatgatgtgcgcagcgccaacatcatcgccgaggagaatgatgtggcctgcctggtgattgaccgggagaccttcaaccagacagtgggcacctttgaggagctgcagaagtacctggagggctacgtggccaacctgaacagagatgatgagaagagacatgccaagaggtccatgagcaactggaagctgagcaaggccctgagcctggagatgatccagctgaaggagaaggtggcccgcttcagcagcagcagccccttccagaacctggagatcatcgccaccctgggcgtgggcggcttcggccgggtggagctggtgaaggtgaagaatgaaaatgtggcctttgccatgaagtgcatcaggaagaagcacatcgtggacaccaagcagcaggagcacgtgtacagcgagaagaggatcctggaggagctgtgcagccccttcatcgtgaagctgtaccgcaccttcaaggacaacaagtatgtgtacatgctgctggaggcctgcctgggcggggagctgtggagcatcctgcgggaccggggcagctttgatgagcccaccagcaagttctgtgtggcctgtgtgacagaggcctttgactacctgcaccggctgggcatcatctacagagacctgaagccagagaacctgatcctggatgctgagggctacctgaagctggtggactttggatttgccaagaagattggcagcggccagaagacctggaccttctgtggcaccccagaatatgtggcccctgaggtgatcctgaacaagggccatgacttctctgtggacttctggagcctgggcatcctggtgtatgagctgctgactggaaacccccccttctctggagtggaccagatgatgacctacaacctgatcctgaagggcatcgagaagatggacttccccaggaagatcaccaggaggcctgaggacctgatccggcggctgtgccggcagaaccccacagagcggctgggcaacctgaagaatggcatcaatgacatcaagaagcaccgctggctgaatggcttcaactgggagggcctgaaggcccggagcctgcccagccccctgcagcgggagctgaagggccccatcgaccacagctactttgacaagtacccacctgagaagggcatgcccccagatgagctgagcggctgggacaaggacttctag

SEQ ID NO: 166006 - DNA, 2289 bp, synthetic construct; identical to SEQ ID NO: 166005
  misc_feature 1..2289: note = Description of Artificial Sequence: Synthetic coding sequence
  source 1..2289: mol_type = other DNA

SEQ ID NO: 166007 - DNA, 2202 bp, synthetic construct
  misc_feature 1..2202: note = Description of Artificial Sequence: Synthetic coding sequence
  source 1..2202: mol_type = other DNA
atgggaaatggatctgtgaagcccaagcacagcaagcacccagatggccacagcggcaacctgaccacagatgccctgaggaacaaggtgacagagctggagcgggagctgcggaggaaggatgctgagatccaggagcgggagtaccacctgaaggagctgcgggagcagctgagcaagcagacagtggccatcgccgagctgacagaggagctgcagaacaagtgcatccagctgaacaagctgcaggatgtggtgcacatgcagggcggcagccccctgcaggccagcccagacaaggtgcccctggaggtgcacaggaagaccagcggcctggtgtccctgcacagccggcggggggccaaggccggcgtgtctgctgagcccaccaccaggacctatgacctgaacaagcccccagagttctcctttgagaaggcccgggtgaggaaggacagcagcgagaagaagctgatcacagatgccctgaacaagaaccagttcctgaagaggctggacccccagcagatcaaggacatggtggagtgcatgtatggaagaaactaccagcagggcagctacatcatcaagcagggcgagcccggcaaccacatctttgtgctggccgagggccgcctggaggtgttccagggcgagaagctgctgagcagcatccccatgtggaccacctttggagagctggccatcctgtacaactgcaccaggacagcctctgtgaaggccatcaccaacgtgaagacctgggccctggaccgggaggtgttccagaacatcatgagaagaacagcccaggccagagatgagcagtacagaaacttcctgcggtctgtgtccctgctgaagaacctgcctgaggacaagctgaccaagatcatcgactgcctggaggtggagtactatgacaagggggactacatcatccgggagggggaggagggcagcaccttcttcatcctggccaagggcaaggtgaaggtgacccagagcacagagggccatgaccagccccagctgatcaagaccctgcagaagggggagtactttggagagaaggccctgatcagtgatgatgtgcgcagcgccaacatcatcgccgaggagaatgatgtggcctgcctggtgattgaccgggagaccttcaaccagacagtgggcacctttgaggagctgcagaagtacctggagggctacgtggccaacctgaacagagatgatgagaagagacatgccaagaggtccatgagcaactggaagctgagcaaggccctgagcctggagatgatccagctgaaggagaaggtgaaggtgaagaatgaaaatgtggcctttgccatgaagtgcatcaggaagaagcacatcgtggacaccaagcagcaggagcacgtgtacagcgagaagaggatcctggaggagctgtgcagccccttcatcgtgaagctgtaccgcaccttcaaggacaacaagtatgtgtacatgctgctggaggcctgcctgggcggggagctgtggagcatcctgcgggaccggggcagctttgatgagcccaccagcaagttctgtgtggcctgtgtgacagaggcctttgactacctgcaccggctgggcatcatctacagagacctgaagccagaaaatctcatcctggatgctgagggctacctgaagctggtggactttggatttgccaagaagattggcagcggccagaagacctggaccttctgtggcaccccagaatatgtggcccctgaggtgatcctgaacaagggccatgacttctctgtggacttctggagcctgggcatcctggtgtatgagctgctgaccggcaacccccccttcagcggcgtggaccagatgatgacctacaacctgatcctgaagggcatcgagaagatggacttccccaggaagatcacccggcggccagaagatctcatccggcggctgtgccggcagaaccccacagagcggctgggcaacctgaagaatggcatcaatgacatcaagaagcaccgctggctgaatggcttcaactgggagggcctgaaggcccggagcctgcccagccccctgcagcgggagctgaagggccccatcgaccacagctactttgacaagtacccacctgagaagggcatgcccccagatgagctgagcggctgggacaaggacttctag

SEQ ID NO: 166008 - DNA, 1029 bp, synthetic construct
  misc_feature 1..1029: note = Description of Artificial Sequence: Synthetic coding sequence
  source 1..1029: mol_type = other DNA
atgagcaactggaagctgagcaaggccctgagcctggagatgatccagctgaaggagaaggtggcccgcttcagcagcagcagccccttccagaacctggagatcatcgccaccctgggcgtgggcggcttcggccgggtggagctggtgaaggtgaagaatgaaaatgtggcctttgccatgaagtgcatcaggaagaagcacatcgtggacaccaagcagcaggagcacgtgtacagcgagaagaggatcctggaggagctgtgcagccccttcatcgtgaagctgtaccgcaccttcaaggacaacaagtatgtgtacatgctgctggaggcctgcctgggcggggagctgtggagcatcctgcgggaccggggcagctttgatgagcccaccagcaagttctgtgtggcctgtgtgacagaggcctttgactacctgcaccggctgggcatcatctacagagacctgaagccagagaacctgatcctggatgctgagggctacctgaagctggtggactttggatttgccaagaagattggcagcggccagaagacctggaccttctgtggcaccccagaatatgtggcccctgaggtgatcctgaacaagggccatgacttctctgtggacttctggagcctgggcatcctggtgtatgagctgctgactggaaacccccccttctctggagtggaccagatgatgacctacaacctgatcctgaagggcatcgagaagatggacttccccaggaagatcaccaggaggcctgaggacctgatccggcggctgtgccggcagaaccccacagagcggctgggcaacctgaagaatggcatcaatgacatcaagaagcaccgctggctgaatggcttcaactgggagggcctgaaggcccggagcctgcccagccccctgcagcgggagctgaagggccccatcgaccacagctactttgacaagtacccacctgagaagggcatgcccccagatgagctgagcggctgggacaaggacttctag

SEQ ID NO: 166009 - DNA, 942 bp, synthetic construct
  misc_feature 1..942: note = Description of Artificial Sequence: Synthetic coding sequence
  source 1..942: mol_type = other DNA
atgagccagagccgccacagagctgaggccccacccctggagcgggaggacagcggcaccttcagcctgggcaagatgatcacagccaagccaggcaagacccccatccaggtgctgcacgagtatggcatgaagaccaagaacatccctgtgtatgaatgtgagaggagtgatgtgcagatccacgtgcccaccttcaccttccgggtgacagtgggggacatcacctgcaccggggagggcaccagcaagaagctggccaagcacagagctgctgaggccgccatcaacatcctgaaggccaatgccagcatctgctttgctgtgcctgaccccctgatgccagaccccagcaagcagcccaagaaccagctgaaccccatcggcagcctgcaggagctggccatccaccacggctggaggctgcctgagtacaccctgagccaggagggcggccctgcccacaagcgggagtacaccaccatctgccgcctggagagcttcatggagactggaaaaggagccagcaagaagcaggccaagagaaatgctgctgagaagttcctggccaagttcagcaacatcagccctgagaaccacatcagcctgaccaacgtggtgggccacagcctgggctgcacctggcacagcctgaggaacagccctggagagaagatcaacctgctgaagaggagcctgctgagcatccccaacacagactacatccagctgctgtctgagatcgccaaggagcagggcttcaacatcacctacctggacattgatgagctgagcgccaacggccagtaccagtgcctggccgagctgagcaccagccccatcaccgtgtgccacggcagcggcatcagctgtggaaatgcccagagtgatgctgcccacaatgccctgcagtacctgaagatcatcgccgagaggaagtag

SEQ ID NO: 166010 - DNA, 909 bp, synthetic construct
  misc_feature 1..909: note = Description of Artificial Sequence: Synthetic coding sequence
  source 1..909: mol_type = other DNA
atgcagagcacccccttctgtggcttctgcagcctgggcaagatgatcacagccaagccaggcaagacccccatccaggtgctgcatgaatatggcatgaagaccaagaacatccctgtgtatgaatgtgagaggagtgatgtgcagatccacgtgcccaccttcaccttccgggtgacagtgggggacatcacctgcacaggagagggcaccagcaagaagctggccaagcacagagctgctgaggccgccatcaacatcctgaaggccaatgccagcatctgctttgctgtgcctgaccccctgatgccagaccccagcaagcagcccaagaaccagctgaaccccatcggcagcctgcaggagctggccatccaccacggctggaggctgcctgagtacaccctgagccaggagggcggccctgcccacaagcgggagtacaccaccatctgccgcctggagagcttcatggagaccgggaagggggccagcaagaagcaggccaagagaaatgctgctgagaagttcctggccaagttcagcaacatcagccctgagaaccacatcagcctgaccaacgtggtgggccacagcctgggctgcacctggcacagcctgaggaacagccctggagagaagatcaacctgctgaagaggagcctgctgagcatccccaacacagactacatccagctgctgtctgaaattgccaaggagcagggcttcaacatcacctacctggacattgatgagctgagcgccaacggccagtaccagtgcctggccgagctgagcaccagccccatcaccgtgtgccacggcagcggcatcagctgtggaaatgcccagagtgatgctgcccacaatgccctgcagtacctgaagatcatcgccgagaggaagtag

SEQ ID NO: 166011 - DNA, 603 bp, synthetic construct
  misc_feature 1..603: note = Description of Artificial Sequence: Synthetic coding sequence
  source 1..603: mol_type = other DNA
atgccagaccccagcaagcagcccaagaaccagctgaaccccatcggcagcctgcaggagctggccatccaccacggctggaggctgcctgagtacaccctgagccaggagggcggccctgcccacaagcgggagtacaccaccatctgccgcctggagagcttcatggagaccgggaagggggccagcaagaagcaggccaagagaaatgctgctgagaagttcctggccaagttcagcaacatcagccctgagaaccacatcagcctgaccaacgtggtgggccacagcctgggctgcacctggcacagcctgaggaacagccctggagagaagatcaacctgctgaagaggagcctgctgagcatccccaacacagactacatccagctgctgtctgaaattgccaaggagcagggcttcaacatcacctacctggacattgatgagctgagcgccaacggccagtaccagtgcctggccgagctgagcaccagccccatcaccgtgtgccacggcagcggcatcagctgtggaaatgcccagagtgatgctgcccacaatgccctgcagtacctgaagatcatcgccgagaggaagtag

SEQ ID NO: 166012 - DNA, 867 bp, synthetic construct
  misc_feature 1..867: note = Description of Artificial Sequence: Synthetic coding sequence
  source 1..867: mol_type = other DNA
atgatcacagccaagccaggcaagacccccatccaggtgctgcatgaatatggcatgaagaccaagaacatccctgtgtatgaatgtgagaggagtgatgtgcagatccacgtgcccaccttcaccttccgggtgacagtgggggacatcacctgcacaggagagggcaccagcaagaagctggccaagcacagagctgctgaggccgccatcaacatcctgaaggccaatgccagcatctgctttgctgtgcctgaccccctgatgccagaccccagcaagcagcccaagaaccagctgaaccccatcggcagcctgcaggagctggccatccaccacggctggaggctgcctgagtacaccctgagccaggagggcggccctgcccacaagcgggagtacaccaccatctgccgcctggagagcttcatggagaccgggaagggggccagcaagaagcaggccaagagaaatgctgctgagaagttcctggccaagttcagcaacatcagccctgagaaccacatcagcctgaccaacgtggtgggccacagcctgggctgcacctggcacagcctgaggaacagccctggagagaagatcaacctgctgaagaggagcctgctgagcatccccaacacagactacatccagctgctgtctgaaattgccaaggagcagggcttcaacatcacctacctggacattgatgagctgagcgccaacggccagtaccagtgcctggccgagctgagcaccagccccatcaccgtgtgccacggcagcggcatcagctgtggaaatgcccagagtgatgctgcccacaatgccctgcagtacctgaagatcatcgccgagaggaagtag

SEQ ID NO: 166013 - DNA, 1077 bp, synthetic construct
  misc_feature 1..1077: note = Description of Artificial Sequence: Synthetic coding sequence
  source 1..1077: mol_type = other DNA
atggaggcccctggcctggcccaggccgctgctgctgagagtgacagcaggaaggtggccgaggagaccccagatggagccccagccctgtgccccagccctgaggccctgagccctgagccccctgtgtacagcctgcaggactttgacaccctggccaccgtgggcaccggcaccttcggccgggtgcacctggtgaaggagaagacagccaagcacttctttgccctgaaggtgatgagcatcccagatgtgatccggctgaagcaggagcagcacgtgcacaatgagaagtctgtgctgaaggaggtgagccaccccttcctgatccgcctcttctggacctggcatgatgagcgcttcctgtacatgctgatggagtatgtgcctggaggagagctgttctcctacctgaggaacagaggccgcttcagcagcaccaccggcctcttctacagcgctgagatcatctgtgccatcgagtacctgcacagcaaggagatcgtgtacagagacctgaagccagagaacatcctgctggacagagatggccacatcaagctgacagactttggatttgccaagaagctggtggacaggacctggaccctgtgtggcaccccagagtacctggcccctgaggtgatccagagcaaaggacatggccgggctgtggactggtgggccctgggcatcctgatctttgagatgctgagcggcttcccccccttctttgatgacaaccccttcggcatctaccagaagatcctggccggcaagattgacttccccaggcacctggacttccacgtgaaggacctgatcaagaagctgctggtggtggacaggacccggcggctgggcaacatgaagaatggagccaatgatgtgaagcaccaccgctggttccgctctgtggactgggaggccgtgccccagaggaagctgaagccacccatcgtgcccaagattgctggagatggagacaccagcaactttgagacctacccagaaaatgactgggacacagctgcccctgtgccccagaaggacctggagatcttcaagaacttctag

SEQ ID NO: 166014 - DNA, 1983 bp, synthetic construct
  misc_feature 1..1983: note = Description of Artificial Sequence: Synthetic coding sequence
  source 1..1983: mol_type = other DNA
atggatgactggaagcccagccccctcatcaagccctttggagccaggaagaagaggtcctggtacctgacctggaagtacaagctgaccaaccagagggccctgcggcgcttctgccagacaggagctgtgctcttcctgctggtgaccgtcatcgtgaacatcaagctgatcctggacacccggcgggccatcagcgaggccaatgaagatcctgagcctgagcaggactatgatgaggccctgggccgcctggagcccccaagaagaagaggcagcggcccccggcgggtgctggatgtggaggtgtacagcagccgcagcaaggtgtatgtggccgtggatggcaccaccgtgctggaggatgaggcccgggagcagggccggggcatccacgtgattgtgctgaaccaggccaccggccacgtgatggccaagagggtgtttgacacctacagcccccatgaagatgaggccatggtgctcttcctgaacatggtggcccctggccgggtgctgatctgcaccgtgaaggatgagggcagcttccacctgaaggacacagccaaggccctgctgcggagcctgggcagccaggccggccctgccctgggctggagggacacctgggcctttgtgggcaggaagggcggccctgtgtttggagagaagcacagcaagagccctgccctgagctcctggggagaccctgtgctgctgaagacagatgtgcccctgagcagcgctgaggaggccgagtgccactgggccgacacagagctgaacagaagaagaagacgcttctgcagcaaggtggagggctacggctctgtgtgcagctgcaaggaccccacccccatcgagttctccccagaccccctgcctgacaacaaggtgctgaatgtgcctgtggccgtgattgctggcaaccggcccaactacctgtacaggatgctgcggagcctgctgagcgcccagggcgtgagcccccagatgatcaccgtcttcattgatggctactatgaggagcccatggatgtggtggccctgtttggcctgcggggcatccagcacacccccatcagcatcaagaatgcccgggtgtcccagcactacaaggccagcctgacagccaccttcaacctcttccctgaggccaagtttgctgtggtgctggaggaggacctggacattgctgtggacttcttctccttcctgagccagagcatccacctgctggaggaggatgacagcctgtactgcatcagcgcctggaatgaccagggctatgagcacacagcagaagatcctgccctgctgtacagagtggagaccatgcctggcctgggctgggtgctgcggcgcagcctgtacaaggaggagctggagcccaagtggcccaccccagagaagctgtgggactgggacatgtggatgaggatgcctgagcagaggcggggccgggagtgcatcatcccagatgtgagccgcagctaccactttggaattgtgggcctgaacatgaatggctacttccacgaggcctacttcaagaagcacaagttcaacacagtgcctggggtgcagctgagaaatgtggacagcctgaagaaggaggcctatgaggtggaggtgcaccggctgctgtctgaggccgaggtgctggaccacagcaagaacccctgtgaagattccttcctgcctgacacagagggccacacctacgtggccttcatccgcatggagaaggatgatgacttcaccacctggacccagctggccaagtgcctgcacatctgggacctggatgtgcggggcaaccaccggggcctgtggaggctcttcaggaagaagaaccacttcctgatggtgggcgtgcctgccagcccctacagcgtgaagaagccacccagcgtgacccccatcttcctggagcccccacccaaggaggagggcgcccctggggcccctgagcagacctag

SEQ ID NO: 166015 - DNA, 2247 bp, synthetic construct
  misc_feature 1..2247: note = Description of Artificial Sequence: Synthetic coding sequence
  source 1..2247: mol_type = other DNA
atggatgactggaagcccagccccctcatcaagccctttggagccaggaagaagaggtcctggtacctgacctggaagtacaagctgaccaaccagagggccctgcggcgcttctgccagacaggagctgtgctcttcctgctggtgaccgtcatcgtgaacatcaagctgatcctggacacccggcgggccatcagcgaggccaatgaagatcctgagcctgagcaggactatgatgaggccctgggccgcctggagcccccaagaagaagaggcagcggcccccggcgggtgctggatgtggaggtgtacagcagccgcagcaaggtgtatgtggccgtggatggcaccaccgtgctggaggatgaggcccgggagcagggccggggcatccacgtgattgtgctgaaccaggccaccggccacgtgatggccaagagggtgtttgacacctacagcccccatgaagatgaggccatggtgctcttcctgaacatggtggcccctggccgggtgctgatctgcaccgtgaaggatgagggcagcttccacctgaaggacacagccaaggccctgctgcggagcctgggcagccaggccggccctgccctgggctggagggacacctgggcctttgtgggcaggaagggcggccctgtgtttggagagaagcacagcaagagccctgccctgagctcctggggagaccctgtgctgctgaagacagatgtgcccctgagcagcgctgaggaggccgagtgccactgggccgacacagagctgaacagaagaagaagacgcttctgcagcaaggtggagggctacggctctgtgtgcagctgcaaggaccccacccccatcgagttctccccagaccccctgcctgacaacaaggtgctgaatgtgcctgtggccgtgattgctggcaaccggcccaactacctgtacaggatgctgcggagcctgctgagcgcccagggcgtgagcccccagatgatcaccgtcttcattgatggctactatgaggagcccatggatgtggtggccctgtttggcctgcggggcatccagcacacccccatcagcatcaagaatgcccgggtgtcccagcactacaaggccagcctgacagccaccttcaacctcttccctgaggccaagtttgctgtggtgctggaggaggacctggacattgctgtggacttcttctccttcctgagccagagcatccacctgctggaggaggatgacagcctgtactgcatcagcgcctggaatgaccagggctatgagcacacagcagaagatcctgccctgctgtacagagtggagaccatgcctggcctgggctgggtgctgcggcgcagcctgtacaaggaggagctggagcccaagtggcccaccccagagaagctgtgggactgggacatgtggatgaggatgcctgagcagaggcggggccgggagtgcatcatcccagatgtgagccgcagctaccactttggaattgtgggcctgaacatgaatggctacttccacgaggcctacttcaagaagcacaagttcaacacagtgcctggggtgcagctgagaaatgtggacagcctgaagaaggaggcctatgaggtggaggtgcaccggctgctgtctgaggccgaggtgctggaccacagcaagaacccctgtgaagattccttcctgcctgacacagagggccacacctacgtggccttcatccgcatggagaaggatgatgacttcaccacctggacccagctggccaagtgcctgcacatctgggacctggatgtgcggggcaaccaccggggcctgtggaggctcttcaggaagaagaaccacttcctgatgtctgaggaggccaccctgagccaccccaacttccctggggccacccccaagggcggcggcagccccaggagccccaggacagacatgaggcctcctcctggcccctgtggggccggccctggcagcgagagcaacctcttcatcgactgcccagagggcctggagaaccggcccaacctggagggcctggacttcttcctgggctggaatgctgccctgcgggtgggcctggccctgacccaggagacagctgtgcccaacccctggacaggccctgctggggcccacatgctgacccagacccacagcgagaccctgcggcactggaccaggcctcccctgagcctgctgtttgtgcagatcagcaaggccggctag

SEQ ID NO: 166016 - DNA, 2247 bp, synthetic construct; identical to SEQ ID NO: 166015
  misc_feature 1..2247: note = Description of Artificial Sequence: Synthetic coding sequence
  source 1..2247: mol_type = other DNA

SEQ ID NO: 166017 - DNA, 603 bp, synthetic construct
  misc_feature 1..603: note = Description of Artificial Sequence: Synthetic coding sequence
  source 1..603: mol_type = other DNA
atggatgactggaagcccagccccctcatcaagccctttggagccaggaagaagaggtcctggtacctgacctggaagtacaagctgaccaaccagagggccctgcggcgcttctgccagacaggagctgtgctcttcctgctggtgaccgtcatcgtgaacatcaagctgatcctggacacccggcgggccatcagcgaggccaatgaagatcctgagcctgagcaggactatgatgaggccctgggccgcctggagcccccaagaagaagaggcagcggcccccggcgggtgctggatgtggaggtgtacagcagccgcagcaaggtgtatgtggccgtggatggcaccaccgtgctggaggatgaggcccgggagcagggccggggcatccacgtgattgtgctgaaccaggccaccggccacgtgatggccaagagggtgtttgacacctacagcccccatgaagatgaggccatggtgctcttcctgaacatggtggcccctggccgggtgctgatctgcaccgtgaaggtgctgagcagcggcaggaacatcctgaaccacctgcccagcctgcccggcggcacccagagctgctag

SEQ ID NO: 166018 - DNA, 1917 bp, synthetic construct
  misc_feature 1..1917: note = Description of Artificial Sequence: Synthetic coding sequence
  source 1..1917: mol_type = other DNA
atggagggcaccaaggagatcaaggtgagcaacagacgcatccaggagcactggacaggagctgtgctcttcctgctggtgaccgtcatcgtgaacatcaagctgatcctggacacccggcgggccatcagcgaggccaatgaagatcctgagcctgagcaggactatgatgaggccctgggccgcctggagcccccaagaagaagaggcagcggcccccggcgggtgctggatgtggaggtgtacagcagccgcagcaaggtgtatgtggccgtggatggcaccaccgtgctggaggatgaggcccgggagcagggccggggcatccacgtgattgtgctgaaccaggccaccggccacgtgatggccaagagggtgtttgacacctacagcccccatgaagatgaggccatggtgctcttcctgaacatggtggcccctggccgggtgctgatctgcaccgtgaaggatgagggcagcttccacctgaaggacacagccaaggccctgctgcggagcctgggcagccaggccggccctgccctgggctggagggacacctgggcctttgtgggcaggaagggcggccctgtgtttggagagaagcacagcaagagccctgccctgagctcctggggagaccctgtgctgctgaagacagatgtgcccctgagcagcgctgaggaggccgagtgccactgggccgacacagagctgaacagaagaagaagacgcttctgcagcaaggtggagggctacggctctgtgtgcagctgcaaggaccccacccccatcgagttctccccagaccccctgcctgacaacaaggtgctgaatgtgcctgtggccgtgattgctggcaaccggcccaactacctgtacaggatgctgcggagcctgctgagcgcccagggcgtgagcccccagatgatcaccgtcttcattgatggctactatgaggagcccatggatgtggtggccctgtttggcctgcggggcatccagcacacccccatcagcatcaagaatgcccgggtgtcccagcactacaaggccagcctgacagccaccttcaacctcttccctgaggccaagtttgctgtggtgctggaggaggacctggacattgctgtggacttcttctccttcctgagccagagcatccacctgctggaggaggatgacagcctgtactgcatcagcgcctggaatgaccagggctatgagcacacagcagaagatcctgccctgctgtacagagtggagaccatgcctggcctgggctgggtgctgcggcgcagcctgtacaaggaggagctggagcccaagtggcccaccccagagaagctgtgggactgggacatgtggatgaggatgcctgagcagaggcggggccgggagtgcatcatcccagatgtgagccgcagctaccactttggaattgtgggcctgaacatgaatggctacttccacgaggcctacttcaagaagcacaagttcaacacagtgcctggggtgcagctgagaaatgtggacagcctgaagaaggaggcctatgaggtggaggtgcaccggctgctgtctgaggccgaggtgctggaccacagcaagaacccctgtgaagattccttcctgcctgacacagagggccacacctacgtggccttcatccgcatggagaaggatgatgacttcaccacctggacccagctggccaagtgcctgcacatctgggacctggatgtgcggggcaaccaccggggcctgtggaggctcttcaggaagaagaaccacttcctgatggtgggcgtgcctgccagcccctacagcgtgaagaagccacccagcgtgacccccatcttcctggagcccccacccaaggaggagggcgcccctggggcccctgagcagacctag

SEQ ID NO: 166019 - DNA, 861 bp, synthetic construct
  misc_feature 1..861: note = Description of Artificial Sequence: Synthetic coding sequence
  source 1..861: mol_type = other DNA
atgtctgacagcgagaagctgaacctggacagcatcatcggccgcctgctggagggggacatccacggccagtactatgacctgctgcggctgtttgaatatggaggcttccccccagagagcaactacctgttcctgggggactatgtggaccggggcaagcagagcctggagaccatctgcctgctgctggcctacaagatcaagtacccagagaacttcttcctgctgcggggcaaccatgaatgtgccagcatcaaccgcatctacggcttctatgatgagtgcaagaggcgctacaacatcaagctgtggaagaccttcacagactgcttcaactgcctgcccatcgccgccatcgtggatgagaagatcttctgctgccacggcggcctgagcccagacctgcagagcatggagcagatccgccgcatcatgaggcccacagatgtgcctgaccagggcctgctgtgtgacctgctgtggagcgaccctgacaaggatgtgcagggctggggagaaaatgaccggggcgtgtccttcacctttggagctgaggtggtggccaagttcctgcacaagcatgacctggacctgatctgccgggcccaccaggtggtggaggatggctatgagttctttgccaagaggcagctggtgaccctcttcagcgcccccaactactgtggggagtttgacaatgctggggccatgatgtctgtggatgagaccctgatgtgcagcttccagatcctgaagccagctgacaagaacaagggcaagtatggccagttcagcggcctgaaccctgggggccggcccatcaccccaccaagaaattctgccaaggccaagaagtag

SEQ ID NO: 166020 - DNA, 1548 bp, synthetic construct
  misc_feature 1..1548: note = Description of Artificial Sequence: Synthetic coding sequence
  source 1..1548: mol_type = other DNA
atggccgagctggagcacctgggcggcaagagagctgagagcgccaggatgagaagagctgagcagctgcggcgctggaggggcagcctgacagagcaggagcctgctgagaggagaggagctggccggcagcccctgacccggcggggcagcccccgggtgcgctttgaagatggagctgtgttcctggccgcctgcagcagcggggacacagatgaggtgaggaagctgctggcccggggagctgacatcaacacagtgaatgtggatggcctgacagccctgcaccaggcctgcattgatgagaacctggacatggtgaagttcctggtggagaacagagccaacgtgaaccagcaggacaatgaaggctggacccccctgcacgccgccgccagctgtggctacctgaacattgctgagtacttcatcaaccacggggcctctgtgggcatcgtgaacagcgagggggaggtgcccagcgacctggccgaggagcccgccatgaaggacctgctgctggagcaggtgaagaagcagggcgtggacctggagcagagcaggaaggaggaggagcagcagatgctgcaggatgcccggcagtggctgaacagcggcaagattgaagatgtgcggcaggcccggagcggggccacagccctgcacgtggccgccgccaagggctacagcgaggtgctgcggctgctgatccaggccggctatgagctgaatgtgcaggactatgatggctggacccccctgcacgccgccgcccactggggcgtgaaggaggcctgcagcatcctggccgaggccctgtgtgacatggacatccggaacaagctgggccagaccccatttgatgtggctgatgagggcctggtggagcacctggagctgctgcagaagaagcagaatgtgctgcggtctgagaaggagaccaggaacaagctgattgaaagtgacctgaacagcaagatccagagcggcttcttcaagaacaaggagaagatgctgtatgaggaggagacccccaagagccaggagatggaggaggagaacaaggagagcagcagcagcagcagcgaggaggaggagggggaggatgaggccagcgagagcgagacagagaaggaggccgacaagaagccagaggcctttgtgaaccacagcaacagcgagagcaagagcagcatcacagagcagatcccagccccagcccagaacaccttcagcgccagcagcgcccggcgcttcagcagcggcctcttcaacaagccagaggagcccaaggatgagagccccagctcctggaggctgggcctgaggaagacaggcagccacaacatgctgtctgaggtggccaacagccgggagcccatccgggaccggggcagcagcatctaccgcagcagcagcagcccccgcatcagcgccctgctggacaacaaggacaaggtgcagtttggccgggtgtggggcaacagcaaggctgtgttcttcttccacgagaacagcatcctgggcaccaatgaaaacatcttctag

SEQ ID NO: 166021 - DNA, 4125 bp, synthetic construct
  misc_feature 1..4125: note = Description of Artificial Sequence: Synthetic coding sequence
  source 1..4125: mol_type = other DNA
atgctgaagacagagagcagtggagagaggaccaccctgcggagcgccagcccccacagaaatgcctacagaacagagttccaggccctgaagagcacctttgacaagcccaagagtgatggagagcagaagaccaaggagggggagggcagccagcagagccggggcaggaaatatggcagcaatgtgaaccgcatcaagaacctcttcatgcagatgggcatggagcccaatgaaaatgctgctgtgattgccaagacccggggcaagggcggccacagcagcccccagaggaggatgaagcccaaggagttcctggagaagacagatggctctgtggtgaagctggagagctctgtgtctgagcgcatcagcagatttgacaccatgtatgatggccccagctacagcaagttcacagagaccaggaagatgtttgagaggtctgtgcatgaaagtggccagaacaaccgctacagccccaagaaggagaaggccggcggcagcgagccccaggatgagtggggcggcagcaagagcaacagaggcagcacagacagcctggacagcctgagcagcaggacagaagctgtgagccccaccgtgtcccagctgtctgctgtgtttgagaacacagacagccccagcgccatcatcagcgagaaggccgagaacaatgagtacagcgtgacaggccactaccccctgaacctgcccagcgtgacagtgaccaacctggacaccttcggccacctgaaggacagcaacagctggccacccagcaacaagaggggcgtggacacagaagatgcccacaagagcaatgccacccctgtgcctgaggtggccagcaagagcaccagcctggccagcatccctggagaggagatccagcagagcaaggagcctgaggacagcaccagcaaccagcagaccccagacagcattgacaaggatggccctgaggagccctgtgccgagagcaaggccatgcccaagtctgagatccccagcccccagagccagctgctggaggatgctgaggccaacctggtgggccgggaggccgccaagcagcagaggaaggagctggccggcggggacttcaccagcccagatgccagcgccagcagctgtgggaaggaggtgcctgaggacagcaacaactttgatggcagccacgtgtacatgcacagcgactacaacgtgtacagagtgcgcagccgctacaacagcgactggggcgagactggaacagagcaggatgaggaggaggacagtgatgaaaattcctactaccagcctgacatggagtacagcgagatcgtgggcctgcctgaggaggaggagatcccagccaacaggaagatcaagttcagcagcgcccccatcaaggtgttcaacacctacagcaatgaagattatgacagaagaaatgatgaggtggaccctgtggccgccagcgcagaatatgagctggagaagagggtggagaagctggagctgtttcctgtggagctggagaaggatgaagatggcctgggcatcagcatcatcggcatgggcgtgggcgcagatgctggcctggagaagctgggcatctttgtgaagacagtgacagagggcggggccgcccagagagatggccgcatccaggtgaatgaccagatcgtggaggtggatggcatcagcctggtgggcgtgacccagaactttgctgccaccgtgctgaggaacaccaagggaaatgtgcgcttcgtcatcggccgggagaagccaggccaggtgtctgaggtggcccagctgatcagccagaccctggagcaggagcggcggcagcgggagctgctggagcagcactacgcccagtatgatgctgatgatgatgagaacacagtggccgagctgcagggcatgagcggcaactgcaacaacaacaacaactacttcctgaagacaggagaatatgccacagatgaggaggaggatgaggtgggccctgtgctgcccggcagtgacatggccatcgaggtgtttgagctgcctgaaaatgaagacatgttcagccccagcgagctggacaccagcaagctgagccacaagttcaaggagctgcagatcaagcatgctgtgacagaggccgagatccagaagctgaagaccaagctgcaggccgcagaaaatgagaaggtgcgctgggagctggagaagacccagctgcagcagaacatcgaggagaacaaggagaggatgctgaagctggagagctactggattgaggcccagaccctgtgccacacagtgaatgagcacctgaaggagacccagagccagtaccaggccctggagaagaagtacaacaaggccaagaagctgatcaaggacttccagcagaaggagctggacttcatcaagaggcaggaggccgagaggaagaagattgaggacctggagaaggcccacctggtggaggtgcagggcctgcaggtgcgcatccgggacctggaggccgaggtgttccggctgctgaagcagaatggcacccaggtgaacaacaacaacaacatctttgaaagaaggaccagcctgggggaggtgtccaagggggacaccatggagaacctggatggcaagcagaccagctgccaggacggcctgagccaggacctgaatgaagctgtgcctgagacagagcggctggacagcaaggccctgaagacccgggcccagctgtctgtgaagaacagacggcagaggcccagcaggacccggctgtatgacagcgtgagcagcacagatggagaggacagcctggagaggaagcccagcaacagcttctacaaccacatgcacatcaccaagctgctgccccccaagggcctgcggaccagcagccctgagagtgacagcggcgtgccccccctgacccctgtggacagcaatgtgcccttcagcagtgaccacatcgccgagttccaggaggagcccctggaccctgagatgggccccctgagctccatgtggggagacaccagcctcttcagcaccagcaagagtgaccatgatgtggaggagagcccctgccaccaccagaccaccaacaagaagatcctgcgggagaaggatgatgccaaggaccccaagagcctgcgggccagcagcagcctggccgtgcagggcggcaagatcaagaggaagtttgtggacctgggcgcccccctgcggaggaacagcagcaagggcaagaagtggaaggagaaggagaaggaggccagccgcttctctgctggcagccgcatcttccggggccgcctggagaactggacccccaagccctgcagcacagcccagaccagcaccaggagcccctgcatgcccttctcctggttcaatgacagcaggaagggcagctacagcttcaggaacctgcctgcccccaccagcagcctgcagcccagccctgagaccctcatcagtgacaagaagggcagcaaggtggagaacacctggatcaccaaggccaacaagaggaaccccaaccccagcagcagcagcatcttcggccgccacagccagctgatgtctgtggtgtggatccaggagaccaacaacttcaccttcaatgatgacttcagccccagcagcaccagcagcgctgacctgagcggcctgggcgctgagcccaagaccccaggcctgagccagagcctggccctgagcagtgatgagatcctggatgatggccagagccccaagcacagccagtgccagaacagagctgtgcaggagtggagcgtgcagcaggtgagccactggctgatgagcctgaacctggagcagtatgtgtctgagttcagcgcccagaacatcactggagagcagctgctgcagctggatggcaacaagctgaaggccctgggcatgacagccagccaggacagagctgtggtgaagaagaagctgaaggagatgaagatgagcctggagaaggccaggaaggcccaggagaagatggagaagcagcgggagaagctgcggaggaaggagcaggagcagatgcagaggaagagcaagaagacagagaagatgaccagcaccacagctgagggcgctggggagcagtag

SEQ ID NO: 166022 - DNA, 1026 bp, synthetic construct
  misc_feature 1..1026: note = Description of Artificial Sequence: Synthetic coding sequence
  source 1..1026: mol_type = other DNA
atgtctgacagcgagaagctgaacctggacagcatcatcggccgcctgctggagggcagccgggtgctgaccccccactgtgcccctgtgcagggcagcaggcctgggaagaatgtgcagctgacagaaaatgagatccggggcctgtgcctgaagagccgggagatcttcctgagccagcccatcctgctggagctggaggcccccctgaagatctgtggggacatccacggccagtactatgacctgctgcggctgtttgaatatggaggcttccccccagagagcaactacctgttcctgggggactatgtggaccggggcaagcagagcctggagaccatctgcctgctgctggcctacaagatcaagtacccagagaacttcttcctgctgcggggcaaccatgaatgtgccagcatcaaccgcatctacggcttctatgatgagtgcaagaggcgctacaacatcaagctgtggaagaccttcacagactgcttcaactgcctgcccatcgccgccatcgtggatgagaagatcttctgctgccacggcggcctgagcccagacctgcagagcatggagcagatccgccgcatcatgaggcccacagatgtgcctgaccagggcctgctgtgtgacctgctgtggagcgaccctgacaaggatgtgcagggctggggagaaaatgacagaggagtgtccttcaccttcggggctgaggtggtggccaagttcctgcacaagcatgacctggacctgatctgccgggcccaccaggtggtggaggatggctatgagttctttgccaagaggcagctggtgaccctcttcagcgcccccaactactgtggggagtttgacaatgctggggccatgatgtctgtggatgagaccctgatgtgcagcttccagatcctgaagccagctgacaagaacaagggcaagtatggccagttcagcggcctgaaccctgggggccggcccatcaccccacccaggaacagcgccaaggccaagaagtag

SEQ ID NO: 166023 - DNA, 993 bp, synthetic construct
  misc_feature 1..993: note = Description of Artificial Sequence: Synthetic coding sequence
  source 1..993: mol_type = other DNA
atgtctgacagcgagaagctgaacctggacagcatcatcggccgcctgctggaggtgcagggcagcaggcctgggaagaatgtgcagctgacagaaaatgagatccggggcctgtgcctgaagagccgggagatcttcctgagccagcccatcctgctggagctggaggcccccctgaagatctgtggggacatccacggccagtactatgacctgctgcggctgtttgaatatggaggcttccccccagagagcaactacctgttcctgggggactatgtggaccggggcaagcagagcctggagaccatctgcctgctgctggcctacaagatcaagtacccagagaacttcttcctgctgcggggcaaccatgaatgtgccagcatcaaccgcatctacggcttctatgatgagtgcaagaggcgctacaacatcaagctgtggaagaccttcacagactgcttcaactgcctgcccatcgccgccatcgtggatgagaagatcttctgctgccacggcggcctgagcccagacctgcagagcatggagcagatccgccgcatcatgaggcccacagatgtgcctgaccagggcctgctgtgtgacctgctgtggagcgaccctgacaaggatgtgcagggctggggagaaaatgaccggggcgtgtccttcacctttggagctgaggtggtggccaagttcctgcacaagcatgacctggacctgatctgccgggcccaccaggtggtggaggatggctatgagttctttgccaagaggcagctggtgaccctcttcagcgcccccaactactgtggggagtttgacaatgctggggccatgatgtctgtggatgagaccctgatgtgcagcttccagatcctgaagccagctgacaagaacaagggcaagtatggccagttcagcggcctgaaccctgggggccggcccatcaccccaccaagaaattctgccaaggccaagaagtag

SEQ ID NO: 166024 - DNA, 1245 bp, synthetic construct
  misc_feature 1..1245: note = Description of Artificial Sequence: Synthetic coding sequence
  source 1..1245: mol_type = other DNA
atgaggcagagagctgacagaagatccatggtgtccaccagcggggccgccacagccagcagcgctgctggccccagcagaggagctgcccacagccccagcagcgccccccacgccagccgccaccggccccccttcagcagccgggccaccggcctgctgcagcagaggcagcactgtgtgcaccactgcacccagctgtgcccccgggtgcagaccccctgcctgcccccacctccagccccagccacagagctgcacagctacctgcagcagggcggggagcggggcctgctggacaccaccccaggcacagctggctggggcaccagcgccactggagctgtgcagggcagcaggcctgggaagaatgtgcagctgacagaaaatgagatccggggcctgtgcctgaagagccgggagatcttcctgagccagcccatcctgctggagctggaggcccccctgaagatctgtggggacatccacggccagtactatgacctgctgcggctgtttgaatatggaggcttccccccagagagcaactacctgttcctgggggactatgtggaccggggcaagcagagcctggagaccatctgcctgctgctggcctacaagatcaagtacccagagaacttcttcctgctgcggggcaaccatgaatgtgccagcatcaaccgcatctacggcttctatgatgagtgcaagaggcgctacaacatcaagctgtggaagaccttcacagactgcttcaactgcctgcccatcgccgccatcgtggatgagaagatcttctgctgccacggcggcctgagcccagacctgcagagcatggagcagatccgccgcatcatgaggcccacagatgtgcctgaccagggcctgctgtgtgacctgctgtggagcgaccctgacaaggatgtgcagggctggggagaaaatgacagaggagtgtccttcaccttcggggctgaggtggtggccaagttcctgcacaagcatgacctggacctgatctgccgggcccaccaggtggtggaggatggctatgagttctttgccaagaggcagctggtgaccctcttcagcgcccccaactactgtggggagtttgacaatgctggggccatgatgtctgtggatgagaccctgatgtgcagcttccagatcctgaagccagctgacaagaacaagggcaagtatggccagttcagcggcctgaaccctgggggccgctag

SEQ ID NO: 166025 - DNA, 984 bp, synthetic construct
  misc_feature 1..984: note = Description of Artificial Sequence: Synthetic coding sequence
  source 1..984: mol_type = other DNA
atggctgatggagagctgaatgtggacagcctcatcacccggctgctggaggtgcggggctgcaggcctgggaagatcgtgcagatgacagaggccgaggtgcggggcctgtgcatcaagagccgggagatcttcctgagccagcccatcctgctggagctggaggcccccctgaagatctgtggggacatccacggccagtacacagacctgctgcggctgtttgaatatggaggcttccccccagaggccaactacctgttcctgggggactatgtggaccggggcaagcagagcctggagaccatctgcctgctgctggcctacaagatcaagtacccagagaacttcttcctgctgcggggcaaccatgaatgtgccagcatcaaccgcatctacggcttctatgatgagtgcaagaggcgcttcaacatcaagctgtggaagaccttcacagactgcttcaactgcctgcccatcgccgccatcgtggatgagaagatcttctgctgccacggcggcctgagcccagacctgcagagcatggagcagatccgccgcatcatgaggcccacagatgtgcctgacaccggcctgctgtgtgacctgctgtggagcgaccctgacaaggatgtgcagggctggggagaaaatgacagaggagtgtccttcaccttcggggctgatgtggtgtccaagttcctgaacagacatgacctggacctgatctgccgggcccaccaggtggtggaggatggctatgagttctttgccaagaggcagctggtgaccctcttcagcgcccccaactactgtggggagtttgacaatgctgggggcatgatgtctgtggatgagaccctgatgtgcagcttccagatcctgaagcccagcgagaagaaggccaagtaccagtatggaggcctgaacagcggccggcctgtgaccccacccaggacagccaacccccccaagaagaggtag

SEQ ID NO: 166026 - DNA, 984 bp, synthetic construct; identical to SEQ ID NO: 166025
  misc_feature 1..984: note = Description of Artificial Sequence: Synthetic coding sequence
  source 1..984: mol_type = other DNA

SEQ ID NO: 166027 - DNA, 984 bp, synthetic construct; identical to SEQ ID NO: 166025
  misc_feature 1..984: note = Description of Artificial Sequence: Synthetic coding sequence
  source 1..984: mol_type = other DNA

SEQ ID NO: 166028 - DNA, 378 bp, synthetic construct
  misc_feature 1..378: note = Description of Artificial Sequence: Synthetic coding sequence
  source 1..378: mol_type = other DNA
atggctgatggagagctgaatgtggacagcctcatcacccggctgctggaggtgcggggctgcaggcctgggaagatcgtgcagatgacagaggccgaggtgcggggcctgtgcatcaagagccgggagatcttcctgagccagcccatcctgctggagctggaggcccccctgaagatctgtggggacatccacggccagtacacagacctgctgcggctgtttgaatatggaggcttccccccagaggccaactacctgttcctgggggactatgtggaccggggcaagcagagcctggagaccatctgcctgctgctggcctacaagatcaagtacccagagaacttcttcctgctgcggggcaaccacgagtag

SEQ ID NO: 166029 - DNA, 417 bp, synthetic construct
  misc_feature 1..417: note = Description of Artificial Sequence: Synthetic coding sequence
  source 1..417: mol_type = other DNA
atggctgatggagagctgaatgtggacagcctcatcacccggctgctggaggtgcggggctgcaggcctgggaagatcgtgcagatgacagaggccgaggtgcggggcctgtgcatcaagagccgggagatcttcctgagccagcccatcctgctggagctggaggcccccctgaagatctgtggggacatccacggccagtacacagacctgctgcggctgtttgaatatggaggcttccccccagaggccaactacctgttcctgggggactatgtggaccggggcaagcagagcctggagaccatctgcctgctgctggcctacaagatcaagtacccagagaacttcttcctgctgcggggcaaccatgaatgtgccagcatcaaccgcatctacggcttctatgatgaatag

SEQ ID NO: 166030 - DNA, 510 bp, synthetic construct
  misc_feature 1..510: note = Description of Artificial Sequence: Synthetic coding sequence
  source 1..510: mol_type = other DNA
atgacagaggccgaggtgcggggcctgtgcatcaagagccgggagatcttcctgagccagcccatcctgctggagctggaggcccccctgaagatctgtggggacatccacggccagtacacagacctgctgcggctgtttgaatatggaggcttccccccagaggccaactacctgttcctgggggactatgtggaccggggcaagcagagcctggagaccatctgcctgctgctggcctacaagatcaagtacccagagaacttcttcctgctgcggggcaaccatgaatgtgccagcatcaaccgcatctacggcttctatgatgagtgcaagaggcgcttcaacatcaagctgtggaagaccttcacagactgcttcaactgcctgcccatcgccgccatcgtggatgagaagatcttctgctgccacggcggcctgagcccagacctgcagagcatggagcagatccgccgcatcatgaggcccacagatgtgcctgacacctag

SEQ ID NO: 166031 - DNA, 972 bp, synthetic construct
  misc_feature 1..972: note = Description of Artificial Sequence: Synthetic coding sequence
  source 1..972: mol_type = other DNA
atggctgacctggacaagctgaacatcgacagcatcatccagaggctgctggaggtgcggggcagcaagccaggcaagaatgtgcagctgcaggagaatgagatccggggcctgtgcctgaagagccgggagatcttcctgagccagcccatcctgctggagctggaggcccccctgaagatctgtggggacatccacggccagtactatgacctgctgcggctgtttgaatatggaggcttccccccagagagcaactacctgttcctgggggactatgtggaccggggcaagcagagcctggagaccatctgcctgctgctggcctacaagatcaagtacccagagaacttcttcctgctgcggggcaaccatgaatgtgccagcatcaaccgcatctacggcttctatgatgagtgcaagaggcgctacaacatcaagctgtggaagaccttcacagactgcttcaactgcctgcccatcgccgccatcgtggatgagaagatcttctgctgccacggcggcctgagcccagacctgcagagcatggagcagatccgccgcatcatgaggcccacagatgtgcctgaccagggcctgctgtgtgacctgctgtggagcgaccctgacaaggatgtgctgggctggggagaaaatgaccggggcgtgtccttcacctttggagctgaggtggtggccaagttcctgcacaagcatgacctggacctgatctgccgggcccaccaggtggtggaggatggctatgagttctttgccaagaggcagctggtgaccctcttcagcgcccccaactactgtggggagtttgacaatgctggggccatgatgtctgtggatgagaccctgatgtgcagcttccagatcctgaagccagctgagaagaagaagcccaatgccaccaggcctgtgaccccaccccggggcatgatcaccaagcaggccaagaagtag

SEQ ID NO: 166032 - DNA, 1014 bp, synthetic construct
  misc_feature 1..1014: note = Description of Artificial Sequence: Synthetic coding sequence
  source 1..1014: mol_type = other DNA
atggctgacctggacaagctgaacatcgacagcatcatccagaggctgctggaggtgcggggcagcaagccaggcaagaatgtgcagctgcaggagaatgagatccggggcctgtgcctgaagagccgggagatcttcctgagccagcccatcctgctggagctggaggcccccctgaagatctgtggggacatccacggccagtactatgacctgctgcggctgtttgaatatggaggcttccccccagagagcaactacctgttcctgggggactatgtggaccggggcaagcagagcctggagaccatctgcctgctgctggcctacaagatcaagtacccagagaacttcttcctgctgcggggcaaccatgaatgtgccagcatcaaccgcatctacggcttctatgatgagtgcaagaggcgctacaacatcaagctgtggaagaccttcacagactgcttcaactgcctgcccatcgccgccatcgtggatgagaagatcttctgctgccacggcggcctgagcccagacctgcagagcatggagcagatccgccgcatcatgaggcccacagatgtgcctgaccagggcctgctgtgtgacctgctgtggagcgaccctgacaaggatgtgctgggctggggagaaaatgaccggggcgtgtccttcacctttggagctgaggtggtggccaagttcctgcacaagcatgacctggacctgatctgccgggcccaccaggtggtggaggatggctatgagttctttgccaagaggcagctggtgaccctcttcagcgcccccaactactgtggggagtttgacaatgctggggccatgatgtctgtggatgagaccctgatgtgcagcttccagatcctgaagccagctgagaagaagaagcccaatgccaccaggcctgtgaccccaccccgggtggccagcggcctgaaccccagcatccagaaggccagcaactacagaaacaacacagtgctgtatgaatag

SEQ ID NO: 166033 - DNA, 999 bp, synthetic construct
  misc_feature 1..999: note = Description of Artificial Sequence: Synthetic coding sequence
  source 1..999: mol_type = other DNA
atgttcctgcccctgtacctgaacctggtgctgtactttgtgttctggctgcactggaccaactgtgacttcagcctggccgtgcggggcagcaagccaggcaagaatgtgcagctgcaggagaatgagatccggggcctgtgcctgaagagccgggagatcttcctgagccagcccatcctgctggagctggaggcccccctgaagatctgtggggacatccacggccagtactatgacctgctgcggctgtttgaatatggaggcttccccccagagagcaactacctgttcctgggggactatgtggaccggggcaagcagagcctggagaccatctgcctgctgctggcctacaagatcaagtacccagagaacttcttcctgctgcggggcaaccatgaatgtgccagcatcaaccgcatctacggcttctatgatgagtgcaagaggcgctacaacatcaagctgtggaagaccttcacagactgcttcaactgcctgcccatcgccgccatcgtggatgagaagatcttctgctgccacggcggcctgagcccagacctgcagagcatggagcagatccgccgcatcatgaggcccacagatgtgcctgaccagggcctgctgtgtgacctgctgtggagcgaccctgacaaggatgtgctgggctggggagaaaatgacagaggagtgtccttcaccttcggggctgaggtggtggccaagttcctgcacaagcatgacctggacctgatctgccgggcccaccaggtggtggaggatggctatgagttctttgccaagaggcagctggtgaccctcttcagcgcccccaactactgtggggagtttgacaatgctggggccatgatgtctgtggatgagaccctgatgtgcagcttccagatcctgaagccagctgagaagaagaagcccaatgccaccaggcctgtgaccccaccccggggcatgatcaccaagcaggccaagaagtag

SEQ ID NO: 166034 - DNA, 426 bp, synthetic construct
  misc_feature 1..426: note = Description of Artificial Sequence: Synthetic coding sequence
  source 1..426: mol_type = other DNA
atggagcagatccgccgcatcatgaggcccacagatgtgcctgaccagggcctgctgtgtgacctgctgtggagcgaccctgacaaggatgtgctgggctggggagaaaatgaccggggcgtgtccttcacctttggagctgaggtggtggccaagttcctgcacaagcatgacctggacctgatctgccgggcccaccaggtggtggaggatggctatgagttctttgccaagaggcagctggtgaccctcttcagcgcccccaactactgtggggagtttgacaatgctggggccatgatgtctgtggatgagaccctgatgtgcagcttccagatcctgaagccagctgagaagaagaagcccaatgccaccaggcctgtgaccccaccccggggcatgatcaccaagcaggccaagaagtag

SEQ ID NO: 166035 - DNA, 225 bp, synthetic construct
  misc_feature 1..225: note = Description of Artificial Sequence: Synthetic coding sequence
  source 1..225: mol_type = other DNA
atgggcagaagaagcagcaagtgctgctgcatctatgagaagccccgggccttcggggagagcagcacagaaagtgatgaggaggaggaggagggctgcggccacacccactgtgtgcggggccacaggaagggcagaagaagagccaccctgggccccacccccaccaccccaccccagcccccagaccccagccagcccccacctggccccatgcagcactag

SEQ ID NO: 166036 - DNA, 225 bp, synthetic construct; identical to SEQ ID NO: 166035
  misc_feature 1..225: note = Description of Artificial Sequence: Synthetic coding sequence
  source 1..225: mol_type = other DNA

SEQ ID NO: 166037 - DNA, 225 bp, synthetic construct; identical to SEQ ID NO: 166035
  misc_feature 1..225: note = Description of Artificial Sequence: Synthetic coding sequence
  source 1..225: mol_type = other DNA

SEQ ID NO: 166038 - DNA, 225 bp, synthetic construct; identical to SEQ ID NO: 166035
  misc_feature 1..225: note = Description of Artificial Sequence: Synthetic coding sequence
  source 1..225: mol_type = other DNA

SEQ ID NO: 166039 - DNA, 381 bp, synthetic construct
  misc_feature 1..381: note = Description of Artificial Sequence: Synthetic coding sequence
  source 1..381: mol_type = other DNA
atggccgaggccggggccggcctgtctgaaacagtgacagagaccaccgtgacagtgaccacagagcctgagaacagaagcctgaccatcaagctgaggaagaggaagccagagaagaaggtggagtggaccagtgacacagtggacaatgagcacatgggcagaagaagcagcaagtgctgctgcatctatgagaagccccgggccttcggggagagcagcacagaaagtgatgaggaggaggaggagggctgcggccacacccactgtgtgcggggccacaggaagggcagaagaagagccaccctgggccccacccccaccaccccaccccagcccccagaccccagccagcccccacctggccccatgcagcactag

SEQ ID NO: 166040 - DNA, 225 bp, synthetic construct; identical to SEQ ID NO: 166035
  misc_feature 1..225: note = Description of Artificial Sequence: Synthetic coding sequence
  source 1..225: mol_type = other DNA

SEQ ID NO: 166041 - DNA, 381 bp, synthetic construct; identical to SEQ ID NO: 166039
  misc_feature 1..381: note = Description of Artificial Sequence: Synthetic coding sequence
  source 1..381: mol_type = other DNA

SEQ ID NO: 166042 - DNA, 225 bp, synthetic construct; identical to SEQ ID NO: 166035
  misc_feature 1..225: note = Description of Artificial Sequence: Synthetic coding sequence
  source 1..225: mol_type = other DNA

SEQ ID NO: 166043 - DNA, 225 bp, synthetic construct; identical to SEQ ID NO: 166035
  misc_feature 1..225: note = Description of Artificial Sequence: Synthetic coding sequence
  source 1..225: mol_type = other DNA

SEQ ID NO: 166044 - DNA, 225 bp, synthetic construct; identical to SEQ ID NO: 166035
  misc_feature 1..225: note = Description of Artificial Sequence: Synthetic coding sequence
  source 1..225: mol_type = other DNA

SEQ ID NO: 166045 - DNA, 225 bp, synthetic construct; identical to SEQ ID NO: 166035
  misc_feature 1..225: note = Description of Artificial Sequence: Synthetic coding sequence
  source 1..225: mol_type = other DNA

SEQ ID NO: 166046 - DNA, 225 bp, synthetic construct; identical to SEQ ID NO: 166035
  misc_feature 1..225: note = Description of Artificial Sequence: Synthetic coding sequence
  source 1..225: mol_type = other DNA

SEQ ID NO: 166047 - DNA, 225 bp, synthetic construct; identical to SEQ ID NO: 166035
  misc_feature 1..225: note = Description of Artificial Sequence: Synthetic coding sequence
  source 1..225: mol_type = other DNA

SEQ ID NO: 166048 - DNA, 225 bp, synthetic construct; identical to SEQ ID NO: 166035
  misc_feature 1..225: note = Description of Artificial Sequence: Synthetic coding sequence
  source 1..225: mol_type = other DNA

SEQ ID NO: 166049 - DNA, 225 bp, synthetic construct; identical to SEQ ID NO: 166035
  misc_feature 1..225: note = Description of Artificial Sequence: Synthetic coding sequence
  source 1..225: mol_type = other DNA

SEQ ID NO: 166050 - DNA, 225 bp, synthetic construct; identical to SEQ ID NO: 166035
  misc_feature 1..225: note = Description of Artificial Sequence: Synthetic coding sequence
  source 1..225: mol_type = other DNA

SEQ ID NO: 166051 - DNA, 225 bp, synthetic construct; identical to SEQ ID NO: 166035
  misc_feature 1..225: note = Description of Artificial Sequence: Synthetic coding sequence
  source 1..225: mol_type = other DNA

SEQ ID NO: 166052 - DNA, 225 bp, synthetic construct; identical to SEQ ID NO: 166035
  misc_feature 1..225: note = Description of Artificial Sequence: Synthetic coding sequence
  source 1..225: mol_type = other DNA

SEQ ID NO: 166053 - DNA, 225 bp, synthetic construct; identical to SEQ ID NO: 166035
  misc_feature 1..225: note = Description of Artificial Sequence: Synthetic coding sequence
  source 1..225: mol_type = other DNA

SEQ ID NO: 166054 - DNA, 225 bp, synthetic construct; identical to SEQ ID NO: 166035
  misc_feature 1..225: note = Description of Artificial Sequence: Synthetic coding sequence
  source 1..225: mol_type = other DNA

SEQ ID NO: 166055 - DNA, 225 bp, synthetic construct; identical to SEQ ID NO: 166035
  misc_feature 1..225: note = Description of Artificial Sequence: Synthetic coding sequence
  source 1..225: mol_type = other DNA

SEQ ID NO: 166056 - DNA, 225 bp, synthetic construct; identical to SEQ ID NO: 166035
  misc_feature 1..225: note = Description of Artificial Sequence: Synthetic coding sequence
  source 1..225: mol_type = other DNA

SEQ ID NO: 166057 - DNA, 381 bp, synthetic construct; identical to SEQ ID NO: 166039
  misc_feature 1..381: note = Description of Artificial Sequence: Synthetic coding sequence
  source 1..381: mol_type = other DNA

SEQ ID NO: 166058 - DNA, 381 bp, synthetic construct; identical to SEQ ID NO: 166039
  misc_feature 1..381: note = Description of Artificial Sequence: Synthetic coding sequence
  source 1..381: mol_type = other DNA

SEQ ID NO: 166059 - DNA, 225 bp, synthetic construct; identical to SEQ ID NO: 166035
  misc_feature 1..225: note = Description of Artificial Sequence: Synthetic coding sequence
  source 1..225: mol_type = other DNA

SEQ ID NO: 166060 - DNA, 225 bp, synthetic construct; identical to SEQ ID NO: 166035
  misc_feature 1..225: note = Description of Artificial Sequence: Synthetic coding sequence
  source 1..225: mol_type = other DNA

SEQ ID NO: 166061 - DNA, 225 bp, synthetic construct; identical to SEQ ID NO: 166035
  misc_feature 1..225: note = Description of Artificial Sequence: Synthetic coding sequence
  source 1..225: mol_type = other DNA

SEQ ID NO: 166062 - DNA, 381 bp, synthetic construct; identical to SEQ ID NO: 166039
  misc_feature 1..381: note = Description of Artificial Sequence: Synthetic coding sequence
  source 1..381: mol_type = other DNA

SEQ ID NO: 166063 - DNA, 225 bp, synthetic construct; identical to SEQ ID NO: 166035
  misc_feature 1..225: note = Description of Artificial Sequence: Synthetic coding sequence
  source 1..225: mol_type = other DNA

SEQ ID NO: 166064 - DNA, 225 bp, synthetic construct; identical to SEQ ID NO: 166035
  misc_feature 1..225: note = Description of Artificial Sequence: Synthetic coding sequence
  source 1..225: mol_type = other DNA

SEQ ID NO: 166065 - DNA, 381 bp, synthetic construct; identical to SEQ ID NO: 166039
  misc_feature 1..381: note = Description of Artificial Sequence: Synthetic coding sequence
  source 1..381: mol_type = other DNA

SEQ ID NO: 166066 - DNA, 225 bp, synthetic construct; identical to SEQ ID NO: 166035
  misc_feature 1..225: note = Description of Artificial Sequence: Synthetic coding sequence
  source 1..225: mol_type = other DNA

SEQ ID NO: 166067 - DNA, 225 bp, synthetic construct; identical to SEQ ID NO: 166035
  misc_feature 1..225: note = Description of Artificial Sequence: Synthetic coding sequence
  source 1..225: mol_type = other DNA

SEQ ID NO: 166068 - DNA, 225 bp, synthetic construct; identical to SEQ ID NO: 166035
  misc_feature 1..225: note = Description of Artificial Sequence: Synthetic coding sequence
  source 1..225: mol_type = other DNA

SEQ ID NO: 166069 - DNA, 225 bp, synthetic construct; identical to SEQ ID NO: 166035
  misc_feature 1..225: note = Description of Artificial Sequence: Synthetic coding sequence
  source 1..225: mol_type = other DNA

SEQ ID NO: 166070 - DNA, 225 bp, synthetic construct; identical to SEQ ID NO: 166035
  misc_feature 1..225: note = Description of Artificial Sequence: Synthetic coding sequence
  source 1..225: mol_type = other DNA

SEQ ID NO: 166071 - DNA, 225 bp, synthetic construct; identical to SEQ ID NO: 166035
  misc_feature 1..225: note = Description of Artificial Sequence: Synthetic coding sequence
  source 1..225: mol_type = other DNA

SEQ ID NO: 166072 - DNA, 381 bp, synthetic construct; identical to SEQ ID NO: 166039
  misc_feature 1..381: note = Description of Artificial Sequence: Synthetic coding sequence
  source 1..381: mol_type = other DNA

SEQ ID NO: 166073 - DNA, 225 bp, synthetic construct; identical to SEQ ID NO: 166035
  misc_feature 1..225: note = Description of Artificial Sequence: Synthetic coding sequence
  source 1..225: mol_type = other DNA

SEQ ID NO: 166074 - DNA, 225 bp, synthetic construct; identical to SEQ ID NO: 166035
  misc_feature 1..225: note = Description of Artificial Sequence: Synthetic coding sequence
  source 1..225: mol_type = other DNA

SEQ ID NO: 166075 - DNA, 225 bp, synthetic construct; identical to SEQ ID NO: 166035
  misc_feature 1..225: note = Description of Artificial Sequence: Synthetic coding sequence
  source 1..225: mol_type = other DNA

SEQ ID NO: 166076 - DNA, 225 bp, synthetic construct; identical to SEQ ID NO: 166035
  misc_feature 1..225: note = Description of Artificial Sequence: Synthetic coding sequence
  source 1..225: mol_type = other DNA

SEQ ID NO: 166077 - DNA, 225 bp, synthetic construct; identical to SEQ ID NO: 166035
  misc_feature 1..225: note = Description of Artificial Sequence: Synthetic coding sequence
  source 1..225: mol_type = other DNA

SEQ ID NO: 166078 - DNA, 225 bp, synthetic construct; identical to SEQ ID NO: 166035
  misc_feature 1..225: note = Description of Artificial Sequence: Synthetic coding sequence
  source 1..225: mol_type = other DNA

SEQ ID NO: 166079 - DNA, 381 bp, synthetic construct; identical to SEQ ID NO: 166039
  misc_feature 1..381: note = Description of Artificial Sequence: Synthetic coding sequence
  source 1..381: mol_type = other DNA

SEQ ID NO: 166080 - DNA, 225 bp, synthetic construct; identical to SEQ ID NO: 166035
  misc_feature 1..225: note = Description of Artificial Sequence: Synthetic coding sequence
  source 1..225: mol_type = other DNA

SEQ ID NO: 166081 - DNA, 225 bp, synthetic construct; identical to SEQ ID NO: 166035
  misc_feature 1..225: note = Description of Artificial Sequence: Synthetic coding sequence
  source 1..225: mol_type = other DNA

SEQ ID NO: 166082 - DNA, 225 bp, synthetic construct; identical to SEQ ID NO: 166035
  misc_feature 1..225: note = Description of Artificial Sequence: Synthetic coding sequence
  source 1..225: mol_type = other DNA

SEQ ID NO: 166083 - DNA, 444 bp, synthetic construct
  misc_feature 1..444: note = Description of Artificial Sequence: Synthetic coding sequence
  source 1..444: mol_type = other DNA
atggctgacagcggcacagctggaggagctgccctggccgccccagcccctggccctggcagcggcggccctggcccccgggtgtacttccagagccccccaggagctgctggggagggccctggaggagcagatgatgagggccctgtgcggcggcagggcaaggtgacagtgaagtatgacaggaaggagctgaggaagaggctgaacctggaggagtggatcctggagcagctgacccggctgtatgactgccaggaggaggagatccctgagctggagattgatgtggatgagctgctggacatggagagtgatgatgcccgggccgcccgggtgaaggagctgctggtggactgctacaagcccacagaggccttcatcagcggcctgctggacaagatccggggcatgcagaagctgagcaccccccagaagaagtag

SEQ ID NO: 166084 - DNA, 498 bp, synthetic construct
  misc_feature 1..498: note = Description of Artificial Sequence: Synthetic coding sequence
  source 1..498: mol_type = other DNA
atgtctgtggccaccggcagcagcgagacagctggaggagccagcggcggcggggcccgggtcttcttccagagcccccggggcggggccggcggcagccctggcagcagcagcggcagcggcagcagcagagaagattctgcccctgtggccacagctgctgctgctggccaggtgcagcagcagcagcagaggaggcaccagcagggcaaggtgacagtgaagtatgacaggaaggagctgaggaagaggctggtgctggaggagtggatcgtggagcagctgggccagctgtatggctgtgaggaggaggagatgcctgaggtggagattgatattgatgacctgctggatgctgacagtgatgaggagcgggccagcaagctgcaggaggccctggtggactgctacaagcccacagaggagttcatcaaggagctgctgagccgcatccggggcatgaggaagctgagccccccccagaagaagtctgtgtag

SEQ ID NO: 166085 - DNA, 438 bp, synthetic construct
  misc_feature 1..438: note = Description of Artificial Sequence: Synthetic coding sequence
  source 1..438: mol_type = other DNA
atgctgagcagcagccctgccagctgcaccagccccagcccagatggagagaacccctgcaagaaggtgcactgggccagcggcagaagaaggaccagcagcacagattctgagagcaagagccacccagacagcagcaagatccccaggagccggcggcccagccggctgactgtgaagtatgaccggggccagctgcagcgctggctggagatggagcagtgggtggatgcccaggtgcaggagctgttccaggaccaggccaccccatctgagcctgagattgacctggaggccctgatggacctgagcacagaggagcagaagacccagctggaggccatcctgggcaactgcccccggcccacagaggccttcatcagcgagctgctgagccagctgaagaagctgcggcggctgagccggccccagaagtag

SEQ ID NO: 166086 - DNA, 603 bp, synthetic construct
  misc_feature 1..603: note = Description of Artificial Sequence: Synthetic coding sequence
  source 1..603: mol_type = other DNA
atgctgagcagcagccctgccagctgcaccagccccagcccagatggagagaacccctgcaagaaggtgcactgggccagcggcagaagaaggaccagcagcacagattctgagagcaagagccacccagacagcagcaagatccccaggagccggcggcccagccggctgactgtgaagtatgaccggggccagctgcagcgctggctggagatggagcagtgggtggatgcccaggtgcaggagctgttccagagcctggccctgagcccccggctggagtgcagcggggtcatccacagcctgcagctgctgcccccaggcttcaaccgcttcagctgcctgagctcctggagctcctgggactatggcatcaagcagcccctgctgagcctgcggctgacctggaagctgtcctggatctacccccagaggagccggcggctgtcctggaggcccttcctgggcacagccccagccccccagaggctgctgagcctgagctgcagcgtgaacagcaggaacagcggggacagcgctggcctgaggaacaagccagagcggcccagcctggccgccagcgccctgcccggcctgccctag

SEQ ID NO: 166087 - DNA, 516 bp, synthetic construct
  misc_feature 1..516: note = Description of Artificial Sequence: Synthetic coding sequence
  source 1..516: mol_type = other DNA
atggagcaggacaacagccccaggaagatccagttcaccgtgcccctgctggagccccacctggaccctgaggccgctgagcagatcagaagaagaagacccaccccagccaccctggtgctgaccagtgaccagagcagccctgagattgatgaggaccgcatccccaacccccacctgaagagcaccctggccatgagcccccggcagaggaagaagatgacccgcatcacccccaccatgaaggagctgcagatgatggtggagcaccacctgggccagcagcagcagggcgaggagcctgagggcgctgctgagagcacagagacccaggagagcaggcctcctggcatcccagacacagaggtggagagccggctgggcaccagcggcacagccaagaagacagctgagtgcatccccaagacccatgagcggggcagcaaggagcccagcaccaaggagcccagcacccacatcccccccctggacagcaagggggccaacagcgtgtag

SEQ ID NO: 166088 - DNA, 462 bp, synthetic construct
  misc_feature 1..462: note = Description of Artificial Sequence: Synthetic coding sequence
  source 1..462: mol_type = other DNA
atggagcaggacaacagccccaggaagatccagttcaccgtgcccctgctggagccccacctggaccctgaggccgctgagcagatcagaagaagaagacccaccccagccaccctggtgctgaccagtgaccagagcagccctgagattgatgaggaccgcatccccaacccccacctgaagaagctgcagaatgccagcctgaagctgacccgggaggccgtgaggaacccagcccagaagaacccccagcccatctaccaccactggatcccccgggagcccacccgctgccaccggcggggcggcaccggcggccagaagtctgtgggcggcttcccctgcagcacccacaccctggcccccttctacgtgttcaccaggagcatcctgctgctgaagagaggagagaggatgagccaccccctggagcccagagatgaccccaccaagatgccctag

SEQ ID NO: 166089 - DNA, 330 bp, synthetic construct
  misc_feature 1..330: note = Description of Artificial Sequence: Synthetic coding sequence
  source 1..330: mol_type = other DNA
atggagcccaacagccccaagaagatccagtttgctgtgcctgtgttccagagccagatcgcccctgaggccgctgagcagatcaggaagagaagacccaccccagccagcctggtgatcctgaatgagcacaaccccccagaaattgatgacaagaggggccccaacacccagggcgagctgcagaatgccagccccaagcagaggaagcagagcgtgtacaccccacccaccatcaagggcgtgaagcacctgaagggccagaatgaaagtgccttccctgaggaggaggagggcaccaatgaaagagaggagcagagggaccactag

SEQ ID NO: 166090 - DNA, 330 bp, synthetic construct; identical to SEQ ID NO: 166089
  misc_feature 1..330: note = Description of Artificial Sequence: Synthetic coding sequence
  source 1..330: mol_type = other DNA

SEQ ID NO: 166091 - DNA, 330 bp, synthetic construct; identical to SEQ ID NO: 166089
  misc_feature 1..330: note = Description of Artificial Sequence: Synthetic coding sequence
  source 1..330: mol_type = other DNA

SEQ ID NO: 166092 - DNA, 618 bp, synthetic construct
  misc_feature 1..618: note = Description of Artificial Sequence: Synthetic coding sequence
  source 1..618: mol_type = other DNA
atggccgccagcacagccagccaccggcccatcaagggcatcctgaagaacaagaccagcaccaccagctccatggtggccagcgctgagcagcccagaggaaatgtggatgaggagctgagcaagaagagccagaagtgggatgagatgaacatcctggccacctaccaccctgctgacaaggactatggcctgatgaagattgatgagcccagcaccccctaccacagcatgatgggagatgatgaagatgcctgcagcgacacagaggccacagaggccatggccccagacatcctggccaggaagctggccgctgctgagggcctggagcccaagtaccgcatccaggagcaggagagcagcggggaggaggacagcgacctgagccctgaggagcgggagaagaagaggcagtttgagatgaagaggaagctgcactacaatgaaggcctgaacatcaagctggcccggcagctgatcagcaaggacctgcatgatgatgatgaagatgaggagatgctggagacagcagatggagagagcatgaacacagaggagagcaaccagggcagcacccccagcgaccagcagcagaacaagctgcggagcagctag

SEQ ID NO: 166093 - DNA, 3093 bp, synthetic construct
  misc_feature 1..3093: note = Description of Artificial Sequence: Synthetic coding sequence
  source 1..3093: mol_type = other DNA
atgaagatggctgatgccaagcagaagagaaatgagcagctgaagcgctggattggcagcgagacagacctggagccccctgtggtgaagaggcagaagaccaaggtgaagtttgatgatggagctgtgttcctggccgcctgcagcagcggggacacagatgaggtgctgaagctgctgcacagaggagctgacatcaactatgccaacgtggatggcctgacagccctgcaccaggcctgcattgatgacaacgtggacatggtgaagttcctggtggagaatggagccaacatcaaccagcctgacaatgaaggctggatccccctgcacgccgccgccagctgtggctacctggacattgctgagttcctgattggccagggcgcccacgtgggcgctgtgaacagcgagggggacacccccctggacattgctgaggaggaggccatggaggagctgctgcagaatgaggtgaaccggcagggcgtggacatcgaggccgccaggaaggaggaggagcgcatcatgctgagagatgcccggcagtggctgaacagcggccacatcaatgatgtgagacatgccaagagcggcggcacagccctgcacgtggccgccgccaagggctacacagaggtgctgaagctgctgatccaggccggctatgatgtgaacatcaaggactatgatggctggacccccctgcacgccgccgcccactggggcaaggaggaggcctgccgcatcctggtggacaacctgtgtgacatggagatggtgaacaaggtgggccagacagcctttgatgtggctgatgaggacatcctgggctacctggaggagctgcagaagaagcagaacctgctgcacagcgagaagagggacaagaagagccccctcatcgagagcacagccaacatggacaacaaccagagccagaagaccttcaagaacaaggagaccctcatcatcgagcctgagaagaatgccagccgcatcgagagcctggagcaggagaaggtggatgaggaggaggagggcaagaaggatgagagcagctgcagcagtgaagaagatgaggaggatgattctgagagcgaggccgagacagacaagaccaagcccctggcctctgtgaccaatgccaacaccagcagcacccaggccgcccctgtggccgtgaccacccccaccgtgagcagcggccaggccacccccaccagccccatcaagaagttccccaccacagccaccaagatcagccccaaggaggaggagaggaaggatgagagccctgccacctggaggctgggcctgaggaagacaggcagctatggagccctggccgagatcacagccagcaaggagggccagaaggagaaggacacagctggggtgaccaggtctgccagcagcccccggctgagcagcagcctggacaacaaggagaaggagaaggacagcaagggcacccggctggcctacgtggcccccaccatcccccggcggctggccagcaccagtgacatcgaggagaaggaaaatagagacagcagcagcctgcggaccagcagcagctacaccaggaggaagtgggaggatgacctgaagaagaacagctctgtgaatgaaggcagcacctaccacaagagctgcagctttggaagacggcaggatgacctgatcagcagctctgtgcccagcaccaccagcacccccaccgtgaccagcgctgctggcctgcagaagagcctgctgagcagcaccagcaccaccaccaagatcaccaccggcagcagcagcgctggcacccagagcagcaccagcaaccggctgtgggccgaggacagcacagagaaggagaaggacagcgtgcccacagctgtgaccatccctgtggcccccaccgtggtgaatgctgctgccagcaccaccaccctgaccaccaccacagctggcaccgtgagcagcaccacagaggtgcgggagcggcggcgcagctacctgacccctgtgagagatgaggagagcgagagccagaggaaggcccggagccggcaggcccggcagagcagaagaagcacccagggcgtgaccctgacagacctgcaggaggccgagaagaccatcggccgcagccgcagcaccaggacccgggagcaggagaatgaggagaaggagaaggaggagaaggagaagcaggacaaggagaagcaggaggagaagaaggagagcgagaccagcagagaagatgagtacaagcagaagtacagcaggacctatgatgagacctaccagcgctacagacctgtgtccaccagcagcagcaccacccccagcagcagcctgagcaccatgagcagcagcctgtatgccagcagccagctgaaccggcccaacagcctggtgggcatcaccagcgcctacagccggggcatcaccaaggaaaatgaaagagaaggagagaagcgggaggaggagaaggagggggaggacaagagccagcccaagagcatccgggagcggcggcggccccgggagaagaggaggagcactggagtgtccttctggacccaggacagtgatgaaaatgagcaggagcagcagagcgacacagaggagggcagcaacaagaaggagacccagacagacagcatcagccgctatgagaccagcagcaccagcgctggggacagatatgacagcctgctgggccgcagcggcagctacagctacctggaggagaggaagccctacagcagccggctggagaaggatgacagcacagacttcaagaagctgtatgagcagatcctggccgagaatgagaagctgaaggcccagctgcatgacaccaacatggagctgacagacctgaagctgcagctggagaaggccacccagaggcaggagagatttgctgacaggagcctgctggagatggagaagcgggagcggcgggccctggagcggcgcatcagcgagatggaggaggagctgaagatgctgcctgacctgaaggctgacaaccagaggctgaaggatgaaaatggagccctgatccgggtcatcagcaagctgagcaagtag

SEQ ID NO: 166094 - DNA, 2916 bp, synthetic construct
  misc_feature 1..2916: note = Description of Artificial Sequence: Synthetic coding sequence
  source 1..2916: mol_type = other DNA
atgaagatggctgatgccaagcagaagagaaatgagcagctgaagcgctggattggcagcgagacagacctggagccccctgtggtgaagaggcagaagaccaaggtgaagtttgatgatggagctgtgttcctggccgcctgcagcagcggggacacagatgaggtgctgaagctgctgcacagaggagctgacatcaactatgccaacgtggatggcctgacagccctgcaccaggcctgcattgatgacaacgtggacatggtgaagttcctggtggagaatggagccaacatcaaccagcctgacaatgaaggctggatccccctgcacgccgccgccagctgtggctacctggacattgctgagttcctgattggccagggcgcccacgtgggcgctgtgaacagcgagggggacacccccctggacattgctgaggaggaggccatggaggagctgctgcagaatgaggtgaaccggcagggcgtggacatcgaggccgccaggaaggaggaggagcgcatcatgctgagagatgcccggcagtggctgaacagcggccacatcaatgatgtgagacatgccaagagcggcggcacagccctgcacgtggccgccgccaagggctacacagaggtgctgaagctgctgatccaggccggctatgatgtgaacatcaaggactatgatggctggacccccctgcacgccgccgcccactggggcaaggaggaggcctgccgcatcctggtggacaacctgtgtgacatggagatggtgaacaaggtgggccagacagcctttgatgtggctgatgaggacatcctgggctacctggaggagctgcagaagaagcagaacctgctgcacagcgagaagagggacaagaagagccccctcatcgagagcacagccaacatggacaacaaccagagccagaagaccttcaagaacaaggagaccctcatcatcgagcctgagaagaatgccagccgcatcgagagcctggagcaggagaaggtggatgaggaggaggagggcaagaaggatgagagcagctgcagcagtgaagaagatgaggaggatgattctgagagcgaggccgagacagacaagaccaagcccctggcctctgtgaccaatgccaacaccagcagcacccaggccgcccctgtggccgtgaccacccccaccgtgagcagcggccaggccacccccaccagccccatcaagaagttccccaccacagccaccaagatcagccccaaggaggaggagaggaaggatgagagccctgccacctggaggctgggcctgaggaagacaggcagctatggagccctggccgagatcacagccagcaaggagggccagaaggagaaggacacagctggggtgaccaggtctgccagcagcccccggctgagcagcagcctggacaacaaggagaaggagaaggacagcaagggcacccggctggcctacgtggcccccaccatcccccggcggctggccagcaccagtgacatcgaggagaaggaaaatagagacagcagcagcctgcggaccagcagcagctacaccaggaggaagtgggaggatgacctgaagaagaacagctctgtgaatgaaggcagcacctaccacaagagctgcagctttggaagacggcaggatgacctgatcagcagctctgtgcccagcaccaccagcacccccaccgtgaccagcgctgctggcctgcagaagagcctgctgagcagcaccagcaccaccaccaagatcaccaccggcagcagcagcgctggcacccagagccgcagctacctgacccctgtgagagatgaggagagcgagagccagaggaaggcccggagccggcaggcccggcagagccgccgcagcacccagggcgtgaccctgacagacctgcaggaggccgagaagaccatcggccgcagccgcagcaccaggacccgggagcaggagaatgaggagaaggagaaggaggagaaggagaagcaggacaaggagaagcaggaggagaagaaggagagcgagaccagccgggaggatgagtacaagcagaagtacagcaggacctatgatgagacctaccagcgctacagacctgtgtccaccagcagcagcaccacccccagcagcagcctgagcaccatgagcagcagcctgtatgccagcagccagctgaaccggcccaacagcctggtgggcatcaccagcgcctacagccggggcatcaccaaggaaaatgaaagagaaggagagaagcgggaggaggagaaggagggggaggacaagagccagcccaagagcatccgggagaggagaagaccccgggagaagagaagaagcactggagtgtccttctggacccaggacagtgatgaaaatgagcaggagcagcagagcgacacagaggagggcagcaacaagaaggagacccaggtgaacaccatcaccctgtatgagaccagcagcaccagcgctggggacagatatgacagcctgctgggccgcagcggcagctacagctacctggaggagaggaagccctacagcagccggctggagaaggatgacagcacagacttcaagaagctgtatgagcagatcctggctgaaaatgagaagctgaaggcccagctgcatgacaccaacatggagctgacagacctgaagctgcagctggagaaggccacccagaggcaggagagatttgctgacaggagcctgctggagatggagaagcgggagcggcgggccctggagcggcgcatcagcgagatggaggaggagctgaagatgctgcctgacctgaaggctgacaaccagaggctgaaggatgaaaatggagccctgatccgggtcatcagcaagctgagcaagtag

SEQ ID NO: 166095 - DNA, 2925 bp, synthetic construct
  misc_feature 1..2925: note = Description of Artificial Sequence: Synthetic coding sequence
  source 1..2925: mol_type = other DNA
atgaagatggctgatgccaagcagaagagaaatgagcagctgaagcgctggattggcagcgagacagacctggagccccctgtggtgaagaggcagaagaccaaggtgaagtttgatgatggagctgtgttcctggccgcctgcagcagcggggacacagatgaggtgctgaagctgctgcacagaggagctgacatcaactatgccaacgtggatggcctgacagccctgcaccaggcctgcattgatgacaacgtggacatggtgaagttcctggtggagaatggagccaacatcaaccagcctgacaatgaaggctggatccccctgcacgccgccgccagctgtggctacctggacattgctgagttcctgattggccagggcgcccacgtgggcgctgtgaacagcgagggggacacccccctggacattgctgaggaggaggccatggaggagctgctgcagaatgaggtgaaccggcagggcgtggacatcgaggccgccaggaaggaggaggagcgcatcatgctgagagatgcccggcagtggctgaacagcggccacatcaatgatgtgagacatgccaagagcggcggcacagccctgcacgtggccgccgccaagggctacacagaggtgctgaagctgctgatccaggccggctatgatgtgaacatcaaggactatgatggctggacccccctgcacgccgccgcccactggggcaaggaggaggcctgccgcatcctggtggacaacctgtgtgacatggagatggtgaacaaggtgggccagacagcctttgatgtggctgatgaggacatcctgggctacctggaggagctgcagaagaagcagaacctgctgcacagcgagaagagggacaagaagagccccctcatcgagagcacagccaacatggacaacaaccagagccagaagaccttcaagaacaaggagaccctcatcatcgagcctgagaagaatgccagccgcatcgagagcctggagcaggagaaggtggatgaggaggaggagggcaagaaggatgagagcagctgcagcagtgaagaagatgaggaggatgattctgagagcgaggccgagacagacaagaccaagcccctggcctctgtgaccaatgccaacaccagcagcacccaggccgcccctgtggccgtgaccacccccaccgtgagcagcggccaggccacccccaccagccccatcaagaagttccccaccacagccaccaagatcagccccaaggaggaggagaggaaggatgagagccctgccacctggaggctgggcctgaggaagacaggcagctatggagccctggccgagatcacagccagcaaggagggccagaaggagaaggacacagctggggtgaccaggtctgccagcagcccccggctgagcagcagcctggacaacaaggagaaggagaaggacagcaagggcacccggctggcctacgtggcccccaccatcccccggcggctggccagcaccagtgacatcgaggagaaggaaaatagagacagcagcagcctgcggaccagcagcagctacaccaggaggaagtgggaggatgacctgaagaagaacagctctgtgaatgaaggcagcacctaccacaagagcaccagcaaccggctgtgggccgaggacagcacagagaaggagaaggacagcgtgcccacagctgtgaccatccctgtggcccccaccgtggtgaatgctgctgccagcaccaccaccctgaccaccaccacagctggcaccgtgagcagcaccacagaggtgcgggagcggcggcgcagctacctgacccctgtgagagatgaggagagcgagagccagaggaaggcccggagccggcaggcccggcagagcagaagaagcacccagggcgtgaccctgacagacctgcaggaggccgagaagaccatcggccgcagccgcagcaccaggacccgggagcaggagaatgaggagaaggagaaggaggagaaggagaagcaggacaaggagaagcaggaggagaagaaggagagcgagaccagcagagaagatgagtacaagcagaagtacagcaggacctatgatgagacctaccagcgctacagacctgtgtccaccagcagcagcaccacccccagcagcagcctgagcaccatgagcagcagcctgtatgccagcagccagctgaaccggcccaacagcctggtgggcatcaccagcgcctacagccggggcatcaccaaggaaaatgaaagagaaggagagaagcgggaggaggagaaggagggggaggacaagagccagcccaagagcatccgggagcggcggcggccccgggagaagaggaggagcactggagtgtccttctggacccaggacagtgatgaaaatgagcaggagcagcagagcgacacagaggagggcagcaacaagaaggagacccaggtgaacaccatcaccctgtatgagaccagcagcaccagcgctggggacagatatgacagcctgctgggccgcagcggcagctacagctacctggaggagaggaagccctacagcagccggctggagaaggatgacagcacagacttcaagaagctgtatgagcagatcctggccgagaatgagaagctgaaggcccagctgcatgacaccaacatggagctgacagacctgaagctgcagctggagaaggccacccagaggcaggagagatttgctgacaggagcctgctggagatggagaagcgggagcggcgggccctggagcggcgcatcagcgagatggaggaggagctgaagatgctgcctgacctgaaggctgacaaccagaggctgaaggatgaaaatggagccctgatccgggtcatcagcaagctgagcaagtag

SEQ ID NO: 166096 - DNA, 2988 bp, synthetic construct
  misc_feature 1..2988: note = Description of Artificial Sequence: Synthetic coding sequence
  source 1..2988: mol_type = other DNA
atgaagatggctgatgccaagcagaagagaaatgagcagctgaagcgctggattggcagcgagacagacctggagccccctgtggtgaagaggcagaagaccaaggtgaagtttgatgatggagctgtgttcctggccgcctgcagcagcggggacacagatgaggtgctgaagctgctgcacagaggagctgacatcaactatgccaacgtggatggcctgacagccctgcaccaggcctgcattgatgacaacgtggacatggtgaagttcctggtggagaatggagccaacatcaaccagcctgacaatgaaggctggatccccctgcacgccgccgccagctgtggctacctggacattgctgagttcctgattggccagggcgcccacgtgggcgctgtgaacagcgagggggacacccccctggacattgctgaggaggaggccatggaggagctgctgcagaatgaggtgaaccggcagggcgtggacatcgaggccgccaggaaggaggaggagcgcatcatgctgagagatgcccggcagtggctgaacagcggccacatcaatgatgtgagacatgccaagagcggcggcacagccctgcacgtggccgccgccaagggctacacagaggtgctgaagctgctgatccaggccggctatgatgtgaacatcaaggactatgatggctggacccccctgcacgccgccgcccactggggcaaggaggaggcctgccgcatcctggtggacaacctgtgtgacatggagatggtgaacaaggtgggccagacagcctttgatgtggctgatgaggacatcctgggctacctggaggagctgcagaagaagcagaacctgctgcacagcgagaagagggacaagaagagccccctcatcgagagcacagccaacatggacaacaaccagagccagaagaccttcaagaacaaggagaccctcatcatcgagcctgagaagaatgccagccgcatcgagagcctggagcaggagaaggtggatgaggaggaggagggcaagaaggatgagagcagctgcagcagtgaagaagatgaggaggatgattctgagagcgaggccgagacagacaagaccaagcccctggcctctgtgaccaatgccaacaccagcagcacccaggccgcccctgtggccgtgaccacccccaccgtgagcagcggccaggccacccccaccagccccatcaagaagttccccaccacagccaccaagatcagccccaaggaggaggagaggaaggatgagagccctgccacctggaggctgggcctgaggaagacaggcagctatggagccctggccgagatcacagccagcaaggagggccagaaggagaaggacacagctggggtgaccaggtctgccagcagcccccggctgagcagcagcctggacaacaaggagaaggagaaggacagcaagggcacccggctggcctacgtggcccccaccatcccccggcggctggccagcaccagtgacatcgaggagaaggaaaatagagacagcagcagcctgcggaccagcagcagctacaccaggaggaagtgggaggatgacctgaagaagaacagctctgtgaatgaaggcagcacctaccacaagagctgcagctttggaagacggcaggatgacctgatcagcagctctgtgcccagcaccaccagcacccccaccgtgaccagcgctgctggcctgcagaagagcctgctgagcagcaccagcaccaccaccaagatcaccaccggcagcagcagcgctggcacccagagcagcaccagcaaccggctgtgggccgaggacagcacagagaaggagaaggacagcgtgcccacagctgtgaccatccctgtggcccccaccgtggtgaatgctgctgccagcaccaccaccctgaccaccaccacagctggcaccgtgagcagcaccacagaggtgcgggagcggcggcgcagctacctgacccctgtgagagatgaggagagcgagagccagaggaaggcccggagccggcaggcccggcagagcagaagaagcacccagggcgtgaccctgacagacctgcaggaggccgagaagaccatcggccgcagccgcagcaccaggacccgggagcaggagaatgaggagaaggagaaggaggagaaggagaagcaggacaaggagaagcaggaggagaagaaggagagcgagaccagcagagaagatgagtacaagcagaagtacagcaggacctatgatgagacctaccagcgctacagacctgtgtccaccagcagcagcaccacccccagcagcagcctgagcaccatgagcagcagcctgtatgccagcagccagctgaaccggcccaacagcctggtgggcatcaccagcgcctacagccggggcatcaccaaggaaaatgaaagagaaggagagaagcgggaggaggagaaggagggggaggacaagagccagcccaagagcatccgggagcggcggcggccccgggagaagaggaggagcactggagtgtccttctggacccaggacagtgatgaaaatgagcaggagcagcagagcgacacagaggagggcagcaacaagaaggagacccaggtgaacaccatcaccctgtatgagaccagcagcaccagcgctggggacagatatgacagcctgctgggccgcagcggcagctacagctacctggaggagaggaagccctacagcagccggctggagaaggatgacagcacagacttcaagaagaggcaggagagatttgctgacaggagcctgctggagatggagaagcgggagcggcgggccctggagcggcgcatcagcgagatggaggaggagctgaagatgctgcctgacctgaaggctgacaaccagaggctgaaggatgaaaatggagccctgatccgggtcatcagcaagctgagcaagtag

SEQ ID NO: 166097 - DNA, 2988 bp, synthetic construct
  misc_feature 1..2988: note = Description of Artificial Sequence: Synthetic coding sequence
  source 1..2988: mol_type = other DNA
atgaagatggctgatgccaagcagaagagaaatgagcagctgaagcgctggattggcagcgagacagacctggagccccctgtggtgaagaggcagaagaccaaggtgaagtttgatgatggagctgtgttcctggccgcctgcagcagcggggacacagatgaggtgctgaagctgctgcacagaggagctgacatcaactatgccaacgtggatggcctgacagccctgcaccaggcctgcattgatgacaacgtggacatggtgaagttcctggtggagaatggagccaacatcaaccagcctgacaatgaaggctggatccccctgcacgccgccgccagctgtggctacctggacattgctgagttcctgattggccagggcgcccacgtgggcgctgtgaacagcgagggggacacccccctggacattgctgaggaggaggccatggaggagctgctgcagaatgaggtgaaccggcagggcgtggacatcgaggccgccaggaaggaggaggagcgcatcatgctgagagatgcccggcagtggctgaacagcggccacatcaatgatgtgagacatgccaagagcggcggcacagccctgcacgtggccgccgccaagggctacacagaggtgctgaagctgctgatccaggccggctatgatgtgaacatcaaggactatgatggctggacccccctgcacgccgccgcccactggggcaaggaggaggcctgccgcatcctggtggacaacctgtgtgacatggagatggtgaacaaggtgggccagacagcctttgatgtggctgatgaggacatcctgggctacctggaggagctgcagaagaagcagaacctgctgcacagcgagaagagggacaagaagagccccctcatcgagagcacagccaacatggacaacaaccagagccagaagaccttcaagaacaaggagaccctcatcatcgagcctgagaagaatgccagccgcatcgagagcctggagcaggagaaggtggatgaggaggaggagggcaagaaggatgagagcagctgcagcagtgaagaagatgaggaggatgattctgagagcgaggccgagacagacaagaccaagcccctggcctctgtgaccaatgccaacaccagcagcacccaggccgcccctgtggccgtgaccacccccaccgtgagcagcggccaggccacccccaccagccccatcaagaagttccccaccacagccaccaagatcagccccaaggaggaggagaggaaggatgagagccctgccacctggaggctgggcctgaggaagacaggcagctatggagccctggccgagatcacagccagcaaggagggccagaaggagaaggacacagctggggtgaccaggtctgccagcagcccccggctgagcagcagcctggacaacaaggagaaggagaaggacagcaagggcacccggctggcctacgtggcccccaccatcccccggcggctggccagcaccagtgacatcgaggagaaggaaaatagagacagcagcagcctgcggaccagcagcagctacaccaggaggaagtgggaggatgacctgaagaagaacagctctgtgaatgaaggcagcacctaccacaagagctgcagctttggaagacggcaggatgacctgatcagcagctctgtgcccagcaccaccagcacccccaccgtgaccagcgctgctggcctgcagaagagcctgctgagcagcaccagcaccaccaccaagatcaccaccggcagcagcagcgctggcacccagagcagcaccagcaaccggctgtgggccgaggacagcacagagaaggagaaggacagcgtgcccacagctgtgaccatccctgtggcccccaccgtggtgaatgctgctgccagcaccaccaccctgaccaccaccacagctggcaccgtgagcagcaccacagaggtgcgggagcggcggcgcagctacctgacccctgtgagagatgaggagagcgagagccagaggaaggcccggagccggcaggcccggcagagcagaagaagcacccagggcgtgaccctgacagacctgcaggaggccgagaagaccatcggccgcagccgcagcaccaggacccgggagcaggagaatgaggagaaggagaaggaggagaaggagaagcaggacaaggagaagcaggaggagaagaaggagagcgagaccagcagagaagatgagtacaagcagaagtacagcaggacctatgatgagacctaccagcgctacagacctgtgtccaccagcagcagcaccacccccagcagcagcctgagcaccatgagcagcagcctgtatgccagcagccagctgaaccggcccaacagcctggtgggcatcaccagcgcctacagccggggcatcaccaaggaaaatgaaagagaaggagagaagcgggaggaggagaaggagggggaggacaagagccagcccaagagcatccgggagcggcggcggccccgggagaagaggaggagcactggagtgtccttctggacccaggacagtgatgaaaatgagcaggagcagcagagcgacacagaggagggcagcaacaagaaggagacccagacagacagcatcagccgctatgagaccagcagcaccagcgctggggacagatatgacagcctgctgggccgcagcggcagctacagctacctggaggagaggaagccctacagcagccggctggagaaggatgacagcacagacttcaagaagaggcaggagagatttgctgacaggagcctgctggagatggagaagcgggagcggcgggccctggagcggcgcatcagcgagatggaggaggagctgaagatgctgcctgacctgaaggctgacaaccagaggctgaaggatgaaaatggagccctgatccgggtcatcagcaagctgagcaagtag

SEQ ID NO: 166098 - DNA, 3093 bp, synthetic construct; identical to SEQ ID NO: 166093
  misc_feature 1..3093: note = Description of Artificial Sequence: Synthetic coding sequence
  source 1..3093: mol_type = other DNA

SEQ ID NO: 166099 - DNA, 3093 bp, synthetic construct
  misc_feature 1..3093: note = Description of Artificial Sequence: Synthetic coding sequence
  source 1..3093: mol_type = other DNA
atgaagatggctgatgccaagcagaagagaaatgagcagctgaagcgctggattggcagcgagacagacctggagccccctgtggtgaagaggcagaagaccaaggtgaagtttgatgatggagctgtgttcctggccgcctgcagcagcggggacacagatgaggtgctgaagctgctgcacagaggagctgacatcaactatgccaacgtggatggcctgacagccctgcaccaggcctgcattgatgacaacgtggacatggtgaagttcctggtggagaatggagccaacatcaaccagcctgacaatgaaggctggatccccctgcacgccgccgccagctgtggctacctggacattgctgagttcctgattggccagggcgcccacgtgggcgctgtgaacagcgagggggacacccccctggacattgctgaggaggaggccatggaggagctgctgcagaatgaggtgaaccggcagggcgtggacatcgaggccgccaggaaggaggaggagcgcatcatgctgagagatgcccggcagtggctgaacagcggccacatcaatgatgtgagacatgccaagagcggcggcacagccctgcacgtggccgccgccaagggctacacagaggtgctgaagctgctgatccaggccggctatgatgtgaacatcaaggactatgatggctggacccccctgcacgccgccgcccactggggcaaggaggaggcctgccgcatcctggtggacaacctgtgtgacatggagatggtgaacaaggtgggccagacagcctttgatgtggctgatgaggacatcctgggctacctggaggagctgcagaagaagcagaacctgctgcacagcgagaagagggacaagaagagccccctcatcgagagcacagccaacatggacaacaaccagagccagaagaccttcaagaacaaggagaccctcatcatcgagcctgagaagaatgccagccgcatcgagagcctggagcaggagaaggtggatgaggaggaggagggcaagaaggatgagagcagctgcagcagtgaagaagatgaggaggatgattctgagagcgaggccgagacagacaagaccaagcccctggcctctgtgaccaatgccaacaccagcagcacccaggccgcccctgtggccgtgaccacccccaccgtgagcagcggccaggccacccccaccagccccatcaagaagttccccaccacagccaccaagatcagccccaaggaggaggagaggaaggatgagagccctgccacctggaggctgggcctgaggaagacaggcagctatggagccctggccgagatcacagccagcaaggagggccagaaggagaaggacacagctggggtgaccaggtctgccagcagcccccggctgagcagcagcctggacaacaaggagaaggagaaggacagcaagggcacccggctggcctacgtggcccccaccatcccccggcggctggccagcaccagtgacatcgaggagaaggaaaatagagacagcagcagcctgcggaccagcagcagctacaccaggaggaagtgggaggatgacctgaagaagaacagctctgtgaatgaaggcagcacctaccacaagagctgcagctttggaagacggcaggatgacctgatcagcagctctgtgcccagcaccaccagcacccccaccgtgaccagcgctgctggcctgcagaagagcctgctgagcagcaccagcaccaccaccaagatcaccaccggcagcagcagcgctggcacccagagcagcaccagcaaccggctgtgggccgaggacagcacagagaaggagaaggacagcgtgcccacagctgtgaccatccctgtggcccccaccgtggtgaatgctgctgccagcaccaccaccctgaccaccaccacagctggcaccgtgagcagcaccacagaggtgcgggagcggcggcgcagctacctgacccctgtgagagatgaggagagcgagagccagaggaaggcccggagccggcaggcccggcagagcagaagaagcacccagggcgtgaccctgacagacctgcaggaggccgagaagaccatcggccgcagccgcagcaccaggacccgggagcaggagaatgaggagaaggagaaggaggagaaggagaagcaggacaaggagaagcaggaggagaagaaggagagcgagaccagcagagaagatgagtacaagcagaagtacagcaggacctatgatgagacctaccagcgctacagacctgtgtccaccagcagcagcaccacccccagcagcagcctgagcaccatgagcagcagcctgtatgccagcagccagctgaaccggcccaacagcctggtgggcatcaccagcgcctacagccggggcatcaccaaggaaaatgaaagagaaggagagaagcgggaggaggagaaggagggggaggacaagagccagcccaagagcatccgggagcggcggcggccccgggagaagaggaggagcactggagtgtccttctggacccaggacagtgatgaaaatgagcaggagcagcagagcgacacagaggagggcagcaacaagaaggagacccaggtgaacaccatcaccctgtatgagaccagcagcaccagcgctggggacagatatgacagcctgctgggccgcagcggcagctacagctacctggaggagaggaagccctacagcagccggctggagaaggatgacagcacagacttcaagaagctgtatgagcagatcctggccgagaatgagaagctgaaggcccagctgcatgacaccaacatggagctgacagacctgaagctgcagctggagaaggccacccagaggcaggagagatttgctgacaggagcctgctggagatggagaagcgggagcggcgggccctggagcggcgcatcagcgagatggaggaggagctgaagatgctgcctgacctgaaggctgacaaccagaggctgaaggatgaaaatggagccctgatccgggtcatcagcaagctgagcaagtag

SEQ ID NO: 166100 - DNA, 2832 bp, synthetic construct
  misc_feature 1..2832: note = Description of Artificial Sequence: Synthetic coding sequence
  source 1..2832: mol_type = other DNA
atggtgaagttcctggtggagaatggagccaacatcaaccagcctgacaatgaaggctggatccccctgcatgctgctgccagctgtggctacctggacattgctgagttcctgattggccagggcgcccacgtgggcgctgtgaacagcgagggggacacccccctggacattgctgaggaggaggccatggaggagctgctgcagaatgaggtgaaccggcagggcgtggacattgaagctgccaggaaggaggaggagcgcatcatgctgagagatgcccggcagtggctgaacagcggccacatcaatgatgtgagacatgccaagagcggcggcacagccctgcacgtggccgccgccaagggctacacagaggtgctgaagctgctgatccaggccggctatgatgtgaacatcaaggactatgatggctggacccccctgcatgctgctgcccactggggcaaggaggaggcctgccgcatcctggtggacaacctgtgtgacatggagatggtgaacaaggtgggccagacagcctttgatgtggctgatgaggacatcctgggctacctggaggagctgcagaagaagcagaacctgctgcacagcgagaagagggacaagaagagccccctgattgagagcacagccaacatggacaacaaccagagccagaagaccttcaagaacaaggagaccctcatcatcgagcctgagaagaatgccagcagaattgagagcctggagcaggagaaggtggatgaggaggaggagggcaagaaggatgagagcagctgcagcagcgaggaggatgaagaagatgacagcgagagcgaggccgagacagacaagaccaagcccctggcctctgtgaccaatgccaacaccagcagcacccaggccgcccctgtggccgtgaccacccccaccgtgagcagcggccaggccacccccaccagccccatcaagaagttccccaccacagccaccaagatcagccccaaggaggaggagaggaaggatgagagccctgccacctggaggctgggcctgaggaagacaggcagctatggagccctggccgagatcacagccagcaaggagggccagaaggagaaggacacagctggggtgaccaggtctgccagcagcccccggctgagcagcagcctggacaacaaggagaaggagaaggacagcaagggcacccggctggcctacgtggcccccaccatcccccggcggctggccagcaccagtgacatcgaggagaaggagaacagagacagcagcagcctgcggaccagcagcagctacaccaggaggaagtgggaggatgacctgaagaagaacagctctgtgaatgaaggcagcacctaccacaagagctgcagctttggccggcggcaggatgacctgatcagcagctctgtgcccagcaccaccagcacccccaccgtgaccagcgctgctggcctgcagaagagcctgctgagcagcaccagcaccaccaccaagatcaccaccggcagcagcagcgctggcacccagagcagcaccagcaaccggctgtgggccgaggacagcacagagaaggagaaggacagcgtgcccacagctgtgaccatccctgtggcccccaccgtggtgaatgctgctgccagcaccaccaccctgaccaccaccacagctggcaccgtgagcagcaccacagaggtgcgggagaggagaagaagctacctgacccctgtgagagatgaggagagcgagagccagaggaaggcccggagccggcaggcccggcagagccgccgcagcacccagggcgtgaccctgacagacctgcaggaggccgagaagaccatcggccgcagccgcagcaccaggacccgggagcaggagaatgaggagaaggagaaggaggagaaggagaagcaggacaaggagaagcaggaggagaagaaggagagcgagaccagccgggaggatgagtacaagcagaagtacagcaggacctatgatgagacctaccagcgctacagacctgtgtccaccagcagcagcaccacccccagcagcagcctgagcaccatgagcagcagcctgtatgccagcagccagctgaaccggcccaacagcctggtgggcatcaccagcgcctacagccggggcatcaccaaggaaaatgaaagagaaggagagaagcgggaggaggagaaggagggggaggacaagagccagcccaagagcatccgggagaggagaagaccccgggagaagagaagaagcactggagtgtccttctggacccaggacagtgatgaaaatgagcaggagcagcagagcgacacagaggagggcagcaacaagaaggagacccagacagacagcatcagccgctatgagaccagcagcaccagcgctggggacagatatgacagcctgctgggccgcagcggcagctacagctacctggaggagaggaagccctacagcagccggctggagaaggatgacagcacagacttcaagaagctgtatgagcagatcctggctgaaaatgagaagctgaaggcccagctgcatgacaccaacatggagctgacagacctgaagctgcagctggagaaggccacccagaggcaggagagatttgctgacaggagcctgctggagatggagaagcgggagcggcgggccctggagcggcgcatcagcgagatggaggaggagctgaagatgctgcctgacctgaaggctgacaaccagaggctgaaggatgaaaatggagccctgatccgggtcatcagcaagctgagcaagtag

SEQ ID NO: 166101 - DNA, 2925 bp, synthetic construct
  misc_feature 1..2925: note = Description of Artificial Sequence: Synthetic coding sequence
  source 1..2925: mol_type = other DNA
atgaagatggctgatgccaagcagaagagaaatgagcagctgaagcgctggattggcagcgagacagacctggagccccctgtggtgaagaggcagaagaccaaggtgaagtttgatgatggagctgtgttcctggccgcctgcagcagcggggacacagatgaggtgctgaagctgctgcacagaggagctgacatcaactatgccaacgtggatggcctgacagccctgcaccaggcctgcattgatgacaacgtggacatggtgaagttcctggtggagaatggagccaacatcaaccagcctgacaatgaaggctggatccccctgcacgccgccgccagctgtggctacctggacattgctgagttcctgattggccagggcgcccacgtgggcgctgtgaacagcgagggggacacccccctggacattgctgaggaggaggccatggaggagctgctgcagaatgaggtgaaccggcagggcgtggacatcgaggccgccaggaaggaggaggagcgcatcatgctgagagatgcccggcagtggctgaacagcggccacatcaatgatgtgagacatgccaagagcggcggcacagccctgcacgtggccgccgccaagggctacacagaggtgctgaagctgctgatccaggccggctatgatgtgaacatcaaggactatgatggctggacccccctgcacgccgccgcccactggggcaaggaggaggcctgccgcatcctggtggacaacctgtgtgacatggagatggtgaacaaggtgggccagacagcctttgatgtggctgatgaggacatcctgggctacctggaggagctgcagaagaagcagaacctgctgcacagcgagaagagggacaagaagagccccctcatcgagagcacagccaacatggacaacaaccagagccagaagaccttcaagaacaaggagaccctcatcatcgagcctgagaagaatgccagccgcatcgagagcctggagcaggagaaggtggatgaggaggaggagggcaagaaggatgagagcagctgcagcagtgaagaagatgaggaggatgattctgagagcgaggccgagacagacaagaccaagcccctggcctctgtgaccaatgccaacaccagcagcacccaggccgcccctgtggccgtgaccacccccaccgtgagcagcggccaggccacccccaccagccccatcaagaagttccccaccacagccaccaagatcagccccaaggaggaggagaggaaggatgagagccctgccacctggaggctgggcctgaggaagacaggcagctatggagccctggccgagatcacagccagcaaggagggccagaaggagaaggacacagctggggtgaccaggtctgccagcagcccccggctgagcagcagcctggacaacaaggagaaggagaaggacagcaagggcacccggctggcctacgtggcccccaccatcccccggcggctggccagcaccagtgacatcgaggagaaggaaaatagagacagcagcagcctgcggaccagcagcagctacaccaggaggaagtgggaggatgacctgaagaagaacagctctgtgaatgaaggcagcacctaccacaagagcaccagcaaccggctgtgggccgaggacagcacagagaaggagaaggacagcgtgcccacagctgtgaccatccctgtggcccccaccgtggtgaatgctgctgccagcaccaccaccctgaccaccaccacagctggcaccgtgagcagcaccacagaggtgcgggagcggcggcgcagctacctgacccctgtgagagatgaggagagcgagagccagaggaaggcccggagccggcaggcccggcagagcagaagaagcacccagggcgtgaccctgacagacctgcaggaggccgagaagaccatcggccgcagccgcagcaccaggacccgggagcaggagaatgaggagaaggagaaggaggagaaggagaagcaggacaaggagaagcaggaggagaagaaggagagcgagaccagcagagaagatgagtacaagcagaagtacagcaggacctatgatgagacctaccagcgctacagacctgtgtccaccagcagcagcaccacccccagcagcagcctgagcaccatgagcagcagcctgtatgccagcagccagctgaaccggcccaacagcctggtgggcatcaccagcgcctacagccggggcatcaccaaggaaaatgaaagagaaggagagaagcgggaggaggagaaggagggggaggacaagagccagcccaagagcatccgggagcggcggcggccccgggagaagaggaggagcactggagtgtccttctggacccaggacagtgatgaaaatgagcaggagcagcagagcgacacagaggagggcagcaacaagaaggagacccagacagacagcatcagccgctatgagaccagcagcaccagcgctggggacagatatgacagcctgctgggccgcagcggcagctacagctacctggaggagaggaagccctacagcagccggctggagaaggatgacagcacagacttcaagaagctgtatgagcagatcctggccgagaatgagaagctgaaggcccagctgcatgacaccaacatggagctgacagacctgaagctgcagctggagaaggccacccagaggcaggagagatttgctgacaggagcctgctggagatggagaagcgggagcggcgggccctggagcggcgcatcagcgagatggaggaggagctgaagatgctgcctgacctgaaggctgacaaccagaggctgaaggatgaaaatggagccctgatccgggtcatcagcaagctgagcaagtag

SEQ ID NO: 166102 - DNA, 2949 bp, synthetic construct
  misc_feature 1..2949: note = Description of Artificial Sequence: Synthetic coding sequence
  source 1..2949: mol_type = other DNA
atggccgagctggagcacctgggcggcaagagagctgagagcgccaggatgagaagagctgagcagctgcggcgctggaggggcagcctgacagagcaggagcctgctgagaggagaggagctggccggcagcccctgacccggcggggcagcccccgggtgcgctttgaagatggagctgtgttcctggccgcctgcagcagcggggacacagatgaggtgaggaagctgctggcccggggagctgacatcaacacagtgaatgtggatggcctgacagccctgcaccaggcctgcattgatgagaacctggacatggtgaagttcctggtggagaacagagccaacgtgaaccagcaggacaatgaaggctggacccccctgcacgccgccgccagctgtggctacctgaacattgctgagtacttcatcaaccacggggcctctgtgggcatcgtgaacagcgagggggaggtgcccagcgacctggccgaggagcccgccatgaaggacctgctgctggagcaggtgaagaagcagggcgtggacctggagcagagcaggaaggaggaggagcagcagatgctgcaggatgcccggcagtggctgaacagcggcaagattgaagatgtgcggcaggcccggagcggggccacagccctgcacgtggccgccgccaagggctacagcgaggtgctgcggctgctgatccaggccggctatgagctgaatgtgcaggactatgatggctggacccccctgcacgccgccgcccactggggcgtgaaggaggcctgcagcatcctggccgaggccctgtgtgacatggacatccggaacaagctgggccagaccccatttgatgtggctgatgagggcctggtggagcacctggagctgctgcagaagaagcagaatgtgctgcggtctgagaaggagaccaggaacaagctgattgaaagtgacctgaacagcaagatccagagcggcttcttcaagaacaaggagaagatgctgtatgaggaggagacccccaagagccaggagatggaggaggagaacaaggagagcagcagcagcagcagcgaggaggaggagggggaggatgaggccagcgagagcgagacagagaaggaggccgacaagaagccagaggcctttgtgaaccacagcaacagcgagagcaagagcagcatcacagagcagatcccagccccagcccagaacaccttcagcgccagcagcgcccggcgcttcagcagcggcctcttcaacaagccagaggagcccaaggatgagagccccagctcctggaggctgggcctgaggaagacaggcagccacaacatgctgtctgaggtggccaacagccgggagcccatccgggaccggggcagcagcatctaccgcagcagcagcagcccccgcatcagcgccctgctggacaacaaggacaaggagcgggagaacaagagctacatcagcagcctggcccccaggaagctgaacagcaccagtgacatcgaggagaaggagaaccgggagagcgctgtgaacctggtgcgcagcggcagctacacccggcagctgtggagagatgaggccaagggaaatgagatcccccagaccatcgcccccagcacctacgtgtccacctacctgaagaggaccccccacaagagccaggccgacaccacagctgagaagacagctgacaacgtgagcagcagcacccccctgtgtgtgatcaccaaccggcccctgcccagcacagccaatggagtgacagccacccctgtgctgagcatcaccggcacagacagctctgtggaggcccgggagaagaggaggagctacctgacccctgtgagagatgaggaggccgagagcctgaggaaggcccggagccggcaggcccggcagaccaggaggagcacccagggcgtgaccctgacagacctgcaggaggccgagaggaccttcagccgcagcagagctgagcggcaggcccaggagcagccccgggagaagcccacagacacagagggcctggagggcagccctgagaagcatgagcccagcgctgtgcctgccacagaagctggggagggccagcagccctggggccgcagcctggatgaggagcccatctgccaccggctgcgctgcccagcccagcctgacaagcccaccaccccagccagccccagcaccagccggcccagcctgtacaccagcagccacctgctgtggaccaaccgcttctctgtgcctgacagcgagagcagcgagaccaccaccaacaccaccacagccaaggagatggacaagaatgaaaatgaggaggccgacctggatgagcagagcagcaagaggctgagcatccgggagaggagaagacccaaggagaggagaagaggcaccggcatcaacttctggaccaaggatgaagatgaaacagatggcagcgaggaggtgaaggagacctgggccgagcggctgaagaggctggagagcggcggcagcaaccccaccaccagtgacagctatggagaccgggccagcgcccgggcccggcgggaggcccgggaggcccggctggccaccctgaccagccgggtggaggaggacagcaacagagactacaagaagctgtatgagagcgccctgacagagaaccagaagctgaagaccaagctgcaggaggcccagctggagctggccgacatcaagagcaagctggagaaggtggcccagcagaagcaggagaagaccagtgacaggagctctgtgctggagatggagaagcgggagcggcgggccctggagaggaagatgtctgagatggaggaggagatgaaggtgctgacagagctgaagagtgacaaccagaggctgaaggatgaaaatggagccctgatccgggtcatcagcaagctgagcaagtag

SEQ ID NO: 166103 - DNA, 1161 bp, synthetic construct
  misc_feature 1..1161: note = Description of Artificial Sequence: Synthetic coding sequence
  source 1..1161: mol_type = other DNA
atggccgagctggagcacctgggcggcaagagagctgagagcgccaggatgagaagagctgagcagctgcggcgctggaggggcagcctgacagagcaggagcctgctgagaggagaggagctggccggcagcccctgacccggcggggcagcccccgggtgcgctttgaagatggagctgtgttcctggccgcctgcagcagcggggacacagatgaggtgaggaagctgctggcccggggagctgacatcaacacagtgaatgtggatggcctgacagccctgcaccaggcctgcattgatgagaacctggacatggtgaagttcctggtggagaacagagccaacgtgaaccagcaggacaatgaaggctggacccccctgcacgccgccgccagctgtggctacctgaacattgctgagtacttcatcaaccacggggcctctgtgggcatcgtgaacagcgagggggaggtgcccagcgacctggccgaggagcccgccatgaaggacctgctgctggagcaggtgaagaagcagggcgtggacctggagcagagcaggaaggaggaggagcagcagatgctgcaggatgcccggcagtggctgaacagcggcaagattgaagatgtgcggcaggcccggagcggggccacagccctgcacgtggccgccgccaagggctacagcgaggtgctgcggctgctgatccaggccggctatgagctgaatgtgcaggactatgatggctggacccccctgcacgccgccgcccactggggcgtgaaggaggcctgcagcatcctggccgaggccctgtgtgacatggacatccggaacaagctgggccagaccccatttgatgtggctgatgagggcctggtggagcacctggagctgctgcagaagaagcagaatgtgctgcggtctgagaaggagaccaggaacaagctgattgaaagtgacctgaacagcaagatccagagcggcttcttcaagaacaaggagaagatgctgtatgaggaggagacccccaagagccaggagatggaggaggagaacaaggagagcagcagcagcagcagcgaggaggaggagggggaggatgaggccagcgagagcgagacagagaaggaggccgtgctcttctggcccttctag

SEQ ID NO: 166104 - DNA, 675 bp, synthetic construct
  misc_feature 1..675: note = Description of Artificial Sequence: Synthetic coding sequence
  source 1..675: mol_type = other DNA
atggacaagaatgaaaatgaggaggccgacctggatgagcagagcagcaagaggctgagcatccgggagaggagaagacccaaggagaggagaagaggcaccggcatcaacttctggaccaaggatgaagatgaaacagatggcagcgaggaggtgaaggagacctggcatgagcggctgagccggctggagagcggcggcagcaaccccaccaccagtgacagctatggagaccgggccagcgcccgggcccggcgggaggcccgggaggcccggctggccaccctgaccagccgggtggaggaggacagcaacagagactacaagaagctgtatgagagcgccctgacagagaaccagaagctgaagaccaagctgcaggaggcccagctggagctggccgacatcaagagcaagctggagaaggtggcccagcagaagcaggagaagaccagtgacaggagctctgtgctggagatggagaagcgggagcggcgggccctggagaggaagatgtctgagatggaggaggagatgaagaacctgcaccagctgaagcagatccagaccctgaagcagatgaatgagcagctgcaggctgaaaatagagccctgaccagggtggtggcccggctgtctgagagcattgagagcagtgacacccaggagctgtag

SEQ ID NO: 166105 - DNA, 627 bp, synthetic construct
  misc_feature 1..627: note = Description of Artificial Sequence: Synthetic coding sequence
  source 1..627: mol_type = other DNA
atggacaagaatgaaaatgaggaggccgacctggatgagcagagcagcaagaggctgagcatccgggagaggagaagacccaaggagaggagaagaggcaccggcatcaacttctggaccaaggatgaagatgaaacagatggcagcgaggaggtgaaggagacctggcatgagcggctgagccggctggagagcggcggcagcaaccccaccaccagtgacagctatggagaccgggccagcgcccgggcccggcgggaggcccgggaggcccggctggccaccctgaccagccgggtggaggaggacagcaacagagactacaagaagctgtatgagagcgccctgacagagaaccagaagctgaagaccaagctgcaggaggcccagctggagctggccgacatcaagagcaagctggagaaggtggcccagcagaagcaggagaagaccagtgacaggagctctgtgctggagatggagaagcgggagcggcgggccctggagaggaagatgtctgagatggaggaggagatgaaggtgctgacagagctgaagagtgacaaccagaggctgaaggatgaaaatggagccctgatccgggtcatcagcaagctgagcaagtag

SEQ ID NO: 166106 - DNA, 2949 bp, synthetic construct
  misc_feature 1..2949: note = Description of Artificial Sequence: Synthetic coding sequence
  source 1..2949: mol_type = other DNA
atggccgagctggagcacctgggcggcaagagagctgagagcgccaggatgagaagagctgagcagctgcggcgctggaggggcagcctgacagagcaggagcctgctgagaggagaggagctggccggcagcccctgacccggcggggcagcccccgggtgcgctttgaagatggagctgtgttcctggccgcctgcagcagcggggacacagatgaggtgaggaagctgctggcccggggagctgacatcaacacagtgaatgtggatggcctgacagccctgcaccaggcctgcattgatgagaacctggacatggtgaagttcctggtggagaacagagccaacgtgaaccagcaggacaatgaaggctggacccccctgcacgccgccgccagctgtggctacctgaacattgctgagtacttcatcaaccacggggcctctgtgggcatcgtgaacagcgagggggaggtgcccagcgacctggccgaggagcccgccatgaaggacctgctgctggagcaggtgaagaagcagggcgtggacctggagcagagcaggaaggaggaggagcagcagatgctgcaggatgcccggcagtggctgaacagcggcaagattgaagatgtgcggcaggcccggagcggggccacagccctgcacgtggccgccgccaagggctacagcgaggtgctgcggctgctgatccaggccggctatgagctgaatgtgcaggactatgatggctggacccccctgcacgccgccgcccactggggcgtgaaggaggcctgcagcatcctggccgaggccctgtgtgacatggacatccggaacaagctgggccagaccccatttgatgtggctgatgagggcctggtggagcacctggagctgctgcagaagaagcagaatgtgctgcggtctgagaaggagaccaggaacaagctgattgaaagtgacctgaacagcaagatccagagcggcttcttcaagaacaaggagaagatgctgtatgaggaggagacccccaagagccaggagatggaggaggagaacaaggagagcagcagcagcagcagcgaggaggaggagggggaggatgaggccagcgagagcgagacagagaaggaggccgacaagaagccagaggcctttgtgaaccacagcaacagcgagagcaagagcagcatcacagagcagatcccagccccagcccagaacaccttcagcgccagcagcgcccggcgcttcagcagcggcctcttcaacaagccagaggagcccaaggatgagagccccagctcctggaggctgggcctgaggaagacaggcagccacaacatgctgtctgaggtggccaacagccgggagcccatccgggaccggggcagcagcatctaccgcagcagcagcagcccccgcatcagcgccctgctggacaacaaggacaaggagcgggagaacaagagctacatcagcagcctggcccccaggaagctgaacagcaccagtgacatcgaggagaaggagaaccgggagagcgctgtgaacctggtgcgcagcggcagctacacccggcagctgtggagagatgaggccaagggaaatgagatcccccagaccatcgcccccagcacctacgtgtccacctacctgaagaggaccccccacaagagccaggccgacaccacagctgagaagacagctgacaacgtgagcagcagcacccccctgtgtgtgatcaccaaccggcccctgcccagcacagccaatggagtgacagccacccctgtgctgagcatcaccggcacagacagctctgtggaggcccgggagaagaggaggagctacctgacccctgtgagagatgaggaggccgagagcctgaggaaggcccggagccggcaggcccggcagaccaggaggagcacccagggcgtgaccctgacagacctgcaggaggccgagaggaccttcagccgcagcagagctgagcggcaggcccaggagcagccccgggagaagcccacagacacagagggcctggagggcagccctgagaagcatgagcccagcgctgtgcctgccacagaagctggggagggccagcagccctggggccgcagcctggatgaggagcccatctgccaccggctgcgctgcccagcccagcctgacaagcccaccaccccagccagccccagcaccagccggcccagcctgtacaccagcagccacctgctgtggaccaaccgcttctctgtgcctgacagcgagagcagcgagaccaccaccaacaccaccacagccaaggagatggacaagaatgaaaatgaggaggccgacctggatgagcagagcagcaagaggctgagcatccgggagaggagaagacccaaggagaggagaagaggcaccggcatcaacttctggaccaaggatgaagatgaaacagatggcagcgaggaggtgaaggagacctggcatgagcggctgagccggctggagagcggcggcagcaaccccaccaccagtgacagctatggagaccgggccagcgcccgggcccggcgggaggcccgggaggcccggctggccaccctgaccagccgggtggaggaggacagcaacagagactacaagaagctgtatgagagcgccctgacagagaaccagaagctgaagaccaagctgcaggaggcccagctggagctggccgacatcaagagcaagctggagaaggtggcccagcagaagcaggagaagaccagtgacaggagctctgtgctggagatggagaagcgggagcggcgggccctggagaggaagatgtctgagatggaggaggagatgaaggtgctgacagagctgaagagtgacaaccagaggctgaaggatgaaaatggagccctgatccgggtcatcagcaagctgagcaagtag

SEQ ID NO: 166107 - DNA, 2349 bp, synthetic construct
  misc_feature 1..2349: note = Description of Artificial Sequence: Synthetic coding sequence
  source 1..2349: mol_type = other DNA
atgtctggagaagatggccctgctgctggccctggagctgctgctgctgctgcccgggagcggcggcgggagcagctgcggcagtggggcgcccgggccggggctgagcccggccctggagagcggcgggccaggacagtgcgctttgaaagagctgctgagttcctggccgcctgtgccggcggggacctggatgaggcccggctgatgctgcgggctgctgaccccggccctggagctgagctggaccctgctgcccctcctccagcccgggctgtgctggacagcaccaatgctgatggcatcagcgccctgcaccaggcctgcattgatgagaacctggaggtggtgcgcttcctggtggagcagggcgccaccgtgaaccaggccgacaatgaaggctggacccccctgcacgtggccgccagctgtggctacctggacatcgcccgctacctgctgagccacggggccaacattgctgctgtgaacagtgatggagacctgcccctggacctggccgagagtgatgccatggagggcctgctgaaggccgagatcgccaggagaggagtggatgtggaggccgccaagagagctgaggaggagctgctgctgcatgacacccgctgctggctgaatggaggagccatgcctgaggcccggcaccccaggactggagccagcgccctgcacgtggccgccgccaagggctacatcgaggtgatgaggctgctgctgcaggccggctatgaccctgagctgagagatggagatggctggacccccctgcacgccgccgcccactggggcgtggaggatgcctgccgcctgctggccgagcacggcggcggcatggacagcctgacccacgccggccagaggccctgtgacctggctgatgaggaggtgctgagcctgctggaggagctggccaggaagcaggaggacctgaggaaccagaaggaggccagccagagccggggccaggagccccaggcccccagcagcagcaagcacagaagaagctctgtgtgccgcctgagcagccgggagaagatcagcctgcaggacctgagcaaggagaggaggcctggaggagctgggggcccccccatccaggatgaagatgaaggagaggagggccccacagagcccccacctgctgagcccaggaccctgaatggagtgagcagccccccccaccccagccccaagagccctgtgcagctggaggaggcccccttcagccgccgcttcggcctgctgaagacaggcagcagcggggccctgggccccccagagaggagaacagctgagggcgcccctggagctggcctgcagaggtctgccagcagctcctggctggagggcaccagcacccaggccaaggagctgcggctggcccgcatcacccccacccccagccccaagctgcctgagcccagcgtgctgtctgaggtgaccaagcccccaccctgcctggagaacagcagcccccccagccgcatccctgagcctgagagccctgccaagcccaacgtgcccacagccagcacagcccccccagctgacagccgggacagaagaagaagctaccagatgcctgtgagagatgaggagagcgagagccagaggaaggcccggagccggctgatgaggcagagcagaagaagcacccagggcgtgaccctgacagacctgaaggaggccgagaaggctgctgggaaggcccctgagagcgagaagccagcccagagcctggaccccagccggcggccccgggtgcctggggtggagaacagcgacagccctgcccagagagctgaggccccagatggccagggccctggcccccaggccgcccgggagcacaggaaggtgggcaaggagtggaggggccctgctgagggggaggaggccgagcctgctgacaggagccaggagagcagcaccctggagggcggccccagcgcccggcggcagcgctggcagagggacctgaaccctgagcctgagcctgagagcgaggagccagatggcggcttccgcaccctgtatgcagagctgcggagagaaaatgaaaggctgcgggaggccctgacagagaccaccctgcggctggcccagctgaaggtggagctggagcgggccacccagaggcaggagagatttgctgagaggcctgccctgctggagctggagagatttgaaagaagagccctggagaggaaggctgctgagctggaggaggagctgaaggccctgagtgacctgcgggctgacaaccagaggctgaaggatgaaaatgctgccctgatccgggtcatcagcaagctgagcaagtag

SEQ ID NO: 166108 - DNA, 2160 bp, synthetic construct
  misc_feature 1..2160: note = Description of Artificial Sequence: Synthetic coding sequence
  source 1..2160: mol_type = other DNA
atgtctggagaagatggccctgctgctggccctggagctgctgctgctgctgcccgggagcggcggcgggagcagctgcggcagtggggcgcccgggccggggctgagcccggccctggagagcggcgggccaggacagtgcgctttgaaagagctgctgagttcctggccgcctgtgccggcggggacctggatgaggcccggctgatgctgcgggctgctgaccccggccctggagctgagctggaccctgctgcccctcctccagcccgggctgtgctggacagcaccaatgctgatggcatcagcgccctgcaccaggcctgcattgatgagaacctggaggtggtgcgcttcctggtggagcagggcgccaccgtgaaccaggccgacaatgaaggctggacccccctgcacgtggccgccagctgtggctacctggacatcgcccgctacctgctgagccacggggccaacattgctgctgtgaacagtgatggagacctgcccctggacctggccgagagtgatgccatggagggcctgctgaaggccgagatcgccaggagaggagtggatgtggaggccgccaagagagctgaggaggagctgctgctgcatgacacccgctgctggctgaatggaggagccatgcctgaggcccggcaccccaggactggagccagcgccctgcacgtggccgccgccaagggctacatcgaggtgatgaggctgctgctgcaggccggctatgaccctgagctgagagatggagatggctggacccccctgcacgccgccgcccactggggcgtggaggatgcctgccgcctgctggccgagcacggcggcggcatggacagcctgacccacgccggccagaggccctgtgacctggctgatgaggaggtgctgagcctgctggaggagctggccaggaagcaggaggacctgaggaaccagaaggaggccagccagagccggggccaggagccccaggcccccagcagcagcaagcacagaagaagctctgtgtgccgcctgagcagccgggagaagatcagcctgcaggacctgagcaaggagaggaggcctggaggagctgggggcccccccatccaggatgaagatgaaggagaggagggccccacagagcccccacctgctgagcccaggaccctgaatggagtgagcagccccccccaccccagccccaagagccctgtgcagctggaggaggcccccttcagccgccgcttcggcctgctgaagacaggcagcagcggggccctgggccccccagagaggagaacagctgagggcgcccctggagctggcctgcagaggtctgccagcagctcctggctggagggcaccagcacccaggccaaggagctgcggctggcccgcatcacccccacccccagccccaagctgcctgagcccagcgtgctgtctgaggtgaccaagcccccaccctgcctggagaacagcagcccccccagccgcatccctgagcctgagagccctgccaagcccaacgtgcccacagccagcacagcccccccagctgacagccgggacagaagaagaagctaccagatgcctgtgagagatgaggagagcgagagccagaggaaggcccggagccggctgatgaggcagagcagaagaagcacccagggcgtgaccctgacagacctgaaggaggccgagaaggccggggaggaggccgagcctgctgacaggagccaggagagcagcaccctggagggcggccccagcgcccggcggcagcgctggcagagggacctgaaccctgagcctgagcctgagagcgaggagccagatggcggcttccgcaccctgtatgcagagctgcggcgggagaatgaaaggctgcgggaggccctgacagagaccaccctgcggctggcccagctgaaggtggagctggagcgggccacccagaggcaggagagatttgctgagaggcctgccctgctggagctggagagatttgagcggcgggccctggagaggaaggctgctgagctggaggaggagctgaaggccctgagtgacctgcgggctgacaaccagaggctgaaggatgaaaatgctgccctgatccgggtcatcagcaagctgagcaagtag

SEQ ID NO: 166109 - DNA, 2124 bp, synthetic construct
  misc_feature 1..2124: note = Description of Artificial Sequence: Synthetic coding sequence
  source 1..2124: mol_type = other DNA
atgagaaatggaggcccctgccagcccctggccgccggccccagggctgagggcgcctctgtgaactggagcgtgacagcctggggccctggcacccaggcctgcattgatgagaacctggaggtggtgcgcttcctggtggagcagggcgccaccgtgaaccaggccgacaatgaaggctggacccccctgcacgtggccgccagctgtggctacctggacatcgcccgctacctgctgagccacggggccaacattgctgctgtgaacagtgatggagacctgcccctggacctggccgagagtgatgccatggagggcctgctgaaggccgagatcgccaggagaggagtggatgtggaggccgccaagagagctgaggaggagctgctgctgcatgacacccgctgctggctgaatggaggagccatgcctgaggcccggcaccccaggactggagccagcgccctgcacgtggccgccgccaagggctacatcgaggtgatgaggctgctgctgcaggccggctatgaccctgagctgagagatggagatggctggacccccctgcacgccgccgcccactggggcgtggaggatgcctgccgcctgctggccgagcacggcggcggcatggacagcctgacccacgccggccagaggccctgtgacctggctgatgaggaggtgctgagcctgctggaggagctggccaggaagcaggaggacctgaggaaccagaaggaggccagccagagccggggccaggagccccaggcccccagcagcagcaagcacagaagaagctctgtgtgccgcctgagcagccgggagaagatcagcctgcaggacctgagcaaggagaggaggcctggaggagctgggggcccccccatccaggatgaagatgaaggagaggagggccccacagagcccccacctgctgagcccaggaccctgaatggagtgagcagccccccccaccccagccccaagagccctgtgcagctggaggaggcccccttcagccgccgcttcggcctgctgaagacaggcagcagcggggccctgggccccccagagaggagaacagctgagggcgcccctggagctggcctgcagaggtctgccagcagctcctggctggagggcaccagcacccaggccaaggagctgcggctggcccgcatcacccccacccccagccccaagctgcctgagcccagcgtgctgtctgaggtgaccaagcccccaccctgcctggagaacagcagcccccccagccgcatccctgagcctgagagccctgccaagcccaacgtgcccacagccagcacagcccccccagctgacagccgggacagaagaagaagctaccagatgcctgtgagagatgaggagagcgagagccagaggaaggcccggagccggctgatgaggcagagcagaagaagcacccagggcgtgaccctgacagacctgaaggaggccgagaaggctgctgggaaggcccctgagagcgagaagccagcccagagcctggaccccagccggcggccccgggtgcctggggtggagaacagcgacagccctgcccagcgggaggccccagatggccagggccctggcccccaggccgcccgggagcacaggaaggtgggcaaggagtggaggggccctgctgagggggaggaggccgagcctgctgacaggagccaggagagcagcaccctggagggcggccccagcgcccggcggcagcgctggcagagggacctgaaccctgagcctgagcctgagagcgaggagccagatggcggcttccgcaccctgtatgcagagctgcggcgggagaatgaaaggctgcgggaggccctgacagagaccaccctgcggctggcccagctgaaggtggagctggagcgggccacccagaggcaggagagatttgctgagaggcctgccctgctggagctggagagatttgagcggcgggccctggagaggaaggctgctgagctggaggaggagctgaaggccctgagtgacctgcgggctgacaaccagaggctgaaggatgaaaatgctgccctgatccgggtcatcagcaagctgagcaagtag

SEQ ID NO: 166110 - DNA, 2142 bp, synthetic construct
  misc_feature 1..2142: note = Description of Artificial Sequence: Synthetic coding sequence
  source 1..2142: mol_type = other DNA
atggagcccggcactggaggcagcaggaagaggctgggcccccgggccggcttccgcttctggccacccttcttccccaggaggagccaggccggcagcagcaagttccccacccccctgggcccagaaaattctggcaaccccaccctgctgagcagcgcccagcctgagaccagggtgtcctactggaccaagctgctgagccagctgctggcccccctgcccggcctgctgcagaaggtgctgatctggagccagctgtttggaggcatgttccccacccgctggctggactttgctggggtgtacagcgccctgcgggccctgaagggccgggagaagccagctgcccccacagcccagaagagcctgagcagcctgcagctggacagcagtgaccccagcgtgaccagccccctggactggctggaggagggcatccactggcagtacagccccccagacctgaagctggagctgaaggccaagggcagcgccctggaccctgctgcccaggccttcctgctggagcagcagctgtggggcgtggagctgctgcccagcagcctgcagagccggctgtacagcaaccgggagctgggcagcagccccagcggccccctgaacatccagagaattgacaacttctctgtggtgtcctacctgctgaaccccagctacctggactgcttcccccggctggaggtgtcctaccagaacagtgatggcaacagcgaggtggtgggcttccagaccctgaccccagagagcagctgcctgcgggaggaccactgccacccccagcccctgtctgctgagctgatcccagcctcctggcagggctgcccccccctgagcacagagggcctgcctgagatccaccacctgaggatgaagaggctggagttcctgcagcaggccaacaagggccaggacctgcccaccccagaccaggacaatggctaccacagcctggaggaggagcacagcctgctgaggatggaccccaagcactgccgggacaaccccacccagtttgtgcctgctgctggggacatccctggcaacacccaggagagcacagaggagaagattgagctgctgaccacagaggtgcccctggccctggaggaggagagccccagcgagggctgccccagcagcgagatccccatggagaaggagcccggggagggccgcatctctgtggtggactacagctacctggagggggacctgcccatcagcgcccggcctgcctgcagcaacaagctgattgactacatcctgggcggggccagcagtgacctggagaccagcagtgaccctgagggggaggactgggatgaggaggctgaagatgatggctttgacagcgacagcagcctgagtgacagcgacctggagcaggaccctgagggcctgcacctgtggaacagcttctgcagcgtggacccctacaacccccagaacttcaccgccaccatccagacagctgcccgcatcgtgcctgaggagcccagcgacagcgagaaggacctgagcggcaagagtgacctggagaacagcagccagagcggcagcctgcctgagaccccagagcacagcagtggagaggaggatgactgggagagcagcgcagatgaggccgagagcctgaagctgtggaacagcttctgcaacagtgatgacccctacaaccccctgaacttcaaggcccccttccagaccagcggggagaatgagaagggctgccgggacagcaagacccccagcgagagcatcgtggccatcagcgagtgccacaccctgctgagctgcaaggtgcagctgctgggcagccaggagagcgagtgcccagacagcgtgcagagagatgtgctgagcggcggccgccacacccacgtgaagaggaagaaggtgaccttcctggaggaggtgacagagtactacatctctggagatgaggacaggaagggcccctgggaggagtttgccagagatggctgccgcttccagaagaggatccaggagacagaagatgccatcggctactgcctgacctttgagcaccgggagaggatgttcaaccggctgcagggcacctgcttcaagggcctgaatgtgctgaagcagtgctag

SEQ ID NO: 166111 - DNA, 1872 bp, synthetic construct
  misc_feature 1..1872: note = Description of Artificial Sequence: Synthetic coding sequence
  source 1..1872: mol_type = other DNA
atgttccccacccgctggctggactttgctggggtgtacagcgccctgcgggccctgaagggccgggagaagccagctgcccccacagcccagaagagcctgagcagcctgcagctggacagcagtgaccccagcgtgaccagccccctggactggctggaggagggcatccactggcagtacagccccccagacctgaagctggagctgaaggccaagggcagcgccctggaccctgctgcccaggccttcctgctggagcagcagctgtggggcgtggagctgctgcccagcagcctgcagagccggctgtacagcaaccgggagctgggcagcagccccagcggccccctgaacatccagagaattgacaacttctctgtggtgtcctacctgctgaaccccagctacctggactgcttcccccggctggaggtgtcctaccagaacagtgatggcaacagcgaggtggtgggcttccagaccctgaccccagagagcagctgcctgcgggaggaccactgccacccccagcccctgtctgctgagctgatcccagcctcctggcagggctgcccccccctgagcacagagggcctgcctgagatccaccacctgaggatgaagaggctggagttcctgcagcaggccaacaagggccaggacctgcccaccccagaccaggacaatggctaccacagcctggaggaggagcacagcctgctgaggatggaccccaagcactgccgggacaaccccacccagtttgtgcctgctgctggggacatccctggcaacacccaggagagcacagaggagaagattgagctgctgaccacagaggtgcccctggccctggaggaggagagccccagcgagggctgccccagcagcgagatccccatggagaaggagcccggggagggccgcatctctgtggtggactacagctacctggagggggacctgcccatcagcgcccggcctgcctgcagcaacaagctgattgactacatcctgggcggggccagcagtgacctggagaccagcagtgaccctgagggggaggactgggatgaggaggctgaagatgatggctttgacagcgacagcagcctgagtgacagcgacctggagcaggaccctgagggcctgcacctgtggaacagcttctgcagcgtggacccctacaacccccagaacttcaccgccaccatccagacagctgcccgcatcgtgcctgaggagcccagcgacagcgagaaggacctgagcggcaagagtgacctggagaacagcagccagagcggcagcctgcctgagaccccagagcacagcagtggagaggaggatgactgggagagcagcgcagatgaggccgagagcctgaagctgtggaacagcttctgcaacagtgatgacccctacaaccccctgaacttcaaggcccccttccagaccagcggggagaatgagaagggctgccgggacagcaagacccccagcgagagcatcgtggccatcagcgagtgccacaccctgctgagctgcaaggtgcagctgctgggcagccaggagagcgagtgcccagacagcgtgcagagagatgtgctgagcggcggccgccacacccacgtgaagaggaagaaggtgaccttcctggaggaggtgacagagtactacatctctggagatgaggacaggaagggcccctgggaggagtttgccagagatggctgccgcttccagaagaggatccaggagacagaagatgccatcggctactgcctgacctttgagcaccgggagaggatgttcaaccggctgcagggcacctgcttcaagggcctgaatgtgctgaagcagtgctag

SEQ ID NO: 166112 - DNA, 1704 bp, synthetic construct
  misc_feature 1..1704: note = Description of Artificial Sequence: Synthetic coding sequence
  source 1..1704: mol_type = other DNA
atggccagccacgtggacctgctgacagagctgcagctgctggagaaggtgcccaccctggagcggctgcgggccgcccagaagagaagagcccagcagctgaagaagtgggcccagtatgagcaggacctgcagcacaggaagaggaagcatgagaggaagaggagcactggaggccgcaggaagaaggtgtcctttgaggcctctgtggccctgctggaggccagcctgagaaatgatgctgaggaggtgcgctacttcctgaagaacaaggtgtccccagacctgtgcaatgaagatggcctgacagccctgcaccagtgctgcatcgacaactttgaggagatcgtgaagctgctgctgagccatggagccaacgtgaatgccaaggacaatgagctgtggacccccctgcacgccgccgccacctgtggccacatcaacctggtgaagatcctggtgcagtacggggctgacctgctggccgtgaacagtgatggcaacatgccctatgacctgtgtgaagatgagcccaccctggatgtgattgagacctgcatggcctaccagggcatcacccaggagaagatcaatgagatgagggtggcccctgagcagcagatgattgctgacatccactgcatgattgctgctggccaggacctggactggattgatgcccagggcgccaccctgctgcacatcgccggggccaacggctacctgcgggctgctgagctgctgctggaccatggagtgcgggtggatgtgaaggactgggatggctgggagcccctgcacgccgccgccttctggggccagatgcagatggccgagctgctggtgagccacggggccagcctgagcgcccggacctccatggatgagatgcccatcgacctgtgtgaggaggaggagttcaaggtgctgctgctggagctgaagcacaagcatgatgtgatcatgaagagccagctgcggcacaagagcagcctgagcaggaggaccagcagcgctggcagccggggcaaggtggtgagaagagccagcctgagtgacaggaccaacctgtacaggaaggagtatgaaggagaggccatcctgtggcagaggtctgctgctgaggaccagaggaccagcacctacaatggagacatccgggagaccaggacagaccaggagaacaaggaccccaacccccggctggagaagcctgtgctgctgtctgagttccccaccaagatccccagaggagagctggacatgcctgtggagaatggcctgcgggcccctgtgtctgcctaccagtatgccctggccaatggagatgtgtggaaggtgcatgaggtgcctgactacagcatggcctacggcaaccctggggtggctgatgccaccccaccctggagcagctacaaggagcagagcccccagaccctgctggagctgaagaggcagagagctgctgccaagctgctgagccaccccttcctgagcacccacctgggcagctccatggccaggactggagagagcagcagcgagggcaaggcccccctgattggaggccgcaccagcccctacagcagcaatggcacctctgtgtactacacagtgaccagcggggacccccccctgctgaagttcaaggcccccatcgaggagatggaggagaaggtgcacggctgctgccgcatctcctag

SEQ ID NO: 166113 - DNA, 1578 bp, synthetic construct
  misc_feature 1..1578: note = Description of Artificial Sequence: Synthetic coding sequence
  source 1..1578: mol_type = other DNA
atggccagccacgtggacctgctgacagagctgcagctgctggagaaggtgcccaccctggagcggctgcgggccgcccagaagagaagagcccagcagctgaagaagtgggcccagtatgagcaggacctgcagcacaggaagaggaagcatgagaggaagaggagcactggaggccgcaggaagaaggtgtcctttgaggcctctgtggccctgctggaggccagcctgagaaatgatgctgaggaggtgcgctacttcctgaagaacaaggtgtccccagacctgtgcaatgaagatggcctgacagccctgcaccagtgctgcatcgacaactttgaggagatcgtgaagctgctgctgagccatggagccaacgtgaatgccaaggacaatgagctgtggacccccctgcacgccgccgccacctgtggccacatcaacctggtgaagatcctggtgcagtacggggctgacctgctggccgtgaacagtgatggcaacatgccctatgacctgtgtgaagatgagcccaccctggatgtgattgagacctgcatggcctaccagggcatcacccaggagaagatcaatgagatgagggtggcccctgagcagcagatgattgctgacatccactgcatgattgctgctggccaggacctggactggattgatgcccagggcgccaccctgatgcagatggccgagctgctggtgagccacggggccagcctgagcgcccggacctccatggatgagatgcccatcgacctgtgtgaggaggaggagttcaaggtgctgctgctggagctgaagcacaagcatgatgtgatcatgaagagccagctgcggcacaagagcagcctgagcaggaggaccagcagcgctggcagccggggcaaggtggtgagaagagccagcctgagtgacaggaccaacctgtacaggaaggagtatgaaggagaggccatcctgtggcagaggtctgctgctgaggaccagaggaccagcacctacaatggagacatccgggagaccaggacagaccaggagaacaaggaccccaacccccggctggagaagcctgtgctgctgtctgagttccccaccaagatccccagaggagagctggacatgcctgtggagaatggcctgcgggcccctgtgtctgcctaccagtatgccctggccaatggagatgtgtggaaggtgcatgaggtgcctgactacagcatggcctacggcaaccctggggtggctgatgccaccccaccctggagcagctacaaggagcagagcccccagaccctgctggagctgaagaggcagagagctgctgccaagctgctgagccaccccttcctgagcacccacctgggcagctccatggccaggactggagagagcagcagcgagggcaaggcccccctgattggaggccgcaccagcccctacagcagcaatggcacctctgtgtactacacagtgaccagcggggacccccccctgctgaagttcaaggcccccatcgaggagatggaggagaaggtgcacggctgctgccgcatctcctag

SEQ ID NO: 166114 - DNA, 3369 bp, synthetic construct
  misc_feature 1..3369: note = Description of Artificial Sequence: Synthetic coding sequence
  source 1..3369: mol_type = other DNA
atggagcccagcgaggtgcccagccagatcagcaaggacaacttcctggaggtgcccaacctgagtgacagcctgtgtgaagatgaggaggtgaccttccagcccggcttcagcccccagcccagcagaagaggaagtgacagcagcgaggacatctacctggacacccccagcagcggcacccggcgggtgtcctttgctgacagctttggcttcaacctggtgtctgtgaaggagtttgactgctgggagctgcccagcgccagcaccacctttgacctgggcacagacatcttccacacagaggagtatgtgctggcccccctgtttgacctgcccagcagcaaagaagacctgatgcagcagctgcagatccagaaggccatcctggagagcacagagagcctgctgggcagcaccagcatcaagggcatcatccgggtgctgaatgtgtcctttgagaagctggtgtatgtgaggatgagcctggatgactggcagacccactatgacatcctggccgagtatgtgcccaacagctgtgatggagaaacagaccagttctccttcaagatcgtgctggtgcccccctaccagaaggatggcagcaaggtggagttctgcatccgctatgagacctctgtgggcaccttctggagcaacaacaacggcaccaactacaccttcatctgccagaagaaggagcaggagcctgagcctgtgaagccctggaaggaggtgcccaaccggcagatcaagggctgcctgaaggtgaagagcagcaaggaggagagctctgtgaccagcgaggagaacaactttgagaaccccaagaacacagacacctacatccccaccatcatctgcagccatgaggacaaggaggacctggaggccagcaacagaaatgtgaaggatgtgaaccgggagcatgatgagcacaatgagaaggagctggagctgatgatcaaccagcacctgatccgcaccaggagcacagccagcagagatgaaagaaacaccttcagcacagatcctgtgaacttccccaacaaggccgagggcctggagaagaagcagatccacggggagatctgcacagacctcttccagaggagcctgagccccagcagcagcgctgagagctctgtgaagggggacttctactgcaatgagaagtacagcagtggagatgactgcacccaccagcccagcgaggagaccaccagcaacatgggagagatcaagcccagcctgggggacaccagcagtgatgagctggtgcagctgcacacaggcagcaaggaggtgctggatgacaatgccaacccagcccacggcaatggcaccgtgcagatcccctgccccagcagtgaccagctgatggccggcaacctgaacaagaagcatgagggcggggccaagaacatcgaggtgaaggacctgggctgcctgcggcgggacttccacagcgacaccagcgcctgcctgaaggagagcacagaggagggcagcagcaaggaggactactatggaaatggcaaggatgatgaggagcagaggatctacctgggcgtgaatgagaagcagaggaagaacttccagaccatcctgcatgaccaggagaggaagatgggcaaccccaagatctctgtggccggcattggagccagcaacagagacctggccaccctgctgtctgagcacacagccatccccacccgggccatcacagcagatgtgagccacagccccaggaccaacctgtcctgggaggaggccgtgctgaccccagagcaccaccacctgaccagcgagggcagcgccctgggcggcatcaccggccaggtgtgcagcagcaggactggaaatgtgctgagaaatgactacctgttccaggtggaggagaagagcggcggcatcaacagcgaggaccaggacaacagcccccagcacaagcagagctggaatgtgctggagagccagggcaagagccgggagaacaagaccaacatcacagagcacatcaagggccagacagactgtgaagatgtgtggggcaagagggacaacaccaggagcctgaaggccaccacagaggagctgttcacctgccaggagaccgtgtgctgtgagctgagcagcctggccgaccacggcatcacagagaaggccgaggccggcacagcctacatcatcaagaccaccagcgagagcaccccagagagcatgtctgcccgggagaaggccatcatcgccaagctgccccaggagacagcccggagtgaccggcccatcgaggtgaaggagacagcctttgacccccatgagggcagaaatgatgacagccactacaccctgtgccagagggacacagtgggcgtcatctatgacaatgactttgagaaggagagccggctgggcatctgcaatgtgcgggtggatgagatggagaaggaggagaccatgtccatgtacaaccccaggaagacccatgaccgggagaagtgtggcactggaaacatcacctctgtggaggagagctcctgggtgatcacagagtaccagaaggccaccagcaagctggacctgcagctgggcatgctgcccacagacaagacagtgttttctgagaacagagacctgcggcaggtgcaggagctgagcaagaagacagacagtgatgccatcgtgcacagcgccttcaacagcgacaccaacagagccccccagaacagcagccccttcagcaagcaccacacagagatctctgtgtccaccaatgagcaggccatcgctgtggagaatgctgtgaccaccatggccagccagcccatcagcaccaagtctgagaacatctgcaacagcacccgggagatccagggcatcgagaagcacccctacccagagagcaagccagaggaggtgagccgcagcagcggcatcgtgaccagcggcagcaggaaggagcgctgcatcggccagatcttccagacagaggagtacagcgtggagaagagcctgggccccatgatcctgatcaacaagcccctggagaacatggaggaggcccggcatgaaaatgaaggcctggtgagcagcggccagagcctgtacaccagcggggagaaggagagtgacagcagcgccagcaccagcctgcctgtggaggagagccaggcccagggcaatgaaagcctcttcagcaagtacaccaacagcaagatcccctacttcctgctcttcctgatcttcctgatcaccgtgtaccactatgacctgatgattggcctgaccttctacgtgctgagcctgtcctggctgtcctgggaggagggccggcagaaggagagcgtgaagaagaagtag

SEQ ID NO: 166115 - DNA, 954 bp, synthetic construct
  misc_feature 1..954: note = Description of Artificial Sequence: Synthetic coding sequence
  source 1..954: mol_type = other DNA
atgagctgcaccaggatgatccaggtgctggacccccggcccctgaccagctctgtgatgcctgtggatgtggccatgaggctgtgcctggcccacagcccccctgtgaagagcttcctgggcccctatgatgagttccagaggaggcactttgtgaacaagctgaagcccctgaagagctgcctgaacatcaagcacaaggccaagagccagaatgactggaagtgcagccacaaccaggccaagaagagggtggtgtttgctgacagcaagggcctgagcctgacagccatccacgtgttcagtgacctgcctgaggagcccgcctgggacctgcagtttgacctgctggacctgaatgacatcagcagcgccctgaagcaccacgaggagaagaacctgatcctggacttcccccagcccagcacagactacctgtccttccgcagccacttccagaagaactttgtgtgcctggagaactgcagcctgcaggagaggacagtgacaggcaccgtgaaggtgaagaatgtgtcctttgagaagaaggtgcagatccgcatcacctttgacagctggaagaactacacagatgtggactgtgtgtacatgaagaatgtgtatggaggaacagacagcgacaccttctcctttgccatcgacctgccccctgtgatccccacagagcagaagattgagttctgcatctcctaccacgccaacggccaggtgttctgggacaacaatgatggccagaactaccgcatcgtgcacgtgcagtggaagccagatggagtgcagacccagatggccccccaggactgtgccttccaccagaccagccccaagacagagctggagagcaccatcttcggcagcccccggctggccagcggcctcttccctgagtggcagagctggggccgcatggagaacctggccagctacagatag

SEQ ID NO: 166116 - DNA, 894 bp, synthetic construct
  misc_feature 1..894: note = Description of Artificial Sequence: Synthetic coding sequence
  source 1..894: mol_type = other DNA
atgagctgcaccaggatgatccaggtgctggacccccggcccctgaccagctctgtgatgcctgtggatgtggccatgaggctgtgcctggcccacagcccccctgtgaagagcttcctgggcccctatgatgagttccagaggaggcactttgtgaacaagctgaagcccctgaagagctgcctgaacatcaagcacaaggccaagagccagaatgactggaagtgcagccacaaccaggccaagaagagggtggtgtttgctgacagcaagggcctgagcctgacagccatccacgtgttcagtgacctgcctgaggagcccgcctgggacctgcagtttgacctgctggacctgaatgacatcagcagcgccctgtccttccgcagccacttccagaagaactttgtgtgcctggagaactgcagcctgcaggagaggacagtgacaggcaccgtgaaggtgaagaatgtgtcctttgagaagaaggtgcagatccgcatcacctttgacagctggaagaactacacagatgtggactgtgtgtacatgaagaatgtgtatggaggaacagacagcgacaccttctcctttgccatcgacctgccccctgtgatccccacagagcagaagattgagttctgcatctcctaccacgccaacggccaggtgttctgggacaacaatgatggccagaactaccgcatcgtgcacgtgcagtggaagccagatggagtgcagacccagatggccccccaggactgtgccttccaccagaccagccccaagacagagctggagagcaccatcttcggcagcccccggctggccagcggcctcttccctgagtggcagagctggggccgcatggagaacctggccagctacagatag

SEQ ID NO: 166117 - DNA, 600 bp, synthetic construct
  misc_feature 1..600: note = Description of Artificial Sequence: Synthetic coding sequence
  source 1..600: mol_type = other DNA
atgagcagccccaccagccccctgaagcaccacgaggagaagaacctgatcctggacttcccccagcccagcacagactacctgtccttccgcagccacttccagaagaactttgtgtgcctggagaactgcagcctgcaggagaggacagtgacaggcaccgtgaaggtgaagaatgtgtcctttgagaagaaggtgcagatccgcatcacctttgacagctggaagaactacacagatgtggactgtgtgtacatgaagaatgtgtatggaggaacagacagcgacaccttctcctttgccatcgacctgccccctgtgatccccacagagcagaagattgagttctgcatctcctaccacgccaacggccaggtgttctgggacaacaatgatggccagaactaccgcatcgtgcacgtgcagtggaagccagatggagtgcagacccagatggccccccaggactgtgccttccaccagaccagccccaagacagagctggagagcaccatcttcggcagcccccggctggccagcggcctcttccctgagtggcagagctggggccgcatggagaacctggccagctacagatag

SEQ ID NO: 166118 - DNA, 900 bp, synthetic construct
  misc_feature 1..900: note = Description of Artificial Sequence: Synthetic coding sequence
  source 1..900: mol_type = other DNA
atgagccggggccccagcagcgctgtgctgcccagcgccctgggcagcaggaagctgggccccaggagcctgagctgcctgagtgacctggatggaggagtggccctggagccccgggcctgcaggcctcctggcagccctggccgggcccccccacccaccccagcccccagcggctgtgacccccggctgcggcccatcatcctgcggcgggcccggagcctgcccagcagccctgagcggcggcagaaggccgccggggcccctggagctgcctgcaggcctggctgcagccagaagctgcgggtgcgctttgctgatgccctgggcctggagctggcccaggtgaaggtgttcaatgctggagatgaccccagcgtgcccctgcacgtgctgagccggctggccatcaacagcgacctgtgctgcagcagccaggacctggagttcaccctgcactgcctggtgcctgacttccccccacctgtggaggccgctgactttggagagcggctgcagaggcagctggtgtgcctggagcgggtgacctgcagcgacctgggcatcagcggcaccgtgcgggtgtgcaatgtggcctttgagaagcaggtggccgtgcgctacaccttcagcggctggaggagcacccatgaagctgtggcccgctggaggggccctgctggccctgagggcacagaagatgtgttcaccttcggcttccctgtgccccccttcctgctggagctgggcagccgggtgcactttgctgtgcgctaccaggtggccggggctgagtactgggacaacaatgaccaccgggactacagcctgacctgcaggaaccacgccctgcacatgcccagaggagaatgtgaggagagctggatccacttcatctag

SEQ ID NO: 166119 - DNA, 756 bp, synthetic construct
  misc_feature 1..756: note = Description of Artificial Sequence: Synthetic coding sequence
  source 1..756: mol_type = other DNA
atgacccggctgactgtgctggccctgctggccggcctgctggccagcagcagagctggcagcagccccctgctggacatcgtgggcggcaggaaggcccggccccggcagttccccttcctggccagcatccagaaccagggccgccacttctgtggcggggccctgatccacgccaggtttgtgatgacagctgccagctgcttccagagccagaaccctggggtgtccacagtggtgctgggcgcctatgacctgcggcggcgggagcggcagagccggcagaccttcagcatcagctccatgtctgaaaatggctatgacccccagcagaacctgaatgacctgatgctgctgcagctggaccgggaggccaacctgaccagctctgtgaccatcctgcccctgcccctgcagaatgccaccgtggaggccggcacccgctgccaggtggccggctggggcagccagaggtctgggggccgcctgagccgcttccccaggtttgtgaatgtgacagtgaccccagaggaccagtgccggcccaacaacgtgtgcacaggagtgctgacccggcggggcggcatctgcaatggagatggcggcacccccctggtgtgtgagggcctggcccacggcgtggccagcttcagcctgggcccctgtggccggggccctgacttcttcaccagggtggccctcttccgggactggattgatggagtgctgaacaaccctggccctggccctgcctag

SEQ ID NO: 166120 - DNA, 954 bp, synthetic construct
  misc_feature 1..954: note = Description of Artificial Sequence: Synthetic coding sequence
  source 1..954: mol_type = other DNA
atggctgctgagagaggagctggccagcagcagagccaggagatgatggaggaggagcacgagctgcctgtggacatggagaccatcaacctggacagagatgctgaagatgtggacctgaaccactacagaattggcaagattgagggctttgaggtgctgaagaaggtgaagaccctgtgcctgcggcagaacctgatcaagtgcatcgagaacctggaggagctgcagagcctgcgggagctggacctgtatgacaaccagatcaagaagattgagaacctggaggccctgacagagctggagatcctggacatctccttcaacctgctgaggaacatcgagggcgtggacaagctgacccggctgaagaagctgttcctggtgaacaacaagatcagcaagattgagaacctgagcaacctgcaccagctgcagatgctggagctgggcagcaaccgcatccgggccattgaaaatattgacaccctgaccaacctggagagcctcttcctgggcaagaacaagatcaccaagctgcagaacctggatgccctgaccaacctgactgtgctgtccatgcagagcaaccggctgaccaagattgagggcctgcagaacctggtgaacctgcgggagctgtacctgagccacaatggaattgaagtcatcgagggcctggagaacaacaacaagctgaccatgctggacatcgccagcaaccgcatcaagaagattgagaacatcagccacctgacagagctgcaggagttctggatgaatgacaacctgctggagagctggagcgacctggatgagctgaagggggcccggagcctggagaccgtgtacctggagaggaaccccctgcagaaggacccccagtacagaaggaaggtgatgctggccctgcccagcgtgcggcagattgatgccacctttgtgcgcttctag

SEQ ID NO: 166121 - DNA, 714 bp, synthetic construct
  misc_feature 1..714: note = Description of Artificial Sequence: Synthetic coding sequence
  source 1..714: mol_type = other DNA
atggctgctgagagaggagctggccagcagcagagccaggagatgatggaggaggagcacgagctgcctgtggacatggagaccatcaacctggacagagatgctgaagatgtggacctgaaccactacagaattggcaagattgagggctttgaggtgctgaagaaggtgaagaccctgtgcctgcggcagaacctgatcaagtgcatcgagaacctggaggagctgcagagcctgcgggagctggacctgtatgacaaccagatcaagaagattgagaacctggaggccctgacagagctggagatcctggacatctccttcaacctgctgaggaacatcgagggcgtggacaagctgacccggctgaagaagctgttcctggtgaacaacaagatcagcaagattgagaacctgagcaacctgcaccagctgcagatgctggagctgggcagcaaccgcatccgggccattgaaaatattgacaccctgaccaacctggagagcctcttcctgggcaagaacaagatcaccaagctgcagaacctggatgccctgaccaacctgactgtgctgtccatgcagagcaaccggctgaccaagattgagggcctgcagaacctggtgaacctgcgggagctgtacctgagccacaatggaattgaagtcatcgagggcctggagaacaacgtgcaggacagcctgacctactag

SEQ ID NO: 166122 - DNA, 843 bp, synthetic construct
  misc_feature 1..843: note = Description of Artificial Sequence: Synthetic coding sequence
  source 1..843: mol_type = other DNA
atggctgctgagagaggagctggccagcagcagagccaggagatgatggaggtggaccggcgggtggagagcgaggagagcggagatgaggagggcaagaagcacagcagcggcatcgtggccgacctgtctgagcagagcctgaaggatggagaggagcggggggaggaggaccctgaggaggagcacgagctgcctgtggacatggagaccatcaacctggacagagatgctgaagatgtggacctgaaccactaccgcatcggcaagattgagggctttgaggtgctgaagaaggtgaagaccctgtgcctgcggcagaacctgatcaagtgcatcgagaacctggaggagctgcagagcctgcgggagctggacctgtatgacaaccagatcaagaagattgagaacctggaggccctgacagagctggagatcctggacatctccttcaacctgctgagaaatattgaaggagtggacaagctgacccggctgaagaagctgttcctggtgaacaacaagatcagcaagattgagaacctgagcaacctgcaccagctgcagatgctggagctgggcagcaaccgcatccgggccatcgagaacatcgacaccctgaccaacctggagagcctcttcctgggcaagaacaagatcaccaagctgcagaacctggatgccctgaccaacctgactgtgctgtccatgcagagcaaccggctgaccaagattgagggcctgcagaacctggtgaacctgcgggagctgtacctgagccacaacggcatcgaggtgattgagggcctggagaacaacgtgcaggacagcctgacctactag

SEQ ID NO: 166123 - DNA, 1083 bp, synthetic construct; identical to SEQ ID NO: 163329
  misc_feature 1..1083: note = Description of Artificial Sequence: Synthetic coding sequence
  source 1..1083: mol_type = other DNA

SEQ ID NO: 166124 - DNA, 384 bp, synthetic construct
  misc_feature 1..384: note = Description of Artificial Sequence: Synthetic coding sequence
  source 1..384: mol_type = other DNA
atggtgcagacagctgtggtgcctgtgaagaagaagagggtggagggccctggcagcctgggcctggaggagagcggcagcaggaggatgcagaactttgccttcagcggcggcctgtatggaggcctgccccccacccacagcgaggccggcagccagccccacggcatccacggcacagccctgattggaggcctgcccatgccctaccccaacctggccccagatgtggacctgacccctgtggtgcccagcgctgtgaacatgaacccagcccccaacccagctgtgtacaaccctgaggccgtgaatgagcccaagaagaagaagtatgccaaggaggcctggccaggcaagaagcccacccccagcctgctgatctag

SEQ ID NO: 166125 - DNA, 1056 bp, synthetic construct
  misc_feature 1..1056: note = Description of Artificial Sequence: Synthetic coding sequence
  source 1..1056: mol_type = other DNA
atggctgctgctgccaacagcggcagcagcctgcccctgtttgactgccccacctgggccggcaagcccccacctggcctgcacctggatgtggtgaagggggacaagctgattgagaagctgatcattgatgagaagaagtactacctgtttggaagaaatccagacctgtgtgacttcaccatcgaccaccagagctgcagccgggtgcacgccgccctggtgtaccacaagcacctgaagagggtcttcctgattgacctgaacagcacccacggcaccttcctgggccacatccggctggagccccacaagccccagcagatccccatcgacagcacagtgtcctttggagccagcacccgggcctacaccctgcgggagaagccccagaccctgcccagcgctgtgaagggagatgagaagatgggcggggaggatgatgagctgaagggcctgctgggcctgcctgaggaggagacagagctggacaacctgacagagttcaacacagcccacaacaagaggatcagcaccctgaccatcgaggagggcaacctggacatccagaggcccaagaggaagaggaagaacagccgggtgaccttctctgaagatgatgagatcatcaacccagaagatgtggaccccagcgtgggccgcttcaggaacatggtgcagacagctgtggtgcctgtgaagaagaagagggtggagggccctggcagcctgggcctggaggagagcggcagcaggaggatgcagaactttgccttcagcggcggcctgtatggaggcctgccccccacccacagcgaggccggcagccagccccacggcatccacggcacagccctgattggaggcctgcccatgccctaccccaacctggccccagatgtggacctgacccctgtggtgcccagcgctgtgaacatgaacccagcccccaacccagctgtgtacaaccctgaggccgtgaatgagcccaagaagaagaagtatgccaaggaggcctggccaggcaagaagcccacccccagcctgctgatctag

SEQ ID NO: 166126 - DNA, 630 bp, synthetic construct
  misc_feature 1..630: note = Description of Artificial Sequence: Synthetic coding sequence
  source 1..630: mol_type = other DNA
atgggcggggaggatgatgagctgaagggcctgctgggcctgcctgaggaggagacagagctggacaacctgacagagttcaacacagcccacaacaagaggatcagcaccctgaccatcgaggagggcaacctggacatccagaggcccaagaggaagaggaagaacagccgggtgaccttctctgaagatgatgagatcatcaacccagaagatgtggaccccagcgtgggccgcttcaggaacatggtgcagacagctgtggtgcctgtgaagaagaagagggtggagggccctggcagcctgggcctggaggagagcggcagcaggaggatgcagaactttgccttcagcggcggcctgtatggaggcctgccccccacccacagcgaggccggcagccagccccacggcatccacggcacagccctgattggaggcctgcccatgccctaccccaacctggccccagatgtggacctgacccctgtggtgcccagcgctgtgaacatgaacccagcccccaacccagctgtgtacaaccctgaggccgtgaatgagcccaagaagaagaagtatgccaaggaggcctggccaggcaagaagcccacccccagcctgctgatctag

SEQ ID NO: 166127 - DNA, 711 bp, synthetic construct
  misc_feature 1..711: note = Description of Artificial Sequence: Synthetic coding sequence
  source 1..711: mol_type = other DNA
atgggcggggaggatgatgagctgaagggcctgctgggcctgcctgaggaggagacagagctggacaacctgacagagttcaacacagcccacaacaagaggatcagcaccctgaccatcgaggagggcaacctggacatccagaggcccaagaggaagaggaagaacagccgggtgaccttctctgaagatgatgagatcatcaacccagaagatgtggaccccagcgtgggccgcttcaggaacatggtgcagacagctgtggtgcctgtgaagaagaagagggtggagggccctggcagcctgggcctggaggagagcggcagcaggaggatgcagaactttgccttcagcggcggcctgtatggaggcctgccccccacccacagcgaggccggcagccagccccacggcatccacggcacagccctgattggaggcctgcccatgccctaccccaacctggccccagatgtggacctgacccctgtggtgcccagcgctgtgaacatgaacccagcccccaacccagctgtgtacaaccctgaggccgtgaatgagcccaagaagaagaagtatgccaaggaggcctggccaggctgtgaatttgtgtcccagagcctgattgccacagccatctggaagtgcctgctgaaggcccagagcctgggcctgggcggcaatgcccccagccccctgtactacaagtag

SEQ ID NO: 166128 - DNA, 618 bp, synthetic construct
  misc_feature 1..618: note = Description of Artificial Sequence: Synthetic coding sequence
  source 1..618: mol_type = other DNA
atgggcggggaggatgatgagctgaagggcctgctgggcctgcctgaggaggagacagagctggacaacctgacagagttcaacacagcccacaacaagaggatcagcaccctgaccatcgaggagggcaacctggacatccagaggcccaagaggaagaggaagaacagccgggtgaccttctctgaagatgatgagatcatcaacccagaagatgtggaccccagcgtgggccgcttcaggaacatggtgcagacagctgtggtgcctgtgaagaagaagagggtggagggccctggcagcctgggcctggaggagagcggcagcaggaggatgcagaactttgccttcagcggcggcctgtatggaggcctgccccccacccacagcgaggccggcagccagccccacggcatccacggcacagccctgattggaggcctgcccatgccctaccccaacctggccccagatgtggacctgacccctgtggtgcccagcgctgtgaacatgaacccagcccccaacccagctgtgtacaaccctgaggccgtgaatgagcccaagaagaagaagtatgccaaggaggcctggccaggcaagaagcccaccccctag

SEQ ID NO: 166129 - DNA, 600 bp, synthetic construct
  misc_feature 1..600: note = Description of Artificial Sequence: Synthetic coding sequence
  source 1..600: mol_type = other DNA
atggctgctgctgccaacagcggcagcagcctgcccctgtttgactgccccacctgggccggcaagcccccacctggcctgcacctggatgtggtgaagggggacaagctgattgagaagctgatcattgatgagaagaagtactacctgtttggaagaaatccagacctgtgtgacttcaccatcgaccaccagagctgcagccgggtgcacgccgccctggtgtaccacaagcacctgaagagggtcttcctgattgacctgaacagcacccacggcaccttcctgggccacatccggctggagccccacaagccccagcagatccccatcgacagcacagtgtcctttggagccagcacccgggcctacaccctgcgggagaagccccagaccctgcccagcgctgtgaagggagatgagaagatgggcggggaggatgatgagctgaagggcctgctgggcctgcctgaggaggagacagagctggacaacctgacagagttcaacacagcccacaaccacatggcctccatgggccagcacagctctgtggcctgcccctgccacacccagaccctgcccctgatgtggacctag

SEQ ID NO: 166130 - DNA, 3891 bp, synthetic construct
  misc_feature 1..3891: note = Description of Artificial Sequence: Synthetic coding sequence
  source 1..3891: mol_type = other DNA
atgctgaagacagagagcagtggagagaggaccaccctgcggagcgccagcccccacagaaatgcctacagaacagagttccaggccctgaagagcacctttgacaagcccaagagtgatggagagcagaagaccaaggagggggagggcagccagcagagccggggcaggaaatatggcagcaatgtgaaccgcatcaagaacctcttcatgcagatgggcatggagcccaatgaaaatgctgctgtgattgccaagacccggggcaagggcggccacagcagcccccagaggaggatgaagcccaaggagttcctggagaagacagatggctctgtggtgaagctggagagctctgtgtctgagcgcatcagcagatttgacaccatgtatgatggccccagctacagcaagttcacagagaccaggaagatgtttgagaggtctgtgcatgaaagtggccagaacaaccgctacagccccaagaaggagaaggccggcggcagcgagccccaggatgagtggggcggcagcaagagcaacagaggcagcacagacagcctggacagcctgagcagcaggacagaagctgtgagccccaccgtgtcccagctgtctgctgtgtttgagaacacagacagccccagcgccatcatcagcgagaaggccgagaacaatgagtacagcgtgacaggccactaccccctgaacctgcccagcgtgacagtgaccaacctggacaccttcggccacctgaaggacagcaacagctggccacccagcaacaagaggggcgtggacacagaagatgcccacaagagcaatgccacccctgtgcctgaggtggccagcaagagcaccagcctggccagcatccctggagaggagatccagcagagcaaggagcctgaggacagcaccagcaaccagcagaccccagacagcattgacaaggatggccctgaggagccctgtgccgagagcaaggccatgcccaagtctgagatccccagcccccagagccagctgctggaggatgctgaggccaacctggtgggccgggaggccgccaagcagcagaggaaggagctggccggcggggacttcaccagcccagatgccagcgccagcagctgtgggaaggaggtgcctgaggacagcaacaactttgatggcagccacgtgtacatgcacagcgactacaacgtgtacagagtgcgcagccgctacaacagcgactggggcgagactggaacagagcaggatgaggaggaggacagtgatgaaaattcctactaccagcctgacatggagtacagcgagatcgtgggcctgcctgaggaggaggagatcccagccaacaggaagatcaagttcagcagcgcccccatcaaggtgttcaacacctacagcaatgaagattatgacagaagaaatgatgaggtggaccctgtggccgccagcgcagaatatgagctggagaagagggtggagaagctggagctgtttcctgtggagctggagaaggatgaagatggcctgggcatcagcatcatcggcatgggcgtgggcgcagatgctggcctggagaagctgggcatctttgtgaagacagtgacagagggcggggccgcccagagagatggccgcatccaggtgaatgaccagatcgtggaggtggatggcatcagcctggtgggcgtgacccagaactttgctgccaccgtgctgaggaacaccaagggaaatgtgcgcttcgtcatcggccgggagaagccaggccaggtgtctgaggtggcccagctgatcagccagaccctggagcaggagcggcggcagcgggagctgctggagcagcactacgcccagtatgatgctgatgatgatgaaacaggagaatatgccacagatgaggaggaggatgaggtgggccctgtgctgcccggcagtgacatggccatcgaggtgtttgagctgcctgaaaatgaagacatgttcagccccagcgagctggacaccagcaagctgagccacaagttcaaggagctgcagatcaagcatgctgtgacagaggccgagatccagaagctgaagaccaagctgcaggccgcagaaaatgagaaggtgcgctgggagctggagaagacccagctgcagcagaacatcgaggagaacaaggagaggatgctgaagctggagagctactggattgaggcccagaccctgtgccacacagtgaatgagcacctgaaggagacccagagccagtaccaggccctggagaagaagtacaacaaggccaagaagctgatcaaggacttccagcagaaggagctggacttcatcaagaggcaggaggccgagaggaagaagattgaggacctggagaaggcccacctggtggaggtgcagggcctgcaggtgcgcatccgggacctggaggccgaggtgttccggctgctgaagcagaatggcacccaggtgaacaacaacaacaacatctttgaaagaaggaccagcctgggggaggtgtccaagggggacaccatggagaacctggatggcaagcagaccagctgccaggacggcctgagccaggacctgaatgaagctgtgcctgagacagagcggctggacagcaaggccctgaagacccgggcccagctgtctgtgaagaacagacggcagaggcccagcaggacccggctgtatgacagcgtgagcagcacagatggagaggacagcctggagaggaagggcctgcggaccagcagccctgagagtgacagcggcgtgccccccctgacccctgtggacagcaatgtgcccttcagcagtgaccacatcgccgagttccaggaggagcccctggaccctgagatgggccccctgagctccatgtggggagacaccagcctcttcagcaccagcaagagtgaccatgatgtggaggagagcccctgccaccaccagaccaccaacaagaagatcctgcgggagaaggatgatgccaaggaccccaagagcctgcgggccagcagcagcctggccgtgcagggcggcaagatcaagaggaagtttgtggacctgggcgcccccctgcggaggaacagcagcaagggcaagaagtggaaggagaaggagaaggaggccagccgcttctctgctggcagccgcatcttccggggccgcctggagaactggacccccaagccctgcagcacagcccagaccagcaccaggagcccctgcatgcccttctcctggttcaatgacagcaggaagggcagctacagcttcaggaacctgcctgcccccaccagcagcctgcagcccagccctgagaccctcatcagtgacaagaagggcagcaagaacttcaccttcaatgatgacttcagccccagcagcaccagcagcgctgacctgagcggcctgggcgctgagcccaagaccccaggcctgagccagagcctggccctgagcagtgatgagatcctggatgatggccagagccccaagcacagccagtgccagaacagagctgtgcaggagtggagcgtgcagcaggtgagccactggctgatgagcctgaacctggagcagtatgtgtctgagttcagcgcccagaacatcactggagagcagctgctgcagctggatggcaacaagctgaaggccctgggcatgacagccagccaggacagagctgtggtgaagaagaagctgaaggagatgaagatgagcctggagaaggccaggaaggcccaggagaagatggagaagcagcgggagaagctgcggaggaaggagcaggagcagatgcagaggaagagcaagaagacagagaagatgaccagcaccacagctgagggcgctggggagcagtag

SEQ ID NO: 166131 - DNA, 3297 bp, synthetic construct
  misc_feature 1..3297: note = Description of Artificial Sequence: Synthetic coding sequence
  source 1..3297: mol_type = other DNA
atgctgaagacagagagcagtggagagaggaccaccctgcggagcgccagcccccacagaaatgcctacagaacagagttccaggccctgaagagcacctttgacaagcccaagagtgatggagagcagaagaccaaggagggggagggcagccagcagagccggggcaggaaatatggcagcaatgtgaaccgcatcaagaacctcttcatgcagatgggcatggagcccaatgaaaatgctgctgtgattgccaagacccggggcaagggcggccacagcagcccccagaggaggatgaagcccaaggagttcctggagaagacagatggctctgtggtgaagctggagagctctgtgtctgagcgcatcagcagatttgacaccatgtatgatggccccagctacagcaagttcacagagaccaggaagatgtttgagaggtctgtgcatgaaagtggccagaacaaccgctacagccccaagaaggagaaggccggcggcagcgagccccaggatgagtggggcggcagcaagagcaacagaggcagcacagacagcctggacagcctgagcagcaggacagaagctgtgagccccaccgtgtcccagctgtctgctgtgtttgagaacacagacagccccagcgccatcatcagcgagaaggccgagaacaatgagtacagcgtgacaggccactaccccctgaacctgcccagcgtgacagtgaccaacctggacaccttcggccacctgaaggacagcaacagctggccacccagcaacaagaggggcgtggacacagaagatgcccacaagagcaatgccacccctgtgcctgaggtggccagcaagagcaccagcctggccagcatccctggagaggagatccagcagagcaaggagcctgaggacagcaccagcaaccagcagaccccagacagcattgacaaggatggccctgaggagccctgtgccgagagcaaggccatgcccaagtctgagatccccagcccccagagccagctgctggaggatgctgaggccaacctggtgggccgggaggccgccaagcagcagaggaaggagctggccggcggggacttcaccagcccagatgccagcgccagcagctgtgggaaggaggtgcctgaggacagcaacaactttgatggcagccacgtgtacatgcacagcgactacaacgtgtacagagtgcgcagccgctacaacagcgactggggcgagactggaacagagcaggatgaggaggaggacagtgatgaaaattcctactaccagcctgacatggagtacagcgagatcgtgggcctgcctgaggaggaggagatcccagccaacaggaagatcaagttcagcagcgcccccatcaaggtgttcaacacctacagcaatgaagattatgacagaagaaatgatgaggtggaccctgtggccgccagcgcagaatatgagctggagaagagggtggagaagctggagctgtttcctgtggagctggagaaggatgaagatggcctgggcatcagcatcatcggcatgggcgtgggcgcagatgctggcctggagaagctgggcatctttgtgaagacagtgacagagggcggggccgcccagagagatggccgcatccaggtgaatgaccagatcgtggaggtggatggcatcagcctggtgggcgtgacccagaactttgctgccaccgtgctgaggaacaccaagggaaatgtgcgcttcgtcatcggccgggagaagccaggccaggtgtctgaggtggcccagctgatcagccagaccctggagcaggagcggcggcagcgggagctgctggagcagcactacgcccagtatgatgctgatgatgatgaaacaggagaatatgccacagatgaggaggaggatgaggtgggccctgtgctgcccggcagtgacatggccatcgaggtgtttgagctgcctgaaaatgaagacatgttcagccccagcgagctggacaccagcaagctgagccacaagttcaaggagctgcagatcaagcatgctgtgacagaggccgagatccagaagctgaagaccaagctgcaggccgcagaaaatgagaaggtgcgctgggagctggagaagacccagctgcagcagaacatcgaggagaacaaggagaggatgctgaagctggagagctactggattgaggcccagaccctgtgccacacagtgaatgagcacctgaaggagacccagagccagtaccaggccctggagaagaagtacaacaaggccaagaagctgatcaaggacttccagcagaaggagctggacttcatcaagaggcaggaggccgagaggaagaagattgaggacctggagaaggcccacctggtggaggtgcagggcctgcaggtgcgcatccgggacctggaggccgaggtgttccggctgctgaagcagaatggcacccaggtgaacaacaacaacaacatctttgaaagaaggaccagcctgggggaggtgtccaagggggacaccatggagaacctggatggcaagcagaccagctgccaggacggcctgagccaggacctgaatgaagctgtgcctgagacagagcggctggacagcaaggccctgaagacccgggcccagctgtctgtgaagaacagacggcagaggcccagcaggacccggctgtatgacagcgtgagcagcacagatggagaggacagcctggagaggaagaacttcaccttcaatgatgacttcagccccagcagcaccagcagcgctgacctgagcggcctgggcgctgagcccaagaccccaggcctgagccagagcctggccctgagcagtgatgagagcctggacatgattgatgatgagatcctggatgatggccagagccccaagcacagccagtgccagaacagagctgtgcaggagtggagcgtgcagcaggtgagccactggctgatgagcctgaacctggagcagtatgtgtctgagttcagcgcccagaacatcactggagagcagctgctgcagctggatggcaacaagctgaaggccctgggcatgacagccagccaggacagagctgtggtgaagaagaagctgaaggagatgaagatgagcctggagaaggccaggaaggcccaggagaagatggagaagcagcgggagaagctgcggaggaaggagcaggagcagatgcagaggaagagcaagaagacagagaagatgaccagcaccacagctgagggcgctggggagcagtag

SEQ ID NO: 166132 - DNA, 222 bp, synthetic construct
  misc_feature 1..222: note = Description of Artificial Sequence: Synthetic coding sequence
  source 1..222: mol_type = other DNA
atgctgaagacagagagcagtggagagaggaccaccctgcggagcgccagcccccacagaaatgcctacagaacagagttccaggccctgaagagcacctttgacaagcccaagagtgatggagagcagaagaccaaggagggggagggcagccagcagagccggggcaggaaatatggcagcaatgtgaaccgcatcaagaacctcttcatgcagatgtag

SEQ ID NO: 166133 - DNA, 126 bp, synthetic construct
  misc_feature 1..126: note = Description of Artificial Sequence: Synthetic coding sequence
  source 1..126: mol_type = other DNA
atgctgaagacagagagcagtggagagaggaccaccctgcggagcgccagcccccacagaaatgcctacagaacagagttccaggccctgaagagcacctttgacaagcccaagagtgatggatag

SEQ ID NO: 166134 - DNA, 3297 bp, synthetic construct; identical to SEQ ID NO: 166131
  misc_feature 1..3297: note = Description of Artificial Sequence: Synthetic coding sequence
  source 1..3297: mol_type = other DNA

SEQ ID NO: 166135 - DNA, 3762 bp, synthetic construct
  misc_feature 1..3762: note = Description of Artificial Sequence: Synthetic coding sequence
  source 1..3762: mol_type = other DNA
atgctgaagacagagagcagtggagagaggaccaccctgcggagcgccagcccccacagaaatgcctacagaacagagttccaggccctgaagagcacctttgacaagcccaagagtgatggagagcagaagaccaaggagggggagggcagccagcagagccggggcaggaaatatggcagcaatgtgaaccgcatcaagaacctcttcatgcagatgggcatggagcccaatgaaaatgctgctgtgattgccaagacccggggcaagggcggccacagcagcccccagaggaggatgaagcccaaggagttcctggagaagacagatggctctgtggtgaagctggagagctctgtgtctgagcgcatcagcagatttgacaccatgtatgatggccccagctacagcaagttcacagagaccaggaagatgtttgagaggtctgtgcatgaaagtggccagaacaaccgctacagccccaagaaggagaaggccggcggcagcgagccccaggatgagtggggcggcagcaagagcaacagaggcagcacagacagcctggacagcctgagcagcaggacagaagctgtgagccccaccgtgtcccagctgtctgctgtgtttgagaacacagacagccccagcgccatcatcagcgagaaggccgagaacaatgagtacagcgtgacaggccactaccccctgaacctgcccagcgtgacagtgaccaacctggacaccttcggccacctgaaggacagcaacagctggccacccagcaacaagaggggcgtggacacagaagatgcccacaagagcaatgccacccctgtgcctgaggtggccagcaagagcaccagcctggccagcatccctggagaggagatccagcagagcaaggagcctgaggacagcaccagcaaccagcagaccccagacagcattgacaaggatggccctgaggagccctgtgccgagagcaaggccatgcccaagtctgagatccccagcccccagagccagctgctggaggatgctgaggccaacctggtgggccgggaggccgccaagcagcagaggaaggagctggccggcggggacttcaccagcccagatgccagcgccagcagctgtgggaaggaggtgcctgaggacagcaacaactttgatggcagccacgtgtacatgcacagcgactacaacgtgtacagagtgcgcagccgctacaacagcgactggggcgagactggaacagagcaggatgaggaggaggacagtgatgaaaattcctactaccagcctgacatggagtacagcgagatcgtgggcctgcctgaggaggaggagatcccagccaacaggaagatcaagttcagcagcgcccccatcaaggtgttcaacacctacagcaatgaagattatgacagaagaaatgatgaggtggaccctgtggccgccagcgcagaatatgagctggagaagagggtggagaagctggagctgtttcctgtggagctggagaaggatgaagatggcctgggcatcagcatcatcggcatgggcgtgggcgcagatgctggcctggagaagctgggcatctttgtgaagacagtgacagagggcggggccgcccagagagatggccgcatccaggtgaatgaccagatcgtggaggtggatggcatcagcctggtgggcgtgacccagaactttgctgccaccgtgctgaggaacaccaagggaaatgtgcgcttcgtcatcggccgggagaagccaggccaggtgtctgaggtggcccagctgatcagccagaccctggagcaggagcggcggcagcgggagctgctggagcagcactacgcccagtatgatgctgatgatgatgaaacaggagaatatgccacagatgaggaggaggatgaggtgggccctgtgctgcccggcagtgacatggccatcgaggtgtttgagctgcctgaaaatgaagacatgttcagccccagcgagctggacaccagcaagctgagccacaagttcaaggagctgcagatcaagcatgctgtgacagaggccgagatccagaagctgaagaccaagctgcaggccgcagaaaatgagaaggtgcgctgggagctggagaagacccagctgcagcagaacatcgaggagaacaaggagaggatgctgaagctggagagctactggattgaggcccagaccctgtgccacacagtgaatgagcacctgaaggagacccagagccagtaccaggccctggagaagaagtacaacaaggccaagaagctgatcaaggacttccagcagaaggagctggacttcatcaagaggcaggaggccgagaggaagaagattgaggacctggagaaggcccacctggtggaggtgcagggcctgcaggtgcgcatccgggacctggaggccgaggtgttccggctgctgaagcagaatggcacccaggtgaacaacaacaacaacatctttgaaagaaggaccagcctgggggaggtgtccaagggggacaccatggagaacctggatggcaagcagaccagctgccaggacggcctgagccaggacctgaatgaagctgtgcctgagacagagcggctggacagcaaggccctgaagacccgggcccagctgtctgtgaagaacagacggcagaggcccagcaggacccggctgtatgacagcgtgagcagcacagatggagaggacagcctggagaggaagcccagcaacagcttctacaaccacatgcacatcaccaagctgctgccccccaagggcctgcggaccagcagccctgagagtgacagcggcgtgccccccctgacccctgtggacagcaatgtgcccttcagcagtgaccacatcgccgagttccaggaggagcccctggaccctgagatgggccccctgagctccatgtggggagacaccagcctcttcagcaccagcaagagtgaccatgatgtggaggagagcccctgccaccaccagaccaccaacaagaagatcctgcgggagaaggatgatgccaaggaccccaagagcctgcgggccagcagcagcctggccgtgcagggcggcaagatcaagaggaagtttgtggacctgggcgcccccctgcggaggaacagcagcaagggcaagaagtggaaggagaaggagaaggaggccagccgcttctctgctggcagccgcatcttccggggccgcctggagaactggacccccaagccctgcagcacagcccagaccagcaccaggagcccctgcatgcccttctcctggttcaatgacagcaggaagggcagctacagcttcaggaacctgcctgcccccaccagcagcctgcagcccagccctgagaccctcatcagtgacaagaagggcagcaagaacttcaccttcaatgatgacttcagccccagcagcaccagcagcgctgacctgagcggcctgggcgctgagcccaagaccccaggcctgagccagagcctggccctgagcagtgatgaggccctgggcatgacagccagccaggacagagctgtggtgaagaagaagctgaaggagatgaagatgagcctggagaaggccaggaaggcccaggagaagatggagaagcagcgggagaagctgcggaggaaggagcaggagcagatgcagaggaagagcaagaagacagagaagatgaccagcaccacagctgagggcgctggggagcagtag

SEQ ID NO: 166136 - DNA, 930 bp, synthetic construct
  misc_feature 1..930: note = Description of Artificial Sequence: Synthetic coding sequence
  source 1..930: mol_type = other DNA
atggatgagaaggtgttcaccaaggagctggaccagtggattgagcagctgaatgaatgcaagcagctgtctgagagccaggtgaagagcctgtgtgagaaggccaaggagatcctgaccaaggagagcaatgtgcaggaggtgcgctgccctgtgacagtgtgtggagatgtgcacggccagttccatgacctgatggagctgttcagaattggaggcaagagcccagacaccaactacctgttcatgggagactatgtggaccggggctactacagcgtggagaccgtgaccctgctggtggccctgaaggtgcgctaccgggagcgcatcaccatcctgcggggcaaccacgagagccggcagatcacccaggtgtatggcttctatgatgagtgcctgaggaaatatggaaatgccaacgtgtggaagtacttcacagacctgtttgactacctgcccctgacagccctggtggatggccagatcttctgcctgcatggaggcctgagccccagcattgacaccctggaccacatccgggccctggaccggctgcaggaggtgccccatgagggccccatgtgtgacctgctgtggagcgaccctgatgacagaggaggctggggcatcagccccaggggggccggctacaccttcggccaggacatcagcgagaccttcaaccacgccaacggcctgaccctggtgtcccgggcccaccagctggtgatggagggctacaactggtgccacgacagaaatgtggtgaccatcttcagcgcccccaactactgctaccgctgtggcaaccaggccgccatcatggagctggatgacaccctgaagtacagcttcctgcagtttgatcctgccccccggcggggggagccccacgtgaccaggaggaccccagactacttcctgtag

SEQ ID NO: 166137 - DNA, 1407 bp, synthetic construct
  misc_feature 1..1407: note = Description of Artificial Sequence: Synthetic coding sequence
  source 1..1407: mol_type = other DNA
atggcccctcctccagcccgggtgcacctgggcgccttcctggccgtgacccccaaccctggcagcgctgccagcggcacagaagctgctgctgccacccccagcaaggtgtggggcagcagcgctggaagaattgagccccggggcggcggccgcggggccctgcccacctccatgggccagcacggccccagcgcccgggcccgggccggccgggcccctggccccaggcctgcccgggaggccagcccccggctgcgggtgcacaagaccttcaagtttgtggtggtgggcgtgctgctgcaggtggtgcccagcagcgctgccaccatcaagctgcatgaccagagcatcggcacccagcagtgggagcacagccccctgggggagctgtgccccccaggcagccacaggtctgagcaccctggggcctgcaaccgctgcacagaaggagtgggctacaccaatgccagcaacaacctgtttgcctgcctgccctgcacagcctgcaagagtgatgaggaggagaggagcccctgcaccaccaccaggaacacagcctgccagtgcaagccaggcaccttcagaaatgacaacagcgctgagatgtgcaggaagtgcagccggggctgcccccggggcatggtgaaggtgaaggactgcaccccctggagcgacattgaatgtgtgcacaaggagagcggaaatggccacaacatctgggtgatcctggtggtgaccctggtggtgcccctgctgctggtggccgtgctgattgtgtgctgctgcatcggcagcggctgcggcggggaccccaagtgcatggacagagtgtgcttctggaggctgggcctgctgcggggccctggagctgaggacaatgcccacaatgagatcctgagcaatgctgacagcctgagcacctttgtgtctgagcagcagatggagagccaggagcctgctgacctgactggagtgacagtgcagagccctggagaggcccagtgcctgctgggccctgctgaggccgagggcagccagaggcggcggctgctggtgcctgccaacggggctgaccccacagagaccctgatgctgttctttgacaagtttgccaacatcgtgccctttgacagctgggaccagctgatgaggcagctggacctgaccaagaatgaaattgatgtggtgcgggccggcacagctggccctggagatgccctgtatgccatgctgatgaagtgggtgaacaagacaggaagaaatgccagcatccacaccctgctggatgccctggagaggatggaggagagacatgcccgggagaagatccaggacctgctggtggacagcggcaagttcatctacctggaggatggcactggatctgctgtgtccctggagtag

SEQ ID NO: 166138 - DNA, 930 bp, synthetic construct; identical to SEQ ID NO: 161626
  misc_feature 1..930: note = Description of Artificial Sequence: Synthetic coding sequence
  source 1..930: mol_type = other DNA

SEQ ID NO: 166139 - DNA, 1461 bp, synthetic construct
  misc_feature 1..1461: note = Description of Artificial Sequence: Synthetic coding sequence
  source 1..1461: mol_type = other DNA
atgagcagcagcagccccccagctggggccgccagcgctgccatcagcgccagcgagaaggtggatggcttcaccaggaagtctgtgaggaaggcccagaggcagaagaggagccagggcagcagccagttccgcagccagggcagccaggccgagctgcaccccctgccccagctgaaggatgccaccagcaatgagcagcaggagctgttctgccagaagctgcagcagtgctgcatcctgtttgacttcatggattctgtgtctgacctgaagagcaaggagatcaagagggccaccctgaatgagctggtggagtatgtgtccaccaacagaggagtgattgtggagagcgcctacagcgacatcgtgaagatgatcagcgccaacatcttccgcaccctgccccccagcgacaacccagactttgatcctgaagaagatgagcccaccctggaggcctcctggccccacatccagctggtgtatgagttcttcctgcgcttcctggagagcccagacttccagcccagcatcgccaagcgctacatcgaccagaagtttgtgcagcagctgctggagctgtttgacagcgaggacccccgggagcgggacttcctgaagacagtgctgcaccgcatctacggcaagttcctgggcctgcgggccttcatcaggaagcagatcaacaacatcttcctgcgcttcatctatgaaacagagcacttcaacggggtggccgagctgctggagatcctgggcagcatcatcaatggatttgccctgcccctgaaggccgagcacaagcagttcctgatgaaggtgctgatccccatgcacacagccaagggcctggccctcttccacgcccagctggcctactgtgtggtgcagttcctggagaaggacaccaccctgacagagcctgtgatccggggcctgctgaagttctggcccaagacctgcagccagaaggaggtgatgttcctgggggagattgaggagatcctggatgtgattgagcccacccagttcaagaagattgaggagcccctcttcaagcagatcagcaaatgtgtgagcagcagccacttccaggtggccgagcgggccctgtacttctggaacaatgagtacatcctgagcctcatcgaggagaacatcgacaagatcctgcccatcatgtttgccagcctgtacaagatcagcaaggagcactggaaccccaccatcgtggccctggtgtacaacgtgctgaagaccctgatggagatgaatggcaagctgtttgatgacctgaccagcagctacaaggccgagcggcagcgggagaagaagaaggagctggagcgggaggagctgtggaagaagctggaggagctgaagctgaagaaggccctggagaagcagaacagcgcctacaacatgcacagcatcctgagcaacaccagcgctgagtag

SEQ ID NO: 166140 - DNA, 1290 bp, synthetic construct
  misc_feature 1..1290: note = Description of Artificial Sequence: Synthetic coding sequence
  source 1..1290: mol_type = other DNA
atgatcatgaatgccaccagcaatgagcagcaggagctgttctgccagaagctgcagcagtgctgcatcctgtttgacttcatggacagcgtgtctgacctgaagagcaaggagatcaagagggccaccctgaatgagctggtggagtatgtgtccaccaacagaggagtcatcgtggagagcgcctacagcgacatcgtgaagatgatcagcgccaacatcttccgcaccctgcccccaagtgacaacccagactttgatcctgaggaggatgagcccaccctggaggcctcctggccccacatccagctggtgtatgagttcttcctgcgcttcctggagagcccagacttccagcccagcatcgccaagcgctacatcgaccagaagtttgtgcagcagctgctggagctgtttgattctgaggacccccgggagcgggacttcctgaagacagtgctgcaccgcatctacggcaagttcctgggcctgcgggccttcatcaggaagcagatcaacaacatcttcctgcgcttcatctatgaaacagagcacttcaatggagtggccgagctgctggagatcctgggcagcatcatcaatggatttgccctgcccctgaaggccgagcacaagcagttcctgatgaaggtgctgatccccatgcacacagccaagggcctggccctcttccacgcccagctggcctactgtgtggtgcagttcctggagaaggacaccaccctgacagagcccgtcatccggggcctgctgaagttctggcccaagacctgcagccagaaggaggtgatgttcctgggggagattgaggagatcctggatgtgattgagcccacccagttcaagaagattgaggagcccctcttcaagcagatcagcaaatgtgtgagcagcagccacttccaggtggccgagcgggccctgtacttctggaacaatgagtacatcctgagcctgattgaagaaaatattgacaagatcctgcccatcatgtttgccagcctgtacaagatcagcaaggagcactggaaccccaccatcgtggccctggtgtacaacgtgctgaagaccctgatggagatgaatggcaagctgtttgatgacctgaccagcagctacaaggccgagcggcagcgggagaagaagaaggagctggagcgggaggagctgtggaagaagctggaggagctgaagctgaagaaggccctggagaagcagaacagcgcctacaacatgcacagcatcctgagcaacaccagcgctgagtag

SEQ ID NO: 166141 - DNA, 1461 bp, synthetic construct; identical to SEQ ID NO: 166139
  misc_feature 1..1461: note = Description of Artificial Sequence: Synthetic coding sequence
  source 1..1461: mol_type = other DNA

SEQ ID NO: 166142 - DNA, 1341 bp, synthetic construct
  misc_feature 1..1341: note = Description of Artificial Sequence: Synthetic coding sequence
  source 1..1341: mol_type = other DNA
atgaagtgcttcagccgctacctgccctacatcttccggccccccaacaccatcctgagcagcagctgccacacagaagctgacatcatcagcacagtggagttcaaccacactggagagctgctggccaccggggacaagggcggccgggtggtgatcttccagcgggagcaggagagcaagaaccaggtgcaccggcggggggagtacaacgtgtacagcaccttccagagccatgagcctgagtttgactacctgaagagcctggagattgaggagaagatcaacaagatccgctggctgccccagcagaatgctgcctacttcctgctgagcaccaatgacaagacagtgaagctgtggaaggtgtctgagcgggacaagaggcctgagggctacaacctgaaggatgaggagggccgcctgcgggaccctgccaccatcaccaccctgcgggtgcctgtgctgcggcccatggacctgatggtggaggccaccccccggcgggtgtttgccaatgcccacacctaccacatcaacagcatctctgtgaacagcgactatgagacctacatgtctgcagatgacctgcgcatcaacctgtggaactttgagatcaccaaccagagcttcaacatcgtggacatcaagccagccaacatggaggagctgacagaggtgatcacagctgctgagttccacccccaccactgcaacacctttgtgtacagcagcagcaagggcaccatccggctgtgtgacatgagggccagcgccctgtgtgacagacacaccaagttctttgaggagcctgaggaccccagcaacagaagcttcttcagcgagatcatcagcagcatcagtgatgtgaagttcagccacagcggccgctacatcatgacccgggactacctgactgtgaaggtgtgggacctgaacatggagaaccggcccatcgagacctaccaggtgcatgactacctgcggagcaagctgtgcagcctgtatgaaaatgactgcatctttgacaagtttgaatgtgtgtggaatggaagtgacagcgtcatcatgacaggcagctacaacaacttcttcaggatgtttgacaggaacaccaagagagatgtgaccctggaggccagccgggagaacagcaagccccgggccatcctgaagcccaggaaggtgtgtgtgggcggcaagaggaggaaggatgagatctctgtggacagcctggacttcagcaagaagatcctgcacacagcctggcaccccagcgagaacatcatcgctgtggccgccaccaacaacctgtacatcttccaggacaaggtgaactag

SEQ ID NO: 166143 - DNA, 1332 bp, synthetic construct
  misc_feature 1..1332: note = Description of Artificial Sequence: Synthetic coding sequence
  source 1..1332: mol_type = other DNA
atggaggaggacatcgacaccaggaagatcaacaacagcttcctgcgggaccacagctatgccacagaggccgacatcatcagcacagtggagttcaaccacactggagagctgctggccactggagacaagggcggccgggtggtgatcttccagcgggagcaggagagcaagaaccaggtgcacagaagaggagagtacaacgtgtacagcaccttccagagccatgagcctgagtttgactacctgaagagcctggagattgaggagaagatcaacaagatccgctggctgccccagcagaatgctgcctacttcctgctgagcaccaatgacaagacagtgaagctgtggaaggtgtctgagcgggacaagaggcctgagggctacaacctgaaggatgaggagggccgcctgcgggaccctgccaccatcaccaccctgcgggtgcctgtgctgcggcccatggacctgatggtggaggccaccccaagaagagtgtttgccaatgcccacacctaccacatcaacagcatctctgtgaacagcgactatgagacctacatgtctgcagatgacctgcgcatcaacctgtggaactttgagatcaccaaccagagcttcaacatcgtggacatcaagccagccaacatggaggagctgacagaggtgatcacagctgctgagttccacccccaccactgcaacacctttgtgtacagcagcagcaagggcaccatccggctgtgtgacatgagggccagcgccctgtgtgacagacacaccaagttctttgaggagcctgaggaccccagcaacagaagcttcttcagcgagatcatcagcagcatcagtgatgtgaagttcagccacagcggccgctacatcatgacccgggactacctgactgtgaaggtgtgggacctgaacatggagaaccggcccatcgagacctaccaggtgcatgactacctgcggagcaagctgtgcagcctgtatgaaaatgactgcatctttgacaagtttgaatgtgtgtggaatggaagtgacagcgtcatcatgacaggcagctacaacaacttcttcaggatgtttgacaggaacaccaagagagatgtgaccctggaggccagccgggagaacagcaagccccgggccatcctgaagcccaggaaggtgtgtgtgggcggcaagaggaggaaggatgagatctctgtggacagcctggacttcagcaagaagatcctgcacacagcctggcaccccagcgagaacatcatcgctgtggccgccaccaacaacctgtacatcttccaggacaaggtgaactag

SEQ ID NO: 166144 - DNA, 1506 bp, synthetic construct
  misc_feature 1..1506: note = Description of Artificial Sequence: Synthetic coding sequence
  source 1..1506: mol_type = other DNA
atggtgctgcagcccagcgagcggcactacagagactggaaccaccggcggctgggcccctggtgcagccccaccggcagccctgcccccctgagctgtgaaacaggctgtggggagggctcctggatcctggtgtgccgcctgctggtgcccacccaggtgtccctgctgtccatggaggaggacatcgacaccaggaagatcaacaacagcttcctgcgggaccacagctatgccacagaggccgacatcatcagcacagtggagttcaaccacactggagagctgctggccactggagacaagggcggccgggtggtgatcttccagcgggagcaggagagcaagaaccaggtgcacagaagaggagagtacaacgtgtacagcaccttccagagccatgagcctgagtttgactacctgaagagcctggagattgaggagaagatcaacaagatccgctggctgccccagcagaatgctgcctacttcctgctgagcaccaatgacaagacagtgaagctgtggaaggtgtctgagcgggacaagaggcctgagggctacaacctgaaggatgaggagggccgcctgcgggaccctgccaccatcaccaccctgcgggtgcctgtgctgcggcccatggacctgatggtggaggccaccccaagaagagtgtttgccaatgcccacacctaccacatcaacagcatctctgtgaacagcgactatgagacctacatgtctgcagatgacctgcgcatcaacctgtggaactttgagatcaccaaccagagcttcaacatcgtggacatcaagccagccaacatggaggagctgacagaggtgatcacagctgctgagttccacccccaccactgcaacacctttgtgtacagcagcagcaagggcaccatccggctgtgtgacatgagggccagcgccctgtgtgacagacacaccaagttctttgaggagcctgaggaccccagcaacagaagcttcttcagcgagatcatcagcagcatcagtgatgtgaagttcagccacagcggccgctacatcatgacccgggactacctgactgtgaaggtgtgggacctgaacatggagaaccggcccatcgagacctaccaggtgcatgactacctgcggagcaagctgtgcagcctgtatgaaaatgactgcatctttgacaagtttgaatgtgtgtggaatggaagtgacagcgtcatcatgacaggcagctacaacaacttcttcaggatgtttgacaggaacaccaagagagatgtgaccctggaggccagccgggagaacagcaagccccgggccatcctgaagcccaggaaggtgtgtgtgggcggcaagaggaggaaggatgagatctctgtggacagcctggacttcagcaagaagatcctgcacacagcctggcaccccagcgagaacatcatcgctgtggccgccaccaacaacctgtacatcttccaggacaaggtgaactag

SEQ ID NO: 166145 - DNA, 1299 bp, synthetic construct
  misc_feature 1..1299: note = Description of Artificial Sequence: Synthetic coding sequence
  source 1..1299: mol_type = other DNA
atgaactacccagatgagaacacctacggcaacaaggctgacatcatcagcacagtggagttcaaccacactggagagctgctggccaccggggacaagggcggccgggtggtgatcttccagcgggagcaggagagcaagaaccaggtgcaccggcggggggagtacaacgtgtacagcaccttccagagccatgagcctgagtttgactacctgaagagcctggagattgaggagaagatcaacaagatccgctggctgccccagcagaatgctgcctacttcctgctgagcaccaatgacaagacagtgaagctgtggaaggtgtctgagcgggacaagaggcctgagggctacaacctgaaggatgaggagggccgcctgcgggaccctgccaccatcaccaccctgcgggtgcctgtgctgcggcccatggacctgatggtggaggccaccccccggcgggtgtttgccaatgcccacacctaccacatcaacagcatctctgtgaacagcgactatgagacctacatgtctgcagatgacctgcgcatcaacctgtggaactttgagatcaccaaccagagcttcaacatcgtggacatcaagccagccaacatggaggagctgacagaggtgatcacagctgctgagttccacccccaccactgcaacacctttgtgtacagcagcagcaagggcaccatccggctgtgtgacatgagggccagcgccctgtgtgacagacacaccaagttctttgaggagcctgaggaccccagcaacagaagcttcttcagcgagatcatcagcagcatcagtgatgtgaagttcagccacagcggccgctacatcatgacccgggactacctgactgtgaaggtgtgggacctgaacatggagaaccggcccatcgagacctaccaggtgcatgactacctgcggagcaagctgtgcagcctgtatgaaaatgactgcatctttgacaagtttgaatgtgtgtggaatggaagtgacagcgtcatcatgacaggcagctacaacaacttcttcaggatgtttgacaggaacaccaagagagatgtgaccctggaggccagccgggagaacagcaagccccgggccatcctgaagcccaggaaggtgtgtgtgggcggcaagaggaggaaggatgagatctctgtggacagcctggacttcagcaagaagatcctgcacacagcctggcaccccagcgagaacatcatcgctgtggccgccaccaacaacctgtacatcttccaggacaaggtgaactag

SEQ ID NO: 166146 - DNA, 1332 bp, synthetic construct; identical to SEQ ID NO: 166143
  misc_feature 1..1332: note = Description of Artificial Sequence: Synthetic coding sequence
  source 1..1332: mol_type = other DNA

SEQ ID NO: 166147 - DNA, 1332 bp, synthetic construct; identical to SEQ ID NO: 166143
  misc_feature 1..1332: note = Description of Artificial Sequence: Synthetic coding sequence
  source 1..1332: mol_type = other DNA

SEQ ID NO: 166148 - DNA, 1530 bp, synthetic construct
  misc_feature 1..1530: note = Description of Artificial Sequence: Synthetic coding sequence
  source 1..1530: mol_type = other DNA
atgctgctgagcctgcctgccctgcacctgcagaccagcgagcaccaccccttcttccagctgccccaccggcggctgggcccctggtgcagccccaccggcagccctgcccccctgagctgtgaaacaggctgtggggagggctcctggatcctggtgtgccgcctgctggtgcccacccaggtgtccctgctgtccatggaggaggacatcgacaccaggaagatcaacaacagcttcctgcgggaccacagctatgccacagaggccgacatcatcagcacagtggagttcaaccacactggagagctgctggccactggagacaagggcggccgggtggtgatcttccagcgggagcaggagagcaagaaccaggtgcacagaagaggagagtacaacgtgtacagcaccttccagagccatgagcctgagtttgactacctgaagagcctggagattgaggagaagatcaacaagatccgctggctgccccagcagaatgctgcctacttcctgctgagcaccaatgacaagacagtgaagctgtggaaggtgtctgagcgggacaagaggcctgagggctacaacctgaaggatgaggagggccgcctgcgggaccctgccaccatcaccaccctgcgggtgcctgtgctgcggcccatggacctgatggtggaggccaccccaagaagagtgtttgccaatgcccacacctaccacatcaacagcatctctgtgaacagcgactatgagacctacatgtctgcagatgacctgcgcatcaacctgtggaactttgagatcaccaaccagagcttcaacatcgtggacatcaagccagccaacatggaggagctgacagaggtgatcacagctgctgagttccacccccaccactgcaacacctttgtgtacagcagcagcaagggcaccatccggctgtgtgacatgagggccagcgccctgtgtgacagacacaccaagttctttgaggagcctgaggaccccagcaacagaagcttcttcagcgagatcatcagcagcatcagtgatgtgaagttcagccacagcggccgctacatcatgacccgggactacctgactgtgaaggtgtgggacctgaacatggagaaccggcccatcgagacctaccaggtgcatgactacctgcggagcaagctgtgcagcctgtatgaaaatgactgcatctttgacaagtttgaatgtgtgtggaatggaagtgacagcgtcatcatgacaggcagctacaacaacttcttcaggatgtttgacaggaacaccaagagagatgtgaccctggaggccagccgggagaacagcaagccccgggccatcctgaagcccaggaaggtgtgtgtgggcggcaagaggaggaaggatgagatctctgtggacagcctggacttcagcaagaagatcctgcacacagcctggcaccccagcgagaacatcatcgctgtggccgccaccaacaacctgtacatcttccaggacaaggtgaactag

SEQ ID NO: 166149 - DNA, 1332 bp, synthetic construct; identical to SEQ ID NO: 166143
  misc_feature 1..1332: note = Description of Artificial Sequence: Synthetic coding sequence
  source 1..1332: mol_type = other DNA

SEQ ID NO: 166150 - DNA, 1350 bp, synthetic construct
  misc_feature 1..1350: note = Description of Artificial Sequence: Synthetic coding sequence
  source 1..1350: mol_type = other DNA
atgatccctggcatcggcaccctgacccaggacaccctgtggtgcttcagccaggtgaagggcaccattgaaattggcaccacagaggccgacatcatcagcacagtggagttcaaccacactggagagctgctggccactggagacaagggcggccgggtggtgatcttccagcgggagcaggagagcaagaaccaggtgcacagaagaggagagtacaacgtgtacagcaccttccagagccatgagcctgagtttgactacctgaagagcctggagattgaggagaagatcaacaagatccgctggctgccccagcagaatgctgcctacttcctgctgagcaccaatgacaagacagtgaagctgtggaaggtgtctgagcgggacaagaggcctgagggctacaacctgaaggatgaggagggccgcctgcgggaccctgccaccatcaccaccctgcgggtgcctgtgctgcggcccatggacctgatggtggaggccaccccaagaagagtgtttgccaatgcccacacctaccacatcaacagcatctctgtgaacagcgactatgagacctacatgtctgcagatgacctgcgcatcaacctgtggaactttgagatcaccaaccagagcttcaacatcgtggacatcaagccagccaacatggaggagctgacagaggtgatcacagctgctgagttccacccccaccactgcaacacctttgtgtacagcagcagcaagggcaccatccggctgtgtgacatgagggccagcgccctgtgtgacagacacaccaagttctttgaggagcctgaggaccccagcaacagaagcttcttcagcgagatcatcagcagcatcagtgatgtgaagttcagccacagcggccgctacatcatgacccgggactacctgactgtgaaggtgtgggacctgaacatggagaaccggcccatcgagacctaccaggtgcatgactacctgcggagcaagctgtgcagcctgtatgaaaatgactgcatctttgacaagtttgaatgtgtgtggaatggaagtgacagcgtcatcatgacaggcagctacaacaacttcttcaggatgtttgacaggaacaccaagagagatgtgaccctggaggccagccgggagaacagcaagccccgggccatcctgaagcccaggaaggtgtgtgtgggcggcaagaggaggaaggatgagatctctgtggacagcctggacttcagcaagaagatcctgcacacagcctggcaccccagcgagaacatcatcgctgtggccgccaccaacaacctgtacatcttccaggacaaggtgaactag

SEQ ID NO: 166151 - DNA, 1299 bp, synthetic construct; identical to SEQ ID NO: 166145
  misc_feature 1..1299: note = Description of Artificial Sequence: Synthetic coding sequence
  source 1..1299: mol_type = other DNA

SEQ ID NO: 166152 - DNA, 1494 bp, synthetic construct
  misc_feature 1..1494: note = Description of Artificial Sequence: Synthetic coding sequence
  source 1..1494: mol_type = other DNA
atggagaccaagctgcccccagccagcacccccaccagccccagcagccctggcctgagccctgtgcccccaccagacaaggtggatggcttcagcagaagaagcctgcggcgggcccggccccggcgcagccacagcagcagccagttccgctaccagagcaaccagcaggagctgacccccctgcccctgctgaaggatgtgcctgccagcgagctgcacgagctgctgagcaggaagctggcccagtgtggggtgatgtttgacttcctggactgtgtggccgacctgaagggcaaggaggtgaagagagctgccctgaatgagctggtggagtgtgtgggcagcacccggggcgtgctgattgagcctgtgtacccagacatcatccgcatgatctctgtgaacatcttccgcaccctgcccccatctgaaaatcctgagtttgatcctgaagaagatgagcccaacctggagcccagctggccccacctgcagctggtgtatgagttcttcctgcgcttcctggagagcccagacttccagcccagcgtggccaagagatatgtggaccagaagtttgtgctgatgctgctggagctgtttgacagcgaggacccccgggagcgggagtacctgaagaccatcctgcaccgggtgtatggcaagttcctgggcctgcgggcctacatcaggaagcagtgcaaccacatcttcctgcgcttcatctatgaatttgagcacttcaacggggtggccgagctgctggagatcctgggcagcatcatcaatggatttgccctgcccctgaagacagagcacaagcagttcctggtgcgggtgctgatccccctgcacagcgtgaagagcctgagcgtcttccacgcccagctggcctactgtgtggtgcagttcctggagaaggatgccaccctgacagaacatgtgatccggggcctgctgaagtactggcccaagacctgcacccagaaggaggtgatgttcctgggggagatggaggagatcctggatgtgattgagcccagccagtttgtgaagatccaggagcccctcttcaagcaggtggcccgctgtgtgagcagcccccacttccaggtggccgagcgggccctgtacttctggaacaatgagtacatcctgagcctgattgaggacaactgccacacagtgctgcctgctgtgtttggcaccctgtaccaggtgtccaaggagcactggaaccagaccatcgtgtccctcatctacaacgtgctgaagaccttcatggagatgaatggcaagctgtttgatgagctgacagccagctacaagctggagaagcagcaggagcagcagaaggcccaggagcggcaggagctgtggcagggcctggaggagctgcggctgcggcggctgcagggcacccagggcgccaaggaggcccccctgcagaggctgaccccccaggtggccgccagcggcggccagagctag

SEQ ID NO: 166153 - DNA, 1107 bp, synthetic construct
  misc_feature 1..1107: note = Description of Artificial Sequence: Synthetic coding sequence
  source 1..1107: mol_type = other DNA
tctgtgcagagccacccagccccaccccggccccgggagaacccccggggcagcgagagcctgccctgccgcctgacagccatggagaccaagctgcccccagccagcacccccaccagccccagcagccctggcctgagccctgtgcccccaccagacaaggtggatggcttcagccgccgcagcctgcggcgggcccggcccaggaggagccacagcagcagccagttccgctaccagagcaaccagcaggagctgacccccctgcccctgctgaaggatgtgcctgccagcgagctgcacgagctgctgagcaggaagctggcccagtgtggggtgatgtttgacttcctggactgtgtggccgacctgaagggcaaggaggtgaagagagctgccctgaatgagctggtggagtgtgtgggcagcacccggggcgtgctgattgagcctgtgtacccagacatcatccgcatgatctctgtgaacatcttccgcaccctgcccccatctgagaaccctgagtttgatcctgaggaggatgagcccaacctggagcccagctggccccacctgcagctggtgtatgagttcttcctgcgcttcctggagagcccagacttccagcccagcgtggccaagcgctacgtggaccagaagtttgtgctgatgctgctggagctgtttgattctgaggacccccgggagcgggagtacctgaagaccatcctgcaccgggtgtatggcaagttcctgggcctgcgggcctacatcaggaagcagtgcaaccacatcttcctgcgcttcatctatgaatttgagcacttcaatggagtggccgagctgctggagatcctgggcagcatcatcaatggatttgccctgcccctgaagacagagcacaagccaggcagcaggccagaccccccagccctgtgccaggtggccgtgtgcctgccctgcccagctggcatcctgtgtggggctgtgcctggagagggctgccacagcgaccgggcccgggaccctggagctgcccagatcctggccaagaacctgcaccctgagggcggagatgtgtctggaggagatggccgggacagctag

SEQ ID NO: 166154 - DNA, 582 bp, synthetic construct
  misc_feature 1..582: note = Description of Artificial Sequence: Synthetic coding sequence
  source 1..582: mol_type = other DNA
atggagaccaagctgcccccagccagcacccccaccagccccagcagccctggcctgagccctgtgcccccaccagacaaggtggatggcttcagcagaagaagcctgcggcgggcccggccccggcgcagccacagcagcagccagttccgctaccagagcaaccagcaggagctgacccccctgcccctgctgaaggatgtgcctgccagcgagctgcacgagctgctgagcaggaagctggcccagtgtggggtgatgtttgacttcctggactgtgtggccgacctgaagggcaaggaggtgaagagagctgccctgaatgagctggtggagtgtgtgggcagcacccggggcgtgctgattgagcctgtgtacccagacatcatccgcatgatctctgtgaacatcttccgcaccctgcccccatctgaaaatcctgagtttgatcctgaagaagatgagcccaacctggagcccagctggccccacctgcagctggtgtatgagttcttcctgcgcttcctggagagcccagacttccagcccagcgtggccaagagatatgtggaccagaagtag

SEQ ID NO: 166155 - DNA, 1494 bp, synthetic construct; identical to SEQ ID NO: 166152
  misc_feature 1..1494: note = Description of Artificial Sequence: Synthetic coding sequence
  source 1..1494: mol_type = other DNA

SEQ ID NO: 166156 - DNA, 408 bp, synthetic construct
  misc_feature 1..408: note = Description of Artificial Sequence: Synthetic coding sequence
  source 1..408: mol_type = other DNA
atggaggagctgacagaggtgatcacagctgctgagttccacccccaccagtgcaatgtgtttgtgtacagcagcagcaagggcaccatccggctgtgtgacatgaggagcagcgccctgtgtgacagacacagcaagttctttgaggagcctgaggaccccagcagccgctccttcttcagcgagatcatcagcagcatcagtgatgtgaagttcagccacagcggccgctacatgatgacccgggaccctgtgggggagggcgtgggcccccagcacagagctggccgctggaggcccaccaggagcaccagcacctgtgccgccagcagcgccctgtccatgaggaccacagccagcctgaccagcctgtctgtggccggcaccgtgcgcatcgcccccagctag

SEQ ID NO: 166157 - DNA, 1269 bp, synthetic construct
  misc_feature 1..1269: note = Description of Artificial Sequence: Synthetic coding sequence
  source 1..1269: mol_type = other DNA
ctgacagctgacatcatcagcacagtggagttcaactacagcggggacctgctggccaccggggacaagggcggccgggtggtgatcttccagcgggagcaggagaacaagagccggccccacagcagaggagagtacaacgtgtacagcaccttccagagccatgagcctgagtttgactacctgaagagcctggagattgaggagaagatcaacaagatccgctggctgccccagcagaatgctgcccacttcctgctgagcaccaatgacaagaccatcaagctgtggaagatcagcgagcgggacaagagagctgagggctacaacctgaaggatgaagatggccgcctgcgggaccccttccgcatcacagccctgcgggtgcccatcctgaagcccatggacctgatggtggaggccagcccccggcgcatctttgccaatgcccacacctaccacatcaacagcatctctgtgaacagcgaccacgagacctacctgtctgcagatgacctgcgcatcaacctgtggcacctggagatcacagacaggagcttcaacatcgtggacatcaagccagccaacatggaggagctgacagaggtgatcacagctgctgagttccacccccaccagtgcaatgtgtttgtgtacagcagcagcaagggcaccatccggctgtgtgacatgaggagcagcgccctgtgtgacagacacagcaagttctttgaggagcctgaggaccccagcagccgctccttcttcagcgagatcatcagcagcatcagtgatgtgaagttcagccacagcggccgctacatgatgacccgggactacctgtctgtgaaggtgtgggacctgaacatggagagcaggcctgtggagacccaccaggtgcatgagtacctgcggagcaagctgtgcagcctgtatgaaaatgactgcatctttgacaagtttgagtgctgctggaatggaagtgacagcgccatcatgacaggcagctacaacaacttcttcaggatgtttgaccgggacaccaggagagatgtgaccctggaggccagccgggagagcagcaagccccgggccagcctgaagcccaggaaggtgtgcaccggcggcaagaggaggaaggatgagatctctgtggacagcctggacttcaacaagaagatcctgcacacagcctggcaccctgtggacaacgtgattgctgtggccgccaccaacaacctgtacatcttccaggacaagatcaactag

SEQ ID NO: 166158 - DNA, 1713 bp, synthetic construct
  misc_feature 1..1713: note = Description of Artificial Sequence: Synthetic coding sequence
  source 1..1713: mol_type = other DNA
atgccctacaagctgaagaaggagaaggagccccccaaggtggccaagtgcacagccaagcccagcagcagcggcaaggatggcggcggagaaaatacagaggaggcccagccccagccccagccccagccccagccccaggcccagagccagccccccagcagcaacaagaggcccagcaacagcaccccaccacccacccagctgagcaagatcaagtacagcggcggcccccagatcgtgaagaaggagctgttcatccagaagctgcggcagtgctgcgtgctgtttgattttgtgtctgaccccctgagtgacctgaagttcaaggaggtgaagagagctggcctgaatgagatggtggagtacatcacccacagcagagatgtggtgacagaggccatctacccagaggccgtgaccatgttttctgtgaacctcttccgcaccctgccccccagcagcaaccccaccggggctgagtttgatcctgaggaggatgagcccaccctggaggccgcctggccccacctgcagctggtgtatgagttcttcctgcgcttcctggagagcccagacttccagcccaacatcgccaagaagtacatcgaccagaagtttgtgctggccctgctggacctgtttgattctgaggacccccgggagcgggacttcctgaagaccatcctgcaccgcatctacggcaagttcctgggcctgcgggcctacatccggcggcagatcaaccacatcttctaccgcttcatctatgaaacagagcaccacaatggaattgctgagctgctggagatcctgggcagcatcatcaatggatttgccctgcccctgaaggaggagcacaagatgttcctgatccgggtgctgctgcccctgcacaaggtgaagagcctgtctgtgtaccacccccagctggcctactgtgtggtgcagttcctggagaaggagagcagcctgacagagcccgtcatcgtgggcctgctgaagttctggcccaagacccacagccccaaggaggtgatgttcctgaatgagctggaggagatcctggatgtgattgagcccagcgagttcagcaaggtgatggagcccctcttccggcagctggccaagtgtgtgagcagcccccacttccaggtggccgagcgggccctgtactactggaacaatgagtacatcatgagcctcatcagtgacaatgctgcccgggtgctgcccatcatgtttcctgccctgtacagaaacagcaagagccactggaacaagaccatccacggcctcatctacaatgccctgaagctgttcatggagatgaaccagaagctgtttgatgactgcacccagcagtacaaggccgagaagcagaagggccgcttcaggatgaaggagcgggaggagatgtggcagaagattgaggagctggcccggctgaacccccagtaccccatgttccgggcccccccacccctgccccctgtgtacagcatggagacagagacccccacagctgaggacatccagctgctgaagaggacagtggagacagaagctgtgcagatgctgaaggacatcaagaaggagaaggtgctgctgcggaggaagtctgagctgccccaggatgtgtacaccatcaaggccctggaggcccacaagagagctgaggagttcctgacagccagccaggaggccctgtag

SEQ ID NO: 166159 - DNA, 1491 bp, synthetic construct
  misc_feature 1..1491: note = Description of Artificial Sequence: Synthetic coding sequence
  source 1..1491: mol_type = other DNA
atgccctacaagctgaagaaggagaaggagctgttcatccagaagctgcggcagtgctgcgtgctgtttgattttgtgtctgaccccctgagtgacctgaagttcaaggaggtgaagagagctggcctgaatgagatggtggagtacatcacccacagcagagatgtggtgacagaggccatctacccagaggccgtgaccatgttttctgtgaacctcttccgcaccctgccccccagcagcaaccccaccggggctgagtttgatcctgaggaggatgagcccaccctggaggccgcctggccccacctgcagctggtgtatgagttcttcctgcgcttcctggagagcccagacttccagcccaacatcgccaagaagtacatcgaccagaagtttgtgctggccctgctggacctgtttgattctgaggacccccgggagcgggacttcctgaagaccatcctgcaccgcatctacggcaagttcctgggcctgcgggcctacatccggcggcagatcaaccacatcttctaccgcttcatctatgaaacagagcaccacaatggaattgctgagctgctggagatcctgggcagcatcatcaatggatttgccctgcccctgaaggaggagcacaagatgttcctgatccgggtgctgctgcccctgcacaaggtgaagagcctgtctgtgtaccacccccagctggcctactgtgtggtgcagttcctggagaaggagagcagcctgacagagcccgtcatcgtgggcctgctgaagttctggcccaagacccacagccccaaggaggtgatgttcctgaatgagctggaggagatcctggatgtgattgagcccagcgagttcagcaaggtgatggagcccctcttccggcagctggccaagtgtgtgagcagcccccacttccaggtggccgagcgggccctgtactactggaacaatgagtacatcatgagcctcatcagtgacaatgctgcccgggtgctgcccatcatgtttcctgccctgtacagaaacagcaagagccactggaacaagaccatccacggcctcatctacaatgccctgaagctgttcatggagatgaaccagaagctgtttgatgactgcacccagcagtacaaggccgagaagcagaagggccgcttcaggatgaaggagcgggaggagatgtggcagaagattgaggagctggcccggctgaacccccagtaccccatgttccgggcccccccacccctgccccctgtgtacagcatggagacagagacccccacagctgaggacatccagctgctgaagaggacagtggagacagaagctgtgcagatgctgaaggacatcaagaaggagaaggtgctgctgcggaggaagtctgagctgccccaggatgtgtacaccatcaaggccctggaggcccacaagagagctgaggagttcctgacagccagccaggaggccctgtag

SEQ ID NO: 166160 - DNA, 1515 bp, synthetic construct
  misc_feature 1..1515: note = Description of Artificial Sequence: Synthetic coding sequence
  source 1..1515: mol_type = other DNA
tgaaagaaggagcggcggcagagcagcagccgcttcaacctgagcaagaaccgggagctgcagaagctgcctgccctgaaggacagccccacccaggagcgggaggagctgttcatccagaagctgcggcagtgctgcgtgctgtttgattttgtgtctgaccccctgagtgacctgaagttcaaggaggtgaagagagctggcctgaatgagatggtggagtacatcacccacagcagagatgtggtgacagaggccatctacccagaggccgtgaccatgttttctgtgaacctcttccgcaccctgccccccagcagcaaccccaccggggctgagtttgatcctgaggaggatgagcccaccctggaggccgcctggccccacctgcagctggtgtatgagttcttcctgcgcttcctggagagcccagacttccagcccaacatcgccaagaagtacatcgaccagaagtttgtgctggccctgctggacctgtttgattctgaggacccccgggagcgggacttcctgaagaccatcctgcaccgcatctacggcaagttcctgggcctgcgggcctacatccggcggcagatcaaccacatcttctaccgcttcatctatgaaacagagcaccacaatggaattgctgagctgctggagatcctgggcagcatcatcaatggatttgccctgcccctgaaggaggagcacaagatgttcctgatccgggtgctgctgcccctgcacaaggtgaagagcctgtctgtgtaccacccccaggtgattgtgggcctgctgaagttctggcccaagacccacagccccaaggaggtgatgttcctgaatgagctggaggagatcctggatgtgattgagcccagcgagttcagcaaggtgatggagcccctcttccggcagctggccaagtgtgtgagcagcccccacttccaggtggccgagcgggccctgtactactggaacaatgagtacatcatgagcctcatcagtgacaatgctgcccgggtgctgcccatcatgtttcctgccctgtacagaaacagcaagagccactggaacaagaccatccacggcctcatctacaatgccctgaagctgttcatggagatgaaccagaagctgtttgatgactgcacccagcagtacaaggccgagaagcagaagggccgcttcaggatgaaggagcgggaggagatgtggcagaagattgaggagctggcccggctgaacccccagtaccccatgttccgggcccccccacccctgccccctgtgtacagcatggagacagagacccccacagctgaggacatccagctgctgaagaggacagtggagacagaagctgtgcagatgctgaaggacatcaagaaggagaaggtgctgctgcggaggaagtctgagctgccccaggatgtgtacaccatcaaggccctggaggcccacaagagagctgaggagttcctgacagccagccaggaggccctgtag

SEQ ID NO: 166161 - DNA, 1809 bp, synthetic construct
  misc_feature 1..1809: note = Description of Artificial Sequence: Synthetic coding sequence
  source 1..1809: mol_type = other DNA
atgccctacaagctgaagaaggagaaggagccccccaaggtggccaagtgcacagccaagcccagcagcagcggcaaggatggcggcggagaaaatacagaggaggcccagccccagccccagccccagccccagccccaggcccagagccagccccccagcagcaacaagaggcccagcaacagcaccccaccacccacccagctgagcaagatcaagtacagcggcggcccccagatcgtgaagaaggagcggcggcagagcagcagccgcttcaacctgagcaagaaccgggagctgcagaagctgcctgccctgaaggacagccccacccaggagcgggaggagctgttcatccagaagctgcggcagtgctgcgtgctgtttgattttgtgtctgaccccctgagtgacctgaagttcaaggaggtgaagagagctggcctgaatgagatggtggagtacatcacccacagcagagatgtggtgacagaggccatctacccagaggccgtgaccatgttttctgtgaacctcttccgcaccctgccccccagcagcaaccccaccggggctgagtttgatcctgaggaggatgagcccaccctggaggccgcctggccccacctgcagctggtgtatgagttcttcctgcgcttcctggagagcccagacttccagcccaacatcgccaagaagtacatcgaccagaagtttgtgctggccctgctggacctgtttgattctgaggacccccgggagcgggacttcctgaagaccatcctgcaccgcatctacggcaagttcctgggcctgcgggcctacatccggcggcagatcaaccacatcttctaccgcttcatctatgaaacagagcaccacaatggaattgctgagctgctggagatcctgggcagcatcatcaatggatttgccctgcccctgaaggaggagcacaagatgttcctgatccgggtgctgctgcccctgcacaaggtgaagagcctgtctgtgtaccacccccagctggcctactgtgtggtgcagttcctggagaaggagagcagcctgacagagcccgtcatcgtgggcctgctgaagttctggcccaagacccacagccccaaggaggtgatgttcctgaatgagctggaggagatcctggatgtgattgagcccagcgagttcagcaaggtgatggagcccctcttccggcagctggccaagtgtgtgagcagcccccacttccaggtggccgagcgggccctgtactactggaacaatgagtacatcatgagcctcatcagtgacaatgctgcccgggtgctgcccatcatgtttcctgccctgtacagaaacagcaagagccactggaacaagaccatccacggcctcatctacaatgccctgaagctgttcatggagatgaaccagaagctgtttgatgactgcacccagcagtacaaggccgagaagcagaagggccgcttcaggatgaaggagcgggaggagatgtggcagaagattgaggagctggcccggctgaacccccagtaccccatgttccgggcccccccacccctgccccctgtgtacagcatggagacagagacccccacagctgaggacatccagctgctgaagaggacagtggagacagaagctgtgcagatgctgaaggacatcaagaaggagaaggtgctgctgcggaggaagtctgagctgccccaggatgtgtacaccatcaaggccctggaggcccacaagagagctgaggagttcctgacagccagccaggaggccctgtag

SEQ ID NO: 166162 - DNA, 1755 bp, synthetic construct
  misc_feature 1..1755: note = Description of Artificial Sequence: Synthetic coding sequence
  source 1..1755: mol_type = other DNA
atgccctacaagctgaagaaggagaaggagccccccaaggtggccaagtgcacagccaagcccagcagcagcggcaaggatggcggcggagaaaatacagaggaggcccagccccagccccagccccagccccagccccaggcccagagccagccccccagcagcaacaagaggcccagcaacagcaccccaccacccacccagctgagcaagatcaagtacagcggcggcccccagatcgtgaagaaggagcggcggcagagcagcagccgcttcaacctgagcaagaaccgggagctgcagaagctgcctgccctgaaggacagccccacccaggagcgggaggagctgttcatccagaagctgcggcagtgctgcgtgctgtttgattttgtgtctgaccccctgagtgacctgaagttcaaggaggtgaagagagctggcctgaatgagatggtggagtacatcacccacagcagagatgtggtgacagaggccatctacccagaggccgtgaccatgttttctgtgaacctcttccgcaccctgccccccagcagcaaccccaccggggctgagtttgatcctgaggaggatgagcccaccctggaggccgcctggccccacctgcagctggtgtatgagttcttcctgcgcttcctggagagcccagacttccagcccaacatcgccaagaagtacatcgaccagaagtttgtgctggccctgctggacctgtttgattctgaggacccccgggagcgggacttcctgaagaccatcctgcaccgcatctacggcaagttcctgggcctgcgggcctacatccggcggcagatcaaccacatcttctaccgcttcatctatgaaacagagcaccacaatggaattgctgagctgctggagatcctgggcagcatcatcaatggatttgccctgcccctgaaggaggagcacaagatgttcctgatccgggtgctgctgcccctgcacaaggtgaagagcctgtctgtgtaccacccccaggtgattgtgggcctgctgaagttctggcccaagacccacagccccaaggaggtgatgttcctgaatgagctggaggagatcctggatgtgattgagcccagcgagttcagcaaggtgatggagcccctcttccggcagctggccaagtgtgtgagcagcccccacttccaggtggccgagcgggccctgtactactggaacaatgagtacatcatgagcctcatcagtgacaatgctgcccgggtgctgcccatcatgtttcctgccctgtacagaaacagcaagagccactggaacaagaccatccacggcctcatctacaatgccctgaagctgttcatggagatgaaccagaagctgtttgatgactgcacccagcagtacaaggccgagaagcagaagggccgcttcaggatgaaggagcgggaggagatgtggcagaagattgaggagctggcccggctgaacccccagtaccccatgttccgggcccccccacccctgccccctgtgtacagcatggagacagagacccccacagctgaggacatccagctgctgaagaggacagtggagacagaagctgtgcagatgctgaaggacatcaagaaggagaaggtgctgctgcggaggaagtctgagctgccccaggatgtgtacaccatcaaggccctggaggcccacaagagagctgaggagttcctgacagccagccaggaggccctgtag

SEQ ID NO: 166163 - DNA, 1404 bp, synthetic construct
  misc_feature 1..1404: note = Description of Artificial Sequence: Synthetic coding sequence
  source 1..1404: mol_type = other DNA
atgagcagcgcccccaccaccccacccagcgtggacaaggtggatggcttcagcaggaagtctgtgaggaaggcccggcagaagaggagccagagcagcagccagttccgcagccagggcaagcccatcgagctgacccccctgcccctgctgaaggatgtgcccagcagcgagcagcctgagctgttcctgaagaagctgcagcagtgctgcgtcatctttgacttcatggacaccctgagtgacctgaagatgaaggagtacaagaggagcaccctgaatgagctggtggactacatcaccatcagccggggctgcctgacagagcagacctacccagaggtggtgaggatggtgtcctgcaacatcttccgcaccctgccccccagcgacagcaatgaatttgatcctgaagaagatgagcccaccctggaggcctcctggccccacctgcagctggtgtatgagttcttcatccgcttcctggagagccaggagttccagcccagcatcgccaagaagtacatcgaccagaagtttgtgctgcagctgctggagctgtttgacagcgaggacccccgggagcgggactacctgaagacagtgctgcaccgcatctacggcaagttcctgggcctgcgggccttcatcaggaagcagatcaacaacatcttcctgcgctttgtgtatgaaacagagcacttcaacggggtggccgagctgctggagatcctgggcagcatcatcaatggatttgccctgcccctgaaggccgagcacaagcagttcctggtgaaggtgctgatccccctgcacacagtgcgcagcctgagcctcttccacgcccagctggcctactgcatcgtgcagttcctggagaaggaccccagcctgacagagcctgtgatccggggcctgatgaagttctggcccaagacctgcagccagaaggaggtgatgttcctgggggagctggaggagatcctggatgtgattgagcccagccagtttgtgaagatccaggagcccctcttcaagcagatcgccaagtgtgtgagcagcccccacttccaggtggccgagcgggccctgtactactggaacaatgagtacatcatgagcctcatcgaggagaacagcaatgtcatcctgcccatcatgttcagcagcctgtaccgcatcagcaaggagcactggaacccagccatcgtggccctggtgtacaacgtgctgaaggccttcatggagatgaacagcaccatgtttgatgagctgacagccacctacaagagtgaccggcagcgggagaagaagaaggagaaggagcgggaggagctgtggaagaagctggaggacctggagctgaagaggggcctgcggagagatggcatcatccccacctag

SEQ ID NO: 166164 - DNA, 1176 bp, synthetic construct
  misc_feature 1..1176: note = Description of Artificial Sequence: Synthetic coding sequence
  source 1..1176: mol_type = other DNA
atggacaccctgagtgacctgaagatgaaggagtacaagaggagcaccctgaatgagctggtggactacatcaccatcagccggggctgcctgacagagcagacctacccagaggtggtgaggatggtgtcctgcaacatcttccgcaccctgccccccagcgacagcaatgaatttgatcctgaagaagatgagcccaccctggaggcctcctggccccacctgcagctggtgtatgagttcttcatccgcttcctggagagccaggagttccagcccagcatcgccaagaagtacatcgaccagaagtttgtgctgcagctgctggagctgtttgacagcgaggacccccgggagcgggactacctgaagacagtgctgcaccgcatctacggcaagttcctgggcctgcgggccttcatcaggaagcagatcaacaacatcttcctgcgctttgtgtatgaaacagagcacttcaacggggtggccgagctgctggagatcctgggcagcatcatcaatggatttgccctgcccctgaaggccgagcacaagcagttcctggtgaaggtgctgatccccctgcacacagtgcgcagcctgagcctcttccacgcccagctggcctactgcatcgtgcagttcctggagaaggaccccagcctgacagagcctgtgatccggggcctgatgaagttctggcccaagacctgcagccagaaggaggtgatgttcctgggggagctggaggagatcctggatgtgattgagcccagccagtttgtgaagatccaggagcccctcttcaagcagatcgccaagtgtgtgagcagcccccacttccaggtggccgagcgggccctgtactactggaacaatgagtacatcatgagcctcatcgaggagaacagcaatgtcatcctgcccatcatgttcagcagcctgtaccgcatcagcaaggagcactggaacccagccatcgtggccctggtgtacaacgtgctgaaggccttcatggagatgaacagcaccatgtttgatgagctgacagccacctacaagagtgaccggcagcgggagaagaagaaggagaaggagcgggaggagctgtggaagaagctggaggacctggagctgaagaggggcctgcggagagatggcatcatccccacctag

SEQ ID NO: 166165 - DNA, 1389 bp, synthetic construct
  misc_feature 1..1389: note = Description of Artificial Sequence: Synthetic coding sequence
  source 1..1389: mol_type = other DNA
atgagcagcgcccccaccaccccacccagcgtggacaaggtggatggcttcagcaggaagtctgtgaggaaggcccggcagaagaggagccagagcagcagccagttccgcagccagggcaagcccatcgagctgacccccctgcccctgctgaaggatgtgcccagcagcgagcagcctgagctgttcctgaagaagctgcagcagtgctgcgtcatctttgacttcatggacaccctgagtgacctgaagatgaaggagtacaagaggagcaccctgaatgagctggtggactacatcaccatcagccggggctgcctgacagagcagacctacccagaggtggtgaggatggtgtcctgcaacatcttccgcaccctgccccccagcgacagcaatgaatttgatcctgaagaagatgagcccaccctggaggcctcctggccccacctgcagctggtgtatgagttcttcatccgcttcctggagagccaggagttccagcccagcatcgccaagaagtacatcgaccagaagtttgtgctgcagctgctggagctgtttgacagcgaggacccccgggagcgggactacctgaagacagtgctgcaccgcatctacggcaagttcctgggcctgcgggccttcatcaggaagcagatcaacaacatcttcctgcgctttgtgtatgaaacagagcacttcaacggggtggccgagctgctggagatcctgggcagcatcatcaatggatttgccctgcccctgaaggccgagcacaagcagttcctggtgaaggtgctgatccccctgcacacagtgcgcagcctgagcctcttccacgcccagctggcctactgcatcgtgcagttcctggagaaggaccccagcctgacagagcctgtgatccggggcctgatgaagttctggcccaagacctgcagccagaaggaggtgatgttcctgggggagctggaggagatcctggatgtgattgagcccagccagtttgtgaagatccaggagcccctcttcaagcagatcgccaagtgtgtgagcagcccccacttccaggtggccgagcgggccctgtactactggaacaatgagtacatcatgagcctcatcgaggagaacagcaatgtcatcctgcccatcatgttcagcagcctgtaccgcatcagcaaggagcactggaacccagccatcgtggccctggtgtacaacgtgctgaaggccttcatggagatgaacagcaccatgtttgatgagctgacagccacctacaatgagaagaagaaggagaaggagcgggaggagctgtggaagaagctggaggacctggagctgaagaggggcctgcggagagatggcatcatccccacctag

SEQ ID NO: 166166 - DNA, 1344 bp, synthetic construct
  misc_feature 1..1344: note = Description of Artificial Sequence: Synthetic coding sequence
  source 1..1344: mol_type = other DNA
atgggcctgtccttcttcagcaagcacctgcccatccaggagggccagccctgggccctgaagaccccagctgacatcatcagcacagtggagttcaaccacactggagagctgctggccactggagacaagggcggccgggtggtgatcttccagcgggagcctgagagcaagaatgccccccacagccagggcgagtatgatgtgtacagcaccttccagagccatgagcctgagtttgactacctgaagagcctggagattgaggagaagatcaacaagatcaagtggctgccccagcagaatgctgcccacagcctgctgagcaccaatgacaagaccatcaagctgtggaagatcacagagcgggacaagaggcctgagggctacaacctgaaggatgaggagggcaagctgaaggacctgagcacagtgaccagcctgcaggtgcctgtgctgaagcccatggacctgatggtggaggtgagcccccggcgcatctttgccaacggccacacctaccacatcaacagcatctctgtgaacagcgactgtgagacctacatgtctgcagatgacctgcgcatcaacctgtggcacctggccatcacagaccgctccttcaacatcgtggacatcaagccagccaacatggaggacctgacagaggtgatcacagccagcgagttccacccccaccactgcaacctgtttgtgtacagcagcagcaagggcagcctgcggctgtgtgacatgagagctgctgccctgtgtgacaagcacagcaagctgtttgaggagcctgaggaccccagcaacagaagcttcttcagcgagatcatcagctctgtgtctgatgtgaagttcagccacagcggccgctacatgctgacccgggactacctgactgtgaaggtgtgggacctgaacatggaggcccggcccatcgagacctaccaggtgcatgactacctgcggagcaagctgtgcagcctgtatgaaaatgactgcatctttgacaagtttgaatgtgcctggaatggaagtgacagcgtcatcatgactggagcctacaacaacttcttcaggatgtttgacaggaacaccaagagagatgtgaccctggaggccagccgggagagcagcaagcccagggctgtgctgaagcccaggagagtgtgtgtgggcggcaagagaagaagagatgacatctctgtggacagcctggacttcaccaagaagatcctgcacacagcctggcaccctgctgagaacatcatcgccatcgccgccaccaacaacctgtacatcttccaggacaaggtgaacagcgacatgcactag

SEQ ID NO: 166167 - DNA, 1344 bp, synthetic construct
  misc_feature 1..1344: note = Description of Artificial Sequence: Synthetic coding sequence
  source 1..1344: mol_type = other DNA
atgggagaggacacagacaccaggaagatcaaccacagcttcctgcgggaccacagctatgtgacagaggccgacatcatcagcacagtggagttcaaccacactggagagctgctggccactggagacaagggcggccgggtggtgatcttccagcgggagcctgagagcaagaatgccccccacagccagggcgagtatgatgtgtacagcaccttccagagccatgagcctgagtttgactacctgaagagcctggagattgaggagaagatcaacaagatcaagtggctgccccagcagaatgctgcccacagcctgctgagcaccaatgacaagaccatcaagctgtggaagatcacagagcgggacaagaggcctgagggctacaacctgaaggatgaggagggcaagctgaaggacctgagcacagtgaccagcctgcaggtgcctgtgctgaagcccatggacctgatggtggaggtgagcccccggcgcatctttgccaacggccacacctaccacatcaacagcatctctgtgaacagcgactgtgagacctacatgtctgcagatgacctgcgcatcaacctgtggcacctggccatcacagaccgctccttcaacatcgtggacatcaagccagccaacatggaggacctgacagaggtgatcacagccagcgagttccacccccaccactgcaacctgtttgtgtacagcagcagcaagggcagcctgcggctgtgtgacatgagagctgctgccctgtgtgacaagcacagcaagctgtttgaggagcctgaggaccccagcaacagaagcttcttcagcgagatcatcagctctgtgtctgatgtgaagttcagccacagcggccgctacatgctgacccgggactacctgactgtgaaggtgtgggacctgaacatggaggcccggcccatcgagacctaccaggtgcatgactacctgcggagcaagctgtgcagcctgtatgaaaatgactgcatctttgacaagtttgaatgtgcctggaatggaagtgacagcgtcatcatgactggagcctacaacaacttcttcaggatgtttgacaggaacaccaagagagatgtgaccctggaggccagccgggagagcagcaagcccagggctgtgctgaagcccaggagagtgtgtgtgggcggcaagagaagaagagatgacatctctgtggacagcctggacttcaccaagaagatcctgcacacagcctggcaccctgctgagaacatcatcgccatcgccgccaccaacaacctgtacatcttccaggacaaggtgaacagcgacatgcactag

SEQ ID NO: 166168 - DNA, 1323 bp, synthetic construct
  misc_feature 1..1323: note = Description of Artificial Sequence: Synthetic coding sequence
  source 1..1323: mol_type = other DNA
atgagggaggccgacaccctgcggcccccccagctgatggaggtgtctgctgacatcatcagcacagtggagttcaaccacactggagagctgctggccaccggggacaagggcggccgggtggtgatcttccagcgggagcctgagagcaagaatgccccccacagccagggcgagtatgatgtgtacagcaccttccagagccatgagcctgagtttgactacctgaagagcctggagattgaggagaagatcaacaagatcaagtggctgccccagcagaatgctgcccacagcctgctgagcaccaatgacaagaccatcaagctgtggaagatcacagagcgggacaagaggcctgagggctacaacctgaaggatgaggagggcaagctgaaggacctgagcacagtgaccagcctgcaggtgcctgtgctgaagcccatggacctgatggtggaggtgagcccccggcgcatctttgccaacggccacacctaccacatcaacagcatctctgtgaacagcgactgtgagacctacatgtctgcagatgacctgcgcatcaacctgtggcacctggccatcacagacaggagcttcaacatcgtggacatcaagccagccaacatggaggacctgacagaggtgatcacagccagcgagttccacccccaccactgcaacctgtttgtgtacagcagcagcaagggcagcctgcggctgtgtgacatgagagctgctgccctgtgtgacaagcacagcaagctgtttgaggagcctgaggaccccagcaacagaagcttcttcagcgagatcatcagctctgtgtctgatgtgaagttcagccacagcggccgctacatgctgacccgggactacctgactgtgaaggtgtgggacctgaacatggaggcccggcccatcgagacctaccaggtgcatgactacctgcggagcaagctgtgcagcctgtatgaaaatgactgcatctttgacaagtttgaatgtgcctggaatggaagtgacagcgtcatcatgaccggggcctacaacaacttcttcaggatgtttgacaggaacaccaagagagatgtgaccctggaggccagccgggagagcagcaagcccagggctgtgctgaagccccggcgggtgtgtgtgggcggcaagagaagaagagatgacatctctgtggacagcctggacttcaccaagaagatcctgcacacagcctggcaccctgctgagaacatcatcgccatcgccgccaccaacaacctgtacatcttccaggacaaggtgaacagcgacatgcactag

SEQ ID NO: 166169 - DNA, 1323 bp, synthetic construct; identical to SEQ ID NO: 166168
  misc_feature 1..1323: note = Description of Artificial Sequence: Synthetic coding sequence
  source 1..1323: mol_type = other DNA

SEQ ID NO: 166170 - DNA, 1293 bp, synthetic construct
  misc_feature 1..1293: note = Description of Artificial Sequence: Synthetic coding sequence
  source 1..1293: mol_type = other DNA
atgggcaagagggacacagctgacatcatcagcacagtggagttcaaccacactggagagctgctggccaccggggacaagggcggccgggtggtgatcttccagcgggagcctgagagcaagaatgccccccacagccagggcgagtatgatgtgtacagcaccttccagagccatgagcctgagtttgactacctgaagagcctggagattgaggagaagatcaacaagatcaagtggctgccccagcagaatgctgcccacagcctgctgagcaccaatgacaagaccatcaagctgtggaagatcacagagcgggacaagaggcctgagggctacaacctgaaggatgaggagggcaagctgaaggacctgagcacagtgaccagcctgcaggtgcctgtgctgaagcccatggacctgatggtggaggtgagcccccggcgcatctttgccaacggccacacctaccacatcaacagcatctctgtgaacagcgactgtgagacctacatgtctgcagatgacctgcgcatcaacctgtggcacctggccatcacagacaggagcttcaacatcgtggacatcaagccagccaacatggaggacctgacagaggtgatcacagccagcgagttccacccccaccactgcaacctgtttgtgtacagcagcagcaagggcagcctgcggctgtgtgacatgagagctgctgccctgtgtgacaagcacagcaagctgtttgaggagcctgaggaccccagcaacagaagcttcttcagcgagatcatcagctctgtgtctgatgtgaagttcagccacagcggccgctacatgctgacccgggactacctgactgtgaaggtgtgggacctgaacatggaggcccggcccatcgagacctaccaggtgcatgactacctgcggagcaagctgtgcagcctgtatgaaaatgactgcatctttgacaagtttgaatgtgcctggaatggaagtgacagcgtcatcatgaccggggcctacaacaacttcttcaggatgtttgacaggaacaccaagagagatgtgaccctggaggccagccgggagagcagcaagcccagggctgtgctgaagccccggcgggtgtgtgtgggcggcaagagaagaagagatgacatctctgtggacagcctggacttcaccaagaagatcctgcacacagcctggcaccctgctgagaacatcatcgccatcgccgccaccaacaacctgtacatcttccaggacaaggtgaacagcgacatgcactag

SEQ ID NO: 166171 - DNA, 1623 bp, synthetic construct
  misc_feature 1..1623: note = Description of Artificial Sequence: Synthetic coding sequence
  source 1..1623: mol_type = other DNA
atgcccaacaagaacaagaaggagaaggagagccccaaggccggcaagagcggcaagagcagcaaggagggccaggacacagtggagagcgagcagatctctgtgaggaagaacagcctggtggccgtgcccagcacagtgtctgccaagatcaaggtgcctgtgtcccagcccatcgtgaagaaggacaagaggcagaacagcagccgcttcagcgccagcaacaaccgggagctgcagaagctgcccagcctgaaggatgtgcccccagctgaccaggagaagctgttcatccagaagctgcggcagtgctgcgtgctgtttgattttgtgtctgaccccctgagtgacctgaagtggaaggaggtgaagagagctgccctgtctgagatggtggagtacatcacccacaacagaaatgtcatcacagagcccatctacccagaggtggtgcacatgtttgctgtgaacatgttccgcaccctgccccccagcagcaaccccactggagctgagtttgatcctgaagaagatgagcccaccctggaggccgcctggccccacctgcagctggtgtatgagttcttcctgcgcttcctggagagcccagacttccagcccaacatcgccaagaagtacatcgaccagaagtttgtgctgcagctgctggagctgtttgacagcgaggacccccgggagcgggacttcctgaagaccaccctgcaccgcatctacggcaagttcctgggcctgcgggcctacatcaggaagcagatcaacaacatcttctaccgcttcatctatgaaacagagcaccacaacggcattgctgagctgctggagatcctgggcagcatcatcaatggatttgccctgcccctgaaggaggagcacaagatcttcctgctgaaggtgctgctgcccctgcacaaggtgaagagcctgtctgtgtaccacccccagctggcctactgtgtggtgcagttcctggagaaggacagcaccctgacagagcctgtggtgatggccctgctgaagtactggcccaagacccacagccccaaggaggtgatgttcctgaatgagctggaggagatcctggatgtgattgagcccagcgagtttgtgaagatcatggagcccctcttccggcagctggccaagtgtgtgagcagcccccacttccaggtggccgagcgggccctgtactactggaacaatgagtacatcatgagcctcatcagtgacaatgctgccaagatcctgcccatcatgttccccagcctgtacagaaacagcaagacccactggaacaagaccatccacggcctcatctacaatgccctgaagctgttcatggagatgaaccagaagctgtttgatgactgcacccagcagttcaaggccgagaagctgaaggagaagctgaagatgaaggagcgggaggaggcctgggtgaagattgagaacctggccaaggccaacccccaggcccagaaggaccccaagaaggaccggcccctggcccggaggaagtctgagctgccccaggacccccacaccaagaaggccctggaggcccactgcagagcagatgagctggccagccaggacggccgctag

SEQ ID NO: 166172 - DNA, 1575 bp, synthetic construct
  misc_feature 1..1575: note = Description of Artificial Sequence: Synthetic coding sequence
  source 1..1575: mol_type = other DNA
atgctgacctgcaacaaggccggcagcaggatggtggtggatgctgccaacagcaatggccccttccagcctgtggtgctgctgcacatcagagatgtgcccccagctgaccaggagaagctgttcatccagaagctgcggcagtgctgcgtgctgtttgattttgtgtctgaccccctgagtgacctgaagtggaaggaggtgaagagagctgccctgtctgagatggtggagtacatcacccacaacagaaatgtcatcacagagcccatctacccagaggtggtgcacatgtttgctgtgaacatgttccgcaccctgccccccagcagcaaccccaccggggctgagtttgatcctgaggaggatgagcccaccctggaggccgcctggccccacctgcagctggtgtatgagttcttcctgcgcttcctggagagcccagacttccagcccaacatcgccaagaagtacatcgaccagaagtttgtgctgcagctgctggagctgtttgattctgaggacccccgggagcgggacttcctgaagaccaccctgcaccgcatctacggcaagttcctgggcctgcgggcctacatcaggaagcagatcaacaacatcttctaccgcttcatctatgaaacagagcaccacaatggaattgctgagctgctggagatcctgggcagcatcatcaatggatttgccctgcccctgaaggaggagcacaagatcttcctgctgaaggtgctgctgcccctgcacaaggtgaagagcctgtctgtgtaccacccccagctggcctactgtgtggtgcagttcctggagaaggacagcaccctgacagagcctgtggtgatggccctgctgaagtactggcccaagacccacagccccaaggaggtgatgttcctgaatgagctggaggagatcctggatgtgattgagcccagcgagtttgtgaagatcatggagcccctcttccggcagctggccaagtgtgtgagcagcccccacttccaggtggccgagcgggccctgtactactggaacaatgagtacatcatgagcctcatcagtgacaatgctgccaagatcctgcccatcatgttccccagcctgtacagaaacagcaagacccactggaacaagaccatccacggcctcatctacaatgccctgaagctgttcatggagatgaaccagaagctgtttgatgactgcacccagcagttcaaggccgagaagctgaaggagaagctgaagatgaaggagcgggaggaggcctgggtgaagattgagaacctggccaaggccaacccccagtacacagtgtacagccaggccagcaccatgagcatccctgtggccatggagacagatggccccctgtttgaagatgtgcagatgctgaggaagacagtgaaggatgaggcccaccaggcccagaaggaccccaagaaggaccggcccctggcccggaggaagtctgagctgccccaggacccccacaccaagaaggccctggaggcccactgcagagcagatgagctggccagccaggacggccgctag

SEQ ID NO: 166173 - DNA, 783 bp, synthetic construct
  misc_feature 1..783: note = Description of Artificial Sequence: Synthetic coding sequence
  source 1..783: mol_type = other DNA
atgttccgcaccctgccccccagcagcaaccccaccggggctgagtttgatcctgaggaggatgagcccaccctggaggccgcctggccccacctgcagctggtgtatgagttcttcctgcgcttcctggagagcccagacttccagcccaacatcgccaagaagtacatcgaccagaagtttgtgctgcagctgctggagctgtttgattctgaggacccccgggagcgggacttcctgaagaccaccctgcaccgcatctacggcaagttcctgggcctgcgggcctacatcaggaagcagatcaacaacatcttctaccgcttcatctatgaaacagagcaccacaatggaattgctgagctgctggagatcctgggcagcatcatcaatggatttgccctgcccctgaaggaggagcacaagatcttcctgctgaaggtgctgctgcccctgcacaaggtgaagagcctgtctgtgtaccacccccagctggcctactgtgtggtgcagttcctggagaaggacagcaccctgacagagcctgtggtgatggccctgctgaagtactggcccaagacccacagccccaaggaggtgatgttcctgaatgagctggaggagatcctggatgtgattgagcccagcgagtttgtgaagatcatggagcccctcttccggcagctggccaagtgtgtgagcagcccccacttccaggacaacacctggctggacatccagaggcctgaggccctgcatggagatgagcccaaggccatctag

SEQ ID NO: 166174 - DNA, 1458 bp, synthetic construct
  misc_feature 1..1458: note = Description of Artificial Sequence: Synthetic coding sequence
  source 1..1458: mol_type = other DNA
atgctgacctgcaacaaggccggcagcaggatggtggtggatgctgccaacagcaatggccccttccagcctgtggtgctgctgcacatcagagatgtgcccccagctgaccaggagaagctgttcatccagaagctgcggcagtgctgcgtgctgtttgattttgtgtctgaccccctgagtgacctgaagtggaaggaggtgaagagagctgccctgtctgagatggtggagtacatcacccacaacagaaatgtcatcacagagcccatctacccagaggtggtgcacatgtttgctgtgaacatgttccgcaccctgccccccagcagcaaccccaccggggctgagtttgatcctgaggaggatgagcccaccctggaggccgcctggccccacctgcagctggtgtatgagttcttcctgcgcttcctggagagcccagacttccagcccaacatcgccaagaagtacatcgaccagaagtttgtgctgcagctgctggagctgtttgattctgaggacccccgggagcgggacttcctgaagaccaccctgcaccgcatctacggcaagttcctgggcctgcgggcctacatcaggaagcagatcaacaacatcttctaccgcttcatctatgaaacagagcaccacaatggaattgctgagctgctggagatcctgggcagcatcatcaatggatttgccctgcccctgaaggaggagcacaagatcttcctgctgaaggtgctgctgcccctgcacaaggtgaagagcctgtctgtgtaccacccccagctggcctactgtgtggtgcagttcctggagaaggacagcaccctgacagagcctgtggtgatggccctgctgaagtactggcccaagacccacagccccaaggaggtgatgttcctgaatgagctggaggagatcctggatgtgattgagcccagcgagtttgtgaagatcatggagcccctcttccggcagctggccaagtgtgtgagcagcccccacttccaggtggccgagcgggccctgtactactggaacaatgagtacatcatgagcctcatcagtgacaatgctgccaagatcctgcccatcatgttccccagcctgtacagaaacagcaagacccactggaacaagaccatccacggcctcatctacaatgccctgaagctgttcatggagatgaaccagaagctgtttgatgactgcacccagcagttcaaggccgagaagctgaaggagaagctgaagatgaaggagcgggaggaggcctgggtgaagattgagaacctggccaaggccaacccccaggcccagaaggaccccaagaaggaccggcccctggcccggaggaagtctgagctgccccaggacccccacaccaagaaggccctggaggcccactgcagagcagatgagctggccagccaggatggaagatag

SEQ ID NO: 166175 - DNA, 1668 bp, synthetic construct
  misc_feature 1..1668: note = Description of Artificial Sequence: Synthetic coding sequence
  source 1..1668: mol_type = other DNA
atgcccaacaagaacaagaaggagaaggagagccccaaggccggcaagagcggcaagagcagcaaggagggccaggacacagtggagagcgagggcaccagccctgaggagcccagcagccccaaggtgcccccacccctgctgcctgagctgctggtgctgatctttggaggcctgcagggcagagatgtgcccccagctgaccaggagaagctgttcatccagaagctgcggcagtgctgcgtgctgtttgattttgtgtctgaccccctgagtgacctgaagtggaaggaggtgaagagagctgccctgtctgagatggtggagtacatcacccacaacagaaatgtcatcacagagcccatctacccagaggtggtgcacatgtttgctgtgaacatgttccgcaccctgccccccagcagcaaccccactggagctgagtttgatcctgaagaagatgagcccaccctggaggccgcctggccccacctgcagctggtgtatgagttcttcctgcgcttcctggagagcccagacttccagcccaacatcgccaagaagtacatcgaccagaagtttgtgctgcagctgctggagctgtttgacagcgaggacccccgggagcgggacttcctgaagaccaccctgcaccgcatctacggcaagttcctgggcctgcgggcctacatcaggaagcagatcaacaacatcttctaccgcttcatctatgaaacagagcaccacaacggcattgctgagctgctggagatcctgggcagcatcatcaatggatttgccctgcccctgaaggaggagcacaagatcttcctgctgaaggtgctgctgcccctgcacaaggtgaagagcctgtctgtgtaccacccccagctggcctactgtgtggtgcagttcctggagaaggacagcaccctgacagagcctgtggtgatggccctgctgaagtactggcccaagacccacagccccaaggaggtgatgttcctgaatgagctggaggagatcctggatgtgattgagcccagcgagtttgtgaagatcatggagcccctcttccggcagctggccaagtgtgtgagcagcccccacttccaggtggccgagcgggccctgtactactggaacaatgagtacatcatgagcctcatcagtgacaatgctgccaagatcctgcccatcatgttccccagcctgtacagaaacagcaagacccactggaacaagaccatccacggcctcatctacaatgccctgaagctgttcatggagatgaaccagaagctgtttgatgactgcacccagcagttcaaggccgagaagctgaaggagaagctgaagatgaaggagcgggaggaggcctgggtgaagattgagaacctggccaaggccaacccccagtacacagtgtacagccaggccagcaccatgagcatccctgtggccatggagacagatggccccctgtttgaagatgtgcagatgctgaggaagacagtgaaggatgaggcccaccaggcccagaaggaccccaagaaggaccggcccctggcccggaggaagtctgagctgccccaggacccccacaccaagaaggccctggaggcccactgcagagcagatgagctggccagccaggatggaagatag

SEQ ID NO: 166176 - DNA, 1350 bp, synthetic construct
  misc_feature 1..1350: note = Description of Artificial Sequence: Synthetic coding sequence
  source 1..1350: mol_type = other DNA
atgctgacctgcaacaaggccggcagcaggatggtggtggatgctgccaacagcaatggccccttccagcctgtggtgctgctgcacatcagagatgtgcccccagctgaccaggagaagctgttcatccagaagctgcggcagtgctgcgtgctgtttgattttgtgtctgaccccctgagtgacctgaagtggaaggaggtgaagagagctgccctgtctgagatggtggagtacatcacccacaacagaaatgtcatcacagagcccatctacccagaggtggtgcacatgtttgctgtgaacatgttccgcaccctgccccccagcagcaaccccaccggggctgagtttgatcctgaggaggatgagcccaccctggaggccgcctggccccacctgcagctggtgtatgagttcttcctgcgcttcctggagagcccagacttccagcccaacatcgccaagaagtacatcgaccagaagtttgtgctgcagctgctggagctgtttgattctgaggacccccgggagcgggacttcctgaagaccaccctgcaccgcatctacggcaagttcctgggcctgcgggcctacatcaggaagcagatcaacaacatcttctaccgcttcatctatgaaacagagcaccacaatggaattgctgagctgctggagatcctgggcagcatcatcaatggatttgccctgcccctgaaggaggagcacaagatcttcctgctgaaggtgctgctgcccctgcacaaggtgaagagcctgtctgtgtaccacccccagctggcctactgtgtggtgcagttcctggagaaggacagcaccctgacagagcctgtggtgatggccctgctgaagtactggcccaagacccacagccccaaggaggtgatgttcctgaatgagctggaggagatcctggatgtgattgagcccagcgagtttgtgaagatcatggagcccctcttccggcagctggccaagtgtgtgagcagcccccacttccaggtggccgagcgggccctgtactactggaacaatgagtacatcatgagcctcatcagtgacaatgctgccaagatcctgcccatcatgttccccagcctgtacagaaacagcaagacccactggaacaagaccatccacggcctcatctacaatgccctgaagctgttcatggagatgaaccagaagctgtttgatgactgcacccagcagttcaaggccgagaagctgaaggagaagctgaagatgaaggagcgggaggaggcctgggtgaagattgagaacctggccaaggccaacccccaggtgctgaagaagaggatcacctag

SEQ ID NO: 166177 - DNA, 1155 bp, synthetic construct
  misc_feature 1..1155: note = Description of Artificial Sequence: Synthetic coding sequence
  source 1..1155: mol_type = other DNA
atgctgacctgcaacaaggccggcagcaggatggtggtggatgctgccaacagcaatggccccttccagcctgtggtgctgctgcacatcagagatgtgcccccagctgaccaggagaagctgttcatccagaagctgcggcagtgctgcgtgctgtttgattttgtgtctgaccccctgagtgacctgaagtggaaggaggtgaagagagctgccctgtctgagatggtggagtacatcacccacaacagaaatgtcatcacagagcccatctacccagaggtggtgcacatgtttgctgtgaacatgttccgcaccctgccccccagcagcaaccccaccggggctgagtttgatcctgaggaggatgagcccaccctggaggccgcctggccccacctgcagctggtgtatgagttcttcctgcgcttcctggagagcccagacttccagcccaacatcgccaagaagtacatcgaccagaagtttgtgctgcagctgctggagctgtttgattctgaggacccccgggagcgggacttcctgaagaccaccctgcaccgcatctacggcaagttcctgggcctgcgggcctacatcaggaagcagatcaacaacatcttctaccgcttcatctatgaaacagagcaccacaatggaattgctgagctgctggagatcctgggcagcatcatcaatggatttgccctgcccctgaaggaggagcacaagatcttcctgctgaaggtgctgctgcccctgcacaaggtgaagagcctgtctgtgtaccacccccagctggcctactgtgtggtgcagttcctggagaaggacagcaccctgacagagcctgtggtgatggccctgctgaagtactggcccaagacccacagccccaaggaggtgatgttcctgaatgagctggaggagatcctggatgtgattgagcccagcgagtttgtgaagatcatggagcccctcttccggcagctggccaagtgtgtgagcagcccccacttccaggtggccgagcgggccctgtactactggaacaatgagtacatcatgagcctcatcagtgacaatgctgccaagatcctgcccatcatgttccccagcctgtacagaaacagcaagacccactggaacaagtag

SEQ ID NO: 166178 - DNA, 1662 bp, synthetic construct
  misc_feature 1..1662: note = Description of Artificial Sequence: Synthetic coding sequence
  source 1..1662: mol_type = other DNA
aacaagaacaagaaggagaaggagagccccaaggccggcaagagcggcaagagcagcaaggagggccaggacacagtggagagcgagggcaccagccctgaggagcccagcagccccaaggtgcccccacccctgctgcctgagctgctggtgctgatctttggaggcctgcagggcagagatgtgcccccagctgaccaggagaagctgttcatccagaagctgcggcagtgctgcgtgctgtttgattttgtgtctgaccccctgagtgacctgaagtggaaggaggtgaagagagctgccctgtctgagatggtggagtacatcacccacaacagaaatgtcatcacagagcccatctacccagaggtggtgcacatgtttgctgtgaacatgttccgcaccctgccccccagcagcaaccccactggagctgagtttgatcctgaagaagatgagcccaccctggaggccgcctggccccacctgcagctggtgtatgagttcttcctgcgcttcctggagagcccagacttccagcccaacatcgccaagaagtacatcgaccagaagtttgtgctgcagctgctggagctgtttgacagcgaggacccccgggagcgggacttcctgaagaccaccctgcaccgcatctacggcaagttcctgggcctgcgggcctacatcaggaagcagatcaacaacatcttctaccgcttcatctatgaaacagagcaccacaacggcattgctgagctgctggagatcctgggcagcatcatcaatggatttgccctgcccctgaaggaggagcacaagatcttcctgctgaaggtgctgctgcccctgcacaaggtgaagagcctgtctgtgtaccacccccagctggcctactgtgtggtgcagttcctggagaaggacagcaccctgacagagcctgtggtgatggccctgctgaagtactggcccaagacccacagccccaaggaggtgatgttcctgaatgagctggaggagatcctggatgtgattgagcccagcgagtttgtgaagatcatggagcccctcttccggcagctggccaagtgtgtgagcagcccccacttccaggtggccgagcgggccctgtactactggaacaatgagtacatcatgagcctcatcagtgacaatgctgccaagatcctgcccatcatgttccccagcctgtacagaaacagcaagacccactggaacaagaccatccacggcctcatctacaatgccctgaagctgttcatggagatgaaccagaagctgtttgatgactgcacccagcagttcaaggccgagaagctgaaggagaagctgaagatgaaggagcgggaggaggcctgggtgaagattgagaacctggccaaggccaacccccagtacacagtgtacagccaggccagcaccatgagcatccctgtggccatggagacagatggccccctgtttgaagatgtgcagatgctgaggaagacagtgaaggatgaggcccaccaggcccagaaggaccccaagaaggaccggcccctggcccggaggaagtctgagctgccccaggacccccacaccaagaaggccctggaggcccactgcagagcagatgagctggccagccaggatggaagatag

SEQ ID NO: 166179 - DNA, 1077 bp, synthetic construct
  misc_feature 1..1077: note = Description of Artificial Sequence: Synthetic coding sequence
  source 1..1077: mol_type = other DNA
atggccgagggggagcggcagcccccaccagacagcagcgaggaggcccccccagccacccagaacttcatcatccccaagaaggagatccacacagtgcctgacatgggcaagtggaagaggagccaggcctatgctgactacatcggcttcatcctgaccctgaatgaaggagtgaagggcaagaagctgacctttgagtacagagtgtctgagatgtggaatgaggtgcatgaggagaaggagcaggccgccaagcagagcgtgtcctgtgatgagtgcatccccctgccccgggccggccactgtgcccccagcgaggccatcgagaagctggtggccctgctgaacaccctggaccgctggattgatgagaccccacctgtggaccagcccagcagatttggaaacaaggcctaccgcacctggtacgccaagctggatgaggaggccgagaacctggtggccaccgtggtgcccacccacctggccgctgctgtgcctgaggtggccgtgtacctgaaggagagcgtgggcaacagcaccagaattgattatggcaccggccacgaggccgcctttgctgccttcctgtgctgcctgtgcaagattggagtgctgcgggtggatgaccagatcgccatcgtgttcaaggtgttcaaccgctacctggaggtgatgaggaagctgcagaagacctacaggatggagcctgctggcagccagggcgtgtggggcctggatgacttccagttcctgcccttcatctggggcagcagccagctgattgaccacccctacctggagcccaggcactttgtggatgagaaggctgtgaatgaaaaccacaaggactacatgttcctggagtgcatcctcttcatcacagagatgaagacaggcccctttgctgagcacagcaaccagctgtggaacatctctgctgtgcccagctggagcaaggtgaaccagggcctcatccgcatgtacaaggcagaatgtctggagaagtttcctgtgatccagcacttcaagtttggcagcctgctgcccatccaccctgtgaccagcggctag

SEQ ID NO: 166180 - DNA, 990 bp, synthetic construct
  misc_feature 1..990: note = Description of Artificial Sequence: Synthetic coding sequence
  source 1..990: mol_type = other DNA
atggccgagggggagcggcagcccccaccagacagcagcgaggaggcccccccagccacccagaacttcatcatccccaagaaggagatccacacagtgcctgacatgggcaagtggaagaggagccaggtgcccttcggcaccgtggcctatgctgactacatcggcttcatcctgaccctgaatgaaggagtgaagggcaagaagctgacctttgagtacagagtgtctgaggccatcgagaagctggtggccctgctgaacaccctggaccgctggattgatgagaccccacctgtggaccagcccagccgcttcggcaacaaggcctaccgcacctggtacgccaagctggatgaggaggccgagaacctggtggccaccgtggtgcccacccacctggccgctgctgtgcctgaggtggccgtgtacctgaaggagagcgtgggcaacagcaccagaattgattatggaactggacatgaagctgcctttgctgccttcctgtgctgcctgtgcaagattggagtgctgcgggtggatgaccagatcgccatcgtgttcaaggtgttcaaccgctacctggaggtgatgaggaagctgcagaagacctacaggatggagcccgccggcagccagggcgtgtggggcctggatgacttccagttcctgcccttcatctggggcagcagccagctgattgaccacccctacctggagcccaggcactttgtggatgagaaggctgtgaatgaaaaccacaaggactacatgttcctggagtgcatcctcttcatcacagagatgaagacaggcccctttgctgagcacagcaaccagctgtggaacatctctgctgtgcccagctggagcaaggtgaaccagggcctcatccgcatgtacaaggccgagtgcctggagaagtttcctgtgatccagcacttcaagtttggcagcctgctgcccatccaccctgtgaccagcggctag

SEQ ID NO: 166181 - DNA, 846 bp, synthetic construct
  misc_feature 1..846: note = Description of Artificial Sequence: Synthetic coding sequence
  source 1..846: mol_type = other DNA
atggccgagggggagcggcagcccccaccagacagcagcgaggaggcccccccagccacccagaacttcatcatccccaagaaggagatccacacagtgcctgacatgggcaagtggaagaggagccaggcctatgctgactacatcggcttcatcctgaccctgaatgaaggagtgaagggcaagaagctgacctttgagtacagagtgtctgaggaggccgagaacctggtggccaccgtggtgcccacccacctggccgctgctgtgcctgaggtggccgtgtacctgaaggagagcgtgggcaacagcaccagaattgattatggaactggacatgaagctgcctttgctgccttcctgtgctgcctgtgcaagattggagtgctgcgggtggatgaccagatcgccatcgtgttcaaggtgttcaaccgctacctggaggtgatgaggaagctgcagaagacctacaggatggagcccgccggcagccagggcgtgtggggcctggatgacttccagttcctgcccttcatctggggcagcagccagctgattgaccacccctacctggagcccaggcactttgtggatgagaaggctgtgaatgaaaaccacaaggactacatgttcctggagtgcatcctcttcatcacagagatgaagacaggcccctttgctgagcacagcaaccagctgtggaacatctctgctgtgcccagctggagcaaggtgaaccagggcctcatccgcatgtacaaggccgagtgcctggagaagtttcctgtgatccagcacttcaagtttggcagcctgctgcccatccaccctgtgaccagcggctag

SEQ ID NO: 166182 - DNA, 885 bp, synthetic construct
  misc_feature 1..885: note = Description of Artificial Sequence: Synthetic coding sequence
  source 1..885: mol_type = other DNA
atggccgagggggagcggcagcccccaccagacagcagcgaggaggcccccccagccacccagaacttcatcatccccaagaaggagatccacacagtgcctgacatgggcaagtggaagaggagccaggccatcgagaagctggtggccctgctgaacaccctggaccgctggattgatgagaccccacctgtggaccagcccagcagatttggaaacaaggcctaccgcacctggtacgccaagctggatgaggaggccgagaacctggtggccaccgtggtgcccacccacctggccgctgctgtgcctgaggtggccgtgtacctgaaggagagcgtgggcaacagcaccagaattgattatggcaccggccacgaggccgcctttgctgccttcctgtgctgcctgtgcaagattggagtgctgcgggtggatgaccagatcgccatcgtgttcaaggtgttcaaccgctacctggaggtgatgaggaagctgcagaagacctacaggatggagcctgctggcagccagggcgtgtggggcctggatgacttccagttcctgcccttcatctggggcagcagccagctgattgaccacccctacctggagcccaggcactttgtggatgagaaggctgtgaatgaaaaccacaaggactacatgttcctggagtgcatcctcttcatcacagagatgaagacaggcccctttgctgagcacagcaaccagctgtggaacatctctgctgtgcccagctggagcaaggtgaaccagggcctcatccgcatgtacaaggcagaatgtctggagaagtttcctgtgatccagcacttcaagtttggcagcctgctgcccatccaccctgtgaccagcggctag

SEQ ID NO: 166183 - DNA, 972 bp, synthetic construct
  misc_feature 1..972: note = Description of Artificial Sequence: Synthetic coding sequence
  source 1..972: mol_type = other DNA
atggccgagggggagcggcagcccccaccagacagcagcgaggaggcccccccagccacccagaacttcatcatccccaagaaggagatccacacagtgcctgacatgggcaagtggaagaggagccaggcctatgctgactacatcggcttcatcctgaccctgaatgaaggagtgaagggcaagaagctgacctttgagtacagagtgtctgaggccatcgagaagctggtggccctgctgaacaccctggaccgctggattgatgagaccccacctgtggaccagcccagccgcttcggcaacaaggcctaccgcacctggtacgccaagctggatgaggaggccgagaacctggtggccaccgtggtgcccacccacctggccgctgctgtgcctgaggtggccgtgtacctgaaggagagcgtgggcaacagcaccagaattgattatggaactggacatgaagctgcctttgctgccttcctgtgctgcctgtgcaagattggagtgctgcgggtggatgaccagatcgccatcgtgttcaaggtgttcaaccgctacctggaggtgatgaggaagctgcagaagacctacaggatggagcccgccggcagccagggcgtgtggggcctggatgacttccagttcctgcccttcatctggggcagcagccagctgattgaccacccctacctggagcccaggcactttgtggatgagaaggctgtgaatgaaaaccacaaggactacatgttcctggagtgcatcctcttcatcacagagatgaagacaggcccctttgctgagcacagcaaccagctgtggaacatctctgctgtgcccagctggagcaaggtgaaccagggcctcatccgcatgtacaaggccgagtgcctggagaagtttcctgtgatccagcacttcaagtttggcagcctgctgcccatccaccctgtgaccagcggctag

SEQ ID NO: 166184 - DNA, 972 bp, synthetic construct; identical to SEQ ID NO: 166183
  misc_feature 1..972: note = Description of Artificial Sequence: Synthetic coding sequence
  source 1..972: mol_type = other DNA

SEQ ID NO: 166185 - DNA, 792 bp, synthetic construct
  misc_feature 1..792: note = Description of Artificial Sequence: Synthetic coding sequence
  source 1..792: mol_type = other DNA
atgggcaagtggaagaggagccaggcctatgctgactacatcggcttcatcctgaccctgaatgaaggagtgaagggcaagaagctgacctttgagtacagagtgtctgaggccatcgagaagctggtggccctgctgaacaccctggaccgctggattgatgagaccccacctgtggaccagcccagcagatttggaaacaaggcctaccgcacctggtacgccaagctggatgaggaggccgagaacctggtggccaccgtggtgcccacccacctggccgctgctgtgcctgaggtggccgtgtacctgaaggagagcgtgggcaacagcaccagaattgattatggcaccggccacgaggccgcctttgctgccttcctgtgctgcctgtgcaagattggagtgctgcgggtggatgaccagatcgccatcgtgttcaaggtgttcaaccgctacctggaggtgatgaggaagctgcagaagacctacaggatggagcctgctggcagccagggcgtgtggggcctggatgacttccagttcctgcccttcatctggggcagcagccagctgattgaccacccctacctggagcccaggcactttgtggatgagaaggctgtgaatgaaaaccacaaggactacatgttcctggagtgcatcctcttcatcacagagatgaagacaggcccctttgctgagcacagcaaccagctgtggaacatctctgctgtgcccagctggagcaaggtgaaccagggcctcatccgcatgtacaaggccgagtag

SEQ ID NO: 166186 - DNA, 1125 bp, synthetic construct
  misc_feature 1..1125: note = Description of Artificial Sequence: Synthetic coding sequence
  source 1..1125: mol_type = other DNA
atggccgagggggagcggcagcccccaccagacagcagcgaggaggcccccccagccacccagaacttcatcatccccaagaaggagatccacacagtgcctgacatgggcaagtggaagaggagccaggcctatgctgactacatcggcttcatcctgaccctgaatgaaggagtgaagggcaagaagctgacctttgagtacagagtgtctgagatgtggaatgaggtgcatgaggagaaggagcaggccgccaagcagagcgtgtcctgtgatgagtgcatccccctgccccgggccggccactgtgcccccagcgaggccatcgagaagctggtggccctgctgaacaccctggaccgctggattgatgagaccccacctgtggaccagcccagcagatttggaaacaaggcctaccgcacctggtacgccaagctggatgaggaggccgagaacctggtggccaccgtggtgcccacccacctggccgctgctgtgcctgaggtggccgtgtacctgaaggagagcgtgggcaacagcaccagaattgattatggcaccggccacgaggccgcctttgctgccttcctgtgctgcctgtgcaagattggagtgctgcgggtggatgaccagatcgccatcgtgttcaaggtgttcaaccgctacctggaggtgatgaggaagctgcagaagacctacaggatggagcctgctggcagccagggcgtgtggggcctggatgacttccagttcctgcccttcatctggggcagcagccagctgattgaccacccctacctggagcccaggcactttgtggatgagaaggctgtgaatgaaaaccacaaggactacatgttcctggagtgcatcctcttcatcacagagatgaagacaggcccctttgctgagcacagcaaccagctgtggaacatctctgctgtgcccagctggagcaaggtgaaccagggcctcatccgcatgtacaaggccgaggccagccccagcgacacctggggcctgggcatcagccacctgggccacggccagagcgagaagcaccagcccccccagcccaggaaggctgctgtgcagctgtgcccagatgagctgggcggctag

SEQ ID NO: 166187 - DNA, 456 bp, synthetic construct
  misc_feature 1..456: note = Description of Artificial Sequence: Synthetic coding sequence
  source 1..456: mol_type = other DNA
atgaagacaggcccctttgctgagcacagcaaccagctgtggaacatctctgctgtgcccagctggagcaaggtgaaccagggcctcatccgcatgtacaaggccgaggtgtctgggggctggcctgtgtgccccagcctgctgccccacctggtgctgggctggggccagagcaagagatgtggcacctggggcagctgcttcctgctgccccactgctttgccctgaacctgcggcctgcccccctgaccctgggcgccagcgagagccccatctggggcatgggcagccagaggagcaccagccaccccagccctgagaagctgcagagcagctctgtgctgatgagcctggaggccgaggcccggacctgctgcatgggcagcggaggagatggcggcctgcccagccccctgagcagcggccagaggctgctgaaggcccgggctgtgtag

SEQ ID NO: 166188 - DNA, 2802 bp, synthetic construct
  misc_feature 1..2802: note = Description of Artificial Sequence: Synthetic coding sequence
  source 1..2802: mol_type = other DNA
atggctgacctgagcctgctgcaggaggacctgcaggaggatgctgatggcagcctggactttgtgtcccaggatgagatgctgacccccctgggccgcctggacaagtatgctgccagcgagaacatcttcaaccggcagatggtggcccggagcctgctggacaccctgcgggaggtgtgtgatgatgagcgggactgcatcgctgtgctggagcgcatcagccggctggctgatgattctgagcccaccgtgcgggcagagctgatggagcaggtgccccacatcgccctcttctgccaggagaaccggcccagcatcccctatgccttcagcaagttcctgctgcccatcgtggtgcgctacctggccgaccagaacaaccaggtgaggaagaccagccaggccgccctgctggccctgctggagcaggagctgattgaaagatttgatgtggagaccaaggtgtgccctgtgctgattgagctgacagccccagacagcaatgatgatgtgaagacagaggccgtggccatcatgtgcaagatggcccccatggtgggcaaggacatcacagagcggctcatcctgccccgcttctgtgagatgtgctgtgactgcaggatgtttcatgtgaggaaggtgtgtgccgccaactttggagacatctgcagcgtggtgggccagcaggccacagaggagatgctgctgccccgcttcttccagctgtgcagcgacaacgtgtggggcgtgaggaaggcctgtgccgagtgcttcatggctgtgtcctgtgccacctgccaggagatccggaggaccaagctgagcgccctcttcatcaacctgatcagtgaccccagccgctgggtgcggcaggccgccttccagagcctgggccccttcatcagcacctttgccaaccccagcagcagcggccagtacttcaaggaggagagcaagagcagcgaggagatgtctgtggagaacaagaacagaacccgggaccaggaggccccagaagatgtgcaggtgcggcctgaggacacccccagcgacctgtctgtgagcaacagcagcgtcatcctggagaacaccatggaggaccacgccgctgaggccagcggcaagcccctgggggagatctctgtgcccctggacagcagcctgctgtgcaccctgagcagcgagagccaccaggaggccgccagcaatgaaaatgacaagaagccaggcaactacaagtccatgctgcggcctgaggtgggcaccaccagccaggacagcgccctgctggaccaggagctgtacaacagcttccacttctggaggacccccctgcctgagattgacctggacatcgagctggagcagaacagcggcggcaagcccagccctgagggccctgaggaggagagcgagggccctgtgcccagcagccccaacatcaccatggccaccaggaaggagctggaggagatgattgagaacctggagccccacattgatgatcctgatgtgaaggcccaggtggaggtgctgtctgctgccctgcgggccagcagcctggatgcccacgaggagaccatcagcattgagaagagaagtgacctgcaggatgagctggacatcaatgagctgcccaactgcaagatcaaccaggaggacagcgtgcccctcatcagtgatgctgtggagaacatggacagcaccctgcactacatccacagcgacagcgacctgagcaacaacagcagcttctccccagatgaggagaggaggaccaaggtgcaggatgtggtgccccaggccctgctggaccagtacctgtccatgacagaccccagccgggcccagacagtggacacagagatcgccaagcactgtgcctacagcctgcccggggtggccctgaccctgggccggcagaactggcactgcctgcgggagacctatgagaccctggccagtgacatgcagtggaaggtgcggaggaccctggccttcagcatccacgagctggccgtcatcctgggggaccagctgacagctgctgacctggtgcccatcttcaacggcttcctgaaggacctggatgaggtgcgcatcggcgtgctgaagcacctgcatgacttcctgaagctgctgcacatcgacaagaggcgggagtacctgtaccagctgcaggagttcctggtgacagacaacagcaggaactggaggttccgggcagagctggccgagcagctgatcctgctgctggagctgtacagccccagagatgtgtatgactacctgcggcccatcgccctgaacctgtgtgccgacaaggtgtcctctgtgcgctggatctcctacaagctggtgtctgagatggtgaagaagctgcatgctgccaccccacccacctttggagtggacctgatcaatgagctggtggagaactttggccgctgccccaagtggagcggccggcaggcctttgtgtttgtgtgccagacagtgattgaagatgactgcctgcccatggaccagtttgctgtgcacctgatgccccacctgctgaccctggccaatgacagagtgcccaacgtgcgggtgctgctggccaagaccctgcggcagaccctgctggagaaggactacttcctggccagcgccagctgccaccaggaggccgtggagcagaccatcatggccctgcagatggaccgggacagtgatgtgaagtactttgccagcatccacccagccagcaccaagatcagtgaagatgccatgagcacagccagcagcacctactag

SEQ ID NO: 166189 - DNA, 924 bp, synthetic construct
  misc_feature 1..924: note = Description of Artificial Sequence: Synthetic coding sequence
  source 1..924: mol_type = other DNA
atggccgagatcagtgacctggaccggcagatcgagcagctgcggcgctgtgagctgatcaaggagagcgaggtgaaggccctgtgtgccaaggcccgggagatcctggtggaggagagcaatgtgcagagggtggacagccctgtgacagtgtgtggggacatccacggccagttctatgacctgaaggagctgttccgggtgggcggagatgtgcctgagaccaactacctgttcatgggagactttgtggaccggggcttctacagcgtggagaccttcctgctgctgctggccctgaaggtgcgctacccagaccgcatcaccctcatccggggcaaccacgagagccggcagatcacccaggtgtatggcttctatgatgaatgtctgaggaaatatggctctgtgacagtgtggagatactgcacagagatctttgactacctgagcctgagcgccatcattgatggcaagatcttctgtgtgcacggcggcctgagccccagcatccagaccctggaccagatccgcaccatcgacaggaagcaggaggtgccccatgatggccccatgtgtgacctgctgtggagcgaccctgaggacaccaccggctggggcgtgagccccagaggagctggctacctgtttggaagtgatgtggtggcccagttcaatgctgccaatgacatcgacatgatctgccgggcccaccagctggtgatggagggctacaagtggcacttcaatgagaccgtgctgactgtgtggagcgcccccaactactgctaccgctgtggaaatgtggccgccatcctggagctggatgagcacctgcagaaggacttcatcatctttgaggccgccccccaggagacccggggcatccccagcaagaagcctgtggccgactacttcctgtag

SEQ ID NO: 166190 - DNA, 1413 bp, synthetic construct
  misc_feature 1..1413: note = Description of Artificial Sequence: Synthetic coding sequence
  source 1..1413: mol_type = other DNA
atgctgcaggtgaggacctacctgacagagcccaccgtgcgggcagagctgatggagcaggtgccccacatcgccctcttctgccaggagaaccggcccagcatcccctatgccttcagcaagttcctgctgcccatcgtggtgcgctacctggccgaccagaacaaccaggtgaggaagaccagccaggccgccctgctggccctgctggagcaggagctgattgaaagatttgatgtggagaccaaggtgtgccctgtgctgattgagctgacagccccagacagcaatgatgatgtgaagacagaggccgtggccatcatgtgcaagatggcccccatggtgggcaaggacatcacagagcggctcatcctgccccgcttctgtgagatgtgctgtgactgcaggatgtttcatgtgaggaaggtgtgtgccgccaactttggagacatctgcagcgtggtgggccagcaggccacagaggagatgctgctgccccgcttcttccagctgtgcagcgacaacgtgtggggcgtgaggaaggcctgtgccgagtgcttcatggctgtgtcctgtgccacctgccaggagatccggaggaccaagctgagcgccctcttcatcaacctgatcagtgaccccagccgctgggtgcggcaggccgccttccagagcctgggccccttcatcagcacctttgccaaccccagcagcagcggccagtacttcaaggaggagagcaagagcagcgaggagatgtctgtggagaacaagaacagaacccgggaccaggaggccccagaagatgtgcaggtgcggcctgaggacacccccagcgacctgtctgtgagcaacagcagcgtcatcctggagaacaccatggaggaccacgccgctgaggccagcggcaagcccctgggggagatctctgtgcccctggacagcagcctgctgtgcaccctgagcagcgagagccaccaggaggccgccagcaatgaaaatgacaagaagccaggcaactacaagtccatgctgcggcctgaggtgggcaccaccagccaggacagcgccctgctggaccaggagctgtacaacagcttccacttctggaggacccccctgcctgagattgacctggacatcgagctggagcagaacagcggcggcaagcccagccctgagggccctgaggaggagagcgagggccctgtgcccagcagccccaacatcaccatggccaccaggaaggagctggaggagatgattgagaacctggagccccacattgatgatcctgatgtgaaggcccaggtggaggtgctgtctgctgccctgcgggccagcagcctggatgcccacgaggagaccatcagcatcaagcgggaggtgatctgcaagatgaactggatctag

SEQ ID NO: 166191 - DNA, 2853 bp, synthetic construct
  misc_feature 1..2853: note = Description of Artificial Sequence: Synthetic coding sequence
  source 1..2853: mol_type = other DNA
atggctgacctgagcctgctgcaggaggacctgcaggaggatgctgatggcttcggcgtggatgactacagcagcgagagtgatgtgatcatcatccccagcgccctggactttgtgtcccaggatgagatgctgacccccctgggccgcctggacaagtatgctgccagcgagaacatcttcaaccggcagatggtggcccggagcctgctggacaccctgcgggaggtgtgtgatgatgagcgggactgcatcgctgtgctggagcgcatcagccggctggctgatgacagcgagcccaccgtgcgggcagagctgatggagcaggtgccccacatcgccctcttctgccaggagaaccggcccagcatcccctatgccttcagcaagttcctgctgcccatcgtggtgcgctacctggccgaccagaacaaccaggtgaggaagaccagccaggccgccctgctggccctgctggagcaggagctgattgaaagatttgatgtggagaccaaggtgtgccctgtgctgattgagctgacagccccagacagcaatgatgatgtgaagacagaagctgtggccatcatgtgcaagatggcccccatggtgggcaaggacatcacagagcggctcatcctgccccgcttctgtgagatgtgctgtgactgcaggatgttccacgtgaggaaggtgtgtgccgccaactttggagacatctgcagcgtggtgggccagcaggccacagaggagatgctgctgccccgcttcttccagctgtgcagcgacaacgtgtggggcgtgaggaaggcctgtgccgagtgcttcatggctgtgtcctgtgccacctgccaggagatccggaggaccaagctgagcgccctcttcatcaacctgatcagtgaccccagccgctgggtgcggcaggccgccttccagagcctgggccccttcatcagcacctttgccaaccccagcagcagcggccagtacttcaaggaggagagcaagagcagcgaggagatgtctgtggagaacaagaacagaacccgggaccaggaggccccagaagatgtgcaggtgcggcctgaggacacccccagcgacctgtctgtgagcaacagcagcgtcatcctggagaacaccatggaggaccatgctgctgaggccagcggcaagcccctgggggagatctctgtgcccctggacagcagcctgctgtgcaccctgagcagcgagagccaccaggaggccgccagcaatgaaaatgacaagaagccaggcaactacaagtccatgctgcggcctgaggtgggcaccaccagccaggacagcgccctgctggaccaggagctgtacaacagcttccacttctggaggacccccctgcctgagattgacctggacatcgagctggagcagaacagcggcggcaagcccagccctgagggccctgaggaggagagcgagggccctgtgcccagcagccccaacatcaccatggccaccaggaaggagctggaggagatgattgagaacctggagccccacattgatgatcctgatgtgaaggcccaggtggaggtgctgtctgctgccctgcgggccagcagcctggatgcccacgaggagaccatcagcattgagaagagaagtgacctgcaggatgagctggacatcaatgagctgcccaactgcaagatcaaccaggaggacagcgtgcccctcatcagtgatgctgtggagaacatggacagcaccctgcactacatccacagcgacagcgacctgagcaacaacagcagcttctccccagatgaggagaggaggaccaaggtgcaggatgtggtgccccaggccctgctggaccagtacctgtccatgacagaccccagccgggcccagacagtggacacagaaattgccaagcactgtgcctacagcctgcccggggtggccctgaccctgggccggcagaactggcactgcctgcgggagacctatgagaccctggccagtgacatgcagtggaaggtgcggaggaccctggccttcagcatccacgagctggccgtcatcctgggggaccagctgacagctgctgacctggtgcccatcttcaacggcttcctgaaggacctggatgaggtgagaattggagtgctgaagcacctgcatgacttcctgaagctgctgcacatcgacaagagaagagagtacctgtaccagctgcaggagttcctggtgacagacaacagcaggaactggaggttccgggcagagctggccgagcagctgatcctgctgctggagctgtacagccccagagatgtgtatgactacctgcggcccatcgccctgaacctgtgtgccgacaaggtgtcctctgtgcgctggatctcctacaagctggtgtctgagatggtgaagaagctgcacgccgccaccccacccaccttcggcgtggacctgatcaatgagctggtggagaactttggccgctgccccaagtggagcggccggcaggcctttgtgtttgtgtgccagacagtgattgaagatgactgcctgcccatggaccagtttgctgtgcacctgatgccccacctgctgaccctggccaatgacagagtgcccaacgtgcgggtgctgctggccaagaccctgcggcagaccctgctggagaaggactacttcctggccagcgccagctgccaccaggaggccgtggagcagaccatcatggccctgcagatggaccgggacagtgatgtgaagtactttgccagcatccacccagccagcaccaagatcagtgaagatgccatgagcacagccagcagcacctactag

SEQ ID NO: 166192 - DNA, 1086 bp, synthetic construct
  misc_feature 1..1086: note = Description of Artificial Sequence: Synthetic coding sequence
  source 1..1086: mol_type = other DNA
atggatgacttccgcaccagcgcccctgagccccggggcccccccaaccccaacgtggagtacatcccctttgatgagatgaaggagcgcatcctgaagatcgtgacaggcttcaacggcatccccttcaccatccagaggctgtgtgagctgctgacagaccccaggaggaactacacaggaacagacaagttcctgcggggcgtggagaagaatgtgatggtggtgtcctgtgtgtaccccagcagcgagaagaacaacagcaacagcctgaacaggatgaatggagtgatgtttcctggcaacagccccagctacacagagaggagcaacatcaatggacctggcaccccccggcccctgaaccggcccaaggtgtccctgagcgcccccatgaccaccaacggcctgcctgagagcacagacagcaaggaggccaacctgcagcagaatgaggagaagaaccacagcgacagcagcaccagcgagagcgaggtgtcctctgtgagccccctgaagaacaagcacccagatgaagatgctgtggaggccgagggccacgaggtgaagaggctgcgctttgacaaggagggggaggtgcgggagacagccagccagaccaccagcagcgagatcagctctgtgatggtgggggagacagaggccagcagcagcagccaggacaaggacaaggacagccgctgcacccggcagcactgcacagaagaagatgaggaggaggatgaggaggaggaggaggagagcttcatgaccagccgggagatgatccctgagaggaagaaccaggagaaggagagtgatgatgccctgactgtgaatgaggagaccagcgaggagaacaaccagatggaggagagtgatgtgtcccaggccgagaaggacctgctgcacagcgagggctctgaaaatgaaggacctgtgagcagcagcagcagtgactgccgggagacagaggagctggtgggcagcaacagcagcaagacaggagagatcctgtctgagagctccatggagaatgatgatgaggccacagaggtgacagatgagcccatggagcaggactag

SEQ ID NO: 166193 - DNA, 1254 bp, synthetic construct
  misc_feature 1..1254: note = Description of Artificial Sequence: Synthetic coding sequence
  source 1..1254: mol_type = other DNA
atggatgtggagcggctgcaggaggccctgaaggactttgagaagaggggcaagaaggaggtgtgccctgtgctggaccagttcctgtgccacgtggccaagacaggagagaccatgatccagtggagccagttcaagggctacttcatcttcaagctggagaaggtgatggatgacttccgcaccagcgcccctgagccccggggcccccccaaccccaacgtggagtacatcccctttgatgagatgaaggagcgcatcctgaagatcgtgacaggcttcaacggcatccccttcaccatccagaggctgtgtgagctgctgacagaccccaggaggaactacacaggaacagacaagttcctgcggggcgtggagaagaatgtgatggtggtgtcctgtgtgtaccccagcagcgagaagaacaacagcaacagcctgaacaggatgaatggagtgatgtttcctggcaacagccccagctacacagagaggagcaacatcaatggacctggcaccccccggcccctgaaccggcccaaggtgtccctgagcgcccccatgaccaccaacggcctgcctgagagcacagacagcaaggaggccaacctgcagcagaatgaggagaagaaccacagcgacagcagcaccagcgagagcgaggtgtcctctgtgagccccctgaagaacaagcacccagatgaagatgctgtggaggccgagggccacgaggtgaagaggctgcgctttgacaaggagggggaggtgcgggagacagccagccagaccaccagcagcgagatcagctctgtgatggtgggggagacagaggccagcagcagcagccaggacaaggacaaggacagccgctgcacccggcagcactgcacagaagaagatgaggaggaggatgaggaggaggaggaggagagcttcatgaccagccgggagatgatccctgagaggaagaaccaggagaaggagagtgatgatgccctgactgtgaatgaggagaccagcgaggagaacaaccagatggaggagagtgatgtgtcccaggccgagaaggacctgctgcacagcgagggctctgaaaatgaaggacctgtgagcagcagcagcagtgactgccgggagacagaggagctggtgggcagcaacagcagcaagacaggagagatcctgtctgagagctccatggagaatgatgatgaggccacagaggtgacagatgagcccatggagcaggactag

SEQ ID NO: 166194 - DNA, 1083 bp, synthetic construct
  misc_feature 1..1083: note = Description of Artificial Sequence: Synthetic coding sequence
  source 1..1083: mol_type = other DNA
atggatgtggagcggctgcaggaggccctgaaggactttgagaagaggggcaagaaggaggtgtgccctgtgctggaccagttcctgtgccacgtggccaagacaggagagaccatcatccccttcaccatccagaggctgtgtgagctgctgacagaccccaggaggaactacacaggaacagacaagttcctgcggggcgtggagaagaatgtgatggtggtgtcctgtgtgtaccccagcagcgagaagaacaacagcaacagcctgaacaggatgaatggagtgatgtttcctggcaacagccccagctacacagagaggagcaacatcaatggacctggcaccccccggcccctgaaccggcccaaggtgtccctgagcgcccccatgaccaccaacggcctgcctgagagcacagacagcaaggaggccaacctgcagcagaatgaggagaagaaccacagcgacagcagcaccagcgagagcgaggtgtcctctgtgagccccctgaagaacaagcacccagatgaagatgctgtggaggccgagggccacgaggtgaagaggctgcgctttgacaaggagggggaggtgcgggagacagccagccagaccaccagcagcgagatcagctctgtgatggtgggggagacagaggccagcagcagcagccaggacaaggacaaggacagccgctgcacccggcagcactgcacagaggaggatgaggaggaggatgaggaggaggaggaggagagcttcatgaccagccgggagatgatccctgagaggaagaaccaggagaaggagagtgatgatgccctgactgtgaatgaggagaccagcgaggagaacaaccagatggaggagagtgatgtgtcccaggccgagaaggacctgctgcacagcgagggctctgaaaatgaaggacctgtgagcagcagcagcagtgactgccgggagacagaggagctggtgggcagcaacagcagcaagacaggagagatcctgtctgagagctccatggagaatgatgatgaggccacagaggtgacagatgagcccatggagcaggactag

SEQ ID NO: 166195 - DNA, 1116 bp, synthetic construct
  misc_feature 1..1116: note = Description of Artificial Sequence: Synthetic coding sequence
  source 1..1116: mol_type = other DNA
atggccctgggcaagttccgggccgccctgcgggactatgaaacagtggtgaaggtgaagccccatgacaaggatgccaagatgaagtaccaggagtgcaacaagatcgtgaagcagaaggcctttgagcgggccatcgctggagatgagcacaagaggtctgtggtggacagcctggacattgaatccatgaccattgaagatgagtacagcggccccaagctggaggatggcaaggtgaccatctccttcatgaaggagctgatgcagtggtacaaggaccagaagaagctgcacaggaaatgtgcctaccagacagagaagatcaccgtgtgtggggacacccacggccagttctatgacctgctgaacatctttgagctgaatggcctgcccagcgagaccaacccctacatcttcaatggagactttgtggaccggggcagcttctctgtggaggtgatcctgaccctgtttggcttcaagctgctgtacccagaccacttccacctgctgcggggcaaccacgagacagacaacatgaaccagatctacggctttgaaggagaggtgaaggccaagtacacagcccagatgtatgagctgttcagcgaggtgtttgagtggctgcccctggcccagtgcatcaatggcaaggtgctgatcatgcacggcggcctcttctctgaagatggagtgaccctggatgacatcaggaagattgaaagaaaccggcagcccccagacagcggccccatgtgtgacctgctgtggagcgacccccagccccagaatggccgcagcatcagcaagaggggcgtgtcctgccagtttggaccagatgtgaccaaggccttcctggaggagaacaacctggactacatcatccgcagccatgaggtgaaggccgagggctatgaggtggcccacggcggccgctgtgtgaccgtcttcagcgcccccaactactgtgaccagatgggcaacaaggccagctacatccacctgcagggcagtgacctgcggccccagttccaccagttcaccgctgtgccccaccccaacgtgaagcccatggcctatgccaacaccctgctgcagctgggcatgatgtag

SEQ ID NO: 166196 - DNA, 1500 bp, synthetic construct
  misc_feature 1..1500: note = Description of Artificial Sequence: Synthetic coding sequence
  source 1..1500: mol_type = other DNA
atggccatggccgagggggagaggacagaatgtgccgagcccccaagagatgagcccccagcagatggagccctgaagagagctgaggagctgaagacccaggccaatgactacttcaaggccaaggactatgaaaatgccatcaagttctacagccaggccatcgagctgaaccccagcaatgccatctactacggcaacagaagcctggcctacctgaggacagagtgctacggctacgccctgggagatgccacccgggccatcgagctggacaagaagtacatcaagggctactacagaagagctgccagcaacatggccctgggcaagttccgggccgccctgcgggactatgaaacagtggtgaaggtgaagccccatgacaaggatgccaagatgaagtaccaggagtgcaacaagatcgtgaagcagaaggcctttgagcgggccatcgctggagatgagcacaagaggtctgtggtggacagcctggacattgaatccatgaccattgaagatgagtacagcggccccaagctggaggatggcaaggtgaccatctccttcatgaaggagctgatgcagtggtacaaggaccagaagaagctgcacaggaaatgtgcctaccagatcctggtgcaggtgaaggaggtgctgagcaagctgagcaccctggtggagaccaccctgaaggagacagagaagatcaccgtgtgtggggacacccacggccagttctatgacctgctgaacatctttgagctgaatggcctgcccagcgagaccaacccctacatcttcaatggagactttgtggaccggggcagcttctctgtggaggtgatcctgaccctgtttggcttcaagctgctgtacccagaccacttccacctgctgcggggcaaccacgagacagacaacatgaaccagatctacggctttgaaggagaggtgaaggccaagtacacagcccagatgtatgagctgttcagcgaggtgtttgagtggctgcccctggcccagtgcatcaatggcaaggtgctgatcatgcacggcggcctcttctctgaagatggagtgaccctggatgacatcaggaagattgaaagaaaccggcagcccccagacagcggccccatgtgtgacctgctgtggagcgacccccagccccagaatggccgcagcatcagcaagaggggcgtgtcctgccagtttggaccagatgtgaccaaggccttcctggaggagaacaacctggactacatcatccgcagccatgaggtgaaggccgagggctatgaggtggcccacggcggccgctgtgtgaccgtcttcagcgcccccaactactgtgaccagatgggcaacaaggccagctacatccacctgcagggcagtgacctgcggccccagttccaccagttcaccgctgtgccccaccccaacgtgaagcccatggcctatgccaacaccctgctgcagctgggcatgatgtag

SEQ ID NO: 166197 - DNA, 1461 bp, synthetic construct
  misc_feature 1..1461: note = Description of Artificial Sequence: Synthetic coding sequence
  source 1..1461: mol_type = other DNA
atggccatggccgagggggagaggacagaatgtgccgagcccccaagagatgagcccccagcagatggagccctgaagagagctgaggagctgaagacccaggccaatgactacttcaaggccaaggactatgaaaatgccatcaagttctacagccaggccatcgagctgaaccccagcaatgccatctactacggctacgccctgggagatgccacccgggccatcgagctggacaagaagtacatcaagggctactaccgccgggccgccagcaacatggccctgggcaagttccgggccgccctgcgggactatgagaccgtggtgaaggtgaagccccatgacaaggatgccaagatgaagtaccaggagtgcaacaagatcgtgaagcagaaggcctttgagcgggccatcgctggagatgagcacaagaggtctgtggtggacagcctggacatcgagagcatgaccattgaagatgagtacagcggccccaagctggaggatggcaaggtgaccatctccttcatgaaggagctgatgcagtggtacaaggaccagaagaagctgcacaggaaatgtgcctaccagatcctggtgcaggtgaaggaggtgctgagcaagctgagcaccctggtggagaccaccctgaaggagacagagaagatcaccgtgtgtggggacacccacggccagttctatgacctgctgaacatctttgagctgaatggcctgcccagcgagaccaacccctacatcttcaacggggactttgtggaccggggcagcttctctgtggaggtgatcctgaccctgtttggcttcaagctgctgtacccagaccacttccacctgctgcggggcaaccatgaaacagacaacatgaaccagatctacggctttgaaggagaggtgaaggccaagtacacagcccagatgtatgagctgttcagcgaggtgtttgagtggctgcccctggcccagtgcatcaacgggaaggtgctgatcatgcatggaggcctcttctctgaagatggagtgaccctggatgacatcaggaagattgaaagaaaccggcagcccccagattctggccccatgtgtgacctgctgtggagcgacccccagccccagaatggccgcagcatcagcaagaggggcgtgtcctgccagtttggaccagatgtgaccaaggccttcctggaggagaacaacctggactacatcatccgcagccatgaggtgaaggccgagggctatgaggtggcccatggaggccgctgtgtgacagtgttcagcgcccccaactactgtgaccagatgggcaacaaggccagctacatccacctgcagggcagtgacctgcggccccagttccaccagttcaccgctgtgccccaccccaacgtgaagcccatggcctatgccaacaccctgctgcagctgggcatgatgtag

SEQ ID NO: 166198 - DNA, 1458 bp, synthetic construct
  misc_feature 1..1458: note = Description of Artificial Sequence: Synthetic coding sequence
  source 1..1458: mol_type = other DNA
tgaatggccgagggggagaggacagaatgtgccgagcccccaagagatgagcccccagcagatggagccctgaagagagctgaggagctgaagacccaggccaatgactacttcaaggccaaggactatgaaaatgccatcaagttctacagccaggccatcgagctgaaccccagcaatgccatctactacggcaacagaagcctggcctacctgaggacagaatgttatggctacgccctgggagatgccacccgggccatcgagctggacaagaagtacatcaagggctactaccgccgggccgccagcaacatggccctgggcaagttccgggccgccctgcgggactatgagaccgtggtgaaggtgaagccccatgacaaggatgccaagatgaagtaccaggagtgcaacaagatcgtgaagcagaaggcctttgagcgggccatcgctggagatgagcacaagaggtctgtggtggacagcctggacatcgagagcatgaccattgaagatgagtacagcggccccaagctggaggatggcaaggtgaccatctccttcatgaaggagctgatgcagtggtacaaggaccagaagaagctgcacaggaaatgtgcctaccagatcctggtgcaggtgaaggaggtgctgagcaagctgagcaccctggtggagaccaccctgaaggagacagagaagatcaccgtgtgtggggacacccacggccagttctatgacctgctgaacatctttgagctgaatggcctgcccagcgagaccaacccctacatcttcaacggggactttgtggaccggggcagcttctctgtggaggtgatcctgaccctgtttggcttcaagctgctgtacccagaccacttccacctgctgcggggcaaccatgaaacagacaacatgaaccagatctacggctttgaaggagaggtgaaggccaagtacacagcccagatgtatgagctgttcagcgaggtgtttgagtggctgcccctggcccagtgcatcaacgggaaggtgctgatcatgcatggaggcctcttctctgaagatggagtgaccctggatgacatcaggaagattgaaagaaaccggcagcccccagattctggccccatgtgtgacctgctgtggagcgacccccagccccagaatggccgcagcatcagcaagaggggcgtgtcctgccagtttggaccagatgtgaccaaggccttcctggaggagaacaacctggactacatcatccgcagccatgaggtgaaggccgagggctatgaggtggcccatggaggccgctgtgtgacagtgttcagcgcccccaactactgtgaccagatgggcaacaaggccagctacatccacctgcagggcagtgacctgcggccccagttccaccagttcaccgctgtgggccggcccagcagcggcagctag

SEQ ID NO: 166199 - DNA, 477 bp, synthetic construct
  misc_feature 1..477: note = Description of Artificial Sequence: Synthetic coding sequence
  source 1..477: mol_type = other DNA
atgctgactgtggccgccctgattgatgagcagatcctgtgtgtgcacggcggcctgagcccagacatcaagaccctggaccagatccgcaccatcgagaggaaccaggagatcccccacaagggggccttctgtgacctggtgtggagcgaccctgaagatgtggacacctgggccatcagccccagaggagctggctggctgtttggagccaaggtgaccaatgaatttgtgcacatcaacaacctgaagctgatctgccgggcccaccagctggtgcatgagggctacaagttcatgtttgatgagaagctggtgacagtgtggagcgcccccaactactgctaccgctgtggcaacatcgccagcatcatggtgttcaaggatgtgaacacccgggagcccaagctgttccgggctgtgcctgacagcgagagggtcatcccccccaggaccaccaccccctacttcctgtag

SEQ ID NO: 166200 - DNA, 918 bp, synthetic construct
  misc_feature 1..918: note = Description of Artificial Sequence: Synthetic coding sequence
  source 1..918: mol_type = other DNA
atggcccccctggacctggacaagtatgtggagatcgcccggctgtgcaagtacctgcctgaaaatgacctgaagaggctgtgtgactatgtgtgtgacctgctgctggaggagagcaatgtgcagcctgtgtccacccctgtgacagtgtgtggggacatccacggccagttctatgacctgtgtgagctgttcagaactggaggccaggtgcctgacaccaactacatcttcatgggagactttgtggaccggggctactacagcctggagaccttcacctacctgctggccctgaaggccaagtggccagaccgcatcaccctgctgcggggcaaccacgagagccggcagatcacccaggtgtatggcttctatgatgagtgccagaccaagtatggaaatgccaatgcctggagatactgcaccaaggtgtttgacatgctgactgtggccgccctgattgatgagcagatcctgtgtgtgcatggaggcctgagcccagacatcaagaccctggaccagatccgcaccattgaaagaaaccaggagatcccccacaagggggccttctgtgacctggtgtggagcgaccctgaagatgtggacacctgggccatcagccccaggggggccggctggctgtttggagccaaggtgaccaatgaatttgtgcacatcaacaacctgaagctgatctgccgggcccaccagctggtgcatgagggctacaagttcatgtttgatgagaagctggtgacagtgtggagcgcccccaactactgctaccgctgtggcaacatcgccagcatcatggtgttcaaggatgtgaacacccgggagcccaagctgttccgggctgtgcctgattctgagagggtcatcccccccaggaccaccaccccctacttcctgtag

SEQ ID NO: 166201 - DNA, 852 bp, synthetic construct
  misc_feature 1..852: note = Description of Artificial Sequence: Synthetic coding sequence
  source 1..852: mol_type = other DNA
atggcccccctggacctggacaagtatgtggagatcgcccggctgtgcaagtacctgcctgaaaatgacctgaagaggctgtgtgactatgtgtgtgacctgctgctggaggagagcaatgtgcagcctgtgtccacccctgtgacagtgtgtggggacatccacggccagggcgactttgtggaccggggctactacagcctggagaccttcacctacctgctggccctgaaggccaagtggccagaccgcatcaccctgctgcggggcaaccacgagagccggcagatcacccaggtgtatggcttctatgatgagtgccagaccaagtatggaaatgccaatgcctggagatactgcaccaaggtgtttgacatgctgactgtggccgccctgattgatgagcagatcctgtgtgtgcatggaggcctgagcccagacatcaagaccctggaccagatccgcaccattgaaagaaaccaggagatcccccacaagggggccttctgtgacctggtgtggagcgaccctgaagatgtggacacctgggccatcagccccaggggggccggctggctgtttggagccaaggtgaccaatgaatttgtgcacatcaacaacctgaagctgatctgccgggcccaccagctggtgcatgagggctacaagttcatgtttgatgagaagctggtgacagtgtggagcgcccccaactactgctaccgctgtggcaacatcgccagcatcatggtgttcaaggatgtgaacacccgggagcccaagctgttccgggctgtgcctgattctgagagggtcatcccccccaggaccaccaccccctacttcctgtag

SEQ ID NO: 166202 - DNA, 1029 bp, synthetic construct
  misc_feature 1..1029: note = Description of Artificial Sequence: Synthetic coding sequence
  source 1..1029: mol_type = other DNA
atggcccccctggacctggacaagtatgtggagatcgcccggctgtgcaagtacctgcctgaaaatgacctgaaggtgagccccatctgtggcctggcccccagcggctgtggggccccagctggccggcccttcctgagccctggccccccacctgtgttccacttcctgcgcttcctgaaggagcggctgtgtgactatgtgtgtgacctgctgctggaggagagcaatgtgcagcctgtgtccacccctgtgacagtgtgtggggacatccacggccagttctatgacctgtgtgagctgttcagaactggaggccaggtgcctgacaccaactacatcttcatgggagactttgtggaccggggctactacagcctggagaccttcacctacctgctggccctgaaggccaagtggccagaccgcatcaccctgctgcggggcaaccacgagagccggcagatcacccaggtgtatggcttctatgatgagtgccagaccaagtatggaaatgccaatgcctggagatactgcaccaaggtgtttgacatgctgactgtggccgccctgattgatgagcagatcctgtgtgtgcacggcggcctgagcccagacatcaagaccctggaccagatccgcaccatcgagaggaaccaggagatcccccacaagggggccttctgtgacctggtgtggagcgaccctgaagatgtggacacctgggccatcagccccagaggagctggctggctgtttggagccaaggtgaccaatgaatttgtgcacatcaacaacctgaagctgatctgccgggcccaccagctggtgcatgagggctacaagttcatgtttgatgagaagctggtgacagtgtggagcgcccccaactactgctaccgctgtggcaacatcgccagcatcatggtgttcaaggatgtgaacacccgggagcccaagctgttccgggctgtgcctgacagcgagagggtcatcccccccaggaccaccaccccctacttcctgtag

SEQ ID NO: 166203 - DNA, 378 bp, synthetic construct
  misc_feature 1..378: note = Description of Artificial Sequence: Synthetic coding sequence
  source 1..378: mol_type = other DNA
atgttcctgctgccccggctgcagctgctgggccagatgaggctgtgtgactatgtgtgtgacctgctgctggaggagagcaatgtgcagcctgtgtccacccctgtgacagtgtgtggggacatccacggccagttctatgacctgtgtgagctgttcagaactggaggccaggtgcctgacaccaactacatcttcatgggagactttgtggaccggggctactacagcctggagaccttcacctacctgctggccctgaaggccaagtggccagaccgcatcaccctgctgcggggcaaccacgagagccggcagatcacccaggtgtatggcttctatgatgagtgccagaccaagtatggaaatgccaactag

SEQ ID NO: 166204 - DNA, 1161 bp, synthetic construct
  misc_feature 1..1161: note = Description of Artificial Sequence: Synthetic coding sequence
  source 1..1161: mol_type = other DNA
atgtctgccctggagaagtccatgcacctgggccgcctgcccagcaggcctcccctgcccggcagcggcggcagccagagcggggccaagatgaggatgggccctggcaggaagagggacttcagccctgtgccctggagccagtactttgagagcatggaggatgtggaggtggagaatgagaccgggaaggacaccttccgggtgtacaagagcggcagcgagggccctgtgctgctgctgctgcatggaggcggccacagcgccctgtcctgggccgtgttcaccgctgccatcatcagccgggtgcagtgcagaattgtggccctggacctgcggagccatggagagaccaaggtgaagaaccctgaggacctgtctgctgagaccatggccaaggatgtgggcaatgtggtggaggccatgtatggagacctgcccccacccatcatgctgattggccacagcatgggcggggccatcgctgtgcacacagccagcagcaacctggtgcccagcctgctgggcctgtgcatgattgatgtggtggagggcacagccatggatgccctgaacagcatgcagaacttcctgcggggccggcccaagaccttcaagagcctggagaatgccatcgagtggagcgtgaagagcggccagatccggaacctggagagcgcccgggtgtccatggtgggccaggtgaagcagtgtgagggcatcaccagccctgagggcagcaagagcatcgtggagggcatcatcgaggaggaggaggaggatgaggagggcagcgagagcatcagcaagaggaagaaggaggatgacatggagaccaagaaggaccacccctacacctggagaattgagctggccaagacagagaagtactgggatggctggttccggggcctgagcaacctcttcctgagctgccccatccccaagctgctgctgctggccggcgtggaccggctggacaaggacctgaccatcggccagatgcagggcaagttccagatgcaggtgctgccccagtgtggccatgctgtgcatgaagatgccccagacaaggtggccgaggccgtggccaccttcctgatccgccacagatttgctgagcccatcggcggcttccagtgtgtgtttcctggctgctag

SEQ ID NO: 166205 - DNA, 600 bp, synthetic construct
  misc_feature 1..600: note = Description of Artificial Sequence: Synthetic coding sequence
  source 1..600: mol_type = other DNA
atggatgccctgaacagcatgcagaacttcctgcggggccggcccaagaccttcaagagcctggagaatgccatcgagtggagcgtgaagagcggccagatccggaacctggagagcgcccgggtgtccatggtgggccaggtgaagcagtgtgagggcatcaccagccctgagggcagcaagagcatcgtggagggcatcatcgaggaggaggaggaggatgaggagggcagcgagagcatcagcaagaggaagaaggaggatgacatggagaccaagaaggaccacccctacacctggagaattgagctggccaagacagagaagtactgggatggctggttccggggcctgagcaacctcttcctgagctgccccatccccaagctgctgctgctggccggcgtggaccggctggacaaggacctgaccatcggccagatgcagggcaagttccagatgcaggtgctgccccagtgtggccatgctgtgcatgaagatgccccagacaaggtggccgaggccgtggccaccttcctgatccgccacagatttgctgagcccatcggcggcttccagtgtgtgtttcctggctgctag

SEQ ID NO: 166206 - DNA, 1203 bp, synthetic construct
  misc_feature 1..1203: note = Description of Artificial Sequence: Synthetic coding sequence
  source 1..1203: mol_type = other DNA
atgtctgccctggagaagtccatgcacctgggccgcctgcccagcaggcctcccctgcccggcagcggcggcagccagagcggggccaagatgaggatgggccctggcaggaagagggacttcagccctgtgccctggagccagtactttgagagcatggaggatgtggaggtggagaatgagaccgggaaggacaccttccgggtgtacaagagcggcagcgagggccctgtgctgctgctgctgcatggaggcggccacagcgccctgtcctgggccgtgttcaccgctgccatcatcagccgggtgcagtgcagaattgtggccctggacctgcggagccatggagagaccaaggtgaagaaccctgaggacctgtctgctgagaccatggccaaggatgtgggcaatgtggtggaggccatgtatggagacctgcccccacccatcatgctgattggccacagcatgggcggggccatcgctgtgcacacagccagcagcaacctggtgcccagcctgctgggcctgtgcatgattgatgtggtggagggcacagccatggatgccctgaacagcatgcagaacttcctgcggggccggcccaagaccttcaagagcctggagaatgccatcgagtggagcgtgaagagcggccagatccggaacctggagagcgcccgggtgtccatggtgggccaggtgaagcagtgtgagggcatcaccagccctgagggcagcaagagcatcgtggagggcatcatcgaggaggaggaggaggatgaggagggcagcgagagcatcagcaagaggaagaaggaggatgacatggagggcctgcccagcgagacccagaacctgctgctcttcctgcagaccaagaaggaccacccctacacctggagaattgagctggccaagacagagaagtactgggatggctggttccggggcctgagcaacctcttcctgagctgccccatccccaagctgctgctgctggccggcgtggaccggctggacaaggacctgaccatcggccagatgcagggcaagttccagatgcaggtgctgccccagtgtggccatgctgtgcatgaagatgccccagacaaggtggccgaggccgtggccaccttcctgatccgccacagatttgctgagcccatcggcggcttccagtgtgtgtttcctggctgctag

SEQ ID NO: 166207 - DNA, 1776 bp, synthetic construct
  misc_feature 1..1776: note = Description of Artificial Sequence: Synthetic coding sequence
  source 1..1776: mol_type = other DNA
atgggctgcagcagcagcagcaccaagaccaggagaagtgacaccagcctgcgggccgccctgatcatccagaactggtaccggggctacaaggcccggctgaaggcccggcagcactacgccctgaccatcttccagagcattgaatatgcagatgagcagggccagatgcagctgagcaccttcttctccttcatgctggagaactacacccacatccacaaggaggagctggagctgaggaaccagagcctggagagcgagcaggacatgagggaccgctgggactatgtggacagcattgatgtgcctgacagctacaacggcccccggctgcagttccccctgacctgcacagacatcgacctgctgctggaggccttcaaggagcagcagatcctgcacgcccactacgtgctggaggtgctgtttgagaccaagaaggtgctgaagcagatgcccaacttcacccacatccagaccagccccagcaaggaggtgaccatctgtggggacctgcacggcaagctggatgacctcttcctgatcttctacaagaatggcctgcccagcgagaggaacccctacgtgttcaatggagactttgtggaccggggcaagaacagcattgagatcctgatgatcctgtgtgtgtccttcctggtgtacccaaatgacctgcacctgaacagaggcaaccacgaggacttcatgatgaacctgcgctatggcttcaccaaggagatcctgcacaagtacaagctgcacggcaagaggatcctgcagatcctggaggagttctacgcctggctgcccatcggcaccatcgtggacaatgagatcctggtgattcatggaggcatcagcgagaccacagacctgaacctgctgcaccgggtggagaggaacaagatgaagtctgtgctgatccccccaacagagaccaacagagaccatgacacagacagcaagcacaacaaggtgggcgtgaccttcaatgcccacggccgcatcaagaccaacggcagccccacagagcacctgacagaacatgagtgggagcaggtggtgaccatcttcagcgccagcaactactatgaggagggcagcaacagaggagcctacatcaagctgtgcagcggcaccaccccccgcttcttccagtaccaggtgaccaaggccacctgcttccagcccctgcggcagagggtggacaccatggagaacagcgccatcaagatcctgcgggagagggtcatcagcaggaagagtgacctgacccgggccttccagctgcaggaccacaggaagagcggcaagctgtctgtgtcccagtgggccttctgcatggagaacatcctgggcctgaacctgccctggaggagcctgagcagcaacctggtgaacatcgaccagaatggaaatgtggagtacatgagcagcttccagaacatcagaattgagaagcctgtgcaggaggcccacagcaccctggtggagaccctgtaccgctacagaagtgacctggagatcatcttcaatgccatcgacacagaccacagcggcctcatctctgtggaggagttccgggccatgtggaagctgttcagcagccactacaacgtgcacattgatgacagccaggtgaacaagctggccaacatcatggacctgaacaaggatggcagcattgacttcaatgagttcctgaaggccttctacgtggtgcacagatatgaggacctgatgaagccagatgtgaccaacctgggctag

SEQ ID NO: 166208 - DNA, 1803 bp, synthetic construct
  misc_feature 1..1803: note = Description of Artificial Sequence: Synthetic coding sequence
  source 1..1803: mol_type = other DNA
atgggctgcagcagcagcagcaccaagaccaggagaagtgacaccagcctgcgggccgccctgatcatccagaactggtaccggggctacaaggcccggctgaaggcccggcagcactacgccctgaccatcttccagagcattgaatatgcagatgagcagggccagatgcagctgagcaccttcttctccttcatgctggagaactacacccacatccacaaggaggagctggagatcctgcacgcccactacgtgctggaggtgctgtttgagaccaagaaggtgctgaagcagatgcccaacttcacccacatccagaccagccccagcaaggaggtgaccatctgtggggacctgcacggcaagctggatgacctcttcctgatcttctacaagaatggcctgcccagcgagaggaacccctacgtgttcaacggggactttgtggaccggggcaagaacagcattgagatcctgatgatcctgtgtgtgtccttcctggtgtacccaaatgacctgcacctgaacagaggcaaccacgaggacttcatgatgaacctgcgctatggcttcaccaaggagatcctgcacaagtacaagctgcacggcaagaggatcctgcagatcctggaggagttctacgcctggctgcccatcggcaccatcgtggacaatgagatcctggtgatccacggcggcatcagcgagaccacagacctgaacctgctgcaccgggtggagaggaacaagatgaagtctgtgctgatccccccaacagagaccaacagagaccatgacacagacagcaagcacaacaaggtgggcgtgaccttcaatgcccacggccgcatcaagaccaacggcagccccacagagcacctgacagagcacgagtgggagcagatcatcgacatcctgtggagcgacccccggggcaagaatggctgcttccccaacacctgccggggcggcggctgctactttggaccagatgtgaccagcaagatcctgaacaagtaccagctgaagatgctgatccgcagccatgagtgcaagccagagggctatgagatctgccatgatggcaaggtggtgaccatcttcagcgccagcaactactatgaggagggcagcaacagaggagcctacatcaagctgtgcagcggcaccaccccccgcttcttccagtaccaggtgaccaaggccacctgcttccagcccctgcggcagagggtggacaccatggagaacagcgccatcaagatcctgcgggagagggtcatcagcaggaagagtgacctgacccgggccttccagctgcaggaccacaggaagagcggcaagctgtctgtgtcccagtgggccttctgcatggagaacatcctgggcctgaacctgccctggaggagcctgagcagcaacctggtgaacatcgaccagaatggaaatgtggagtacatgagcagcttccagaacatccgcatcgagaagcctgtgcaggaggcccacagcaccctggtggagaccctgtaccgctacagaagtgacctggagatcatcttcaatgccatcgacacagaccacagcggcctcatctctgtggaggagttccgggccatgtggaagctgttcagcagccactacaacgtgcacattgatgacagccaggtgaacaagctggccaacatcatggacctgaacaaggatggcagcattgacttcaatgagttcctgaaggccttctacgtggtgcacagatatgaggacctgatgaagccagatgtgaccaacctgggctag

SEQ ID NO: 166209 - DNA, 1962 bp, synthetic construct
  misc_feature 1..1962: note = Description of Artificial Sequence: Synthetic coding sequence
  source 1..1962: mol_type = other DNA
atgggctgcagcagcagcagcaccaagaccaggagaagtgacaccagcctgcgggccgccctgatcatccagaactggtaccggggctacaaggcccggctgaaggcccggcagcactacgccctgaccatcttccagagcattgaatatgcagatgagcagggccagatgcagctgagcaccttcttctccttcatgctggagaactacacccacatccacaaggaggagctggagctgaggaaccagagcctggagagcgagcaggacatgagggaccgctgggactatgtggacagcattgatgtgcctgacagctacaacggcccccggctgcagttccccctgacctgcacagacatcgacctgctgctggaggccttcaaggagcagcagatcctgcacgcccactacgtgctggaggtgctgtttgagaccaagaaggtgctgaagcagatgcccaacttcacccacatccagaccagccccagcaaggaggtgaccatctgtggggacctgcacggcaagctggatgacctcttcctgatcttctacaagaatggcctgcccagcgagaggaacccctacgtgttcaatggagactttgtggaccggggcaagaacagcattgagatcctgatgatcctgtgtgtgtccttcctggtgtacccaaatgacctgcacctgaacagaggcaaccacgaggacttcatgatgaacctgcgctatggcttcaccaaggagatcctgcacaagtacaagctgcacggcaagaggatcctgcagatcctggaggagttctacgcctggctgcccatcggcaccatcgtggacaatgagatcctggtgattcatggaggcatcagcgagaccacagacctgaacctgctgcaccgggtggagaggaacaagatgaagtctgtgctgatccccccaacagagaccaacagagaccatgacacagacagcaagcacaacaaggtgggcgtgaccttcaatgcccacggccgcatcaagaccaacggcagccccacagagcacctgacagaacatgagtgggagcagatcatcgacatcctgtggagcgacccccggggcaagaatggctgcttccccaacacctgccggggcggcggctgctacttcggcccagatgtgaccagcaagatcctgaacaagtaccagctgaagatgctgatccgcagccatgagtgcaagccagagggctatgagatctgccatgatggcaaggtggtgaccatcttcagcgccagcaactactatgaggagggcagcaacagaggagcctacatcaagctgtgcagcggcaccaccccccgcttcttccagtaccaggtgaccaaggccacctgcttccagcccctgcggcagagggtggacaccatggagaacagcgccatcaagatcctgcgggagagggtcatcagcaggaagagtgacctgacccgggccttccagctgcaggaccacaggaagagcggcaagctgtctgtgtcccagtgggccttctgcatggagaacatcctgggcctgaacctgccctggaggagcctgagcagcaacctggtgaacatcgaccagaatggaaatgtggagtacatgagcagcttccagaacatcagaattgagaagcctgtgcaggaggcccacagcaccctggtggagaccctgtaccgctacagaagtgacctggagatcatcttcaatgccatcgacacagaccacagcggcctcatctctgtggaggagttccgggccatgtggaagctgttcagcagccactacaacgtgcacattgatgacagccaggtgaacaagctggccaacatcatggacctgaacaaggatggcagcattgacttcaatgagttcctgaaggccttctacgtggtgcacagatatgaggacctgatgaagccagatgtgaccaacctgggctag

SEQ ID NO: 166210 - DNA, 1131 bp, synthetic construct
  misc_feature 1..1131: note = Description of Artificial Sequence: Synthetic coding sequence
  source 1..1131: mol_type = other DNA
atgggctgcagcagcagcagcaccaagaccaggagaagtgacaccagcctgcgggccgccctgatcatccagaactggtaccggggctacaaggcccggctgaaggcccggcagcactacgccctgaccatcttccagagcattgaatatgcagatgagcagggccagatgcagctgagcaccttcttctccttcatgctggagaactacacccacatccacaaggaggagctggagctgaggaaccagagcctggagagcgagcaggacatgagggaccgctgggactatgtggacagcattgatgtgcctgacagctacaacggcccccggctgcagttccccctgacctgcacagacatcgacctgctgctggaggccttcaaggagcagcagatcctgcacgcccactacgtgctggaggtgctgtttgagaccaagaaggtgctgaagcagatgcccaacttcacccacatccagaccagccccagcaaggaggtgaccatctgtggggacctgcacggcaagctggatgacctcttcctgatcttctacaagaatggcctgcccagcgagaggaacccctacgtgttcaatggagactttgtggaccggggcaagaacagcattgagatcctgatgatcctgtgtgtgtccttcctggtgtacccaaatgacctgcacctgaacagaggcaaccacgaggacttcatgatgaacctgcgctatggcttcaccaaggagatcctgcacaagtacaagctgcacggcaagaggatcctgcagatcctggaggagttctacgcctggctgcccatcggcaccatcgtggacaatgagatcctggtgattcatggaggcatcagcgagaccacagacctgaacctgctgcaccgggtggagaggaacaagatgaagtctgtgctgatccccccaacagagaccaacagagaccatgacacagacagcaagcacaacaaggtgggcgtgaccttcaatgcccacggccgcatcaagaccaacggcagccccacagagcacctgacagaacatgagtgggagcagagcggctactacggcaagcagaggcaccaggacatcaagcgggagagtgacttcaccaagaagtag

SEQ ID NO: 166211 - DNA, 1767 bp, synthetic construct
  misc_feature 1..1767: note = Description of Artificial Sequence: Synthetic coding sequence
  source 1..1767: mol_type = other DNA
atgctggagaactacacccacatccacaaggaggagctggagctgaggaaccagagcctggagagcgagcaggacatgagggaccgctgggactatgtggacagcattgatgtgcctgacagctacaacggcccccggctgcagttccccctgacctgcacagacatcgacctgctgctggaggccttcaaggagcagcagatcctgcacgcccactacgtgctggaggtgctgtttgagaccaagaaggtgctgaagcagatgcccaacttcacccacatccagaccagccccagcaaggaggtgaccatctgtggggacctgcacggcaagctggatgacctcttcctgatcttctacaagaatggcctgcccagcgagaggaacccctacgtgttcaacggggactttgtggaccggggcaagaacagcattgagatcctgatgatcctgtgtgtgtccttcctggtgtacccaaatgacctgcacctgaacagaggcaaccacgaggacttcatgatgaacctgcgctatggcttcaccaaggagatcctgcacaagtacaagctgcacggcaagaggatcctgcagatcctggaggagttctacgcctggctgcccatcggcaccatcgtggacaatgagatcctggtgatccacggcggcatcagcgagaccacagacctgaacctgctgcaccgggtggagaggaacaagatgaagtctgtgctgatccccccaacagagaccaacagagaccatgacacagacagcaagcacaacaaggtgggcgtgaccttcaatgcccacggccgcatcaagaccaacggcagccccacagagcacctgacagagcacgagtgggagcagatcatcgacatcctgtggagcgacccccggggcaagaatggctgcttccccaacacctgccggggcggcggctgctactttggaccagatgtgaccagcaagatcctgaacaagtaccagctgaagatgctgatccgcagccatgagtgcaagccagagggctatgagatctgccatgatggcaaggtggtgaccatcttcagcgccagcaactactatgaggagggcagcaacagaggagcctacatcaagctgtgcagcggcaccaccccccgcttcttccagtaccaggtgaccaaggccacctgcttccagcccctgcggcagagggtggacaccatggagaacagcgccatcaagatcctgcgggagagggtcatcagcaggaagagtgacctgacccgggccttccagctgcaggaccacaggaagagcggcaagctgtctgtgtcccagtgggccttctgcatggagaacatcctgggcctgaacctgccctggaggagcctgagcagcaacctggtgaacatcgaccagaatggaaatgtggagtacatgagcagcttccagaacatccgcatcgagaagcctgtgcaggaggcccacagcaccctggtggagaccctgtaccgctacagaagtgacctggagatcatcttcaatgccatcgacacagaccacagcggcctcatctctgtggaggagttccgggccatgtggaagctgttcagcagccactacaacgtgcacattgatgacagccaggtgaacaagctggccaacatcatggacctgaacaaggatggcagcattgacttcaatgagttcctgaaggccttctacgtggtgcacagatatgaggacctgatgaagccagatgtgaccaacctgggctag

SEQ ID NO: 166212 - DNA, 2262 bp, synthetic construct
  misc_feature 1..2262: note = Description of Artificial Sequence: Synthetic coding sequence
  source 1..2262: mol_type = other DNA
atgggcagcggcaccagcacccagcaccactttgccttccagaatgctgagcgggccttcaaggctgctgccctgatccagcgctggtacagaagatatgtggcccggctggagatgagaagacgctgcacctggagcatcttccagagcattgaatatgccggccagcaggaccaggtgaagctgcatgacttcttctcctacctgatggaccacttcatccccagcagccacaatgaccgggacttcctgacccgcatcttcacagaggacagatttgcccaggacagcgagatgaagaagtgcagcgactatgagagcattgaggtgcctgacagctacacaggcccccggctgtccttccccctgctgcctgaccacgccacagccctggtggaggccttccggctgaagcagcagctgcacgcccgctacgtgctgaacctgctgtatgagaccaagaagcacctggtgcagctgcccaacatcaacagagtgtccacctgctacagcgaggagatcaccgtgtgtggggacctgcacggccagctggatgacctgatcttcatcttctacaagaatggcctgcccagccctgagaggagctatgtgttcaacggggactttgtggaccggggcaaggacagcgtggagatcctgatgatcctgtttgccttcatgctggtgtaccccaaggagttccacctgaacagaggcaaccacgaggaccacatggtgaacctgcgctatggcttcaccaaggaggtgatgaacaagtacaaggtgcacggcaaggagatcctgcggaccctgcaggatgtgttctgctggctgcccctggccaccctgattgatgagaaggtgctgatcctgcacggcggcgtgtctgacatcacagacctggagctgctggacaagattgaaagaagcaagatcgtgtccaccatgcgctgcaagacccggcagaagtctgagaagcagatggaggagaagaggcgggccaaccagaagagcagcgcccagggccccatcccctggttcctgcctgagagccgcagcctgcccagcagccccctgcggctgggcagctacaaggcccagaagaccagccgcagcagcagcatcccctgcagcggcagcctggatggccgggagctgagccggcaggtgcgcagctctgtggagctggagctggagcgctgccggcagcaggccggcctgctggtgactggagagaaggaggagcccagccgcagcgccagcgaggccgacagcgaggccggggagctgaggaagcccacccaggaggagtggaggcaggtggtggacatcctgtggagcgaccccatggcccaggagggctgcaaggccaacaccatccggggcggcggctgctactttggaccagatgtgacccagcagctgctgcagaagtacaacatgcagttcctgatccgcagccatgagtgcaagccagagggctatgagttctgccacaacaggaaggtgctgaccatcttcagcgccagcaactactatgaggtgggcagcaacagaggagcctacgtgaagctgggccctgccctgaccccccacatcgtgcagtaccaggccaacaaggtgacccacaccctgaccatgaggcagaggatcagccgggtggaggagagcgccctgcgggccctgcgggagaagctgtttgcccacagcagtgacctgctgtctgagttcaagaagcatgatgctgacaaggtgggcctcatcaccctgagtgactgggccgctgctgtggagagcgtgctgcacctgggcctgccctggaggatgctgcggccccagctggtgaacagcagcgctgacaacatgctggagtacaagtcctggctgaagaacctggccaaggagcagctgagccgggagaacatccagagcagcctgctggagaccctgtacagaaacagaagcaacctggagaccatcttccgcatcatcgacagcgaccacagcggcttcatcagcctggatgagttccggcagacctggaagctgttcagcagccacatgaacatcgacatcacagatgactgcatctgtgacctggcccggagcattgacttcaacaaggatggccacatcgacatcaatgagttcctggaggccttccggctggtggagaagagctgcccagaaggagatgcctctgaatgtccccaggccaccaatgccaaggacagcggctgcagcagccctggggcccactag

SEQ ID NO: 166213 - DNA, 1797 bp, synthetic construct
  misc_feature 1..1797: note = Description of Artificial Sequence: Synthetic coding sequence
  source 1..1797: mol_type = other DNA
atgggcagcggcaccagcacccagcaccactttgccttccagaatgctgagcgggccttcaaggctgctgccctgatccagcgctggtacagaagatatgtggcccggctggagatgagaagacgctgcacctggagcatcttccagagcattgaatatgccggccagcaggaccaggtgaagctgcatgacttcttctcctacctgatggaccacttcatccccagcagccacaatgaccgggacttcctgacccgcatcttcacagaggacagatttgcccaggacagcgagatgaagaagtgcagcgactatgagagcattgaggtgcctgacagctacacaggcccccggctgtccttccccctgctgcctgaccacgccacagccctggtggaggccttccggctgaagcagcagctgcacgcccgctacgtgctgaacctgctgtatgagaccaagaagcacctggtgcagctgcccaacatcaacagagtgtccacctgctacagcgaggagatcaccgtgtgtggggacctgcacggccagctggatgacctgatcttcatcttctacaagaatggcctgcccagccctgagaggagctatgtgttcaacggggactttgtggaccggggcaaggacagcgtggagatcctgatgatcctgtttgccttcatgctggtgtaccccaaggagttccacctgaacagaggcaaccacgaggaccacatggtgaacctgcgctatggcttcaccaaggaggtgatgaacaagtacaaggtgcacggcaaggagatcctgcggaccctgcaggatgtgttctgctggctgcccctggccaccctgattgatgagaaggtgctgatcctgcacggcggcgtgtctgacatcacagacctggagctgctggacaagattgaaagaagcaagatcgtgtccaccatgcgctgcaagacccggcagaagtctgagaagcagatggaggagaagaggcgggccaaccagaagagcagcgcccagggccccatcccctggttcctgcctgagagccgcagcctgcccagcagccccctgcggctgggcagctacaaggcccagaagaccagccgcagcagcagcatcccctgcagcggcagcctggatggccgggagctgagccggcaggtgcgcagctctgtggagctggagctggagcgctgccggcagcaggccggcctgctggtgactggagagaaggaggagcccagccgcagcgccagcgaggccgacagcgaggccggggagctgaggaagcccacccaggaggagtggaggcaggtggtggacatcctgtggagcgaccccatggcccaggagggctgcaaggccaacaccatccggggcggcggctgctactttggaccagatgtgacccagcagctgctgcagaagtacaacatgcagttcctgatccgcagccatgagtgcaagccagagggctatgagttctgccacaacaggaaggtgctgaccatcttcagcgccagcaactactatgaggtgggcagcaacagaggagcctacgtgaagctgggccctgccctgaccccccacatcgtgcagtaccaggccaacaaggtgacccacaccctgaccatgaggcagaggatcagccgggtggaggagagcgccctgcgggccctgcgggagaagctgtttgcccacagcagtgacctgctgtctgagttcaagaagcatgatgctgacaaggtgggcctggccagcagccagctgtgctactaccagcagaagtag

SEQ ID NO: 166214 - DNA, 1440 bp, synthetic construct
  misc_feature 1..1440: note = Description of Artificial Sequence: Synthetic coding sequence
  source 1..1440: mol_type = other DNA
atgggcgccttcctggacaagcccaagacagagaagcacaatgcccacggggctggaaatggcctgcgctatggcctgagctccatgcagggctggagggtggagatggaggatgcccacacagctgtggtgggcatcccccacggcctggaggactggagcttctttgctgtgtatgatggccatgctggcagccgggtggccaactactgcagcacccacctgctggagcacatcaccaccaatgaagacttccgggccgccggcaagagcggcagcgccctggagctgtctgtggagaatgtgaagaatggcatcagaacaggcttcctgaagattgatgagtacatgaggaacttcagtgacctgagaaatggcatggacaggagcggcagcacagctgtgggcgtgatgatcagccccaagcacatctacttcatcaactgtggggacagcagagctgtgctgtacagaaatggccaggtgtgcttcagcacccaggaccacaagccctgcaacccccgggagaaggagcgcatccagaatgccggcggctctgtgatgatccagagggtgaatggcagcctggccgtgtcccgggccctgggggactatgactacaagtgtgtggatggcaagggccccacagagcagctggtgtccccagagcctgaggtgtatgagatcctgcgggcagaggaggatgagttcatcatcctggcctgtgatggcatctgggatgtgatgagcaatgaggagctgtgtgaatatgtgaagagccggctggaggtgtctgatgacctggagaatgtgtgcaactgggtggtggacacctgcctgcacaagggcagccgggacaacatgagcatcgtgctggtgtgcttcagcaatgcccccaaggtgtctgatgaagctgtgaagaaggacagcgagctggacaagcacctggagagccgggtggaggagatcatggagaagtctggagaggagggcatgccagacctggcccacgtgatgaggatcctgtctgctgagaacatccccaacctgcccccaggcggcggcctggccggcaagagaaatgtgattgaagctgtgtacagccggctgaacccccaccgggagagtgatggagccagtgatgaagctgaggagagcggcagccagggcaagctggtggaggccctgcggcagatgaggatcaaccaccggggcaactaccggcagctgctggaggagatgctgaccagctaccgcctggccaaggtggagggggaggagagccctgctgagcctgctgccacagccaccagcagcaacagtgatgctggcaaccctgtgaccatgcaggagagccacacagagagcgagagcggcctggccgagctggacagcagcaatgaagatgctggcaccaagatgtctggagagaagatctag

SEQ ID NO: 166215 - DNA, 579 bp, synthetic construct
  misc_feature 1..579: note = Description of Artificial Sequence: Synthetic coding sequence
  source 1..579: mol_type = other DNA
atgagcatcgtgctggtgtgcttcagcaatgcccccaaggtgtctgatgaggccgtgaagaaggacagcgagctggacaagcacctggagagccgggtggaggagatcatggagaagagcggggaggagggcatgccagacctggcccacgtgatgaggatcctgtctgctgagaacatccccaacctgcccccaggcggcggcctggccggcaagagaaatgtcatcgaggccgtgtacagccggctgaacccccaccgggagagtgatggagccagtgatgaggccgaggagagcggcagccagggcaagctggtggaggccctgcggcagatgaggatcaaccaccggggcaactaccggcagctgctggaggagatgctgaccagctaccgcctggccaaggtggagggggaggagagccctgctgagcctgctgccacagccaccagcagcaacagtgatgctggcaaccctgtgaccatgcaggagagccacacagaaagtgaaagtggcctggccgagctggacagcagcaatgaagatgctggcaccaagatgtctggagagaagatctag

SEQ ID NO: 166216 - DNA, 1164 bp, synthetic construct
  misc_feature 1..1164: note = Description of Artificial Sequence: Synthetic coding sequence
  source 1..1164: mol_type = other DNA
atgggcgccttcctggacaagcccaagacagagaagcacaatgcccacggggctggaaatggcctgcgctatggcctgagctccatgcagggctggagggtggagatggaggatgcccacacagctgtggtgggcatcccccacggcctggaggactggagcttctttgctgtgtatgatggccatgctggcagccgggtggccaactactgcagcacccacctgctggagcacatcaccaccaatgaagacttccgggccgccggcaagagcggcagcgccctggagctgtctgtggagaatgtgaagaatggcatcagaacaggcttcctgaagattgatgagtacatgaggaacttcagtgacctgagaaatggcatggacaggagcggcagcacagctgtgggcgtgatgatcagccccaagcacatctacttcatcaactgtggggacagcagagctgtgctgtacagaaatggccaggtgtgcttcagcacccaggaccacaagccctgcaacccccgggagaaggagcgcatccagaatgccggcggctctgtgatgatccagagggtgaatggcagcctggccgtgtcccgggccctgggggactatgactacaagtgtgtggatggcaagggccccacagagcagctggtgtccccagagcctgaggtgtatgagatcctgcgggcagaggaggatgagttcatcatcctggcctgtgatggcatctgggatgtgatgagcaatgaggagctgtgtgaatatgtgaagagccggctggaggtgtctgatgacctggagaatgtgtgcaactgggtggtggacacctgcctgcacaagggcagccgggacaacatgagcatcgtgctggtgtgcttcagcaatgcccccaaggtgtctgatgaagctgtgaagaaggacagcgagctggacaagcacctggagagccgggtggaggagatcatggagaagtctggagaggagggcatgccagacctggcccacgtgatgaggatcctgtctgctgagaacatccccaacctgcccccaggcggcggcctggccggcaagagaaatgtgattgaagctgtgtacagccggctgaacccccaccgggagagtgatggaggagctggggacctggaggacccctggtag

SEQ ID NO: 166217 - DNA, 1143 bp, synthetic construct
  misc_feature 1..1143: note = Description of Artificial Sequence: Synthetic coding sequence
  source 1..1143: mol_type = other DNA
atgggcgccttcctggacaagcccaagacagagaagcacaatgcccacggggctggaaatggcctgcgctatggcctgagctccatgcagggctggagggtggagatggaggatgcccacacagctgtggtgggcatcccccacggcctggaggactggagcttctttgctgtgtatgatggccatgctggcagccgggtggccaactactgcagcacccacctgctggagcacatcaccaccaatgaagacttccgggccgccggcaagagcggcagcgccctggagctgtctgtggagaatgtgaagaatggcatcagaacaggcttcctgaagattgatgagtacatgaggaacttcagtgacctgagaaatggcatggacaggagcggcagcacagctgtgggcgtgatgatcagccccaagcacatctacttcatcaactgtggggacagcagagctgtgctgtacagaaatggccaggtgtgcttcagcacccaggaccacaagccctgcaacccccgggagaaggagcgcatccagaatgccggcggctctgtgatgatccagagggtgaatggcagcctggccgtgtcccgggccctgggggactatgactacaagtgtgtggatggcaagggccccacagagcagctggtgtccccagagcctgaggtgtatgagatcctgcgggcagaggaggatgagttcatcatcctggcctgtgatggcatctgggatgtgatgagcaatgaggagctgtgtgaatatgtgaagagccggctggaggtgtctgatgacctggagaatgtgtgcaactgggtggtggacacctgcctgcacaagggcagccgggacaacatgagcatcgtgctggtgtgcttcagcaatgcccccaaggtgtctgatgaagctgtgaagaaggacagcgagctggacaagcacctggagagccgggtggaggagatcatggagaagtctggagaggagggcatgccagacctggcccacgtgatgaggatcctgtctgctgagaacatccccaacctgcccccaggcggcggcctggccggcaagagaaatgtgattgaagctgtgtacagccggctgaacccccaccgggagagtgatggccagaagtag

SEQ ID NO: 166218 - DNA, 984 bp, synthetic construct
  misc_feature 1..984: note = Description of Artificial Sequence: Synthetic coding sequence
  source 1..984: mol_type = other DNA
atgggcgccttcctggacaagcccaagacagagaagcacaatgcccacggggctggaaatggcctgcgctatggcctgagctccatgcagggctggagggtggagatggaggatgcccacacagctgtggtgggcatcccccacggcctggaggactggagcttctttgctgtgtatgatggccatgctggcagccgggtggccaactactgcagcacccacctgctggagcacatcaccaccaatgaagacttccgggccgccggcaagagcggcagcgccctggagctgtctgtggagaatgtgaagaatggcatcagaacaggcttcctgaagattgatgagtacatgaggaacttcagtgacctgagaaatggcatggacaggagcggcagcacagctgtgggcgtgatgatcagccccaagcacatctacttcatcaactgtggggacagcagagctgtgctgtacagaaatggccaggtgtgcttcagcacccaggaccacaagccctgcaacccccgggagaaggagcgcatccagaatgccggcggctctgtgatgatccagagggtgaatggcagcctggccgtgtcccgggccctgggggactatgactacaagtgtgtggatggcaagggccccacagagcagctggtgtccccagagcctgaggtgtatgagatcctgcgggcagaggaggatgagttcatcatcctggcctgtgatggcatctgggatgtgatgagcaatgaggagctgtgtgaatatgtgaagagccggctggaggtgtctgatgacctggagaatgtgtgcaactgggtggtggacacctgcctgcacaagggcagccgggacaacatgagcatcgtgctggtgtgcttcagcaatgcccccaaggtgtctgatgaagctgtgaagaaggacagcgagctggacaagcacctggagagccgggtggagggcaagaccaatgccttctag

SEQ ID NO: 166219 - DNA, 1137 bp, synthetic construct
  misc_feature 1..1137: note = Description of Artificial Sequence: Synthetic coding sequence
  source 1..1137: mol_type = other DNA
atgggcgccttcctggacaagcccaagacagagaagcacaatgcccacggggctggaaatggcctgcgctatggcctgagctccatgcagggctggagggtggagatggaggatgcccacacagctgtggtgggcatcccccacggcctggaggactggagcttctttgctgtgtatgatggccatgctggcagccgggtggccaactactgcagcacccacctgctggagcacatcaccaccaatgaagacttccgggccgccggcaagagcggcagcgccctggagctgtctgtggagaatgtgaagaatggcatcagaacaggcttcctgaagattgatgagtacatgaggaacttcagtgacctgagaaatggcatggacaggagcggcagcacagctgtgggcgtgatgatcagccccaagcacatctacttcatcaactgtggggacagcagagctgtgctgtacagaaatggccaggtgtgcttcagcacccaggaccacaagccctgcaacccccgggagaaggagcgcatccagaatgccggcggctctgtgatgatccagagggtgaatggcagcctggccgtgtcccgggccctgggggactatgactacaagtgtgtggatggcaagggccccacagagcagctggtgtccccagagcctgaggtgtatgagatcctgcgggcagaggaggatgagttcatcatcctggcctgtgatggcatctgggatgtgatgagcaatgaggagctgtgtgaatatgtgaagagccggctggaggtgtctgatgacctggagaatgtgtgcaactgggtggtggacacctgcctgcacaagggcagccgggacaacatgagcatcgtgctggtgtgcttcagcaatgcccccaaggtgtctgatgaagctgtgaagaaggacagcgagctggacaagcacctggagagccgggtggaggagatcatggagaagtctggagaggagggcatgccagacctggcccacgtgatgaggatcctgtctgctgagaacatccccaacctgcccccaggcggcggcctggccggcaagagaaatgtgattgaagctgtgtacagccggctgaacccccaccgggagagtgatggatag

SEQ ID NO: 166220 - DNA, 1518 bp, synthetic construct
  misc_feature 1..1518: note = Description of Artificial Sequence: Synthetic coding sequence
  source 1..1518: mol_type = other DNA
atgctgaacagagtgcgctctgctgtggcccacctggtgtcctctggaggagcccccccaccccggcccaagagcccagacctgcccaatgctgccagcgcccctcctgctgctgcccctgaggcccccaggagccccccagccaaggccggcagcggcagcgccaccccagccaaggctgtggaggcccgggccagcttcagccggcccaccttcctgcagctgagccctgggggcctgcggcgggcagatgaccatgctggccgggctgtgcagagccccccagacacaggaagaaggctgccctggagcacaggctacgccgaggtgatcaatgccggcaagagccgccacaatgaagaccaggcctgctgtgaggtggtgtatgtggagggcagaagatctgtgactggagtgccccgggagcccagccggggccagggcctgtgcttctactactggggcctgtttgatggccatgctgggggcggcgctgctgagatggccagccggctgctgcaccgccacatccgggagcagctgaaggacctggtggagatcctgcaggaccccagccccccacccctgtgcctgcccaccaccccaggcaccccagacagcagtgaccccagccacctgctgggcccccagagctgctggagcagccagaaggaggtgtcccatgagagcctggtggtgggcgctgtggagaatgccttccagctgatggatgagcagatggcccgggagcggcggggccaccaggtggagggcggctgctgtgccctggtggtgatctacctgctgggcaaggtgtatgtggccaatgctggggacagccgggccatcatcgtgagaaatggagagatcatccccatgagccgggagttcaccccagagacagagcggcagaggctgcagctgctgggcttcctgaagccagagctgctgggcagcgagttcacccacctggagttcccccggcgggtgctgcccaaggagctgggccagaggatgctgtacagagaccagaacatgacaggctgggcctacaagaagattgagctggaggacctgcgcttccccctggtgtgtggggagggcaagaaggcccgggtgatggccaccatcggcgtgacccggggcctgggggaccacagcctgaaggtgtgcagcagcaccctgcccatcaagcccttcctgagctgcttccctgaggtgcgggtgtatgacctgacccagtatgagcactgcccagatgatgtgctggtgctgggcacagatggcctgtgggatgtgaccacagactgtgaggtggccgccaccgtggacagagtgctgagcgcctatgagcccaatgaccacagccgctacacagccctggcccaggccctggtgctgggcgcccggggcaccccccgggaccggggctggaggctgcccaacaacaagctgggcagcggagatgacatctctgtgtttgtgatccccctgggcggccctggcagctacagctag

SEQ ID NO: 166221 - DNA, 900 bp, synthetic construct
  misc_feature 1..900: note = Description of Artificial Sequence: Synthetic coding sequence
  source 1..900: mol_type = other DNA
atggccagccggctgctgcaccgccacatccgggagcagctgaaggacctgaaggaggtgtcccatgagagcctggtggtgggcgctgtggagaatgccttccagctgatggatgagcagatggcccgggagcggcggggccaccaggtggagggcggctgctgtgccctggtggtgatctacctgctgggcaaggtgtatgtggccaatgctggggacagccgggccatcatcgtgagaaatggagagatcatccccatgagccgggagttcaccccagagacagagcggcagaggctgcagctgctgggcttcctgaagccagagctgctgggcagcgagttcacccacctggagttcccccggcgggtgctgcccaaggagctgggccagaggatgctgtacagagaccagaacatgacaggctgggcctacaagaagattgagctggaggacctgcgcttccccctggtgtgtggggagggcaagaaggcccgggtgatggccaccatcggcgtgacccggggcctgggggaccacagcctgaaggtgtgcagcagcaccctgcccatcaagcccttcctgagctgcttccctgaggtgcgggtgtatgacctgacccagtatgagcactgcccagatgatgtgctggtgctgggcacagatggcctgtgggatgtgaccacagactgtgaggtggccgccaccgtggacagagtgctgagcgcctatgagcccaatgaccacagccgctacacagccctggcccaggccctggtgctgggcgcccggggcaccccccgggaccggggctggaggctgcccaacaacaagctgggcagcggagatgacatctctgtgtttgtgatccccctgggcggccctggcagctacagctag

SEQ ID NO: 166222 - DNA, 1119 bp, synthetic construct
  misc_feature 1..1119: note = Description of Artificial Sequence: Synthetic coding sequence
  source 1..1119: mol_type = other DNA
atgagcacagctgccctgatcaccctggtgcgcagcggcggcaaccaggtgagaagaagagtgctgctgagcagccggctgctgcaggatgaccggcgggtgacccccacctgccacagcagcaccagcgagccccgctgcagcagatttgatcctgatggcagcggcagccctgccacctgggacaactttggcatctgggacaacagaattgatgagcccatcctgctgccccccagcatcaagtatggcaagcccatccccaagatcagcctggagaatgtgggctgtgccagccagatcggcaagaggaaagaaaatgaagatagatttgattttgcccagctgacagatgaggtgctgtactttgctgtgtatgatggccatggaggccctgctgctgctgacttctgccacacccacatggagaagtgcatcatggacctgctgcccaaggagaagaacctggagaccctgctgaccctggccttcctggagattgacaaggccttcagcagccacgcccggctgtctgcagatgccaccctgctgaccagcggcaccacagccaccgtggccctgctgagagatggcatcgagctggtggtggcctctgtgggggacagccgggccatcctgtgcaggaagggcaagcccatgaagctgaccatcgaccacaccccagagaggaaggatgagaaggagcgcatcaagaagtgtggcggctttgtggcctggaacagcctgggccagccccacgtgaatggccgcctggccatgaccaggagcatcggggacctggacctgaagaccagcggcgtgattgctgagcctgagaccaagaggatcaagctgcaccacgcagatgacagcttcctggtgctgaccacagatggcatcaacttcatggtgaacagccaggagatctgtgactttgtgaaccagtgccacgaccccaatgaggccgcccatgctgtgacagagcaggccatccagtatggaacagaggacaacagcacagctgtggtggtgccctttggagcctggggcaagtacaagaacagcgagatcaacttctccttcagccgcagctttgccagcagcggccgctgggcctag

SEQ ID NO: 166223 - DNA, 702 bp, synthetic construct
  misc_feature 1..702: note = Description of Artificial Sequence: Synthetic coding sequence
  source 1..702: mol_type = other DNA
atgagcacagctgccctgatcaccctggtgcgcagcggcggcaaccaggtgagaagaagagtgctgctgagcagccggctgctgcaggatgaccggcgggtgacccccacctgccacagcagcaccagcgagccccgctgcagcagatttgatcctgatggcagcggcagccctgccacctgggacaactttggcatctgggacaacagaattgatgagcccatcctgctgccccccagcatcaagtatggcaagcccatccccaagatcagcctggagaatgtgggctgtgccagccagatcggcaagaggaaagaaaatgaagatagatttgattttgcccagctgacagatgaggtgctgtactttgctgtgtatgatggccatggaggccctgctgctgctgacttctgccacacccacatggagaagtgcatcatggacctgctgcccaaggagaagaacctggagaccctgctgaccctggccttcctggagattgacaaggccttcagcagccacgcccggctgtctgcagatgagaactgtgcctggagcgctgccctggacctggagcctgtggacaccatctgtggggcctctgtggagcgggagatctgcctgatcctgagccaggtgaaggagagcagcggcagctacccaggcctgcgggagggcagccacatcagcctgagccactag

SEQ ID NO: 166224 - DNA, 702 bp, synthetic construct; identical to SEQ ID NO: 166223
  misc_feature 1..702: note = Description of Artificial Sequence: Synthetic coding sequence
  source 1..702: mol_type = other DNA

SEQ ID NO: 166225 - DNA, 585 bp, synthetic construct
  misc_feature 1..585: note = Description of Artificial Sequence: Synthetic coding sequence
  source 1..585: mol_type = other DNA
atgattgaggacaccatgaccctgctgagcctgctgggccgcatcatgagatacttcctgctgcggcctgagaccctcttcctgctgtgcatcagcctggccctgtggagctacttcttccacacagatgaggtgaagaccatcgtgaagagcagcagagatgctgtgaagatggtgaagggcaaggtggccgagatcatgcagaatgaccggctgggcggcctggatgtgctggaggccgagttcagcaagacctgggagttcaagaaccacaacgtggccgtgtacagcatccagggcagaagagaccacatggaggacagatttgaggtgctgacagacctggccaacaagacccaccccagcatcttcggcatctttgatggccacggcggggagacagctgctgaatatgtgaagagccggctgcctgaggccctgaagcagcacctgcaggactatgagaaggacaaggaaaattctgtgctgagctaccagaccatcctggagcagcagatcctgagcattgaccgggagatgctggagaagctgactgtgtcctatgatgaagctgtgaccttctag

SEQ ID NO: 166226 - DNA, 1083 bp, synthetic construct
  misc_feature 1..1083: note = Description of Artificial Sequence: Synthetic coding sequence
  source 1..1083: mol_type = other DNA
atgattgaggacaccatgaccctgctgagcctgctgggccgcatcatgagatacttcctgctgcggcctgagaccctcttcctgctgtgcatcagcctggccctgtggagctacttcttccacacagatgaggtgaagaccatcgtgaagagcagcagagatgctgtgaagatggtgaagggcaaggtggccgagatcatgcagaatgaccggctgggcggcctggatgtgctggaggccgagttcagcaagacctgggagttcaagaaccacaacgtggccgtgtacagcatccagggcagaagagaccacatggaggacagatttgaggtgctgacagacctggccaacaagacccaccccagcatcttcggcatctttgatggccacggcggggagacagctgctgaatatgtgaagagccggctgcctgaggccctgaagcagcacctgcaggactatgagaaggacaaggaaaattctgtgctgagctaccagaccatcctggagcagcagatcctgagcattgaccgggagatgctggagaagctgactgtgtcctatgatgaagctggcaccacctgcctgattgccctgctgagtgacaaggacctgactgtggccaacgtgggggacagcagaggagtgctgtgtgacaaggatggaaatgccatccccctgagccatgaccacaagccctaccagctgaaggagaggaagaggatcaagagagctgggggcttcatctccttcaacggctcctggagggtgcagggcatcctggccatgagccgcagcctgggggactaccccctgaagaacctgaatgtggtgatcccagaccctgacatcctgacctttgacctggacaagctgcagcctgagttcatgatcctggccagtgatggcctgtgggatgccttcagcaatgaggaggccgtgcgcttcatcaaggagcggctggatgagccccactttggagccaagagcatcgtgctgcagagcttctaccggggctgcccagacaacatcaccgtgatggtggtgaagttcaggaacagcagcaagacagaggagcagtag

SEQ ID NO: 166227 - DNA, 813 bp, synthetic construct
  misc_feature 1..813: note = Description of Artificial Sequence: Synthetic coding sequence
  source 1..813: mol_type = other DNA
atgcacctgaatggccgctgcatctgccccagcgacccccagtttgtggaggagaagggcatccgggcagaggacctggtgattggagccctggagagcgccttccaggagtgtgatgaagtcatcggccgggagctggaggccagcggccagatgggcggctgcacagccctggtggccgtgtccctgcagggcaagctgtacatggccaatgctggggacagccgggccatcctggtgagaagagatgagatccggcccctgagctttgagttcaccccagagacagagcggcagaggatccagcagctggcctttgtgtacccagagctgctggccggggagttcacccggctggagttcccccggcggctgaagggagatgacctgggccagaaggtgctcttccgggaccaccacatgagcggctggagctacaagagggtggagaagagtgacctgaagtaccccctcatccacggccagggccggcaggcccggctgctgggcaccctggccgtgtcccggggcctgggggaccaccagctgcgggtgctggacaccaacatccagctgaagcccttcctgctgtctgtgccccaggtgacagtgctggatgtggaccagctggagctgcaggaggatgatgtggtggtgatggccacagatggcctgtgggatgtgctgagcaatgagcaggtggcctggctggtgcgctccttcctgcccggcaaccaggaggacccccaccgctactgcagctgctggggccctgcctgggcctgggtgggcgccagcagcaagcccaagtag

SEQ ID NO: 166228 - DNA, 897 bp, synthetic construct
  misc_feature 1..897: note = Description of Artificial Sequence: Synthetic coding sequence
  source 1..897: mol_type = other DNA
atgcacctgaatggccgctgcatctgccccagcgacccccagtttgtggaggagaagggcatccgggcagaggacctggtgattggagccctggagagcgccttccaggagtgtgatgaagtcatcggccgggagctggaggccagcggccagatgggcggctgcacagccctggtggccgtgtccctgcagggcaagctgtacatggccaatgctggggacagccgggccatcctggtgagaagagatgagatccggcccctgagctttgagttcaccccagagacagagcggcagaggatccagcagctggcctttgtgtacccagagctgctggccggggagttcacccggctggagttcccccggcggctgaagggagatgacctgggccagaaggtgctcttccgggaccaccacatgagcggctggagctacaagagggtggagaagagtgacctgaagtaccccctcatccacggccagggccggcaggcccggctgctgggcaccctggccgtgtcccggggcctgggggaccaccagctgcgggtgctggacaccaacatccagctgaagcccttcctgctgtctgtgccccaggtgacagtgctggatgtggaccagctggagctgcaggaggatgatgtggtggtgatggccacagatggcctgtgggatgtgctgagcaatgagcaggtggcctggctggtgcgctccttcctgcccggcaaccaggaggacccccaccgcttcagcaagctggcccagatgctgatccacagcacccagggcaaggaggacagcctgacagaggagggccaggtgtcctatgatgatgtgtctgtgtttgtgatccccctgcacagccagggccaggagagcagtgaccactag

SEQ ID NO: 166229 - DNA, 744 bp, synthetic construct
  misc_feature 1..744: note = Description of Artificial Sequence: Synthetic coding sequence
  source 1..744: mol_type = other DNA
atgggcggctgcacagccctggtggccgtgtccctgcagggcaagctgtacatggccaatgctggggacagccgggccatcctggtgagaagagatgagatccggcccctgagctttgagttcaccccagagacagagcggcagaggatccagcagctggcctttgtgtacccagagctgctggccggggagttcacccggctggagttcccccggcggctgaagggagatgacctgggccagaaggtgctcttccgggaccaccacatgagcggctggagctacaagagggtggagaagagtgacctgaagtaccccctcatccacggccagggccggcaggcccggctgctgggcaccctggccgtgtcccggggcctgggggaccaccagctgcgggtgctggacaccaacatccagctgaagcccttcctgctgtctgtgccccaggtgacagtgctggatgtggaccagctggagctgcaggaggatgatgtggtggtgatggccacagatggcctgtgggatgtgctgagcaatgagcaggtggcctggctggtgcgctccttcctgcccggcaaccaggaggacccccaccgcttcagcaagctggcccagatgctgatccacagcacccagggcaaggaggacagcctgacagaggagggccaggtgtcctatgatgatgtgtctgtgtttgtgatccccctgcacagccagggccaggagagcagtgaccactag

SEQ ID NO: 166230 - DNA, 1380 bp, synthetic construct
  misc_feature 1..1380: note = Description of Artificial Sequence: Synthetic coding sequence
  source 1..1380: mol_type = other DNA
atgtctgctggctggttcagaagacgcttcctgcccggggagcccctgcctgcccccaggcctcctggcccccacgccagccctgtgccctaccgccggccccgcttcctgcggggcagcagcagcagccctggagctgctgatgccagcagaagaccagacagcaggcctgtgcgcagccctgcccggggccgcaccctgccctggaatgccggctacgccgagatcatcaatgctgagaagtctgagttcaatgaagaccaggccgcctgtgggaagctgtgcatcagaagatgtgaatttggagctgaggaggagtggctgaccctgtgcccagaggagttcctgaccggccactactgggccctgtttgatggccatggaggccctgctgctgccatcctggccgccaacaccctgcacagctgcctgcggcggcagctggaggccgtggtggagggcctggtggccacccagccccccatgcacctgaatggccgctgcatctgccccagcgacccccagtttgtggaggagaagggcatccgggcagaggacctggtgattggagccctggagagcgccttccaggagtgtgatgaggtgattggccgggagctggaggccagcggccagatgggcggctgcacagccctggtggccgtgtccctgcagggcaagctgtacatggccaatgctggggacagccgggccatcctggtgagaagagatgagatccggcccctgagctttgagttcaccccagagacagagcggcagaggatccagcagctggcctttgtgtacccagagctgctggccggggagttcacccggctggagttcccccggcggctgaagggagatgacctgggccagaaggtgctcttccgggaccaccacatgagcggctggagctacaagagggtggagaagagtgacctgaagtaccccctcatccacggccagggccggcaggcccggctgctgggcaccctggccgtgtcccggggcctgggggaccaccagctgcgggtgctggacaccaacatccagctgaagcccttcctgctgtctgtgccccaggtgacagtgctggatgtggaccagctggagctgcaggaggatgatgtggtggtgatggccacagatggcctgtgggatgtgctgagcaatgagcaggtggcctggctggtgcgctccttcctgcccggcaaccaggaggacccccaccgcttcagcaagctggcccagatgctgatccacagcacccagggcaaggaggacagcctgacagaggagggccaggtgtcctatgatgatgtgtctgtgtttgtgatccccctgcacagccagggccaggagagcagtgaccactag

SEQ ID NO: 166231 - DNA, 1821 bp, synthetic construct
  misc_feature 1..1821: note = Description of Artificial Sequence: Synthetic coding sequence
  source 1..1821: mol_type = other DNA
atgagaagaagtgaggtgctggccgaggagagcatcgtgtgcctgcagaaggccctgaaccacctgcgggagatctgggagctgattggcatccctgaggaccagaggctgcagaggacagaggtggtgaagaagcacatcaaggagctgctggacatgatgattgctgaggaggagagcctgaaggagcggctcatcaagagcatctctgtgtgccagaaggagctgaacaccctgtgcagcgagctgcacgtggagcccttccaggaggagggggagaccaccatcctgcagctggagaaggacctgcggacccaggtggagctgatgaggaagcagaagaaggagaggaagcaggagctgaagctgctgcaggagcaggaccaggagctgtgtgagatcctgtgcatgccccactatgacatcgacagcgcctctgtgcccagcctggaggagctgaaccagttccggcagcacgtgaccaccctgcgggagaccaaggccagccggcgggaggagtttgtgtccatcaagaggcagatcatcctgtgcatggaggccctggaccacaccccagacaccagctttgaaagagatgtggtgtgtgaagatgaagatgccttctgcctgagcctggagaacatcgccaccctgcagaagctgctgcggcagctggagatgcagaagagccagaatgaggccgtgtgtgagggcctgcggacccagatccgggagctgtgggaccggctgcagatccctgaggaggagcgggaggccgtggccaccatcatgagcggcagcaaggccaaggtgaggaaggccctgcagctggaggtggaccggctggaggagctgaagatgcagaacatgaagaaggtgattgaggccatccgggtggagctggtgcagtactgggaccagtgcttctacagccaggagcagaggcaggcctttgcccccttctgtgccgaggactacacagagagcctgctgcagctgcatgatgctgagatcgtgcggctgaagaactactatgaggtgcacaaggagctgtttgagggcgtgcagaagtgggaggagacctggaggctcttcctggagtttgagaggaaggccagtgaccccaaccgcttcaccaacagaggaggcaacctgctgaaggaggagaagcagagggccaagctgcagaagatgctgcccaagctggaggaggagctgaaggcccgcatcgagctgtgggagcaggagcacagcaaggccttcatggtgaatggccagaagttcatggagtatgtggccgagcagtgggagatgcaccggctggagaaggagcgggccaagcaggagcggcagctgaagaacaagaagcagacagaaacagagatgctgtatggcagcgcccccaggacccccagcaagaggcggggcctggcccccaacacccctgggaaggccaggaagctgaacaccaccaccatgagcaatgccacagccaacagcagcatccggcccatctttggaggcaccgtgtaccacagccctgtgtcccggctgcccccatctggcagcaagcctgtggccgccagcacctgcagcggcaagaagacccccaggacaggccgccacggggccaacaaggagaacctggagctgaatggcagcatcctgagcggcggctacccaggcagcgcccccctgcagaggaacttcagcatcaacagcgtggccagcacctacagcgagtttgcccgggagctgagcaaggccagcaagagtgatgccaccagcggcatcctgaacagcaccaacatccagagctag

SEQ ID NO: 166232 - DNA, 1701 bp, synthetic construct
  misc_feature 1..1701: note = Description of Artificial Sequence: Synthetic coding sequence
  source 1..1701: mol_type = other DNA
atgagaagaagtgaggtgctggccgaggagagcatcgtgtgcctgcagaaggccctgaaccacctgcgggagatctgggagctgattggcatccctgaggaccagaggctgcagaggacagaggtggtgaagaagcacatcaaggagctgctggacatgatgattgctgaggaggagagcctgaaggagcggctcatcaagagcatctctgtgtgccagaaggagctgaacaccctgtgcagcgagctgcacgtggagcccttccaggaggagggggagaccaccatcctgcagctggagaaggacctgcggacccaggtggagctgatgaggaagcagaagaaggagaggaagcaggagctgaagctgctgcaggagcaggaccaggagctgtgtgagatcctgtgcatgccccactatgacatcgacagcgcctctgtgcccagcctggaggagctgaaccagttccggcagcacgtgaccaccctgcgggagaccaaggccagccggcgggaggagtttgtgtccatcaagaggcagatcatcctgtgcatggaggccctggaccacaccccagacaccagctttgaaagagatgtggtgtgtgaagatgaagatgccttctgcctgagcctggagaacatcgccaccctgcagaagctgctgcggcagctggagatgcagaagagccagaatgaggccgtgtgtgagggcctgcggacccagatccgggagctgtgggaccggctgcagatccctgaggaggagcgggaggccgtggccaccatcatgagcggcagcaaggccaaggtgaggaaggccctgcagctggaggtggaccggctggaggagctgaagatgcagaacatgaagaaggtgattgaggccatccgggtggagctggtgcagtactgggaccagtgcttctacagccaggagcagaggcaggcctttgcccccttctgtgccgaggactacacagagagcctgctgcagctgcatgatgctgagatcgtgcggctgaagaactactatgaggtgcacaaggagctgtttgagggcgtgcagaagtgggaggagacctggaggctcttcctggagtttgagaggaaggccagtgaccccaaccgcttcaccaacagaggaggcaacctgctgaaggaggagaagcagagggccaagctgcagaagatgctgcccaagctggaggaggagctgaaggcccgcatcgagctgtgggagcaggagcacagcaaggccttcatggtgaatggccagaagttcatggagtatgtggccgagcagtgggagatgcaccggctggagaaggagcgggccaagcaggagcggcagctgaagaacaagaagcagacagaaacagagatgctgtatggcagcgcccccaggacccccagcaagaggcggggcctggcccccaacacccctgggaaggccaggaagctgaacaccaccaccatgagcaatgccacagccaacagcagcatccggcccatctttggaggcaccgtgtaccacagccctgtgtcccggctgcccccatctggcagcaagcctgtggccgccagcacctgcagcggcaagaagacccccaggacaggccgccacggggccaacaaggagaacctggagctgaatggcagcatcctgagcgcccggaccttcaagggcttccagatctag

SEQ ID NO: 166233 - DNA, 1863 bp, synthetic construct
  misc_feature 1..1863: note = Description of Artificial Sequence: Synthetic coding sequence
  source 1..1863: mol_type = other DNA
atgagaagaagtgaggtgctggccgaggagagcatcgtgtgcctgcagaaggccctgaaccacctgcgggagatctgggagctgattggcatccctgaggaccagaggctgcagaggacagaggtggtgaagaagcacatcaaggagctgctggacatgatgattgctgaggaggagagcctgaaggagcggctcatcaagagcatctctgtgtgccagaaggagctgaacaccctgtgcagcgagctgcacgtggagcccttccaggaggagggggagaccaccatcctgcagctggagaaggacctgcggacccaggtggagctgatgaggaagcagaagaaggagaggaagcaggagctgaagctgctgcaggagcaggaccaggagctgtgtgagatcctgtgcatgccccactatgacatcgacagcgcctctgtgcccagcctggaggagctgaaccagttccggcagcacgtgaccaccctgcgggagaccaaggccagccggcgggaggagtttgtgtccatcaagaggcagatcatcctgtgcatggaggccctggaccacaccccagacaccagctttgaaagagatgtggtgtgtgaagatgaagatgccttctgcctgagcctggagaacatcgccaccctgcagaagctgctgcggcagctggagatgcagaagagccagaatgaggccgtgtgtgagggcctgcggacccagatccgggagctgtgggaccggctgcagatccctgaggaggagcgggaggccgtggccaccatcatgagcggcagcaaggccaaggtgaggaaggccctgcagctggaggtggaccggctggaggagctgaagatgcagaacatgaagaaggtgattgaggccatccgggtggagctggtgcagtactgggaccagtgcttctacagccaggagcagaggcaggcctttgcccccttctgtgccgaggactacacagagagcctgctgcagctgcatgatgctgagatcgtgcggctgaagaactactatgaggtgcacaaggagctgtttgagggcgtgcagaagtgggaggagacctggaggctcttcctggagtttgagaggaaggccagtgaccccaaccgcttcaccaacagaggaggcaacctgctgaaggaggagaagcagagggccaagctgcagaagatgctgcccaagctggaggaggagctgaaggcccgcatcgagctgtgggagcaggagcacagcaaggccttcatggtgaatggccagaagttcatggagtatgtggccgagcagtgggagatgcaccggctggagaaggagcgggccaagcaggagcggcagctgaagaacaagaagcagacagaaacagagatgctgtatggcagcgcccccaggacccccagcaagaggcggggcctggcccccaacacccctgggaaggccaggaagctgaacaccaccaccatgagcaatgccacagccaacagcagcatccggcccatctttggaggcaccgtgtaccacagccctgtgtcccggctgcccccatctggcagcaagcctgtggccgccagcacctgcagcggcaagaagacccccaggacaggccgccacggggccaacaaggagaacctggagctgaatggcagcatcctgagcggcggctacccaggcagcgcccccctgcagaggaacttcagcatcaacagcgtggccagcacctacagcgagtttgccaaggaccccagcctgagtgacagcagcacagtgggcctgcagcgggagctgagcaaggccagcaagagtgatgccaccagcggcatcctgaacagcaccaacatccagagctag

SEQ ID NO: 166234 - DNA, 1578 bp, synthetic construct
  misc_feature 1..1578: note = Description of Artificial Sequence: Synthetic coding sequence
  source 1..1578: mol_type = other DNA
atgagaagaagtgaggtgctggccgaggagagcatcgtgtgcctgcagaaggccctgaaccacctgcgggagatctgggagctgattggcatccctgaggaccagaggctgcagaggacagaggtggtgaagaagcacatcaaggaggagggggagaccaccatcctgcagctggagaaggacctgcggacccaggtggagctgatgaggaagcagaagaaggagaggaagcaggagctgaagctgctgcaggagcaggaccaggagctgtgtgagatcctgtgcatgccccactatgacattgattctgcctctgtgcccagcctggaggagctgaaccagttccggcagcacgtgaccaccctgcgggagaccaaggccagcagaagagaggagtttgtgtccatcaagaggcagatcatcctgtgcatggaggccctggaccacaccccagacaccagctttgaaagagatgtggtgtgtgaagatgaagatgccttctgcctgagcctggagaacatcgccaccctgcagaagctgctgcggcagctggagatgcagaagagccagaatgaagctgtgtgtgagggcctgcggacccagatccgggagctgtgggaccggctgcagatccctgaggaggagcgggaggccgtggccaccatcatgagcggcagcaaggccaaggtgaggaaggccctgcagctggaggtggaccggctggaggagctgaagatgcagaacatgaagaaggtgattgaggccatccgggtggagctggtgcagtactgggaccagtgcttctacagccaggagcagaggcaggcctttgcccccttctgtgccgaggactacacagagagcctgctgcagctgcatgatgctgagatcgtgcggctgaagaactactatgaggtgcacaaggagctgtttgaaggagtgcagaagtgggaggagacctggaggctcttcctggagtttgagaggaaggccagtgaccccaaccgcttcaccaacagaggaggcaacctgctgaaggaggagaagcagagggccaagctgcagaagatgctgcccaagctggaggaggagctgaaggccagaattgagctgtgggagcaggagcacagcaaggccttcatggtgaatggccagaagttcatggagtatgtggccgagcagtgggagatgcaccggctggagaaggagcgggccaagcaggagcggcagctgaagaacaagaagcagacagaaacagagatgctgtatggcagcgcccccaggacccccagcaagagaagaggcctggcccccaacaccccaggcaaggccaggaagctgaacaccaccaccatgagcaatgccacagccaacagcagcatccggcccatctttggaggcaccgtgtaccacagccctgtgtcccggctgccccccagcggcagcaagcctgtggccgccagcacctgcagcggcaagaagacccccaggactggaagacatggagccaacaaggagaacctggagctgaatggcagcatcctgagcgcccggaccttcaagggcttccagatctag

SEQ ID NO: 166235 - DNA, 696 bp, synthetic construct
  misc_feature 1..696: note = Description of Artificial Sequence: Synthetic coding sequence
  source 1..696: mol_type = other DNA
atgagggtgctgggcggccgctgtggggccctgctggcctgcctgctgctggtgctgcctgtgtctgaggccaacttctgcctgtacttcagaaatgacttcatctacaacagagcctgcatctctgtgctggtgggcctgagcggctgcaacttcttctacagcatctgcttcctgagcaagcagcaggccagccaggtgctggtgaggaagaggcgggccaacagcctgctggaggagaccaagcagggcaacctggagagagaatgtattgaggagctgtgcaacaaggaggaggcccgggaggtgtttgaaaatgaccctgagacagactacttctaccccaagtacctggtgtgcctgcgctccttccagacaggcctcttcaccgctgcccggcagagcaccaatgcctacccagacctgcggagctgtgtgaatgccatcccagaccagtgcagccccctgccctgcaatgaagatggctacatgagctgcaaggatggcaaggccagcttcacctgcacctgcaagccaggctggcagggcgagaagtgtgaatttgacatcaatgaatgcaaggaccccagcaacatcaatggaggctgcagccagatctgtgacaacaccccaggcagctaccactgcagctgcaagaatggatttgtgatgctgagcaacaagaaggactgctag

SEQ ID NO: 166236 - DNA, 2031 bp, synthetic construct
  misc_feature 1..2031: note = Description of Artificial Sequence: Synthetic coding sequence
  source 1..2031: mol_type = other DNA
atgagggtgctgggcggccgctgtggggccctgctggcctgcctgctgctggtgctgcctgtgtctgaggccaacttcctgagcaagcagcaggccagccaggtgctggtgaggaagaggcgggccaacagcctgctggaggagaccaagcagggcaacctggagagagaatgtattgaggagctgtgcaacaaggaggaggcccgggaggtgtttgaaaatgaccctgagacagactacttctaccccaagtacctggtgtgcctgcgctccttccagacaggcctcttcaccgctgcccggcagagcaccaatgcctacccagacctgcggagctgtgtgaatgccatcccagaccagtgcagccccctgccctgcaatgaagatggctacatgagctgcaaggatggcaaggccagcttcacctgcacctgcaagccaggctggcagggcgagaagtgtgaatttgacatcaatgaatgcaaggaccccagcaacatcaatggaggctgcagccagatctgtgacaacaccccaggcagctaccactgcagctgcaagaatggatttgtgatgctgagcaacaagaaggactgcaaggatgtggatgagtgcagcctgaagcccagcatctgtggcacagctgtgtgcaagaacatccctggggactttgaatgtgaatgtcctgagggctaccgctacaacctgaagagcaagagctgtgaggacattgatgagtgcagcgagaacatgtgtgcccagctgtgtgtgaactacccaggcggctacacctgctactgtgatggcaagaagggcttcaagctggcccaggaccagaagagctgtgaggtggtgtctgtgtgcctgcccctgaacctggacaccaagtatgagctgctgtacctggccgagcagtttgctggggtggtgctgtacctgaagttccggctgcctgagatcagccgcttctctgctgagtttgacttccgcacctatgacagcgagggcgtcatcctgtatgcagagagcattgaccacagcgcctggctgctgattgccctgcggggcggcaagattgaggtgcagctgaagaatgagcacaccagcaagatcaccactggaggagatgtgatcaacaacggcctgtggaacatggtgtctgtggaggagctggagcacagcatcagcatcaagatcgccaaggaggccgtgatggacatcaacaagccaggccccctcttcaagccagaaaatggcctgctggagaccaaggtgtactttgctggcttccccaggaaggtggagagcgagctgatcaagcccatcaacccccggctggatggctgcatccgctcctggaacctgatgaagcagggcgccagcggcatcaaggagatcatccaggagaagcagaacaagcactgcctggtgacagtggagaagggcagctactacccaggcagcggcatcgcccagttccacatcgactacaacaacgtgagcagcgctgagggctggcacgtgaatgtgaccctgaacatccggcccagcacaggcaccggggtgatgctggccctggtgtctggcaacaacacagtgccctttgctgtgtccctggtggacagcaccagcgagaagagccaggacatcctgctgtctgtggagaacacagtcatctaccgcatccaggccctgagcctgtgcagcgaccagcagagccacctggagttccgggtgaacagaaacaacctggagctgagcacccccctgaagattgagaccatcagccatgaggacctgcagaggcagctggccgtgctggacaaggccatgaaggccaaggtggccacctacctgggcggcctgcctgatgtgcccttcagcgccacccctgtgaatgccttctacaacggctgcatggaggtgaacatcaatggagtgcagctggacctggatgaggccatcagcaagcacaatgacatccgggcccacagctgccccagcgtgtggaagaagaccaagaacagctag

SEQ ID NO: 166237 - DNA, 1275 bp, synthetic construct
  misc_feature 1..1275: note = Description of Artificial Sequence: Synthetic coding sequence
  source 1..1275: mol_type = other DNA
atgggctgcggcaccagcaaggtgctgcctgagccccccaaggatgtgcagctggacctggtgaagaaggtggagcccttcagcggcaccaagagtgatgtgtacaagcacttcatcacagaggtggacagcgtgggccctgtgaaggccggcttccctgctgccagccagtatgcccacccctgccccggccccccaacagctggccacacagagcccccatctgagcccccaagaagagcccgggtggccaagtaccgggccaagtttgacccccgggtgacagccaagtatgacatcaaggccctgattggccggggcagcttcagccgggtggtgcgggtggagcaccgggccacccggcagccctatgccatcaagatgattgagaccaagtaccgggagggccgggaggtgtgtgagagcgagctgcgggtgctgcggcgggtgagacatgccaacatcatccagctggtggaggtgtttgagacccaggagcgggtgtacatggtgatggagctggccaccggcggggagctgtttgaccgcatcatcgccaagggcagcttcacagaaagagatgccaccagggtgctgcagatggtgctggatggagtgcgctacctgcacgccctgggcatcacccaccgggacctgaagccagagaacctgctgtactaccaccctggaacagacagcaagatcatcatcacagactttggcctggccagcgccaggaagaagggagatgactgcctgatgaagaccacctgtggcaccccagagtacatcgcccctgaggtgctggtgaggaagccctacaccaacagcgtggacatgtgggccctgggcgtcatcgcctacatcctgctgagcggcaccatgccctttgaagatgacaacagaacccggctgtaccggcagatcctgcggggcaagtacagctacagcggggagccctggcccagcgtgagcaacctggccaaggacttcatcgaccggctgctgactgtggaccccggggccaggatgacagccctgcaggccctgcggcacccctgggtggtgtccatggccgccagcagctccatgaagaacctgcacaggagcatcagccagaacctgctgaagagggccagcagccgctgccagagcaccaagagcgcccagagcaccaggagcagccgcagcaccaggagcaacaagagccggcgggtgcgggagcgggagctgcgggagctgaacctgcgctaccagcagcagtacaatggatag

SEQ ID NO: 166238 - DNA, 1953 bp, synthetic construct
  misc_feature 1..1953: note = Description of Artificial Sequence: Synthetic coding sequence
  source 1..1953: mol_type = other DNA
atggcctgccgggagtttgagatgggcaggaagaagtgtgagcgctactggcccctgtatggagaggaccccatcacctttgcccccttcaagatcagctgtgaagatgagcaggccaggacagactacttcatccgcaccctgctgctggagttccagaatgaaagcagaagactctaccagttccactacgtgaactggccagaccatgatgtgcccagcagctttgacagcatcctggacatgatcagcctgatgaggaagtaccaggagcatgaagatgtgcccatctgcatccactgcagcgctggctgcggccgcactggagccatctgtgccatcgactacacctggaacctgctgaaggccggcaagatccctgaggagttcaacgtgttcaacctgatccaggagatgaggacccagaggcacagcgctgtgcagaccaaggagcagtatgagctggtgcaccgggccatcgcccagctgtttgagaagcagctgcagctgtatgagatccacggggcccagaagattgctgatggagtgaatgagatcaacacagagaacatggtgagcagcattgagcctgagaagcaggacagccccccacccaagccacccaggaccaggagctgcctggtggagggagatgccaaggaggagatcctgcagcccccagagccccaccctgtgccccccatcctgacccccagcccccccagcgccttccccaccgtgaccaccgtgtggcaggacaatgaccgctaccaccccaagcctgtgctgcacatggtgagcagcgagcagcacagcgctgacctgaacagaaactacagcaagagcacagagctgcccgggaagaatgaaagcaccatcgagcagattgacaagaagctggagaggaacctgagctttgagatcaagaaggtgcccctgcaggagggccccaagagctttgatggcaacaccctgctgaacagaggccacgccatcaagatcaagagcgccagcccctgcatcgctgacaagatcagcaagccccaggagctgagcagtgacctgaatgtgggggacaccagccagaacagctgtgtggactgcagcgtgacccagagcaacaaggtgtctgtgaccccacctgaggagagccagaacagcgacaccccacccaggccagaccggctgcccctggatgagaagggccacgtgacctggagcttccacggcccagaaaatgccatccccatcccagacctgtctgagggcaacagcagtgacatcaactaccagaccaggaagacagtgtccctgacccccagccccaccacccaggtggagaccccagacctggtggaccatgacaacaccagccccctcttccgcacccccctgtccttcaccaaccccctgcacagtgatgacagcgacagtgatgaaagaaacagtgatggagctgtgacccagaacaagaccaacatcagcacagccagcgccaccgtgtctgctgccaccagcacagagagcatcagcaccaggaaggtgctgcccatgagcatcgcccggcacaacattgctggcaccacccacagcggggctgagaaggatgtggatgtgtctgaggacagccccccacccctgcctgagaggaccccagagagctttgtgctggccagcgagcacaacacccctgtgcgctctgagtggagcgagctgcagagccaggagaggtctgagcagaagaagtctgagggcctcatcaccagtgaaaatgaaaaatgtgaccaccctgctgggggcatccactatgagatgtgcatcgagtgcccccccaccttcagtgacaagcgggagcagatcagcgagaaccccacagaggccacagacatcggcttcggcaacagatgtgggaagcccaagggcccccgggaccccccatctgagtggacctag

SEQ ID NO: 166239 - DNA, 1062 bp, synthetic construct
  misc_feature 1..1062: note = Description of Artificial Sequence: Synthetic coding sequence
  source 1..1062: mol_type = other DNA
atgagccgcagcctggacagcgcccggagcttcctggagcggctggaggcccggggcggccgggagggcgctgtgctggccggggagttcagcaagagatgtgagcgctactgggcccaggagcaggagcccctgcagacaggcctcttctgcatcaccctcatcaaggagaagtggctgaatgaagacatcatgctgcggaccctgaaggtgaccttccagaaggagagccgctctgtgtaccagctgcagtacatgtcctggccagaccggggcgtgcccagcagcccagaccacatgctggccatggtggaggaggcccggcggctgcagggcagcggccctgagcccctgtgtgtgcactgcagcgctggctgcggccgcactggagtgctgtgcaccgtggactatgtgcggcagctgctgctgacccagatgatccccccagacttcagcctgtttgatgtggtgctgaagatgaggaagcagaggcctgctgctgtgcagacagaggagcagtaccgcttcctgtaccacacagtggcccagatgttctgcagcaccctgcagaatgccagcccccactaccagaacatcaaggagaactgtgcccccctgtatgatgatgccctcttcctgcggaccccccaggccctgctggccatccccaggcctcctgggggcgtgctgcggagcatctctgtgcccggcagccctggccacgccatggctgacacctatgctgtggtgcagaagagaggagccccagctggagctggcagcggcacccagacaggaactggaactggaactggagcccggtctgctgaggaggcccccctgtacagcaaggtgaccccccgggcccagaggcctggggcccacgcagaagatgcccggggcaccctgcccggccgggtgcctgctgaccagagccctgctggcagcggggcctatgaagatgtggccggcggggcccagacaggaggcctgggcttcaacctgagaattggccggcccaagggcccccgggaccccccagctgagtggaccagggtgtag

SEQ ID NO: 166240 - DNA, 1233 bp, synthetic construct
  misc_feature 1..1233: note = Description of Artificial Sequence: Synthetic coding sequence
  source 1..1233: mol_type = other DNA
atgcccaccaccatcgagcgggagtttgaggagctggacacccagaggcgctggcagcccctgtacctggagatcagaaatgaaagccatgactacccccaccgggtggccaagttcccagaaaatagaaacagaaaccgctacagagatgtgagcccctatgaccacagccgggtgaagctgcagaatgcagaaaatgactacatcaatgccagcctggtggacatcgaggaggcccagaggagctacatcctgacccagggccccctgcccaacacctgctgccacttctggctgatggtgtggcagcagaagaccaaggctgtggtgatgctgaacagaattgtggagaaggagagcgtgaagtgtgcccagtactggcccacagatgaccaggagatgctgttcaaggagaccggcttctctgtgaagctgctgtctgaagatgtgaagagctactacacagtgcacctgctgcagctggagaacatcaactacatcgagaacctgtggatcaccctgtacctgaagctgctgatgctggatgtgaagaggagcctgaagtctggagagaccaggaccatcagccacttccactacaccacctggccagactttggagtgcctgagagccctgccagcttcctgaacttcctgttcaaggtgcgggagagcggcagcctgaacccagaccacggccctgctgtgatccactgcagcgctggcatcggccgcagcggcaccttcagcctggtggacacctgcctggtgctgatggagaagggagatgacatcaacatcaagcaggtgctgctgaacatgaggaagtacaggatgggcctcatccagaccccagaccagctgcgcttctcctacatggccatcatcgagggcgccaagtgcatcaagggggacagcagcatccagaagcgctggaaggagctgagcaaggaggacctgagccctgcctttgaccacagccccaacaagatcatgacagagaagtacaatggaaacagaattggcctggaggaggagaagctgactggagaccgctgcaccggcctgagcagcaagatgcaggacaccatggaggagaacagcgagagcgccctgaggaagaggatccgggaggacaggaaggccaccacagcccagaaggtgcagcagatgaagcagaggctgaatgaaaatgaaaggaagaggaagaggccccggctgacagacacctag

SEQ ID NO: 166241 - DNA, 2259 bp, synthetic construct
  misc_feature 1..2259: note = Description of Artificial Sequence: Synthetic coding sequence
  source 1..2259: mol_type = other DNA
atggaccagcgggagatcctgcagaagttcctggatgaggcccagagcaagaagatcaccaaggaggagtttgccaatgagttcctgaagctgaagaggcagagcaccaagtacaaggctgacaagacctaccccaccaccgtggccgagaagcccaagaacatcaagaagaaccgctacaaggacatcctgccctatgactacagccgggtggagctgagcctcatcaccagtgatgaggacagcagctacatcaatgccaacttcatcaagggcgtgtatggccccaaggcctacatcgccacccagggccccctgagcaccaccctgctggacttctggaggatgatctgggagtacagcgtgctgatcatcgtgatggcctgcatggagtatgagatgggcaagaagaagtgtgagcgctactgggccgagcccggggagatgcagctggagtttggccccttctctgtgtcctgtgaggccgagaagaggaagagtgactacatcatccgcaccctgaaggtgaagttcaacagcgagaccaggaccatctaccagttccactacaagaactggccagaccatgatgtgcccagcagcattgaccccatcctggagctgatctgggatgtgcgctgctaccaggaggatgacagcgtgcccatctgcatccactgcagcgctggctgcggccgcactggagtcatctgtgccatcgactacacctggatgctgctgaaggatggcagccaggccaagcactgcatccctgagaagaaccacaccctgcaggccgacagctacagccccaacctgcccaagagcaccaccaaggccgccaagatgatgaaccagcagaggaccaagatggagatcaaggagagcagcagctttgacttccgcaccagcgagatcagcgccaaggaggagctggtgctgcacccagccaagagcagcaccagctttgacttcctggagctgaactacagctttgacaagaatgctgacaccaccatgaagtggcagaccaaggccttccccatcgtgggggagcccctgcagaagcaccagagcctggacctgggcagcctgctgtttgagggctgcagcaacagcaagcctgtgaatgctgctggccgctacttcaacagcaaggtgcccatcaccaggaccaagagcaccccatttgagctgatccagcagcgggagaccaaggaggtggacagcaaggagaacttctcctacctggagagccagccccatgacagctgctttgtggagatgcaggcccagaaggtgatgcacgtgtcctctgctgagctgaactacagcctgccctatgacagcaagcaccagatcagaaatgccagcaatgtgaagcaccacgacagcagcgccctgggcgtgtacagctacatccccctggtggagaacccctacttcagctcctggccacccagcggcaccagcagcaagatgagcctggacctgcctgagaagcaggacggcaccgtcttccccagcagcctgctgcccaccagcagcaccagcctcttctcctactacaacagccatgacagcctgagcctgaacagccccaccaacatcagcagcctgctgaaccaggagagcgctgtgctggccacagcccccagaattgatgatgagatccccccacccctgcctgtgtggaccccagagagcttcatcgtggtggaggaggccggggagttcagccccaacgtgcccaagagcctgagcagcgctgtgaaggtgaagattggcaccagcctggagtggggcggcaccagcgagcccaagaagtttgatgattctgtcatcctgcggcccagcaagtctgtgaagctgcggagccccaagtctgagctgcaccaggacaggagcagccccccaccacccctgcctgagaggaccctggagagcttcttcctggctgatgaggactgcatgcaggcccagagcattgagacctacagcaccagctacccagacaccatggagaacagcaccagcagcaagcagaccctgaagaccccaggcaagagcttcaccaggagcaagagcctgaagatcctgaggaacatgaagaagagcatctgcaacagctgcccccccaacaagccagctgagagcgtgcagagcaacaacagcagcagcttcctgaactttggatttgccaaccgcttcagcaagcccaagggccccaggaaccccccacccacctggaacatctag

SEQ ID NO: 166242 - DNA, 5724 bp, synthetic construct
  misc_feature 1..5724: note = Description of Artificial Sequence: Synthetic coding sequence
  source 1..5724: mol_type = other DNA
atgctgagccacggggccggcctggccctgtggatcaccctgagcctgctgcagacaggcctggccgagcctgagcgctgcaacttcaccctggccgagagcaaggccagcagccacagcgtgtccatccagtggaggatcctgggcagcccctgcaacttcagcctcatctacagcagtgacaccctgggcgccgccctgtgccccaccttcagaattgacaacaccacctacggctgcaacctgcaggacctgcaggccggcaccatctacaacttccgcatcatcagcctggatgaggagaggacagtggtgctgcagacagaccccctgcccccagcccgcttcggcgtgtccaaggagaagaccaccagcaccagcctgcacgtgtggtggacccccagcagcggcaaggtgaccagctatgaggtgcagctgtttgatgagaacaaccagaagatccagggcgtgcagatccaggagagcacctcctggaatgagtacaccttcttcaacctgacagctggcagcaagtacaacatcgccatcacagctgtgtctgggggcaagaggagcttctctgtgtacaccaacggcagcacagtgcccagccctgtgaaggacatcggcatcagcaccaaggccaacagcctgctgatctcctggagccacggcagcggaaatgtggagcgctaccgcctgatgctgatggacaagggcatcctggtgcacggcggcgtggtggacaagcacgccaccagctatgccttccacggcctgaccccaggctacctgtacaacctgactgtgatgacagaggccgccggcctgcagaactaccgctggaagctggtgaggacagcccccatggaggtgagcaacctgaaggtgaccaatgatggcagcctgaccagcctgaaggtgaagtggcagaggcctcctggaaatgtggacagctacaacatcaccctgagccacaagggcaccatcaaggagagccgggtgctggccccctggatcacagagacccacttcaaggagctggtgcccggccgcctgtaccaggtgacagtgtcctgtgtgtctggagagctgagcgcccagaagatggctgtgggccgcaccttcccagacaaggtggccaacctggaggccaacaacaacggccgcatgaggagcctggtggtgtcctggagccccccagctggggactgggagcagtaccgcatcctgctcttcaatgacagcgtggtgctgctgaacatcaccgtgggcaaggaggagacccagtatgtgatggatgacaccggcctggtgcccggccggcagtatgaggtggaggtgattgtggagagcggcaacctgaagaacagcgagcgctgccagggccgcacagtgcccctggccgtgctgcagctgcgggtgaagcacgccaatgagaccagcctgagcatcatgtggcagacccctgtggccgagtgggagaagtacatcatcagcctggccgaccgggacctgctgctgatccacaagagcctgagcaaggatgccaaggagttcaccttcacagacctggtgcccggcaggaagtacatggccaccgtgaccagcatcagcggggacctgaagaacagcagctctgtgaagggccgcacagtgcctgcccaggtgacagacctgcacgtggccaaccagggcatgaccagcagcctcttcaccaactggacccaggcccagggagatgtggagttctaccaggtgctgctgattcatgaaaatgtggtgatcaagaatgaaagcatcagcagcgagaccagccgctacagcttccacagcctgaagagcggcagcctgtacagcgtggtggtgaccaccgtgtctgggggcatcagcagccggcaggtggtggtggagggccgcacagtgcccagctctgtgtctggagtgacagtgaacaacagcggcagaaatgactacctgtctgtgtcctggctgctggcccctggagatgtggacaactatgaggtgaccctgagccatgatggcaaggtggtgcagagcctggtgattgccaagtctgtgcgggagtgcagcttcagcagcctgaccccaggccgcctgtacacagtgaccatcaccaccaggtctgggaagtatgagaaccacagcttcagccaggagaggacagtgcctgacaaggtgcagggcgtgtctgtgagcaacagcgcccggagtgactacctgcgggtgtcctgggtgcacgccaccggggactttgaccactatgaggtgaccatcaagaacaagaacaacttcatccagaccaagagcatccccaagtcagaaaatgaatgtgtgtttgtgcagctggtgcccggccgcctgtacagcgtgacagtgaccaccaagagcggccagtatgaggccaatgagcagggcaatggccgcaccatccctgagcctgtgaaggacctgaccctgaggaacagaagcacagaggacctgcacgtgacctggagcggggccaatggagatgtggaccagtatgagatccagctgctcttcaatgacatgaaggtgttcccccccttccacctggtgaacacagccacagagtaccgcttcaccagcctgaccccaggccggcagtacaagatcctggtgctgaccatctctggagatgtgcagcagagcgccttcatcgagggcttcaccgtgcccagcgctgtgaagaacatccacatcagccccaacggggccacagacagcctgactgtgaactggaccccaggaggaggagatgtggacagctacacagtgtctgccttccgccacagccagaaggtggacagccagaccatccccaagcacgtgtttgagcacaccttccaccggctggaggccggggagcagtaccagatcatgattgcctctgtgtctggcagcctgaagaaccagatcaacgtggtgggccgcacagtgcctgctgctgtgacagacctgcgcatcacagagaacagcaccaggcacctgtccttccgctggacagccagcgagggggagctgtcctggtacaacatcttcctgtacaacccagatggcaacctgcaggagcgggcccaggtggaccccctggtgcagagcttctccttccagaacctgctgcagggccgcatgtacaagatggtgattgtgacccacagcggggagctgagcaatgaaagcttcatcttcggccgcacagtgcctgcctctgtgagccacctgcggggcagcaacagaaacaccacagacagcctgtggttcaactggagccctgccagcggggactttgacttctatgagctgatcctgtacaaccccaacggcaccaagaaggagaactggaaggacaaggacctgacagagtggaggttccagggcctggtgcccggcaggaaatatgtgctgtgggtggtgacccacagcggggacctgagcaacaaggtgacagctgagagcaggacagcccccagcccccccagcctgatgagctttgctgacatcgccaacaccagcctggccatcacctggaagggccccccagactggacagactacaatgactttgagctgcagtggctgcccagagatgccctgaccgtcttcaacccctacaacaacaggaagtctgagggccgcatcgtgtatggcctgcggcccggccgcagctaccagttcaacgtgaagacagtgtctggggacagctggaagacctacagcaagcccatcttcggctctgtgaggaccaagccagacaagatccagaacctgcactgccggccccagaacagcacagccatcgcctgctcctggatccccccagacagcgactttgatggctacagcattgagtgcaggaagatggacacccaggaggtggagttcagcaggaagctggagaaggagaagagcctgctgaacatcatgatgctggtgccccacaagcgctacctggtgtccatcaaggtgcagagcgctggcatgaccagcgaggtggtggaggacagcaccatcaccatgattgaccggcccccacctcctccaccccacatccgggtgaatgagaaggatgtgctgatcagcaagagcagcatcaacttcaccgtgaactgctcctggttcagtgacaccaacggggctgtgaagtacttcaccgtggtggtgcgggaggctgatggcagtgatgagctgaagccagagcagcagcaccccctgcccagctacctggagtaccgccacaatgccagcatccgggtgtaccagaccaactactttgccagcaaatgtgccgagaaccccaacagcaacagcaagagcttcaacatcaagctgggcgctgagatggagagcctgggcggcaaatgtgaccccacccagcagaagttctgtgatggccccctgaagccccacacagcctaccgcatcagcatccgggccttcacccagctgtttgatgaggacctgaaggagttcaccaagcccctgtacagcgacaccttcttcagcctgcccatcaccacagaaagtgagcccctgtttggagccatcgagggcgtgtctgctggcctcttcctgattggcatgctggtggccgtggtggccctgctgatctgccggcagaaggtgagccacggccgggagcggcccagcgcccggctgagcatccggcgggaccggcccctgtctgtgcacctgaacctgggccagaagggcaacaggaagaccagctgccccatcaagatcaaccagtttgagggccacttcatgaagctgcaggccgacagcaactacctgctgagcaaggagtatgaggagctgaaggatgtgggcaggaaccagagctgtgacatcgccctgctgcctgagaacagaggcaagaaccgctacaacaacatcctgccctatgatgccaccagggtgaagctgagcaatgtggatgatgacccctgcagcgactacatcaatgccagctacatccctggcaacaacttcagaagagagtacatcgtgacccagggccccctgcccggcaccaaggatgacttctggaagatggtgtgggagcagaatgtgcacaacatcgtgatggtgacccagtgtgtggagaagggccgggtgaagtgtgaccactactggccagctgaccaggacagcctgtactatggagacctgatcctgcagatgctgtctgagagcgtgctgcctgagtggaccatccgggagttcaagatctgtggggaggagcagctggatgcccacaggctcatccgccacttccactacacagtgtggccagaccatggagtgcctgagaccacccagagcctcatccagtttgtgaggacagtgcgggactacatcaacagaagccctggagctggccccaccgtggtgcactgcagcgctggggtgggccgcacaggcaccttcatcgccctggaccgcatcctgcagcagctggacagcaaggacagcgtggacatctatggagctgtgcatgacctgcggctgcaccgggtgcacatggtgcagacagagtgccagtatgtgtacctgcaccagtgtgtgagagatgtgctgcgggccaggaagctgcggtctgagcaggagaaccccctcttccccatctatgaaaatgtgaaccctgagtaccaccgggaccctgtgtacagccgccactag

SEQ ID NO: 166243 - DNA, 4518 bp, synthetic construct
  misc_feature 1..4518: note = Description of Artificial Sequence: Synthetic coding sequence
  source 1..4518: mol_type = other DNA
atggtgcacgtggcccggctgctgctgctgctgctgaccttcttcctgaggacagatgctgagaccccaccccgcttcaccaggacccctgtggaccagacaggagtgtctggaggagtggccagcttcatctgccaggccaccggggacccccggcccaagatcgtgtggaacaagaagggcaagaaggtgagcaaccagagatttgaagtcatcgagtttgatgatggcagcggctctgtgctgcgcatccagcccctgcggaccccaagagatgaggccatctatgaatgtgtggccagcaacaacgtgggggagatctctgtgtccacccggctgactgtgctgcgggaggaccagatcccccggggcttccccaccatcgacatgggcccccagctgaaggtggtggagaggaccaggacagccaccatgctgtgtgccgccagcggcaacccagaccctgagatcacctggttcaaggacttcctgcctgtggacaccagcaacaacaacggccgcatcaagcagctgcggtctgagagcattggagccctgcagatcgagcagagcgaggagagtgaccagggcaagtatgaatgtgtggccaccaacagcgctggcacccgctacagcgccccagccaacctgtatgtgcgggtgcggcgggtgcccccacgcttcagcatcccccccaccaaccacgagatcatgcctgggggctctgtgaacatcacctgtgtggccgtgggcagccccatgccctacgtgaagtggatgctgggcgctgaggacctgaccccagaagatgacatgcccatcggcagaaatgtgctggagctgaatgatgtgcggcagagcgccaactacacctgtgtggccatgagcaccctgggcgtgattgaggccatcgcccagatcaccgtgaaggccctgcccaagcccccaggcacccctgtggtgacagagagcacagccaccagcatcaccctgacctgggacagcggcaaccctgagcctgtgtcctactacatcatccagcacaagcccaagaacagcgaggagctgtacaaggagattgatggagtggccaccacccgctacagcgtggccggcctgagcccctacagcgactatgagttccgggtggtggccgtgaacaacatcggccggggccccccatctgagcctgtgctgacccagaccagcgagcaggcccccagcagcgcccccagagatgtgcaggccaggatgctgagcagcaccaccatcctggtgcagtggaaggagcctgaggagcccaacggccagatccagggctacagagtgtactacaccatggaccccacccagcacgtgaacaactggatgaagcacaacgtggccgacagccagatcaccaccatcggcaacctggtgccccagaagacctacagcgtgaaggtgctggccttcaccagcattggagatggccccctgagcagtgacatccaggtgatcacccagacaggagtgcccggccagcccctgaacttcaaggccgagcctgagagcgagaccagcatcctgctgtcctggaccccacccaggagtgacaccatcgccaactatgagctggtgtacaaggatggagagcacggggaggagcagaggatcaccatcgagcccggcaccagctaccgcctgcagggcctgaagcccaacagcctgtactacttccggctggccgcccggagcccccagggcctgggcgccagcacagctgagatcagcgcccggaccatgcagagcatgtttgccaagaacttccacgtgaaggctgtgatgaagacctctgtgctgctgtcctgggagatccctgagaactacaacagcgccatgcccttcaagatcctgtatgatgatggcaagatggtggaggaggtggatggccgggccacccagaagctgattgtgaacctgaagccagagaagagctacagctttgtgctgaccaacagaggcaacagcgctgggggcctgcagcaccgggtgacagccaagacagccccagatgtgctgcggaccaagccagccttcatcggcaagaccaacctggatggcatgatcaccgtgcagctgcctgaggtgcctgccaatgaaaacatcaagggctactacatcatcatcgtgcccctgaagaagagccggggcaagttcatcaagccctgggagagcccagatgagatggagctggatgagctgctgaaggagatcagcaggaagaggaggagcatccgctatggccgggaggtggagctgaagccctacatcgccgcccactttgatgtgctgcccacagagttcaccctgggagatgacaagcactacggcggcttcaccaacaagcagctgcagagcggccaggagtatgtgttctttgtgctggccgtgatggagcacgccgagagcaagatgtatgccaccagcccctacagcgaccctgtggtgtccatggacctggacccccagcccatcacagatgaggaggagggcctcatctgggtggtgggccctgtgctggccgtggtgttcatcatctgcatcgtcatcgccatcctgctgtacaagaggaagagagctgagagtgacagcaggaagagcagcatccccaacaacaaggagatccccagccaccaccccacagatcctgtggagctgcggcggctgaacttccagaccccaggcagtgatgattctggctacccaggcaacctgcacagcagctccatggccagccacccccccatccccatcctggagctggccgaccacatcgagcggctgaaggccaatgacaacctgaagttcagccaggagtatgagagcattgatcctggccagcagttcacctgggagcacagcaacctggaggtgaacaagcccaagaacagatatgccaacgtgattgcctatgaccacagccgggtgctgctgagcgccatcgagggcatccctggcagtgactatgtgaatgccaactacattgatggctacaggaagcagaatgcctacatcgccacccagggcagcctgcctgagacctttggagacttctggaggatgatctgggagcagaggtctgccaccgtggtgatgatgaccaagctggaggagaggagccgggtgaagtgtgaccagtactggcccagccggggcacagagacccacggcctggtgcaggtgaccctgctggacacagtggagctggccacctactgtgtgaggacctttgccctgtacaagaatggcagcagcgagaagcgggaggtgcggcagttccagttcaccgcctggccagaccatggagtgcctgagcaccccacccccttcctggccttcctgcggcgggtgaagacctgcaaccccccagatgctggccccatggtggtgcactgcagcgctggggtgggccgcacaggctgcttcatcgtgattgatgccatgctggagcgcatcaagcatgagaagacagtggacatctacggccacgtgaccctgatgagggcccagaggaactacatggtgcagacagaggaccagtacatcttcatccatgatgccctgctggaggccgtgacctgtggcaacacagaggtgcctgccaggaacctgtatgcctacatccagaagctgacccagatcgagaccggggagaatgtgacaggcatggagctggagttcaagaggctggccagcagcaaggcccacaccagccgcttcatcagcgccaacctgccctgcaacaagttcaagaaccggctggtgaacatcatgccctatgagagcaccagggtgtgcctgcagcccatccggggcgtggagggcagtgactacatcaatgccagcttcattgatggctaccggcagcagaaggcctacatcgccacccagggccccctggccgagaccacagaggacttctggaggatgctgtgggagcacaacagcaccatcgtggtgatgctgaccaagctgcgggagatgggccgggagaagtgccaccagtactggccagctgagaggtctgcccgctaccagtactttgtggtggaccccatggccgagtacaacatgccccagtacatcctgcgggagttcaaggtgacagatgccagagatggccagagcaggacagtgcggcagttccagttcacagactggccagagcagggcgtgcccaagtctggagagggcttcatcgacttcatcggccaggtgcacaagaccaaggagcagtttggccaggacggccccatctctgtgcactgcagcgctggggtgggccgcactggagtcttcatcaccctgagcatcgtgctggagaggatgagatatgaaggagtggtggacatcttccagacagtgaagatgctgcggacccagaggcctgccatggtgcagacagaggaccagtaccagttctcctaccgggccgccctggagtacctgggcagctttgaccactacgccacctag

SEQ ID NO: 166244 - DNA, 4398 bp, synthetic construct
  misc_feature 1..4398: note = Description of Artificial Sequence: Synthetic coding sequence
  source 1..4398: mol_type = other DNA
atgaggggcctgggcacctgcctggccaccctggccggcctgctgctgacagctgctggggagaccttcagcggcggctgcctgtttgatgagccctacagcacctgtggctacagccagagtgaaggagatgacttcaactgggagcaggtgaacaccctgaccaagcccaccagtgacccctggatgcccagcggcagcttcatgctggtgaatgccagcggccggcctgagggccagagggcccacctgctgctgccccagctgaaggaaaatgacacccactgcatcgacttccactactttgtgagcagcaagagcaacagccccccaggcctgctgaatgtgtatgtgaaggtgaacaacggccccctgggcaaccccatctggaacatcagcggggaccccaccaggacctggaacagagctgagctggccatcagcaccttctggcccaacttctaccaggtgatctttgaagtcatcaccagcggccaccagggctacctggccattgatgaggtgaaggtgctgggccacccctgcaccaggaccccccacttcctgcgcatccagaatgtggaggtgaatgccggccagtttgccaccttccagtgcagcgccatcggccgcacagtggccggggaccggctgtggctgcagggcattgatgtgagagatgcccccctgaaggagatcaaggtgaccagcagccgccgcttcatcgccagcttcaacgtggtgaacaccaccaagagagatgctgggaagtaccgctgcatgatcagaacagagggcggcgtgggcatcagcaactatgcagagctggtggtgaaggagccccctgtgcccatcgccccaccccagctggcctctgtgggcgccacctacctgtggatccagctgaatgccaacagcatcaatggagatggccccatcgtggcccgggaggtggagtactgcacagccagcggctcctggaatgaccggcagcctgtggacagcaccagctacaagattggccacctggaccctgacacagaatatgagatctctgtgctgctgaccaggcctggagagggcggcaccggcagccctggccctgccctgcggaccaggaccaagtgtgccgaccccatgaggggccccaggaagctggaggtggtggaggtgaagagccggcagatcaccatccgctgggagcccttcggctacaacgtgacccgctgccacagctacaacctgactgtgcactactgctaccaggtgggcggccaggagcaggtgcgggaggaggtgtcctgggacacagagaacagccacccccagcacaccatcaccaacctgagcccctacaccaacgtgtctgtgaagctgatcctgatgaaccctgagggcaggaaggagagccaggagctgattgtgcagacagatgaggacctgcccggggctgtgcccacagagagcatccagggcagcacctttgaggagaagatcttcctgcagtggagggagcccacccagacctacggcgtcatcaccctgtatgagatcacctacaaggctgtgtcctcctttgatcctgagattgacctgagcaaccagagcggccgggtgtccaagctgggcaatgagacccacttcctgttcttcggcctgtacccaggcaccacctacagcttcaccatccgggccagcacagccaagggctttggacctccagccaccaaccagttcaccaccaagatcagcgcccccagcatgcctgcctatgagctggagacccccctgaaccagacagacaacacagtgacagtgatgctgaagccagcccacagcagaggagcccctgtgtctgtgtaccagatcgtggtggaggaggagcggcccaggaggaccaagaagaccacagagatcctgaagtgctaccctgtgcccatccacttccagaatgccagcctgctgaacagccagtactactttgctgctgagttccctgctgacagcctgcaggccgcccagcccttcaccatcggggacaacaagacctacaacggctactggaacacccccctgctgccctacaagagctaccgcatctacttccaggccgccagccgggccaatggagagaccaagattgactgtgtgcaggtggccaccaagggggccgccacccccaagcctgtgcctgagcctgagaagcagacagaccacacagtgaagattgctggggtgattgctggcatcctgctgtttgtgatcatcttcctgggcgtggtgctggtgatgaagaagaggaagctggccaagaagaggaaggagaccatgagcagcacccggcaggagatgacagtgatggtgaacagcatggacaagagctatgcagagcagggcaccaactgtgatgaggccttctccttcatggacacccacaacctgaatggccgctctgtgagcagccccagcagcttcaccatgaagaccaacaccctgagcacctctgtgcccaacagctactacccagacccctttgtgcccacagccatcctggtgcccatcaatgatgagacccacaccatggccagtgacaccagcagcctggtgcagagccacacctacaagaagcgggagccagcagatgtgccctaccagacaggccagctgcacccagccatccgggtggccgacctgctgcagcacatcacccagatgaagtgtgccgagggctacggcttcaaggaggagtatgagagcttctttgagggccagagcgccccctgggacagcgccaagaaggatgaaaataggatgaagaacagatatggcaacatcatcgcctatgaccacagccgggtgcggctgcagaccatcgagggggacaccaacagcgactacatcaatggaaactacattgatggctaccaccggcccaaccactacatcgccacccagggccccatgcaggagaccatctatgacttctggaggatggtgtggcatgagaacacagccagcatcatcatggtgaccaacctggtggaggtgggccgggtgaagtgctgcaagtactggccagatgacacagagatctacaaggacatcaaggtgaccctcatcgagacagagctgctggccgagtatgtgatccgcacctttgctgtggagaagaggggcgtgcatgagatccgggagatccggcagttccacttcaccggctggccagaccatggagtgccctaccacgccaccggcctgctgggctttgtgcggcaggtgaagagcaagagcccccccagcgctggccccctggtggtgcactgcagcgctggggccggccgcacaggctgcttcatcgtgattgacatcatgctggacatggccgagcgggagggcgtggtggacatctacaactgtgtgcgggagctgcggagccggcgggtgaacatggtgcagacagaggagcagtatgtgttcatccatgatgccatcctggaggcctgcctgtgtggggacacctctgtgcctgccagccaggtgcgcagcctgtactatgacatgaacaagctggacccccagaccaacagcagccagatcaaggaggagttccgcaccctgaacatggtgacccccaccctgcgggtggaggactgcagcatcgccctgctgcccagaaatcatgagaagaaccgctgcatggacatcctgcccccagaccgctgcctgcccttcctgatcaccattgatggagagagcagcaactacatcaatgctgccctgatggacagctacaagcagcccagcgccttcatcgtgacccagcaccccctgcccaacacagtgaaggacttctggaggctggtgctggactaccactgcacctctgtggtgatgctgaatgatgtggaccctgcccagctgtgcccccagtactggccagaaaatggagtgcaccgccacggccccatccaggtggagtttgtgtctgctgacctggaggaggacatcatcagccgcatcttccgcatctacaatgctgcccggccccaggacggctacaggatggtgcagcagttccagttcctgggctggcccatgtacagagacacccctgtgtccaagaggagcttcctgaagctgatccggcaggtggacaagtggcaggaggagtacaacggcggggagggccgcacagtggtgcactgcctgaatggaggcggccgcagcggcaccttctgtgccatcagcatcgtgtgtgagatgctgcggcaccagaggacagtggatgtgttccacgctgtgaagaccctgaggaacaacaagcccaacatggtggacctgctggaccagtacaagttctgctatgaggtggccctggagtacctgaacagcggctag

SEQ ID NO: 166245 - DNA, 4323 bp, synthetic construct
  misc_feature 1..4323: note = Description of Artificial Sequence: Synthetic coding sequence
  source 1..4323: mol_type = other DNA
atggcccgggcccaggccctggtgctggccctgaccttccagctgtgtgcccctgagacagagaccccagctgctggctgcacctttgaggaggccagtgaccctgctgtgccctgtgagtacagccaggcccagtatgatgacttccagtgggagcaggtgcgcatccaccctggcacccgggccccagctgacctgccccacggcagctacctgatggtgaacaccagccagcacgcccctggccagagggcccacgtgatcttccagagcctgtctgaaaatgacacccactgtgtgcagttctcctacttcctgtacagcagagatggccacagccctggcaccctgggcgtgtatgtgcgggtgaatggaggccccctgggcagcgctgtgtggaacatgacaggcagccacggccggcagtggcaccaggccgagctggccgtgtccaccttctggcccaatgagtaccaggtgctgtttgaggccctgatcagcccagaccggcggggctacatgggcctggatgacatcctgctgctgagctacccctgtgccaaggccccccacttcagccggctgggagatgtggaggtgaatgccggccagaatgccagcttccagtgcatggctgctggccgggctgctgaggccgagcgcttcctgctgcagaggcagagcggggccctggtgcctgctgctggggtgcgccacatcagccaccggcgcttcctggccaccttccccctggccgctgtgtccagagctgagcaggacctgtaccgctgtgtgtcccaggcccccaggggggccggcgtgagcaactttgctgagctgattgtgaaggagccccccacccccatcgccccaccccagctgctgcgggccggccccacctacctgatcatccagctgaacaccaacagcatcattggagatggccccatcgtgaggaaggagattgagtacaggatggcccggggcccctgggccgaggtgcatgctgtgtccctgcagacctacaagctgtggcacctggaccctgacacagaatatgagatctctgtgctgctgaccaggcctggagatggcggcaccggccggcccggccccccactcatcagcaggaccaagtgtgccgagcccatgagggcccccaagggcctggcctttgctgagatccaggcccggcagctgaccctgcagtgggagcccctgggctacaacgtgacccgctgccacacctacacagtgtccctgtgctaccactacaccctgggcagcagccacaaccagaccatcagagaatgtgtgaagacagagcagggcgtgagccgctacaccatcaagaacctgctgccctacagaaatgtgcacgtgcggctggtgctgaccaaccctgagggcaggaaggagggcaaggaggtgaccttccagacagatgaagatgtgcccagcggcattgctgctgagagcctgaccttcacccccctggaggacatgatcttcctgaagtgggaggagccccaggagcccaacggcctcatcacccagtatgagatctcctaccagagcattgagagcagtgaccctgctgtgaatgtgcccggccccaggaggaccatcagcaagctgagaaatgagacctaccacgtgttcagcaacctgcaccctggcaccacctacctgttctctgtgcgggccaggactggaaaaggatttggccaggccgccctgacagagatcaccaccaacatcagcgcccccagctttgattatgctgacatgcccagccccctgggggagagcgagaacaccatcaccgtgctgctgcggcctgcccagggccgcggggcccccatctctgtgtaccaggtgattgtggaggaggagcgggcccggcggctgcggcgggagcccggcggccaggactgcttccctgtgcccctgacctttgaagctgccctggcccggggcctggtgcactactttggagctgagctggccgccagcagcctgcctgaggccatgcccttcaccgtgggggacaaccagacctaccggggcttctggaacccccccctggagcccaggaaggcctacctgatctacttccaggccgccagccacctgaagggggagacccggctgaactgcatcagaattgccaggaaggccgcctgcaaggagagcaagaggcccctggaggtgtcccagaggtctgaggagatgggcctcatcctgggcatctgtgccggcggcctggccgtgctgatcctgctgctgggcgccatcatcgtcatcatcaggaagggcaagcctgtgaacatgaccaaggccaccgtgaactaccggcaggagaagacccacatgatgtctgctgtggaccgctccttcacagaccagagcaccctgcaggaggatgagcggctgggcctgtccttcatggacacccacggctacagcaccaggggggaccagaggtctgggggcgtgacagaggccagcagcctgctgggcggcagcccccggcggccctgtggcaggaagggcagcccctaccacacaggccagctgcaccctgctgtgcgggtggccgacctgctgcagcacatcaaccagatgaagacagctgagggctacggcttcaagcaggagtatgagagcttctttgagggctgggatgccaccaagaagaaggacaaggtgaagggcagccggcaggagcccatgcctgcctatgacagacaccgggtgaagctgcaccccatgctgggggaccccaatgctgactacatcaatgccaactacatcgacatccgcatcaaccgggagggctaccacaggagcaaccacttcatcgccacccagggccccaagccagagatggtgtatgacttctggaggatggtgtggcaggagcactgcagcagcatcgtgatgatcaccaagctggtggaggtgggccgggtgaagtgcagccgctactggccagaggacagcgacacctatggagacatcaagatcatgctggtgaagacagagaccctggccgagtatgtggtgaggacctttgccctggagcggcggggctacagcgcccggcatgaggtgcggcagttccacttcaccgcctggccagagcacggcgtgccctaccacgccaccggcctgctggccttcatccggcgggtgaaggccagcaccccaccagatgctggccccatcgtcatccactgcagcgctggcactggaagaacaggctgctacatcgtgctggatgtgatgctggacatggccgagtgtgaaggagtggtggacatctacaactgtgtgaagaccctgtgcagcagaagagtgaacatgatccagacagaggagcagtacatcttcatccatgatgccatcctggaggcctgcctgtgtggggagaccaccatccctgtgtctgagttcaaggccacctacaaggagatgatcagaattgacccccagagcaacagcagccagctgcgggaggagttccagaccctgaacagcgtgaccccacccctggatgtggaggagtgcagcatcgccctgctgcccaggaacagagacaagaacagatccatggatgtgctgcccccagaccgctgcctgcccttcctgatcagcacagatggagacagcaacaactacatcaatgctgccctgacagacagctacaccaggtctgctgccttcatcgtgaccctgcaccccctgcagagcaccaccccagacttctggaggctggtgtatgactatggctgcaccagcatcgtgatgctgaaccagctgaaccagagcaacagcgcctggccctgcctgcagtactggccagagcccggccggcagcagtatggcctgatggaggtggagttcatgtctggaacagcagatgaggacctggtggcccgggtcttccgggtgcagaacatcagccgggagggccacctgctggtgcgccacttccagttcctgcgctggagcgcctacagagacaccccagacagcaagaaggccttcctgcacctgctggccgaggtggacaagtggcaggccgagagcggagatggccgcaccatcgtgcactgcctgaatggaggcggccgcagcggcaccttctgtgcctgtgccaccgtgctggagatgatccgctgccacaacctggtggatgtgttctttgctgccaagaccctgaggaactacaagcccaacatggtggagaccatggaccagtaccacttctgctatgatgtggccctggagtacctggagggcctggagagcaggtag

SEQ ID NO: 166246 - DNA, 4347 bp, synthetic construct
  misc_feature 1..4347: note = Description of Artificial Sequence: Synthetic coding sequence
  source 1..4347: mol_type = other DNA
atgaggatcctgaagcgcttcctggcctgcatccagctgctgtgtgtgtgccgcctggactgggccaacggctactaccggcagcagaggaagctggtggaggagatcggctggagctacacaggagccctgaaccagaagaactggggcaagaagtaccccacctgcaacagccccaagcagagccccatcaacattgatgaggacctgacccaggtgaatgtgaacctgaagaagctgaagttccagggctgggacaagaccagcctggagaacaccttcatccacaacacaggcaagacagtggagatcaacctgaccaatgactacagagtgtctggaggagtgtctgagatggtgttcaaggccagcaagatcaccttccactggggcaagtgcaacatgagcagtgatggcagcgagcacagcctggagggccagaagttccccctggagatgcagatctactgctttgatgctgaccgcttcagcagctttgaggaggccgtgaagggcaagggcaagctgcgggccctgagcatcctgtttgaggtgggcacagaggagaacctggacttcaaggccatcattgatggagtggagagcgtgtccagatttgggaagcaggccgccctggaccccttcatcctgctgaacctgctgcccaacagcacagacaagtactacatctacaacggcagcctgaccagccccccctgcacagacacagtggactggatcgtgttcaaggacacagtgtccatcagcgagagccagctggccgtgttctgtgaggtgctgaccatgcagcagagcggctacgtgatgctgatggactacctgcagaacaacttccgggagcagcagtacaagttcagccggcaggtgttcagcagctacacaggcaaggaggagatccatgaagctgtgtgcagcagcgagccagaaaatgtgcaggccgaccctgagaactacaccagcctgctggtgacctgggagcggccccgggtggtgtatgacaccatgattgagaagtttgctgtgctgtaccagcagctggatggagaggaccagaccaagcatgagttcctgacagatggctaccaggacctgggcgccatcctgaacaacctgctgcccaacatgtcctatgtgctgcagatcgtggccatctgcaccaacggcctgtatggcaagtacagcgaccagctgattgtggacatgcccacagacaaccctgagctggacctcttccctgagctgattggaacagaggagatcatcaaggaggaggaggagggcaaggacatcgaggagggcgccatcgtgaaccctggccgggacagcgccaccaaccagatcaggaagaaggagccccagatcagcaccaccacccactacaaccgcatcggcaccaagtacaatgaggccaagaccaacagaagccccacccggggcagcgagttcagcgggaaaggagatgtgcccaacaccagcctgaacagcaccagccagcctgtgaccaagctggccacagagaaggacatcagcctgaccagccagacagtgacagagctgcccccccacacagtggagggcaccagcgccagcctgaatgatggcagcaagacagtgctgcggagcccccacatgaacctgagcggcacagctgagagcctgaacacagtgtccatcacagaatatgaggaggagagcctgctgaccagcttcaagctggacacaggagctgaggacagcagcggcagcagccctgccaccagcgccatccccttcatcagcgagaacatcagccagggctacatcttcagcagcgagaaccctgagaccatcacctatgatgtgctgatccctgagagcgccagaaatgccagcgaggacagcaccagcagcggcagcgaggagagcctgaaggaccccagcatggagggcaatgtgtggttccccagcagcacagacatcacagcccagccagatgtgggcagcggccgggagagcttcctgcagaccaactacacagagatccgggtggatgagagcgagaagaccaccaagagcttctctgctggccctgtgatgagccagggccccagcgtgacagacctggagatgccccactacagcacctttgcctacttccccacagaggtgaccccccacgccttcacccccagcagccggcagcaggacctggtgtccacagtgaatgtggtgtacagccagaccacccagcctgtgtacaatgaggccagcaacagcagccatgagagcagaattggcctggccgagggcctggagagcgagaagaaggctgtgatccccctggtgattgtgtctgccctgaccttcatctgcctggtggtgctggtgggcatcctgatctactggaggaagtgcttccagacagcccacttctacctggaggacagcaccagccccagggtcatcagcaccccacccacccccatcttccccatcagtgatgatgtgggcgccatccccatcaagcacttccccaagcacgtggccgacctgcacgccagcagcggcttcacagaggagtttgaggaggtgcagagctgcaccgtggacctgggcatcacagctgacagcagcaaccacccagacaacaagcacaagaaccgctacatcaacatcgtggcctatgaccacagccgggtgaagctggcccagctggccgagaaggatggcaagctgacagactacatcaatgccaactacgtggatggctacaaccggcccaaggcctacatcgccgcccagggccccctgaagagcacagctgaggacttctggaggatgatctgggagcacaacgtggaggtgattgtgatgatcaccaacctggtggagaagggcagaagaaaatgtgaccagtactggccagcagatggcagcgaggagtatggcaacttcctggtgacccagaagtctgtgcaggtgctggcctactacacagtgaggaacttcaccctgaggaacaccaagatcaagaagggcagccagaagggccggcccagcggccgggtggtgacccagtaccactacacccagtggccagacatgggcgtgcctgagtacagcctgcctgtgctgacctttgtgaggaaggccgcctatgccaagagacatgctgtgggccctgtggtggtgcactgcagcgctggggtgggccgcacaggcacctacatcgtgctggacagcatgctgcagcagatccagcacgagggcaccgtgaacatcttcggcttcctgaagcacatccgcagccagaggaactacctggtgcagacagaggagcagtatgtgttcatccatgacaccctggtggaggccatcctgagcaaggagacagaggtgctggacagccacatccacgcctacgtgaatgccctgctgatccctggccctgctgggaagaccaagctggagaagcagttccagctgctgagccagagcaacatccagcagagcgactacagcgctgccctgaagcagtgcaaccgggagaagaacagaaccagcagcatcatccctgtggagaggagccgggtgggcatcagcagcctgagcggggagggcacagactacatcaatgccagctacatcatgggctactaccagagcaatgagttcatcatcacccagcaccccctgctgcacaccatcaaggacttctggaggatgatctgggaccacaatgcccagctggtggtgatgatcccagatggccagaacatggccgaggatgaatttgtgtactggcccaacaaggatgagcccatcaactgtgagagcttcaaggtgaccctgatggccgaggagcacaagtgcctgagcaatgaggagaagctgatcatccaggacttcatcctggaggccacccaggatgattatgtgctggaggtgcgccacttccagtgccccaagtggcccaacccagacagccccatcagcaagacctttgagctgatcagcgtcatcaaggaggaggccgccaacagagatggccccatgattgtgcatgatgagcacggcggcgtgacagctggcaccttctgtgccctgaccaccctgatgcaccagctggagaaggaaaattctgtggatgtgtaccaggtggccaagatgatcaacctgatgaggcctggggtgtttgctgacatcgagcagtaccagttcctgtacaaggtgatcctgagcctggtgtccacccggcaggaggagaaccccagcaccagcctggacagcaatggagctgccctgcctgatggcaacattgctgagagcctggagagcctggtgtag

SEQ ID NO: 166247 - DNA, 504 bp, synthetic construct
  misc_feature 1..504: note = Description of Artificial Sequence: Synthetic coding sequence
  source 1..504: mol_type = other DNA
atgaacagacctgcccctgtggagatctcctatgagaacatgaggttcctgatcacccacaaccccaccaatgccaccctgaacaagttcacagaggagctgaagaagtatggagtgaccaccctggtgcgggtgtgtgatgccacctatgacaaggcccctgtggagaaggagggcatccacgtgctggactggccctttgatgatggagcccccccacccaaccagatcgtggatgactggctgaacctgctgaagaccaagttccgggaggagcccggctgctgcgtggccgtgcactgtgtggccggcctgggccgggcccctgtgctggtggccctggccctgattgaatgtggcatgaagtatgaagatgctgtgcagttcatccggcagaagagaagaggagccttcaacagcaagcagctgctgtacctggagaagtaccggcccaagatgaggctgcgcttccgggacaccaacggccactgctgcgtgcagtag

SEQ ID NO: 166248 - DNA, 249 bp, synthetic construct
  misc_feature 1..249: note = Description of Artificial Sequence: Synthetic coding sequence
  source 1..249: mol_type = other DNA
atgaacagacctgcccctgtggagatctcctatgagaacatgaggttcctgatcacccacaaccccaccaatgccaccctgaacaagttcacagaggagctgaagaagtatggagtgaccaccctggtgcgggtgtgtgatgccacctatgacaaggcccctgtggagaaggagggcatccacgtgctgaagaagaagggctctgtgcagttccagacagctgccctgtttggagagatccccacctag

SEQ ID NO: 166249 - DNA, 411 bp, synthetic construct
  misc_feature 1..411: note = Description of Artificial Sequence: Synthetic coding sequence
  source 1..411: mol_type = other DNA
atgaacagacctgcccctgtggagatctcctatgagaacatgaggttcctgatcacccacaaccccaccaatgccaccctgaacaagttcacagaggactggccctttgatgatggagcccccccacccaaccagatcgtggatgactggctgaacctgctgaagaccaagttccgggaggagcccggctgctgcgtggccgtgcactgtgtggccggcctgggccgggcccctgtgctggtggccctggccctgattgaatgtggcatgaagtatgaagatgctgtgcagttcatccggcagaagagaagaggagccttcaacagcaagcagctgctgtacctggagaagtaccggcccaagatgaggctgcgcttccgggacaccaacggccactgctgcgtgcagtag

SEQ ID NO: 166250 - DNA, 192 bp, synthetic construct
  misc_feature 1..192: note = Description of Artificial Sequence: Synthetic coding sequence
  source 1..192: mol_type = other DNA
atgaacagacctgcccctgtggagatctcctatgagaacatgaggttcctgatcacccacaaccccaccaatgccaccctgaacaagttcacagaggagctgaagaagtatggagtgaccaccctggtgcgggtgtgtgatgccacctatgacaaggcccctgtggagaaggagggcatccacgtgctgtag

SEQ ID NO: 166251 - DNA, 69 bp, synthetic construct
  misc_feature 1..69: note = Description of Artificial Sequence: Synthetic coding sequence
  source 1..69: mol_type = other DNA
atgaacagacctgcccctgtggagatctcctatgagaacatgaggttcctgatcacccacaacccctag

SEQ ID NO: 166252 - DNA, 522 bp, synthetic construct
  misc_feature 1..522: note = Description of Artificial Sequence: Synthetic coding sequence
  source 1..522: mol_type = other DNA
atggccaggatgaacagacctgcccctgtggaggtgtcctacaagcacatgaggttcctgatcacccacaaccccaccaatgccaccctgagcaccttcatcgaggacctgaagaagtacggggccaccaccgtggtgcgggtgtgtgaggtgacctatgacaagacccccctggagaaggatggcatcaccgtggtggactggccctttgatgatggagcccctcctcctgggaaggtggtggaggactggctgagcctggtgaaggccaagttctgtgaggcccctggcagctgtgtggccgtgcactgtgtggccggcctgggccgggcccctgtgctggtggccctggccctgattgagagcggcatgaagtatgaagatgccatccagttcatccggcagaagagaagaggagccatcaacagcaagcagctgacctacctggagaagtaccggcccaagcagaggctgcgcttcaaggacccccacacccacaagacccgctgctgcgtgatgtag

SEQ ID NO: 166253 - DNA, 447 bp, synthetic construct
  misc_feature 1..447: note = Description of Artificial Sequence: Synthetic coding sequence
  source 1..447: mol_type = other DNA
atggccaggatgaacagacctgcccctgtggaggtgtcctacaagcacatgaggttcctgatcacccacaaccccaccaatgccaccctgagcaccttcatcgaggacctgaagaagtacggggccaccaccgtggtgcgggtgtgtgaggtgacctatgacaagacccccctggagaaggatggcatcaccgtggtggactggccctttgatgatggagcccctcctcctgggaaggtggtggaggactggctgagcctggtgaaggccaagttctgtgaggcccctggcagctgtgtggccgtgcactgtgtggccggcctgggcaggaagagaagaggagccatcaacagcaagcagctgacctacctggagaagtaccggcccaagcagaggctgcgcttcaaggacccccacacccacaagacccgctgctgcgtgatgtag

SEQ ID NO: 166254 - DNA, 447 bp, synthetic construct; identical to SEQ ID NO: 166253
  misc_feature 1..447: note = Description of Artificial Sequence: Synthetic coding sequence
  source 1..447: mol_type = other DNA

SEQ ID NO: 166255 - DNA, 522 bp, synthetic construct; identical to SEQ ID NO: 166252
  misc_feature 1..522: note = Description of Artificial Sequence: Synthetic coding sequence
  source 1..522: mol_type = other DNA

SEQ ID NO: 166256 - DNA, 213 bp, synthetic construct
  misc_feature 1..213: note = Description of Artificial Sequence: Synthetic coding sequence
  source 1..213: mol_type = other DNA
atggccaggatgaacagacctgcccctgtggaggtgtcctacaagcacatgaggttcctgatcacccacaaccccaccaatgccaccctgagcaccttcatcgaggacctgaagaagtacggggccaccaccgtggtgcgggtgtgtgaggtgacctatgacaagacccccctggagaaggatggcatcaccgtggtggactggcccttctag

SEQ ID NO: 166257 - DNA, 2343 bp, synthetic construct
  misc_feature 1..2343: note = Description of Artificial Sequence: Synthetic coding sequence
  source 1..2343: mol_type = other DNA
atggagcaggtggagatcctgaggaagttcatccagagggtgcaggccatgaagagcccagaccacaatggagaggacaactttgcccgggacttcatgaggctgcggcggctgagcaccaagtacagaacagagaagatctaccccacagccaccggggagaaggaggagaatgtgaagaagaaccgctacaaggacatcctgccctttgaccacagccgggtgaagctgaccctgaagacccccagccaggacagcgactacatcaatgccaacttcatcaagggcgtgtatggccccaaggcctacgtggccacccagggccccctggccaacacagtgattgacttctggaggatgatctgggagtacaacgtggtgatcatcgtgatggcctgccgggagtttgagatgggcaggaagaagtgtgagcgctactggcccctgtatggagaggaccccatcacctttgcccccttcaagatcagctgtgaagatgagcaggccaggacagactacttcatccgcaccctgctgctggagttccagaatgaaagcagaagactctaccagttccactacgtgaactggccagaccatgatgtgcccagcagctttgacagcatcctggacatgatcagcctgatgaggaagtaccaggagcatgaagatgtgcccatctgcatccactgcagcgctggctgcggccgcactggagccatctgtgccatcgactacacctggaacctgctgaaggccggcaagatccctgaggagttcaacgtgttcaacctgatccaggagatgaggacccagaggcacagcgctgtgcagaccaaggagcagtatgagctggtgcaccgggccatcgcccagctgtttgagaagcagctgcagctgtatgagatccacggggcccagaagattgctgatggagtgaatgagatcaacacagagaacatggtgagcagcattgagcctgagaagcaggacagccccccacccaagccacccaggaccaggagctgcctggtggagggagatgccaaggaggagatcctgcagcccccagagccccaccctgtgccccccatcctgacccccagcccccccagcgccttccccaccgtgaccaccgtgtggcaggacaatgaccgctaccaccccaagcctgtgctgcacatggtgagcagcgagcagcacagcgctgacctgaacagaaactacagcaagagcacagagctgcccgggaagaatgaaagcaccatcgagcagattgacaagaagctggagaggaacctgagctttgagatcaagaaggtgcccctgcaggagggccccaagagctttgatggcaacaccctgctgaacagaggccacgccatcaagatcaagagcgccagcccctgcatcgctgacaagatcagcaagccccaggagctgagcagtgacctgaatgtgggggacaccagccagaacagctgtgtggactgcagcgtgacccagagcaacaaggtgtctgtgaccccacctgaggagagccagaacagcgacaccccacccaggccagaccggctgcccctggatgagaagggccacgtgacctggagcttccacggcccagaaaatgccatccccatcccagacctgtctgagggcaacagcagtgacatcaactaccagaccaggaagacagtgtccctgacccccagccccaccacccaggtggagaccccagacctggtggaccatgacaacaccagccccctcttccgcacccccctgtccttcaccaaccccctgcacagtgatgacagcgacagtgatgaaagaaacagtgatggagctgtgacccagaacaagaccaacatcagcacagccagcgccaccgtgtctgctgccaccagcacagagagcatcagcaccaggaaggtgctgcccatgagcatcgcccggcacaacattgctggcaccacccacagcggggctgagaaggatgtggatgtgtctgaggacagccccccacccctgcctgagaggaccccagagagctttgtgctggccagcgagcacaacacccctgtgcgctctgagtggagcgagctgcagagccaggagaggtctgagcagaagaagtctgagggcctcatcaccagtgaaaatgaaaaatgtgaccaccctgctgggggcatccactatgagatgtgcatcgagtgcccccccaccttcagtgacaagcgggagcagatcagcgagaaccccacagaggccacagacatcggcttcggcaacagatgtgggaagcccaagggcccccgggaccccccatctgagtggacctag

SEQ ID NO: 166258 - DNA, 1986 bp, synthetic construct
  misc_feature 1..1986: note = Description of Artificial Sequence: Synthetic coding sequence
  source 1..1986: mol_type = other DNA
atgatctgggagtacaacgtggtgatcatcgtgatggcctgccgggagtttgagatgggcaggaagaagtgtgagcgctactggcccctgtatggagaggaccccatcacctttgcccccttcaagatcagctgtgaagatgagcaggccaggacagactacttcatccgcaccctgctgctggagttccagaatgaaagccggcggctgtaccagttccactacgtgaactggccagaccatgatgtgcccagcagctttgacagcatcctggacatgatcagcctgatgaggaagtaccaggagcatgaagatgtgcccatctgcatccactgcagcgctggctgcggccgcactggagccatctgtgccatcgactacacctggaacctgctgaaggccggcaagatccctgaggagttcaacgtgttcaacctgatccaggagatgaggacccagaggcacagcgctgtgcagaccaaggagcagtatgagctggtgcaccgggccatcgcccagctgtttgagaagcagctgcagctgtatgagatccatggagcccagaagattgctgatggagtgaatgagatcaacacagagaacatggtgagcagcattgagcctgagaagcaggacagccccccacccaagccacccaggaccaggagctgcctggtggagggagatgccaaggaggagatcctgcagcccccagagccccaccctgtgccccccatcctgacccccagccccccatctgccttccccaccgtgaccaccgtgtggcaggacaatgaccgctaccaccccaagcctgtgctgcacatggtgtcctctgagcagcacagcgctgacctgaacagaaactacagcaagagcacagagctgcccgggaagaatgaaagcaccatcgagcagattgacaagaagctggagaggaacctgagctttgagatcaagaaggtgcccctgcaggagggccccaagagctttgatggcaacaccctgctgaacagaggacatgccatcaagatcaagagcgccagcccctgcatcgctgacaagatcagcaagccccaggagctgagcagtgacctgaatgtgggggacaccagccagaacagctgtgtggactgcagcgtgacccagagcaacaaggtgtctgtgaccccacctgaggagagccagaacagcgacaccccacccaggccagaccggctgcccctggatgagaagggccacgtgacctggagcttccacggcccagaaaatgccatccccatcccagacctgtctgagggcaacagcagtgacatcaactaccagaccaggaagacagtgtccctgacccccagccccaccacccaggtggagaccccagacctggtggaccatgacaacaccagccccctcttccgcacccccctgtccttcaccaaccccctgcacagtgatgacagcgacagtgatgagaggaacagtgatggagctgtgacccagaacaagaccaacatcagcacagccagcgccaccgtgtctgctgccaccagcacagagagcatcagcaccaggaaggtgctgcccatgagcatcgcccggcacaacattgctggcaccacccacagcggggctgagaaggatgtggatgtgtctgaggacagccccccacccctgcctgagaggaccccagagagctttgtgctggccagcgagcacaacacccctgtgcgctctgagtggagcgagctgcagagccaggagaggtctgagcagaagaagtctgagggcctcatcaccagtgaaaatgagaagtgtgaccaccctgctgggggcatccactatgagatgtgcattgaatgtcctcccaccttcagtgacaagcgggagcagatcagcgagaaccccacagaggccacagacattggatttggaaacagatgtgggaagcccaagggcccccgggacccccccagcgagtggacctag

SEQ ID NO: 166259 - DNA, 1632 bp, synthetic construct
  misc_feature 1..1632: note = Description of Artificial Sequence: Synthetic coding sequence
  source 1..1632: mol_type = other DNA
atgatctgggagtacaacgtggtgatcatcgtgatggcctgccgggagtttgagatgggcaggaagaagtgtgagcgctactggcccctgtatggagaggaccccatcacctttgcccccttcaagatcagctgtgaagatgagcaggccaggacagactacttcatccgcaccctgctgctggagttccagaatgaaagccggcggctgtaccagttccactacgtgaactggccagaccatgatgtgcccagcagctttgacagcatcctggacatgatcagcctgatgaggaagtaccaggagcatgaagatgtgcccatctgcatccactgcagcgctggctgcggccgcactggagccatctgtgccatcgactacacctggaacctgctgaaggccggcaagatccctgaggagttcaacgtgttcaacctgatccaggagatgaggacccagaggcacagcgctgtgcagaccaaggagcagtatgagctggtgcaccgggccatcgcccagctgtttgagaagcagctgcagctgtatgagatccatggagcccagaagattgctgatggagtgaatgagatcaacacagagaacatggtgagcagcattgagcctgagaagcaggacagccccccacccaagccacccaggaccaggagctgcctggtggagggagatgccaaggaggagatcctgcagcccccagagccccaccctgtgccccccatcctgacccccagccccccatctgccttccccaccgtgaccaccgtgtggcaggacaatgaccgctaccaccccaagcctgtgctgcacatggtgtcctctgagcagcacagcgctgacctgaacagaaactacagcaagagcacagagctgcccgggaagaatgaaagcaccatcgagcagattgacaagaagctggagaggaacctgagctttgagatcaagaaggtgcccctgcaggagggccccaagagctttgatggcaacaccctgctgaacagaggacatgccatcaagatcaagagcgccagcccctgcatcgctgacaagatcagcaagccccaggagctgagcagtgacctgaatgtgggggacaccagccagaacagctgtgtggactgcagcgtgacccagagcaacaaggtgtctgtgaccccacctgaggagagccagaacagcgacaccccacccaggccagaccggctgcccctggatgagaagggccacgtgacctggagcttccacggcccagaaaatgccatccccatcccagacctgtctgagggcaacagcagtgacatcaactaccagaccaggaagacagtgtccctgacccccagccccaccacccaggtggagaccccagacctggtggaccatgacaacaccagccccctcttccgcacccccctgtccttcaccaaccccctgcacagtgatgacagcgacagtgatgagaggaacagtgatggagctgtgacccagaacaagaccaacatcagcacagccagcgccaccgtgtctgctgccaccagcacagagagcatcagcaccaggaaggtgctgcccatgagcatcgcccggcacaacagcaggaacaacaccttccgctgctag

SEQ ID NO: 166260 - DNA, 6885 bp, synthetic construct
  misc_feature 1..6885: note = Description of Artificial Sequence: Synthetic coding sequence
  source 1..6885: mol_type = other DNA
atgcacgtgtccctggccgaggccctggaggtgcggggcggccccctgcaggaggaggagatctgggccgtgctgaaccagagcgctgagagcctgcaggagctgttcaggaaggtgtccctggccgaccctgctgccctgggcttcatcatcagcccctggagcctgctgctgctgcccagcggctctgtgtccttcacagatgagaacatcagcaaccaggacctgcgggccttcaccgcccctgaggtgctgcagaaccagagcctgaccagcctgagtgatgtggagaagatccacatctacagcctgggcatgaccctgtactggggcgctgactatgaggtgccccagagccagcccatcaagctgggggaccacctgaacagcatcctgctgggcatgtgtgaagatgtgatctatgcccgggtgtctgtgaggacagtgctggatgcctgcagcgcccacatccggaacagcaactgtgcccccagcttctcctatgtgaagcacctggtgaagctggtgctgggcaacctgtctggaacagaccagctgagctgcaacagcgagcagaagccagacaggagccaggccatccgggaccggctgcggggcaagggcctgcccaccggccgcagcagcaccagtgatgtgctggacatccagaagccacccctgagccaccagaccttcctgaacaagggcctgagcaagtccatgggcttcctgagcatcaaggacacccaggatgagaactacttcaaggacatcctgagtgacaacagcggccgggaggacagcgagaacaccttcagcccctaccagttcaagaccagcggccctgagaagaagcccatccctggcattgatgtgctgagcaagaagaagatctgggccagctccatggacctgctgtgcacagctgaccgggacttcagcagtggagaaacagccacctaccgccgctgccaccctgaggccgtgacagtgaggaccagcaccacccccaggaagaaggaggcccgctacagtgatggcagcatcgccctggacatcttcggcccccagaagatggaccccatctaccacacccgggagctgcccaccagcagcgccatcagcagcgccctggaccgcatccgggagcggcagaagaagctgcaggtgctgcgggaggccatgaatgtggaggagcctgtgcggcgctacaagacctaccatggagatgtgttcagcaccagcagcgagagccccagcatcatcagcagcgagagtgacttccggcaggtgcggcgctctgaggccagcaagagatttgagagcagcagcggcctgcccggggtggatgagaccctgagccagggccagagccagaggcccagccggcagtatgagaccccatttgagggcaacctgatcaaccaggagatcatgctgaagaggcaggaggaggagctgatgcagctgcaggccaagatggccctgcggcagagccggctgagcctgtacccaggggacaccatcaaggcctccatgctggacatcacccgggaccccctgcgggagatcgccctggagacagccatgacccagaggaagctgaggaacttctttggacctgagtttgtgaagatgaccatcgagcccttcatcagcctggacctgcccaggagcatcctgaccaagaagggcaagaatgaagacaacagaaggaaggtgaacatcatgctgctgaatggccagaggctggagctgacctgtgacaccaagaccatctgcaaggatgtgtttgacatggtggtggcccacatcggcctggtggagcaccacctgtttgccctggccaccctgaaggacaatgagtacttctttgtggaccctgacctgaagctgaccaaggtggcccctgagggctggaaggaggagcccaagaagaagaccaaggccaccgtgaacttcaccctcttcttccgcatcaagttcttcatggatgatgtgtccctcatccagcacaccctgacctgccaccagtactacctgcagctgaggaaggacatcctggaggagaggatgcactgtgatgatgagaccagcctgctgctggccagcctggccctgcaggccgagtatggagactaccagcctgaggtgcatggagtgtcctacttcaggatggagcactacctgcctgcccgggtgatggagaagctggacctgagctacatcaaggaggagctgcccaagctgcacaacacctacgtgggcgccagcgagaaggagacagagctggagttcctgaaggtgtgccagaggctgacagaatatggagtgcacttccaccgggtgcaccctgagaagaagagccagacaggcatcctgctgggcgtgtgcagcaagggcgtgctggtgtttgaggtgcacaatggagtgaggaccctggtgctgcgcttcccctggagggagaccaagaagatctccttcagcaagaagaagatcaccctgcagaacaccagtgatggcatcaagcacggcttccagacagacaacagcaagatctgccagtacctgctgcacctgtgcagctaccagcacaagttccagctgcagatgagggcccggcagagcaaccaggatgcccaggacattgatgtgctgcacaagcgctggagcatcgtgagcagccctgagcgggagatcaccctggtgaacctgaagaaggatgccaagtatggcctgggcttccagatcatcggcggggagaagatgggccgcctggacctgggcatcttcatcagctctgtggcccctgggggccctgctgacctggatggctgcctgaagccaggggacaggctcatctctgtgaacagcgtgtccctggagggcgtgagccaccacgccgccatcgagatcctgcagaatgccccagaagatgtgaccctggtgatcagccagcccaaggagaagatcagcaaggtgcccagcacccctgtgcacctgaccaatgagatgaagaactacatgaagaagagcagctacatgcaggacagcgccatcgacagcagcagcaaggaccaccactggagccggggcaccctgcggcacatcagtgaaaattcctttggccccagcggcggcctgcgggagggcagcctgagcagccaggacagcaggacagagagcgccagcctgagccagagccaggtgaatggcttctttgccagccacctgggggaccagacctggcaggagagccagcacggcagccccagccccagcgtcatcagcaaggccacagagaaggagaccttcacagacagcaaccagagcaagaccaagaagccaggcatcagtgatgtgacagactacagcgacagaggagacagcgacatggatgaggccacctacagcagcagccaggaccaccagacccccaagcaggagagcagcagctctgtgaacaccagcaacaagatgaacttcaagaccttcagcagcagcccccccaagccaggggacatctttgaggtggagctggccaagaatgacaacagcctgggcatctctgtgactggaggagtgaacacctctgtgagacatggaggcatctacgtgaaggccgtcatcccccagggcgctgctgagagtgatggccgcatccacaagggggacagagtgctggccgtgaatggagtgtccctggagggcgccacccacaagcaggccgtggagaccctgaggaacacaggccaggtggtgcacctgctgctggagaagggccagagccccaccagcaaggagcacgtgcctgtgaccccccagtgcaccctgagtgaccagaatgcccagggccagggccctgagaaggtgaagaagaccacccaggtgaaggactacagctttgtgacagaggagaacacctttgaggtgaagctgttcaagaacagcagcggcctgggcttctccttcagccgggaggacaacctgatccctgagcagatcaatgccagcatcgtgcgggtgaagaagctgtttcctggccagcctgctgctgagagcggcaagattgatgtgggagatgtgatcctgaaggtgaatggagccagcctgaagggcctgagccagcaggaggtgatcagcgccctgcggggcacagcccctgaggtgttcctgctgctgtgcaggcctcctcctggggtgctgcctgagattgacacagccctgctgacccccctgcagagccctgcccaggtgctgcccaacagcagcaaggacagcagccagcccagctgtgtggagcagagcaccagcagtgatgaaaatgagatgtctgacaagagcaagaagcagtgcaagagccccagcagaagagacagctacagcgacagcagcggcagcggagaagatgacctggtgacagccccagccaacatcagcaacagcacctggagcagcgccctgcaccagaccctgagcaacatggtgtcccaggcccagagccaccacgaggcccccaagagccaggaggacaccatctgcaccatgttctactacccccagaagatccccaacaagccagagtttgaggacagcaaccccagccccctgcccccagacatggcccctggccagagctaccagccccagagcgagagcgccagcagcagctccatggacaagtaccacatccaccacatcagcgagcccacccggcaggagaactggacccccctgaagaatgacctggagaaccacctggaggactttgagctggaggtggagctgctgatcaccctcatcaagtctgagaagggcagcctgggcttcaccgtgaccaagggcaaccagagaattggctgctacgtgcatgatgtgatccaggaccctgccaagagtgatggccgcctgaagccaggggacaggctcatcaaggtgaatgacacagatgtgaccaacatgacccacacagatgctgtgaacctgctgcgggccgccagcaagacagtgcggctggtgattggccgggtgctggagctgccccgcatccccatgctgccccacctgctgcctgacatcaccctgacctgcaacaaggaggagctgggcttcagcctgtgtggcggccatgacagcctgtaccaggtggtgtacatcagtgacatcaaccccaggtctgtggccgccatcgagggcaacctgcagctgctggatgtgatccactacgtgaatggagtgtccacccagggcatgaccctggaggaggtgaacagagccctggacatgagcctgcccagcctggtgctgaaggccaccagaaatgacctgcctgtggtgcccagcagcaagaggtctgctgtgtctgcccccaagagcaccaagggaaatggcagctacagcgtgggcagctgcagccagcctgccctgaccccaaatgacagcttcagcacagtggccggggaggagatcaatgagatctcctaccccaagggcaagtgcagcacctaccagatcaagggcagccccaacctgaccctgcccaaggagagctacatccaggaggatgacatctatgatgacagccaggaggccgaggtgatccagagcctgctggatgtggtggatgaggaggcccagaacctgctgaatgaaaataatgctgctggctacagctgtggccctggcaccctgaagatgaatggcaagctgtctgaggagaggacagaggacacagactgtgatggcagccccctgcctgagtacttcacagaggccaccaagatgaatggctgtgaggagtactgtgaggagaaggtgaagtctgagagcctcatccagaagccccaggagaagaagacagatgatgatgagatcacctggggcaatgatgagctgcccattgaaagaaccaaccatgaagattctgacaaggaccacagcttcctgaccaatgatgagctggccgtgctgcctgtggtgaaggtgctgcccagcggcaagtacaccggggccaacctgaagagcgtcatccgggtgctgcggggcctgctggaccagggcatccccagcaaggagctggagaacctgcaggagctgaagcccctggaccagtgcctgattggccagaccaaggaaaatagaaggaagaaccgctacaagaacatcctgccctatgatgccaccagggtgcccctgggagatgaaggaggctacatcaatgccagcttcatcaagatccctgtgggcaaggaggagtttgtgtacatcgcctgccagggccccctgcccaccaccgtgggggacttctggcagatgatctgggagcagaagagcaccgtcatcgccatgatgacccaggaggtggagggggagaagatcaagtgccagcgctactggcccaacatcctgggcaagaccaccatggtgagcaaccggctgcggctggccctggtgaggatgcagcagctgaagggctttgtggtgcgggccatgaccctggaggacatccagacccgggaggtgcgccacatcagccacctgaacttcaccgcctggccagaccatgacacccccagccagccagatgacctgctgaccttcatctcctacatgaggcacatccacaggagcggccccatcatcacccactgcagcgctggcatcggccgcagcggcaccctcatctgcattgatgtggtgctgggcctcatcagccaggacctggactttgacatcagtgacctggtgcgctgcatgaggctgcagagacatggcatggtgcagacagaggaccagtacatcttctgctaccaggtgatcctgtatgtgctgacccggctgcaggccgaggaggagcagaagcagcagccccagctgctgaagtag

SEQ ID NO: 166261 - DNA, 7305 bp, synthetic construct
  misc_feature 1..7305: note = Description of Artificial Sequence: Synthetic coding sequence
  source 1..7305: mol_type = other DNA
cagttcctgttcaccaaggtgtccctggccgaccctgctgccctgggcttcatcatcagcccctggagcctgctgctgctgcccagcggctctgtgtccttcacagatgagaacatcagcaaccaggacctgcgggccttcaccgcccctgaggtgctgcagaaccagagcctgaccagcctgagtgatgtggagaagatccacatctacagcctgggcatgaccctgtactggggcgctgactatgaggtgccccagagccagcccatcaagctgggggaccacctgaacagcatcctgctgggcatgtgtgaagatgtgatctatgcccgggtgtctgtgaggacagtgctggatgcctgcagcgcccacatccggaacagcaactgtgcccccagcttctcctatgtgaagcacctggtgaagctggtgctgggcaacctgtctggaacagaccagctgagctgcaacagcgagcagaagccagacaggagccaggccatccgggaccggctgcggggcaagggcctgcccaccggccgcagcagcaccagtgatgtgctggacatccagaagccacccctgagccaccagaccttcctgaacaagggcctgagcaagtccatgggcttcctgagcatcaaggacacccaggatgagaactacttcaaggacatcctgagtgacaacagcggccgggaggacagcgagaacaccttcagcccctaccagttcaagaccagcggccctgagaagaagcccatccctggcattgatgtgctgagcaagaagaagatctgggccagctccatggacctgctgtgcacagctgaccgggacttcagcagtggagaaacagccacctaccgccgctgccaccctgaggccgtgacagtgaggaccagcaccacccccaggaagaaggaggcccgctacagtgatggcagcatcgccctggacatcttcggcccccagaagatggaccccatctaccacacccgggagctgcccaccagcagcgccatcagcagcgccctggaccgcatccgggagcggcagaagaagctgcaggtgctgcgggaggccatgaatgtggaggagcctgtgcggcgctacaagacctaccatggagatgtgttcagcaccagcagcgagagccccagcatcatcagcagcgagagtgacttccggcaggtgcggcgctctgaggccagcaagagatttgagagcagcagcggcctgcccggggtggatgagaccctgagccagggccagagccagaggcccagccggcagtatgagaccccatttgagggcaacctgatcaaccaggagatcatgctgaagaggcaggaggaggagctgatgcagctgcaggccaagatggccctgcggcagagccggctgagcctgtacccaggggacaccatcaaggcctccatgctggacatcacccgggaccccctgcgggagatcgccctggagacagccatgacccagaggaagctgaggaacttctttggacctgagtttgtgaagatgaccatcgagcccttcatcagcctggacctgcccaggagcatcctgaccaagaagggcaagaatgaagacaacagaaggaaggtgaacatcatgctgctgaatggccagaggctggagctgacctgtgacaccaagaccatctgcaaggatgtgtttgacatggtggtggcccacatcggcctggtggagcaccacctgtttgccctggccaccctgaaggacaatgagtacttctttgtggaccctgacctgaagctgaccaaggtggcccctgagggctggaaggaggagcccaagaagaagaccaaggccaccgtgaacttcaccctcttcttccgcatcaagttcttcatggatgatgtgtccctcatccagcacaccctgacctgccaccagtactacctgcagctgaggaaggacatcctggaggagaggatgcactgtgatgatgagaccagcctgctgctggccagcctggccctgcaggccgagtatggagactaccagcctgaggtgcatggagtgtcctacttcaggatggagcactacctgcctgcccgggtgatggagaagctggacctgagctacatcaaggaggagctgcccaagctgcacaacacctacgtgggcgccagcgagaaggagacagagctggagttcctgaaggtgtgccagaggctgacagaatatggagtgcacttccaccgggtgcaccctgagaagaagagccagacaggcatcctgctgggcgtgtgcagcaagggcgtgctggtgtttgaggtgcacaatggagtgaggaccctggtgctgcgcttcccctggagggagaccaagaagatctccttcagcaagaagaagatcaccctgcagaacaccagtgatggcatcaagcacggcttccagacagacaacagcaagatctgccagtacctgctgcacctgtgcagctaccagcacaagttccagctgcagatgagggcccggcagagcaaccaggatgcccaggacatcgagcgggccagcttccgcagcctgaacctgcaggccgagagcgtgcggggcttcaacatgggccgggccatcagcacaggcagcctggccagcagcaccctgaacaagctggccgtgcggcccctgtctgtgcaggccgagatcctgaagaggctgagctgcagcgagctgagcctgtaccagcccctgcagaacagcagcaaggagaagaatgacaaggcctcctgggaggagaagccccgggagatgagcaagagctaccatgacctgagccaggccagcctgtacccccacaggaagaatgtcatcgtgaacatggagcccccaccccagacagtggccgagctggtgggcaagcccagccaccagatgagcagaagtgatgctgagagcctggccggcgtgaccaagctgaacaacagcaagtctgtggccagcctgaacagaagccctgagaggaggaagcatgaaagtgacagcagcagcattgaagatcctggccaggcctacgtgctggatgtgctgcacaagcgctggagcatcgtgagcagccctgagcgggagatcaccctggtgaacctgaagaaggatgccaagtatggcctgggcttccagatcatcggcggggagaagatgggccgcctggacctgggcatcttcatcagctctgtggcccctgggggccctgctgacctggatggctgcctgaagccaggggacaggctcatctctgtgaacagcgtgtccctggagggcgtgagccaccacgccgccatcgagatcctgcagaatgccccagaagatgtgaccctggtgatcagccagcccaaggagaagatcagcaaggtgcccagcacccctgtgcacctgaccaatgagatgaagaactacatgaagaagagcagctacatgcaggacagcgccatcgacagcagcagcaaggaccaccactggagccggggcaccctgcggcacatcagtgaaaattcctttggccccagcggcggcctgcgggagggcagcctgagcagccaggacagcaggacagagagcgccagcctgagccagagccaggtgaatggcttctttgccagccacctgggggaccagacctggcaggagagccagcacggcagccccagccccagcgtcatcagcaaggccacagagaaggagaccttcacagacagcaaccagagcaagaccaagaagccaggcatcagtgatgtgacagactacagcgacagaggagacagcgacatggatgaggccacctacagcagcagccaggaccaccagacccccaagcaggagagcagcagctctgtgaacaccagcaacaagatgaacttcaagaccttcagcagcagcccccccaagccaggggacatctttgaggtggagctggccaagaatgacaacagcctgggcatctctgtgactggaggagtgaacacctctgtgagacatggaggcatctacgtgaaggccgtcatcccccagggcgctgctgagagtgatggccgcatccacaagggggacagagtgctggccgtgaatggagtgtccctggagggcgccacccacaagcaggccgtggagaccctgaggaacacaggccaggtggtgcacctgctgctggagaagggccagagccccaccagcaaggagcacgtgcctgtgaccccccagtgcaccctgagtgaccagaatgcccagggccagggccctgagaaggtgaagaagaccacccaggtgaaggactacagctttgtgacagaggagaacacctttgaggtgaagctgttcaagaacagcagcggcctgggcttctccttcagccgggaggacaacctgatccctgagcagatcaatgccagcatcgtgcgggtgaagaagctgtttcctggccagcctgctgctgagagcggcaagattgatgtgggagatgtgatcctgaaggtgaatggagccagcctgaagggcctgagccagcaggaggtgatcagcgccctgcggggcacagcccctgaggtgttcctgctgctgtgcaggcctcctcctggggtgctgcctgagattgacacagccctgctgacccccctgcagagccctgcccaggtgctgcccaacagcagcaaggacagcagccagcccagctgtgtggagcagagcaccagcagtgatgaaaatgagatgtctgacaagagcaagaagcagtgcaagagccccagcagaagagacagctacagcgacagcagcggcagcggagaagatgacctggtgacagccccagccaacatcagcaacagcacctggagcagcgccctgcaccagaccctgagcaacatggtgtcccaggcccagagccaccacgaggcccccaagagccaggaggacaccatctgcaccatgttctactacccccagaagatccccaacaagccagagtttgaggacagcaaccccagccccctgcccccagacatggcccctggccagagctaccagccccagagcgagagcgccagcagcagctccatggacaagtaccacatccaccacatcagcgagcccacccggcaggagaactggacccccctgaagaatgacctggagaaccacctggaggactttgagctggaggtggagctgctgatcaccctcatcaagtctgagaagggcagcctgggcttcaccgtgaccaagggcaaccagagaattggctgctacgtgcatgatgtgatccaggaccctgccaagagtgatggccgcctgaagccaggggacaggctcatcaaggtgaatgacacagatgtgaccaacatgacccacacagatgctgtgaacctgctgcgggccgccagcaagacagtgcggctggtgattggccgggtgctggagctgccccgcatccccatgctgccccacctgctgcctgacatcaccctgacctgcaacaaggaggagctgggcttcagcctgtgtggcggccatgacagcctgtaccaggtggtgtacatcagtgacatcaaccccaggtctgtggccgccatcgagggcaacctgcagctgctggatgtgatccactacgtgaatggagtgtccacccagggcatgaccctggaggaggtgaacagagccctggacatgagcctgcccagcctggtgctgaaggccaccagaaatgacctgcctgtggtgcccagcagcaagaggtctgctgtgtctgcccccaagagcaccaagggaaatggcagctacagcgtgggcagctgcagccagcctgccctgaccccaaatgacagcttcagcacagtggccggggaggagatcaatgagatctcctaccccaagggcaagtgcagcacctaccagatcaagggcagccccaacctgaccctgcccaaggagagctacatccaggaggatgacatctatgatgacagccaggaggccgaggtgatccagagcctgctggatgtggtggatgaggaggcccagaacctgctgaatgaaaataatgctgctggctacagctgtggccctggcaccctgaagatgaatggcaagctgtctgaggagaggacagaggacacagactgtgatggcagccccctgcctgagtacttcacagaggccaccaagatgaatggctgtgaggagtactgtgaggagaaggtgaagtctgagagcctcatccagaagccccaggagaagaagacagatgatgatgagatcacctggggcaatgatgagctgcccattgaaagaaccaaccatgaagattctgacaaggaccacagcttcctgaccaatgatgagctggccgtgctgcctgtggtgaaggtgctgcccagcggcaagtacaccggggccaacctgaagagcgtcatccgggtgctgcggggcctgctggaccagggcatccccagcaaggagctggagaacctgcaggagctgaagcccctggaccagtgcctgattggccagaccaaggaaaatagaaggaagaaccgctacaagaacatcctgccctatgatgccaccagggtgcccctgggagatgaaggaggctacatcaatgccagcttcatcaagatccctgtgggcaaggaggagtttgtgtacatcgcctgccagggccccctgcccaccaccgtgggggacttctggcagatgatctgggagcagaagagcaccgtcatcgccatgatgacccaggaggtggagggggagaagatcaagtgccagcgctactggcccaacatcctgggcaagaccaccatggtgagcaaccggctgcggctggccctggtgaggatgcagcagctgaagggctttgtggtgcgggccatgaccctggaggacatccagacccgggaggtgcgccacatcagccacctgaacttcaccgcctggccagaccatgacacccccagccagccagatgacctgctgaccttcatctcctacatgaggcacatccacaggagcggccccatcatcacccactgcagcgctggcatcggccgcagcggcaccctcatctgcattgatgtggtgctgggcctcatcagccaggacctggactttgacatcagtgacctggtgcgctgcatgaggctgcagagacatggcatggtgcagacagaggaccagtacatcttctgctaccaggtgatcctgtatgtgctgacccggctgcaggccgaggaggagcagaagcagcagccccagctgctgaagtag

SEQ ID NO: 166262 - DNA, 7458 bp, synthetic construct
  misc_feature 1..7458: note = Description of Artificial Sequence: Synthetic coding sequence
  source 1..7458: mol_type = other DNA
atgcacgtgtccctggccgaggccctggaggtgcggggcggccccctgcaggaggaggagatctgggccgtgctgaaccagagcgctgagagcctgcaggagctgttcaggaaggtgtccctggccgaccctgctgccctgggcttcatcatcagcccctggagcctgctgctgctgcccagcggctctgtgtccttcacagatgagaacatcagcaaccaggacctgcgggccttcaccgcccctgaggtgctgcagaaccagagcctgaccagcctgagtgatgtggagaagatccacatctacagcctgggcatgaccctgtactggggcgctgactatgaggtgccccagagccagcccatcaagctgggggaccacctgaacagcatcctgctgggcatgtgtgaagatgtgatctatgcccgggtgtctgtgaggacagtgctggatgcctgcagcgcccacatccggaacagcaactgtgcccccagcttctcctatgtgaagcacctggtgaagctggtgctgggcaacctgtctggaacagaccagctgagctgcaacagcgagcagaagccagacaggagccaggccatccgggaccggctgcggggcaagggcctgcccaccggccgcagcagcaccagtgatgtgctggacatccagaagccacccctgagccaccagaccttcctgaacaagggcctgagcaagtccatgggcttcctgagcatcaaggacacccaggatgagaactacttcaaggacatcctgagtgacaacagcggccgggaggacagcgagaacaccttcagcccctaccagttcaagaccagcggccctgagaagaagcccatccctggcattgatgtgctgagcaagaagaagatctgggccagctccatggacctgctgtgcacagctgaccgggacttcagcagtggagaaacagccacctaccgccgctgccaccctgaggccgtgacagtgaggaccagcaccacccccaggaagaaggaggcccgctacagtgatggcagcatcgccctggacatcttcggcccccagaagatggaccccatctaccacacccgggagctgcccaccagcagcgccatcagcagcgccctggaccgcatccgggagcggcagaagaagctgcaggtgctgcgggaggccatgaatgtggaggagcctgtgcggcgctacaagacctaccatggagatgtgttcagcaccagcagcgagagccccagcatcatcagcagcgagagtgacttccggcaggtgcggcgctctgaggccagcaagagatttgagagcagcagcggcctgcccggggtggatgagaccctgagccagggccagagccagaggcccagccggcagtatgagaccccatttgagggcaacctgatcaaccaggagatcatgctgaagaggcaggaggaggagctgatgcagctgcaggccaagatggccctgcggcagagccggctgagcctgtacccaggggacaccatcaaggcctccatgctggacatcacccgggaccccctgcgggagatcgccctggagacagccatgacccagaggaagctgaggaacttctttggacctgagtttgtgaagatgaccatcgagcccttcatcagcctggacctgcccaggagcatcctgaccaagaagggcaagaatgaagacaacagaaggaaggtgaacatcatgctgctgaatggccagaggctggagctgacctgtgacaccaagaccatctgcaaggatgtgtttgacatggtggtggcccacatcggcctggtggagcaccacctgtttgccctggccaccctgaaggacaatgagtacttctttgtggaccctgacctgaagctgaccaaggtggcccctgagggctggaaggaggagcccaagaagaagaccaaggccaccgtgaacttcaccctcttcttccgcatcaagttcttcatggatgatgtgtccctcatccagcacaccctgacctgccaccagtactacctgcagctgaggaaggacatcctggaggagaggatgcactgtgatgatgagaccagcctgctgctggccagcctggccctgcaggccgagtatggagactaccagcctgaggtgcatggagtgtcctacttcaggatggagcactacctgcctgcccgggtgatggagaagctggacctgagctacatcaaggaggagctgcccaagctgcacaacacctacgtgggcgccagcgagaaggagacagagctggagttcctgaaggtgtgccagaggctgacagaatatggagtgcacttccaccgggtgcaccctgagaagaagagccagacaggcatcctgctgggcgtgtgcagcaagggcgtgctggtgtttgaggtgcacaatggagtgaggaccctggtgctgcgcttcccctggagggagaccaagaagatctccttcagcaagaagaagatcaccctgcagaacaccagtgatggcatcaagcacggcttccagacagacaacagcaagatctgccagtacctgctgcacctgtgcagctaccagcacaagttccagctgcagatgagggcccggcagagcaaccaggatgcccaggacatcgagcgggccagcttccgcagcctgaacctgcaggccgagagcgtgcggggcttcaacatgggccgggccatcagcacaggcagcctggccagcagcaccctgaacaagctggccgtgcggcccctgtctgtgcaggccgagatcctgaagaggctgagctgcagcgagctgagcctgtaccagcccctgcagaacagcagcaaggagaagaatgacaaggcctcctgggaggagaagccccgggagatgagcaagagctaccatgacctgagccaggccagcctgtacccccacaggaagaatgtcatcgtgaacatggagcccccaccccagacagtggccgagctggtgggcaagcccagccaccagatgagcagaagtgatgctgagagcctggccggcgtgaccaagctgaacaacagcaagtctgtggccagcctgaacagaagccctgagaggaggaagcatgaaagtgacagcagcagcattgaagatcctggccaggcctacgtgctgggcatgaccatgcacagcagcggcaacagcagcagccaggtgcccctgaaggaaaatgatgtgctgcacaagcgctggagcatcgtgagcagccctgagcgggagatcaccctggtgaacctgaagaaggatgccaagtatggcctgggcttccagatcattggaggagagaagatgggccgcctggacctgggcatcttcatcagctctgtggcccctgggggccctgctgacctggatggctgcctgaagccaggggacaggctcatctctgtgaacagcgtgtccctggagggcgtgagccaccacgccgccatcgagatcctgcagaatgccccagaagatgtgaccctggtgatcagccagcccaaggagaagatcagcaaggtgcccagcacccctgtgcacctgaccaatgagatgaagaactacatgaagaagagcagctacatgcaggacagcgccatcgacagcagcagcaaggaccaccactggagccggggcaccctgcggcacatcagcgagaacagctttggccccagcggcggcctgcgggagggcagcctgagcagccaggacagcaggacagaaagtgccagcctgagccagagccaggtgaatggcttctttgccagccacctgggggaccagacctggcaggagagccagcacggcagccccagccccagcgtcatcagcaaggccacagagaaggagaccttcacagacagcaaccagagcaagaccaagaagccaggcatcagtgatgtgacagactacagcgacagaggagacagcgacatggatgaggccacctacagcagcagccaggaccaccagacccccaagcaggagagcagcagctctgtgaacaccagcaacaagatgaacttcaagaccttcagcagcagcccccccaagccaggggacatctttgaggtggagctggccaagaatgacaacagcctgggcatctctgtgactggaggagtgaacacctctgtgcgccacggcggcatctacgtgaaggctgtgatcccccagggcgctgctgagagtgatggccgcatccacaagggggacagagtgctggccgtgaatggagtgtccctggagggcgccacccacaagcaggccgtggagaccctgaggaacacaggccaggtggtgcacctgctgctggagaagggccagagccccaccagcaaggagcacgtgcctgtgaccccccagtgcaccctgagtgaccagaatgcccagggccagggccctgagaaggtgaagaagaccacccaggtgaaggactacagctttgtgacagaggagaacacctttgaggtgaagctgttcaagaacagcagcggcctgggcttctccttcagccgggaggacaacctgatccctgagcagatcaatgccagcatcgtgcgggtgaagaagctgtttcctggccagcctgctgctgagagcggcaagattgatgtgggagatgtgatcctgaaggtgaatggagccagcctgaagggcctgagccagcaggaggtgatcagcgccctgcggggcacagcccctgaggtgttcctgctgctgtgccggcccccacctggggtgctgcctgagattgacacagccctgctgacccccctgcagagccctgcccaggtgctgcccaacagcagcaaggacagcagccagcccagctgtgtggagcagagcaccagcagtgatgaaaatgagatgtctgacaagagcaagaagcagtgcaagagccccagccggcgggacagctacagcgacagcagcggcagcggggaggatgacctggtgacagccccagccaacatcagcaacagcacctggagcagcgccctgcaccagaccctgagcaacatggtgtcccaggcccagagccaccacgaggcccccaagagccaggaggacaccatctgcaccatgttctactacccccagaagatccccaacaagccagagtttgaggacagcaaccccagccccctgcccccagacatggcccctggccagagctaccagccccagagcgagagcgccagcagcagctccatggacaagtaccacatccaccacatcagcgagcccacccggcaggagaactggacccccctgaagaatgacctggagaaccacctggaggactttgagctggaggtggagctgctgatcaccctcatcaagtctgagaagggcagcctgggcttcaccgtgaccaagggcaaccagagaattggctgctacgtgcatgatgtgatccaggaccctgccaagagtgatggccgcctgaagccaggggacaggctcatcaaggtgaatgacacagatgtgaccaacatgacccacacagatgctgtgaacctgctgcgggccgccagcaagacagtgcggctggtgattggccgggtgctggagctgccccgcatccccatgctgccccacctgctgcctgacatcaccctgacctgcaacaaggaggagctgggcttcagcctgtgtggcggccatgacagcctgtaccaggtggtgtacatcagtgacatcaaccccaggtctgtggccgccatcgagggcaacctgcagctgctggatgtgatccactacgtgaatggagtgtccacccagggcatgaccctggaggaggtgaacagagccctggacatgagcctgcccagcctggtgctgaaggccaccagaaatgacctgcctgtggtgcccagcagcaagaggtctgctgtgtctgcccccaagagcaccaagggaaatggcagctacagcgtgggcagctgcagccagcctgccctgaccccaaatgacagcttcagcacagtggccggggaggagatcaatgagatctcctaccccaagggcaagtgcagcacctaccagatcaagggcagccccaacctgaccctgcccaaggagagctacatccaggaggatgacatctatgatgacagccaggaggccgaggtgatccagagcctgctggatgtggtggatgaggaggcccagaacctgctgaatgaaaataatgctgctggctacagctgtggccctggcaccctgaagatgaatggcaagctgtctgaggagaggacagaggacacagactgtgatggcagccccctgcctgagtacttcacagaggccaccaagatgaatggctgtgaggagtactgtgaggagaaggtgaagtctgagagcctcatccagaagccccaggagaagaagacagatgatgatgagatcacctggggcaatgatgagctgcccatcgagaggaccaaccacgaggacagcgacaaggaccacagcttcctgaccaatgatgagctggccgtgctgcctgtggtgaaggtgctgcccagcggcaagtacacaggagccaacctgaagagcgtcatccgggtgctgcggggcctgctggaccagggcatccccagcaaggagctggagaacctgcaggagctgaagcccctggaccagtgcctgattggccagaccaaggagaacagaaggaagaaccgctacaagaacatcctgccctatgatgccaccagggtgcccctgggagatgagggcggctacatcaatgccagcttcatcaagatccctgtgggcaaggaggagtttgtgtacatcgcctgccagggccccctgcccaccaccgtgggggacttctggcagatgatctgggagcagaagagcacagtgattgccatgatgacccaggaggtggagggggagaagatcaagtgccagcgctactggcccaacatcctgggcaagaccaccatggtgagcaaccggctgcggctggccctggtgaggatgcagcagctgaagggctttgtggtgcgggccatgaccctggaggacatccagacccgggaggtgcgccacatcagccacctgaacttcaccgcctggccagaccatgacacccccagccagccagatgacctgctgaccttcatctcctacatgaggcacatccacaggagcggccccatcatcacccactgcagcgctggcatcggccgcagcggcaccctcatctgcattgatgtggtgctgggcctcatcagccaggacctggactttgacatcagtgacctggtgcgctgcatgaggctgcagagacatggcatggtgcagacagaggaccagtacatcttctgctaccaggtgatcctgtatgtgctgacccggctgcaggccgaggaggagcagaagcagcagccccagctgctgaagtag

SEQ ID NO: 166263 - DNA, 7401 bp, synthetic construct
  misc_feature 1..7401: note = Description of Artificial Sequence: Synthetic coding sequence
  source 1..7401: mol_type = other DNA
atgcacgtgtccctggccgaggccctggaggtgcggggcggccccctgcaggaggaggagatctgggccgtgctgaaccagagcgctgagagcctgcaggagctgttcaggaaggtgtccctggccgaccctgctgccctgggcttcatcatcagcccctggagcctgctgctgctgcccagcggctctgtgtccttcacagatgagaacatcagcaaccaggacctgcgggccttcaccgcccctgaggtgctgcagaaccagagcctgaccagcctgagtgatgtggagaagatccacatctacagcctgggcatgaccctgtactggggcgctgactatgaggtgccccagagccagcccatcaagctgggggaccacctgaacagcatcctgctgggcatgtgtgaagatgtgatctatgcccgggtgtctgtgaggacagtgctggatgcctgcagcgcccacatccggaacagcaactgtgcccccagcttctcctatgtgaagcacctggtgaagctggtgctgggcaacctgtctggaacagaccagctgagctgcaacagcgagcagaagccagacaggagccaggccatccgggaccggctgcggggcaagggcctgcccaccggccgcagcagcaccagtgatgtgctggacatccagaagccacccctgagccaccagaccttcctgaacaagggcctgagcaagtccatgggcttcctgagcatcaaggacacccaggatgagaactacttcaaggacatcctgagtgacaacagcggccgggaggacagcgagaacaccttcagcccctaccagttcaagaccagcggccctgagaagaagcccatccctggcattgatgtgctgagcaagaagaagatctgggccagctccatggacctgctgtgcacagctgaccgggacttcagcagtggagaaacagccacctaccgccgctgccaccctgaggccgtgacagtgaggaccagcaccacccccaggaagaaggaggcccgctacagtgatggcagcatcgccctggacatcttcggcccccagaagatggaccccatctaccacacccgggagctgcccaccagcagcgccatcagcagcgccctggaccgcatccgggagcggcagaagaagctgcaggtgctgcgggaggccatgaatgtggaggagcctgtgcggcgctacaagacctaccatggagatgtgttcagcaccagcagcgagagccccagcatcatcagcagcgagagtgacttccggcaggtgcggcgctctgaggccagcaagagatttgagagcagcagcggcctgcccggggtggatgagaccctgagccagggccagagccagaggcccagccggcagtatgagaccccatttgagggcaacctgatcaaccaggagatcatgctgaagaggcaggaggaggagctgatgcagctgcaggccaagatggccctgcggcagagccggctgagcctgtacccaggggacaccatcaaggcctccatgctggacatcacccgggaccccctgcgggagatcgccctggagacagccatgacccagaggaagctgaggaacttctttggacctgagtttgtgaagatgaccatcgagcccttcatcagcctggacctgcccaggagcatcctgaccaagaagggcaagaatgaagacaacagaaggaaggtgaacatcatgctgctgaatggccagaggctggagctgacctgtgacaccaagaccatctgcaaggatgtgtttgacatggtggtggcccacatcggcctggtggagcaccacctgtttgccctggccaccctgaaggacaatgagtacttctttgtggaccctgacctgaagctgaccaaggtggcccctgagggctggaaggaggagcccaagaagaagaccaaggccaccgtgaacttcaccctcttcttccgcatcaagttcttcatggatgatgtgtccctcatccagcacaccctgacctgccaccagtactacctgcagctgaggaaggacatcctggaggagaggatgcactgtgatgatgagaccagcctgctgctggccagcctggccctgcaggccgagtatggagactaccagcctgaggtgcatggagtgtcctacttcaggatggagcactacctgcctgcccgggtgatggagaagctggacctgagctacatcaaggaggagctgcccaagctgcacaacacctacgtgggcgccagcgagaaggagacagagctggagttcctgaaggtgtgccagaggctgacagaatatggagtgcacttccaccgggtgcaccctgagaagaagagccagacaggcatcctgctgggcgtgtgcagcaagggcgtgctggtgtttgaggtgcacaatggagtgaggaccctggtgctgcgcttcccctggagggagaccaagaagatctccttcagcaagaagaagatcaccctgcagaacaccagtgatggcatcaagcacggcttccagacagacaacagcaagatctgccagtacctgctgcacctgtgcagctaccagcacaagttccagctgcagatgagggcccggcagagcaaccaggatgcccaggacatcgagcgggccagcttccgcagcctgaacctgcaggccgagagcgtgcggggcttcaacatgggccgggccatcagcacaggcagcctggccagcagcaccctgaacaagctggccgtgcggcccctgtctgtgcaggccgagatcctgaagaggctgagctgcagcgagctgagcctgtaccagcccctgcagaacagcagcaaggagaagaatgacaaggcctcctgggaggagaagccccgggagatgagcaagagctaccatgacctgagccaggccagcctgtacccccacaggaagaatgtcatcgtgaacatggagcccccaccccagacagtggccgagctggtgggcaagcccagccaccagatgagcagaagtgatgctgagagcctggccggcgtgaccaagctgaacaacagcaagtctgtggccagcctgaacagaagccctgagaggaggaagcatgaaagtgacagcagcagcattgaagatcctggccaggcctacgtgctggatgtgctgcacaagcgctggagcatcgtgagcagccctgagcgggagatcaccctggtgaacctgaagaaggatgccaagtatggcctgggcttccagatcatcggcggggagaagatgggccgcctggacctgggcatcttcatcagctctgtggcccctgggggccctgctgacctggatggctgcctgaagccaggggacaggctcatctctgtgaacagcgtgtccctggagggcgtgagccaccacgccgccatcgagatcctgcagaatgccccagaagatgtgaccctggtgatcagccagcccaaggagaagatcagcaaggtgcccagcacccctgtgcacctgaccaatgagatgaagaactacatgaagaagagcagctacatgcaggacagcgccatcgacagcagcagcaaggaccaccactggagccggggcaccctgcggcacatcagtgaaaattcctttggccccagcggcggcctgcgggagggcagcctgagcagccaggacagcaggacagagagcgccagcctgagccagagccaggtgaatggcttctttgccagccacctgggggaccagacctggcaggagagccagcacggcagccccagccccagcgtcatcagcaaggccacagagaaggagaccttcacagacagcaaccagagcaagaccaagaagccaggcatcagtgatgtgacagactacagcgacagaggagacagcgacatggatgaggccacctacagcagcagccaggaccaccagacccccaagcaggagagcagcagctctgtgaacaccagcaacaagatgaacttcaagaccttcagcagcagcccccccaagccaggggacatctttgaggtggagctggccaagaatgacaacagcctgggcatctctgtgactggaggagtgaacacctctgtgagacatggaggcatctacgtgaaggccgtcatcccccagggcgctgctgagagtgatggccgcatccacaagggggacagagtgctggccgtgaatggagtgtccctggagggcgccacccacaagcaggccgtggagaccctgaggaacacaggccaggtggtgcacctgctgctggagaagggccagagccccaccagcaaggagcacgtgcctgtgaccccccagtgcaccctgagtgaccagaatgcccagggccagggccctgagaaggtgaagaagaccacccaggtgaaggactacagctttgtgacagaggagaacacctttgaggtgaagctgttcaagaacagcagcggcctgggcttctccttcagccgggaggacaacctgatccctgagcagatcaatgccagcatcgtgcgggtgaagaagctgtttcctggccagcctgctgctgagagcggcaagattgatgtgggagatgtgatcctgaaggtgaatggagccagcctgaagggcctgagccagcaggaggtgatcagcgccctgcggggcacagcccctgaggtgttcctgctgctgtgcaggcctcctcctggggtgctgcctgagattgacacagccctgctgacccccctgcagagccctgcccaggtgctgcccaacagcagcaaggacagcagccagcccagctgtgtggagcagagcaccagcagtgatgaaaatgagatgtctgacaagagcaagaagcagtgcaagagccccagcagaagagacagctacagcgacagcagcggcagcggagaagatgacctggtgacagccccagccaacatcagcaacagcacctggagcagcgccctgcaccagaccctgagcaacatggtgtcccaggcccagagccaccacgaggcccccaagagccaggaggacaccatctgcaccatgttctactacccccagaagatccccaacaagccagagtttgaggacagcaaccccagccccctgcccccagacatggcccctggccagagctaccagccccagagcgagagcgccagcagcagctccatggacaagtaccacatccaccacatcagcgagcccacccggcaggagaactggacccccctgaagaatgacctggagaaccacctggaggactttgagctggaggtggagctgctgatcaccctcatcaagtctgagaagggcagcctgggcttcaccgtgaccaagggcaaccagagaattggctgctacgtgcatgatgtgatccaggaccctgccaagagtgatggccgcctgaagccaggggacaggctcatcaaggtgaatgacacagatgtgaccaacatgacccacacagatgctgtgaacctgctgcgggccgccagcaagacagtgcggctggtgattggccgggtgctggagctgccccgcatccccatgctgccccacctgctgcctgacatcaccctgacctgcaacaaggaggagctgggcttcagcctgtgtggcggccatgacagcctgtaccaggtggtgtacatcagtgacatcaaccccaggtctgtggccgccatcgagggcaacctgcagctgctggatgtgatccactacgtgaatggagtgtccacccagggcatgaccctggaggaggtgaacagagccctggacatgagcctgcccagcctggtgctgaaggccaccagaaatgacctgcctgtggtgcccagcagcaagaggtctgctgtgtctgcccccaagagcaccaagggaaatggcagctacagcgtgggcagctgcagccagcctgccctgaccccaaatgacagcttcagcacagtggccggggaggagatcaatgagatctcctaccccaagggcaagtgcagcacctaccagatcaagggcagccccaacctgaccctgcccaaggagagctacatccaggaggatgacatctatgatgacagccaggaggccgaggtgatccagagcctgctggatgtggtggatgaggaggcccagaacctgctgaatgaaaataatgctgctggctacagctgtggccctggcaccctgaagatgaatggcaagctgtctgaggagaggacagaggacacagactgtgatggcagccccctgcctgagtacttcacagaggccaccaagatgaatggctgtgaggagtactgtgaggagaaggtgaagtctgagagcctcatccagaagccccaggagaagaagacagatgatgatgagatcacctggggcaatgatgagctgcccattgaaagaaccaaccatgaagattctgacaaggaccacagcttcctgaccaatgatgagctggccgtgctgcctgtggtgaaggtgctgcccagcggcaagtacaccggggccaacctgaagagcgtcatccgggtgctgcggggcctgctggaccagggcatccccagcaaggagctggagaacctgcaggagctgaagcccctggaccagtgcctgattggccagaccaaggaaaatagaaggaagaaccgctacaagaacatcctgccctatgatgccaccagggtgcccctgggagatgaaggaggctacatcaatgccagcttcatcaagatccctgtgggcaaggaggagtttgtgtacatcgcctgccagggccccctgcccaccaccgtgggggacttctggcagatgatctgggagcagaagagcaccgtcatcgccatgatgacccaggaggtggagggggagaagatcaagtgccagcgctactggcccaacatcctgggcaagaccaccatggtgagcaaccggctgcggctggccctggtgaggatgcagcagctgaagggctttgtggtgcgggccatgaccctggaggacatccagacccgggaggtgcgccacatcagccacctgaacttcaccgcctggccagaccatgacacccccagccagccagatgacctgctgaccttcatctcctacatgaggcacatccacaggagcggccccatcatcacccactgcagcgctggcatcggccgcagcggcaccctcatctgcattgatgtggtgctgggcctcatcagccaggacctggactttgacatcagtgacctggtgcgctgcatgaggctgcagagacatggcatggtgcagacagaggaccagtacatcttctgctaccaggtgatcctgtatgtgctgacccggctgcaggccgaggaggagcagaagcagcagccccagctgctgaagtag

SEQ ID NO: 166264 - DNA, 7473 bp, synthetic construct
  misc_feature 1..7473: note = Description of Artificial Sequence: Synthetic coding sequence
  source 1..7473: mol_type = other DNA
atgcacgtgtccctggccgaggccctggaggtgcggggcggccccctgcaggaggaggagatctgggccgtgctgaaccagagcgctgagagcctgcaggagctgttcaggaaggtgtccctggccgaccctgctgccctgggcttcatcatcagcccctggagcctgctgctgctgcccagcggctctgtgtccttcacagatgagaacatcagcaaccaggacctgcgggccttcaccgcccctgaggtgctgcagaaccagagcctgaccagcctgagtgatgtggagaagatccacatctacagcctgggcatgaccctgtactggggcgctgactatgaggtgccccagagccagcccatcaagctgggggaccacctgaacagcatcctgctgggcatgtgtgaagatgtgatctatgcccgggtgtctgtgaggacagtgctggatgcctgcagcgcccacatccggaacagcaactgtgcccccagcttctcctatgtgaagcacctggtgaagctggtgctgggcaacctgtctggaacagaccagctgagctgcaacagcgagcagaagccagacaggagccaggccatccgggaccggctgcggggcaagggcctgcccaccggccgcagcagcaccagtgatgtgctggacatccagaagccacccctgagccaccagaccttcctgaacaagggcctgagcaagtccatgggcttcctgagcatcaaggacacccaggatgagaactacttcaaggacatcctgagtgacaacagcggccgggaggacagcgagaacaccttcagcccctaccagttcaagaccagcggccctgagaagaagcccatccctggcattgatgtgctgagcaagaagaagatctgggccagctccatggacctgctgtgcacagctgaccgggacttcagcagtggagaaacagccacctaccgccgctgccaccctgaggccgtgacagtgaggaccagcaccacccccaggaagaaggaggcccgctacagtgatggcagcatcgccctggacatcttcggcccccagaagatggaccccatctaccacacccgggagctgcccaccagcagcgccatcagcagcgccctggaccgcatccgggagcggcagaagaagctgcaggtgctgcgggaggccatgaatgtggaggagcctgtgcggcgctacaagacctaccatggagatgtgttcagcaccagcagcgagagccccagcatcatcagcagcgagagtgacttccggcaggtgcggcgctctgaggccagcaagagatttgagagcagcagcggcctgcccggggtggatgagaccctgagccagggccagagccagaggcccagccggcagtatgagaccccatttgagggcaacctgatcaaccaggagatcatgctgaagaggcaggaggaggagctgatgcagctgcaggccaagatggccctgcggcagagccggctgagcctgtacccaggggacaccatcaaggcctccatgctggacatcacccgggaccccctgcgggagatcgccctggagacagccatgacccagaggaagctgaggaacttctttggacctgagtttgtgaagatgaccatcgagcccttcatcagcctggacctgcccaggagcatcctgaccaagaagggcaagaatgaagacaacagaaggaaggtgaacatcatgctgctgaatggccagaggctggagctgacctgtgacaccaagaccatctgcaaggatgtgtttgacatggtggtggcccacatcggcctggtggagcaccacctgtttgccctggccaccctgaaggacaatgagtacttctttgtggaccctgacctgaagctgaccaaggtggcccctgagggctggaaggaggagcccaagaagaagaccaaggccaccgtgaacttcaccctcttcttccgcatcaagttcttcatggatgatgtgtccctcatccagcacaccctgacctgccaccagtactacctgcagctgaggaaggacatcctggaggagaggatgcactgtgatgatgagaccagcctgctgctggccagcctggccctgcaggccgagtatggagactaccagcctgaggtgcatggagtgtcctacttcaggatggagcactacctgcctgcccgggtgatggagaagctggacctgagctacatcaaggaggagctgcccaagctgcacaacacctacgtgggcgccagcgagaaggagacagagctggagttcctgaaggtgtgccagaggctgacagaatatggagtgcacttccaccgggtgcaccctgagaagaagagccagacaggcatcctgctgggcgtgtgcagcaagggcgtgctggtgtttgaggtgcacaatggagtgaggaccctggtgctgcgcttcccctggagggagaccaagaagatctccttcagcaagaagaagatcaccctgcagaacaccagtgatggcatcaagcacggcttccagacagacaacagcaagatctgccagtacctgctgcacctgtgcagctaccagcacaagttccagctgcagatgagggcccggcagagcaaccaggatgcccaggacatcgagcgggccagcttccgcagcctgaacctgcaggccgagagcgtgcggggcttcaacatgggccgggccatcagcacaggcagcctggccagcagcaccctgaacaagctggccgtgcggcccctgtctgtgcaggccgagatcctgaagaggctgagctgcagcgagctgagcctgtaccagcccctgcagaacagcagcaaggagaagaatgacaaggcctcctgggaggagaagccccgggagatgagcaagagctaccatgacctgagccaggccagcctgtacccccacaggaagaatgtcatcgtgaacatggagcccccaccccagacagtggccgagctggtgggcaagcccagccaccagatgagcagaagtgatgctgagagcctggccggcgtgaccaagctgaacaacagcaagtctgtggccagcctgaacagaagccctgagaggaggaagcatgaaagtgacagcagcagcattgaagatcctggccaggcctacgtgctgggcatgaccatgcacagcagcggcaacagcagcagccaggtgcccctgaaggaaaatgatgtgctgcacaagcgctggagcatcgtgagcagccctgagcgggagatcaccctggtgaacctgaagaaggatgccaagtatggcctgggcttccagatcattggaggagagaagatgggccgcctggacctgggcatcttcatcagctctgtggcccctgggggccctgctgacctggatggctgcctgaagccaggggacaggctcatctctgtgaacagcgtgtccctggagggcgtgagccaccacgccgccatcgagatcctgcagaatgccccagaagatgtgaccctggtgatcagccagcccaaggagaagatcagcaaggtgcccagcacccctgtgcacctgaccaatgagatgaagaactacatgaagaagagcagctacatgcaggacagcgccatcgacagcagcagcaaggaccaccactggagccggggcaccctgcggcacatcagcgagaacagctttggccccagcggcggcctgcgggagggcagcctgagcagccaggacagcaggacagaaagtgccagcctgagccagagccaggtgaatggcttctttgccagccacctgggggaccagacctggcaggagagccagcacggcagccccagccccagcgtcatcagcaaggccacagagaaggagaccttcacagacagcaaccagagcaagaccaagaagccaggcatcagtgatgtgacagactacagcgacagaggagacagcgacatggatgaggccacctacagcagcagccaggaccaccagacccccaagcaggagagcagcagctctgtgaacaccagcaacaagatgaacttcaagaccttcagcagcagcccccccaagccaggggacatctttgaggtggagctggccaagaatgacaacagcctgggcatctctgtgacagtgctgtttgacaagggcggcgtgaacacctctgtgagacatggaggcatctacgtgaaggccgtcatcccccagggcgctgctgagagtgatggccgcatccacaagggggacagagtgctggccgtgaatggagtgtccctggagggcgccacccacaagcaggccgtggagaccctgaggaacacaggccaggtggtgcacctgctgctggagaagggccagagccccaccagcaaggagcacgtgcctgtgaccccccagtgcaccctgagtgaccagaatgcccagggccagggccctgagaaggtgaagaagaccacccaggtgaaggactacagctttgtgacagaggagaacacctttgaggtgaagctgttcaagaacagcagcggcctgggcttctccttcagccgggaggacaacctgatccctgagcagatcaatgccagcatcgtgcgggtgaagaagctgtttcctggccagcctgctgctgagagcggcaagattgatgtgggagatgtgatcctgaaggtgaatggagccagcctgaagggcctgagccagcaggaggtgatcagcgccctgcggggcacagcccctgaggtgttcctgctgctgtgcaggcctcctcctggggtgctgcctgagattgacacagccctgctgacccccctgcagagccctgcccaggtgctgcccaacagcagcaaggacagcagccagcccagctgtgtggagcagagcaccagcagtgatgaaaatgagatgtctgacaagagcaagaagcagtgcaagagccccagcagaagagacagctacagcgacagcagcggcagcggagaagatgacctggtgacagccccagccaacatcagcaacagcacctggagcagcgccctgcaccagaccctgagcaacatggtgtcccaggcccagagccaccacgaggcccccaagagccaggaggacaccatctgcaccatgttctactacccccagaagatccccaacaagccagagtttgaggacagcaaccccagccccctgcccccagacatggcccctggccagagctaccagccccagagcgagagcgccagcagcagctccatggacaagtaccacatccaccacatcagcgagcccacccggcaggagaactggacccccctgaagaatgacctggagaaccacctggaggactttgagctggaggtggagctgctgatcaccctcatcaagtctgagaagggcagcctgggcttcaccgtgaccaagggcaaccagagaattggctgctacgtgcatgatgtgatccaggaccctgccaagagtgatggccgcctgaagccaggggacaggctcatcaaggtgaatgacacagatgtgaccaacatgacccacacagatgctgtgaacctgctgcgggccgccagcaagacagtgcggctggtgattggccgggtgctggagctgccccgcatccccatgctgccccacctgctgcctgacatcaccctgacctgcaacaaggaggagctgggcttcagcctgtgtggcggccatgacagcctgtaccaggtggtgtacatcagtgacatcaaccccaggtctgtggccgccatcgagggcaacctgcagctgctggatgtgatccactacgtgaatggagtgtccacccagggcatgaccctggaggaggtgaacagagccctggacatgagcctgcccagcctggtgctgaaggccaccagaaatgacctgcctgtggtgcccagcagcaagaggtctgctgtgtctgcccccaagagcaccaagggaaatggcagctacagcgtgggcagctgcagccagcctgccctgaccccaaatgacagcttcagcacagtggccggggaggagatcaatgagatctcctaccccaagggcaagtgcagcacctaccagatcaagggcagccccaacctgaccctgcccaaggagagctacatccaggaggatgacatctatgatgacagccaggaggccgaggtgatccagagcctgctggatgtggtggatgaggaggcccagaacctgctgaatgaaaataatgctgctggctacagctgtggccctggcaccctgaagatgaatggcaagctgtctgaggagaggacagaggacacagactgtgatggcagccccctgcctgagtacttcacagaggccaccaagatgaatggctgtgaggagtactgtgaggagaaggtgaagtctgagagcctcatccagaagccccaggagaagaagacagatgatgatgagatcacctggggcaatgatgagctgcccattgaaagaaccaaccatgaagattctgacaaggaccacagcttcctgaccaatgatgagctggccgtgctgcctgtggtgaaggtgctgcccagcggcaagtacaccggggccaacctgaagagcgtcatccgggtgctgcggggcctgctggaccagggcatccccagcaaggagctggagaacctgcaggagctgaagcccctggaccagtgcctgattggccagaccaaggaaaatagaaggaagaaccgctacaagaacatcctgccctatgatgccaccagggtgcccctgggagatgaaggaggctacatcaatgccagcttcatcaagatccctgtgggcaaggaggagtttgtgtacatcgcctgccagggccccctgcccaccaccgtgggggacttctggcagatgatctgggagcagaagagcaccgtcatcgccatgatgacccaggaggtggagggggagaagatcaagtgccagcgctactggcccaacatcctgggcaagaccaccatggtgagcaaccggctgcggctggccctggtgaggatgcagcagctgaagggctttgtggtgcgggccatgaccctggaggacatccagacccgggaggtgcgccacatcagccacctgaacttcaccgcctggccagaccatgacacccccagccagccagatgacctgctgaccttcatctcctacatgaggcacatccacaggagcggccccatcatcacccactgcagcgctggcatcggccgcagcggcaccctcatctgcattgatgtggtgctgggcctcatcagccaggacctggactttgacatcagtgacctggtgcgctgcatgaggctgcagagacatggcatggtgcagacagaggaccagtacatcttctgctaccaggtgatcctgtatgtgctgacccggctgcaggccgaggaggagcagaagcagcagccccagctgctgaagtag

SEQ ID NO: 166265 - DNA, 420 bp, synthetic construct
  misc_feature 1..420: note = Description of Artificial Sequence: Synthetic coding sequence
  source 1..420: mol_type = other DNA
atgcacgtgtccctggccgaggccctggaggtgcggggcggccccctgcaggaggaggagatctgggccgtgctgaaccagagcgctgagagcctgcaggagctgttcaggaaggtgtccctggccgaccctgctgccctgggcttcatcatcagcccctggagcctgctgctgctgcccagcggctctgtgtccttcacagatgagaacatcagcaaccaggacctgcgggccttcaccgcccctgaggtgctgcagaaccagagcctgaccagcctgagtgatgtggagaagatccacatctacagcctgggcatgaccctgtactggggcgctgactatgaggtgccccagagccagcccatcaagctgggggaccacctgaacagcatcctgctgggcatgtgtgaagatgtgtag

SEQ ID NO: 166266 - DNA, 7473 bp, synthetic construct; identical to SEQ ID NO: 166264
  misc_feature 1..7473: note = Description of Artificial Sequence: Synthetic coding sequence
  source 1..7473: mol_type = other DNA

SEQ ID NO: 166267 - DNA, 3564 bp, synthetic construct
  misc_feature 1..3564: note = Description of Artificial Sequence: Synthetic coding sequence
  source 1..3564: mol_type = other DNA
atgcccttcggcctgaagctgcggaggacccggcgctacaacgtgctgagcaagaactgctttgtgacccgcatccggctgctggacagcaatgtgattgagtgcaccctgtctgtggagagcacaggccaggagtgcctggaggccgtggcccagaggctggagctgcgggagacccactacttcggcctgtggttcctgagcaagagccagcaggcccgctgggtggagctggagaagcccctgaagaagcacctggacaagtttgccaatgagcccctgctcttctttggagtgatgttctacgtgcccaacgtgtcctggctgcagcaggaggccacccgctaccagtactacctgcaggtgaagaaggatgtgctggagggccgcctgcgctgcaccctggaccaggtgatccggctggccggcctggccgtgcaggccgactttggagactacaaccagtttgacagccaggacttcctgcgggagtatgtgctcttccccatggacctggccctggaggaggccgtgctggaggagctgacccagaaggtggcccaggagcacaaggcccacagcggcatcctgcctgctgaggccgagctgatgtacatcaatgaggtggagcggctggatggcttcggccaggagatcttccctgtgaaggacaaccacggcaactgtgtgcacctgggcatcttcttcatgggcatctttgtgaggaacagaattggccggcaggccgtcatctaccgctggaatgacatgggcaacatcacccacaacaagagcaccatcctggtggagctgatcaacaaggaggagacagccctcttccacacagatgacattgaaaatgccaagtacatcagccggctgtttgccaccaggcacaagttctacaagcagaacaagatctgcacagagcagagcaacagccccccacccatccggcggcagcccacctggagccgcagcagcctgccccggcagcagccctacatcctgccccctgtgcacgtgcagtgtggggagcactacagcgagacccacaccagccaggacagcatcttccacggcaatgaggaggccctgtactgcaacagccacaacagcctggacctgaactacctgaatggcaccgtgaccaatggatctgtgtgcagcgtgcacagcgtgaacagcctgaactgcagccagagcttcatccaggccagccctgtgagcagcaacctgagcatccctggcagtgacatcatgagagctgactacatccccagccaccgccacagcgccatcatcgtgcccagctaccggcccaccccagactatgaaacagtgatgaggcagatgaagaggggcatcctgcacacagacagccagagccagagcctgaggaacctgaacatcatcaacacccacgcctacaaccagcctgaggacctggtgtacagccagcctgagatgagggagcggcacccctacacagtgccctacggcccccagggcgtgtacagcaacaagctggtgagccccagcgaccagaggaaccccaagaacaacgtggtgcccagcaagccaggggccagcgccatcagccacacagtgtccaccccagagctggccaacatgcagctgcagggcagccacaactacagcacagcccacatgctgaagaactacctgttccggcccccaccaccctacccccggcccaggcctgccaccagcaccccagacctggccagccaccgccacaagtatgtgtctggcagcagcccagacctggtgaccaggaaggtgcagctgtctgtgaagaccttccaggaggacagcagccctgtggtgcaccagagcctgcaggaggtgtctgagcccctgacagccaccaagcaccacggcaccgtgaacaagaggcacagcctggaggtgatgaacagcatggtgcggggcatggaggccatgaccctgaagagcctgcacctgcccatggcccggaggaacaccctgcgggagcagggccccccagaggagggcagcggcagccatgaggtgccccagctgccccagtaccaccacaagaagaccttcagtgatgccaccatgctgatccacagcagcgagagcgaggaggaggaggaggaggcccctgagagcgtgccccagatccccatgctgcgggagaagatggagtacagcgcccagctgcaggccgccctggcccgcatccccaacaagcccccacctgagtacccaggccccaggaagtctgtgtccaatggagccctgcggcaggaccaggccagcctgcccccagccatggcccgggcccgggtgctgcggcacggccctgccaaggccatctccatgagcaggacagaccccccagctgtgaatggagccagcctgggccccagcatcagcgagccagacctgacctctgtgaaggagcgggtgaagaaggagcctgtgaaggagaggcctgtgtctgagatgttcagcctggaggacagcatcatcgagcgggagatgatgatccggaacctggagaagcagaagatggccggcctggaggcccagaagaggcccctgatgctggccgccctgaatggcctgtctgtggcccgggtgtctggccgggaggagaacagagtggatgccaccagggtgcccatggatgagcgcttccgcaccctgaagaagaagctggaggagggcatggtgttcacagaatatgagcagatccccaagaagaaggccaacggcatcttcagcacagctgccctgcctgaaaatgctgagaggagccgcatccgggaggtggtgccctatgaagaaaatagagtggagctgatccccaccaaggagaacaacacaggctacatcaatgccagccacatcaaggtggtggtgggcggcgctgagtggcactacatcgccacccagggccccctgccccacacctgccacgacttctggcagatggtgtgggagcagggcgtgaatgtgattgccatggtgacagctgaggaggagggcggccgcaccaagagccaccgctactggcccaagctgggcagcaagcacagcagcgccacctacggcaagttcaaggtgaccaccaagttcagaacagacagcgtgtgctacgccaccaccggcctgaaggtgaagcacctgctgagcggccaggagaggacagtgtggcacctgcagtacacagactggccagaccacggctgcccagaagatgtgcagggcttcctgagctacctggaggagatccagagcgtgcggcggcacaccaacagcatgctggagggcaccaagaacagacacccccccatcgtggtgcactgcagcgctggggtgggccgcactggagtgctgatcctgtctgagctgatgatctactgcctggagcacaatgagaaggtggaggtgcccatgatgctgcggctgctgcgggagcagaggatgttcatgatccagaccatcgcccagtacaagtttgtgtaccaggtgctgatccagttcctgcagaacagccgcctcatctag

SEQ ID NO: 166268 - DNA, 636 bp, synthetic construct
  misc_feature 1..636: note = Description of Artificial Sequence: Synthetic coding sequence
  source 1..636: mol_type = other DNA
atgcccttcggcctgaagctgcggaggacccggcgctacaacgtgctgagcaagaactgctttgtgacccgcatccggctgctggacagcaatgtgattgagtgcaccctgtctgtggagagcacaggccaggagtgcctggaggccgtggcccagaggctggagctgcgggagacccactacttcggcctgtggttcctgagcaagagccagcaggcccgctgggtggagctggagaagcccctgaagaagcacctggacaagtttgccaatgagcccctgctcttctttggagtgatgttctacgtgcccaacgtgtcctggctgcagcaggaggccacccgctaccagtactacctgcaggtgaagaaggatgtgctggagggccgcctgcgctgcaccctggaccaggtgatccggctggccggcctggccgtgcaggccgactttggagactacaaccagtttgacagccaggacttcctgcgggagtatgtgctcttccccatggacctggccctggaggaggccgtgctggaggagctgacccagaaggtggcccaggagcacaaggcccacaggaccatcatggagaccgtgtacaccctggccttcagcctgtggggcttctcctag

SEQ ID NO: 166269 - DNA, 1383 bp, synthetic construct
  misc_feature 1..1383: note = Description of Artificial Sequence: Synthetic coding sequence
  source 1..1383: mol_type = other DNA
atgagccgcagcctggacagcgcccggagcttcctggagcggctggaggcccggggcggccgggagggcgctgtgctggccggggagttcagtgacatccaggcctgcagcgctgcctggaaggcagatggagtgtgcagcacagtggccggcagcaggccagaaaatgtgaggaagaaccgctacaaggatgtgctgccctatgaccagaccagggtcatcctgagcctgctgcaggaggagggccacagcgactacatcaatggaaacttcatccggggcgtggatggcagcctggcctacatcgccacccagggccccctgccccacaccctgctggacttctggaggctggtgtgggagtttggagtgaaggtgatcctgatggcctgccgggagattgaaaatggaaggaagagatgtgagcgctactgggcccaggagcaggagcccctgcagacaggcctcttctgcatcaccctcatcaaggagaagtggctgaatgaagacatcatgctgcggaccctgaaggtgaccttccagaaggagagccgctctgtgtaccagctgcagtacatgtcctggccagacagaggagtgcccagcagcccagaccacatgctggccatggtggaggaggcccggcggctgcagggcagcggccctgagcccctgtgtgtgcactgcagcgctggctgcggccgcactggagtgctgtgcaccgtggactatgtgcggcagctgctgctgacccagatgatccccccagacttcagcctgtttgatgtggtgctgaagatgaggaagcagaggcctgctgctgtgcagacagaggagcagtaccgcttcctgtaccacacagtggcccagatgttctgcagcaccctgcagaatgccagcccccactaccagaacatcaaggagaactgtgcccccctgtatgatgatgccctcttcctgcggaccccccaggccctgctggccatcccccggcccccaggaggagtgctgcggagcatctctgtgcccggcagccctggccacgccatggctgacacctatgctgtggtgcagaagagaggagccccagctggggccggcagcggcacccagacaggcaccggcaccggcaccggggcccggtctgctgaggaggcccccctgtacagcaaggtgaccccccgggcccagaggcctggggcccatgctgaagatgcccggggcaccctgcccggccgggtgcctgctgaccagagccctgctggcagcggggcctatgaagatgtggccggcggggcccagacaggaggcctgggcttcaacctgcgcatcggccggcccaagggcccccgggaccccccagctgagtggaccagggtgtag

SEQ ID NO: 166270 - DNA, 1248 bp, synthetic construct
  misc_feature 1..1248: note = Description of Artificial Sequence: Synthetic coding sequence
  source 1..1248: mol_type = other DNA
atgcccaccaccatcgagcgggagtttgaggagctggacacccagaggcgctggcagcccctgtacctggagatcagaaatgaaagccatgactacccccaccgggtggccaagttcccagaaaatagaaacagaaaccgctacagagatgtgagcccctatgaccacagccgggtgaagctgcagaatgcagaaaatgactacatcaatgccagcctggtggacatcgaggaggcccagaggagctacatcctgacccagggccccctgcccaacacctgctgccacttctggctgatggtgtggcagcagaagaccaaggctgtggtgatgctgaacagaattgtggagaaggagagcgtgaagtgtgcccagtactggcccacagatgaccaggagatgctgttcaaggagaccggcttctctgtgaagctgctgtctgaagatgtgaagagctactacacagtgcacctgctgcagctggagaacatcaacagcggggagaccaggaccatcagccacttccactacaccacctggccagactttggagtgcctgagagccctgccagcttcctgaacttcctgttcaaggtgcgggagagcggcagcctgaacccagaccacggccctgctgtgatccactgcagcgctggcatcggccgcagcggcaccttcagcctggtggacacctgcctggtgctgatggagaagggagatgacatcaacatcaagcaggtgctgctgaacatgaggaagtacaggatgggcctcatccagaccccagaccagctgcgcttctcctacatggccatcattgaaggagccaagtgcatcaagggggacagcagcatccagaagcgctggaaggagctgagcaaagaagacctgagccctgcctttgaccacagccccaacaagatcatgacagagaagtacaacggcaaccgcatcggcctggaggaggagaagctgaccggggaccgctgcaccggcctgagcagcaagatgcaggacaccatggaggagaacagcgagagcgccctgaggaagaggatccgggaggacaggaaggccaccacagcccagaaggtgcagcagatgaagcagaggctgaatgaaaatgaaaggaagaggaagcgctggctgtactggcagcccatcctgaccaagatgggcttcatgtctgtcatcctggtgggcgcctttgtgggctggaccctcttcttccagcagaatgccctgtag

SEQ ID NO: 166271 - DNA, 1164 bp, synthetic construct
  misc_feature 1..1164: note = Description of Artificial Sequence: Synthetic coding sequence
  source 1..1164: mol_type = other DNA
atgcccaccaccatcgagcgggagtttgaggagctggacacccagaggcgctggcagcccctgtacctggagatcagaaatgaaagccatgactacccccaccgggtggccaagttcccagaaaatagaaacagaaaccgctacagagatgtgagcccctatgaccacagccgggtgaagctgcagaatgcagaaaatgactacatcaatgccagcctggtggacatcgaggaggcccagaggagctacatcctgacccagggccccctgcccaacacctgctgccacttctggctgatggtgtggcagcagaagaccaaggctgtggtgatgctgaacagaattgtggagaaggagagcgtgaagtgtgcccagtactggcccacagatgaccaggagatgctgttcaaggagaccggcttctctgtgaagctgctgtctgaagatgtgaagagctactacacagtgcacctgctgcagctggagaacatcaacagcggggagaccaggaccatcagccacttccactacaccacctggccagactttggagtgcctgagagccctgccagcttcctgaacttcctgttcaaggtgcgggagagcggcagcctgaacccagaccacggccctgctgtgatccactgcagcgctggcatcggccgcagcggcaccttcagcctggtggacacctgcctggtgctgatggagaagggagatgacatcaacatcaagcaggtgctgctgaacatgaggaagtacaggatgggcctcatccagaccccagaccagctgcgcttctcctacatggccatcattgaaggagccaagtgcatcaagggggacagcagcatccagaagcgctggaaggagctgagcaaagaagacctgagccctgcctttgaccacagccccaacaagatcatgacagagaagtacaacggcaaccgcatcggcctggaggaggagaagctgaccggggaccgctgcaccggcctgagcagcaagatgcaggacaccatggaggagaacagcgagagcgccctgaggaagaggatccgggaggacaggaaggccaccacagcccagaaggtgcagcagatgaagcagaggctgaatgaaaatgaaaggaagaggaagaggccccggctgacagacacctag

SEQ ID NO: 166272 - DNA, 1179 bp, synthetic construct
  misc_feature 1..1179: note = Description of Artificial Sequence: Synthetic coding sequence
  source 1..1179: mol_type = other DNA
tgccagcaggagttcaggatgtatggcaaggatggcaagggcaccaactggatggaccagggcgacatggagtgcaggatgcaggagattgatgaccacagccgggtgaagctgcagaatgcagaaaatgactacatcaatgccagcctggtggacatcgaggaggcccagaggagctacatcctgacccagggccccctgcccaacacctgctgccacttctggctgatggtgtggcagcagaagaccaaggctgtggtgatgctgaaccgcatcgtggagaaggagagcgtgaagtgtgcccagtactggcccacagatgaccaggagatgctgttcaaggagaccggcttctctgtgaagctgctgtctgaagatgtgaagagctactacacagtgcacctgctgcagctggagaacatcaacagcggggagaccaggaccatcagccacttccactacaccacctggccagactttggagtgcctgagagccctgccagcttcctgaacttcctgttcaaggtgcgggagagcggcagcctgaacccagaccacggccctgctgtgatccactgcagcgctggcatcggccgcagcggcaccttcagcctggtggacacctgcctggtgctgatggagaagggagatgacatcaacatcaagcaggtgctgctgaacatgaggaagtacaggatgggcctcatccagaccccagaccagctgcgcttctcctacatggccatcatcgagggcgccaagtgcatcaagggggacagcagcatccagaagcgctggaaggagctgagcaaggaggacctgagccctgcctttgaccacagccccaacaagatcatgacagagaagtacaatggaaacagaattggcctggaggaggagaagctgactggagaccgctgcaccggcctgagcagcaagatgcaggacaccatggaggagaacagcgagagcgccctgaggaagaggatccgggaggacaggaaggccaccacagcccagaaggtgcagcagatgaagcagaggctgaatgaaaatgaaaggaagaggaagcgctggctgtactggcagcccatcctgaccaagatgggcttcatgtctgtcatcctggtgggcgcctttgtgggctggaccctcttcttccagcagaatgccctgtag

SEQ ID NO: 166273 - DNA, 1062 bp, synthetic construct
  misc_feature 1..1062: note = Description of Artificial Sequence: Synthetic coding sequence
  source 1..1062: mol_type = other DNA
atgcccaccaccatcgagcgggagtttgaggagctggacacccagaggcgctggcagcccctgtacctggagatcagaaatgaaagccatgactacccccaccgggtggccaagttcccagaaaatagaaacagaaaccgctacagagatgtgagcccctatgaccacagccgggtgaagctgcagaatgcagaaaatgactacatcaatgccagcctggtggacatcgaggaggcccagaggagctacatcctgacccagggccccctgcccaacacctgctgccacttctggctgatggtgtggcagcagaagaccaaggctgtggtgatgctgaacagaattgtggagaaggagagcgtgaagtgtgcccagtactggcccacagatgaccaggagatgctgttcaaggagaccggcttctctgtgaagctgctgtctgaagatgtgaagagctactacacagtgcacctgctgcagctggagaacatcaacagcggggagaccaggaccatcagccacttccactacaccacctggccagactttggagtgcctgagagccctgccagcttcctgaacttcctgttcaaggtgcgggagagcggcagcctgaacccagaccacggccctgctgtgatccactgcagcgctggcatcggccgcagcggcaccttcagcctggtggacacctgcctggtgctgatggagaagggagatgacatcaacatcaagcaggtgctgctgaacatgaggaagtacaggatgggcctcatccagaccccagaccagctgcgcttctcctacatggccatcattgaaggagccaagtgcatcaagggggacagcagcatccagaagcgctggaaggagctgagcaaagaagacctgagccctgcctttgaccacagccccaacaagatcatgacagagaagtacaacggcaaccgcatcggcctggaggaggagaagctgaccggggaccgctgcaccggcctgagcagcaagatgcaggacaccatggaggagaacagcgagcggccccggctgacagacacctag

SEQ ID NO: 166274 - DNA, 2424 bp, synthetic construct
  misc_feature 1..2424: note = Description of Artificial Sequence: Synthetic coding sequence
  source 1..2424: mol_type = other DNA
atggaccagcgggagatcctgcagaagttcctggatgaggcccagagcaagaagatcaccaaggaggagtttgccaatgagttcctgaagctgaagaggcagagcaccaagtacaaggctgacaagacctaccccaccaccgtggccgagaagcccaagaacatcaagaagaaccgctacaaggacatcctgccctatgactacagccgggtggagctgagcctcatcaccagtgatgaggacagcagctacatcaatgccaacttcatcaagggcgtgtatggccccaaggcctacatcgccacccagggccccctgagcaccaccctgctggacttctggaggatgatctgggagtacagcgtgctgatcatcgtgatggcctgcatggagtatgagatgggcaagaagaagtgtgagcgctactgggccgagcccggggagatgcagctggagtttggccccttctctgtgtcctgtgaggccgagaagaggaagagtgactacatcatccgcaccctgaaggtgaagttcaacagcgagaccaggaccatctaccagttccactacaagaactggccagaccatgatgtgcccagcagcattgaccccatcctggagctgatctgggatgtgcgctgctaccaggaggatgacagcgtgcccatctgcatccactgcagcgctggctgcggccgcactggagtcatctgtgccatcgactacacctggatgctgctgaaggatggcatcatccctgagaacttctctgtgttcagcctcatccgggagatgaggacccagaggcccagcctggtgcagacccaggagcagtatgagctggtgtacaatgctgtgctggagctgttcaagaggcagatggatgtgatccgggacaagcacagcggcacagagagccaggccaagcactgcatccctgagaagaaccacaccctgcaggccgacagctacagccccaacctgcccaagagcaccaccaaggccgccaagatgatgaaccagcagaggaccaagatggagatcaaggagagcagcagctttgacttccgcaccagcgagatcagcgccaaggaggagctggtgctgcacccagccaagagcagcaccagctttgacttcctggagctgaactacagctttgacaagaatgctgacaccaccatgaagtggcagaccaaggccttccccatcgtgggggagcccctgcagaagcaccagagcctggacctgggcagcctgctgtttgagggctgcagcaacagcaagcctgtgaatgctgctggccgctacttcaacagcaaggtgcccatcaccaggaccaagagcaccccatttgagctgatccagcagcgggagaccaaggaggtggacagcaaagaaaacttctcctacctggagagccagccccatgacagctgctttgtggagatgcaggcccagaaggtgatgcacgtgagcagcgctgagctgaactacagcctgccctatgacagcaagcaccagatcagaaatgccagcaatgtgaagcaccacgacagcagcgccctgggcgtgtacagctacatccccctggtggagaacccctacttcagctcctggcccccatctggcaccagcagcaagatgagcctggacctgcctgagaagcaggacggcaccgtcttccccagcagcctgctgcccaccagcagcaccagcctcttctcctactacaacagccatgacagcctgagcctgaacagccccaccaacatcagcagcctgctgaaccaggagagcgctgtgctggccacagcccccagaattgatgatgagatccccccacccctgcctgtgtggaccccagagagcttcatcgtggtggaggaggccggggagttcagccccaacgtgcccaagagcctgagcagcgctgtgaaggtgaagattggcaccagcctggagtggggcggcaccagcgagcccaagaagtttgatgacagcgtcatcctgcggcccagcaagtctgtgaagctgcggagccccaagtctgagctgcaccaggacaggagcagccccccaccacccctgcctgagaggaccctggagagcttcttcctggctgatgaggactgcatgcaggcccagagcattgagacctacagcaccagctacccagacaccatggagaacagcaccagcagcaagcagaccctgaagacccctgggaagagcttcaccaggagcaagagcctgaagatcctgaggaacatgaagaagagcatctgcaacagctgcccccccaacaagccagctgagagcgtgcagagcaacaacagcagcagcttcctgaactttggatttgccaaccgcttcagcaagcccaagggccccagaaatcctccacccacctggaacatctag

SEQ ID NO: 166275 - DNA, 1692 bp, synthetic construct
  misc_feature 1..1692: note = Description of Artificial Sequence: Synthetic coding sequence
  source 1..1692: mol_type = other DNA
atgctgctgaaggatggcatcatccctgagaacttctctgtgttcagcctcatccgggagatgaggacccagaggcccagcctggtgcagacccaggagcagtatgagctggtgtacaatgctgtgctggagctgttcaagaggcagatggatgtgatccgggacaagcacagcggcacagagagccaggccaagcactgcatccctgagaagaaccacaccctgcaggccgacagctacagccccaacctgcccaagagcaccaccaaggccgccaagatgatgaaccagcagaggaccaagatggagatcaaggagagcagcagctttgacttccgcaccagcgagatcagcgccaaggaggagctggtgctgcacccagccaagagcagcaccagctttgacttcctggagctgaactacagctttgacaagaatgctgacaccaccatgaagtggcagaccaaggccttccccatcgtgggggagcccctgcagaagcaccagagcctggacctgggcagcctgctgtttgagggctgcagcaacagcaagcctgtgaatgctgctggccgctacttcaacagcaaggtgcccatcaccaggaccaagagcaccccatttgagctgatccagcagcgggagaccaaggaggtggacagcaaagaaaacttctcctacctggagagccagccccatgacagctgctttgtggagatgcaggcccagaaggtgatgcacgtgagcagcgctgagctgaactacagcctgccctatgacagcaagcaccagatcagaaatgccagcaatgtgaagcaccacgacagcagcgccctgggcgtgtacagctacatccccctggtggagaacccctacttcagctcctggcccccatctggcaccagcagcaagatgagcctggacctgcctgagaagcaggacggcaccgtcttccccagcagcctgctgcccaccagcagcaccagcctcttctcctactacaacagccatgacagcctgagcctgaacagccccaccaacatcagcagcctgctgaaccaggagagcgctgtgctggccacagcccccagaattgatgatgagatccccccacccctgcctgtgtggaccccagagagcttcatcgtggtggaggaggccggggagttcagccccaacgtgcccaagagcctgagcagcgctgtgaaggtgaagattggcaccagcctggagtggggcggcaccagcgagcccaagaagtttgatgacagcgtcatcctgcggcccagcaagtctgtgaagctgcggagccccaagtctgagctgcaccaggacaggagcagccccccaccacccctgcctgagaggaccctggagagcttcttcctggctgatgaggactgcatgcaggcccagagcattgagacctacagcaccagctacccagacaccatggagaacagcaccagcagcaagcagaccctgaagacccctgggaagagcttcaccaggagcaagagcctgaagatcctgaggaacatgaagaagagcatctgcaacagctgcccccccaacaagccagctgagagcgtgcagagcaacaacagcagcagcttcctgaactttggatttgccaaccgcttcagcaagcccaagggccccagaaatcctccacccacctggaacatctag

SEQ ID NO: 166276 - DNA, 4911 bp, synthetic construct
  misc_feature 1..4911: note = Description of Artificial Sequence: Synthetic coding sequence
  source 1..4911: mol_type = other DNA
atggaggccgtgcccaggatgcccatgatctggctggacctgaaggaggccggggacttccacttccagcctgctgtgaagaagtttgtgctgaagaactacggggagaaccctgaggcctacaatgaggagctgaagaagctggagctgctgcggcagaatgctgtgcgggtgccccgggactttgagggctgcagcgtgctgaggaagtacctgggccagctgcactacctgcagagccgggtgcccatgggcagcggccaggaggccgctgtgcctgtgacctggacagagatcttcagcggcaagtctgtggcccacgaggacatcaagtatgagcaggcctgcatcctgtacaacctgggcgccctgcacagcatgctgggcgccatggacaagagggtgtctgaggagggcatgaaggtgtcctgcacccacttccagtgtgccgccggggcctttgcctacctgcgggagcacttcccccaggcctacagcgtggacatgagccggcagatcctgaccctgaatgtgaacctgatgctgggccaggcccaggagtgcctgctggagaagtccatgctggacaacaggaagagcttcctggtggcccgcatcagcgcccaggtggtggactactacaaggaggcctgccgggccctggagaacccagacacagccagcctgctgggccgcatccagaaggactggaagaagctggtgcagatgaagatctactactttgctgctgtggcccacctgcacatgggcaagcaggccgaggagcagcagaagtttggagagcgggtggcctacttccagagcgccctggacaagctgaatgaggccatcaagctggccaagggccagcctgacacagtgcaggatgccctgcgcttcaccatggatgtgattggaggcaagtacaacagcgccaagaaggacaatgacttcatctaccatgaagctgtgcctgccctggacaccctgcagcctgtgaagggggcccccctggtgaagcccctgcctgtgaaccccacagatcctgctgtgacaggccctgacatctttgccaagctggtgcccatggccgcccacgaggccagcagcctgtacagcgaggagaaggccaagctgctgcgggagatgatggccaagattgaggacaagaatgaggtgctggaccagttcatggacagcatgcagctggaccctgagaccgtggacaacctggatgcctacagccacatccccccccagctgatggagaagtgtgccgccctgtctgtgcggccagacacagtgaggaacctggtgcagagcatgcaggtgctgagcggggtcttcacagatgtggaggccagcctgaaggacatccgggacctgctggaggaggatgagctgctggagcagaagttccaggaggccgtgggccaggccggggccatcagcatcaccagcaaggccgagctggccgaggtgagaagagagtgggccaagtacatggaggtgcatgagaaggccagcttcaccaacagcgagctgcaccgggccatgaacctgcacgtgggcaacctgcggctgctgagcggccccctggaccaggtgcgggccgccctgcccaccccagccctgagccctgaggacaaggctgtgctgcagaacctgaagaggatcctggccaaggtgcaggagatgagggaccagagggtgtccctggagcagcagctgcgggagctgatccagaaggatgacatcacagccagcctggtgaccacagaccacagcgagatgaagaagctgtttgaggagcagctgaagaagtatgaccagctgaaggtgtacctggagcagaacctggccgcccaggacagagtgctgtgtgccctgacagaggccaacgtgcagtatgctgctgtgagaagagtgctgagtgacctggaccagaagtggaacagcaccctgcagaccctggtggccagctatgaggcctatgaggacctgatgaagaagagccaggagggccgggacttctacgccgacctggagagcaaggtggccgccctgctggagaggacccagagcacctgccaggcccgggaggccgcccggcagcagctgctggaccgggagctgaagaagaagcccccaccccggcccacagcccccaagcccctgctgccccggcgggaggagagcgaggccgtggaggccggggaccccccagaggagctgcggagcctgcccccagacatggtggccggcccccggctgcctgacaccttcctgggcagcgccacccccctgcacttcccccccagccccttccccagcagcacaggccctggcccccactacctgagcggccccctgcccccaggcacctacagcggccccacccagctgatccagccccgggcccctggcccccacgccatgcctgtggcccctggccctgccctgtacccagccccagcctacaccccagagctgggcctggtgcccaggagcagcccccagcacggcgtggtgagcagcccctacgtgggcgtgggccctgcccctcctgtggccggcctgcccagcgcccccccaccccagttcagcggccctgagctggccatggctgtgcggcctgccaccaccaccgtggacagcatccaggcccccatccccagccacacagccccccggcccaaccccaccccagcccctcctccaccctgcttccctgtgcccccaccccagcccctgcccaccccctacacctacccagctggggccaagcagcccatcccagcccagcaccacttcagcagcggcatcccagctggcttccctgcccccagaattggcccccagccccagccccacccccagccccaccccagccaggccttcggcccccagcccccccagcagcccctgcccctgcagcacccccacctgtttcctccccaggcccctggcctgctgcccccccagagcccctacccctatgccccccagcccggggtgctgggccagcccccaccacccctgcacacccagctgtacccaggccctgcccaggaccccctgcctgcccacagcggggccctgcccttccccagccctggccccccccagcccccccacccccccctggcctacggccctgcccccagcacccggcccatgggcccccaggccgcccccctgaccatccggggccccagcagcgctggccagagcacccccagcccccacctggtgcccagccctgcccccagccctggccctggccctgtgccccccaggcctcctgctgctgagcccccaccctgcctgcggagaggagctgctgctgctgacctgctgagcagcagccctgagagccagcacggcggcacccagagccctgggggcggccagcccctgctgcagcccaccaaggtggatgctgctgagggccggcggccccaggccctgcggctcatcgagcgggacccctatgagcaccctgagcggctgcggcagctgcagcaggagctggaggccttccggggccagctgggagatgtgggcgccctggacacagtgtggagggagctgcaggatgcccaggagcatgatgcccggggccgcagcatcgccatcgcccgctgctacagcctgaagaacagacaccaggatgtgatgccctatgacagcaacagagtggtgctgcggagcggcaaggatgactacatcaatgccagctgtgtggagggcctgagcccctactgcccccccctggtggccacccaggcccccctgcctggaacagctgctgacttctggctgatggtgcatgagcagaaggtgtctgtgattgtgatgctggtgtctgaggccgagatggagaagcagaaggtggcccgctacttccccacagagcggggccagcccatggtgcatggagccctgagcctggccctgagctctgtgcgcagcacagagacccacgtggagcgggtgctgagcctgcagttccgggaccagagcctgaagaggagcctggtgcacctgcacttccccacctggccagagctgggcctgcctgacagccccagcaacctgctgcgcttcatccaggaggtgcacgcccactacctgcaccagaggcccctgcacacccccatcatcgtgcactgcagcagcggcgtgggccgcactggagcctttgccctgctgtatgctgctgtgcaggaggtggaggccggaaatggcatccctgagctgccccagctggtgcggaggatgaggcagcagaggaagcacatgctgcaggagaagctgcacctgcgcttctgctatgaggccgtggtgcgccacgtggagcaggtgctgcagagacatggagtgcccccaccctgcaagcccctggccagcgccagcatcagccagaagaaccacctgccccaggacagccaggacctggtgctgggcggagatgtgcccatcagcagcatccaggccaccatcgccaagctgagcatccggcccccaggcggcctggagagccctgtggccagcctgcccggccctgctgagcccccaggcctgcccccagccagcctgcctgagagcacccccatccccagcagcagccccccacccctgagcagccccctgcctgaggccccccagcccaaggaggagccccctgtgcctgaggcccccagcagcggcccccccagcagcagcctggagctgctggccagcctgaccccagaggccttcagcctggacagcagcctgcggggcaagcagaggatgagcaagcacaacttcctgcaggcccacaacggccagggcctgcgggccacccggcccagtgatgaccccctgagcctgctggaccccctgtggaccctgaacaagacctag

SEQ ID NO: 166277 - DNA, 2739 bp, synthetic construct
  misc_feature 1..2739: note = Description of Artificial Sequence: Synthetic coding sequence
  source 1..2739: mol_type = other DNA
atggaggccgtgcccaggatgcccatgatctggctggacctgaaggaggccggggacttccacttccagcctgctgtgaagaagaatgctgtgcgggtgccccgggactttgagggctgcagcgtgctgaggaagtacctgggccagctgcactacctgcagagccgggtgcccatgggcagcggccaggaggccgctgtgcctgtgacctggacagagatcttcagcggcaagtctgtggcccacgaggacatcaagtatgagcaggcctgcatcctgtacaacctgggcgccctgcacagcatgctgggcgccatggacaagagggtgtctgaagaatgtgccgccggggcctttgcctacctgcgggagcacttcccccaggcctacagcgtggacatgagccggcagatcctgaccctgaatgtgaacctgatgctgggccaggcccaggagtgcctgctggagaagtccatgctggacaacaggaagagcttcctggtggcccgcatcagcgcccaggtggtggactactacaaggaggcctgccgggccctggagaacccagacacagccagcctgctgggccgcatccagaaggactggaagaagctggtgcagatgaagatctactactttgctgctgtggcccacctgcacatgggcaagcaggccgaggagcagcagaagtttggagagcgggtggcctacttccagagcgccctggacaagctgaatgaggccatcaagctggccaagggccagcctgacacagtgcaggatgccctgcgcttcaccatggatgtgattggaggcaagtacaacagcgccaagaaggacaatgacttcatctaccacgaggccgtgcctgccctggacaccctgcagcctgtgaagggggcccccctggtgaagcccctgcctgtgaaccccacagatcctgctgtgactggaccagacatctttgccaagctggtgcccatggccgcccacgaggccagcagcctgtacagcgaggagaaggccaagctgctgcgggagatgatggccaagattgaggacaagaatgaggtgctggaccagttcatggacagcatgcagctggaccctgagaccgtggacaacctggatgcctacagccacatccccccccagctgatggagaagtgtgccgccctgtctgtgcggccagacacagtgaggaacctggtgcagagcatgcaggtgctgtctggagtcttcacagatgtggaggccagcctgaaggacatccgggacctgctggaggaggatgagctgctggagcagaagttccaggaggccgtgggccaggccggggccatcagcatcaccagcaaggccgagctggccgaggtgcggcgggagtgggccaagtacatggaggtgcatgagaaggccagcttcaccaacagcgagctgcaccgggccatgaacctgcacgtgggcaacctgcggctgctgagcggccccctggaccaggtgcgggccgccctgcccaccccagccctgagccctgaggacaaggctgtgctgcagaacctgaagaggatcctggccaaggtgcaggagatgagggaccagagggtgtccctggagcagcagctgcgggagctgatccagaaggatgacatcacagccagcctggtgaccacagaccacagcgagatgaagaagctgtttgaggagcagctgaagaagtatgaccagctgaaggtgtacctggagcagaacctggccgcccaggacagagtgctgtgtgccctgacagaggccaacgtgcagtatgctgctgtgcggcgggtgctgagtgacctggaccagaagtggaacagcaccctgcagaccctggtggccagctatgaggcctatgaggacctgatgaagaagagccaggagggccgggacttctatgctgacctggagagcaaggtggccgccctgctggagaggacccagagcacctgccaggcccgggaggccgcccggcagcagctgctggaccgggagctgaagaagaagcccccaccccggcccacagcccccaagcccctgctgccccggcgggaggagagcgaggccgtggaggccggggaccccccagaggagctgcggagcctgcccccagacatggtggccggcccccggctgcctgacaccttcctgggcagcgccacccccctgcacttcccccccagccccttccccagcagcactggacctggcccccactacctgagcggccccctgcccccaggcacctacagcggccccacccagctgatccagccccgggcccctggcccccacgccatgcctgtggcccctggccctgccctgtacccagcccccagcagcgcccccagcttcacctctgtgtgggccagcgcccccacagctgcccccagcaccccagccagcaccagcctgcccaccccaggccccaggacccccacccccaccatccccctgcccctgtgccccagcgcctggggccctggagctgctgccaccccacccacccacccagccctgcccaggagccgcagccggcccagcgccagccccctgcggggcagcgccttcccccagccctgggcccccagcgccagccccagccccaccggcatctggagctgccccttctaccagacccacggccccccaggcagccccagctaccacagccgggccctggtgtgctggcctgtgcacccctag

SEQ ID NO: 166278 - DNA, 1698 bp, synthetic construct
  misc_feature 1..1698: note = Description of Artificial Sequence: Synthetic coding sequence
  source 1..1698: mol_type = other DNA
atgaactatgaaggagcccggagtgaaagagaaaatcatgctgctgatgacagcgagggcggggccctggacatgtgctgcagcgagcggctgcccggcctgccccagcccatcgtgatggaggccctggatgaggccgagggcctgcaggacagccagcgggagatgcctcctcctcctccacccagcccccccagcgaccctgcccagaagcccccaccaagaggagctggcagccacagcctgactgtgcgcagcagcctgtgcctgtttgctgccagccagttcctgctggcctgtggggtgctgtggttcagcggctacggccacatctggagccagaatgccaccaacctggtgagcagcctgctgaccctgctgaagcagctggagcccacagcctggctggacagcggcacctggggcgtgcccagcctgctgctggtgttcctgtctgtgggcctggtgctggtgaccaccctggtgtggcacctgctgcggaccccacctgagccccccacccccctgcccccagaagatcggcggcagagcgtgtcccggcagcccagcttcacctacagcgagtggatggaggagaagattgaagatgacttcctggacctggaccctgtgcctgagacccctgtgtttgactgtgtgatggacatcaagccagaggccgaccccaccagcctgactgtgaagtccatgggcctgcaggagcggcggggcagcaatgtgtccctgaccctggacatgtgcaccccaggctgcaatgaggagggcttcggctacctgatgagcccccgggaggagagcgcccgggagtacctgctgagcgccagccgggtgctgcaggccgaggagctgcacgagaaggccctggaccccttcctgctgcaggccgagttctttgagatccccatgaactttgtggaccccaaggagtatgacatccctggcctggtgaggaagaaccgctacaagaccatcctgcccaacccccacagccgggtgtgcctgaccagcccagaccctgatgaccccctgagcagctacatcaatgccaactacatccggggctacggcggggaggagaaggtgtacatcgccacccagggccccatcgtgtccacagtggccgacttctggaggatggtgtggcaggagcacacccccatcatcgtgatgatcaccaacatcgaggagatgaatgaaaaatgtacagagtactggccagaggagcaggtggcctatgatggagtggagatcaccgtgcagaaggtgatccacacagaggactaccgcctgcggctcatcagcctgaagagcggcacagaggagcggggcctgaagcactactggttcacctcctggccagaccagaagaccccagaccgggccccacccctgctgcacctggtgcgggaggtggaggaggccgcccagcaggagggcccccactgtgcccccatcatcgtgcactgcagcgctggcatcggccgcacaggctgcttcatcgccaccagcatctgctgccagcagctgcggcaggagggcgtggtggacatcctgaagaccacctgccagctgcggcaggaccggggcggcatgatccagacctgtgagcagtaccagtttgtgcaccacgtgatgagcctgtatgagaagcagctgagccaccagagccctgagtag

SEQ ID NO: 166279 - DNA, 1602 bp, synthetic construct
  misc_feature 1..1602: note = Description of Artificial Sequence: Synthetic coding sequence
  source 1..1602: mol_type = other DNA
atgaactatgaaggagcccggagtgaaagagaaaatcatgctgctgatgacagcgagggcggggccctggacatgtgctgcagcgagcggctgcccggcctgccccagcccatcgtgatggaggccctggatgaggccgagggcctgcaggacagccagcgggagatgcctcctcctcctccacccagcccccccagcgaccctgcccagaagcccccaccaagaggagctggcagccacagcctgactgtgcgcagcagcctgtgcctgtttgctgccagccagttcctgctggagcccacagcctggctggacagcggcacctggggcgtgcccagcctgctgctggtgttcctgtctgtgggcctggtgctggtgaccaccctggtgtggcacctgctgcggaccccacctgagccccccacccccctgcccccagaagatcggcggcagagcgtgtcccggcagcccagcttcacctacagcgagtggatggaggagaagattgaagatgacttcctggacctggaccctgtgcctgagacccctgtgtttgactgtgtgatggacatcaagccagaggccgaccccaccagcctgactgtgaagtccatgggcctgcaggagcggcggggcagcaatgtgtccctgaccctggacatgtgcaccccaggctgcaatgaggagggcttcggctacctgatgagcccccgggaggagagcgcccgggagtacctgctgagcgccagccgggtgctgcaggccgaggagctgcacgagaaggccctggaccccttcctgctgcaggccgagttctttgagatccccatgaactttgtggaccccaaggagtatgacatccctggcctggtgaggaagaaccgctacaagaccatcctgcccaacccccacagccgggtgtgcctgaccagcccagaccctgatgaccccctgagcagctacatcaatgccaactacatccggggctacggcggggaggagaaggtgtacatcgccacccagggccccatcgtgtccacagtggccgacttctggaggatggtgtggcaggagcacacccccatcatcgtgatgatcaccaacatcgaggagatgaatgaaaaatgtacagagtactggccagaggagcaggtggcctatgatggagtggagatcaccgtgcagaaggtgatccacacagaggactaccgcctgcggctcatcagcctgaagagcggcacagaggagcggggcctgaagcactactggttcacctcctggccagaccagaagaccccagaccgggccccacccctgctgcacctggtgcgggaggtggaggaggccgcccagcaggagggcccccactgtgcccccatcatcgtgcactgcagcgctggcatcggccgcacaggctgcttcatcgccaccagcatctgctgccagcagctgcggcaggagggcgtggtggacatcctgaagaccacctgccagctgcggcaggaccggggcggcatgatccagacctgtgagcagtaccagtttgtgcaccacgtgatgagcctgtatgagaagcagctgagccaccagagccctgagtag

SEQ ID NO: 166280 - DNA, 1698 bp, synthetic construct; identical to SEQ ID NO: 166278
  misc_feature 1..1698: note = Description of Artificial Sequence: Synthetic coding sequence
  source 1..1698: mol_type = other DNA

SEQ ID NO: 166281 - DNA, 1788 bp, synthetic construct
  misc_feature 1..1788: note = Description of Artificial Sequence: Synthetic coding sequence
  source 1..1788: mol_type = other DNA
atggtgcgctggttccaccgggacctgagcggcctggatgctgagaccctgctgaagggccggggcgtgcacggcagcttcctggcccggcccagcaggaagaaccagggcgacttcagcctgtctgtgcgggtgggggaccaggtgacccacatccgcatccagaacagcggggacttctatgacctgtatggaggagagaagtttgccaccctgacagagctggtggagtactacacccagcagcagggcgtgctgcaggacagagatggcaccatcatccacctgaagtaccccctgaactgcagcgaccccaccagcgagcgctggtaccacggccacatgtctgggggccaggccgagaccctgctgcaggccaagggggagccctggaccttcctggtgcgggagagcctgagccagcccggggactttgtgctgtctgtgctgagtgaccagcccaaggccggccctggcagccccctgcgggtgacccacatcaaggtgatgtgtgagggcggccgctacacagtgggcggcctggagacctttgacagcctgacagacctggtggagcacttcaagaagacaggaattgaggaggccagcggggcctttgtgtacctgcggcagccctactatgccaccagggtgaatgctgctgacatcgagaacagagtgctggagctgaacaagaagcaggagagcgaggacacagccaaggccggcttctgggaggagtttgagagcctgcagaagcaggaggtgaagaacctgcaccagaggctggagggccagaggccagaaaataaaggcaagaaccgctacaagaacatcctgccctttgaccacagcagggtcatcctgcagggccgggacagcaacatccctggcagtgactacatcaatgccaactacatcaagaaccagctgctgggcccagatgaaaatgccaagacctacatcgccagccagggctgcctggaggccaccgtgaatgacttctggcagatggcctggcaggagaacagccgggtgattgtgatgaccacccgggaggtggagaagggcaggaacaagtgtgtgccctactggccagaggtgggcatgcagagggcctacggcccctacagcgtgaccaactgtggggagcatgacaccacagagtacaagctgcggaccctgcaggtgagccccctggacaacggggacctgatccgggagatctggcactaccagtacctgtcctggccagaccacggcgtgcccagcgagcccggcggcgtgctgtccttcctggaccagatcaaccagaggcaggagagcctgccccacgccggccccatcatcgtgcactgcagcgctggcattggaagaacaggcaccatcatcgtcatcgacatgctgatggagaacatcagcaccaagggcctggactgtgacatcgacatccagaagaccatccagatggtgcgggcccagaggagcggcatggtgcagacagaggcccagtacaagttcatctacgtggccatcgcccagttcatcgagaccaccaagaagaagctggaggtgctgcagagccagaagggccaggagagtgaatatggcaacatcacctaccccccagccatgaagaatgcccacgccaaggccagcaggaccagcagcaagcacaaggaggatgtgtatgagaacctgcacaccaagaacaagcgggaggagaaggtgaagaagcagaggtctgctgacaaggagaagagcaagggcagcctgaagaggaagtag

SEQ ID NO: 166282 - DNA, 1794 bp, synthetic construct
  misc_feature 1..1794: note = Description of Artificial Sequence: Synthetic coding sequence
  source 1..1794: mol_type = other DNA
atgctgagccggggctggttccaccgggacctgagcggcctggatgctgagaccctgctgaagggccggggcgtgcacggcagcttcctggcccggcccagcaggaagaaccagggcgacttcagcctgtctgtgcgggtgggggaccaggtgacccacatccgcatccagaacagcggggacttctatgacctgtatggaggagagaagtttgccaccctgacagagctggtggagtactacacccagcagcagggcgtgctgcaggacagagatggcaccatcatccacctgaagtaccccctgaactgcagcgaccccaccagcgagcgctggtaccacggccacatgtctgggggccaggccgagaccctgctgcaggccaagggggagccctggaccttcctggtgcgggagagcctgagccagcccggggactttgtgctgtctgtgctgagtgaccagcccaaggccggccctggcagccccctgcgggtgacccacatcaaggtgatgtgtgagggcggccgctacacagtgggcggcctggagacctttgacagcctgacagacctggtggagcacttcaagaagacaggaattgaggaggccagcggggcctttgtgtacctgcggcagccctactatgccaccagggtgaatgctgctgacatcgagaacagagtgctggagctgaacaagaagcaggagagcgaggacacagccaaggccggcttctgggaggagtttgagagcctgcagaagcaggaggtgaagaacctgcaccagaggctggagggccagaggccagaaaataaaggcaagaaccgctacaagaacatcctgccctttgaccacagcagggtcatcctgcagggccgggacagcaacatccctggcagtgactacatcaatgccaactacatcaagaaccagctgctgggcccagatgaaaatgccaagacctacatcgccagccagggctgcctggaggccaccgtgaatgacttctggcagatggcctggcaggagaacagccgggtgattgtgatgaccacccgggaggtggagaagggcaggaacaagtgtgtgccctactggccagaggtgggcatgcagagggcctacggcccctacagcgtgaccaactgtggggagcatgacaccacagagtacaagctgcggaccctgcaggtgagccccctggacaacggggacctgatccgggagatctggcactaccagtacctgtcctggccagaccacggcgtgcccagcgagcccggcggcgtgctgtccttcctggaccagatcaaccagaggcaggagagcctgccccacgccggccccatcatcgtgcactgcagcgctggcattggaagaacaggcaccatcatcgtcatcgacatgctgatggagaacatcagcaccaagggcctggactgtgacatcgacatccagaagaccatccagatggtgcgggcccagaggagcggcatggtgcagacagaggcccagtacaagttcatctacgtggccatcgcccagttcatcgagaccaccaagaagaagctggaggtgctgcagagccagaagggccaggagagtgaatatggcaacatcacctaccccccagccatgaagaatgcccacgccaaggccagcaggaccagcagcaagcacaaggaggatgtgtatgagaacctgcacaccaagaacaagcgggaggagaaggtgaagaagcagaggtctgctgacaaggagaagagcaagggcagcctgaagaggaagtag

SEQ ID NO: 166283 - DNA, 1671 bp, synthetic construct
  misc_feature 1..1671: note = Description of Artificial Sequence: Synthetic coding sequence
  source 1..1671: mol_type = other DNA
atgctgagcagaggagtgggggaccaggtgacccacatccgcatccagaacagcggggacttctatgacctgtatggaggagagaagtttgccaccctgacagagctggtggagtactacacccagcagcagggcgtgctgcaggacagagatggcaccatcatccacctgaagtaccccctgaactgcagcgaccccaccagcgagcgctggtaccacggccacatgtctgggggccaggccgagaccctgctgcaggccaagggggagccctggaccttcctggtgcgggagagcctgagccagcccggggactttgtgctgtctgtgctgagtgaccagcccaaggccggccctggcagccccctgcgggtgacccacatcaaggtgatgtgtgagggcggccgctacacagtgggcggcctggagacctttgacagcctgacagacctggtggagcacttcaagaagacaggcatcgaggaggccagcggggcctttgtgtacctgcggcagccctactatgccaccagggtgaatgctgctgacattgaaaatagagtgctggagctgaacaagaagcaggagagcgaggacacagccaaggccggcttctgggaggagtttgagagcctgcagaagcaggaggtgaagaacctgcaccagaggctggagggccagaggcctgagaacaagggcaagaaccgctacaagaacatcctgccctttgaccacagcagggtcatcctgcagggccgggacagcaacatccctggcagtgactacatcaatgccaactacatcaagaaccagctgctgggcccagatgaaaatgccaagacctacatcgccagccagggctgcctggaggccaccgtgaatgacttctggcagatggcctggcaggagaacagcagggtcatcgtgatgaccacccgggaggtggagaagggcagaaataaatgtgtgccctactggccagaggtgggcatgcagagggcctacggcccctacagcgtgaccaactgtggggagcatgacaccacagagtacaagctgcggaccctgcaggtgagccccctggacaatggagacctgatccgggagatctggcactaccagtacctgtcctggccagaccatggagtgcccagcgagcctggaggagtgctgtccttcctggaccagatcaaccagaggcaggagagcctgccccatgctggccccatcatcgtgcactgcagcgctggcatcggccgcacaggcaccatcatcgtgattgacatgctgatggagaacatcagcaccaagggcctggactgtgacatcgacatccagaagaccatccagatggtgcgggcccagaggagcggcatggtgcagacagaggcccagtacaagttcatctacgtggccatcgcccagttcatcgagaccaccaagaagaagctggaggtgctgcagagccagaagggccaggagagtgaatatggcaacatcacctaccccccagccatgaagaatgcccacgccaaggccagcaggaccagcagcaagcacaaggaggatgtgtatgagaacctgcacaccaagaacaagcgggaggagaaggtgaagaagcagaggtctgctgacaaggagaagagcaagggcagcctgaagaggaagtag

SEQ ID NO: 166284 - DNA, 1875 bp, synthetic construct
  misc_feature 1..1875: note = Description of Artificial Sequence: Synthetic coding sequence
  source 1..1875: mol_type = other DNA
atggtgcgctggttccaccgggacctgagcggcctggatgctgagaccctgctgaagggccggggcgtgcacggcagcttcctggcccggcccagcaggaagaaccagggcgacttcagcctgtctgtgcgggtgggggaccaggtgacccacatccgcatccagaacagcggggacttctatgacctgtatggaggagagaagtttgccaccctgacagagctggtggagtactacacccagcagcagggcgtgctgcaggacagagatggcaccatcatccacctgaagtaccccctgaactgcagcgaccccaccagcgagcgctggtaccacggccacatgtctgggggccaggccgagaccctgctgcaggccaagggggagccctggaccttcctggtgcgggagagcctgagccagcccggggactttgtgctgtctgtgctgagtgaccagcccaaggccggccctggcagccccctgcgggtgacccacatcaaggtgatgtgtgagggcggccgctacacagtgggcggcctggagacctttgacagcctgacagacctggtggagcacttcaagaagacaggaattgaggaggccagcggggcctttgtgtacctgcggcagccctactatgccaccagggtgaatgctgctgacatcgagaacagagtgctggagctgaacaagaagcaggagagcgaggacacagccaaggccggcttctgggaggagtttgagagcctgcagaagcaggaggtgaagaacctgcaccagaggctggagggccagaggccagaaaataaaggcaagaaccgctacaagaacatcctgccctttgaccacagcagggtcatcctgcagggccgggacagcaacatccctggcagtgactacatcaatgccaactacatcaagaaccagctgctgggcccagatgaaaatgccaagacctacatcgccagccagggctgcctggaggccaccgtgaatgacttctggcagatggcctggcaggagaacagccgggtgattgtgatgaccacccgggaggtggagaagggcaggaacaagtgtgtgccctactggccagaggtgggcatgcagagggcctacggcccctacagcgtgaccaactgtggggagcatgacaccacagagtacaagctgcggaccctgcaggtgagccccctggacaacggggacctgatccgggagatctggcactaccagtacctgtcctggccagaccacggcgtgcccagcgagcccggcggcgtgctgtccttcctggaccagatcaaccagaggcaggagagcctgccccacgccggccccatcatcgtgcactgcagcgctggcattggaagaacaggcaccatcatcgtcatcgacatgctgatggagaacatcagcaccaagggcctggactgtgacatcgacatccagaagaccatccagatggtgcgggcccagaggagcggcatggtgcagacagaggcccagtacaagttcatctacgtggccatcgcccagttcatcgagaccaccaagaagaagctggaggtgctgcagagccagaagggccaggagagtgaatatggcaacatcacctaccccccagccatgaagaatgcccacgccaaggccagcaggaccagcagcaagagcctggagagcagcgctggcaccgtggccgccagccctgtgagaagaggaggccagaggggcctgcctgtgcccggcccccctgtgctgagcccagacctgcaccagctgcctgtgctggcccccctgcaccctgctgctgacaccaggaggatgtgcatgaggacctgcaccctgcggacccggggccgcaggaagtag

SEQ ID NO: 166285 - DNA, 1083 bp, synthetic construct
  misc_feature 1..1083: note = Description of Artificial Sequence: Synthetic coding sequence
  source 1..1083: mol_type = other DNA
atggtgcaggcccatggaggccgcagccgggcccagcccctgaccctgagcctgggcgccgccatgacccagcccccacctgagaagaccccagccaagaagcacgtgcggctgcaggagcggcggggcagcaatgtggccctgatgctggatgtgcgcagcctgggcgctgtggagcccatctgcagcgtgaacaccccccgggaggtgaccctgcacttcctgaggacagctggccaccccctgacccgctgggccctgcagaggcagccccccagccccaagcagctggaggaggagttcctgaagatccccagcaactttgtgtccccagaggacctggacatccctggccacgccagcaaggaccgctacaagaccatcctgcccaacccccagagccgggtgtgcctgggccgggcccagagccaggaggatggagactacatcaatgccaactacatccggggctatgatggcaaggagaaggtgtacatcgccacccagggccccatgcccaacacagtgtctgacttctgggagatggtgtggcaggaggaggtgtccctgattgtgatgctgacccagctgcgggagggcaaggagaagtgtgtgcactactggcccacagaggaggagacctacggccccttccagatccgcatccaggacatgaaggaatgtcctgagtacacagtgcggcagctgaccatccagtaccaggaggagcggcgctctgtgaagcacatcctcttcagcgcctggccagaccaccagaccccagagagcgctggccccctgctgcggctggtggccgaggtggaggagagccctgagacagctgcccaccctggccccatcgtggtgcactgcagcgctggcattggaagaacaggctgcttcatcgccacccgcatcggctgccagcagctgaaggcccggggggaggtggacatcctgggcatcgtgtgccagctgcggctggacagaggaggcatgatccagacagctgagcagtaccagttcctgcaccacaccctggccctgtatgccggccagctgcctgaggagcccagcccctag

SEQ ID NO: 166286 - DNA, 1398 bp, synthetic construct
  misc_feature 1..1398: note = Description of Artificial Sequence: Synthetic coding sequence
  source 1..1398: mol_type = other DNA
atggtgggcaaggcctggcccctgacccacagccagggcaccggcccctgggcccctgagggccacagaagagaggccgctgacccctggtggcagaggcagcaggcccaggagggccgcatgcagctgggctgtgcctgggtggccgccaggagaggaggcggcaggaagctggcctcctggagcctgctgagcccccagaggcagacagaccggcagacagacagctggcaggaggccgcctggggcccccagctgctgcagcagacctcctggctgtctgagccccccctgggccctgccccccacctgtccatggtgcaggcccacggcggccgcagccgggcccagcccctgaccctgagcctgggcgccgccatgacccagcccccacctgagaagaccccagccaagaagcacgtgcggctgcaggagcggcggggcagcaatgtggccctgatgctggatgtgcgcagcctgggcgctgtggagcccatctgcagcgtgaacaccccccgggaggtgaccctgcacttcctgaggacagctggccaccccctgacccgctgggccctgcagaggcagccccccagccccaagcagctggaggaggagttcctgaagatccccagcaactttgtgtccccagaggacctggacatccctggccacgccagcaaggaccgctacaagaccatcctgcccaacccccagagccgggtgtgcctgggccgggcccagagccaggaggatggagactacatcaatgccaactacatccggggctatgatggcaaggagaaggtgtacatcgccacccagggccccatgcccaacacagtgtctgacttctgggagatggtgtggcaggaggaggtgtccctcatcgtgatgctgacccagctgcgggagggcaaggagaagtgtgtgcactactggcccacagaggaggagacctacggccccttccagatccgcatccaggacatgaaggagtgcccagagtacacagtgcggcagctgaccatccagtaccaggaggagaggagatctgtgaagcacatcctcttcagcgcctggccagaccaccagaccccagagagcgctggccccctgctgcggctggtggccgaggtggaggagagccctgagacagctgcccaccctggccccatcgtggtgcactgcagcgctggcatcggccgcacaggctgcttcatcgccaccagaattggctgccagcagctgaaggcccggggggaggtggacatcctgggcatcgtgtgccagctgcggctggaccggggcggcatgatccagacagctgagcagtaccagttcctgcaccacaccctggccctgtatgccggccagctgcctgaggagcccagcccctag

SEQ ID NO: 166287 - DNA, 1200 bp, synthetic construct
  misc_feature 1..1200: note = Description of Artificial Sequence: Synthetic coding sequence
  source 1..1200: mol_type = other DNA
atgggcgccagcttctggcccatccggcaggcccgggagcagcagaggcgggccctgtccttccggcagacctcctggctgtctgagccccccctgggccctgccccccacctgtccatggtgcaggcccacggcggccgcagccgggcccagcccctgaccctgagcctgggcgccgccatgacccagcccccacctgagaagaccccagccaagaagcacgtgcggctgcaggagcggcggggcagcaatgtggccctgatgctggatgtgcgcagcctgggcgctgtggagcccatctgcagcgtgaacaccccccgggaggtgaccctgcacttcctgaggacagctggccaccccctgacccgctgggccctgcagaggcagccccccagccccaagcagctggaggaggagttcctgaagatccccagcaactttgtgtccccagaggacctggacatccctggccacgccagcaaggaccgctacaagaccatcctgcccaacccccagagccgggtgtgcctgggccgggcccagagccaggaggatggagactacatcaatgccaactacatccggggctatgatggcaaggagaaggtgtacatcgccacccagggccccatgcccaacacagtgtctgacttctgggagatggtgtggcaggaggaggtgtccctcatcgtgatgctgacccagctgcgggagggcaaggagaagtgtgtgcactactggcccacagaggaggagacctacggccccttccagatccgcatccaggacatgaaggagtgcccagagtacacagtgcggcagctgaccatccagtaccaggaggagaggagatctgtgaagcacatcctcttcagcgcctggccagaccaccagaccccagagagcgctggccccctgctgcggctggtggccgaggtggaggagagccctgagacagctgcccaccctggccccatcgtggtgcactgcagcgctggcatcggccgcacaggctgcttcatcgccaccagaattggctgccagcagctgaaggcccggggggaggtggacatcctgggcatcgtgtgccagctgcggctggaccggggcggcatgatccagacagctgagcagtaccagttcctgcaccacaccctggccctgtatgccggccagctgcctgaggagcccagcccctag

SEQ ID NO: 166288 - DNA, 465 bp, synthetic construct
  misc_feature 1..465: note = Description of Artificial Sequence: Synthetic coding sequence
  source 1..465: mol_type = other DNA
atggtgcaggcccatggaggccgcagccgggcccagcccctgaccctgagcctgggcgccgccatgacccagcccccacctgagaagaccccagccaagaagcacgtgcggctgcaggagcggcggggcagcaatgtggccctgatgctggatgtgcgcagcctgggcgctgtggagcccatctgcagcgtgaacaccccccgggaggtgaccctgcacttcctgaggacagctggccaccccctgacccgctgggccctgcagaggcagccccccagccccaagcagctggaggaggagttcctgaagatccccagcaactttgtgtccccagaggacctggacatccctggccacgccagcaaggaccgctacaagaccatcctgcccaacccccagagccgggtgtgcctgggccgggcccagagccaggaggatggagactacatcaatgccaactactag

SEQ ID NO: 166289 - DNA, 1326 bp, synthetic construct
  misc_feature 1..1326: note = Description of Artificial Sequence: Synthetic coding sequence
  source 1..1326: mol_type = other DNA
aagagaagaagagctgcctccatgaaccggctgggctgctggccagcccggagcctgcccaggagcggccggggcagcggccagaggagcctgggcctgggcggccaccccagcggccccaggcaccctggcaccccagctgccaagaggacctgggagagccctggggtgcgggcccgggactgccccctgagcacctcctggctgtctgagccccccctgggccctgccccccacctgtccatggtgcaggcccacggcggccgcagccgggcccagcccctgaccctgagcctgggcgccgccatgacccagcccccacctgagaagaccccagccaagaagcacgtgcggctgcaggagcggcggggcagcaatgtggccctgatgctggatgtgcgcagcctgggcgctgtggagcccatctgcagcgtgaacaccccccgggaggtgaccctgcacttcctgaggacagctggccaccccctgacccgctgggccctgcagaggcagccccccagccccaagcagctggaggaggagttcctgaagatccccagcaactttgtgtccccagaggacctggacatccctggccacgccagcaaggaccgctacaagaccatcctgcccaacccccagagccgggtgtgcctgggccgggcccagagccaggaggatggagactacatcaatgccaactacatccggggctatgatggcaaggagaaggtgtacatcgccacccagggccccatgcccaacacagtgtctgacttctgggagatggtgtggcaggaggaggtgtccctcatcgtgatgctgacccagctgcgggagggcaaggagaagtgtgtgcactactggcccacagaggaggagacctacggccccttccagatccgcatccaggacatgaaggagtgcccagagtacacagtgcggcagctgaccatccagtaccaggaggagaggagatctgtgaagcacatcctcttcagcgcctggccagaccaccagaccccagagagcgctggccccctgctgcggctggtggccgaggtggaggagagccctgagacagctgcccaccctggccccatcgtggtgcactgcagcgctggcatcggccgcacaggctgcttcatcgccaccagaattggctgccagcagctgaaggcccggggggaggtggacatcctgggcatcgtgtgccagctgcggctggaccggggcggcatgatccagacagctgagcagtaccagttcctgcaccacaccctggccctgtatgccggccagctgcctgaggagcccagcccctag

SEQ ID NO: 166290 - DNA, 423 bp, synthetic construct
  misc_feature 1..423: note = Description of Artificial Sequence: Synthetic coding sequence
  source 1..423: mol_type = other DNA
atggtgcaggcccatggaggccgcagccgggcccagcccctgaccctgagcctgggcgccgccatgacccagcccccacctgagaagaccccagccaagaagcacgtgcggctgcaggagcggcggggcagcaatgtggccctgatgctggatgtgcgcagcctgggcgctgtggagcccatctgcagcgtgaacaccccccgggaggtgaccctgcacttcctgaggacagctggccaccccctgacccgctgggccctgcagaggcagccccccagccccaagcagctggaggaggagttcctgaagatccccagcaactttgtgtccccagaggacctggacatccctggccacgccagcaaggaccgctacaagaccatcctgcccaacccccagagccgggtgtgcctgggccgctag

SEQ ID NO: 166291 - DNA, 1083 bp, synthetic construct; identical to SEQ ID NO: 166285
  misc_feature 1..1083: note = Description of Artificial Sequence: Synthetic coding sequence
  source 1..1083: mol_type = other DNA

SEQ ID NO: 166292 - DNA, 570 bp, synthetic construct
  misc_feature 1..570: note = Description of Artificial Sequence: Synthetic coding sequence
  source 1..570: mol_type = other DNA
atgcccaacacagtgtctgacttctgggagatggtgtggcaggaggaggtgtccctcatcgtgatgctgacccagctgcgggagggcaaggagaagtgtgtgcactactggcccacagaggaggagacctacggccccttccagatccgcatccaggacatgaaggagtgcccagagtacacagtgcggcagctgaccatccagtaccaggaggagaggagatctgtgaagcacatcctcttcagcgcctggccagaccaccagaccccagagagcgctggccccctgctgcggctggtggccgaggtggaggagagccctgagacagctgcccaccctggccccatcgtggtgcactgcagcgctggcatcggccgcacaggctgcttcatcgccaccagaattggctgccagcagctgaaggcccggggggaggtggacatcctgggcatcgtgtgccagctgcggctggaccggggcggcatgatccagacagctgagcagtaccagttcctgcaccacaccctggccctgtatgccggccagctgcctgaggagcccagcccctag

SEQ ID NO: 166293 - DNA, 411 bp, synthetic construct
  misc_feature 1..411: note = Description of Artificial Sequence: Synthetic coding sequence
  source 1..411: mol_type = other DNA
atgaaggaatgtcctgagtacacagtgcggcagctgaccatccagtaccaggaggagcggcgctctgtgaagcacatcctcttcagcgcctggccagaccaccagaccccagagagcgctggccccctgctgcggctggtggccgaggtggaggagagccctgagacagctgcccaccctggccccatcgtggtgcactgcagcgctggcattggaagaacaggctgcttcatcgccacccgcatcggctgccagcagctgaaggcccggggggaggtggacatcctgggcatcgtgtgccagctgcggctggacagaggaggcatgatccagacagctgagcagtaccagttcctgcaccacaccctggccctgtatgccggccagctgcctgaggagcccagcccctag

SEQ ID NO: 166294 - DNA, 1545 bp, synthetic construct
  misc_feature 1..1545: note = Description of Artificial Sequence: Synthetic coding sequence
  source 1..1545: mol_type = other DNA
atgagcagccccatcagcaagagccgcagcctggccgccttcctgcagcagctgcggagcccccggcagcccccccggctggtgaccagcacagcctacaccagcccccagccccgggaggtgcctgtgtgccccctgacagctggaggagagacccagaatgctgctgccctgcccggccccacctcctggcccctgctgggcagcctgctgcagatcctgtggaagggcggcctgaagaagcagcacgacaccctggtggagtaccacaagaagtatggcaagatcttcaggatgaagctgggcagctttgagagcgtgcacctgggcagcccctgcctgctggaggccctgtacagaacagaaagtgcctacccccagaggctggagatcaagccctggaaggcctacagagactacaggaaggagggctacggcctgctgatcctggagggggaggactggcagagggtgcgcagcgccttccagaagaagctgatgaagccaggagaggtgatgaagctggacaacaagatcaatgaggtgctggccgacttcatgggcagaattgatgagctgtgtgatgagcggggccacgtggaggacctgtacagcgagctgaacaagtggagctttgagagcatctgcctggtgctgtatgagaagcgcttcggcctgctgcagaagaatgctggagatgaagctgtgaacttcatcatggccatcaagaccatgatgagcacctttggaaggatgatggtgacccctgtggagctgcacaagagcctgaacaccaaggtgtggcaggaccacaccctggcctgggacaccatcttcaagtctgtgaaggcctgcatcgacaaccggctggagaagtacagccagcagcccagcgctgacttcctgtgtgacatctaccaccagaaccggctgagcaagaaggagctgtatgctgctgtgacagagctgcagctggccgctgtggagaccacagccaacagcctgatgtggatcctgtacaacctgagcaggaacccccaggtgcagcagaagctgctgaaggagatccagagcgtgctgcctgagaaccaggtgcccagggctgaggacctgaggaacatgccctacctgaaggcctgcctgaaggagagcatgaggctgacccccagcgtgcccttcaccaccaggaccctggacaaggccaccgtgctgggggagtatgccctgcccaagggcaccgtgctgatgctgaacacccaggtgctgggcagcagcgaggacaactttgaggacagcagccagttccggcctgagcgctggctgcaggagaaggagaagatcaacccctttgcccacctgccctttggagtgggcaagaggatgtgcattggaagaaggctggccgagctgcagctgcacctggccctgtgctggatcgtgaggaaatatgacatccaggccacagacaatgaacctgtggagatgctgcacagcggcaccctggtgcccagccgggagctgcccatcgccttctgccagaggtag

SEQ ID NO: 166295 - DNA, 2382 bp, synthetic construct
  misc_feature 1..2382: note = Description of Artificial Sequence: Synthetic coding sequence
  source 1..2382: mol_type = other DNA
atggacagctggttcatcctggtgctgctgggcagcggcctcatctgtgtgtctgccaacaatgccaccaccgtggcccccagcgtgggcatcaccaggctcatcaacagcagcacagctgagcctgtgaaggaggaggccaagaccagcaaccccaccagcagcctgaccagcctgtctgtggcccccaccttcagccccaacatcaccctgggccccacctacctgaccaccgtgaacagcagtgacagcgacaatggcaccaccaggacagccagcaccaacagcatcggcatcaccatcagccccaacggcacctggctgcctgacaaccagttcacagatgccaggacagagccctgggagggcaacagcagcacagctgccaccaccccagagaccttccccccatctgatgagacccccatcatcgctgtgatggtggccctgagcagcctgctggtgattgtgttcatcatcatcgtgctgtacatgctgcgcttcaagaagtacaagcaggccggcagccacagcaacagcttccggctgagcaatggaagaacagaagatgtggagccccagagcgtgcccctgctggcccggagccccagcaccaacaggaagtacccacccctgcctgtggacaagctggaggaggagatcaacagaaggatggctgatgacaacaagctgttccgggaggagttcaatgccctgcctgcctgccccatccaggccacctgtgaggccgccagcaaggaggagaacaaggagaagaaccgctacgtgaacatcctgccctatgaccacagccgggtgcacctgacccctgtggagggcgtgcctgacagcgactacatcaatgccagcttcatcaatggctaccaggagaagaacaagttcatcgccgcccagggccccaaggaggagaccgtgaatgacttctggaggatgatctgggagcagaacacagccaccatcgtgatggtgaccaacctgaaggagaggaaggagtgcaagtgtgcccagtactggccagaccagggctgctggacctacggcaacatccgggtgtctgtggaggatgtgacagtgctggtggactacacagtgaggaagttctgcatccagcaggtgggggacatgaccaacaggaagccccagaggctcatcacccagttccacttcacctcctggccagactttggagtgcccttcacccccatcggcatgctgaagttcctgaagaaggtgaaggcctgcaacccccagtatgctggggccatcgtggtgcactgcagcgctggggtgggccgcacaggcacctttgtggtgattgatgccatgctggacatgatgcacacagagaggaaggtggatgtgtatggctttgtgagccgcatccgggcccagcgctgccagatggtgcagacagacatgcagtatgtgttcatctaccaggccctgctggagcactacctgtatggagacacagagctggaggtgaccagcctggagacccacctgcagaagatctacaacaagatccctggcaccagcaacaacggcctggaggaggagttcaagaagctgaccagcatcaagatccagaatgacaagatgaggactggaaacctgcctgccaacatgaagaagaacagagtgctgcagatcatcccctatgagttcaacagagtcatcatccctgtgaagagaggagaagaaaatacagattatgtgaatgccagcttcattgatggctaccggcagaaggacagctacatcgccagccagggccccctgctgcacaccatcgaggacttctggaggatgatctgggagtggaagagctgcagcatcgtgatgctgacagagctggaggagcggggccaggagaagtgtgcccagtactggcccagtgatggcctggtgtcctatggagacatcaccgtggagctgaagaaggaggaggagtgtgagagctacacagtgcgggacctgctggtgaccaacacccgggagaacaagagccggcagatccggcagttccacttccacggctggccagaggtgggcatccccagtgatggcaagggcatgatcagcatcatcgctgctgtgcagaagcagcagcagcagagcggcaaccaccccatcaccgtgcactgcagcgctggagctggccgcacaggcaccttctgtgccctgagcacagtgctggagcgggtgaaggccgagggcatcctggatgtgttccagacagtgaagagcctgcggctgcagaggccccacatggtgcagaccctggagcagtatgagttctgctacaaggtggtgcaggagtacattgatgccttcagtgactatgccaacttcaagtag

SEQ ID NO: 166296 - DNA, 2382 bp, synthetic construct; identical to SEQ ID NO: 166295
  misc_feature 1..2382: note = Description of Artificial Sequence: Synthetic coding sequence
  source 1..2382: mol_type = other DNA

SEQ ID NO: 166297 - DNA, 1977 bp, synthetic construct
  misc_feature 1..1977: note = Description of Artificial Sequence: Synthetic coding sequence
  source 1..1977: mol_type = other DNA
atggtggccctgagcagcctgctggtgattgtgttcatcatcatcgtgctgtacatgctgcggcgcttcaggaaggccgagctgatgagcaggaacacagagaagtacaagcaggccggcagccacagcaacagcttccggctgagcaatggccgcacagaagatgtggagccccagagcgtgcccctgctggcccggagccccagcaccaacaggaagtacccacccctgcctgtggacaagctggaggaggagatcaacagaaggatggctgatgacaacaagctgttccgggaggagttcaatgccctgcctgcctgccccatccaggccacctgtgaggccgccagcaaggaggagaacaaggagaagaacagatatgtgaacatcctgccctatgaccacagccgggtgcacctgacccctgtggagggcgtgcctgacagcgactacatcaatgccagcttcatcaatggctaccaggagaagaacaagttcatcgccgcccagggccccaaggaggagaccgtgaatgacttctggaggatgatctgggagcagaacacagccaccatcgtgatggtgaccaacctgaaggagaggaaagaatgtaaatgtgcccagtactggccagaccagggctgctggacctacggcaacatccgggtgtctgtggaggatgtgacagtgctggtggactacacagtgaggaagttctgcatccagcaggtgggggacatgaccaacaggaagccccagaggctcatcacccagttccacttcacctcctggccagactttggagtgcccttcacccccatcggcatgctgaagttcctgaagaaggtgaaggcctgcaacccccagtatgctggggccatcgtggtgcactgcagcgctggggtgggccgcacaggcacctttgtggtgattgatgccatgctggacatgatgcacacagagaggaaggtggatgtgtatggctttgtgagccgcatccgggcccagcgctgccagatggtgcagacagacatgcagtatgtgttcatctaccaggccctgctggagcactacctgtatggagacacagagctggaggtgaccagcctggagacccacctgcagaagatctacaacaagatccctggcaccagcaacaacggcctggaggaggagttcaagaagctgaccagcatcaagatccagaatgacaagatgaggacaggcaacctgcctgccaacatgaagaagaacagagtgctgcagatcatcccctatgagttcaacagagtcatcatccctgtgaagagaggagaggagaacacagattatgtgaatgccagcttcattgatggctaccggcagaaggacagctacatcgccagccagggccccctgctgcacaccatcgaggacttctggaggatgatctgggagtggaagagctgcagcatcgtgatgctgacagagctggaggagcggggccaggagaagtgtgcccagtactggcccagtgatggcctggtgtcctatggagacatcaccgtggagctgaagaaggaggaggagtgtgagagctacacagtgcgggacctgctggtgaccaacacccgggagaacaagagccggcagatccggcagttccacttccacggctggccagaggtgggcatccccagtgatggcaagggcatgatcagcatcatcgctgctgtgcagaagcagcagcagcagagcggcaaccaccccatcaccgtgcactgcagcgctggggccggccgcacaggcaccttctgtgccctgagcacagtgctggagcgggtgaaggccgagggcatcctggatgtgttccagacagtgaagagcctgcggctgcagaggccccacatggtgcagaccctggagcagtatgagttctgctacaaggtggtgcaggagtacattgatgccttcagtgactatgccaacttcaagtag

SEQ ID NO: 166298 - DNA, 2409 bp, synthetic construct
  misc_feature 1..2409: note = Description of Artificial Sequence: Synthetic coding sequence
  source 1..2409: mol_type = other DNA
atggacagctggttcatcctggtgctgctgggcagcggcctcatctgtgtgtctgccaacaatgccaccaccgtggcccccagcgtgggcatcaccaggctcatcaacagcagcacagctgagcctgtgaaggaggaggccaagaccagcaaccccaccagcagcctgaccagcctgtctgtggcccccaccttcagccccaacatcaccctgggccccacctacctgaccaccgtgaacagcagtgacagcgacaatggcaccaccaggacagccagcaccaacagcatcggcatcaccatcagccccaacggcacctggctgcctgacaaccagttcacagatgccaggacagagccctgggagggcaacagcagcacagctgccaccaccccagagaccttcccccccagcggcaacagcgacagcaaggacagaagagatgagacccccatcatcgctgtgatggtggccctgagcagcctgctggtgattgtgttcatcatcatcgtgctgtacatgctgcgcttcaagaagtacaagcaggccggcagccacagcaacagcttccggctgagcaatggccgcacagaagatgtggagccccagagcgtgcccctgctggcccggagccccagcaccaacaggaagtacccacccctgcctgtggacaagctggaggaggagatcaacagaaggatggctgatgacaacaagctgttccgggaggagttcaatgccctgcctgcctgccccatccaggccacctgtgaggccgccagcaaggaggagaacaaggagaagaacagatatgtgaacatcctgccctatgaccacagccgggtgcacctgacccctgtggagggcgtgcctgacagcgactacatcaatgccagcttcatcaatggctaccaggagaagaacaagttcatcgccgcccagggccccaaggaggagaccgtgaatgacttctggaggatgatctgggagcagaacacagccaccatcgtgatggtgaccaacctgaaggagaggaaagaatgtaaatgtgcccagtactggccagaccagggctgctggacctacggcaacatccgggtgtctgtggaggatgtgacagtgctggtggactacacagtgaggaagttctgcatccagcaggtgggggacatgaccaacaggaagccccagaggctcatcacccagttccacttcacctcctggccagactttggagtgcccttcacccccatcggcatgctgaagttcctgaagaaggtgaaggcctgcaacccccagtatgctggggccatcgtggtgcactgcagcgctggggtgggccgcacaggcacctttgtggtgattgatgccatgctggacatgatgcacacagagaggaaggtggatgtgtatggctttgtgagccgcatccgggcccagcgctgccagatggtgcagacagacatgcagtatgtgttcatctaccaggccctgctggagcactacctgtatggagacacagagctggaggtgaccagcctggagacccacctgcagaagatctacaacaagatccctggcaccagcaacaacggcctggaggaggagttcaagaagctgaccagcatcaagatccagaatgacaagatgaggacaggcaacctgcctgccaacatgaagaagaacagagtgctgcagatcatcccctatgagttcaacagagtcatcatccctgtgaagagaggagaggagaacacagattatgtgaatgccagcttcattgatggctaccggcagaaggacagctacatcgccagccagggccccctgctgcacaccatcgaggacttctggaggatgatctgggagtggaagagctgcagcatcgtgatgctgacagagctggaggagcggggccaggagaagtgtgcccagtactggcccagtgatggcctggtgtcctatggagacatcaccgtggagctgaagaaggaggaggagtgtgagagctacacagtgcgggacctgctggtgaccaacacccgggagaacaagagccggcagatccggcagttccacttccacggctggccagaggtgggcatccccagtgatggcaagggcatgatcagcatcatcgctgctgtgcagaagcagcagcagcagagcggcaaccaccccatcaccgtgcactgcagcgctggggccggccgcacaggcaccttctgtgccctgagcacagtgctggagcgggtgaaggccgagggcatcctggatgtgttccagacagtgaagagcctgcggctgcagaggccccacatggtgcagaccctggagcagtatgagttctgctacaaggtggtgcaggagtacattgatgccttcagtgactatgccaacttcaagtag

SEQ ID NO: 166299 - DNA, 2409 bp, synthetic construct; identical to SEQ ID NO: 166298
  misc_feature 1..2409: note = Description of Artificial Sequence: Synthetic coding sequence
  source 1..2409: mol_type = other DNA

SEQ ID NO: 166300 - DNA, 603 bp, synthetic construct
  misc_feature 1..603: note = Description of Artificial Sequence: Synthetic coding sequence
  source 1..603: mol_type = other DNA
atggacagctggttcatcctggtgctgctgggcagcggcctcatctgtgtgtctgccaacaatgccaccaccgtggcccccagcgtgggcatcaccaggctcatcaacagcagcacagctgagcctgtgaaggaggaggccaagaccagcaaccccaccagcagcctgaccagcctgtctgtggcccccaccttcagccccaacatcaccctgggccccacctacctgaccaccgtgaacagcagtgacagcgacaatggcaccaccaggacagccagcaccaacagcatcggcatcaccatcagccccaacggcacctggctgcctgacaaccagttcacagatgccaggacagagccctgggagggcaacagcagcacagctgccaccaccccagagaccttcccccccagcggcaacagcgacagcaaggacagaagagatgagacccccatcatcgctgtgatggtggccctgagcagcctgctggtgattgtgttcatcatcatcgtgctgtacatgctgcgcttcaagaagtacaagcaggccggcagccacagcaacagcttccggctgagcaatggccgcacagaagatgtgtag

SEQ ID NO: 166301 - DNA, 2442 bp, synthetic construct
  misc_feature 1..2442: note = Description of Artificial Sequence: Synthetic coding sequence
  source 1..2442: mol_type = other DNA
atggatgatgctgtgcagatcaccaagatctccatggacagctggttcatcctggtgctgctgggcagcggcctcatctgtgtgtctgccaacaatgccaccaccgtggcccccagcgtgggcatcaccaggctcatcaacagcagcacagctgagcctgtgaaggaggaggccaagaccagcaaccccaccagcagcctgaccagcctgtctgtggcccccaccttcagccccaacatcaccctgggccccacctacctgaccaccgtgaacagcagtgacagcgacaatggcaccaccaggacagccagcaccaacagcatcggcatcaccatcagccccaacggcacctggctgcctgacaaccagttcacagatgccaggacagagccctgggagggcaacagcagcacagctgccaccaccccagagaccttccccccatctggcaacagcgacagcaaggacagaagagatgagacccccatcatcgctgtgatggtggccctgagcagcctgctggtgattgtgttcatcatcatcgtgctgtacatgctgcgcttcaagaagtacaagcaggccggcagccacagcaacagcttccggctgagcaatggaagaacagaagatgtggagccccagagcgtgcccctgctggcccggagccccagcaccaacaggaagtacccacccctgcctgtggacaagctggaggaggagatcaacagaaggatggctgatgacaacaagctgttccgggaggagttcaatgccctgcctgcctgccccatccaggccacctgtgaggccgccagcaaggaggagaacaaggagaagaaccgctacgtgaacatcctgccctatgaccacagccgggtgcacctgacccctgtggagggcgtgcctgacagcgactacatcaatgccagcttcatcaatggctaccaggagaagaacaagttcatcgccgcccagggccccaaggaggagaccgtgaatgacttctggaggatgatctgggagcagaacacagccaccatcgtgatggtgaccaacctgaaggagaggaaggagtgcaagtgtgcccagtactggccagaccagggctgctggacctacggcaacatccgggtgtctgtggaggatgtgacagtgctggtggactacacagtgaggaagttctgcatccagcaggtgggggacatgaccaacaggaagccccagaggctcatcacccagttccacttcacctcctggccagactttggagtgcccttcacccccatcggcatgctgaagttcctgaagaaggtgaaggcctgcaacccccagtatgctggggccatcgtggtgcactgcagcgctggggtgggccgcacaggcacctttgtggtgattgatgccatgctggacatgatgcacacagagaggaaggtggatgtgtatggctttgtgagccgcatccgggcccagcgctgccagatggtgcagacagacatgcagtatgtgttcatctaccaggccctgctggagcactacctgtatggagacacagagctggaggtgaccagcctggagacccacctgcagaagatctacaacaagatccctggcaccagcaacaacggcctggaggaggagttcaagaagctgaccagcatcaagatccagaatgacaagatgaggactggaaacctgcctgccaacatgaagaagaacagagtgctgcagatcatcccctatgagttcaacagagtcatcatccctgtgaagagaggagaagaaaatacagattatgtgaatgccagcttcattgatggctaccggcagaaggacagctacatcgccagccagggccccctgctgcacaccatcgaggacttctggaggatgatctgggagtggaagagctgcagcatcgtgatgctgacagagctggaggagcggggccaggagaagtgtgcccagtactggcccagtgatggcctggtgtcctatggagacatcaccgtggagctgaagaaggaggaggagtgtgagagctacacagtgcgggacctgctggtgaccaacacccgggagaacaagagccggcagatccggcagttccacttccacggctggccagaggtgggcatccccagtgatggcaagggcatgatcagcatcatcgctgctgtgcagaagcagcagcagcagagcggcaaccaccccatcaccgtgcactgcagcgctggagctggccgcacaggcaccttctgtgccctgagcacagtgctggagcgggtgaaggccgagggcatcctggatgtgttccagacagtgaagagcctgcggctgcagaggccccacatggtgcagaccctggagcagtatgagttctgctacaaggtggtgcaggagtacattgatgccttcagtgactatgccaacttcaagtag

SEQ ID NO: 166302 - DNA, 528 bp, synthetic construct
  misc_feature 1..528: note = Description of Artificial Sequence: Synthetic coding sequence
  source 1..528: mol_type = other DNA
atggacagctggttcatcctggtgctgctgggcagcggcctcatctgtgtgtctgccaacaatgccaccaccgtggcccccagcgtgggcatcaccaggctcatcaacagcagcacagctgagcctgtgaaggaggaggccaagaccagcaaccccaccagcagcctgaccagcctgtctgtggcccccaccttcagccccaacatcaccctgggccccacctacctgaccaccgtgaacagcagtgacagcgacaatggcaccaccaggacagccagcaccaacagcatcggcatcaccatcagccccaacggcacctggctgcctgacaaccagttcacagatgccaggacagagccctgggagggcaacagcagcacagctgccaccaccccagagaccttcccccccagcggcaacagcgacagcaaggacagaagagatgagacccccatcatcgctgtgatggtggccctgagcagcctgctggtgattgtgttcatcatcatcgtgctgtacatgctgtag

SEQ ID NO: 166303 - DNA, 417 bp, synthetic construct
  misc_feature 1..417: note = Description of Artificial Sequence: Synthetic coding sequence
  source 1..417: mol_type = other DNA
atggacagctggttcatcctggtgctgctgggcagcggcctcatctgtgtgtctgccaacaatgccaccaccgtggcccccagcgtgggcatcaccaggctcatcaacagcagcacagctgagcctgtgaaggaggaggccaagaccagcaaccccaccagcagcctgaccagcctgtctgtggcccccaccttcagccccaacatcaccctgggccccacctacctgaccaccgtgaacagcagtgacagcgacaatggcaccaccaggacagccagcaccaacagcatcggcatcaccatcagccccaacggcacctggctgcctgacaaccagttcacagatgccaggacagagccctgggagggcaacagcagcacagctgccaccaccccagagaccttcccccccagctag

SEQ ID NO: 166304 - DNA, 762 bp, synthetic construct
  misc_feature 1..762: note = Description of Artificial Sequence: Synthetic coding sequence
  source 1..762: mol_type = other DNA
atggacagctggttcatcctggtgctgctgggcagcggcctcatctgtgtgtctgccaacaatgccaccaccgtggcccccagcgtgggcatcaccaggctcatcaacagcagcacagctgagcctgtgaaggaggaggccaagaccagcaaccccaccagcagcctgaccagcctgtctgtggcccccaccttcagccccaacatcaccctgggccccacctacctgaccaccgtgaacagcagtgacagcgacaatggcaccaccaggacagccagcaccaacagcatcggcatcaccatcagccccaacggcacctggctgcctgacaaccagttcacagatgccaggacagagccctgggagggcaacagcagcacagctgccaccaccccagagaccttccccccatctgatgagacccccatcatcgctgtgatggtggccctgagcagcctgctggtgattgtgttcatcatcatcgtgctgtacatgctgcgcttcaagaagtacaagcaggccggcagccacagcaacagcttccggctgagcaatggaagaacagaagatgtggagccccagagcgtgcccctgctggcccggagccccagcaccaacaggaagtacccacccctgcctgtggacaagctggaggaggagatcaacagaaggatggctgatgacaacaagctgttccgggaggagttcaatgccctgcctgcctgccccatccaggccacctgtgaggccgccagcaagtag

SEQ ID NO: 166305 - DNA, 1239 bp, synthetic construct
  misc_feature 1..1239: note = Description of Artificial Sequence: Synthetic coding sequence
  source 1..1239: mol_type = other DNA
atgaccaacaggaagccccagaggctcatcacccagttccacttcacctcctggccagactttggagtgcccttcacccccatcggcatgctgaagttcctgaagaaggtgaaggcctgcaacccccagtatgctggggccatcgtggtgcactgcagcgctggggtgggccgcacaggcacctttgtggtgattgatgccatgctggacatgatgcacacagagaggaaggtggatgtgtatggctttgtgagccgcatccgggcccagcgctgccagatggtgcagacagacatgcagtatgtgttcatctaccaggccctgctggagcactacctgtatggagacacagagctggaggtgaccagcctggagacccacctgcagaagatctacaacaagatccctggcaccagcaacaacggcctggaggaggagttcaagaagctgaccagcatcaagatccagaatgacaagatgaggacaggcaacctgcctgccaacatgaagaagaacagagtgctgcagatcatcccctatgagttcaacagagtcatcatccctgtgaagagaggagaggagaacacagattatgtgaatgccagcttcattgatggctaccggcagaaggacagctacatcgccagccagggccccctgctgcacaccatcgaggacttctggaggatgatctgggagtggaagagctgcagcatcgtgatgctgacagagctggaggagcggggccaggagaagtgtgcccagtactggcccagtgatggcctggtgtcctatggagacatcaccgtggagctgaagaaggaggaggagtgtgagagctacacagtgcgggacctgctggtgaccaacacccgggagaacaagagccggcagatccggcagttccacttccacggctggccagaggtgggcatccccagtgatggcaagggcatgatcagcatcatcgctgctgtgcagaagcagcagcagcagagcggcaaccaccccatcaccgtgcactgcagcgctggggccggccgcacaggcaccttctgtgccctgagcacagtgctggagcgggtgaaggccgagggcatcctggatgtgttccagacagtgaagagcctgcggctgcagaggccccacatggtgcagaccctggagcagtatgagttctgctacaaggtggtgcaggagtacattgatgccttcagtgactatgccaacttcaagtag

SEQ ID NO: 166306 - DNA, 5994 bp, synthetic construct
  misc_feature 1..5994: note = Description of Artificial Sequence: Synthetic coding sequence
  source 1..5994: mol_type = other DNA
atgctgagccacggggccggcctggccctgtggatcaccctgagcctgctgcagacaggcctggccgagcctgagcgctgcaacttcaccctggccgagagcaaggccagcagccacagcgtgtccatccagtggaggatcctgggcagcccctgcaacttcagcctcatctacagcagtgacaccctgggcgccgccctgtgccccaccttcagaattgacaacaccacctacggctgcaacctgcaggacctgcaggccggcaccatctacaacttccgcatcatcagcctggatgaggagaggacagtggtgctgcagacagaccccctgcccccagcccgcttcggcgtgtccaaggagaagaccaccagcaccagcctgcacgtgtggtggacccccagcagcggcaaggtgaccagctatgaggtgcagctgtttgatgagaacaaccagaagatccagggcgtgcagatccaggagagcacctcctggaatgagtacaccttcttcaacctgacagctggcagcaagtacaacatcgccatcacagctgtgtctgggggcaagaggagcttctctgtgtacaccaacggcagcacagtgcccagccctgtgaaggacatcggcatcagcaccaaggccaacagcctgctgatctcctggagccacggcagcggaaatgtggagcgctaccgcctgatgctgatggacaagggcatcctggtgcacggcggcgtggtggacaagcacgccaccagctatgccttccacggcctgaccccaggctacctgtacaacctgactgtgatgacagaggccgccggcctgcagaactaccgctggaagctggtgaggacagcccccatggaggtgagcaacctgaaggtgaccaatgatggcagcctgaccagcctgaaggtgaagtggcagaggcctcctggaaatgtggacagctacaacatcaccctgagccacaagggcaccatcaaggagagccgggtgctggccccctggatcacagagacccacttcaaggagctggtgcccggccgcctgtaccaggtgacagtgtcctgtgtgtctggagagctgagcgcccagaagatggctgtgggccgcaccttcccagacaaggtggccaacctggaggccaacaacaacggccgcatgaggagcctggtggtgtcctggagccccccagctggggactgggagcagtaccgcatcctgctcttcaatgacagcgtggtgctgctgaacatcaccgtgggcaaggaggagacccagtatgtgatggatgacaccggcctggtgcccggccggcagtatgaggtggaggtgattgtggagagcggcaacctgaagaacagcgagcgctgccagggccgcacagtgcccctggccgtgctgcagctgcgggtgaagcacgccaatgagaccagcctgagcatcatgtggcagacccctgtggccgagtgggagaagtacatcatcagcctggccgaccgggacctgctgctgatccacaagagcctgagcaaggatgccaaggagttcaccttcacagacctggtgcccggcaggaagtacatggccaccgtgaccagcatcagcggggacctgaagaacagcagctctgtgaagggccgcacagtgcctgcccaggtgacagacctgcacgtggccaaccagggcatgaccagcagcctcttcaccaactggacccaggcccagggagatgtggagttctaccaggtgctgctgattcatgaaaatgtggtgatcaagaatgaaagcatcagcagcgagaccagccgctacagcttccacagcctgaagagcggcagcctgtacagcgtggtggtgaccaccgtgtctgggggcatcagcagccggcaggtggtggtggagggccgcacagtgcccagctctgtgtctggagtgacagtgaacaacagcggcagaaatgactacctgtctgtgtcctggctgctggcccctggagatgtggacaactatgaggtgaccctgagccatgatggcaaggtggtgcagagcctggtgattgccaagtctgtgcgggagtgcagcttcagcagcctgaccccaggccgcctgtacacagtgaccatcaccaccaggtctgggaagtatgagaaccacagcttcagccaggagaggacagtgcctgacaaggtgcagggcgtgtctgtgagcaacagcgcccggagtgactacctgcgggtgtcctgggtgcacgccaccggggactttgaccactatgaggtgaccatcaagaacaagaacaacttcatccagaccaagagcatccccaagtcagaaaatgaatgtgtgtttgtgcagctggtgcccggccgcctgtacagcgtgacagtgaccaccaagagcggccagtatgaggccaatgagcagggcaatggccgcaccatccctgagcctgtgaaggacctgaccctgaggaacagaagcacagaggacctgcacgtgacctggagcggggccaatggagatgtggaccagtatgagatccagctgctcttcaatgacatgaaggtgttcccccccttccacctggtgaacacagccacagagtaccgcttcaccagcctgaccccaggccggcagtacaagatcctggtgctgaccatctctggagatgtgcagcagagcgccttcatcgagggcttcaccgtgcccagcgctgtgaagaacatccacatcagccccaacggggccacagacagcctgactgtgaactggaccccaggaggaggagatgtggacagctacacagtgtctgccttccgccacagccagaaggtggacagccagaccatccccaagcacgtgtttgagcacaccttccaccggctggaggccggggagcagtaccagatcatgattgcctctgtgtctggcagcctgaagaaccagatcaacgtggtgggccgcacagtgcctgcctctgtgcagggcgtgattgctgacaatgcctacagcagctacagcctgattgtgtcctggcagaaggccgccggcgtggccgagagatatgacatcctgctgctgacagaaaatggcatcctgctgaggaacaccagcgagcccgccaccaccaagcagcacaagtttgaggacctgaccccaggcaagaagtacaagatccagatcctgactgtgtctgggggcctcttcagcaaggaggcccagacagagggccgcacagtgcctgctgctgtgacagacctgcgcatcacagagaacagcaccaggcacctgtccttccgctggacagccagcgagggggagctgtcctggtacaacatcttcctgtacaacccagatggcaacctgcaggagcgggcccaggtggaccccctggtgcagagcttctccttccagaacctgctgcagggccgcatgtacaagatggtgattgtgacccacagcggggagctgagcaatgaaagcttcatcttcggccgcacagtgcctgcctctgtgagccacctgcggggcagcaacagaaacaccacagacagcctgtggttcaactggagccctgccagcggggactttgacttctatgagctgatcctgtacaaccccaacggcaccaagaaggagaactggaaggacaaggacctgacagagtggaggttccagggcctggtgcccggcaggaaatatgtgctgtgggtggtgacccacagcggggacctgagcaacaaggtgacagctgagagcaggacagcccccagcccccccagcctgatgagctttgctgacatcgccaacaccagcctggccatcacctggaagggccccccagactggacagactacaatgactttgagctgcagtggctgcccagagatgccctgaccgtcttcaacccctacaacaacaggaagtctgagggccgcatcgtgtatggcctgcggcccggccgcagctaccagttcaacgtgaagacagtgtctggggacagctggaagacctacagcaagcccatcttcggctctgtgaggaccaagccagacaagatccagaacctgcactgccggccccagaacagcacagccatcgcctgctcctggatccccccagacagcgactttgatggctacagcattgagtgcaggaagatggacacccaggaggtggagttcagcaggaagctggagaaggagaagagcctgctgaacatcatgatgctggtgccccacaagcgctacctggtgtccatcaaggtgcagagcgctggcatgaccagcgaggtggtggaggacagcaccatcaccatgattgaccggcccccacctcctccaccccacatccgggtgaatgagaaggatgtgctgatcagcaagagcagcatcaacttcaccgtgaactgctcctggttcagtgacaccaacggggctgtgaagtacttcaccgtggtggtgcgggaggctgatggcagtgatgagctgaagccagagcagcagcaccccctgcccagctacctggagtaccgccacaatgccagcatccgggtgtaccagaccaactactttgccagcaaatgtgccgagaaccccaacagcaacagcaagagcttcaacatcaagctgggcgctgagatggagagcctgggcggcaaatgtgaccccacccagcagaagttctgtgatggccccctgaagccccacacagcctaccgcatcagcatccgggccttcacccagctgtttgatgaggacctgaaggagttcaccaagcccctgtacagcgacaccttcttcagcctgcccatcaccacagaaagtgagcccctgtttggagccatcgagggcgtgtctgctggcctcttcctgattggcatgctggtggccgtggtggccctgctgatctgccggcagaaggtgagccacggccgggagcggcccagcgcccggctgagcatccggcgggaccggcccctgtctgtgcacctgaacctgggccagaagggcaacaggaagaccagctgccccatcaagatcaaccagtttgagggccacttcatgaagctgcaggccgacagcaactacctgctgagcaaggagtatgaggagctgaaggatgtgggcaggaaccagagctgtgacatcgccctgctgcctgagaacagaggcaagaaccgctacaacaacatcctgccctatgatgccaccagggtgaagctgagcaatgtggatgatgacccctgcagcgactacatcaatgccagctacatccctggcaacaacttcagaagagagtacatcgtgacccagggccccctgcccggcaccaaggatgacttctggaagatggtgtgggagcagaatgtgcacaacatcgtgatggtgacccagtgtgtggagaagggccgggtgaagtgtgaccactactggccagctgaccaggacagcctgtactatggagacctgatcctgcagatgctgtctgagagcgtgctgcctgagtggaccatccgggagttcaagatctgtggggaggagcagctggatgcccacaggctcatccgccacttccactacacagtgtggccagaccatggagtgcctgagaccacccagagcctcatccagtttgtgaggacagtgcgggactacatcaacagaagccctggagctggccccaccgtggtgcactgcagcgctggggtgggccgcacaggcaccttcatcgccctggaccgcatcctgcagcagctggacagcaaggacagcgtggacatctatggagctgtgcatgacctgcggctgcaccgggtgcacatggtgcagacagagtgccagtatgtgtacctgcaccagtgtgtgagagatgtgctgcgggccaggaagctgcggtctgagcaggagaaccccctcttccccatctatgaaaatgtgaaccctgagtaccaccgggaccctgtgtacagccgccactag

SEQ ID NO: 166307 - DNA, 6648 bp, synthetic construct
  misc_feature 1..6648: note = Description of Artificial Sequence: Synthetic coding sequence
  source 1..6648: mol_type = other DNA
atggaggccgagttctacatggtgatcctgacctgcctgatcttcaggaacagcgagggcttccagatcgtgcacgtgcagaagcagcagtgcctcttcaagaatgagaaggtggtggtgggcagctgcaacagaaccatccagaaccagcagtggatgtggacagaagatgagaagctgctgcacgtgaagagcgccctgtgcctggccatcagcaacagcagccggggccccagccgcagcgccatcctggaccgctgcagccaggccccccgctggacctgctatgaccaggagggcttcctggaggtggagaatgccagcctcttcctgcagaagcagggcagccgggtggtggtgaagaaggccaggaagtacctgcacagctggatgaagattgatgtgaacaaggagggcaagctggtgaatgaaagcctgtgcctgcagaaggccggcctgggcgctgaggtgtctgtgcgcagcaccaggaacacagccccaccccagatcctgaccaccttcaatgctgtgcctgatggcctggtgttcctgatccggaacaccacagaggccttcatcagaaatgctgctgagaactacagccagaacagcagcgagcggcagcaccccaacctgcacatgacaggcatcacagacacctcctgggtgctgagcaccacccagcccttcagcagcaccacagaggagaccggcctggccgagcctgagcgctgcaacttcaccctggccgagagcaaggccagcagccacagcgtgtccatccagtggaggatcctgggcagcccctgcaacttcagcctcatctacagcagtgacaccctgggcgccgccctgtgccccaccttcagaattgacaacaccacctacggctgcaacctgcaggacctgcaggccggcaccatctacaacttccgcatcatcagcctggatgaggagaggacagtggtgctgcagacagaccccctgcccccagcccgcttcggcgtgtccaaggagaagaccaccagcaccagcctgcacgtgtggtggacccccagcagcggcaaggtgaccagctatgaggtgcagctgtttgatgagaacaaccagaagatccagggcgtgcagatccaggagagcacctcctggaatgagtacaccttcttcaacctgacagctggcagcaagtacaacatcgccatcacagctgtgtctgggggcaagaggagcttctctgtgtacaccaacggcagcacagtgcccagccctgtgaaggacatcggcatcagcaccaaggccaacagcctgctgatctcctggagccacggcagcggaaatgtggagcgctaccgcctgatgctgatggacaagggcatcctggtgcacggcggcgtggtggacaagcacgccaccagctatgccttccacggcctgaccccaggctacctgtacaacctgactgtgatgacagaggccgccggcctgcagaactaccgctggaagctggtgaggacagcccccatggaggtgagcaacctgaaggtgaccaatgatggcagcctgaccagcctgaaggtgaagtggcagaggcctcctggaaatgtggacagctacaacatcaccctgagccacaagggcaccatcaaggagagccgggtgctggccccctggatcacagagacccacttcaaggagctggtgcccggccgcctgtaccaggtgacagtgtcctgtgtgtctggagagctgagcgcccagaagatggctgtgggccgcaccttcccagacaaggtggccaacctggaggccaacaacaacggccgcatgaggagcctggtggtgtcctggagccccccagctggggactgggagcagtaccgcatcctgctcttcaatgacagcgtggtgctgctgaacatcaccgtgggcaaggaggagacccagtatgtgatggatgacaccggcctggtgcccggccggcagtatgaggtggaggtgattgtggagagcggcaacctgaagaacagcgagcgctgccagggccgcacagtgcccctggccgtgctgcagctgcgggtgaagcacgccaatgagaccagcctgagcatcatgtggcagacccctgtggccgagtgggagaagtacatcatcagcctggccgaccgggacctgctgctgatccacaagagcctgagcaaggatgccaaggagttcaccttcacagacctggtgcccggcaggaagtacatggccaccgtgaccagcatcagcggggacctgaagaacagcagctctgtgaagggccgcacagtgcctgcccaggtgacagacctgcacgtggccaaccagggcatgaccagcagcctcttcaccaactggacccaggcccagggagatgtggagttctaccaggtgctgctgattcatgaaaatgtggtgatcaagaatgaaagcatcagcagcgagaccagccgctacagcttccacagcctgaagagcggcagcctgtacagcgtggtggtgaccaccgtgtctgggggcatcagcagccggcaggtggtggtggagggccgcacagtgcccagctctgtgtctggagtgacagtgaacaacagcggcagaaatgactacctgtctgtgtcctggctgctggcccctggagatgtggacaactatgaggtgaccctgagccatgatggcaaggtggtgcagagcctggtgattgccaagtctgtgcgggagtgcagcttcagcagcctgaccccaggccgcctgtacacagtgaccatcaccaccaggtctgggaagtatgagaaccacagcttcagccaggagaggacagtgcctgacaaggtgcagggcgtgtctgtgagcaacagcgcccggagtgactacctgcgggtgtcctgggtgcacgccaccggggactttgaccactatgaggtgaccatcaagaacaagaacaacttcatccagaccaagagcatccccaagtcagaaaatgaatgtgtgtttgtgcagctggtgcccggccgcctgtacagcgtgacagtgaccaccaagagcggccagtatgaggccaatgagcagggcaatggccgcaccatccctgagcctgtgaaggacctgaccctgaggaacagaagcacagaggacctgcacgtgacctggagcggggccaatggagatgtggaccagtatgagatccagctgctcttcaatgacatgaaggtgttcccccccttccacctggtgaacacagccacagagtaccgcttcaccagcctgaccccaggccggcagtacaagatcctggtgctgaccatctctggagatgtgcagcagagcgccttcatcgagggcttcaccgtgcccagcgctgtgaagaacatccacatcagccccaacggggccacagacagcctgactgtgaactggaccccaggaggaggagatgtggacagctacacagtgtctgccttccgccacagccagaaggtggacagccagaccatccccaagcacgtgtttgagcacaccttccaccggctggaggccggggagcagtaccagatcatgattgcctctgtgtctggcagcctgaagaaccagatcaacgtggtgggccgcacagtgcctgcctctgtgcagggcgtgattgctgacaatgcctacagcagctacagcctgattgtgtcctggcagaaggccgccggcgtggccgagagatatgacatcctgctgctgacagaaaatggcatcctgctgaggaacaccagcgagcccgccaccaccaagcagcacaagtttgaggacctgaccccaggcaagaagtacaagatccagatcctgactgtgtctgggggcctcttcagcaaggaggcccagacagagggccgcacagtgcctgctgctgtgacagacctgcgcatcacagagaacagcaccaggcacctgtccttccgctggacagccagcgagggggagctgtcctggtacaacatcttcctgtacaacccagatggcaacctgcaggagcgggcccaggtggaccccctggtgcagagcttctccttccagaacctgctgcagggccgcatgtacaagatggtgattgtgacccacagcggggagctgagcaatgaaagcttcatcttcggccgcacagtgcctgcctctgtgagccacctgcggggcagcaacagaaacaccacagacagcctgtggttcaactggagccctgccagcggggactttgacttctatgagctgatcctgtacaaccccaacggcaccaagaaggagaactggaaggacaaggacctgacagagtggaggttccagggcctggtgcccggcaggaaatatgtgctgtgggtggtgacccacagcggggacctgagcaacaaggtgacagctgagagcaggacagcccccagcccccccagcctgatgagctttgctgacatcgccaacaccagcctggccatcacctggaagggccccccagactggacagactacaatgactttgagctgcagtggctgcccagagatgccctgaccgtcttcaacccctacaacaacaggaagtctgagggccgcatcgtgtatggcctgcggcccggccgcagctaccagttcaacgtgaagacagtgtctggggacagctggaagacctacagcaagcccatcttcggctctgtgaggaccaagccagacaagatccagaacctgcactgccggccccagaacagcacagccatcgcctgctcctggatccccccagacagcgactttgatggctacagcattgagtgcaggaagatggacacccaggaggtggagttcagcaggaagctggagaaggagaagagcctgctgaacatcatgatgctggtgccccacaagcgctacctggtgtccatcaaggtgcagagcgctggcatgaccagcgaggtggtggaggacagcaccatcaccatgattgaccggcccccacctcctccaccccacatccgggtgaatgagaaggatgtgctgatcagcaagagcagcatcaacttcaccgtgaactgctcctggttcagtgacaccaacggggctgtgaagtacttcaccgtggtggtgcgggaggctgatggcagtgatgagctgaagccagagcagcagcaccccctgcccagctacctggagtaccgccacaatgccagcatccgggtgtaccagaccaactactttgccagcaaatgtgccgagaaccccaacagcaacagcaagagcttcaacatcaagctgggcgctgagatggagagcctgggcggcaaatgtgaccccacccagcagaagttctgtgatggccccctgaagccccacacagcctaccgcatcagcatccgggccttcacccagctgtttgatgaggacctgaaggagttcaccaagcccctgtacagcgacaccttcttcagcctgcccatcaccacagaaagtgagcccctgtttggagccatcgagggcgtgtctgctggcctcttcctgattggcatgctggtggccgtggtggccctgctgatctgccggcagaaggtgagccacggccgggagcggcccagcgcccggctgagcatccggcgggaccggcccctgtctgtgcacctgaacctgggccagaagggcaacaggaagaccagctgccccatcaagatcaaccagtttgagggccacttcatgaagctgcaggccgacagcaactacctgctgagcaaggagtatgaggagctgaaggatgtgggcaggaaccagagctgtgacatcgccctgctgcctgagaacagaggcaagaaccgctacaacaacatcctgccctatgatgccaccagggtgaagctgagcaatgtggatgatgacccctgcagcgactacatcaatgccagctacatccctggcaacaacttcagaagagagtacatcgtgacccagggccccctgcccggcaccaaggatgacttctggaagatggtgtgggagcagaatgtgcacaacatcgtgatggtgacccagtgtgtggagaagggccgggtgaagtgtgaccactactggccagctgaccaggacagcctgtactatggagacctgatcctgcagatgctgtctgagagcgtgctgcctgagtggaccatccgggagttcaagatctgtggggaggagcagctggatgcccacaggctcatccgccacttccactacacagtgtggccagaccatggagtgcctgagaccacccagagcctcatccagtttgtgaggacagtgcgggactacatcaacagaagccctggagctggccccaccgtggtgcactgcagcgctggggtgggccgcacaggcaccttcatcgccctggaccgcatcctgcagcagctggacagcaaggacagcgtggacatctatggagctgtgcatgacctgcggctgcaccgggtgcacatggtgcagacagagtgccagtatgtgtacctgcaccagtgtgtgagagatgtgctgcgggccaggaagctgcggtctgagcaggagaaccccctcttccccatctatgaaaatgtgaaccctgagtaccaccgggaccctgtgtacagccgccactag

SEQ ID NO: 166308 - DNA, 5724 bp, synthetic construct
  misc_feature 1..5724: note = Description of Artificial Sequence: Synthetic coding sequence
  source 1..5724: mol_type = other DNA
atgctgagccacggggccggcctggccctgtggatcaccctgagcctgctgcagacaggcctggccgagcctgagcgctgcaacttcaccctggccgagagcaaggccagcagccacagcgtgtccatccagtggaggatcctgggcagcccctgcaacttcagcctcatctacagcagtgacaccctgggcgccgccctgtgccccaccttcagaattgacaacaccacctacggctgcaacctgcaggacctgcaggccggcaccatctacaacttccgcatcatcagcctggatgaggagaggacagtggtgctgcagacagaccccctgcccccagcccgcttcggcgtgtccaaggagaagaccaccagcaccagcctgcacgtgtggtggacccccagcagcggcaaggtgaccagctatgaggtgcagctgtttgatgagaacaaccagaagatccagggcgtgcagatccaggagagcacctcctggaatgagtacaccttcttcaacctgacagctggcagcaagtacaacatcgccatcacagctgtgtctgggggcaagaggagcttctctgtgtacaccaacggcagcacagtgcccagccctgtgaaggacatcggcatcagcaccaaggccaacagcctgctgatctcctggagccacggcagcggaaatgtggagcgctaccgcctgatgctgatggacaagggcatcctggtgcacggcggcgtggtggacaagcacgccaccagctatgccttccacggcctgaccccaggctacctgtacaacctgactgtgatgacagaggccgccggcctgcagaactaccgctggaagctggtgaggacagcccccatggaggtgagcaacctgaaggtgaccaatgatggcagcctgaccagcctgaaggtgaagtggcagaggcctcctggaaatgtggacagctacaacatcaccctgagccacaagggcaccatcaaggagagccgggtgctggccccctggatcacagagacccacttcaaggagctggtgcccggccgcctgtaccaggtgacagtgtcctgtgtgtctggagagctgagcgcccagaagatggctgtgggccgcaccttccccctggccgtgctgcagctgcgggtgaagcacgccaatgagaccagcctgagcatcatgtggcagacccctgtggccgagtgggagaagtacatcatcagcctggccgaccgggacctgctgctgatccacaagagcctgagcaaggatgccaaggagttcaccttcacagacctggtgcccggcaggaagtacatggccaccgtgaccagcatcagcggggacctgaagaacagcagctctgtgaagggccgcacagtgcctgcccaggtgacagacctgcacgtggccaaccagggcatgaccagcagcctcttcaccaactggacccaggcccagggagatgtggagttctaccaggtgctgctgattcatgaaaatgtggtgatcaagaatgaaagcatcagcagcgagaccagccgctacagcttccacagcctgaagagcggcagcctgtacagcgtggtggtgaccaccgtgtctgggggcatcagcagccggcaggtggtggtggagggccgcacagtgcccagctctgtgtctggagtgacagtgaacaacagcggcagaaatgactacctgtctgtgtcctggctgctggcccctggagatgtggacaactatgaggtgaccctgagccatgatggcaaggtggtgcagagcctggtgattgccaagtctgtgcgggagtgcagcttcagcagcctgaccccaggccgcctgtacacagtgaccatcaccaccaggtctgggaagtatgagaaccacagcttcagccaggagaggacagtgcctgacaaggtgcagggcgtgtctgtgagcaacagcgcccggagtgactacctgcgggtgtcctgggtgcacgccaccggggactttgaccactatgaggtgaccatcaagaacaagaacaacttcatccagaccaagagcatccccaagtcagaaaatgaatgtgtgtttgtgcagctggtgcccggccgcctgtacagcgtgacagtgaccaccaagagcggccagtatgaggccaatgagcagggcaatggccgcaccatccctgagcctgtgaaggacctgaccctgaggaacagaagcacagaggacctgcacgtgacctggagcggggccaatggagatgtggaccagtatgagatccagctgctcttcaatgacatgaaggtgttcccccccttccacctggtgaacacagccacagagtaccgcttcaccagcctgaccccaggccggcagtacaagatcctggtgctgaccatctctggagatgtgcagcagagcgccttcatcgagggcttcaccgtgcccagcgctgtgaagaacatccacatcagccccaacggggccacagacagcctgactgtgaactggaccccaggaggaggagatgtggacagctacacagtgtctgccttccgccacagccagaaggtggacagccagaccatccccaagcacgtgtttgagcacaccttccaccggctggaggccggggagcagtaccagatcatgattgcctctgtgtctggcagcctgaagaaccagatcaacgtggtgggccgcacagtgcctgcctctgtgcagggcgtgattgctgacaatgcctacagcagctacagcctgattgtgtcctggcagaaggccgccggcgtggccgagagatatgacatcctgctgctgacagaaaatggcatcctgctgaggaacaccagcgagcccgccaccaccaagcagcacaagtttgaggacctgaccccaggcaagaagtacaagatccagatcctgactgtgtctgggggcctcttcagcaaggaggcccagacagagggccgcacagtgcctgctgctgtgacagacctgcgcatcacagagaacagcaccaggcacctgtccttccgctggacagccagcgagggggagctgtcctggtacaacatcttcctgtacaacccagatggcaacctgcaggagcgggcccaggtggaccccctggtgcagagcttctccttccagaacctgctgcagggccgcatgtacaagatggtgattgtgacccacagcggggagctgagcaatgaaagcttcatcttcggccgcacagtgcctgcctctgtgagccacctgcggggcagcaacagaaacaccacagacagcctgtggttcaactggagccctgccagcggggactttgacttctatgagctgatcctgtacaaccccaacggcaccaagaaggagaactggaaggacaaggacctgacagagtggaggttccagggcctggtgcccggcaggaaatatgtgctgtgggtggtgacccacagcggggacctgagcaacaaggtgacagctgagagcaggacagcccccagcccccccagcctgatgagctttgctgacatcgccaacaccagcctggccatcacctggaagggccccccagactggacagactacaatgactttgagctgcagtggctgcccagagatgccctgaccgtcttcaacccctacaacaacaggaagtctgagggccgcatcgtgtatggcctgcggcccggccgcagctaccagttcaacgtgaagacagtgtctggggacagctggaagacctacagcaagcccatcttcggctctgtgaggaccaagccagacaagatccagaacctgcactgccggccccagaacagcacagccatcgcctgctcctggatccccccagacagcgactttgatggctacagcattgagtgcaggaagatggacacccaggaggtggagttcagcaggaagctggagaaggagaagagcctgctgaacatcatgatgctggtgccccacaagcgctacctggtgtccatcaaggtgcagagcgctggcatgaccagcgaggtggtggaggacagcaccatcaccatgattgaccggcccccacctcctccaccccacatccgggtgaatgagaaggatgtgctgatcagcaagagcagcatcaacttcaccgtgaactgctcctggttcagtgacaccaacggggctgtgaagtacttcaccgtggtggtgcgggaggctgatggaaatgatgagctgaagccagagcagcagcaccccctgcccagctacctggagtaccgccacaatgccagcatccgggtgtaccagaccaactactttgccagcaaatgtgccgagaaccccaacagcaacagcaagagcttcaacatcaagctgggcgctgagatggagagcctgggcggcaaatgtgaccccacccagcagaagttctgtgatggccccctgaagccccacacagcctaccgcatcagcatccgggccttcacccagctgtttgatgaggacctgaaggagttcaccaagcccctgtacagcgacaccttcttcagcctgcccatcaccacagaaagtgagcccctgtttggagccatcgagggcgtgtctgctggcctcttcctgattggcatgctggtggccgtggtggccctgctgatctgccggcagaaggtgagccacggccgggagcggcccagcgcccggctgagcatccggcgggaccggcccctgtctgtgcacctgaacctgggccagaagggcaacaggaagaccagctgccccatcaagatcaaccagtttgagggccacttcatgaagctgcaggccgacagcaactacctgctgagcaaggagtatgaggagctgaaggatgtgggcaggaaccagagctgtgacatcgccctgctgcctgagaacagaggcaagaaccgctacaacaacatcctgccctatgatgccaccagggtgaagctgagcaatgtggatgatgacccctgcagcgactacatcaatgccagctacatccctggcaacaacttcagaagagagtacatcgtgacccagggccccctgcccggcaccaaggatgacttctggaagatggtgtgggagcagaatgtgcacaacatcgtgatggtgacccagtgtgtggagaagggccgggtgaagtgtgaccactactggccagctgaccaggacagcctgtactatggagacctgatcctgcagatgctgtctgagagcgtgctgcctgagtggaccatccgggagttcaagatctgtggggaggagcagctggatgcccacaggctcatccgccacttccactacacagtgtggccagaccatggagtgcctgagaccacccagagcctcatccagtttgtgaggacagtgcgggactacatcaacagaagccctggagctggccccaccgtggtgcactgcagcgctggggtgggccgcacaggcaccttcatcgccctggaccgcatcctgcagcagctggacagcaaggacagcgtggacatctatggagctgtgcatgacctgcggctgcaccgggtgcacatggtgcagacagagtgccagtatgtgtacctgcaccagtgtgtgagagatgtgctgcgggccaggaagctgcggtctgagcaggagaaccccctcttccccatctatgaaaatgtgaaccctgagtaccaccgggaccctgtgtacagccgccactag

SEQ ID NO: 166309 - DNA, 2760 bp, synthetic construct
  misc_feature 1..2760: note = Description of Artificial Sequence: Synthetic coding sequence
  source 1..2760: mol_type = other DNA
atggaggccgagttctacatggtgatcctgacctgcctgatcttcaggaacagcgagggcttccagatcgtgcacgtgcagaagcagcagtgcctcttcaagaatgagaaggtggtggtgggcagctgcaacagaaccatccagaaccagcagtggatgtggacagaagatgagaagctgctgcacgtgaagagcgccctgtgcctggccatcagcaacagcagccggggccccagccgcagcgccatcctggaccgctgcagccaggccccccgctggacctgctatgaccaggagggcttcctggaggtggagaatgccagcctcttcctgcagaagcagggcagccgggtggtggtgaagaaggccaggaagtacctgcacagctggatgaagattgatgtgaacaaggagggcaagctggtgaatgaaagcctgtgcctgcagaaggccggcctgggcgctgaggtgtctgtgcgcagcaccaggaacacagccccaccccagatcctgaccaccttcaatgctgtgcctgatggcctggtgttcctgatccggaacaccacagaggccttcatcagaaatgctgctgagaactacagccagaacagcagcgagcggcagcaccccaacctgcacatgacaggcatcacagacacctcctgggtgctgagcaccacccagcccttcagcagcaccacagaggagaccggcctggccgagcctgagcgctgcaacttcaccctggccgagagcaaggccagcagccacagcgtgtccatccagtggaggatcctgggcagcccctgcaacttcagcctcatctacagcagtgacaccctgggcgccgccctgtgccccaccttcagaattgacaacaccacctacggctgcaacctgcaggacctgcaggccggcaccatctacaacttccgcatcatcagcctggatgaggagaggacagtggtgctgcagacagaccccctgcccccagcccgcttcggcgtgtccaaggagaagaccaccagcaccagcctgcacgtgtggtggacccccagcagcggcaaggtgaccagctatgaggtgcagctgtttgatgagaacaaccagaagatccagggcgtgcagatccaggagagcacctcctggaatgagtacaccttcttcaacctgacagctggcagcaagtacaacatcgccatcacagctgtgtctgggggcaagaggagcttctctgtgtacaccaacggcagcacagtgcccagccctgtgaaggacatcggcatcagcaccaaggccaacagcctgctgatctcctggagccacggcagcggaaatgtggagcgctaccgcctgatgctgatggacaagggcatcctggtgcacggcggcgtggtggacaagcacgccaccagctatgccttccacggcctgaccccaggctacctgtacaacctgactgtgatgacagaggccgccggcctgcagaactaccgctggaagctggtgaggacagcccccatggaggtgagcaacctgaaggtgaccaatgatggcagcctgaccagcctgaaggtgaagtggcagaggcctcctggaaatgtggacagctacaacatcaccctgagccacaagggcaccatcaaggagagccgggtgctggccccctggatcacagagacccacttcaaggagctggtgcccggccgcctgtaccaggtgacagtgtcctgtgtgtctggagagctgagcgcccagaagatggctgtgggccgcaccttcccagacaaggtggccaacctggaggccaacaacaacggccgcatgaggagcctggtggtgtcctggagccccccagctggggactgggagcagtaccgcatcctgctcttcaatgacagcgtggtgctgctgaacatcaccgtgggcaaggaggagacccagtatgtgatggatgacaccggcctggtgcccggccggcagtatgaggtggaggtgattgtggagagcggcaacctgaagaacagcgagcgctgccagggccgcacagtgcccctggccgtgctgcagctgcgggtgaagcacgccaatgagaccagcctgagcatcatgtggcagacccctgtggccgagtgggagaagtacatcatcagcctggccgaccgggacctgctgctgatccacaagagcctgagcaaggatgccaaggagttcaccttcacagacctggtgcccggcaggaagtacatggccaccgtgaccagcatcagcggggacctgaagaacagcagctctgtgaagggccgcacagtgcctgcccaggtgacagacctgcacgtggccaaccagggcatgaccagcagcctcttcaccaactggacccaggcccagggagatgtggagttctaccaggtgctgctgattcatgaaaatgtggtgatcaagaatgaaagcatcagcagcgagaccagccgctacagcttccacagcctgaagagcggcagcctgtacagcgtggtggtgaccaccgtgtctgggggcatcagcagccggcaggtggtggtggagggccgcacagtgcctgacaaggtgcagggcgtgtctgtgagcaacagcgcccggagtgactacctgcgggtgtcctgggtgcacgccaccggggactttgaccactatgaggtgaccatcaagaacaagaacaacttcatccagaccaaggccttccccagccagaagaccaacgtgtacctgttctcctag

SEQ ID NO: 166310 - DNA, 5724 bp, synthetic construct
  misc_feature 1..5724: note = Description of Artificial Sequence: Synthetic coding sequence
  source 1..5724: mol_type = other DNA
atgctgagccacggggccggcctggccctgtggatcaccctgagcctgctgcagacaggcctggccgagcctgagcgctgcaacttcaccctggccgagagcaaggccagcagccacagcgtgtccatccagtggaggatcctgggcagcccctgcaacttcagcctcatctacagcagtgacaccctgggcgccgccctgtgccccaccttcagaattgacaacaccacctacggctgcaacctgcaggacctgcaggccggcaccatctacaacttccgcatcatcagcctggatgaggagaggacagtggtgctgcagacagaccccctgcccccagcccgcttcggcgtgtccaaggagaagaccaccagcaccagcctgcacgtgtggtggacccccagcagcggcaaggtgaccagctatgaggtgcagctgtttgatgagaacaaccagaagatccagggcgtgcagatccaggagagcacctcctggaatgagtacaccttcttcaacctgacagctggcagcaagtacaacatcgccatcacagctgtgtctgggggcaagaggagcttctctgtgtacaccaacggcagcacagtgcccagccctgtgaaggacatcggcatcagcaccaaggccaacagcctgctgatctcctggagccacggcagcggaaatgtggagcgctaccgcctgatgctgatggacaagggcatcctggtgcacggcggcgtggtggacaagcacgccaccagctatgccttccacggcctgaccccaggctacctgtacaacctgactgtgatgacagaggccgccggcctgcagaactaccgctggaagctggtgaggacagcccccatggaggtgagcaacctgaaggtgaccaatgatggcagcctgaccagcctgaaggtgaagtggcagaggcctcctggaaatgtggacagctacaacatcaccctgagccacaagggcaccatcaaggagagccgggtgctggccccctggatcacagagacccacttcaaggagctggtgcccggccgcctgtaccaggtgacagtgtcctgtgtgtctggagagctgagcgcccagaagatggctgtgggccgcaccttccccctggccgtgctgcagctgcgggtgaagcacgccaatgagaccagcctgagcatcatgtggcagacccctgtggccgagtgggagaagtacatcatcagcctggccgaccgggacctgctgctgatccacaagagcctgagcaaggatgccaaggagttcaccttcacagacctggtgcccggcaggaagtacatggccaccgtgaccagcatcagcggggacctgaagaacagcagctctgtgaagggccgcacagtgcctgcccaggtgacagacctgcacgtggccaaccagggcatgaccagcagcctcttcaccaactggacccaggcccagggagatgtggagttctaccaggtgctgctgattcatgaaaatgtggtgatcaagaatgaaagcatcagcagcgagaccagccgctacagcttccacagcctgaagagcggcagcctgtacagcgtggtggtgaccaccgtgtctgggggcatcagcagccggcaggtggtggtggagggccgcacagtgcccagctctgtgtctggagtgacagtgaacaacagcggcagaaatgactacctgtctgtgtcctggctgctggcccctggagatgtggacaactatgaggtgaccctgagccatgatggcaaggtggtgcagagcctggtgattgccaagtctgtgcgggagtgcagcttcagcagcctgaccccaggccgcctgtacacagtgaccatcaccaccaggtctgggaagtatgagaaccacagcttcagccaggagaggacagtgcctgacaaggtgcagggcgtgtctgtgagcaacagcgcccggagtgactacctgcgggtgtcctgggtgcacgccaccggggactttgaccactatgaggtgaccatcaagaacaagaacaacttcatccagaccaagagcatccccaagtcagaaaatgaatgtgtgtttgtgcagctggtgcccggccgcctgtacagcgtgacagtgaccaccaagagcggccagtatgaggccaatgagcagggcaatggccgcaccatccctgagcctgtgaaggacctgaccctgaggaacagaagcacagaggacctgcacgtgacctggagcggggccaatggagatgtggaccagtatgagatccagctgctcttcaatgacatgaaggtgttcccccccttccacctggtgaacacagccacagagtaccgcttcaccagcctgaccccaggccggcagtacaagatcctggtgctgaccatctctggagatgtgcagcagagcgccttcatcgagggcttcaccgtgcccagcgctgtgaagaacatccacatcagccccaacggggccacagacagcctgactgtgaactggaccccaggaggaggagatgtggacagctacacagtgtctgccttccgccacagccagaaggtggacagccagaccatccccaagcacgtgtttgagcacaccttccaccggctggaggccggggagcagtaccagatcatgattgcctctgtgtctggcagcctgaagaaccagatcaacgtggtgggccgcacagtgcctgcctctgtgcagggcgtgattgctgacaatgcctacagcagctacagcctgattgtgtcctggcagaaggccgccggcgtggccgagagatatgacatcctgctgctgacagaaaatggcatcctgctgaggaacaccagcgagcccgccaccaccaagcagcacaagtttgaggacctgaccccaggcaagaagtacaagatccagatcctgactgtgtctgggggcctcttcagcaaggaggcccagacagagggccgcacagtgcctgctgctgtgacagacctgcgcatcacagagaacagcaccaggcacctgtccttccgctggacagccagcgagggggagctgtcctggtacaacatcttcctgtacaacccagatggcaacctgcaggagcgggcccaggtggaccccctggtgcagagcttctccttccagaacctgctgcagggccgcatgtacaagatggtgattgtgacccacagcggggagctgagcaatgaaagcttcatcttcggccgcacagtgcctgcctctgtgagccacctgcggggcagcaacagaaacaccacagacagcctgtggttcaactggagccctgccagcggggactttgacttctatgagctgatcctgtacaaccccaacggcaccaagaaggagaactggaaggacaaggacctgacagagtggaggttccagggcctggtgcccggcaggaaatatgtgctgtgggtggtgacccacagcggggacctgagcaacaaggtgacagctgagagcaggacagcccccagcccccccagcctgatgagctttgctgacatcgccaacaccagcctggccatcacctggaagggccccccagactggacagactacaatgactttgagctgcagtggctgcccagagatgccctgaccgtcttcaacccctacaacaacaggaagtctgagggccgcatcgtgtatggcctgcggcccggccgcagctaccagttcaacgtgaagacagtgtctggggacagctggaagacctacagcaagcccatcttcggctctgtgaggaccaagccagacaagatccagaacctgcactgccggccccagaacagcacagccatcgcctgctcctggatccccccagacagcgactttgatggctacagcattgagtgcaggaagatggacacccaggaggtggagttcagcaggaagctggagaaggagaagagcctgctgaacatcatgatgctggtgccccacaagcgctacctggtgtccatcaaggtgcagagcgctggcatgaccagcgaggtggtggaggacagcaccatcaccatgattgaccggcccccacctcctccaccccacatccgggtgaatgagaaggatgtgctgatcagcaagagcagcatcaacttcaccgtgaactgctcctggttcagtgacaccaacggggctgtgaagtacttcaccgtggtggtgcgggaggctgatggcagtgatgagctgaagccagagcagcagcaccccctgcccagctacctggagtaccgccacaatgccagcatccgggtgtaccagaccaactactttgccagcaaatgtgccgagaaccccaacagcaacagcaagagcttcaacatcaagctgggcgctgagatggagagcctgggcggcaaatgtgaccccacccagcagaagttctgtgatggccccctgaagccccacacagcctaccgcatcagcatccgggccttcacccagctgtttgatgaggacctgaaggagttcaccaagcccctgtacagcgacaccttcttcagcctgcccatcaccacagaaagtgagcccctgtttggagccatcgagggcgtgtctgctggcctcttcctgattggcatgctggtggccgtggtggccctgctgatctgccggcagaaggtgagccacggccgggagcggcccagcgcccggctgagcatccggcgggaccggcccctgtctgtgcacctgaacctgggccagaagggcaacaggaagaccagctgccccatcaagatcaaccagtttgagggccacttcatgaagctgcaggccgacagcaactacctgctgagcaaggagtatgaggagctgaaggatgtgggcaggaaccagagctgtgacatcgccctgctgcctgagaacagaggcaagaaccgctacaacaacatcctgccctatgatgccaccagggtgaagctgagcaatgtggatgatgacccctgcagcgactacatcaatgccagctacatccctggcaacaacttcagaagagagtacatcgtgacccagggccccctgcccggcaccaaggatgacttctggaagatggtgtgggagcagaatgtgcacaacatcgtgatggtgacccagtgtgtggagaagggccgggtgaagtgtgaccactactggccagctgaccaggacagcctgtactatggagacctgatcctgcagatgctgtctgagagcgtgctgcctgagtggaccatccgggagttcaagatctgtggggaggagcagctggatgcccacaggctcatccgccacttccactacacagtgtggccagaccatggagtgcctgagaccacccagagcctcatccagtttgtgaggacagtgcgggactacatcaacagaagccctggagctggccccaccgtggtgcactgcagcgctggggtgggccgcacaggcaccttcatcgccctggaccgcatcctgcagcagctggacagcaaggacagcgtggacatctatggagctgtgcatgacctgcggctgcaccgggtgcacatggtgcagacagagtgccagtatgtgtacctgcaccagtgtgtgagagatgtgctgcgggccaggaagctgcggtctgagcaggagaaccccctcttccccatctatgaaaatgtgaaccctgagtaccaccgggaccctgtgtacagccgccactag

SEQ ID NO: 166311 - DNA, 621 bp, synthetic construct
  misc_feature 1..621: note = Description of Artificial Sequence: Synthetic coding sequence
  source 1..621: mol_type = other DNA
atggccctgccctgcaccctgggcctgggcatgctgctggccctgcccggggccctgggcagcggcggcagcgctgaggacagcgtgggcagcagctctgtgacagtggtgctgctgctgctgctgctgctgctgctggccaccggcctggccctggcctggaggcggctgagccgggacagcggcggctactaccacccagcccggctgggcgccgccctgtggggccgcacccggcggctgctgtgggccagccccccaggccgctggctgcaggcccgggcagagctgggcagcacagacaatgacctggagcggcaggaggatgagcaggacacagattatgaccacgtggctgatggcggcctgcaggccgaccctggagagggggagcagcagtgtggggaggccagcagccctgagcaggtgcctgtgcgggcagaggaggcccgggacagcgacacagaaggagacctggtgctgggcagccctggccctgccagcgctgggggcagcgctgaggccctgctgagtgacctgcacgcctttgctggcagcgctgcctgggatgacagcgcccgggccgccggcggccagggcctgcacgtgacagccctgtag

SEQ ID NO: 166312 - DNA, 4152 bp, synthetic construct
  misc_feature 1..4152: note = Description of Artificial Sequence: Synthetic coding sequence
  source 1..4152: mol_type = other DNA
atggtgcacgtggcccggctgctgctgctgctgctgaccttcttcctgaggacagatgctgagaccccaccccgcttcaccaggacccctgtggaccagacaggagtgtctggaggagtggccagcttcatctgccaggccaccggggacccccggcccaagatcgtgtggaacaagaagggcaagaaggtgagcaaccagagatttgaagtcatcgagtttgatgatggcagcggctctgtgctgcgcatccagcccctgcggaccccaagagatgaggccatctatgaatgtgtggccagcaacaacgtgggggagatctctgtgtccacccggctgactgtgctgcgggaggaccagatcccccggggcttccccaccatcgacatgggcccccagctgaaggtggtggagaggaccaggacagccaccatgctgtgtgccgccagcggcaacccagaccctgagatcacctggttcaaggacttcctgcctgtggacaccagcaacaacaacggccgcatcaagcagctgcggtctgtgtctgtgtgtgccacctaccacactggagccctgcagatcgagcagagcgaggagagtgaccagggcaagtatgaatgtgtggccaccaacagcgctggcacccgctacagcgccccagccaacctgtatgtgcgggtgaacaggaaggtgcggcgggtgcccccacgcttcagcatcccccccaccaaccacgagatcatgcctgggggctctgtgaacatcacctgtgtggccgtgggcagccccatgccctacgtgaagtggatgctgggcgctgaggacctgaccccagaagatgacatgcccatcggcagaaatgtgctggagctgaatgatgtgcggcagagcgccaactacacctgtgtggccatgagcaccctgggcgtgattgaggccatcgcccagatcaccgtgaaggccctgcccaagcccccaggcacccctgtggtgacagagagcacagccaccagcatcaccctgacctgggacagcggcaaccctgagcctgtgtcctactacatcatccagcacaagcccaagaacagcgaggagctgtacaaggagattgatggagtggccaccacccgctacagcgtggccggcctgagcccctacagcgactatgagttccgggtggtggccgtgaacaacatcggccggggccccccatctgagcctgtgctgacccagaccagcgagcaggcccccagcagcgcccccagagatgtgcaggccaggatgctgagcagcaccaccatcctggtgcagtggaaggagcctgaggagcccaacggccagatccagggctacagagtgtactacaccatggaccccacccagcacgtgaacaactggatgaagcacaacgtggccgacagccagatcaccaccatcggcaacctggtgccccagaagacctacagcgtgaaggtgctggccttcaccagcattggagatggccccctgagcagtgacatccaggtgatcacccagacaggagtgcccggccagcccctgaacttcaaggccgagcctgagagcgagaccagcatcctgctgtcctggaccccacccaggagtgacaccatcgccaactatgagctggtgtacaaggatggagagcacggggaggagcagaggatcaccatcgagcccggcaccagctaccgcctgcagggcctgaagcccaacagcctgtactacttccggctggccgcccggagcccccagggcctgggcgccagcacagctgagatcagcgcccggaccatgcagagcagcaagggctactacatcatcatcgtgcccctgaagaagagccggggcaagttcatcaagccctgggagagcccagatgagatggagctggatgagctgctgaaggagatcagcaggaagaggaggagcatccgctatggccgggaggtggagctgaagccctacatcgccgcccactttgatgtgctgcccacagagttcaccctgggagatgacaagcactacggcggcttcaccaacaagcagctgcagagcggccaggagtatgtgttctttgtgctggccgtgatggagcacgccgagagcaagatgtatgccaccagcccctacagcgaccctgtggtgtccatggacctggacccccagcccatcacagatgaggaggagggcctcatctgggtggtgggccctgtgctggccgtggtgttcatcatctgcatcgtcatcgccatcctgctgtacaagaggaagagagctgagagtgacagcaggaagagcagcatccccaacaacaaggagatccccagccaccaccccacagatcctgtggagctgcggcggctgaacttccagaccccaggcatggccagccacccccccatccccatcctggagctggccgaccacatcgagcggctgaaggccaatgacaacctgaagttcagccaggagtatgagagcattgatcctggccagcagttcacctgggagcacagcaacctggaggtgaacaagcccaagaacagatatgccaacgtgattgcctatgaccacagccgggtgctgctgagcgccatcgagggcatccctggcagtgactatgtgaatgccaactacattgatggctacaggaagcagaatgcctacatcgccacccagggcagcctgcctgagacctttggagacttctggaggatgatctgggagcagaggtctgccaccgtggtgatgatgaccaagctggaggagaggagccgggtgaagtgtgaccagtactggcccagccggggcacagagacccacggcctggtgcaggtgaccctgctggacacagtggagctggccacctactgtgtgaggacctttgccctgtacaagaatggcagcagcgagaagcgggaggtgcggcagttccagttcaccgcctggccagaccatggagtgcctgagcaccccacccccttcctggccttcctgcggcgggtgaagacctgcaaccccccagatgctggccccatggtggtgcactgcagcgctggggtgggccgcacaggctgcttcatcgtgattgatgccatgctggagcgcatcaagcatgagaagacagtggacatctacggccacgtgaccctgatgagggcccagaggaactacatggtgcagacagaggaccagtacatcttcatccatgatgccctgctggaggccgtgacctgtggcaacacagaggtgcctgccaggaacctgtatgcctacatccagaagctgacccagatcgagaccggggagaatgtgacaggcatggagctggagttcaagaggctggccagcagcaaggcccacaccagccgcttcatcagcgccaacctgccctgcaacaagttcaagaaccggctggtgaacatcatgccctatgagagcaccagggtgtgcctgcagcccatccggggcgtggagggcagtgactacatcaatgccagcttcattgatggctaccggcagcagaaggcctacatcgccacccagggccccctggccgagaccacagaggacttctggaggatgctgtgggagcacaacagcaccatcgtggtgatgctgaccaagctgcgggagatgggccgggagaagtgccaccagtactggccagctgagaggtctgcccgctaccagtactttgtggtggaccccatggccgagtacaacatgccccagtacatcctgcgggagttcaaggtgacagatgccagagatggccagagcaggacagtgcggcagttccagttcacagactggccagagcagggcgtgcccaagtctggagagggcttcatcgacttcatcggccaggtgcacaagaccaaggagcagtttggccaggacggccccatctctgtgcactgcagcgctggggtgggccgcactggagtcttcatcaccctgagcatcgtgctggagaggatgagatatgaaggagtggtggacatcttccagacagtgaagatgctgcggacccagaggcctgccatggtgcagacagaggaccagtaccagttctcctaccgggccgccctggagtacctgggcagctttgaccactacgccacctag

SEQ ID NO: 166313 - DNA, 4521 bp, synthetic construct
  misc_feature 1..4521: note = Description of Artificial Sequence: Synthetic coding sequence
  source 1..4521: mol_type = other DNA
atggtgcacgtggcccggctgctgctgctgctgctgaccttcttcctgaggacagatgctgagaccccaccccgcttcaccaggacccctgtggaccagacaggagtgtctggaggagtggccagcttcatctgccaggccaccggggacccccggcccaagatcgtgtggaacaagaagggcaagaaggtgagcaaccagagatttgaagtcatcgagtttgatgatggcagcggctctgtgctgcgcatccagcccctgcggaccccaagagatgaggccatctatgaatgtgtggccagcaacaacgtgggggagatctctgtgtccacccggctgactgtgctgcgggaggaccagatcccccggggcttccccaccatcgacatgggcccccagctgaaggtggtggagaggaccaggacagccaccatgctgtgtgccgccagcggcaacccagaccctgagatcacctggttcaaggacttcctgcctgtggacaccagcaacaacaacggccgcatcaagcagctgcggtctgagagcattggaggcacccccatccggggggccctgcagatcgagcagagcgaggagagtgaccagggcaagtatgaatgtgtggccaccaacagcgctggcacccgctacagcgccccagccaacctgtatgtgcgggagctgcgggaggtgcggcgggtgcccccacgcttcagcatcccccccaccaaccacgagatcatgcctgggggctctgtgaacatcacctgtgtggccgtgggcagccccatgccctacgtgaagtggatgctgggcgctgaggacctgaccccagaagatgacatgcccatcggcagaaatgtgctggagctgaatgatgtgcggcagagcgccaactacacctgtgtggccatgagcaccctgggcgtgattgaggccatcgcccagatcaccgtgaaggccctgcccaagcccccaggcacccctgtggtgacagagagcacagccaccagcatcaccctgacctgggacagcggcaaccctgagcctgtgtcctactacatcatccagcacaagcccaagaacagcgaggagctgtacaaggagattgatggagtggccaccacccgctacagcgtggccggcctgagcccctacagcgactatgagttccgggtggtggccgtgaacaacatcggccggggccccccatctgagcctgtgctgacccagaccagcgagcaggcccccagcagcgcccccagagatgtgcaggccaggatgctgagcagcaccaccatcctggtgcagtggaaggagcctgaggagcccaacggccagatccagggctacagagtgtactacaccatggaccccacccagcacgtgaacaactggatgaagcacaacgtggccgacagccagatcaccaccatcggcaacctggtgccccagaagacctacagcgtgaaggtgctggccttcaccagcattggagatggccccctgagcagtgacatccaggtgatcacccagacaggagtgcccggccagcccctgaacttcaaggccgagcctgagagcgagaccagcatcctgctgtcctggaccccacccaggagtgacaccatcgccaactatgagctggtgtacaaggatggagagcacggggaggagcagaggatcaccatcgagcccggcaccagctaccgcctgcagggcctgaagcccaacagcctgtactacttccggctggccgcccggagcccccagggcctgggcgccagcacagctgagatcagcgcccggaccatgcagagcatgtttgccaagaacttccacgtgaaggctgtgatgaagacctctgtgctgctgtcctgggagatccctgagaactacaacagcgccatgcccttcaagatcctgtatgatgatggcaagatggtggaggaggtggatggccgggccacccagaagctgattgtgaacctgaagccagagaagagctacagctttgtgctgaccaacagaggcaacagcgctgggggcctgcagcaccgggtgacagccaagacagccccagatgtgctgcggaccaagccagccttcatcggcaagaccaacctggatggcatgatcaccgtgcagctgcctgaggtgcctgccaatgaaaacatcaagggctactacatcatcatcgtgcccctgaagaagagccggggcaagttcatcaagccctgggagagcccagatgagatggagctggatgagctgctgaaggagatcagcaggaagaggaggagcatccgctatggccgggaggtggagctgaagccctacatcgccgcccactttgatgtgctgcccacagagttcaccctgggagatgacaagcactacggcggcttcaccaacaagcagctgcagagcggccaggagtatgtgttctttgtgctggccgtgatggagcacgccgagagcaagatgtatgccaccagcccctacagcgaccctgtggtgtccatggacctggacccccagcccatcacagatgaggaggagggcctcatctgggtggtgggccctgtgctggccgtggtgttcatcatctgcatcgtcatcgccatcctgctgtacaagagcagcaagccagacaggaagagagctgagagtgacagcaggaagagcagcatccccaacaacaaggagatccccagccaccaccccacagatcctgtggagctgcggcggctgaacttccagaccccaggcatggccagccacccccccatccccatcctggagctggccgaccacatcgagcggctgaaggccaatgacaacctgaagttcagccaggagtatgagagcattgaccccggccagcagttcacctgggagcacagcaacctggaggtgaacaagcccaagaacagatatgccaacgtcatcgcctatgaccacagccgggtgctgctgagcgccatcgagggcatccctggcagtgactatgtgaatgccaactacattgatggctacaggaagcagaatgcctacatcgccacccagggcagcctgcctgagaccttcggggacttctggaggatgatctgggagcagaggtctgccaccgtggtgatgatgaccaagctggaggagaggagccgggtgaagtgtgaccagtactggcccagccggggcacagagacccacggcctggtgcaggtgaccctgctggacacagtggagctggccacctactgtgtgaggacctttgccctgtacaagaatggcagcagcgagaagcgggaggtgcggcagttccagttcaccgcctggccagaccacggcgtgcctgagcaccccacccccttcctggccttcctgcggcgggtgaagacctgcaaccccccagatgctggccccatggtggtgcactgcagcgctggggtgggccgcacaggctgcttcatcgtgattgatgccatgctggagcgcatcaagcatgagaagacagtggacatctacggccacgtgaccctgatgagggcccagaggaactacatggtgcagacagaggaccagtacatcttcatccatgatgccctgctggaggccgtgacctgtggcaacacagaggtgcctgccaggaacctgtatgcctacatccagaagctgacccagattgaaacaggagaaaatgtgacaggcatggagctggagttcaagaggctggccagcagcaaggcccacaccagccgcttcatcagcgccaacctgccctgcaacaagttcaagaaccggctggtgaacatcatgccctatgagagcaccagggtgtgcctgcagcccatccggggcgtggagggcagtgactacatcaatgccagcttcattgatggctaccggcagcagaaggcctacatcgccacccagggccccctggccgagaccacagaggacttctggaggatgctgtgggagcacaacagcaccatcgtggtgatgctgaccaagctgcgggagatgggccgggagaagtgccaccagtactggccagctgagaggtctgcccgctaccagtactttgtggtggaccccatggccgagtacaacatgccccagtacatcctgcgggagttcaaggtgacagatgccagagatggccagagcaggacagtgcggcagttccagttcacagactggccagagcagggcgtgcccaagagcggggagggcttcatcgacttcatcggccaggtgcacaagaccaaggagcagtttggccaggacggccccatctctgtgcactgcagcgctggggtgggccgcactggagtcttcatcaccctgagcatcgtgctggagaggatgagatatgagggcgtggtggacatcttccagacagtgaagatgctgcggacccagaggcctgccatggtgcagacagaggaccagtaccagttctcctacagagctgccctggagtacctgggcagctttgaccactacgccacctag

SEQ ID NO: 166314 - DNA, 5739 bp, synthetic construct
  misc_feature 1..5739: note = Description of Artificial Sequence: Synthetic coding sequence
  source 1..5739: mol_type = other DNA
atggtgcacgtggcccggctgctgctgctgctgctgaccttcttcctgaggacagatgctgagaccccaccccgcttcaccaggacccctgtggaccagacaggagtgtctggaggagtggccagcttcatctgccaggccaccggggacccccggcccaagatcgtgtggaacaagaagggcaagaaggtgagcaaccagagatttgaagtcatcgagtttgatgatggcagcggctctgtgctgcgcatccagcccctgcggaccccaagagatgaggccatctatgaatgtgtggccagcaacaacgtgggggagatctctgtgtccacccggctgactgtgctgcgggaggaccagatcccccggggcttccccaccatcgacatgggcccccagctgaaggtggtggagaggaccaggacagccaccatgctgtgtgccgccagcggcaacccagaccctgagatcacctggttcaaggacttcctgcctgtggacaccagcaacaacaacggccgcatcaagcagctgcggtctgagagcattggaggcacccccatccggggggccctgcagatcgagcagagcgaggagagtgaccagggcaagtatgaatgtgtggccaccaacagcgctggcacccgctacagcgccccagccaacctgtatgtgcgggagctgcgggaggtgcggcgggtgcccccacgcttcagcatcccccccaccaaccacgagatcatgcctgggggctctgtgaacatcacctgtgtggccgtgggcagccccatgccctacgtgaagtggatgctgggcgctgaggacctgaccccagaagatgacatgcccatcggcagaaatgtgctggagctgaatgatgtgcggcagagcgccaactacacctgtgtggccatgagcaccctgggcgtgattgaggccatcgcccagatcaccgtgaaggccctgcccaagcccccaggcacccctgtggtgacagagagcacagccaccagcatcaccctgacctgggacagcggcaaccctgagcctgtgtcctactacatcatccagcacaagcccaagaacagcgaggagctgtacaaggagattgatggagtggccaccacccgctacagcgtggccggcctgagcccctacagcgactatgagttccgggtggtggccgtgaacaacatcggccggggccccccatctgagcctgtgctgacccagaccagcgagcaggcccccagcagcgcccccagagatgtgcaggccaggatgctgagcagcaccaccatcctggtgcagtggaaggagcctgaggagcccaacggccagatccagggctacagagtgtactacaccatggaccccacccagcacgtgaacaactggatgaagcacaacgtggccgacagccagatcaccaccatcggcaacctggtgccccagaagacctacagcgtgaaggtgctggccttcaccagcattggagatggccccctgagcagtgacatccaggtgatcacccagacaggagtgcccggccagcccctgaacttcaaggccgagcctgagagcgagaccagcatcctgctgtcctggaccccacccaggagtgacaccatcgccaactatgagctggtgtacaaggatggagagcacggggaggagcagaggatcaccatcgagcccggcaccagctaccgcctgcagggcctgaagcccaacagcctgtactacttccggctggccgcccggagcccccagggcctgggcgccagcacagctgagatcagcgcccggaccatgcagagcaagcccagcgccccaccccaggacatcagctgcaccagccccagcagcaccagcatcctggtgtcctggcagcccccacctgtggagaagcagaatggcatcatcacagagtacagcatcaagtacacagctgtggatggagaagatgacaagccccatgagatcctgggcatccccagcgacaccaccaagtacctgctggagcagctggagaagtggacagagtaccgcatcaccgtgacagcccacacagatgtgggccctggccctgagagcctgtctgtgctgatccgcaccaatgaagatgtgcccagcggcccccccaggaaggtggaggtggaggccgtgaacagcacctctgtgaaggtgtcctggaggagccctgtgcccaacaagcagcacggccagatccggggctaccaggtgcactacgtgaggatggagaatggagagcccaagggccagcccatgctgaaggatgtgatgctggctgatgcccagtgggagtttgatgacaccacagaacatgacatgatcatcagcggcctgcagcctgagaccagctacagcctgactgtgacagcctacaccaccaagggagatggagcccggagcaagcccaagctggtgtccaccaccggggctgtgcctgggaagccccggctggtgatcaaccacacccagatgaacacagccctgatccagtggcacccccctgtggacaccttcggccccctgcagggctaccgcctgaagtttggaaggaaggacatggagcccctgaccaccctggagttcagcgagaaggaggaccacttcaccgccacagacatccacaagggggccagctatgtgttccggctgagcgccaggaacaaggtgggctttggagaggagatggtgaaggagatcagcatccctgaggaggtgcccaccggcttcccccagaacctgcacagcgagggcaccaccagcacctctgtgcagctgtcctggcagccccctgtgctggccgagagaaatggcatcatcaccaagtacaccctgctgtacagagacatcaacatccccctgctgcccatggagcagctgattgtgcctgctgacaccaccatgaccctgaccggcctgaagccagacaccacctatgatgtgaaggtgcgggcccacaccagcaagggccctggcccctacagccccagcgtgcagttccgcaccctgcctgtggaccaggtgtttgccaagaacttccacgtgaaggctgtgatgaagacctctgtgctgctgtcctgggagatccctgagaactacaacagcgccatgcccttcaagatcctgtatgatgatggcaagatggtggaggaggtggatggccgggccacccagaagctgattgtgaacctgaagccagagaagagctacagctttgtgctgaccaacagaggcaacagcgctgggggcctgcagcaccgggtgacagccaagacagccccagatgtgctgcggaccaagccagccttcatcggcaagaccaacctggatggcatgatcaccgtgcagctgcctgaggtgcctgccaatgaaaacatcaagggctactacatcatcatcgtgcccctgaagaagagccggggcaagttcatcaagccctgggagagcccagatgagatggagctggatgagctgctgaaggagatcagcaggaagagaagaagcatccgctatggccgggaggtggagctgaagccctacatcgccgcccactttgatgtgctgcccacagagttcaccctgggagatgacaagcactatggaggcttcaccaacaagcagctgcagagcggccaggagtatgtgttctttgtgctggccgtgatggagcacgccgagagcaagatgtatgccaccagcccctacagcgaccctgtggtgtccatggacctggacccccagcccatcacagatgaggaggagggcctcatctgggtggtgggccctgtgctggccgtggtgttcatcatctgcatcgtgattgccatcctgctgtacaagaggaagagagctgagagtgacagcaggaagagcagcatccccaacaacaaggagatccccagccaccaccccacagatcctgtggagctgcggcggctgaacttccagaccccaggcatggccagccacccccccatccccatcctggagctggccgaccacatcgagcggctgaaggccaatgacaacctgaagttcagccaggagtatgagagcattgaccccggccagcagttcacctgggagcacagcaacctggaggtgaacaagcccaagaacagatatgccaacgtcatcgcctatgaccacagccgggtgctgctgagcgccatcgagggcatccctggcagtgactatgtgaatgccaactacattgatggctacaggaagcagaatgcctacatcgccacccagggcagcctgcctgagaccttcggggacttctggaggatgatctgggagcagaggtctgccaccgtggtgatgatgaccaagctggaggagaggagccgggtgaagtgtgaccagtactggcccagccggggcacagagacccacggcctggtgcaggtgaccctgctggacacagtggagctggccacctactgtgtgaggacctttgccctgtacaagaatggcagcagcgagaagcgggaggtgcggcagttccagttcaccgcctggccagaccacggcgtgcctgagcaccccacccccttcctggccttcctgcggcgggtgaagacctgcaaccccccagatgctggccccatggtggtgcactgcagcgctggggtgggccgcacaggctgcttcatcgtgattgatgccatgctggagcgcatcaagcatgagaagacagtggacatctacggccacgtgaccctgatgagggcccagaggaactacatggtgcagacagaggaccagtacatcttcatccatgatgccctgctggaggccgtgacctgtggcaacacagaggtgcctgccaggaacctgtatgcctacatccagaagctgacccagattgaaacaggagaaaatgtgacaggcatggagctggagttcaagaggctggccagcagcaaggcccacaccagccgcttcatcagcgccaacctgccctgcaacaagttcaagaaccggctggtgaacatcatgccctatgagagcaccagggtgtgcctgcagcccatccggggcgtggagggcagtgactacatcaatgccagcttcattgatggctaccggcagcagaaggcctacatcgccacccagggccccctggccgagaccacagaggacttctggaggatgctgtgggagcacaacagcaccatcgtggtgatgctgaccaagctgcgggagatgggccgggagaagtgccaccagtactggccagctgagaggtctgcccgctaccagtactttgtggtggaccccatggccgagtacaacatgccccagtacatcctgcgggagttcaaggtgacagatgccagagatggccagagcaggacagtgcggcagttccagttcacagactggccagagcagggcgtgcccaagagcggggagggcttcatcgacttcatcggccaggtgcacaagaccaaggagcagtttggccaggacggccccatctctgtgcactgcagcgctggggtgggccgcactggagtcttcatcaccctgagcatcgtgctggagaggatgagatatgagggcgtggtggacatcttccagacagtgaagatgctgcggacccagaggcctgccatggtgcagacagaggaccagtaccagttctcctacagagctgccctggagtacctgggcagctttgaccactacgccacctag

SEQ ID NO: 166315 - DNA, 5673 bp, synthetic construct
  misc_feature 1..5673: note = Description of Artificial Sequence: Synthetic coding sequence
  source 1..5673: mol_type = other DNA
atggtgcacgtggcccggctgctgctgctgctgctgaccttcttcctgaggacagatgctgagaccccaccccgcttcaccaggacccctgtggaccagacaggagtgtctggaggagtggccagcttcatctgccaggccaccggggacccccggcccaagatcgtgtggaacaagaagggcaagaaggtgagcaaccagagatttgaagtcatcgagtttgatgatggcagcggctctgtgctgcgcatccagcccctgcggaccccaagagatgaggccatctatgaatgtgtggccagcaacaacgtgggggagatctctgtgtccacccggctgactgtgctgcgggaggaccagatcccccggggcttccccaccatcgacatgggcccccagctgaaggtggtggagaggaccaggacagccaccatgctgtgtgccgccagcggcaacccagaccctgagatcacctggttcaaggacttcctgcctgtggacaccagcaacaacaacggccgcatcaagcagctgcggagcggggccctgcagatcgagcagagcgaggagagtgaccagggcaagtatgaatgtgtggccaccaacagcgctggcacccgctacagcgccccagccaacctgtatgtgcgggtgagaagagtgcccccacgcttcagcatcccccccaccaaccacgagatcatgcctgggggctctgtgaacatcacctgtgtggccgtgggcagccccatgccctacgtgaagtggatgctgggcgctgaggacctgaccccagaagatgacatgcccatcggcagaaatgtgctggagctgaatgatgtgcggcagagcgccaactacacctgtgtggccatgagcaccctgggcgtcatcgaggccatcgcccagatcaccgtgaaggccctgcccaagcccccaggcacccctgtggtgacagagagcacagccaccagcatcaccctgacctgggacagcggcaaccctgagcctgtgtcctactacatcatccagcacaagcccaagaacagcgaggagctgtacaaggagattgatggagtggccaccacccgctacagcgtggccggcctgagcccctacagcgactatgagttccgggtggtggccgtgaacaacatcggccggggcccccccagcgagcctgtgctgacccagaccagcgagcaggcccccagcagcgcccccagagatgtgcaggccaggatgctgagcagcaccaccatcctggtgcagtggaaggagcctgaggagcccaacggccagatccagggctacagagtgtactacaccatggaccccacccagcacgtgaacaactggatgaagcacaacgtggccgacagccagatcaccaccatcggcaacctggtgccccagaagacctacagcgtgaaggtgctggccttcaccagcattggagatggccccctgagcagtgacatccaggtgatcacccagacaggagtgcccggccagcccctgaacttcaaggccgagcctgagagcgagaccagcatcctgctgtcctggaccccacccaggagtgacaccatcgccaactatgagctggtgtacaaggatggagaacatggagaggagcagaggatcaccatcgagcccggcaccagctaccgcctgcagggcctgaagcccaacagcctgtactacttccggctggccgcccggagcccccagggcctgggcgccagcacagctgagatcagcgcccggaccatgcagagcaagcccagcgccccaccccaggacatcagctgcaccagccccagcagcaccagcatcctggtgtcctggcagcccccacctgtggagaagcagaatggcatcatcacagagtacagcatcaagtacacagctgtggatggagaagatgacaagccccatgagatcctgggcatccccagcgacaccaccaagtacctgctggagcagctggagaagtggacagagtaccgcatcaccgtgacagcccacacagatgtgggccctggccctgagagcctgtctgtgctgatccgcaccaatgaagatgtgcccagcggcccccccaggaaggtggaggtggaggccgtgaacagcacctctgtgaaggtgtcctggaggagccctgtgcccaacaagcagcacggccagatccggggctaccaggtgcactacgtgaggatggagaatggagagcccaagggccagcccatgctgaaggatgtgatgctggctgatgcccaggacatgatcatcagcggcctgcagcctgagaccagctacagcctgactgtgacagcctacaccaccaagggagatggagcccggagcaagcccaagctggtgtccaccaccggggctgtgcctgggaagccccggctggtgatcaaccacacccagatgaacacagccctgatccagtggcacccccctgtggacaccttcggccccctgcagggctaccgcctgaagtttggaaggaaggacatggagcccctgaccaccctggagttcagcgagaaggaggaccacttcaccgccacagacatccacaagggggccagctatgtgttccggctgagcgccaggaacaaggtgggctttggagaggagatggtgaaggagatcagcatccctgaggaggtgcccaccggcttcccccagaacctgcacagcgagggcaccaccagcacctctgtgcagctgtcctggcagccccctgtgctggccgagagaaatggcatcatcaccaagtacaccctgctgtacagagacatcaacatccccctgctgcccatggagcagctgattgtgcctgctgacaccaccatgaccctgaccggcctgaagccagacaccacctatgatgtgaaggtgcgggcccacaccagcaagggccctggcccctacagccccagcgtgcagttccgcaccctgcctgtggaccaggtgtttgccaagaacttccacgtgaaggctgtgatgaagacctctgtgctgctgtcctgggagatccctgagaactacaacagcgccatgcccttcaagatcctgtatgatgatggcaagatggtggaggaggtggatggccgggccacccagaagctgattgtgaacctgaagccagagaagagctacagctttgtgctgaccaacagaggcaacagcgctgggggcctgcagcaccgggtgacagccaagacagccccagatgtgctgcggaccaagccagccttcatcggcaagaccaacctggatggcatgatcaccgtgcagctgcctgaggtgcctgccaatgaaaacatcaagggctactacatcatcatcgtgcccctgaagaagagccggggcaagttcatcaagccctgggagagcccagatgagatggagctggatgagctgctgaaggagatcagcaggaagagaagaagcatccgctatggccgggaggtggagctgaagccctacatcgccgcccactttgatgtgctgcccacagagttcaccctgggagatgacaagcactatggaggcttcaccaacaagcagctgcagagcggccaggagtatgtgttctttgtgctggccgtgatggagcacgccgagagcaagatgtatgccaccagcccctacagcgaccctgtggtgtccatggacctggacccccagcccatcacagatgaggaggagggcctcatctgggtggtgggccctgtgctggccgtggtgttcatcatctgcatcgtgattgccatcctgctgtacaagaggaagagagctgagagtgacagcaggaagagcagcatccccaacaacaaggagatccccagccaccaccccacagatcctgtggagctgcggcggctgaacttccagaccccaggcatggccagccacccccccatccccatcctggagctggccgaccacatcgagcggctgaaggccaatgacaacctgaagttcagccaggagtatgagagcattgaccccggccagcagttcacctgggagcacagcaacctggaggtgaacaagcccaagaacagatatgccaacgtcatcgcctatgaccacagccgggtgctgctgagcgccatcgagggcatccctggcagtgactatgtgaatgccaactacattgatggctacaggaagcagaatgcctacatcgccacccagggcagcctgcctgagaccttcggggacttctggaggatgatctgggagcagaggtctgccaccgtggtgatgatgaccaagctggaggagaggagccgggtgaagtgtgaccagtactggcccagccggggcacagagacccacggcctggtgcaggtgaccctgctggacacagtggagctggccacctactgtgtgaggacctttgccctgtacaagaatggcagcagcgagaagcgggaggtgcggcagttccagttcaccgcctggccagaccacggcgtgcctgagcaccccacccccttcctggccttcctgcggcgggtgaagacctgcaaccccccagatgctggccccatggtggtgcactgcagcgctggggtgggccgcacaggctgcttcatcgtgattgatgccatgctggagcgcatcaagcatgagaagacagtggacatctacggccacgtgaccctgatgagggcccagaggaactacatggtgcagacagaggaccagtacatcttcatccatgatgccctgctggaggccgtgacctgtggcaacacagaggtgcctgccaggaacctgtatgcctacatccagaagctgacccagattgaaacaggagaaaatgtgacaggcatggagctggagttcaagaggctggccagcagcaaggcccacaccagccgcttcatcagcgccaacctgccctgcaacaagttcaagaaccggctggtgaacatcatgccctatgagagcaccagggtgtgcctgcagcccatccggggcgtggagggcagtgactacatcaatgccagcttcattgatggctaccggcagcagaaggcctacatcgccacccagggccccctggccgagaccacagaggacttctggaggatgctgtgggagcacaacagcaccatcgtggtgatgctgaccaagctgcgggagatgggccgggagaagtgccaccagtactggccagctgagaggtctgcccgctaccagtactttgtggtggaccccatggccgagtacaacatgccccagtacatcctgcgggagttcaaggtgacagatgccagagatggccagagcaggacagtgcggcagttccagttcacagactggccagagcagggcgtgcccaagagcggggagggcttcatcgacttcatcggccaggtgcacaagaccaaggagcagtttggccaggacggccccatctctgtgcactgcagcgctggggtgggccgcactggagtcttcatcaccctgagcatcgtgctggagaggatgagatatgagggcgtggtggacatcttccagacagtgaagatgctgcggacccagaggcctgccatggtgcagacagaggaccagtaccagttctcctacagagctgccctggagtacctgggcagctttgaccactacgccacctag

SEQ ID NO: 166316 - DNA, 5700 bp, synthetic construct
  misc_feature 1..5700: note = Description of Artificial Sequence: Synthetic coding sequence
  source 1..5700: mol_type = other DNA
atggtgcacgtggcccggctgctgctgctgctgctgaccttcttcctgaggacagatgctgagaccccaccccgcttcaccaggacccctgtggaccagacaggagtgtctggaggagtggccagcttcatctgccaggccaccggggacccccggcccaagatcgtgtggaacaagaagggcaagaaggtgagcaaccagagatttgaagtcatcgagtttgatgatggcagcggctctgtgctgcgcatccagcccctgcggaccccaagagatgaggccatctatgaatgtgtggccagcaacaacgtgggggagatctctgtgtccacccggctgactgtgctgcgggaggaccagatcccccggggcttccccaccatcgacatgggcccccagctgaaggtggtggagaggaccaggacagccaccatgctgtgtgccgccagcggcaacccagaccctgagatcacctggttcaaggacttcctgcctgtggacaccagcaacaacaacggccgcatcaagcagctgcggagcggggccctgcagatcgagcagagcgaggagagtgaccagggcaagtatgaatgtgtggccaccaacagcgctggcacccgctacagcgccccagccaacctgtatgtgcgggtgagaagagtgcccccacgcttcagcatcccccccaccaaccacgagatcatgcctgggggctctgtgaacatcacctgtgtggccgtgggcagccccatgccctacgtgaagtggatgctgggcgctgaggacctgaccccagaagatgacatgcccatcggcagaaatgtgctggagctgaatgatgtgcggcagagcgccaactacacctgtgtggccatgagcaccctgggcgtcatcgaggccatcgcccagatcaccgtgaaggccctgcccaagcccccaggcacccctgtggtgacagagagcacagccaccagcatcaccctgacctgggacagcggcaaccctgagcctgtgtcctactacatcatccagcacaagcccaagaacagcgaggagctgtacaaggagattgatggagtggccaccacccgctacagcgtggccggcctgagcccctacagcgactatgagttccgggtggtggccgtgaacaacatcggccggggcccccccagcgagcctgtgctgacccagaccagcgagcaggcccccagcagcgcccccagagatgtgcaggccaggatgctgagcagcaccaccatcctggtgcagtggaaggagcctgaggagcccaacggccagatccagggctacagagtgtactacaccatggaccccacccagcacgtgaacaactggatgaagcacaacgtggccgacagccagatcaccaccatcggcaacctggtgccccagaagacctacagcgtgaaggtgctggccttcaccagcattggagatggccccctgagcagtgacatccaggtgatcacccagacaggagtgcccggccagcccctgaacttcaaggccgagcctgagagcgagaccagcatcctgctgtcctggaccccacccaggagtgacaccatcgccaactatgagctggtgtacaaggatggagaacatggagaggagcagaggatcaccatcgagcccggcaccagctaccgcctgcagggcctgaagcccaacagcctgtactacttccggctggccgcccggagcccccagggcctgggcgccagcacagctgagatcagcgcccggaccatgcagagcaagcccagcgccccaccccaggacatcagctgcaccagccccagcagcaccagcatcctggtgtcctggcagcccccacctgtggagaagcagaatggcatcatcacagagtacagcatcaagtacacagctgtggatggagaagatgacaagccccatgagatcctgggcatccccagcgacaccaccaagtacctgctggagcagctggagaagtggacagagtaccgcatcaccgtgacagcccacacagatgtgggccctggccctgagagcctgtctgtgctgatccgcaccaatgaagatgtgcccagcggcccccccaggaaggtggaggtggaggccgtgaacagcacctctgtgaaggtgtcctggaggagccctgtgcccaacaagcagcacggccagatccggggctaccaggtgcactacgtgaggatggagaatggagagcccaagggccagcccatgctgaaggatgtgatgctggctgatgcccagtgggagtttgatgacaccacagaacatgacatgatcatcagcggcctgcagcctgagaccagctacagcctgactgtgacagcctacaccaccaagggagatggagcccggagcaagcccaagctggtgtccaccactggagctgtgcctgggaagccccggctggtgatcaaccacacccagatgaacacagccctgatccagtggcacccccctgtggacaccttcggccccctgcagggctaccgcctgaagtttggaaggaaggacatggagcccctgaccaccctggagttcagcgagaaggaggaccacttcaccgccacagacatccacaagggggccagctatgtgttccggctgagcgccaggaacaaggtgggctttggagaggagatggtgaaggagatcagcatccctgaggaggtgcccaccggcttcccccagaacctgcacagcgagggcaccaccagcacctctgtgcagctgtcctggcagccccctgtgctggccgagagaaatggcatcatcaccaagtacaccctgctgtacagagacatcaacatccccctgctgcccatggagcagctgattgtgcctgctgacaccaccatgaccctgaccggcctgaagccagacaccacctatgatgtgaaggtgcgggcccacaccagcaaaggacctggcccctacagccccagcgtgcagttccgcaccctgcctgtggaccaggtgtttgccaagaacttccacgtgaaggctgtgatgaagacctctgtgctgctgtcctgggagatccctgagaactacaacagcgccatgcccttcaagatcctgtatgatgatggcaagatggtggaggaggtggatggccgggccacccagaagctgattgtgaacctgaagccagagaagagctacagctttgtgctgaccaacagaggcaacagcgctgggggcctgcagcaccgggtgacagccaagacagccccagatgtgctgcggaccaagccagccttcatcggcaagaccaacctggatggcatgatcaccgtgcagctgcctgaggtgcctgccaatgaaaacatcaagggctactacatcatcatcgtgcccctgaagaagagccggggcaagttcatcaagccctgggagagcccagatgagatggagctggatgagctgctgaaggagatcagcaggaagaggaggagcatccgctatggccgggaggtggagctgaagccctacatcgccgcccactttgatgtgctgcccacagagttcaccctgggagatgacaagcactacggcggcttcaccaacaagcagctgcagagcggccaggagtatgtgttctttgtgctggccgtgatggagcacgccgagagcaagatgtatgccaccagcccctacagcgaccctgtggtgtccatggacctggacccccagcccatcacagatgaggaggagggcctcatctgggtggtgggccctgtgctggccgtggtgttcatcatctgcatcgtcatcgccatcctgctgtacaagaggaagagagctgagagtgacagcaggaagagcagcatccccaacaacaaggagatccccagccaccaccccacagatcctgtggagctgcggcggctgaacttccagaccccaggcatggccagccacccccccatccccatcctggagctggccgaccacatcgagcggctgaaggccaatgacaacctgaagttcagccaggagtatgagagcattgatcctggccagcagttcacctgggagcacagcaacctggaggtgaacaagcccaagaacagatatgccaacgtgattgcctatgaccacagccgggtgctgctgagcgccatcgagggcatccctggcagtgactatgtgaatgccaactacattgatggctacaggaagcagaatgcctacatcgccacccagggcagcctgcctgagacctttggagacttctggaggatgatctgggagcagaggtctgccaccgtggtgatgatgaccaagctggaggagaggagccgggtgaagtgtgaccagtactggcccagccggggcacagagacccacggcctggtgcaggtgaccctgctggacacagtggagctggccacctactgtgtgaggacctttgccctgtacaagaatggcagcagcgagaagcgggaggtgcggcagttccagttcaccgcctggccagaccatggagtgcctgagcaccccacccccttcctggccttcctgcggcgggtgaagacctgcaaccccccagatgctggccccatggtggtgcactgcagcgctggggtgggccgcacaggctgcttcatcgtgattgatgccatgctggagcgcatcaagcatgagaagacagtggacatctacggccacgtgaccctgatgagggcccagaggaactacatggtgcagacagaggaccagtacatcttcatccatgatgccctgctggaggccgtgacctgtggcaacacagaggtgcctgccaggaacctgtatgcctacatccagaagctgacccagatcgagaccggggagaatgtgacaggcatggagctggagttcaagaggctggccagcagcaaggcccacaccagccgcttcatcagcgccaacctgccctgcaacaagttcaagaaccggctggtgaacatcatgccctatgagagcaccagggtgtgcctgcagcccatccggggcgtggagggcagtgactacatcaatgccagcttcattgatggctaccggcagcagaaggcctacatcgccacccagggccccctggccgagaccacagaggacttctggaggatgctgtgggagcacaacagcaccatcgtggtgatgctgaccaagctgcgggagatgggccgggagaagtgccaccagtactggccagctgagaggtctgcccgctaccagtactttgtggtggaccccatggccgagtacaacatgccccagtacatcctgcgggagttcaaggtgacagatgccagagatggccagagcaggacagtgcggcagttccagttcacagactggccagagcagggcgtgcccaagtctggagagggcttcatcgacttcatcggccaggtgcacaagaccaaggagcagtttggccaggacggccccatctctgtgcactgcagcgctggggtgggccgcactggagtcttcatcaccctgagcatcgtgctggagaggatgagatatgaaggagtggtggacatcttccagacagtgaagatgctgcggacccagaggcctgccatggtgcagacagaggaccagtaccagttctcctaccgggccgccctggagtacctgggcagctttgaccactacgccacctag

SEQ ID NO: 166317 - DNA, 5739 bp, synthetic construct; identical to SEQ ID NO: 166314
  misc_feature 1..5739: note = Description of Artificial Sequence: Synthetic coding sequence
  source 1..5739: mol_type = other DNA

SEQ ID NO: 166318 - DNA, 4509 bp, synthetic construct
  misc_feature 1..4509: note = Description of Artificial Sequence: Synthetic coding sequence
  source 1..4509: mol_type = other DNA
atggtgcacgtggcccggctgctgctgctgctgctgaccttcttcctgaggacagatgctgagaccccaccccgcttcaccaggacccctgtggaccagacaggagtgtctggaggagtggccagcttcatctgccaggccaccggggacccccggcccaagatcgtgtggaacaagaagggcaagaaggtgagcaaccagagatttgaagtcatcgagtttgatgatggcagcggctctgtgctgcgcatccagcccctgcggaccccaagagatgaggccatctatgaatgtgtggccagcaacaacgtgggggagatctctgtgtccacccggctgactgtgctgcgggaggaccagatcccccggggcttccccaccatcgacatgggcccccagctgaaggtggtggagaggaccaggacagccaccatgctgtgtgccgccagcggcaacccagaccctgagatcacctggttcaaggacttcctgcctgtggacaccagcaacaacaacggccgcatcaagcagctgcggagcggcggcacccccatccggggggccctgcagatcgagcagagcgaggagagtgaccagggcaagtatgaatgtgtggccaccaacagcgctggcacccgctacagcgccccagccaacctgtatgtgcgggagctgcgggaggtgagaagagtgcccccacgcttcagcatcccccccaccaaccacgagatcatgcctgggggctctgtgaacatcacctgtgtggccgtgggcagccccatgccctacgtgaagtggatgctgggcgctgaggacctgaccccagaagatgacatgcccatcggcagaaatgtgctggagctgaatgatgtgcggcagagcgccaactacacctgtgtggccatgagcaccctgggcgtcatcgaggccatcgcccagatcaccgtgaaggccctgcccaagcccccaggcacccctgtggtgacagagagcacagccaccagcatcaccctgacctgggacagcggcaaccctgagcctgtgtcctactacatcatccagcacaagcccaagaacagcgaggagctgtacaaggagattgatggagtggccaccacccgctacagcgtggccggcctgagcccctacagcgactatgagttccgggtggtggccgtgaacaacatcggccggggcccccccagcgagcctgtgctgacccagaccagcgagcaggcccccagcagcgcccccagagatgtgcaggccaggatgctgagcagcaccaccatcctggtgcagtggaaggagcctgaggagcccaacggccagatccagggctacagagtgtactacaccatggaccccacccagcacgtgaacaactggatgaagcacaacgtggccgacagccagatcaccaccatcggcaacctggtgccccagaagacctacagcgtgaaggtgctggccttcaccagcattggagatggccccctgagcagtgacatccaggtgatcacccagacaggagtgcccggccagcccctgaacttcaaggccgagcctgagagcgagaccagcatcctgctgtcctggaccccacccaggagtgacaccatcgccaactatgagctggtgtacaaggatggagaacatggagaggagcagaggatcaccatcgagcccggcaccagctaccgcctgcagggcctgaagcccaacagcctgtactacttccggctggccgcccggagcccccagggcctgggcgccagcacagctgagatcagcgcccggaccatgcagagcatgtttgccaagaacttccacgtgaaggctgtgatgaagacctctgtgctgctgtcctgggagatccctgagaactacaacagcgccatgcccttcaagatcctgtatgatgatggcaagatggtggaggaggtggatggccgggccacccagaagctgattgtgaacctgaagccagagaagagctacagctttgtgctgaccaacagaggcaacagcgctgggggcctgcagcaccgggtgacagccaagacagccccagatgtgctgcggaccaagccagccttcatcggcaagaccaacctggatggcatgatcaccgtgcagctgcctgaggtgcctgccaatgaaaacatcaagggctactacatcatcatcgtgcccctgaagaagagccggggcaagttcatcaagccctgggagagcccagatgagatggagctggatgagctgctgaaggagatcagcaggaagagaagaagcatccgctatggccgggaggtggagctgaagccctacatcgccgcccactttgatgtgctgcccacagagttcaccctgggagatgacaagcactatggaggcttcaccaacaagcagctgcagagcggccaggagtatgtgttctttgtgctggccgtgatggagcacgccgagagcaagatgtatgccaccagcccctacagcgaccctgtggtgtccatggacctggacccccagcccatcacagatgaggaggagggcctcatctgggtggtgggccctgtgctggccgtggtgttcatcatctgcatcgtgattgccatcctgctgtacaagagcaagccagacaggaagagagctgagagtgacagcaggaagagcagcatccccaacaacaaggagatccccagccaccaccccacagatcctgtggagctgcggcggctgaacttccagaccccaggcatggccagccacccccccatccccatcctggagctggccgaccacatcgagcggctgaaggccaatgacaacctgaagttcagccaggagtatgagagcattgaccccggccagcagttcacctgggagcacagcaacctggaggtgaacaagcccaagaacagatatgccaacgtcatcgcctatgaccacagccgggtgctgctgagcgccatcgagggcatccctggcagtgactatgtgaatgccaactacattgatggctacaggaagcagaatgcctacatcgccacccagggcagcctgcctgagaccttcggggacttctggaggatgatctgggagcagaggtctgccaccgtggtgatgatgaccaagctggaggagaggagccgggtgaagtgtgaccagtactggcccagccggggcacagagacccacggcctggtgcaggtgaccctgctggacacagtggagctggccacctactgtgtgaggacctttgccctgtacaagaatggcagcagcgagaagcgggaggtgcggcagttccagttcaccgcctggccagaccacggcgtgcctgagcaccccacccccttcctggccttcctgcggcgggtgaagacctgcaaccccccagatgctggccccatggtggtgcactgcagcgctggggtgggccgcacaggctgcttcatcgtgattgatgccatgctggagcgcatcaagcatgagaagacagtggacatctacggccacgtgaccctgatgagggcccagaggaactacatggtgcagacagaggaccagtacatcttcatccatgatgccctgctggaggccgtgacctgtggcaacacagaggtgcctgccaggaacctgtatgcctacatccagaagctgacccagattgaaacaggagaaaatgtgacaggcatggagctggagttcaagaggctggccagcagcaaggcccacaccagccgcttcatcagcgccaacctgccctgcaacaagttcaagaaccggctggtgaacatcatgccctatgagagcaccagggtgtgcctgcagcccatccggggcgtggagggcagtgactacatcaatgccagcttcattgatggctaccggcagcagaaggcctacatcgccacccagggccccctggccgagaccacagaggacttctggaggatgctgtgggagcacaacagcaccatcgtggtgatgctgaccaagctgcgggagatgggccgggagaagtgccaccagtactggccagctgagaggtctgcccgctaccagtactttgtggtggaccccatggccgagtacaacatgccccagtacatcctgcgggagttcaaggtgacagatgccagagatggccagagcaggacagtgcggcagttccagttcacagactggccagagcagggcgtgcccaagagcggggagggcttcatcgacttcatcggccaggtgcacaagaccaaggagcagtttggccaggacggccccatctctgtgcactgcagcgctggggtgggccgcactggagtcttcatcaccctgagcatcgtgctggagaggatgagatatgagggcgtggtggacatcttccagacagtgaagatgctgcggacccagaggcctgccatggtgcagacagaggaccagtaccagttctcctacagagctgccctggagtacctgggcagctttgaccactacgccacctag

SEQ ID NO: 166319 - DNA, 4518 bp, synthetic construct
  misc_feature 1..4518: note = Description of Artificial Sequence: Synthetic coding sequence
  source 1..4518: mol_type = other DNA
atggtgcacgtggcccggctgctgctgctgctgctgaccttcttcctgaggacagatgctgagaccccaccccgcttcaccaggacccctgtggaccagacaggagtgtctggaggagtggccagcttcatctgccaggccaccggggacccccggcccaagatcgtgtggaacaagaagggcaagaaggtgagcaaccagagatttgaagtcatcgagtttgatgatggcagcggctctgtgctgcgcatccagcccctgcggaccccaagagatgaggccatctatgaatgtgtggccagcaacaacgtgggggagatctctgtgtccacccggctgactgtgctgcgggaggaccagatcccccggggcttccccaccatcgacatgggcccccagctgaaggtggtggagaggaccaggacagccaccatgctgtgtgccgccagcggcaacccagaccctgagatcacctggttcaaggacttcctgcctgtggacaccagcaacaacaacggccgcatcaagcagctgcggtctgtgtccattggagccctgcagatcgagcagagcgaggagagtgaccagggcaagtatgaatgtgtggccaccaacagcgctggcacccgctacagcgccccagccaacctgtatgtgcgggtgcggcgggtgcccccacgcttcagcatcccccccaccaaccacgagatcatgcctgggggctctgtgaacatcacctgtgtggccgtgggcagccccatgccctacgtgaagtggatgctgggcgctgaggacctgaccccagaagatgacatgcccatcggcagaaatgtgctggagctgaatgatgtgcggcagagcgccaactacacctgtgtggccatgagcaccctgggcgtgattgaggccatcgcccagatcaccgtgaaggccctgcccaagcccccaggcacccctgtggtgacagagagcacagccaccagcatcaccctgacctgggacagcggcaaccctgagcctgtgtcctactacatcatccagcacaagcccaagaacagcgaggagctgtacaaggagattgatggagtggccaccacccgctacagcgtggccggcctgagcccctacagcgactatgagttccgggtggtggccgtgaacaacatcggccggggccccccatctgagcctgtgctgacccagaccagcgagcaggcccccagcagcgcccccagagatgtgcaggccaggatgctgagcagcaccaccatcctggtgcagtggaaggagcctgaggagcccaacggccagatccagggctacagagtgtactacaccatggaccccacccagcacgtgaacaactggatgaagcacaacgtggccgacagccagatcaccaccatcggcaacctggtgccccagaagacctacagcgtgaaggtgctggccttcaccagcattggagatggccccctgagcagtgacatccaggtgatcacccagacaggagtgcccggccagcccctgaacttcaaggccgagcctgagagcgagaccagcatcctgctgtcctggaccccacccaggagtgacaccatcgccaactatgagctggtgtacaaggatggagagcacggggaggagcagaggatcaccatcgagcccggcaccagctaccgcctgcagggcctgaagcccaacagcctgtactacttccggctggccgcccggagcccccagggcctgggcgccagcacagctgagatcagcgcccggaccatgcagagcatgtttgccaagaacttccacgtgaaggctgtgatgaagacctctgtgctgctgtcctgggagatccctgagaactacaacagcgccatgcccttcaagatcctgtatgatgatggcaagatggtggaggaggtggatggccgggccacccagaagctgattgtgaacctgaagccagagaagagctacagctttgtgctgaccaacagaggcaacagcgctgggggcctgcagcaccgggtgacagccaagacagccccagatgtgctgcggaccaagccagccttcatcggcaagaccaacctggatggcatgatcaccgtgcagctgcctgaggtgcctgccaatgaaaacatcaagggctactacatcatcatcgtgcccctgaagaagagccggggcaagttcatcaagccctgggagagcccagatgagatggagctggatgagctgctgaaggagatcagcaggaagaggaggagcatccgctatggccgggaggtggagctgaagccctacatcgccgcccactttgatgtgctgcccacagagttcaccctgggagatgacaagcactacggcggcttcaccaacaagcagctgcagagcggccaggagtatgtgttctttgtgctggccgtgatggagcacgccgagagcaagatgtatgccaccagcccctacagcgaccctgtggtgtccatggacctggacccccagcccatcacagatgaggaggagggcctcatctgggtggtgggccctgtgctggccgtggtgttcatcatctgcatcgtcatcgccatcctgctgtacaagaggaagagagctgagagtgacagcaggaagagcagcatccccaacaacaaggagatccccagccaccaccccacagatcctgtggagctgcggcggctgaacttccagaccccaggcagtgatgattctggctacccaggcaacctgcacagcagctccatggccagccacccccccatccccatcctggagctggccgaccacatcgagcggctgaaggccaatgacaacctgaagttcagccaggagtatgagagcattgatcctggccagcagttcacctgggagcacagcaacctggaggtgaacaagcccaagaacagatatgccaacgtgattgcctatgaccacagccgggtgctgctgagcgccatcgagggcatccctggcagtgactatgtgaatgccaactacattgatggctacaggaagcagaatgcctacatcgccacccagggcagcctgcctgagacctttggagacttctggaggatgatctgggagcagaggtctgccaccgtggtgatgatgaccaagctggaggagaggagccgggtgaagtgtgaccagtactggcccagccggggcacagagacccacggcctggtgcaggtgaccctgctggacacagtggagctggccacctactgtgtgaggacctttgccctgtacaagaatggcagcagcgagaagcgggaggtgcggcagttccagttcaccgcctggccagaccatggagtgcctgagcaccccacccccttcctggccttcctgcggcgggtgaagacctgcaaccccccagatgctggccccatggtggtgcactgcagcgctggggtgggccgcacaggctgcttcatcgtgattgatgccatgctggagcgcatcaagcatgagaagacagtggacatctacggccacgtgaccctgatgagggcccagaggaactacatggtgcagacagaggaccagtacatcttcatccatgatgccctgctggaggccgtgacctgtggcaacacagaggtgcctgccaggaacctgtatgcctacatccagaagctgacccagatcgagaccggggagaatgtgacaggcatggagctggagttcaagaggctggccagcagcaaggcccacaccagccgcttcatcagcgccaacctgccctgcaacaagttcaagaaccggctggtgaacatcatgccctatgagagcaccagggtgtgcctgcagcccatccggggcgtggagggcagtgactacatcaatgccagcttcattgatggctaccggcagcagaaggcctacatcgccacccagggccccctggccgagaccacagaggacttctggaggatgctgtgggagcacaacagcaccatcgtggtgatgctgaccaagctgcgggagatgggccgggagaagtgccaccagtactggccagctgagaggtctgcccgctaccagtactttgtggtggaccccatggccgagtacaacatgccccagtacatcctgcgggagttcaaggtgacagatgccagagatggccagagcaggacagtgcggcagttccagttcacagactggccagagcagggcgtgcccaagtctggagagggcttcatcgacttcatcggccaggtgcacaagaccaaggagcagtttggccaggacggccccatctctgtgcactgcagcgctggggtgggccgcactggagtcttcatcaccctgagcatcgtgctggagaggatgagatatgaaggagtggtggacatcttccagacagtgaagatgctgcggacccagaggcctgccatggtgcagacagaggaccagtaccagttctcctaccgggccgccctggagtacctgggcagctttgaccactacgccacctag

SEQ ID NO: 166320 - DNA, 282 bp, synthetic construct
  misc_feature 1..282: note = Description of Artificial Sequence: Synthetic coding sequence
  source 1..282: mol_type = other DNA
atggtgcacgtggcccggctgctgctgctgctgctgaccttcttcctgaggacagatgctgagaccccaccccgcttcaccaggacccctgtggaccagacaggagtgtctggaggagtggccagcttcatctgccaggccaccggggacccccggcccaagatcgtgtggaacaagaagggcaagaaggtgagcaaccagagatttgaagtcatcgagtttgatgatggcagcggctctgtgctgcgcatccagcccctgcggaccccaagagatgaatag

SEQ ID NO: 166321 - DNA, 4518 bp, synthetic construct
  misc_feature 1..4518: note = Description of Artificial Sequence: Synthetic coding sequence
  source 1..4518: mol_type = other DNA
atggtgcacgtggcccggctgctgctgctgctgctgaccttcttcctgaggacagatgctgagaccccaccccgcttcaccaggacccctgtggaccagacaggagtgtctggaggagtggccagcttcatctgccaggccaccggggacccccggcccaagatcgtgtggaacaagaagggcaagaaggtgagcaaccagagatttgaagtcatcgagtttgatgatggcagcggctctgtgctgcgcatccagcccctgcggaccccaagagatgaggccatctatgaatgtgtggccagcaacaacgtgggggagatctctgtgtccacccggctgactgtgctgcgggaggaccagatcccccggggcttccccaccatcgacatgggcccccagctgaaggtggtggagaggaccaggacagccaccatgctgtgtgccgccagcggcaacccagaccctgagatcacctggttcaaggacttcctgcctgtggacaccagcaacaacaacggccgcatcaagcagctgcggtctgagagcattggaggcacccccatccggggggccctgcagatcgagcagagcgaggagagtgaccagggcaagtatgaatgtgtggccaccaacagcgctggcacccgctacagcgccccagccaacctgtatgtgcgggagctgcgggaggtgcggcgggtgcccccacgcttcagcatcccccccaccaaccacgagatcatgcctgggggctctgtgaacatcacctgtgtggccgtgggcagccccatgccctacgtgaagtggatgctgggcgctgaggacctgaccccagaagatgacatgcccatcggcagaaatgtgctggagctgaatgatgtgcggcagagcgccaactacacctgtgtggccatgagcaccctgggcgtgattgaggccatcgcccagatcaccgtgaaggccctgcccaagcccccaggcacccctgtggtgacagagagcacagccaccagcatcaccctgacctgggacagcggcaaccctgagcctgtgtcctactacatcatccagcacaagcccaagaacagcgaggagctgtacaaggagattgatggagtggccaccacccgctacagcgtggccggcctgagcccctacagcgactatgagttccgggtggtggccgtgaacaacatcggccggggccccccatctgagcctgtgctgacccagaccagcgagcaggcccccagcagcgcccccagagatgtgcaggccaggatgctgagcagcaccaccatcctggtgcagtggaaggagcctgaggagcccaacggccagatccagggctacagagtgtactacaccatggaccccacccagcacgtgaacaactggatgaagcacaacgtggccgacagccagatcaccaccatcggcaacctggtgccccagaagacctacagcgtgaaggtgctggccttcaccagcattggagatggccccctgagcagtgacatccaggtgatcacccagacaggagtgcccggccagcccctgaacttcaaggccgagcctgagagcgagaccagcatcctgctgtcctggaccccacccaggagtgacaccatcgccaactatgagctggtgtacaaggatggagagcacggggaggagcagaggatcaccatcgagcccggcaccagctaccgcctgcagggcctgaagcccaacagcctgtactacttccggctggccgcccggagcccccagggcctgggcgccagcacagctgagatcagcgcccggaccatgcagagcatgtttgccaagaacttccacgtgaaggctgtgatgaagacctctgtgctgctgtcctgggagatccctgagaactacaacagcgccatgcccttcaagatcctgtatgatgatggcaagatggtggaggaggtggatggccgggccacccagaagctgattgtgaacctgaagccagagaagagctacagctttgtgctgaccaacagaggcaacagcgctgggggcctgcagcaccgggtgacagccaagacagccccagatgtgctgcggaccaagccagccttcatcggcaagaccaacctggatggcatgatcaccgtgcagctgcctgaggtgcctgccaatgaaaacatcaagggctactacatcatcatcgtgcccctgaagaagagccggggcaagttcatcaagccctgggagagcccagatgagatggagctggatgagctgctgaaggagatcagcaggaagaggaggagcatccgctatggccgggaggtggagctgaagccctacatcgccgcccactttgatgtgctgcccacagagttcaccctgggagatgacaagcactacggcggcttcaccaacaagcagctgcagagcggccaggagtatgtgttctttgtgctggccgtgatggagcacgccgagagcaagatgtatgccaccagcccctacagcgaccctgtggtgtccatggacctggacccccagcccatcacagatgaggaggagggcctcatctgggtggtgggccctgtgctggccgtggtgttcatcatctgcatcgtcatcgccatcctgctgtacaagagcaagccagacaggaagagagctgagagtgacagcaggaagagcagcatccccaacaacaaggagatccccagccaccaccccacagatcctgtggagctgcggcggctgaacttccagaccccaggcatggccagccacccccccatccccatcctggagctggccgaccacatcgagcggctgaaggccaatgacaacctgaagttcagccaggagtatgagagcattgatcctggccagcagttcacctgggagcacagcaacctggaggtgaacaagcccaagaacagatatgccaacgtgattgcctatgaccacagccgggtgctgctgagcgccatcgagggcatccctggcagtgactatgtgaatgccaactacattgatggctacaggaagcagaatgcctacatcgccacccagggcagcctgcctgagacctttggagacttctggaggatgatctgggagcagaggtctgccaccgtggtgatgatgaccaagctggaggagaggagccgggtgaagtgtgaccagtactggcccagccggggcacagagacccacggcctggtgcaggtgaccctgctggacacagtggagctggccacctactgtgtgaggacctttgccctgtacaagaatggcagcagcgagaagcgggaggtgcggcagttccagttcaccgcctggccagaccatggagtgcctgagcaccccacccccttcctggccttcctgcggcgggtgaagacctgcaaccccccagatgctggccccatggtggtgcactgcagcgctggggtgggccgcacaggctgcttcatcgtgattgatgccatgctggagcgcatcaagcatgagaagacagtggacatctacggccacgtgaccctgatgagggcccagaggaactacatggtgcagacagaggaccagtacatcttcatccatgatgccctgctggaggccgtgacctgtggcaacacagaggtgcctgccaggaacctgtatgcctacatccagaagctgacccagatcgagaccggggagaatgtgacaggcatggagctggagttcaagaggctggccagcagcaaggcccacaccagccgcttcatcagcgccaacctgccctgcaacaagttcaagaaccggctggtgaacatcatgccctatgagagcaccagggtgtgcctgcagcccatccggggcgtggagggcagtgactacatcaatgccagcttcattgatggctaccggcagcagaaggcctacatcgccacccagggccccctggccgagaccacagaggacttctggaggatgctgtgggagcacaacagcaccatcgtggtgatgctgaccaagctgcgggagatgggccgggagaagtgccaccagtactggccagctgagaggtctgcccgctaccagtactttgtggtggaccccatggccgagtacaacatgccccagtacatcctgcgggagttcaaggtgacagatgccagagatggccagagcaggacagtgcggcagttccagttcacagactggccagagcagggcgtgcccaagtctggagagggcttcatcgacttcatcggccaggtgcacaagaccaaggagcagtttggccaggacggccccatctctgtgcactgcagcgctggggtgggccgcactggagtcttcatcaccctgagcatcgtgctggagaggatgagatatgaaggagtggtggacatcttccagacagtgaagatgctgcggacccagaggcctgccatggtgcagacagaggaccagtaccagttctcctaccgggccgccctggagtacctgggcagctttgaccactacgccacctag

SEQ ID NO: 166322 - DNA, 4509 bp, synthetic construct
  misc_feature 1..4509: note = Description of Artificial Sequence: Synthetic coding sequence
  source 1..4509: mol_type = other DNA
atggtgcacgtggcccggctgctgctgctgctgctgaccttcttcctgaggacagatgctgagaccccaccccgcttcaccaggacccctgtggaccagacaggagtgtctggaggagtggccagcttcatctgccaggccaccggggacccccggcccaagatcgtgtggaacaagaagggcaagaaggtgagcaaccagagatttgaagtcatcgagtttgatgatggcagcggctctgtgctgcgcatccagcccctgcggaccccaagagatgaggccatctatgaatgtgtggccagcaacaacgtgggggagatctctgtgtccacccggctgactgtgctgcgggaggaccagatcccccggggcttccccaccatcgacatgggcccccagctgaaggtggtggagaggaccaggacagccaccatgctgtgtgccgccagcggcaacccagaccctgagatcacctggttcaaggacttcctgcctgtggacaccagcaacaacaacggccgcatcaagcagctgcggagcggccgggtcttccacactggagccctgcagatcgagcagagcgaggagagtgaccagggcaagtatgaatgtgtggccaccaacagcgctggcacccgctacagcgccccagccaacctgtatgtgcgggtgaacaggaaggtgagaagagtgcccccacgcttcagcatcccccccaccaaccacgagatcatgcctgggggctctgtgaacatcacctgtgtggccgtgggcagccccatgccctacgtgaagtggatgctgggcgctgaggacctgaccccagaagatgacatgcccatcggcagaaatgtgctggagctgaatgatgtgcggcagagcgccaactacacctgtgtggccatgagcaccctgggcgtcatcgaggccatcgcccagatcaccgtgaaggccctgcccaagcccccaggcacccctgtggtgacagagagcacagccaccagcatcaccctgacctgggacagcggcaaccctgagcctgtgtcctactacatcatccagcacaagcccaagaacagcgaggagctgtacaaggagattgatggagtggccaccacccgctacagcgtggccggcctgagcccctacagcgactatgagttccgggtggtggccgtgaacaacatcggccggggcccccccagcgagcctgtgctgacccagaccagcgagcaggcccccagcagcgcccccagagatgtgcaggccaggatgctgagcagcaccaccatcctggtgcagtggaaggagcctgaggagcccaacggccagatccagggctacagagtgtactacaccatggaccccacccagcacgtgaacaactggatgaagcacaacgtggccgacagccagatcaccaccatcggcaacctggtgccccagaagacctacagcgtgaaggtgctggccttcaccagcattggagatggccccctgagcagtgacatccaggtgatcacccagacaggagtgcccggccagcccctgaacttcaaggccgagcctgagagcgagaccagcatcctgctgtcctggaccccacccaggagtgacaccatcgccaactatgagctggtgtacaaggatggagaacatggagaggagcagaggatcaccatcgagcccggcaccagctaccgcctgcagggcctgaagcccaacagcctgtactacttccggctggccgcccggagcccccagggcctgggcgccagcacagctgagatcagcgcccggaccatgcagagcatgtttgccaagaacttccacgtgaaggctgtgatgaagacctctgtgctgctgtcctgggagatccctgagaactacaacagcgccatgcccttcaagatcctgtatgatgatggcaagatggtggaggaggtggatggccgggccacccagaagctgattgtgaacctgaagccagagaagagctacagctttgtgctgaccaacagaggcaacagcgctgggggcctgcagcaccgggtgacagccaagacagccccagatgtgctgcggaccaagccagccttcatcggcaagaccaacctggatggcatgatcaccgtgcagctgcctgaggtgcctgccaatgaaaacatcaagggctactacatcatcatcgtgcccctgaagaagagccggggcaagttcatcaagccctgggagagcccagatgagatggagctggatgagctgctgaaggagatcagcaggaagagaagaagcatccgctatggccgggaggtggagctgaagccctacatcgccgcccactttgatgtgctgcccacagagttcaccctgggagatgacaagcactatggaggcttcaccaacaagcagctgcagagcggccaggagtatgtgttctttgtgctggccgtgatggagcacgccgagagcaagatgtatgccaccagcccctacagcgaccctgtggtgtccatggacctggacccccagcccatcacagatgaggaggagggcctcatctgggtggtgggccctgtgctggccgtggtgttcatcatctgcatcgtgattgccatcctgctgtacaagaggaagccctacaggaagagagctgagagtgacagcaggaagagcagcatccccaacaacaaggagatccccagccaccaccccacagatcctgtggagctgcggcggctgaacttccagaccccaggcatggccagccacccccccatccccatcctggagctggccgaccacatcgagcggctgaaggccaatgacaacctgaagttcagccaggagtatgagagcattgaccccggccagcagttcacctgggagcacagcaacctggaggtgaacaagcccaagaacagatatgccaacgtcatcgcctatgaccacagccgggtgctgctgagcgccatcgagggcatccctggcagtgactatgtgaatgccaactacattgatggctacaggaagcagaatgcctacatcgccacccagggcagcctgcctgagaccttcggggacttctggaggatgatctgggagcagaggtctgccaccgtggtgatgatgaccaagctggaggagaggagccgggtgaagtgtgaccagtactggcccagccggggcacagagacccacggcctggtgcaggtgaccctgctggacacagtggagctggccacctactgtgtgaggacctttgccctgtacaagaatggcagcagcgagaagcgggaggtgcggcagttccagttcaccgcctggccagaccacggcgtgcctgagcaccccacccccttcctggccttcctgcggcgggtgaagacctgcaaccccccagatgctggccccatggtggtgcactgcagcgctggggtgggccgcacaggctgcttcatcgtgattgatgccatgctggagcgcatcaagcatgagaagacagtggacatctacggccacgtgaccctgatgagggcccagaggaactacatggtgcagacagaggaccagtacatcttcatccatgatgccctgctggaggccgtgacctgtggcaacacagaggtgcctgccaggaacctgtatgcctacatccagaagctgacccagattgaaacaggagaaaatgtgacaggcatggagctggagttcaagaggctggccagcagcaaggcccacaccagccgcttcatcagcgccaacctgccctgcaacaagttcaagaaccggctggtgaacatcatgccctatgagagcaccagggtgtgcctgcagcccatccggggcgtggagggcagtgactacatcaatgccagcttcattgatggctaccggcagcagaaggcctacatcgccacccagggccccctggccgagaccacagaggacttctggaggatgctgtgggagcacaacagcaccatcgtggtgatgctgaccaagctgcgggagatgggccgggagaagtgccaccagtactggccagctgagaggtctgcccgctaccagtactttgtggtggaccccatggccgagtacaacatgccccagtacatcctgcgggagttcaaggtgacagatgccagagatggccagagcaggacagtgcggcagttccagttcacagactggccagagcagggcgtgcccaagagcggggagggcttcatcgacttcatcggccaggtgcacaagaccaaggagcagtttggccaggacggccccatctctgtgcactgcagcgctggggtgggccgcactggagtcttcatcaccctgagcatcgtgctggagaggatgagatatgagggcgtggtggacatcttccagacagtgaagatgctgcggacccagaggcctgccatggtgcagacagaggaccagtaccagttctcctacagagctgccctggagtacctgggcagctttgaccactacgccacctag

SEQ ID NO: 166323 - DNA, 5739 bp, synthetic construct; identical to SEQ ID NO: 166314
  misc_feature 1..5739: note = Description of Artificial Sequence: Synthetic coding sequence
  source 1..5739: mol_type = other DNA

SEQ ID NO: 166324 - DNA, 2103 bp, synthetic construct
  misc_feature 1..2103: note = Description of Artificial Sequence: Synthetic coding sequence
  source 1..2103: mol_type = other DNA
atggagcccctgtgccccctgctgctggtgggcttcagcctgcccctggcccgggccctgcggggaaatgagaccacagctgacagcaatgagaccaccaccaccagcggccccccagaccccggggccagccagcccctgctggcctggctgctgctgcccctgctgctgctgctgctggtgctgctgctggccgcctacttcttccgcttcaggaagcagaggaaggctgtggtgtccaccagtgacaagaagatgcccaacggcatcctggaggagcaggagcagcagagggtgatgctgctgagccgcagccccagcggccccaagaagtacttccccatccctgtggagcacctggaggaggagatccgcatccgctctgcagatgactgcaagcagttccgggaggagttcaacagcctgcccagcggccacatccagggcacctttgagctggccaacaaggaggagaaccgggagaagaaccgctaccccaacatcctgcccaatgaccacagcagggtcatcctgagccagctggatggcatcccctgcagcgactacatcaatgccagctacattgatggctacaaggagaagaacaagttcatcgccgcccagggccccaagcaggagaccgtgaatgacttctggaggatggtgtgggagcagaagagcgccaccatcgtgatgctgaccaacctgaaggagaggaaggaggagaagtgccaccagtactggccagaccagggctgctggacctacggcaacatccgggtgtgtgtggaggactgtgtggtgctggtggactacaccatcaggaagttctgcatccagccccagctgcctgatggctgcaaggccccccggctggtgtcccagctgcacttcacctcctggccagactttggagtgcccttcacccccatcggcatgctgaagttcctgaagaaggtgaagaccctgaaccctgtgcacgccggccccatcgtggtgcactgcagcgctggggtgggccgcacaggcaccttcatcgtgattgatgccatgatggccatgatgcatgctgagcagaaggtggatgtgtttgaatttgtgagccgcatccggaaccagaggccccagatggtgcagacagacatgcagtacaccttcatctaccaggccctgctggagtactacctgtatggagacacagagctggatgtgagcagcctggagaagcacctgcagaccatgcacggcaccaccacccactttgacaagattggcctggaggaggagttcaggaagctgaccaacgtgcgcatcatgaaggagaacatgaggactggaaacctgcctgccaacatgaagaaggcccgggtcatccagatcatcccctatgacttcaacagagtcatcctgtccatgaagaggggccaggagtacacagactacatcaatgccagcttcattgatggctaccggcagaaggactacttcatcgccacccagggccccctggcccacacagtggaggacttctggaggatgatctgggagtggaagagccacaccatcgtgatgctgacagaggtgcaggagcgggagcaggacaagtgctaccagtactggcccacagagggctctgtgacccacggggagatcaccatcgagatcaagaatgacaccctgtctgaggccatcagcatccgggacttcctggtgaccctgaaccagccccaggcccggcaggaggagcaggtgcgggtggtgcggcagttccacttccacggctggccagagatcggcatcccagctgagggcaagggcatgattgacctgattgctgctgtgcagaagcagcagcagcagacaggcaaccaccccatcaccgtgcactgcagcgctggggccggccgcacaggcaccttcatcgccctgagcaacatcctggagcgggtgaaggccgagggcctgctggatgtgttccaggccgtgaagagcctgcggctgcagaggccccacatggtgcagaccctggagcagtatgagttctgctacaaggtggtgcaggacttcatcgacatcttcagtgactatgccaacttcaagtag

SEQ ID NO: 166325 - DNA, 1929 bp, synthetic construct
  misc_feature 1..1929: note = Description of Artificial Sequence: Synthetic coding sequence
  source 1..1929: mol_type = other DNA
atgagcaacagaagcagcttcagccggctgacctggttcaggaagcagaggaaggctgtggtgtccaccagtgacaagaagatgcccaacggcatcctggaggagcaggagcagcagagggtgatgctgctgagccgcagccccagcggccccaagaagtacttccccatccctgtggagcacctggaggaggagatccgcatccgctctgcagatgactgcaagcagttccgggaggagttcaacagcctgcccagcggccacatccagggcacctttgagctggccaacaaggaggagaaccgggagaagaaccgctaccccaacatcctgcccaatgaccacagcagggtcatcctgagccagctggatggcatcccctgcagcgactacatcaatgccagctacattgatggctacaaggagaagaacaagttcatcgccgcccagggccccaagcaggagaccgtgaatgacttctggaggatggtgtgggagcagaagagcgccaccatcgtgatgctgaccaacctgaaggagaggaaggaggagaagtgccaccagtactggccagaccagggctgctggacctacggcaacatccgggtgtgtgtggaggactgtgtggtgctggtggactacaccatcaggaagttctgcatccagccccagctgcctgatggctgcaaggccccccggctggtgtcccagctgcacttcacctcctggccagactttggagtgcccttcacccccatcggcatgctgaagttcctgaagaaggtgaagaccctgaaccctgtgcacgccggccccatcgtggtgcactgcagcgctggggtgggccgcacaggcaccttcatcgtgattgatgccatgatggccatgatgcatgctgagcagaaggtggatgtgtttgaatttgtgagccgcatccggaaccagaggccccagatggtgcagacagacatgcagtacaccttcatctaccaggccctgctggagtactacctgtatggagacacagagctggatgtgagcagcctggagaagcacctgcagaccatgcacggcaccaccacccactttgacaagattggcctggaggaggagttcaggaagctgaccaacgtgcgcatcatgaaggagaacatgaggactggaaacctgcctgccaacatgaagaaggcccgggtcatccagatcatcccctatgacttcaacagagtcatcctgtccatgaagaggggccaggagtacacagactacatcaatgccagcttcattgatggctaccggcagaaggactacttcatcgccacccagggccccctggcccacacagtggaggacttctggaggatgatctgggagtggaagagccacaccatcgtgatgctgacagaggtgcaggagcgggagcaggacaagtgctaccagtactggcccacagagggctctgtgacccacggggagatcaccatcgagatcaagaatgacaccctgtctgaggccatcagcatccgggacttcctggtgaccctgaaccagccccaggcccggcaggaggagcaggtgcgggtggtgcggcagttccacttccacggctggccagagatcggcatcccagctgagggcaagggcatgattgacctgattgctgctgtgcagaagcagcagcagcagacaggcaaccaccccatcaccgtgcactgcagcgctggggccggccgcacaggcaccttcatcgccctgagcaacatcctggagcgggtgaaggccgagggcctgctggatgtgttccaggccgtgaagagcctgcggctgcagaggccccacatggtgcagaccctggagcagtatgagttctgctacaaggtggtgcaggacttcatcgacatcttcagtgactatgccaacttcaagtag

SEQ ID NO: 166326 - DNA, 2103 bp, synthetic construct; identical to SEQ ID NO: 166324
  misc_feature 1..2103: note = Description of Artificial Sequence: Synthetic coding sequence
  source 1..2103: mol_type = other DNA

SEQ ID NO: 166327 - DNA, 438 bp, synthetic construct
  misc_feature 1..438: note = Description of Artificial Sequence: Synthetic coding sequence
  source 1..438: mol_type = other DNA
atggagcccctgtgccccctgctgctggtgggcttcagcctgcccctggcccgggccctgcggggaaatgagaccacagctgacagcaatgagaccaccaccaccagcggccccccagaccccggggccagccagcccctgctggcctggctgctgctgcccctgctgctgctgctgctggtgctgctgctggccgcctacttcttccgcttcaggaagcagaggaaggctgtggtgtccaccagtgacaagaagatgcccaacggcatcctggaggagcaggagcagcagagggtgatgctgctgagccgcagccccagcggccccaagaagtacttccccatccctgtggagcacctggaggaggagatccgcatccgctctgcagatgactgcaagcagttccgggaggagttcaacatgaccatcctgggctag

SEQ ID NO: 166328 - DNA, 2010 bp, synthetic construct
  misc_feature 1..2010: note = Description of Artificial Sequence: Synthetic coding sequence
  source 1..2010: mol_type = other DNA
atggtgtcccagaggctgcccaggaagacccggggccccccctggagcccctgtgtgcacagctgctggtgggtgctggcctgccgcagccctggcctgagcggggccacccggcccctgcccacagccacccggcagccccggccccaggccctgcggacccgggccccacccagccgctgctggccaggctgctactgccgctgctgcagcagcagcagctgcagcttcagcccccccaccagcagcggcagcggccccaagaagtacttccccatccctgtggagcacctggaggaggagatccgcatccgctctgcagatgactgcaagcagttccgggaggagttcaacagcctgcccagcggccacatccagggcacctttgagctggccaacaaggaggagaaccgggagaagaaccgctaccccaacatcctgcccaatgaccacagcagggtcatcctgagccagctggatggcatcccctgcagcgactacatcaatgccagctacattgatggctacaaggagaagaacaagttcatcgccgcccagggccccaagcaggagaccgtgaatgacttctggaggatggtgtgggagcagaagagcgccaccatcgtgatgctgaccaacctgaaggagaggaaggaggagaagtgccaccagtactggccagaccagggctgctggacctacggcaacatccgggtgtgtgtggaggactgtgtggtgctggtggactacaccatcaggaagttctgcatccagccccagctgcctgatggctgcaaggccccccggctggtgtcccagctgcacttcacctcctggccagactttggagtgcccttcacccccatcggcatgctgaagttcctgaagaaggtgaagaccctgaaccctgtgcacgccggccccatcgtggtgcactgcagcgctggggtgggccgcacaggcaccttcatcgtgattgatgccatgatggccatgatgcatgctgagcagaaggtggatgtgtttgaatttgtgagccgcatccggaaccagaggccccagatggtgcagacagacatgcagtacaccttcatctaccaggccctgctggagtactacctgtatggagacacagagctggatgtgagcagcctggagaagcacctgcagaccatgcacggcaccaccacccactttgacaagattggcctggaggaggagttcaggaagctgaccaacgtgcgcatcatgaaggagaacatgaggactggaaacctgcctgccaacatgaagaaggcccgggtcatccagatcatcccctatgacttcaacagagtcatcctgtccatgaagaggggccaggagtacacagactacatcaatgccagcttcattgatggctaccggcagaaggactacttcatcgccacccagggccccctggcccacacagtggaggacttctggaggatgatctgggagtggaagagccacaccatcgtgatgctgacagaggtgcaggagcgggagcaggacaagtgctaccagtactggcccacagagggctctgtgacccacggggagatcaccatcgagatcaagaatgacaccctgtctgaggccatcagcatccgggacttcctggtgaccctgaaccagccccaggcccggcaggaggagcaggtgcgggtggtgcggcagttccacttccacggctggccagagatcggcatcccagctgagggcaagggcatgattgacctgattgctgctgtgcagaagcagcagcagcagacaggcaaccaccccatcaccgtgcactgcagaaattccatgaacagcgccaccaagtggtacaagatcctgctgatctacttcctgatcatgctgatcagcaatgaagacagctgcctgaagatcttcttcaacctgatggagcagaggaggagccacttcccccaggatgcccggctgagcccccccctgtctggaacagcctttgccctgtag

SEQ ID NO: 166329 - DNA, 423 bp, synthetic construct
  misc_feature 1..423: note = Description of Artificial Sequence: Synthetic coding sequence
  source 1..423: mol_type = other DNA
atggagcccctgtgccccctgctgctggtgggcttcagcctgcccctggcccgggccctgcggggaaatgagaccacagctgacagcaatgagaccaccaccaccagcggccccccagaccccggggccagccagcccctgctggcctggctgctgctgcccctgctgctgctgctgctggtgctgctgctggccgcctacttcttccgcttcaggaagcagaggaaggctgtggtgtccaccagtgacaagaagatgcccaacggcatcctggaggagcaggagcagcagagggtgatgctgctgagccgcagccccagcggccccaagaagtacttccccatccctgtggagcacctggaggaggagatccgcatccgctctgcagatgactgcaagcagttccgggaggagttcaactag

SEQ ID NO: 166330 - DNA, 465 bp, synthetic construct
  misc_feature 1..465: note = Description of Artificial Sequence: Synthetic coding sequence
  source 1..465: mol_type = other DNA
atggagcccctgtgccccctgctgctggtgggcttcagcctgcccctggcccgggccctgcggggaaatgagaccacagctgacagcaatgagaccaccaccaccagcggccccccagaccccggggccagccagcccctgctggcctggctgctgctgcccctgctgctgctgctgctggtgctgctgctggccgcctacttcttccgcttcaggaagcagaggaaggctgtggtgtccaccagtgacaagaagatgcccaacggcatcctggaggagcaggagcagcagagggtgatgctgctgagccgcagccccagcggccccaagaagtacttccccatccctgtggagcacctggaggaggagatccgcatccgctctgcagatgactgcaagcagttccgggaggagttcaacagcctgcccagcggccacatccagggcacctttgagctggcctag

SEQ ID NO: 166331 - DNA, 5724 bp, synthetic construct
  misc_feature 1..5724: note = Description of Artificial Sequence: Synthetic coding sequence
  source 1..5724: mol_type = other DNA
atggcccctgagcccgcccctggccgcaccatggtgcccctggtgcctgccctggtgatgctgggcctggtggccggggcccacggggacagcaagcctgtgttcatcaaggtgcctgaggaccagacaggcctgagcggcggcgtggccagctttgtgtgccaggccactggagagcccaagccccgcatcacctggatgaagaagggcaagaaggtgagcagccagagatttgaggtgattgaatttgatgatggagctggctctgtgctgcgcatccagcccctgcgggtgcagagagatgaggccatctatgagtgcacagccaccaacagcctgggggagatcaacaccagcgccaagctgtctgtgctggaggaggagcagctgcccccaggcttccccagcattgacatgggcccccagctgaaggtggtggagaaggccaggacagccaccatgctgtgtgccgccggcggcaacccagaccctgagatctcctggttcaaggacttcctgcctgtggaccctgccaccagcaatggccgcatcaagcagctgcggagcggggccctgcagatcgagagcagcgaggagagtgaccagggcaagtatgaatgtgtggccaccaacagcgctggcacccgctacagcgccccagccaacctgtatgtgcgggtgcggcgggtggccccccgcttcagcatcccccccagcagccaggaggtgatgcctgggggctctgtgaacctgacctgtgtggccgtgggcgcccccatgccctacgtgaagtggatgatgggcgctgaggagctgaccaaggaggatgagatgcctgtgggcagaaatgtgctggagctgagcaatgtggtgcgcagcgccaactacacctgtgtggccatcagcagcctgggcatgattgaggccacagcccaggtgacagtgaaggccctgcccaagccacccatcgacctggtggtgacagagaccacagccacctctgtgaccctgacctgggacagcggcaacagcgagcctgtgacctactacggcatccagtacagagctgctggaacagagggccccttccaggaggtggatggagtggccaccacccgctacagcatcggcggcctgagccccttctctgaatatgccttccgggtgctggccgtgaacagcatcggccggggccccccatctgaggccgtgcgggccaggactggagagcaggcccccagcagccccccccggcgggtgcaggccaggatgctgagcgccagcaccatgctggtgcagtgggagcccccagaggagcccaacggcctggtgcggggctacagagtgtactacaccccagacagccggcggcccccaaatgcctggcacaagcacaacacagatgctggcctgctgaccaccgtgggcagcctgctgcccggcatcacctacagcctgcgggtgctggccttcaccgctgtgggagatggcccccccagccccaccatccaggtgaagacccagcagggcgtgcctgcccagcctgctgacttccaggccgaggtggagagtgacacccgcatccagctgtcctggctgctgcccccccaggagcgcatcatcatgtatgagctggtgtactgggccgcagaagatgaggaccagcagcacaaggtgacctttgaccccaccagcagctacaccctggaggacctgaagccagacaccctgtaccgcttccagctggccgcccggagtgacatgggcgtgggcgtcttcacccccaccatcgaggccaggacagcccagagcaccccatctgccccaccccagaaggtgatgtgtgtgtccatgggcagcaccaccgtgcgggtgtcctgggtgcccccacctgctgacagcagaaatggagtcatcacccagtacagcgtggcctatgaggccgtggatggagaggaccggggcagacatgtggtggatggcatcagccgggagcacagctcctgggacctggtgggcctggagaagtggacagagtacagagtgtgggtgcgggcccacacagatgtgggccctggccctgagagcagccctgtgctggtgaggacagatgaagatgtgcccagcggcccccccaggaaggtggaggtggagcccctgaacagcacagctgtgcacgtgtactggaagctgcctgtgcccagcaagcagcacggccagatccggggctaccaggtgacctacgtgcggctggagaatggagagccccggggcctgcccatcatccaggatgtgatgctggccgaggcccagtggaggcctgaggagagcgaggactatgagaccaccatcagcggcctgaccccagagaccacctacagcgtgacagtggccgcctacaccaccaagggagatggagcccggagcaagcccaagatcgtgaccaccactggagctgtgcccggccggcccaccatgatgatcagcaccacagccatgaacacagccctgctgcagtggcacccccccaaggagctgcctggagagctgctgggctaccgcctgcagtactgcagagcagatgaggcccggcccaacaccatcgactttgggaaggatgaccagcacttcaccgtgacaggcctgcacaagggcaccacctacatcttccggctggccgccaagaacagagctggcctgggggaggagtttgagaaggagatccgcaccccagaggacctgcccagcggcttcccccagaacctgcacgtgacaggcctgaccaccagcaccacagagctggcctgggacccccctgtgctggccgagagaaatggccgcatcatctcctacacagtggtgttccgggacatcaacagccagcaggagctgcagaacatcaccacagacacccgcttcaccctgaccggcctgaagccagacaccacctatgacatcaaggtgcgggcctggaccagcaagggcagcggccccctgagccccagcatccagagcaggaccatgcctgtggagcaggtgtttgccaagaacttccgggtggccgccgccatgaagacctctgtgctgctgtcctgggaggtgcctgacagctacaagtctgctgtgcccttcaagatcctgtacaacggccagagcgtggaggtggatggccacagcatgaggaagctgattgctgacctgcagcccaacacagagtacagctttgtgctgatgaacagaggcagcagcgctgggggcctgcagcacctggtgtccatcagaacagccccagacctgctgccccacaagcccctgcctgccagcgcctacattgaagatggccgctttgacctgtccatgccccacgtgcaggaccccagcctggtgcgctggttctacatcgtggtggtgcccatcgacagagtgggcggctccatgctgaccccccgctggagcaccccagaggagctggagctggatgagctgctggaggccatcgagcagggcggggaggagcagaggagaagaagacggcaggccgagcggctgaagccctacgtggccgcccagctggatgtgctgcctgagaccttcaccctgggggacaagaagaactaccggggcttctacaaccggcccctgagcccagacctgagctaccagtgctttgtgctggccagcctgaaggagcccatggaccagaagagatatgccagcagcccctacagtgatgagatcgtggtgcaggtgaccccagcccagcagcaggaggagcctgagatgctgtgggtgactggacctgtgctggccgtcatcctgatcatcctgattgtgattgccatcctgctcttcaagaggaagaggacccacagccccagcagcaaggatgagcagagcatcggcctgaaggacagcctgctggcccacagcagtgaccctgtggagatgaggcggctgaactaccagaccccaggcatgagggaccacccccccatccccatcacagacctggccgacaacatcgagcggctgaaggccaatgatggcctgaagttcagccaggagtatgagagcattgatcctggccagcagttcacctgggagaacagcaacctggaggtgaacaagcccaagaacagatatgccaacgtgattgcctatgaccacagcagggtcatcctgaccagcattgatggagtgcccggcagtgactacatcaatgccaactacattgatggctacaggaagcagaatgcctacatcgccacccagggccccctgcctgagaccatgggagacttctggaggatggtgtgggagcagaggacagccaccgtggtgatgatgacccggctggaggagaagagccgggtgaagtgtgaccagtactggccagcccggggcacagagacctgtggcctcatccaggtgaccctgctggacacagtggagctggccacctacacagtgaggacctttgccctgcacaagagcggcagcagcgagaagcgggagctgcggcagttccagttcatggcctggccagaccatggagtgcctgagtaccccacccccatcctggccttcctgcggcgggtgaaggcctgcaaccccctggatgctggccccatggtggtgcactgcagcgctggggtgggccgcacaggctgcttcatcgtgattgatgccatgctggagaggatgaagcatgagaagacagtggacatctacggccacgtgacctgcatgaggagccagaggaactacatggtgcagacagaggaccagtatgtgttcatccacgaggccctgctggaggccgccacctgtggccacacagaggtgcctgccaggaacctgtatgcccacatccagaagctgggccaggtgcccccaggagagagcgtgacagccatggagctggagttcaagctgctggccagcagcaaggcccacaccagccgcttcatcagcgccaacctgccctgcaacaagttcaagaaccggctggtgaacatcatgccctatgagctgaccagggtgtgcctgcagcccatccggggcgtggagggcagtgactacatcaatgccagcttcctggatggctaccggcagcagaaggcctacatcgccacccagggccccctggccgagagcacagaggacttctggaggatgctgtgggagcacaacagcaccatcatcgtgatgctgaccaagctgcgggagatgggccgggagaagtgccaccagtactggccagctgagaggtctgcccgctaccagtactttgtggtggaccccatggccgagtacaacatgccccagtacatcctgcgggagttcaaggtgacagatgccagagatggccagagcaggaccatccggcagttccagttcacagactggccagagcagggcgtgcccaagacaggagagggcttcatcgacttcatcggccaggtgcacaagaccaaggagcagtttggccaggacggccccatcaccgtgcactgcagcgctggggtgggccgcactggagtcttcatcaccctgagcatcgtgctggagaggatgagatatgaaggagtggtggacatgttccagacagtgaagaccctgcggacccagaggcctgccatggtgcagacagaggaccagtaccagctgtgctaccgggccgccctggagtacctgggcagctttgaccactacgccacctag

SEQ ID NO: 166332 - DNA, 5697 bp, synthetic construct
  misc_feature 1..5697: note = Description of Artificial Sequence: Synthetic coding sequence
  source 1..5697: mol_type = other DNA
atggcccctgagcccgcccctggccgcaccatggtgcccctggtgcctgccctggtgatgctgggcctggtggccggggcccacggggacagcaagcctgtgttcatcaaggtgcctgaggaccagacaggcctgagcggcggcgtggccagctttgtgtgccaggccactggagagcccaagccccgcatcacctggatgaagaagggcaagaaggtgagcagccagagatttgaggtgattgaatttgatgatggagctggctctgtgctgcgcatccagcccctgcgggtgcagagagatgaggccatctatgagtgcacagccaccaacagcctgggggagatcaacaccagcgccaagctgtctgtgctggaggaggagcagctgcccccaggcttccccagcattgacatgggcccccagctgaaggtggtggagaaggccaggacagccaccatgctgtgtgccgccggcggcaacccagaccctgagatctcctggttcaaggacttcctgcctgtggaccctgccaccagcaatggccgcatcaagcagctgcggagcggggccctgcagatcgagagcagcgaggagagtgaccagggcaagtatgaatgtgtggccaccaacagcgctggcacccgctacagcgccccagccaacctgtatgtgcgggtgcggcgggtggccccccgcttcagcatcccccccagcagccaggaggtgatgcctgggggctctgtgaacctgacctgtgtggccgtgggcgcccccatgccctacgtgaagtggatgatgggcgctgaggagctgaccaaggaggatgagatgcctgtgggcagaaatgtgctggagctgagcaatgtggtgcgcagcgccaactacacctgtgtggccatcagcagcctgggcatgattgaggccacagcccaggtgacagtgaaggccctgcccaagccacccatcgacctggtggtgacagagaccacagccacctctgtgaccctgacctgggacagcggcaacagcgagcctgtgacctactacggcatccagtacagagctgctggaacagagggccccttccaggaggtggatggagtggccaccacccgctacagcatcggcggcctgagccccttctctgaatatgccttccgggtgctggccgtgaacagcatcggccggggccccccatctgaggccgtgcgggccaggactggagagcaggcccccagcagccccccccggcgggtgcaggccaggatgctgagcgccagcaccatgctggtgcagtgggagcccccagaggagcccaacggcctggtgcggggctacagagtgtactacaccccagacagccggcggcccccaaatgcctggcacaagcacaacacagatgctggcctgctgaccaccgtgggcagcctgctgcccggcatcacctacagcctgcgggtgctggccttcaccgctgtgggagatggcccccccagccccaccatccaggtgaagacccagcagggcgtgcctgcccagcctgctgacttccaggccgaggtggagagtgacacccgcatccagctgtcctggctgctgcccccccaggagcgcatcatcatgtatgagctggtgtactgggccgcagaagatgaggaccagcagcacaaggtgacctttgaccccaccagcagctacaccctggaggacctgaagccagacaccctgtaccgcttccagctggccgcccggagtgacatgggcgtgggcgtcttcacccccaccatcgaggccaggacagcccagagcaccccatctgccccaccccagaaggtgatgtgtgtgtccatgggcagcaccaccgtgcgggtgtcctgggtgcccccacctgctgacagcagaaatggagtcatcacccagtacagcgtggcctatgaggccgtggatggagaggaccggggcagacatgtggtggatggcatcagccgggagcacagctcctgggacctggtgggcctggagaagtggacagagtacagagtgtgggtgcgggcccacacagatgtgggccctggccctgagagcagccctgtgctggtgaggacagatgaagatgtgcccagcggcccccccaggaaggtggaggtggagcccctgaacagcacagctgtgcacgtgtactggaagctgcctgtgcccagcaagcagcacggccagatccggggctaccaggtgacctacgtgcggctggagaatggagagccccggggcctgcccatcatccaggatgtgatgctggccgaggcccaggagaccaccatcagcggcctgaccccagagaccacctacagcgtgacagtggccgcctacaccaccaagggagatggagcccggagcaagcccaagatcgtgaccaccaccggggctgtgcccggccggcccaccatgatgatcagcaccacagccatgaacacagccctgctgcagtggcacccccccaaggagctgcccggggagctgctgggctaccgcctgcagtactgcagagcagatgaggcccggcccaacaccatcgactttgggaaggatgaccagcacttcaccgtgacaggcctgcacaagggcaccacctacatcttccggctggccgccaagaacagagctggcctgggggaggagtttgagaaggagatccgcaccccagaggacctgcccagcggcttcccccagaacctgcacgtgacaggcctgaccaccagcaccacagagctggcctgggacccccctgtgctggccgagagaaatggccgcatcatctcctacacagtggtgttccgggacatcaacagccagcaggagctgcagaacatcaccacagacacccgcttcaccctgaccggcctgaagccagacaccacctatgacatcaaggtgcgggcctggaccagcaaaggaagtggccccctgagccccagcatccagagcaggaccatgcctgtggagcaggtgtttgccaagaacttccgggtggccgccgccatgaagacctctgtgctgctgtcctgggaggtgcctgacagctacaagtctgctgtgcccttcaagatcctgtacaacggccagagcgtggaggtggatggccacagcatgaggaagctgattgctgacctgcagcccaacacagagtacagctttgtgctgatgaacagaggcagcagcgctgggggcctgcagcacctggtgtccatcagaacagccccagacctgctgccccacaagcccctgcctgccagcgcctacattgaagatggccgctttgacctgtccatgcctcatgtgcaggaccccagcctggtgcgctggttctacatcgtggtggtgcccatcgacagagtgggcggctccatgctgaccccccgctggagcaccccagaggagctggagctggatgagctgctggaggccatcgagcagggcggggaggagcagaggagaagaagacggcaggccgagcggctgaagccctacgtggccgcccagctggatgtgctgcctgagaccttcaccctgggggacaagaagaactaccggggcttctacaaccggcccctgagcccagacctgagctaccagtgctttgtgctggccagcctgaaggagcccatggaccagaagagatatgccagcagcccctacagtgatgaaattgtggtgcaggtgaccccagcccagcagcaggaggagcctgagatgctgtgggtgacaggccctgtgctggccgtcatcctgatcatcctgattgtcatcgccatcctgctcttcaagaggaagaggacccacagccccagcagcaaggatgagcagagcatcggcctgaaggacagcctgctggcccacagcagtgaccctgtggagatgaggcggctgaactaccagaccccaggcatgagggaccacccccccatccccatcacagacctggccgacaacatcgagcggctgaaggccaatgatggcctgaagttcagccaggagtatgagagcattgaccccggccagcagttcacctgggagaacagcaacctggaggtgaacaagcccaagaacagatatgccaacgtcatcgcctatgaccacagcagggtcatcctgaccagcattgatggagtgcccggcagtgactacatcaatgccaactacattgatggctacaggaagcagaatgcctacatcgccacccagggccccctgcctgagaccatgggagacttctggaggatggtgtgggagcagaggacagccaccgtggtgatgatgacccggctggaggagaagagccgggtgaagtgtgaccagtactggccagcccggggcacagagacctgtggcctcatccaggtgaccctgctggacacagtggagctggccacctacacagtgaggacctttgccctgcacaagagcggcagcagcgagaagcgggagctgcggcagttccagttcatggcctggccagaccacggcgtgcctgagtaccccacccccatcctggccttcctgcggcgggtgaaggcctgcaaccccctggatgctggccccatggtggtgcactgcagcgctggggtgggccgcacaggctgcttcatcgtgattgatgccatgctggagaggatgaagcatgagaagacagtggacatctacggccacgtgacctgcatgaggagccagaggaactacatggtgcagacagaggaccagtatgtgttcatccacgaggccctgctggaggccgccacctgtggccacacagaggtgcctgccaggaacctgtatgcccacatccagaagctgggccaggtgcccccaggagagagcgtgacagccatggagctggagttcaagctgctggccagcagcaaggcccacaccagccgcttcatcagcgccaacctgccctgcaacaagttcaagaaccggctggtgaacatcatgccctatgagctgaccagggtgtgcctgcagcccatccggggcgtggagggcagtgactacatcaatgccagcttcctggatggctaccggcagcagaaggcctacatcgccacccagggccccctggccgagagcacagaggacttctggaggatgctgtgggagcacaacagcaccatcatcgtgatgctgaccaagctgcgggagatgggccgggagaagtgccaccagtactggccagctgagaggtctgcccgctaccagtactttgtggtggaccccatggccgagtacaacatgccccagtacatcctgcgggagttcaaggtgacagatgccagagatggccagagcaggaccatccggcagttccagttcacagactggccagagcagggcgtgcccaagacaggagagggcttcatcgacttcatcggccaggtgcacaagaccaaggagcagtttggccaggacggccccatcaccgtgcactgcagcgctggggtgggccgcactggagtcttcatcaccctgagcatcgtgctggagaggatgagatatgagggcgtggtggacatgttccagacagtgaagaccctgcggacccagaggcctgccatggtgcagacagaggaccagtaccagctgtgctacagagctgccctggagtacctgggcagctttgaccactacgccacctag

SEQ ID NO: 166333 - DNA, 5724 bp, synthetic construct; identical to SEQ ID NO: 166331
  misc_feature 1..5724: note = Description of Artificial Sequence: Synthetic coding sequence
  source 1..5724: mol_type = other DNA

SEQ ID NO: 166334 - DNA, 3801 bp, synthetic construct
  misc_feature 1..3801: note = Description of Artificial Sequence: Synthetic coding sequence
  source 1..3801: mol_type = other DNA
atgtatgagctggtgtactgggccgcagaagatgaggaccagcagcacaaggtgacctttgaccccaccagcagctacaccctggaggacctgaagccagacaccctgtaccgcttccagctggccgcccggagtgacatgggcgtgggcgtcttcacccccaccatcgaggccaggacagcccagagcatgcccagcggcccccccaggaaggtggaggtggagcccctgaacagcacagctgtgcacgtgtactggaagctgcctgtgcccagcaagcagcacggccagatccggggctaccaggtgacctacgtgcggctggagaatggagagccccggggcctgcccatcatccaggatgtgatgctggccgaggcccaggagaccaccatcagcggcctgaccccagagaccacctacagcgtgacagtggccgcctacaccaccaagggagatggagcccggagcaagcccaagatcgtgaccaccactggagctgtgcccggccggcccaccatgatgatcagcaccacagccatgaacacagccctgctgcagtggcacccccccaaggagctgcctggagagctgctgggctaccgcctgcagtactgcagagcagatgaggcccggcccaacaccatcgactttgggaaggatgaccagcacttcaccgtgacaggcctgcacaagggcaccacctacatcttccggctggccgccaagaacagagctggcctgggggaggagtttgagaaggagatccgcaccccagaggacctgcccagcggcttcccccagaacctgcacgtgacaggcctgaccaccagcaccacagagctggcctgggacccccctgtgctggccgagagaaatggccgcatcatctcctacacagtggtgttccgggacatcaacagccagcaggagctgcagaacatcaccacagacacccgcttcaccctgaccggcctgaagccagacaccacctatgacatcaaggtgcgggcctggaccagcaagggcagcggccccctgagccccagcatccagagcaggaccatgcctgtggagcaggtgtttgccaagaacttccgggtggccgccgccatgaagacctctgtgctgctgtcctgggaggtgcctgacagctacaagtctgctgtgcccttcaagatcctgtacaacggccagagcgtggaggtggatggccacagcatgaggaagctgattgctgacctgcagcccaacacagagtacagctttgtgctgatgaacagaggcagcagcgctgggggcctgcagcacctggtgtccatcagaacagccccagacctgctgccccacaagcccctgcctgccagcgcctacattgaagatggccgctttgacctgtccatgccccacgtgcaggaccccagcctggtgcgctggttctacatcgtggtggtgcccatcgacagagtgggcggctccatgctgaccccccgctggagcaccccagaggagctggagctggatgagctgctggaggccatcgagcagggcggggaggagcagaggagaagaagacggcaggccgagcggctgaagccctacgtggccgcccagctggatgtgctgcctgagaccttcaccctgggggacaagaagaactaccggggcttctacaaccggcccctgagcccagacctgagctaccagtgctttgtgctggccagcctgaaggagcccatggaccagaagagatatgccagcagcccctacagtgatgagatcgtggtgcaggtgaccccagcccagcagcaggaggagcctgagatgctgtgggtgactggacctgtgctggccgtcatcctgatcatcctgattgtgattgccatcctgctcttcaagaggaagaggacccacagccccagcagcaaggatgagcagagcatcggcctgaaggacagcctgctggcccacagcagtgaccctgtggagatgaggcggctgaactaccagaccccaggcagctctgtgcccagctgccccaacaccagctccatgagggaccacccccccatccccatcacagacctggccgacaacatcgagcggctgaaggccaatgatggcctgaagttcagccaggagtatgagagcattgaccccggccagcagttcacctgggagaacagcaacctggaggtgaacaagcccaagaacagatatgccaacgtcatcgcctatgaccacagcagggtcatcctgaccagcattgatggagtgcccggcagtgactacatcaatgccaactacattgatggctacaggaagcagaatgcctacatcgccacccagggccccctgcctgagaccatgggagacttctggaggatggtgtgggagcagaggacagccaccgtggtgatgatgacccggctggaggagaagagccgggtgaagtgtgaccagtactggccagcccggggcacagagacctgtggcctcatccaggtgaccctgctggacacagtggagctggccacctacacagtgaggacctttgccctgcacaagagcggcagcagcgagaagcgggagctgcggcagttccagttcatggcctggccagaccacggcgtgcctgagtaccccacccccatcctggccttcctgcggcgggtgaaggcctgcaaccccctggatgctggccccatggtggtgcactgcagcgctggggtgggccgcacaggctgcttcatcgtgattgatgccatgctggagaggatgaagcatgagaagacagtggacatctacggccacgtgacctgcatgaggagccagaggaactacatggtgcagacagaggaccagtatgtgttcatccacgaggccctgctggaggccgccacctgtggccacacagaggtgcctgccaggaacctgtatgcccacatccagaagctgggccaggtgcccccaggagagagcgtgacagccatggagctggagttcaagctgctggccagcagcaaggcccacaccagccgcttcatcagcgccaacctgccctgcaacaagttcaagaaccggctggtgaacatcatgccctatgagctgaccagggtgtgcctgcagcccatccggggcgtggagggcagtgactacatcaatgccagcttcctggatggctaccggcagcagaaggcctacatcgccacccagggccccctggccgagagcacagaggacttctggaggatgctgtgggagcacaacagcaccatcatcgtgatgctgaccaagctgcgggagatgggccgggagaagtgccaccagtactggccagctgagaggtctgcccgctaccagtactttgtggtggaccccatggccgagtacaacatgccccagtacatcctgcgggagttcaaggtgacagatgccagagatggccagagcaggaccatccggcagttccagttcacagactggccagagcagggcgtgcccaagacaggagagggcttcatcgacttcatcggccaggtgcacaagaccaaggagcagtttggccaggacggccccatcaccgtgcactgcagcgctggggtgggccgcactggagtcttcatcaccctgagcatcgtgctggagaggatgagatatgagggcgtggtggacatgttccagacagtgaagaccctgcggacccagaggcctgccatggtgcagacagaggaccagtaccagctgtgctacagagctgccctggagtacctgggcagctttgaccactacgccacctag

SEQ ID NO: 166335 - DNA, 5697 bp, synthetic construct; identical to SEQ ID NO: 166332
  misc_feature 1..5697: note = Description of Artificial Sequence: Synthetic coding sequence
  source 1..5697: mol_type = other DNA

SEQ ID NO: 166336 - DNA, 3609 bp, synthetic construct
  misc_feature 1..3609: note = Description of Artificial Sequence: Synthetic coding sequence
  source 1..3609: mol_type = other DNA
atgatgtgtgaggtgatgcccaccatcagcgaggccgagggccccccaggcggcggcggcggccacggcagcggcagccccagccagccagatgctgacagccactttgagcagctgatggtgtccatgctggaggagcgggaccggctgctggacaccctgcgggagacccaggagaccctggccctgacccagggcaagctgcacgaggtgggccacgagcgggacagcctgcagaggcagctgaacacagccctgccccaggagtttgctgccctgaccaaggagctgaatgtgtgccgggagcagctgctggagcgggaggaggagattgctgagctgaaggccgagaggaacaacacccggctgctgctggagcacctggagtgcctggtgtccagacatgagaggagcctgaggatgacagtggtgaagaggcaggcccagagccctgctggggtgagcagcgaggtggaggtgctgaaggccctgaagagcctgtttgagcaccacaaggccctggatgagaaggtgcgggagcggctgcgggtggccctggagcgctgcagcctgctggaggaggagctgggcgccacccacaaggagctgatgatcctgaaggagcagaacaaccagaagaagaccctgacagatggagtgctggacatcaaccacgagcaggagaacacccccagcaccagcggcaagaggagcagtgatggcagcctgagccatgaggaggacctggccaaggtgattgagctgcaggagatcatcagcaagcagagccgggagcagagccagatgaaggagcggctggccagcctgagcagccacgtgacagagctggaggaggacctggacacagccaggaaggacctgatcaagtctgaggagatgaacaccaagctgcagagagatgtgcgggaggccatggcccagaaggaggacatggaggagcgcatcaccaccctggagaagcgctacctggccgcccagcgggaggccacctctgtgcatgacctgaatgacaagctggagaatgagatcgccaacaaggacagcatgcaccggcagacagaggacaagaaccggcagctgcaggagcggctggagctggccgagcagaagctgcagcagaccctgaggaaggccgagaccctgcctgaggtggaggccgagctggcccagagggtggccgccctgagcaaggccgaggagagacatggcaacatcgaggagcggctgcggcagatggaggcccagctggaggagaagaaccaggagctgcagagggcccggcagcgggagaagatgaatgaggagcacaacaagaggctgagtgacacagtggacaagctgctgtctgagagcaatgaaaggctgcagctgcacctgaaggagaggatggccgccctggaggacaagaacagcctgctgcgggaggtggagagcgccaagaagcagctggaggagacccagcacgacaaggaccagctggtgctgaacatcgaggccctgcgggcagagctggaccacatgaggctgcggggggccagcctgcaccacggccggccccacctgggctctgtgcctgacttccgcttccccatggctgatggccacacagacagctacagcaccagcgctgtgctgcggcggccccagaagggccgcctggccgccctgagagatgagcccagcaaggtgcagaccctgaatgagcaggactgggagcgggcccagcaggcctctgtgctggccaacgtggcccaggcctttgaaagtgatgctgatgtgtctgatggagaagatgaccgggacaccctgctgagctctgtggacctgctgagccccagcggccaggctgatgcccacaccctggccatgatgctgcaggagcagctggatgccatcaacaaggagatccgcctcatccaggaggagaaggaaaatacagagcagagagctgaggagattgagagccgggtgggcagcggcagcctggacaacctgggccgcttccgctccatgagcagcatccccccctacccagccagcagcctggccagcagcagccccccaggcagcggccgcagcaccccccggcgcatcccccacagccctgcccgggaggtggaccggctgggcgtgatgaccctgctgccccccagccgggaggaggtgagagatgacaagaccaccatcaagtgtgagaccagcccccccagcagcccccgggccctgcggctggaccggctgcacaagggggccctgcacacagtgtcccatgaggacatccgggacatccggaacagcacaggcagccaggacggccctgtgagcaaccccagcagcagcaacagcagccaggacagcctgcacaaggcccccaagaagaagggcatcaagagcagcatcggccgcctgtttgggaagaaggagaagggccggcccggccagacaggcaaggaggccctgggccaggccggcgtgtctgaaacagacaacagcagccaggatgccctgggcctgagcaagctgggcggccaggccgagaagaacaggaagctgcagaagaagcatgagctgctggaggaggcccggcggcagggcctgccctttgcccagtgggatggccccaccgtggtggtgtggctggagctgtgggtgggcatgcctgcctggtacgtggccgcctgccgggccaacgtgaagagcggggccatcatgtctgccctgagtgacacagagatccagcgggagatcggcatcagcaaccccctgcaccggctgaagctgcggctggccatccaggagatcatgagcctgaccagccccagcgccccacccaccagcaggaccaccctggcctatggagacatgaaccacgagtggattggaaatgagtggctgcccagcctgggcctgccccagtaccgcagctacttcatggagtgcctggtggatgccaggatgctggaccacctgaccaagaaggacctgcggggccagctgaagatggtggacagcttccacaggaacagcttccagtgtggcatcatgtgcctgcggcggctgaactatgacaggaaggagctggagaggaagcgggaggagagccagagcgagatcaaggatgtgctggtgtggagcaatgacagagtcatccgctggatcctgagcatcggcctgaaggagtatgccaacaacctgattgaaagtggagtgcacggggccctgctggccctggatgagacctttgacttcagcgccctggccctgctgctgcagatccccacccagaacacccaggcccgggctgtgctggagcgggagttcaacaacctgctggtgatgggcacagacagaagatttgatgaagatgatgacaagagcttcagaagagcccccagctggaggaagaagttccggcccaaggacatccggggcctggccgccggcagcgctgagaccctgcctgccaacttccgggtgaccagctccatgagcagccccagcatgcagcccaagaagatgcagatggatggaaatgtgtctggcacccagaggctggacagcgccaccgtgaggacctacagctgctag

SEQ ID NO: 166337 - DNA, 3558 bp, synthetic construct
  misc_feature 1..3558: note = Description of Artificial Sequence: Synthetic coding sequence
  source 1..3558: mol_type = other DNA
atgatgtgtgaggtgatgcccaccatcagcgaggccgagggccccccaggcggcggcggcggccacggcagcggcagccccagccagccagatgctgacagccactttgagcagctgatggtgtccatgctggaggagcgggaccggctgctggacaccctgcgggagacccaggagaccctggccctgacccagggcaagctgcacgaggtgggccacgagcgggacagcctgcagaggcagctgaacacagccctgccccaggagtttgctgccctgaccaaggagctgaatgtgtgccgggagcagctgctggagcgggaggaggagattgctgagctgaaggccgagaggaacaacacccggctgctgctggagcacctggagtgcctggtgtccagacatgagaggagcctgaggatgacagtggtgaagaggcaggcccagagccctgctggggtgagcagcgaggtggaggtgctgaaggccctgaagagcctgtttgagcaccacaaggccctggatgagaaggtgcgggagcggctgcgggtggccctggagcgctgcagcctgctggaggaggagctgggcgccacccacaaggagctgatgatcctgaaggagcagaacaaccagaagaagaccctgacagatggagtgctggacatcaaccacgagcaggagaacacccccagcaccagcggcaagaggagcagtgatggcagcctgagccatgaggaggacctggccaaggtgattgagctgcaggagatcatcagcaagcagagccgggagcagagccagatgaaggagcggctggccagcctgagcagccacgtgacagagctggaggaggacctggacacagccaggaaggacctgatcaagtctgaggagatgaacaccaagctgcagagagatgtgcgggaggccatggcccagaaggaggacatggaggagcgcatcaccaccctggagaagcgctacctggccgcccagcgggaggccacctctgtgcatgacctgaatgacaagctggagaatgagatcgccaacaaggacagcatgcaccggcagacagaggacaagaaccggcagctgcaggagcggctggagctggccgagcagaagctgcagcagaccctgaggaaggccgagaccctgcctgaggtggaggccgagctggcccagagggtggccgccctgagcaaggccgaggagagacatggcaacatcgaggagcggctgcggcagatggaggcccagctggaggagaagaaccaggagctgcagagggcccggcagcgggagaagatgaatgaggagcacaacaagaggctgagtgacacagtggacaagctgctgtctgagagcaatgaaaggctgcagctgcacctgaaggagaggatggccgccctggaggacaagaacagcctgctgcgggaggtggagagcgccaagaagcagctggaggagacccagcacgacaaggaccagctggtgctgaacatcgaggccctgcgggcagagctggaccacatgaggctgcggggggccagcctgcaccacggccggccccacctgggctctgtgcctgacttccgcttccccatggctgatggccacacagacagctacagcaccagcgctgtgctgcggcggccccagaagggccgcctggccgccctgagagatgagcccagcaaggtgcagaccctgaatgagcaggactgggagcgggcccagcaggcctctgtgctggccaacgtggcccaggcctttgaaagtgatgctgatgtgtctgatggagaagatgaccgggacaccctgctgagctctgtggacctgctgagccccagcggccaggctgatgcccacaccctggccatgatgctgcaggagcagctggatgccatcaacaaggagatccgcctcatccaggaggagaaggaaaatacagagcagagagctgaggagattgagagccgggtgggcagcggcagcctggacaacctgggccgcttccgctccatgagcagcatccccccctacccagccagcagcctggccagcagcagccccccaggcagcggccgcagcaccccccggcgcatcccccacagccctgcccgggaggtggaccggctgggcgtgatgaccctgctgccccccagccgggaggaggtgagagatgacaagaccaccatcaagtgtgagaccagcccccccagcagcccccgggccctgcggctggaccggctgcacaagggggccctgcacacagtgtcccatgaggacatccgggacatccggaacagcacaggcagccaggacggccctgtgagcaaccccagcagcagcaacagcagccaggacagcctgcacaaggcccccaagaagaagggcatcaagagcagcatcggccgcctgtttgggaagaaggagaagggccggcccggccagacaggcaaggaggccctgggccaggccggcgtgtctgaaacagacaacagcagccaggatgccctgggcctgagcaagctgggcggccaggccgagaagaacaggaagctgcagaagaagcatgagctgctggaggaggcccggcggcagggcctgccctttgcccagtgggatggccccaccgtggtggtgtggctggagctgtgggtgggcatgcctgcctggtacgtggccgcctgccgggccaacgtgaagagcggggccatcatgtctgccctgagtgacacagagatccagcgggagatcggcatcagcaaccccctgcaccggctgaagctgcggctggccatccaggagatcatgagcctgaccagccccagcgccccacccaccagcaggaccaccctggcctatggagacatgaaccacgagtggattggaaatgagtggctgcccagcctgggcctgccccagtaccgcagctacttcatggagtgcctggtggatgccaggatgctggaccacctgaccaagaaggacctgcggggccagctgaagatggtggacagcttccacaggaacagcttccagtgtggcatcatgtgcctgcggcggctgaactatgacaggaaggagctggagaggaagcgggaggagagccagagcgagatcaaggatgtgctggtgtggagcaatgacagagtcatccgctggatcctgagcatcggcctgaaggagtatgccaacaacctgattgaaagtggagtgcacggggccctgctggccctggatgagacctttgacttcagcgccctggccctgctgctgcagatccccacccagaacacccaggcccgggctgtgctggagcgggagttcaacaacctgctggtgatgggcacagacagaagatttgatgaagatgatgacaagagcttcagaagagcccccagctggaggaagaagttccggcccaaggacatccggggcctggccgccggcagcgctgagaccctgcctgccaacttccgggtgaccagctccatgagcagccccagcatgcagcccaagaagatgcagatggatggcatgtag

SEQ ID NO: 166338 - DNA, 477 bp, synthetic construct
  misc_feature 1..477: note = Description of Artificial Sequence: Synthetic coding sequence
  source 1..477: mol_type = other DNA
atgatgtgtgaggtgatgcccaccatcagcgaggccgagggccccccaggcggcggcggcggccacggcagcggcagccccagccagccagatgctgacagccactttgagcagctgatggtgtccatgctggaggagcgggaccggctgctggacaccctgcgggagacccaggagaccctggccctgacccagggcaagctgcacgaggtgggccacgagcgggacagcctgcagaggcagctgaacacagccctgccccaggagtttgctgccctgaccaaggagctgaatgtgtgccgggagcagctgctggagcgggaggaggagattgctgagctgaaggccgagaggaacaacacccggctgctgctggagcacctggagtgcctggtgtccagacatgagaggagcctgaggatgacagtggtgaagaggcaggcccagagccctgctggggtgagcagcgaggtgtag

SEQ ID NO: 166339 - DNA, 300 bp, synthetic construct
  misc_feature 1..300: note = Description of Artificial Sequence: Synthetic coding sequence
  source 1..300: mol_type = other DNA
atgatgtgtgaggtgatgcccaccatcagcgaggccgagggccccccaggcggcggcggcggccacggcagcggcagccccagccagccagatgctgacagccactttgagcagctgatggtgtccatgctggaggagcgggaccggctgctggacaccctgcgggagacccaggagaccctggccctgacccagggcaagctgcacgaggtgggccacgagcgggacagcctgcagaggcagctgaacacagccctgccccaggagtttgctgccctgaccaaggagctgaatgtgtag

SEQ ID NO: 166340 - DNA, 2100 bp, synthetic construct
  misc_feature 1..2100: note = Description of Artificial Sequence: Synthetic coding sequence
  source 1..2100: mol_type = other DNA
atgaggctgcggggggccagcctgcaccacggccggccccacctgggctctgtgcctgacttccgcttccccatggctgatggccacacagacagctacagcaccagcgctgtgctgcggcggccccagaagggccgcctggccgccctgagagatgagcccagcaaggtgcagaccctgaatgagcaggactgggagcgggcccagcaggcctctgtgctggccaacgtggcccaggcctttgaaagtgatgctgatgtgtctgatggagaagatgaccgggacaccctgctgagctctgtggacctgctgagccccagcggccaggctgatgcccacaccctggccatgatgctgcaggagcagctggatgccatcaacaaggagatccgcctcatccaggaggagaaggagaacacagagcagagagctgaggagattgagagccgggtgggcagcggcagcctggacaacctgggccgcttccgctccatgagcagcatccccccctacccagccagcagcctggccagcagcagccccccaggcagcggccgcagcaccccccggcgcatcccccacagccctgcccgggaggtggaccggctgggcgtgatgaccctgcccagcgacctgaggaagcacaggaggaagctgccccccagccgggaggaggtgagagatgacaagaccaccatcaagtgtgagaccagcccccccagcagcccccgggccctgcggctggaccggctgcacaagggggccctgcacacagtgtcccatgaggacatccgggacatccggaacagcacaggcagccaggacggccctgtgagcaaccccagcagcagcaacagcagccaggacagcctgcacaaggcccccaagaagaagggcatcaagagcagcatcggccgcctgtttgggaagaaggagaagggccggcccggccagacaggcaaggaggccctgggccaggccggcgtgtctgaaacagacaacagcagccaggatgccctgggcctgagcaagctgggcggccaggccgagaagaacaggaagctgcagaagaagcatgagctgctggaggaggcccggcggcagggcctgccctttgcccagtgggatggccccaccgtggtggtgtggctggagctgtgggtgggcatgcctgcctggtacgtggccgcctgccgggccaacgtgaagagcggggccatcatgtctgccctgagtgacacagagatccagcgggagatcggcatcagcaaccccctgcaccggctgaagctgcggctggccatccaggagatcatgagcctgaccagccccagcgccccacccaccagcaggaccaccctggcctacggggacatgaaccacgagtggattggaaatgagtggctgcccagcctgggcctgccccagtaccgcagctacttcatggagtgcctggtggatgccaggatgctggaccacctgaccaagaaggacctgcggggccagctgaagatggtggacagcttccacagaaattccttccagtgtggcatcatgtgcctgcggcggctgaactatgacaggaaggagctggagaggaagcgggaggagagccagagcgagatcaaggatgtgctggtgtggagcaatgacagagtcatccgctggatcctgagcatcggcctgaaggagtatgccaacaacctgattgagagcggcgtgcatggagccctgctggccctggatgagacctttgacttcagcgccctggccctgctgctgcagatccccacccagaacacccaggcccgggctgtgctggagcgggagttcaacaacctgctggtgatgggcacagacagaagatttgatgaagatgatgacaagagcttccggcgggcccccagctggaggaagaagttccggcccaaggacatccggggcctggccgccggcagcgctgagaccctgcctgccaacttccgggtgaccagctccatgagcagccccagcatgcagcccaagaagatgcagatggatggaaatgtgtctggcacccagaggctggacagcgccaccgtgaggacctacagctgctag

SEQ ID NO: 166341 - DNA, 3585 bp, synthetic construct
  misc_feature 1..3585: note = Description of Artificial Sequence: Synthetic coding sequence
  source 1..3585: mol_type = other DNA
atgatgtgtgaggtgatgcccaccatcagtgaagatggccggcggggcagcgccctgggcccagatgaggccggcggggagctggagcggctgatggtgaccatgctgacagagcgggagcggctgctggagaccctgcgggaggcccaggacggcctggccacagcccagctgcggctgcgggagctgggccacgagaaggacagcctgcagaggcagctgagcatcgccctgccccaggagtttgctgccctgaccaaggagctgaacctgtgccgggagcagctgctggagcgggaggaggagattgctgagctgaaggccgagaggaacaacacccggctgctgctggagcacctggagtgcctggtgtccagacatgagaggagcctgaggatgacagtggtgaagaggcaggcccagagccctggaggagtgagcagcgaggtggaggtgctgaaggccctgaagagcctgtttgagcaccacaaggccctggatgagaaggtgcgggagcggctgaggatggccctggagcgggtggccgtgctggaggaggagctggagctgagcaaccaggagaccctgaacctgcgggagcagctgagcagaagaagaagtggcctggaggagcccgggaaggatggagatggccagaccctggccaacggcctgggccctggaggagacagcaacagaagaacagctgagctggaggaggccctggagcggcagagagctgaggtgtgccagctgcgggagcggctggccgtgctgtgccggcagatgagccagctggaggaggagctgggcacagcccaccgggagctgggcaaggccgaggaggccaacagcaagctgcagagggacctgaaggaggccctggcccagcgggaggacatggaggagcgcatcaccaccctggagaagcgctacctgagcgcccagcgggaggccaccagcctgcatgatgccaatgacaagctggagaatgagctggccagcaaggagagcctgtaccggcagagcgaggagaagagccggcagctggccgagtggctggatgatgccaagcagaagctgcagcagaccctgcagaaggccgagaccctgcctgagattgaggcccagctggcccagagggtggccgccctgaacaaggccgaggagcggcacggcaactttgaggagcggctgcggcagctggaggcccagctggaggagaagaaccaggagctgcagagggcccggcagcgggagaagatgaatgatgaccacaacaagaggctgtctgaaacagtggacaagctgctgtctgagagcaatgaaaggctgcagctgcacctgaaggagaggatgggcgccctggaggagaagaacagcctgtctgaggagatcgccaacatgaagaagctgcaggatgagctgctgctgaacaaggagcagctgctggccgagatggagaggatgcagatggagattgaccagctgcggggccggccccccagcagctacagccgcagcctgcccggcagcgccctggagctgcgctacagccaggcccccaccctgcccagcggggcccacctggacccctacgtggccggcagcggccgggccggcaagaggggccgctggagcggcgtgaaggaggagcccagcaaggactgggagaggtctgccccagctggcagcatccccccacccttccctggagagctggatggcagtgatgaggaggaggccgagggcatgtttggagctgagctgctgagccccagcggccaggctgatgtgcagaccctggccatcatgctgcaggagcagctggaggccatcaacaaggagatcaagctgatccaggaggagaaggagaccacagagcagagagctgaggagctggagagccgggtgagcagcagcggcctggacagcctgggccgctaccgcagcagctgcagcctgccccccagcctgaccaccagcaccctggccagccccagcccccccagcagcggccacagcaccccccggctggccccacccagccctgcccgggagggcacagacaaggccaaccacgtgcccaaggaggaggccggggcccccagaggagagggccctgccatccctggggacaccccaccacccacccccaggtctgcccggctggagaggatgacccaggccctggccctgcaggccggcagcctggaggatggcggccccccccggggcagcgagggcaccccagacagcctgcacaaggcccccaagaagaagagcatcaagagcagcatcggccgcctgtttgggaagaaggagaagggccgcatgggccccccaggccgggacagcagcagcctggccggcacccccagtgatgagaccctggccacagaccccctgggcctggccaagctgactggacctggggacaaggacagaagaaacaagaggaagcatgagctgctggaggaggcctgccggcagggcctgccctttgctgcctgggatggccccaccgtggtgtcctggctggagctgtgggtgggcatgcctgcctggtacgtggccgcctgccgggccaacgtgaagagcggggccatcatggccaacctgagtgacacagagatccagcgggagatcggcatcagcaaccccctgcaccggctgaagctgcggctggccatccaggagatggtgtccctgaccagccccagcgccccagccagcagcaggaccagcactggaaatgtgtggatgacccatgaggagatggagagcctgacagccaccaccaagccagagaccaaggagatctcctgggagcagatcctggcctatggagacatgaaccacgagtgggtgggcaatgactggctgcccagcctgggcctgccccagtaccgcagctacttcatggagagcctggtggatgccaggatgctggaccacctgaacaagaaggagctgcggggccagctgaagatggtggacagcttccaccgggtgtccctgcactacggcatcatgtgcctgaagaggctgaactatgacaggaaggacctggagaggagaagagaggagagccagacccagatcagagatgtgatggtgtggagcaatgaaagagtgatgggctgggtgtctggcctgggcctgaaggagtttgccaccaacctgacagaaagtggagtgcacggggccctgctggccctggatgagacctttgactacagcgacctggccctgctgctgcagatccccacccagaatgcccaggcccggcagctgctggagaaggagttcagcaacctgatcagcctgggcacagaccggcggctggatgaggacagcgccaagagcttcagccgcagccccagctggaggaagatgttccgggagaaggacctgcggggcgtgaccccagacagcgctgagatgctgccccccaacttccgctctgctgctgctggggccctgggcagccctggcctgcccctgaggaagctgcagcctgagggccagaccagcggcagcagcagagcagatggagtgtctgtgaggacctacagctgctag

SEQ ID NO: 166342 - DNA, 1731 bp, synthetic construct
  misc_feature 1..1731: note = Description of Artificial Sequence: Synthetic coding sequence
  source 1..1731: mol_type = other DNA
atgagcggccaggagtttgctgccctgaccaaggagctgaacctgtgccgggagcagctgctggagcgggaggaggagattgctgagctgaaggccgagaggaacaacacccggctgctgctggagcacctggagtgcctggtgtccagacatgagaggagcctgaggatgacagtggtgaagaggcaggcccagagccctggaggagtgagcagcgaggtggaggtgctgaaggccctgaagagcctgtttgagcaccacaaggccctggatgagaaggtgcgggagcggctgaggatggccctggagcgggtggccgtgctggaggaggagctggagctgagcaaccaggagaccctgaacctgcgggagcagctgagcagaagaagaagtggcctggaggagcccgggaaggatggagatggccagaccctggccaacggcctgggccctggaggagacagcaacagaagaacagctgagctggaggaggccctggagcggcagagagctgaggtgtgccagctgcgggagcggctggccgtgctgtgccggcagatgagccagctggaggaggagctgggcacagcccaccgggagctgggcaaggccgaggaggccaacagcaagctgcagagggacctgaaggaggccctggcccagcgggaggacatggaggagcgcatcaccaccctggagaagcgctacctgagcgcccagcgggaggccaccagcctgcatgatgccaatgacaagctggagaatgagctggccagcaaggagagcctgtaccggcagagcgaggagaagagccggcagctggccgagtggctggatgatgccaagcagaagctgcagcagaccctgcagaaggccgagaccctgcctgagattgaggcccagctggcccagagggtggccgccctgaacaaggccgaggagcggcacggcaactttgaggagcggctgcggcagctggaggcccagctggaggagaagaaccaggagctgcagagggcccggcagcgggagaagatgaatgatgaccacaacaagaggctgtctgaaacagtggacaagctgctgtctgagagcaatgaaaggctgcagctgcacctgaaggagaggatgggcgccctggaggagaagaacagcctgtctgaggagatcgccaacatgaagaagctgcaggatgagctgctgctgaacaaggagcagctgctggccgagatggagaggatgcagatggagattgaccagctgcggggccggccccccagcagctacagccgcagcctgcccggcagcgccctggagctgcgctacagccaggcccccaccctgcccagcggggcccacctggacccctacgtggccggcagcggccgggccggcaagaggggccgctggagcggcgtgaaggaggagcccagcaaggactgggagaggtctgccccagctggcagcatccccccacccttccctggagagctggatggcagtgatgaggaggaggccgagggcatgtttggagctgagctgctgagccccagcggccaggctgatgtgcagaccctggccatcatgctgcaggagcagctggaggccatcaacaaggagatcaagatcatgagcctgcggaggaagctggagctgcacgagggccggggccggcccagccaggagaccccccaccaccccctgcctgccctgcctgtgctgcgggagtag

SEQ ID NO: 166343 - DNA, 4338 bp, synthetic construct
  misc_feature 1..4338: note = Description of Artificial Sequence: Synthetic coding sequence
  source 1..4338: mol_type = other DNA
atgaggcggctgctggagccctgctggtggatcctcttcctgaagatcaccagctctgtgctgcactacgtggtgtgcttccctgccctgacagagggctacgtgggcgccctgcacgagaacagacatggcagcgctgtgcagatcagaagaaggaaggccagcggggacccctactgggcctacagcggggcctacggccctgagcactgggtgaccagctctgtgtcctgtggcggccgccaccagagccccatcgacatcctggaccagtatgcccgggtgggggaggagtaccaggagctgcagctggatggctttgacaatgaaagcagcaacaagacctggatgaagaacacaggcaagacagtggccatcctgctgaaggatgactactttgtgtctggagctggcctgcccggccgcttcaaggccgagaaggtggagttccactggggccacagcaatggcagcgctggcagcgagcacagcatcaatggccgccgcttccctgtggagatgcagatcttcttctacaacccagatgactttgacagcttccagacagccatcagtgaaaatcgcatcattggagccatggccatcttcttccaggtgagcccccgggacaacagcgccctggaccccatcatccacggcctgaagggcgtggtgcaccacgagaaggagaccttcctggacccctttgtgctgcgggacctgctgcctgccagcctgggcagctactaccgctacacaggcagcctgaccaccccaccctgcagcgagatcgtggagtggatcgtgttcagaagacctgtgcccatctcctaccaccagctggaggccttctacagcatcttcaccacagagcagcaggaccacgtgaagtctgtggagtacctgaggaacaacttccggccccagcagaggctgcatgacagagtggtgtccaagtctgctgtgcgggacagctggaaccacgacatgacagacttcctggagaaccccctgggcacagaggccagcaaggtgtgcagcagcccccccatccacatgaaggtgcagcccctgaaccagacagccctgcaggtgtcctggagccagcctgagaccatctaccacccccccatcatgaactacatgatctcctacagctggaccaagaatgaagatgagaaggagaagaccttcaccaaggacagcgacaaggacctgaaggccaccatcagccacgtgtccccagacagcctgtacctgttccgggtgcaggccgtgtgcagaaatgacatgagaagtgacttcagccagaccatgctgttccaggccaacaccacccgcatcttccagggcacccgcatcgtgaagacaggagtgcccacagccagccctgccagcagcgctgacatggcccccatcagcagcggcagcagcacctggaccagcagcggcatccccttctcctttgtgtccatggccaccggcatgggccccagcagcagcggcagccaggccaccgtggcctctgtggtgaccagcaccctgctggccggcctgggctttggaggcggcggcatcagcagcttccccagcacagtgtggcccacccggctgcccacagctgccagcgccagcaagcaggccgcccggcctgtgctggccaccacagaggccctggccagccctggcccagatggagacagcagccccaccaaggatggagagggcacagaggagggggagaaggatgagaagtctgagagtgaagatggagagcgggagcatgaagaagatggagagaaggacagcgagaagaaggagaagtctggagtgacccacgccgctgaggagaggaaccagacagagcccagccccacccccagcagccccaacagaacagctgagggcggccaccagaccatccctggccacgagcaggaccacacagctgtgcccacagaccagacaggaggaagaagagatgctggccctggcctggaccctgacatggtgaccagcacccaggtgcccccaacagccacagaggagcagtatgccggcagtgaccccaagaggcctgagatgcccagcaagaagcccatgagcagaggagaccgcttcagcgaggacagccgcttcatcaccgtgaacccagctgagaagaacaccagcggcatgatcagcaggcctgcccctggccgcatggagtggatcatccccctcatcgtggtgtctgccctgacctttgtgtgcctgatcctgctgattgctgtgctggtgtactggaggggctgcaacaagatcaagagcaagggcttcccccggcgcttccgggaggtgcccagcagtggagagcggggggagaagggcagcaggaagtgcttccagacagcccacttctacgtggaggacagcagcagcccccgggtggtgcccaatgaaagcatccccatcatccccatcccagatgacatggaggccatccctgtgaagcagtttgtgaagcacatcggggagctgtacagcaacaaccagcacggcttcagcgaggactttgaggaggtgcagcgctgcacagctgacatgaacatcacagctgagcacagcaaccaccctgagaacaagcacaagaaccgctacatcaacatcctggcctatgaccacagccgggtgaagctgcggcccctgcccgggaaggacagcaagcacagcgactacatcaatgccaactacgtggatggctacaacaaggccaaggcctacatcgccacccagggccccctgaagagcacctttgaggacttctggaggatgatctgggagcagaacacaggcatcatcgtgatgatcaccaacctggtggagaagggccgcaggaaatgtgaccagtactggcccacagagaacagcgaggagtatggcaacatcatcgtgaccctgaagagcaccaagatccacgcctgctacacagtgcggcgcttcagcatccggaacaccaaggtgaagaagggccagaagggcaaccccaagggccggcagaatgaaagagtggtgatccagtaccactacacccagtggccagacatgggcgtgcctgaatatgccctgcctgtgctgacctttgtgagaagaagcagcgctgccaggatgcctgagactggacctgtgctggtgcactgcagcgctggggtgggccgcacaggcacctacatcgtgattgacagcatgctgcagcagatcaaggacaagagcacagtgaatgtgctgggcttcctgaagcacatccgcacccagaggaactacctggtgcagacagaggagcagtacatcttcatccatgatgccctgctggaggccatcctgggcaaggagacagaggtgagcagcaaccagctgcacagctatgtgaacagcatcctgatccctggggtgggcggcaagacccggctggagaagcagttcaagctggtgacccagtgcaatgccaagtatgtggagtgcttcagcgcccagaaggagtgcaacaaggagaagaacagaaacagctctgtggtgcccagcgagcgggcccgggtgggcctggcccccctgcccggcatgaagggcacagactacatcaatgccagctacatcatgggctactaccgcagcaatgagttcatcatcacccagcaccccctgccccacaccaccaaggacttctggaggatgatctgggaccacaatgcccagatcatcgtgatgctgcctgacaaccagagcctggctgaagatgaatttgtgtactggcccagccgggaggagagcatgaactgtgaggccttcaccgtgaccctcatcagcaaggaccggctgtgcctgagcaatgaggagcagatcatcatccatgacttcatcctggaggccacccaggatgattatgtgctggaggtgcgccacttccagtgccccaagtggcccaacccagatgcccccatcagcagcacctttgagctgatcaacgtcatcaaggaggaggccctgaccagagatggccccaccatcgtgcatgatgaatatggagctgtgtctgctggcatgctgtgtgccctgaccaccctgagccagcagctggagaatgaaaatgctgtggatgtgttccaggtggccaagatgatcaacctgatgaggcctggggtcttcacagacatcgagcagtaccagttcatctacaaggccatgctgagcctggtgtccaccaaggaaaatggaaatggccccatgacagtggacaagaatggagctgtgctgattgctgatgaaagtgaccctgctgagagcatggagagcctggtgtag

SEQ ID NO: 166344 - DNA, 309 bp, synthetic construct
  misc_feature 1..309: note = Description of Artificial Sequence: Synthetic coding sequence
  source 1..309: mol_type = other DNA
atgaggcggctgctggagccctgctggtggatcctcttcctgaagatcaccagctctgtgctgcactacgtggtgtgcttccctgccctgacagagggctacgtgggcgccctgcacgagaacagacatggcagcgctgtgcagatcagaagaaggaaggccagcggggacccctactgggcctacagcggcaagagcagctgcagcaatggagaccacacaggccagctgaccagccacagcacccacctgaaggcccactttgagagcctgctgtgcctgagctctgtgtgcagcaacctgtcctag

SEQ ID NO: 166345 - DNA, 2814 bp, synthetic construct
  misc_feature 1..2814: note = Description of Artificial Sequence: Synthetic coding sequence
  source 1..2814: mol_type = other DNA
atggccggggccggcggcggcctgggcgtgtggggcaacctggtgctgctgggcctgtgctcctggacaggagcccgggccccagcccccaaccctggcaggaacctgactgtggagacccagaccaccagcagcatcagcctgtcctgggaggtgcctgatggcctggacagccagaacagcaactactgggtgcagtgcacaggagatggcggcaccacagagaccaggaacaccacagccaccaacgtgacagtggatggcctgggccctggcagcctgtacacctgcagcgtgtgggtggagaaggatggagtgaacagctctgtgggcaccgtgaccacagccacagcccccaaccctgtgaggaacctgactgtggaggcccagaccaacagcagcatcgccctgacctgggaggtgcctgatggccctgacccccagaacagcacctacggcgtggagtacacaggagatggcggccgggccggcaccaggagcacagcccacaccaacatcaccgtggaccggctggagcccggctgcctgtatgtgttttctgtgtgggtgggcaagaatggcatcaacagcagccgggagaccagaaatgccaccacagcccccaaccctgtgaggaacctgcacatggagacccagaccaacagcagcatcgccctgtgctgggaggtgcctgatggcccctacccccaggactacacctactgggtggagtacacaggagatggcggcggcacagagaccaggaacaccaccaacacctctgtgacagctgagcggctggagcccggcaccctgtacaccttctctgtgtgggccgagaagaatggagcccggggcagccggcagaatgtgtccatcagcacagtgcccaatgctgtgaccagcctgagcaagcaggactggaccaacagcaccatcgccctgcgctggacagccccccagggccctggccagagcagctacagctactgggtgtcctgggtgcgggagggcatgacagaccccaggacccagagcaccagcggcacagacatcaccctgaaggagctggaggccggcagcctgtaccacctgactgtgtgggccgagagaaatgaggtgcggggctacaacagcaccctgacagctgccacagccccaaatgaggtgacagacctgcagaatgagacccagaccaagaacagcgtgatgctgtggtggaaggcccctggggacccccacagccagctgtatgtgtactgggtgcagtgggccagcaagggccacccccggcggggccaggacccccaggccaactgggtgaaccagaccagcaggaccaatgagacctggtacaaggtggaggccctggagcccggcaccctgtacaacttcaccgtgtgggccgagagaaatgatgtggccagcagcacccagagcctgtgtgccagcacctacccagacacagtgaccatcaccagctgtgtgtccaccagcgctggctacggcgtgaacctgatctggagctgcccccagggcggctatgaggcctttgagctggaggtgggcggccagaggggcagccaggacaggagcagctgtggggaggccgtgtctgtgctgggcctgggccctgcccggagctacccagccaccatcaccaccatctgggatggcatgaaggtggtgagccacagcgtggtgtgccacacagaatctgctggggtgattgctggggcctttgtgggcatcctgctcttcctgatcctggtgggcctgctgatcttcttcctgaagagaagaaacaagaagaagcagcagaagccagagctgcgggacctggtgttcagcagccctggggacatcccagcagaagattttgctgaccacgtgaggaagaatgaaagagacagcaactgtggctttgctgacaagtaccagcagctgagcctggtgggccacagccagagccagatggtggccagcgcctctgaaaataatgccaagaaccgctacagaaatgtgctgccctatgactggagccgggtgcccctgaagcccatccacgaggagcccggcagtgactacatcaatgccagcttcatgcctggcctgtggagcccccaggagttcatcgccacccagggccccctgccccagacagtgggggacttctggaggctggtgtgggagcagcagagccacaccctggtgatgctgaccaactgcatggaggccggccgggtgaagtgtgagcactactggcccctggacagccagccctgcacccacggccacctgcgggtgaccctggtgggggaggaggtgatggagaactggacagtgcgggagctgctgctgctgcaggtggaggagcagaagaccctgtctgtgcggcagttccactaccaggcctggccagaccatggagtgcccagcagcccagacaccctgctggccttctggaggatgctgcggcagtggctggaccagaccatggagggcggcccccccatcgtgcactgcagcgctggggtgggccgcacaggcaccctgattgccctggatgtgctgctgcggcagctgcagagcgagggcctgctgggccccttctcctttgtgaggaagatgagggagagccggcccctgatggtgcagacagaggcccagtatgtgttcctgcaccagtgcatcctgcgcttcctgcagcagagcgcccaggccccagctgagaaggaggtgccctatgaagatgtggagaacctgatctatgaaaatgtggccgccatccaggcccacaagctggaggtgtag

SEQ ID NO: 166346 - DNA, 3348 bp, synthetic construct
  misc_feature 1..3348: note = Description of Artificial Sequence: Synthetic coding sequence
  source 1..3348: mol_type = other DNA
atggccggggccggcggcggcctgggcgtgtggggcaacctggtgctgctgggcctgtgctcctggacaggagcccgggccccagcccccaaccctggcaggaacctgactgtggagacccagaccaccagcagcatcagcctgtcctgggaggtgcctgatggcctggacagccagaacagcaactactgggtgcagtgcacaggagatggcggcaccacagagaccaggaacaccacagccaccaacgtgacagtggatggcctgggccctggcagcctgtacacctgcagcgtgtgggtggagaaggatggagtgaacagctctgtgggcaccgtgaccacagccacagcccccaaccctgtgaggaacctgcgggtggaggcccagaccaacagcagcatcgccctgacctgggaggtgcctgatggccctgacccccagaacagcacctacggcgtggagtacacaggagatggcggccgggccggcaccaggagcacagcccacaccaacatcaccgtggatggcctggagcccggctgcctgtatgccttctccatgtgggtgggcaagaatggcatcaacagcagccgggagaccagaaatgccaccacagcccacaaccctgtgaggaacctgcgggtggaggcccagaccaccagcagcatcagcctgtcctgggaggtgcctgatggaacagacccccagaacagcacctactgtgtgcagtgcacaggagatggcggccgcacagagaccaggaacaccacagacaccagggtgacagtggatggcctgggccctggcagcctgtacacctgcagcgtgtgggtggagaaggatggagtgaacagctctgtggagatcgtgaccagcgccacagcccccaaccctgtgaggaacctgactgtggaggcccagaccaacagcagcatcgccctgacctgggaggtgcctgatggccctgacccccagaacagcacctacggcgtggagtacacaggagatggcggccgggccggcaccaggagcacagcccacaccaacatcaccgtggaccggctggagcccggctgcctgtatgtgttttctgtgtgggtgggcaagaatggcatcaacagcagccgggagaccagaaatgccaccacagcccccaaccctgtgaggaacctgcacatggagacccagaccaacagcagcatcgccctgtgctgggaggtgcctgatggcccctacccccaggactacacctactgggtggagtacacaggagatggcggcggcacagagaccaggaacaccaccaacacctctgtgacagctgagcggctggagcccggcaccctgtacaccttctctgtgtgggccgagaagaatggagcccggggcagccggcagaatgtgtccatcagcacagtgcccaatgctgtgaccagcctgagcaagcaggactggaccaacagcaccatcgccctgcgctggacagccccccagggccctggccagagcagctacagctactgggtgtcctgggtgcgggagggcatgacagaccccaggacccagagcaccagcggcacagacatcaccctgaaggagctggaggccggcagcctgtaccacctgactgtgtgggccgagagaaatgaggtgcggggctacaacagcaccctgacagctgccacagccccaaatgaggtgacagacctgcagaatgagacccagaccaagaacagcgtgatgctgtggtggaaggcccctggggacccccacagccagctgtatgtgtactgggtgcagtgggccagcaagggccacccccggcggggccaggacccccaggccaactgggtgaaccagaccagcaggaccaatgagacctggtacaaggtggaggccctggagcccggcaccctgtacaacttcaccgtgtgggccgagagaaatgatgtggccagcagcacccagagcctgtgtgccagcacctacccagacacagtgaccatcaccagctgtgtgtccaccagcgctggctacggcgtgaacctgatctggagctgcccccagggcggctatgaggcctttgagctggaggtgggcggccagaggggcagccaggacaggagcagctgtggggaggccgtgtctgtgctgggcctgggccctgcccggagctacccagccaccatcaccaccatctgggatggcatgaaggtggtgagccacagcgtggtgtgccacacagaatctgctggggtgattgctggggcctttgtgggcatcctgctcttcctgatcctggtgggcctgctgatcttcttcctgaagagaagaaacaagaagaagcagcagaagccagagctgcgggacctggtgttcagcagccctggggacatcccagcagaagattttgctgaccacgtgaggaagaatgaaagagacagcaactgtggctttgctgacaagtaccagcagctgagcctggtgggccacagccagagccagatggtggccagcgcctctgaaaataatgccaagaaccgctacagaaatgtgctgccctatgactggagccgggtgcccctgaagcccatccacgaggagcccggcagtgactacatcaatgccagcttcatgcctggcctgtggagcccccaggagttcatcgccacccagggccccctgccccagacagtgggggacttctggaggctggtgtgggagcagcagagccacaccctggtgatgctgaccaactgcatggaggccggccgggtgaagtgtgagcactactggcccctggacagccagccctgcacccacggccacctgcgggtgaccctggtgggggaggaggtgatggagaactggacagtgcgggagctgctgctgctgcaggtggaggagcagaagaccctgtctgtgcggcagttccactaccaggcctggccagaccatggagtgcccagcagcccagacaccctgctggccttctggaggatgctgcggcagtggctggaccagaccatggagggcggcccccccatcgtgcactgcagcgctggggtgggccgcacaggcaccctgattgccctggatgtgctgctgcggcagctgcagagcgagggcctgctgggccccttctcctttgtgaggaagatgagggagagccggcccctgatggtgcagacagaggcccagtatgtgttcctgcaccagtgcatcctgcgcttcctgcagcagagcgcccaggccccagctgagaaggaggtgccctatgaagatgtggagaacctgatctatgaaaatgtggccgccatccaggcccacaagctggaggtgtag

SEQ ID NO: 166347 - DNA, 1278 bp, synthetic construct
  misc_feature 1..1278: note = Description of Artificial Sequence: Synthetic coding sequence
  source 1..1278: mol_type = other DNA
atgaagccagctgcccgggaggcccggctgcccccaagaagccctggcctgcgctgggccctgcccctgctgctgctgctgctgcggctgggccagatcctgtgtgccggcggcacccccagccccatcccagaccccagcgtggccaccgtggccactggagaaaatggcatcacccagatcagcagcacagctgagagcttccacaagcagaatggcaccggcaccccccaggtggagaccaacaccagtgaagatggagagagcagcggggccaatgacagcctgcggaccccagagcagggcagcaatggaacagatggagccagccagaagacccccagcagcacaggccccagccctgtgtttgacatcaaggctgtgtccatcagccccaccaacgtcatcctgacctggaagagcaatgacacagctgccagcgagtacaagtatgtggtgaagcacaagatggagaatgagaagaccatcaccgtggtgcaccagccctggtgcaacatcaccggcctgcggcctgccaccagctatgtgttcagcatcaccccaggcattggaaatgagacctggggagaccccagggtcatcaaggtgatcacagagcccatccctgtgtctgacctgcgggtggccctgactggagtgaggaaggccgccctgtcctggagcaatggaaatggaacagccagctgccgggtgctgctggagagcatcggcagccatgaggagctgacccaggacagccggctgcaggtgaacatcagcggcctgaagccaggagtgcagtacaacatcaacccctacctgctgcagagcaacaagaccaagggggaccccctgggcacagaaggaggcctggatgccagcaacacagagaggagcagagctggcagccccacagcccctgtgcatgatgagagcctggtgggccctgtggaccccagcagcggccagcagagccgggacacagaggtgctgctggtgggcctggagcccggcacccgctacaatgccaccgtgtacagccaggccgccaatggaacagagggccagccccaggccatcgagttccgcaccaatgccatccaggtgtttgatgtgacagctgtgaacatcagcgccaccagcctgaccctcatctggaaggtgtctgacaatgaaagcagcagcaactacacctacaagatccacgtggccggggagacagacagcagcaacctgaatgtgtctgagcccagggctgtgattcctggcctgaggtag

SEQ ID NO: 166348 - DNA, 4014 bp, synthetic construct
  misc_feature 1..4014: note = Description of Artificial Sequence: Synthetic coding sequence
  source 1..4014: mol_type = other DNA
atgaagccagctgcccgggaggcccggctgcccccaagaagccctggcctgcgctgggccctgcccctgctgctgctgctgctgcggctgggccagatcctgtgtgccggcggcacccccagccccatcccagaccccagcgtggccaccgtggccactggagaaaatggcatcacccagatcagcagcacagctgagagcttccacaagcagaatggcaccggcaccccccaggtggagaccaacaccagtgaagatggagagagcagcggggccaatgacagcctgcggaccccagagcagggcagcaatggaacagatggagccagccagaagacccccagcagcacaggccccagccctgtgtttgacatcaaggctgtgtccatcagccccaccaacgtcatcctgacctggaagagcaatgacacagctgccagcgagtacaagtatgtggtgaagcacaagatggagaatgagaagaccatcaccgtggtgcaccagccctggtgcaacatcaccggcctgcggcctgccaccagctatgtgttcagcatcaccccaggcattggaaatgagacctggggagaccccagggtcatcaaggtgatcacagagcccatccctgtgtctgacctgcgggtggccctgactggagtgaggaaggccgccctgtcctggagcaatggaaatggaacagccagctgccgggtgctgctggagagcatcggcagccatgaggagctgacccaggacagccggctgcaggtgaacatcagcggcctgaagccaggagtgcagtacaacatcaacccctacctgctgcagagcaacaagaccaagggggaccccctgggcacagaaggaggcctggatgccagcaacacagagaggagcagagctggcagccccacagcccctgtgcatgatgagagcctggtgggccctgtggaccccagcagcggccagcagagccgggacacagaggtgctgctggtgggcctggagcccggcacccgctacaatgccaccgtgtacagccaggccgccaatggaacagagggccagccccaggccatcgagttccgcaccaatgccatccaggtgtttgatgtgacagctgtgaacatcagcgccaccagcctgaccctcatctggaaggtgtctgacaatgaaagcagcagcaactacacctacaagatccacgtggccggggagacagacagcagcaacctgaatgtgtctgagcccagggctgtgattcctggcctgcggagcagcaccttctacaacatcaccgtgtgccctgtgctgggggacatcgagggcaccccaggcttcctgcaggtgcacaccccacctgtgcctgtgtctgacttccgggtgacagtggtgtccaccacagagatcggcctggcctggagcagccatgatgctgagagcttccagatgcacatcacccaggagggcgccggcaacagccgggtggagatcaccaccaaccagagcatcatcatcggcggcctcttccctggcaccaagtactgctttgaaattgtgcccaagggccccaatggaacagaaggagccagcaggacagtgtgcaacagaacagtgcccagcgctgtgtttgacatccacgtggtgtatgtgaccaccacagagatgtggctggactggaagagcccagatggagcctctgaatatgtgtaccacctggtgattgagagcaagcacggcagcaaccacaccagcacctatgacaaggccatcaccctgcagggcctcatccctggcaccctgtacaacatcaccatcagccctgaggtggaccacgtgtggggagaccccaacagcacagcccagtacacccggcccagcaatgtgagcaacattgatgtgtccaccaacaccacagctgccaccctgtcctggcagaactttgatgatgccagccccacctacagctactgcctgctgattgagaaggccggcaacagcagcaatgccacccaggtggtgacagacatcggcatcacagatgccaccgtgacagagctgatccctggcagcagctacacagtggagatctttgcccaggtgggagatggcatcaagagcctggagcccggcaggaagagcttctgcacagatcctgcctccatggccagctttgactgtgaggtggtgcccaaggagcccgccctggtgctgaagtggacctgccccccaggggccaatgccggctttgagctggaggtgagcagcggggcctggaacaatgccacccacctggagagctgcagcagtgaaaatggaacagagtacagaacagaggtgacctacctgaacttcagcaccagctacaacatcagcatcaccaccgtgtcctgtgggaagatggccgcccccaccaggaacacctgcaccaccggcatcacagaccccccacctccagatggcagccccaacatcacctctgtgagccacaacagcgtgaaggtgaagttcagcggctttgaggccagccacggccccatcaaggcctatgctgtgatcctgaccaccggggaggccggccaccccagcgcagatgtgctgaagtacacctatgaggacttcaagaagggggccagtgacacctacgtgacctacctgatcagaacagaggagaagggccgcagccagagcctgtctgaggtgctgaagtatgaaattgatgtgggcaatgaaagcaccaccctgggctactacaacgggaagctggagcccctgggcagctaccgggcctgtgtggccggcttcaccaacatcaccttccacccccagaacaagggcctgattgatggagctgagagctatgtgtccttcagccgctacagtgatgctgtgtccctgccccaggaccccggggtcatctgtggggctgtgtttggctgcatctttggagccctggtgattgtgacagtgggcggcttcatcttctggaggaagaagaggaaggatgccaagaacaatgaggtgtccttcagccagatcaagcccaagaagagcaagctgatccgggtggagaactttgaggcctacttcaagaagcagcaggccgacagcaactgtggctttgctgaggagtatgaggacctgaagctggtgggcatcagccagcccaagtatgctgctgagctggccgagaacagaggcaagaaccgctacaacaacgtgctgccctatgacatcagccgggtgaagctgtctgtgcagacccacagcacagatgactacatcaatgccaactacatgcctggctaccacagcaagaaggacttcatcgccacccagggccccctgcccaacaccctgaaggacttctggaggatggtgtgggagaagaatgtgtatgccatcatcatgctgaccaagtgtgtggagcagggccgcaccaagtgtgaggagtactggcccagcaagcaggcccaggactatggagacatcaccgtggccatgaccagcgagatcgtgctgcctgagtggaccatccgggacttcaccgtgaagaacatccagaccagcgagagccaccccctgcggcagttccacttcacctcctggccagaccacggcgtgcctgacaccacagacctgctgatcaacttccgctacctggtgcgggactacatgaagcagagccccccagagagccccatcctggtgcactgcagcgctggggtgggccgcacaggcaccttcatcgccatcgacaggctcatctaccagattgaaaatgaaaatacagtggatgtgtatggcatcgtgtatgacctgaggatgcaccggcccctgatggtgcagacagaggaccagtatgtgttcctgaaccagtgtgtgctggacatcgtgcgcagccagaaggacagcaaggtggacctgatctaccagaacaccacagccatgaccatctatgagaacctggcccctgtgaccaccttcggcaagaccaacggctacatcgcctag

SEQ ID NO: 166349 - DNA, 1620 bp, synthetic construct
  misc_feature 1..1620: note = Description of Artificial Sequence: Synthetic coding sequence
  source 1..1620: mol_type = other DNA
atgaagccagctgcccgggaggcccggctgcccccaagaagccctggcctgcgctgggccctgcccctgctgctgctgctgctgcggctgggccagatcctgtgtgccggcggcacccccagccccatcccagaccccagcgtggccaccgtggccactggagaaaatggcatcacccagatcagcagcacagctgagagcttccacaagcagaatggcaccggcaccccccaggtggagaccaacaccagtgaagatggagagagcagcggggccaatgacagcctgcggaccccagagcagggcagcaatggaacagatggagccagccagaagacccccagcagcacaggccccagccctgtgtttgacatcaaggctgtgtccatcagccccaccaacgtcatcctgacctggaagagcaatgacacagctgccagcgagtacaagtatgtggtgaagcacaagatggagaatgagaagaccatcaccgtggtgcaccagccctggtgcaacatcaccggcctgcggcctgccaccagctatgtgttcagcatcaccccaggcattggaaatgagacctggggagaccccagggtcatcaaggtgatcacagagcccatccctgtgtctgacctgcgggtggccctgactggagtgaggaaggccgccctgtcctggagcaatggaaatggaacagccagctgccgggtgctgctggagagcatcggcagccatgaggagctgacccaggacagccggctgcaggtgaacatcagcggcctgaagccaggagtgcagtacaacatcaacccctacctgctgcagagcaacaagaccaagggggaccccctgggcacagaaggaggcctggatgccagcaacacagagaggagcagagctggcagccccacagcccctgtgcatgatgagagcctggtgggccctgtggaccccagcagcggccagcagagccgggacacagaggtgctgctggtgggcctggagcccggcacccgctacaatgccaccgtgtacagccaggccgccaatggaacagagggccagccccaggccatcgagttccgcaccaatgccatccaggtgtttgatgtgacagctgtgaacatcagcgccaccagcctgaccctcatctggaaggtgtctgacaatgaaagcagcagcaactacacctacaagatccacgtggccggggagacagacagcagcaacctgaatgtgtctgagcccagggctgtgattcctggcctgcggagcagcaccttctacaacatcaccgtgtgccctgtgctgggggacatcgagggcaccccaggcttcctgcaggtgcacaccccacctgtgcctgtgtctgacttccgggtgacagtggtgtccaccacagagatcggcctggcctggagcagccatgatgctgagagcttccagatgcacatcacccaggagggcgccggcaacagccgggtggagatcaccaccaaccagagcatcatcatcggcggcctcttccctggcaccaagtactgctttgaaattgtgcccaagggccccaatggaacagaaggagccagcaggacagtgtgcaacagaactggatag

SEQ ID NO: 166350 - DNA, 4419 bp, synthetic construct
  misc_feature 1..4419: note = Description of Artificial Sequence: Synthetic coding sequence
  source 1..4419: mol_type = other DNA
atggacaccacagctgctgctgccctgcctgcctttgtggccctgctgctgctgagcccctggcccctgctgggcagcgcccagggccagttctctgctgggggctgcacctttgatgatggccctggggcctgtgactaccaccaggacctgtatgatgactttgagtgggtgcacgtgtctgcccaggagccccactacctgcccccagagatgccccagggcagctacatgattgtggacagcagtgaccatgaccctggagagaaggcccggctgcagctgcccaccatgaaggaaaatgacacccactgcatcgacttctcctacctgctgtacagccagaagggcctgaaccctggcaccctgaacatcctggtgcgggtgaacaagggccccctggccaaccccatctggaatgtgacaggcttcaccggccgggactggctgcgggcagagctggccgtgtccaccttctggcccaatgagtaccaggtgatctttgaggccgaggtgtctgggggccgcagcggctacatcgccattgatgacatccaggtgctgagctacccctgtgacaagagcccccacttcctgcggctgggagatgtggaggtgaatgccggccagaatgccaccttccagtgcatcgccaccggcagagatgctgtgcacaacaagctgtggctgcagaggagaaatggagaggacatccctgtggcccagaccaagaacatcaaccacagaagatttgctgccagcttccggctgcaggaggtgaccaagacagaccaggacctgtaccgctgtgtgacccagagcgagcggggcagcggcgtgagcaactttgcccagctgattgtgcgggagcccccccggcccatcgccccaccccagctgctgggcgtgggccccacctacctgctgatccagctgaatgccaacagcatcattggagatggccccatcatcctgaaggaggtggagtacaggatgaccagcggctcctggacagagacccatgctgtgaatgcccccacctacaagctgtggcacctggaccctgacacagaatatgagatccgggtgctgctgaccaggcctggagagggcggcaccggcctgcccggccccccactcatcaccaggaccaagtgtgccgagcccatgaggacccccaagaccctgaagattgctgagatccaggccaggagaattgctgtggactgggagagcctgggctacaacatcacccgctgccacaccttcaacgtgaccatctgctaccactacttccggggccacaatgaaagcaaggctgactgcctggacatggaccccaaggccccccagcacgtggtgaaccacctgcccccctacaccaacgtgtccctgaagatgatcctgaccaaccctgagggcaggaaggagagcgaggagaccatcatccagacagatgaagatgtgcccggccctgtgcctgtgaagagcctgcagggcaccagctttgagaacaagatcttcctgaactggaaggagcccctggaccccaacggcatcatcacccagtatgagatctcctacagcagcatccgcagctttgatcctgctgtgcctgtggccggccccccccagacagtgagcaacctgtggaacagcacccaccacgtgttcatgcacctgcaccctggcaccacctaccagttcttcatccgggccagcacagtgaagggctttggacctgccacagccatcaacgtgaccaccaacatcagcgcccccaccctgcctgactatgaaggagtggatgccagcctgaatgaaacagccaccaccatcaccgtgctgctgcggcctgcccaggccaagggggcccccatcagcgcctaccagatcgtggtggaggagctgcacccccacaggaccaagcgggaggccggggccatggagtgctaccaggtgcctgtgacctaccagaatgccatgtctggaggagccccctactactttgctgctgagctgcccccaggcaacctgcctgagcccgcccccttcaccgtgggggacaacagaacctaccagggcttctggaacccccccctggcccccaggaagggctacaacatctacttccaggccatgagctctgtggagaaggagaccaagacccagtgtgtgcgcatcgccaccaaggctgctgccacagaggagcctgaggtgatcccagaccctgccaagcagacagacagagtggtgaagattgctggcatctctgctggcatcctggtgttcatcctgctgctgctggtggtgatcctgattgtgaagaagaggaggagctactacagctacagctactacctgaagctggccaagaagaggaaggatgccatgggcaacacccggcaggagatgacccacatggtgaatgccatggacaggagctatgctgaccagagcaccctgcacgccgaggaccccctgagcatcaccttcatggaccagcacaacttcagcccccggctgcccaatgaccccctggtgcccacagctgtgctggtgcccatcacagatgagaaccacagcgccacagctgagagcagccggctgctggatgtgccccgctacctgtgtgagggcacagagagcccctaccagacaggccagctgcacccagccatccgggtggccgacctgctgcagcacatcaacctgatgaagaccagtgacagctatggcttcaaggaggagtatgagagcttctttgagggccagagcgcctcctgggatgtggccaagaaggaccagaacagagccaagaacagatatggcaacatcatcgcctatgaccacagcagggtcatcctgcagcctgtggaggatgaccccagcagtgactacatcaatgccaactacatcgacatctggctgtacagagatggctaccagaggcccagccactacatcgccacccagggccctgtgcatgagaccgtgtatgacttctggaggatgatctggcaggagcagagcgcctgcatcgtgatggtgaccaacctggtggaggtgggccgggtgaagtgctacaagtactggccagatgacacagaggtgtatggagacttcaaggtgacctgtgtggagatggagcccctggccgagtatgtggtgaggaccttcaccctggagcggcggggctacaatgagatccgggaggtgaagcagttccacttcaccggctggccagaccacggcgtgccctaccacgccaccggcctgctgtccttcatccggcgggtgaagctgagcaaccccccatctgctggccccatcgtggtgcactgcagcgctggagctggccgcacaggctgctacatcgtcatcgacatcatgctggacatggccgagcgggagggcgtggtggacatctacaactgtgtgaaggccctgcggagccgccgcatcaacatggtgcagacagaggagcagtacatcttcatccatgatgccatcctggaggcctgcctgtgtggggagacagccatccctgtgtgtgagttcaaggccgcctactttgacatgatcagaattgacagccagaccaacagcagccacctgaaggatgagttccagaccctgaacagcgtgaccccccggctgcaggccgaggactgcagcatcgcctgcctgcccaggaaccacgacaagaaccgcttcatggacatgctgcccccagaccgctgcctgcccttcctgatcaccattgatggagagagcagcaactacatcaatgctgccctgatggacagctaccggcagcctgctgccttcatcgtgacccagtaccccctgcccaacacagtgaaggacttctggaggctggtgtatgactatggctgcaccagcatcgtgatgctgaatgaggtggacctgagccagggctgcccccagtactggccagaggagggcatgctgcgctatggccccatccaggtggagtgcatgagctgcagcatggactgtgatgtgatcaaccgcatcttccgcatctgcaacctgacccggccccaggagggctacctgatggtgcagcagttccagtacctgggctgggccagccaccgggaggtgcccggcagcaagaggagcttcctgaagctgatcctgcaggtggagaagtggcaggaggagtgtgaggagggggagggccgcaccatcatccactgcctgaatggaggcggccgcagcggcatgttctgtgccatcggcatcgtggtggagatggtgaagaggcagaatgtggtggatgtgttccacgctgtgaagaccctgaggaacagcaagcccaacatggtggaggcccctgagcagtaccgcttctgctatgatgtggccctggagtacctggagagcagctag

SEQ ID NO: 166351 - DNA, 4377 bp, synthetic construct
  misc_feature 1..4377: note = Description of Artificial Sequence: Synthetic coding sequence
  source 1..4377: mol_type = other DNA
atggacaccacagctgctgctgccctgcctgcctttgtggccctgctgctgctgagcccctggcccctgctgggcagcgcccagggccagttctctgctgggggctgcacctttgatgatggccctggggcctgtgactaccaccaggacctgtatgatgactttgagtgggtgcacgtgtctgcccaggagccccactacctgcccccagagatgccccagggcagctacatgattgtggacagcagtgaccatgaccctggagagaaggcccggctgcagctgcccaccatgaaggaaaatgacacccactgcatcgacttctcctacctgctgtacagccagaagggcctgaaccctggcaccctgaacatcctggtgcgggtgaacaagggccccctggccaaccccatctggaatgtgacaggcttcaccggccgggactggctgcgggcagagctggccgtgtccaccttctggcccaatgagtaccaggtgatctttgaggccgaggtgtctgggggccgcagcggctacatcgccattgatgacatccaggtgctgagctacccctgtgacaagagcccccacttcctgcggctgggagatgtggaggtgaatgccggccagaatgccaccttccagtgcatcgccaccggcagagatgctgtgcacaacaagctgtggctgcagaggagaaatggagaggacatccctgtggcccagaccaagaacatcaaccacagaagatttgctgccagcttccggctgcaggaggtgaccaagacagaccaggacctgtaccgctgtgtgacccagagcgagcggggcagcggcgtgagcaactttgcccagctgattgtgcgggagcccccccggcccatcgccccaccccagctgctgggcgtgggccccacctacctgctgatccagctgaatgccaacagcatcattggagatggccccatcatcctgaaggaggtggagtacaggatgaccagcggctcctggacagagacccatgctgtgaatgcccccacctacaagctgtggcacctggaccctgacacagaatatgagatccgggtgctgctgaccaggcctggagagggcggcaccggcctgcccggccccccactcatcaccaggaccaagtgtgccgagcccatgaggacccccaagaccctgaagattgctgagatccaggccaggagaattgctgtggactgggagagcctgggctacaacatcacccgctgccacaccttcaacgtgaccatctgctaccactacttccggggccacaatgaaagcaaggctgactgcctggacatggaccccaaggccccccagcacgtggtgaaccacctgcccccctacaccaacgtgtccctgaagatgatcctgaccaaccctgagggcaggaaggagagcgaggagaccatcatccagacagatgaagatgtgcccggccctgtgcctgtgaagagcctgcagggcaccagctttgagaacaagatcttcctgaactggaaggagcccctggaccccaacggcatcatcacccagtatgagatctcctacagcagcatccgcagctttgatcctgctgtgcctgtggccggccccccccagacagtgagcaacctgtggaacagcacccaccacgtgttcatgcacctgcaccctggcaccacctaccagttcttcatccgggccagcacagtgaagggctttggacctgccacagccatcaacgtgaccaccaacatcagcgcccccaccctgcctgactatgaaggagtggatgccagcctgaatgaaacagccaccaccatcaccgtgctgctgcggcctgcccaggccaagggggcccccatcagcgcctaccagatcgtggtggaggagctgcacccccacaggaccaagcgggaggccggggccatggagtgctaccaggtgcctgtgacctaccagaatgccatgtctggaggagccccctactactttgctgctgagctgcccccaggcaacctgcctgagcccgcccccttcaccgtgggggacaacagaacctaccagggcttctggaacccccccctggcccccaggaagggctacaacatctacttccaggccatgagctctgtggagaaggagaccaagacccagtgtgtgcgcatcgccaccaaggctgctgccacagaggagcctgaggtgatcccagaccctgccaagcagacagacagagtggtgaagattgctggcatctctgctggcatcctggtgttcatcctgctgctgctggtggtgatcctgattgtgaagaagagcaagctggccaagaagaggaaggatgccatgggcaacacccggcaggagatgacccacatggtgaatgccatggacaggagctatgctgaccagagcaccctgcacgccgaggaccccctgagcatcaccttcatggaccagcacaacttcagcccccggctgcccaatgaccccctggtgcccacagctgtgctggatgagaaccacagcgccacagctgagagcagccggctgctggatgtgccccgctacctgtgtgagggcacagagagcccctaccagacaggccagctgcacccagccatccgggtggccgacctgctgcagcacatcaacctgatgaagaccagtgacagctatggcttcaaggaggagtatgagagcttctttgagggccagagcgcctcctgggatgtggccaagaaggaccagaacagagccaagaacagatatggcaacatcatcgcctatgaccacagcagggtcatcctgcagcctgtggaggatgaccccagcagtgactacatcaatgccaactacatcgacatctggctgtacagagatggctaccagaggcccagccactacatcgccacccagggccctgtgcatgagaccgtgtatgacttctggaggatgatctggcaggagcagagcgcctgcatcgtgatggtgaccaacctggtggaggtgggccgggtgaagtgctacaagtactggccagatgacacagaggtgtatggagacttcaaggtgacctgtgtggagatggagcccctggccgagtatgtggtgaggaccttcaccctggagcggcggggctacaatgagatccgggaggtgaagcagttccacttcaccggctggccagaccacggcgtgccctaccacgccaccggcctgctgtccttcatccggcgggtgaagctgagcaaccccccatctgctggccccatcgtggtgcactgcagcgctggagctggccgcacaggctgctacatcgtcatcgacatcatgctggacatggccgagcgggagggcgtggtggacatctacaactgtgtgaaggccctgcggagccgccgcatcaacatggtgcagacagaggagcagtacatcttcatccatgatgccatcctggaggcctgcctgtgtggggagacagccatccctgtgtgtgagttcaaggccgcctactttgacatgatcagaattgacagccagaccaacagcagccacctgaaggatgagttccagaccctgaacagcgtgaccccccggctgcaggccgaggactgcagcatcgcctgcctgcccaggaaccacgacaagaaccgcttcatggacatgctgcccccagaccgctgcctgcccttcctgatcaccattgatggagagagcagcaactacatcaatgctgccctgatggacagctaccggcagcctgctgccttcatcgtgacccagtaccccctgcccaacacagtgaaggacttctggaggctggtgtatgactatggctgcaccagcatcgtgatgctgaatgaggtggacctgagccagggctgcccccagtactggccagaggagggcatgctgcgctatggccccatccaggtggagtgcatgagctgcagcatggactgtgatgtgatcaaccgcatcttccgcatctgcaacctgacccggccccaggagggctacctgatggtgcagcagttccagtacctgggctgggccagccaccgggaggtgcccggcagcaagaggagcttcctgaagctgatcctgcaggtggagaagtggcaggaggagtgtgaggagggggagggccgcaccatcatccactgcctgaatggaggcggccgcagcggcatgttctgtgccatcggcatcgtggtggagatggtgaagaggcagaatgtggtggatgtgttccacgctgtgaagaccctgaggaacagcaagcccaacatggtggaggcccctgagcagtaccgcttctgctatgatgtggccctggagtacctggagagcagctag

SEQ ID NO: 166352 - DNA, 4341 bp, synthetic construct
  misc_feature 1..4341: note = Description of Artificial Sequence: Synthetic coding sequence
  source 1..4341: mol_type = other DNA
atggacaccacagctgctgctgccctgcctgcctttgtggccctgctgctgctgagcccctggcccctgctgggcagcgcccagggccagttctctgctgggggctgcacctttgatgatggccctggggcctgtgactaccaccaggacctgtatgatgactttgagtgggtgcacgtgtctgcccaggagccccactacctgcccccagagatgccccagggcagctacatgattgtggacagcagtgaccatgaccctggagagaaggcccggctgcagctgcccaccatgaaggaaaatgacacccactgcatcgacttctcctacctgctgtacagccagaagggcctgaaccctggcaccctgaacatcctggtgcgggtgaacaagggccccctggccaaccccatctggaatgtgacaggcttcaccggccgggactggctgcgggcagagctggccgtgtccaccttctggcccaatgagtaccaggtgatctttgaggccgaggtgtctgggggccgcagcggctacatcgccattgatgacatccaggtgctgagctacccctgtgacaagagcccccacttcctgcggctgggagatgtggaggtgaatgccggccagaatgccaccttccagtgcatcgccaccggcagagatgctgtgcacaacaagctgtggctgcagaggagaaatggagaggacatccctgtggcccagaccaagaacatcaaccacagaagatttgctgccagcttccggctgcaggaggtgaccaagacagaccaggacctgtaccgctgtgtgacccagagcgagcggggcagcggcgtgagcaactttgcccagctgattgtgcgggagcccccccggcccatcgccccaccccagctgctgggcgtgggccccacctacctgctgatccagctgaatgccaacagcatcattggagatggccccatcatcctgaaggaggtggagtacaggatgaccagcggctcctggacagagacccatgctgtgaatgcccccacctacaagctgtggcacctggaccctgacacagaatatgagatccgggtgctgctgaccaggcctggagagggcggcaccggcctgcccggccccccactcatcaccaggaccaagtgtgccgagcccatgaggacccccaagaccctgaagattgctgagatccaggccaggagaattgctgtggactgggagagcctgggctacaacatcacccgctgccacaccttcaacgtgaccatctgctaccactacttccggggccacaatgaaagcaaggctgactgcctggacatggaccccaaggccccccagcacgtggtgaaccacctgcccccctacaccaacgtgtccctgaagatgatcctgaccaaccctgagggcaggaaggagagcgaggagaccatcatccagacagatgaagatgtgcccggccctgtgcctgtgaagagcctgcagggcaccagctttgagaacaagatcttcctgaactggaaggagcccctggaccccaacggcatcatcacccagtatgagatctcctacagcagcatccgcagctttgatcctgctgtgcctgtggccggccccccccagacagtgagcaacctgtggaacagcacccaccacgtgttcatgcacctgcaccctggcaccacctaccagttcttcatccgggccagcacagtgaagggctttggacctgccacagccatcaacgtgaccaccaacatcagcgcccccaccctgcctgactatgaaggagtggatgccagcctgaatgaaacagccaccaccatcaccgtgctgctgcggcctgcccaggccaagggggcccccatcagcgcctaccagatcgtggtggaggagctgcacccccacaggaccaagcgggaggccggggccatggagtgctaccaggtgcctgtgacctaccagaatgccatgtctggaggagccccctactactttgctgctgagctgcccccaggcaacctgcctgagcccgcccccttcaccgtgggggacaacagaacctaccagggcttctggaacccccccctggcccccaggaagggctacaacatctacttccaggccatgagctctgtggagaaggagaccaagacccagtgtgtgcgcatcgccaccaaggctgctgccacagaggagcctgaggtgatcccagaccctgccaagcagacagacagagtggtgaagattgctggcatctctgctggcatcctggtgttcatcctgctgctgctggtggtgatcctgattgtgaagaagagcaagctggccaagaagaggaaggatgccatgggcaacacccggcaggagatgacccacatggtgaatgccatggacaggagctatgctgaccagagcaccctgcacgccgaggaccccctgagcatcaccttcatggaccagcacaacttcagccccaggtatgagaaccacagcgccacagctgagagcagccggctgctggatgtgccccgctacctgtgtgagggcacagagagcccctaccagacaggccagctgcacccagccatccgggtggccgacctgctgcagcacatcaacctgatgaagaccagtgacagctatggcttcaaggaggagtatgagagcttctttgagggccagagcgcctcctgggatgtggccaagaaggaccagaacagagccaagaacagatatggcaacatcatcgcctatgaccacagcagggtcatcctgcagcctgtggaggatgaccccagcagtgactacatcaatgccaactacatcgacatctggctgtacagagatggctaccagaggcccagccactacatcgccacccagggccctgtgcatgagaccgtgtatgacttctggaggatgatctggcaggagcagagcgcctgcatcgtgatggtgaccaacctggtggaggtgggccgggtgaagtgctacaagtactggccagatgacacagaggtgtatggagacttcaaggtgacctgtgtggagatggagcccctggccgagtatgtggtgaggaccttcaccctggagcggcggggctacaatgagatccgggaggtgaagcagttccacttcaccggctggccagaccacggcgtgccctaccacgccaccggcctgctgtccttcatccggcgggtgaagctgagcaaccccccatctgctggccccatcgtggtgcactgcagcgctggagctggccgcacaggctgctacatcgtcatcgacatcatgctggacatggccgagcgggagggcgtggtggacatctacaactgtgtgaaggccctgcggagccgccgcatcaacatggtgcagacagaggagcagtacatcttcatccatgatgccatcctggaggcctgcctgtgtggggagacagccatccctgtgtgtgagttcaaggccgcctactttgacatgatcagaattgacagccagaccaacagcagccacctgaaggatgagttccagaccctgaacagcgtgaccccccggctgcaggccgaggactgcagcatcgcctgcctgcccaggaaccacgacaagaaccgcttcatggacatgctgcccccagaccgctgcctgcccttcctgatcaccattgatggagagagcagcaactacatcaatgctgccctgatggacagctaccggcagcctgctgccttcatcgtgacccagtaccccctgcccaacacagtgaaggacttctggaggctggtgtatgactatggctgcaccagcatcgtgatgctgaatgaggtggacctgagccagggctgcccccagtactggccagaggagggcatgctgcgctatggccccatccaggtggagtgcatgagctgcagcatggactgtgatgtgatcaaccgcatcttccgcatctgcaacctgacccggccccaggagggctacctgatggtgcagcagttccagtacctgggctgggccagccaccgggaggtgcccggcagcaagaggagcttcctgaagctgatcctgcaggtggagaagtggcaggaggagtgtgaggagggggagggccgcaccatcatccactgcctgaatggaggcggccgcagcggcatgttctgtgccatcggcatcgtggtggagatggtgaagaggcagaatgtggtggatgtgttccacgctgtgaagaccctgaggaacagcaagcccaacatggtggaggcccctgagcagtaccgcttctgctatgatgtggccctggagtacctggagagcagctag

SEQ ID NO: 166353 - DNA, 4320 bp, synthetic construct
  misc_feature 1..4320: note = Description of Artificial Sequence: Synthetic coding sequence
  source 1..4320: mol_type = other DNA
atggacaccacagctgctgctgccctgcctgcctttgtggccctgctgctgctgagcccctggcccctgctgggcagcgcccagggccagttctctgctgggggctgcacctttgatgatggccctggggcctgtgactaccaccaggacctgtatgatgactttgagtgggtgcacgtgtctgcccaggagccccactacctgcccccagagatgccccagggcagctacatgattgtggacagcagtgaccatgaccctggagagaaggcccggctgcagctgcccaccatgaaggaaaatgacacccactgcatcgacttctcctacctgctgtacagccagaagggcctgaaccctggcaccctgaacatcctggtgcgggtgaacaagggccccctggccaaccccatctggaatgtgacaggcttcaccggccgggactggctgcgggcagagctggccgtgtccaccttctggcccaatgagtaccaggtgatctttgaggccgaggtgtctgggggccgcagcggctacatcgccattgatgacatccaggtgctgagctacccctgtgacaagagcccccacttcctgcggctgggagatgtggaggtgaatgccggccagaatgccaccttccagtgcatcgccaccggcagagatgctgtgcacaacaagctgtggctgcagaggagaaatggagaggacatccctgtggcccagaccaagaacatcaaccacagaagatttgctgccagcttccggctgcaggaggtgaccaagacagaccaggacctgtaccgctgtgtgacccagagcgagcggggcagcggcgtgagcaactttgcccagctgattgtgcgggagcccccccggcccatcgccccaccccagctgctgggcgtgggccccacctacctgctgatccagctgaatgccaacagcatcattggagatggccccatcatcctgaaggaggtggagtacaggatgaccagcggctcctggacagagacccatgctgtgaatgcccccacctacaagctgtggcacctggaccctgacacagaatatgagatccgggtgctgctgaccaggcctggagagggcggcaccggcctgcccggccccccactcatcaccaggaccaagtgtgccgagcccatgaggacccccaagaccctgaagattgctgagatccaggccaggagaattgctgtggactgggagagcctgggctacaacatcacccgctgccacaccttcaacgtgaccatctgctaccactacttccggggccacaatgaaagcaaggctgactgcctggacatggaccccaaggccccccagcacgtggtgaaccacctgcccccctacaccaacgtgtccctgaagatgatcctgaccaaccctgagggcaggaaggagagcgaggagaccatcatccagacagatgaagatgtgcccggccctgtgcctgtgaagagcctgcagggcaccagctttgagaacaagatcttcctgaactggaaggagcccctggaccccaacggcatcatcacccagtatgagatctcctacagcagcatccgcagctttgatcctgctgtgcctgtggccggccccccccagacagtgagcaacctgtggaacagcacccaccacgtgttcatgcacctgcaccctggcaccacctaccagttcttcatccgggccagcacagtgaagggctttggacctgccacagccatcaacgtgaccaccaacatcagcgcccccaccctgcctgactatgaaggagtggatgccagcctgaatgaaacagccaccaccatcaccgtgctgctgcggcctgcccaggccaagggggcccccatcagcgcctaccagatcgtggtggaggagctgcacccccacaggaccaagcgggaggccggggccatggagtgctaccaggtgcctgtgacctaccagaatgccatgtctggaggagccccctactactttgctgctgagctgcccccaggcaacctgcctgagcccgcccccttcaccgtgggggacaacagaacctaccagggcttctggaacccccccctggcccccaggaagggctacaacatctacttccaggccatgagctctgtggagaaggagaccaagacccagtgtgtgcgcatcgccaccaaggccgccacagaggagcctgaggtgatcccagaccctgccaagcagacagacagagtggtgaagattgctggcatctctgctggcatcctggtgttcatcctgctgctgctggtggtgatcctgattgtgaagaagagcaagctggccaagaagaggaaggatgccatgggcaacacccggcaggagatgacccacatggtgaatgccatggacaggagctatgctgaccagagcaccctgcatgctgaggaccccctgagcatcaccttcatggaccagcacaacttcagccccaggtatgagaaccacagcgccacagctgagagcagccggctgctggatgtgccccgctacctgtgtgagggcacagagagcccctaccagacaggccagctgcacccagccatccgggtggccgacctgctgcagcacatcaacctgatgaagaccagtgacagctatggcttcaaggaggagtatgagagcttctttgagggccagagcgcctcctgggatgtggccaagaaggaccagaacagagccaagaacagatatggcaacatcatcgcctatgaccacagcagggtcatcctgcagcctgtggaggatgaccccagcagtgactacatcaatgccaactacattgatggctaccagaggcccagccactacatcgccacccagggccctgtgcatgaaacagtgtatgacttctggaggatgatctggcaggagcagagcgcctgcatcgtgatggtgaccaacctggtggaggtgggccgggtgaagtgctacaagtactggccagatgacacagaggtgtatggagacttcaaggtgacctgtgtggagatggagcccctggccgagtatgtggtgaggaccttcaccctggagcggcggggctacaatgagatccgggaggtgaagcagttccacttcaccggctggccagaccatggagtgccctaccacgccaccggcctgctgtccttcatcagaagagtgaagctgagcaacccccccagcgctggccccatcgtggtgcactgcagcgctggggccggccgcacaggctgctacatcgtgattgacatcatgctggacatggccgagcgggagggcgtggtggacatctacaactgtgtgaaggccctgcggagccgccgcatcaacatggtgcagacagaggagcagtacatcttcatccatgatgccatcctggaggcctgcctgtgtggggagacagccatccctgtgtgtgagttcaaggccgcctactttgacatgatcagaattgacagccagaccaacagcagccacctgaaggatgagttccagaccctgaacagcgtgaccccccggctgcaggccgaggactgcagcatcgcctgcctgcccagaaatcatgacaagaaccgcttcatggacatgctgcccccagaccgctgcctgcccttcctgatcaccattgatggagagagcagcaactacatcaatgctgccctgatggacagctaccggcagcctgctgccttcatcgtgacccagtaccccctgcccaacacagtgaaggacttctggaggctggtgtatgactatggctgcaccagcatcgtgatgctgaatgaggtggacctgagccagggctgcccccagtactggccagaggagggcatgctgcgctatggccccatccaggtggagtgcatgagctgcagcatggactgtgatgtgatcaaccgcatcttccgcatctgcaacctgacccggccccaggagggctacctgatggtgcagcagttccagtacctgggctgggccagccaccgggaggtgcccggcagcaagaggagcttcctgaagctgatcctgcaggtggagaagtggcaggaggagtgtgaggagggggagggccgcaccatcatccactgcctgaatggaggcggccgcagcggcatgttctgtgccatcggcatcgtggtggagatggtgaagaggcagaatgtggtggatgtgttccacgctgtgaagaccctgaggaacagcaagcccaacatggtggaggcccctgagcagtaccgcttctgctatgatgtggccctggagtacctggagagcagctag

SEQ ID NO: 166354 - DNA, 4323 bp, synthetic construct
  misc_feature 1..4323: note = Description of Artificial Sequence: Synthetic coding sequence
  source 1..4323: mol_type = other DNA
atggacaccacagctgctgctgccctgcctgcctttgtggccctgctgctgctgagcccctggcccctgctgggcagcgcccagggccagttctctgctgggggctgcacctttgatgatggccctggggcctgtgactaccaccaggacctgtatgatgactttgagtgggtgcacgtgtctgcccaggagccccactacctgcccccagagatgccccagggcagctacatgattgtggacagcagtgaccatgaccctggagagaaggcccggctgcagctgcccaccatgaaggaaaatgacacccactgcatcgacttctcctacctgctgtacagccagaagggcctgaaccctggcaccctgaacatcctggtgcgggtgaacaagggccccctggccaaccccatctggaatgtgacaggcttcaccggccgggactggctgcgggcagagctggccgtgtccaccttctggcccaatgagtaccaggtgatctttgaggccgaggtgtctgggggccgcagcggctacatcgccattgatgacatccaggtgctgagctacccctgtgacaagagcccccacttcctgcggctgggagatgtggaggtgaatgccggccagaatgccaccttccagtgcatcgccaccggcagagatgctgtgcacaacaagctgtggctgcagaggagaaatggagaggacatccctgtggcccagaccaagaacatcaaccacagaagatttgctgccagcttccggctgcaggaggtgaccaagacagaccaggacctgtaccgctgtgtgacccagagcgagcggggcagcggcgtgagcaactttgcccagctgattgtgcgggagcccccccggcccatcgccccaccccagctgctgggcgtgggccccacctacctgctgatccagctgaatgccaacagcatcattggagatggccccatcatcctgaaggaggtggagtacaggatgaccagcggctcctggacagagacccatgctgtgaatgcccccacctacaagctgtggcacctggaccctgacacagaatatgagatccgggtgctgctgaccaggcctggagagggcggcaccggcctgcccggccccccactcatcaccaggaccaagtgtgccgagcccatgaggacccccaagaccctgaagattgctgagatccaggccaggagaattgctgtggactgggagagcctgggctacaacatcacccgctgccacaccttcaacgtgaccatctgctaccactacttccggggccacaatgaaagcaaggctgactgcctggacatggaccccaaggccccccagcacgtggtgaaccacctgcccccctacaccaacgtgtccctgaagatgatcctgaccaaccctgagggcaggaaggagagcgaggagaccatcatccagacagatgaagatgtgcccggccctgtgcctgtgaagagcctgcagggcaccagctttgagaacaagatcttcctgaactggaaggagcccctggaccccaacggcatcatcacccagtatgagatctcctacagcagcatccgcagctttgatcctgctgtgcctgtggccggccccccccagacagtgagcaacctgtggaacagcacccaccacgtgttcatgcacctgcaccctggcaccacctaccagttcttcatccgggccagcacagtgaagggctttggacctgccacagccatcaacgtgaccaccaacatcagcgcccccaccctgcctgactatgaaggagtggatgccagcctgaatgaaacagccaccaccatcaccgtgctgctgcggcctgcccaggccaagggggcccccatcagcgcctaccagatcgtggtggaggagctgcacccccacaggaccaagcgggaggccggggccatggagtgctaccaggtgcctgtgacctaccagaatgccatgtctggaggagccccctactactttgctgctgagctgcccccaggcaacctgcctgagcccgcccccttcaccgtgggggacaacagaacctaccagggcttctggaacccccccctggcccccaggaagggctacaacatctacttccaggccatgagctctgtggagaaggagaccaagacccagtgtgtgcgcatcgccaccaaggctgctgccacagaggagcctgaggtgatcccagaccctgccaagcagacagacagagtggtgaagattgctggcatctctgctggcatcctggtgttcatcctgctgctgctggtggtgatcctgattgtgaagaagagcaagctggccaagaagaggaaggatgccatgggcaacacccggcaggagatgacccacatggtgaatgccatggacaggagctatgctgaccagagcaccctgcacgccgaggaccccctgagcatcaccttcatggaccagcacaacttcagccccaggtatgagaaccacagcgccacagctgagagcagccggctgctggatgtgccccgctacctgtgtgagggcacagagagcccctaccagacaggccagctgcacccagccatccgggtggccgacctgctgcagcacatcaacctgatgaagaccagtgacagctatggcttcaaggaggagtatgagagcttctttgagggccagagcgcctcctgggatgtggccaagaaggaccagaacagagccaagaacagatatggcaacatcatcgcctatgaccacagcagggtcatcctgcagcctgtggaggatgaccccagcagtgactacatcaatgccaactacattgatggctaccagaggcccagccactacatcgccacccagggccctgtgcatgagaccgtgtatgacttctggaggatgatctggcaggagcagagcgcctgcatcgtgatggtgaccaacctggtggaggtgggccgggtgaagtgctacaagtactggccagatgacacagaggtgtatggagacttcaaggtgacctgtgtggagatggagcccctggccgagtatgtggtgaggaccttcaccctggagcggcggggctacaatgagatccgggaggtgaagcagttccacttcaccggctggccagaccacggcgtgccctaccacgccaccggcctgctgtccttcatccggcgggtgaagctgagcaaccccccatctgctggccccatcgtggtgcactgcagcgctggagctggccgcacaggctgctacatcgtcatcgacatcatgctggacatggccgagcgggagggcgtggtggacatctacaactgtgtgaaggccctgcggagccgccgcatcaacatggtgcagacagaggagcagtacatcttcatccatgatgccatcctggaggcctgcctgtgtggggagacagccatccctgtgtgtgagttcaaggccgcctactttgacatgatcagaattgacagccagaccaacagcagccacctgaaggatgagttccagaccctgaacagcgtgaccccccggctgcaggccgaggactgcagcatcgcctgcctgcccaggaaccacgacaagaaccgcttcatggacatgctgcccccagaccgctgcctgcccttcctgatcaccattgatggagagagcagcaactacatcaatgctgccctgatggacagctaccggcagcctgctgccttcatcgtgacccagtaccccctgcccaacacagtgaaggacttctggaggctggtgtatgactatggctgcaccagcatcgtgatgctgaatgaggtggacctgagccagggctgcccccagtactggccagaggagggcatgctgcgctatggccccatccaggtggagtgcatgagctgcagcatggactgtgatgtgatcaaccgcatcttccgcatctgcaacctgacccggccccaggagggctacctgatggtgcagcagttccagtacctgggctgggccagccaccgggaggtgcccggcagcaagaggagcttcctgaagctgatcctgcaggtggagaagtggcaggaggagtgtgaggagggggagggccgcaccatcatccactgcctgaatggaggcggccgcagcggcatgttctgtgccatcggcatcgtggtggagatggtgaagaggcagaatgtggtggatgtgttccacgctgtgaagaccctgaggaacagcaagcccaacatggtggaggcccctgagcagtaccgcttctgctatgatgtggccctggagtacctggagagcagctag

SEQ ID NO: 166355 - DNA, 4374 bp, synthetic construct
  misc_feature 1..4374: note = Description of Artificial Sequence: Synthetic coding sequence
  source 1..4374: mol_type = other DNA
atggacaccacagctgctgctgccctgcctgcctttgtggccctgctgctgctgagcccctggcccctgctgggcagcgcccagggccagttctctgctgggggctgcacctttgatgatggccctggggcctgtgactaccaccaggacctgtatgatgactttgagtgggtgcacgtgtctgcccaggagccccactacctgcccccagagatgccccagggcagctacatgattgtggacagcagtgaccatgaccctggagagaaggcccggctgcagctgcccaccatgaaggaaaatgacacccactgcatcgacttctcctacctgctgtacagccagaagggcctgaaccctggcaccctgaacatcctggtgcgggtgaacaagggccccctggccaaccccatctggaatgtgacaggcttcaccggccgggactggctgcgggcagagctggccgtgtccaccttctggcccaatgagtaccaggtgatctttgaggccgaggtgtctgggggccgcagcggctacatcgccattgatgacatccaggtgctgagctacccctgtgacaagagcccccacttcctgcggctgggagatgtggaggtgaatgccggccagaatgccaccttccagtgcatcgccaccggcagagatgctgtgcacaacaagctgtggctgcagaggagaaatggagaggacatccctgtggcccagaccaagaacatcaaccacagaagatttgctgccagcttccggctgcaggaggtgaccaagacagaccaggacctgtaccgctgtgtgacccagagcgagcggggcagcggcgtgagcaactttgcccagctgattgtgcgggagcccccccggcccatcgccccaccccagctgctgggcgtgggccccacctacctgctgatccagctgaatgccaacagcatcattggagatggccccatcatcctgaaggaggtggagtacaggatgaccagcggctcctggacagagacccatgctgtgaatgcccccacctacaagctgtggcacctggaccctgacacagaatatgagatccgggtgctgctgaccaggcctggagagggcggcaccggcctgcccggccccccactcatcaccaggaccaagtgtgccgagcccatgaggacccccaagaccctgaagattgctgagatccaggccaggagaattgctgtggactgggagagcctgggctacaacatcacccgctgccacaccttcaacgtgaccatctgctaccactacttccggggccacaatgaaagcaaggctgactgcctggacatggaccccaaggccccccagcacgtggtgaaccacctgcccccctacaccaacgtgtccctgaagatgatcctgaccaaccctgagggcaggaaggagagcgaggagaccatcatccagacagatgaagatgtgcccggccctgtgcctgtgaagagcctgcagggcaccagctttgagaacaagatcttcctgaactggaaggagcccctggaccccaacggcatcatcacccagtatgagatctcctacagcagcatccgcagctttgatcctgctgtgcctgtggccggccccccccagacagtgagcaacctgtggaacagcacccaccacgtgttcatgcacctgcaccctggcaccacctaccagttcttcatccgggccagcacagtgaagggctttggacctgccacagccatcaacgtgaccaccaacatcagcgcccccaccctgcctgactatgaaggagtggatgccagcctgaatgaaacagccaccaccatcaccgtgctgctgcggcctgcccaggccaagggggcccccatcagcgcctaccagatcgtggtggaggagctgcacccccacaggaccaagcgggaggccggggccatggagtgctaccaggtgcctgtgacctaccagaatgccatgtctggaggagccccctactactttgctgctgagctgcccccaggcaacctgcctgagcccgcccccttcaccgtgggggacaacagaacctaccagggcttctggaacccccccctggcccccaggaagggctacaacatctacttccaggccatgagctctgtggagaaggagaccaagacccagtgtgtgcgcatcgccaccaaggctgctgccacagaggagcctgaggtgatcccagaccctgccaagcagacagacagagtggtgaagattgctggcatctctgctggcatcctggtgttcatcctgctgctgctggtggtgatcctgattgtgaagaagagcaagctggccaagaagaggaaggatgccatgggcaacacccggcaggagatgacccacatggtgaatgccatggacaggagctatgctgaccagagcaccctgcacgccgaggaccccctgagcatcaccttcatggaccagcacaacttcagcccccggctgcccaatgaccccctggtgcccacagctgtgctggatgagaaccacagcgccacagctgagagcagccggctgctggatgtgccccgctacctgtgtgagggcacagagagcccctaccagacaggccagctgcacccagccatccgggtggccgacctgctgcagcacatcaacctgatgaagaccagtgacagctatggcttcaaggaggagtatgagagcttctttgagggccagagcgcctcctgggatgtggccaagaaggaccagaacagagccaagaacagatatggcaacatcatcgcctatgaccacagcagggtcatcctgcagcctgtggaggatgaccccagcagtgactacatcaatgccaactacattgatgtgtccatcttcatcggctaccagaggcccagccactacatcgccacccagggccctgtgcatgaaacagtgtatgacttctggaggatgatctggcaggagcagagcgcctgcatcgtgatggtgaccaacctggtggaggtgggccgggtgaagtgctacaagtactggccagatgacacagaggtgtatggagacttcaaggtgacctgtgtggagatggagcccctggccgagtatgtggtgaggaccttcaccctggagcggcggggctacaatgagatccgggaggtgaagcagttccacttcaccggctggccagaccatggagtgccctaccacgccaccggcctgctgtccttcatcagaagagtgaagctgagcaacccccccagcgctggccccatcgtggtgcactgcagcgctggggccggccgcacaggctgctacatcgtgattgacatcatgctggacatggccgagcgggagggcgtggtggacatctacaactgtgtgaaggccctgcggagccgccgcatcaacatggtgcagacagaggagcagtacatcttcatccatgatgccatcctggaggcctgcctgtgtggggagacagccatccctgtgtgtgagttcaaggccgcctactttgacatgatcagaattgacagccagaccaacagcagccacctgaaggatgagttccagaccctgaacagcgtgaccccccggctgcaggccgaggactgcagcatcgcctgcctgcccagaaatcatgacaagaaccgcttcatggacatgctgcccccagaccgctgcctgcccttcctgatcaccattgatggagagagcagcaactacatcaatgctgccctgatggacagctaccggcagcctgctgccttcatcgtgacccagtaccccctgcccaacacagtgaaggacttctggaggctggtgtatgactatggctgcaccagcatcgtgatgctgaatgaggtggacctgagccagggctgcccccagtactggccagaggagggcatgctgcgctatggccccatccaggtggagtgcatgagctgcagcatggactgtgatgtgatcaaccgcatcttccgcatctgcaacctgacccggccccaggagggctacctgatggtgcagcagttccagtacctgggctgggccagccaccgggaggtgcccggcagcaagaggagcttcctgaagctgatcctgcaggtggagaagtggcaggaggagtgtgaggagggggagggccgcaccatcatccactgcctgaatggaggcggccgcagcggcatgttctgtgccatcggcatcgtggtggagatggtgaagaggcagaatgtggtggatgtgttccacgctgtgaagaccctgaggaacagcaagcccaacatggtggaggcccctgagcagtaccgcttctgctatgatgtggccctggagtacctggagagcagctag

SEQ ID NO: 166356 - DNA, 2244 bp, synthetic construct
  misc_feature 1..2244: note = Description of Artificial Sequence: Synthetic coding sequence
  source 1..2244: mol_type = other DNA
atgaccctgaatggctgcatgctggtgctgaagagcctcatcatctaccacccccgctgccccaaggtgatctttgaagctgaggtgtctgggggccgcagcggctacatcgccattgatgacatccaggtgctgagctacccctgtgacaagagcccccacttcctgcggctgggagatgtggaggtgaatgccggccagaatgccaccttccagtgcatcgccaccggcagagatgctgtgcacaacaagctgtggctgcagaggagaaatggagaggacatccctgtggcccagaccaagaacatcaaccacagaagatttgctgccagcttccggctgcaggaggtgaccaagacagaccaggacctgtaccgctgtgtgacccagagcgagcggggcagcggcgtgagcaactttgcccagctgattgtgcgggagcccccccggcccatcgccccaccccagctgctgggcgtgggccccacctacctgctgatccagctgaatgccaacagcatcattggagatggccccatcatcctgaaggaggtggagtacaggatgaccagcggctcctggacagagacccatgctgtgaatgcccccacctacaagctgtggcacctggaccctgacacagaatatgagatccgggtgctgctgaccaggcctggagagggcggcaccggcctgcccggccccccactcatcaccaggaccaagtgtgccgagcccatgaggacccccaagaccctgaagattgctgagatccaggccaggagaattgctgtggactgggagagcctgggctacaacatcacccgctgccacaccttcaacgtgaccatctgctaccactacttccggggccacaatgaaagcaaggctgactgcctggacatggaccccaaggccccccagcacgtggtgaaccacctgcccccctacaccaacgtgtccctgaagatgatcctgaccaaccctgagggcaggaaggagagcgaggagaccatcatccagacagatgaagatgtgcccggccctgtgcctgtgaagagcctgcagggcaccagctttgagaacaagatcttcctgaactggaaggagcccctggaccccaacggcatcatcacccagtatgagatctcctacagcagcatccgcagctttgatcctgctgtgcctgtggccggccccccccagacagtgagcaacctgtggaacagcacccaccacgtgttcatgcacctgcaccctggcaccacctaccagttcttcatccgggccagcacagtgaagggcttcggccctgccacagccatcaacgtgaccaccaacatcagcgcccccaccctgcctgactatgagggcgtggatgccagcctgaatgaaacagccaccaccatcaccgtgctgctgcggcctgcccaggccaagggggcccccatcagcgcctaccagatcgtggtggaggagctgcacccccacaggaccaagcgggaggccggggccatggagtgctaccaggtgcctgtgacctaccagaatgccatgtctgggggcgccccctactactttgctgctgagctgcccccaggcaacctgcctgagcccgcccccttcaccgtgggggacaacagaacctaccagggcttctggaacccccccctggcccccaggaagggctacaacatctacttccaggccatgagctctgtggagaaggagaccaagacccagtgtgtgagaattgccaccaaggccgccgccacagaggagcctgaggtgatcccagaccctgccaagcagacagacagagtggtgaagattgctggcatctctgctggcatcctggtgttcatcctgctgctgctggtggtgatcctgattgtgaagaagcgctacatctgctggaggaggcacatctgcatccggaacatcagaagaagctactacagctacagctactacctgaagctggccaagaagaggaaggatgccatgggcaacacccggcaggagatgacccacatggtgaatgccatggacaggagctatgctgaccagagcaccctgcatgctgaggaccccctgagcatcaccttcatggaccagcacaacttcagcccccggctgcccaatgaccccctggtgcccacagctgtgctggtgcccagccctggcaggaagaatgtgtaccatggagacaacaacagcttctttgccatctcctacctgtag

SEQ ID NO: 166357 - DNA, 4389 bp, synthetic construct
  misc_feature 1..4389: note = Description of Artificial Sequence: Synthetic coding sequence
  source 1..4389: mol_type = other DNA
atggacaccacagctgctgctgccctgcctgcctttgtggccctgctgctgctgagcccctggcccctgctgggcagcgcccagggccagttctctgctgggggctgcacctttgatgatggccctggggcctgtgactaccaccaggacctgtatgatgactttgagtgggtgcacgtgtctgcccaggagccccactacctgcccccagagatgccccagggcagctacatgattgtggacagcagtgaccatgaccctggagagaaggcccggctgcagctgcccaccatgaaggaaaatgacacccactgcatcgacttctcctacctgctgtacagccagaagggcctgaaccctggcaccctgaacatcctggtgcgggtgaacaagggccccctggccaaccccatctggaatgtgacaggcttcaccggccgggactggctgcgggcagagctggccgtgtccaccttctggcccaatgagtaccaggtgatctttgaggccgaggtgtctgggggccgcagcggctacatcgccattgatgacatccaggtgctgagctacccctgtgacaagagcccccacttcctgcggctgggagatgtggaggtgaatgccggccagaatgccaccttccagtgcatcgccaccggcagagatgctgtgcacaacaagctgtggctgcagaggagaaatggagaggacatccctgtggcccagaccaagaacatcaaccacagaagatttgctgccagcttccggctgcaggaggtgaccaagacagaccaggacctgtaccgctgtgtgacccagagcgagcggggcagcggcgtgagcaactttgcccagctgattgtgcgggagcccccccggcccatcgccccaccccagctgctgggcgtgggccccacctacctgctgatccagctgaatgccaacagcatcattggagatggccccatcatcctgaaggaggtggagtacaggatgaccagcggctcctggacagagacccatgctgtgaatgcccccacctacaagctgtggcacctggaccctgacacagaatatgagatccgggtgctgctgaccaggcctggagagggcggcaccggcctgcccggccccccactcatcaccaggaccaagtgtgccgagcccatgaggacccccaagaccctgaagattgctgagatccaggccaggagaattgctgtggactgggagagcctgggctacaacatcacccgctgccacaccttcaacgtgaccatctgctaccactacttccggggccacaatgaaagcaaggctgactgcctggacatggaccccaaggccccccagcacgtggtgaaccacctgcccccctacaccaacgtgtccctgaagatgatcctgaccaaccctgagggcaggaaggagagcgaggagaccatcatccagacagatgaagatgtgcccggccctgtgcctgtgaagagcctgcagggcaccagctttgagaacaagatcttcctgaactggaaggagcccctggaccccaacggcatcatcacccagtatgagatctcctacagcagcatccgcagctttgatcctgctgtgcctgtggccggccccccccagacagtgagcaacctgtggaacagcacccaccacgtgttcatgcacctgcaccctggcaccacctaccagttcttcatccgggccagcacagtgaagggctttggacctgccacagccatcaacgtgaccaccaacatcagcgcccccaccctgcctgactatgaaggagtggatgccagcctgaatgaaacagccaccaccatcaccgtgctgctgcggcctgcccaggccaagggggcccccatcagcgcctaccagatcgtggtggaggagctgcacccccacaggaccaagcgggaggccggggccatggagtgctaccaggtgcctgtgacctaccagaatgccatgtctggaggagccccctactactttgctgctgagctgcccccaggcaacctgcctgagcccgcccccttcaccgtgggggacaacagaacctaccagggcttctggaacccccccctggcccccaggaagggctacaacatctacttccaggccatgagctctgtggagaaggagaccaagacccagtgtgtgcgcatcgccaccaaggctgctgccacagaggagcctgaggtgatcccagaccctgccaagcagacagacagagtggtgaagattgctggcatctctgctggcatcctggtgttcatcctgctgctgctggtggtgatcctgattgtgaagaagagcaagctggccaagaagaggaaggatgccatgggcaacacccggcaggagatgacccacatggtgaatgccatggacaggagctatgctgaccagagcaccctgcacgccgaggaccccctgagcatcaccttcatggaccagcacaacttcagcccccggctgcccaatgaccccctggtgcccacagctgtgctggtgcccatcacagatgagaaccacagcgccacagctgagagcagccggctgctggatgtgccccgctacctgtgtgagggcacagagagcccctaccagacaggccagctgcacccagccatccgggtggccgacctgctgcagcacatcaacctgatgaagaccagtgacagctatggcttcaaggaggagtatgagagcttctttgagggccagagcgcctcctgggatgtggccaagaaggaccagaacagagccaagaacagatatggcaacatcatcgcctatgaccacagcagggtcatcctgcagcctgtggaggatgaccccagcagtgactacatcaatgccaactacatcgacatctggctgtacagagatggctaccagaggcccagccactacatcgccacccagggccctgtgcatgagaccgtgtatgacttctggaggatgatctggcaggagcagagcgcctgcatcgtgatggtgaccaacctggtggaggtgggccgggtgaagtgctacaagtactggccagatgacacagaggtgtatggagacttcaaggtgacctgtgtggagatggagcccctggccgagtatgtggtgaggaccttcaccctggagcggcggggctacaatgagatccgggaggtgaagcagttccacttcaccggctggccagaccacggcgtgccctaccacgccaccggcctgctgtccttcatccggcgggtgaagctgagcaaccccccatctgctggccccatcgtggtgcactgcagcgctggagctggccgcacaggctgctacatcgtcatcgacatcatgctggacatggccgagcgggagggcgtggtggacatctacaactgtgtgaaggccctgcggagccgccgcatcaacatggtgcagacagaggagcagtacatcttcatccatgatgccatcctggaggcctgcctgtgtggggagacagccatccctgtgtgtgagttcaaggccgcctactttgacatgatcagaattgacagccagaccaacagcagccacctgaaggatgagttccagaccctgaacagcgtgaccccccggctgcaggccgaggactgcagcatcgcctgcctgcccaggaaccacgacaagaaccgcttcatggacatgctgcccccagaccgctgcctgcccttcctgatcaccattgatggagagagcagcaactacatcaatgctgccctgatggacagctaccggcagcctgctgccttcatcgtgacccagtaccccctgcccaacacagtgaaggacttctggaggctggtgtatgactatggctgcaccagcatcgtgatgctgaatgaggtggacctgagccagggctgcccccagtactggccagaggagggcatgctgcgctatggccccatccaggtggagtgcatgagctgcagcatggactgtgatgtgatcaaccgcatcttccgcatctgcaacctgacccggccccaggagggctacctgatggtgcagcagttccagtacctgggctgggccagccaccgggaggtgcccggcagcaagaggagcttcctgaagctgatcctgcaggtggagaagtggcaggaggagtgtgaggagggggagggccgcaccatcatccactgcctgaatggaggcggccgcagcggcatgttctgtgccatcggcatcgtggtggagatggtgaagaggcagaatgtggtggatgtgttccacgctgtgaagaccctgaggaacagcaagcccaacatggtggaggcccctgagcagtaccgcttctgctatgatgtggccctggagtacctggagagcagctag

SEQ ID NO: 166358 - DNA, 4359 bp, synthetic construct
  misc_feature 1..4359: note = Description of Artificial Sequence: Synthetic coding sequence
  source 1..4359: mol_type = other DNA
atgaggggcctgggcacctgcctggccaccctggccggcctgctgctgacagctgctggggagaccttcagcggcggctgcctgtttgatgagccctacagcacctgtggctacagccagagtgaaggagatgacttcaactgggagcaggtgaacaccctgaccaagcccaccagtgacccctggatgcccagcggcagcttcatgctggtgaatgccagcggccggcctgagggccagagggcccacctgctgctgccccagctgaaggaaaatgacacccactgcatcgacttccactactttgtgagcagcaagagcaacagccccccaggcctgctgaatgtgtatgtgaaggtgaacaacggccccctgggcaaccccatctggaacatcagcggggaccccaccaggacctggaacagagctgagctggccatcagcaccttctggcccaacttctaccaggtgatctttgaagtcatcaccagcggccaccagggctacctggccattgatgaggtgaaggtgctgggccacccctgcaccaggaccccccacttcctgcgcatccagaatgtggaggtgaatgccggccagtttgccaccttccagtgcagcgccatcggccgcacagtggccggggaccggctgtggctgcagggcattgatgtgagagatgcccccctgaaggagatcaaggtgaccagcagccgccgcttcatcgccagcttcaacgtggtgaacaccaccaagagagatgctgggaagtaccgctgcatgatcagaacagagggcggcgtgggcatcagcaactatgcagagctggtggtgaaggagccccctgtgcccatcgccccaccccagctggcctctgtgggcgccacctacctgtggatccagctgaatgccaacagcatcaatggagatggccccatcgtggcccgggaggtggagtactgcacagccagcggctcctggaatgaccggcagcctgtggacagcaccagctacaagattggccacctggaccctgacacagaatatgagatctctgtgctgctgaccaggcctggagagggcggcaccggcagccctggccctgccctgcggaccaggaccaagtgtgccgaccccatgaggggccccaggaagctggaggtggtggaggtgaagagccggcagatcaccatccgctgggagcccttcggctacaacgtgacccgctgccacagctacaacctgactgtgcactactgctaccaggtgggcggccaggagcaggtgcgggaggaggtgtcctgggacacagagaacagccacccccagcacaccatcaccaacctgagcccctacaccaacgtgtctgtgaagctgatcctgatgaaccctgagggcaggaaggagagccaggagctgattgtgcagacagatgaggacctgcccggggctgtgcccacagagagcatccagggcagcacctttgaggagaagatcttcctgcagtggagggagcccacccagacctacggcgtcatcaccctgtatgagatcacctacaaggctgtgtcctcctttgatcctgagattgacctgagcaaccagagcggccgggtgtccaagctgggcaatgagacccacttcctgttcttcggcctgtacccaggcaccacctacagcttcaccatccgggccagcacagccaagggctttggacctccagccaccaaccagttcaccaccaagatcagcgcccccagcatgcctgcctatgagctggagacccccctgaaccagacagacaacacagtgacagtgatgctgaagccagcccacagcagaggagcccctgtgtctgtgtaccagatcgtggtggaggaggagcggcccaggaggaccaagaagaccacagagatcctgaagtgctaccctgtgcccatccacttccagaatgccagcctgctgaacagccagtactactttgctgctgagttccctgctgacagcctgcaggccgcccagcccttcaccatcggggacaacaagacctacaacggctactggaacacccccctgctgccctacaagagctaccgcatctacttccaggccgccagccgggccaatggagagaccaagattgactgtgtgcaggtggccaccaagggggccgccacccccaagcctgtgcctgagcctgagaagcagacagaccacacagtgaagattgctggggtgattgctggcatcctgctgtttgtgatcatcttcctgggcgtggtgctggtgatgaagaagaggaagctggccaagaagaggaaggagaccatgagcagcacccggcaggagatgacagtgatggtgaacagcatggacaagagctatgcagagcagggcaccaactgtgatgaggccttctccttcatggacacccacaacctgaatggccgctctgtgagcagccccagcagcttcaccatgaagaccaacaccctgagcacctctgtgcccaacagctactacccagatgagacccacaccatggccagtgacaccagcagcctggtgcagagccacacctacaagaagcgggagccagcagatgtgccctaccagacaggccagctgcacccagccatccgggtggccgacctgctgcagcacatcacccagatgaagtgtgccgagggctacggcttcaaggaggagtatgagagcttctttgagggccagagcgccccctgggacagcgccaagaaggatgagaacaggatgaagaacagatatggcaacatcatcgcctatgaccacagccgggtgcggctgcagaccattgaaggagacaccaacagcgactacatcaatggaaactacattgatggctaccaccggcccaaccactacatcgccacccagggccccatgcaggagaccatctatgacttctggaggatggtgtggcatgaaaatacagccagcatcatcatggtgaccaacctggtggaggtgggccgggtgaagtgctgcaagtactggccagatgacacagagatctacaaggacatcaaggtgaccctgattgaaacagagctgctggccgagtatgtgatccgcacctttgctgtggagaagaggggcgtgcatgagatccgggagatccggcagttccacttcaccggctggccagaccacggcgtgccctaccacgccaccggcctgctgggctttgtgcggcaggtgaagagcaagagccccccatctgctggccccctggtggtgcactgcagcgctggagctggccgcacaggctgcttcatcgtcatcgacatcatgctggacatggccgagcgggagggcgtggtggacatctacaactgtgtgcgggagctgcggagcagaagagtgaacatggtgcagacagaggagcagtatgtgttcatccatgatgccatcctggaggcctgcctgtgtggggacacctctgtgcctgccagccaggtgcgcagcctgtactatgacatgaacaagctggacccccagaccaacagcagccagatcaaggaggagttccgcaccctgaacatggtgacccccaccctgcgggtggaggactgcagcatcgccctgctgcccaggaaccacgagaagaaccgctgcatggacatcctgcccccagaccgctgcctgcccttcctgatcaccattgatggagagagcagcaactacatcaatgctgccctgatggacagctacaagcagcccagcgccttcatcgtgacccagcaccccctgcccaacacagtgaaggacttctggaggctggtgctggactaccactgcacctctgtggtgatgctgaatgatgtggaccctgcccagctgtgcccccagtactggccagaaaatggagtgcacagacatggccccatccaggtggagtttgtgtctgctgacctggaggaggacatcatcagccgcatcttccgcatctacaatgctgcccggccccaggacggctacaggatggtgcagcagttccagttcctgggctggcccatgtacagagacacccctgtgtccaagaggagcttcctgaagctgatccggcaggtggacaagtggcaggaggagtacaatggaggagagggccgcacagtggtgcactgcctgaatggaggcggccgcagcggcaccttctgtgccatcagcatcgtgtgtgagatgctgcggcaccagaggacagtggatgtgttccacgctgtgaagaccctgaggaacaacaagcccaacatggtggacctgctggaccagtacaagttctgctatgaggtggccctggagtacctgaacagcggctag

SEQ ID NO: 166359 - DNA, 4173 bp, synthetic construct
  misc_feature 1..4173: note = Description of Artificial Sequence: Synthetic coding sequence
  source 1..4173: mol_type = other DNA
atgcccagcggcagcttcatgctggtgaatgccagcggccggcctgagggccagagggcccacctgctgctgccccagctgaaggaaaatgacacccactgcatcgacttccactactttgtgagcagcaagagcaacagccccccaggcctgctgaatgtgtatgtgaaggtgaacaacggccccctgggcaaccccatctggaacatcagcggggaccccaccaggacctggaacagagctgagctggccatcagcaccttctggcccaacttctaccaggtgatctttgaagtcatcaccagcggccaccagggctacctggccattgatgaggtgaaggtgctgggccacccctgcaccaggaccccccacttcctgcgcatccagaatgtggaggtgaatgccggccagtttgccaccttccagtgcagcgccatcggccgcacagtggccggggaccggctgtggctgcagggcattgatgtgagagatgcccccctgaaggagatcaaggtgaccagcagccgccgcttcatcgccagcttcaacgtggtgaacaccaccaagagagatgctgggaagtaccgctgcatgatcagaacagagggcggcgtgggcatcagcaactatgcagagctggtggtgaaggagccccctgtgcccatcgccccaccccagctggcctctgtgggcgccacctacctgtggatccagctgaatgccaacagcatcaatggagatggccccatcgtggcccgggaggtggagtactgcacagccagcggctcctggaatgaccggcagcctgtggacagcaccagctacaagattggccacctggaccctgacacagaatatgagatctctgtgctgctgaccaggcctggagagggcggcaccggcagccctggccctgccctgcggaccaggaccaagtgtgccgaccccatgaggggccccaggaagctggaggtggtggaggtgaagagccggcagatcaccatccgctgggagcccttcggctacaacgtgacccgctgccacagctacaacctgactgtgcactactgctaccaggtgggcggccaggagcaggtgcgggaggaggtgtcctgggacacagagaacagccacccccagcacaccatcaccaacctgagcccctacaccaacgtgtctgtgaagctgatcctgatgaaccctgagggcaggaaggagagccaggagctgattgtgcagacagatgaggacctgcccggggctgtgcccacagagagcatccagggcagcacctttgaggagaagatcttcctgcagtggagggagcccacccagacctacggcgtcatcaccctgtatgagatcacctacaaggctgtgtcctcctttgatcctgagattgacctgagcaaccagagcggccgggtgtccaagctgggcaatgagacccacttcctgttcttcggcctgtacccaggcaccacctacagcttcaccatccgggccagcacagccaagggctttggacctccagccaccaaccagttcaccaccaagatcagcgcccccagcatgcctgcctatgagctggagacccccctgaaccagacagacaacacagtgacagtgatgctgaagccagcccacagcagaggagcccctgtgtctgtgtaccagatcgtggtggaggaggagcggcccaggaggaccaagaagaccacagagatcctgaagtgctaccctgtgcccatccacttccagaatgccagcctgctgaacagccagtactactttgctgctgagttccctgctgacagcctgcaggccgcccagcccttcaccatcggggacaacaagacctacaacggctactggaacacccccctgctgccctacaagagctaccgcatctacttccaggccgccagccgggccaatggagagaccaagattgactgtgtgcaggtggccaccaagggggccgccacccccaagcctgtgcctgagcctgagaagcagacagaccacacagtgaagattgctggggtgattgctggcatcctgctgtttgtgatcatcttcctgggcgtggtgctggtgatgaagaagaggaagctggccaagaagaggaaggagaccatgagcagcacccggcaggagatgacagtgatggtgaacagcatggacaagagctatgcagagcagggcaccaactgtgatgaggccttctccttcatggacacccacaacctgaatggccgctctgtgagcagccccagcagcttcaccatgaagaccaacaccctgagcacctctgtgcccaacagctactacccagatgagacccacaccatggccagtgacaccagcagcctggtgcagagccacacctacaagaagcgggagccagcagatgtgccctaccagacaggccagctgcacccagccatccgggtggccgacctgctgcagcacatcacccagatgaagtgtgccgagggctacggcttcaaggaggagtatgagagcttctttgagggccagagcgccccctgggacagcgccaagaaggatgagaacaggatgaagaacagatatggcaacatcatcgcctatgaccacagccgggtgcggctgcagaccattgaaggagacaccaacagcgactacatcaatggaaactacattgatggctaccaccggcccaaccactacatcgccacccagggccccatgcaggagaccatctatgacttctggaggatggtgtggcatgaaaatacagccagcatcatcatggtgaccaacctggtggaggtgggccgggtgaagtgctgcaagtactggccagatgacacagagatctacaaggacatcaaggtgaccctgattgaaacagagctgctggccgagtatgtgatccgcacctttgctgtggagaagaggggcgtgcatgagatccgggagatccggcagttccacttcaccggctggccagaccacggcgtgccctaccacgccaccggcctgctgggctttgtgcggcaggtgaagagcaagagccccccatctgctggccccctggtggtgcactgcagcgctggagctggccgcacaggctgcttcatcgtcatcgacatcatgctggacatggccgagcgggagggcgtggtggacatctacaactgtgtgcgggagctgcggagcagaagagtgaacatggtgcagacagaggagcagtatgtgttcatccatgatgccatcctggaggcctgcctgtgtggggacacctctgtgcctgccagccaggtgcgcagcctgtactatgacatgaacaagctggacccccagaccaacagcagccagatcaaggaggagttccgcaccctgaacatggtgacccccaccctgcgggtggaggactgcagcatcgccctgctgcccaggaaccacgagaagaaccgctgcatggacatcctgcccccagaccgctgcctgcccttcctgatcaccattgatggagagagcagcaactacatcaatgctgccctgatggacagctacaagcagcccagcgccttcatcgtgacccagcaccccctgcccaacacagtgaaggacttctggaggctggtgctggactaccactgcacctctgtggtgatgctgaatgatgtggaccctgcccagctgtgcccccagtactggccagaaaatggagtgcacagacatggccccatccaggtggagtttgtgtctgctgacctggaggaggacatcatcagccgcatcttccgcatctacaatgctgcccggccccaggacggctacaggatggtgcagcagttccagttcctgggctggcccatgtacagagacacccctgtgtccaagaggagcttcctgaagctgatccggcaggtggacaagtggcaggaggagtacaatggaggagagggccgcacagtggtgcactgcctgaatggaggcggccgcagcggcaccttctgtgccatcagcatcgtgtgtgagatgctgcggcaccagaggacagtggatgtgttccacgctgtgaagaccctgaggaacaacaagcccaacatggtggacctgctggaccagtacaagttctgctatgaggtggccctggagtacctgaacagcggctag

SEQ ID NO: 166360 - DNA, 4401 bp, synthetic construct
  misc_feature 1..4401: note = Description of Artificial Sequence: Synthetic coding sequence
  source 1..4401: mol_type = other DNA
atgaggggcctgggcacctgcctggccaccctggccggcctgctgctgacagctgctggggagaccttcagcggcggctgcctgtttgatgagccctacagcacctgtggctacagccagagtgaaggagatgacttcaactgggagcaggtgaacaccctgaccaagcccaccagtgacccctggatgcccagcggcagcttcatgctggtgaatgccagcggccggcctgagggccagagggcccacctgctgctgccccagctgaaggaaaatgacacccactgcatcgacttccactactttgtgagcagcaagagcaacagccccccaggcctgctgaatgtgtatgtgaaggtgaacaacggccccctgggcaaccccatctggaacatcagcggggaccccaccaggacctggaacagagctgagctggccatcagcaccttctggcccaacttctaccaggtgatctttgaagtcatcaccagcggccaccagggctacctggccattgatgaggtgaaggtgctgggccacccctgcaccaggaccccccacttcctgcgcatccagaatgtggaggtgaatgccggccagtttgccaccttccagtgcagcgccatcggccgcacagtggccggggaccggctgtggctgcagggcattgatgtgagagatgcccccctgaaggagatcaaggtgaccagcagccgccgcttcatcgccagcttcaacgtggtgaacaccaccaagagagatgctgggaagtaccgctgcatgatcagaacagagggcggcgtgggcatcagcaactatgcagagctggtggtgaaggagccccctgtgcccatcgccccaccccagctggcctctgtgggcgccacctacctgtggatccagctgaatgccaacagcatcaatggagatggccccatcgtggcccgggaggtggagtactgcacagccagcggctcctggaatgaccggcagcctgtggacagcaccagctacaagattggccacctggaccctgacacagaatatgagatctctgtgctgctgaccaggcctggagagggcggcaccggcagccctggccctgccctgcggaccaggaccaagtgtgccgaccccatgaggggccccaggaagctggaggtggtggaggtgaagagccggcagatcaccatccgctgggagcccttcggctacaacgtgacccgctgccacagctacaacctgactgtgcactactgctaccaggtgggcggccaggagcaggtgcgggaggaggtgtcctgggacacagagaacagccacccccagcacaccatcaccaacctgagcccctacaccaacgtgtctgtgaagctgatcctgatgaaccctgagggcaggaaggagagccaggagctgattgtgcagacagatgaggacctgcccggggctgtgcccacagagagcatccagggcagcacctttgaggagaagatcttcctgcagtggagggagcccacccagacctacggcgtcatcaccctgtatgagatcacctacaaggctgtgtcctcctttgatcctgagattgacctgagcaaccagagcggccgggtgtccaagctgggcaatgagacccacttcctgttcttcggcctgtacccaggcaccacctacagcttcaccatccgggccagcacagccaagggctttggacctccagccaccaaccagttcaccaccaagatcagcgcccccagcatgcctgcctatgagctggagacccccctgaaccagacagacaacacagtgacagtgatgctgaagccagcccacagcagaggagcccctgtgtctgtgtaccagatcgtggtggaggaggagcggcccaggaggaccaagaagaccacagagatcctgaagtgctaccctgtgcccatccacttccagaatgccagcctgctgaacagccagtactactttgctgctgagttccctgctgacagcctgcaggccgcccagcccttcaccatcggggacaacaagacctacaacggctactggaacacccccctgctgccctacaagagctaccgcatctacttccaggccgccagccgggccaatggagagaccaagattgactgtgtgcaggtggccaccaagggggccgccacccccaagcctgtgcctgagcctgagaagcagacagaccacacagtgaagattgctggggtgattgctggcatcctgctgtttgtgatcatcttcctgggcgtggtgctggtgatgaagaagaggaagctggccaagaagaggaaggagaccatgagcagcacccggcaggagatgacagtgatggtgaacagcatggacaagagctatgcagagcagggcaccaactgtgatgaggccttctccttcatggacacccacaacctgaatggccgctctgtgagcagccccagcagcttcaccatgaagaccaacaccctgagcacctctgtgcccaacagctactacccagacccctttgtgcccacagccatcctggacttcagcctgaacaatgagacccacaccatggccagtgacaccagcagcctggtgcagagccacacctacaagaagcgggagccagcagatgtgccctaccagacaggccagctgcacccagccatccgggtggccgacctgctgcagcacatcacccagatgaagtgtgccgagggctacggcttcaaggaggagtatgagagcttctttgagggccagagcgccccctgggacagcgccaagaaggatgagaacaggatgaagaacagatatggcaacatcatcgcctatgaccacagccgggtgcggctgcagaccattgaaggagacaccaacagcgactacatcaatggaaactacattgatggctaccaccggcccaaccactacatcgccacccagggccccatgcaggagaccatctatgacttctggaggatggtgtggcatgaaaatacagccagcatcatcatggtgaccaacctggtggaggtgggccgggtgaagtgctgcaagtactggccagatgacacagagatctacaaggacatcaaggtgaccctgattgaaacagagctgctggccgagtatgtgatccgcacctttgctgtggagaagaggggcgtgcatgagatccgggagatccggcagttccacttcaccggctggccagaccacggcgtgccctaccacgccaccggcctgctgggctttgtgcggcaggtgaagagcaagagccccccatctgctggccccctggtggtgcactgcagcgctggagctggccgcacaggctgcttcatcgtcatcgacatcatgctggacatggccgagcgggagggcgtggtggacatctacaactgtgtgcgggagctgcggagcagaagagtgaacatggtgcagacagaggagcagtatgtgttcatccatgatgccatcctggaggcctgcctgtgtggggacacctctgtgcctgccagccaggtgcgcagcctgtactatgacatgaacaagctggacccccagaccaacagcagccagatcaaggaggagttccgcaccctgaacatggtgacccccaccctgcgggtggaggactgcagcatcgccctgctgcccaggaaccacgagaagaaccgctgcatggacatcctgcccccagaccgctgcctgcccttcctgatcaccattgatggagagagcagcaactacatcaatgctgccctgatggacagctacaagcagcccagcgccttcatcgtgacccagcaccccctgcccaacacagtgaaggacttctggaggctggtgctggactaccactgcacctctgtggtgatgctgaatgatgtggaccctgcccagctgtgcccccagtactggccagaaaatggagtgcacagacatggccccatccaggtggagtttgtgtctgctgacctggaggaggacatcatcagccgcatcttccgcatctacaatgctgcccggccccaggacggctacaggatggtgcagcagttccagttcctgggctggcccatgtacagagacacccctgtgtccaagaggagcttcctgaagctgatccggcaggtggacaagtggcaggaggagtacaatggaggagagggccgcacagtggtgcactgcctgaatggaggcggccgcagcggcaccttctgtgccatcagcatcgtgtgtgagatgctgcggcaccagaggacagtggatgtgttccacgctgtgaagaccctgaggaacaacaagcccaacatggtggacctgctggaccagtacaagttctgctatgaggtggccctggagtacctgaacagcggctag

SEQ ID NO: 166361 - DNA, 3720 bp, synthetic construct
  misc_feature 1..3720: note = Description of Artificial Sequence: Synthetic coding sequence
  source 1..3720: mol_type = other DNA
atgggcaccctgagcctgcaccctggcattgatgtgagagatgcccccctgaaggagatcaaggtgaccagcagccgccgcttcatcgccagcttcaacgtggtgaacaccaccaagagagatgctgggaagtaccgctgcatgatcagaacagaaggaggagtgggcatcagcaactatgcagagctggtggtgaaggagccccctgtgcccatcgccccaccccagctggcctctgtgggcgccacctacctgtggatccagctgaatgccaacagcatcaatggagatggccccatcgtggcccgggaggtggagtactgcacagccagcggctcctggaatgaccggcagcctgtggacagcaccagctacaagattggccacctggaccctgacacagaatatgagatctctgtgctgctgaccaggcctggagagggcggcaccggcagccctggccctgccctgcggaccaggaccaagtgtgccgaccccatgaggggccccaggaagctggaggtggtggaggtgaagagccggcagatcaccatccgctgggagcccttcggctacaacgtgacccgctgccacagctacaacctgactgtgcactactgctaccaggtgggcggccaggagcaggtgcgggaggaggtgtcctgggacacagagaacagccacccccagcacaccatcaccaacctgagcccctacaccaacgtgtctgtgaagctgatcctgatgaaccctgagggcaggaaggagagccaggagctgattgtgcagacagatgaggacctgcctggagctgtgcccacagagagcatccagggcagcacctttgaggagaagatcttcctgcagtggagggagcccacccagacctatggagtcatcaccctgtatgagatcacctacaaggctgtgagcagctttgatcctgagattgacctgagcaaccagagcggccgggtgtccaagctgggcaatgagacccacttcctgttcttcggcctgtacccaggcaccacctacagcttcaccatccgggccagcacagccaagggcttcggccccccagccaccaaccagttcaccaccaagatcagcgcccccagcatgcctgcctatgagctggagacccccctgaaccagacagacaacacagtgacagtgatgctgaagccagcccacagcagaggagcccctgtgtctgtgtaccagatcgtggtggaggaggagcggcccaggaggaccaagaagaccacagagatcctgaagtgctaccctgtgcccatccacttccagaatgccagcctgctgaacagccagtactactttgctgctgagttccctgctgacagcctgcaggccgcccagcccttcaccatcggggacaacaagacctacaacggctactggaacacccccctgctgccctacaagagctaccgcatctacttccaggccgccagccgggccaacggggagaccaagattgactgtgtgcaggtggccaccaagggagctgccacccccaagcctgtgcctgagcctgagaagcagacagaccacacagtgaagattgctggggtgattgctggcatcctgctcttcgtcatcatcttcctgggcgtggtgctggtgatgaagaagaggaagctggccaagaagaggaaggagaccatgagcagcacccggcaggagatgacagtgatggtgaacagcatggacaagagctatgcagagcagggcaccaactgtgatgaggccttctccttcatggacacccacaacctgaatggccgctctgtgagcagccccagcagcttcaccatgaagaccaacaccctgagcacctctgtgcccaacagctactacccagatgagacccacaccatggccagtgacaccagcagcctggtgcagagccacacctacaagaagcgggagccagcagatgtgccctaccagacaggccagctgcacccagccatccgggtggccgacctgctgcagcacatcacccagatgaagtgtgccgagggctacggcttcaaggaggagtatgagagcttctttgagggccagagcgccccctgggacagcgccaagaaggatgaaaataggatgaagaacagatatggcaacatcatcgcctatgaccacagccgggtgcggctgcagaccatcgagggggacaccaacagcgactacatcaatggaaactacattgatggctaccaccggcccaaccactacatcgccacccagggccccatgcaggagaccatctatgacttctggaggatggtgtggcatgagaacacagccagcatcatcatggtgaccaacctggtggaggtgggccgggtgaagtgctgcaagtactggccagatgacacagagatctacaaggacatcaaggtgaccctcatcgagacagagctgctggccgagtatgtgatccgcacctttgctgtggagaagaggggcgtgcatgagatccgggagatccggcagttccacttcaccggctggccagaccatggagtgccctaccacgccaccggcctgctgggctttgtgcggcaggtgaagagcaagagcccccccagcgctggccccctggtggtgcactgcagcgctggggccggccgcacaggctgcttcatcgtgattgacatcatgctggacatggccgagcgggagggcgtggtggacatctacaactgtgtgcgggagctgcggagccggcgggtgaacatggtgcagacagaggagcagtatgtgttcatccatgatgccatcctggaggcctgcctgtgtggggacacctctgtgcctgccagccaggtgcgcagcctgtactatgacatgaacaagctggacccccagaccaacagcagccagatcaaggaggagttccgcaccctgaacatggtgacccccaccctgcgggtggaggactgcagcatcgccctgctgcccagaaatcatgagaagaaccgctgcatggacatcctgcccccagaccgctgcctgcccttcctgatcaccattgatggagagagcagcaactacatcaatgctgccctgatggacagctacaagcagcccagcgccttcatcgtgacccagcaccccctgcccaacacagtgaaggacttctggaggctggtgctggactaccactgcacctctgtggtgatgctgaatgatgtggaccctgcccagctgtgcccccagtactggccagaaaatggagtgcaccgccacggccccatccaggtggagtttgtgtctgctgacctggaggaggacatcatcagccgcatcttccgcatctacaatgctgcccggccccaggacggctacaggatggtgcagcagttccagttcctgggctggcccatgtacagagacacccctgtgtccaagaggagcttcctgaagctgatccggcaggtggacaagtggcaggaggagtacaacggcggggagggccgcacagtggtgcactgcctgaatggaggcggccgcagcggcaccttctgtgccatcagcatcgtgtgtgagatgctgcggcaccagaggacagtggatgtgttccacgctgtgaagaccctgaggaacaacaagcccaacatggtggacctgctggaccagtacaagttctgctatgaggtggccctggagtacctgaacagcggctag

SEQ ID NO: 166362 - DNA, 2940 bp, synthetic construct
  misc_feature 1..2940: note = Description of Artificial Sequence: Synthetic coding sequence
  source 1..2940: mol_type = other DNA
atgaggcggcccaggaggcctgggggcctgggcggcagcggcggcctgcggctgctgctgtgcctgctgctgctgagcagcaggcctgggggctgcagcgctgtgtctgcccacggctgcctgtttgaccggcggctgtgcagccacctggaggtgtgcatccaggacggcctgtttggccagtgccaggtgggcgtgggccaggcccggcccctgctgcaggtgaccagccctgtgctgcagaggctgcagggcgtgctgcggcagctgatgagccagggcctgtcctggcatgatgacctgacccagtatgtgatcagccaggagatggagcgcatcccccggctgcggcccccagagccccggccccgggacagaagtggcctggcccccaagaggcctggccctgctggggagctgctgctgcaggacatccccactggaagtgccccagctgcccagcaccggctgccccagccccctgtgggcaagggcggggccggggccagcagcagcctgagccccctgcaggccgagctgctgccccccctgctggagcacctgctgctgcccccccagcccccccaccccagcctgtcctatgagcccgccctgctgcagccctacctgttccaccagtttggcagcagagatggcagccgggtgtctgagggcagccctggcatggtgtctgtgggccccctgcccaaggccgaggccccagccctcttcagcaggacagccagcaagggcatctttggagaccaccctggccacagctatggagacctgcccggccccagccctgcccagctgttccaggacagcggcctgctgtacctggcccaggagctgcctgcccccagccgggcccgggtgccccggctgcctgagcagggcagcagcagcagagctgaggacagccctgagggctatgagaaggagggcctgggggacagaggagagaagccagccagccctgctgtgcagccagatgctgccctgcagaggctggccgctgtgctggccggctatggagtggagctgcggcagctgaccccagagcagctgagcaccctgctgaccctgctgcagctgctgcccaagggagctggaagaaatcctggaggagtggtgaatgtgggcgctgacatcaagaagaccatggagggccctgtggagggccgggacacagctgagctgcctgcccggaccagccccatgcctggccaccccacagccagccccaccagcagcgaggtgcagcaggtgcccagccctgtgagcagcgagccccccaaggccgcccggccccctgtgacccctgtgctgctggagaagaagagccccctgggccagagccagcccaccgtggccggccagcccagcgcccggcctgctgctgaggagtatggctacatcgtgacagaccagaagcccctgagcctggccgccggcgtgaagctgctggagatcctggccgagcacgtgcacatgagcagcggcagcttcatcaacatctctgtggtgggccctgccctgaccttccgcatccgccacaatgagcagaacctgagcctggctgatgtgacccagcaggccggcctggtgaagtctgagctggaggcccagacaggcctgcagatcctgcagacaggagtgggccagcgggaggaggccgctgctgtgctgccccagacagcccacagcaccagccccatgaggtctgtgctgctgaccctggtggccctggccggcgtggccggcctgctggtggccctggccgtggccctgtgtgtgcggcagcacgcccggcagcaggacaaggagcggctggccgccctgggccctgagggcgcccatggagacaccacctttgagtaccaggacctgtgccggcagcacatggccaccaagagcctcttcaacagagctgagggccccccagagcccagccgggtgtcctctgtgagcagccagttcagtgatgctgcccaggccagccccagcagccacagcagcacccccagctggtgtgaggagcccgcccaggccaacatggacatcagcacaggccacatgatcctggcctacatggaggaccacctgaggaacagagaccggctggccaaggagtggcaggccctgtgtgcctaccaggccgagcccaacacctgtgccacagcccagggcgagggcaacatcaagaagaacagacacccagacttcctgccctatgaccacgcccgcatcaagctgaaggtggagagcagccccagcagaagtgactacatcaatgccagccccatcattgaacatgaccccaggatgcctgcctacatcgccacccagggccccctgagccacaccatcgctgacttctggcagatggtgtgggagagcggctgcaccgtcatcgtgatgctgacccccctggtggaggatggagtgaagcagtgtgaccgctactggccagatgagggcgccagcctgtaccacgtgtatgaggtgaacctggtgtctgagcacatctggtgtgaggacttcctggtgcgctccttctacctgaagaatgtgcagacccaggagaccaggaccctgacccagttccacttcctgtcctggccagctgagggcaccccagccagcacccggcccctgctggacttccggaggaaggtgaacaagtgctaccggggccgcagctgccccatcatcgtgcactgcagtgatggagctggccgcacaggcacctacatcctgattgacatggtgctgaacaggatggccaagggcgtgaaggagattgatattgctgccaccctggagcacgtgcgggaccagaggcctggcctggtgcgcagcaaggaccagtttgaatttgccctgacagctgtggccgaggaggtgaatgccatcctgaaggccctgccccagtag

SEQ ID NO: 166363 - DNA, 2853 bp, synthetic construct
  misc_feature 1..2853: note = Description of Artificial Sequence: Synthetic coding sequence
  source 1..2853: mol_type = other DNA
atgaggcggcccaggaggcctgggggcctgggcggcagcggcggcctgcggctgctgctgtgcctgctgctgctgagcagcaggcctgggggctgcagcgctgtgtctgcccacggctgcctgtttgaccggcggctgtgcagccacctggaggtgtgcatccaggacggcctgtttggccagtgccaggtgggcgtgggccaggcccggcccctgctgcaggtgaccagccctgtgctgcagaggctgcagggcgtgctgcggcagctgatgagccagggcctgtcctggcatgatgacctgacccagtatgtgatcagccaggagatggagcgcatcccccggctgcggcccccagagccccggccccgggacagaagtggcctggcccccaagaggcctggccctgctggggagctgctgctgcaggacatccccactggaagtgccccagctgcccagcaccggctgccccagccccctgtgggcaagggcggggccggggccagcagcagcctgagccccctgcaggccgagctgctgccccccctgctggagcacctgctgctgcccccccagcccccccaccccagcctgtcctatgagcccgccctgctgcagccctacctgttccaccagtttggcagcagagatggcagccgggtgtctgagggcagccctggcatggtgtctgtgggccccctgcccaaggccgaggccccagccctcttcagcaggacagccagcaagggcatctttggagaccaccctggccacagctatggagacctgcccggccccagccctgcccagctgttccaggacagcggcctgctgtacctggcccaggagctgcctgcccccagccgggcccgggtgccccggctgcctgagcagggcagcagcagcagagctgaggacagccctgagggctatgagaaggagggcctgggggacagaggagagaagccagccagccctgctgtgcagccagatgctgccctgcagaggctggccgctgtgctggccggctatggagtggagctgcggcagctgaccccagagcagctgagcaccctgctgaccctgctgcagctgctgcccaagggagctggaagaaatcctggaggagtggtgaatgtgggcgctgacatcaagaagaccatggagggccctgtggagggccgggacacagctgagctgcctgcccggaccagccccatgcctggccaccccacagccagccccaccagcagcgaggtgcagcaggtgcccagccctgtgagcagcgagccccccaaggccgcccggccccctgtgacccctgtgctgctggagaagaagagccccctgggccagagccagcccaccgtggccggccagcccagcgcccggcctgctgctgaggagtatggctacatcgtgacagaccagaatgtggtgggccctgccctgaccttccgcatccgccacaatgagcagaacctgagcctggctgatgtgacccagcaggccggcctggtgaagtctgagctggaggcccagacaggcctgcagatcctgcagacaggagtgggccagcgggaggaggccgctgctgtgctgccccagacagcccacagcaccagccccatgaggtctgtgctgctgaccctggtggccctggccggcgtggccggcctgctggtggccctggccgtggccctgtgtgtgcggcagcacgcccggcagcaggacaaggagcggctggccgccctgggccctgagggcgcccacggggacaccacctttgagtaccaggacctgtgccggcagcacatggccaccaagagcctcttcaacagagctgagggccccccagagcccagccgggtgtcctctgtgagcagccagttcagtgatgctgcccaggccagccccagcagccacagcagcacccccagctggtgtgaggagcccgcccaggccaacatggacatcagcacaggccacatgatcctggcctacatggaggaccacctgaggaacagagaccggctggccaaggagtggcaggccctgtgtgcctaccaggccgagcccaacacctgtgccacagcccagggcgagggcaacatcaagaagaacagacacccagacttcctgccctatgaccacgcccgcatcaagctgaaggtggagagcagccccagcagaagtgactacatcaatgccagccccatcatcgagcatgaccccaggatgcctgcctacatcgccacccagggccccctgagccacaccatcgctgacttctggcagatggtgtgggagagcggctgcaccgtgattgtgatgctgacccccctggtggaggatggagtgaagcagtgtgaccgctactggccagatgaaggagccagcctgtaccacgtgtatgaggtgaacctggtgtctgagcacatctggtgtgaggacttcctggtgcgctccttctacctgaagaatgtgcagacccaggagaccaggaccctgacccagttccacttcctgtcctggccagctgagggcaccccagccagcacccggcccctgctggacttccggaggaaggtgaacaagtgctaccggggccgcagctgccccatcatcgtgcactgcagtgatggagctggccgcacaggcacctacatcctgattgacatggtgctgaacaggatggccaagggcgtgaaggagattgatattgctgccaccctggagcacgtgcgggaccagaggcctggcctggtgcgcagcaaggaccagtttgaatttgccctgacagctgtggccgaggaggtgaatgccatcctgaaggccctgccccagtag

SEQ ID NO: 166364 - DNA, 489 bp, synthetic construct
  misc_feature 1..489: note = Description of Artificial Sequence: Synthetic coding sequence
  source 1..489: mol_type = other DNA
atgaggcggcccaggaggcctgggggcctgggcggcagcggcggcctgcggctgctgctgtgcctgctgctgctgagcagcaggcctgggggctgcagcgctgtgtctgcccacggctgcctgtttgaccggcggctgtgcagccacctggaggtgtgcatccaggacggcctgtttggccagtgccaggtgggcgtgggccaggcccggcccctgctgcaggtgaccagccctgtgctgcagaggctgcagggcgtgctgcggcagctgatgagccagggcctgtcctggcatgatgacctgacccagtatgtgatcagccaggagatggagcgcatcccccggctgcggcccccagagccccggccccgggacagaagtggcctggcccccaagaggcctggccctgctggggagctgctgctgcaggacatccccactggaagtgccccagctgcccagctgctgtctgtgcccagcgctggatag

SEQ ID NO: 166365 - DNA, 2670 bp, synthetic construct
  misc_feature 1..2670: note = Description of Artificial Sequence: Synthetic coding sequence
  source 1..2670: mol_type = other DNA
atgagccagggcctgtcctggcatgatgacctgacccagtatgtgatcagccaggagatggagcgcatcccccggctgcggcccccagagccccggccccgggacagaagtggcctggcccccaagaggcctggccctgctggggagctgctgctgcaggacatccccactggaagtgccccagctgcccagcaccggctgccccagccccctgtgggcaagggcggggccggggccagcagcagcctgagccccctgcaggccgagctgctgccccccctgctggagcacctgctgctgcccccccagcccccccaccccagcctgtcctatgagcccgccctgctgcagccctacctgttccaccagtttggcagcagagatggcagccgggtgtctgagggcagccctggcatggtgtctgtgggccccctgcccaaggccgaggccccagccctcttcagcaggacagccagcaagggcatctttggagaccaccctggccacagctatggagacctgcccggccccagccctgcccagctgttccaggacagcggcctgctgtacctggcccaggagctgcctgcccccagccgggcccgggtgccccggctgcctgagcagggcagcagcagcagagctgaggacagccctgagggctatgagaaggagggcctgggggacagaggagagaagccagccagccctgctgtgcagccagatgctgccctgcagaggctggccgctgtgctggccggctatggagtggagctgcggcagctgaccccagagcagctgagcaccctgctgaccctgctgcagctgctgcccaagggagctggaagaaatcctggaggagtggtgaatgtgggcgctgacatcaagaagaccatggagggccctgtggagggccgggacacagctgagctgcctgcccggaccagccccatgcctggccaccccacagccagccccaccagcagcgaggtgcagcaggtgcccagccctgtgagcagcgagccccccaaggccgcccggccccctgtgacccctgtgctgctggagaagaagagccccctgggccagagccagcccaccgtggccggccagcccagcgcccggcctgctgctgaggagtatggctacatcgtgacagaccagaagcccctgagcctggccgccggcgtgaagctgctggagatcctggccgagcacgtgcacatgagcagcggcagcttcatcaacatctctgtggtgggccctgccctgaccttccgcatccgccacaatgagcagaacctgagcctggctgatgtgacccagcaggccggcctggtgaagtctgagctggaggcccagacaggcctgcagatcctgcagacaggagtgggccagcgggaggaggccgctgctgtgctgccccagacagcccacagcaccagccccatgaggtctgtgctgctgaccctggtggccctggccggcgtggccggcctgctggtggccctggccgtggccctgtgtgtgcggcagcacgcccggcagcaggacaaggagcggctggccgccctgggccctgagggcgcccatggagacaccacctttgagtaccaggacctgtgccggcagcacatggccaccaagagcctcttcaacagagctgagggccccccagagcccagccgggtgtcctctgtgagcagccagttcagtgatgctgcccaggccagccccagcagccacagcagcacccccagctggtgtgaggagcccgcccaggccaacatggacatcagcacaggccacatgatcctggcctacatggaggaccacctgaggaacagagaccggctggccaaggagtggcaggccctgtgtgcctaccaggccgagcccaacacctgtgccacagcccagggcgagggcaacatcaagaagaacagacacccagacttcctgccctatgaccacgcccgcatcaagctgaaggtggagagcagccccagcagaagtgactacatcaatgccagccccatcattgaacatgaccccaggatgcctgcctacatcgccacccagggccccctgagccacaccatcgctgacttctggcagatggtgtgggagagcggctgcaccgtcatcgtgatgctgacccccctggtggaggatggagtgaagcagtgtgaccgctactggccagatgagggcgccagcctgtaccacgtgtatgaggtgaacctggtgtctgagcacatctggtgtgaggacttcctggtgcgctccttctacctgaagaatgtgcagacccaggagaccaggaccctgacccagttccacttcctgtcctggccagctgagggcaccccagccagcacccggcccctgctggacttccggaggaaggtgaacaagtgctaccggggccgcagctgccccatcatcgtgcactgcagtgatggagctggccgcacaggcacctacatcctgattgacatggtgctgaacaggatggccaagggcgtgaaggagattgatattgctgccaccctggagcacgtgcgggaccagaggcctggcctggtgcgcagcaaggaccagtttgaatttgccctgacagctgtggccgaggaggtgaatgccatcctgaaggccctgccccagtag

SEQ ID NO: 166366 - DNA, 2853 bp, synthetic construct; identical to SEQ ID NO: 166363
  misc_feature 1..2853: note = Description of Artificial Sequence: Synthetic coding sequence
  source 1..2853: mol_type = other DNA

SEQ ID NO: 166367 - DNA, 2961 bp, synthetic construct
  misc_feature 1..2961: note = Description of Artificial Sequence: Synthetic coding sequence
  source 1..2961: mol_type = other DNA
atgggcccccccctgcccctgctgctgctgctgctgctgctgctgcccccccgggtgctgcctgctgcccccagctctgtgccccggggccggcagctgcccggccgcctgggctgcctgctggaggagggcctgtgtggggccagcgaggcctgtgtgaatgatggagtgtttggccgctgccagaaggtgcctgccatggacttctaccgctatgaggtgtcccctgtggccctgcagaggctgcgggtggccctgcagaagctgagcggcaccggcttcacctggcaggatgactacacccagtatgtgatggaccaggagctggccgacctgcccaagacctacctgcggcggcctgaggccagcagccctgcccggcccagcaagcacagcgtgggcagcgagcggcgctacagccgggagggcggggccgccctggccaatgccctgcggcggcacctgcccttcctggaggccctgagccaggccccagccagtgatgtgctggcccggacccacacagcccaggaccggcccccagcagaaggagatgaccgcttcagcgagagcatcctgacctacgtggcccacaccagcgccctgacctacccacctggcagcaggacccagctgcgggaggacctgctgcccaggaccctgggccagctgcagccagatgagctgagccccaaggtggacagcggcgtggacagacaccacctgatggccgccctgagcgcctatgctgcccagaggcccccagcccctcctggagagggcagcctggagccccagtacctgctgcgggcccccagcaggatgccccggcccctgctggccccagctgccccccagaagtggcccagccccctgggggacagcgaggaccccagcagcactggagatggagcccgcatccacaccctgctgaaggacctgcagaggcagcctgctgaggtgcggggcctgagcggcctggagctggatggcatggccgagctgatggccggcctgatgcagggcgtggaccatggagtggcccggggcagccctggccgggccgccctgggggagagcggggagcaggctgatggccccaaggccaccctgcggggggacagcttcccagatgatggagtgcaggatgatgatgaccggctgtaccaggaggtgcaccggctgagcgccaccctgggcggcctgctgcaggaccacggcagccggctgctgcccggggccctgccctttgcccggcccctggacatggagaggaagaagtctgagcaccctgagagcagcctgagcagcgaggaggagacagctggggtggagaatgtgaagagccagacctacagcaaggacctgctgggccagcagccccacagcgagcctggagctgctgccttcggggagctgcagaaccagatgcctggccccagcaaggaggagcagagcctgcctgctggggcccaggaggccctgagtgatggcctgcagctggaggtgcagcccagcgaggaggaggcccggggctacatcgtgacagaccgggaggtgctgggccctgctgtgaccttcaaggtgtctgccaacgtgcagaatgtgaccacagaagatgtggagaaggccaccgtggacaacaaggacaagctggaggagaccagcggcctgaagatcctgcagacaggagtgggcagcaagagcaagctgaagttcctgcccccccaggccgagcaggaggacagcaccaagttcatcgccctgaccctggtgtccctggcctgcatcctgggcgtgctgctggccagcggcctcatctactgcctgcggcacagcagccagcaccggctgaaggagaagctgagcggcctgggcggggaccctggagcagatgccacagctgcctaccaggagctgtgccggcagaggatggccacccggcccccagacaggcctgagggcccccacaccagccgcatcagctctgtgagcagccagttcagtgatggccccatccccagccccagcgcccggagcagcgccagctcctggagcgaggagcctgtgcagagcaacatggacatcagcacaggccacatgatcctgagctacatggaggaccacctgaagaacaagaaccggctggagaaggagtgggaggccctgtgtgcctaccaggccgagcccaacagcagctttgtggcccagcgggaggagaatgtgcccaagaacagaagcctggccgtgctgacctatgaccacagccgggtgctgctgaaggccgagaacagccacagccacagcgactacatcaatgccagccccatcatggaccatgaccccagaaatcctgcctacatcgccacccagggccccctgcctgccaccgtggccgacttctggcagatggtgtgggagagcggctgtgtggtgattgtgatgctgacccccctggctgaaaatggagtgcggcagtgctaccactactggccagatgagggcagcaacctgtaccacatctatgaggtgaacctggtgtctgagcacatctggtgtgaggacttcctggtgcgctccttctacctgaagaacctgcagaccaatgagaccaggacagtgacccagttccacttcctgtcctggtatgaccggggcgtgcccagcagcagccgcagcctgctggacttccggaggaaggtgaacaagtgctaccggggccgcagctgccccatcatcgtgcactgcagtgatggagctggccgcagcggcacctacgtgctgattgacatggtgctgaacaagatggccaagggggccaaggagattgatattgctgccaccctggagcacctgcgggaccagaggcctggcatggtgcagaccaaggagcagtttgaatttgccctgacagctgtggccgaggaggtgaatgccatcctgaaggccctgccccagtag

SEQ ID NO: 166368 - DNA, 2997 bp, synthetic construct
  misc_feature 1..2997: note = Description of Artificial Sequence: Synthetic coding sequence
  source 1..2997: mol_type = other DNA
atgggcccccccctgcccctgctgctgctgctgctgctgctgctgcccccccgggtgctgcctgctgcccccagctctgtgccccggggccggcagctgcccggccgcctggatggagtgtttggccgctgccagaaggtgcctgccatggacttctaccgctatgaggtgtcccctgtggccctgcagaggctgcgggtggccctgcagaagctgtctggaacaggcttcacctggcaggatgactacacccagtatgtgatggaccaggagctggccgacctgcccaagacctacctgcggcggcctgaggccagcagccctgcccggcccagcaagcacagcgtgggcagcgagcggcgctacagccgggagggcggggccgccctggccaatgccctgcggcggcacctgcccttcctggaggccctgagccaggccccagccagtgatgtgctggcccggacccacacagcccaggaccggcccccagcagaaggagatgaccgcttcagcgagagcatcctgacctacgtggcccacaccagcgccctgacctacccacctggcagcaggacccagctgcgggaggacctgctgcccaggaccctgggccagctgcagccagatgagctgagccccaaggtggacagcggcgtggacagacaccacctgatggccgccctgagcgcctatgctgcccagaggcccccagcccctcctggagagggcagcctggagccccagtacctgctgcgggcccccagcaggatgccccggcccctgctggccccagctgccccccagaagtggcccagccccctgggggacagcgaggaccccagcagcactggagatggagcccgcatccacaccctgctgaaggacctgcagaggcagcctgctgaggtgcggggcctgagcggcctggagctggatggcatggccgagctgatggccggcctgatgcagggcgtggaccacggcgtggcccggggcagccctggccgggccgccctgggggagagcggggagcaggctgatggccccaaggccaccctgcggggggacagcttcccagatgatggagtgcaggatgatgatgaccggctgtaccaggaggtgcaccggctgagcgccaccctgggcggcctgctgcaggaccacggcagccggctgctgcccggggccctgccctttgcccggcccctggacatggagaggaagaagtctgagcaccctgagagcagcctgagcagcgaggaggagacagctggggtggagaatgtgaagagccagacctacagcaaggacctgctgggccagcagccccacagcgagcccggggctgctgcctttggagagctgcagaaccagatgcctggccccagcaaggaggagcagagcctgcctgctggggcccaggaggccctgagtgatggcctgcagctggaggtgcagcccagcgaggaggaggcccggggctacatcgtgacagaccgggaccccctgcggcctgaggagggccggcggctggtggaggatgtggcccggctgctgcaggtgcccagcagcgcctttgctgatgtggaggtgctgggccctgctgtgaccttcaaggtgtctgccaacgtgcagaatgtgaccacagaagatgtggagaaggccaccgtggacaacaaggacaagctggaggagaccagcggcctgaagatcctgcagacaggagtgggcagcaagagcaagctgaagttcctgcccccccaggccgagcaggaggacagcaccaagttcatcgccctgaccctggtgtccctggcctgcatcctgggcgtgctgctggccagcggcctcatctactgcctgcggcacagcagccagcaccggctgaaggagaagctgagcggcctgggcggggaccctggagcagatgccacagctgcctaccaggagctgtgccggcagaggatggccacccggcccccagacaggcctgagggcccccacaccagccgcatcagctctgtgagcagccagttcagtgatggccccatccccagccccagcgcccggagcagcgccagctcctggagcgaggagcctgtgcagagcaacatggacatcagcacaggccacatgatcctgagctacatggaggaccacctgaagaacaagaaccggctggagaaggagtgggaggccctgtgtgcctaccaggccgagcccaacagcagctttgtggcccagcgggaggagaatgtgcccaagaacagaagcctggccgtgctgacctatgaccacagccgggtgctgctgaaggccgagaacagccacagccacagcgactacatcaatgccagccccatcatggaccatgaccccagaaatcctgcctacatcgccacccagggccccctgcctgccaccgtggccgacttctggcagatggtgtgggagagcggctgtgtggtgattgtgatgctgacccccctggctgaaaatggagtgcggcagtgctaccactactggccagatgagggcagcaacctgtaccacatctatgaggtgaacctggtgtctgagcacatctggtgtgaggacttcctggtgcgctccttctacctgaagaacctgcagaccaatgagaccaggacagtgacccagttccacttcctgtcctggtatgaccggggcgtgcccagcagcagccgcagcctgctggacttccggaggaaggtgaacaagtgctaccggggccgcagctgccccatcatcgtgcactgcagtgatggagctggccgcagcggcacctacgtgctgattgacatggtgctgaacaagatggccaagggggccaaggagattgatattgctgccaccctggagcacctgcgggaccagaggcctggcatggtgcagaccaaggagcagtttgaatttgccctgacagctgtggccgaggaggtgaatgccatcctgaaggccctgccccagtag

SEQ ID NO: 166369 - DNA, 3048 bp, synthetic construct
  misc_feature 1..3048: note = Description of Artificial Sequence: Synthetic coding sequence
  source 1..3048: mol_type = other DNA
atgggcccccccctgcccctgctgctgctgctgctgctgctgctgcccccccgggtgctgcctgctgcccccagctctgtgccccggggccggcagctgcccggccgcctgggctgcctgctggaggagggcctgtgtggggccagcgaggcctgtgtgaatgatggagtgtttggccgctgccagaaggtgcctgccatggacttctaccgctatgaggtgtcccctgtggccctgcagaggctgcgggtggccctgcagaagctgagcggcaccggcttcacctggcaggatgactacacccagtatgtgatggaccaggagctggccgacctgcccaagacctacctgcggcggcctgaggccagcagccctgcccggcccagcaagcacagcgtgggcagcgagcggcgctacagccgggagggcggggccgccctggccaatgccctgcggcggcacctgcccttcctggaggccctgagccaggccccagccagtgatgtgctggcccggacccacacagcccaggaccggcccccagcagaaggagatgaccgcttcagcgagagcatcctgacctacgtggcccacaccagcgccctgacctacccacctggcagcaggacccagctgcgggaggacctgctgcccaggaccctgggccagctgcagccagatgagctgagccccaaggtggacagcggcgtggacagacaccacctgatggccgccctgagcgcctatgctgcccagaggcccccagcccctcctggagagggcagcctggagccccagtacctgctgcgggcccccagcaggatgccccggcccctgctggccccagctgccccccagaagtggcccagccccctgggggacagcgaggaccccagcagcactggagatggagcccgcatccacaccctgctgaaggacctgcagaggcagcctgctgaggtgcggggcctgagcggcctggagctggatggcatggccgagctgatggccggcctgatgcagggcgtggaccatggagtggcccggggcagccctggccgggccgccctgggggagagcggggagcaggctgatggccccaaggccaccctgcggggggacagcttcccagatgatggagtgcaggatgatgatgaccggctgtaccaggaggtgcaccggctgagcgccaccctgggcggcctgctgcaggaccacggcagccggctgctgcccggggccctgccctttgcccggcccctggacatggagaggaagaagtctgagcaccctgagagcagcctgagcagcgaggaggagacagctggggtggagaatgtgaagagccagacctacagcaaggacctgctgggccagcagccccacagcgagcctggagctgctgccttcggggagctgcagaaccagatgcctggccccagcaaggaggagcagagcctgcctgctggggcccaggaggccctgagtgatggcctgcagctggaggtgcagcccagcgaggaggaggcccggggctacatcgtgacagaccgggaccccctgcggcctgaggagggccgccgcctggtggaggatgtggcccggctgctgcaggtgcccagcagcgcctttgctgatgtggaggtgctgggccctgctgtgaccttcaaggtgtctgccaacgtgcagaatgtgaccacagaagatgtggagaaggccaccgtggacaacaaggacaagctggaggagaccagcggcctgaagatcctgcagacaggagtgggcagcaagagcaagctgaagttcctgcccccccaggccgagcaggaggacagcaccaagttcatcgccctgaccctggtgtccctggcctgcatcctgggcgtgctgctggccagcggcctcatctactgcctgcggcacagcagccagcaccggctgaaggagaagctgagcggcctgggcggggaccccggggctgatgccacagctgcctaccaggagctgtgccggcagaggatggccacccggcccccagacaggcctgagggcccccacaccagccgcatcagctctgtgagcagccagttcagtgatggccccatccccagccccagcgcccggagcagcgccagctcctggagcgaggagcctgtgcagagcaacatggacatcagcacaggccacatgatcctgagctacatggaggaccacctgaagaacaagaaccggctggagaaggagtgggaggccctgtgtgcctaccaggccgagcccaacagcagctttgtggcccagcgggaggagaatgtgcccaagaacagaagcctggccgtgctgacctatgaccacagccgggtgctgctgaaggccgagaacagccacagccacagcgactacatcaatgccagccccatcatggaccatgaccccaggaacccagcctacatcgccacccagggccccctgcctgccaccgtggccgacttctggcagatggtgtgggagagcggctgtgtggtgattgtgatgctgacccccctggccgagaatggagtgcggcagtgctaccactactggccagatgagggcagcaacctgtaccacatctatgaggtgaacctggtgtctgagcacatctggtgtgaggacttcctggtgcgctccttctacctgaagaacctgcagaccaatgagaccaggacagtgacccagttccacttcctgtcctggtatgacagaggagtgcccagcagcagccgcagcctgctggacttccggaggaaggtgaacaagtgctaccggggccgcagctgccccatcatcgtgcactgcagtgatggagctggccgcagcggcacctacgtgctgattgacatggtgctgaacaagatggccaagggggccaaggagattgatattgctgccaccctggagcacctgcgggaccagaggcctggcatggtgcagaccaaggagcagtttgaatttgccctgacagctgtggccgaggaggtgaatgccatcctgaaggccctgccccagtag

SEQ ID NO: 166370 - DNA, 3117 bp, synthetic construct
  misc_feature 1..3117: note = Description of Artificial Sequence: Synthetic coding sequence
  source 1..3117: mol_type = other DNA
atggctgtggagagcgagtacagcctgctgaggacagaggccagcttccccaccatgaagatgttctgtgtgagccacaccctgccccgggtggaggtgatgtttgtgtctggcccccagacccgggagaggacagagcctgtggacccccgctggcagtgcctggtgcagatgtgggccggctgcctgctggaggagggcctgtgtggggccagcgaggcctgtgtgaatgatggagtgtttggccgctgccagaaggtgcctgccatggacttctaccgctatgaggtgtcccctgtggccctgcagaggctgcgggtggccctgcagaagctgtctggaacaggcttcacctggcaggatgactacacccagtatgtgatggaccaggagctggccgacctgcccaagacctacctgcggcggcctgaggccagcagccctgcccggcccagcaagcacagcgtgggcagcgagcggcgctacagccgggagggcggggccgccctggccaatgccctgcggcggcacctgcccttcctggaggccctgagccaggccccagccagtgatgtgctggcccggacccacacagcccaggaccggcccccagcagaaggagatgaccgcttcagcgagagcatcctgacctacgtggcccacaccagcgccctgacctacccacctggcagcaggacccagctgcgggaggacctgctgcccaggaccctgggccagctgcagccagatgagctgagccccaaggtggacagcggcgtggacagacaccacctgatggccgccctgagcgcctatgctgcccagaggcccccagcccctcctggagagggcagcctggagccccagtacctgctgcgggcccccagcaggatgccccggcccctgctggccccagctgccccccagaagtggcccagccccctgggggacagcgaggaccccagcagcactggagatggagcccgcatccacaccctgctgaaggacctgcagaggcagcctgctgaggtgcggggcctgagcggcctggagctggatggcatggccgagctgatggccggcctgatgcagggcgtggaccacggcgtggcccggggcagccctggccgggccgccctgggggagagcggggagcaggctgatggccccaaggccaccctgcggggggacagcttcccagatgatggagtgcaggatgatgatgaccggctgtaccaggaggtgcaccggctgagcgccaccctgggcggcctgctgcaggaccacggcagccggctgctgcccggggccctgccctttgcccggcccctggacatggagaggaagaagtctgagcaccctgagagcagcctgagcagcgaggaggagacagctggggtggagaatgtgaagagccagacctacagcaaggacctgctgggccagcagccccacagcgagcccggggctgctgcctttggagagctgcagaaccagatgcctggccccagcaaggaggagcagagcctgcctgctggggcccaggaggccctgagtgatggcctgcagctggaggtgcagcccagcgaggaggaggcccggggctacatcgtgacagaccgggaccccctgcggcctgaggagggccggcggctggtggaggatgtggcccggctgctgcaggtgcccagcagcgcctttgctgatgtggaggtgctgggccctgctgtgaccttcaaggtgtctgccaacgtgcagaatgtgaccacagaagatgtggagaaggccaccgtggacaacaaggacaagctggaggagaccagcggcctgaagatcctgcagacaggagtgggcagcaagagcaagctgaagttcctgcccccccaggccgagcaggaggacagcaccaagttcatcgccctgaccctggtgtccctggcctgcatcctgggcgtgctgctggccagcggcctcatctactgcctgcggcacagcagccagcaccggctgaaggagaagctgagcggcctgggcggggaccctggagcagatgccacagctgcctaccaggagctgtgccggcagaggatggccacccggcccccagacaggcctgagggcccccacaccagccgcatcagctctgtgagcagccagttcagtgatggccccatccccagccccagcgcccggagcagcgccagctcctggagcgaggagcctgtgcagagcaacatggacatcagcacaggccacatgatcctgagctacatggaggaccacctgaagaacaagaaccggctggagaaggagtgggaggccctgtgtgcctaccaggccgagcccaacagcagctttgtggcccagcgggaggagaatgtgcccaagaacagaagcctggccgtgctgacctatgaccacagccgggtgctgctgaaggccgagaacagccacagccacagcgactacatcaatgccagccccatcatggaccatgaccccagaaatcctgcctacatcgccacccagggccccctgcctgccaccgtggccgacttctggcagatggtgtgggagagcggctgtgtggtgattgtgatgctgacccccctggctgaaaatggagtgcggcagtgctaccactactggccagatgagggcagcaacctgtaccacatctatgaggtgaacctggtgtctgagcacatctggtgtgaggacttcctggtgcgctccttctacctgaagaacctgcagaccaatgagaccaggacagtgacccagttccacttcctgtcctggtatgaccggggcgtgcccagcagcagccgcagcctgctggacttccggaggaaggtgaacaagtgctaccggggccgcagctgccccatcatcgtgcactgcagtgatggagctggccgcagcggcacctacgtgctgattgacatggtgctgaacaagatggccaagggggccaaggagattgatattgctgccaccctggagcacctgcgggaccagaggcctggcatggtgcagaccaaggagcagtttgaatttgccctgacagctgtggccgaggaggtgaatgccatcctgaaggccctgccccagtag

SEQ ID NO: 166371 - DNA, 2934 bp, synthetic construct
  misc_feature 1..2934: note = Description of Artificial Sequence: Synthetic coding sequence
  source 1..2934: mol_type = other DNA
atgggcccccccctgcccctgctgctgctgctgctgctgctgctgcccccccgggtgctgcctgctgcccccagctctgtgccccggggccggcagctgcccggccgcctgggctgcctgctggaggagggcctgtgtggggccagcgaggcctgtgtgaatggcttcacctggcaggatgactacacccagtatgtgatggaccaggagctggccgacctgcccaagacctacctgcggcggcctgaggccagcagccctgcccggcccagcaagcacagcgtgggcagcgagcggcgctacagccgggagggcggggccgccctggccaatgccctgcggcggcacctgcccttcctggaggccctgagccaggccccagccagtgatgtgctggcccggacccacacagcccaggaccggcccccagcagaaggagatgaccgcttcagcgagagcatcctgacctacgtggcccacaccagcgccctgacctacccacctggcagcaggacccagctgcgggaggacctgctgcccaggaccctgggccagctgcagccagatgagctgagccccaaggtggacagcggcgtggacagacaccacctgatggccgccctgagcgcctatgctgcccagaggcccccagcccctcctggagagggcagcctggagccccagtacctgctgcgggcccccagcaggatgccccggcccctgctggccccagctgccccccagaagtggcccagccccctgggggacagcgaggaccccagcagcactggagatggagcccgcatccacaccctgctgaaggacctgcagaggcagcctgctgaggtgcggggcctgagcggcctggagctggatggcatggccgagctgatggccggcctgatgcagggcgtggaccatggagtggcccggggcagccctggccgggccgccctgggggagagcggggagcaggctgatggccccaaggccaccctgcggggggacagcttcccagatgatggagtgcaggatgatgatgaccggctgtaccaggaggtgcaccggctgagcgccaccctgggcggcctgctgcaggaccacggcagccggctgctgcccggggccctgccctttgcccggcccctggacatggagaggaagaagtctgagcaccctgagagcagcctgagcagcgaggaggagacagctggggtggagaatgtgaagagccagacctacagcaaggacctgctgggccagcagccccacagcgagcctggagctgctgccttcggggagctgcagaaccagatgcctggccccagcaaggaggagcagagcctgcctgctggggcccaggaggccctgagtgatggcctgcagctggaggtgcagcccagcgaggaggaggcccggggctacatcgtgacagaccgggaccccctgcggcctgaggagggccgccgcctggtggaggatgtggcccggctgctgcaggtgcccagcagcgcctttgctgatgtggaggtgctgggccctgctgtgaccttcaaggtgtctgccaacgtgcagaatgtgaccacagaagatgtggagaaggccaccgtggacaacaaggacaagctggaggagaccagcggcctgaagatcctgcagacaggagtgggcagcaagagcaagctgaagttcctgcccccccaggccgagcaggaggacagcaccaagttcatcgccctgaccctggtgtccctggcctgcatcctgggcgtgctgctggccagcggcctcatctactgcctgcggcacagcagccagcaccggctgaaggagaagctgagcggcctgggcggggaccccggggctgatgccacagctgcctaccaggagctgtgccggcagaggatggccacccggcccccagacaggcctgagggcccccacaccagccgcatcagctctgtgagcagccagttcagtgatggccccatccccagccccagcgcccggagcagcgccagctcctggagcgaggagcctgtgcagagcaacatggacatcagcacaggccacatgatcctgagctacatggaggaccacctgaagaacaagaaccggctggagaaggagtgggaggccctgtgtgcctaccaggccgagcccaacagcagctttgtggcccagcgggaggagaatgtgcccaagaacagaagcctggccgtgctgacctatgaccacagccgggtgctgctgaaggccgagaacagccacagccacagcgactacatcaatgccagccccatcatggaccatgaccccaggaacccagcctacatcgccacccagggccccctgcctgccaccgtggccgacttctggcagatggtgtgggagagcggctgtgtggtgattgtgatgctgacccccctggccgagaatggagtgcggcagtgctaccactactggccagatgagggcagcaacctgtaccacatctatgaggtgaacctggtgtctgagcacatctggtgtgaggacttcctggtgcgctccttctacctgaagaacctgcagaccaatgagaccaggacagtgacccagttccacttcctgtcctggtatgacagaggagtgcccagcagcagccgcagcctgctggacttccggaggaaggtgaacaagtgctaccggggccgcagctgccccatcatcgtgcactgcagtgatggagctggccgcagcggcacctacgtgctgattgacatggtgctgaacaagatggccaagggggccaaggagattgatattgctgccaccctggagcacctgcgggaccagaggcctggcatggtgcagaccaaggagcagtttgaatttgccctgacagctgtggccgaggaggtgaatgccatcctgaaggccctgccccagtag

SEQ ID NO: 166372 - DNA, 3651 bp, synthetic construct
  misc_feature 1..3651: note = Description of Artificial Sequence: Synthetic coding sequence
  source 1..3651: mol_type = other DNA
atgggccacctgcccaccggcatccatggagcccggcggctgctgcccctgctgtggctgtttgtgctcttcaagaatgccacagccttccacgtgacagtgcaggatgacaacaacatcgtggtgtccctggaggccagtgatgtgatcagccctgcctctgtgtatgtggtgaagatcactggagagagcaagaactacttctttgaatttgaggagttcaacagcaccctgcccccacctgtgatcttcaaggccagctaccacggcctgtactacatcatcaccctggtggtggtgaatggaaatgtggtgaccaagcccagccgcagcatcaccgtgctgaccaagcccctgcctgtgacctctgtgtccatctatgactacaagcccagccctgagactggagtgctgtttgagatccactacccagagaagtacaacgtgttcaccagggtgaacatctcctactgggagggcaaggacttccgcaccatgctgtacaaggacttcttcaagggcaagacagtgttcaaccactggctgcccggcatgtgctacagcaacatcaccttccagctggtgtctgaggccaccttcaacaagagcaccctggtggagtacagcggcgtgtcccatgagcccaagcagcacaggacagccccctacccaccccagaacatctctgtgcgcatcgtgaacctgaacaagaacaactgggaggagcagagcggcaacttccctgaggagagcttcatgaggagccaggacaccatcggcaaggagaagctgttccacttcacagaggagaccccagagatccccagcggcaacatcagcagcggctggccagacttcaacagcagtgactatgagaccaccagccagccctactggtgggacagcgccagcgctgcccctgagagtgaagatgaatttgtgtctgtgctgcccatggagtatgagaacaacagcaccctgtctgaaacagagaagagcaccagcggcagcttctccttcttccctgtgcagatgatcctgacctggctgccccccaagccacccacagcctttgatggcttccacatccacatcgagcgggaggagaacttcacagagtacctgatggtggatgaggaggcccacgagtttgtggccgagctgaaggagcccgggaagtacaagctgtctgtgaccaccttcagcagcagcggcagctgtgagaccaggaagagccagagcgccaagagcctgtccttctacatcagccccagcggggagtggattgaggagctgacagagaagccccagcacgtgtctgtgcacgtgctgagcagcaccacagccctgatgtcctggaccagcagccaggagaactacaacagcaccatcgtgtctgtggtgtccctgacctgccagaagcagaaggagagccagaggctggagaagcagtactgcacccaggtgaacagcagcaagcccatcatcgagaacctggtgcctggggcccagtaccaggtggtgatctacctgaggaagggccccctgattggccccccaagtgaccctgtgacctttgccatcgtgcccaccggcatcaaggacctgatgctgtaccccctgggccccacagctgtggtgctgtcctggacccggccctacctgggcgtcttcagaaaatatgtggtggagatgttctacttcaacccagccaccatgaccagcgagtggaccacctactatgaaattgctgccaccgtgtccctgacagcctctgtgagaattgccaacctgctgcctgcctggtactacaacttccgggtgaccatggtgacctggggagaccctgagctgagctgctgtgacagcagcaccatctccttcatcacagcccctgtggcccctgagatcacctctgtggagtacttcaacagcctgctgtacatctcctggacctatggagatgacaccacagacctgagccacagcaggatgctgcactggatggtggtggccgagggcaagaagaagatcaagaagtctgtgaccagaaatgtgatgacagccatcctgagcctgcccccaggggacatctacaacctgtctgtgacagcctgcacagagcggggcagcaacacctccatgctgcggctggtgaagctggagcccgccccacccaagagcctgtttgctgtgaacaagacccagacctctgtgaccctgctgtgggtggaggagggcgtggccgacttctttgaggtgttctgccagcaggtgggcagcagccagaagaccaagctgcaggagcctgtggccgtgagcagccacgtggtgaccatcagcagcctgctgcctgccacagcctacaactgcagcgtgaccagcttcagccatgacagccccagcgtgcccaccttcatcgctgtgtccaccatggtgacagagatgaaccccaacgtggtggtgatctctgtgctggccatcctgagcaccctgctgattggcctgctgctggtgaccctcatcatcctgaggaagaagcacctgcagatggcccgggagtgtggggccggcacctttgtgaactttgccagcctggagagagatggcaagctgccctacaactggaggaggagcatctttgccttcctgaccctgctgcccagctgcctgtggacagactacctgctggccttctacatcaacccctggagcaagaatggcctgaagaagaggaagctgaccaaccctgtgcagctggatgactttgatgcctacatcaaggacatggccaaggacagcgactacaagttcagcctgcagtttgaggagctgaagctgattggcctggacatcccccactttgctgctgacctgcccctgaaccgctgcaagaaccgctacaccaacatcctgccctatgacttcagccgggtgcggctggtgtccatgaatgaggaggagggcgctgactacatcaatgccaactacatccctggctacaacagcccccaggagtacatcgccacccagggccccctgcctgagaccagaaatgacttctggaagatggtgctgcagcagaagagccagatcatcgtgatgctgacccagtgcaatgagaagagaagagtgaagtgtgaccactactggcccttcacagaggagcccatcgcctacggggacatcaccgtggagatgatcagcgaggaggagcaggatgactgggcctgccgccacttccgcatcaactatgcagatgagatgcaggatgtgatgcacttcaactacacagcctggccagaccatggagtgcccacagccaatgctgctgagagcatcctgcagtttgtgcacatggtgcggcagcaggccaccaagagcaagggccccatgatcatccactgcagcgctggggtgggccgcacaggcaccttcatcgccctggaccggctgctgcagcacatccgggaccatgaatttgtggacatcctgggcctggtgtctgagatgaggagctacaggatgtccatggtgcagacagaggagcagtacatcttcatccaccagtgtgtgcagctgatgtggatgaagaagaagcagcagttctgcatcagtgatgtgatctatgaaaatgtgtccaagagctag

SEQ ID NO: 166373 - DNA, 3567 bp, synthetic construct
  misc_feature 1..3567: note = Description of Artificial Sequence: Synthetic coding sequence
  source 1..3567: mol_type = other DNA
atgggccacctgcccaccggcatccatggagcccggcggctgctgcccctgctgtggctgtttgtgctcttcaagaatgccacagccttccacgtgacagtgcaggatgacaacaacatcgtggtgtccctggaggccagtgatgtgatcagccctgcctctgtgtatgtggtgaagatcactggagagagcaagaactacttctttgaatttgaggagttcaacagcaccctgcccccacctgtgatcttcaaggccagctaccacggcctgtactacatcatcaccctggtggtggtgaatggaaatgtggtgaccaagcccagccgcagcatcaccgtgctgaccaagcccctgcctgtgacctctgtgtccatctatgactacaagcccagccctgagactggagtgctgtttgagatccactacccagagaagtacaacgtgttcaccagggtgaacatctcctactgggagggcaaggacttccgcaccatgctgtacaaggacttcttcaagggcaagacagtgttcaaccactggctgcccggcatgtgctacagcaacatcaccttccagctggtgtctgaggccaccttcaacaagagcaccctggtggagtacagcggcgtgtcccatgagcccaagcagcacaggacagccccctacccaccccagaacatctctgtgcgcatcgtgaacctgaacaagaacaactgggaggagcagagcggcaacttccctgaggagagcttcatgaggagccaggacaccatcggcaaggagaagctgttccacttcacagaggagaccccagagatccccagcggcaacatcagcagcggctggccagacttcaacagcagtgactatgagaccaccagccagccctactggtgggacagcgccagcgctgcccctgagagtgaagatgaatttgtgtctgtgctgcccatggagtatgagaacaacagcaccctgtctgaaacagagaagagcaccagcggcagcttctccttcttccctgtgcagatgatcctgacctggctgccccccaagccacccacagcctttgatggcttccacatccacatcgagcgggaggagaacttcacagagtacctgatggtggatgaggaggcccacgagtttgtggccgagctgaaggagcccgggaagtacaagctgtctgtgaccaccttcagcagcagcggcagctgtgagaccaggaagagccagagcgccaagagcctgtccttctacatcagccccagcggggagtggattgaggagctgacagagaagccccagcacgtgtctgtgcacgtgctgagcagcaccacagccctgatgtcctggaccagcagccaggagaactacaacagcaccatcgtgtctgtggtgtccctgacctgccagaagcagaaggagagccagaggctggagaagcagtactgcacccaggtgaacagcagcaagcccatcatcgagaacctggtgcctggggcccagtaccaggtggtgatctacctgaggaagggccccctgattggccccccaagtgaccctgtgacctttgccatcgtgcccaccggcatcaaggacctgatgctgtaccccctgggccccacagctgtggtgctgtcctggacccggccctacctgggcgtcttcagaaaatatgtggtggagatgttctacttcaacccagccaccatgaccagcgagtggaccacctactatgaaattgctgccaccgtgtccctgacagcctctgtgagaattgccaacctgctgcctgcctggtactacaacttccgggtgaccatggtgacctggggagaccctgagctgagctgctgtgacagcagcaccatctccttcatcacagcccctgtggcccctgagatcacctctgtggagtacttcaacagcctgctgtacatctcctggacctatggagatgacaccacagacctgagccacagcaggatgctgcactggatggtggtggccgagggcaagaagaagatcaagaagtctgtgaccagaaatgtgatgacagccatcctgagcctgcccccaggggacatctacaacctgtctgtgacagcctgcacagagcggggcagcaacacctccatgctgcggctggtgaagctggagcccgccccacccaagagcctgtttgctgtgaacaagacccagacctctgtgaccctgctgtgggtggaggagggcgtggccgacttctttgaggtgttctgccagcaggtgggcagcagccagaagaccaagctgcaggagcctgtggccgtgagcagccacgtggtgaccatcagcagcctgctgcctgccacagcctacaactgcagcgtgaccagcttcagccatgacagccccagcgtgcccaccttcatcgctgtgtccaccatggtgacagagatgaaccccaacgtggtggtgatctctgtgctggccatcctgagcaccctgctgattggcctgctgctggtgaccctcatcatcctgaggaagaagcacctgcagatggcccgggagtgtggggccggcacctttgtgaactttgccagcctggagagagatggcaagctgccctacaactggagcaagaatggcctgaagaagaggaagctgaccaaccctgtgcagctggatgactttgatgcctacatcaaggacatggccaaggacagcgactacaagttcagcctgcagtttgaggagctgaagctgattggcctggacatcccccactttgctgctgacctgcccctgaaccgctgcaagaaccgctacaccaacatcctgccctatgacttcagccgggtgcggctggtgtccatgaatgaggaggagggcgctgactacatcaatgccaactacatccctggctacaacagcccccaggagtacatcgccacccagggccccctgcctgagaccagaaatgacttctggaagatggtgctgcagcagaagagccagatcatcgtgatgctgacccagtgcaatgagaagagaagagtgaagtgtgaccactactggcccttcacagaggagcccatcgcctacggggacatcaccgtggagatgatcagcgaggaggagcaggatgactgggcctgccgccacttccgcatcaactatgcagatgagatgcaggatgtgatgcacttcaactacacagcctggccagaccatggagtgcccacagccaatgctgctgagagcatcctgcagtttgtgcacatggtgcggcagcaggccaccaagagcaagggccccatgatcatccactgcagcgctggggtgggccgcacaggcaccttcatcgccctggaccggctgctgcagcacatccgggaccatgaatttgtggacatcctgggcctggtgtctgagatgaggagctacaggatgtccatggtgcagacagaggagcagtacatcttcatccaccagtgtgtgcagctgatgtggatgaagaagaagcagcagttctgcatcagtgatgtgatctatgaaaatgtgtccaagagctag

SEQ ID NO: 166374 - DNA, 1218 bp, synthetic construct
  misc_feature 1..1218: note = Description of Artificial Sequence: Synthetic coding sequence
  source 1..1218: mol_type = other DNA
atggtgacagagatgaaccccaacgtggtggtgatctctgtgctggccatcctgagcaccctgctgattggcctgctgctggtgaccctcatcatcctgaggaagaagcacctgcagatggccagagaatgtggggccggcacctttgtgaactttgccagcctggagagagatggcaagctgccctacaactggaggaggagcatctttgccttcctgaccctgctgcccagctgcctgtggacagactacctgctggccttctacatcaacccctggagcaagaatggcctgaagaagaggaagctgaccaaccctgtgcagctggatgactttgatgcctacatcaaggacatggccaaggacagcgactacaagttcagcctgcagtttgaggagctgaagctgattggcctggacatcccccactttgctgctgacctgcccctgaaccgctgcaagaaccgctacaccaacatcctgccctatgacttcagccgggtgcggctggtgtccatgaatgaggaggagggcgctgactacatcaatgccaactacatccctggctacaacagcccccaggagtacatcgccacccagggccccctgcctgagaccagaaatgacttctggaagatggtgctgcagcagaagagccagatcatcgtgatgctgacccagtgcaatgagaagagaagagtgaagtgtgaccactactggcccttcacagaggagcccatcgcctatggagacatcaccgtggagatgatcagcgaggaggagcaggatgactgggcctgccgccacttccgcatcaactatgcagatgagatgcaggatgtgatgcacttcaactacacagcctggccagaccacggcgtgcccacagccaatgctgctgagagcatcctgcagtttgtgcacatggtgcggcagcaggccaccaagagcaagggccccatgatcatccactgcagcgctggggtgggccgcacaggcaccttcatcgccctggaccggctgctgcagcacatccgggaccacgagtttgtggacatcctgggcctggtgtctgagatgaggagctacaggatgtccatggtgcagacagaggagcagtacatcttcatccaccagtgtgtgcagctgatgtggatgaagaagaagcagcagttctgcatcagtgatgtgatctatgaaaatgtgtccaagagctag

SEQ ID NO: 166375 - DNA, 1218 bp, synthetic construct; identical to SEQ ID NO: 166374
  misc_feature 1..1218: note = Description of Artificial Sequence: Synthetic coding sequence
  source 1..1218: mol_type = other DNA

SEQ ID NO: 166376 - DNA, 1134 bp, synthetic construct
  misc_feature 1..1134: note = Description of Artificial Sequence: Synthetic coding sequence
  source 1..1134: mol_type = other DNA
atggtgacagagatgaaccccaacgtggtggtgatctctgtgctggccatcctgagcaccctgctgattggcctgctgctggtgaccctcatcatcctgaggaagaagcacctgcagatggccagagaatgtggggccggcacctttgtgaactttgccagcctggagagagatggcaagctgccctacaactggagcaagaatggcctgaagaagaggaagctgaccaaccctgtgcagctggatgactttgatgcctacatcaaggacatggccaaggacagcgactacaagttcagcctgcagtttgaggagctgaagctgattggcctggacatcccccactttgctgctgacctgcccctgaaccgctgcaagaaccgctacaccaacatcctgccctatgacttcagccgggtgcggctggtgtccatgaatgaggaggagggcgctgactacatcaatgccaactacatccctggctacaacagcccccaggagtacatcgccacccagggccccctgcctgagaccagaaatgacttctggaagatggtgctgcagcagaagagccagatcatcgtgatgctgacccagtgcaatgagaagagaagagtgaagtgtgaccactactggcccttcacagaggagcccatcgcctatggagacatcaccgtggagatgatcagcgaggaggagcaggatgactgggcctgccgccacttccgcatcaactatgcagatgagatgcaggatgtgatgcacttcaactacacagcctggccagaccacggcgtgcccacagccaatgctgctgagagcatcctgcagtttgtgcacatggtgcggcagcaggccaccaagagcaagggccccatgatcatccactgcagcgctggggtgggccgcacaggcaccttcatcgccctggaccggctgctgcagcacatccgggaccacgagtttgtggacatcctgggcctggtgtctgagatgaggagctacaggatgtccatggtgcagacagaggagcagtacatcttcatccaccagtgtgtgcagctgatgtggatgaagaagaagcagcagttctgcatcagtgatgtgatctatgaaaatgtgtccaagagctag

SEQ ID NO: 166377 - DNA, 1134 bp, synthetic construct; identical to SEQ ID NO: 166376
  misc_feature 1..1134: note = Description of Artificial Sequence: Synthetic coding sequence
  source 1..1134: mol_type = other DNA

SEQ ID NO: 166378 - DNA, 6888 bp, synthetic construct
  misc_feature 1..6888: note = Description of Artificial Sequence: Synthetic coding sequence
  source 1..6888: mol_type = other DNA
atggacttcctgatcatcttcctgctgctcttcatcggcaccagcgagacccaggtggatgtgtccaatgtggtgcccggcaccaggtatgacatcaccatcagcagcatcagcaccacctacaccagccctgtgacccgcatcgtgaccaccaacgtgaccaagccaggcccccctgtgttcctggccggggagcgggtgggcagcgctggcatcctgctgtcctggaacaccccacccaaccccaacggccgcatcatctcctacatcgtgaagtacaaggaggtgtgcccctggatgcagacagtgtacacccaggtgcgcagcaagccagacagcctggaggtgctgctgaccaacctgaaccctggcaccacctatgagatcaaggtgatcatcctgaatgccaccaaggtgggctgcctgctgagccccatcctgctgaacacagtgctggagggcctggcccgggccatcaacctgacccgggagtgccagacagtggatgctggccagtgtgtgcagtgtgctgtgcgggagcccaagcagggcagcaccagcggcggccgggcccagaccaacaagaagacagctgtgaccagcgctgacctgaaccacacagctggggacctgaggacaggccgcctgcccccccagcccctgacagctgagcagcccaactgggaggccccacccagccggggccgcctgaccccccacaaggccggctacagcagcgccacagctgctggcacccaggccaacagagtgtggagccggcccctggccaagatccagaccaccatccgggagtactacaagcacctgtatgccaagaaggagggcatcctgcccaacagcttctatgaggccagcatcatcctgatccccaagcctgtgcctgagggccccccccagaactgtgtgacaggcaacatcaccgggaagagcttcagcatcctgtgggacccccccaccatcgtgacaggcaagttctcctacagagtggagctgtatggccccagcggccgcatcctggacaacagcaccaaggacctgaagtttgccttcaccaacctgacccccttcaccatgtatgatgtgtacatcgctgctgagaccagcgctggcaccggccccaagagcaacatctctgtgttcaccccaccagatgtgcctggagctgtgtttgacctgcagctggccgaggtggagagcacccaggtgcgcatcacctggaagaagccccggcagcccaacggcatcatcaaccagtacagagtgaaggtgctggtgcctgagaccggcatcatcctggagaacaccctgctgactggaaataatgagtacatcaatgaccccatggcccctgagatcgtgaacatcgtggagcccatggtgggcctgtatgagggcagcgctgagatgagcagtgacctgcacagcctggccaccttcatctacaacagccacccagacaagaacttccctgccaggaacagagctgaggaccagaccagccctgtggtgaccaccaggaaccagtacatcacagacattgctgctgagcagctgtcctatgtgatccggcggctggtgcccttcacagagcacatgatctctgtgtctgccttcaccatcatgggagagggcccccccaccgtgctgtctgtgaggacccggcagcaggtgcccagcagcatcaagatcatcaactacaagaacatcagcagcagcagcatcctgctgtactgggaccccccagagtaccccaacgggaagatcacccactacaccatctatgccatggagctggacaccaacagagccttccagatcaccaccatcgacaacagcttcctgatcaccggcctgaagaagtacaccaagtacaagatgagggtggccgccagcacccacgtgggggagagcagcctgtctgaagaaaatgacatctttgtgaggaccagtgaagatgagcctgagagcagcccccaggatgtggaggtgattgatgtgacagcagatgagatccggctgaagtggagccccccagagaagcccaacggcatcatcatcgcctatgaggtgctgtacaagaacatcgacaccctgtacatgaagaacaccagcaccacagacatcatcctgaggaacctgcggccccacaccctgtacaacatctctgtgcgcagctacacccgcttcggccacggcaaccaggtgagcagcctgctgtctgtgaggaccagcgagaccgtgcctgattctgcccctgagaacatcacctacaagaacatcagcagtggagaaattgagctgtccttcctgccccccagcagccccaacggcatcatccagaagtacaccatctacctgaagaggagcaatggaaatgaggagaggaccatcaacaccaccagcctgacccagaacatcaaggtgctgaagaagtacacccagtacatcatcgaggtgtctgccagcaccctgaagggggagggcgtgcgcagcgcccccatcagcatcctgacagaagaagatgccccagacagccccccccaggacttctctgtgaagcagctgtctggagtgacagtgaagctgtcctggcagccccccctggagcccaacggcatcatcctgtactacacagtgtatgtgtggaacagaagcagcctgaagaccatcaacgtgacagagaccagcctggagctgagtgacctggactacaacgtggagtacagcgcctacgtgacagccagcaccaggtttggagatggcaagaccaggagcaacatcatctccttccagaccccagagggcgcccccagcgacccccccaaggatgtgtactatgccaacctgagcagcagcagcatcatcctcttctggaccccacccagcaagcccaacggcatcatccagtactacagcgtgtactacagaaacaccagcggcaccttcatgcagaacttcaccctgcacgaggtgaccaatgactttgacaacatgacagtgtccaccatcatcgacaagctgaccatcttctcctactacaccttctggctgacagccagcacctctgtgggcaatggaaacaagagcagtgacatcatcgaggtgtacacagaccaggacatccctgagggctttgtgggcaacctgacctatgagagcatcagcagcacagccatcaacgtgtcctgggtgcccccagcccagcccaacggcctggtgttctactacgtgtccctcatcctgcagcagacccccaggcatgtgcggccccccctggtgacctatgaaagaagcatctactttgacaacctggagaagtacacagactacatcctgaagatcacccccagcacagagaagggcttcagtgacacctacacagcccagctgtacatcaagacagaagaagatgtgcctgagaccagccccatcatcaacaccttcaagaacctgagcagcacctctgtgctgctgtcctgggacccccctgtgaagcccaacggggccatcatctcctatgacctgaccctgcagggccccaatgaaaactacagcttcatcaccagtgacaactacatcatcctggaggagctgagccccttcaccctgtacagcttctttgctgctgcccggaccaggaagggcctgggccccagcagcatcctcttcttctacacagatgagagcgtgcccctggccccaccccagaacctgaccctcatcaactgcaccagtgactttgtgtggctgaagtggagccccagccccctgcccggcggcatcgtgaaggtgtacagcttcaagatccatgaacatgaaacagacaccatctactacaagaacatcagcggcttcaagacagaggccaagctggtgggcctggagcctgtgtccacctacagcatccgggtgtctgccttcaccaaggtgggcaatggaaaccagttcagcaatgtggtgaagttcaccacccaggagagcgtgcctgatgtggtgcagaacatgcagtgcatggccacctcctggcagagcgtgctggtgaagtgggacccccccaagaaggccaacggcatcatcacccagtacatggtgacagtggagaggaacagcaccaaggtgagcccccaggaccacatgtacaccttcatcaagctgctggccaacaccagctatgtgttcaaggtgcgggccagcaccagcgctggggagggagatgagagcacctgccacgtgtccaccctgcctgagaccgtgcccagcgtgcccaccaacatcgccttcagtgatgtgcagagcaccagcgccaccctgacctggatccggccagacaccatcctgggctacttccagaactacaagatcaccacccagctgcgggcccagaagtgcaaggagtgggagagtgaagaatgtgtggagtaccagaagatccagtacctgtatgaggcccacctgacagaggagaccgtgtatggcctgaagaagttccgctggtaccgcttccaggtggccgccagcaccaatgccggctatggaaatgccagcaactggatcagcaccaagaccctgcccggccccccagatggccccccagaaaatgtgcacgtggtggccaccagccccttcagcatcagcatctcctggagcgagcctgctgtgatcaccggccccacctgctacctgattgatgtgaagtctgtggacaatgatgagttcaacatctccttcatcaagagcaatgaggagaacaagaccatcgagatcaaggacctggagatcttcacccgctacagcgtggtgatcacagccttcaccggcaacatctctgctgcctacgtggagggcaagagcagcgctgagatgattgtgaccaccctggagagcgcccccaaggacccccccaacaacatgaccttccagaagatcccagatgaggtgaccaagttccagctgaccttcctgccccccagccagcccaatggaaacatccaggtgtaccaggccctggtgtaccgggaggatgaccccacagctgtgcagatccacaacctgagcatcatccagaagaccaacaccttcgtcatcgccatgctggagggcctgaagggcggccacacctacaacatctctgtgtatgctgtgaacagcgctggggccggccccaaggtgcccatgaggatcaccatggacatcaaggccccagcccggcccaagaccaagcccacccccatctatgatgccaccgggaagctgctggtgaccagcaccaccatcaccatccgcatgcccatctgctactacagtgatgaccacggccccatcaagaatgtgcaggtgctggtgacagaaacaggagcccagcatgatggaaatgtgaccaagtggtatgatgcctacttcaacaaggcccggccctacttcaccaatgaaggcttccccaaccccccctgcacagagggcaagaccaagttctctggaaatgaggagatctacatcatcggggctgacaatgcctgcatgatccctggaaatgaagacaagatctgcaatggccccctgaagcccaagaagcagtacctgttcaagttccgggccaccaacatcatgggccagttcacagacagcgactacagcgaccctgtgaagaccctgggggagggcctgtctgagaggacagtggagatcatcctgtctgtgaccctgtgcatcctgagcatcatcctgctgggcacagccatctttgcctttgcccgcatccggcagaagcagaaggagggcggcacctacagcccccaggatgctgagatcatcgacaccaagctgaagctggaccagctgatcaccgtggccgacctggagctgaaggatgagcggctgacccggctgctgagctacaggaagagcatcaagcccatcagcaagaagagcttcctgcagcacgtggaggagctgtgcaccaacaacaacctgaagttccaggaggagttcagcgagctgcccaagttcctgcaggacctgagcagcacagatgctgacctgccctggaacagagccaagaaccgcttccccaacatcaagccctacaacaacaacagagtgaagctgattgctgatgcctctgtgcccggcagtgactacatcaatgccagctacatcagcggctacctgtgccccaatgagttcatcgccacccagggccccctgcccggcaccgtgggggacttctggaggatggtgtgggagacccgggccaagaccctggtgatgctgacccagtgctttgagaagggccgcatccgctgccaccagtactggccagaggacaacaagcctgtgacagtgtttggagacatcgtcatcaccaagctgatggaggatgtgcagattgactggaccatccgggacctgaagattgagcggcacggggactgcatgacagtgcggcagtgcaacttcaccgcctggccagagcacggcgtgcctgaaaattctgcccccctcatccactttgtgaagctggtgcgggccagccgggcccatgacaccacccccatgattgtgcactgcagcgctggggtgggccgcactggagtcttcatcgccctggaccacctgacccagcacatcaatgaccatgactttgtggacatctacggcctggtggccgagctgcggtctgagaggatgtgcatggtgcagaacctggcccagtacatcttcctgcaccagtgcatcctggacctgctgagcaacaagggcagcaaccagcccatctgctttgtgaactacagcgccctgcagaagatggacagcctggatgccatggagggagatgtggagctggagtgggaggagaccaccatgtag

SEQ ID NO: 166379 - DNA, 5787 bp, synthetic construct
  misc_feature 1..5787: note = Description of Artificial Sequence: Synthetic coding sequence
  source 1..5787: mol_type = other DNA
atggcccccacctggggccctggcatggtgtctgtggtgggccccatgggcctgctggtggtgctgctggtgggcggctgtgccgctgaggagcccccacgcttcatcaaggagcccaaggaccagattggagtgtctgggggcgtggccagctttgtgtgccaggccactggagaccccaagccccgggtgacctggaacaagaagggcaagaaggtgaacagccagagatttgagaccattgaatttgatgagagcgctggagctgtgctgcgcatccagcccctgcggaccccaagagatgaaaatgtgtatgaatgtgtggcccagaacagcgtgggggagatcaccgtgcacgccaagctgactgtgctgcgggaggaccagctgcccagcggcttccccaacatcgacatgggcccccagctgaaggtggtggagaggaccaggacagccaccatgctgtgtgccgccagcggcaacccagaccctgagatcacctggttcaaggacttcctgcctgtggaccccagcgccagcaatggccgcatcaagcagctgcggagtgaccaggccttcagccacctgcccaccggggccctgcagatcgagagcagcgaggagacagaccagggcaagtatgaatgtgtggccaccaacagcgctggggtgcgctacagcagccctgccaacctgtatgtgcgggtgagaagagtggccccccgcttcagcatcctgcccatgagccatgagatcatgcctggaggaaatgtgaacatcacctgtgtggccgtgggcagccccatgccctacgtgaagtggatgcagggcgctgaggacctgaccccagaagatgacatgcctgtgggcagaaatgtgctggagctgacagatgtgaaggacagcgccaactacacctgtgtggccatgagcagcctgggcgtcatcgaggccgtggcccagatcaccgtgaagagcctgcccaaggcccctggcacccccatggtgacagagaacacagccaccagcatcaccatcacctgggacagcggcaacccagaccctgtgtcctactacgtgattgagtacaagagcaagagccaggacggcccctaccagatcaaggaggacatcaccaccacccgctacagcattggaggcctgagccccaacagtgaatatgagatctgggtgtctgctgtgaacagcatcggccagggcccccccagcgagagcgtggtgaccaggactggagagcaggccccagccagcgcccccagaaatgtgcaggccaggatgctgagcgccaccaccatgattgtgcagtgggaggagcctgtggagcccaacggcctcatccggggctacagagtgtactacaccatggagcctgagcaccctgtgggcaactggcagaagcacaacgtggatgacagcctgctgaccaccgtgggcagcctgctggaggatgagacctacacagtgcgggtgctggccttcacctctgtgggagatggccccctgagtgaccccatccaggtgaagacccagcagggcgtgcccggccagcccatgaacctgcgggcagaggcccggtctgagaccagcatcaccctgtcctggagccccccccggcaggagagcatcatcaagtatgagctgctcttccgggagggggaccacggccgggaggtgggccgcacctttgaccccaccaccagctatgtggtggaggacctgaagcccaacacagaatatgccttccggctggccgcccggagcccccagggcctgggcgccttcacccctgtggtgcggcagaggaccctgcagagcaagcccagcgccccaccccaggatgtgaagtgtgtgtctgtgcgcagcacagccatcctggtgtcctggaggcctcctcctcctgagacccacaacggggccctggtgggctacagcgtgcgctaccggcccctgggcagcgaggaccctgagcccaaggaggtgaatggcatcccccccaccaccacccagatcctgctggaggccctggagaagtggacccagtaccgcatcaccaccgtggcccacacagaggtgggccctggccctgagagcagccctgtggtggtgaggacagatgaagatgtgcccagcgccccacccaggaaggtggaggccgaggccctgaatgccacagccatccgggtgctgtggaggagccctgcccctggccggcagcacggccagatccggggctaccaggtgcactacgtgaggatggagggcgctgaggcccggggccccccacgcatcaaggatgtgatgctggctgatgcccagtgggagacagatgacacagcagaatatgagatggtgatcaccaacctgcagcctgagacagcctacagcatcaccgtggccgcctacaccatgaagggagatggagcccggagcaagcccaaggtggtggtgaccaagggagctgtgctgggccggcccaccctgtctgtgcagcagaccccagagggcagcctgctggcccgctgggagcccccagctggaacagctgaggaccaggtgctgggctaccgcctgcagtttggaagagaggacagcacccccctggccaccctggagttccccccatctgaagatcgctacacagccagcggcgtgcacaagggggccacctacgtgttccggctggccgcccggagcagaggaggcctgggggaggaggccgctgaggtgctgagcatccctgaggacaccccccggggccacccccagatcctggaggccgctggaaatgccagcgctggcaccgtgctgctgcgctggctgccccctgtgcctgctgagagaaatggagccatcgtgaagtacacagtggccgtgcgggaggccggggccctgggccctgcccgggagacagagctgcctgctgctgctgagcctggagcagaaaatgccctgaccctgcagggcctgaagccagacacagcctatgacctgcaggtgcgggcccacacccggcggggccctggccccttcagcccccctgtgcgctaccgcaccttcctgcgggaccaggtgagccccaagaacttcaaggtgaagatgatcatgaagacctctgtgctgctgtcctgggagttcccagacaactacaacagccccaccccctacaagatccagtacaacggcctgaccctggatgtggatggccgcaccaccaagaagctgatcacccacctgaagccccacaccttctacaactttgtgctgaccaacagaggcagcagcctgggcggcctgcagcagacagtgacagcctggacagccttcaacctgctgaatggcaagcccagcgtggcccccaagccagatgctgatggcttcatcatggtgtacctgcctgatggccagagccctgtgcctgtgcagagctacttcatcgtgatggtgcccctgaggaagagccggggcggccagttcctgacccccctgggcagccctgaggacatggacctggaggagctgatccaggacatcagccggctgcagaggaggagcctgcggcacagccggcagctggaggtgccccggccctacatcgccgcccgcttctctgtgctgccccccaccttccaccctggggaccagaagcagtatggaggctttgacaacagaggcctggagcccggccaccgctacgtgctgtttgtgctggccgtgctgcagaagtctgagcccacctttgctgccagccccttcagtgaccccttccagctggacaacccagacccccagcccatcgtggatggagaggagggcctcatctgggtgattggccctgtgctggccgtggtgttcatcatctgcatcgtgattgccatcctgctgtacaagaacaagccagacagcaagaggaaggacagcgagcccaggaccaagtgcctgctgaacaatgctgacctggccccccaccaccccaaggaccctgtggagatgaggcgcatcaacttccagaccccaggcatgctgagccacccccccatccccatcgctgacatggccgagcacacagagcggctgaaggccaatgacagcctgaagctgagccaggagtatgagagcattgaccccggccagcagttcacctgggagcacagcaacctggaggtgaacaagcccaagaacagatatgccaacgtcatcgcctatgaccacagcagggtcatcctgcagcccatcgagggcatcatgggcagtgactacatcaatgccaactacgtggatggctaccgctgccagaatgcctacatcgccacccagggccccctgcctgagaccttcggggacttctggaggatggtgtgggagcagaggtctgccaccatcgtgatgatgacccggctggaggagaagagccgcatcaagtgtgaccagtactggcccaacagaggaacagagacctacggcttcatccaggtgaccctgctggacaccatcgagctggccaccttctgtgtgaggaccttcagcctgcacaagaatggcagcagcgagaagcgggaggtgcggcagttccagttcaccgcctggccagaccacggcgtgcctgagtaccccacccccttcctggccttcctgcggcgggtgaagacctgcaaccccccagatgctggccccatcgtggtgcactgcagcgctggggtgggccgcacaggctgcttcatcgtgattgatgccatgctggagcgcatcaagccagagaagacagtggatgtgtatggccacgtgaccctgatgaggagccagaggaactacatggtgcagacagaggaccagtacagcttcatccacgaggccctgctggaggccgtgggctgcggcaacacagaggtgcctgcccggagcctgtatgcctacatccagaagctggcccaggtggagcctggagagcacgtgacaggcatggagctggagttcaagaggctggccaacagcaaggcccacaccagccgcttcatcagcgccaacctgccctgcaacaagttcaagaaccggctggtgaacatcatgccctatgagagcaccagggtgtgcctgcagcccatccggggcgtggagggcagtgactacatcaatgccagcttcattgatggctaccggcagcagaaggcctacatcgccacccagggccccctggccgagaccacagaggacttctggaggatgctgtgggagaacaacagcaccatcgtggtgatgctgaccaagctgcgggagatgggccgggagaagtgccaccagtactggccagctgagaggtctgcccgctaccagtactttgtggtggaccccatggccgagtacaacatgccccagtacatcctgcgggagttcaaggtgacagatgccagagatggccagagcaggacagtgcggcagttccagttcacagactggccagagcagggcgtgcccaagagcggggagggcttcatcgacttcatcggccaggtgcacaagaccaaggagcagtttggccaggacggccccatctctgtgcactgcagcgctggggtgggccgcactggagtcttcatcaccctgagcatcgtgctggagaggatgagatatgagggcgtggtggacatcttccagacagtgaagatgctgcggacccagaggcctgccatggtgcagacagaagatgagtaccagttctgctaccaggccgccctggagtacctgggcagctttgaccactacgccacctag

SEQ ID NO: 166380 - DNA, 5733 bp, synthetic construct
  misc_feature 1..5733: note = Description of Artificial Sequence: Synthetic coding sequence
  source 1..5733: mol_type = other DNA
atggcccccacctggggccctggcatggtgtctgtggtgggccccatgggcctgctggtggtgctgctggtgggcggctgtgccgctgaggagcccccacgcttcatcaaggagcccaaggaccagattggagtgtctgggggcgtggccagctttgtgtgccaggccactggagaccccaagccccgggtgacctggaacaagaagggcaagaaggtgaacagccagagatttgagaccattgaatttgatgagagcgctggagctgtgctgcgcatccagcccctgcggaccccaagagatgaaaatgtgtatgaatgtgtggcccagaacagcgtgggggagatcaccgtgcacgccaagctgactgtgctgcgggaggaccagctgcccagcggcttccccaacatcgacatgggcccccagctgaaggtggtggagaggaccaggacagccaccatgctgtgtgccgccagcggcaacccagaccctgagatcacctggttcaaggacttcctgcctgtggaccccagcgccagcaatggccgcatcaagcagctgcggagcggggccctgcagatcgagagcagcgaggagacagaccagggcaagtatgaatgtgtggccaccaacagcgctggggtgcgctacagcagccctgccaacctgtatgtgcgggtgcggcgggtggccccccgcttcagcatcctgcccatgagccatgagatcatgcctggaggaaatgtgaacatcacctgtgtggccgtgggcagccccatgccctacgtgaagtggatgcagggcgctgaggacctgaccccagaagatgacatgcctgtgggcagaaatgtgctggagctgacagatgtgaaggacagcgccaactacacctgtgtggccatgagcagcctgggcgtgattgaagctgtggcccagatcaccgtgaagagcctgcccaaggcccctggcacccccatggtgacagaaaatacagccaccagcatcaccatcacctgggacagcggcaacccagaccctgtgtcctactacgtgattgagtacaagagcaagagccaggacggcccctaccagatcaaggaggacatcaccaccacccgctacagcatcggcggcctgagccccaacagtgaatatgagatctgggtgtctgctgtgaacagcatcggccagggccccccatctgagagcgtggtgaccaggactggagagcaggccccagccagcgcccccagaaatgtgcaggccaggatgctgagcgccaccaccatgattgtgcagtgggaggagcctgtggagcccaacggcctcatccggggctacagagtgtactacaccatggagcctgagcaccctgtgggcaactggcagaagcacaacgtggatgacagcctgctgaccaccgtgggcagcctgctggaggatgagacctacacagtgcgggtgctggccttcacctctgtgggagatggccccctgagtgaccccatccaggtgaagacccagcagggcgtgcccggccagcccatgaacctgcgggcagaggcccggtctgagaccagcatcaccctgtcctggagccccccccggcaggagagcatcatcaagtatgagctgctcttccgggagggggaccacggccgggaggtgggccgcacctttgaccccaccaccagctatgtggtggaggacctgaagcccaacacagaatatgccttccggctggccgcccggagcccccagggcctgggcgccttcacccctgtggtgcggcagaggaccctgcagagcaagcccagcgccccaccccaggatgtgaagtgtgtgtctgtgcgcagcacagccatcctggtgtcctggaggcctcctcctcctgagacccacaatggagccctggtgggctacagcgtgcgctaccggcccctgggctctgaagatcctgagcccaaggaggtgaatggcatcccccccaccaccacccagatcctgctggaggccctggagaagtggacccagtaccgcatcaccaccgtggcccacacagaggtgggccctggccctgagagcagccctgtggtggtgaggacagatgaagatgtgcccagcgccccacccaggaaggtggaggccgaggccctgaatgccacagccatccgggtgctgtggaggagccctgcccctggccggcagcacggccagatccggggctaccaggtgcactacgtgaggatggagggcgctgaggcccggggccccccacgcatcaaggatgtgatgctggctgatgcccaggagatggtgatcaccaacctgcagcctgagacagcctacagcatcaccgtggccgcctacaccatgaagggagatggagcccggagcaagcccaaggtggtggtgaccaagggagctgtgctgggccggcccaccctgtctgtgcagcagaccccagagggcagcctgctggcccgctgggagcccccagctggaacagctgaggaccaggtgctgggctaccgcctgcagtttggaagagaggacagcacccccctggccaccctggagttccccccatctgaagatcgctacacagccagcggcgtgcacaagggggccacctacgtgttccggctggccgcccggagcagaggaggcctgggggaggaggccgctgaggtgctgagcatccctgaggacaccccccggggccacccccagatcctggaggccgctggaaatgccagcgctggcaccgtgctgctgcgctggctgccccctgtgcctgctgagagaaatggagccatcgtgaagtacacagtggccgtgcgggaggccggggccctgggccctgcccgggagacagagctgcctgctgctgctgagcctggagcagaaaatgccctgaccctgcagggcctgaagccagacacagcctatgacctgcaggtgcgggcccacacccggcggggccctggccccttcagcccccctgtgcgctaccgcaccttcctgcgggaccaggtgagccccaagaacttcaaggtgaagatgatcatgaagacctctgtgctgctgtcctgggagttcccagacaactacaacagccccaccccctacaagatccagtacaacggcctgaccctggatgtggatggccgcaccaccaagaagctgatcacccacctgaagccccacaccttctacaactttgtgctgaccaacagaggcagcagcctgggcggcctgcagcagacagtgacagcctggacagccttcaacctgctgaatggcaagcccagcgtggcccccaagccagatgctgatggcttcatcatggtgtacctgcctgatggccagagccctgtgcctgtgcagagctacttcatcgtgatggtgcccctgaggaagagccggggcggccagttcctgacccccctgggcagccctgaggacatggacctggaggagctgatccaggacatcagccggctgcagaggaggagcctgcggcacagccggcagctggaggtgccccggccctacatcgccgcccgcttctctgtgctgccccccaccttccaccctggggaccagaagcagtatggaggctttgacaacagaggcctggagcccggccaccgctacgtgctgtttgtgctggccgtgctgcagaagtctgagcccacctttgctgccagccccttcagtgaccccttccagctggacaacccagacccccagcccatcgtggatggagaggagggcctcatctgggtgattggccctgtgctggccgtggtgttcatcatctgcatcgtgattgccatcctgctgtacaagaacaagccagacagcaagaggaaggacagcgagcccaggaccaagtgcctgctgaacaatgctgacctggccccccaccaccccaaggaccctgtggagatgaggcgcatcaacttccagaccccaggcatgctgagccacccccccatccccatcgctgacatggccgagcacacagagcggctgaaggccaatgacagcctgaagctgagccaggagtatgagagcattgaccccggccagcagttcacctgggagcacagcaacctggaggtgaacaagcccaagaacagatatgccaacgtcatcgcctatgaccacagcagggtcatcctgcagcccatcgagggcatcatgggcagtgactacatcaatgccaactacgtggatggctaccgctgccagaatgcctacatcgccacccagggccccctgcctgagaccttcggggacttctggaggatggtgtgggagcagaggtctgccaccatcgtgatgatgacccggctggaggagaagagccgcatcaagtgtgaccagtactggcccaacagaggaacagagacctacggcttcatccaggtgaccctgctggacaccatcgagctggccaccttctgtgtgaggaccttcagcctgcacaagaatggcagcagcgagaagcgggaggtgcggcagttccagttcaccgcctggccagaccacggcgtgcctgagtaccccacccccttcctggccttcctgcggcgggtgaagacctgcaaccccccagatgctggccccatcgtggtgcactgcagcgctggggtgggccgcacaggctgcttcatcgtgattgatgccatgctggagcgcatcaagccagagaagacagtggatgtgtatggccacgtgaccctgatgaggagccagaggaactacatggtgcagacagaggaccagtacagcttcatccacgaggccctgctggaggccgtgggctgcggcaacacagaggtgcctgcccggagcctgtatgcctacatccagaagctggcccaggtggagcctggagagcacgtgacaggcatggagctggagttcaagaggctggccaacagcaaggcccacaccagccgcttcatcagcgccaacctgccctgcaacaagttcaagaaccggctggtgaacatcatgccctatgagagcaccagggtgtgcctgcagcccatccggggcgtggagggcagtgactacatcaatgccagcttcattgatggctaccggcagcagaaggcctacatcgccacccagggccccctggccgagaccacagaggacttctggaggatgctgtgggagaacaacagcaccatcgtggtgatgctgaccaagctgcgggagatgggccgggagaagtgccaccagtactggccagctgagaggtctgcccgctaccagtactttgtggtggaccccatggccgagtacaacatgccccagtacatcctgcgggagttcaaggtgacagatgccagagatggccagagcaggacagtgcggcagttccagttcacagactggccagagcagggcgtgcccaagagcggggagggcttcatcgacttcatcggccaggtgcacaagaccaaggagcagtttggccaggacggccccatctctgtgcactgcagcgctggggtgggccgcactggagtcttcatcaccctgagcatcgtgctggagaggatgagatatgagggcgtggtggacatcttccagacagtgaagatgctgcggacccagaggcctgccatggtgcagacagaagatgagtaccagttctgctaccaggccgccctggagtacctgggcagctttgaccactacgccacctag

SEQ ID NO: 166381 - DNA, 4506 bp, synthetic construct
  misc_feature 1..4506: note = Description of Artificial Sequence: Synthetic coding sequence
  source 1..4506: mol_type = other DNA
atggcccccacctggggccctggcatggtgtctgtggtgggccccatgggcctgctggtggtgctgctggtgggcggctgtgccgctgaggagcccccacgcttcatcaaggagcccaaggaccagattggagtgtctgggggcgtggccagctttgtgtgccaggccactggagaccccaagccccgggtgacctggaacaagaagggcaagaaggtgaacagccagagatttgagaccattgaatttgatgagagcgctggagctgtgctgcgcatccagcccctgcggaccccaagagatgaaaatgtgtatgaatgtgtggcccagaacagcgtgggggagatcaccgtgcacgccaagctgactgtgctgcgggaggaccagctgcccagcggcttccccaacatcgacatgggcccccagctgaaggtggtggagaggaccaggacagccaccatgctgtgtgccgccagcggcaacccagaccctgagatcacctggttcaaggacttcctgcctgtggaccccagcgccagcaatggccgcatcaagcagctgcggagcggggccctgcagatcgagagcagcgaggagacagaccagggcaagtatgaatgtgtggccaccaacagcgctggggtgcgctacagcagccctgccaacctgtatgtgcgggtgcggcgggtggccccccgcttcagcatcctgcccatgagccatgagatcatgcctggaggaaatgtgaacatcacctgtgtggccgtgggcagccccatgccctacgtgaagtggatgcagggcgctgaggacctgaccccagaagatgacatgcctgtgggcagaaatgtgctggagctgacagatgtgaaggacagcgccaactacacctgtgtggccatgagcagcctgggcgtgattgaagctgtggcccagatcaccgtgaagagcctgcccaaggcccctggcacccccatggtgacagaaaatacagccaccagcatcaccatcacctgggacagcggcaacccagaccctgtgtcctactacgtgattgagtacaagagcaagagccaggacggcccctaccagatcaaggaggacatcaccaccacccgctacagcatcggcggcctgagccccaacagtgaatatgagatctgggtgtctgctgtgaacagcatcggccagggccccccatctgagagcgtggtgaccaggactggagagcaggccccagccagcgcccccagaaatgtgcaggccaggatgctgagcgccaccaccatgattgtgcagtgggaggagcctgtggagcccaacggcctcatccggggctacagagtgtactacaccatggagcctgagcaccctgtgggcaactggcagaagcacaacgtggatgacagcctgctgaccaccgtgggcagcctgctggaggatgagacctacacagtgcgggtgctggccttcacctctgtgggagatggccccctgagtgaccccatccaggtgaagacccagcagggcgtgcccggccagcccatgaacctgcgggcagaggcccggtctgagaccagcatcaccctgtcctggagccccccccggcaggagagcatcatcaagtatgagctgctcttccgggagggggaccacggccgggaggtgggccgcacctttgaccccaccaccagctatgtggtggaggacctgaagcccaacacagaatatgccttccggctggccgcccggagcccccagggcctgggcgccttcacccctgtggtgcggcagaggaccctgcagagcatcagccccaagaacttcaaggtgaagatgatcatgaagacctctgtgctgctgtcctgggagttcccagacaactacaacagccccaccccctacaagatccagtacaacggcctgaccctggatgtggatggccgcaccaccaagaagctgatcacccacctgaagccccacaccttctacaactttgtgctgaccaacagaggcagcagcctgggcggcctgcagcagacagtgacagcctggacagccttcaacctgctgaatggcaagcccagcgtggcccccaagccagatgctgatggcttcatcatggtgtacctgcctgatggccagagccctgtgcctgtgcagagctacttcatcgtgatggtgcccctgaggaagagcagaggaggccagttcctgacccccctgggcagccctgaggacatggacctggaggagctgatccaggacatcagccggctgcagaggaggagcctgcggcacagccggcagctggaggtgccccggccctacatcgccgcccgcttctctgtgctgccccccaccttccaccctggggaccagaagcagtatggaggctttgacaacagaggcctggagcccggccacagatatgtgctgtttgtgctggccgtgctgcagaagtctgagcccacctttgctgccagccccttcagtgaccccttccagctggacaacccagacccccagcccatcgtggatggagaggagggcctcatctgggtgattggccctgtgctggccgtggtgttcatcatctgcatcgtcatcgccatcctgctgtacaagaacaagccagacagcaagaggaaggacagcgagcccaggaccaagtgcctgctgaacaatgctgacctggccccccaccaccccaaggaccctgtggagatgaggcgcatcaacttccagaccccaggcatgctgagccacccccccatccccatcgctgacatggccgagcacacagagcggctgaaggccaatgacagcctgaagctgagccaggagtatgagagcattgatcctggccagcagttcacctgggagcacagcaacctggaggtgaacaagcccaagaacagatatgccaacgtgattgcctatgaccacagcagggtcatcctgcagcccatcgagggcatcatgggcagtgactacatcaatgccaactacgtggatggctaccgctgccagaatgcctacatcgccacccagggccccctgcctgagacctttggagacttctggaggatggtgtgggagcagaggtctgccaccatcgtgatgatgacccggctggaggagaagagccgcatcaagtgtgaccagtactggcccaacagaggaacagagacctacggcttcatccaggtgaccctgctggacaccatcgagctggccaccttctgtgtgaggaccttcagcctgcacaagaatggcagcagcgagaagcgggaggtgcggcagttccagttcaccgcctggccagaccatggagtgcctgagtaccccacccccttcctggccttcctgcggcgggtgaagacctgcaaccccccagatgctggccccatcgtggtgcactgcagcgctggggtgggccgcacaggctgcttcatcgtgattgatgccatgctggagcgcatcaagccagagaagacagtggatgtgtatggccacgtgaccctgatgaggagccagaggaactacatggtgcagacagaggaccagtacagcttcatccacgaggccctgctggaggccgtgggctgcggcaacacagaggtgcctgcccggagcctgtatgcctacatccagaagctggcccaggtggagcccggggagcacgtgacaggcatggagctggagttcaagaggctggccaacagcaaggcccacaccagccgcttcatcagcgccaacctgccctgcaacaagttcaagaaccggctggtgaacatcatgccctatgagagcaccagggtgtgcctgcagcccatccggggcgtggagggcagtgactacatcaatgccagcttcattgatggctaccggcagcagaaggcctacatcgccacccagggccccctggccgagaccacagaggacttctggaggatgctgtgggagaacaacagcaccatcgtggtgatgctgaccaagctgcgggagatgggccgggagaagtgccaccagtactggccagctgagaggtctgcccgctaccagtactttgtggtggaccccatggccgagtacaacatgccccagtacatcctgcgggagttcaaggtgacagatgccagagatggccagagcaggacagtgcggcagttccagttcacagactggccagagcagggcgtgcccaagtctggagagggcttcatcgacttcatcggccaggtgcacaagaccaaggagcagtttggccaggacggccccatctctgtgcactgcagcgctggggtgggccgcactggagtcttcatcaccctgagcatcgtgctggagaggatgagatatgaaggagtggtggacatcttccagacagtgaagatgctgcggacccagaggcctgccatggtgcagacagaagatgagtaccagttctgctaccaggccgccctggagtacctgggcagctttgaccactacgccacctag

SEQ ID NO: 166382 - DNA, 5847 bp, synthetic construct
  misc_feature 1..5847: note = Description of Artificial Sequence: Synthetic coding sequence
  source 1..5847: mol_type = other DNA
atggcccccacctggggccctggcatggtgtctgtggtgggccccatgggcctgctggtggtgctgctggtgggcggctgtgccgctgaggagcccccacgcttcatcaaggagcccaaggaccagattggagtgtctgggggcgtggccagctttgtgtgccaggccactggagaccccaagccccgggtgacctggaacaagaagggcaagaaggtgaacagccagagatttgagaccattgaatttgatgagagcgctggagctgtgctgcgcatccagcccctgcggaccccaagagatgaaaatgtgtatgaatgtgtggcccagaacagcgtgggggagatcaccgtgcacgccaagctgactgtgctgcgggaggaccagctgcccagcggcttccccaacatcgacatgggcccccagctgaaggtggtggagaggaccaggacagccaccatgctgtgtgccgccagcggcaacccagaccctgagatcacctggttcaaggacttcctgcctgtggaccccagcgccagcaatggccgcatcaagcagctgcggagtgaccaggccttcagccacctgcccaccggggccctgcagatcgagagcagcgaggagacagaccagggcaagtatgaatgtgtggccaccaacagcgctggggtgcgctacagcagccctgccaacctgtatgtgcgggtgtggaggacagtgagaagagtggccccccgcttcagcatcctgcccatgagccatgagatcatgcctggaggaaatgtgaacatcacctgtgtggccgtgggcagccccatgccctacgtgaagtggatgcagggcgctgaggacctgaccccagaagatgacatgcctgtgggcagaaatgtgctggagctgacagatgtgaaggacagcgccaactacacctgtgtggccatgagcagcctgggcgtcatcgaggccgtggcccagatcaccgtgaagagcctgcccaaggcccctggcacccccatggtgacagagaacacagccaccagcatcaccatcacctgggacagcggcaacccagaccctgtgtcctactacgtgattgagtacaagagcaagagccaggacggcccctaccagatcaaggaggacatcaccaccacccgctacagcattggaggcctgagccccaacagtgaatatgagatctgggtgtctgctgtgaacagcatcggccagggcccccccagcgagagcgtggtgaccaggactggagagcaggccccagccagcgcccccagaaatgtgcaggccaggatgctgagcgccaccaccatgattgtgcagtgggaggagcctgtggagcccaacggcctcatccggggctacagagtgtactacaccatggagcctgagcaccctgtgggcaactggcagaagcacaacgtggatgacagcctgctgaccaccgtgggcagcctgctggaggatgagacctacacagtgcgggtgctggccttcacctctgtgggagatggccccctgagtgaccccatccaggtgaagacccagcagggcgtgcccggccagcccatgaacctgcgggcagaggcccggtctgagaccagcatcaccctgtcctggagccccccccggcaggagagcatcatcaagtatgagctgctcttccgggagggggaccacggccgggaggtgggccgcacctttgaccccaccaccagctatgtggtggaggacctgaagcccaacacagaatatgccttccggctggccgcccggagcccccagggcctgggcgccttcacccctgtggtgcggcagaggaccctgcagagcaagcccagcgccccaccccaggatgtgaagtgtgtgtctgtgcgcagcacagccatcctggtgtcctggaggcctcctcctcctgagacccacaacggggccctggtgggctacagcgtgcgctaccggcccctgggcagcgaggaccctgagcccaaggaggtgaatggcatcccccccaccaccacccagatcctgctggaggccctggagaagtggacccagtaccgcatcaccaccgtggcccacacagaggtgggccctggccctgagagcagccctgtggtggtgaggacagatgaagatgtgcccagcgccccacccaggaaggtggaggccgaggccctgaatgccacagccatccgggtgctgtggaggagccctgcccctggccggcagcacggccagatccggggctaccaggtgcactacgtgaggatggagggcgctgaggcccggggccccccacgcatcaaggatgtgatgctggctgatgcccagtgggagacagatgacacagcagaatatgagatggtgatcaccaacctgcagcctgagacagcctacagcatcaccgtggccgcctacaccatgaagggagatggagcccggagcaagcccaaggtggtggtgaccaagggagctgtgctgggccggcccaccctgtctgtgcagcagaccccagagggcagcctgctggcccgctgggagcccccagctggaacagctgaggaccaggtgctgggctaccgcctgcagtttggaagagaggacagcacccccctggccaccctggagttccccccatctgaagatcgctacacagccagcggcgtgcacaagggggccacctacgtgttccggctggccgcccggagcagaggaggcctgggggaggaggccgctgaggtgctgagcatccctgaggacaccccccggggccacccccagatcctggaggccgctggaaatgccagcgctggcaccgtgctgctgcgctggctgccccctgtgcctgctgagagaaatggagccatcgtgaagtacacagtggccgtgcgggaggccggggccctgggccctgcccgggagacagagctgcctgctgctgctgagcctggagcagaaaatgccctgaccctgcagggcctgaagccagacacagcctatgacctgcaggtgcgggcccacacccggcggggccctggccccttcagcccccctgtgcgctaccgcaccttcctgcgggaccaggtgagccccaagaacttcaaggtgaagatgatcatgaagacctctgtgctgctgtcctgggagttcccagacaactacaacagccccaccccctacaagatccagtacaacggcctgaccctggatgtggatggccgcaccaccaagaagctgatcacccacctgaagccccacaccttctacaactttgtgctgaccaacagaggcagcagcctgggcggcctgcagcagacagtgacagcctggacagccttcaacctgctgaatggcaagcccagcgtggcccccaagccagatgctgatggcttcatcatggtgtacctgcctgatggccagagccctgtgcctgtgcagagctacttcatcgtgatggtgcccctgaggaagagccggggcggccagttcctgacccccctgggcagccctgaggacatggacctggaggagctgatccaggacatcagccggctgcagaggaggagcctgcggcacagccggcagctggaggtgccccggccctacatcgccgcccgcttctctgtgctgccccccaccttccaccctggggaccagaagcagtatggaggctttgacaacagaggcctggagcccggccaccgctacgtgctgtttgtgctggccgtgctgcagaagtctgagcccacctttgctgccagccccttcagtgaccccttccagctggacaacccagacccccagcccatcgtggatggagaggagggcctcatctgggtgattggccctgtgctggccgtggtgttcatcatctgcatcgtgattgccatcctgctgtacaagaacaagccagacagcaagaggaaggacagcgagcccaggaccaagtgcctgctgaacaatgctgacctggccccccaccaccccaaggaccctgtggagatgaggcgcatcaacttccagaccccagattctggcctgcggagccccctgcgggagcccggcttccactttgagagcatgctgagccacccccccatccccatcgctgacatggccgagcacacagagcggctgaaggccaatgacagcctgaagctgagccaggagtatgagagcattgaccccggccagcagttcacctgggagcacagcaacctggaggtgaacaagcccaagaacagatatgccaacgtcatcgcctatgaccacagcagggtcatcctgcagcccatcgagggcatcatgggcagtgactacatcaatgccaactacgtggatggctaccgctgccagaatgcctacatcgccacccagggccccctgcctgagaccttcggggacttctggaggatggtgtgggagcagaggtctgccaccatcgtgatgatgacccggctggaggagaagagccgcatcaagtgtgaccagtactggcccaacagaggaacagagacctacggcttcatccaggtgaccctgctggacaccatcgagctggccaccttctgtgtgaggaccttcagcctgcacaagaatggcagcagcgagaagcgggaggtgcggcagttccagttcaccgcctggccagaccacggcgtgcctgagtaccccacccccttcctggccttcctgcggcgggtgaagacctgcaaccccccagatgctggccccatcgtggtgcactgcagcgctggggtgggccgcacaggctgcttcatcgtgattgatgccatgctggagcgcatcaagccagagaagacagtggatgtgtatggccacgtgaccctgatgaggagccagaggaactacatggtgcagacagaggaccagtacagcttcatccacgaggccctgctggaggccgtgggctgcggcaacacagaggtgcctgcccggagcctgtatgcctacatccagaagctggcccaggtggagcctggagagcacgtgacaggcatggagctggagttcaagaggctggccaacagcaaggcccacaccagccgcttcatcagcgccaacctgccctgcaacaagttcaagaaccggctggtgaacatcatgccctatgagagcaccagggtgtgcctgcagcccatccggggcgtggagggcagtgactacatcaatgccagcttcattgatggctaccggcagcagaaggcctacatcgccacccagggccccctggccgagaccacagaggacttctggaggatgctgtgggagaacaacagcaccatcgtggtgatgctgaccaagctgcgggagatgggccgggagaagtgccaccagtactggccagctgagaggtctgcccgctaccagtactttgtggtggaccccatggccgagtacaacatgccccagtacatcctgcgggagttcaaggtgacagatgccagagatggccagagcaggacagtgcggcagttccagttcacagactggccagagcagggcgtgcccaagagcggggagggcttcatcgacttcatcggccaggtgcacaagaccaaggagcagtttggccaggacggccccatctctgtgcactgcagcgctggggtgggccgcactggagtcttcatcaccctgagcatcgtgctggagaggatgagatatgagggcgtggtggacatcttccagacagtgaagatgctgcggacccagaggcctgccatggtgcagacagaagatgagtaccagttctgctaccaggccgccctggagtacctgggcagctttgaccactacgccacctag

SEQ ID NO: 166383 - DNA, 4593 bp, synthetic construct
  misc_feature 1..4593: note = Description of Artificial Sequence: Synthetic coding sequence
  source 1..4593: mol_type = other DNA
atggcccccacctggggccctggcatggtgtctgtggtgggccccatgggcctgctggtggtgctgctggtgggcggctgtgccgctgaggagcccccacgcttcatcaaggagcccaaggaccagattggagtgtctgggggcgtggccagctttgtgtgccaggccactggagaccccaagccccgggtgacctggaacaagaagggcaagaaggtgaacagccagagatttgagaccattgaatttgatgagagcgctggagctgtgctgcgcatccagcccctgcggaccccaagagatgaaaatgtgtatgaatgtgtggcccagaacagcgtgggggagatcaccgtgcacgccaagctgactgtgctgcgggaggaccagctgcccagcggcttccccaacatcgacatgggcccccagctgaaggtggtggagaggaccaggacagccaccatgctgtgtgccgccagcggcaacccagaccctgagatcacctggttcaaggacttcctgcctgtggaccccagcgccagcaatggccgcatcaagcagctgcggagtgaccaggccttcagccacctgcccaccggggccctgcagatcgagagcagcgaggagacagaccagggcaagtatgaatgtgtggccaccaacagcgctggggtgcgctacagcagccctgccaacctgtatgtgcgggtgtggaggacagtgagaagagtggccccccgcttcagcatcctgcccatgagccatgagatcatgcctggaggaaatgtgaacatcacctgtgtggccgtgggcagccccatgccctacgtgaagtggatgcagggcgctgaggacctgaccccagaagatgacatgcctgtgggcagaaatgtgctggagctgacagatgtgaaggacagcgccaactacacctgtgtggccatgagcagcctgggcgtcatcgaggccgtggcccagatcaccgtgaagagcctgcccaaggcccctggcacccccatggtgacagagaacacagccaccagcatcaccatcacctgggacagcggcaacccagaccctgtgtcctactacgtgattgagtacaagagcaagagccaggacggcccctaccagatcaaggaggacatcaccaccacccgctacagcattggaggcctgagccccaacagtgaatatgagatctgggtgtctgctgtgaacagcatcggccagggcccccccagcgagagcgtggtgaccaggactggagagcaggccccagccagcgcccccagaaatgtgcaggccaggatgctgagcgccaccaccatgattgtgcagtgggaggagcctgtggagcccaacggcctcatccggggctacagagtgtactacaccatggagcctgagcaccctgtgggcaactggcagaagcacaacgtggatgacagcctgctgaccaccgtgggcagcctgctggaggatgagacctacacagtgcgggtgctggccttcacctctgtgggagatggccccctgagtgaccccatccaggtgaagacccagcagggcgtgcccggccagcccatgaacctgcgggcagaggcccggtctgagaccagcatcaccctgtcctggagccccccccggcaggagagcatcatcaagtatgagctgctcttccgggagggggaccacggccgggaggtgggccgcacctttgaccccaccaccagctatgtggtggaggacctgaagcccaacacagaatatgccttccggctggccgcccggagcccccagggcctgggcgccttcacccctgtggtgcggcagaggaccctgcagagcatcagccccaagaacttcaaggtgaagatgatcatgaagacctctgtgctgctgtcctgggagttcccagacaactacaacagccccaccccctacaagatccagtacaacggcctgaccctggatgtggatggccgcaccaccaagaagctgatcacccacctgaagccccacaccttctacaactttgtgctgaccaacagaggcagcagcctgggcggcctgcagcagacagtgacagcctggacagccttcaacctgctgaatggcaagcccagcgtggcccccaagccagatgctgatggcttcatcatggtgtacctgcctgatggccagagccctgtgcctgtgcagagctacttcatcgtgatggtgcccctgaggaagagccggggcggccagttcctgacccccctgggcagccctgaggacatggacctggaggagctgatccaggacatcagccggctgcagaggaggagcctgcggcacagccggcagctggaggtgccccggccctacatcgccgcccgcttctctgtgctgccccccaccttccaccctggggaccagaagcagtatggaggctttgacaacagaggcctggagcccggccaccgctacgtgctgtttgtgctggccgtgctgcagaagtctgagcccacctttgctgccagccccttcagtgaccccttccagctggacaacccagacccccagcccatcgtggatggagaggagggcctcatctgggtgattggccctgtgctggccgtggtgttcatcatctgcatcgtgattgccatcctgctgtacaagaacaagccagacagcaagaggaaggacagcgagcccaggaccaagtgcctgctgaacaatgctgacctggccccccaccaccccaaggaccctgtggagatgaggcgcatcaacttccagaccccagattctggcctgcggagccccctgcgggagcccggcttccactttgagagcatgctgagccacccccccatccccatcgctgacatggccgagcacacagagcggctgaaggccaatgacagcctgaagctgagccaggagtatgagagcattgaccccggccagcagttcacctgggagcacagcaacctggaggtgaacaagcccaagaacagatatgccaacgtcatcgcctatgaccacagcagggtcatcctgcagcccatcgagggcatcatgggcagtgactacatcaatgccaactacgtggatggctaccgctgccagaatgcctacatcgccacccagggccccctgcctgagaccttcggggacttctggaggatggtgtgggagcagaggtctgccaccatcgtgatgatgacccggctggaggagaagagccgcatcaagtgtgaccagtactggcccaacagaggaacagagacctacggcttcatccaggtgaccctgctggacaccatcgagctggccaccttctgtgtgaggaccttcagcctgcacaagaatggcagcagcgagaagcgggaggtgcggcagttccagttcaccgcctggccagaccacggcgtgcctgagtaccccacccccttcctggccttcctgcggcgggtgaagacctgcaaccccccagatgctggccccatcgtggtgcactgcagcgctggggtgggccgcacaggctgcttcatcgtgattgatgccatgctggagcgcatcaagccagagaagacagtggatgtgtatggccacgtgaccctgatgaggagccagaggaactacatggtgcagacagaggaccagtacagcttcatccacgaggccctgctggaggccgtgggctgcggcaacacagaggtgcctgcccggagcctgtatgcctacatccagaagctggcccaggtggagcctggagagcacgtgacaggcatggagctggagttcaagaggctggccaacagcaaggcccacaccagccgcttcatcagcgccaacctgccctgcaacaagttcaagaaccggctggtgaacatcatgccctatgagagcaccagggtgtgcctgcagcccatccggggcgtggagggcagtgactacatcaatgccagcttcattgatggctaccggcagcagaaggcctacatcgccacccagggccccctggccgagaccacagaggacttctggaggatgctgtgggagaacaacagcaccatcgtggtgatgctgaccaagctgcgggagatgggccgggagaagtgccaccagtactggccagctgagaggtctgcccgctaccagtactttgtggtggaccccatggccgagtacaacatgccccagtacatcctgcgggagttcaaggtgacagatgccagagatggccagagcaggacagtgcggcagttccagttcacagactggccagagcagggcgtgcccaagagcggggagggcttcatcgacttcatcggccaggtgcacaagaccaaggagcagtttggccaggacggccccatctctgtgcactgcagcgctggggtgggccgcactggagtcttcatcaccctgagcatcgtgctggagaggatgagatatgagggcgtggtggacatcttccagacagtgaagatgctgcggacccagaggcctgccatggtgcagacagaagatgagtaccagttctgctaccaggccgccctggagtacctgggcagctttgaccactacgccacctag

SEQ ID NO: 166384 - DNA, 5820 bp, synthetic construct
  misc_feature 1..5820: note = Description of Artificial Sequence: Synthetic coding sequence
  source 1..5820: mol_type = other DNA
atggcccccacctggggccctggcatggtgtctgtggtgggccccatgggcctgctggtggtgctgctggtgggcggctgtgccgctgaggagcccccacgcttcatcaaggagcccaaggaccagattggagtgtctgggggcgtggccagctttgtgtgccaggccactggagaccccaagccccgggtgacctggaacaagaagggcaagaaggtgaacagccagagatttgagaccattgaatttgatgagagcgctggagctgtgctgcgcatccagcccctgcggaccccaagagatgaaaatgtgtatgaatgtgtggcccagaacagcgtgggggagatcaccgtgcacgccaagctgactgtgctgcgggaggaccagctgcccagcggcttccccaacatcgacatgggcccccagctgaaggtggtggagaggaccaggacagccaccatgctgtgtgccgccagcggcaacccagaccctgagatcacctggttcaaggacttcctgcctgtggaccccagcgccagcaatggccgcatcaagcagctgcggagtgaccaggccttcagccacctgcccaccggggccctgcagatcgagagcagcgaggagacagaccagggcaagtatgaatgtgtggccaccaacagcgctggggtgcgctacagcagccctgccaacctgtatgtgcgggtgtggaggacagtgagaagagtggccccccgcttcagcatcctgcccatgagccatgagatcatgcctggaggaaatgtgaacatcacctgtgtggccgtgggcagccccatgccctacgtgaagtggatgcagggcgctgaggacctgaccccagaagatgacatgcctgtgggcagaaatgtgctggagctgacagatgtgaaggacagcgccaactacacctgtgtggccatgagcagcctgggcgtcatcgaggccgtggcccagatcaccgtgaagagcctgcccaaggcccctggcacccccatggtgacagagaacacagccaccagcatcaccatcacctgggacagcggcaacccagaccctgtgtcctactacgtgattgagtacaagagcaagagccaggacggcccctaccagatcaaggaggacatcaccaccacccgctacagcattggaggcctgagccccaacagtgaatatgagatctgggtgtctgctgtgaacagcatcggccagggcccccccagcgagagcgtggtgaccaggactggagagcaggccccagccagcgcccccagaaatgtgcaggccaggatgctgagcgccaccaccatgattgtgcagtgggaggagcctgtggagcccaacggcctcatccggggctacagagtgtactacaccatggagcctgagcaccctgtgggcaactggcagaagcacaacgtggatgacagcctgctgaccaccgtgggcagcctgctggaggatgagacctacacagtgcgggtgctggccttcacctctgtgggagatggccccctgagtgaccccatccaggtgaagacccagcagggcgtgcccggccagcccatgaacctgcgggcagaggcccggtctgagaccagcatcaccctgtcctggagccccccccggcaggagagcatcatcaagtatgagctgctcttccgggagggggaccacggccgggaggtgggccgcacctttgaccccaccaccagctatgtggtggaggacctgaagcccaacacagaatatgccttccggctggccgcccggagcccccagggcctgggcgccttcacccctgtggtgcggcagaggaccctgcagagcaagcccagcgccccaccccaggatgtgaagtgtgtgtctgtgcgcagcacagccatcctggtgtcctggaggcctcctcctcctgagacccacaacggggccctggtgggctacagcgtgcgctaccggcccctgggcagcgaggaccctgagcccaaggaggtgaatggcatcccccccaccaccacccagatcctgctggaggccctggagaagtggacccagtaccgcatcaccaccgtggcccacacagaggtgggccctggccctgagagcagccctgtggtggtgaggacagatgaagatgtgcccagcgccccacccaggaaggtggaggccgaggccctgaatgccacagccatccgggtgctgtggaggagccctgcccctggccggcagcacggccagatccggggctaccaggtgcactacgtgaggatggagggcgctgaggcccggggccccccacgcatcaaggatgtgatgctggctgatgcccaggagatggtgatcaccaacctgcagcctgagacagcctacagcatcaccgtggccgcctacaccatgaagggagatggagcccggagcaagcccaaggtggtggtgaccaagggagctgtgctgggccggcccaccctgtctgtgcagcagaccccagagggcagcctgctggcccgctgggagcccccagctggaacagctgaggaccaggtgctgggctaccgcctgcagtttggccgggaggacagcacccccctggccaccctggagttccccccatctgaggaccgctacacagccagcggcgtgcacaagggggccacctacgtgttccggctggccgcccggagccggggcggcctgggggaggaggccgctgaggtgctgagcatccctgaggacaccccccggggccacccccagatcctggaggccgctggaaatgccagcgctggcaccgtgctgctgcgctggctgccccctgtgcctgctgagagaaatggagccatcgtgaagtacacagtggccgtgcgggaggccggggccctgggccctgcccgggagacagagctgcctgctgctgctgagcccggggctgaaaatgccctgaccctgcagggcctgaagccagacacagcctatgacctgcaggtgcgggcccacacccggcggggccctggccccttcagcccccctgtgcgctaccgcaccttcctgcgggaccaggtgagccccaagaacttcaaggtgaagatgatcatgaagacctctgtgctgctgtcctgggagttcccagacaactacaacagccccaccccctacaagatccagtacaacggcctgaccctggatgtggatggccgcaccaccaagaagctgatcacccacctgaagccccacaccttctacaactttgtgctgaccaacagaggcagcagcctgggcggcctgcagcagacagtgacagcctggacagccttcaacctgctgaatggcaagcccagcgtggcccccaagccagatgctgatggcttcatcatggtgtacctgcctgatggccagagccctgtgcctgtgcagagctacttcatcgtgatggtgcccctgaggaagagcagaggaggccagttcctgacccccctgggcagccctgaggacatggacctggaggagctgatccaggacatcagccggctgcagaggaggagcctgcggcacagccggcagctggaggtgccccggccctacatcgccgcccgcttctctgtgctgccccccaccttccaccctggggaccagaagcagtatggaggctttgacaacagaggcctggagcccggccacagatatgtgctgtttgtgctggccgtgctgcagaagtctgagcccacctttgctgccagccccttcagtgaccccttccagctggacaacccagacccccagcccatcgtggatggagaggagggcctcatctgggtgattggccctgtgctggccgtggtgttcatcatctgcatcgtcatcgccatcctgctgtacaagaacaagccagacagcaagaggaaggacagcgagcccaggaccaagtgcctgctgaacaatgctgacctggccccccaccaccccaaggaccctgtggagatgaggcgcatcaacttccagaccccagacagcggcctgcggagccccctgcgggagcccggcttccactttgagagcatgctgagccacccccccatccccatcgctgacatggccgagcacacagagcggctgaaggccaatgacagcctgaagctgagccaggagtatgagagcattgatcctggccagcagttcacctgggagcacagcaacctggaggtgaacaagcccaagaacagatatgccaacgtgattgcctatgaccacagcagggtcatcctgcagcccatcgagggcatcatgggcagtgactacatcaatgccaactacgtggatggctaccgctgccagaatgcctacatcgccacccagggccccctgcctgagacctttggagacttctggaggatggtgtgggagcagaggtctgccaccatcgtgatgatgacccggctggaggagaagagccgcatcaagtgtgaccagtactggcccaacagaggaacagagacctacggcttcatccaggtgaccctgctggacaccatcgagctggccaccttctgtgtgaggaccttcagcctgcacaagaatggcagcagcgagaagcgggaggtgcggcagttccagttcaccgcctggccagaccatggagtgcctgagtaccccacccccttcctggccttcctgcggcgggtgaagacctgcaaccccccagatgctggccccatcgtggtgcactgcagcgctggggtgggccgcacaggctgcttcatcgtgattgatgccatgctggagcgcatcaagccagagaagacagtggatgtgtatggccacgtgaccctgatgaggagccagaggaactacatggtgcagacagaggaccagtacagcttcatccacgaggccctgctggaggccgtgggctgcggcaacacagaggtgcctgcccggagcctgtatgcctacatccagaagctggcccaggtggagcccggggagcacgtgacaggcatggagctggagttcaagaggctggccaacagcaaggcccacaccagccgcttcatcagcgccaacctgccctgcaacaagttcaagaaccggctggtgaacatcatgccctatgagagcaccagggtgtgcctgcagcccatccggggcgtggagggcagtgactacatcaatgccagcttcattgatggctaccggcagcagaaggcctacatcgccacccagggccccctggccgagaccacagaggacttctggaggatgctgtgggagaacaacagcaccatcgtggtgatgctgaccaagctgcgggagatgggccgggagaagtgccaccagtactggccagctgagaggtctgcccgctaccagtactttgtggtggaccccatggccgagtacaacatgccccagtacatcctgcgggagttcaaggtgacagatgccagagatggccagagcaggacagtgcggcagttccagttcacagactggccagagcagggcgtgcccaagtctggagagggcttcatcgacttcatcggccaggtgcacaagaccaaggagcagtttggccaggacggccccatctctgtgcactgcagcgctggggtgggccgcactggagtcttcatcaccctgagcatcgtgctggagaggatgagatatgaaggagtggtggacatcttccagacagtgaagatgctgcggacccagaggcctgccatggtgcagacagaagatgagtaccagttctgctaccaggccgccctggagtacctgggcagctttgaccactacgccacctag

SEQ ID NO: 166385 - DNA, 5847 bp, synthetic construct
  misc_feature 1..5847: note = Description of Artificial Sequence: Synthetic coding sequence
  source 1..5847: mol_type = other DNA
atggcccccacctggggccctggcatggtgtctgtggtgggccccatgggcctgctggtggtgctgctggtgggcggctgtgccgctgaggagcccccacgcttcatcaaggagcccaaggaccagattggagtgtctgggggcgtggccagctttgtgtgccaggccactggagaccccaagccccgggtgacctggaacaagaagggcaagaaggtgaacagccagagatttgagaccattgaatttgatgagagcgctggagctgtgctgcgcatccagcccctgcggaccccaagagatgaaaatgtgtatgaatgtgtggcccagaacagcgtgggggagatcaccgtgcacgccaagctgactgtgctgcgggaggaccagctgcccagcggcttccccaacatcgacatgggcccccagctgaaggtggtggagaggaccaggacagccaccatgctgtgtgccgccagcggcaacccagaccctgagatcacctggttcaaggacttcctgcctgtggaccccagcgccagcaatggccgcatcaagcagctgcggtctgagacctttgagagcacccccatccggggggccctgcagatcgagagcagcgaggagacagaccagggcaagtatgaatgtgtggccaccaacagcgctggggtgcgctacagcagccctgccaacctgtatgtgcgggagctgcgggaggtgagaagagtggccccccgcttcagcatcctgcccatgagccatgagatcatgcctggaggaaatgtgaacatcacctgtgtggccgtgggcagccccatgccctacgtgaagtggatgcagggcgctgaggacctgaccccagaagatgacatgcctgtgggcagaaatgtgctggagctgacagatgtgaaggacagcgccaactacacctgtgtggccatgagcagcctgggcgtcatcgaggccgtggcccagatcaccgtgaagagcctgcccaaggcccctggcacccccatggtgacagagaacacagccaccagcatcaccatcacctgggacagcggcaacccagaccctgtgtcctactacgtgattgagtacaagagcaagagccaggacggcccctaccagatcaaggaggacatcaccaccacccgctacagcattggaggcctgagccccaacagtgaatatgagatctgggtgtctgctgtgaacagcatcggccagggcccccccagcgagagcgtggtgaccaggactggagagcaggccccagccagcgcccccagaaatgtgcaggccaggatgctgagcgccaccaccatgattgtgcagtgggaggagcctgtggagcccaacggcctcatccggggctacagagtgtactacaccatggagcctgagcaccctgtgggcaactggcagaagcacaacgtggatgacagcctgctgaccaccgtgggcagcctgctggaggatgagacctacacagtgcgggtgctggccttcacctctgtgggagatggccccctgagtgaccccatccaggtgaagacccagcagggcgtgcccggccagcccatgaacctgcgggcagaggcccggtctgagaccagcatcaccctgtcctggagccccccccggcaggagagcatcatcaagtatgagctgctcttccgggagggggaccacggccgggaggtgggccgcacctttgaccccaccaccagctatgtggtggaggacctgaagcccaacacagaatatgccttccggctggccgcccggagcccccagggcctgggcgccttcacccctgtggtgcggcagaggaccctgcagagcaagcccagcgccccaccccaggatgtgaagtgtgtgtctgtgcgcagcacagccatcctggtgtcctggaggcctcctcctcctgagacccacaacggggccctggtgggctacagcgtgcgctaccggcccctgggcagcgaggaccctgagcccaaggaggtgaatggcatcccccccaccaccacccagatcctgctggaggccctggagaagtggacccagtaccgcatcaccaccgtggcccacacagaggtgggccctggccctgagagcagccctgtggtggtgaggacagatgaagatgtgcccagcgccccacccaggaaggtggaggccgaggccctgaatgccacagccatccgggtgctgtggaggagccctgcccctggccggcagcacggccagatccggggctaccaggtgcactacgtgaggatggagggcgctgaggcccggggccccccacgcatcaaggatgtgatgctggctgatgcccagtgggagacagatgacacagcagaatatgagatggtgatcaccaacctgcagcctgagacagcctacagcatcaccgtggccgcctacaccatgaagggagatggagcccggagcaagcccaaggtggtggtgaccaagggagctgtgctgggccggcccaccctgtctgtgcagcagaccccagagggcagcctgctggcccgctgggagcccccagctggaacagctgaggaccaggtgctgggctaccgcctgcagtttggaagagaggacagcacccccctggccaccctggagttccccccatctgaagatcgctacacagccagcggcgtgcacaagggggccacctacgtgttccggctggccgcccggagcagaggaggcctgggggaggaggccgctgaggtgctgagcatccctgaggacaccccccggggccacccccagatcctggaggccgctggaaatgccagcgctggcaccgtgctgctgcgctggctgccccctgtgcctgctgagagaaatggagccatcgtgaagtacacagtggccgtgcgggaggccggggccctgggccctgcccgggagacagagctgcctgctgctgctgagcctggagcagaaaatgccctgaccctgcagggcctgaagccagacacagcctatgacctgcaggtgcgggcccacacccggcggggccctggccccttcagcccccctgtgcgctaccgcaccttcctgcgggaccaggtgagccccaagaacttcaaggtgaagatgatcatgaagacctctgtgctgctgtcctgggagttcccagacaactacaacagccccaccccctacaagatccagtacaacggcctgaccctggatgtggatggccgcaccaccaagaagctgatcacccacctgaagccccacaccttctacaactttgtgctgaccaacagaggcagcagcctgggcggcctgcagcagacagtgacagcctggacagccttcaacctgctgaatggcaagcccagcgtggcccccaagccagatgctgatggcttcatcatggtgtacctgcctgatggccagagccctgtgcctgtgcagagctacttcatcgtgatggtgcccctgaggaagagccggggcggccagttcctgacccccctgggcagccctgaggacatggacctggaggagctgatccaggacatcagccggctgcagaggaggagcctgcggcacagccggcagctggaggtgccccggccctacatcgccgcccgcttctctgtgctgccccccaccttccaccctggggaccagaagcagtatggaggctttgacaacagaggcctggagcccggccaccgctacgtgctgtttgtgctggccgtgctgcagaagtctgagcccacctttgctgccagccccttcagtgaccccttccagctggacaacccagacccccagcccatcgtggatggagaggagggcctcatctgggtgattggccctgtgctggccgtggtgttcatcatctgcatcgtgattgccatcctgctgtacaagaacaagccagacagcaagaggaaggacagcgagcccaggaccaagtgcctgctgaacaatgctgacctggccccccaccaccccaaggaccctgtggagatgaggcgcatcaacttccagaccccagattctggcctgcggagccccctgcgggagcccggcttccactttgagagcatgctgagccacccccccatccccatcgctgacatggccgagcacacagagcggctgaaggccaatgacagcctgaagctgagccaggagtatgagagcattgaccccggccagcagttcacctgggagcacagcaacctggaggtgaacaagcccaagaacagatatgccaacgtcatcgcctatgaccacagcagggtcatcctgcagcccatcgagggcatcatgggcagtgactacatcaatgccaactacgtggatggctaccgctgccagaatgcctacatcgccacccagggccccctgcctgagaccttcggggacttctggaggatggtgtgggagcagaggtctgccaccatcgtgatgatgacccggctggaggagaagagccgcatcaagtgtgaccagtactggcccaacagaggaacagagacctacggcttcatccaggtgaccctgctggacaccatcgagctggccaccttctgtgtgaggaccttcagcctgcacaagaatggcagcagcgagaagcgggaggtgcggcagttccagttcaccgcctggccagaccacggcgtgcctgagtaccccacccccttcctggccttcctgcggcgggtgaagacctgcaaccccccagatgctggccccatcgtggtgcactgcagcgctggggtgggccgcacaggctgcttcatcgtgattgatgccatgctggagcgcatcaagccagagaagacagtggatgtgtatggccacgtgaccctgatgaggagccagaggaactacatggtgcagacagaggaccagtacagcttcatccacgaggccctgctggaggccgtgggctgcggcaacacagaggtgcctgcccggagcctgtatgcctacatccagaagctggcccaggtggagcctggagagcacgtgacaggcatggagctggagttcaagaggctggccaacagcaaggcccacaccagccgcttcatcagcgccaacctgccctgcaacaagttcaagaaccggctggtgaacatcatgccctatgagagcaccagggtgtgcctgcagcccatccggggcgtggagggcagtgactacatcaatgccagcttcattgatggctaccggcagcagaaggcctacatcgccacccagggccccctggccgagaccacagaggacttctggaggatgctgtgggagaacaacagcaccatcgtggtgatgctgaccaagctgcgggagatgggccgggagaagtgccaccagtactggccagctgagaggtctgcccgctaccagtactttgtggtggaccccatggccgagtacaacatgccccagtacatcctgcgggagttcaaggtgacagatgccagagatggccagagcaggacagtgcggcagttccagttcacagactggccagagcagggcgtgcccaagagcggggagggcttcatcgacttcatcggccaggtgcacaagaccaaggagcagtttggccaggacggccccatctctgtgcactgcagcgctggggtgggccgcactggagtcttcatcaccctgagcatcgtgctggagaggatgagatatgagggcgtggtggacatcttccagacagtgaagatgctgcggacccagaggcctgccatggtgcagacagaagatgagtaccagttctgctaccaggccgccctggagtacctgggcagctttgaccactacgccacctag

SEQ ID NO: 166386 - DNA, 5850 bp, synthetic construct
  misc_feature 1..5850: note = Description of Artificial Sequence: Synthetic coding sequence
  source 1..5850: mol_type = other DNA
atggcccccacctggggccctggcatggtgtctgtggtgggccccatgggcctgctggtggtgctgctggtgggcggctgtgccgctgaggagcccccacgcttcatcaaggagcccaaggaccagattggagtgtctgggggcgtggccagctttgtgtgccaggccactggagaccccaagccccgggtgacctggaacaagaagggcaagaaggtgaacagccagagatttgagaccattgaatttgatgagagcgctggagctgtgctgcgcatccagcccctgcggaccccaagagatgaaaatgtgtatgaatgtgtggcccagaacagcgtgggggagatcaccgtgcacgccaagctgactgtgctgcgggaggaccagctgcccagcggcttccccaacatcgacatgggcccccagctgaaggtggtggagaggaccaggacagccaccatgctgtgtgccgccagcggcaacccagaccctgagatcacctggttcaaggacttcctgcctgtggaccccagcgccagcaatggccgcatcaagcagctgcggcgctctgagacctttgagagcacccccatccggggggccctgcagatcgagagcagcgaggagacagaccagggcaagtatgaatgtgtggccaccaacagcgctggggtgcgctacagcagccctgccaacctgtatgtgcgggagctgcgggaggtgcggcgggtggccccccgcttcagcatcctgcccatgagccatgagatcatgcctggaggaaatgtgaacatcacctgtgtggccgtgggcagccccatgccctacgtgaagtggatgcagggcgctgaggacctgaccccagaagatgacatgcctgtgggcagaaatgtgctggagctgacagatgtgaaggacagcgccaactacacctgtgtggccatgagcagcctgggcgtgattgaagctgtggcccagatcaccgtgaagagcctgcccaaggcccctggcacccccatggtgacagaaaatacagccaccagcatcaccatcacctgggacagcggcaacccagaccctgtgtcctactacgtgattgagtacaagagcaagagccaggacggcccctaccagatcaaggaggacatcaccaccacccgctacagcatcggcggcctgagccccaacagtgaatatgagatctgggtgtctgctgtgaacagcatcggccagggccccccatctgagagcgtggtgaccaggactggagagcaggccccagccagcgcccccagaaatgtgcaggccaggatgctgagcgccaccaccatgattgtgcagtgggaggagcctgtggagcccaacggcctcatccggggctacagagtgtactacaccatggagcctgagcaccctgtgggcaactggcagaagcacaacgtggatgacagcctgctgaccaccgtgggcagcctgctggaggatgagacctacacagtgcgggtgctggccttcacctctgtgggagatggccccctgagtgaccccatccaggtgaagacccagcagggcgtgcccggccagcccatgaacctgcgggcagaggcccggtctgagaccagcatcaccctgtcctggagccccccccggcaggagagcatcatcaagtatgagctgctcttccgggagggggaccacggccgggaggtgggccgcacctttgaccccaccaccagctatgtggtggaggacctgaagcccaacacagaatatgccttccggctggccgcccggagcccccagggcctgggcgccttcacccctgtggtgcggcagaggaccctgcagagcaagcccagcgccccaccccaggatgtgaagtgtgtgtctgtgcgcagcacagccatcctggtgtcctggaggcctcctcctcctgagacccacaatggagccctggtgggctacagcgtgcgctaccggcccctgggctctgaagatcctgagcccaaggaggtgaatggcatcccccccaccaccacccagatcctgctggaggccctggagaagtggacccagtaccgcatcaccaccgtggcccacacagaggtgggccctggccctgagagcagccctgtggtggtgaggacagatgaagatgtgcccagcgccccacccaggaaggtggaggccgaggccctgaatgccacagccatccgggtgctgtggaggagccctgcccctggccggcagcacggccagatccggggctaccaggtgcactacgtgaggatggagggcgctgaggcccggggccccccacgcatcaaggatgtgatgctggctgatgcccagtgggagacagatgacacagcagaatatgagatggtgatcaccaacctgcagcctgagacagcctacagcatcaccgtggccgcctacaccatgaagggagatggagcccggagcaagcccaaggtggtggtgaccaagggagctgtgctgggccggcccaccctgtctgtgcagcagaccccagagggcagcctgctggcccgctgggagcccccagctggaacagctgaggaccaggtgctgggctaccgcctgcagtttggccgggaggacagcacccccctggccaccctggagttccccccatctgaggaccgctacacagccagcggcgtgcacaagggggccacctacgtgttccggctggccgcccggagccggggcggcctgggggaggaggccgctgaggtgctgagcatccctgaggacaccccccggggccacccccagatcctggaggccgctggaaatgccagcgctggcaccgtgctgctgcgctggctgccccctgtgcctgctgagagaaatggagccatcgtgaagtacacagtggccgtgcgggaggccggggccctgggccctgcccgggagacagagctgcctgctgctgctgagcccggggctgaaaatgccctgaccctgcagggcctgaagccagacacagcctatgacctgcaggtgcgggcccacacccggcggggccctggccccttcagcccccctgtgcgctaccgcaccttcctgcgggaccaggtgagccccaagaacttcaaggtgaagatgatcatgaagacctctgtgctgctgtcctgggagttcccagacaactacaacagccccaccccctacaagatccagtacaacggcctgaccctggatgtggatggccgcaccaccaagaagctgatcacccacctgaagccccacaccttctacaactttgtgctgaccaacagaggcagcagcctgggcggcctgcagcagacagtgacagcctggacagccttcaacctgctgaatggcaagcccagcgtggcccccaagccagatgctgatggcttcatcatggtgtacctgcctgatggccagagccctgtgcctgtgcagagctacttcatcgtgatggtgcccctgaggaagagcagaggaggccagttcctgacccccctgggcagccctgaggacatggacctggaggagctgatccaggacatcagccggctgcagaggaggagcctgcggcacagccggcagctggaggtgccccggccctacatcgccgcccgcttctctgtgctgccccccaccttccaccctggggaccagaagcagtatggaggctttgacaacagaggcctggagcccggccacagatatgtgctgtttgtgctggccgtgctgcagaagtctgagcccacctttgctgccagccccttcagtgaccccttccagctggacaacccagacccccagcccatcgtggatggagaggagggcctcatctgggtgattggccctgtgctggccgtggtgttcatcatctgcatcgtcatcgccatcctgctgtacaagaagaagccccacagcaagaggaaggacagcgagcccaggaccaagtgcctgctgaacaatgctgacctggccccccaccaccccaaggaccctgtggagatgaggcgcatcaacttccagaccccagacagcggcctgcggagccccctgcgggagcccggcttccactttgagagcatgctgagccacccccccatccccatcgctgacatggccgagcacacagagcggctgaaggccaatgacagcctgaagctgagccaggagtatgagagcattgatcctggccagcagttcacctgggagcacagcaacctggaggtgaacaagcccaagaacagatatgccaacgtgattgcctatgaccacagcagggtcatcctgcagcccatcgagggcatcatgggcagtgactacatcaatgccaactacgtggatggctaccgctgccagaatgcctacatcgccacccagggccccctgcctgagacctttggagacttctggaggatggtgtgggagcagaggtctgccaccatcgtgatgatgacccggctggaggagaagagccgcatcaagtgtgaccagtactggcccaacagaggaacagagacctacggcttcatccaggtgaccctgctggacaccatcgagctggccaccttctgtgtgaggaccttcagcctgcacaagaatggcagcagcgagaagcgggaggtgcggcagttccagttcaccgcctggccagaccatggagtgcctgagtaccccacccccttcctggccttcctgcggcgggtgaagacctgcaaccccccagatgctggccccatcgtggtgcactgcagcgctggggtgggccgcacaggctgcttcatcgtgattgatgccatgctggagcgcatcaagccagagaagacagtggatgtgtatggccacgtgaccctgatgaggagccagaggaactacatggtgcagacagaggaccagtacagcttcatccacgaggccctgctggaggccgtgggctgcggcaacacagaggtgcctgcccggagcctgtatgcctacatccagaagctggcccaggtggagcccggggagcacgtgacaggcatggagctggagttcaagaggctggccaacagcaaggcccacaccagccgcttcatcagcgccaacctgccctgcaacaagttcaagaaccggctggtgaacatcatgccctatgagagcaccagggtgtgcctgcagcccatccggggcgtggagggcagtgactacatcaatgccagcttcattgatggctaccggcagcagaaggcctacatcgccacccagggccccctggccgagaccacagaggacttctggaggatgctgtgggagaacaacagcaccatcgtggtgatgctgaccaagctgcgggagatgggccgggagaagtgccaccagtactggccagctgagaggtctgcccgctaccagtactttgtggtggaccccatggccgagtacaacatgccccagtacatcctgcgggagttcaaggtgacagatgccagagatggccagagcaggacagtgcggcagttccagttcacagactggccagagcagggcgtgcccaagtctggagagggcttcatcgacttcatcggccaggtgcacaagaccaaggagcagtttggccaggacggccccatctctgtgcactgcagcgctggggtgggccgcactggagtcttcatcaccctgagcatcgtgctggagaggatgagatatgaaggagtggtggacatcttccagacagtgaagatgctgcggacccagaggcctgccatggtgcagacagaagatgagtaccagttctgctaccaggccgccctggagtacctgggcagctttgaccactacgccacctag

SEQ ID NO: 166387 - DNA, 4683 bp, synthetic construct
  misc_feature 1..4683: note = Description of Artificial Sequence: Synthetic coding sequence
  source 1..4683: mol_type = other DNA
cgcagcgcccggggcctgtctgtgcgggacagaggagccatccccctgcagggcggggacagaagaagcctgcccagcatggcccccacctggggccctggcatggtgtctgtggtgggccccatgggcctgctggtggtgctgctggtgggcggctgtgccgctgaggagcccccacgcttcatcaaggagcccaaggaccagattggagtgtctgggggcgtggccagctttgtgtgccaggccactggagaccccaagccccgggtgacctggaacaagaagggcaagaaggtgaacagccagagatttgagaccattgaatttgatgagagcgctggagctgtgctgcgcatccagcccctgcggaccccaagagatgaaaatgtgtatgaatgtgtggcccagaacagcgtgggggagatcaccgtgcacgccaagctgactgtgctgcgggaggaccagctgcccagcggcttccccaacatcgacatgggcccccagctgaaggtggtggagaggaccaggacagccaccatgctgtgtgccgccagcggcaacccagaccctgagatcacctggttcaaggacttcctgcctgtggaccccagcgccagcaatggccgcatcaagcagctgcggagcggggccctgcagatcgagagcagcgaggagacagaccagggcaagtatgaatgtgtggccaccaacagcgctggggtgcgctacagcagccctgccaacctgtatgtgcgggtgcggcgggtggccccccgcttcagcatcctgcccatgagccatgagatcatgcctggaggaaatgtgaacatcacctgtgtggccgtgggcagccccatgccctacgtgaagtggatgcagggcgctgaggacctgaccccagaagatgacatgcctgtgggcagaaatgtgctggagctgacagatgtgaaggacagcgccaactacacctgtgtggccatgagcagcctgggcgtgattgaagctgtggcccagatcaccgtgaagagcctgcccaaggcccctggcacccccatggtgacagaaaatacagccaccagcatcaccatcacctgggacagcggcaacccagaccctgtgtcctactacgtgattgagtacaagagcaagagccaggacggcccctaccagatcaaggaggacatcaccaccacccgctacagcatcggcggcctgagccccaacagtgaatatgagatctgggtgtctgctgtgaacagcatcggccagggccccccatctgagagcgtggtgaccaggactggagagcaggccccagccagcgcccccagaaatgtgcaggccaggatgctgagcgccaccaccatgattgtgcagtgggaggagcctgtggagcccaacggcctcatccggggctacagagtgtactacaccatggagcctgagcaccctgtgggcaactggcagaagcacaacgtggatgacagcctgctgaccaccgtgggcagcctgctggaggatgagacctacacagtgcgggtgctggccttcacctctgtgggagatggccccctgagtgaccccatccaggtgaagacccagcagggcgtgcccggccagcccatgaacctgcgggcagaggcccggtctgagaccagcatcaccctgtcctggagccccccccggcaggagagcatcatcaagtatgagctgctcttccgggagggggaccacggccgggaggtgggccgcacctttgaccccaccaccagctatgtggtggaggacctgaagcccaacacagaatatgccttccggctggccgcccggagcccccagggcctgggcgccttcacccctgtggtgcggcagaggaccctgcagagcatcagccccaagaacttcaaggtgaagatgatcatgaagacctctgtgctgctgtcctgggagttcccagacaactacaacagccccaccccctacaagatccagtacaacggcctgaccctggatgtggatggccgcaccaccaagaagctgatcacccacctgaagccccacaccttctacaactttgtgctgaccaacagaggcagcagcctgggcggcctgcagcagacagtgacagcctggacagccttcaacctgctgaatggcaagcccagcgtggcccccaagccagatgctgatggcttcatcatggtgtacctgcctgatggccagagccctgtgcctgtgcagagctacttcatcgtgatggtgcccctgaggaagagcagaggaggccagttcctgacccccctgggcagccctgaggacatggacctggaggagctgatccaggacatcagccggctgcagaggaggagcctgcggcacagccggcagctggaggtgccccggccctacatcgccgcccgcttctctgtgctgccccccaccttccaccctggggaccagaagcagtatggaggctttgacaacagaggcctggagcccggccacagatatgtgctgtttgtgctggccgtgctgcagaagtctgagcccacctttgctgccagccccttcagtgaccccttccagctggacaacccagacccccagcccatcgtggatggagaggagggcctcatctgggtgattggccctgtgctggccgtggtgttcatcatctgcatcgtcatcgccatcctgctgtacaagaacaagccagacagcaagaggaaggacagcgagcccaggaccaagtgcctgctgaacaatgctgacctggccccccaccaccccaaggaccctgtggagatgaggcgcatcaacttccagaccccagacagcggcctgcggagccccctgcgggagcccggcttccactttgagagcatgctgagccacccccccatccccatcgctgacatggccgagcacacagagcggctgaaggccaatgacagcctgaagctgagccaggagtatgagagcattgatcctggccagcagttcacctgggagcacagcaacctggaggtgaacaagcccaagaacagatatgccaacgtgattgcctatgaccacagcagggtcatcctgcagcccatcgagggcatcatgggcagtgactacatcaatgccaactacgtggatggctaccgctgccagaatgcctacatcgccacccagggccccctgcctgagacctttggagacttctggaggatggtgtgggagcagaggtctgccaccatcgtgatgatgacccggctggaggagaagagccgcatcaagtgtgaccagtactggcccaacagaggaacagagacctacggcttcatccaggtgaccctgctggacaccatcgagctggccaccttctgtgtgaggaccttcagcctgcacaagaatggcagcagcgagaagcgggaggtgcggcagttccagttcaccgcctggccagaccatggagtgcctgagtaccccacccccttcctggccttcctgcggcgggtgaagacctgcaaccccccagatgctggccccatcgtggtgcactgcagcgctggggtgggccgcacaggctgcttcatcgtgattgatgccatgctggagcgcatcaagccagagaagacagtggatgtgtatggccacgtgaccctgatgaggagccagaggaactacatggtgcagacagaggaccagtacagcttcatccacgaggccctgctggaggccgtgggctgcggcaacacagaggtgcctgcccggagcctgtatgcctacatccagaagctggcccaggtggagcccggggagcacgtgacaggcatggagctggagttcaagaggctggccaacagcaaggcccacaccagccgcttcatcagcgccaacctgccctgcaacaagttcaagaaccggctggtgaacatcatgccctatgagagcaccagggtgtgcctgcagcccatccggggcgtggagggcagtgactacatcaatgccagcttcattgatggctaccggcagcagaaggcctacatcgccacccagggccccctggccgagaccacagaggacttctggaggatgctgtgggagaacaacagcaccatcgtggtgatgctgaccaagctgcgggagatgggccgggagaagtgccaccagtactggccagctgagaggtctgcccgctaccagtactttgtggtggaccccatggccgagtacaacatgccccagtacatcctgcgggagttcaaggtgacagatgccagagatggccagagcaggacagtgcggcagttccagttcacagactggccagagcagggcgtgcccaagtctggagagggcttcatcgacttcatcggccaggtgcacaagaccaaggagcagtttggccaggacggccccatctctgtgcactgcagcgctggggtgggccgcactggagtcttcatcaccctgagcatcgtgctggagaggatgagatatgaaggagtggtggacatcttccagacagtgaagatgctgcggacccagaggcctgccatggtgcagacagaaacagagagccggcccggctggagcgctgtggcccagagccggctgacagccagcagcgcctcctggattcatgccatcctgctgccccagcccccagagtggctgggcctgcaggtgtag

SEQ ID NO: 166388 - DNA, 4518 bp, synthetic construct
  misc_feature 1..4518: note = Description of Artificial Sequence: Synthetic coding sequence
  source 1..4518: mol_type = other DNA
atggcccccacctggggccctggcatggtgtctgtggtgggccccatgggcctgctggtggtgctgctggtgggcggctgtgccgctgaggagcccccacgcttcatcaaggagcccaaggaccagattggagtgtctgggggcgtggccagctttgtgtgccaggccactggagaccccaagccccgggtgacctggaacaagaagggcaagaaggtgaacagccagagatttgagaccattgaatttgatgagagcgctggagctgtgctgcgcatccagcccctgcggaccccaagagatgaaaatgtgtatgaatgtgtggcccagaacagcgtgggggagatcaccgtgcacgccaagctgactgtgctgcgggaggaccagctgcccagcggcttccccaacatcgacatgggcccccagctgaaggtggtggagaggaccaggacagccaccatgctgtgtgccgccagcggcaacccagaccctgagatcacctggttcaaggacttcctgcctgtggaccccagcgccagcaatggccgcatcaagcagctgcggagcggggccctgcagatcgagagcagcgaggagacagaccagggcaagtatgaatgtgtggccaccaacagcgctggggtgcgctacagcagccctgccaacctgtatgtgcgggccctgcgggaggtgcggcgggtggccccccgcttcagcatcctgcccatgagccatgagatcatgcctggaggaaatgtgaacatcacctgtgtggccgtgggcagccccatgccctacgtgaagtggatgcagggcgctgaggacctgaccccagaagatgacatgcctgtgggcagaaatgtgctggagctgacagatgtgaaggacagcgccaactacacctgtgtggccatgagcagcctgggcgtgattgaagctgtggcccagatcaccgtgaagagcctgcccaaggcccctggcacccccatggtgacagaaaatacagccaccagcatcaccatcacctgggacagcggcaacccagaccctgtgtcctactacgtgattgagtacaagagcaagagccaggacggcccctaccagatcaaggaggacatcaccaccacccgctacagcatcggcggcctgagccccaacagtgaatatgagatctgggtgtctgctgtgaacagcatcggccagggccccccatctgagagcgtggtgaccaggactggagagcaggccccagccagcgcccccagaaatgtgcaggccaggatgctgagcgccaccaccatgattgtgcagtgggaggagcctgtggagcccaacggcctcatccggggctacagagtgtactacaccatggagcctgagcaccctgtgggcaactggcagaagcacaacgtggatgacagcctgctgaccaccgtgggcagcctgctggaggatgagacctacacagtgcgggtgctggccttcacctctgtgggagatggccccctgagtgaccccatccaggtgaagacccagcagggcgtgcccggccagcccatgaacctgcgggcagaggcccggtctgagaccagcatcaccctgtcctggagccccccccggcaggagagcatcatcaagtatgagctgctcttccgggagggggaccacggccgggaggtgggccgcacctttgaccccaccaccagctatgtggtggaggacctgaagcccaacacagaatatgccttccggctggccgcccggagcccccagggcctgggcgccttcacccctgtggtgcggcagaggaccctgcagagcatcagccccaagaacttcaaggtgaagatgatcatgaagacctctgtgctgctgtcctgggagttcccagacaactacaacagccccaccccctacaagatccagtacaacggcctgaccctggatgtggatggccgcaccaccaagaagctgatcacccacctgaagccccacaccttctacaactttgtgctgaccaacagaggcagcagcctgggcggcctgcagcagacagtgacagcctggacagccttcaacctgctgaatggcaagcccagcgtggcccccaagccagatgctgatggcttcatcatggtgtacctgcctgatggccagagccctgtgcctgtgcagagctacttcatcgtgatggtgcccctgaggaagagcagaggaggccagttcctgacccccctgggcagccctgaggacatggacctggaggagctgatccaggacatcagccggctgcagaggaggagcctgcggcacagccggcagctggaggtgccccggccctacatcgccgcccgcttctctgtgctgccccccaccttccaccctggggaccagaagcagtatggaggctttgacaacagaggcctggagcccggccacagatatgtgctgtttgtgctggccgtgctgcagaagtctgagcccacctttgctgccagccccttcagtgaccccttccagctggacaacccagacccccagcccatcgtggatggagaggagggcctcatctgggtgattggccctgtgctggccgtggtgttcatcatctgcatcgtcatcgccatcctgctgtacaagaacaagccagacagcaagaggaaggacagcgagcccaggaccaagtgcctgctgaacaatgctgacctggccccccaccaccccaaggaccctgtggagatgaggcgcatcaacttccagaccccaggcatgctgagccacccccccatccccatcgctgacatggccgagcacacagagcggctgaaggccaatgacagcctgaagctgagccaggagtatgagagcattgatcctggccagcagttcacctgggagcacagcaacctggaggtgaacaagcccaagaacagatatgccaacgtgattgcctatgaccacagcagggtcatcctgcagcccatcgagggcatcatgggcagtgactacatcaatgccaactacgtggatggctaccgctgccagaatgcctacatcgccacccagggccccctgcctgagacctttggagacttctggaggatggtgtgggagcagaggtctgccaccatcgtgatgatgacccggctggaggagaagagccgcatcaagtgtgaccagtactggcccaacagaggaacagagacctacggcttcatccaggtgaccctgctggacaccatcgagctggccaccttctgtgtgaggaccttcagcctgcacaagaatggcagcagcgagaagcgggaggtgcggcagttccagttcaccgcctggccagaccatggagtgcctgagtaccccacccccttcctggccttcctgcggcgggtgaagacctgcaaccccccagatgctggccccatcgtggtgcactgcagcgctggggtgggccgcacaggctgcttcatcgtgattgatgccatgctggagcgcatcaagccagagaagacagtggatgtgtatggccacgtgaccctgatgaggagccagaggaactacatggtgcagacagaggaccagtacagcttcatccacgaggccctgctggaggccgtgggctgcggcaacacagaggtgcctgcccggagcctgtatgcctacatccagaagctggcccaggtggagcccggggagcacgtgacaggcatggagctggagttcaagaggctggccaacagcaaggcccacaccagccgcttcatcagcgccaacctgccctgcaacaagttcaagaaccggctggtgaacatcatgccctatgagagcaccagggtgtgcctgcagcccatccggggcgtggagggcagtgactacatcaatgccagcttcattgatggctaccggcagcagaaggcctacatcgccacccagggccccctggccgagaccacagaggacttctggaggatgctgtgggagaacaacagcaccatcgtggtgatgctgaccaagctgcgggagatgggccgggagaagtgccaccagtactggccagctgagaggtctgcccgctaccagtactttgtggtggaccccatggccgagtacaacatgccccagtacatcctgcgggagttcaaggtgacagatgccagagatggccagagcaggacagtgcggcagttccagttcacagactggccagagcagggcgtgcccaagtctggagagggcttcatcgacttcatcggccaggtgcacaagaccaaggagcagtttggccaggacggccccatctctgtgcactgcagcgctggggtgggccgcactggagtcttcatcaccctgagcatcgtgctggagaggatgagatatgaaggagtggtggacatcttccagacagtgaagatgctgcggacccagaggcctgccatggtgcagacagaagatgagtaccagttctgctaccaggccgccctggagtacctgggcagctttgaccactacgccacctag

SEQ ID NO: 166389 - DNA, 4329 bp, synthetic construct
  misc_feature 1..4329: note = Description of Artificial Sequence: Synthetic coding sequence
  source 1..4329: mol_type = other DNA
atggcccgggcccaggccctggtgctggccctgaccttccagctgtgtgcccctgagacagagaccccagctgctggctgcacctttgaggaggccagtgaccctgctgtgccctgtgagtacagccaggcccagtatgatgacttccagtgggagcaggtgcgcatccaccctggcacccgggccccagctgacctgccccacggcagctacctgatggtgaacaccagccagcacgcccctggccagagggcccacgtgatcttccagagcctgtctgaaaatgacacccactgtgtgcagttctcctacttcctgtacagcagagatggccacagccctggcaccctgggcgtgtatgtgcgggtgaatggaggccccctgggcagcgctgtgtggaacatgacaggcagccacggccggcagtggcaccaggccgagctggccgtgtccaccttctggcccaatgagtaccaggtgctgtttgaggccctgatcagcccagaccggcggggctacatgggcctggatgacatcctgctgctgagctacccctgtgccaaggccccccacttcagccggctgggagatgtggaggtgaatgccggccagaatgccagcttccagtgcatggctgctggccgggctgctgaggccgagcgcttcctgctgcagaggcagagcggggccctggtgcctgctgctggggtgcgccacatcagccaccggcgcttcctggccaccttccccctggccgctgtgtccagagctgagcaggacctgtaccgctgtgtgtcccaggcccccaggggggccggcgtgagcaactttgctgagctgattgtgaaggagccccccacccccatcgccccaccccagctgctgcgggccggccccacctacctgatcatccagctgaacaccaacagcatcattggagatggccccatcgtgaggaaggagattgagtacaggatggcccggggcccctgggccgaggtgcatgctgtgtccctgcagacctacaagctgtggcacctggaccctgacacagaatatgagatctctgtgctgctgaccaggcctggagatggcggcaccggccggcccggccccccactcatcagcaggaccaagtgtgccgagcccatgagggcccccaagggcctggcctttgctgagatccaggcccggcagctgaccctgcagtgggagcccctgggctacaacgtgacccgctgccacacctacacagtgtccctgtgctaccactacaccctgggcagcagccacaaccagaccatcagagaatgtgtgaagacagagcagggcgtgagccgctacaccatcaagaacctgctgccctacagaaatgtgcacgtgcggctggtgctgaccaaccctgagggcaggaaggagggcaaggaggtgaccttccagacagatgaagatgtgcccagcggcattgctgctgagagcctgaccttcacccccctggaggacatgatcttcctgaagtgggaggagccccaggagcccaacggcctcatcacccagtatgagatctcctaccagagcattgagagcagtgaccctgctgtgaatgtgcccggccccaggaggaccatcagcaagctgagaaatgagacctaccacgtgttcagcaacctgcaccctggcaccacctacctgttctctgtgcgggccaggactggaaaaggatttggccaggccgccctgacagagatcaccaccaacatcagcgcccccagctttgattatgctgacatgcccagccccctgggggagagcgagaacaccatcaccgtgctgctgcggcctgcccagggccgcggggcccccatctctgtgtaccaggtgattgtggaggaggagcgggcccggcggctgcggcgggagcccggcggccaggactgcttccctgtgcccctgacctttgaagctgccctggcccggggcctggtgcactactttggagctgagctggccgccagcagcctgcctgaggccatgcccttcaccgtgggggacaaccagacctaccggggcttctggaacccccccctggagcccaggaaggcctacctgatctacttccaggccgccagccacctgaagggggagacccggctgaactgcatcagaattgccaggaaggccgcctgcaaggagagcaagaggcccctggaggtgtcccagaggtctgaggagatgggcctcatcctgggcatctgtgccggcggcctggccgtgctgatcctgctgctgggcgccatcatcgtcatcatcaggaagggcaagcctgtgaacatgaccaaggccaccgtgaactaccggcaggagaagacccacatgatgtctgctgtggaccgctccttcacagaccagagcaccctgcaggaggatgagcggctgggcctgtccttcatggacacccacggctacagcaccaggggggaccagaggtctgggggcgtgacagaggccagcagcctgctgggcggcagcccccggcggccctgtggcaggaagggcagcccctaccacacaggccagctgcaccctgctgtgcgggtggccgacctgctgcagcacatcaaccagatgaagacagctgagggctacggcttcaagcaggagtatgagagcttctttgagggctgggatgccaccaagaagaaggacaaggtgaagggcagccggcaggagcccatgcctgcctatgacagacaccgggtgaagctgcaccccatgctgggggaccccaatgctgactacatcaatgccaactacatcgacctgcggggcggccgcacaggctaccacaggagcaaccacttcatcgccacccagggccccaagccagagatggtgtatgacttctggaggatggtgtggcaggagcactgcagcagcatcgtgatgatcaccaagctggtggaggtgggccgggtgaagtgcagccgctactggccagaggacagcgacacctatggagacatcaagatcatgctggtgaagacagagaccctggccgagtatgtggtgaggacctttgccctggagcggcggggctacagcgcccggcatgaggtgcggcagttccacttcaccgcctggccagagcacggcgtgccctaccacgccaccggcctgctggccttcatccggcgggtgaaggccagcaccccaccagatgctggccccatcgtcatccactgcagcgctggcactggaagaacaggctgctacatcgtgctggatgtgatgctggacatggccgagtgtgaaggagtggtggacatctacaactgtgtgaagaccctgtgcagcagaagagtgaacatgatccagacagaggagcagtacatcttcatccatgatgccatcctggaggcctgcctgtgtggggagaccaccatccctgtgtctgagttcaaggccacctacaaggagatgatcagaattgacccccagagcaacagcagccagctgcgggaggagttccagaccctgaacagcgtgaccccacccctggatgtggaggagtgcagcatcgccctgctgcccaggaacagagacaagaacagatccatggatgtgctgcccccagaccgctgcctgcccttcctgatcagcacagatggagacagcaacaactacatcaatgctgccctgacagacagctacaccaggtctgctgccttcatcgtgaccctgcaccccctgcagagcaccaccccagacttctggaggctggtgtatgactatggctgcaccagcatcgtgatgctgaaccagctgaaccagagcaacagcgcctggccctgcctgcagtactggccagagcccggccggcagcagtatggcctgatggaggtggagttcatgtctggaacagcagatgaggacctggtggcccgggtcttccgggtgcagaacatcagccggctgcaggagggccacctgctggtgcgccacttccagttcctgcgctggagcgcctacagagacaccccagacagcaagaaggccttcctgcacctgctggccgaggtggacaagtggcaggccgagagcggagatggccgcaccatcgtgcactgcctgaatggaggcggccgcagcggcaccttctgtgcctgtgccaccgtgctggagatgatccgctgccacaacctggtggatgtgttctttgctgccaagaccctgaggaactacaagcccaacatggtggagaccatggaccagtaccacttctgctatgatgtggccctggagtacctggagggcctggagagcaggtag

SEQ ID NO: 166390 - DNA, 4341 bp, synthetic construct
  misc_feature 1..4341: note = Description of Artificial Sequence: Synthetic coding sequence
  source 1..4341: mol_type = other DNA
atggcccgggcccaggccctggtgctggccctgaccttccagctgtgtgcccctgagacagagaccccagctgctggctgcacctttgaggaggccagtgaccctgctgtgccctgtgagtacagccaggcccagtatgatgacttccagtgggagcaggtgcgcatccaccctggcacccgggccccagctgacctgccccacggcagctacctgatggtgaacaccagccagcacgcccctggccagagggcccacgtgatcttccagagcctgtctgaaaatgacacccactgtgtgcagttctcctacttcctgtacagcagagatggccacagccctggcaccctgggcgtgtatgtgcgggtgaatggaggccccctgggcagcgctgtgtggaacatgacaggcagccacggccggcagtggcaccaggccgagctggccgtgtccaccttctggcccaatgagtaccaggtgctgtttgaggccctgatcagcccagaccggcggggctacatgggcctggatgacatcctgctgctgagctacccctgtgccaaggccccccacttcagccggctgggagatgtggaggtgaatgccggccagaatgccagcttccagtgcatggctgctggccgggctgctgaggccgagcgcttcctgctgcagaggcagagcggggccctggtgcctgctgctggggtgcgccacatcagccaccggcgcttcctggccaccttccccctggccgctgtgtccagagctgagcaggacctgtaccgctgtgtgtcccaggcccccaggggggccggcgtgagcaactttgctgagctgattgtgaaggagccccccacccccatcgccccaccccagctgctgcgggccggccccacctacctgatcatccagctgaacaccaacagcatcattggagatggccccatcgtgaggaaggagattgagtacaggatggcccggggcccctgggccgaggtgcatgctgtgtccctgcagacctacaagctgtggcacctggaccctgacacagaatatgagatctctgtgctgctgaccaggcctggagatggcggcaccggccggcccggccccccactcatcagcaggaccaagtgtgccgagcccatgagggcccccaagggcctggcctttgctgagatccaggcccggcagctgaccctgcagtgggagcccctgggctacaacgtgacccgctgccacacctacacagtgtccctgtgctaccactacaccctgggcagcagccacaaccagaccatcagagaatgtgtgaagacagagcagggcgtgagccgctacaccatcaagaacctgctgccctacagaaatgtgcacgtgcggctggtgctgaccaaccctgagggcaggaaggagggcaaggaggtgaccttccagacagatgaagatgtgcccagcggcattgctgctgagagcctgaccttcacccccctggaggacatgatcttcctgaagtgggaggagccccaggagcccaacggcctcatcacccagtatgagatctcctaccagagcattgagagcagtgaccctgctgtgaatgtgcccggccccaggaggaccatcagcaagctgagaaatgagacctaccacgtgttcagcaacctgcaccctggcaccacctacctgttctctgtgcgggccaggactggaaaaggatttggccaggccgccctgacagagatcaccaccaacatcagcgcccccagctttgattatgctgacatgcccagccccctgggggagagcgagaacaccatcaccgtgctgctgcggcctgcccagggccgcggggcccccatctctgtgtaccaggtgattgtggaggaggagcgggcccggcggctgcggcgggagcccggcggccaggactgcttccctgtgcccctgacctttgaagctgccctggcccggggcctggtgcactactttggagctgagctggccgccagcagcctgcctgaggccatgcccttcaccgtgggggacaaccagacctaccggggcttctggaacccccccctggagcccaggaaggcctacctgatctacttccaggccgccagccacctgaagggggagacccggctgaactgcatcagaattgccaggaaggccgcctgcaaggagagcaagaggcccctggaggtgtcccagaggtctgaggagatgggcctcatcctgggcatctgtgccggcggcctggccgtgctgatcctgctgctgggcgccatcatcgtcatcatcaggaagggccgggaccactacgcctacagctactaccccaagcctgtgaacatgaccaaggccaccgtgaactaccggcaggagaagacccacatgatgtctgctgtggaccgctccttcacagaccagagcaccctgcaggaggatgagcggctgggcctgtccttcatggacacccacggctacagcaccaggggggaccagaggtctgggggcgtgacagaggccagcagcctgctgggcggcagcccccggcggccctgtggcaggaagggcagcccctaccacacaggccagctgcaccctgctgtgcgggtggccgacctgctgcagcacatcaaccagatgaagacagctgagggctacggcttcaagcaggagtatgagagcttctttgagggctgggatgccaccaagaagaaggacaaggtgaagggcagccggcaggagcccatgcctgcctatgacagacaccgggtgaagctgcaccccatgctgggggaccccaatgctgactacatcaatgccaactacattgatggctaccacaggagcaaccacttcatcgccacccagggccccaagccagagatggtgtatgacttctggaggatggtgtggcaggagcactgcagcagcatcgtgatgatcaccaagctggtggaggtgggccgggtgaagtgcagccgctactggccagaggacagcgacacctatggagacatcaagatcatgctggtgaagacagagaccctggccgagtatgtggtgaggacctttgccctggagcggcggggctacagcgcccggcatgaggtgcggcagttccacttcaccgcctggccagagcacggcgtgccctaccacgccaccggcctgctggccttcatccggcgggtgaaggccagcaccccaccagatgctggccccatcgtcatccactgcagcgctggcactggaagaacaggctgctacatcgtgctggatgtgatgctggacatggccgagtgtgaaggagtggtggacatctacaactgtgtgaagaccctgtgcagcagaagagtgaacatgatccagacagaggagcagtacatcttcatccatgatgccatcctggaggcctgcctgtgtggggagaccaccatccctgtgtctgagttcaaggccacctacaaggagatgatcagaattgacccccagagcaacagcagccagctgcgggaggagttccagaccctgaacagcgtgaccccacccctggatgtggaggagtgcagcatcgccctgctgcccaggaacagagacaagaacagatccatggatgtgctgcccccagaccgctgcctgcccttcctgatcagcacagatggagacagcaacaactacatcaatgctgccctgacagacagctacaccaggtctgctgccttcatcgtgaccctgcaccccctgcagagcaccaccccagacttctggaggctggtgtatgactatggctgcaccagcatcgtgatgctgaaccagctgaaccagagcaacagcgcctggccctgcctgcagtactggccagagcccggccggcagcagtatggcctgatggaggtggagttcatgtctggaacagcagatgaggacctggtggcccgggtcttccgggtgcagaacatcagccggctgcaggagggccacctgctggtgcgccacttccagttcctgcgctggagcgcctacagagacaccccagacagcaagaaggccttcctgcacctgctggccgaggtggacaagtggcaggccgagagcggagatggccgcaccatcgtgcactgcctgaatggaggcggccgcagcggcaccttctgtgcctgtgccaccgtgctggagatgatccgctgccacaacctggtggatgtgttctttgctgccaagaccctgaggaactacaagcccaacatggtggagaccatggaccagtaccacttctgctatgatgtggccctggagtacctggagggcctggagagcaggtag

SEQ ID NO: 166391 - DNA, 4329 bp, synthetic construct
  misc_feature 1..4329: note = Description of Artificial Sequence: Synthetic coding sequence
  source 1..4329: mol_type = other DNA
atggcccgggcccaggccctggtgctggccctgaccttccagctgtgtgcccctgagacagagaccccagctgctggctgcacctttgaggaggccagtgaccctgctgtgccctgtgagtacagccaggcccagtatgatgacttccagtgggagcaggtgcgcatccaccctggcacccgggccccagctgacctgccccacggcagctacctgatggtgaacaccagccagcacgcccctggccagagggcccacgtgatcttccagagcctgtctgaaaatgacacccactgtgtgcagttctcctacttcctgtacagcagagatggccacagccctggcaccctgggcgtgtatgtgcgggtgaatggaggccccctgggcagcgctgtgtggaacatgacaggcagccacggccggcagtggcaccaggccgagctggccgtgtccaccttctggcccaatgagtaccaggtgctgtttgaggccctgatcagcccagaccggcggggctacatgggcctggatgacatcctgctgctgagctacccctgtgccaaggccccccacttcagccggctgggagatgtggaggtgaatgccggccagaatgccagcttccagtgcatggctgctggccgggctgctgaggccgagcgcttcctgctgcagaggcagagcggggccctggtgcctgctgctggggtgcgccacatcagccaccggcgcttcctggccaccttccccctggccgctgtgtccagagctgagcaggacctgtaccgctgtgtgtcccaggcccccaggggggccggcgtgagcaactttgctgagctgattgtgaaggagccccccacccccatcgccccaccccagctgctgcgggccggccccacctacctgatcatccagctgaacaccaacagcatcattggagatggccccatcgtgaggaaggagattgagtacaggatggcccggggcccctgggccgaggtgcatgctgtgtccctgcagacctacaagctgtggcacctggaccctgacacagaatatgagatctctgtgctgctgaccaggcctggagatggcggcaccggccggcccggccccccactcatcagcaggaccaagtgtgccgagcccatgagggcccccaagggcctggcctttgctgagatccaggcccggcagctgaccctgcagtgggagcccctgggctacaacgtgacccgctgccacacctacacagtgtccctgtgctaccactacaccctgggcagcagccacaaccagaccatcagagaatgtgtgaagacagagcagggcgtgagccgctacaccatcaagaacctgctgccctacagaaatgtgcacgtgcggctggtgctgaccaaccctgagggcaggaaggagggcaaggaggtgaccttccagacagatgaagatgtgcccagcggcattgctgctgagagcctgaccttcacccccctggaggacatgatcttcctgaagtgggaggagccccaggagcccaacggcctcatcacccagtatgagatctcctaccagagcattgagagcagtgaccctgctgtgaatgtgcccggccccaggaggaccatcagcaagctgagaaatgagacctaccacgtgttcagcaacctgcaccctggcaccacctacctgttctctgtgcgggccaggactggaaaaggatttggccaggccgccctgacagagatcaccaccaacatcagcgcccccagctttgattatgctgacatgcccagccccctgggggagagcgagaacaccatcaccgtgctgctgcggcctgcccagggccgcggggcccccatctctgtgtaccaggtgattgtggaggaggagcgggcccggcggctgcggcgggagcccggcggccaggactgcttccctgtgcccctgacctttgaagctgccctggcccggggcctggtgcactactttggagctgagctggccgccagcagcctgcctgaggccatgcccttcaccgtgggggacaaccagacctaccggggcttctggaacccccccctggagcccaggaaggcctacctgatctacttccaggccgccagccacctgaagggggagacccggctgaactgcatcagaattgccaggaaggccgcctgcaaggagagcaagaggcccctggaggtgtcccagaggtctgaggagatgggcctcatcctgggcatctgtgccggcggcctggccgtgctgatcctgctgctgggcgccatcatcgtcatcatcaggaagggcaagcctgtgaacatgaccaaggccaccgtgaactaccggcaggagaagacccacatgatgtctgctgtggaccgctccttcacagaccagagcaccctgcaggaggatgagcggctgggcctgtccttcatggacacccacggctacagcaccaggggggaccagaggtctgggggcgtgacagaggccagcagcctgctgggcggcagcccccggcggccctgtggcaggaagggcagcccctaccacacaggccagctgcaccctgctgtgcgggtggccgacctgctgcagcacatcaaccagatgaagacagctgagggctacggcttcaagcaggagtatgagagcttctttgagggctgggatgccaccaagaagaaggacaaggtgaagggcagccggcaggagcccatgcctgcctatgacagacaccgggtgaagctgcaccccatgctgggggaccccaatgctgactacatcaatgccaactacatcgacatccgcatcaaccgggagggctaccacaggagcaaccacttcatcgccacccagggccccaagccagagatggtgtatgacttctggaggatggtgtggcaggagcactgcagcagcatcgtgatgatcaccaagctggtggaggtgggccgggtgaagtgcagccgctactggccagaggacagcgacacctatggagacatcaagatcatgctggtgaagacagagaccctggccgagtatgtggtgaggacctttgccctggagcggcggggctacagcgcccggcatgaggtgcggcagttccacttcaccgcctggccagagcacggcgtgccctaccacgccaccggcctgctggccttcatccggcgggtgaaggccagcaccccaccagatgctggccccatcgtcatccactgcagcgctggcactggaagaacaggctgctacatcgtgctggatgtgatgctggacatggccgagtgtgaaggagtggtggacatctacaactgtgtgaagaccctgtgcagcagaagagtgaacatgatccagacagaggagcagtacatcttcatccatgatgccatcctggaggcctgcctgtgtggggagaccaccatccctgtgtctgagttcaaggccacctacaaggagatgatcagaattgacccccagagcaacagcagccagctgcgggaggagttccagaccctgaacagcgtgaccccacccctggatgtggaggagtgcagcatcgccctgctgcccaggaacagagacaagaacagatccatggatgtgctgcccccagaccgctgcctgcccttcctgatcagcacagatggagacagcaacaactacatcaatgctgccctgacagacagctacaccaggtctgctgccttcatcgtgaccctgcaccccctgcagagcaccaccccagacttctggaggctggtgtatgactatggctgcaccagcatcgtgatgctgaaccagctgaaccagagcaacagcgcctggccctgcctgcagtactggccagagcccggccggcagcagtatggcctgatggaggtggagttcatgtctggaacagcagatgaggacctggtggcccgggtcttccgggtgcagaacatcagccggctgcaggagggccacctgctggtgcgccacttccagttcctgcgctggagcgcctacagagacaccccagacagcaagaaggccttcctgcacctgctggccgaggtggacaagtggcaggccgagagcggagatggccgcaccatcgtgcactgcctgaatggaggcggccgcagcggcaccttctgtgcctgtgccaccgtgctggagatgatccgctgccacaacctggtggatgtgttctttgctgccaagaccctgaggaactacaagcccaacatggtggagaccatggaccagtaccacttctgctatgatgtggccctggagtacctggagggcctggagagcaggtag

SEQ ID NO: 166392 - DNA, 4311 bp, synthetic construct
  misc_feature 1..4311: note = Description of Artificial Sequence: Synthetic coding sequence
  source 1..4311: mol_type = other DNA
atggcccgggcccaggccctggtgctggccctgaccttccagctgtgtgcccctgagacagagaccccagctgctggctgcacctttgaggaggccagtgaccctgctgtgccctgtgagtacagccaggcccagtatgatgacttccagtgggagcaggtgcgcatccaccctggcacccgggccccagctgacctgccccacggcagctacctgatggtgaacaccagccagcacgcccctggccagagggcccacgtgatcttccagagcctgtctgaaaatgacacccactgtgtgcagttctcctacttcctgtacagcagagatggccacagccctggcaccctgggcgtgtatgtgcgggtgaatggaggccccctgggcagcgctgtgtggaacatgacaggcagccacggccggcagtggcaccaggccgagctggccgtgtccaccttctggcccaatgagtaccaggtgctgtttgaggccctgatcagcccagaccggcggggctacatgggcctggatgacatcctgctgctgagctacccctgtgccaaggccccccacttcagccggctgggagatgtggaggtgaatgccggccagaatgccagcttccagtgcatggctgctggccgggctgctgaggccgagcgcttcctgctgcagaggcagagcggggccctggtgcctgctgctggggtgcgccacatcagccaccggcgcttcctggccaccttccccctggccgctgtgtccagagctgagcaggacctgtaccgctgtgtgtcccaggcccccaggggggccggcgtgagcaactttgctgagctgattgtgaaggagccccccacccccatcgccccaccccagctgctgcgggccggccccacctacctgatcatccagctgaacaccaacagcatcattggagatggccccatcgtgaggaaggagattgagtacaggatggcccggggcccctgggccgaggtgcatgctgtgtccctgcagacctacaagctgtggcacctggaccctgacacagaatatgagatctctgtgctgctgaccaggcctggagatggcggcaccggccggcccggccccccactcatcagcaggaccaagtgtgccgagcccatgagggcccccaagggcctggcctttgctgagatccaggcccggcagctgaccctgcagtgggagcccctgggctacaacgtgacccgctgccacacctacacagtgtccctgtgctaccactacaccctgggcagcagccacaaccagaccatcagagaatgtgtgaagacagagcagggcgtgagccgctacaccatcaagaacctgctgccctacagaaatgtgcacgtgcggctggtgctgaccaaccctgagggcaggaaggagggcaaggaggtgaccttccagacagatgaagatgtgcccagcggcattgctgctgagagcctgaccttcacccccctggaggacatgatcttcctgaagtgggaggagccccaggagcccaacggcctcatcacccagtatgagatctcctaccagagcattgagagcagtgaccctgctgtgaatgtgcccggccccaggaggaccatcagcaagctgagaaatgagacctaccacgtgttcagcaacctgcaccctggcaccacctacctgttctctgtgcgggccaggactggaaaaggatttggccaggccgccctgacagagatcaccaccaacatcagcgcccccagctttgattatgctgacatgcccagccccctgggggagagcgagaacaccatcaccgtgctgctgcggcctgcccagggccgcggggcccccatctctgtgtaccaggtgattgtggaggaggagcgggcccggcggctgcggcgggagcccggcggccaggactgcttccctgtgcccctgacctttgaagctgccctggcccggggcctggtgcactactttggagctgagctggccgccagcagcctgcctgaggccatgcccttcaccgtgggggacaaccagacctaccggggcttctggaacccccccctggagcccaggaaggcctacctgatctacttccaggccgccagccacctgaagggggagacccggctgaactgcatcagaattgccaggaaggccgcctgcaaggagagcaagaggcccctggaggtgtcccagaggtctgaggagatgggcctcatcctgggcatctgtgccggcggcctggccgtgctgatcctgctgctgggcgccatcatcgtcatcatcaggaagggcaagcctgtgaacatgaccaaggccaccgtgaactaccggcaggagaagacccacatgatgtctgctgtggaccgctccttcacagaccagagcaccctgcaggaggatgagcggctgggcctgtccttcatggacacccacggctacagcaccaggggggaccagaggtctgggggcgtgacagaggccagcagcctgctgggcggcagcccccggcggccctgtggcaggaagggcagcccctaccacacaggccagctgcaccctgctgtgcgggtggccgacctgctgcagcacatcaaccagatgaagacagctgagggctacggcttcaagcaggagtatgagagcttctttgagggctgggatgccaccaagaagaaggacaaggtgaagggcagccggcaggagcccatgcctgcctatgacagacaccgggtgaagctgcaccccatgctgggggaccccaatgctgactacatcaatgccaactacattgatggctaccacaggagcaaccacttcatcgccacccagggccccaagccagagatggtgtatgacttctggaggatggtgtggcaggagcactgcagcagcatcgtgatgatcaccaagctggtggaggtgggccgggtgaagtgcagccgctactggccagaggacagcgacacctatggagacatcaagatcatgctggtgaagacagagaccctggccgagtatgtggtgaggacctttgccctggagcggcggggctacagcgcccggcatgaggtgcggcagttccacttcaccgcctggccagagcacggcgtgccctaccacgccaccggcctgctggccttcatccggcgggtgaaggccagcaccccaccagatgctggccccatcgtcatccactgcagcgctggcactggaagaacaggctgctacatcgtgctggatgtgatgctggacatggccgagtgtgaaggagtggtggacatctacaactgtgtgaagaccctgtgcagcagaagagtgaacatgatccagacagaggagcagtacatcttcatccatgatgccatcctggaggcctgcctgtgtggggagaccaccatccctgtgtctgagttcaaggccacctacaaggagatgatcagaattgacccccagagcaacagcagccagctgcgggaggagttccagaccctgaacagcgtgaccccacccctggatgtggaggagtgcagcatcgccctgctgcccaggaacagagacaagaacagatccatggatgtgctgcccccagaccgctgcctgcccttcctgatcagcacagatggagacagcaacaactacatcaatgctgccctgacagacagctacaccaggtctgctgccttcatcgtgaccctgcaccccctgcagagcaccaccccagacttctggaggctggtgtatgactatggctgcaccagcatcgtgatgctgaaccagctgaaccagagcaacagcgcctggccctgcctgcagtactggccagagcccggccggcagcagtatggcctgatggaggtggagttcatgtctggaacagcagatgaggacctggtggcccgggtcttccgggtgcagaacatcagccggctgcaggagggccacctgctggtgcgccacttccagttcctgcgctggagcgcctacagagacaccccagacagcaagaaggccttcctgcacctgctggccgaggtggacaagtggcaggccgagagcggagatggccgcaccatcgtgcactgcctgaatggaggcggccgcagcggcaccttctgtgcctgtgccaccgtgctggagatgatccgctgccacaacctggtggatgtgttctttgctgccaagaccctgaggaactacaagcccaacatggtggagaccatggaccagtaccacttctgctatgatgtggccctggagtacctggagggcctggagagcaggtag

SEQ ID NO: 166393 - DNA, 4302 bp, synthetic construct
  misc_feature 1..4302: note = Description of Artificial Sequence: Synthetic coding sequence
  source 1..4302: mol_type = other DNA
atggcccgggcccaggccctggtgctggccctgaccttccagctgtgtgcccctgagacagagaccccagctgctggctgcacctttgaggaggccagtgaccctgctgtgccctgtgagtacagccaggcccagtatgatgacttccagtgggagcaggtgcgcatccaccctggcacccgggccccagctgacctgccccacggcagctacctgatggtgaacaccagccagcacgcccctggccagagggcccacgtgatcttccagagcctgtctgaaaatgacacccactgtgtgcagttctcctacttcctgtacagcagagatggccacagccctggcaccctgggcgtgtatgtgcgggtgaatggaggccccctgggcagcgctgtgtggaacatgacaggcagccacggccggcagtggcaccaggccgagctggccgtgtccaccttctggcccaatgagtaccaggtgctgtttgaggccctgatcagcccagaccggcggggctacatgggcctggatgacatcctgctgctgagctacccctgtgccaaggccccccacttcagccggctgggagatgtggaggtgaatgccggccagaatgccagcttccagtgcatggctgctggccgggctgctgaggccgagcgcttcctgctgcagaggcagagcggggccctggtgcctgctgctggggtgcgccacatcagccaccggcgcttcctggccaccttccccctggccgctgtgtccagagctgagcaggacctgtaccgctgtgtgtcccaggcccccaggggggccggcgtgagcaactttgctgagctgattgtgaaggagccccccacccccatcgccccaccccagctgctgcgggccggccccacctacctgatcatccagctgaacaccaacagcatcattggagatggccccatcgtgaggaaggagattgagtacaggatggcccggggcccctgggccgaggtgcatgctgtgtccctgcagacctacaagctgtggcacctggaccctgacacagaatatgagatctctgtgctgctgaccaggcctggagatggcggcaccggccggcccggccccccactcatcagcaggaccaagtgtgccgagcccatgagggcccccaagggcctggcctttgctgagatccaggcccggcagctgaccctgcagtgggagcccctgggctacaacgtgacccgctgccacacctacacagtgtccctgtgctaccactacaccctgggcagcagccacaaccagaccatcagagaatgtgtgaagacagagcagggcgtgagccgctacaccatcaagaacctgctgccctacagaaatgtgcacgtgcggctggtgctgaccaaccctgagggcaggaaggagggcaaggaggtgaccttccagacagatgaagatgtgcccagcggcattgctgctgagagcctgaccttcacccccctggaggacatgatcttcctgaagtgggaggagccccaggagcccaacggcctcatcacccagtatgagatctcctaccagagcattgagagcagtgaccctgctgtgaatgtgcccggccccaggaggaccatcagcaagctgagaaatgagacctaccacgtgttcagcaacctgcaccctggcaccacctacctgttctctgtgcgggccaggactggaaaaggatttggccaggccgccctgacagagatcaccaccaacatcagcgcccccagctttgattatgctgacatgcccagccccctgggggagagcgagaacaccatcaccgtgctgctgcggcctgcccagggccgcggggcccccatctctgtgtaccaggtgattgtggaggaggagcgggcccggcggctgcggcgggagcccggcggccaggactgcttccctgtgcccctgacctttgaagctgccctggcccggggcctggtgcactactttggagctgagctggccgccagcagcctgcctgaggccatgcccttcaccgtgggggacaaccagacctaccggggcttctggaacccccccctggagcccaggaaggcctacctgatctacttccaggccgccagccacctgaagggggagacccggctgaactgcatcagaattgccaggaaggccgcctgcaaggagagcaagaggcccctggaggtgtcccagaggtctgaggagatgggcctcatcctgggcatctgtgccggcggcctggccgtgctgatcctgctgctgggcgccatcatcgtcatcatcaggaagggcaagcctgtgaacatgaccaaggccaccgtgaactaccggcaggagaagacccacatgatgtctgctgtggaccgctccttcacagaccagagcaccctgcaggaggatgagcggctgggcctgtccttcatggacacccacggctacagcaccaggggggaccagaggtctgggggcgtgacagaggccagcagcctgctgggcggcagcccccggcggccctgtggcaggaagggcagcccctaccacacaggccagctgcaccctgctgtgcgggtggccgacctgctgcagcacatcaaccagatgaagacagctgagggctacggcttcaagcaggagtatgagagcttctttgagggctgggatgccaccaagaagaaggacaaggtgaagggcagccggcaggagcccatgcctgcctatgacagacaccgggtgaagctgcaccccatgctgggggaccccaatgctgactacatcaatgccaactacattgatggctaccacaggagcaaccacttcatcgccacccagggccccaagccagagatggtgtatgacttctggaggatggtgtggcaggagcactgcagcagcatcgtgatgatcaccaagctggtggaggtgaagtgcagccgctactggccagaagattctgacacctacggggacatcaagatcatgctggtgaagacagagaccctggccgagtatgtggtgaggacctttgccctggagcggcggggctacagcgcccggcatgaggtgcggcagttccacttcaccgcctggccagagcacggcgtgccctaccacgccaccggcctgctggccttcatcagaagagtgaaggccagcaccccaccagatgctggccccatcgtcatccactgcagcgctggcaccggccgcacaggctgctacatcgtgctggatgtgatgctggacatggctgaatgtgagggcgtggtggacatctacaactgtgtgaagaccctgtgcagccggcgggtgaacatgatccagacagaggagcagtacatcttcatccatgatgccatcctggaggcctgcctgtgtggggagaccaccatccctgtgtctgagttcaaggccacctacaaggagatgatcagaattgacccccagagcaacagcagccagctgcgggaggagttccagaccctgaacagcgtgaccccacccctggatgtggaggagtgcagcatcgccctgctgcccaggaacagagacaagaacagatccatggatgtgctgcccccagaccgctgcctgcccttcctgatcagcacagatggagacagcaacaactacatcaatgctgccctgacagacagctacaccaggtctgctgccttcatcgtgaccctgcaccccctgcagagcaccaccccagacttctggaggctggtgtatgactatggctgcaccagcatcgtgatgctgaaccagctgaaccagagcaacagcgcctggccctgcctgcagtactggccagagcccggccggcagcagtatggcctgatggaggtggagttcatgagcggcacagcagatgaggacctggtggcccgggtcttccgggtgcagaacatcagccggctgcaggagggccacctgctggtgcgccacttccagttcctgcgctggagcgcctacagagacaccccagacagcaagaaggccttcctgcacctgctggccgaggtggacaagtggcaggccgagagcggagatggccgcaccatcgtgcactgcctgaatggaggcggccgcagcggcaccttctgtgcctgtgccaccgtgctggagatgatccgctgccacaacctggtggatgtgttctttgctgccaagaccctgaggaactacaagcccaacatggtggagaccatggaccagtaccacttctgctatgatgtggccctggagtacctggagggcctggagagcaggtag

SEQ ID NO: 166394 - DNA, 6948 bp, synthetic construct
  misc_feature 1..6948: note = Description of Artificial Sequence: Synthetic coding sequence
  source 1..6948: mol_type = other DNA
atgaggatcctgaagcgcttcctggcctgcatccagctgctgtgtgtgtgccgcctggactgggccaacggctactaccggcagcagaggaagctggtggaggagatcggctggagctacacaggagccctgaaccagaagaactggggcaagaagtaccccacctgcaacagccccaagcagagccccatcaacattgatgaggacctgacccaggtgaatgtgaacctgaagaagctgaagttccagggctgggacaagaccagcctggagaacaccttcatccacaacacaggcaagacagtggagatcaacctgaccaatgactacagagtgtctggaggagtgtctgagatggtgttcaaggccagcaagatcaccttccactggggcaagtgcaacatgagcagtgatggcagcgagcacagcctggagggccagaagttccccctggagatgcagatctactgctttgatgctgaccgcttcagcagctttgaggaggccgtgaagggcaagggcaagctgcgggccctgagcatcctgtttgaggtgggcacagaggagaacctggacttcaaggccatcattgatggagtggagagcgtgtccagatttgggaagcaggccgccctggaccccttcatcctgctgaacctgctgcccaacagcacagacaagtactacatctacaacggcagcctgaccagccccccctgcacagacacagtggactggatcgtgttcaaggacacagtgtccatcagcgagagccagctggccgtgttctgtgaggtgctgaccatgcagcagagcggctacgtgatgctgatggactacctgcagaacaacttccgggagcagcagtacaagttcagccggcaggtgttcagcagctacacaggcaaggaggagatccatgaagctgtgtgcagcagcgagccagaaaatgtgcaggccgaccctgagaactacaccagcctgctggtgacctgggagcggccccgggtggtgtatgacaccatgattgagaagtttgctgtgctgtaccagcagctggatggagaggaccagaccaagcatgagttcctgacagatggctaccaggacctgggcgccatcctgaacaacctgctgcccaacatgtcctatgtgctgcagatcgtggccatctgcaccaacggcctgtatggcaagtacagcgaccagctgattgtggacatgcccacagacaaccctgagctggacctcttccctgagctgattggaacagaggagatcatcaaggaggaggaggagggcaaggacatcgaggagggcgccatcgtgaaccctggccgggacagcgccaccaaccagatcaggaagaaggagccccagatcagcaccaccacccactacaaccgcatcggcaccaagtacaatgaggccaagaccaacagaagccccacccggggcagcgagttcagcgggaaaggagatgtgcccaacaccagcctgaacagcaccagccagcctgtgaccaagctggccacagagaaggacatcagcctgaccagccagacagtgacagagctgcccccccacacagtggagggcaccagcgccagcctgaatgatggcagcaagacagtgctgcggagcccccacatgaacctgagcggcacagctgagagcctgaacacagtgtccatcacagaatatgaggaggagagcctgctgaccagcttcaagctggacacaggagctgaggacagcagcggcagcagccctgccaccagcgccatccccttcatcagcgagaacatcagccagggctacatcttcagcagcgagaaccctgagaccatcacctatgatgtgctgatccctgagagcgccagaaatgccagcgaggacagcaccagcagcggcagcgaggagagcctgaaggaccccagcatggagggcaatgtgtggttccccagcagcacagacatcacagcccagccagatgtgggcagcggccgggagagcttcctgcagaccaactacacagagatccgggtggatgagagcgagaagaccaccaagagcttctctgctggccctgtgatgagccagggccccagcgtgacagacctggagatgccccactacagcacctttgcctacttccccacagaggtgaccccccacgccttcacccccagcagccggcagcaggacctggtgtccacagtgaatgtggtgtacagccagaccacccagcctgtgtacaacggggagacccccctgcagcccagctacagcagcgaggtgttccccctggtgacccccctgctgctggacaaccagatcctgaacaccaccccagctgccagcagcagtgacagcgccctgcacgccacccctgtgttccccagcgtggatgtgtcctttgagagcatcctgagcagctatgatggagcccccctgctgcccttcagcagcgccagcttcagcagcgagctgttccgccacctgcacacagtgtcccagatcctgccccaggtgaccagcgccacagaaagtgacaaggtgcccctgcacgccagcctgcctgtggccggcggggacctgctgctggagcccagcctggcccagtacagtgatgtgctgagcaccacccatgctgccagcgagaccctggagtttggcagcgagagcggcgtgctgtacaagaccctgatgttcagccaggtggagccccccagcagtgatgccatgatgcacgcccggagcagcggccctgagcccagctatgccctgagtgacaatgaaggcagccagcacatcttcaccgtgtcctacagcagcgccatccctgtgcatgattctgtgggcgtgacctaccagggcagcctcttcagcggccccagccacatccccatccccaagagcagcctcatcacccccacagccagcctgctgcagcccacccacgccctgtctggagatggagagtggagcggggccagcagtgacagcgagttcctgctgcctgacacagatggcctgacagccctgaacatcagcagccctgtgtctgtggccgagttcacctacaccacctctgtgtttggagatgacaacaaggccctgagcaagtctgagatcatctatggaaatgaaacagagctgcagatccccagcttcaatgagatggtgtaccccagcgagagcacagtgatgcccaacatgtatgacaacgtgaacaagctgaatgccagcctgcaggagacctctgtgtccatcagcagcaccaagggcatgtttcctggcagcctggcccacaccaccaccaaggtgtttgaccacgagatcagccaggtgcctgagaacaacttctctgtgcagcccacccacacagtgtcccaggccagcggggacaccagcctgaagcctgtgctgagcgccaacagcgagcccgccagcagtgaccctgccagcagcgagatgctgagccccagcacccagctgctcttctatgagaccagcgccagcttcagcacagaggtgctgctgcagcccagcttccaggccagtgatgtggacaccctgctgaagacagtgctgcctgctgtgcccagcgaccccatcctggtggagacccccaaggtggacaagatcagcagcaccatgctgcacctgattgtgagcaacagcgccagcagcgagaacatgctgcacagcacctctgtgcctgtgtttgatgtgagccccaccagccacatgcacagcgccagcctgcagggcctgaccatctcctatgccagcgagaagtatgagcctgtgctgctgaagtctgagagcagccaccaggtggtgcccagcctgtacagcaatgatgagctgttccagacagccaacctggagatcaaccaggcccacccccccaagggccgccacgtgtttgccacccctgtgctgagcattgatgagcccctgaacaccctcatcaacaagctgatccacagtgatgagatcctgaccagcaccaagagctctgtgacaggcaaggtgtttgctggcatccccaccgtggccagtgacacctttgtgtccacagaccacagcgtgcccatcggaaatggacatgtggccatcacagctgtgagcccccacagagatggctctgtgaccagcaccaagctgctcttccccagcaaggccaccagcgagctgagccacagcgccaagagtgatgctggcctggtgggcggcggagaagatggagacacagatgatgatggagatgatgatgatgatgaccggggcagtgatggcctgagcatccacaagtgcatgagctgcagcagctaccgggagagccaggagaaggtgatgaatgacagcgacacccatgagaacagcctgatggaccagaacaaccccatctcctacagcctgtctgaaaattctgaggaggacaacagagtgacctctgtgtccagtgacagccagacaggcatggacaggagccctgggaagagccccagcgccaacggcctgagccagaagcacaatgatggcaaggaggagaatgacatccagacaggcagcgccctgctgcccctgagccctgagagcaaggcctgggccgtgctgaccagtgatgaggagagcggcagcggccagggcaccagtgacagcctgaatgaaaatgagaccagcacagacttctcctttgctgacaccaatgagaaggatgctgatggcatcctggccgccggggacagcgagatcaccccaggcttcccccagagccccaccagctctgtgaccagcgagaacagcgaggtgttccacgtgtctgaggccgaggccagcaacagcagccatgagagcagaattggcctggccgagggcctggagagcgagaagaaggctgtgatccccctggtgattgtgtctgccctgaccttcatctgcctggtggtgctggtgggcatcctgatctactggaggaagtgcttccagacagcccacttctacctggaggacagcaccagccccagggtcatcagcaccccacccacccccatcttccccatcagtgatgatgtgggcgccatccccatcaagcacttccccaagcacgtggccgacctgcacgccagcagcggcttcacagaggagtttgagaccctgaaggagttctaccaggaggtgcagagctgcaccgtggacctgggcatcacagctgacagcagcaaccacccagacaacaagcacaagaaccgctacatcaacatcgtggcctatgaccacagccgggtgaagctggcccagctggccgagaaggatggcaagctgacagactacatcaatgccaactacgtggatggctacaaccggcccaaggcctacatcgccgcccagggccccctgaagagcacagctgaggacttctggaggatgatctgggagcacaacgtggaggtgattgtgatgatcaccaacctggtggagaagggccgcaggaaatgtgaccagtactggccagcagatggcagcgaggagtatggcaacttcctggtgacccagaagtctgtgcaggtgctggcctactacacagtgaggaacttcaccctgaggaacaccaagatcaagaagggcagccagaagggccggcccagcggccgggtggtgacccagtaccactacacccagtggccagacatgggcgtgcctgagtacagcctgcctgtgctgacctttgtgaggaaggccgcctatgccaagagacatgctgtgggccctgtggtggtgcactgcagcgctggggtgggccgcacaggcacctacatcgtgctggacagcatgctgcagcagatccagcacgagggcaccgtgaacatcttcggcttcctgaagcacatccgcagccagaggaactacctggtgcagacagaggagcagtatgtgttcatccatgacaccctggtggaggccatcctgagcaaggagacagaggtgctggacagccacatccacgcctacgtgaatgccctgctgatccctggccctgctgggaagaccaagctggagaagcagttccagctgctgagccagagcaacatccagcagagcgactacagcgctgccctgaagcagtgcaaccgggagaagaacagaaccagcagcatcatccctgtggagaggagccgggtgggcatcagcagcctgtctggagagggcacagactacatcaatgccagctacatcatgggctactaccagagcaatgagttcatcatcacccagcaccccctgctgcacaccatcaaggacttctggaggatgatctgggaccacaatgcccagctggtggtgatgatcccagatggccagaacatggctgaagatgaatttgtgtactggcccaacaaggatgagcccatcaactgtgagagcttcaaggtgaccctgatggccgaggagcacaagtgcctgagcaatgaggagaagctgatcatccaggacttcatcctggaggccacccaggatgattatgtgctggaggtgcgccacttccagtgccccaagtggcccaacccagacagccccatcagcaagacctttgagctgatcagcgtcatcaaggaggaggccgccaacagagatggccccatgattgtgcatgatgaacatggaggagtgacagctggcaccttctgtgccctgaccaccctgatgcaccagctggagaaggagaacagcgtggatgtgtaccaggtggccaagatgatcaacctgatgaggcctggggtgtttgctgacatcgagcagtaccagttcctgtacaaggtgatcctgagcctggtgtccacccggcaggaggagaaccccagcaccagcctggacagcaatggagctgccctgcctgatggcaacattgctgagagcctggagagcctggtgtag

SEQ ID NO: 166395 - DNA, 474 bp, synthetic construct
  misc_feature 1..474: note = Description of Artificial Sequence: Synthetic coding sequence
  source 1..474: mol_type = other DNA
atgggccgcctgacagaagctgctgctgctggcagcggcagcagagctgctggctgggccggcagcccccccaccctgctgcccctgagccccaccagcccccgctgtgccgccaccatggccagcagtgatgaagatggcaccaatggaggagccagcgaggccggagaagatcgggaggcccctggagagcggcggcggctgggcgtgctggccacagcctggctgaccttctatgacatcgccatgacagctggccgcctcatcctgagcccccggctggagtgcattggagccatcagcgcccactgccagccccagcccccagagttcaagcgcttcagctgcctgggcctgcggagctcctgggactacaagaggggccccccccggcccatcaacttctgcatcttcggccgggacagagtgagcccctgctggccaggctggagcaggaccccagacctgaagtag

SEQ ID NO: 166396 - DNA, 867 bp, synthetic construct
  misc_feature 1..867: note = Description of Artificial Sequence: Synthetic coding sequence
  source 1..867: mol_type = other DNA
atgggccgcctgacagaagctgctgctgctggcagcggcagcagagctgctggctgggccggcagcccccccaccctgctgcccctgagccccaccagcccccgctgtgccgccaccatggccagcagtgatgaagatggcaccaatggaggagccagcgaggccggagaagatcgggaggcccctggagagcggcggcggctgggcgtgctggccacagcctggctgaccttctatgacatcgccatgacagctggctggctggtgctggccatcgccatggtgcgcttctacatggagaagggcacccaccggggcctgtacaagagcatccagaagaccctgaagttcttccagacctttgccctgctggagatcgtgcactgcctgattggaattgtgcccacctctgtgattgtgactggagtgcaggtgagcagccgcatcttcatggtgtggctgatcacccacagcatcaagcccatccagaatgaggagagcgtggtgctcttcctggtggcctggacagtgacagagatcacccgctacagcttctacaccttcagcctgctggaccacctgccctacttcatcaagtgggcccgctacaacttcttcatcatcctgtaccctgtgggcgtggccggggagctgctgaccatctatgctgccctgccccacgtgaagaagacaggcatgttcagcatccggctgcccaacaagtacaacgtgtcctttgactactactacttcctgctgatcaccatggccagctacatccccctcttcccccagctgtacttccacatgctgcggcagaggaggaaggtgctgcatggagaggtgattgtggagaaggatgactag

SEQ ID NO: 166397 - DNA, 1269 bp, synthetic construct
  misc_feature 1..1269: note = Description of Artificial Sequence: Synthetic coding sequence
  source 1..1269: mol_type = other DNA
atggccggctgtgtgcccctgctgcagggcctggtgctggtgctggccctgcaccgggtggagcccagcgccaccagcctgaaggagagacatggcctgcacagcgacagcgcctgcaccggggtgcaggagagcctcttcctgcctgccagcaaggccaatgatgtgctggtgcgctggaagagagctggcagctacctgctggaggagctgtttgagggcaacctggagaaggaatgttatgaggagatctgtgtgtatgaggaggcccgggaggtgtttgaaaatgaggtggtgacagatgagttctggaggcgctacaagggcggcagcccctgcatcagccagccctgcctgcacaacggcagctgccaggacagcatctggggctacacctgcacctgcagccctggctatgagggcagcaactgtgagctggccaagaatgaatgccaccctgagaggacagatggctgccagcacttctgcctgcccggccaggagagctacacctgcagctgtgcccagggctaccgcctgggggaggaccacaagcagtgtgtgccccatgaccagtgtgcctgtggggtgctgaccagcgagaagagggccccagacctgcaggacctgccctggcaggtgaagctgaccaacagcgagggcaaggacttctgtggcggcgtcatcatccgggagaactttgtgctgaccacagccaagtgcagcctgctgcacaggaacatcaccgtgaagacctacttcaacagaaccagccaggaccccctgatgatcaagatcacccacgtgcacgtgcacatgagatatgatgctgatgctggagaaaatgacctgagcctgctggagctggagtggcccatccagtgccctggggccggcctgcctgtgtgcaccccagagaaggactttgctgagcacctgctgatccccaggacccggggcctgctgagcggctgggccagaaatggaacagacctgggcaacagcctgaccaccaggcctgtgaccctggtggagggggaggagtgtggccaggtgctgaatgtgacagtgaccaccaggacctactgtgagaggagctctgtggccgccatgcactggatggatggctctgtggtgacccgggagcaccggggctcctggttcctgactggagtgctgggcagccagcctgtgggcggccaggcccacatggtgctggtgaccaaggtgagccgctacagcctgtggttcaagcagatcatgaactag

SEQ ID NO: 166398 - DNA, 1203 bp, synthetic construct
  misc_feature 1..1203: note = Description of Artificial Sequence: Synthetic coding sequence
  source 1..1203: mol_type = other DNA
atggccggctgtgtgcccctgctgcagggcctggtgctggtgctggccctgcaccgggtggagcccagcgtcttcctgcctgccagcaaggccaatgatgtgctggtgcgctggaagagagctggcagctacctgctggaggagctgtttgagggcaacctggagaaggaatgttatgaggagatctgtgtgtatgaggaggcccgggaggtgtttgaaaatgaggtggtgacagatgagttctggaggcgctacaagggcggcagcccctgcatcagccagccctgcctgcacaacggcagctgccaggacagcatctggggctacacctgcacctgcagccctggctatgagggcagcaactgtgagctggccaagaatgaatgccaccctgagaggacagatggctgccagcacttctgcctgcccggccaggagagctacacctgcagctgtgcccagggctaccgcctgggggaggaccacaagcagtgtgtgccccatgaccagtgtgcctgtggggtgctgaccagcgagaagagggccccagacctgcaggacctgccctggcaggtgaagctgaccaacagcgagggcaaggacttctgtggcggcgtcatcatccgggagaactttgtgctgaccacagccaagtgcagcctgctgcacaggaacatcaccgtgaagacctacttcaacagaaccagccaggaccccctgatgatcaagatcacccacgtgcacgtgcacatgagatatgatgctgatgctggagaaaatgacctgagcctgctggagctggagtggcccatccagtgccctggggccggcctgcctgtgtgcaccccagagaaggactttgctgagcacctgctgatccccaggacccggggcctgctgagcggctgggccagaaatggaacagacctgggcaacagcctgaccaccaggcctgtgaccctggtggagggggaggagtgtggccaggtgctgaatgtgacagtgaccaccaggacctactgtgagaggagctctgtggccgccatgcactggatggatggctctgtggtgacccgggagcaccggggctcctggttcctgactggagtgctgggcagccagcctgtgggcggccaggcccacatggtgctggtgaccaaggtgagccgctacagcctgtggttcaagcagatcatgaactag

SEQ ID NO: 166399 - DNA, 1053 bp, synthetic construct
  misc_feature 1..1053: note = Description of Artificial Sequence: Synthetic coding sequence
  source 1..1053: mol_type = other DNA
atggagcccaagaggatccgggagggctacctggtgaagaagggcagcgtcttcaacacctggaagcccatgtgggtggtgctgctggaggatggcatcgagttctacaagaagaagagtgacaacagccccaagggcatgatccccctgaagggcagcaccctgaccagcccctgccaggactttgggaagaggatgtttgtgttcaagatcaccaccaccaagcagcaggaccacttcttccaggccgccttcctggaggagagagatgcctgggtgcgggacatcaagaaggccatcaagtgcattgaaggaggccagaagtttgccaggaagagcaccaggaggagcatccggctgcctgagaccatcgacctgggcgccctgtacctgtccatgaaggacacagagaagggcatcaaggagctgaacctggagaaggacaagaagatcttcaaccactgcttcaccggcaactgtgtgattgactggctggtgagcaaccagagcgtgaggaaccggcaggagggcctgatgattgccagcagcctgctgaatgaaggctacctgcagcctgctggggacatgagcaagtctgctgtggatggaacagctgagaaccccttcctggacaacccagatgccttctactacttcccagacagcggcttcttctgtgaggagaacagcagtgatgatgatgtgatcctgaaggaggagttccggggcgtcatcatcaagcagggctgcctgctgaagcagggccacaggaggaagaactggaaggtgaggaagttcatcctgcgggaggaccctgcctacctgcactactatgaccctgctggagctgaggaccccctgggcgccatccacctgcggggctgtgtggtgacctctgtggagagcaacagcaatggaaggaagtctgaggaggagaacctgtttgagatcatcacagcagatgaggtgcactacttcctgcaggccgccacccccaaggagaggacagagtggatccgggccatccagatggccagcaggacaggcaagtag

SEQ ID NO: 166400 - DNA, 648 bp, synthetic construct
  misc_feature 1..648: note = Description of Artificial Sequence: Synthetic coding sequence
  source 1..648: mol_type = other DNA
atggccagcctgcagatgaggggcaaccctggcagccacttctgtggcggcaccctcatccaccccagctttgtgctgacagctgcccactgcctgcgggacatcccccagaggctggtgaatgtggtgctgggcgcccacaacgtgaggacccaggagcccacccagcagcacttctctgtggcccaggtgttcctgaacaactatgatgctgagaacaagctgaatgatgtgctgctgatccagctgagcagccctgccaacctgagcgcctctgtggccaccgtgcagctgccccagcaggaccagcctgtgccccacggcacccagtgcctggccatgggctggggccgggtgggcgcccatgaccccccagcccaggtgctgcaggagctgaatgtgacagtggtgaccttcttctgccggccccacaacatctgcacctttgtgcccaggaggaaggccggcatctgctttggagacagcggcggccccctcatctgtgatggcatcatccagggcatcgacagctttgtgatctggggctgtgccaccaggctcttcccagacttcttcaccagggtggccctgtatgtggactggatccgcagcaccctgcggcgggtggaggccaagggccggccctag

SEQ ID NO: 166401 - DNA, 858 bp, synthetic construct
  misc_feature 1..858: note = Description of Artificial Sequence: Synthetic coding sequence
  source 1..858: mol_type = other DNA
atgcctggggcccggagcggcggcagcggaggagatggcagcaacagcggcagctacagcggagatgccagcggggctgtgacagtgtgggaggtggtgtccctgctgggcaagctgctgggcaccgtggtggccctgaaggtggtgctgtacctgctgcgggtgtgcctggccatggcctggaagtctggaggagccagccacagcgagctgatccacaacctgaggaagaatggcatcatcaagacagacaaggtgtttgaggtgatgctggccacagacaggagccactacgccaagtgcaacccctacatggacagcccccagagcatcggcttccaggccaccatcagcgccccccacatgcacgcctatgccctggagctgctgtttgaccagctgcatgaaggagccaaggccctggatgtgggcagcggcagcggcatcctgacagcctgctttgccaggatggtgggctgcaccgggaaggtgattggaattgaccacatcaaggagctggtggatgattctgtgaacaacgtgaggaaggatgaccccaccctgctgagcagcggccgggtgcagctggtggtgggagatggccgcatgggctacgccgaggaggccccctatgatgccatccacgtgggcgctgctgcccctgtggtgccccaggccctgattgaccagctgaagccaggcggccgcctcatcctgcctgtgggccctgctgggggcaaccagatgctggagcagtatgacaagctgcaggacggcagcatcaagatgaagcccctgatgggcgtcatctacgtgcccctgacagacaaggagaagcagtggagccgctggaagtag

SEQ ID NO: 166402 - DNA, 684 bp, synthetic construct
  misc_feature 1..684: note = Description of Artificial Sequence: Synthetic coding sequence
  source 1..684: mol_type = other DNA
atggcctggaagtctggaggagccagccacagcgagctgatccacaacctgaggaagaatggcatcatcaagacagacaaggtgtttgaggtgatgctggccacagacaggagccactacgccaagtgcaacccctacatggacagcccccagagcatcggcttccaggccaccatcagcgccccccacatgcacgcctatgccctggagctgctgtttgaccagctgcatgaaggagccaaggccctggatgtgggcagcggcagcggcatcctgacagcctgctttgccaggatggtgggctgcaccgggaaggtgattggaattgaccacatcaaggagctggtggatgattctgtgaacaacgtgaggaaggatgaccccaccctgctgagcagcggccgggtgcagctggtggtgggagatggccgcatgggctacgccgaggaggccccctatgatgccatccacgtgggcgctgctgcccctgtggtgccccaggccctgattgaccagctgaagccaggcggccgcctcatcctgcctgtgggccctgctgggggcaaccagatgctggagcagtatgacaagctgcaggacggcagcatcaagatgaagcccctgatgggcgtcatctacgtgcccctgacagacaaggagaagcagtggagccgctggaagtag

SEQ ID NO: 166403 - DNA, 861 bp, synthetic construct
  misc_feature 1..861: note = Description of Artificial Sequence: Synthetic coding sequence
  source 1..861: mol_type = other DNA
atgcctggggcccggagcggcggcagcggaggagatggcagcaacagcggcagctacagcggagatgccagcggggctgtgacagtgtgggaggtggtgtccctgctgggcaagctgctgggcaccgtggtggccctgaaggtggtgctgtacctgctgcgggtgtgcctggccatggcctggaagtctggaggagccagccacagcgagctgatccacaacctgaggaagaatggcatcatcaagacagacaaggtgtttgaggtgatgctggccacagacaggagccactacgccaagtgcaacccctacatggacagcccccagagcatcggcttccaggccaccatcagcgccccccacatgcacgcctatgccctggagctgctgtttgaccagctgcatgaaggagccaaggccctggatgtgggcagcggcagcggcatcctgacagcctgctttgccaggatggtgggctgcaccgggaaggtgattggaattgaccacatcaaggagctggtggatgattctgtgaacaacgtgaggaaggatgaccccaccctgctgagcagcggccgggtgcagctggtggtgggagatggccgcatgggctacgccgaggaggccccctatgatgccatccacgtgggcgctgctgcccctgtggtgccccaggccctgattgaccagctgaagccaggcggccgcctcatcctgcctgtgggccctgctgggggcaaccagatgctggagcagtatgacaagctgcaggacggcagcatcaagatgaagcccctgatgggcgtcatctacgtgcccctgacagacaaggagaagcagtggagcagagatgagctgtag

SEQ ID NO: 166404 - DNA, 858 bp, synthetic construct; identical to SEQ ID NO: 166401
  misc_feature 1..858: note = Description of Artificial Sequence: Synthetic coding sequence
  source 1..858: mol_type = other DNA

SEQ ID NO: 166405 - DNA, 579 bp, synthetic construct
  misc_feature 1..579: note = Description of Artificial Sequence: Synthetic coding sequence
  source 1..579: mol_type = other DNA
atggcctggaagtctggaggagccagccacagcgagctgatccacaacctgcgctccttccaggccaccatcagcgccccccacatgcacgcctatgccctggagctgctgtttgaccagctgcacgagggcgccaaggccctggatgtgggcagcggcagcggcatcctgacagcctgctttgccaggatggtgggctgcaccgggaaggtgattggcatcgaccacatcaaggagctggtggatgacagcgtgaacaacgtgaggaaggatgaccccaccctgctgagcagcggccgggtgcagctggtggtgggagatggccgcatgggctatgcagaggaggccccctatgatgccatccacgtgggcgccgccgcccctgtggtgccccaggccctgattgaccagctgaagccaggcggccgcctcatcctgcctgtgggccctgctgggggcaaccagatgctggagcagtatgacaagctgcaggacggcagcatcaagatgaagcccctgatgggcgtcatctacgtgcccctgacagacaaggagaagcagtggagccgctggaagtag

SEQ ID NO: 166406 - DNA, 2016 bp, synthetic construct
  misc_feature 1..2016: note = Description of Artificial Sequence: Synthetic coding sequence
  source 1..2016: mol_type = other DNA
atgaagcagatcttcttcctggatgacagcggcccccccttcggccacatggtgctggccctgggcggctacctgggcggctttgatggcaacttcctgtggaacagaattggagctgagtacagcagcaatgtgcctgtgtggagcctgcggctgctgcctgccctggccggggccctgtctgtgcccatggcctaccagatcgtgctggagctgcacttcagccactgtgccgccatgggcgccgccctgctgatgctgattgaaaatgccctgatcacccagagccggctgatgctgctggagagcgtgctgatcttcttcaacctgctggccgtgctgagctacctgaagttcttcaactgccagaagcacagccccttcagcctgtcctggtggttctggctgaccctgactggagtggcctgcagctgtgctgtgggcatcaagtacatgggcgtcttcacctacgtgctggtgctgggcgtggccgctgtgcacgcctggcacctgctgggggaccagaccctgagcaatgtgtgtgtgttctgccacctgctggcccgggctgtggccctgctggtgattcctgtggtgctgtacctgctcttcttctacgtgcacctgatcctggtgttccgcagcggcccccatgaccagatcatgagcagcgccttccaggccagcctggagggcggcctggcccgcatcacccagggccagcccctggaggtggccttcggcagccaggtgaccctgagaaatgtgtttgggaagcctgtgccctgctggctgcacagccaccaggacacctaccccatgatctatgaaaatggccggggcagcagccaccagcagcaggtgacctgctaccccttcaaggatgtgaacaactggtggatcgtgaaggacccccggcggcaccagctggtggtgagcagcccccccaggcctgtgagacatggagacatggtgcagctggtgcacggcatgaccaccaggagcctgaacacccatgatgtggccgcccccctgagcccccacagccaggaggtgtcctgctacatcgactacaacatctccatgcctgcccagaacctgtggaggctggagatcgtgaacagaggaagtgacacagatgtgtggaagaccatcctgtctgaggtgcgctttgtgcacgtgaacaccagcgctgtgctgaagctgagcggggcccacctgcctgactggggctaccggcagctggagatcgtgggggagaagctgagccggggctaccacggcagcacagtgtggaatgtggaggagcacagatatggagccagccaggagcagcgggagcgggagcgggagctgcacagccctgcccaggtggatgtgtccaggaacctgtccttcatggcccgcttcagcgagctgcagtggaggatgctggccctgcggagtgatgattctgagcacaagtacagcagcagccccctggagtgggtgaccctggacaccaacatcgcctactggctgcaccccaggaccagcgcccagatccacctgctgggcaacatcgtcatctgggtgtctggcagcctggccctggccatctatgccctgctgagcctgtggtacctgctgcggaggagaagaaatgtgcatgacctgccccaggatgcctggctgcgctgggtgctggccggggccctgtgtgccggcggctgggccgtgaactacctgcccttcttcctgatggagaagaccctcttcctgtaccactacctgcctgccctgaccttccagatcctgctgctgcctgtggtgctgcagcacatcagtgaccacctgtgccgcagccagctgcagaggagcatcttcagcgccctggtggtggcctggtacagcagcgcctgccacgtgagcaacaccctgcggcccctgacctatggagacaagagcctgagcccccatgagctgaaggccctgcgctggaaggacagctgggacatcctgatcaggaagcactag

SEQ ID NO: 166407 - DNA, 2088 bp, synthetic construct
  misc_feature 1..2088: note = Description of Artificial Sequence: Synthetic coding sequence
  source 1..2088: mol_type = other DNA
atgtggggcttcctgaagaggcctgtggtggtgacagctgacatcaacctgagcctggtggccctgaccggcatgggcctgctgagccggctgtggaggctgacctaccccagggctgtggtgctcttccgccgcatccgctggcagttctttgtggagcagaactggagctctgtggtggccttccctgagtacagcagcaatgtgcctgtgtggagcctgcggctgctgcctgccctggccggggccctgtctgtgcccatggcctaccagatcgtgctggagctgcacttcagccactgtgccgccatgggcgccgccctgctgatgctgattgaaaatgccctgatcacccagagccggctgatgctgctggagagcgtgctgatcttcttcaacctgctggccgtgctgagctacctgaagttcttcaactgccagaagcacagccccttcagcctgtcctggtggttctggctgaccctgactggagtggcctgcagctgtgctgtgggcatcaagtacatgggcgtcttcacctacgtgctggtgctgggcgtggccgctgtgcacgcctggcacctgctgggggaccagaccctgagcaatgtgtgtgtgttctgccacctgctggcccgggctgtggccctgctggtgattcctgtggtgctgtacctgctcttcttctacgtgcacctgatcctggtgttccgcagcggcccccatgaccagatcatgagcagcgccttccaggccagcctggagggcggcctggcccgcatcacccagggccagcccctggaggtggccttcggcagccaggtgaccctgagaaatgtgtttgggaagcctgtgccctgctggctgcacagccaccaggacacctaccccatgatctatgaaaatggccggggcagcagccaccagcagcaggtgacctgctaccccttcaaggatgtgaacaactggtggatcgtgaaggacccccggcggcaccagctggtggtgagcagcccccccaggcctgtgagacatggagacatggtgcagctggtgcacggcatgaccaccaggagcctgaacacccatgatgtggccgcccccctgagcccccacagccaggaggtgtcctgctacatcgactacaacatctccatgcctgcccagaacctgtggaggctggagatcgtgaacagaggaagtgacacagatgtgtggaagaccatcctgtctgaggtgcgctttgtgcacgtgaacaccagcgctgtgctgaagctgagcggggcccacctgcctgactggggctaccggcagctggagatcgtgggggagaagctgagccggggctaccacggcagcacagtgtggaatgtggaggagcacagatatggagccagccaggagcagcgggagcgggagcgggagctgcacagccctgcccaggtggatgtgtccaggaacctgtccttcatggcccgcttcagcgagctgcagtggaggatgctggccctgcggagtgatgattctgagcacaagtacagcagcagccccctggagtgggtgaccctggacaccaacatcgcctactggctgcaccccaggaccagcgcccagatccacctgctgggcaacatcgtcatctgggtgtctggcagcctggccctggccatctatgccctgctgagcctgtggtacctgctgcggaggagaagaaatgtgcatgacctgccccaggatgcctggctgcgctgggtgctggccggggccctgtgtgccggcggctgggccgtgaactacctgcccttcttcctgatggagaagaccctcttcctgtaccactacctgcctgccctgaccttccagatcctgctgctgcctgtggtgctgcagcacatcagtgaccacctgtgccgcagccagctgcagaggagcatcttcagcgccctggtggtggcctggtacagcagcgcctgccacgtgagcaacaccctgcggcccctgacctatggagacaagagcctgagcccccatgagctgaaggccctgcgctggaaggacagctgggacatcctgatcaggaagcactag

SEQ ID NO: 166408 - DNA, 1041 bp, synthetic construct
  misc_feature 1..1041: note = Description of Artificial Sequence: Synthetic coding sequence
  source 1..1041: mol_type = other DNA
tggaggggcggcggctgcaccagccctgccaccctgggcgccgcccggggagctgtgggcatcggcaaggagggccagtaccagcccctgattgccagcctgacctggggcctggtgcccctgagccaggcccaggagatcgtgaacagaggaagtgacacagatgtgtggaagaccatcctgtctgaggtgcgctttgtgcacgtgaacaccagcgctgtgctgaagctgagcggggcccacctgcctgactggggctaccggcagctggagatcgtgggggagaagctgagccggggctaccacggcagcacagtgtggaatgtggaggagcaccgctacggggccagccaggagcagcgggagcgggagcgggagctgcacagccctgcccaggtggatgtgtccaggaacctgtccttcatggcccgcttcagcgagctgcagtggaggatgctggccctgcggagtgatgacagcgagcacaagtacagcagcagccccctggagtgggtgaccctggacaccaacatcgcctactggctgcaccccaggaccagcgcccagatccacctgctgggcaacatcgtcatctgggtgtctggcagcctggccctggccatctatgccctgctgagcctgtggtacctgctgcggaggagaagaaatgtgcatgacctgccccaggatgcctggctgcgctgggtgctggccggggccctgtgtgccggcggctgggccgtgaactacctgcccttcttcctgatggagaagaccctcttcctgtaccactacctgcctgccctgaccttccagatcctgctgctgcctgtggtgctgcagcacatcagtgaccacctgtgccgcagccagctgcagaggagcatcttcagcgccctggtggtggcctggtacagcagcgcctgccacgtgagcaacaccctgcggcccctgacctacggggacaagagcctgagcccccatgagctgaaggccctgcgctggaaggacagctgggacatcctgatcaggaagcactag

SEQ ID NO: 166409 - DNA, 471 bp, synthetic construct
  misc_feature 1..471: note = Description of Artificial Sequence: Synthetic coding sequence
  source 1..471: mol_type = other DNA
atggcctaccagatcgtgctggagctgcacttcagccactgtgccgccatgggcgccgccctgctgatgctgattgaaaatgccctgatcacccagagccggctgatgctgctggagagcgtgctgatcttcttcaacctgctggccgtgctgagctacctgaagttcttcaactgccagaagcacagcctgcccctgtgggccccccggcccaaccacgtgcagtgcctgcccggccagctgcggggccgcaccagcagtgaccacagcggcagcgccaccggcggcggcctgtgggtgcccggccacagcgaggagcggctgtgggagacctgtgccctgctggccagcttccccccaggccacctgccccatgatgtgcgctatgaaaatggccggggcagcagccaccagcagcaggtgacctgctaccccttcaaggatgtgaacaactggtggatcgtgaagtag

SEQ ID NO: 166410 - DNA, 2244 bp, synthetic construct
  misc_feature 1..2244: note = Description of Artificial Sequence: Synthetic coding sequence
  source 1..2244: mol_type = other DNA
atgtggggcttcctgaagaggcctgtggtggtgacagctgacatcaacctgagcctggtggccctgaccggcatgggcctgctgagccggctgtggaggctgacctaccccagggctgtggtgtttgatgaggtgtactacggccagtacatctccttctacatgaagcagatcttcttcctggatgacagcggcccccccttcggccacatggtgctggccctgggcggctacctgggcggctttgatggcaacttcctgtggaacagaattggagctgagtacagcagcaatgtgcctgtgtggagcctgcggctgctgcctgccctggccggggccctgtctgtgcccatggcctaccagatcgtgctggagctgcacttcagccactgtgccgccatgggcgccgccctgctgatgctgattgaaaatgccctgatcacccagagccggctgatgctgctggagagcgtgctgatcttcttcaacctgctggccgtgctgagctacctgaagttcttcaactgccagaagcacagccccttcagcctgtcctggtggttctggctgaccctgactggagtggcctgcagctgtgctgtgggcatcaagtacatgggcgtcttcacctacgtgctggtgctgggcgtggccgctgtgcacgcctggcacctgctgggggaccagaccctgagcaatgtgggcgcagatgtgcagtgctgcatgaggcctgcctgcatgggccagatgcagatgagccagggcgtgtgtgtgttctgccacctgctggcccgggctgtggccctgctggtgattcctgtggtgctgtacctgctcttcttctacgtgcacctgatcctggtgttccgcagcggcccccatgaccagatcatgagcagcgccttccaggccagcctggagggcggcctggcccgcatcacccagggccagcccctggaggtggccttcggcagccaggtgaccctgagaaatgtgtttgggaagcctgtgccctgctggctgcacagccaccaggacacctaccccatgatctatgaaaatggccggggcagcagccaccagcagcaggtgacctgctaccccttcaaggatgtgaacaactggtggatcgtgaaggacccccggcggcaccagctggtggtgagcagcccccccaggcctgtgagacatggagacatggtgcagctggtgcacggcatgaccaccaggagcctgaacacccatgatgtggccgcccccctgagcccccacagccaggaggtgtcctgctacatcgactacaacatctccatgcctgcccagaacctgtggaggctggagatcgtgaacagaggaagtgacacagatgtgtggaagaccatcctgtctgaggtgcgctttgtgcacgtgaacaccagcgctgtgctgaagctgagcggggcccacctgcctgactggggctaccggcagctggagatcgtgggggagaagctgagccggggctaccacggcagcacagtgtggaatgtggaggagcacagatatggagccagccaggagcagcgggagcgggagcgggagctgcacagccctgcccaggtggatgtgtccaggaacctgtccttcatggcccgcttcagcgagctgcagtggaggatgctggccctgcggagtgatgattctgagcacaagtacagcagcagccccctggagtgggtgaccctggacaccaacatcgcctactggctgcaccccaggaccagcgcccagatccacctgctgggcaacatcgtcatctgggtgtctggcagcctggccctggccatctatgccctgctgagcctgtggtacctgctgcggaggagaagaaatgtgcatgacctgccccaggatgcctggctgcgctgggtgctggccggggccctgtgtgccggcggctgggccgtgaactacctgcccttcttcctgatggagaagaccctcttcctgtaccactacctgcctgccctgaccttccagatcctgctgctgcctgtggtgctgcagcacatcagtgaccacctgtgccgcagccagctgcagaggagcatcttcagcgccctggtggtggcctggtacagcagcgcctgccacgtgagcaacaccctgcggcccctgacctatggagacaagagcctgagcccccatgagctgaaggccctgcgctggaaggacagctgggacatcctgatcaggaagcactag

SEQ ID NO: 166411 - DNA, 2178 bp, synthetic construct
  misc_feature 1..2178: note = Description of Artificial Sequence: Synthetic coding sequence
  source 1..2178: mol_type = other DNA
atgtggggcttcctgaagaggcctgtggtggtgacagctgacatcaacctgagcctggtggccctgaccggcatgggcctgctgagccggctgtggaggctgacctaccccagggctgtggtgtttgatgaggtgtactacggccagtacatctccttctacatgaagcagatcttcttcctggatgacagcggcccccccttcggccacatggtgctggccctgggcggctacctgggcggctttgatggcaacttcctgtggaacagaattggagctgagtacagcagcaatgtgcctgtgtggagcctgcggctgctgcctgccctggccggggccctgtctgtgcccatggcctaccagatcgtgctggagctgcacttcagccactgtgccgccatgggcgccgccctgctgatgctgattgaaaatgccctgatcacccagagccggctgatgctgctggagagcgtgctgatcttcttcaacctgctggccgtgctgagctacctgaagttcttcaactgccagaagcacagccccttcagcctgtcctggtggttctggctgaccctgactggagtggcctgcagctgtgctgtgggcatcaagtacatgggcgtcttcacctacgtgctggtgctgggcgtggccgctgtgcacgcctggcacctgctgggggaccagaccctgagcaatgtgtgtgtgttctgccacctgctggcccgggctgtggccctgctggtgattcctgtggtgctgtacctgctcttcttctacgtgcacctgatcctggtgttccgcagcggcccccatgaccagatcatgagcagcgccttccaggccagcctggagggcggcctggcccgcatcacccagggccagcccctggaggtggccttcggcagccaggtgaccctgagaaatgtgtttgggaagcctgtgccctgctggctgcacagccaccaggacacctaccccatgatctatgaaaatggccggggcagcagccaccagcagcaggtgacctgctaccccttcaaggatgtgaacaactggtggatcgtgaaggacccccggcggcaccagctggtggtgagcagcccccccaggcctgtgagacatggagacatggtgcagctggtgcacggcatgaccaccaggagcctgaacacccatgatgtggccgcccccctgagcccccacagccaggaggtgtcctgctacatcgactacaacatctccatgcctgcccagaacctgtggaggctggagatcgtgaacagaggaagtgacacagatgtgtggaagaccatcctgtctgaggtgcgctttgtgcacgtgaacaccagcgctgtgctgaagctgagcggggcccacctgcctgactggggctaccggcagctggagatcgtgggggagaagctgagccggggctaccacggcagcacagtgtggaatgtggaggagcacagatatggagccagccaggagcagcgggagcgggagcgggagctgcacagccctgcccaggtggatgtgtccaggaacctgtccttcatggcccgcttcagcgagctgcagtggaggatgctggccctgcggagtgatgattctgagcacaagtacagcagcagccccctggagtgggtgaccctggacaccaacatcgcctactggctgcaccccaggaccagcgcccagatccacctgctgggcaacatcgtcatctgggtgtctggcagcctggccctggccatctatgccctgctgagcctgtggtacctgctgcggaggagaagaaatgtgcatgacctgccccaggatgcctggctgcgctgggtgctggccggggccctgtgtgccggcggctgggccgtgaactacctgcccttcttcctgatggagaagaccctcttcctgtaccactacctgcctgccctgaccttccagatcctgctgctgcctgtggtgctgcagcacatcagtgaccacctgtgccgcagccagctgcagaggagcatcttcagcgccctggtggtggcctggtacagcagcgcctgccacgtgagcaacaccctgcggcccctgacctatggagacaagagcctgagcccccatgagctgaaggccctgcgctggaaggacagctgggacatcctgatcaggaagcactag

SEQ ID NO: 166412 - DNA, 1827 bp, synthetic construct
  misc_feature 1..1827: note = Description of Artificial Sequence: Synthetic coding sequence
  source 1..1827: mol_type = other DNA
atggcctaccagatcgtgctggagctgcacttcagccactgtgccgccatgggcgccgccctgctgatgctgattgaaaatgccctgatcacccagagccggctgatgctgctggagagcgtgctgatcttcttcaacctgctggccgtgctgagctacctgaagttcttcaactgccagaagcacagccccttcagcctgtcctggtggttctggctgaccctgactggagtggcctgcagctgtgctgtgggcatcaagtacatgggcgtcttcacctacgtgctggtgctgggcgtggccgctgtgcacgcctggcacctgctgggggaccagaccctgagcaatgtgtgtgtgttctgccacctgctggcccgggctgtggccctgctggtgattcctgtggtgctgtacctgctcttcttctacgtgcacctgatcctggtgttccgcagcggcccccatgaccagatcatgagcagcgccttccaggccagcctggagggcggcctggcccgcatcacccagggccagcccctggaggtggccttcggcagccaggtgaccctgagaaatgtgtttgggaagcctgtgccctgctggctgcacagccaccaggacacctaccccatgatctatgaaaatggccggggcagcagccaccagcagcaggtgacctgctaccccttcaaggatgtgaacaactggtggatcgtgaaggaccccaggaggcaccagctggtggtgagcagcccccccaggcctgtgcgccacggggacatggtgcagctggtgcacggcatgaccaccaggagcctgaacacccatgatgtggccgcccccctgagcccccacagccaggaggtgtcctgctacatcgactacaacatctccatgcctgcccagaacctgtggaggctggagatcgtgaacagaggaagtgacacagatgtgtggaagaccatcctgtctgaggtgcgctttgtgcacgtgaacaccagcgctgtgctgaagctgagcggggcccacctgcctgactggggctaccggcagctggagatcgtgggggagaagctgagccggggctaccacggcagcacagtgtggaatgtggaggagcaccgctacggggccagccaggagcagcgggagcgggagcgggagctgcacagccctgcccaggtggatgtgtccaggaacctgtccttcatggcccgcttcagcgagctgcagtggaggatgctggccctgcggagtgatgacagcgagcacaagtacagcagcagccccctggagtgggtgaccctggacaccaacatcgcctactggctgcaccccaggaccagcgcccagatccacctgctgggcaacatcgtcatctgggtgtctggcagcctggccctggccatctatgccctgctgagcctgtggtacctgctgcggaggagaagaaatgtgcatgacctgccccaggatgcctggctgcgctgggtgctggccggggccctgtgtgccggcggctgggccgtgaactacctgcccttcttcctgatggagaagaccctcttcctgtaccactacctgcctgccctgaccttccagatcctgctgctgcctgtggtgctgcagcacatcagtgaccacctgtgccgcagccagctgcagaggagcatcttcagcgccctggtggtggcctggtacagcagcgcctgccacgtgagcaacaccctgcggcccctgacctacggggacaagagcctgagcccccatgagctgaaggccctgcgctggaaggacagctgggacatcctgatcaggaagcactag

SEQ ID NO: 166413 - DNA, 471 bp, synthetic construct; identical to SEQ ID NO: 166409
  misc_feature 1..471: note = Description of Artificial Sequence: Synthetic coding sequence
  source 1..471: mol_type = other DNA

SEQ ID NO: 166414 - DNA, 429 bp, synthetic construct
  misc_feature 1..429: note = Description of Artificial Sequence: Synthetic coding sequence
  source 1..429: mol_type = other DNA
atgtggggcttcctgaagaggcctgtggtggtgacagctgacatcaacctgagcctggtggccctgaccggcatgggcctgctgagccggctgtggaggctgacctaccccagggctgtggtgtttgatgaggtgtactacggccagtacatctccttctacatgaagcagatcttcttcctggatgacagcggcccccccttcggccacatggtgctggccctgggcggctacctgggcggctttgatggcaacttcctgtggaacagaattggagctgagtacagcagcaatgtgcctgtgtggagcctgcggctgctgcctgccctggccggggccctgtctgtgcccatggcctaccagatcgtgctggagctgcacttcagccactgtgccgccatgggcgccgccctgctgatgctgatctag

SEQ ID NO: 166415 - DNA, 1722 bp, synthetic construct
  misc_feature 1..1722: note = Description of Artificial Sequence: Synthetic coding sequence
  source 1..1722: mol_type = other DNA
atgctgctggagagcgtgctgatcttcttcaacctgctggccgtgctgagctacctgaagttcttcaactgccagaagcacagccccttcagcctgtcctggtggttctggctgaccctgactggagtggcctgcagctgtgctgtgggcatcaagtacatgggcgtcttcacctacgtgctggtgctgggcgtggccgctgtgcacgcctggcacctgctgggggaccagaccctgagcaatgtgtgtgtgttctgccacctgctggcccgggctgtggccctgctggtgattcctgtggtgctgtacctgctcttcttctacgtgcacctgatcctggtgttccgcagcggcccccatgaccagatcatgagcagcgccttccaggccagcctggagggcggcctggcccgcatcacccagggccagcccctggaggtggccttcggcagccaggtgaccctgagaaatgtgtttgggaagcctgtgccctgctggctgcacagccaccaggacacctaccccatgatctatgaaaatggccggggcagcagccaccagcagcaggtgacctgctaccccttcaaggatgtgaacaactggtggatcgtgaaggacccccggcggcaccagctggtggtgagcagcccccccaggcctgtgagacatggagacatggtgcagctggtgcacggcatgaccaccaggagcctgaacacccatgatgtggccgcccccctgagcccccacagccaggaggtgtcctgctacatcgactacaacatctccatgcctgcccagaacctgtggaggctggagatcgtgaacagaggaagtgacacagatgtgtggaagaccatcctgtctgaggtgcgctttgtgcacgtgaacaccagcgctgtgctgaagctgagcggggcccacctgcctgactggggctaccggcagctggagatcgtgggggagaagctgagccggggctaccacggcagcacagtgtggaatgtggaggagcacagatatggagccagccaggagcagcgggagcgggagcgggagctgcacagccctgcccaggtggatgtgtccaggaacctgtccttcatggcccgcttcagcgagctgcagtggaggatgctggccctgcggagtgatgattctgagcacaagtacagcagcagccccctggagtgggtgaccctggacaccaacatcgcctactggctgcaccccaggaccagcgcccagatccacctgctgggcaacatcgtcatctgggtgtctggcagcctggccctggccatctatgccctgctgagcctgtggtacctgctgcggaggagaagaaatgtgcatgacctgccccaggatgcctggctgcgctgggtgctggccggggccctgtgtgccggcggctgggccgtgaactacctgcccttcttcctgatggagaagaccctcttcctgtaccactacctgcctgccctgaccttccagatcctgctgctgcctgtggtgctgcagcacatcagtgaccacctgtgccgcagccagctgcagaggagcatcttcagcgccctggtggtggcctggtacagcagcgcctgccacgtgagcaacaccctgcggcccctgacctatggagacaagagcctgagcccccatgagctgaaggccctgcgctggaaggacagctgggacatcctgatcaggaagcactag

SEQ ID NO: 166416 - DNA, 2178 bp, synthetic construct; identical to SEQ ID NO: 166411
  misc_feature 1..2178: note = Description of Artificial Sequence: Synthetic coding sequence
  source 1..2178: mol_type = other DNA

SEQ ID NO: 166417 - DNA, 507 bp, synthetic construct
  misc_feature 1..507: note = Description of Artificial Sequence: Synthetic coding sequence
  source 1..507: mol_type = other DNA
atggcctaccagatcgtgctggagctgcacttcagccactgtgccgccatgggcgccgccctgctgatgctgattgaaaatgccctgatcacccagagccggctgatgctgctggagagcgtgctgatcttcttcaacctgctggccgtgctgagctacctgaagttcttcaactgccagaagcacagccccttcagcctgtcctggtggttctggctgaccctgactggagtggcctgcagctgtgctgtgggcatcaagtacatgggcgtcttcacctacgtgctggtgctgggcgtggccgctgtgcacgcctggcacctgctgggggaccagaccctgagcaatgtgtgtgtgttctgccacctgctggcccgggctgtggccctgctggtgattcctgtggtgctgtacctgctcttcttctacgtgcacctgatcctggtgttccgcagcggcccccatgaccagatcatgagcagcgccttccaggccagcctggagtag

SEQ ID NO: 166418 - DNA, 894 bp, synthetic construct
  misc_feature 1..894: note = Description of Artificial Sequence: Synthetic coding sequence
  source 1..894: mol_type = other DNA
atggcctaccagatcgtgctggagctgcacttcagccactgtgccgccatgggcgccgccctgctgatgctgattgaaaatgccctgatcacccagagccggctgatgctgctggagagcgtgctgatcttcttcaacctgctggccgtgctgagctacctgaagttcttcaactgccagaagcacagccccttcagcctgtcctggtggttctggctgaccctgactggagtggcctgcagctgtgctgtgggcatcaagtacatgggcgtcttcacctacgtgctggtgctgggcgtggccgctgtgcacgcctggcacctgctgggggaccagaccctgagcaatgtgggcgcagatgtgcagtgctgcatgaggcctgcctgcatgggccagatgcagatgagccagggcgtgtgtgtgttctgccacctgctggcccgggctgtggccctgctggtgattcctgtggtgctgtacctgctcttcttctacgtgcacctgatcctggtgttccgcagcggcccccatgaccagatcatgagcagcgccttccaggccagcctggagggcggcctggcccgcatcacccagggccagcccctggaggtggccttcggcagccaggtgaccctgagaaatgtgtttgggaagcctgtgccctgctggctgcacagccaccaggacacctaccccatgatctatgaaaatggccggggcagcagccaccagcagcaggtgacctgctaccccttcaaggatgtgaacaactggtggatcgtgaaggaccccaggaggcaccagctggtggtgagcagcccccccaggcctgtgcgccacggggacatggtgcagctggtgcacggcatgaccaccaggagcctgaacacctag

SEQ ID NO: 166419 - DNA, 657 bp, synthetic construct
  misc_feature 1..657: note = Description of Artificial Sequence: Synthetic coding sequence
  source 1..657: mol_type = other DNA
atgaagcagatcttcttcctggatgacagcggcccccccttcggccacatggtgctggccctgggcggctacctgggcggctttgatggcaacttcctgtggaacagaattggagctgagtacagcagcaatgtgcctgtgtggagcctgcggctgctgcctgccctggccggggccctgtctgtgcccatggcctaccagatcgtgctggagctgcacttcagccactgtgccgccatgggcgccgccctgctgatgctgattgaaaatgccctgatcacccagagccggctgatgctgctggagagcgtgctgatcttcttcaacctgctggccgtgctgagctacctgaagttcttcaactgccagaagcacagccccttcagcctgtcctggtggttctggctgaccctgactggagtggcctgcagctgtgctgtgggcatcaagtacatgggcgtcttcacctacgtgctggtgctgggcgtggccgctgtgcacgcctggcacctgctgggggaccagaccctgagcaatgtgggcgcagatgtgcagtgctgcatgaggcctgcctgcatgggccagatgcagatgagccagggcgtgtgtgtgttctgccacctgctggcccgggctgtggccctgctggtgatctag

SEQ ID NO: 166420 - DNA, 1398 bp, synthetic construct
  misc_feature 1..1398: note = Description of Artificial Sequence: Synthetic coding sequence
  source 1..1398: mol_type = other DNA
atggccatcttctgtggcacagagctggagcaggtgtgtgtgttctgccacctgctggcccgggctgtggccctgctggtgattcctgtggtgctgtacctgctcttcttctacgtgcacctgatcctggtgttccgcagcggcccccatgaccagatcatgagcagcgccttccaggccagcctggagggcggcctggcccgcatcacccagggccagcccctggaggtggccttcggcagccaggtgaccctgagaaatgtgtttgggaagcctgtgccctgctggctgcacagccaccaggacacctaccccatgatctatgaaaatggccggggcagcagccaccagcagcaggtgacctgctaccccttcaaggatgtgaacaactggtggatcgtgaaggacccccggcggcaccagctggtggtgagcagcccccccaggcctgtgagacatggagacatggtgcagctggtgcacggcatgaccaccaggagcctgaacacccatgatgtggccgcccccctgagcccccacagccaggaggtgtcctgctacatcgactacaacatctccatgcctgcccagaacctgtggaggctggagatcgtgaacagaggaagtgacacagatgtgtggaagaccatcctgtctgaggtgcgctttgtgcacgtgaacaccagcgctgtgctgaagctgagcggggcccacctgcctgactggggctaccggcagctggagatcgtgggggagaagctgagccggggctaccacggcagcacagtgtggaatgtggaggagcacagatatggagccagccaggagcagcgggagcgggagcgggagctgcacagccctgcccaggtggatgtgtccaggaacctgtccttcatggcccgcttcagcgagctgcaggcccagatccacctgctgggcaacatcgtcatctgggtgtctggcagcctggccctggccatctatgccctgctgagcctgtggtacctgctgcggaggagaagaaatgtgcatgacctgccccaggatgcctggctgcgctgggtgctggccggggccctgtgtgccggcggctgggccgtgaactacctgcccttcttcctgatggagaagaccctcttcctgtaccactacctgcctgccctgaccttccagatcctgctgctgcctgtggtgctgcagcacatcagtgaccacctgtgccgcagccagctgcagaggagcatcttcagcgccctggtggtggcctggtacagcagcgcctgccacgtgagcaacaccctgcggcccctgacctatggagacaagagcctgagcccccatgagctgaaggccctgcgctggaaggacagctgggacatcctgatcaggaagcactag

SEQ ID NO: 166421 - DNA, 2253 bp, synthetic construct
  misc_feature 1..2253: note = Description of Artificial Sequence: Synthetic coding sequence
  source 1..2253: mol_type = other DNA
atgcccccagccactggaggcggcctggccgagagcgagctgcggccccggcggggccgctgtggcccccaggccgcccgggctgctggaagagatgtggccgctgaggccgtggcccggagccccaagaggcctgcctggggcagccgccgctttgaggccgtgggctggtgggccctgctggccctggtgaccctgctgagctttgccacccgcttccaccggctggatgagcccccccacatctgctgggatgagacccactttgggaagatgggcagctactacatcaacagaaccttcttctttgatgtgcacccccccctgggcaagatgctgattggcctggccggctacctgagcggctatgatggcaccttcctgttccagaagccaggggacaagtatgagcaccacagctacatgggcatgaggggcttctgtgccttcctgggctcctggctggtgccctttgcctacctgactgtgctggacctgagcaagagcctgtctgctgccctgctgacagctgccctgctgacctttgacaccggctgcctgaccctgagccagtacatcctgctggaccccatcctgatgttcttcatcatggccgccatgctgtccatggtgaagtacaacagctgtgccgaccggcccttcagcgccccctggtggttctggctgagcctgactggagtgtccctggccggggccctgggcgtgaagtttgtgggcctcttcatcatcctgcaggtgggcctgaacaccatcgctgacctgtggtacctgtttggagacctgagcctgagcctggtgacagtgggcaagcacctgacagcccgggtgctgtgcctgattgtgctgcccctggccctgtacacagccacctttgctgtgcacttcatggtgctgagcaagagcggccctggagatggcttcttcagcagcgccttccaggcccggctgagcggcaacaacctgcacaatgccagcatccctgagcacctggcctacggcagcgtcatcaccgtgaagaacctgaggatggccatcggctacctgcacagccaccgccacctgtacccagagggcatcggggcccggcagcagcaggtgaccacctacctgcacaaggactacaacaacctgtggatcatcaagaagcacaacaccaacagcgaccccctggaccccagcttccctgtggagtttgtgcgccacggggacatcatccggctggagcacaaggagaccagcaggaacctgcacagccactaccacgaggcccccatgaccaggaagcactaccaggtgacaggctacggcatcaatggaactggagacagcaatgacttctggagaattgaggtggtgaacaggaagtttggaaaccgcatcaaggtgctgcggagccgcatccgcttcatccacctggtgacaggctgtgtgctgggcagcagcggcaaggtgctgcccaagtggggctgggagcagctggaggtgacctgcaccccctacctgaaggagaccctgaacagcatctggaatgtggaggaccacatcaaccccaagctgcccaacatcagcctggatgtgctgcagcccagcttccctgagatcctgctggagagccacatggtgatgatccggggcaacagcggcctgaagcccaaggacaatgagttcaccagcaagccctggcactggcccatcaactaccagggcctgcgcttcagcggcgtgaatgacacagacttccgggtgtacctgctgggcaaccctgtggtgtggtggctgaacctgctgagcatcgccctgtacctgctgagcggcagcatcatcgctgtggccatgcagagaggagcccggctgcctgctgaggtggccggcctgagccaggtgctgctgcggggcggcggccaggtgctgctgggctggaccctgcactacttccccttcttcctgatgggccgggtgctgtacttccaccactacttccctgccatgctgttcagctccatgctgaccggcatcctgtgggacaccctgctgcggctgtgtgcctggggcctggcctcctggcccctggcccggggcatccacgtggccggcatcctgagcctgctgctgggcacagcctacagcttctacctgttccaccccctggcctacggcatggtgggccccctggcccaggacccccagagccccatggccggcctgcgctggctggacagctgggacttctag

SEQ ID NO: 166422 - DNA, 669 bp, synthetic construct
  misc_feature 1..669: note = Description of Artificial Sequence: Synthetic coding sequence
  source 1..669: mol_type = other DNA
atgaagctgcccctgctgctggccctgctgtttggagctgtgtctgccctgcacctgcggtctgagaccagcacctttgagacccccctgggcgccaagaccctgcctgaagatgaggagaccccagagcaggagatggaggagaccccctgccgggagctggaggaggaggaggagtggggcagcggctctgaagatgccagcaagaaggatggagctgtggagagcatctctgtgcctgacatggtggacaagaacctgacctgcccagaggaggaggacacagtgaaggtggtgggcatccctggctgccagacctgccgctacctgctggtgcgcagcctgcagaccttcagccaggcctggttcacctgccgccgctgctaccggggcaacctggtgtccatccacaacttcaacatcaactaccgcatccagtgcagcgtgtctgccctgaaccagggccaggtgtggattggaggccgcatcaccggcagcggccgctgccgccgcttccagtgggtggatggcagccgctggaactttgcctactgggccgcccaccagccctggagccggggcggccactgtgtggccctgtgcacccggggcggccactggaggcgggcccactgcctgcggcggctgcccttcatctgcagctactag

SEQ ID NO: 166423 - DNA, 669 bp, synthetic construct; identical to SEQ ID NO: 166422
  misc_feature 1..669: note = Description of Artificial Sequence: Synthetic coding sequence
  source 1..669: mol_type = other DNA

SEQ ID NO: 166424 - DNA, 636 bp, synthetic construct
  misc_feature 1..636: note = Description of Artificial Sequence: Synthetic coding sequence
  source 1..636: mol_type = other DNA
atgaagctgcccctgctgctggccctgctgtttggagctgtgtctgccctgcacctgcggtctgagaccagcacctttgagacccccctgggcgccaagaccctgcctgaagatgaggagaccccagagcaggagatggaggagaccccctgccgggagctggaggaggaggaggagtggggcagcggctctgaagatgccagcaagaaggatggagctgtggagagcatctctgtgcctgacatggtggacaagaacctgacctgcccagaggaggaggacacagtgaaggtggtgggcatccctggctgccagacctgccgctacctgctcttcacctgccgccgctgctaccggggcaacctggtgtccatccacaacttcaacatcaactaccgcatccagtgcagcgtgtctgccctgaaccagggccaggtgtggattggaggccgcatcactggaagtggccgctgccgccgcttccagtgggtggatggcagccgctggaactttgcctactgggccgcccaccagccctggagcagaggaggccactgtgtggccctgtgcacccggggcggccactggaggcgggcccactgcctgcggcggctgcccttcatctgcagctactag

SEQ ID NO: 166425 - DNA, 678 bp, synthetic construct
  misc_feature 1..678: note = Description of Artificial Sequence: Synthetic coding sequence
  source 1..678: mol_type = other DNA
atgcagtgcctgctgctgctgcccttcctgctgctgggcaccgtgtctgccctgcacctggagaatgatgccccccacctggagagcctggagacccaggccgacctgggccaggacctggacagcagcaaggagcaggagcgggacctggccctgacagaggaggtgatccaggccgagggggaggaggtgaaggccagcgcctgccaggacaactttgaagatgaggaggccatggagagtgaccctgctgccctggacaaggacttccagtgcccccgggaggaggacatcgtggaggtgcagggcagcccccgctgcaagatctgccgctacctgctggtgaggacccccaagacctttgctgaggcccagaatgtgtgcagccgctgctacggcggcaacctggtgtccatccatgacttcaacttcaactaccgcatccagtgctgcaccagcacagtgaaccaggcccaggtgtggattggaggcaacctgcggggctggttcctgtggaagcgcttctgctggacagatggcagccactggaactttgcctactggagccctggccagcctggaaatggccagggcagctgtgtggccctgtgcaccaagggcggctactggaggcgggcccagtgtgacaagcagctgccctttgtgtgcagcttctag

SEQ ID NO: 166426 - DNA, 4092 bp, synthetic construct
  misc_feature 1..4092: note = Description of Artificial Sequence: Synthetic coding sequence
  source 1..4092: mol_type = other DNA
atggcctggaagaccctgcccatctacctgctgctgctgctgtctgtgtttgtgatccagcaggtgagcagccaggagctgagctgcaagggccgctgctttgagagctttgagcggggccgggagtgtgactgtgatgcccagtgcaagaagtatgacaagtgctgcccagactatgagagcttctgtgccgaggtgcacaaccccaccagcccccccagcagcaagaaggcccccccacccagcggggccagccagaccatcaagagcaccaccaagaggagccccaagccacccaacaagaagaagaccaagaaggtgattgagagcgaggagatcacagaggagcacagcgtgtctgagaaccaggagagcagcagcagcagcagcagcagcagcagcagcagcaccatcaggaagatcaagagcagcaagaacagcgctgccaaccgggagctgcagaagaagctgaaggtgaaggacaacaagaagaacagaaccaagaagaagcccacccccaagccccctgtggtggatgaagctggcagcggcctggacaatggagacttcaaggtgaccaccccagacaccagcaccacccagcacaacaaggtgtccaccagccccaagatcaccacagccaagcccatcaacccccggcccagcctgccccccaacagcgacaccagcaaggagaccagcctgactgtgaacaaggagaccaccgtggagaccaaggagaccaccaccaccaacaagcagaccagcacagatggcaaggagaagaccaccagcgccaaggagacccagagcattgagaagaccagcgccaaggacctggcccccaccagcaaggtgctggccaagcccacccccaaggccgagaccaccaccaagggccctgccctgaccacccccaaggagcccacccccaccacccccaaggagcccgccagcaccacccccaaggagcccacccccaccaccatcaagagcgcccccaccacccccaaggagcccgcccccaccaccaccaagagcgcccccaccacccccaaggagcccgcccccaccaccaccaaggagcccgcccccaccacccccaaggagcccgcccccaccaccaccaaggagcccgcccccaccaccaccaagagcgcccccaccacccccaaggagcccgcccccaccacccccaagaagccagcccccaccacccccaaggagcccgcccccaccacccccaaggagcccacccccaccacccccaaggagcccgcccccaccaccaaggagcccgcccccaccacccccaaggagcccgcccccacagcccccaagaagccagcccccaccacccccaaggagcccgcccccaccacccccaaggagcccgcccccaccaccaccaaggagcccagccccaccacccccaaggagcccgcccccaccaccaccaagagcgcccccaccaccaccaaggagcccgcccccaccaccaccaagagcgcccccaccacccccaaggagcccagccccaccaccaccaaggagcccgcccccaccacccccaaggagcccgcccccaccacccccaagaagccagcccccaccacccccaaggagcccgcccccaccacccccaaggagcccgcccccaccaccaccaagaagccagcccccaccacccccaaggagcccgcccccaccacccccaaggagacagcccccaccacccccaagaagctgacccccaccaccccagagaagctggcccccaccaccccagagaagccagcccccaccaccccagaggagctggcccccaccaccccagaggagcccacccccaccaccccagaggagcccgcccccaccacccccaaggctgctgcccccaacacccccaaggagcccgcccccaccacccccaaggagcccgcccccaccacccccaaggagcccgcccccaccacccccaaggagacagcccccaccacccccaagggcacagcccccaccaccctgaaggagcccgcccccaccacccccaagaagccagcccccaaggagctggcccccaccaccaccaaggagcccaccagcaccacctgtgacaagccagcccccaccacccccaagggcacagcccccaccacccccaaggagcccgcccccaccacccccaaggagcccgcccccaccacccccaagggcacagcccccaccaccctgaaggagcccgcccccaccacccccaagaagccagcccccaaggagctggcccccaccaccaccaagggccccaccagcaccaccagtgacaagccagcccccaccacccccaaggagacagcccccaccacccccaaggagcccgcccccaccacccccaagaagccagcccccaccaccccagagaccccaccacccaccaccagcgaggtgtccacccccaccaccaccaaggagcccaccaccatccacaagagcccagatgagagcaccccagagctgtctgctgagcccacccccaaggccctggagaacagccccaaggagcccggggtgcccaccaccaagaccccagctgccaccaagccagagatgaccaccacagccaaggacaagaccacagagcgggacctgcggaccaccccagagaccaccacagctgcccccaagatgaccaaggagacagccaccaccacagagaagaccacagagagcaagatcacagccaccaccacccaggtgaccagcaccaccacccaggacaccacccccttcaagatcaccaccctgaagaccaccaccctggcccccaaggtgaccaccaccaagaagaccatcaccaccacagagatcatgaacaagccagaggagacagccaagcccaaggaccgggccaccaacagcaaggccaccacccccaagccccagaagcccaccaaggcccccaagaagcccaccagcaccaagaagcccaagaccatgccccgggtgaggaagcccaagaccacccccacccccaggaagatgaccagcaccatgcctgagctgaaccccaccagcagaattgctgaggccatgctgcagaccaccacccggcccaaccagacccccaacagcaagctggtggaggtgaaccccaagtcagaagatgctgggggcgctgagggggagaccccccacatgctgctgcggccccacgtgttcatgcctgaggtgaccccagacatggactacctgccccgggtgcccaaccagggcatcatcatcaaccccatgctgagtgatgagaccaacatctgcaatggcaagcctgtggatggcctgaccaccctgagaaatggcaccctggtggccttccggggccactacttctggatgctgagccccttcagcccccccagccctgcccggcgcatcacagaggtgtggggcatccccagccccatcgacaccgtcttcacccgctgcaactgtgagggcaagaccttcttcttcaaggacagccagtactggaggttcaccaatgacatcaaggatgctggctaccccaagcccatcttcaagggctttggaggcctgaccggccagatcgtggccgccctgagcacagccaagtacaagaactggccagagagcgtgtacttcttcaagaggggcggcagcatccagcagtacatctacaagcaggagcctgtgcagaagtgccctggaagaagacctgccctgaactaccctgtgtatggagagaccacccaggtgagaagaagaagatttgagcgggccatcggccccagccagacccacaccatccgcatccagtacagccctgcccggctggcctaccaggacaagggcgtgctgcacaatgaggtgaaggtgtccatcctgtggaggggcctgcccaacgtggtgaccagcgccatcagcctgcccaacatcaggaagccagatggctatgactactatgccttcagcaaggaccagtactacaacattgatgtgcccagcaggacagcccgggccatcaccaccaggagcggccagaccctgagcaaggtgtggtacaactgcccctag

SEQ ID NO: 166427 - DNA, 2802 bp, synthetic construct
  misc_feature 1..2802: note = Description of Artificial Sequence: Synthetic coding sequence
  source 1..2802: mol_type = other DNA
atggcctggaagaccctgcccatctacctgctgctgctgctgtctgtgtttgtgatccagcaggtgagcagccaggagctgagctgcaagggccgctgctttgagagctttgagcggggccgggagtgtgactgtgatgcccagtgcaagaagtatgacaagtgctgcccagactatgagagcttctgtgccgaggtgcacaaccccaccagcccccccagcagcaagaaggcccccccacccagcggggccagccagaccatcaagagcaccaccaagaggagccccaagccacccaacaagaagaagaccaagaaggtgattgagagcgaggagatcacagaggagcacagcgtgtctgagaaccaggagagcagcagcagcagcagcagcagcagcagcagcagcaccatcaggaagatcaagagcagcaagaacagcgctgccaaccgggagctgcagaagaagctgaaggtgaaggacaacaagaagaacagaaccaagaagaagcccacccccaagccccctgtggtggatgaagctggcagcggcctggacaatggagacttcaaggtgaccaccccagacaccagcaccacccagcacaacaaggtgtccaccagccccaagatcaccacagccaagcccatcaacccccggcccagcctgccccccaacagcgacaccagcaaggagaccagcctgactgtgaacaaggagaccaccgtggagaccaaggagaccaccaccaccaacaagcagaccagcacagatggcaaggagaagaccaccagcgccaaggagacccagagcattgagaagaccagcgccaaggacctggcccccaccagcaaggtgctggccaagcccacccccaaggccgagaccaccaccaagggccctgccctgaccacccccaaggagcccacccccaccacccccaaggagcccgccagcaccacccccaaggagcccacccccaccaccatcaagagcgcccccaccacccccaaggagcccgcccccaccaccaccaagagcgcccccaccacccccaaggagcccgcccccaccaccaccaaggagcccgcccccaccacccccaagaagccagcccccaccaccccagagaccccaccacccaccaccagcgaggtgtccacccccaccaccaccaaggagcccaccaccatccacaagagcccagatgagagcaccccagagctgtctgctgagcccacccccaaggccctggagaacagccccaaggagcccggggtgcccaccaccaagaccccagctgccaccaagccagagatgaccaccacagccaaggacaagaccacagagcgggacctgcggaccaccccagagaccaccacagctgcccccaagatgaccaaggagacagccaccaccacagagaagaccacagagagcaagatcacagccaccaccacccaggtgaccagcaccaccacccaggacaccacccccttcaagatcaccaccctgaagaccaccaccctggcccccaaggtgaccaccaccaagaagaccatcaccaccacagagatcatgaacaagccagaggagacagccaagcccaaggaccgggccaccaacagcaaggccaccacccccaagccccagaagcccaccaaggcccccaagaagcccaccagcaccaagaagcccaagaccatgccccgggtgaggaagcccaagaccacccccacccccaggaagatgaccagcaccatgcctgagctgaaccccaccagcagaattgctgaggccatgctgcagaccaccacccggcccaaccagacccccaacagcaagctggtggaggtgaaccccaagtcagaagatgctgggggcgctgagggggagaccccccacatgctgctgcggccccacgtgttcatgcctgaggtgaccccagacatggactacctgccccgggtgcccaaccagggcatcatcatcaaccccatgctgagtgatgagaccaacatctgcaatggcaagcctgtggatggcctgaccaccctgagaaatggcaccctggtggccttccggggccactacttctggatgctgagccccttcagcccccccagccctgcccggcgcatcacagaggtgtggggcatccccagccccatcgacaccgtcttcacccgctgcaactgtgagggcaagaccttcttcttcaaggacagccagtactggaggttcaccaatgacatcaaggatgctggctaccccaagcccatcttcaagggctttggaggcctgaccggccagatcgtggccgccctgagcacagccaagtacaagaactggccagagagcgtgtacttcttcaagaggggcggcagcatccagcagtacatctacaagcaggagcctgtgcagaagtgccctggaagaagacctgccctgaactaccctgtgtatggagagaccacccaggtgagaagaagaagatttgagcgggccatcggccccagccagacccacaccatccgcatccagtacagccctgcccggctggcctaccaggacaagggcgtgctgcacaatgaggtgaaggtgtccatcctgtggaggggcctgcccaacgtggtgaccagcgccatcagcctgcccaacatcaggaagccagatggctatgactactatgccttcagcaaggaccagtactacaacattgatgtgcccagcaggacagcccgggccatcaccaccaggagcggccagaccctgagcaaggtgtggtacaactgcccctag

SEQ ID NO: 166428 - DNA, 3936 bp, synthetic construct
  misc_feature 1..3936: note = Description of Artificial Sequence: Synthetic coding sequence
  source 1..3936: mol_type = other DNA
atggcctggaagaccctgcccatctacctgctgctgctgctgtctgtgtttgtgatccagcaggtgagcagccaggacctgagcagctgtgccggccgctgtggggagggctacagcagagatgccacctgcaactgtgactacaactgccagcactacatggagtgctgcccagacttcaagagggtgtgcacagctgagctgagctgcaagggccgctgctttgagagctttgagcggggcagagaatgtgactgtgatgcccagtgcaagaagtatgacaagtgctgcccagactatgagagcttctgtgccgaggtgaaggacaacaagaagaacagaaccaagaagaagcccacccccaagccccctgtggtggatgaagctggcagcggcctggacaatggagacttcaaggtgaccaccccagacaccagcaccacccagcacaacaaggtgtccaccagccccaagatcaccacagccaagcccatcaacccccggcccagcctgccccccaacagcgacaccagcaaggagaccagcctgactgtgaacaaggagaccaccgtggagaccaaggagaccaccaccaccaacaagcagaccagcacagatggcaaggagaagaccaccagcgccaaggagacccagagcattgagaagaccagcgccaaggacctggcccccaccagcaaggtgctggccaagcccacccccaaggccgagaccaccaccaagggccctgccctgaccacccccaaggagcccacccccaccacccccaaggagcccgccagcaccacccccaaggagcccacccccaccaccatcaagagcgcccccaccacccccaaggagcccgcccccaccaccaccaagagcgcccccaccacccccaaggagcccgcccccaccaccaccaaggagcccgcccccaccacccccaaggagcccgcccccaccaccaccaaggagcccgcccccaccaccaccaagagcgcccccaccacccccaaggagcccgcccccaccacccccaagaagccagcccccaccacccccaaggagcccgcccccaccacccccaaggagcccacccccaccacccccaaggagcccgcccccaccaccaaggagcccgcccccaccacccccaaggagcccgcccccacagcccccaagaagccagcccccaccacccccaaggagcccgcccccaccacccccaaggagcccgcccccaccaccaccaaggagcccagccccaccacccccaaggagcccgcccccaccaccaccaagagcgcccccaccaccaccaaggagcccgcccccaccaccaccaagagcgcccccaccacccccaaggagcccagccccaccaccaccaaggagcccgcccccaccacccccaaggagcccgcccccaccacccccaagaagccagcccccaccacccccaaggagcccgcccccaccacccccaaggagcccgcccccaccaccaccaagaagccagcccccaccacccccaaggagcccgcccccaccacccccaaggagacagcccccaccacccccaagaagctgacccccaccaccccagagaagctggcccccaccaccccagagaagccagcccccaccaccccagaggagctggcccccaccaccccagaggagcccacccccaccaccccagaggagcccgcccccaccacccccaaggctgctgcccccaacacccccaaggagcccgcccccaccacccccaaggagcccgcccccaccacccccaaggagcccgcccccaccacccccaaggagacagcccccaccacccccaagggcacagcccccaccaccctgaaggagcccgcccccaccacccccaagaagccagcccccaaggagctggcccccaccaccaccaaggagcccaccagcaccacctgtgacaagccagcccccaccacccccaagggcacagcccccaccacccccaaggagcccgcccccaccacccccaaggagcccgcccccaccacccccaagggcacagcccccaccaccctgaaggagcccgcccccaccacccccaagaagccagcccccaaggagctggcccccaccaccaccaagggccccaccagcaccaccagtgacaagccagcccccaccacccccaaggagacagcccccaccacccccaaggagcccgcccccaccacccccaagaagccagcccccaccaccccagagaccccaccacccaccaccagcgaggtgtccacccccaccaccaccaaggagcccaccaccatccacaagagcccagatgagagcaccccagagctgtctgctgagcccacccccaaggccctggagaacagccccaaggagcccggggtgcccaccaccaagaccccagctgccaccaagccagagatgaccaccacagccaaggacaagaccacagagcgggacctgcggaccaccccagagaccaccacagctgcccccaagatgaccaaggagacagccaccaccacagagaagaccacagagagcaagatcacagccaccaccacccaggtgaccagcaccaccacccaggacaccacccccttcaagatcaccaccctgaagaccaccaccctggcccccaaggtgaccaccaccaagaagaccatcaccaccacagagatcatgaacaagccagaggagacagccaagcccaaggaccgggccaccaacagcaaggccaccacccccaagccccagaagcccaccaaggcccccaagaagcccaccagcaccaagaagcccaagaccatgccccgggtgaggaagcccaagaccacccccacccccaggaagatgaccagcaccatgcctgagctgaaccccaccagcagaattgctgaggccatgctgcagaccaccacccggcccaaccagacccccaacagcaagctggtggaggtgaaccccaagtcagaagatgctgggggcgctgagggggagaccccccacatgctgctgcggccccacgtgttcatgcctgaggtgaccccagacatggactacctgccccgggtgcccaaccagggcatcatcatcaaccccatgctgagtgatgagaccaacatctgcaatggcaagcctgtggatggcctgaccaccctgagaaatggcaccctggtggccttccggggccactacttctggatgctgagccccttcagcccccccagccctgcccggcgcatcacagaggtgtggggcatccccagccccatcgacaccgtcttcacccgctgcaactgtgagggcaagaccttcttcttcaaggacagccagtactggaggttcaccaatgacatcaaggatgctggctaccccaagcccatcttcaagggctttggaggcctgaccggccagatcgtggccgccctgagcacagccaagtacaagaactggccagagagcgtgtacttcttcaagaggggcggcagcatccagcagtacatctacaagcaggagcctgtgcagaagtgccctggaagaagacctgccctgaactaccctgtgtatggagagaccacccaggtgagaagaagaagatttgagcgggccatcggccccagccagacccacaccatccgcatccagtacagccctgcccggctggcctaccaggacaagggcgtgctgcacaatgaggtgaaggtgtccatcctgtggaggggcctgcccaacgtggtgaccagcgccatcagcctgcccaacatcaggaagccagatggctatgactactatgccttcagcaaggaccagtactacaacattgatgtgcccagcaggacagcccgggccatcaccaccaggagcggccagaccctgagcaaggtgtggtacaactgcccctag

SEQ ID NO: 166429 - DNA, 4086 bp, synthetic construct
  misc_feature 1..4086: note = Description of Artificial Sequence: Synthetic coding sequence
  source 1..4086: mol_type = other DNA
atggcctggaagaccctgcccatctacctgctgctgctgctgtctgtgtttgtgatccagcaggtgagcagccaggacctgagcagctgtgccggccgctgtggggagggctacagcagagatgccacctgcaactgtgactacaactgccagcactacatggagtgctgcccagacttcaagagggtgtgcacagctgagctgagctgcaagggccgctgctttgagagctttgagcggggcagagaatgtgactgtgatgcccagtgcaagaagtatgacaagtgctgcccagactatgagagcttctgtgccgaggtgcacaaccccaccagcccccccagcagcaagaaggcccctcctccttctggggccagccagaccatcaagagcaccaccaagaggagccccaagccacccaacaagaagaagaccaagaaggtgattgaaagtgaggagatcacagaggtgaaggacaacaagaagaacagaaccaagaagaagcccacccccaagccccctgtggtggatgaagctggcagcggcctggacaatggagacttcaaggtgaccaccccagacaccagcaccacccagcacaacaaggtgtccaccagccccaagatcaccacagccaagcccatcaacccccggcccagcctgccccccaacagcgacaccagcaaggagaccagcctgactgtgaacaaggagaccaccgtggagaccaaggagaccaccaccaccaacaagcagaccagcacagatggcaaggagaagaccaccagcgccaaggagacccagagcattgagaagaccagcgccaaggacctggcccccaccagcaaggtgctggccaagcccacccccaaggccgagaccaccaccaagggccctgccctgaccacccccaaggagcccacccccaccacccccaaggagcccgccagcaccacccccaaggagcccacccccaccaccatcaagagcgcccccaccacccccaaggagcccgcccccaccaccaccaagagcgcccccaccacccccaaggagcccgcccccaccaccaccaaggagcccgcccccaccacccccaaggagcccgcccccaccaccaccaaggagcccgcccccaccaccaccaagagcgcccccaccacccccaaggagcccgcccccaccacccccaagaagccagcccccaccacccccaaggagcccgcccccaccacccccaaggagcccacccccaccacccccaaggagcccgcccccaccaccaaggagcccgcccccaccacccccaaggagcccgcccccacagcccccaagaagccagcccccaccacccccaaggagcccgcccccaccacccccaaggagcccgcccccaccaccaccaaggagcccagccccaccacccccaaggagcccgcccccaccaccaccaagagcgcccccaccaccaccaaggagcccgcccccaccaccaccaagagcgcccccaccacccccaaggagcccagccccaccaccaccaaggagcccgcccccaccacccccaaggagcccgcccccaccacccccaagaagccagcccccaccacccccaaggagcccgcccccaccacccccaaggagcccgcccccaccaccaccaagaagccagcccccaccacccccaaggagcccgcccccaccacccccaaggagacagcccccaccacccccaagaagctgacccccaccaccccagagaagctggcccccaccaccccagagaagccagcccccaccaccccagaggagctggcccccaccaccccagaggagcccacccccaccaccccagaggagcccgcccccaccacccccaaggctgctgcccccaacacccccaaggagcccgcccccaccacccccaaggagcccgcccccaccacccccaaggagcccgcccccaccacccccaaggagacagcccccaccacccccaagggcacagcccccaccaccctgaaggagcccgcccccaccacccccaagaagccagcccccaaggagctggcccccaccaccaccaaggagcccaccagcaccacctgtgacaagccagcccccaccacccccaagggcacagcccccaccacccccaaggagcccgcccccaccacccccaaggagcccgcccccaccacccccaagggcacagcccccaccaccctgaaggagcccgcccccaccacccccaagaagccagcccccaaggagctggcccccaccaccaccaagggccccaccagcaccaccagtgacaagccagcccccaccacccccaaggagacagcccccaccacccccaaggagcccgcccccaccacccccaagaagccagcccccaccaccccagagaccccaccacccaccaccagcgaggtgtccacccccaccaccaccaaggagcccaccaccatccacaagagcccagatgagagcaccccagagctgtctgctgagcccacccccaaggccctggagaacagccccaaggagcccggggtgcccaccaccaagaccccagctgccaccaagccagagatgaccaccacagccaaggacaagaccacagagcgggacctgcggaccaccccagagaccaccacagctgcccccaagatgaccaaggagacagccaccaccacagagaagaccacagagagcaagatcacagccaccaccacccaggtgaccagcaccaccacccaggacaccacccccttcaagatcaccaccctgaagaccaccaccctggcccccaaggtgaccaccaccaagaagaccatcaccaccacagagatcatgaacaagccagaggagacagccaagcccaaggaccgggccaccaacagcaaggccaccacccccaagccccagaagcccaccaaggcccccaagaagcccaccagcaccaagaagcccaagaccatgccccgggtgaggaagcccaagaccacccccacccccaggaagatgaccagcaccatgcctgagctgaaccccaccagcagaattgctgaggccatgctgcagaccaccacccggcccaaccagacccccaacagcaagctggtggaggtgaaccccaagtcagaagatgctgggggcgctgagggggagaccccccacatgctgctgcggccccacgtgttcatgcctgaggtgaccccagacatggactacctgccccgggtgcccaaccagggcatcatcatcaaccccatgctgagtgatgagaccaacatctgcaatggcaagcctgtggatggcctgaccaccctgagaaatggcaccctggtggccttccggggccactacttctggatgctgagccccttcagcccccccagccctgcccggcgcatcacagaggtgtggggcatccccagccccatcgacaccgtcttcacccgctgcaactgtgagggcaagaccttcttcttcaaggacagccagtactggaggttcaccaatgacatcaaggatgctggctaccccaagcccatcttcaagggctttggaggcctgaccggccagatcgtggccgccctgagcacagccaagtacaagaactggccagagagcgtgtacttcttcaagaggggcggcagcatccagcagtacatctacaagcaggagcctgtgcagaagtgccctggaagaagacctgccctgaactaccctgtgtatggagagaccacccaggtgagaagaagaagatttgagcgggccatcggccccagccagacccacaccatccgcatccagtacagccctgcccggctggcctaccaggacaagggcgtgctgcacaatgaggtgaaggtgtccatcctgtggaggggcctgcccaacgtggtgaccagcgccatcagcctgcccaacatcaggaagccagatggctatgactactatgccttcagcaaggaccagtactacaacattgatgtgcccagcaggacagcccgggccatcaccaccaggagcggccagaccctgagcaaggtgtggtacaactgcccctag

SEQ ID NO: 166430 - DNA, 4215 bp, synthetic construct
  misc_feature 1..4215: note = Description of Artificial Sequence: Synthetic coding sequence
  source 1..4215: mol_type = other DNA
atggcctggaagaccctgcccatctacctgctgctgctgctgtctgtgtttgtgatccagcaggtgagcagccaggacctgagcagctgtgccggccgctgtggggagggctacagcagagatgccacctgcaactgtgactacaactgccagcactacatggagtgctgcccagacttcaagagggtgtgcacagctgagctgagctgcaagggccgctgctttgagagctttgagcggggcagagaatgtgactgtgatgcccagtgcaagaagtatgacaagtgctgcccagactatgagagcttctgtgccgaggtgcacaaccccaccagcccccccagcagcaagaaggcccctcctccttctggggccagccagaccatcaagagcaccaccaagaggagccccaagccacccaacaagaagaagaccaagaaggtgattgaaagtgaggagatcacagaggagcacagcgtgtctgagaaccaggagagcagcagcagcagcagcagcagcagcagcagcagcaccatcaggaagatcaagagcagcaagaacagcgctgccaaccgggagctgcagaagaagctgaaggtgaaggacaacaagaagaacagaaccaagaagaagcccacccccaagccccctgtggtggatgaggccggcagcggcctggacaacggggacttcaaggtgaccaccccagacaccagcaccacccagcacaacaaggtgtccaccagccccaagatcaccacagccaagcccatcaacccccggcccagcctgccccccaacagcgacaccagcaaggagaccagcctgactgtgaacaaggagaccaccgtggagaccaaggagaccaccaccaccaacaagcagaccagcacagatggcaaggagaagaccaccagcgccaaggagacccagagcattgagaagaccagcgccaaggacctggcccccaccagcaaggtgctggccaagcccacccccaaggccgagaccaccaccaagggccctgccctgaccacccccaaggagcccacccccaccacccccaaggagcccgccagcaccacccccaaggagcccacccccaccaccatcaagagcgcccccaccacccccaaggagcccgcccccaccaccaccaagagcgcccccaccacccccaaggagcccgcccccaccaccaccaaggagcccgcccccaccacccccaaggagcccgcccccaccaccaccaaggagcccgcccccaccaccaccaagagcgcccccaccacccccaaggagcccgcccccaccacccccaagaagccagcccccaccacccccaaggagcccgcccccaccacccccaaggagcccacccccaccacccccaaggagcccgcccccaccaccaaggagcccgcccccaccacccccaaggagcccgcccccacagcccccaagaagccagcccccaccacccccaaggagcccgcccccaccacccccaaggagcccgcccccaccaccaccaaggagcccagccccaccacccccaaggagcccgcccccaccaccaccaagagcgcccccaccaccaccaaggagcccgcccccaccaccaccaagagcgcccccaccacccccaaggagcccagccccaccaccaccaaggagcccgcccccaccacccccaaggagcccgcccccaccacccccaagaagccagcccccaccacccccaaggagcccgcccccaccacccccaaggagcccgcccccaccaccaccaagaagccagcccccaccacccccaaggagcccgcccccaccacccccaaggagacagcccccaccacccccaagaagctgacccccaccaccccagagaagctggcccccaccaccccagagaagccagcccccaccaccccagaggagctggcccccaccaccccagaggagcccacccccaccaccccagaggagcccgcccccaccacccccaaggccgccgcccccaacacccccaaggagcccgcccccaccacccccaaggagcccgcccccaccacccccaaggagcccgcccccaccacccccaaggagacagcccccaccacccccaagggcacagcccccaccaccctgaaggagcccgcccccaccacccccaagaagccagcccccaaggagctggcccccaccaccaccaaggagcccaccagcaccacctgtgacaagccagcccccaccacccccaagggcacagcccccaccacccccaaggagcccgcccccaccacccccaaggagcccgcccccaccacccccaagggcacagcccccaccaccctgaaggagcccgcccccaccacccccaagaagccagcccccaaggagctggcccccaccaccaccaagggccccaccagcaccaccagtgacaagccagcccccaccacccccaaggagacagcccccaccacccccaaggagcccgcccccaccacccccaagaagccagcccccaccaccccagagaccccaccacccaccaccagcgaggtgtccacccccaccaccaccaaggagcccaccaccatccacaagagcccagatgagagcaccccagagctgtctgctgagcccacccccaaggccctggagaacagccccaaggagcccggggtgcccaccaccaagaccccagctgccaccaagccagagatgaccaccacagccaaggacaagaccacagagcgggacctgcggaccaccccagagaccaccacagctgcccccaagatgaccaaggagacagccaccaccacagagaagaccacagagagcaagatcacagccaccaccacccaggtgaccagcaccaccacccaggacaccacccccttcaagatcaccaccctgaagaccaccaccctggcccccaaggtgaccaccaccaagaagaccatcaccaccacagagatcatgaacaagccagaggagacagccaagcccaaggaccgggccaccaacagcaaggccaccacccccaagccccagaagcccaccaaggcccccaagaagcccaccagcaccaagaagcccaagaccatgccccgggtgaggaagcccaagaccacccccacccccaggaagatgaccagcaccatgcctgagctgaaccccaccagcagaattgctgaggccatgctgcagaccaccacccggcccaaccagacccccaacagcaagctggtggaggtgaaccccaagtcagaagatgctggaggagctgagggggagaccccccacatgctgctgcggccccacgtgttcatgcctgaggtgaccccagacatggactacctgccccgggtgcccaaccagggcatcatcatcaaccccatgctgagtgatgagaccaacatctgcaatggcaagcctgtggatggcctgaccaccctgagaaatggcaccctggtggccttccggggccactacttctggatgctgagccccttcagcccccccagccctgcccggcgcatcacagaggtgtggggcatccccagccccatcgacacagtgttcacccgctgcaactgtgagggcaagaccttcttcttcaaggacagccagtactggaggttcaccaatgacatcaaggatgctggctaccccaagcccatcttcaagggctttggaggcctgaccggccagatcgtggccgccctgagcacagccaagtacaagaactggccagagagcgtgtacttcttcaagagaggaggcagcatccagcagtacatctacaagcaggagcctgtgcagaagtgccccggccggcggcctgccctgaactaccctgtgtatggagagaccacccaggtgagaagaagaagatttgagcgggccatcggccccagccagacccacaccatccgcatccagtacagccctgcccggctggcctaccaggacaagggcgtgctgcacaatgaggtgaaggtgtccatcctgtggaggggcctgcccaacgtggtgaccagcgccatcagcctgcccaacatcaggaagccagatggctatgactactatgccttcagcaaggaccagtactacaacattgatgtgcccagcaggacagcccgggccatcaccaccaggagcggccagaccctgagcaaggtgtggtacaactgcccctag

SEQ ID NO: 166431 - DNA, 834 bp, synthetic construct
  misc_feature 1..834: note = Description of Artificial Sequence: Synthetic coding sequence
  source 1..834: mol_type = other DNA
atgggcctgctggagtgctgtgcccgctgcctggtgggcgccccctttgccagcctggtggccaccggcctgtgcttctttggagtggccctcttctgtggctgcggccacgaggccctgactggaacagagaagctgattgagacctacttcagcaagaactaccaggactatgagtacctgatcaacgtcatccacgccttccagtatgtgatctatggaacagccagcttcttcttcctgtatggagccctgctgctggccgagggcttctacaccaccggggctgtgcggcagatctttggagactacaagaccaccatctgtgggaagggcctgagcgccaccgtgactggaggccagaagggccggggcagccggggccagcaccaggcccacagcctggagcgggtgtgccactgcctgggcaagtggctgggccacccagacaagtttgtgggcatcacctacgccctgactgtggtgtggctgctggtgtttgcctgcagcgctgtgcctgtgtacatctacttcaacacctggaccacctgccagagcatcgccttccccagcaagaccagcgccagcatcggcagcctgtgtgctgatgccaggatgtatggagtgctgccctggaatgccttccctgggaaggtgtgtggcagcaacctgctgagcatctgcaagacagctgagttccagatgaccttccacctgttcatcgccgcctttgtgggcgccgccgccaccctggtgtccctgctgaccttcatgattgctgccacctacaactttgctgtgctgaagctgatgggccggggcaccaagttctag

SEQ ID NO: 166432 - DNA, 729 bp, synthetic construct
  misc_feature 1..729: note = Description of Artificial Sequence: Synthetic coding sequence
  source 1..729: mol_type = other DNA
atgggcctgctggagtgctgtgcccgctgcctggtgggcgccccctttgccagcctggtggccaccggcctgtgcttctttggagtggccctcttctgtggctgcggccacgaggccctgactggaacagagaagctgattgagacctacttcagcaagaactaccaggactatgagtacctgatcaacgtcatccacgccttccagtatgtgatctatggaacagccagcttcttcttcctgtatggagccctgctgctggccgagggcttctacaccaccggggctgtgcggcagatctttggagactacaagaccaccatctgtgggaagggcctgagcgccacctttgtgggcatcacctacgccctgactgtggtgtggctgctggtgtttgcctgcagcgctgtgcctgtgtacatctacttcaacacctggaccacctgccagagcatcgccttccccagcaagaccagcgccagcatcggcagcctgtgtgctgatgccaggatgtatggagtgctgccctggaatgccttccctgggaaggtgtgtggcagcaacctgctgagcatctgcaagacagctgagttccagatgaccttccacctgttcatcgccgcctttgtgggcgctgctgccaccctggtgtccctgctgaccttcatgattgctgccacctacaactttgctgtgctgaagctgatgggccggggcaccaagttctag

SEQ ID NO: 166433 - DNA, 834 bp, synthetic construct; identical to SEQ ID NO: 166431
  misc_feature 1..834: note = Description of Artificial Sequence: Synthetic coding sequence
  source 1..834: mol_type = other DNA

SEQ ID NO: 166434 - DNA, 384 bp, synthetic construct
  misc_feature 1..384: note = Description of Artificial Sequence: Synthetic coding sequence
  source 1..384: mol_type = other DNA
atgggcctgctggagtgctgtgcccgctgcctggtgggcgccccctttgccagcctggtggccaccggcctgtgcttctttggagtggccctcttctgtggctgcggccacgaggccctgactggaacagagaagctgattgagacctacttcagcaagaactaccaggactatgagtacctgatcaacgtcatccacgccttccagtatgtgatctatggaacagccagcttcttcttcctgtatggagccctgctgctggccgagggcttctacaccaccggggctgtgcggcagatctttggagactacaagaccaccatctgtgggaagggcctgagcgccaccgtgactggaggccagaagggccggggcagcaggtag

SEQ ID NO: 166435 - DNA, 768 bp, synthetic construct
  misc_feature 1..768: note = Description of Artificial Sequence: Synthetic coding sequence
  source 1..768: mol_type = other DNA
atgggcctgctggagtgctgtgcccgctgcctggtgggcgccccctttgccagcctggtggccaccggcctgtgcttctttggagtggccctcttctgtggctgcggccacgaggccctgactggaacagagaagctgattgagacctacttcagcaagaactaccaggactatgagtacctgatcaacgtcatccacgccttccagtatgtgatctatggaacagccagcttcttcttcctgtatggagccctgctgctggccgagggcttctacaccaccggggctgtgcggcagaagggccggggcagccggggccagcaccaggcccacagcctggagcgggtgtgccactgcctgggcaagtggctgggccacccagacaagtttgtgggcatcacctacgccctgactgtggtgtggctgctggtgtttgcctgcagcgctgtgcctgtgtacatctacttcaacacctggaccacctgccagagcatcgccttccccagcaagaccagcgccagcatcggcagcctgtgtgctgatgccaggatgtatggagtgctgccctggaatgccttccctgggaaggtgtgtggcagcaacctgctgagcatctgcaagacagctgagttccagatgaccttccacctgttcatcgccgcctttgtgggcgccgccgccaccctggtgtccctgctgaccttcatgattgctgccacctacaactttgctgtgctgaagctgatgggccggggcaccaagttctag

SEQ ID NO: 166436 - DNA, 414 bp, synthetic construct
  misc_feature 1..414: note = Description of Artificial Sequence: Synthetic coding sequence
  source 1..414: mol_type = other DNA
atgggcctgctggagtgctgtgcccgctgcctggtgggcgccccctttgccagcctggtggccaccggcctgtgcttctttggagtggccctcttctgtggctgcggccacgaggccctgactggaacagagaagctgattgagacctacttcagcaagaactaccaggactatgagtacctgatcaacgtcatccacgccttccagtatgtgatctatggaacagccagcttcttcttcctgtatggagccctgctgctggccgagggcttctacaccaccggggctgtgcggcagatctttggagactacaagaccaccatctgtgggaagggcctgagcgccaccgtgactggaggccagaagggccggggcagccggggccagcaccaggcccacagcctggagaggtag

SEQ ID NO: 166437 - DNA, 303 bp, synthetic construct
  misc_feature 1..303: note = Description of Artificial Sequence: Synthetic coding sequence
  source 1..303: mol_type = other DNA
atgggcctgctggagtgctgtgcccgctgcctggtgggcgccccctttgccagcctggtggccaccggcctgtgcttctttggagtggccctcttctgtggctgcggccacgaggccctgactggaacagagaagctgattgagacctacttcagcaagaactaccaggactatgagtacctgatcaacgtcatccacgccttccagtatgtgatctatggaacagccagcttcttcttcctgtatggagccctgctgctggccgagggcttctacaccaccggggctgtgcggcagatctag

SEQ ID NO: 166438 - DNA, 372 bp, synthetic construct
  misc_feature 1..372: note = Description of Artificial Sequence: Synthetic coding sequence
  source 1..372: mol_type = other DNA
atgggcctgctggagtgctgtgcccgctgcctggtgggcgccccctttgccagcctggtggccaccggcctgtgcttctttggagtggccctcttctgtggctgcggccacgaggccctgactggaacagagaagctgattgagacctacttcagcaagaactaccaggactatgagtacctgatcaacgtcatccacgccttccagtatgtgatctatggaacagccagcttcttcttcctgtatggagccctgctgctggccgagggcttctacaccaccggggctgtgcggcagatctttggagactacaagaccaccatctgtgggaagggcctgagcgccaccgtgactggaggccagaagggctag

SEQ ID NO: 166439 - DNA, 339 bp, synthetic construct
  misc_feature 1..339: note = Description of Artificial Sequence: Synthetic coding sequence
  source 1..339: mol_type = other DNA
atgggcctgctggagtgctgtgcccgctgcctggtgggcgccccctttgccagcctggtggccaccggcctgtgcttctttggagtggccctcttctgtggctgcggccacgaggccctgactggaacagagaagctgattgagacctacttcagcaagaactaccaggactatgagtacctgatcaacgtcatccacgccttccagtatgtgatctatggaacagccagcttcttcttcctgtatggagccctgctgctggccgagggcttctacaccaccggggctgtgcggcagatctttggagactacaagaccaccatctgtgggaaaggatag

SEQ ID NO: 166440 - DNA, 411 bp, synthetic construct
  misc_feature 1..411: note = Description of Artificial Sequence: Synthetic coding sequence
  source 1..411: mol_type = other DNA
atgggcctgctggagtgctgtgcccgctgcctggtgggcgccccctttgccagcctggtggccaccggcctgtgcttctttggagtggccctcttctgtggctgcggccacgaggccctgactggaacagagaagctgattgagacctacttcagcaagaactaccaggactatgagtacctgatcaacgtcatccacgccttccagtatgtgatctatggaacagccagcttcttcttcctgtatggagccctgctgctggccgagggcttctacaccaccggggctgtgcggcagatctttggagactacaagaccaccatctgtgggaagggcctgagcgccaccgtgactggaggccagaagggccggggcagccggggccagcaccaggcccacagcctggagtag

SEQ ID NO: 166441 - DNA, 438 bp, synthetic construct
  misc_feature 1..438: note = Description of Artificial Sequence: Synthetic coding sequence
  source 1..438: mol_type = other DNA
atggctgacagcgagcggctgagcgcccctggctgctgggccgcctgcaccaacttcagcaggaccaggaagggcatcctgctgtttgctgagatcatcctgtgcctggtgatcctgatctgcttcagcgccagcaccccaggctacagcagcctgtctgtgattgagatgatcctggccgccatcttctttgtggtgtacatgtgtgacctgcacaccaagatccccttcatcaactggccctggagcgacttcttccgcaccctgattgctgccatcctgtacctgatcaccagcatcgtggtgctggtggagcggggcaaccacagcaagatcgtggccggcgtgaaggccatgggcgccgccctgaagcaccgggccaagggcctgcggagccagggccccttcctgcccctgctgctggccgagatcgtgtag

SEQ ID NO: 166442 - DNA, 459 bp, synthetic construct
  misc_feature 1..459: note = Description of Artificial Sequence: Synthetic coding sequence
  source 1..459: mol_type = other DNA
atggctgacagcgagcggctgagcgcccctggctgctgggccgcctgcaccaacttcagcaggaccaggaagggcatcctgctgtttgctgagatcatcctgtgcctggtgatcctgatctgcttcagcgccagcaccccaggctacagcagcctgtctgtgattgagatgatcctggccgccatcttctttgtggtgtacatgtgtgacctgcacaccaagatccccttcatcaactggccctggagcgacttcttccgcaccctgattgctgccatcctgtacctgatcaccagcatcgtggtgctggtggagcggggcaaccacagcaagatcgtggccggcgtgctgggcctcatcgccacctgcctgtttggctatgatgcctacgtgaccttccctgtgcggcagcccaggcacacagctgcccccacagatcctgcagatggccctgtgtag

SEQ ID NO: 166443 - DNA, 336 bp, synthetic construct
  misc_feature 1..336: note = Description of Artificial Sequence: Synthetic coding sequence
  source 1..336: mol_type = other DNA
atgtctgatgctgctgtggacaccagcagcgagatcaccaccaaggacctgaaggagaagaaggaggtggtggaggaggccgagaatggaagagatgccccagccaatggaaatgcagaaaatgaagaaaatggagagcaggaggccgacaatgaggtggatgaggaggaggaggagggcggggaggaggaggaggaggaggaggagggagatggagaggaggaggatggagatgaagatgaggaggccgagagcgccaccgggaagagagctgctgaagatgatgaagatgatgatgtggacaccaagaagcagaagacagatgaagatgactag

SEQ ID NO: 166444 - DNA, 408 bp, synthetic construct
  misc_feature 1..408: note = Description of Artificial Sequence: Synthetic coding sequence
  source 1..408: mol_type = other DNA
atgcagaccttcggccctgctggggtggccgctgtgggccggcgggtggagagccctgctgaccggcgggccacccgggcctgccactgcaagctgtgcctgcctgctggcagcctgcagggcctgaagggggaggagggctctgtggaggaggctgaaaatggaagagatgccccagccaatggaaatgccaatgaagaaaatggagagcaggaggccgacaatgaggtggatgaggaggaggaggagggcggggaggaggaggaggaggaggaggagggagatggagaggaggaggatggagatgaagatgaggaggccgagagcgccaccgggaagagagctgctgaagatgatgaagatgatgatgtggacaccaagaagcagaagacagatgaagatgactag

SEQ ID NO: 166445 - DNA, 333 bp, synthetic construct
  misc_feature 1..333: note = Description of Artificial Sequence: Synthetic coding sequence
  source 1..333: mol_type = other DNA
atgtctgatgctgctgtggacaccagcagcgagatcaccaccaaggacctgaaggagaagaaggaggtggtggaggaggccgagaatggaagagatgccccagccaatggaaatgccaatgaggagaatggagagcaggaggccgacaatgaggtggatgaggaggaggaggagggcggggaggaggaggaggaggaggaggagggagatggagaggaggaggatggagatgaagatgaggaggccgagagcgccaccgggaagagagctgctgaagatgatgaagatgatgatgtggacaccaagaagcagaagacagatgaagatgactag

SEQ ID NO: 166446 - DNA, 3714 bp, synthetic construct
  misc_feature 1..3714: note = Description of Artificial Sequence: Synthetic coding sequence
  source 1..3714: mol_type = other DNA
atggattctggagctgggggccgccgctgcccagaggccgccctgctgatcctgggcccccccaggatggagcacctgcggcacagccctggccctgggggccagaggctgctgctgcccagcatgctgctggccctgctgctgctgctggcccccagccctggccacgccaccagggtggtgtacaaggtgcctgaggagcagccccccaacaccctcatcggcagcctggccgctgactatggcttcccagatgtgggccacctgtacaagctggaggtgggcgccccctacctgcgggtggatggcaagacaggagacatcttcaccacagagaccagcattgaccgggagggcctgcgggagtgccagaaccagctgcccggggacccctgcatcctggagtttgaggtgtccatcacagacctggtgcagaatggcagcccccggctgctggagggccagatcgaggtgcaggacatcaatgacaacacccccaactttgccagccctgtgatcaccctggccatccctgagaacaccaacatcggcagcctcttccccatccccctggccagtgacagagatgctggccccaacggggtggccagctatgagctgcaggccggccctgaggcccaggagctgtttggcctgcaggtggccgaggaccaggaggagaagcagccccagctgattgtgatgggcaacctggaccgggagcgctgggacagctatgacctgaccatcaaggtgcaggacggcggcagccccccccgggccagcagcgccctgctgcgggtgacagtgctggacaccaatgacaatgcccccaagtttgagcggcccagctatgaagctgagctgtctgagaacagccccatcggccacagcgtcatccaggtgaaggccaatgacagcgaccagggcgccaatgctgagattgagtacaccttccaccaggcccctgaggtggtgcggcggctgctgcggctggacaggaacacaggcctcatcaccgtgcagggccctgtggaccgggaggacctgagcaccctgcgcttctctgtgctggccaaggaccggggcaccaaccccaagagcgcccgggcccaggtggtggtgacagtgaaggacatgaatgacaatgcccccaccatcgagatccggggcatcggcctggtgacccaccaggacggcatggccaacatcagtgaagatgtggccgaggagacagctgtggccctggtgcaggtgtctgacagagatgaaggagaaaatgctgctgtgacctgtgtggtggccggagatgtgcccttccagctgcggcaggccagcgagaccggcagtgacagcaagaagaagtacttcctgcagaccaccacccccctggactatgagaaggtgaaggactacaccatcgagatcgtggccgtggacagcggcaacccccccctgagcagcaccaacagcctgaaggtgcaggtggtggatgtgaatgacaatgcccctgtgttcacccagagcgtgacagaggtggccttccctgagaacaacaagccaggagaggtgattgctgagatcacagccagtgatgctgacagcggcagcaatgctgagctggtgtacagcctggagcctgagcctgctgccaagggcctcttcaccatcagccctgagactggagagatccaggtgaagaccagcctggaccgggagcagcgggagagctatgagctgaaggtggtggccgctgaccggggcagccccagcctgcagggcacagccaccgtgctggtgaatgtgctggactgcaatgacaatgaccccaagttcatgctgagcggctacaacttctctgtgatggagaacatgcctgccctgagccctgtgggcatggtgacagtgattgatggagacaagggagaaaatgcccaggtgcagctgtctgtggagcaggacaatggagactttgtgatccagaatggcaccggcaccatcctgagcagcctgagctttgaccgggagcagcagagcacctacaccttccagctgaaggctgtggatggaggagtgcccccaagaagtgcctacgtgggcgtgaccatcaacgtgctggatgaaaatgacaatgccccctacatcacagcccccagcaacaccagccacaagctgctgaccccccagacccggctgggggagaccgtgtcccaggtggccgctgaggactttgacagcggcgtgaatgctgagctgatctacagcattgctgggggcaacccctacggcctcttccagatcggcagccacagcggggccatcaccctggagaaggagattgaaagaagacaccacggcctgcaccggctggtggtgaaggtgtctgaccggggcaagccacccaggtatggaacagccctggtgcacctgtatgtgaatgagaccctggccaacagaaccctgctggagaccctgctgggccacagcctggacacccccctggacatcgacattgctggggaccctgaatatgaaagaagcaagcagaggggcaacatcctgtttggagtggtggccggcgtggtggccgtggccctgctgattgccctggccgtgctggtgcgctactgccggcagcgggaggccaagagcggctaccaggccggcaagaaggagaccaaggacctgtatgcccccaagcccagcggcaaggccagcaaaggaaacaagagcaagggcaagaagagcaagagccccaagcctgtgaagcctgtggaggatgaagatgaagctggcctgcagaagagcctgaagttcaacctgatgtctgatgcccctggggacagcccccgcatccacctgcccctgaactacccacctggcagcccagacctgggccgccactaccgcagcaacagccccctgcccagcatccagctgcagccccagagccccagcgccagcaagaagcaccaggtggtgcaggacctgcccccagccaacacctttgtgggcaccggggacaccaccagcacaggcagcgagcagtacagcgactacagctaccgcaccaacccccccaagtaccccagcaagcagctgccccacagaagagtgaccttcagcgccaccagccaggcccaggagctgcaggaccccagccagcacagctactatgattctggcctggaggagagcgagacccccagcagcaagagcagcagcggcccccggctgggccccctggccctgcctgaggaccactatgaaagaaccaccccagatggcagcatcggggagatggagcacccagaaaatgacctgcggcccctgcctgatgtggccatgacaggcacctgcaccagagaatgttctgaatttggccacagcgacacctgctggatgcctggccagagcagccccagcaggaggaccaagagcagcgccctgaagctgagcacctttgtgccctaccaggaccggggcggccaggagcctgctggagctggcagccccagccccccagaggacaggaacaccaagacagcccctgtgcggctgctgcccagctacagcgccttcagccacagcagccatgacagctgcaaggacagcgccaccctggaggagatccccctgacccagaccagtgacttccccccagctgccaccccagccagcgcccagacagccaagcgggagatctacctgtag

SEQ ID NO: 166447 - DNA, 3183 bp, synthetic construct
  misc_feature 1..3183: note = Description of Artificial Sequence: Synthetic coding sequence
  source 1..3183: mol_type = other DNA
atggattctggagctgggggccgccgctgcccagaggccgccctgctgatcctgggcccccccaggatggagcacctgcggcacagccctggccctgggggccagaggctgctgctgcccagcatgctgctggccctgctgctgctgctggcccccagccctggccacgccaccagggtggtgtacaaggtgcctgaggagcagccccccaacaccctcatcggcagcctggccgctgactatggcttcccagatgtgggccacctgtacaagctggaggtgggcgccccctacctgcgggtggatggcaagacaggagacatcttcaccacagagaccagcattgaccgggagggcctgcgggagtgccagaaccagctgcccggggacccctgcatcctggagtttgaggtgtccatcacagacctggtgcagaatggcagcccccggctgctggagggccagatcgaggtgcaggacatcaatgacaacacccccaactttgccagccctgtgatcaccctggccatccctgagaacaccaacatcggcagcctcttccccatccccctggccagtgacagagatgctggccccaacggggtggccagctatgagctgcaggccggccctgaggcccaggagctgtttggcctgcaggtggccgaggaccaggaggagaagcagccccagctgattgtgatgggcaacctggaccgggagcgctgggacagctatgacctgaccatcaaggtgcaggacggcggcagccccccccgggccagcagcgccctgctgcgggtgacagtgctggacaccaatgacaatgcccccaagtttgagcggcccagctatgaagctgagctgtctgagaacagccccatcggccacagcgtcatccaggtgaaggccaatgacagcgaccagggcgccaatgctgagattgagtacaccttccaccaggcccctgaggtggtgcggcggctgctgcggctggacaggaacacaggcctcatcaccgtgcagggccctgtggaccgggaggacctgagcaccctgcgcttctctgtgctggccaaggaccggggcaccaaccccaagagcgcccgggcccaggtggtggtgacagtgaaggacatgaatgacaatgcccccaccatcgagatccggggcatcggcctggtgacccaccaggacggcatggccaacatcagtgaagatgtggccgaggagacagctgtggccctggtgcaggtgtctgacagagatgaaggagaaaatgctgctgtgacctgtgtggtggccggagatgtgcccttccagctgcggcaggccagcgagaccggcagtgacagcaagaagaagtacttcctgcagaccaccacccccctggactatgagaaggtgaaggactacaccatcgagatcgtggccgtggacagcggcaacccccccctgagcagcaccaacagcctgaaggtgcaggtggtggatgtgaatgacaatgcccctgtgttcacccagagcgtgacagaggtggccttccctgagaacaacaagccaggagaggtgattgctgagatcacagccagtgatgctgacagcggcagcaatgctgagctggtgtacagcctggagcctgagcctgctgccaagggcctcttcaccatcagccctgagactggagagatccaggtgaagaccagcctggaccgggagcagcgggagagctatgagctgaaggtggtggccgctgaccggggcagccccagcctgcagggcacagccaccgtgctggtgaatgtgctggactgcaatgacaatgaccccaagttcatgctgagcggctacaacttctctgtgatggagaacatgcctgccctgagccctgtgggcatggtgacagtgattgatggagacaagggagaaaatgcccaggtgcagctgtctgtggagcaggacaatggagactttgtgatccagaatggcaccggcaccatcctgagcagcctgagctttgaccgggagcagcagagcacctacaccttccagctgaaggctgtggatggaggagtgcccccaagaagtgcctacgtgggcgtgaccatcaacgtgctggatgaaaatgacaatgccccctacatcacagcccccagcaacaccagccacaagctgctgaccccccagacccggctgggggagaccgtgtcccaggtggccgctgaggactttgacagcggcgtgaatgctgagctgatctacagcattgctgggggcaacccctacggcctcttccagatcggcagccacagcggggccatcaccctggagaaggagattgaaagaagacaccacggcctgcaccggctggtggtgaaggtgtctgaccggggcaagccacccaggtatggaacagccctggtgcacctgtatgtgaatgagaccctggccaacagaaccctgctggagaccctgctgggccacagcctggacacccccctggacatcgacattgctggggaccctgaatatgaaagaagcaagcagaggggcaacatcctgtttggagtggtggccggcgtggtggccgtggccctgctgattgccctggccgtgctggtgcgctactgccggcagcgggaggccaagagcggctaccaggccggcaagaaggagaccaaggacctgtatgcccccaagcccagcggcaaggccagcaaaggaaacaagagcaagggcaagaagagcaagagccccaagcctgtgaagcctgtggaggatgaagatgaagctggcctgcagaagagcctgaagttcaacctgatgtctgatgcccctggggacagcccccgcatccacctgcccctgaactacccacctggcagcccagacctgggccgccactaccgcagcaacagccccctgcccagcatccagctgcagccccagagccccagcgccagcaagaagcaccaggtggtgcaggacctgcccccagccaacacctttgtgggcaccggggacaccaccagcacaggcagcgagcagtacagcgactacagctaccgcaccaacccccccaagtaccccagcaagcaggtgggccagcccttccagctgagcaccccccagcccctgccccacccctaccatggagccatctggacagaggtgtgggagtag

SEQ ID NO: 166448 - DNA, 3147 bp, synthetic construct
  misc_feature 1..3147: note = Description of Artificial Sequence: Synthetic coding sequence
  source 1..3147: mol_type = other DNA
atggattctggagctgggggccgccgctgcccagaggccgccctgctgatcctgggcccccccaggatggagcacctgcggcacagccctggccctgggggccagaggctgctgctgcccagcatgctgctggccctgctgctgctgctggcccccagccctggccacgccaccagggtggtgtacaaggtgcctgaggagcagccccccaacaccctcatcggcagcctggccgctgactatggcttcccagatgtgggccacctgtacaagctggaggtgggcgccccctacctgcgggtggatggcaagacaggagacatcttcaccacagagaccagcattgaccgggagggcctgcgggagtgccagaaccagctgcccggggacccctgcatcctggagtttgaggtgtccatcacagacctggtgcagaatggcagcccccggctgctggagggccagatcgaggtgcaggacatcaatgacaacacccccaactttgccagccctgtgatcaccctggccatccctgagaacaccaacatcggcagcctcttccccatccccctggccagtgacagagatgctggccccaacggggtggccagctatgagctgcaggtggccgaggaccaggaggagaagcagccccagctgattgtgatgggcaacctggaccgggagcgctgggacagctatgacctgaccatcaaggtgcaggacggcggcagccccccccgggccagcagcgccctgctgcgggtgacagtgctggacaccaatgacaatgcccccaagtttgagcggcccagctatgaagctgagctgtctgagaacagccccatcggccacagcgtcatccaggtgaaggccaatgacagcgaccagggcgccaatgctgagattgagtacaccttccaccaggcccctgaggtggtgcggcggctgctgcggctggacaggaacacaggcctcatcaccgtgcagggccctgtggaccgggaggacctgagcaccctgcgcttctctgtgctggccaaggaccggggcaccaaccccaagagcgcccgggcccaggtggtggtgacagtgaaggacatgaatgacaatgcccccaccatcgagatccggggcatcggcctggtgacccaccaggacggcatggccaacatcagtgaagatgtggccgaggagacagctgtggccctggtgcaggtgtctgacagagatgaaggagaaaatgctgctgtgacctgtgtggtggccggagatgtgcccttccagctgcggcaggccagcgagaccggcagtgacagcaagaagaagtacttcctgcagaccaccacccccctggactatgagaaggtgaaggactacaccatcgagatcgtggccgtggacagcggcaacccccccctgagcagcaccaacagcctgaaggtgcaggtggtggatgtgaatgacaatgcccctgtgttcacccagagcgtgacagaggtggccttccctgagaacaacaagccaggagaggtgattgctgagatcacagccagtgatgctgacagcggcagcaatgctgagctggtgtacagcctggagcctgagcctgctgccaagggcctcttcaccatcagccctgagactggagagatccaggtgaagaccagcctggaccgggagcagcgggagagctatgagctgaaggtggtggccgctgaccggggcagccccagcctgcagggcacagccaccgtgctggtgaatgtgctggactgcaatgacaatgaccccaagttcatgctgagcggctacaacttctctgtgatggagaacatgcctgccctgagccctgtgggcatggtgacagtgattgatggagacaagggagaaaatgcccaggtgcagctgtctgtggagcaggacaatggagactttgtgatccagaatggcaccggcaccatcctgagcagcctgagctttgaccgggagcagcagagcacctacaccttccagctgaaggctgtggatggaggagtgcccccaagaagtgcctacgtgggcgtgaccatcaacgtgctggatgaaaatgacaatgccccctacatcacagcccccagcaacaccagccacaagctgctgaccccccagacccggctgggggagaccgtgtcccaggtggccgctgaggactttgacagcggcgtgaatgctgagctgatctacagcattgctgggggcaacccctacggcctcttccagatcggcagccacagcggggccatcaccctggagaaggagattgaaagaagacaccacggcctgcaccggctggtggtgaaggtgtctgaccggggcaagccacccaggtatggaacagccctggtgcacctgtatgtgaatgagaccctggccaacagaaccctgctggagaccctgctgggccacagcctggacacccccctggacatcgacattgctggggaccctgaatatgaaagaagcaagcagaggggcaacatcctgtttggagtggtggccggcgtggtggccgtggccctgctgattgccctggccgtgctggtgcgctactgccggcagcgggaggccaagagcggctaccaggccggcaagaaggagaccaaggacctgtatgcccccaagcccagcggcaaggccagcaaaggaaacaagagcaagggcaagaagagcaagagccccaagcctgtgaagcctgtggaggatgaagatgaagctggcctgcagaagagcctgaagttcaacctgatgtctgatgcccctggggacagcccccgcatccacctgcccctgaactacccacctggcagcccagacctgggccgccactaccgcagcaacagccccctgcccagcatccagctgcagccccagagccccagcgccagcaagaagcaccaggtggtgcaggacctgcccccagccaacacctttgtgggcaccggggacaccaccagcacaggcagcgagcagtacagcgactacagctaccgcaccaacccccccaagtaccccagcaagcaggtgggccagcccttccagctgagcaccccccagcccctgccccacccctaccatggagccatctggacagaggtgtgggagtag

SEQ ID NO: 166449 - DNA, 3117 bp, synthetic construct
  misc_feature 1..3117: note = Description of Artificial Sequence: Synthetic coding sequence
  source 1..3117: mol_type = other DNA
atggagcacctgcggcacagccctggccctgggggccagaggctgctgctgcccagcatgctgctggccctgctgctgctgctggcccccagccctggccacgccaccagggtggtgtacaaggtgcctgaggagcagccccccaacaccctcatcggcagcctggccgctgactatggcttcccagatgtgggccacctgtacaagctggaggtgggcgccccctacctgcgggtggatggcaagacaggagacatcttcaccacagagaccagcattgaccgggagggcctgcgggagtgccagaaccagctgcccggggacccctgcatcctggagtttgaggtgtccatcacagacctggtgcagaatggcagcccccggctgctggagggccagatcgaggtgcaggacatcaatgacaacacccccaactttgccagccctgtgatcaccctggccatccctgagaacaccaacatcggcagcctcttccccatccccctggccagtgacagagatgctggccccaacggggtggccagctatgagctgcaggccggccctgaggcccaggagctgtttggcctgcaggtggccgaggaccaggaggagaagcagccccagctgattgtgatgggcaacctggaccgggagcgctgggacagctatgacctgaccatcaaggtgcaggacggcggcagccccccccgggccagcagcgccctgctgcgggtgacagtgctggacaccaatgacaatgcccccaagtttgagcggcccagctatgaagctgagctgtctgagaacagccccatcggccacagcgtcatccaggtgaaggccaatgacagcgaccagggcgccaatgctgagattgagtacaccttccaccaggcccctgaggtggtgcggcggctgctgcggctggacaggaacacaggcctcatcaccgtgcagggccctgtggaccgggaggacctgagcaccctgcgcttctctgtgctggccaaggaccggggcaccaaccccaagagcgcccgggcccaggtggtggtgacagtgaaggacatgaatgacaatgcccccaccatcgagatccggggcatcggcctggtgacccaccaggacggcatggccaacatcagtgaagatgtggccgaggagacagctgtggccctggtgcaggtgtctgacagagatgaaggagaaaatgctgctgtgacctgtgtggtggccggagatgtgcccttccagctgcggcaggccagcgagaccggcagtgacagcaagaagaagtacttcctgcagaccaccacccccctggactatgagaaggtgaaggactacaccatcgagatcgtggccgtggacagcggcaacccccccctgagcagcaccaacagcctgaaggtgcaggtggtggatgtgaatgacaatgcccctgtgttcacccagagcgtgacagaggtggccttccctgagaacaacaagccaggagaggtgattgctgagatcacagccagtgatgctgacagcggcagcaatgctgagctggtgtacagcctggagcctgagcctgctgccaagggcctcttcaccatcagccctgagactggagagatccaggtgaagaccagcctggaccgggagcagcgggagagctatgagctgaaggtggtggccgctgaccggggcagccccagcctgcagggcacagccaccgtgctggtgaatgtgctggactgcaatgacaatgaccccaagttcatgctgagcggctacaacttctctgtgatggagaacatgcctgccctgagccctgtgggcatggtgacagtgattgatggagacaagggagaaaatgcccaggtgcagctgtctgtggagcaggacaatggagactttgtgatccagaatggcaccggcaccatcctgagcagcctgagctttgaccgggagcagcagagcacctacaccttccagctgaaggctgtggatggaggagtgcccccaagaagtgcctacgtgggcgtgaccatcaacgtgctggatgaaaatgacaatgccccctacatcacagcccccagcaacaccagccacaagctgctgaccccccagacccggctgggggagaccgtgtcccaggtggccgctgaggactttgacagcggcgtgaatgctgagctgatctacagcattgctgggggcaacccctacggcctcttccagatcggcagccacagcggggccatcaccctggagaaggagattgaaagaagacaccacggcctgcaccggctggtggtgaaggtgtctgaccggggcaagccacccaggtatggaacagccctggtgcacctgtatgtgaatgagaccctggccaacagaaccctgctggagaccctgctgggccacagcctggacacccccctggacatcgacattgctggggaccctgaatatgaaagaagcaagcagaggggcaacatcctgtttggagtggtggccggcgtggtggccgtggccctgctgattgccctggccgtgctggtgcgctactgccggcagcgggaggccaagagcggctaccaggccggcaagaaggagaccaaggacctgtatgcccccaagcccagcggcaaggccagcaaaggaaacaagagcaagggcaagaagagcaagagccccaagcctgtgaagcctgtggaggatgaagatgaagctggcctgcagaagagcctgaagttcaacctgatgtctgatgcccctggggacagcccccgcatccacctgcccctgaactacccacctggcagcccagacctgggccgccactaccgcagcaacagccccctgcccagcatccagctgcagccccagagccccagcgccagcaagaagcaccaggtggtgcaggacctgcccccagccaacacctttgtgggcaccggggacaccaccagcacaggcagcgagcagtacagcgactacagctaccgcaccaacccccccaagtaccccagcaagcaggtgggccagcccttccagctgagcaccccccagcccctgccccacccctaccatggagccatctggacagaggtgtgggagtag

SEQ ID NO: 166450 - DNA, 3123 bp, synthetic construct
  misc_feature 1..3123: note = Description of Artificial Sequence: Synthetic coding sequence
  source 1..3123: mol_type = other DNA
atgattgtgctgctgctgtttgccctgctgtggatggtggagggcgtcttcagccagctgcactacacagtgcaggaggagcaggagcacggcacctttgtgggcaacattgctgaggacctgggcctggacatcaccaagctgagcgcccggggcttccagacagtgcccaacagcaggaccccctacctggacctgaacctggagaccggggtgctgtatgtgaatgagaagattgaccgggagcagatctgcaagcagagccccagctgtgtgctgcacctggaggtgttcctggagaaccccctggagctgttccaggtggagattgaggtgctggacatcaatgacaaccccccatccttccctgagccagacctgactgtggagatcagcgagagcgccaccccaggcacccgcttccccctggagagcgcctttgatcctgatgtgggcaccaacagcctgcgggactatgagatcacccccaacagctacttcagcctggatgtgcagacccagggagatggcaacagatttgctgagctggtgctggagaagcccctggaccgggagcagcaggccgtgcacagatatgtgctgacagctgtggatggcggcggcggcggcggcgtgggggagggcggcggcggcggcggcggggccggcctgcccccccagcagcagaggactggaacagccctgctgaccatccgggtgctggacagcaatgacaacgtgcctgcctttgaccagcctgtgtacacagtgtccctgcctgagaacagccccccaggcaccctggtgatccagctgaatgccacagatcctgatgagggccagaatggagaggtggtgtacagcttcagcagccacatcagcccccgggcccgggagctgtttggcctgagccccaggacaggccgcctggaggtgtctggagagctggactatgaggagagccctgtgtaccaggtgtatgtgcaggccaaggacctgggccccaatgctgtgcctgcccactgcaaggtgctggtgcgggtgctggatgccaatgacaatgcccctgagatctccttcagcacagtgaaggaggccgtgtctgagggcgccgcccctggcaccgtggtggccctcttctctgtgacagaccgggacagtgaagaaaatggccaggtgcagtgtgagctgctgggagatgtgcccttccggctgaagagcagcttcaagaactactacaccatcgtgacagaggcccccctggaccgggaggccggggacagctacaccctgactgtggtggcccgggacagaggagagcccgccctgagcaccagcaagagcatccaggtgcaggtgtctgatgtgaatgacaatgccccccgcttcagccagcctgtgtatgatgtgtatgtgacagagaacaacgtgcctggggcctacatctatgctgtgtctgccacagacagagatgaaggagccaatgcccagctggcctacagcatcctggagtgccagatccagggcatgtctgtgttcacctacgtgtccatcaacagtgaaaatggctacctgtatgccctgcggagctttgattatgagcagctgaaggacttctccttccaggtggaggccagagatgctggcagcccccaggccctggccggaaatgccaccgtgaacatcctgattgtggaccagaatgacaatgccccagccatcgtggcccccctgcctggaagaaatggcaccccagcccgggaggtgctgcccaggtctgctgagcccggctacctgctgaccagggtggccgctgtggatgctgatgatggagaaaatgcccggctgacctacagcatcgtgagaggaaatgagatgaacctcttcaggatggactggaggactggagagctgaggacagcccggcgggtgcctgccaagagggacccccagaggccctatgagctggtgattgaggtgcgggaccacggccagccccccctgagcagcacagccaccctggtggtgcagctggtggatggagctgtggagccccagggcggcggcggcagcggcggcggcggcagcggggagcaccagaggcccagccgcagcggcggcggggagaccagcctggacctgaccctcatcctgatcatcgccctgggctctgtgtccttcatcttcctgctggccatgattgtgctggccgtgcgctgccagaaggagaagaagctgaacatctacacctgcctggccagtgactgctgcctgtgctgctgctgctgcggcggcggcggcagcacctgctgcggccggcaggcccgggccaggaagaagaagctgagcaagagtgacatcatgctggtgcagagcagcaatgtgcccagcaacccagcccaggtgcccatcgaggagagcggcggcttcggcagccaccaccacaaccagaactactgctaccaggtgtgcctgaccccagagagcgccaagacagacctgatgttcctgaagccctgcagccccagccgcagcacagacacagagcacaacccctgtggggccatcgtgacaggctacacagaccagcagcctgacatcatcagcaatggcagcatcctgagcaatgagaccaagcaccagagagctgagctgagctacctggtggaccggcccaggagagtgaacagcagcgccttccaggaggccgacatcgtgagcagcaaggacagcggccatggagacagcgagcagggcgacagcgaccatgatgccaccaacagagcccagagcgctggcatggacctcttcagcaactgcacagaggagtgcaaggccctgggccacagcgaccgctgctggatgcccagctttgtgcccagtgatggccggcaggccgctgactaccgcagcaacctgcacgtgcccggcatggacagcgtgcctgacacagaggtgtttgagaccccagaggcccagcccggggctgagaggagcttcagcaccttcggcaaggagaaggccctgcacagcaccctggagaggaaggagctggatggcctgctgaccaacacccgggccccctacaagccaccctacctgaccaggaagaggatctgctag

SEQ ID NO: 166451 - DNA, 3123 bp, synthetic construct
  misc_feature 1..3123: note = Description of Artificial Sequence: Synthetic coding sequence
  source 1..3123: mol_type = other DNA
atgattgtgctgctgctgtttgccctgctgtggatggtggagggcgtcttcagccagctgcactacacagtgcaggaggagcaggagcacggcacctttgtgggcaacattgctgaggacctgggcctggacatcaccaagctgagcgcccggggcttccagacagtgcccaacagcaggaccccctacctggacctgaacctggagaccggggtgctgtatgtgaatgagaagattgaccgggagcagatctgcaagcagagccccagctgtgtgctgcacctggaggtgttcctggagaaccccctggagctgttccaggtggagattgaggtgctggacatcaatgacaaccccccatccttccctgagccagacctgactgtggagatcagcgagagcgccaccccaggcacccgcttccccctggagagcgcctttgatcctgatgtgggcaccaacagcctgcgggactatgagatcacccccaacagctacttcagcctggatgtgcagacccagggagatggcaacagatttgctgagctggtgctggagaagcccctggaccgggagcagcaggccgtgcacagatatgtgctgacagctgtggatggcggcggcggcggcggcgtgggggagggcggcggcggcggcggcggggccggcctgcccccccagcagcagaggactggaacagccctgctgaccatccgggtgctggacagcaatgacaacgtgcctgcctttgaccagcctgtgtacacagtgtccctgcctgagaacagccccccaggcaccctggtgatccagctgaatgccacagatcctgatgagggccagaatggagaggtggtgtacagcttcagcagccacatcagcccccgggcccgggagctgtttggcctgagccccaggacaggccgcctggaggtgtctggagagctggactatgaggagagccctgtgtaccaggtgtatgtgcaggccaaggacctgggccccaatgctgtgcctgcccactgcaaggtgctggtgcgggtgctggatgccaatgacaatgcccctgagatctccttcagcacagtgaaggaggccgtgtctgagggcgccgcccctggcaccgtggtggccctcttctctgtgacagaccgggacagtgaagaaaatggccaggtgcagtgtgagctgctgggagatgtgcccttccggctgaagagcagcttcaagaactactacaccatcgtgacagaggcccccctggaccgggaggccggggacagctacaccctgactgtggtggcccgggacagaggagagcccgccctgagcaccagcaagagcatccaggtgcaggtgtctgatgtgaatgacaatgccccccgcttcagccagcctgtgtatgatgtgtatgtgacagagaacaacgtgcctggggcctacatctatgctgtgtctgccacagacagagatgaaggagccaatgcccagctggcctacagcatcctggagtgccagatccagggcatgtctgtgttcacctacgtgtccatcaacagtgaaaatggctacctgtatgccctgcggagctttgattatgagcagctgaaggacttctccttccaggtggaggccagagatgctggcagcccccaggccctggccggaaatgccaccgtgaacatcctgattgtggaccagaatgacaatgccccagccatcgtggcccccctgcctggaagaaatggcaccccagcccgggaggtgctgcccaggtctgctgagcccggctacctgctgaccagggtggccgctgtggatgctgatgatggagaaaatgcccggctgacctacagcatcgtgagaggaaatgagatgaacctcttcaggatggactggaggactggagagctgaggacagcccggcgggtgcctgccaagagggacccccagaggccctatgagctggtgattgaggtgcgggaccacggccagccccccctgagcagcacagccaccctggtggtgcagctggtggatggagctgtggagccccagggcggcggcggcagcggcggcggcggcagcggggagcaccagaggcccagccgcagcggcggcggggagaccagcctggacctgaccctcatcctgatcatcgccctgggctctgtgtccttcatcttcctgctggccatgattgtgctggccgtgcgctgccagaaggagaagaagctgaacatctacacctgcctggccagtgactgctgcctgtgctgctgctgctgcggcggcggcggcagcacctgctgcggccggcaggcccgggccaggaagaagaagctgagcaagagtgacatcatgctggtgcagagcagcaatgtgcccagcaacccagcccaggtgcccatcgaggagagcggcggcttcggcagccaccaccacaaccagaactactgctaccaggtgtgcctgaccccagagagcgccaagacagacctgatgttcctgaagccctgcagccccagccgcagcacagacacagagcacaacccctgtggggccatcgtgacaggctacacagaccagcagcctgacatcatcagcaatggcagcatcctgagcaatgagaccaagcaccagagagctgagctgagctacctggtggaccggcccaggagagtgaacagcagcgccttccaggaggccgacatcgtgagcagcaaggacagcggccatggagacagcgagcagggcgacagcgaccatgatgccaccaacagagcccagagcgctggcatggacctcttcagcaactgcacagaggagtgcaaggccctgggccacagcgaccgctgctggatgcccagctttgtgcccagtgatggccggcaggccgctgactaccgcagcaacctgcacgtgcccggcatggacagcgtgcctgacacagaggtgtttgagaccccagaggcccagcccggggctgagaggagcttcagcaccttcggcaaggagaaggccctgcacagcaccctggagaggaaggagctggatggcctgctgaccaacacccgggccccctacaagccaccctacctgaggaagaagcagcgctgctag

SEQ ID NO: 166452 - DNA, 3933 bp, synthetic construct
  misc_feature 1..3933: note = Description of Artificial Sequence: Synthetic coding sequence
  source 1..3933: mol_type = other DNA
atggacctgctgagcggcacctacatctttgctgtgctgctggcctgtgtggtgttccacagcggggcccaggagaagaactacaccatccgggaggagatgccagaaaatgtgctgattggagacctgctgaaggacctgaacctgagcctcatccccaacaagagcctgaccacagccatgcagttcaagctggtgtacaagacaggagatgtgcccctcatcagaattgaagaagatactggagagatcttcaccactggagccagaattgaccgggagaagctgtgtgccggcatccccagagatgagcactgcttctatgaggtggaggtggccatcctgcctgatgagatcttccggctggtgaagatccgcttcctgattgaggacatcaatgacaatgcccccctcttccctgccaccgtcatcaacatcagcatccctgagaacagcgccatcaacagcaagtacaccctgcctgctgctgtggaccctgatgtgggcatcaatggagtgcagaactatgagctgatcaagagccagaacatcttcggcctggatgtgattgagaccccagagggggacaagatgccccagctgattgtgcagaaggagctggaccgggaggagaaggacacctacgtgatgaaggtgaaggtggaggatggcggcttcccccagaggagcagcacagccatcctgcaggtgtctgtgacagacaccaatgacaaccaccctgtgttcaaggagacagaaattgaggtgtccatcccagaaaatgcccctgtgggcacctctgtgacccagctgcacgccacagatgctgacatcggggagaatgccaagatccacttctccttcagcaacctggtgagcaacatcgcccggcggctcttccacctgaatgccaccaccggcctcatcaccatcaaggagcccctggaccgggaggagacccccaaccacaagctgctggtgctggccagtgatggcggcctgatgcctgcccgggccatggtgctggtgaatgtgacagatgtgaatgacaacgtgcccagcattgacatccgctacatcgtgaaccctgtgaatgacacagtggtgctgtctgagaacatccccctgaacaccaagatcgccctgatcaccgtgacagacaaggatgctgaccacaacggccgggtgacctgcttcacagaccacgagatccccttccggctgcggcctgtgttcagcaaccagttcctgctggagacagctgcctacctggactatgagagcaccaaggagtatgccatcaagctgctggccgcagatgctgggaagccacccctgaaccagagcgccatgctgttcatcaaggtgaaggatgaaaatgacaatgcccctgtgttcacccagagctttgtgacagtgtccatccctgagaacaacagccctggcatccagctgaccaaggtgtctgccatggatgctgacagcggccccaatgccaagatcaactacctgctgggcccagatgcccctcctgagttcagcctggactgcaggacaggcatgctgactgtggtgaagaagctggaccgggagaaggaggacaagtacctgttcaccatcctggccaaggacaatggagtgccccccctgaccagcaatgtgacagtgtttgtgtccatcatcgaccagaatgacaacagccctgtgttcacccacaatgagtacaacttctacgtgcctgagaacctgcccaggcatggcaccgtgggcctcatcaccgtgacagatcctgactatggagacaacagcgctgtgaccctgagcatcctggatgaaaatgatgacttcaccatcgacagccagacaggagtcatccggcccaacatcagctttgaccgggagaagcaggagagctacaccttctacgtgaaggccgaggatggcggccgggtgagccgcagcagcagcgccaaggtgaccatcaacgtggtggatgtgaatgacaacaagcctgtgttcatcgtgccccccagcaactgcagctatgagctggtgctgcccagcaccaaccctggcaccgtggtgttccaggtgattgctgtggacaatgacaccggcatgaatgctgaggtgcgctacagcatcgtgggcggcaacacccgggacctgtttgccatcgaccaggagaccggcaacatcaccctgatggagaagtgtgatgtgacagacctgggcctgcaccgggtgctggtgaaggccaatgacctgggccagcctgacagcctcttctctgtggtgattgtgaacctgtttgtgaatgaatctgtgaccaatgccaccctcatcaatgagctggtgaggaagagcacagaggcccctgtgacccccaacacagaaattgctgatgtgagcagccccaccagtgactatgtgaagatcctggtggccgctgtggccggcaccatcaccgtggtggtggtgatcttcatcacagctgtggtgcgctgccggcaggccccccacctgaaggccgcccagaagaacaagcagaacagcgagtgggccacccccaaccctgagaaccggcagatgatcatgatgaagaagaagaagaagaagaagaagcacagccccaagaacctgctgctgaactttgtgaccatcgaggagaccaaggcagatgatgtggacagtgatggcaacagagtgaccctggacctgcccatcgacctggaggagcagaccatgggcaagtacaactgggtgaccacccccaccaccttcaagccagacagcccagacctggcccggcactacaagagcgccagcccccagcctgccttccagatccagcctgagacccccctgaacagcaagcaccacatcatccaggagctgcccctggacaacacctttgtggcctgtgacagcatcagcaagtgcagcagcagcagcagtgacccctacagcgtgtctgactgtggctaccctgtgaccacctttgaggtgcctgtgtctgtgcacacccggcccagccagaggagagtgaccttccacctgcctgagggcagccaggagagcagcagtgatggcggcctgggggaccatgatgctggcagcctgaccagcaccagccacggcctgcccctgggctacccccaggaggagtactttgaccgggccacccccagcaacagaacagaaggagatggcaacagcgaccctgagagcaccttcatccccaggagccccacagctgctgagatcaccgtgcagcccaccgtggaggaggccagtgacaactgcacccaggagtgcctgatctacggccacagtgatgcctgctggatgcctgccagcctggaccacagcagcagcagccaggcccaggccagcgccctgtgccacagcccccccctgagccaggccagcacccagcaccacagcccccgggtgacccagaccatcgccctgtgccacagcccccctgtgacccagaccatcgccctgtgccacagccccccacccatccaggtgtctgccctgcaccacagcccccccctggtgcaggccacagccctgcaccacagcccccccagcgcccaggccagcgccctgtgctacagcccccccctggcccaggccgccgccatcagccacagcagccccctgccccaggtgattgccctgcacaggagccaggcccagagctctgtgtccctgcagcagggctgggtgcagggcgcagatggcctgtgcagcgtggaccagggcgtgcagggcagcgccaccagccagttctacaccatgtctgagcggctgcaccccagtgatgacagcatcaaggtgatccccctgaccaccttcaccccccggcagcaggcccggcccagcagaggagacagccccatcatggaggagcaccccctgtag

SEQ ID NO: 166453 - DNA, 4044 bp, synthetic construct
  misc_feature 1..4044: note = Description of Artificial Sequence: Synthetic coding sequence
  source 1..4044: mol_type = other DNA
atggacctgctgagcggcacctacatctttgctgtgctgctggcctgtgtggtgttccacagcggggcccaggagaagaactacaccatccgggaggagatgccagaaaatgtgctgattggagacctgctgaaggacctgaacctgagcctcatccccaacaagagcctgaccacagccatgcagttcaagctggtgtacaagacaggagatgtgcccctcatcagaattgaagaagatactggagagatcttcaccactggagccagaattgaccgggagaagctgtgtgccggcatccccagagatgagcactgcttctatgaggtggaggtggccatcctgcctgatgagatcttccggctggtgaagatccgcttcctgattgaggacatcaatgacaatgcccccctcttccctgccaccgtcatcaacatcagcatccctgagaacagcgccatcaacagcaagtacaccctgcctgctgctgtggaccctgatgtgggcatcaatggagtgcagaactatgagctgatcaagagccagaacatcttcggcctggatgtgattgagaccccagagggggacaagatgccccagctgattgtgcagaaggagctggaccgggaggagaaggacacctacgtgatgaaggtgaaggtggaggatggcggcttcccccagaggagcagcacagccatcctgcaggtgtctgtgacagacaccaatgacaaccaccctgtgttcaaggagacagaaattgaggtgtccatcccagaaaatgcccctgtgggcacctctgtgacccagctgcacgccacagatgctgacatcggggagaatgccaagatccacttctccttcagcaacctggtgagcaacatcgcccggcggctcttccacctgaatgccaccaccggcctcatcaccatcaaggagcccctggaccgggaggagacccccaaccacaagctgctggtgctggccagtgatggcggcctgatgcctgcccgggccatggtgctggtgaatgtgacagatgtgaatgacaacgtgcccagcattgacatccgctacatcgtgaaccctgtgaatgacacagtggtgctgtctgagaacatccccctgaacaccaagatcgccctgatcaccgtgacagacaaggatgctgaccacaacggccgggtgacctgcttcacagaccacgagatccccttccggctgcggcctgtgttcagcaaccagttcctgctggagacagctgcctacctggactatgagagcaccaaggagtatgccatcaagctgctggccgcagatgctgggaagccacccctgaaccagagcgccatgctgttcatcaaggtgaaggatgaaaatgacaatgcccctgtgttcacccagagctttgtgacagtgtccatccctgagaacaacagccctggcatccagctgaccaaggtgtctgccatggatgctgacagcggccccaatgccaagatcaactacctgctgggcccagatgcccctcctgagttcagcctggactgcaggacaggcatgctgactgtggtgaagaagctggaccgggagaaggaggacaagtacctgttcaccatcctggccaaggacaatggagtgccccccctgaccagcaatgtgacagtgtttgtgtccatcatcgaccagaatgacaacagccctgtgttcacccacaatgagtacaacttctacgtgcctgagaacctgcccaggcatggcaccgtgggcctcatcaccgtgacagatcctgactatggagacaacagcgctgtgaccctgagcatcctggatgaaaatgatgacttcaccatcgacagccagacaggagtcatccggcccaacatcagctttgaccgggagaagcaggagagctacaccttctacgtgaaggccgaggatggcggccgggtgagccgcagcagcagcgccaaggtgaccatcaacgtggtggatgtgaatgacaacaagcctgtgttcatcgtgccccccagcaactgcagctatgagctggtgctgcccagcaccaaccctggcaccgtggtgttccaggtgattgctgtggacaatgacaccggcatgaatgctgaggtgcgctacagcatcgtgggcggcaacacccgggacctgtttgccatcgaccaggagaccggcaacatcaccctgatggagaagtgtgatgtgacagacctgggcctgcaccgggtgctggtgaaggccaatgacctgggccagcctgacagcctcttctctgtggtgattgtgaacctgtttgtgaatgaatctgtgaccaatgccaccctcatcaatgagctggtgaggaagagcacagaggcccctgtgacccccaacacagaaattgctgatgtgagcagccccaccagtgactatgtgaagatcctggtggccgctgtggccggcaccatcaccgtggtggtggtgatcttcatcacagctgtggtgcgctgccggcaggccccccacctgaaggccgcccagaagaacaagcagaacagcgagtgggccacccccaaccctgagaaccggcagatgatcatgatgaagaagaagaagaagaagaagaagcacagccccaagaacctgctgctgaactttgtgaccatcgaggagaccaaggcagatgatgtggacagtgatggcaacagagtgaccctggacctgcccatcgacctggaggagcagaccatgggcaagtacaactgggtgaccacccccaccaccttcaagccagacagcccagacctggcccggcactacaagagcgccagcccccagcctgccttccagatccagcctgagacccccctgaacagcaagcaccacatcatccaggagctgcccctggacaacacctttgtggcctgtgacagcatcagcaagtgcagcagcagcagcagtgacccctacagcgtgtctgactgtggctaccctgtgaccacctttgaggtgcctgtgtctgtgcacaccaggcctcccatgaaggaggtggtgcgcagctgcacccccatgaaggagagcaccaccatggagatctggatccacccccagccccagaggaagtctgagggcaaggtggccggcaagagccagaggagagtgaccttccacctgcctgagggcagccaggagagcagcagtgatggcggcctgggggaccatgatgctggcagcctgaccagcaccagccacggcctgcccctgggctacccccaggaggagtactttgaccgggccacccccagcaacagaacagaaggagatggcaacagcgaccctgagagcaccttcatccccaggagccccacagctgctgagatcaccgtgcagcccaccgtggaggaggccagtgacaactgcacccaggagtgcctgatctacggccacagtgatgcctgctggatgcctgccagcctggaccacagcagcagcagccaggcccaggccagcgccctgtgccacagcccccccctgagccaggccagcacccagcaccacagcccccgggtgacccagaccatcgccctgtgccacagcccccctgtgacccagaccatcgccctgtgccacagccccccacccatccaggtgtctgccctgcaccacagcccccccctggtgcaggccacagccctgcaccacagccccccatctgcccaggccagcgccctgtgctacagcccccccctggcccaggccgccgccatcagccacagcagccccctgccccaggtgattgccctgcacaggagccaggcccagagctctgtgtccctgcagcagggctgggtgcagggcgcagatggcctgtgcagcgtggaccagggcgtgcagggcagcgccaccagccagttctacaccatgtctgagcggctgcaccccagtgatgacagcatcaaggtgatccccctgaccaccttcaccccccggcagcaggcccggcccagcagaggagacagccccatcatggaggagcaccccctgtag

SEQ ID NO: 166454 - DNA, 3990 bp, synthetic construct
  misc_feature 1..3990: note = Description of Artificial Sequence: Synthetic coding sequence
  source 1..3990: mol_type = other DNA
atggacctgctgagcggcacctacatctttgctgtgctgctggcctgtgtggtgttccacagcggggcccaggagaagaactacaccatccgggaggagatgccagaaaatgtgctgattggagacctgctgaaggacctgaacctgagcctcatccccaacaagagcctgaccacagccatgcagttcaagctggtgtacaagacaggagatgtgcccctcatcagaattgaagaagatactggagagatcttcaccactggagccagaattgaccgggagaagctgtgtgccggcatccccagagatgagcactgcttctatgaggtggaggtggccatcctgcctgatgagatcttccggctggtgaagatccgcttcctgattgaggacatcaatgacaatgcccccctcttccctgccaccgtcatcaacatcagcatccctgagaacagcgccatcaacagcaagtacaccctgcctgctgctgtggaccctgatgtgggcatcaatggagtgcagaactatgagctgatcaagagccagaacatcttcggcctggatgtgattgagaccccagagggggacaagatgccccagctgattgtgcagaaggagctggaccgggaggagaaggacacctacgtgatgaaggtgaaggtggaggatggcggcttcccccagaggagcagcacagccatcctgcaggtgtctgtgacagacaccaatgacaaccaccctgtgttcaaggagacagaaattgaggtgtccatcccagaaaatgcccctgtgggcacctctgtgacccagctgcacgccacagatgctgacatcggggagaatgccaagatccacttctccttcagcaacctggtgagcaacatcgcccggcggctcttccacctgaatgccaccaccggcctcatcaccatcaaggagcccctggaccgggaggagacccccaaccacaagctgctggtgctggccagtgatggcggcctgatgcctgcccgggccatggtgctggtgaatgtgacagatgtgaatgacaacgtgcccagcattgacatccgctacatcgtgaaccctgtgaatgacacagtggtgctgtctgagaacatccccctgaacaccaagatcgccctgatcaccgtgacagacaaggatgctgaccacaacggccgggtgacctgcttcacagaccacgagatccccttccggctgcggcctgtgttcagcaaccagttcctgctggagacagctgcctacctggactatgagagcaccaaggagtatgccatcaagctgctggccgcagatgctgggaagccacccctgaaccagagcgccatgctgttcatcaaggtgaaggatgaaaatgacaatgcccctgtgttcacccagagctttgtgacagtgtccatccctgagaacaacagccctggcatccagctgaccaaggtgtctgccatggatgctgacagcggccccaatgccaagatcaactacctgctgggcccagatgcccctcctgagttcagcctggactgcaggacaggcatgctgactgtggtgaagaagctggaccgggagaaggaggacaagtacctgttcaccatcctggccaaggacaatggagtgccccccctgaccagcaatgtgacagtgtttgtgtccatcatcgaccagaatgacaacagccctgtgttcacccacaatgagtacaacttctacgtgcctgagaacctgcccaggcatggcaccgtgggcctcatcaccgtgacagatcctgactatggagacaacagcgctgtgaccctgagcatcctggatgaaaatgatgacttcaccatcgacagccagacaggagtcatccggcccaacatcagctttgaccgggagaagcaggagagctacaccttctacgtgaaggccgaggatggcggccgggtgagccgcagcagcagcgccaaggtgaccatcaacgtggtggatgtgaatgacaacaagcctgtgttcatcgtgccccccagcaactgcagctatgagctggtgctgcccagcaccaaccctggcaccgtggtgttccaggtgattgctgtggacaatgacaccggcatgaatgctgaggtgcgctacagcatcgtgggcggcaacacccgggacctgtttgccatcgaccaggagaccggcaacatcaccctgatggagaagtgtgatgtgacagacctgggcctgcaccgggtgctggtgaaggccaatgacctgggccagcctgacagcctcttctctgtggtgattgtgaacctgtttgtgaatgaatctgtgaccaatgccaccctcatcaatgagctggtgaggaagagcacagaggcccctgtgacccccaacacagaaattgctgatgtgagcagccccaccagtgactatgtgaagatcctggtggccgctgtggccggcaccatcaccgtggtggtggtgatcttcatcacagctgtggtgcgctgccggcaggccccccacctgaaggccgcccagaagaacaagcagaacagcgagtgggccacccccaaccctgagaaccggcagatgatcatgatgaagaagaagaagaagaagaagaagcacagccccaagaacctgctgctgaactttgtgaccatcgaggagaccaaggcagatgatgtggacagtgatggcaacagagtgaccctggacctgcccatcgacctggaggagcagaccatgggcaagtacaactgggtgaccacccccaccaccttcaagccagacagcccagacctggcccggcactacaagagcgccagcccccagcctgccttccagatccagcctgagacccccctgaacagcaagcaccacatcatccaggagctgcccctggacaacacctttgtggcctgtgacagcatcagcaagtgcagcagcagcagcagtgacccctacagcgtgtctgactgtggctaccctgtgaccacctttgaggtgcctgtgtctgtgcacaccaggcctcccatgaaggaggtggtgcgcagctgcacccccatgaaggagagcaccaccatggagatctggatccacccccagccccagagccagaggagagtgaccttccacctgcctgagggcagccaggagagcagcagtgatggcggcctgggggaccatgatgctggcagcctgaccagcaccagccacggcctgcccctgggctacccccaggaggagtactttgaccgggccacccccagcaacagaacagaaggagatggcaacagcgaccctgagagcacagctgagatcaccgtgcagcccaccgtggaggaggccagtgacaactgcacccaggagtgcctgatctacggccacagtgatgcctgctggatgcctgccagcctggaccacagcagcagcagccaggcccaggccagcgccctgtgccacagcccccccctgagccaggccagcacccagcaccacagcccccgggtgacccagaccatcgccctgtgccacagcccccctgtgacccagaccatcgccctgtgccacagccccccacccatccaggtgtctgccctgcaccacagcccccccctggtgcaggccacagccctgcaccacagccccccatctgcccaggccagcgccctgtgctacagcccccccctggcccaggccgccgccatcagccacagcagccccctgccccaggtgattgccctgcacaggagccaggcccagagctctgtgtccctgcagcagggctgggtgcagggcgcagatggcctgtgcagcgtggaccagggcgtgcagggcagcgccaccagccagttctacaccatgtctgagcggctgcaccccagtgatgacagcatcaaggtgatccccctgaccaccttcaccccccggcagcaggcccggcccagcagaggagacagccccatcatggaggagcaccccctgtag

SEQ ID NO: 166455 - DNA, 3066 bp, synthetic construct
  misc_feature 1..3066: note = Description of Artificial Sequence: Synthetic coding sequence
  source 1..3066: mol_type = other DNA
atggacctgctgagcggcacctacatctttgctgtgctgctggcctgtgtggtgttccacagcggggcccaggagaagaactacaccatccgggaggagatgccagaaaatgtgctgattggagacctgctgaaggacctgaacctgagcctcatccccaacaagagcctgaccacagccatgcagttcaagctggtgtacaagacaggagatgtgcccctcatcagaattgaagaagatactggagagatcttcaccactggagccagaattgaccgggagaagctgtgtgccggcatccccagagatgagcactgcttctatgaggtggaggtggccatcctgcctgatgagatcttccggctggtgaagatccgcttcctgattgaggacatcaatgacaatgcccccctcttccctgccaccgtcatcaacatcagcatccctgagaacagcgccatcaacagcaagtacaccctgcctgctgctgtggaccctgatgtgggcatcaatggagtgcagaactatgagctgatcaagagccagaacatcttcggcctggatgtgattgagaccccagagggggacaagatgccccagctgattgtgcagaaggagctggaccgggaggagaaggacacctacgtgatgaaggtgaaggtggaggatggcggcttcccccagaggagcagcacagccatcctgcaggtgtctgtgacagacaccaatgacaaccaccctgtgttcaaggagacagaaattgaggtgtccatcccagaaaatgcccctgtgggcacctctgtgacccagctgcacgccacagatgctgacatcggggagaatgccaagatccacttctccttcagcaacctggtgagcaacatcgcccggcggctcttccacctgaatgccaccaccggcctcatcaccatcaaggagcccctggaccgggaggagacccccaaccacaagctgctggtgctggccagtgatggcggcctgatgcctgcccgggccatggtgctggtgaatgtgacagatgtgaatgacaacgtgcccagcattgacatccgctacatcgtgaaccctgtgaatgacacagtggtgctgtctgagaacatccccctgaacaccaagatcgccctgatcaccgtgacagacaaggatgctgaccacaacggccgggtgacctgcttcacagaccacgagatccccttccggctgcggcctgtgttcagcaaccagttcctgctggagacagctgcctacctggactatgagagcaccaaggagtatgccatcaagctgctggccgcagatgctgggaagccacccctgaaccagagcgccatgctgttcatcaaggtgaaggatgaaaatgacaatgcccctgtgttcacccagagctttgtgacagtgtccatccctgagaacaacagccctggcatccagctgaccaaggtgtctgccatggatgctgacagcggccccaatgccaagatcaactacctgctgggcccagatgcccctcctgagttcagcctggactgcaggacaggcatgctgactgtggtgaagaagctggaccgggagaaggaggacaagtacctgttcaccatcctggccaaggacaatggagtgccccccctgaccagcaatgtgacagtgtttgtgtccatcatcgaccagaatgacaacagccctgtgttcacccacaatgagtacaacttctacgtgcctgagaacctgcccaggcatggcaccgtgggcctcatcaccgtgacagatcctgactatggagacaacagcgctgtgaccctgagcatcctggatgaaaatgatgacttcaccatcgacagccagacaggagtcatccggcccaacatcagctttgaccgggagaagcaggagagctacaccttctacgtgaaggccgaggatggcggccgggtgagccgcagcagcagcgccaaggtgaccatcaacgtggtggatgtgaatgacaacaagcctgtgttcatcgtgccccccagcaactgcagctatgagctggtgctgcccagcaccaaccctggcaccgtggtgttccaggtgattgctgtggacaatgacaccggcatgaatgctgaggtgcgctacagcatcgtgggcggcaacacccgggacctgtttgccatcgaccaggagaccggcaacatcaccctgatggagaagtgtgatgtgacagacctgggcctgcaccgggtgctggtgaaggccaatgacctgggccagcctgacagcctcttctctgtggtgattgtgaacctgtttgtgaatgaatctgtgaccaatgccaccctcatcaatgagctggtgaggaagagcacagaggcccctgtgacccccaacacagaaattgctgatgtgagcagccccaccagtgactatgtgaagatcctggtggccgctgtggccggcaccatcaccgtggtggtggtgatcttcatcacagctgtggtgcgctgccggcaggccccccacctgaaggccgcccagaagaacaagcagaacagcgagtgggccacccccaaccctgagaaccggcagatgatcatgatgaagaagaagaagaagaagaagaagcacagccccaagaacctgctgctgaactttgtgaccatcgaggagaccaaggcagatgatgtggacagtgatggcaacagagtgaccctggacctgcccatcgacctggaggagcagaccatgggcaagtacaactgggtgaccacccccaccaccttcaagccagacagcccagacctggcccggcactacaagagcgccagcccccagcctgccttccagatccagcctgagacccccctgaacagcaagcaccacatcatccaggagctgcccctggacaacacctttgtggcctgtgacagcatcagcaagtgcagcagcagcagcagtgacccctacagcgtgtctgactgtggctaccctgtgaccacctttgaggtgcctgtgtctgtgcacaccaggcctgtgggcatccaggtgagcaacaccaccttctag

SEQ ID NO: 166456 - DNA, 3933 bp, synthetic construct
  misc_feature 1..3933: note = Description of Artificial Sequence: Synthetic coding sequence
  source 1..3933: mol_type = other DNA
atggacctgctgagcggcacctacatctttgctgtgctgctggcctgtgtggtgttccacagcggggcccaggagaagaactacaccatccgggaggagatgccagaaaatgtgctgattggagacctgctgaaggacctgaacctgagcctcatccccaacaagagcctgaccacagccatgcagttcaagctggtgtacaagacaggagatgtgcccctcatcagaattgaagaagatactggagagatcttcaccactggagccagaattgaccgggagaagctgtgtgccggcatccccagagatgagcactgcttctatgaggtggaggtggccatcctgcctgatgagatcttccggctggtgaagatccgcttcctgattgaggacatcaatgacaatgcccccctcttccctgccaccgtcatcaacatcagcatccctgagaacagcgccatcaacagcaagtacaccctgcctgctgctgtggaccctgatgtgggcatcaatggagtgcagaactatgagctgatcaagagccagaacatcttcggcctggatgtgattgagaccccagagggggacaagatgccccagctgattgtgcagaaggagctggaccgggaggagaaggacacctacgtgatgaaggtgaaggtggaggatggcggcttcccccagaggagcagcacagccatcctgcaggtgtctgtgacagacaccaatgacaaccaccctgtgttcaaggagacagaaattgaggtgtccatcccagaaaatgcccctgtgggcacctctgtgacccagctgcacgccacagatgctgacatcggggagaatgccaagatccacttctccttcagcaacctggtgagcaacatcgcccggcggctcttccacctgaatgccaccaccggcctcatcaccatcaaggagcccctggaccgggaggagacccccaaccacaagctgctggtgctggccagtgatggcggcctgatgcctgcccgggccatggtgctggtgaatgtgacagatgtgaatgacaacgtgcccagcattgacatccgctacatcgtgaaccctgtgaatgacacagtggtgctgtctgagaacatccccctgaacaccaagatcgccctgatcaccgtgacagacaaggatgctgaccacaacggccgggtgacctgcttcacagaccacgagatccccttccggctgcggcctgtgttcagcaaccagttcctgctggagacagctgcctacctggactatgagagcaccaaggagtatgccatcaagctgctggccgcagatgctgggaagccacccctgaaccagagcgccatgctgttcatcaaggtgaaggatgaaaatgacaatgcccctgtgttcacccagagctttgtgacagtgtccatccctgagaacaacagccctggcatccagctgaccaaggtgtctgccatggatgctgacagcggccccaatgccaagatcaactacctgctgggcccagatgcccctcctgagttcagcctggactgcaggacaggcatgctgactgtggtgaagaagctggaccgggagaaggaggacaagtacctgttcaccatcctggccaaggacaatggagtgccccccctgaccagcaatgtgacagtgtttgtgtccatcatcgaccagaatgacaacagccctgtgttcacccacaatgagtacaacttctacgtgcctgagaacctgcccaggcatggcaccgtgggcctcatcaccgtgacagatcctgactatggagacaacagcgctgtgaccctgagcatcctggatgaaaatgatgacttcaccatcgacagccagacaggagtcatccggcccaacatcagctttgaccgggagaagcaggagagctacaccttctacgtgaaggccgaggatggcggccgggtgagccgcagcagcagcgccaaggtgaccatcaacgtggtggatgtgaatgacaacaagcctgtgttcatcgtgccccccagcaactgcagctatgagctggtgctgcccagcaccaaccctggcaccgtggtgttccaggtgattgctgtggacaatgacaccggcatgaatgctgaggtgcgctacagcatcgtgggcggcaacacccgggacctgtttgccatcgaccaggagaccggcaacatcaccctgatggagaagtgtgatgtgacagacctgggcctgcaccgggtgctggtgaaggccaatgacctgggccagcctgacagcctcttctctgtggtgattgtgaacctgtttgtgaatgaatctgtgaccaatgccaccctcatcaatgagctggtgaggaagagcacagaggcccctgtgacccccaacacagaaattgctgatgtgagcagccccaccagtgactatgtgaagatcctggtggccgctgtggccggcaccatcaccgtggtggtggtgatcttcatcacagctgtggtgcgctgccggcaggccccccacctgaaggccgcccagaagaacaagcagaacagcgagtgggccacccccaaccctgagaaccggcagatgatcatgatgaagaagaagaagaagaagaagaagcacagccccaagaacctgctgctgaactttgtgaccatcgaggagaccaaggcagatgatgtggacagtgatggcaacagagtgaccctggacctgcccatcgacctggaggagcagaccatgggcaagtacaactgggtgaccacccccaccaccttcaagccagacagcccagacctggcccggcactacaagagcgccagcccccagcctgccttccagatccagcctgagacccccctgaacagcaagcaccacatcatccaggagctgcccctggacaacacctttgtggcctgtgacagcatcagcaagtgcagcagcagcagcagtgacccctacagcgtgtctgactgtggctaccctgtgaccacctttgaggtgcctgtgtctgtgcacacccggcccagccagaggagagtgaccttccacctgcctgagggcagccaggagagcagcagtgatggcggcctgggggaccatgatgctggcagcctgaccagcaccagccacggcctgcccctgggctacccccaggaggagtactttgaccgggccacccccagcaacagaacagaaggagatggcaacagcgaccctgagagcaccttcatccctggcctgaagaaggctgctgagatcaccgtgcagcccaccgtggaggaggccagtgacaactgcacccaggagtgcctgatctacggccacagtgatgcctgctggatgcctgccagcctggaccacagcagcagcagccaggcccaggccagcgccctgtgccacagcccccccctgagccaggccagcacccagcaccacagcccccgggtgacccagaccatcgccctgtgccacagcccccctgtgacccagaccatcgccctgtgccacagccccccacccatccaggtgtctgccctgcaccacagcccccccctggtgcaggccacagccctgcaccacagcccccccagcgcccaggccagcgccctgtgctacagcccccccctggcccaggccgccgccatcagccacagcagccccctgccccaggtgattgccctgcacaggagccaggcccagagctctgtgtccctgcagcagggctgggtgcagggcgcagatggcctgtgcagcgtggaccagggcgtgcagggcagcgccaccagccagttctacaccatgtctgagcggctgcaccccagtgatgacagcatcaaggtgatccccctgaccaccttcaccccccggcagcaggcccggcccagcagaggagacagccccatcatggaggagcaccccctgtag

SEQ ID NO: 166457 - DNA, 4044 bp, synthetic construct
  misc_feature 1..4044: note = Description of Artificial Sequence: Synthetic coding sequence
  source 1..4044: mol_type = other DNA
atggacctgctgagcggcacctacatctttgctgtgctgctggcctgtgtggtgttccacagcggggcccaggagaagaactacaccatccgggaggagatgccagaaaatgtgctgattggagacctgctgaaggacctgaacctgagcctcatccccaacaagagcctgaccacagccatgcagttcaagctggtgtacaagacaggagatgtgcccctcatcagaattgaagaagatactggagagatcttcaccactggagccagaattgaccgggagaagctgtgtgccggcatccccagagatgagcactgcttctatgaggtggaggtggccatcctgcctgatgagatcttccggctggtgaagatccgcttcctgattgaggacatcaatgacaatgcccccctcttccctgccaccgtcatcaacatcagcatccctgagaacagcgccatcaacagcaagtacaccctgcctgctgctgtggaccctgatgtgggcatcaatggagtgcagaactatgagctgatcaagagccagaacatcttcggcctggatgtgattgagaccccagagggggacaagatgccccagctgattgtgcagaaggagctggaccgggaggagaaggacacctacgtgatgaaggtgaaggtggaggatggcggcttcccccagaggagcagcacagccatcctgcaggtgtctgtgacagacaccaatgacaaccaccctgtgttcaaggagacagaaattgaggtgtccatcccagaaaatgcccctgtgggcacctctgtgacccagctgcacgccacagatgctgacatcggggagaatgccaagatccacttctccttcagcaacctggtgagcaacatcgcccggcggctcttccacctgaatgccaccaccggcctcatcaccatcaaggagcccctggaccgggaggagacccccaaccacaagctgctggtgctggccagtgatggcggcctgatgcctgcccgggccatggtgctggtgaatgtgacagatgtgaatgacaacgtgcccagcattgacatccgctacatcgtgaaccctgtgaatgacacagtggtgctgtctgagaacatccccctgaacaccaagatcgccctgatcaccgtgacagacaaggatgctgaccacaacggccgggtgacctgcttcacagaccacgagatccccttccggctgcggcctgtgttcagcaaccagttcctgctggagacagctgcctacctggactatgagagcaccaaggagtatgccatcaagctgctggccgcagatgctgggaagccacccctgaaccagagcgccatgctgttcatcaaggtgaaggatgaaaatgacaatgcccctgtgttcacccagagctttgtgacagtgtccatccctgagaacaacagccctggcatccagctgaccaaggtgtctgccatggatgctgacagcggccccaatgccaagatcaactacctgctgggcccagatgcccctcctgagttcagcctggactgcaggacaggcatgctgactgtggtgaagaagctggaccgggagaaggaggacaagtacctgttcaccatcctggccaaggacaatggagtgccccccctgaccagcaatgtgacagtgtttgtgtccatcatcgaccagaatgacaacagccctgtgttcacccacaatgagtacaacttctacgtgcctgagaacctgcccaggcatggcaccgtgggcctcatcaccgtgacagatcctgactatggagacaacagcgctgtgaccctgagcatcctggatgaaaatgatgacttcaccatcgacagccagacaggagtcatccggcccaacatcagctttgaccgggagaagcaggagagctacaccttctacgtgaaggccgaggatggcggccgggtgagccgcagcagcagcgccaaggtgaccatcaacgtggtggatgtgaatgacaacaagcctgtgttcatcgtgccccccagcaactgcagctatgagctggtgctgcccagcaccaaccctggcaccgtggtgttccaggtgattgctgtggacaatgacaccggcatgaatgctgaggtgcgctacagcatcgtgggcggcaacacccgggacctgtttgccatcgaccaggagaccggcaacatcaccctgatggagaagtgtgatgtgacagacctgggcctgcaccgggtgctggtgaaggccaatgacctgggccagcctgacagcctcttctctgtggtgattgtgaacctgtttgtgaatgaatctgtgaccaatgccaccctcatcaatgagctggtgaggaagagcacagaggcccctgtgacccccaacacagaaattgctgatgtgagcagccccaccagtgactatgtgaagatcctggtggccgctgtggccggcaccatcaccgtggtggtggtgatcttcatcacagctgtggtgcgctgccggcaggccccccacctgaaggccgcccagaagaacaagcagaacagcgagtgggccacccccaaccctgagaaccggcagatgatcatgatgaagaagaagaagaagaagaagaagcacagccccaagaacctgctgctgaactttgtgaccatcgaggagaccaaggcagatgatgtggacagtgatggcaacagagtgaccctggacctgcccatcgacctggaggagcagaccatgggcaagtacaactgggtgaccacccccaccaccttcaagccagacagcccagacctggcccggcactacaagagcgccagcccccagcctgccttccagatccagcctgagacccccctgaacagcaagcaccacatcatccaggagctgcccctggacaacacctttgtggcctgtgacagcatcagcaagtgcagcagcagcagcagtgacccctacagcgtgtctgactgtggctaccctgtgaccacctttgaggtgcctgtgtctgtgcacaccaggcctcccatgaaggaggtggtgcgcagctgcacccccatgaaggagagcaccaccatggagatctggatccacccccagccccagaggaagtctgagggcaaggtggccggcaagagccagaggagagtgaccttccacctgcctgagggcagccaggagagcagcagtgatggcggcctgggggaccatgatgctggcagcctgaccagcaccagccacggcctgcccctgggctacccccaggaggagtactttgaccgggccacccccagcaacagaacagaaggagatggcaacagcgaccctgagagcaccttcatccctggcctgaagaaggctgctgagatcaccgtgcagcccaccgtggaggaggccagtgacaactgcacccaggagtgcctgatctacggccacagtgatgcctgctggatgcctgccagcctggaccacagcagcagcagccaggcccaggccagcgccctgtgccacagcccccccctgagccaggccagcacccagcaccacagcccccgggtgacccagaccatcgccctgtgccacagcccccctgtgacccagaccatcgccctgtgccacagccccccacccatccaggtgtctgccctgcaccacagcccccccctggtgcaggccacagccctgcaccacagccccccatctgcccaggccagcgccctgtgctacagcccccccctggcccaggccgccgccatcagccacagcagccccctgccccaggtgattgccctgcacaggagccaggcccagagctctgtgtccctgcagcagggctgggtgcagggcgcagatggcctgtgcagcgtggaccagggcgtgcagggcagcgccaccagccagttctacaccatgtctgagcggctgcaccccagtgatgacagcatcaaggtgatccccctgaccaccttcaccccccggcagcaggcccggcccagcagaggagacagccccatcatggaggagcaccccctgtag

SEQ ID NO: 166458 - DNA, 4014 bp, synthetic construct
  misc_feature 1..4014: note = Description of Artificial Sequence: Synthetic coding sequence
  source 1..4014: mol_type = other DNA
atggacctgctgagcggcacctacatctttgctgtgctgctggcctgtgtggtgttccacagcggggcccaggagaagaactacaccatccgggaggagatgccagaaaatgtgctgattggagacctgctgaaggacctgaacctgagcctcatccccaacaagagcctgaccacagccatgcagttcaagctggtgtacaagacaggagatgtgcccctcatcagaattgaagaagatactggagagatcttcaccactggagccagaattgaccgggagaagctgtgtgccggcatccccagagatgagcactgcttctatgaggtggaggtggccatcctgcctgatgagatcttccggctggtgaagatccgcttcctgattgaggacatcaatgacaatgcccccctcttccctgccaccgtcatcaacatcagcatccctgagaacagcgccatcaacagcaagtacaccctgcctgctgctgtggaccctgatgtgggcatcaatggagtgcagaactatgagctgatcaagagccagaacatcttcggcctggatgtgattgagaccccagagggggacaagatgccccagctgattgtgcagaaggagctggaccgggaggagaaggacacctacgtgatgaaggtgaaggtggaggatggcggcttcccccagaggagcagcacagccatcctgcaggtgtctgtgacagacaccaatgacaaccaccctgtgttcaaggagacagaaattgaggtgtccatcccagaaaatgcccctgtgggcacctctgtgacccagctgcacgccacagatgctgacatcggggagaatgccaagatccacttctccttcagcaacctggtgagcaacatcgcccggcggctcttccacctgaatgccaccaccggcctcatcaccatcaaggagcccctggaccgggaggagacccccaaccacaagctgctggtgctggccagtgatggcggcctgatgcctgcccgggccatggtgctggtgaatgtgacagatgtgaatgacaacgtgcccagcattgacatccgctacatcgtgaaccctgtgaatgacacagtggtgctgtctgagaacatccccctgaacaccaagatcgccctgatcaccgtgacagacaaggatgctgaccacaacggccgggtgacctgcttcacagaccacgagatccccttccggctgcggcctgtgttcagcaaccagttcctgctggagacagctgcctacctggactatgagagcaccaaggagtatgccatcaagctgctggccgcagatgctgggaagccacccctgaaccagagcgccatgctgttcatcaaggtgaaggatgaaaatgacaatgcccctgtgttcacccagagctttgtgacagtgtccatccctgagaacaacagccctggcatccagctgaccaaggtgtctgccatggatgctgacagcggccccaatgccaagatcaactacctgctgggcccagatgcccctcctgagttcagcctggactgcaggacaggcatgctgactgtggtgaagaagctggaccgggagaaggaggacaagtacctgttcaccatcctggccaaggacaatggagtgccccccctgaccagcaatgtgacagtgtttgtgtccatcatcgaccagaatgacaacagccctgtgttcacccacaatgagtacaacttctacgtgcctgagaacctgcccaggcatggcaccgtgggcctcatcaccgtgacagatcctgactatggagacaacagcgctgtgaccctgagcatcctggatgaaaatgatgacttcaccatcgacagccagacaggagtcatccggcccaacatcagctttgaccgggagaagcaggagagctacaccttctacgtgaaggccgaggatggcggccgggtgagccgcagcagcagcgccaaggtgaccatcaacgtggtggatgtgaatgacaacaagcctgtgttcatcgtgccccccagcaactgcagctatgagctggtgctgcccagcaccaaccctggcaccgtggtgttccaggtgattgctgtggacaatgacaccggcatgaatgctgaggtgcgctacagcatcgtgggcggcaacacccgggacctgtttgccatcgaccaggagaccggcaacatcaccctgatggagaagtgtgatgtgacagacctgggcctgcaccgggtgctggtgaaggccaatgacctgggccagcctgacagcctcttctctgtggtgattgtgaacctgtttgtgaatgaatctgtgaccaatgccaccctcatcaatgagctggtgaggaagagcacagaggcccctgtgacccccaacacagaaattgctgatgtgagcagccccaccagtgactatgtgaagatcctggtggccgctgtggccggcaccatcaccgtggtggtggtgatcttcatcacagctgtggtgcgctgccggcaggccccccacctgaaggccgcccagaagaacaagcagaacagcgagtgggccacccccaaccctgagaaccggcagatgatcatgatgaagaagaagaagaagaagaagaagcacagccccaagaacctgctgctgaactttgtgaccatcgaggagaccaaggcagatgatgtggacagtgatggcaacagagtgaccctggacctgcccatcgacctggaggagcagaccatgggcaagtacaactgggtgaccacccccaccaccttcaagccagacagcccagacctggcccggcactacaagagcgccagcccccagcctgccttccagatccagcctgagacccccctgaacagcaagcaccacatcatccaggagctgcccctggacaacacctttgtggcctgtgacagcatcagcaagtgcagcagcagcagcagtgacccctacagcgtgtctgactgtggctaccctgtgaccacctttgaggtgcctgtgtctgtgcacaccaggcctcccatgaaggaggtggtgcgcagctgcacccccatgaaggagagcaccaccatggagatctggatccacccccagccccagagccagaggagagtgaccttccacctgcctgagggcagccaggagagcagcagtgatggcggcctgggggaccatgatgctggcagcctgaccagcaccagccacggcctgcccctgggctacccccaggaggagtactttgaccgggccacccccagcaacagaacagaaggagatggcaacagcgaccctgagagcaccttcatccctggcctgaagaaggctgctgagatcaccgtgcagcccaccgtggaggaggccagtgacaactgcacccaggagtgcctgatctacggccacagtgatgcctgctggatgcctgccagcctggaccacagcagcagcagccaggcccaggccagcgccctgtgccacagcccccccctgagccaggccagcacccagcaccacagcccccgggtgacccagaccatcgccctgtgccacagcccccctgtgacccagaccatcgccctgtgccacagccccccacccatccaggtgtctgccctgcaccacagcccccccctggtgcaggccacagccctgcaccacagccccccatctgcccaggccagcgccctgtgctacagcccccccctggcccaggccgccgccatcagccacagcagccccctgccccaggtgattgccctgcacaggagccaggcccagagctctgtgtccctgcagcagggctgggtgcagggcgcagatggcctgtgcagcgtggaccagggcgtgcagggcagcgccaccagccagttctacaccatgtctgagcggctgcaccccagtgatgacagcatcaaggtgatccccctgaccaccttcaccccccggcagcaggcccggcccagcagaggagacagccccatcatggaggagcaccccctgtag

SEQ ID NO: 166459 - DNA, 3078 bp, synthetic construct
  misc_feature 1..3078: note = Description of Artificial Sequence: Synthetic coding sequence
  source 1..3078: mol_type = other DNA
atggacctgctgagcggcacctacatctttgctgtgctgctggcctgtgtggtgttccacagcggggcccaggagaagaactacaccatccgggaggagatgccagaaaatgtgctgattggagacctgctgaaggacctgaacctgagcctcatccccaacaagagcctgaccacagccatgcagttcaagctggtgtacaagacaggagatgtgcccctcatcagaattgaagaagatactggagagatcttcaccactggagccagaattgaccgggagaagctgtgtgccggcatccccagagatgagcactgcttctatgaggtggaggtggccatcctgcctgatgagatcttccggctggtgaagatccgcttcctgattgaggacatcaatgacaatgcccccctcttccctgccaccgtcatcaacatcagcatccctgagaacagcgccatcaacagcaagtacaccctgcctgctgctgtggaccctgatgtgggcatcaatggagtgcagaactatgagctgatcaagagccagaacatcttcggcctggatgtgattgagaccccagagggggacaagatgccccagctgattgtgcagaaggagctggaccgggaggagaaggacacctacgtgatgaaggtgaaggtggaggatggcggcttcccccagaggagcagcacagccatcctgcaggtgtctgtgacagacaccaatgacaaccaccctgtgttcaaggagacagaaattgaggtgtccatcccagaaaatgcccctgtgggcacctctgtgacccagctgcacgccacagatgctgacatcggggagaatgccaagatccacttctccttcagcaacctggtgagcaacatcgcccggcggctcttccacctgaatgccaccaccggcctcatcaccatcaaggagcccctggaccgggaggagacccccaaccacaagctgctggtgctggccagtgatggcggcctgatgcctgcccgggccatggtgctggtgaatgtgacagatgtgaatgacaacgtgcccagcattgacatccgctacatcgtgaaccctgtgaatgacacagtggtgctgtctgagaacatccccctgaacaccaagatcgccctgatcaccgtgacagacaaggatgctgaccacaacggccgggtgacctgcttcacagaccacgagatccccttccggctgcggcctgtgttcagcaaccagttcctgctggagacagctgcctacctggactatgagagcaccaaggagtatgccatcaagctgctggccgcagatgctgggaagccacccctgaaccagagcgccatgctgttcatcaaggtgaaggatgaaaatgacaatgcccctgtgttcacccagagctttgtgacagtgtccatccctgagaacaacagccctggcatccagctgaccaaggtgtctgccatggatgctgacagcggccccaatgccaagatcaactacctgctgggcccagatgcccctcctgagttcagcctggactgcaggacaggcatgctgactgtggtgaagaagctggaccgggagaaggaggacaagtacctgttcaccatcctggccaaggacaatggagtgccccccctgaccagcaatgtgacagtgtttgtgtccatcatcgaccagaatgacaacagccctgtgttcacccacaatgagtacaacttctacgtgcctgagaacctgcccaggcatggcaccgtgggcctcatcaccgtgacagatcctgactatggagacaacagcgctgtgaccctgagcatcctggatgaaaatgatgacttcaccatcgacagccagacaggagtcatccggcccaacatcagctttgaccgggagaagcaggagagctacaccttctacgtgaaggccgaggatggcggccgggtgagccgcagcagcagcgccaaggtgaccatcaacgtggtggatgtgaatgacaacaagcctgtgttcatcgtgccccccagcaactgcagctatgagctggtgctgcccagcaccaaccctggcaccgtggtgttccaggtgattgctgtggacaatgacaccggcatgaatgctgaggtgcgctacagcatcgtgggcggcaacacccgggacctgtttgccatcgaccaggagaccggcaacatcaccctgatggagaagtgtgatgtgacagacctgggcctgcaccgggtgctggtgaaggccaatgacctgggccagcctgacagcctcttctctgtggtgattgtgaacctgtttgtgaatgaatctgtgaccaatgccaccctcatcaatgagctggtgaggaagagcacagaggcccctgtgacccccaacacagaaattgctgatgtgagcagccccaccagtgactatgtgaagatcctggtggccgctgtggccggcaccatcaccgtggtggtggtgatcttcatcacagctgtggtgcgctgccggcaggccccccacctgaaggccgcccagaagaacaagcagaacagcgagtgggccacccccaaccctgagaaccggcagatgatcatgatgaagaagaagaagaagaagaagaagcacagccccaagaacctgctgctgaactttgtgaccatcgaggagaccaaggcagatgatgtggacagtgatggcaacagagtgaccctggacctgcccatcgacctggaggagcagaccatgggcaagtacaactgggtgaccacccccaccaccttcaagccagacagcccagacctggcccggcactacaagagcgccagcccccagcctgccttccagatccagcctgagacccccctgaacagcaagcaccacatcatccaggagctgcccctggacaacacctttgtggcctgtgacagcatcagcaagtgcagcagcagcagcagtgacccctacagcgtgtctgactgtggctaccctgtgaccacctttgaggtgcctgtgtctgtgcacacccggcccacagacagcaggaccagcaccatcgagatctgcagcgagatctag

SEQ ID NO: 166460 - DNA, 4020 bp, synthetic construct
  misc_feature 1..4020: note = Description of Artificial Sequence: Synthetic coding sequence
  source 1..4020: mol_type = other DNA
atggacctgctgagcggcacctacatctttgctgtgctgctggcctgtgtggtgttccacagcggggcccaggagaagaactacaccatccgggaggagatgccagaaaatgtgctgattggagacctgctgaaggacctgaacctgagcctcatccccaacaagagcctgaccacagccatgcagttcaagctggtgtacaagacaggagatgtgcccctcatcagaattgaagaagatactggagagatcttcaccactggagccagaattgaccgggagaagctgtgtgccggcatccccagagatgagcactgcttctatgaggtggaggtggccatcctgcctgatgagatcttccggctggtgaagatccgcttcctgattgaggacatcaatgacaatgcccccctcttccctgccaccgtcatcaacatcagcatccctgagaacagcgccatcaacagcaagtacaccctgcctgctgctgtggaccctgatgtgggcatcaatggagtgcagaactatgagctgatcaagagccagaacatcttcggcctggatgtgattgagaccccagagggggacaagatgccccagctgattgtgcagaaggagctggaccgggaggagaaggacacctacgtgatgaaggtgaaggtggaggatggcggcttcccccagaggagcagcacagccatcctgcaggtgtctgtgacagacaccaatgacaaccaccctgtgttcaaggagacagaaattgaggtgtccatcccagaaaatgcccctgtgggcacctctgtgacccagctgcacgccacagatgctgacatcggggagaatgccaagatccacttctccttcagcaacctggtgagcaacatcgcccggcggctcttccacctgaatgccaccaccggcctcatcaccatcaaggagcccctggaccgggaggagacccccaaccacaagctgctggtgctggccagtgatggcggcctgatgcctgcccgggccatggtgctggtgaatgtgacagatgtgaatgacaacgtgcccagcattgacatccgctacatcgtgaaccctgtgaatgacacagtggtgctgtctgagaacatccccctgaacaccaagatcgccctgatcaccgtgacagacaaggatgctgaccacaacggccgggtgacctgcttcacagaccacgagatccccttccggctgcggcctgtgttcagcaaccagttcctgctggagacagctgcctacctggactatgagagcaccaaggagtatgccatcaagctgctggccgcagatgctgggaagccacccctgaaccagagcgccatgctgttcatcaaggtgaaggatgaaaatgacaatgcccctgtgttcacccagagctttgtgacagtgtccatccctgagaacaacagccctggcatccagctgaccaaggtgtctgccatggatgctgacagcggccccaatgccaagatcaactacctgctgggcccagatgcccctcctgagttcagcctggactgcaggacaggcatgctgactgtggtgaagaagctggaccgggagaaggaggacaagtacctgttcaccatcctggccaaggacaatggagtgccccccctgaccagcaatgtgacagtgtttgtgtccatcatcgaccagaatgacaacagccctgtgttcacccacaatgagtacaacttctacgtgcctgagaacctgcccaggcatggcaccgtgggcctcatcaccgtgacagatcctgactatggagacaacagcgctgtgaccctgagcatcctggatgaaaatgatgacttcaccatcgacagccagacaggagtcatccggcccaacatcagctttgaccgggagaagcaggagagctacaccttctacgtgaaggccgaggatggcggccgggtgagccgcagcagcagcgccaaggtgaccatcaacgtggtggatgtgaatgacaacaagcctgtgttcatcgtgccccccagcaactgcagctatgagctggtgctgcccagcaccaaccctggcaccgtggtgttccaggtgattgctgtggacaatgacaccggcatgaatgctgaggtgcgctacagcatcgtgggcggcaacacccgggacctgtttgccatcgaccaggagaccggcaacatcaccctgatggagaagtgtgatgtgacagacctgggcctgcaccgggtgctggtgaaggccaatgacctgggccagcctgacagcctcttctctgtggtgattgtgaacctgtttgtgaatgaatctgtgaccaatgccaccctcatcaatgagctggtgaggaagagcacagaggcccctgtgacccccaacacagaaattgctgatgtgagcagccccaccagtgactatgtgaagatcctggtggccgctgtggccggcaccatcaccgtggtggtggtgatcttcatcacagctgtggtgcgctgccggcaggccccccacctgaaggccgcccagaagaacaagcagaacagcgagtgggccacccccaaccctgagaaccggcagatgatcatgatgaagaagaagaagaagaagaagaagcacagccccaagaacctgctgctgaactttgtgaccatcgaggagaccaaggcagatgatgtggacagtgatggcaacagagtgaccctggacctgcccatcgacctggaggagcagaccatgggcaagtacaactgggtgaccacccccaccaccttcaagccagacagcccagacctggcccggcactacaagagcgccagcccccagcctgccttccagatccagcctgagacccccctgaacagcaagcaccacatcatccaggagctgcccctggacaacacctttgtggcctgtgacagcatcagcaagtgcagcagcagcagcagtgacccctacagcgtgtctgactgtggctaccctgtgaccacctttgaggtgcctgtgtctgtgcacaccaggcctcccatgaaggaggtggtgcgcagctgcacccccatgaaggagagcaccaccatggagatctggatccacccccagccccagaggaagtctgagggcaaggtggccggcaagagccagaggagagtgaccttccacctgcctgagggcagccaggagagcagcagtgatggcggcctgggggaccatgatgctggcagcctgaccagcaccagccacggcctgcccctgggctacccccaggaggagtactttgaccgggccacccccagcaacagaacagaaggagatggcaacagcgaccctgagagcacagctgagatcaccgtgcagcccaccgtggaggaggccagtgacaactgcacccaggagtgcctgatctacggccacagtgatgcctgctggatgcctgccagcctggaccacagcagcagcagccaggcccaggccagcgccctgtgccacagcccccccctgagccaggccagcacccagcaccacagcccccgggtgacccagaccatcgccctgtgccacagcccccctgtgacccagaccatcgccctgtgccacagccccccacccatccaggtgtctgccctgcaccacagcccccccctggtgcaggccacagccctgcaccacagccccccatctgcccaggccagcgccctgtgctacagcccccccctggcccaggccgccgccatcagccacagcagccccctgccccaggtgattgccctgcacaggagccaggcccagagctctgtgtccctgcagcagggctgggtgcagggcgcagatggcctgtgcagcgtggaccagggcgtgcagggcagcgccaccagccagttctacaccatgtctgagcggctgcaccccagtgatgacagcatcaaggtgatccccctgaccaccttcaccccccggcagcaggcccggcccagcagaggagacagccccatcatggaggagcaccccctgtag

SEQ ID NO: 166461 - DNA, 3198 bp, synthetic construct
  misc_feature 1..3198: note = Description of Artificial Sequence: Synthetic coding sequence
  source 1..3198: mol_type = other DNA
atggacctgctgagcggcacctacatctttgctgtgctgctggcctgtgtggtgttccacagcggggcccaggagaagaactacaccatccgggaggagatgccagaaaatgtgctgattggagacctgctgaaggacctgaacctgagcctcatccccaacaagagcctgaccacagccatgcagttcaagctggtgtacaagacaggagatgtgcccctcatcagaattgaagaagatactggagagatcttcaccactggagccagaattgaccgggagaagctgtgtgccggcatccccagagatgagcactgcttctatgaggtggaggtggccatcctgcctgatgagatcttccggctggtgaagatccgcttcctgattgaggacatcaatgacaatgcccccctcttccctgccaccgtcatcaacatcagcatccctgagaacagcgccatcaacagcaagtacaccctgcctgctgctgtggaccctgatgtgggcatcaatggagtgcagaactatgagctgatcaagagccagaacatcttcggcctggatgtgattgagaccccagagggggacaagatgccccagctgattgtgcagaaggagctggaccgggaggagaaggacacctacgtgatgaaggtgaaggtggaggatggcggcttcccccagaggagcagcacagccatcctgcaggtgtctgtgacagacaccaatgacaaccaccctgtgttcaaggagacagaaattgaggtgtccatcccagaaaatgcccctgtgggcacctctgtgacccagctgcacgccacagatgctgacatcggggagaatgccaagatccacttctccttcagcaacctggtgagcaacatcgcccggcggctcttccacctgaatgccaccaccggcctcatcaccatcaaggagcccctggaccgggaggagacccccaaccacaagctgctggtgctggccagtgatggcggcctgatgcctgcccgggccatggtgctggtgaatgtgacagatgtgaatgacaacgtgcccagcattgacatccgctacatcgtgaaccctgtgaatgacacagtggtgctgtctgagaacatccccctgaacaccaagatcgccctgatcaccgtgacagacaaggatgctgaccacaacggccgggtgacctgcttcacagaccacgagatccccttccggctgcggcctgtgttcagcaaccagttcctgctggagacagctgcctacctggactatgagagcaccaaggagtatgccatcaagctgctggccgcagatgctgggaagccacccctgaaccagagcgccatgctgttcatcaaggtgaaggatgaaaatgacaatgcccctgtgttcacccagagctttgtgacagtgtccatccctgagaacaacagccctggcatccagctgaccaaggtgtctgccatggatgctgacagcggccccaatgccaagatcaactacctgctgggcccagatgcccctcctgagttcagcctggactgcaggacaggcatgctgactgtggtgaagaagctggaccgggagaaggaggacaagtacctgttcaccatcctggccaaggacaatggagtgccccccctgaccagcaatgtgacagtgtttgtgtccatcatcgaccagaatgacaacagccctgtgttcacccacaatgagtacaacttctacgtgcctgagaacctgcccaggcatggcaccgtgggcctcatcaccgtgacagatcctgactatggagacaacagcgctgtgaccctgagcatcctggatgaaaatgatgacttcaccatcgacagccagacaggagtcatccggcccaacatcagctttgaccgggagaagcaggagagctacaccttctacgtgaaggccgaggatggcggccgggtgagccgcagcagcagcgccaaggtgaccatcaacgtggtggatgtgaatgacaacaagcctgtgttcatcgtgccccccagcaactgcagctatgagctggtgctgcccagcaccaaccctggcaccgtggtgttccaggtgattgctgtggacaatgacaccggcatgaatgctgaggtgcgctacagcatcgtgggcggcaacacccgggacctgtttgccatcgaccaggagaccggcaacatcaccctgatggagaagtgtgatgtgacagacctgggcctgcaccgggtgctggtgaaggccaatgacctgggccagcctgacagcctcttctctgtggtgattgtgaacctgtttgtgaatgaatctgtgaccaatgccaccctcatcaatgagctggtgaggaagagcacagaggcccctgtgacccccaacacagaaattgctgatgtgagcagccccaccagtgactatgtgaagatcctggtggccgctgtggccggcaccatcaccgtggtggtggtgatcttcatcacagctgtggtgcgctgccggcaggccccccacctgaaggccgcccagaagaacaagcagaacagcgagtgggccacccccaaccctgagaaccggcagatgatcatgatgaagaagaagaagaagaagaagaagcacagccccaagaacctgctgctgaactttgtgaccatcgaggagaccaaggcagatgatgtggacagtgatggcaacagagtgaccctggacctgcccatcgacctggaggagcagaccatgggcaagtacaactgggtgaccacccccaccaccttcaagccagacagcccagacctggcccggcactacaagagcgccagcccccagcctgccttccagatccagcctgagacccccctgaacagcaagcaccacatcatccaggagctgcccctggacaacacctttgtggcctgtgacagcatcagcaagtgcagcagcagcagcagtgacccctacagcgtgtctgactgtggctaccctgtgaccacctttgaggtgcctgtgtctgtgcacaccaggcctcccatgaaggaggtggtgcgcagctgcacccccatgaaggagagcaccaccatggagatctggatccacccccagccccagaggaagtctgagggcaaggtggccggcaagacagtgctgaccagcagcagccccagcgccatgaccctgagctacctggactag

SEQ ID NO: 166462 - DNA, 1344 bp, synthetic construct
  misc_feature 1..1344: note = Description of Artificial Sequence: Synthetic coding sequence
  source 1..1344: mol_type = other DNA
atggccacagctgccaccaccaccaccaccaccacagccaccgtggccctgaccacctcctgggacaatgccaccggccggcccacagctgagccagaccccatcctggacaactacgtgctgctggtggtggtgatgagcctgtttgtgggcggcaccctggtggtgctgagcggcgtgctgctgctgtgcaagcgctgctgggatgtgcaccagaggctgaacagagccatggaggaggccgagaagaccaccaccacctacctggacaatggcacccacccagcccaggaccctgacttccggggggaggaccctgagtgccaggatgctgagacagagcgcttcctgagcaccagcagcacaggccggcgggtgtccttcaatgaagctgccctgtttgagcagagcaggaagacccaggacaagggccgccgctacaccctgacagaaggagacttccaccacctgaagaatgcccggctgacccacctgcacctgccccccctgaagatcgtgaccatccatgaatgtgacagcggggaggccagcagcgccaccaccccccacccagccaccagccccaaggccaccctggccatcttccagcccccaggcaaggccctgaccggccgctctgtgggccccagcagcgccctgcccggggacccctacaacagcgctgctggggccacagactttgctgagatcagccccagcgccagcagtgacagcggggagggcaccagcctggatgctggcaccaggagcaccaaggccggcggccctggagctgctgctggccctggagaggccggccctggcagcggggccggcaccgtgctgcagttcctgacccggctgcggagacatgccagcctggatggagccagcccctacttcaaggtgaagaagtggaagctggagcccagccagagagctgccagcctggacacccggggcagccccaagaggcaccacttccagaggcagagagctgccagcgagagcacagagcaggaggagggagatgccccccaggaggacttcatccagtacatcgcccgggctggagatgctgtggccttcccccacccccggcccttcctggccagccccccaccagccctgggccgctacttctctgtggatggaggagcccggggcggccctgtgggcccctgcccccccagccccccaccccggcggccccgggagaggagccctggccctgtggacaccaggagccctgccagcagcggcaaggccccaccccggggcggcctgaccggggccaccagccctgcctggacccggggcggcaagcagggcgagaccggctag

SEQ ID NO: 166463 - DNA, 3114 bp, synthetic construct
  misc_feature 1..3114: note = Description of Artificial Sequence: Synthetic coding sequence
  source 1..3114: mol_type = other DNA
atgacagtgggcttcaacagcgacatcagctctgtggtgcgggtgaacaccaccaactgccacaagtgcctgctgagcggcacctacatctttgctgtgctgctggtgtgtgtggtgttccacagcggggcccaggagaagaactacaccatccgggaggagatcccagaaaatgtgctgattggcaacctgctgaaggacctgaacctgagcctcatccccaacaagagcctgaccaccaccatgcagttcaagctggtgtacaagacaggagatgtgcccctcatccgcatcgaggaggacaccggggagatcttcaccaccggggccagaattgaccgggagaagctgtgtgccggcatccccagagatgagcactgcttctatgaggtggaggtggccatcctgcctgatgagatcttccggctggtgaagatccgcttcctgattgaggacatcaatgacaatgcccccctcttccctgccaccgtcatcaacatcagcatcccagaaaattctgccatcaacagcaagtacaccctgcctgctgctgtggaccctgatgtgggcatcaacggggtgcagaactatgagctgatcaagagccagaacatcttcggcctggatgtgattgagaccccagagggggacaagatgccccagctgattgtgcagaaggagctggaccgggaggagaaggacacctacgtgatgaaggtgaaggtggaggatggcggcttcccccagaggagcagcacagccatcctgcaggtgtctgtgacagacaccaatgacaaccaccctgtgttcaaggagacagaaattgaggtgtccatcccagaaaatgcccctgtgggcacctctgtgacccagctgcacgccacagatgctgacattggagaaaatgccaagatccacttctccttcagcaacctggtgagcaacatcgcccggcggctcttccacctgaatgccaccaccggcctcatcaccatcaaggagcccctggaccgggaggagacccccaaccacaagctgctggtgctggccagtgatggcggcctgatgcctgcccgggccatggtgctggtgaatgtgacagatgtgaatgacaacgtgcccagcattgacatccgctacatcgtgaaccctgtgaatgacacagtggtgctgtctgagaacatccccctgaacaccaagatcgccctgatcaccgtgacagacaaggatgctgaccacaacggccgggtgacctgcttcacagaccacgagatccccttccggctgcggcctgtgttcagcaaccagttcctgctggagaatgctgcctacctggactatgagagcaccaaggagtatgccatcaagctgctggccgcagatgctgggaagccacccctgaaccagagcgccatgctgttcatcaaggtgaaggatgaaaatgacaatgcccctgtgttcacccagagctttgtgacagtgtccatccctgagaacaacagccctggcatccagctgatgaaggtgtctgccacagatgctgacagcggccccaatgctgagatcaactacctgctgggcccagatgcccctcctgagttcagcctggacagaagaacaggcatgctgactgtggtgaagaagctggaccgggagaaggaggacaagtacctgttcaccatcctggccaaggacaacggggtgccccccctgaccagcaatgtgacagtgtttgtgtccatcatcgaccagaatgacaacagccctgtgttcacccacaatgagtacaagttctacgtgcctgagaacctgcccaggcatggaacagtgggcctcatcaccgtgacagatcctgactatggagacaacagcgctgtgaccctgagcatcctggatgaaaatgatgacttcaccatcgacagccagacaggagtcatccggcccaacatcagctttgaccgggagaagcaggagagctacaccttctacgtgaaggcagaagatggcggccgggtgagccgcagcagcagcgccaaggtgaccatcaacgtggtggatgtgaatgacaacaagcctgtgttcatcgtgcccccctacaactacagctatgagctggtgctgcccagcaccaaccctggcaccgtggtgttccaggtgattgctgtggacaatgacaccggcatgaatgctgaggtgcgctacagcatcgtgggcggcaacacccgggacctgtttgccatcgaccaggagactggaaacatcaccctgatggagaagtgtgatgtgacagacctgggcctgcaccgggtgctggtgaaggccaatgacctgggccagcctgacagcctcttctctgtggtgattgtgaacctgtttgtgaatgaatctgtgaccaatgccaccctcatcaatgagctggtgaggaagagcattgaggcccctgtgacccccaacacagaaattgctgatgtgagcagccccaccagtgactatgtgaagatcctggtggccgctgtggccggcaccatcaccgtggtggtggtgatcttcatcacagctgtggtgcgctgccggcaggccccccacctgaaggccgcccagaagaacatgcagaacagcgagtgggccacccccaacccagaaaatcggcagatgatcatgatgaagaagaagaagaagaagaagaagcacagccccaagaacctgctgctgaatgtggtgaccatcgaggagaccaaggcagatgatgtggacagtgatggcaacagagtgaccctggacctgcccatcgacctggaggagcagaccatgggcaagtacaactgggtgaccacccccaccaccttcaagccagacagcccagacctggcccggcactacaagagcgccagcccccagcctgccttccagatccagcctgagacccccctgaacctgaagcaccacatcatccaggagctgcccctggacaacacctttgtggcctgtgacagcatcagcaactgcagcagcagcagcagtgacccctacagcgtgtctgactgtggctaccctgtgaccacctttgaggtgcctgtgtctgtgcacacccggcccacagacagcaggacatag

SEQ ID NO: 166464 - DNA, 3147 bp, synthetic construct
  misc_feature 1..3147: note = Description of Artificial Sequence: Synthetic coding sequence
  source 1..3147: mol_type = other DNA
atgttccgggtgggcttcctgatcatcagcagcagcagcagcctgagccccctgctgctggtgtctgtggtgcgggtgaacaccaccaactgccacaagtgcctgctgagcggcacctacatctttgctgtgctgctggtgtgtgtggtgttccacagcggggcccaggagaagaactacaccatccgggaggagatcccagaaaatgtgctgattggcaacctgctgaaggacctgaacctgagcctcatccccaacaagagcctgaccaccaccatgcagttcaagctggtgtacaagacaggagatgtgcccctcatcagaattgaagaagatactggagagatcttcaccactggagccagaattgaccgggagaagctgtgtgccggcatccccagagatgagcactgcttctatgaggtggaggtggccatcctgcctgatgagatcttccggctggtgaagatccgcttcctgattgaggacatcaatgacaatgcccccctcttccctgccaccgtcatcaacatcagcatccctgagaacagcgccatcaacagcaagtacaccctgcctgctgctgtggaccctgatgtgggcatcaatggagtgcagaactatgagctgatcaagagccagaacatcttcggcctggatgtgattgagaccccagagggggacaagatgccccagctgattgtgcagaaggagctggaccgggaggagaaggacacctacgtgatgaaggtgaaggtggaggatggcggcttcccccagaggagcagcacagccatcctgcaggtgtctgtgacagacaccaatgacaaccaccctgtgttcaaggagacagaaattgaggtgtccatcccagaaaatgcccctgtgggcacctctgtgacccagctgcacgccacagatgctgacatcggggagaatgccaagatccacttctccttcagcaacctggtgagcaacatcgcccggcggctcttccacctgaatgccaccaccggcctcatcaccatcaaggagcccctggaccgggaggagacccccaaccacaagctgctggtgctggccagtgatggcggcctgatgcctgcccgggccatggtgctggtgaatgtgacagatgtgaatgacaacgtgcccagcattgacatccgctacatcgtgaaccctgtgaatgacacagtggtgctgtctgagaacatccccctgaacaccaagatcgccctgatcaccgtgacagacaaggatgctgaccacaacggccgggtgacctgcttcacagaccacgagatccccttccggctgcggcctgtgttcagcaaccagttcctgctggagaatgctgcctacctggactatgagagcaccaaggagtatgccatcaagctgctggccgcagatgctgggaagccacccctgaaccagagcgccatgctgttcatcaaggtgaaggatgaaaatgacaatgcccctgtgttcacccagagctttgtgacagtgtccatccctgagaacaacagccctggcatccagctgatgaaggtgtctgccacagatgctgacagcggccccaatgctgagatcaactacctgctgggcccagatgcccctcctgagttcagcctggacagaagaacaggcatgctgactgtggtgaagaagctggaccgggagaaggaggacaagtacctgttcaccatcctggccaaggacaatggagtgccccccctgaccagcaatgtgacagtgtttgtgtccatcatcgaccagaatgacaacagccctgtgttcacccacaatgagtacaagttctacgtgcctgagaacctgcccaggcatggcaccgtgggcctcatcaccgtgacagatcctgactatggagacaacagcgctgtgaccctgagcatcctggatgaaaatgatgacttcaccatcgacagccagacaggagtcatccggcccaacatcagctttgaccgggagaagcaggagagctacaccttctacgtgaaggccgaggatggcggccgggtgagccgcagcagcagcgccaaggtgaccatcaacgtggtggatgtgaatgacaacaagcctgtgttcatcgtgcccccctacaactacagctatgagctggtgctgcccagcaccaaccctggcaccgtggtgttccaggtgattgctgtggacaatgacaccggcatgaatgctgaggtgcgctacagcatcgtgggcggcaacacccgggacctgtttgccatcgaccaggagaccggcaacatcaccctgatggagaagtgtgatgtgacagacctgggcctgcaccgggtgctggtgaaggccaatgacctgggccagcctgacagcctcttctctgtggtgattgtgaacctgtttgtgaatgaatctgtgaccaatgccaccctcatcaatgagctggtgaggaagagcattgaggcccctgtgacccccaacacagaaattgctgatgtgagcagccccaccagtgactatgtgaagatcctggtggccgctgtggccggcaccatcaccgtggtggtggtgatcttcatcacagctgtggtgcgctgccggcaggccccccacctgaaggccgcccagaagaacatgcagaacagcgagtgggccacccccaaccctgagaaccggcagatgatcatgatgaagaagaagaagaagaagaagaagcacagccccaagaacctgctgctgaatgtggtgaccatcgaggagaccaaggcagatgatgtggacagtgatggcaacagagtgaccctggacctgcccatcgacctggaggagcagaccatgggcaagtacaactgggtgaccacccccaccaccttcaagccagacagcccagacctggcccggcactacaagagcgccagcccccagcctgccttccagatccagcctgagacccccctgaacctgaagcaccacatcatccaggagctgcccctggacaacacctttgtggcctgtgacagcatcagcaactgcagcagcagcagcagtgacccctacagcgtgtctgactgtggctaccctgtgaccacctttgaggtgcctgtgtctgtgcacacccggcccacagacagcaggacatag

SEQ ID NO: 166465 - DNA, 3960 bp, synthetic construct
  misc_feature 1..3960: note = Description of Artificial Sequence: Synthetic coding sequence
  source 1..3960: mol_type = other DNA
tgagtggtgcgggtgaacaccaccaactgccacaagtgcctgctgagcggcacctacatctttgctgtgctgctggtgtgtgtggtgttccacagcggggcccaggagaagaactacaccatccgggaggagatcccagaaaatgtgctgattggcaacctgctgaaggacctgaacctgagcctcatccccaacaagagcctgaccaccaccatgcagttcaagctggtgtacaagacaggagatgtgcccctcatccgcatcgaggaggacaccggggagatcttcaccaccggggccagaattgaccgggagaagctgtgtgccggcatccccagagatgagcactgcttctatgaggtggaggtggccatcctgcctgatgagatcttccggctggtgaagatccgcttcctgattgaggacatcaatgacaatgcccccctcttccctgccaccgtcatcaacatcagcatcccagaaaattctgccatcaacagcaagtacaccctgcctgctgctgtggaccctgatgtgggcatcaacggggtgcagaactatgagctgatcaagagccagaacatcttcggcctggatgtgattgagaccccagagggggacaagatgccccagctgattgtgcagaaggagctggaccgggaggagaaggacacctacgtgatgaaggtgaaggtggaggatggcggcttcccccagaggagcagcacagccatcctgcaggtgtctgtgacagacaccaatgacaaccaccctgtgttcaaggagacagaaattgaggtgtccatcccagaaaatgcccctgtgggcacctctgtgacccagctgcacgccacagatgctgacattggagaaaatgccaagatccacttctccttcagcaacctggtgagcaacatcgcccggcggctcttccacctgaatgccaccaccggcctcatcaccatcaaggagcccctggaccgggaggagacccccaaccacaagctgctggtgctggccagtgatggcggcctgatgcctgcccgggccatggtgctggtgaatgtgacagatgtgaatgacaacgtgcccagcattgacatccgctacatcgtgaaccctgtgaatgacacagtggtgctgtctgagaacatccccctgaacaccaagatcgccctgatcaccgtgacagacaaggatgctgaccacaacggccgggtgacctgcttcacagaccacgagatccccttccggctgcggcctgtgttcagcaaccagttcctgctggagaatgctgcctacctggactatgagagcaccaaggagtatgccatcaagctgctggccgcagatgctgggaagccacccctgaaccagagcgccatgctgttcatcaaggtgaaggatgaaaatgacaatgcccctgtgttcacccagagctttgtgacagtgtccatccctgagaacaacagccctggcatccagctgatgaaggtgtctgccacagatgctgacagcggccccaatgctgagatcaactacctgctgggcccagatgcccctcctgagttcagcctggacagaagaacaggcatgctgactgtggtgaagaagctggaccgggagaaggaggacaagtacctgttcaccatcctggccaaggacaacggggtgccccccctgaccagcaatgtgacagtgtttgtgtccatcatcgaccagaatgacaacagccctgtgttcacccacaatgagtacaagttctacgtgcctgagaacctgcccaggcatggaacagtgggcctcatcaccgtgacagatcctgactatggagacaacagcgctgtgaccctgagcatcctggatgaaaatgatgacttcaccatcgacagccagacaggagtcatccggcccaacatcagctttgaccgggagaagcaggagagctacaccttctacgtgaaggcagaagatggcggccgggtgagccgcagcagcagcgccaaggtgaccatcaacgtggtggatgtgaatgacaacaagcctgtgttcatcgtgcccccctacaactacagctatgagctggtgctgcccagcaccaaccctggcaccgtggtgttccaggtgattgctgtggacaatgacaccggcatgaatgctgaggtgcgctacagcatcgtgggcggcaacacccgggacctgtttgccatcgaccaggagactggaaacatcaccctgatggagaagtgtgatgtgacagacctgggcctgcaccgggtgctggtgaaggccaatgacctgggccagcctgacagcctcttctctgtggtgattgtgaacctgtttgtgaatgaatctgtgaccaatgccaccctcatcaatgagctggtgaggaagagcattgaggcccctgtgacccccaacacagaaattgctgatgtgagcagccccaccagtgactatgtgaagatcctggtggccgctgtggccggcaccatcaccgtggtggtggtgatcttcatcacagctgtggtgcgctgccggcaggccccccacctgaaggccgcccagaagaacatgcagaacagcgagtgggccacccccaacccagaaaatcggcagatgatcatgatgaagaagaagaagaagaagaagaagcacagccccaagaacctgctgctgaatgtggtgaccatcgaggagaccaaggcagatgatgtggacagtgatggcaacagagtgaccctggacctgcccatcgacctggaggagcagaccatgggcaagtacaactgggtgaccacccccaccaccttcaagccagacagcccagacctggcccggcactacaagagcgccagcccccagcctgccttccagatccagcctgagacccccctgaacctgaagcaccacatcatccaggagctgcccctggacaacacctttgtggcctgtgacagcatcagcaactgcagcagcagcagcagtgacccctacagcgtgtctgactgtggctaccctgtgaccacctttgaggtgcctgtgtctgtgcacacccggcccagccagaggagagtgaccttccacctgcctgagggcagccaggagagcagcagtgatggcggcctgggggaccatgatgctggcagcctgaccagcaccagccacggcctgcccctgggctacccccaggaggagtactttgaccgggccacccccagcaacagaacagaaggagatggcaacagcgaccctgagagcaccttcatccctggcctgaagaaggagatcaccgtgcagcccaccgtggaggaggccagtgacaactgcacccaggagtgcctgatctacggccacagtgatgcctgctggatgcctgccagcctggaccacagcagcagcagccaggcccaggccagcgccctgtgccacagcccccccctgagccaggccagcacccagcaccacagcccccctgtgacccagaccatcgtgctgtgccacagcccccctgtgacccagaccatcgccctgtgccacagccccccacccatccaggtgtctgccctgcaccacagcccccccctggtgcagggcacagccctgcaccacagccccccatctgcccaggccagcgccctgtgctacagcccccccctggcccaggccgccgccatcagccacagcagcagcctgccccaggtgattgccctgcacaggagccaggcccagagctctgtgtccctgcagcagggctgggtgcagggcgccaacggcctgtgcagcgtggaccagggcgtgcagggcagcgccaccagccagttctacaccatgtctgagcggctgcaccccagtgatgacagcatcaaggtgatccccctgaccacctttgccccccggcagcaggcccggcccagcagaggagacagccccatcatggagacccaccccctgtag

SEQ ID NO: 166466 - DNA, 1080 bp, synthetic construct
  misc_feature 1..1080: note = Description of Artificial Sequence: Synthetic coding sequence
  source 1..1080: mol_type = other DNA
atgaggagcatcaggaagcgctggaccatctgcaccatcagcctgctgctgatcttctacaagaccaaggagatcgccaggacagaggagcaccaggagacccagctgattggagatggagagctgagcctgagccgcagcctggtgaacagcagtgacaagatcatcaggaaggccggcagcagcatcttccagcacaacgtggagggctggaagatcaacagcagcctggtgctggagatcaggaagaacatcctgcgcttcctggatgctgagagagatgtgtctgtggtgaagagcagcttcaagccaggagatgtgatccactacgtgctggacagaagaaggaccctgaacatcagccatgacctgcacagcctgctgcctgaggtgagccccatgaagaacagacgcttcaagacctgtgctgtggtgggcaacagcggcatcctgctggacagtgaatgtgggaaggagattgacagccacaactttgtgatccgctgcaacctggcccctgtggtggagtttgctgctgatgtgggcaccaagagtgacttcatcaccatgaaccccagcgtggtgcagagggcctttggaggcttcagaaatgaaagtgaccgggagaagtttgtgcaccggctgtccatgctgaatgattctgtgctgtggatcccagccttcatggtgaagggcggggagaagcacgtggagtgggtgaatgccctgatcctgaagaacaagctgaaggtgaggacagcctaccccagcctgcggctcatccatgctgtgcggggctactggctgaccaacaaggtgcccatcaagaggcccagcacaggcctgctgatgtacaccctggccacccgcttctgtgatgagatccacctgtatggcttctggcccttccccaaggacctgaatggcaaggctgtgaagtaccactactatgatgacctgaagtaccgctacttcagcaatgccagcccccacaggatgcccctggagttcaagaccctgaatgtgctgcacaacagaggagccctgaagctgaccactggaaaatgtgtgaagcagtag

SEQ ID NO: 166467 - DNA, 72 bp, synthetic construct
  misc_feature 1..72: note = Description of Artificial Sequence: Synthetic coding sequence
  source 1..72: mol_type = other DNA
atgatgcagctgctgcagctgctgctgggcctgctgggccctgggggctacctgttcctgctgggggactag

SEQ ID NO: 166468 - DNA, 3480 bp, synthetic construct
  misc_feature 1..3480: note = Description of Artificial Sequence: Synthetic coding sequence
  source 1..3480: mol_type = other DNA
atgtacctgagcatctgctgctgcttcctgctgtgggccccagccctgaccctgaagaacctgaactacagcgtgcctgaggagcagggcgccggcaccgtgattggcaacatcggcagagatgcccggctgcagcccggcctgcccccagctgagcggggcggcggcggccgcagcaagagcggcagctacagagtgctggagaacagcgccccccacctgctggatgtggatgctgacagcggcctgctgtacaccaagcagagaattgaccgggagagcctgtgccgccacaatgccaagtgccagctgagcctggaggtgtttgccaatgacaaggagatctgcatgatcaaggtggagatccaggacatcaatgacaatgcccccagcttcagcagtgaccagatcgagatggacatcagtgaaaatgctgcccctggcacccgcttccccctgaccagcgcccatgaccctgatgctggagaaaatggcctgcggacctacctgctgaccagagatgaccacggcctgtttggcctggatgtgaagagcagaggagatggcaccaagtttcctgagctggtgatccagaaggccctggaccgggagcagcagaaccaccacaccctggtgctgacagccctggatggaggagagcccccaagaagtgccaccgtgcagatcaacgtgaaggtgattgacagcaatgacaacagccctgtgtttgaggcccccagctacctggtggagctgcctgaaaatgcccccctgggcaccgtggtgattgacctgaatgccacagatgctgatgagggccccaatggagaggtgctgtacagcttcagcagctatgtgcctgacagagtgcgggagctgttcagcattgaccccaagacaggcctcatccgggtgaagggcaacctggactatgaagaaaatggcatgctggagattgatgtgcaggcccgggacctgggccccaaccccatcccagcccactgcaaggtgacagtgaagctgattgacagaaatgacaatgcccccagcattggatttgtgtctgtgcggcagggcgccctgtctgaggccgcccctcctggcaccgtgattgccctggtgcgggtgacagaccgggacagcggcaagaatggccagctgcagtgccgggtgctgggcggcggcggcactggaggcggcggcggcctgggcggccctgggggctctgtgcccttcaagctggaggagaactatgacaacttctacacagtggtgacagaccggcccctggaccgggagacccaggatgagtacaacgtgaccatcgtggccagagatggcggcagcccccccctgaacagcaccaagagctttgccatcaagatcctggatgaaaatgacaaccccccacgcttcaccaagggcctgtatgtgctgcaggtgcatgagaacaacatccctggagagtacctgggctctgtgctggcccaggaccctgacctgggccagaatggcaccgtgtcctacagcatcctgcccagccacatcggagatgtgtccatctacacctacgtgtctgtgaaccccaccaatggagccatctatgccctgcgctccttcaactttgagcagaccaaggcctttgagttcaaggtgctggccaaggacagcggggccccagcccacctggagagcaatgccaccgtgcgggtgacagtgctggatgtgaatgacaatgcccctgtgattgtgctgcccaccctgcagaatgacacagctgagctgcaggtgcccagaaatgccggcctgggctacctggtgtccacagtgcgggccctggacagcgactttggagagagcggccgcctgacctatgaaattgtggatggaaatgatgaccacctgtttgaaattgaccccagcagcggggagatccgcaccctgcaccccttctgggaggatgtgacccctgtggtggagctggtggtgaaggtgacagaccacggcaagcccaccctgtctgctgtggccaagctgatcatccgctctgtgtctggcagcctgcctgagggcgtgccccgggtgaatggagagcagcaccactgggacatgagcctgcccctgattgtgaccctgagcaccatcagcatcatcctgctggccgccatgatcaccatcgctgtgaagtgcaagcgggagaacaaggagatccgcacctacaactgcagaattgctgagtacagccacccccagctgggcggcggcaagggcaagaagaagaagatcaacaagaatgacatcatgctggtgcagagcgaggtggaggagagaaatgccatgaatgtgatgaatgtggtgagcagccccagcctggccaccagccccatgtactttgactaccagacccggctgcccctgagcagccccaggtctgaggtgatgtacctgaagccagccagcaacaacctgactgtgccccagggccacgccggctgccacaccagcttcaccggccagggcaccaatgccagcgagaccccagccaccaggatgagcatcatccagacagacaacttccctgctgagcccaactacatgggcagccggcagcagtttgtgcagagcagcagcaccttcaaggaccctgagcgggccagcctgcgggacagcggccacggggacagcgaccaggccgacagcgaccaggacaccaacaagggcagctgctgtgacatgtctgtgcgggaggccctgaagatgaagaccaccagcaccaagagccagcccctggagcaggagcctgaggagtgtgtgaactgcacagatgaatgtcgggtgctgggccacagcgaccgctgctggatgccccagtttcctgctgccaaccaggctgaaaatgctgactaccgcaccaacctgtttgtgcccaccgtggaggccaacgtggagacagagacctatgaaacagtgaaccccaccgggaagaagaccttctgcaccttcggcaaggacaagcgggagcacaccatcctgattgccaacgtgaagccctacctgaaggccaagagggccctgagccccctgctgcaggaggtgcccagcgccagcagcagccccaccaaggcctgcatcgagccctgcaccagcaccaagggcagcctggatggctgtgaggccaagccaggggccctggccgaggccagcagccagtacctgcccacagacagccagtacctgagccccagcaagcagccccgggacccccccttcatggccagtgaccagatggcccgggtgtttgctgatgtgcacagccgggccagccgggacagcagcgagatgggcgctgtgctggagcagctggaccaccccaacagagacctgggccgggagagcgtggatgctgaggaggtggtgcgggagattgacaagctgctgcaggactgcagaggaaatgaccctgtggccgtgaggaagtag

SEQ ID NO: 166469 - DNA, 3408 bp, synthetic construct
  misc_feature 1..3408: note = Description of Artificial Sequence: Synthetic coding sequence
  source 1..3408: mol_type = other DNA
atgcaccagatgaatgccaagatgcacttccgctttgtgtttgccctgctgattgtgtccttcaaccatgatgtgctgggcaagaacctgaagtaccgcatctatgaggagcagagggtgggcagcgtcatcgcccggctgtctgaagatgtggctgatgtgctgctgaagctgcccaaccccagcacagtgcgcttccgggccatgcagaggggcaacagccccctgctggtggtgaatgaagataatggagagatcagcatcggggccaccatcgaccgggagcagctgtgccagaagaacctgaactgcagcattgaatttgatgtgatcaccctgcccacagagcacctgcagctgttccacatcgaggtggaggtgctggacatcaatgacaacagcccccagttcagccgcagcctcatccccatcgagatcagcgagagcgctgctgtgggcacccgcatccccctggacagcgcctttgatcctgatgtgggggagaacagcctgcacacctacagcctgagcgccaatgacttcttcaacatcgaggtgaggaccaggacagatggagccaagtatgcagagctgattgtggtgcgggagctggaccgggagctgaagagcagctatgagctgcagctgacagccagtgacatgggcgtgccccagaggagcggcagcagcatcctgaagatcagcatcagtgacagcaatgacaacagccctgcctttgagcagcagagctacatcatccagctgctggagaacagccctgtgggcaccctgctgctggacctgaatgccacagatcctgatgagggcgccaacgggaagatcgtgtacagcttcagcagccacgtgagccccaagatcatggagaccttcaagattgattctgagcggggccacctgaccctcttcaagcaggtggactatgagatcaccaagagctatgaaattgatgtgcaggcccaggacctgggccccaacagcatcccagcccactgcaagatcatcatcaaggtggtggatgtgaatgacaacaagccagagatcaacatcaacctgatgagccctgggaaggaggagatctcctacatctttgaaggagaccccatcgacacctttgtggccctggtgcgggtgcaggacaaggacagcggcctgaatggagaaattgtgtgcaagctgcacggccacggccacttcaagctgcagaagacctatgagaacaactacctgatcctgaccaatgccaccctggaccgggagaagaggtctgagtacagcctgactgtgattgctgaggaccggggcacccccagcctgagcacagtgaagcacttcaccgtgcagatcaatgacatcaatgacaaccccccccacttccagaggagccgctatgaatttgtgatcagcgagaacaacagccctggggcctacatcaccaccgtgacagccacagatcctgacctgggggagaatggccaggtgacctacaccatcctggagagcttcatcctgggcagcagcatcaccacctacgtgaccatcgaccccagcaatggagccatctatgccctgcgcatctttgaccacgaggaggtgtcccagatcacctttgtggtggaggccagagatggcggcagccccaagcagctggtgagcaacaccaccgtggtgctgaccatcattgatgaaaatgacaacgtgcctgtggtgattggccctgccctgaggaacaacacagctgagatcaccatccccaagggagctgagagcggcttccacgtgacccgcatccgggccatcgaccgggacagcggcgtgaatgctgagctgagctgtgccatcgtggccggaaatgaggagaacatcttcatcatcgaccccaggagctgtgacatccacaccaacgtgtccatggacagcgtgccctacacagagtgggagctgagcgtcatcatccaggacaagggcaacccccagctgcacaccaaggtgctgctgaagtgcatgatctttgaatatgcagagagcgtgaccagcacagccatgacctctgtgtcccaggccagcctggatgtgtccatgatcatcatcatcagcctgggcgccatctgtgctgtgctgctggtgatcatggtgctgtttgccacccgctgcaaccgggagaagaaggacaccaggagctacaactgccgggtggccgagagcacctaccagcaccaccccaagaggcccagccggcagatccacaagggggacatcaccctggtgcccaccatcaatggcaccctgcccatccgcagccaccacaggagcagccccagcagcagccccaccctggagcggggccagatgggcagccggcagagccacaacagccaccagagcctgaacagcctggtgaccatcagcagcaaccacgtgcctgagaacttcagcctggagctgacccacgccaccccagctgtggagcaggtgtcccagctgctgtccatgctgcaccagggccagtaccagccccggcccagcttccggggcaacaagtacagccgcagctaccgctatgccctgcaggacatggacaagttcagcctgaaggacagcggccgcggggacagcgaggccggggacagcgactatgacctgggccgggacagccccatcgaccggctgctgggggagggcttcagtgacctcttcctgacagatggccgcatcccagctgccatgaggctgtgcacagaagaatgtcgggtgctgggccacagcgaccagtgctggatgccacccctgcccagccccagcagtgactaccgcagcaacatgttcatccctggagaggagttccccacccagccccagcagcagcacccccaccagagcctggaggatgatgcccagcctgctgacagcggggagaagaagaagagcttcagcaccttcggcaaggacagccccaatgatgaggacaccggggacaccagcaccagcagcctgctgtctgagatgagcagcgtcttccagaggctgctgccccccagcctggacacctacagtgaatgttctgaggtggacaggagcaacagcctggagaggaggaagggccccctgcctgccaagacagtgggctacccccagggcgtggccgcctgggccgccagcacccacttccagaaccccaccaccaactgtggcccccccctgggcacccacagctctgtgcagcccagcagcaagtggctgcctgccatggaggagatccctgagaactatgaggaggatgactttgacaacgtgctgaaccacctgaatgatggcaagcatgagctgatggatgccagcgagctggtggccgagatcaacaagctgctgcaggatgtgcggcagagctag

SEQ ID NO: 166470 - DNA, 3405 bp, synthetic construct
  misc_feature 1..3405: note = Description of Artificial Sequence: Synthetic coding sequence
  source 1..3405: mol_type = other DNA
atgcaccagatgaatgccaagatgcacttccgctttgtgtttgccctgctgattgtgtccttcaaccatgatgtgctgggcaagaacctgaagtaccgcatctatgaggagcagagggtgggcagcgtcatcgcccggctgtctgaagatgtggctgatgtgctgctgaagctgcccaaccccagcacagtgcgcttccgggccatgcagaggggcaacagccccctgctggtggtgaatgaagataatggagagatcagcatcggggccaccatcgaccgggagcagctgtgccagaagaacctgaactgcagcattgaatttgatgtgatcaccctgcccacagagcacctgcagctgttccacatcgaggtggaggtgctggacatcaatgacaacagcccccagttcagccgcagcctcatccccatcgagatcagcgagagcgctgctgtgggcacccgcatccccctggacagcgcctttgatcctgatgtgggggagaacagcctgcacacctacagcctgagcgccaatgacttcttcaacatcgaggtgaggaccaggacagatggagccaagtatgcagagctgattgtggtgcgggagctggaccgggagctgaagagcagctatgagctgcagctgacagccagtgacatgggcgtgccccagaggagcggcagcagcatcctgaagatcagcatcagtgacagcaatgacaacagccctgcctttgagcagcagagctacatcatccagctgctggagaacagccctgtgggcaccctgctgctggacctgaatgccacagatcctgatgagggcgccaacgggaagatcgtgtacagcttcagcagccacgtgagccccaagatcatggagaccttcaagattgattctgagcggggccacctgaccctcttcaagcaggtggactatgagatcaccaagagctatgaaattgatgtgcaggcccaggacctgggccccaacagcatcccagcccactgcaagatcatcatcaaggtggtggatgtgaatgacaacaagccagagatcaacatcaacctgatgagccctgggaaggaggagatctcctacatctttgaaggagaccccatcgacacctttgtggccctggtgcgggtgcaggacaaggacagcggcctgaatggagaaattgtgtgcaagctgcacggccacggccacttcaagctgcagaagacctatgagaacaactacctgatcctgaccaatgccaccctggaccgggagaagaggtctgagtacagcctgactgtgattgctgaggaccggggcacccccagcctgagcacagtgaagcacttcaccgtgcagatcaatgacatcaatgacaaccccccccacttccagaggagccgctatgaatttgtgatcagcgagaacaacagccctggggcctacatcaccaccgtgacagccacagatcctgacctgggggagaatggccaggtgacctacaccatcctggagagcttcatcctgggcagcagcatcaccacctacgtgaccatcgaccccagcaatggagccatctatgccctgcgcatctttgaccacgaggaggtgtcccagatcacctttgtggtggaggccagagatggcggcagccccaagcagctggtgagcaacaccaccgtggtgctgaccatcattgatgaaaatgacaacgtgcctgtggtgattggccctgccctgaggaacaacacagctgagatcaccatccccaagggagctgagagcggcttccacgtgacccgcatccgggccatcgaccgggacagcggcgtgaatgctgagctgagctgtgccatcgtggccggaaatgaggagaacatcttcatcatcgaccccaggagctgtgacatccacaccaacgtgtccatggacagcgtgccctacacagagtgggagctgagcgtcatcatccaggacaagggcaacccccagctgcacaccaaggtgctgctgaagtgcatgatctttgaatatgcagagagcgtgaccagcacagccatgacctctgtgtcccaggccagcctggatgtgtccatgatcatcatcatcagcctgggcgccatctgtgctgtgctgctggtgatcatggtgctgtttgccacccgctgcaaccgggagaagaaggacaccaggagctacaactgccgggtggccgagagcacctaccagcaccaccccaagaggcccagccggcagatccacaagggggacatcaccctggtgcccaccatcaatggcaccctgcccatccgcagccaccacaggagcagccccagcagcagccccaccctggagcggggccagatgggcagccggcagagccacaacagccaccagagcctgaacagcctggtgaccatcagcagcaaccacgtgcctgagaacttcagcctggagctgacccacgccaccccagctgtggaggtgtcccagctgctgtccatgctgcaccagggccagtaccagccccggcccagcttccggggcaacaagtacagccgcagctaccgctatgccctgcaggacatggacaagttcagcctgaaggacagcggccgcggggacagcgaggccggggacagcgactatgacctgggccgggacagccccatcgaccggctgctgggggagggcttcagtgacctcttcctgacagatggccgcatcccagctgccatgaggctgtgcacagaggagtgccgggtgctgggccacagcgaccagtgctggatgccacccctgcccagccccagcagtgactaccgcagcaacatgttcatccctggagaggagttccccacccagccccagcagcagcacccccaccagagcctggaggatgatgcccagcctgctgacagcggggagaagaagaagagcttcagcaccttcggcaaggacagccccaatgatgaagatactggagacaccagcaccagcagcctgctgtctgagatgagctctgtgttccagaggctgctgccccccagcctggacacctacagcgagtgcagcgaggtggacaggagcaacagcctggagaggaggaagggccccctgcctgccaagacagtgggctacccccagggcgtggccgcctgggccgccagcacccacttccagaaccccaccaccaactgtggcccccccctgggcacccacagctctgtgcagcccagcagcaagtggctgcctgccatggaggagatcccagaaaattatgaagaagatgactttgacaacgtgctgaaccacctgaatgatggcaagcatgagctgatggatgccagcgagctggtggccgagatcaacaagctgctgcaggatgtgcggcagagctag

SEQ ID NO: 166471 - DNA, 3306 bp, synthetic construct
  misc_feature 1..3306: note = Description of Artificial Sequence: Synthetic coding sequence
  source 1..3306: mol_type = other DNA
atggagagcctgctgctgcctgtgctgctgctgctggccatcctgtggacccaggccgccgccctgatcaacctgaagtacagcgtggaggaggagcagagagctggcaccgtgattgccaacgtggccaaggatgcccgggaggccggctttgccctggacccccggcaggccagcgccttccgggtggtgagcaacagcgccccccacctggtggacatcaaccccagcagcggcctgctggtgaccaagcagaagattgaccgggacctgctgtgccggcagagccccaagtgcatcatcagcctggaggtgatgagcagctccatggagatctgtgtgatcaaggtggagatcaaggacctgaatgacaatgcccccagcttccctgctgcccagatcgagctggagatcagcgaggccgccagccctggcacccgcatccccctggacagcgcctatgaccctgacagcggcagctttggagtgcagacctatgagctgaccccaaatgagctgtttggcctggagatcaagaccagaggagatggcagcagatttgctgagctggtggtggagaagagcctggaccgggagacccagagccactacagcttccgcatcacagccctggatggaggagaccccccccggctgggcaccgtgggcctgagcatcaaggtgacagacagcaatgacaacaaccctgtgttttctgagagcacctatgctgtgtctgtgcctgagaacagcccccccaacacccctgtgatccggctgaatgccagtgaccctgatgagggcaccaacggccaggtggtgtacagcttctacggctacgtgaatgacaggacccgggagctgttccagattgacccccacagcggcctggtgacagtgactggagccctggactatgaggagggccacgtgtatgagctggatgtgcaggccaaggacctgggccccaacagcatcccagcccactgcaaggtgacagtgtctgtgctggacaccaatgacaacccccctgtgatcaacctgctgtctgtgaacagcgagctggtggaggtgtctgagagcgcccctcctggctacgtgattgccctggtgcgggtgtctgaccgggacagcggcctgaatggccgggtgcagtgccgcctgctgggcaatgtgcccttccggctgcaggagtatgagagcttcagcaccatcctggtggatggccgcctggaccgggagcagcacgaccagtacaacctgaccatccaggccagagatggaggagtgcccatgctgcagagcgccaagagcttcaccgtgctgatcacagatgaaaatgacaaccacccccacttcagcaagccctactaccaggtgattgtgcaggagaacaacacccctggggcctacctgctgtctgtgtctgcccgggaccctgacctgggcctgaatggatctgtgtcctaccagatcgtgcccagccaggtgcgggacatgcctgtgttcacctacgtgtccatcaaccccaacagcggggacatctatgccctgcggagcttcaaccacgagcagaccaaggcctttgagttcaaggtgctggccaaggatggcggcctgcccagcctgcagagcaatgccaccgtgcgggtcatcatcctggatgtgaatgacaacacccctgtgatcacagccccacccctcatcaatggaacagctgaggtgtacatccccagaaattctggaattggctacctggtgacagtggtgaaggcagaagattatgatgaaggagaaaatggccgggtgacctatgacatgacagaaggagaccggggcttctttgaaattgaccaggtgaatggagaggtgaggaccaccaggaccttcggggagagcagcaagagcagctatgagctgattgtggtggcccatgaccacggcaagaccagcctgagcgccagcgccctggtgctgatctacctgagccctgccctggatgcccaggagagcatgggctctgtgaacctgagcctcatcttcatcatcgccctgggcagcattgctggcatcctgtttgtgaccatgatctttgtggccatcaagtgcaagagggacaacaaggagatccgcacctacaactgcagaattgctgagtacagctatggccaccagaagaagagcagcaagaagaagaagatcagcaagaatgacatccggctggtgcccagagatgtggaggagacagacaagatgaatgtggtgtcctgcagcagcctgaccagcagcctgaactactttgactaccaccagcagaccctgcccctgggctgcagaagaagtgagagcaccttcctgaatgtggagaaccagaacaccaggaacaccagcgccaaccacatctaccaccacagcttcaacagccagggcccccagcagcctgacctgatcatcaatggagtgcccctgcctgagacagagaactacagctttgacagcaactacgtgaacagccgggcccacctgatcaagagcagcagcaccttcaaggacctggagggcaacagcctgaaggacagcggccacgaggagagtgaccagacagacagcgagcatgatgtgcagaggagcctgtactgtgacacagctgtgaatgatgtgctgaacacctctgtgacctccatgggcagccagatgccagaccatgaccagaatgaaggcttccactgccgggaggagtgccgcatcctgggccacagcgaccgctgctggatgcccaggaaccccatgcccatccgcagcaagagccctgagcacgtgaggaacatcatcgccctgagcattgaggccacagctgctgatgtggaggcctatgatgactgtggccccaccaagaggacctttgccaccttcggcaaggatgtgtctgaccaccctgctgaggagcggcccaccctgaagggcaagaggacagtggatgtgaccatctgcagccccaaggtgaacagcgtcatccgggaggccggaaatggctgtgaggccatcagccctgtgaccagccccctgcacctgaagagcagcctgcccaccaagcccagcgtgtcctacaccatcgccctggcccccccagcccgggacctggagcagtatgtgaacaacgtgaacaacggccccacccggcccagcgaggccgagcccagaggagctgacagcgagaaggtgatgcatgaggtgagccccatcctgaaggagggcaggaacaaggagagccctggggtgaagaggctgaaggacatcgtgctgtag

SEQ ID NO: 166472 - DNA, 3447 bp, synthetic construct
  misc_feature 1..3447: note = Description of Artificial Sequence: Synthetic coding sequence
  source 1..3447: mol_type = other DNA
atggagagcctgctgctgcctgtgctgctgctgctggccatcctgtggacccaggccgccgccctgatcaacctgaagtacagcgtggaggaggagcagagagctggcaccgtgattgccaacgtggccaaggatgcccgggaggccggctttgccctggacccccggcaggccagcgccttccgggtggtgagcaacagcgccccccacctggtggacatcaaccccagcagcggcctgctggtgaccaagcagaagattgaccgggacctgctgtgccggcagagccccaagtgcatcatcagcctggaggtgatgagcagctccatggagatctgtgtgatcaaggtggagatcaaggacctgaatgacaatgcccccagcttccctgctgcccagatcgagctggagatcagcgaggccgccagccctggcacccgcatccccctggacagcgcctatgaccctgacagcggcagctttggagtgcagacctatgagctgaccccaaatgagctgtttggcctggagatcaagaccagaggagatggcagcagatttgctgagctggtggtggagaagagcctggaccgggagacccagagccactacagcttccgcatcacagccctggatggaggagaccccccccggctgggcaccgtgggcctgagcatcaaggtgacagacagcaatgacaacaaccctgtgttttctgagagcacctatgctgtgtctgtgcctgagaacagcccccccaacacccctgtgatccggctgaatgccagtgaccctgatgagggcaccaacggccaggtggtgtacagcttctacggctacgtgaatgacaggacccgggagctgttccagattgacccccacagcggcctggtgacagtgactggagccctggactatgaggagggccacgtgtatgagctggatgtgcaggccaaggacctgggccccaacagcatcccagcccactgcaaggtgacagtgtctgtgctggacaccaatgacaacccccctgtgatcaacctgctgtctgtgaacagcgagctggtggaggtgtctgagagcgcccctcctggctacgtgattgccctggtgcgggtgtctgaccgggacagcggcctgaatggccgggtgcagtgccgcctgctgggcaatgtgcccttccggctgcaggagtatgagagcttcagcaccatcctggtggatggccgcctggaccgggagcagcacgaccagtacaacctgaccatccaggccagagatggaggagtgcccatgctgcagagcgccaagagcttcaccgtgctgatcacagatgaaaatgacaaccacccccacttcagcaagccctactaccaggtgattgtgcaggagaacaacacccctggggcctacctgctgtctgtgtctgcccgggaccctgacctgggcctgaatggatctgtgtcctaccagatcgtgcccagccaggtgcgggacatgcctgtgttcacctacgtgtccatcaaccccaacagcggggacatctatgccctgcggagcttcaaccacgagcagaccaaggcctttgagttcaaggtgctggccaaggatggcggcctgcccagcctgcagagcaatgccaccgtgcgggtcatcatcctggatgtgaatgacaacacccctgtgatcacagccccacccctcatcaatggaacagctgaggtgtacatccccagaaattctggaattggctacctggtgacagtggtgaaggcagaagattatgatgaaggagaaaatggccgggtgacctatgacatgacagaaggagaccggggcttctttgaaattgaccaggtgaatggagaggtgaggaccaccaggaccttcggggagagcagcaagagcagctatgagctgattgtggtggcccatgaccacggcaagaccagcctgagcgccagcgccctggtgctgatctacctgagccctgccctggatgcccaggagagcatgggctctgtgaacctgagcctcatcttcatcatcgccctgggcagcattgctggcatcctgtttgtgaccatgatctttgtggccatcaagtgcaagagggacaacaaggagatccgcacctacaactgcagcaactgcctgaccatcacctgcctgctgggctgcttcatcaagggccagaacagcaagtgcctgcactgcatctctgtgagccccatcagcgaggagcaggacaagaagacagaggagaaggtgtccctgcggggcaagagaattgctgagtacagctatggccaccagaagaagagcagcaagaagaagaagatcagcaagaatgacatccggctggtgcccagagatgtggaggagacagacaagatgaatgtggtgtcctgcagcagcctgaccagcagcctgaactactttgactaccaccagcagaccctgcccctgggctgccgccgctctgagagcaccttcctgaatgtggagaaccagaacaccaggaacaccagcgccaaccacatctaccaccacagcttcaacagccagggcccccagcagcctgacctgatcatcaacggggtgcccctgcctgagacagagaactacagctttgacagcaactacgtgaacagccgggcccacctgatcaagagcagcagcaccttcaaggacctggagggcaacagcctgaaggacagcggccacgaggagagtgaccagacagattctgaacatgatgtgcagaggagcctgtactgtgacacagctgtgaatgatgtgctgaacacctctgtgacctccatgggcagccagatgccagaccatgaccagaatgaaggcttccactgccgggaggagtgccgcatcctgggccacagcgaccgctgctggatgcccaggaaccccatgcccatccgcagcaagagccctgagcacgtgaggaacatcatcgccctgagcattgaggccacagctgctgatgtggaggcctatgatgactgtggccccaccaagaggacctttgccaccttcggcaaggatgtgtctgaccaccctgctgaggagcggcccaccctgaagggcaagaggacagtggatgtgaccatctgcagccccaaggtgaacagcgtcatccgggaggccggaaatggctgtgaggccatcagccctgtgaccagccccctgcacctgaagagcagcctgcccaccaagcccagcgtgtcctacaccatcgccctggcccccccagcccgggacctggagcagtatgtgaacaacgtgaacaacggccccacccggcccagcgaggccgagcccagaggagctgacagcgagaaggtgatgcatgaggtgagccccatcctgaaggagggcaggaacaaggagagccctggggtgaagaggctgaaggacatcgtgctgtag

SEQ ID NO: 166473 - DNA, 3303 bp, synthetic construct
  misc_feature 1..3303: note = Description of Artificial Sequence: Synthetic coding sequence
  source 1..3303: mol_type = other DNA
atggagagcctgctgctgcctgtgctgctgctgctggccatcctgtggacccaggccgccgccctgatcaacctgaagtacagcgtggaggaggagcagagagctggcaccgtgattgccaacgtggccaaggatgcccgggaggccggctttgccctggacccccggcaggccagcgccttccgggtggtgagcaacagcgccccccacctggtggacatcaaccccagcagcggcctgctggtgaccaagcagaagattgaccgggacctgctgtgccggcagagccccaagtgcatcatcagcctggaggtgatgagcagctccatggagatctgtgtgatcaaggtggagatcaaggacctgaatgacaatgcccccagcttccctgctgcccagatcgagctggagatcagcgaggccgccagccctggcacccgcatccccctggacagcgcctatgaccctgacagcggcagctttggagtgcagacctatgagctgaccccaaatgagctgtttggcctggagatcaagaccagaggagatggcagcagatttgctgagctggtggtggagaagagcctggaccgggagacccagagccactacagcttccgcatcacagccctggatggaggagaccccccccggctgggcaccgtgggcctgagcatcaaggtgacagacagcaatgacaacaaccctgtgttttctgagagcacctatgctgtgtctgtgcctgagaacagcccccccaacacccctgtgatccggctgaatgccagtgaccctgatgagggcaccaacggccaggtggtgtacagcttctacggctacgtgaatgacaggacccgggagctgttccagattgacccccacagcggcctggtgacagtgactggagccctggactatgaggagggccacgtgtatgagctggatgtgcaggccaaggacctgggccccaacagcatcccagcccactgcaaggtgacagtgtctgtgctggacaccaatgacaacccccctgtgatcaacctgctgtctgtgaacagcgagctggtggaggtgtctgagagcgcccctcctggctacgtgattgccctggtgcgggtgtctgaccgggacagcggcctgaatggccgggtgcagtgccgcctgctgggcaatgtgcccttccggctgcaggagtatgagagcttcagcaccatcctggtggatggccgcctggaccgggagcagcacgaccagtacaacctgaccatccaggccagagatggaggagtgcccatgctgcagagcgccaagagcttcaccgtgctgatcacagatgaaaatgacaaccacccccacttcagcaagccctactaccaggtgattgtgcaggagaacaacacccctggggcctacctgctgtctgtgtctgcccgggaccctgacctgggcctgaatggatctgtgtcctaccagatcgtgcccagccaggtgcgggacatgcctgtgttcacctacgtgtccatcaaccccaacagcggggacatctatgccctgcggagcttcaaccacgagcagaccaaggcctttgagttcaaggtgctggccaaggatggcggcctgcccagcctgcagagcaatgccaccgtgcgggtcatcatcctggatgtgaatgacaacacccctgtgatcacagccccacccctcatcaatggaacagctgaggtgtacatccccagaaattctggaattggctacctggtgacagtggtgaaggcagaagattatgatgaaggagaaaatggccgggtgacctatgacatgacagaaggagaccggggcttctttgaaattgaccaggtgaatggagaggtgaggaccaccaggaccttcggggagagcagcaagagcagctatgagctgattgtggtggcccatgaccacggcaagaccagcctgagcgccagcgccctggtgctgatctacctgagccctgccctggatgcccaggagagcatgggctctgtgaacctgagcctcatcttcatcatcgccctgggcagcattgctggcatcctgtttgtgaccatgatctttgtggccatcaagtgcaagagggacaacaaggagatccgcacctacaactgcagaattgctgagtacagctatggccaccagaagaagagcagcaagaagaagaagatcagcaagaatgacatccggctggtgcccagagatgtggaggagacagacaagatgaatgtggtgtcctgcagcagcctgaccagcagcctgaactactttgactaccaccagcagaccctgcccctgggctgcagaagaagtgagagcaccttcctgaatgtggagaaccagaacaccaggaacaccagcgccaaccacatctaccaccacagcttcaacagccagggcccccagcagcctgacctgatcatcaatggagtgcccctgcctgagacagagaactacagctttgacagcaactacgtgaacagccgggcccacctgatcaagagcagcaccttcaaggacctggagggcaacagcctgaaggacagcggccacgaggagagtgaccagacagattctgaacatgatgtgcagaggagcctgtactgtgacacagctgtgaatgatgtgctgaacacctctgtgacctccatgggcagccagatgccagaccatgaccagaatgaaggcttccactgccgggaggagtgccgcatcctgggccacagcgaccgctgctggatgcccaggaaccccatgcccatccgcagcaagagccctgagcacgtgaggaacatcatcgccctgagcattgaggccacagctgctgatgtggaggcctatgatgactgtggccccaccaagaggacctttgccaccttcggcaaggatgtgtctgaccaccctgctgaggagcggcccaccctgaagggcaagaggacagtggatgtgaccatctgcagccccaaggtgaacagcgtcatccgggaggccggaaatggctgtgaggccatcagccctgtgaccagccccctgcacctgaagagcagcctgcccaccaagcccagcgtgtcctacaccatcgccctggcccccccagcccgggacctggagcagtatgtgaacaacgtgaacaacggccccacccggcccagcgaggccgagcccagaggagctgacagcgagaaggtgatgcatgaggtgagccccatcctgaaggagggcaggaacaaggagagccctggggtgaagaggctgaaggacatcgtgctgtag

SEQ ID NO: 166474 - DNA, 2094 bp, synthetic construct
  misc_feature 1..2094: note = Description of Artificial Sequence: Synthetic coding sequence
  source 1..2094: mol_type = other DNA
atgttcaccctggatgtggaggagaatgaaaatggagagaggaccccctacctgattgtgatgggcgccctggaccgggagacccaggaccagtatgtgtccatcatcatcgcagaagatggcggcagcccccccctgctgggcagcgccaccctgaccatcggcatcagtgacatcaatgacaactgccccctcttcacagacagccagatcaacgtgacagtgtatggaaatgccaccgtgggcacccccatcgctgctgtgcaggccgtggacaaggacctgggcaccaatgcccagatcacctacagctacagccagaaggtgccccaggccagcaaggacctcttccacctggatgaaaatactggagtcatcaagctgttcagcaagattggaggctctgtgctggagagccacaagctgaccatcctggccaatggacctggctgcatcccagctgtgatcacagccctggtgtccatcatcaaggtgatcttccggcccccagagatcgtgccccgctacatcgccaatgaaattgatggagtggtgtacctgaaggagctggagcctgtgaacacccccatcgccttcttcaccatccgggaccctgagggcaagtacaaggtgaactgctacctggatggagagggccccttccggctgagcccctacaagccctacaacaatgagtacctgctggagaccaccaagcccatggactatgagctgcagcagttctatgaggtggccgtggtggcctggaacagcgagggcttccacgtgaagagggtcatcaaggtgcagctgctggatgacaatgacaatgcccccatcttcctgcagcccctcatcgagctgaccatcgaggagaacaacagccccaatgccttcctgaccaagctgtatgccacagatgctgacagcgaggagcggggccaggtgtcctacttcctgggcccagatgcccccagctacttcagcctggacagcgtgacaggcatcctgactgtgtccacccagctggaccgggaggagaaggagaagtaccgctacacagtgcgggctgtggactgtgggaagccaccccgggagagcgtggccaccgtggccctgactgtgctggacaagaatgacaacagcccccgcttcatcaacaaggacttctccttctttgtgcctgagaacttccctggctatggagaaattggagtcatctctgtgacagatgctgatgctggaagaaatggctgggtggccctgtctgtggtgaaccagagcgacatctttgtgattgacaccgggaagggcatgctgcgggccaaggtgtccctggaccgggagcagcagagcagctacaccctgtgggtggaggccgtggatggaggagagcccgccctgagcagcacagccaagatcaccatcctgctgctggacatcaatgacaacccccccctggtgctcttcccccagagcaacatgagctacctgctggtgctgcccagcaccctgcccggcagccctgtgacagaggtgtatgctgtggacaaggacaccggcatgaatgctgtgattgcctacagcatcattggaagaagaggccccaggcctgagagcttcagaattgaccccaagacaggcaacatcaccctggaggaggccctgctgcagacagattatggcctgcaccggctgctggtgaaggtgtctgaccacggctacccagagcccctgcacagcacagtgatggtgaacctgtttgtgaatgacacagtgtccaatgaaagctacatcgagagcctgctgaggaaggagcctgagatcaacatcgaggagaaggagccccagatcagcattgagcccacccacaggaaggtggagagcgtgtcctgcatgcccaccctggtggccctgagcgtcatcagcctgggcagcatcaccctggtgacaggcatgggcatctacatctgcctgaggaaaggagagaagcacccccgggaggatgagaacctggaggtgcagatccccctgaagggcaagattgacctgcacatgagggagaggaagcccatggacatcagcaacatctag

SEQ ID NO: 166475 - DNA, 2856 bp, synthetic construct
  misc_feature 1..2856: note = Description of Artificial Sequence: Synthetic coding sequence
  source 1..2856: mol_type = other DNA
atgagaggaagaggaaatgcccggagcagccaggccctgggcgtgtcctggtgcccagccacctggcacccccggctggacatgggccgcctgcaccggcccaggagcagcaccagctacagaaacctgccccacctgttcctgttcttcctgtttgtgggccccttcagctgcctgggcagctacagccgggccacagagctgctgtacagcctgaatgaaggcctgcctgctggggtgctgattggcagcctggccgaggacctgcggctgctgcccaggtctgctggccgcccagacccccagagccagctgcctgagaggactggagctgagtggaacccccccctgtccttcagcctggccagccggggcctgagcggccagtatgtgaccctggacaacagaagtggagagctgcacaccagcgcccaggagattgaccgggaggccctgtgtgtggagggcggcggcggcacagcctggagcggctctgtgtccatcagcagcagccccagcgacagctgcctgctgctgctggatgtgctggtgctgccccaggagtacttccgctttgtgaaggtgaagatcgccatccgggacatcaatgacaatgccccccagtttcctgtgtcccagatctctgtgtgggtgcctgaaaatgcccctgtgaacacccggctggccatcgagcaccctgctgtggaccctgatgtgggcatcaacggggtgcagacctaccgcctgctggactaccacggcatgttcaccctggatgtggaggagaatgaaaatggagagaggaccccctacctgattgtgatgggcgccctggaccgggagacccaggaccagtatgtgtccatcatcatcgcagaagatggcggcagcccccccctgctgggcagcgccaccctgaccatcggcatcagtgacatcaatgacaactgccccctcttcacagacagccagatcaacgtgacagtgtatggaaatgccaccgtgggcacccccatcgctgctgtgcaggccgtggacaaggacctgggcaccaatgcccagatcacctacagctacagccagaaggtgccccaggccagcaaggacctcttccacctggatgaaaatactggagtcatcaagctgttcagcaagattggaggctctgtgctggagagccacaagctgaccatcctggccaatggacctggctgcatcccagctgtgatcacagccctggtgtccatcatcaaggtgatcttccggcccccagagatcgtgccccgctacatcgccaatgaaattgatggagtggtgtacctgaaggagctggagcctgtgaacacccccatcgccttcttcaccatccgggaccctgagggcaagtacaaggtgaactgctacctggatggagagggccccttccggctgagcccctacaagccctacaacaatgagtacctgctggagaccaccaagcccatggactatgagctgcagcagttctatgaggtggccgtggtggcctggaacagcgagggcttccacgtgaagagggtcatcaaggtgcagctgctggatgacaatgacaatgcccccatcttcctgcagcccctcatcgagctgaccatcgaggagaacaacagccccaatgccttcctgaccaagctgtatgccacagatgctgacagcgaggagcggggccaggtgtcctacttcctgggcccagatgcccccagctacttcagcctggacagcgtgacaggcatcctgactgtgtccacccagctggaccgggaggagaaggagaagtaccgctacacagtgcgggctgtggactgtgggaagccaccccgggagagcgtggccaccgtggccctgactgtgctggacaagaatgacaacagcccccgcttcatcaacaaggacttctccttctttgtgcctgagaacttccctggctatggagaaattggagtcatctctgtgacagatgctgatgctggaagaaatggctgggtggccctgtctgtggtgaaccagagcgacatctttgtgattgacaccgggaagggcatgctgcgggccaaggtgtccctggaccgggagcagcagagcagctacaccctgtgggtggaggccgtggatggaggagagcccgccctgagcagcacagccaagatcaccatcctgctgctggacatcaatgacaacccccccctggtgctcttcccccagagcaacatgagctacctgctggtgctgcccagcaccctgcccggcagccctgtgacagaggtgtatgctgtggacaaggacaccggcatgaatgctgtgattgcctacagcatcattggaagaagaggccccaggcctgagagcttcagaattgaccccaagacaggcaacatcaccctggaggaggccctgctgcagacagattatggcctgcaccggctgctggtgaaggtgtctgaccacggctacccagagcccctgcacagcacagtgatggtgaacctgtttgtgaatgacacagtgtccaatgaaagctacatcgagagcctgctgaggaaggagcctgagatcaacatcgaggagaaggagccccagatcagcattgagcccacccacaggaaggtggagagcgtgtcctgcatgcccaccctggtggccctgagcgtcatcagcctgggcagcatcaccctggtgacaggcatgggcatctacatctgcctgaggaaaggagagaagcacccccgggaggatgagaacctggaggtgcagatccccctgaagggcaagattgacctgcacatgagggagaggaagcccatggacatcagcaacatctag

SEQ ID NO: 166476 - DNA, 2856 bp, synthetic construct; identical to SEQ ID NO: 166475
  misc_feature 1..2856: note = Description of Artificial Sequence: Synthetic coding sequence
  source 1..2856: mol_type = other DNA

SEQ ID NO: 166477 - DNA, 3603 bp, synthetic construct
  misc_feature 1..3603: note = Description of Artificial Sequence: Synthetic coding sequence
  source 1..3603: mol_type = other DNA
atgctgaggatgaggacagctggctgggcccggggctggtgcctgggctgctgcctgctgctgcccctgagcctgagcctggccgccgccaagcagctgctgcgctaccgcctggccgaggagggccctgcagatgtgagaattggaaatgtggccagtgacctgggcatcgtgactggaagtggagaggtgaccttcagcctggagagcggcagcgagtacctgaagattgacaacctgactggagagctgagcaccagcgagaggagaattgaccgggagaagctgccccagtgccagatgatctttgatgaaaatgaatgcttcctggactttgaggtgtctgtgattggccccagccagagctgggtggacctgtttgagggccaggtgattgtgctggacatcaatgacaacacccccaccttccccagccctgtgctgaccctgactgtggaggagaacagacctgtgggcaccctgtacctgctgcccacagccacagaccgggactttggaagaaatggaattgaaagatatgagctgctgcaggagcccggcggcggcggcagcggcggggagagccggcgggccggggctgctgacagcgccccctacccaggcggcggcggcaatggagccagcggcggcggcagcggcggcagcaagaggcggctggatgccagcgagggcggcggcggcaccaaccctgggggccgcagctctgtgtttgagctgcaggtggccgacaccccagatggagagaagcagccccagctgattgtgaagggcgtgtatgaggccgacctggccgagaacagcgcccctggcacccccatcctgcagctgcgggctgctgacctggatgtgggcgtgaatggccagatcgagtatgtgtttggagctgccacagagagcgtgcggcggctgctgcggctggatgagaccagcggctggctgtctgtgctgcacagaattgaccgggaggaggtgaaccagctgcgcttcaccgtgatggcccgggaccggggccagccccccaagacagacaaggccaccgtggtgctgaacatcaaggatgaaaatgacaacgtgcccagcattgagatcaggaagattggccgcatccccctgaaggatggagtggccaacgtggctgaagatgtgctggtggacacccccatcgccctggtgcaggtgtctgaccgggaccagggagaaaatggagtggtgacctgcaccgtggtgggagatgtgcccttccagctgaagccagccagtgacacagaaggagaccagaacaagaagaagtacttcctgcacaccagcacccccctggactatgaggccacccgggagttcaacgtggtgattgtggccgtggacagcggcagccccagcctgagcagcaacaacagcctgattgtgaaggtgggggacaccaatgacaacccccccatgtttggccagagcgtggtggaggtgtacttccctgagaacaacatccctggagagcgggtggccaccgtgctggccacagatgctgacagcggcaagaatgctgagatcgcctacagcctggacagctctgtgatgggcatctttgccattgatcctgattctggggacatcctggtgaacacagtgctggaccgggagcagacagacagatatgagttcaaggtgaatgccaaggacaagggcatccctgtgctgcagggcagcaccaccgtgattgtgcaggtggccgacaagaatgacaatgaccccaagttcatgcaggatgtgttcaccttctacgtgaaggagaacctgcagcccaacagccctgtgggcatggtgacagtgatggatgctgacaagggcagaaatgctgagatgagcctgtacatcgaggagaacaacaacatcttcagcattgaaaatgacaccggcaccatctacagcaccatgagctttgaccgggagcaccagaccacctacaccttccgggtgaaggctgtggatggaggagaccccccaagaagtgccacagccaccgtgtccctgtttgtgatggatgaaaatgacaatgcccccaccgtgaccctgcccaagaacatctcctacaccctgctgccccccagcagcaatgtgaggacagtggtggccaccgtgctggccacagacagtgatgatggcatcaatgctgacctgaactacagcatcgtgggcggcaaccccttcaagctgtttgaaattgaccccaccagcggcgtggtgtccctggtgggcaagctgacccagaagcactacggcctgcaccggctggtggtgcaggtgaatgattctggccagcccagccagagcaccaccaccctggtgcacgtgtttgtgaatgaatctgtgtccaatgccacagccatcgacagccagatcgcccggagcctgcacatccccctgacccaggacattgctggggaccccagctatgagatcagcaagcagaggctgagcatcgtgattggagtggtggccggcatcatgaccgtcatcctgatcatcctgattgtggtgatggcccgctactgccgcagcaagaacaagaatggctatgaagctgggaagaaggaccacgaggacttcttcaccccccagcagcacgacaagagcaagaagcccaagaaggacaagaagaacaagaagagcaagcagcccctgtacagcagcatcgtgacagtggaggccagcaagcccaacggccagagatatgattctgtgaatgagaagctgagtgacagccccagcatgggccgctacagatctgtgaatggaggccctggcagcccagacctggcccggcactacaagagcagcagccccctgcccaccgtgcagctgcacccccagagccccacagctgggaagaagcaccaggccgtgcaggacctgcccccagccaacacctttgtgggcgctggggacaacatcagcatcggcagtgaccactgcagcgagtacagctgccagaccaacaacaagtacagcaagcagcccttccggcgggtgaccttctctgtggtgtcccagccccaggacccccaccagggcagcctgcagagctgctatgacagcggcctggaggagagcgagacccccagcagcaagagcagcagcggcccccggctgggcgccctgcccctgcctgaggacaactatgaaagaaccaccccagatggctctgtggacagccggcccctgcctgatgtggccctgaccgggaagtgcacccgggagtgtgatgaatatggccacagcgacagctgctggatgcctgtgaggaccagccctgagaggaagaagagccagcccaagctgagcaccttcatgcctgtggatgagcggggcagccaggagaagctggccaacggggaggccgccatcatgggagacaggaacagaaacctgctgaacaagaagctgaccagcagctatgagaccttctctgctgccagcttcagcaagaatgaggaggccaaccctgaggacatccccctgaccaagacaggagagtacaagcccagccctgtgaacaccctgacccggcgggaggtgtacctgtag

SEQ ID NO: 166478 - DNA, 3210 bp, synthetic construct
  misc_feature 1..3210: note = Description of Artificial Sequence: Synthetic coding sequence
  source 1..3210: mol_type = other DNA
atgctgaggatgaggacagctggctgggcccggggctggtgcctgggctgctgcctgctgctgcccctgagcctgagcctggccgccgccaagcagctgctgcgctaccgcctggccgaggagggccctgcagatgtgagaattggaaatgtggccagtgacctgggcatcgtgactggaagtggagaggtgaccttcagcctggagagcggcagcgagtacctgaagattgacaacctgactggagagctgagcaccagcgagaggagaattgaccgggagaagctgccccagtgccagatgatctttgatgaaaatgaatgcttcctggactttgaggtgtctgtgattggccccagccagagctgggtggacctgtttgagggccaggtgattgtgctggacatcaatgacaacacccccaccttccccagccctgtgctgaccctgactgtggaggagaacagacctgtgggcaccctgtacctgctgcccacagccacagaccgggactttggaagaaatggaattgaaagatatgagctgctgcaggagcccggcggcggcggcagcggcggggagagccggcgggccggggctgctgacagcgccccctacccaggcggcggcggcaatggagccagcggcggcggcagcggcggcagcaagaggcggctggatgccagcgagggcggcggcggcaccaaccctgggggccgcagctctgtgtttgagctgcaggtggccgacaccccagatggagagaagcagccccagctgattgtgaagggggccctggaccgggagcagagggacagctatgagctgaccctgcgggtgagagatggaggagacccccccaggagcagccaggccatcctgcgggtgctgatcacagatgtgaatgacaacagccccaggtttgagaagtctgtgtatgaagctgacctggctgaaaattctgcccctggcacccccatcctgcagctgcgggctgctgacctggatgtgggcgtgaatggccagattgaatatgtgtttggagctgccacagaatctgtgcggcggctgctgcggctggatgagaccagcggctggctgtctgtgctgcacagaattgaccgggaggaggtgaaccagctgcgcttcaccgtgatggcccgggaccggggccagccccccaagacagacaaggccaccgtggtgctgaacatcaaggatgaaaatgacaacgtgcccagcattgagatcaggaagattggccgcatccccctgaaggatggagtggccaacgtggccgaggatgtgctggtggacacccccatcgccctggtgcaggtgtctgaccgggaccagggagaaaatggagtggtgacctgcaccgtggtgggagatgtgcccttccagctgaagccagccagtgacacagaaggagaccagaacaagaagaagtacttcctgcacaccagcacccccctggactatgaggccacccgggagttcaacgtggtgattgtggccgtggacagcggcagccccagcctgagcagcaacaacagcctcatcgtgaaggtgggggacaccaatgacaacccccccatgtttggccagagcgtggtggaggtgtacttccctgagaacaacatccctggagagcgggtggccaccgtgctggccacagatgctgacagcggcaagaatgctgagatcgcctacagcctggacagctctgtgatgggcatctttgccatcgaccctgacagcggggacatcctggtgaacacagtgctggaccgggagcagacagacagatatgagttcaaggtgaatgccaaggacaagggcatccctgtgctgcagggcagcaccaccgtcatcgtgcaggtggccgacaagaatgacaatgaccccaagttcatgcaggatgtgttcaccttctacgtgaaggagaacctgcagcccaacagccctgtgggcatggtgacagtgatggatgctgacaagggcagaaatgctgagatgagcctgtacatcgaggagaacaacaacatcttcagcattgaaaatgacaccggcaccatctacagcaccatgagctttgaccgggagcaccagaccacctacaccttccgggtgaaggctgtggatggaggagacccccccaggtctgccacagccaccgtgtccctgtttgtgatggatgaaaatgacaatgcccccaccgtgaccctgcccaagaacatctcctacaccctgctgccccccagcagcaatgtgaggacagtggtggccaccgtgctggccacagacagtgatgatggcatcaatgctgacctgaactacagcatcgtgggcggcaaccccttcaagctgtttgaaattgaccccaccagcggcgtggtgtccctggtgggcaagctgacccagaagcactacggcctgcaccggctggtggtgcaggtgaatgacagcggccagcccagccagagcaccaccaccctggtgcacgtgtttgtgaatgaatctgtgtccaatgccacagccatcgacagccagatcgcccggagcctgcacatccccctgacccaggacattgctggggaccccagctatgagatcagcaagcagaggctgagcatcgtcatcggcgtggtggccggcatcatgaccgtcatcctgatcatcctgattgtggtgatggcccgctactgccgcagcaagaacaagaatggctatgaggccggcaagaaggaccacgaggacttcttcaccccccagcagcacgacaagagcaagaagcccaagaaggacaagaagaacaagaagagcaagcagcccctgtacagcagcatcgtgacagtggaggccagcaagcccaacggccagagatatgacagcgtgaatgagaagctgagtgacagccccagcatgggccgctacagatctgtgaatggaggccctggcagcccagacctggcccggcactacaagagcagcagccccctgcccaccgtgcagctgcacccccagagccccacagctgggaagaagcaccaggccgtgcaggacctgcccccagccaacacctttgtgggcgctggggacaacatcagcattggaagtgaccactgcagcgagtacagctgccagaccaacaacaagtacagcaagcagatgaggctgcacccctacatcaccgtgtttggatag

SEQ ID NO: 166479 - DNA, 3768 bp, synthetic construct
  misc_feature 1..3768: note = Description of Artificial Sequence: Synthetic coding sequence
  source 1..3768: mol_type = other DNA
atgctgaggatgaggacagctggctgggcccggggctggtgcctgggctgctgcctgctgctgcccctgagcctgagcctggccgccgccaagcagctgctgcgctaccgcctggccgaggagggccctgcagatgtgagaattggaaatgtggccagtgacctgggcatcgtgactggaagtggagaggtgaccttcagcctggagagcggcagcgagtacctgaagattgacaacctgactggagagctgagcaccagcgagaggagaattgaccgggagaagctgccccagtgccagatgatctttgatgaaaatgaatgcttcctggactttgaggtgtctgtgattggccccagccagagctgggtggacctgtttgagggccaggtgattgtgctggacatcaatgacaacacccccaccttccccagccctgtgctgaccctgactgtggaggagaacagacctgtgggcaccctgtacctgctgcccacagccacagaccgggactttggaagaaatggaattgaaagatatgagctgctgcaggagcccggcggcggcggcagcggcggggagagccggcgggccggggctgctgacagcgccccctacccaggcggcggcggcaatggagccagcggcggcggcagcggcggcagcaagaggcggctggatgccagcgagggcggcggcggcaccaaccctgggggccgcagctctgtgtttgagctgcaggtggccgacaccccagatggagagaagcagccccagctgattgtgaagggggccctggaccgggagcagagggacagctatgagctgaccctgcgggtgagagatggaggagacccccccaggagcagccaggccatcctgcgggtgctgatcacagatgtgaatgacaacagccccaggtttgagaagtctgtgtatgaagctgacctggctgaaaattctgcccctggcacccccatcctgcagctgcgggctgctgacctggatgtgggcgtgaatggccagattgaatatgtgtttggagctgccacagaatctgtgcggcggctgctgcggctggatgagaccagcggctggctgtctgtgctgcacagaattgaccgggaggaggtgaaccagctgcgcttcaccgtgatggcccgggaccggggccagccccccaagacagacaaggccaccgtggtgctgaacatcaaggatgaaaatgacaacgtgcccagcattgagatcaggaagattggccgcatccccctgaaggatggagtggccaacgtggccgaggatgtgctggtggacacccccatcgccctggtgcaggtgtctgaccgggaccagggagaaaatggagtggtgacctgcaccgtggtgggagatgtgcccttccagctgaagccagccagtgacacagaaggagaccagaacaagaagaagtacttcctgcacaccagcacccccctggactatgaggccacccgggagttcaacgtggtgattgtggccgtggacagcggcagccccagcctgagcagcaacaacagcctcatcgtgaaggtgggggacaccaatgacaacccccccatgtttggccagagcgtggtggaggtgtacttccctgagaacaacatccctggagagcgggtggccaccgtgctggccacagatgctgacagcggcaagaatgctgagatcgcctacagcctggacagctctgtgatgggcatctttgccatcgaccctgacagcggggacatcctggtgaacacagtgctggaccgggagcagacagacagatatgagttcaaggtgaatgccaaggacaagggcatccctgtgctgcagggcagcaccaccgtcatcgtgcaggtggccgacaagaatgacaatgaccccaagttcatgcaggatgtgttcaccttctacgtgaaggagaacctgcagcccaacagccctgtgggcatggtgacagtgatggatgctgacaagggcagaaatgctgagatgagcctgtacatcgaggagaacaacaacatcttcagcattgaaaatgacaccggcaccatctacagcaccatgagctttgaccgggagcaccagaccacctacaccttccgggtgaaggctgtggatggaggagacccccccaggtctgccacagccaccgtgtccctgtttgtgatggatgaaaatgacaatgcccccaccgtgaccctgcccaagaacatctcctacaccctgctgccccccagcagcaatgtgaggacagtggtggccaccgtgctggccacagacagtgatgatggcatcaatgctgacctgaactacagcatcgtgggcggcaaccccttcaagctgtttgaaattgaccccaccagcggcgtggtgtccctggtgggcaagctgacccagaagcactacggcctgcaccggctggtggtgcaggtgaatgacagcggccagcccagccagagcaccaccaccctggtgcacgtgtttgtgaatgaatctgtgtccaatgccacagccatcgacagccagatcgcccggagcctgcacatccccctgacccaggacattgctggggaccccagctatgagatcagcaagcagaggctgagcatcgtcatcggcgtggtggccggcatcatgaccgtcatcctgatcatcctgattgtggtgatggcccgctactgccgcagcaagaacaagaatggctatgaggccggcaagaaggaccacgaggacttcttcaccccccagcagcacgacaagagcaagaagcccaagaaggacaagaagaacaagaagagcaagcagcccctgtacagcagcatcgtgacagtggaggccagcaagcccaacggccagagatatgacagcgtgaatgagaagctgagtgacagccccagcatgggccgctacagatctgtgaatggaggccctggcagcccagacctggcccggcactacaagagcagcagccccctgcccaccgtgcagctgcacccccagagccccacagctgggaagaagcaccaggccgtgcaggacctgcccccagccaacacctttgtgggcgctggggacaacatcagcattggaagtgaccactgcagcgagtacagctgccagaccaacaacaagtacagcaagcagcccttcagaagagtgaccttctctgtggtgtcccagccccaggacccccaccagggcagcctgcagagctgctatgattctggcctggaggagagcgagacccccagcagcaagagcagcagcggcccccggctgggcgccctgcccctgcctgaggacaactatgaaagaaccaccccagatggctctgtgggggaggccgagcacatggagaatgacagccggcccctgcctgatgtggccctgaccgggaagtgcaccagagaatgtgatgaatatggccacagcgacagctgctggatgcctgtgaggaccagccctgagaggaagaagagccagcccaagctgagcaccttcatgcctgtggatgagcggggcagccaggagaagctggccaatggagaggccgccatcatgggagacaggaacagaaacctgctgaacaagaagctgaccagcagctatgagaccttctctgctgccagcttcagcaagaatgaggaggccaaccctgaggacatccccctgaccaagacaggagagtacaagcccagccctgtgaacaccctgacccggcgggaggtgtacctgtag

SEQ ID NO: 166480 - DNA, 2922 bp, synthetic construct
  misc_feature 1..2922: note = Description of Artificial Sequence: Synthetic coding sequence
  source 1..2922: mol_type = other DNA
atgagccctgtgcggcgctggggcagcccctgcctcttccccctgcagctgttcagcctgtgctgggtgctgtctgtggcccagagcaagacagtgcgctacagcacctttgaagaagatgcccctggcaccgtcatcggcaccctggccgaggacctgcacatgaaggtgtctggggacaccagcttccggctgatgaagcagttcaacagcagcctgctgcgggtgcgggagggagatggccagctgactgtgggagatgctggcctggaccgggagcggctgtgtggccaggccccccagtgtgtgctggcctttgatgtggtgtccttcagccaggagcagttccggctggtgcacgtggaggtggaggtgagagatgtgaatgaccacgccccccgcttcccccgggcccagatccctgtggaggtgtctgagggcgctgctgtgggcacccgcatccccctggaggtgcctgtggatgaagatgtgggcgccaacggcctgcagacagtgcggctggccgagccccacagccccttccgggtggagctgcagaccagggcagatggagcccagtgtgccgacctggtgctgctgcaggagctggaccgggagagccaggccgcctacagcctggagctggtggcccaggacggcggccggcccccaagaagtgccacagctgccctgtctgtgcgggtgctggatgccaatgaccacagccctgccttcccccagggcgctgtggccgaggtggagctggctgaagatgcccctgtgggcagcctgctgctggacctggatgctgctgaccctgatgagggccccaatggagatgtggtgtttgcctttggagcccggaccccacctgaggcccggcggctcttccggctggaccccaggagcggccgcctgaccctggccggccctgtggactatgaaaggcaggacacctatgagctggatgtgcgggcccaggaccggggccctggccccagggctgccacctgcaaggtgattgtgcgcatcagagatgtgaatgacaatgccccagacatcgccatcacccccctggccgcccctggggccccagccaccagcccctttgctgctgctgctgctgctgctgccctgggcggcgcagatgccagcagccctgctggggccggcaccccagaggccggggccaccagcctggtgcctgagggcgccgcccgggagagcctggtggccctggtgtccaccagtgaccgggacagcggggccaacggccaggtgcgctgtgccctgtatggccacgagcacttccggctgcagcctgcctatgccggcagctacctggtggtgacagctgccagcctggaccgggagagaattgctgagtacaacctgaccctggtggccgaggacagaggagccccacccctgaggacagtgcggccctacacagtgcgggtgggagatgaaaatgacaatgcccccctcttcaccaggcctgtgtatgaggtgtctgtgcgggagaacaaccccccaggggcctacctggccaccgtggccgcccgggaccgggacctgggcagaaatggccaggtgacctaccgcctgctggaggccgaggtgggccgggccggcggcgctgtgtccacctacgtgtctgtggaccctgccaccggggccatctatgccctgcggagctttgattatgagaccctgcggcagctggatgtgcgcatccaggccagtgatggcggcagcccccagctgagcagcagcgccctggtgcaggtgcgggtgctggaccagaatgaccacgcccctgtgctggtgcacccagccccagccaacggcagcctggaggtggccgtgcccggccgcacagccaaggacacagtggtggcccgggtgcaggccagagatgctgatgagggcgccaacggggagctggcctttgagctgcagcagcaggagccccgggaggcctttgccatcggccgcaggactggagagatcctgctgaccggggacctgagccaggagcccccaggccgggtcttccgggccctgctggtgatcagtgatggcggccggccccccctgaccaccacagccaccgtgtcctttgtggtgacagctgggggcggccggggccctgctgccccagccagcgctggcagccctgagaggagccggcccccaggcagccggctgggcgtgtctggctctgtgctgcagtgggacacccccctgattgtcatcatcgtgctggccggcagctgcaccctgctgctggccgccatcatcgccatcgccaccacctgcaacagaaggaagaaggagccctacggggccagccctggctttgggaaggagcccgcccctcctgtggccgtgtggaagggccacagcttcaacaccatcagcggccgggaggccgagaagttcagcggcaaggacagcggcaagggggacagcgacttcaatgacagcgacagcgacatctctggagatgccctgaagaaggacctgatcaaccacatgcagagcggcctgtgggcctgcacagctgagtgcaagatcctgggccacagcgaccgctgctggagccccagctgcagcggccccaatgcccaccccagcccccaccccccagcccagatgagcaccttctgcaagagcaccagcctgccccgggaccccctgcggcgggacaactactaccaggcccagctgcccaagacagtgggcctgcagagcgtgtatgagaaggtgctgcaccgggactatgacagaacagtgaccctgctgagcccccccaggcctggccgcctgcctgacctgcaggagattggagtgcccctgtaccagagccccccaggccgctacctgagccccaagaagggggccaatgaaaatgtgtag

SEQ ID NO: 166481 - DNA, 3213 bp, synthetic construct
  misc_feature 1..3213: note = Description of Artificial Sequence: Synthetic coding sequence
  source 1..3213: mol_type = other DNA
atgagccctgtgcggcgctggggcagcccctgcctcttccccctgcagctgttcagcctgtgctgggtgctgtctgtggcccagagcaagacagtgcgctacagcacctttgaagaagatgcccctggcaccgtcatcggcaccctggccgaggacctgcacatgaaggtgtctggggacaccagcttccggctgatgaagcagttcaacagcagcctgctgcgggtgcgggagggagatggccagctgactgtgggagatgctggcctggaccgggagcggctgtgtggccaggccccccagtgtgtgctggcctttgatgtggtgtccttcagccaggagcagttccggctggtgcacgtggaggtggaggtgagagatgtgaatgaccacgccccccgcttcccccgggcccagatccctgtggaggtgtctgagggcgctgctgtgggcacccgcatccccctggaggtgcctgtggatgaagatgtgggcgccaacggcctgcagacagtgcggctggccgagccccacagccccttccgggtggagctgcagaccagggcagatggagcccagtgtgccgacctggtgctgctgcaggagctggaccgggagagccaggccgcctacagcctggagctggtggcccaggacggcggccggcccccaagaagtgccacagctgccctgtctgtgcgggtgctggatgccaatgaccacagccctgccttcccccagggcgctgtggccgaggtggagctggctgaagatgcccctgtgggcagcctgctgctggacctggatgctgctgaccctgatgagggccccaatggagatgtggtgtttgcctttggagcccggaccccacctgaggcccggcggctcttccggctggaccccaggagcggccgcctgaccctggccggccctgtggactatgaaaggcaggacacctatgagctggatgtgcgggcccaggaccggggccctggccccagggctgccacctgcaaggtgattgtgcgcatcagagatgtgaatgacaatgccccagacatcgccatcacccccctggccgcccctggggccccagccaccagcccctttgctgctgctgctgctgctgctgccctgggcggcgcagatgccagcagccctgctggggccggcaccccagaggccggggccaccagcctggtgcctgagggcgccgcccgggagagcctggtggccctggtgtccaccagtgaccgggacagcggggccaacggccaggtgcgctgtgccctgtatggccacgagcacttccggctgcagcctgcctatgccggcagctacctggtggtgacagctgccagcctggaccgggagagaattgctgagtacaacctgaccctggtggccgaggacagaggagccccacccctgaggacagtgcggccctacacagtgcgggtgggagatgaaaatgacaatgcccccctcttcaccaggcctgtgtatgaggtgtctgtgcgggagaacaaccccccaggggcctacctggccaccgtggccgcccgggaccgggacctgggcagaaatggccaggtgacctaccgcctgctggaggccgaggtgggccgggccggcggcgctgtgtccacctacgtgtctgtggaccctgccaccggggccatctatgccctgcggagctttgattatgagaccctgcggcagctggatgtgcgcatccaggccagtgatggcggcagcccccagctgagcagcagcgccctggtgcaggtgcgggtgctggaccagaatgaccacgcccctgtgctggtgcacccagccccagccaacggcagcctggaggtggccgtgcccggccgcacagccaaggacacagtggtggcccgggtgcaggccagagatgctgatgagggcgccaacggggagctggcctttgagctgcagcagcaggagccccgggaggcctttgccatcggccgcaggactggagagatcctgctgaccggggacctgagccaggagcccccaggccgggtcttccgggccctgctggtgatcagtgatggcggccggccccccctgaccaccacagccaccgtgtcctttgtggtgacagctgggggcggccggggccctgctgccccagccagcgctggcagccctgagaggagccggcccccaggcagccggctgggcgtgtctggctctgtgctgcagtgggacacccccctgattgtcatcatcgtgctggccggcagctgcaccctgctgctggccgccatcatcgccatcgccaccacctgcaacagaaggaagaaggaggtgaggaaaggaggagccctgcgggaggagaggcctggagctgctgggggcggggccagcgcccctggcagccctgaggaggccgcccggggggccggcccccggcccaacatgtttgatgtgctgaccttccctggcaccgggaaggcccccttcggcagccctgctgctgatgcccctcctcctgctgtggccgctgctgaggtgcccggcagcgagggcggcagcgccaccggggagagcgcctgccactttgagggccagcagaggctgcggggggcccacgccgagccctatggagccagccctggctttgggaaggagcccgcccctcctgtggccgtgtggaagggccacagcttcaacaccatcagcggccgggaggccgagaagttcagcggcaaggacagcgggaaaggagacagcgacttcaatgacagcgacagcgacatctctggagatgccctgaagaaggacctgatcaaccacatgcagagcggcctgtgggcctgcacagctgagtgcaagatcctgggccacagcgaccgctgctggagccccagctgcagcggccccaatgcccaccccagcccccaccccccagcccagatgagcaccttctgcaagagcaccagcctgccccgggaccccctgcggcgggacaactactaccaggcccagctgcccaagacagtgggcctgcagagcgtgtatgagaaggtgctgcaccgggactatgacagaacagtgaccctgctgagccccccccggcccggccgcctgcctgacctgcaggagattggagtgcccctgtaccagagccccccaggccgctacctgagccccaagaagggggccaatgaaaatgtgtag

SEQ ID NO: 166482 - DNA, 1791 bp, synthetic construct
  misc_feature 1..1791: note = Description of Artificial Sequence: Synthetic coding sequence
  source 1..1791: mol_type = other DNA
atgagccctgtgcggcgctggggcagcccctgcctcttccccctgcagctgttcagcctgtgctgggtgctgtctgtggcccagagcaagacagtgcgctacagcacctttgaagaagatgcccctggcaccgtcatcggcaccctggccgaggacctgcacatgaaggtgtctggggacaccagcttccggctgatgaagcagttcaacagcagcctgctgcgggtgcgggagggagatggccagctgactgtgggagatgctggcctggaccgggagcggctgtgtggccaggccccccagtgtgtgctggcctttgatgtggtgtccttcagccaggagcagttccggctggtgcacgtggaggtggaggtgagagatgtgaatgaccacgcccctgtgctggtgcacccagccccagccaacggcagcctggaggtggccgtgcccggccgcacagccaaggacacagtggtggcccgggtgcaggccagagatgctgatgagggcgccaacggggagctggcctttgagctgcagcagcaggagccccgggaggcctttgccatcggccgcaggactggagagatcctgctgaccggggacctgagccaggagcccccaggccgggtcttccgggccctgctggtgatcagtgatggcggccggccccccctgaccaccacagccaccgtgtcctttgtggtgacagctgggggcggccggggccctgctgccccagccagcgctggcagccctgagaggagccggcccccaggcagccggctgggcgtgtctggctctgtgctgcagtgggacacccccctgattgtcatcatcgtgctggccggcagctgcaccctgctgctggccgccatcatcgccatcgccaccacctgcaacagaaggaagaaggaggtgaggaaaggaggagccctgcgggaggagaggcctggagctgctgggggcggggccagcgcccctggcagccctgaggaggccgcccggggggccggcccccggcccaacatgtttgatgtgctgaccttccctggcaccgggaaggcccccttcggcagccctgctgctgatgcccctcctcctgctgtggccgctgctgaggtgcccggcagcgagggcggcagcgccaccggggagagcgcctgccactttgagggccagcagaggctgcggggggcccacgccgagccctatggagccagccctggctttgggaaggagcccgcccctcctgtggccgtgtggaagggccacagcttcaacaccatcagcggccgggaggccgagaagttcagcggcaaggacagcgggaaaggagacagcgacttcaatgacagcgacagcgacatctctggagatgccctgaagaaggacctgatcaaccacatgcagagcggcctgtgggcctgcacagctgagtgcaagatcctgggccacagcgaccgctgctggagccccagctgcagcggccccaatgcccaccccagcccccaccccccagcccagatgagcaccttctgcaagagcaccagcctgccccgggaccccctgcggcgggacaactactaccaggcccagctgcccaagacagtgggcctgcagagcgtgtatgagaaggtgctgcaccgggactatgacagaacagtgaccctgctgagccccccccggcccggccgcctgcctgacctgcaggagattggagtgcccctgtaccagagccccccaggccgctacctgagccccaagaagggggccaatgaaaatgtgtag

SEQ ID NO: 166483 - DNA, 2742 bp, synthetic construct
  misc_feature 1..2742: note = Description of Artificial Sequence: Synthetic coding sequence
  source 1..2742: mol_type = other DNA
atgagccctgtgcggcgctggggcagcccctgcctcttccccctgcagctgttcagcctgtgctgggtgctgtctgtggcccagagcaagacagtgcgctacagcacctttgaagaagatgcccctggcaccgtcatcggcaccctggccgaggacctgcacatgaaggtgtctggggacaccagcttccggctgatgaagcagttcaacagcagcctgctgcgggtgcgggagggagatggccagctgactgtgggagatgctggcctggaccgggagcggctgtgtggccaggccccccagtgtgtgctggcctttgatgtggtgtccttcagccaggagcagttccggctggtgcacgtggaggtggaggtgagagatgtgaatgaccacgccccccgcttcccccgggcccagatccctgtggaggtgtctgagggcgctgctgtgggcacccgcatccccctggaggtgcctgtggatgaagatgtgggcgccaacggcctgcagacagtgcggctggccgagccccacagccccttccgggtggagctgcagaccagggcagatggagcccagtgtgccgacctggtgctgctgcaggagctggaccgggagagccaggccgcctacagcctggagctggtggcccaggacggcggccggcccccaagaagtgccacagctgccctgtctgtgcgggtgctggatgccaatgaccacagccctgccttcccccagggcgctgtggccgaggtggagctggctgaagatgcccctgtgggcagcctgctgctggacctggatgctgctgaccctgatgagggccccaatggagatgtggtgtttgcctttggagcccggaccccacctgaggcccggcggctcttccggctggaccccaggagcggccgcctgaccctggccggccctgtggactatgaaaggcaggacacctatgagctggatgtgcgggcccaggaccggggccctggccccagggctgccacctgcaaggtgattgtgcgcatcagagatgtgaatgacaatgccccagacatcgccatcacccccctggccgcccctggggccggcaacctgaccctgcggagaaatggccaggtgacctaccgcctgctggaggccgaggtgggccgggccggcggcgctgtgtccacctacgtgtctgtggaccctgccactggagccatctatgccctgcggagctttgattatgagaccctgcggcagctggatgtgcgcatccaggccagtgatggcggcagcccccagctgagcagcagcgccctggtgcaggtgcgggtgctggaccagaatgaccacgcccctgtgctggtgcacccagccccagccaacggcagcctggaggtggccgtgcccggccgcacagccaaggacacagtggtggcccgggtgcaggccagagatgctgatgaaggagccaatggagagctggcctttgagctgcagcagcaggagccccgggaggcctttgccatcggcagaagaactggagagatcctgctgactggagacctgagccaggagcccccaggccgggtcttccgggccctgctggtgatcagtgatggcggccggccccccctgaccaccacagccaccgtgtcctttgtggtgacagctgggggcggccggggccctgctgccccagccagcgctggcagccctgagaggagcaggcctcctggcagccggctgggcgtgtctggctctgtgctgcagtgggacacccccctcatcgtcatcatcgtgctggccggcagctgcaccctgctgctggccgccatcatcgccatcgccaccacctgcaacagaaggaagaaggaggtgaggaagggcggggccctgcgggaggagaggcctggagctgctgggggcggggccagcgcccctggcagccctgaggaggccgcccggggagctggcccccggcccaacatgtttgatgtgctgaccttccctggcaccgggaaggcccccttcggcagccctgctgctgatgcccctcctcctgctgtggccgctgctgaggtgcccggcagcgagggcggcagcgccactggagagagcgcctgccactttgagggccagcagaggctgcggggggcccatgctgagccctacggggccagccctggctttgggaaggagcccgcccctcctgtggccgtgtggaagggccacagcttcaacaccatcagcggccgggaggccgagaagttcagcggcaaggacagcggcaagggggacagcgacttcaatgacagcgacagcgacatctctggagatgccctgaagaaggacctgatcaaccacatgcagagcggcctgtgggcctgcacagctgagtgcaagatcctgggccacagcgaccgctgctggagccccagctgcagcggccccaatgcccaccccagcccccaccccccagcccagatgagcaccttctgcaagagcaccagcctgccccgggaccccctgcggcgggacaactactaccaggcccagctgcccaagacagtgggcctgcagagcgtgtatgagaaggtgctgcaccgggactatgacagaacagtgaccctgctgagcccccccaggcctggccgcctgcctgacctgcaggagattggagtgcccctgtaccagagccccccaggccgctacctgagccccaagaagggggccaatgaaaatgtgtag

SEQ ID NO: 166484 - DNA, 3612 bp, synthetic construct
  misc_feature 1..3612: note = Description of Artificial Sequence: Synthetic coding sequence
  source 1..3612: mol_type = other DNA
atggacctgcgggacttctacctgctggccgccctgattgcctgcctgcggctggacagcgccatcgcccaggagctgatctacaccatccgggaggagctgcctgaaaatgtgcccatcggcaacatccccaaggacctgaacatcagccacatcaatgctgccaccggcaccagcgccagcctggtgtaccgcctggtgtccaaggctggagatgcccccctggtgaaggtgagcagcagcactggagagatcttcaccaccagcaacagaattgaccgggagaagctgtgtgccggggccagctatgcagaggagaatgaatgcttctttgagctggaggtggtgatcctgcccaatgacttcttccgcctcatcaagatcaagatcatcgtgaaggacaccaatgacaatgcccccatgttccccagccctgtgatcaacatcagcatccctgagaacaccctcatcaacagccgcttccccatccccagcgccacagatcctgacaccggcttcaacggggtgcagcactatgagctgctgaatggccagagcgtgtttggcctggacatcgtggagaccccagagggggagaagtggccccagctgattgtgcagcagaacctggaccgggagcagaaggacacctacgtgatgaagatcaaggtggaggatggcggcaccccccagaagagcagcacagccatcctgcaggtgacagtgtctgatgtgaatgacaacagacctgtgttcaaggagggccaggtggaggtgcacatcccagaaaatgcccctgtgggcaccagcgtcatccagctgcacgccacagatgctgacatcggcagcaatgctgagatccgctacatctttggagcccaggtggccccagccaccaagaggctgtttgccctgaacaacaccaccggcctcatcaccgtgcagaggagcctggaccgggaggagacagccatccacaaggtgacagtgctggccagtgatggcagcagcaccccagcccgggccaccgtgaccatcaacgtgacagatgtgaatgacaacccccccaacatcgacctgcgctacatcatcagccccatcaatggcaccgtgtacctgtctgagaaggaccctgtgaacaccaagatcgccctgatcaccgtgtctgacaaggacacagatgtgaatggcaaggtgatctgcttcatcgagcgggaggtgcccttccacctgaaggctgtgtatgacaaccagtacctgctggagaccagcagcctgctggactatgagggcaccaaggagttctccttcaagatcgtggccagtgacagcggcaagcccagcctgaaccagacagccctggtgcgggtgaagctggaggatgaaaatgacaacccccccatcttcaaccagcccgtcatcgagctgtctgtgtctgagaacaacagaagaggcctgtacctgaccaccatcagcgccacagatgaggacagcggcaagaatgctgacatcgtgtaccagctgggccccaatgccagcttctttgacctggacaggaagacaggagtgctgacagccagccgggtgtttgaccgggaggagcaggagcgcttcatcttcaccgtgacagcccgggacaatggcaccccacccctgcagagccaggccgctgtgattgtgacagtgctggatgaaaatgacaacagccccaagttcacccacaaccacttccagttctttgtgtctgagaacctgcccaagtacagcacagtgggcgtcatcaccgtgacagatgctgatgctggggagaacaaggctgtgaccctgagcatcctgaatgacaatgacaactttgtgctggacccctacagcggggtcatcaagagcaatgtgtcctttgaccgggagcagcagagcagctacacctttgatgtgaaggccacagatggcggccagcccccaagaagcagcacagccaaggtgaccatcaacgtgatggatgtgaatgacaacagccctgtggtgatcagcccccccagcaacaccagcttcaagctggtgcccctgagcgccatccctggctctgtggtggccgaggtgtttgctgtggatgtggacaccggcatgaatgctgagctgaagtacaccatcgtgtctggcaacaacaagggcctcttcagaattgatcctgtgacaggcaacatcaccctggaggagaagccagcccccacagatgtgggcctgcaccggctggtggtgaacatcagtgacctgggctaccccaagagcctgcacaccctggtgctggtgttcctgtatgtgaatgacacagctggaaatgccagctacatctatgacctgatccggaggaccatggagacccccctggacaggaacatcggggacagcagccagccctaccagaatgaagactacctgaccatcatgattgccatcatcgccggggccatggtggtgattgtggtgatctttgtgacagtgctggtgcgctgcagacatgccagccgcttcaaggccgcccagaggagcaagcagggcgctgagtggatgagccccaaccaggagaacaagcagaacaagaagaagaagaggaagaagaggaagagccccaagagcagcctgctgaactttgtgaccatcgaggagagcaagccagatgatgctgtgcatgagcccatcaatggcaccatcagcctgcctgctgagctggaggagcagagcatcggccgctttgactggggccctgccccacccaccaccttcaagcccaacagcccagacctggccaagcactacaagagcgccagcccccagcctgccttccacctgaagccagacacccctgtgtctgtgaagaagcaccacgtgatccaggagctgcccctggacaacacctttgtgggcggctgtgacaccctgagcaagaggagcagcaccagcagtgaccacttcagcgcctctgaatgtagcagccagggcggcttcaagaccaagggccccctgcacacccggcagagccagaggagagtgaccttccacctgcctgatggcagccaggagagctgcagcgacagcggcctgggggaccacgagcctgtgggcagcggcaccctcatcagccaccccctgcccctggtgcagccccaggatgagttctatgaccaggccagcccagacaagaggacagaagcagatggcaacagcgaccccaacagtgatggccccctgggcccccggggcctggccgaggccacagagatgtgcacccaggagtgcctggtgctgggccacagcgacaactgctggatgcctcctggcctgggcccctaccagcaccccaagagccccctgagcacctttgccccccagaaggagtgggtgaagaaggacaagctggtgaatggccacaccctgacccgggcctggaaggaggacagcaacagaaaccagttcaatgacaggaagcagtatggcagcaatgaaggccacttcaacaacggcagccacatgacagacatccccctggccaacctgaagagctacaagcaggccggcggggccacagagagccccaaggagcaccagctgtag

SEQ ID NO: 166485 - DNA, 3099 bp, synthetic construct
  misc_feature 1..3099: note = Description of Artificial Sequence: Synthetic coding sequence
  source 1..3099: mol_type = other DNA
atggacctgcgggacttctacctgctggccgccctgattgcctgcctgcggctggacagcgccatcgcccaggagctgatctacaccatccgggaggagctgcctgaaaatgtgcccatcggcaacatccccaaggacctgaacatcagccacatcaatgctgccaccggcaccagcgccagcctggtgtaccgcctggtgtccaaggctggagatgcccccctggtgaaggtgagcagcagcactggagagatcttcaccaccagcaacagaattgaccgggagaagctgtgtgccggggccagctatgcagaggagaatgaatgcttctttgagctggaggtggtgatcctgcccaatgacttcttccgcctcatcaagatcaagatcatcgtgaaggacaccaatgacaatgcccccatgttccccagccctgtgatcaacatcagcatccctgagaacaccctcatcaacagccgcttccccatccccagcgccacagatcctgacaccggcttcaacggggtgcagcactatgagctgctgaatggccagagcgtgtttggcctggacatcgtggagaccccagagggggagaagtggccccagctgattgtgcagcagaacctggaccgggagcagaaggacacctacgtgatgaagatcaaggtggaggatggcggcaccccccagaagagcagcacagccatcctgcaggtgacagtgtctgatgtgaatgacaacagacctgtgttcaaggagggccaggtggaggtgcacatcccagaaaatgcccctgtgggcaccagcgtcatccagctgcacgccacagatgctgacatcggcagcaatgctgagatccgctacatctttggagcccaggtggccccagccaccaagaggctgtttgccctgaacaacaccaccggcctcatcaccgtgcagaggagcctggaccgggaggagacagccatccacaaggtgacagtgctggccagtgatggcagcagcaccccagcccgggccaccgtgaccatcaacgtgacagatgtgaatgacaacccccccaacatcgacctgcgctacatcatcagccccatcaatggcaccgtgtacctgtctgagaaggaccctgtgaacaccaagatcgccctgatcaccgtgtctgacaaggacacagatgtgaatggcaaggtgatctgcttcatcgagcgggaggtgcccttccacctgaaggctgtgtatgacaaccagtacctgctggagaccagcagcctgctggactatgagggcaccaaggagttctccttcaagatcgtggccagtgacagcggcaagcccagcctgaaccagacagccctggtgcgggtgaagctggaggatgaaaatgacaacccccccatcttcaaccagcccgtcatcgagctgtctgtgtctgagaacaacagaagaggcctgtacctgaccaccatcagcgccacagatgaggacagcggcaagaatgctgacatcgtgtaccagctgggccccaatgccagcttctttgacctggacaggaagacaggagtgctgacagccagccgggtgtttgaccgggaggagcaggagcgcttcatcttcaccgtgacagcccgggacaatggcaccccacccctgcagagccaggccgctgtgattgtgacagtgctggatgaaaatgacaacagccccaagttcacccacaaccacttccagttctttgtgtctgagaacctgcccaagtacagcacagtgggcgtcatcaccgtgacagatgctgatgctggggagaacaaggctgtgaccctgagcatcctgaatgacaatgacaactttgtgctggacccctacagcggggtcatcaagagcaatgtgtcctttgaccgggagcagcagagcagctacacctttgatgtgaaggccacagatggcggccagcccccaagaagcagcacagccaaggtgaccatcaacgtgatggatgtgaatgacaacagccctgtggtgatcagcccccccagcaacaccagcttcaagctggtgcccctgagcgccatccctggctctgtggtggccgaggtgtttgctgtggatgtggacaccggcatgaatgctgagctgaagtacaccatcgtgtctggcaacaacaagggcctcttcagaattgatcctgtgacaggcaacatcaccctggaggagaagccagcccccacagatgtgggcctgcaccggctggtggtgaacatcagtgacctgggctaccccaagagcctgcacaccctggtgctggtgttcctgtatgtgaatgacacagctggaaatgccagctacatctatgacctgatccggaggaccatggagacccccctggacaggaacatcggggacagcagccagccctaccagaatgaagactacctgaccatcatgattgccatcatcgccggggccatggtggtgattgtggtgatctttgtgacagtgctggtgcgctgcagacatgccagccgcttcaaggccgcccagaggagcaagcagggcgctgagtggatgagccccaaccaggagaacaagcagaacaagaagaagaagaggaagaagaggaagagccccaagagcagcctgctgaactttgtgaccatcgaggagagcaagccagatgatgctgtgcatgagcccatcaatggcaccatcagcctgcctgctgagctggaggagcagagcatcggccgctttgactggggccctgccccacccaccaccttcaagcccaacagcccagacctggccaagcactacaagagcgccagcccccagcctgccttccacctgaagccagacacccctgtgtctgtgaagaagcaccacgtgatccaggagctgcccctggacaacacctttgtgggcggctgtgacaccctgagcaagaggagcagcaccagcagtgaccacttcagcgcctctgaatgtagcagccagggcggcttcaagaccaagggccccctgcacacccggcaggtgaatgagcacttctactggagcatcagcacagcctacaagtgccctgtgaaccagtactag

SEQ ID NO: 166486 - DNA, 3714 bp, synthetic construct
  misc_feature 1..3714: note = Description of Artificial Sequence: Synthetic coding sequence
  source 1..3714: mol_type = other DNA
atggacctgcgggacttctacctgctggccgccctgattgcctgcctgcggctggacagcgccatcgcccaggagctgatctacaccatccgggaggagctgcctgaaaatgtgcccatcggcaacatccccaaggacctgaacatcagccacatcaatgctgccaccggcaccagcgccagcctggtgtaccgcctggtgtccaaggctggagatgcccccctggtgaaggtgagcagcagcactggagagatcttcaccaccagcaacagaattgaccgggagaagctgtgtgccggggccagctatgcagaggagaatgaatgcttctttgagctggaggtggtgatcctgcccaatgacttcttccgcctcatcaagatcaagatcatcgtgaaggacaccaatgacaatgcccccatgttccccagccctgtgatcaacatcagcatccctgagaacaccctcatcaacagccgcttccccatccccagcgccacagatcctgacaccggcttcaacggggtgcagcactatgagctgctgaatggccagagcgtgtttggcctggacatcgtggagaccccagagggggagaagtggccccagctgattgtgcagcagaacctggaccgggagcagaaggacacctacgtgatgaagatcaaggtggaggatggcggcaccccccagaagagcagcacagccatcctgcaggtgacagtgtctgatgtgaatgacaacagacctgtgttcaaggagggccaggtggaggtgcacatcccagaaaatgcccctgtgggcaccagcgtcatccagctgcacgccacagatgctgacatcggcagcaatgctgagatccgctacatctttggagcccaggtggccccagccaccaagaggctgtttgccctgaacaacaccaccggcctcatcaccgtgcagaggagcctggaccgggaggagacagccatccacaaggtgacagtgctggccagtgatggcagcagcaccccagcccgggccaccgtgaccatcaacgtgacagatgtgaatgacaacccccccaacatcgacctgcgctacatcatcagccccatcaatggcaccgtgtacctgtctgagaaggaccctgtgaacaccaagatcgccctgatcaccgtgtctgacaaggacacagatgtgaatggcaaggtgatctgcttcatcgagcgggaggtgcccttccacctgaaggctgtgtatgacaaccagtacctgctggagaccagcagcctgctggactatgagggcaccaaggagttctccttcaagatcgtggccagtgacagcggcaagcccagcctgaaccagacagccctggtgcgggtgaagctggaggatgaaaatgacaacccccccatcttcaaccagcccgtcatcgagctgtctgtgtctgagaacaacagaagaggcctgtacctgaccaccatcagcgccacagatgaggacagcggcaagaatgctgacatcgtgtaccagctgggccccaatgccagcttctttgacctggacaggaagacaggagtgctgacagccagccgggtgtttgaccgggaggagcaggagcgcttcatcttcaccgtgacagcccgggacaatggcaccccacccctgcagagccaggccgctgtgattgtgacagtgctggatgaaaatgacaacagccccaagttcacccacaaccacttccagttctttgtgtctgagaacctgcccaagtacagcacagtgggcgtcatcaccgtgacagatgctgatgctggggagaacaaggctgtgaccctgagcatcctgaatgacaatgacaactttgtgctggacccctacagcggggtcatcaagagcaatgtgtcctttgaccgggagcagcagagcagctacacctttgatgtgaaggccacagatggcggccagcccccaagaagcagcacagccaaggtgaccatcaacgtgatggatgtgaatgacaacagccctgtggtgatcagcccccccagcaacaccagcttcaagctggtgcccctgagcgccatccctggctctgtggtggccgaggtgtttgctgtggatgtggacaccggcatgaatgctgagctgaagtacaccatcgtgtctggcaacaacaagggcctcttcagaattgatcctgtgacaggcaacatcaccctggaggagaagccagcccccacagatgtgggcctgcaccggctggtggtgaacatcagtgacctgggctaccccaagagcctgcacaccctggtgctggtgttcctgtatgtgaatgacacagctggaaatgccagctacatctatgacctgatccggaggaccatggagacccccctggacaggaacatcggggacagcagccagccctaccagaatgaagactacctgaccatcatgattgccatcatcgccggggccatggtggtgattgtggtgatctttgtgacagtgctggtgcgctgcagacatgccagccgcttcaaggccgcccagaggagcaagcagggcgctgagtggatgagccccaaccaggagaacaagcagaacaagaagaagaagaggaagaagaggaagagccccaagagcagcctgctgaactttgtgaccatcgaggagagcaagccagatgatgctgtgcatgagcccatcaatggcaccatcagcctgcctgctgagctggaggagcagagcatcggccgctttgactggggccctgccccacccaccaccttcaagcccaacagcccagacctggccaagcactacaagagcgccagcccccagcctgccttccacctgaagccagacacccctgtgtctgtgaagaagcaccacgtgatccaggagctgcccctggacaacacctttgtgggcggctgtgacaccctgagcaagaggagcagcaccagcagtgaccacttcagcgcctctgaatgtagcagccagggcggcttcaagaccaagggccccctgcacacccggcagtgcaacagccacagcaagagtgacaacatccctgtgaccccccagaagtgccccagcagcacaggcttccacatccaggagaatgaggagagccactatgagagccagaggagagtgaccttccacctgcctgatggcagccaggagagctgcagcgacagcggcctgggggaccacgagcctgtgggcagcggcaccctcatcagccaccccctgcccctggtgcagccccaggatgagttctatgaccaggccagcccagacaagaggacagaagcagatggcaacagcgaccccaacagtgatggccccctgggcccccggggcctggccgaggccacagagatgtgcacccaggagtgcctggtgctgggccacagcgacaactgctggatgcctcctggcctgggcccctaccagcaccccaagagccccctgagcacctttgccccccagaaggagtgggtgaagaaggacaagctggtgaatggccacaccctgacccgggcctggaaggaggacagcaacagaaaccagttcaatgacaggaagcagtatggcagcaatgaaggccacttcaacaacggcagccacatgacagacatccccctggccaacctgaagagctacaagcaggccggcggggccacagagagccccaaggagcaccagctgtag

SEQ ID NO: 166487 - DNA, 3612 bp, synthetic construct; identical to SEQ ID NO: 166484
  misc_feature 1..3612: note = Description of Artificial Sequence: Synthetic coding sequence
  source 1..3612: mol_type = other DNA

SEQ ID NO: 166488 - DNA, 3714 bp, synthetic construct; identical to SEQ ID NO: 166486
  misc_feature 1..3714: note = Description of Artificial Sequence: Synthetic coding sequence
  source 1..3714: mol_type = other DNA

SEQ ID NO: 166489 - DNA, 2424 bp, synthetic construct
  misc_feature 1..2424: note = Description of Artificial Sequence: Synthetic coding sequence
  source 1..2424: mol_type = other DNA
atggtgttcagcagaagaggaggcctgggcgcccgggacctgctgctgtggctgctgctgctggccgcctgggaggtgggcagcggccagctgcactacagcatccctgaggaggccaagcacggcacctttgtgggccgggtggcccaggacctgggcctggagctggccgagctggtgcccaggctcttccgggtggccagcaagacccaccgggacctgctggaggtgaacctgcagaatggcatcctgtttgtgaacagcagaattgaccgggaggagctgtgccagtggagcgcagaatgttccatccacctggagctgattgctgaccggcccctgcaggtgttccacgtggaggtgaaggtgaaggacatcaatgacaacccccctgtgttccggggccgggagcagatcatcttcatccctgagagccggctgctgaacagccgcttccccatcgagggcgctgctgatgctgacatcggggccaatgccctgctgacctacaccctgagccccagcgactacttcagcctggatgtggaggccagtgatgagctgagcaagagcctgtggctggagctgaggaagtacctggaccgggaggagaccccagagctgcacctgctgctgacagccacagatggcggcaagccagagctgcagggcaccgtggagctgctgatcaccgtgctggatgtgaatgacaatgcccccctgtttgaccaggccgtgtacagagtgcacctgctggagaccacagccaacggcaccctggtgaccaccctgaatgccagtgatgctgatgagggcgtgaatggagaggtggtgttctcctttgattctggcatcagccgggacatccaggagaagttcaaggtggacagcagcagtggagagatccggctgattgacaagctggactatgaggagaccaagagctatgagatccaggtgaaggctgtggacaagggcagcccccccatgagcaaccactgcaaggtgctggtgaaggtgctggatgtgaatgacaatgcccctgagctggccgtgaccagcctgtacctgcccatcagagaagatgcccccctgagcacagtgattgccctgatcaccgtgtctgaccgggacagcggggccaacggccaggtgacctgcagcctgatgccccacgtgcccttcaagctggtgtccaccttcaagaactactacagcctggtgctggacagcgccctggaccgggagagcctgtctgtgtatgagctggtggtgacagccagagatggcggcagccccagcctgtgggccacagcccgggtgtctgtggaggtggctgatgtgaatgacaatgccccagcctttgcccagcctgagtacacagtgtttgtgaaggagaacaaccccccaggctgccacatcttcaccgtgtctgccagagatgctgatgcccaggagaatgccctggtgtcctacagcctggtggagaggagagtgggggagcgggccctgagcaactacgtgtctgtgcacgccgagagcggcaaggtgtatgccctgcagcccctggaccacgaggagctggagctgctgcagttccaggtgtctgccagagatgctggggtgccccccctgggcagcaatgtgaccctgcaggtgtttgtgctggatgaaaatgacaatgccccagccctgctggccccccgggtgggcggcaccatcggggctgtgtctgagctggtgccccggctggtgggcgccggccacgtggtggccaaggtgcgggctgtggatgctgacagcggctacaatgcctggctgtcctatgagctgcagcctgctgctggaggagcccgcatccccttccgggtgggcctgtacaccggggagatcagcaccaccagggtgctggatgaggccgacctgagccgctaccgcctgctggtgctggtgaaggaccacggggagcccgccctgacagccacagccaccgtgctggtgtccctggtggagagcggccaggcccccaaggccagcagccgggcctctgtgggcgtggccggccctgaggccgccctggtggatgtgaatgtgtacctgatcatcgccatctgtgctgtgagcagcctgctggtgctgaccctgctgctgtacacagccctgcgctgcagcgtgcccccaacagagggcgcctacgtgcctgggaagcccaccctggtgtgcagcagcgccctgggctcctggagcaacagccagcagaggcggcagagggtgtgcagcagcgagggcccccccaagacagacctgatggccttcagccctggcctgagccccagcctgaacaccagcgagagaaatgagcagcctgaggccaacctggacctgtctggaaatgtgagccccacctttgagttctggctgtag

SEQ ID NO: 166490 - DNA, 2061 bp, synthetic construct
  misc_feature 1..2061: note = Description of Artificial Sequence: Synthetic coding sequence
  source 1..2061: mol_type = other DNA
atggtgttcagcagaagaggaggcctgggcgcccgggacctgctgctgtggctgctgctgctggccgcctgggaggtgggcagcggccagctgcactacagcatccctgaggaggccaagcacggcacctttgtgggccgggtggcccaggacctgggcctggagctggccgagctggtgcccaggctcttccgggtggccagcaagacccaccgggacctgctggaggtgaacctgcagaatggcatcctgtttgtgaacagcagaattgaccgggaggagctgtgccagtggagcgcagaatgttccatccacctggagctgattgctgaccggcccctgcaggtgttccacgtggaggtgaaggtgaaggacatcaatgacaacccccctgtgttccggggccgggagcagatcatcttcatccctgagagccggctgctgaacagccgcttccccatcgagggcgctgctgatgctgacatcggggccaatgccctgctgacctacaccctgagccccagcgactacttcagcctggatgtggaggccagtgatgagctgagcaagagcctgtggctggagctgaggaagtacctggaccgggaggagaccccagagctgcacctgctgctgacagccacagatggcggcaagccagagctgcagggcaccgtggagctgctgatcaccgtgctggatgtgaatgacaatgcccccctgtttgaccaggccgtgtacagagtgcacctgctggagaccacagccaacggcaccctggtgaccaccctgaatgccagtgatgctgatgagggcgtgaatggagaggtggtgttctcctttgattctggcatcagccgggacatccaggagaagttcaaggtggacagcagcagtggagagatccggctgattgacaagctggactatgaggagaccaagagctatgagatccaggtgaaggctgtggacaagggcagcccccccatgagcaaccactgcaaggtgctggtgaaggtgctggatgtgaatgacaatgcccctgagctggccgtgaccagcctgtacctgcccatcagagaagatgcccccctgagcacagtgattgccctgatcaccgtgtctgaccgggacagcggggccaacggccaggtgacctgcagcctgatgccccacgtgcccttcaagctggtgtccaccttcaagaactactacagcctggtgctggacagcgccctggaccgggagagcctgtctgtgtatgagctggtggtgacagccagagatggcggcagccccagcctgtgggccacagcccgggtgtctgtggaggtggctgatgtgaatgacaatgccccagcctttgcccagcctgagtacacagtgtttgtgaaggagaacaaccccccaggctgccacatcttcaccgtgtctgccagagatgctgatgcccaggagaatgccctggtgtcctacagcctggtggagaggagagtgggggagcgggccctgagcaactacgtgtctgtgcacgccgagagcggcaaggtgtatgccctgcagcccctggaccacgaggagctggagctgctgcagttccagccccggcagcccaacccagactggagatacagcgccagcctgcgggccggcatgcacagctctgtgcacctggaggaggccggcatcctgcgggccggccctgggggccctgaccagcagtggcccaccgtgagcagcgccaccccagagcctgaggccggggaggtgagcccccctgtgggcgctggggtgaacagcaacagctggaccttcaagtatggccctggcaaccccaagcagagcggccctggagagctgcctgacaagttcatcatccctggcagccctgccatcatcagcatccggcaggagcccaccaacagccagattgacaagagtgacttcatcaccttcggcaagaaggaggagaccaagaagaagaagaagaagaagaagggcaacaagacccaggagaagaaggagaagggcaacagcaccacagacaacagcgaccagtag

SEQ ID NO: 166491 - DNA, 2853 bp, synthetic construct
  misc_feature 1..2853: note = Description of Artificial Sequence: Synthetic coding sequence
  source 1..2853: mol_type = other DNA
atggtgttcagcagaagaggaggcctgggcgcccgggacctgctgctgtggctgctgctgctggccgcctgggaggtgggcagcggccagctgcactacagcatccctgaggaggccaagcacggcacctttgtgggccgggtggcccaggacctgggcctggagctggccgagctggtgcccaggctcttccgggtggccagcaagacccaccgggacctgctggaggtgaacctgcagaatggcatcctgtttgtgaacagcagaattgaccgggaggagctgtgccagtggagcgcagaatgttccatccacctggagctgattgctgaccggcccctgcaggtgttccacgtggaggtgaaggtgaaggacatcaatgacaacccccctgtgttccggggccgggagcagatcatcttcatccctgagagccggctgctgaacagccgcttccccatcgagggcgctgctgatgctgacatcggggccaatgccctgctgacctacaccctgagccccagcgactacttcagcctggatgtggaggccagtgatgagctgagcaagagcctgtggctggagctgaggaagtacctggaccgggaggagaccccagagctgcacctgctgctgacagccacagatggcggcaagccagagctgcagggcaccgtggagctgctgatcaccgtgctggatgtgaatgacaatgcccccctgtttgaccaggccgtgtacagagtgcacctgctggagaccacagccaacggcaccctggtgaccaccctgaatgccagtgatgctgatgagggcgtgaatggagaggtggtgttctcctttgattctggcatcagccgggacatccaggagaagttcaaggtggacagcagcagtggagagatccggctgattgacaagctggactatgaggagaccaagagctatgagatccaggtgaaggctgtggacaagggcagcccccccatgagcaaccactgcaaggtgctggtgaaggtgctggatgtgaatgacaatgcccctgagctggccgtgaccagcctgtacctgcccatcagagaagatgcccccctgagcacagtgattgccctgatcaccgtgtctgaccgggacagcggggccaacggccaggtgacctgcagcctgatgccccacgtgcccttcaagctggtgtccaccttcaagaactactacagcctggtgctggacagcgccctggaccgggagagcctgtctgtgtatgagctggtggtgacagccagagatggcggcagccccagcctgtgggccacagcccgggtgtctgtggaggtggctgatgtgaatgacaatgccccagcctttgcccagcctgagtacacagtgtttgtgaaggagaacaaccccccaggctgccacatcttcaccgtgtctgccagagatgctgatgcccaggagaatgccctggtgtcctacagcctggtggagaggagagtgggggagcgggccctgagcaactacgtgtctgtgcacgccgagagcggcaaggtgtatgccctgcagcccctggaccacgaggagctggagctgctgcagttccaggtgtctgccagagatgctggggtgccccccctgggcagcaatgtgaccctgcaggtgtttgtgctggatgaaaatgacaatgccccagccctgctggccccccgggtgggcggcaccatcggggctgtgtctgagctggtgccccggctggtgggcgccggccacgtggtggccaaggtgcgggctgtggatgctgacagcggctacaatgcctggctgtcctatgagctgcagcctgctgctggaggagcccgcatccccttccgggtgggcctgtacaccggggagatcagcaccaccagggtgctggatgaggccgacctgagccgctaccgcctgctggtgctggtgaaggaccacggggagcccgccctgacagccacagccaccgtgctggtgtccctggtggagagcggccaggcccccaaggccagcagccgggcctctgtgggcgtggccggccctgaggccgccctggtggatgtgaatgtgtacctgatcatcgccatctgtgctgtgagcagcctgctggtgctgaccctgctgctgtacacagccctgcgctgcagcgtgcccccaacagagggcgcctacgtgcctgggaagcccaccctggtgtgcagcagcgccctgggctcctggagcaacagccagcagaggcggcagagggtgtgcagcagcgagggcccccccaagacagacctgatggccttcagccctggcctgagccccagcctgaacaccagcgagagaaatgagcagcctgaggccaacctggacctgagcggcaacccccggcagcccaacccagactggagatacagcgccagcctgcgggccggcatgcacagctctgtgcacctggaggaggccggcatcctgcgggccggccctgggggccctgaccagcagtggcccaccgtgagcagcgccaccccagagcctgaggccggggaggtgagcccccctgtgggcgctggggtgaacagcaacagctggaccttcaagtatggccctggcaaccccaagcagagcggccctggagagctgcctgacaagttcatcatccctggcagccctgccatcatcagcatccggcaggagcccaccaacagccagattgacaagagtgacttcatcaccttcggcaagaaggaggagaccaagaagaagaagaagaagaagaagggcaacaagacccaggagaagaaggagaagggcaacagcaccacagacaacagcgaccagtag

SEQ ID NO: 166492 - DNA, 2847 bp, synthetic construct
  misc_feature 1..2847: note = Description of Artificial Sequence: Synthetic coding sequence
  source 1..2847: mol_type = other DNA
atggtgagccgctgcagctgcctgggcgtgcagtgcctgctgctgagcctgctgctgctggccgcctgggaggtgggcagcggccagctgcactacagcgtgtatgaggaggcccggcacggcacctttgtgggcagaattgcccaggacctgggcctggagctggccgagctggtgcagaggctcttccgggtggccagcaagagacatggagacctgctggaggtgaacctgcagaatggcatcctgtttgtgaacagcagaattgaccgggaggagctgtgtggccgctctgtggagtgcagcatccacctggaggtgattgtggaccggcccctgcaggtgttccacgtggatgtggaggtgaaggacatcaatgacaaccccccacgcttctctgtgacagagcagaagctgagcatccctgagagccggctgctggacagccgcttccccctggagggcgccagtgatgctgatgtgggagaaaatgccctgctgacctacaagctgagccccaatgagtactttgtgctggacatcatcaacaagaaggacaaggacaagtttcctgtgctggtgctgaggaagctgctggaccgggaggagaacccccagctgaagctgctgctgacagccacagatggcggcaagccagagttcaccggctctgtgtccctgctgatcctggtgctggatgccaatgacaatgcccccatctttgacaggcctgtgtatgaggtgaagatgtatgagaaccaggtgaaccagaccctggtgatccggctgaatgccagtgacagtgatgagggcatcaacaaggagatgatgtacagcttcagcagcctggtgccccccaccatccggaggaagttctggatcaatgaaagaactggagagatcaaggtgaatgatgccatcgactttgaggacagcaacacctatgagatccacgtggatgtgacagacaagggcaacccccccatggtgggccactgcaccgtgctggtggagctgctggatgaaaatgacaacagccctgaggtgattgtgaccagcctgagcctgcctgtgaaggaggatgcccaggtgggcaccgtcatcgccctgatctctgtgtctgaccatgacagcggggccaacggccaggtgacctgcagcctgacccctcatgtgcccttcaagctggtgtccacctacaagaactactacagcctggtgctggacagcgccctggaccgggagcgggtgtctgcctatgagctggtggtgacagccagagatggcggcagcccccccctgtgggccacagcctctgtgtctgtggaggtggctgatgtgaatgacaatgccccagcctttgcccagagcgagtacacagtgtttgtgaaggagaacaaccccccaggctgccacatcttcaccgtgtctgcctgggatgctgatgcccaggagaatgccctggtgtcctacagcctggtggagcggcggctgggggagaggagcctgagcagctatgtgtctgtgcatgctgagagcggcaaggtgtatgccctgcagcccctggaccacgaggagctggagctgctgcagttccaggtgtctgccagagatggcggcgtgccccccctgggcagcaacctgaccctgcaggtgtttgtgctggatgaaaatgacaatgccccagccctgctggccagccctgctggcagcgctgggggcgctgtgtctgagctggtgctgcggtctgtggtggccggccacgtggtggccaaggtgcgggctgtggatgctgacagcggctacaatgcctggctgtcctatgagctgcagagcgctgctgtgggcgcccgcatccccttccgggtgggcctgtacacaggagagatcagcaccacccgggccctggatgaaacagacagcccccggcagaggctgctggtgctggtgaaggaccatggagagcccagcctgacagccacagccaccgtgctggtgtccctggtggagggcagccaggcccccaaggccagcagccgggcctctgtgggcgtggcccctgaggtggccctggtggatgtgaatgtgtacctgatcatcgccatctgtgctgtgagcagcctgctggtgctgaccctgctgctgtacacagccctgcgctgcagcgctgcccccacagagggcgcctgtggccctgtgaagcccaccctggtgtgcagcagcgctgtgggctcctggagctacagccagcagaggcggcagagggtgtgcagcggggagggcctgcccaaggctgacctgatggccttcagccccagcctgcccccctgccccatggtggatgtggatggagaggaccagagcattggaggagaccacagcaggaagccccggcagcccaacccagactggagatacagcgccagcctgcgggccggcatgcacagctctgtgcacctggaggaggccggcatcctgcgggccggccctgggggccctgaccagcagtggcccaccgtgagcagcgccaccccagagcctgaggccggggaggtgagcccccctgtgggcgctggggtgaacagcaacagctggaccttcaagtatggccctggcaaccccaagcagagcggccctggagagctgcctgacaagttcatcatccctggcagccctgccatcatcagcatccggcaggagcccaccaacagccagattgacaagagtgacttcatcaccttcggcaagaaggaggagaccaagaagaagaagaagaagaagaagggcaacaagacccaggagaagaaggagaagggcaacagcaccacagacaacagcgaccagtag

SEQ ID NO: 166493 - DNA, 2058 bp, synthetic construct
  misc_feature 1..2058: note = Description of Artificial Sequence: Synthetic coding sequence
  source 1..2058: mol_type = other DNA
atggtgagccgctgcagctgcctgggcgtgcagtgcctgctgctgagcctgctgctgctggccgcctgggaggtgggcagcggccagctgcactacagcgtgtatgaggaggcccggcacggcacctttgtgggcagaattgcccaggacctgggcctggagctggccgagctggtgcagaggctcttccgggtggccagcaagagacatggagacctgctggaggtgaacctgcagaatggcatcctgtttgtgaacagcagaattgaccgggaggagctgtgtggccgctctgtggagtgcagcatccacctggaggtgattgtggaccggcccctgcaggtgttccacgtggatgtggaggtgaaggacatcaatgacaaccccccacgcttctctgtgacagagcagaagctgagcatccctgagagccggctgctggacagccgcttccccctggagggcgccagtgatgctgatgtgggagaaaatgccctgctgacctacaagctgagccccaatgagtactttgtgctggacatcatcaacaagaaggacaaggacaagtttcctgtgctggtgctgaggaagctgctggaccgggaggagaacccccagctgaagctgctgctgacagccacagatggcggcaagccagagttcaccggctctgtgtccctgctgatcctggtgctggatgccaatgacaatgcccccatctttgacaggcctgtgtatgaggtgaagatgtatgagaaccaggtgaaccagaccctggtgatccggctgaatgccagtgacagtgatgagggcatcaacaaggagatgatgtacagcttcagcagcctggtgccccccaccatccggaggaagttctggatcaatgaaagaactggagagatcaaggtgaatgatgccatcgactttgaggacagcaacacctatgagatccacgtggatgtgacagacaagggcaacccccccatggtgggccactgcaccgtgctggtggagctgctggatgaaaatgacaacagccctgaggtgattgtgaccagcctgagcctgcctgtgaaggaggatgcccaggtgggcaccgtcatcgccctgatctctgtgtctgaccatgacagcggggccaacggccaggtgacctgcagcctgacccctcatgtgcccttcaagctggtgtccacctacaagaactactacagcctggtgctggacagcgccctggaccgggagcgggtgtctgcctatgagctggtggtgacagccagagatggcggcagcccccccctgtgggccacagcctctgtgtctgtggaggtggctgatgtgaatgacaatgccccagcctttgcccagagcgagtacacagtgtttgtgaaggagaacaaccccccaggctgccacatcttcaccgtgtctgcctgggatgctgatgcccaggagaatgccctggtgtcctacagcctggtggagcggcggctgggggagaggagcctgagcagctatgtgtctgtgcatgctgagagcggcaaggtgtatgccctgcagcccctggaccacgaggagctggagctgctgcagttccagccccggcagcccaacccagactggagatacagcgccagcctgcgggccggcatgcacagctctgtgcacctggaggaggccggcatcctgcgggccggccctgggggccctgaccagcagtggcccaccgtgtcctctgccaccccagagcctgaggccggggaggtgtccccacctgtgggcgccggcgtgaacagcaacagctggaccttcaagtatggccctggcaaccccaagcagagcggccctggagagctgcctgacaagttcatcatccctggcagccctgccatcatcagcatccggcaggagcccaccaacagccagattgacaagagtgacttcatcaccttcggcaagaaggaggagaccaagaagaagaagaagaagaagaagggcaacaagacccaggagaagaaggagaagggcaacagcaccacagacaacagcgaccagtag

SEQ ID NO: 166494 - DNA, 2850 bp, synthetic construct
  misc_feature 1..2850: note = Description of Artificial Sequence: Synthetic coding sequence
  source 1..2850: mol_type = other DNA
atgtttggcttccagaggcggggcctgggcaccccccggctgcagctgtggctgctgctgctggagttctgggaggtgggcagcggccagctgcactacagcgtgtctgaggaggccaagcacggcacctttgtgggccgcatcgcccaggacctgggcctggagctggccgagctggtgcagaggctcttccgggtggccagcaagacccatggagacctgctggaggtgaacctgcagaatggcatcctgtttgtgaacagcagaattgaccgggaggagctgtgtggccagagcgcagaatgttccatccacctggaggtgattgtggaccggcccctgcaggtgttccacgtgaatgtggaggtgaaggacatcaatgacaacccccctgtgttcagcctgcgggagcagaagctgctgattgctgagagcaagcagagcgacagccgcttccccctggagggcgccagtgatgctgacatcgaggagaatgccctgctgacctaccgcctgagcaagaatgagtacttcagcctggacagccccaccaacgggaagcagatcaagaggctgagcctcatcctgaagaagagcctggaccgggagaagaccccagagctgaacctgctgctgacagccacagatggcggcaagccagagctgactggaacagtgcggctgctggtgcaggtgctggatgtgaatgacaatgaccctgagtttgacaagtctgagtacaaggtgtccctgatggagaatgctgccaaggagaccctggtgctgaagctgaatgccacagacagagatgagggcgtgaatggagaggtgacctacagcctgatgagcatcaagcccaacggccgccacctgttcaccctggaccagaacaacggggaggtgcgggtgaatggcaccctggactatgaggagaacaagttctacaagattgaggtgcaggccacagacaagggcaccccacccatggccggccactgcaccgtgtgggtggagatcctggacaccaatgacaacagccctgaggtggccgtgaccagcctgagcctgcctgtgcgggaggatgcccagcccagcaccgtcatcgccctgatctctgtgtctgaccgggacagcggcgtgaatggccaggtgacctgcagcctgacccctcatgtgcccttcaagctggtgtccaccttcaagaactactacagcctggtgctggacagcgccctggacagagaaaatgtgtgggcctatgagctggtggtgacagccagagatggcggcagccccagcctgtgggccacagcccgggtgtctgtggaggtggctgatgtgaatgacaatgccccagcctttgcccagcctgagtacacagtgtttgtgaaggagaacaaccccccaggctgccacatcttcaccgtgtctgccagagatgctgatgcccaggagaatgccctggtgtcctacagcctggtggagcggcggctgggggaccgggccctgagcagctatgtgtctgtgcatgctgagagcggcaaggtgtatgccctgcagcccctggaccacgaggagctggagctgctgcagttccaggtgtctgccagagatgctggggtgccccccctgagcagcaatgtgaccctgcaggtgtttgtgctggatgaaaatgacaatgccccagccctgctggccacccaggccggcagcgctgggggcgctgtgaacaagctggtgcccaggtctgtgggcgccggccacgtggtggccaaggtgcgggctgtggatgctgacagcggctacaatgcctggctgtcctatgagctgcagcctgctgctgggggcagccgcatccccttccgggtgggcctgtacacaggagagatcagcaccacccgggccctggatgaagctgacagccccaggcaccggctgctggtgctggtgaaggaccatggagagcccgccctgacagccacagccaccgtgctggtgtccctggtggagagcggccaggcccccaaggccagcagcaggaccctggccggggccgccagccctgaggccgccctggtggatgtgaatgtgtacctgatcatcgccatctgtgtggtgagcagcctgctggtgctgaccctgctgctgtacacagccctgtggtggagcgccacccccacagaaggagcctgtgcccctgggaagcccaccctggtgtgcagcagagctgtgggctcctggagctacagccagcagaggcggcagagggtgtgcagcgaggagggcccccccaagacagacctgatggccttcagccccagcctgcccctgggcctgaacaaggaggaggagggggagcggcaggagcccggcagcaaccaccctggccagccccggcagcccaacccagactggagatacagcgccagcctgcgggccggcatgcacagctctgtgcacctggaggaggccggcatcctgcgggccggccctgggggccctgaccagcagtggcccaccgtgtcctctgccaccccagagcctgaggccggggaggtgtccccacctgtgggcgccggcgtgaacagcaacagctggaccttcaagtatggccctggcaaccccaagcagagcggccctggagagctgcctgacaagttcatcatccctggcagccctgccatcatcagcatccggcaggagcccaccaacagccagattgacaagagtgacttcatcaccttcggcaagaaggaggagaccaagaagaagaagaagaagaagaagggcaacaagacccaggagaagaaggagaagggcaacagcaccacagacaacagcgaccagtag

SEQ ID NO: 166495 - DNA, 2826 bp, synthetic construct
  misc_feature 1..2826: note = Description of Artificial Sequence: Synthetic coding sequence
  source 1..2826: mol_type = other DNA
atggtgatcatcggcccccggggccctggcagccagaggctgctgctgagcctgctgctgctggccgcctgggaggtgggcagcggccagctgcactacagcgtgtatgaggaggccaagcacggcacctttgtgggccgcatcgcccaggacctgggcctggagctggccgagctggtgcccaggctcttccgggtggccagcaagagacatggagacctgctggaggtgaacctgcagaatggcatcctgtttgtgaacagcagaattgaccgggagaagctgtgtggccgctctgcagaatgttccatccacctggaggtgattgtggaccggcccctgcaggtgttccacgtggatgtggaggtgaaggacatcaatgacaacccccctgtgttccgggagcgggagcagaaggtgcctgtgtctgagagcgcccccctggacagccacttccccctggagggcgccagtgatgctgacatcggcgtgaacagcctgctgacctacgccctgagcctgaatgaaaattttgagctgaagatcaagaccaagaaggacaagagcatcctgcctgagctggtgctgaggaagctgctggaccgggagcagacccccaagctgaacctgctgctgatggtgattgatggcggcaagccagagctgactggatctgtgcagatccagatcaccgtgctggatgtgaatgacaatggacctgcctttgacaagcccagctacaaggtggtgctgtctgaaaatgtgcagaatgacaccagggtcatccagctgaatgccagtgaccctgatgagggcctgaatggagagatctcctatggcatcaagatgatcctgcctgtgtctgagaagtgcatgttcagcatcaacccagacacaggagagatccgcatctatggagagctggactttgaggagaacaatgcctatgagatccaggtgaatgccatcgacaagggcatccccagcatggccggccacagcatggtgctggtggaggtgctggatgtgaatgacaacgtgcctgaggtgatggtgaccagcctgagcctgcctgtgcaggaggatgcccaggtgggcaccgtgattgccctgatctctgtgtctgaccgggacagcggggccaacggccaggtgatctgcagcctgaccccccacgtgcccttcaagctggtgtccacctacaagaactactacagcctggtgctggacagcgccctggaccgggagagcgtgtctgcctatgagctggtggtgacagccagagatggcggcagccccagcctgtgggccacagcccgggtgtctgtggaggtggctgatgtgaatgacaatgccccagcctttgcccagcctgagtacacagtgtttgtgaaggagaacaaccccccaggctgccacatcttcaccgtgtctgcctgggatgctgatgcccagaagaatgccctggtgtcctacagcctggtggagaggagagtgggggagcacgccctgagcagctatgtgtctgtgcacgccgagagcggcaaggtgtatgccctgcagcccctggaccacgaggagctggagctgctgcagttccaggtgtctgccagagatgctggggtgccccccctgggcagcaatgtgaccctgcaggtgtttgtgctggatgaaaatgacaatgccccagccctgctggccaccccagctggcagcgctggaggagctgtgtctgagctggtgcccaggtctgtgggcgccggccacgtggtggccaaggtgcgggctgtggatgctgacagcggctacaatgcctggctgtcctatgagctgcagcctgctgctgtgggcgcccacatccccttccacgtgggcctgtacaccggggagatcagcaccacccgcatcctggatgaagcagatgcccccaggcaccggctgctggtgctggtgaaggaccacggggagcccgccctgaccagcacagccaccgtgctggtgtccctggtggagaatggccaggcccccaagaccagcagccgggcctctgtgggcgctgtggaccctgaggccgccctggtggacatcaacgtgtacctgatcatcgccatctgtgctgtgagcagcctgctggtgctgaccctgctgctgtacacagccctgcgctgcagcgccccacccaccgtgagccgctgtgcccctgggaagcccaccctggtgtgcagcagcgctgtgggctcctggagctacagccagcagaggcggcagagggtgtgcagcgctgagagcccccccaagacagacctgatggccttcagccccagcctgcagctgagccgggaggactgcctgaacccccccagcgagccccggcagcccaacccagactggagatacagcgccagcctgcgggccggcatgcacagctctgtgcacctggaggaggccggcatcctgcgggccggccctgggggccctgaccagcagtggcccaccgtgtcctctgccaccccagagcctgaggccggggaggtgtccccacctgtgggcgccggcgtgaacagcaacagctggaccttcaagtatggccctggcaaccccaagcagagcggccctggagagctgcctgacaagttcatcatccctggcagccctgccatcatcagcatccggcaggagcccaccaacagccagattgacaagagtgacttcatcaccttcggcaagaaggaggagaccaagaagaagaagaagaagaagaagggcaacaagacccaggagaagaaggagaagggcaacagcaccacagacaacagcgaccagtag

SEQ ID NO: 166496 - DNA, 2853 bp, synthetic construct
  misc_feature 1..2853: note = Description of Artificial Sequence: Synthetic coding sequence
  source 1..2853: mol_type = other DNA
atgctgagctcctggcagggcggcccccggccccggcagctgctgctgtggctgctgatcctggccgcctgggagaccggcagcggccagctgcactacagcgtgcctgaggaggccaagcacggcacctttgtgggccgcatcgcccaggacctgggcctggagctggccgagctggtgcccaggctcttccgggtggccagcaagagacatggagacctgctggaggtgaacctgcagaatggcatcctgtttgtgaacagcagaattgaccgggaggagctgtgtggccgctctgcagaatgttccatccacctggaggtgattgtggaccggcccctgcaggtgttccacgtggaggtgaaggtgcgggacatcaatgacaacccccccatcttccctgagagcaagaagaggatcatcatcgccgagagcaggcctcctgagacccgcttccccctggatggagccagtgatgctgacatcggcgtgaacagcgccctgacctaccgcctggaccccaatgactacttcaccctggatgcccagaacagcctggagcagatgagcagcctgagcctggtgctgaggaagaccctggaccgggaggagatccaggagcacagcctgctgctgacagccagtgatggcggcaagccagagctgactggaacagtgcagctgctgatcaccatcctggatgtgaatgacaatgcccctgagttctaccagagcgtgtacaaggtgacagtgctggagaatgccttcaacggcaccctggtgatcaagctgaatgccacagatcctgatgatggcaccaacggggacatcgtgtacagcttccggcggcctgtgtggccagctgtggtgtatgccttcaccatcaaccccaacaatggagagatccgcaccaagggcaagctggactttgaggagaagaagctgtatgagatctctgtggaggccgtggacaagggcaacatccccatggccggccactgcaccctgctggtggaggtgctggatgtgaatgacaatgcccctgaggtgaccatcaccagcctgagcctgcccatccgggaggacacccagcccagcgccatcatcgccctgatctctgtgtctgaccgggacagcggcagcaatggccaggtgacctgcaccctgaccccccacgtgcccttcaagctggtgtccacctacaagaactactacagcctggtgctggacagcgccctggaccgggagagcgtgtctgcctatgagctggtggtgacagccagagatggcggcagccccagcctgtgggccacagcctctgtgtctgtgggcgtggctgatgtgaatgacaatgccccagcctttgcccagcctgagtacacagtgtttgtgaaggagaacaaccccccaggctgccacatcttcaccgtgtctgcccaggatgctgatgcccaggagaatgccctggtgtcctacagcctggtggagaggagagtgggggagcgggccctgagcagctatgtgtctgtgcacgccgagagcggcaaggtgtatgccctgcagcccctggaccacgaggagctggagctgctgcagttccaggtgtctgcccgggacagcggcgtgccccccctgggcagcaatgtgaccctgcaggtgtttgtgctggatgaaaatgacaatgccccagccctgctgacccctggggccggcagcgctgggggcaccgtgtctgagctgatgcccaggtctgtgggcgccggccacgtggtggccaaggtgcgggctgtggatgctgacagcggctacaatgcctggctgtcctatgagctgcagctggccgctgtgggcgcccgcatccccttccgggtgggcctgtacaccggggagatcagcaccacccggcccctggatgaggtggatgccccccaccaccggctgctggtgctggtgaaggaccacggggagcccgccctgacagccacagccaccgtgctgctgagcctggtggagagcggccaggccccccaggccagcagccgggccagcgctggagctgtgggccctgaggccgccctggtggatgtgaatgtgtacctgatcatcgccatctgtgctgtgagcagcctgctggtgctgaccctgctgctgtacacagccctgcgctgcagcgccccacccacagagggcgcctgtgcccctgggaagcccaccctggtgtgcagcagcgctgctggctcctggagctacagccagcagaggcggccccgggtgtgcagcggggagggcccccacaagacagacctgatggccttcagccccagcctgcccccctgcctgggcagcgctgagggcaccggccagcgggaggaggacagcgagtgcctgaaggagccccggcagcccaacccagactggagatacagcgccagcctgcgggccggcatgcacagctctgtgcacctggaggaggccggcatcctgcgggccggccctgggggccctgaccagcagtggcccaccgtgagcagcgccaccccagagcctgaggccggggaggtgagcccccctgtgggcgctggggtgaacagcaacagctggaccttcaagtatggccctggcaaccccaagcagagcggccctggagagctgcctgacaagttcatcatccctggcagccctgccatcatcagcatccggcaggagcccaccaacagccagattgacaagagtgacttcatcaccttcggcaagaaggaggagaccaagaagaagaagaagaagaagaagggcaacaagacccaggagaagaaggagaagggcaacagcaccacagacaacagcgaccagtag

SEQ ID NO: 166497 - DNA, 2715 bp, synthetic construct
  misc_feature 1..2715: note = Description of Artificial Sequence: Synthetic coding sequence
  source 1..2715: mol_type = other DNA
atgctgagctcctggcagggcggcccccggccccggcagctgctgctgtggctgctgatcctggccgcctgggagaccggcagcggccagctgcactacagcgtgcctgaggaggccaagcacggcacctttgtgggccgcatcgcccaggacctgggcctggagctggccgagctggtgcccaggctcttccgggtggccagcaagagacatggagacctgctggaggtgaacctgcagaatggcatcctgtttgtgaacagcagaattgaccgggaggagctgtgtggccgctctgcagaatgttccatccacctggaggtgattgtggaccggcccctgcaggtgttccacgtggaggtgaaggtgcgggacatcaatgacaacccccccatcttccctgagagcaagaagaggatcatcatcgccgagagcaggcctcctgagacccgcttccccctggatggagccagtgatgctgacatcggcgtgaacagcgccctgacctaccgcctggaccccaatgactacttcaccctggatgcccagaacagcctggagcagatgagcagcctgagcctggtgctgaggaagaccctggaccgggaggagatccaggagcacagcctgctgctgacagccagtgatggcggcaagccagagctgactggaacagtgcagctgctgatcaccatcctggatgtgaatgacaatgcccctgagttctaccagagcgtgtacaaggtgacagtgctggagaatgccttcaacggcaccctggtgatcaagctgaatgccacagatcctgatgatggcaccaacggggacatcgtgtacagcttccggcggcctgtgtggccagctgtggtgtatgccttcaccatcaaccccaacaatggagagatccgcaccaagggcaagctggactttgaggagaagaagctgtatgagatctctgtggaggccgtggacaagggcaacatccccatggccggccactgcaccctgctggtggaggtgctggatgtgaatgacaatgcccctgaggtgaccatcaccagcctgagcctgcccatccgggaggacacccagcccagcgccatcatcgccctgatctctgtgtctgaccgggacagcggcagcaatggccaggtgacctgcaccctgaccccccacgtgcccttcaagctggtgtccacctacaagaactactacagcctggtgctggacagcgccctggaccgggagagcgtgtctgcctatgagctggtggtgacagccagagatggcggcagccccagcctgtgggccacagcctctgtgtctgtgggcgtggctgatgtgaatgacaatgccccagcctttgcccagcctgagtacacagtgtttgtgaaggagaacaaccccccaggctgccacatcttcaccgtgtctgcccaggatgctgatgcccaggagaatgccctggtgtcctacagcctggtggagaggagagtgggggagcgggccctgagcagctatgtgtctgtgcacgccgagagcggcaaggtgtatgccctgcagcccctggaccacgaggagctggagctgctgcagttccaggtgtctgcccgggacagcggcgtgccccccctgggcagcaatgtgaccctgcaggtgtttgtgctggatgaaaatgacaatgccccagccctgctgacccctggggccggcagcgctgggggcaccgtgtctgagctgatgcccaggtctgtgggcgccggccacgtggtggccaaggtgcgggctgtggatgctgacagcggctacaatgcctggctgtcctatgagctgcagctggccgctgtgggcgcccgcatccccttccgggtgggcctgtacaccggggagatcagcaccacccggcccctggatgaggtggatgccccccaccaccggctgctggtgctggtgaaggaccacggggagcccgccctgacagccacagccaccgtgctgctgagcctggtggagagcggccaggccccccaggccagcagccgggccagcgctggagctgtgggccctgaggccgccctggtggatgtgaatgtgtacctgatcatcgccatctgtgctgtgagcagcctgctggtgctgaccctgctgctgtacacagccctgcgctgcagcgccccacccacagagggcgcctgtgcccctgggaagcccaccctggtgtgcagcagcgctgctggctcctggagctacagccagcagaggcggccccgggtgtgcagcggggagggcccccacaagacagacctgatggccttcagccccagcctgcccccctgcctgggcagcgctgagggcaccggccagcgggaggaggacagcgagtgcctgaaggagccccggcagcccaacccagactggagatacagcgccagcctgcgggccggcatgcacagctctgtgcacctggaggaggccggcatcctgcgggccggccctgggggccctgaccagcagtggcccaccgtgagcagcgccaccccagagcctgaggccggggaggtgagcccccctgtgggcgctggggtgaacagcaacagctggaccttcaagtatggccctggcaaccccaagcagagcggccctgagcccaagaagcagacccaggtgtccttcctgctgcggaggaagggggaggccagccagccccggcagtag

SEQ ID NO: 166498 - DNA, 2475 bp, synthetic construct
  misc_feature 1..2475: note = Description of Artificial Sequence: Synthetic coding sequence
  source 1..2475: mol_type = other DNA
atggccagcagcatccggcggggccgcggggcctggacccggctgctgagcctgctgctgctggccgcctgggaggtgggcagcggccagctgcgctacagcgtgcctgaggaggccaagcacggcacctttgtgggccgcatcgcccaggacctgggcctggagctggaggagctggtgcccaggctcttccgggtggccagcaagagacatggagacctgctggaggtgaacctgcagaatggcatcctgtttgtgaacagcagaattgaccgggaggagctgtgtggccgctctgcagaatgttccatccacgtggaggtgattgtggaccggcccctgcaggtgttccacgtggaggtggaggtgaaggacatcaatgacaacccccccatcttccccatgacagtgaagaccatccgcttccctgagagccggctgctggacagccgcttccccctggagggcgccagtgatgctgacatcggcgtgaatgccctgctgagctacaagctgagcagcagcgagttcttcttcctggacatccaggccaatgatgagctgtctgagagcctgagcctggtgctgggcaagagcctggaccgggaggagacagctgaggtgaacctgctgctggtggccacagatggcggcaagccagagctgactggaacagtgcagatcctgatcaaggtgctggatgtgaatgacaatgagcccacctttgcccagagcgtgtacaaggtgaagctgctggagaacacagccaacggcaccctggtggtgaagctgaatgccagtgatgctgatgagggccccaacagcgagatcgtgtacagcctgggcagtgatgtgagcagcaccatccagaccaagttcaccatcgaccccatctctggagagatccgcaccaagggcaagctggactatgaggaggccaagagctatgagatccaggtgacagccacagacaagggcacccccagcatgagcggccactgcaagatcagcctgaagctggtggacatcaatgacaacaccccagaggtgtccatcaccagcctgagcctgcccatcagtgaaaatgccagcctgggcaccgtgattgccctgatcaccgtgtctgaccgggacagcggcaccaacggccacgtgacctgcagcctgaccccccacgtgcccttcaagctggtgtccaccttcaagaactactacagcctggtgctggacagcgccctggaccgggagagcgtgtctgcctatgagctggtggtgacagccagagatggcggcagccccagcctgtgggccaccacctctgtgtccattgaggtggctgatgtgaatgacaatgccccagcctttgcccagcctgagtacacagtgtttgtgaaggagaacaaccccccaggctgccacatcttcaccgtgtctgcctgggatgctgatgcccaggagaatgccctggtgtcctacagcctggtggagaggagagtgggggagcgggccctgagcagctatgtgtctgtgcacgccgagagcggcaaggtgtatgccctgcagcccctggaccacgaggaggtggagctgctgcagttccaggtgtctgccagagatgctggggtgccccccctgggcagcaatgtgaccctgcaggtgtttgtgctggatgaaaatgacaatgccccagccctgctggccccccgggccggcacagctgctggagctgtgtctgagctggtgccctggagcgtgggcgccggccacgtggtggccaaggtgcgggctgtggatgctgacagcggctacaatgcctggctgtcctatgagctgcagctgggcactggaagtgcccgcatccccttccgggtgggcctgtacaccggggagatcagcaccacccgggccctggatgaggccgacagccccaggcaccggctgctggtgctggtgaaggaccacggggagcccgccctgacagccacagccaccgtgctggtgtccctggtggagagcggccaggcccccaaggccagcagccgggcctgggtgggcgctgctggcagcgaggccaccctggtggatgtgaatgtgtacctgatcatcgccatctgtgctgtgagcagcctgctggtgctgactgtgctgctgtacacagccctgcgctgcagcgtgcccccaacagagggcgcccgggcccctgggaagcccaccctggtgtgcagcagcgctgtgggctcctggagctacagccagcagaggcggcagagggtgtgcagcggggaggacccccccaagacagacctgatggccttcagccccagcctgagccagggccctgacagcgctgaggagaagcagctgtctgagagtgaatatgtgggcaaggtgtccctgctgctcttcctggccaacagcaagatcgtgctcttcaagaagttctacatgatcagcaccagctacctggacagctag

SEQ ID NO: 166499 - DNA, 2847 bp, synthetic construct
  misc_feature 1..2847: note = Description of Artificial Sequence: Synthetic coding sequence
  source 1..2847: mol_type = other DNA
atggccagcagcatccggcggggccgcggggcctggacccggctgctgagcctgctgctgctggccgcctgggaggtgggcagcggccagctgcgctacagcgtgcctgaggaggccaagcacggcacctttgtgggccgcatcgcccaggacctgggcctggagctggaggagctggtgcccaggctcttccgggtggccagcaagagacatggagacctgctggaggtgaacctgcagaatggcatcctgtttgtgaacagcagaattgaccgggaggagctgtgtggccgctctgcagaatgttccatccacgtggaggtgattgtggaccggcccctgcaggtgttccacgtggaggtggaggtgaaggacatcaatgacaacccccccatcttccccatgacagtgaagaccatccgcttccctgagagccggctgctggacagccgcttccccctggagggcgccagtgatgctgacatcggcgtgaatgccctgctgagctacaagctgagcagcagcgagttcttcttcctggacatccaggccaatgatgagctgtctgagagcctgagcctggtgctgggcaagagcctggaccgggaggagacagctgaggtgaacctgctgctggtggccacagatggcggcaagccagagctgactggaacagtgcagatcctgatcaaggtgctggatgtgaatgacaatgagcccacctttgcccagagcgtgtacaaggtgaagctgctggagaacacagccaacggcaccctggtggtgaagctgaatgccagtgatgctgatgagggccccaacagcgagatcgtgtacagcctgggcagtgatgtgagcagcaccatccagaccaagttcaccatcgaccccatctctggagagatccgcaccaagggcaagctggactatgaggaggccaagagctatgagatccaggtgacagccacagacaagggcacccccagcatgagcggccactgcaagatcagcctgaagctggtggacatcaatgacaacaccccagaggtgtccatcaccagcctgagcctgcccatcagtgaaaatgccagcctgggcaccgtgattgccctgatcaccgtgtctgaccgggacagcggcaccaacggccacgtgacctgcagcctgaccccccacgtgcccttcaagctggtgtccaccttcaagaactactacagcctggtgctggacagcgccctggaccgggagagcgtgtctgcctatgagctggtggtgacagccagagatggcggcagccccagcctgtgggccaccacctctgtgtccattgaggtggctgatgtgaatgacaatgccccagcctttgcccagcctgagtacacagtgtttgtgaaggagaacaaccccccaggctgccacatcttcaccgtgtctgcctgggatgctgatgcccaggagaatgccctggtgtcctacagcctggtggagaggagagtgggggagcgggccctgagcagctatgtgtctgtgcacgccgagagcggcaaggtgtatgccctgcagcccctggaccacgaggaggtggagctgctgcagttccaggtgtctgccagagatgctggggtgccccccctgggcagcaatgtgaccctgcaggtgtttgtgctggatgaaaatgacaatgccccagccctgctggccccccgggccggcacagctgctggagctgtgtctgagctggtgccctggagcgtgggcgccggccacgtggtggccaaggtgcgggctgtggatgctgacagcggctacaatgcctggctgtcctatgagctgcagctgggcactggaagtgcccgcatccccttccgggtgggcctgtacaccggggagatcagcaccacccgggccctggatgaggccgacagccccaggcaccggctgctggtgctggtgaaggaccacggggagcccgccctgacagccacagccaccgtgctggtgtccctggtggagagcggccaggcccccaaggccagcagccgggcctgggtgggcgctgctggcagcgaggccaccctggtggatgtgaatgtgtacctgatcatcgccatctgtgctgtgagcagcctgctggtgctgactgtgctgctgtacacagccctgcgctgcagcgtgcccccaacagagggcgcccgggcccctgggaagcccaccctggtgtgcagcagcgctgtgggctcctggagctacagccagcagaggcggcagagggtgtgcagcggggaggacccccccaagacagacctgatggccttcagccccagcctgagccagggccctgacagcgctgaggagaagcagctgtctgagagtgaatatgtgggcaagccccggcagcccaacccagactggagatacagcgccagcctgcgggccggcatgcacagctctgtgcacctggaggaggccggcatcctgcgggccggccctgggggccctgaccagcagtggcccaccgtgagcagcgccaccccagagcctgaggccggggaggtgagcccccctgtgggcgctggggtgaacagcaacagctggaccttcaagtatggccctggcaaccccaagcagagcggccctggagagctgcctgacaagttcatcatccctggcagccctgccatcatcagcatccggcaggagcccaccaacagccagattgacaagagtgacttcatcaccttcggcaagaaggaggagaccaagaagaagaagaagaagaagaagggcaacaagacccaggagaagaaggagaagggcaacagcaccacagacaacagcgaccagtag

SEQ ID NO: 166500 - DNA, 2853 bp, synthetic construct
  misc_feature 1..2853: note = Description of Artificial Sequence: Synthetic coding sequence
  source 1..2853: mol_type = other DNA
atgctgttctcctggagagaagatcctggggcccagtgcctgctgctgagcctgctgctgctggccgccagcgaggtgggcagcggccagctgcactacagcgtgtctgaggaggccaagcacggcacctttgtgggccgcatcgcccaggacctgggcctggagctggccgagctggtgcccaggctcttccgggtggccagcaagagacatggagacctgctggaggtgaacctgcagaatggcatcctgtttgtgaacagcagaattgaccgggaggagctgtgtggccgctctgcagaatgttccatccacctggaggtgattgtggaccggcccctgcaggtgttccacgtggaggtggaggtgaaggacatcaatgacaatgcccctgtgttccccatggctgtgaagaacctcttcatcagcgagagccggcagcccggcagccgcttcagcctggagggcgccagtgatgctgacatcggcaccaacagcctgctgacctacagcctggacagcacagagtacttcaccctggatgtgaagagaaatgatgaggagatcaagagcctgggcctggtgctgaagaagaacctgaaccgggaggacacccccaagcactacctgctgatcacagccattgatggcggcaagccagagctgaccggcaccacccagctgaagatcaccgtgctggatgtgaatgacaatgccccagcctttgagaggaccatctacaaggtgcggctgctggagaatgccccaaatggcaccctggtggtgacagtgaatgccacagacctggatgagggcgtgaacaaggacatcgcctacagcttcaacacagacatgtctgctgacatcctgagcaagttccacctggaccctgtgaatggccagatctctgtgaagggcaacatcgactttgaggagagcaagagctatgagatccaggtggaggccacagacaagggcaacccccccatgtctgaccactgcaccgtgctgctggagatcgtggacatcaatgacaacgtgcctgagctggtgatccagagcctgagcctgcctgtgctggaggacagccccctgagcacagtgattgccctgatctctgtgtctgaccgggacagcggcgtgaatggccaggtgacctgcagcctgaccccccacgtgcccttcaagctggtgtccaccttcaagaactactacagcctggtgctggacagccccctggaccgggagagcgtgtctgcctatgagctggtggtgacagccagagatggcggcagccccagcctgtgggccacagcctctgtgtctgtggaggtggctgatgtgaatgacaatgccccagccttcagccagagcgagtacacagtgtttgtgaaggagaacaaccccccaggctgccacatcttcaccgtgtctgccagagatgctgatgcccaggagaatgccctggtgtcctacagcctggtggagaggagagtgggggagcgggccctgagcagctatgtgtctgtgcacgccgagagcggcaaggtgtatgccctgcagcccctggaccacgaggagctggagctgctgcagttccaggtgtctgccagagatgctggggtgccccccctgggcagcaatgtgaccctgcaggtgtttgtgctggatgaaaatgacaatgccccagccctgctgatgccccgggtgggcggcattggaggagctgtgtctgagctggtgcccaggtctgtgggcgccggccacgtggtggccaaggtgcgggctgtggatgctgacagcggctacaatgcctggctgtcctatgagctgcagcccggcactggaggagcccgcatccccttccgggtgggcctgtacaccggggagatcagcaccacccgggccctggatgaggtggatgcccccaggcaccggctgctggtgctggtgaaggaccacggggagcccagcctgacagccacagccaccgtgctggtgtccctggtggagagcggccaggcccccaaggccagcagccaggccagcgctggggccactggacctgaggccgccctggtggatgtgaatgtgtacctgattgtggccatctgtgctgtgagcagcctgctggtgctgaccctgctgctgtacacagccctgcgctgcagcgccccacccacagaaggagactgtggccctgggaagcccaccctggtgtgcagcagcgctgtgggctcctggagctacagccagcagaggcagcagagggtgtgcagcggggagggcctgcccaagacagacctgatggccttcagccccagcctgcccccctgccccatcagccgggaccgggaggagaagcaggatgtggatgtggacctgagcgccaagccccggcagcccaacccagactggagatacagcgccagcctgcgggccggcatgcacagctctgtgcacctggaggaggccggcatcctgcgggccggccctgggggccctgaccagcagtggcccaccgtgagcagcgccaccccagagcctgaggccggggaggtgagcccccctgtgggcgctggggtgaacagcaacagctggaccttcaagtatggccctggcaaccccaagcagagcggccctggagagctgcctgacaagttcatcatccctggcagccctgccatcatcagcatccggcaggagcccaccaacagccagattgacaagagtgacttcatcaccttcggcaagaaggaggagaccaagaagaagaagaagaagaagaagggcaacaagacccaggagaagaaggagaagggcaacagcaccacagacaacagcgaccagtag

SEQ ID NO: 166501 - DNA, 2475 bp, synthetic construct
  misc_feature 1..2475: note = Description of Artificial Sequence: Synthetic coding sequence
  source 1..2475: mol_type = other DNA
atgctgttctcctggagagaagatcctggggcccagtgcctgctgctgagcctgctgctgctggccgccagcgaggtgggcagcggccagctgcactacagcgtgtctgaggaggccaagcacggcacctttgtgggccgcatcgcccaggacctgggcctggagctggccgagctggtgcccaggctcttccgggtggccagcaagagacatggagacctgctggaggtgaacctgcagaatggcatcctgtttgtgaacagcagaattgaccgggaggagctgtgtggccgctctgcagaatgttccatccacctggaggtgattgtggaccggcccctgcaggtgttccacgtggaggtggaggtgaaggacatcaatgacaatgcccctgtgttccccatggctgtgaagaacctcttcatcagcgagagccggcagcccggcagccgcttcagcctggagggcgccagtgatgctgacatcggcaccaacagcctgctgacctacagcctggacagcacagagtacttcaccctggatgtgaagagaaatgatgaggagatcaagagcctgggcctggtgctgaagaagaacctgaaccgggaggacacccccaagcactacctgctgatcacagccattgatggcggcaagccagagctgaccggcaccacccagctgaagatcaccgtgctggatgtgaatgacaatgccccagcctttgagaggaccatctacaaggtgcggctgctggagaatgccccaaatggcaccctggtggtgacagtgaatgccacagacctggatgagggcgtgaacaaggacatcgcctacagcttcaacacagacatgtctgctgacatcctgagcaagttccacctggaccctgtgaatggccagatctctgtgaagggcaacatcgactttgaggagagcaagagctatgagatccaggtggaggccacagacaagggcaacccccccatgtctgaccactgcaccgtgctgctggagatcgtggacatcaatgacaacgtgcctgagctggtgatccagagcctgagcctgcctgtgctggaggacagccccctgagcacagtgattgccctgatctctgtgtctgaccgggacagcggcgtgaatggccaggtgacctgcagcctgaccccccacgtgcccttcaagctggtgtccaccttcaagaactactacagcctggtgctggacagccccctggaccgggagagcgtgtctgcctatgagctggtggtgacagccagagatggcggcagccccagcctgtgggccacagcctctgtgtctgtggaggtggctgatgtgaatgacaatgccccagccttcagccagagcgagtacacagtgtttgtgaaggagaacaaccccccaggctgccacatcttcaccgtgtctgccagagatgctgatgcccaggagaatgccctggtgtcctacagcctggtggagaggagagtgggggagcgggccctgagcagctatgtgtctgtgcacgccgagagcggcaaggtgtatgccctgcagcccctggaccacgaggagctggagctgctgcagttccaggtgtctgccagagatgctggggtgccccccctgggcagcaatgtgaccctgcaggtgtttgtgctggatgaaaatgacaatgccccagccctgctgatgccccgggtgggcggcattggaggagctgtgtctgagctggtgcccaggtctgtgggcgccggccacgtggtggccaaggtgcgggctgtggatgctgacagcggctacaatgcctggctgtcctatgagctgcagcccggcactggaggagcccgcatccccttccgggtgggcctgtacaccggggagatcagcaccacccgggccctggatgaggtggatgcccccaggcaccggctgctggtgctggtgaaggaccacggggagcccagcctgacagccacagccaccgtgctggtgtccctggtggagagcggccaggcccccaaggccagcagccaggccagcgctggggccactggacctgaggccgccctggtggatgtgaatgtgtacctgattgtggccatctgtgctgtgagcagcctgctggtgctgaccctgctgctgtacacagccctgcgctgcagcgccccacccacagaaggagactgtggccctgggaagcccaccctggtgtgcagcagcgctgtgggctcctggagctacagccagcagaggcagcagagggtgtgcagcggggagggcctgcccaagacagacctgatggccttcagccccagcctgcccccctgccccatcagccgggaccgggaggagaagcaggatgtggatgtggacctgagcgccaaggtgagcaacttctacctgttcttccccaagtgcctgtgcttctccttcctgaatgtgtccacccccctggagatccactag

SEQ ID NO: 166502 - DNA, 2451 bp, synthetic construct
  misc_feature 1..2451: note = Description of Artificial Sequence: Synthetic coding sequence
  source 1..2451: mol_type = other DNA
atggtgtacagcagaagaggcagcctgggcagccggctgctgctgctgtggctgctgctggcctactggaaggccggcagcggccagctgcactacagcatccctgaggaggccaagcacggcacctttgtgggcagaattgcccaggacctgggcctggagctggccgagctggtgcccaggctcttccgggtggccagcaagggccgcggggacctgctggaggtgaacctgcagaatggcatcctgtttgtgaacagcagaattgaccgggaggagctgtgcagaagaagagctgagtgcagcatccacctggaggtgattgtggaccggcccctgcaggtgttccacgtggaggtggccgtgaaggacatcaatgacaaccccccacgcttcagccggcaggagcagaggctcttcatcctggagagcaggatgccagacagccgcttccccctggagggcgccagtgacctggacattggagccaatgcccagctgcgctaccgcctgaaccccaatgagtactttgacctggatgtgaagaccaatgaggaggagaccaacttcctggagctggtgctgaggaagagcctggaccgggaggagacccaggagcaccggctgctggtgattgccacagatggcggcaagccagagctgaccggcaccgtgcagctgctgatcaacgtgctggatgccaatgacaatgcccctgagtttgacaagagcatctacaacgtgcggctgctggagaatgcccccagcggcaccctggtgatcaagctgaatgccagtgatgctgatgagggcatcaacaaggagatcgtgtacttcttcagcaacctggtgctggatgatgtgaagagcaagttcatcatcaacagcaacacaggagagatcaaggtgaatggagagctggactatgaggactacaacagctatgagatcaacattgatgccatggacaagagcaccttccccctgagcggccactgcaaggtggtggtgaagctgctggatgtgaatgacaacaccccagagatggccatcaccaccctcttcctgcctgtgaaggaggatgcccccctgagcaccgtcatcgccctgatctctgtgtctgaccgggacagcggggccaacggccaggtgacctgcagcctgatgcctcatgtgcccttcaagctggtgtccaccttcaagaactactacagcctggtgctggacagcgccctggaccgggagagcgtgtctgtgtatgagctggtggtgacagccagagatggcggcagccccagcctgtgggccacagcctctgtgtctgtggaggtggctgatgtgaatgacaatgccccagcctttgcccagccccagtacacagtgtttgtgaaggagaacaaccccccaggctgccacatcttcaccgtgtctgccagagatgctgatgcccaggagaatgccctggtgtcctacagcctggtggagcggcgggtgggggagcggcccctgagcagctatgtgtctgtgcatgctgagagcggcaaggtgtatgccctgcagcccctggaccacgaggaggtggagctgctgcagttccaggtgtctgccagagatgctggggtgccccccctgggcagcaatgtgaccctgcaggtgtttgtgctggatgaaaatgacaatgccccagccctgctggtgccccgggtgggcggcaccggcggcgctgtgtctgagctggtgcccaggtctgtgggcgccggccacgtggtggccaaggtgcgggctgtggaccctgacagcggctacaatgcctggctgtcctatgagctgcagcctgcccctggcagcgcccgcatccccttccgggtgggcctgtacacaggagagatcagcaccaccaggagcctggatgaaacagaggcccccaggcaccggctgctggtgctggtgaaggaccatggagagccccccctgacagccacagccaccgtgctggtgtccctggtggagagcggccaggcccccaaggccagcagccgggccagcgctggagctgtgggccctgaggccgccctggtggatgtgaatgtgtacctgatcatcgccatctgtgctgtgagcagcctgctggtgctgaccctgctgctgtacacagccctgcgctgcagcgcccagcccacagaagctgtgtgcacccggggcaagcccaccctgctgtgcagcagcgctgtgggctcctggagctacagccagcagaggcggcagagggtgtgcagcggggaggccccacccaagacagacctgatggccttcagccccagcctgccccagggccccaccagcacagacaacgtgtccttcctgatcctgaccagcatcttccccagccagttcagcaacatcaagtgccacatccaccccctcttcctgtacctgaagatcatgtcctag

SEQ ID NO: 166503 - DNA, 2673 bp, synthetic construct
  misc_feature 1..2673: note = Description of Artificial Sequence: Synthetic coding sequence
  source 1..2673: mol_type = other DNA
atggtgtacagcagaagaggcagcctgggcagccggctgctgctgctgtggctgctgctggcctactggaaggccggcagcggccagctgcactacagcatccctgaggaggccaagcacggcacctttgtgggcagaattgcccaggacctgggcctggagctggccgagctggtgcccaggctcttccgggtggccagcaagggccgcggggacctgctggaggtgaacctgcagaatggcatcctgtttgtgaacagcagaattgaccgggaggagctgtgcagaagaagagctgagtgcagcatccacctggaggtgattgtggaccggcccctgcaggtgttccacgtggaggtggccgtgaaggacatcaatgacaaccccccacgcttcagccggcaggagcagaggctcttcatcctggagagcaggatgccagacagccgcttccccctggagggcgccagtgacctggacattggagccaatgcccagctgcgctaccgcctgaaccccaatgagtactttgacctggatgtgaagaccaatgaggaggagaccaacttcctggagctggtgctgaggaagagcctggaccgggaggagacccaggagcaccggctgctggtgattgccacagatggcggcaagccagagctgaccggcaccgtgcagctgctgatcaacgtgctggatgccaatgacaatgcccctgagtttgacaagagcatctacaacgtgcggctgctggagaatgcccccagcggcaccctggtgatcaagctgaatgccagtgatgctgatgagggcatcaacaaggagatcgtgtacttcttcagcaacctggtgctggatgatgtgaagagcaagttcatcatcaacagcaacacaggagagatcaaggtgaatggagagctggactatgaggactacaacagctatgagatcaacattgatgccatggacaagagcaccttccccctgagcggccactgcaaggtggtggtgaagctgctggatgtgaatgacaacaccccagagatggccatcaccaccctcttcctgcctgtgaaggaggatgcccccctgagcaccgtcatcgccctgatctctgtgtctgaccgggacagcggggccaacggccaggtgacctgcagcctgatgcctcatgtgcccttcaagctggtgtccaccttcaagaactactacagcctggtgctggacagcgccctggaccgggagagcgtgtctgtgtatgagctggtggtgacagccagagatggcggcagccccagcctgtgggccacagcctctgtgtctgtggaggtggctgatgtgaatgacaatgccccagcctttgcccagccccagtacacagtgtttgtgaaggagaacaaccccccaggctgccacatcttcaccgtgtctgccagagatgctgatgcccaggagaatgccctggtgtcctacagcctggtggagcggcgggtgggggagcggcccctgagcagctatgtgtctgtgcatgctgagagcggcaaggtgtatgccctgcagcccctggaccacgaggaggtggagctgctgcagttccaggtgtctgccagagatgctggggtgccccccctgggcagcaatgtgaccctgcaggtgtttgtgctggatgaaaatgacaatgccccagccctgctggtgccccgggtgggcggcaccggcggcgctgtgtctgagctggtgcccaggtctgtgggcgccggccacgtggtggccaaggtgcgggctgtggaccctgacagcggctacaatgcctggctgtcctatgagctgcagcctgcccctggcagcgcccgcatccccttccgggtgggcctgtacacaggagagatcagcaccaccaggagcctggatgaaacagaggcccccaggcaccggctgctggtgctggtgaaggaccatggagagccccccctgacagccacagccaccgtgctggtgtccctggtggagagcggccaggcccccaaggccagcagccgggccagcgctggagctgtgggccctgaggccgccctggtggatgtgaatgtgtacctgatcatcgccatctgtgctgtgagcagcctgctggtgctgaccctgctgctgtacacagccctgcgctgcagcgcccagcccacagaagctgtgtgcacccggggcaagcccaccctgctgtgcagcagcgctgtgggctcctggagctacagccagcagaggcggcagagggtgtgcagcggggaggccccacccaagacagacctgatggccttcagccccagcctgccccagggccccaccagcacagacaacccccggcagcccaacccagactggagatacagcgccagcctgcgggccggcatgcacagctctgtgcacctggaggaggccggcatcctgcgggccggccctgggggccctgaccagcagtggcccaccgtgagcagcgccaccccagagcctgaggccggggaggtgagcccccctgtgggcgctggggtgaacagcaacagctggaccttcaagtatggccctggcaaccccaagcagagcggccctgagcccaagaagcagacccaggtgtccttcctgctgcggaggaagggggaggccagccagccccggcagtag

SEQ ID NO: 166504 - DNA, 2811 bp, synthetic construct
  misc_feature 1..2811: note = Description of Artificial Sequence: Synthetic coding sequence
  source 1..2811: mol_type = other DNA
atggtgtacagcagaagaggcagcctgggcagccggctgctgctgctgtggctgctgctggcctactggaaggccggcagcggccagctgcactacagcatccctgaggaggccaagcacggcacctttgtgggcagaattgcccaggacctgggcctggagctggccgagctggtgcccaggctcttccgggtggccagcaagggccgcggggacctgctggaggtgaacctgcagaatggcatcctgtttgtgaacagcagaattgaccgggaggagctgtgcagaagaagagctgagtgcagcatccacctggaggtgattgtggaccggcccctgcaggtgttccacgtggaggtggccgtgaaggacatcaatgacaaccccccacgcttcagccggcaggagcagaggctcttcatcctggagagcaggatgccagacagccgcttccccctggagggcgccagtgacctggacattggagccaatgcccagctgcgctaccgcctgaaccccaatgagtactttgacctggatgtgaagaccaatgaggaggagaccaacttcctggagctggtgctgaggaagagcctggaccgggaggagacccaggagcaccggctgctggtgattgccacagatggcggcaagccagagctgaccggcaccgtgcagctgctgatcaacgtgctggatgccaatgacaatgcccctgagtttgacaagagcatctacaacgtgcggctgctggagaatgcccccagcggcaccctggtgatcaagctgaatgccagtgatgctgatgagggcatcaacaaggagatcgtgtacttcttcagcaacctggtgctggatgatgtgaagagcaagttcatcatcaacagcaacacaggagagatcaaggtgaatggagagctggactatgaggactacaacagctatgagatcaacattgatgccatggacaagagcaccttccccctgagcggccactgcaaggtggtggtgaagctgctggatgtgaatgacaacaccccagagatggccatcaccaccctcttcctgcctgtgaaggaggatgcccccctgagcaccgtcatcgccctgatctctgtgtctgaccgggacagcggggccaacggccaggtgacctgcagcctgatgcctcatgtgcccttcaagctggtgtccaccttcaagaactactacagcctggtgctggacagcgccctggaccgggagagcgtgtctgtgtatgagctggtggtgacagccagagatggcggcagccccagcctgtgggccacagcctctgtgtctgtggaggtggctgatgtgaatgacaatgccccagcctttgcccagccccagtacacagtgtttgtgaaggagaacaaccccccaggctgccacatcttcaccgtgtctgccagagatgctgatgcccaggagaatgccctggtgtcctacagcctggtggagcggcgggtgggggagcggcccctgagcagctatgtgtctgtgcatgctgagagcggcaaggtgtatgccctgcagcccctggaccacgaggaggtggagctgctgcagttccaggtgtctgccagagatgctggggtgccccccctgggcagcaatgtgaccctgcaggtgtttgtgctggatgaaaatgacaatgccccagccctgctggtgccccgggtgggcggcaccggcggcgctgtgtctgagctggtgcccaggtctgtgggcgccggccacgtggtggccaaggtgcgggctgtggaccctgacagcggctacaatgcctggctgtcctatgagctgcagcctgcccctggcagcgcccgcatccccttccgggtgggcctgtacacaggagagatcagcaccaccaggagcctggatgaaacagaggcccccaggcaccggctgctggtgctggtgaaggaccatggagagccccccctgacagccacagccaccgtgctggtgtccctggtggagagcggccaggcccccaaggccagcagccgggccagcgctggagctgtgggccctgaggccgccctggtggatgtgaatgtgtacctgatcatcgccatctgtgctgtgagcagcctgctggtgctgaccctgctgctgtacacagccctgcgctgcagcgcccagcccacagaagctgtgtgcacccggggcaagcccaccctgctgtgcagcagcgctgtgggctcctggagctacagccagcagaggcggcagagggtgtgcagcggggaggccccacccaagacagacctgatggccttcagccccagcctgccccagggccccaccagcacagacaacccccggcagcccaacccagactggagatacagcgccagcctgcgggccggcatgcacagctctgtgcacctggaggaggccggcatcctgcgggccggccctgggggccctgaccagcagtggcccaccgtgagcagcgccaccccagagcctgaggccggggaggtgagcccccctgtgggcgctggggtgaacagcaacagctggaccttcaagtatggccctggcaaccccaagcagagcggccctggagagctgcctgacaagttcatcatccctggcagccctgccatcatcagcatccggcaggagcccaccaacagccagattgacaagagtgacttcatcaccttcggcaagaaggaggagaccaagaagaagaagaagaagaagaagggcaacaagacccaggagaagaaggagaagggcaacagcaccacagacaacagcgaccagtag

SEQ ID NO: 166505 - DNA, 2061 bp, synthetic construct
  misc_feature 1..2061: note = Description of Artificial Sequence: Synthetic coding sequence
  source 1..2061: mol_type = other DNA
atggtgttcaccccagaggaccggctgggcaagcagtgcctgctgctgcccctgctgctgctggccgcctggaaggtgggcagcggccagctgcactacagcgtgcctgaggaggccaagcacggcacctttgtgggccgcatcgcccaggacctgggcctggagctggccgagctggtgcccaggctcttcaggatggccagcaaggaccgggaggacctgctggaggtgaacctgcagaatggcatcctgtttgtgaacagcagaattgaccgggaggagctgtgtggccgctctgcagaatgttccatccacctggaggtgattgtggaccggcccctgcaggtgttccacgtggatgtggaggtgcgggacatcaatgacaaccccccactcttccctgtggaggagcagagggtgctgatctatgagagccggctgcctgacagcgtcttccccctggagggcgccagtgatgctgatgtgggcagcaacagcatcctgacctacaagctgagcagcagcgagtacttcggcctggatgtgaagatcaacagtgatgacaacaagcagatcggcctgctgctgaagaagagcctggaccgggaggaggccccagcccacaacctcttcctgacagccacagatggcggcaagccagagctgactggaacagtgcagctgctggtgacagtgctggatgtgaatgacaatgcccccacctttgagcagagtgaatatgaggtgcgcatctttgaaaatgctgacaatggcaccaccgtcatccggctgaatgccagtgacagagatgagggcgccaacggggccatctcctacagcttcaacagcctggtggccgccatggtgattgaccacttcagcattgacagaaatactggagagatcgtcatccggggcaacctggactttgagcaggagaacctgtacaagatcctgattgatgccacagacaagggccacccccccatggccggccactgcaccgtgctggtgcgcatcctggacaagaatgacaacgtgcctgagatcgccctgaccagcctgagcctgcctgtgagagaagatgcccagtttggaacagtgattgccctgatctctgtgaatgacctggacagcggggccaacggccaggtgaactgcagcctgaccccccacgtgcccttcaagctggtgtccaccttcaagaactactacagcctggtgctggacagcgccctggaccgggagagcgtgtctgcctatgagctggtggtgacagccagagatggcggcagccccagcctgtgggccacagccagcctgtctgtggaggtggccgacatgaatgacaatgccccagcctttgcccagcctgagtacacagtgtttgtgaaggagaacaaccccccaggctgccacatcttcaccgtgtctgccagagatgctgatgcccaggagaatgccctggtgtcctacagcctggtggagaggagagtgggggagcgggccctgagcagctacatctctgtgcacgccgagagcggcaaggtgtatgccctgcagcccctggaccacgaggagctggagctgctgcagttccagccccggcagcccaacccagactggagatacagcgccagcctgcgggccggcatgcacagctctgtgcacctggaggaggccggcatcctgcgggccggccctgggggccctgaccagcagtggcccaccgtgagcagcgccaccccagagcctgaggccggggaggtgagcccccctgtgggcgctggggtgaacagcaacagctggaccttcaagtatggccctggcaaccccaagcagagcggccctggagagctgcctgacaagttcatcatccctggcagccctgccatcatcagcatccggcaggagcccaccaacagccagattgacaagagtgacttcatcaccttcggcaagaaggaggagaccaagaagaagaagaagaagaagaagggcaacaagacccaggagaagaaggagaagggcaacagcaccacagacaacagcgaccagtag

SEQ ID NO: 166506 - DNA, 2853 bp, synthetic construct
  misc_feature 1..2853: note = Description of Artificial Sequence: Synthetic coding sequence
  source 1..2853: mol_type = other DNA
atggtgttcaccccagaggaccggctgggcaagcagtgcctgctgctgcccctgctgctgctggccgcctggaaggtgggcagcggccagctgcactacagcgtgcctgaggaggccaagcacggcacctttgtgggccgcatcgcccaggacctgggcctggagctggccgagctggtgcccaggctcttcaggatggccagcaaggaccgggaggacctgctggaggtgaacctgcagaatggcatcctgtttgtgaacagcagaattgaccgggaggagctgtgtggccgctctgcagaatgttccatccacctggaggtgattgtggaccggcccctgcaggtgttccacgtggatgtggaggtgcgggacatcaatgacaaccccccactcttccctgtggaggagcagagggtgctgatctatgagagccggctgcctgacagcgtcttccccctggagggcgccagtgatgctgatgtgggcagcaacagcatcctgacctacaagctgagcagcagcgagtacttcggcctggatgtgaagatcaacagtgatgacaacaagcagatcggcctgctgctgaagaagagcctggaccgggaggaggccccagcccacaacctcttcctgacagccacagatggcggcaagccagagctgactggaacagtgcagctgctggtgacagtgctggatgtgaatgacaatgcccccacctttgagcagagtgaatatgaggtgcgcatctttgaaaatgctgacaatggcaccaccgtcatccggctgaatgccagtgacagagatgagggcgccaacggggccatctcctacagcttcaacagcctggtggccgccatggtgattgaccacttcagcattgacagaaatactggagagatcgtcatccggggcaacctggactttgagcaggagaacctgtacaagatcctgattgatgccacagacaagggccacccccccatggccggccactgcaccgtgctggtgcgcatcctggacaagaatgacaacgtgcctgagatcgccctgaccagcctgagcctgcctgtgagagaagatgcccagtttggaacagtgattgccctgatctctgtgaatgacctggacagcggggccaacggccaggtgaactgcagcctgaccccccacgtgcccttcaagctggtgtccaccttcaagaactactacagcctggtgctggacagcgccctggaccgggagagcgtgtctgcctatgagctggtggtgacagccagagatggcggcagccccagcctgtgggccacagccagcctgtctgtggaggtggccgacatgaatgacaatgccccagcctttgcccagcctgagtacacagtgtttgtgaaggagaacaaccccccaggctgccacatcttcaccgtgtctgccagagatgctgatgcccaggagaatgccctggtgtcctacagcctggtggagaggagagtgggggagcgggccctgagcagctacatctctgtgcacgccgagagcggcaaggtgtatgccctgcagcccctggaccacgaggagctggagctgctgcagttccaggtgtctgccagagatgctggggtgccccccctgggcagcaatgtgaccctgcaggtgtttgtgctggatgaaaatgacaatgccccagccctgctggccccccgggtgggcggcactggaggagctgtgtctgagctggtgcccaggagcctgggcgccggccaggtggtggccaaggtgcgggctgtggatgctgacagcggctacaatgcctggctgtcctatgagctgcagcccccagccagcagcgcccgcttccccttccgggtgggcctgtacaccggggagatcagcaccaccagggtgctggatgaggccgacagccccaggcaccggctgctggtgctggtgaaggaccacggggagcccgccctgacagccacagccaccgtgctggtgtccctggtggagagcggccaggcccccaaggccagcagccgggcctctgtgggcgctgctggccctgaggccgccctggtggatgtgaatgtgtacctgatcatcgccatctgtgctgtgagcagcctgctggtgctgaccctgctgctgtacacagccctgcgctgcagcgccccacccacagagggcgcctgcacagctgacaagcccaccctggtgtgcagcagcgctgtgggctcctggagctacagccagcagaggcggcagagggtgtgcagcggggagggcccccccaagatggacctgatggccttcagccccagcctgagcccctgccccatcatgatgggcaaggccgagaaccaggacctgaatgaagatcatgatgccaagccccggcagcccaacccagactggagatacagcgccagcctgcgggccggcatgcacagctctgtgcacctggaggaggccggcatcctgcgggccggccctgggggccctgaccagcagtggcccaccgtgagcagcgccaccccagagcctgaggccggggaggtgagcccccctgtgggcgctggggtgaacagcaacagctggaccttcaagtatggccctggcaaccccaagcagagcggccctggagagctgcctgacaagttcatcatccctggcagccctgccatcatcagcatccggcaggagcccaccaacagccagattgacaagagtgacttcatcaccttcggcaagaaggaggagaccaagaagaagaagaagaagaagaagggcaacaagacccaggagaagaaggagaagggcaacagcaccacagacaacagcgaccagtag

SEQ ID NO: 166507 - DNA, 2370 bp, synthetic construct
  misc_feature 1..2370: note = Description of Artificial Sequence: Synthetic coding sequence
  source 1..2370: mol_type = other DNA
atggtgtgccccaacggctatgaccccggcggccgccacctgctgctcttcatcatcatcctggccgcctgggaggccggccggggccagctgcactacagcgtgcctgaggaggccaagcacggcaactttgtgggccgcatcgcccaggacctgggcctggagctggccgagctggtgcccaggctcttccgggctgtgtgcaagttccggggggacctgctggaggtgaacctgcagaatggcatcctgtttgtgaacagcagaattgaccgggaggagctgtgtggccgctctgcagaatgttccatccacctggaggtgattgtggagcggcccctgcaggtgttccacgtggatgtggaggtgaaggacatcaatgacaacccccctgtgtttcctgccacccagaggaacctcttcatcgccgagagccggcccctggacagccgcttccccctggagggcgccagtgatgctgacatcggggagaatgccctgctgacctaccgcctgagccccaatgagtacttcttcctggatgtgcccaccagcaaccagcaggtgaagcccctgggcctggtgctgaggaagctgctggaccgggaggagaccccagagctgcacctgctgctgacagccacagatggcggcaagccagagctgactggaacagtgcagctgctgatcaccgtgctggacaacaatgacaatgcccctgtgtttgacaggaccctgtacacagtgaagctgcctgaaaatgtgtccatcggcaccctggtgatccaccccaatgccagtgacctggatgagggcctgaatggagacatcatctacagcttcagcagtgatgtgtccccagacatcaagagcaagttccacatggaccccctgagcggggccatcaccgtgattggccacatggactttgaggagagccgggcccacaagatccctgtggaggccgtggacaagggcttcccccccctggccggccactgcaccgtgctggtggaggtggtggatgtgaatgacaatgccccccagctgaccctgaccagcctgagcctgcccatcccagaagatgcccagcccggcaccgtcatcaccctcatctctgtgtttgaccgggactttggagtgaatggccaggtgacctgcagcctgaccccccgggtgcccttcaagctggtgtccaccttcaagaactactacagcctggtgctggacagcgccctggaccgggagagcgtgtctgcctatgagctggtggtgacagccagagatggcggcagccccagcctgtgggccacagcctctgtgtctgtggaggtggctgatgtgaatgacaatgccccagcctttgcccagcctgagtacacagtgtttgtgaaggagaacaaccccccaggctgccacatcttcaccgtgtctgctggagatgctgatgcccagaagaatgccctggtgtcctacagcctggtggagctgcgggtgggggagcgggccctgagcagctatgtgtctgtgcacgccgagagcggcaaggtgtatgccctgcagcccctggaccacgaggagctggagctgctgcagttccaggtgtctgccagagatgctggggtgccccccctgggcagcaatgtgaccctgcaggtgtttgtgctggatgaaaatgacaatgccccagccctgctggccccccgggtgggcggcactggaggagctgtgcgggagctggtgcccaggtctgtgggcgccggccacgtggtggccaaggtgcgggctgtggatgctgacagcggctacaatgcctggctgtcctatgagctgcagcctgtggccgccggggccagcatccccttccgggtgggcctgtacaccggggagatcagcaccacccgggccctggatgaaacagatgcccccaggcaccggctgctggtgctggtgaaggaccacggggagcccagcctgacagccacagccaccgtgctggtgtccctggtggagagcggccaggcccccaaggccagcagccgggccagcctgggcattgctggccctgagacagagctggtggatgtgaatgtgtacctgatcatcgccatctgtgctgtgagcagcctgctggtgctgaccctgctgctgtacacagccctgcgctgcagcgcccccagcagcgagggcgcctgcagcctggtgaagcccaccctggtgtgcagcagcgctgtgggctcctggagcttcagccagcagaggcggcagagggtgtgcagcggggagggcccccccaagacagacctgatggccttcagccccagcctgccccagggccccagcagcacagacaacgtgagccacaagtag

SEQ ID NO: 166508 - DNA, 2814 bp, synthetic construct
  misc_feature 1..2814: note = Description of Artificial Sequence: Synthetic coding sequence
  source 1..2814: mol_type = other DNA
atggtgtgccccaacggctatgaccccggcggccgccacctgctgctcttcatcatcatcctggccgcctgggaggccggccggggccagctgcactacagcgtgcctgaggaggccaagcacggcaactttgtgggccgcatcgcccaggacctgggcctggagctggccgagctggtgcccaggctcttccgggctgtgtgcaagttccggggggacctgctggaggtgaacctgcagaatggcatcctgtttgtgaacagcagaattgaccgggaggagctgtgtggccgctctgcagaatgttccatccacctggaggtgattgtggagcggcccctgcaggtgttccacgtggatgtggaggtgaaggacatcaatgacaacccccctgtgtttcctgccacccagaggaacctcttcatcgccgagagccggcccctggacagccgcttccccctggagggcgccagtgatgctgacatcggggagaatgccctgctgacctaccgcctgagccccaatgagtacttcttcctggatgtgcccaccagcaaccagcaggtgaagcccctgggcctggtgctgaggaagctgctggaccgggaggagaccccagagctgcacctgctgctgacagccacagatggcggcaagccagagctgactggaacagtgcagctgctgatcaccgtgctggacaacaatgacaatgcccctgtgtttgacaggaccctgtacacagtgaagctgcctgaaaatgtgtccatcggcaccctggtgatccaccccaatgccagtgacctggatgagggcctgaatggagacatcatctacagcttcagcagtgatgtgtccccagacatcaagagcaagttccacatggaccccctgagcggggccatcaccgtgattggccacatggactttgaggagagccgggcccacaagatccctgtggaggccgtggacaagggcttcccccccctggccggccactgcaccgtgctggtggaggtggtggatgtgaatgacaatgccccccagctgaccctgaccagcctgagcctgcccatcccagaagatgcccagcccggcaccgtcatcaccctcatctctgtgtttgaccgggactttggagtgaatggccaggtgacctgcagcctgaccccccgggtgcccttcaagctggtgtccaccttcaagaactactacagcctggtgctggacagcgccctggaccgggagagcgtgtctgcctatgagctggtggtgacagccagagatggcggcagccccagcctgtgggccacagcctctgtgtctgtggaggtggctgatgtgaatgacaatgccccagcctttgcccagcctgagtacacagtgtttgtgaaggagaacaaccccccaggctgccacatcttcaccgtgtctgctggagatgctgatgcccagaagaatgccctggtgtcctacagcctggtggagctgcgggtgggggagcgggccctgagcagctatgtgtctgtgcacgccgagagcggcaaggtgtatgccctgcagcccctggaccacgaggagctggagctgctgcagttccaggtgtctgccagagatgctggggtgccccccctgggcagcaatgtgaccctgcaggtgtttgtgctggatgaaaatgacaatgccccagccctgctggccccccgggtgggcggcactggaggagctgtgcgggagctggtgcccaggtctgtgggcgccggccacgtggtggccaaggtgcgggctgtggatgctgacagcggctacaatgcctggctgtcctatgagctgcagcctgtggccgccggggccagcatccccttccgggtgggcctgtacaccggggagatcagcaccacccgggccctggatgaaacagatgcccccaggcaccggctgctggtgctggtgaaggaccacggggagcccagcctgacagccacagccaccgtgctggtgtccctggtggagagcggccaggcccccaaggccagcagccgggccagcctgggcattgctggccctgagacagagctggtggatgtgaatgtgtacctgatcatcgccatctgtgctgtgagcagcctgctggtgctgaccctgctgctgtacacagccctgcgctgcagcgcccccagcagcgagggcgcctgcagcctggtgaagcccaccctggtgtgcagcagcgctgtgggctcctggagcttcagccagcagaggcggcagagggtgtgcagcggggagggcccccccaagacagacctgatggccttcagccccagcctgccccagggccccagcagcacagacaacccccggcagcccaacccagactggagatacagcgccagcctgcgggccggcatgcacagctctgtgcacctggaggaggccggcatcctgcgggccggccctgggggccctgaccagcagtggcccaccgtgtcctctgccaccccagagcctgaggccggggaggtgtccccacctgtgggcgccggcgtgaacagcaacagctggaccttcaagtatggccctggcaaccccaagcagagcggccctggagagctgcctgacaagttcatcatccctggcagccctgccatcatcagcatccggcaggagcccaccaacagccagattgacaagagtgacttcatcaccttcggcaagaaggaggagaccaagaagaagaagaagaagaagaagggcaacaagacccaggagaagaaggagaagggcaacagcaccacagacaacagcgaccagtag

SEQ ID NO: 166509 - DNA, 2445 bp, synthetic construct
  misc_feature 1..2445: note = Description of Artificial Sequence: Synthetic coding sequence
  source 1..2445: mol_type = other DNA
atggactaccactggagaggagagctgggctcctggaggctgctgctgctgctgctgctgctggccgcctggaaggtgggcagcggccagctgcactacagcgtgcctgaggaggccaagcacggcacctttgtgggccgcatcgcccaggacctgggcctggagctggccgagctggtgcccaggctcttccgggtggccagcaagaggcaccgggacctgctggaggtgtccctgcagaatggcatcctgtttgtgaacagcagaattgaccgggaggagctgtgtggccgctctgcagaatgttccatccacctggaggtgattgtggaccggcccctgcaggtgttccacgtggatgtggaggtgaaggatgtgaatgacaacccccctgtgttccgggtgaaggaccagaagctgtttgtgtctgagagcaggatgccagacagccgcttccccctggagggcgccagtgatgctgatgtgggcgccaacagcgtgctgacctaccgcctgagcagccatgactacttcatgctggatgtgaacagcaagaatgatgagaacaagctggtggagctggtgctgaggaagagcctggacagagaagatgccccagcccaccacctgttcctgacagccacagatggcggcaagccagagctgactggaacagtgcagctgctggtgacagtgctggatgtgaatgacaatgcccccacctttgagcagagtgaatatgaggtgcgcatctttgaaaatgctgacaatggcaccaccgtcatcaagctgaatgccagtgaccctgatgagggcgccaacggggccatctcctacagcttcaacagcctggtggagaccatggtgattgaccacttcagcattgacagaaatactggagagatcgtcatccggggcaacctggactttgagcaggagaacctgtacaagatcctgattgatgccacagacaagggccacccccccatggccggccactgcaccgtgctggtgcgcatcctggacaagaatgacaacgtgcctgagatcgccctgaccagcctgagcctgcctgtgagagaagatgcccagtttggaacagtgattgccctgatctctgtgaatgacctggacagcggggccaacggccaggtgacctgcagcctgatgccccacgtgcccttcaagctggtgtccaccttcaagaactactacagcctggtgctggacagcgccctggaccgggagcgggtgtctgcctatgagctggtggtgacagccagagatggcggcagccccagcctgtgggccacagccagcctgtctgtggaggtggctgatgtgaatgacaatgccccagcctttgcccagcctgagtacacagtgtttgtgaaggagaacaaccccccaggctgccacatcttcaccgtgtctgccagagatgctgatgcccaggagaatgccctggtgtcctacagcctggtggagaggagagtgggggagaggagcctgagcagctacatctctgtgcacacagagagcggcaaggtgtatgccctgcagcccctggaccacgaggagctggagctgctgcagttccaggtgtctgccagagatgctggggtgccccccctgggcagcaatgtgaccctgcaggtgtttgtgctggatgaaaatgacaatgccccagccctgctggagccccgggtgggcggcactggaggagctgccagcaagctggtgcccaggtctgtgggcgccggccacgtggtggccaaggtgcgggctgtggatgctgacagcggctacaatgcctggctgtcctatgagctgcagcctgctgccagcagcccccgcatccccttccgggtgggcctgtacaccggggagatcagcaccaccagggtgctggatgaggccgacagccccaggcaccggctgctggtgctggtgaaggaccacggggagcccgccctgacagccacagccaccgtgctggtgtccctggtggagagcggccaggcccccaaggccagcagccggcagagcgctggggtgctgggccctgaggccgccctggtggatgtgaatgtgtacctgatcatcgccatctgtgctgtgagcagcctgctggtgctgaccctgctgctgtacacagccctgcgctgcagcgccctgcccacagagggcggctgccgggccggcaagcccaccctggtgtgcagcagcgctgtgggctcctggagctacagccagcagcagccccagagggtgtgcagcggggagggcccccccaagacagacctgatggccttcagcccctgcctgcccccagacctgggctctgtggatgtgggggaggagcaggacctgaatgtggaccacggcctgaaggtgagccccttcaagttccgcacccacaagttctacctgtggaagctgtag

SEQ ID NO: 166510 - DNA, 2853 bp, synthetic construct
  misc_feature 1..2853: note = Description of Artificial Sequence: Synthetic coding sequence
  source 1..2853: mol_type = other DNA
atggactaccactggagaggagagctgggctcctggaggctgctgctgctgctgctgctgctggccgcctggaaggtgggcagcggccagctgcactacagcgtgcctgaggaggccaagcacggcacctttgtgggccgcatcgcccaggacctgggcctggagctggccgagctggtgcccaggctcttccgggtggccagcaagaggcaccgggacctgctggaggtgtccctgcagaatggcatcctgtttgtgaacagcagaattgaccgggaggagctgtgtggccgctctgcagaatgttccatccacctggaggtgattgtggaccggcccctgcaggtgttccacgtggatgtggaggtgaaggatgtgaatgacaacccccctgtgttccgggtgaaggaccagaagctgtttgtgtctgagagcaggatgccagacagccgcttccccctggagggcgccagtgatgctgatgtgggcgccaacagcgtgctgacctaccgcctgagcagccatgactacttcatgctggatgtgaacagcaagaatgatgagaacaagctggtggagctggtgctgaggaagagcctggacagagaagatgccccagcccaccacctgttcctgacagccacagatggcggcaagccagagctgactggaacagtgcagctgctggtgacagtgctggatgtgaatgacaatgcccccacctttgagcagagtgaatatgaggtgcgcatctttgaaaatgctgacaatggcaccaccgtcatcaagctgaatgccagtgaccctgatgagggcgccaacggggccatctcctacagcttcaacagcctggtggagaccatggtgattgaccacttcagcattgacagaaatactggagagatcgtcatccggggcaacctggactttgagcaggagaacctgtacaagatcctgattgatgccacagacaagggccacccccccatggccggccactgcaccgtgctggtgcgcatcctggacaagaatgacaacgtgcctgagatcgccctgaccagcctgagcctgcctgtgagagaagatgcccagtttggaacagtgattgccctgatctctgtgaatgacctggacagcggggccaacggccaggtgacctgcagcctgatgccccacgtgcccttcaagctggtgtccaccttcaagaactactacagcctggtgctggacagcgccctggaccgggagcgggtgtctgcctatgagctggtggtgacagccagagatggcggcagccccagcctgtgggccacagccagcctgtctgtggaggtggctgatgtgaatgacaatgccccagcctttgcccagcctgagtacacagtgtttgtgaaggagaacaaccccccaggctgccacatcttcaccgtgtctgccagagatgctgatgcccaggagaatgccctggtgtcctacagcctggtggagaggagagtgggggagaggagcctgagcagctacatctctgtgcacacagagagcggcaaggtgtatgccctgcagcccctggaccacgaggagctggagctgctgcagttccaggtgtctgccagagatgctggggtgccccccctgggcagcaatgtgaccctgcaggtgtttgtgctggatgaaaatgacaatgccccagccctgctggagccccgggtgggcggcactggaggagctgccagcaagctggtgcccaggtctgtgggcgccggccacgtggtggccaaggtgcgggctgtggatgctgacagcggctacaatgcctggctgtcctatgagctgcagcctgctgccagcagcccccgcatccccttccgggtgggcctgtacaccggggagatcagcaccaccagggtgctggatgaggccgacagccccaggcaccggctgctggtgctggtgaaggaccacggggagcccgccctgacagccacagccaccgtgctggtgtccctggtggagagcggccaggcccccaaggccagcagccggcagagcgctggggtgctgggccctgaggccgccctggtggatgtgaatgtgtacctgatcatcgccatctgtgctgtgagcagcctgctggtgctgaccctgctgctgtacacagccctgcgctgcagcgccctgcccacagagggcggctgccgggccggcaagcccaccctggtgtgcagcagcgctgtgggctcctggagctacagccagcagcagccccagagggtgtgcagcggggagggcccccccaagacagacctgatggccttcagcccctgcctgcccccagacctgggctctgtggatgtgggggaggagcaggacctgaatgtggaccacggcctgaagccccggcagcccaacccagactggagatacagcgccagcctgcgggccggcatgcacagctctgtgcacctggaggaggccggcatcctgcgggccggccctgggggccctgaccagcagtggcccaccgtgagcagcgccaccccagagcctgaggccggggaggtgagcccccctgtgggcgctggggtgaacagcaacagctggaccttcaagtatggccctggcaaccccaagcagagcggccctggagagctgcctgacaagttcatcatccctggcagccctgccatcatcagcatccggcaggagcccaccaacagccagattgacaagagtgacttcatcaccttcggcaagaaggaggagaccaagaagaagaagaagaagaagaagggcaacaagacccaggagaagaaggagaagggcaacagcaccacagacaacagcgaccagtag

SEQ ID NO: 166511 - DNA, 2529 bp, synthetic construct
  misc_feature 1..2529: note = Description of Artificial Sequence: Synthetic coding sequence
  source 1..2529: mol_type = other DNA
atgctgtacagcagcagaggagaccctgagggccagcccctgctgctgagcctgctgatcctggccatgtgggtggtgggcagcggccagctgcactacagcgtgcctgaggaggccgagcacggcacctttgtgggccgcatcgcccaggacctgggcctggagctggccgagctggtgcccaggctcttccagctggacagcaagggccgcggggacctgctggaggtgaacctgcagaatggcatcctgtttgtgaacagcagaattgaccgggaggagctgtgtggccgctctgcagaatgttccatccacctggaggtgattgtggaccggcccctgcaggtgttccacgtggatgtggaggtgaaggacatcaatgacaacccccctgtgtttcctgccacccagaagaacctcttcatcgccgagagccggcccctggacagccgcttccccctggagggcgccagtgatgctgacatcggggagaatgccctgctgacctaccgcctgagccccaatgagtacttcttcctggatgtgcccaccagcaaccagcaggtgaagcccctgggcctggtgctgaggaagctgctggaccgggaggagaccccagagctgcacctgctgctgacagccacagatggcggcaagccagagctgactggaacagtgcagctgctgatcaccgtgctggacaacaatgacaatgcccctgtgtttgacaggaccctgtacacagtgaagctgcctgaaaatgtgtccatcggcaccctggtgatccaccccaatgccagtgacctggatgagggcctgaatggagacatcatctacagcttcagcagtgatgtgtccccagacatcaagagcaagttccacatggaccccctgagcggggccatcaccgtgattggccacatggactttgaggagagccgggcccacaagatccctgtggaggccgtggacaagggcttcccccccctggccggccactgcaccctgctggtggaggtggtggatgtgaatgacaatgccccccagctgaccatcaagaccctgtctgtgcctgtgaaggaggatgcccagctgggcaccgtgattgccctgatctctgtgattgacctggatgctgatgccaacggccaggtgacctgcagcctgaccccccacgtgcccttcaagctggtgtccacctacaagaactactacagcctggtgctggaccgggccctggaccgggagagcgtgtctgcctatgagctggtggtgacagccagagatggcggcagccccagcctgtgggccacagcccgggtgtctgtggaggtggctgatgtgaatgacaatgccccagcctttgcccagagcgagtacacagtgtttgtgaaggagaacaaccccccaggctgccacatcttcaccgtgtctgccagagatgctgatgcccaggagaatgccctggtgtcctacagcctggtggagcggcggctgggggagaggagcctgagcagctatgtgtctgtgcacgccgagagcggcaaggtgtatgccctgcagcccctggaccacgaggagctggagctgctgcagttccaggtgtctgccagagatgctggggtgccccccctgggcagcaatgtgaccctgcaggtgtttgtgctggatgaaaatgacaatgccccagccctgctgacccccaggatgaggggcacagatggagctgtgtctgagatggtgctgcggtctgtgggcgccggcgtggtggtgggcaaggtgcgggctgtggatgctgacagcggctacaatgcctggctgtcctatgagctgcagcctgagacagccagcgccagcatccccttccgggtgggcctgtacaccggggagatcagcaccacccgggccctggatgaaacagatgccccccggcagaggctgctggtgctggtgaaggaccacggggagcccgccctgacagccacagccaccgtgctggtgtccctggtggagagcggccaggcccccaagagcagcagccgggcctctgtgggcgccactggacctgaggtgaccctggtggatgtgaatgtgtacctgatcatcgccatctgtgctgtgagcagcctgctggtgctgaccctgctgctgtacacagtgctgcgctgcagcgccatgcccacagaaggagaatgtgcccctgggaagcccaccctggtgtgcagcagcgctgtgggctcctggagctacagccagcagaggcggcagagggtgtgcagcggggagggcaagcagaagacagacctgatggccttcagccctggcctgagcccctgtgccggcagcacagagaggactggagagcccagcgccagcagtgacagcacaggcaaggtgggcttcagcagcatcctcttcatctacatcatcttcttcctggagcgctactaccgcctgctgcctggagctgtgcagatcgtgctcttcatcttcctggagatccagcagatcttcttcctgatcaagtag

SEQ ID NO: 166512 - DNA, 2853 bp, synthetic construct
  misc_feature 1..2853: note = Description of Artificial Sequence: Synthetic coding sequence
  source 1..2853: mol_type = other DNA
atgctgtacagcagcagaggagaccctgagggccagcccctgctgctgagcctgctgatcctggccatgtgggtggtgggcagcggccagctgcactacagcgtgcctgaggaggccgagcacggcacctttgtgggccgcatcgcccaggacctgggcctggagctggccgagctggtgcccaggctcttccagctggacagcaagggccgcggggacctgctggaggtgaacctgcagaatggcatcctgtttgtgaacagcagaattgaccgggaggagctgtgtggccgctctgcagaatgttccatccacctggaggtgattgtggaccggcccctgcaggtgttccacgtggatgtggaggtgaaggacatcaatgacaacccccctgtgtttcctgccacccagaagaacctcttcatcgccgagagccggcccctggacagccgcttccccctggagggcgccagtgatgctgacatcggggagaatgccctgctgacctaccgcctgagccccaatgagtacttcttcctggatgtgcccaccagcaaccagcaggtgaagcccctgggcctggtgctgaggaagctgctggaccgggaggagaccccagagctgcacctgctgctgacagccacagatggcggcaagccagagctgactggaacagtgcagctgctgatcaccgtgctggacaacaatgacaatgcccctgtgtttgacaggaccctgtacacagtgaagctgcctgaaaatgtgtccatcggcaccctggtgatccaccccaatgccagtgacctggatgagggcctgaatggagacatcatctacagcttcagcagtgatgtgtccccagacatcaagagcaagttccacatggaccccctgagcggggccatcaccgtgattggccacatggactttgaggagagccgggcccacaagatccctgtggaggccgtggacaagggcttcccccccctggccggccactgcaccctgctggtggaggtggtggatgtgaatgacaatgccccccagctgaccatcaagaccctgtctgtgcctgtgaaggaggatgcccagctgggcaccgtgattgccctgatctctgtgattgacctggatgctgatgccaacggccaggtgacctgcagcctgaccccccacgtgcccttcaagctggtgtccacctacaagaactactacagcctggtgctggaccgggccctggaccgggagagcgtgtctgcctatgagctggtggtgacagccagagatggcggcagccccagcctgtgggccacagcccgggtgtctgtggaggtggctgatgtgaatgacaatgccccagcctttgcccagagcgagtacacagtgtttgtgaaggagaacaaccccccaggctgccacatcttcaccgtgtctgccagagatgctgatgcccaggagaatgccctggtgtcctacagcctggtggagcggcggctgggggagaggagcctgagcagctatgtgtctgtgcacgccgagagcggcaaggtgtatgccctgcagcccctggaccacgaggagctggagctgctgcagttccaggtgtctgccagagatgctggggtgccccccctgggcagcaatgtgaccctgcaggtgtttgtgctggatgaaaatgacaatgccccagccctgctgacccccaggatgaggggcacagatggagctgtgtctgagatggtgctgcggtctgtgggcgccggcgtggtggtgggcaaggtgcgggctgtggatgctgacagcggctacaatgcctggctgtcctatgagctgcagcctgagacagccagcgccagcatccccttccgggtgggcctgtacaccggggagatcagcaccacccgggccctggatgaaacagatgccccccggcagaggctgctggtgctggtgaaggaccacggggagcccgccctgacagccacagccaccgtgctggtgtccctggtggagagcggccaggcccccaagagcagcagccgggcctctgtgggcgccactggacctgaggtgaccctggtggatgtgaatgtgtacctgatcatcgccatctgtgctgtgagcagcctgctggtgctgaccctgctgctgtacacagtgctgcgctgcagcgccatgcccacagaaggagaatgtgcccctgggaagcccaccctggtgtgcagcagcgctgtgggctcctggagctacagccagcagaggcggcagagggtgtgcagcggggagggcaagcagaagacagacctgatggccttcagccctggcctgagcccctgtgccggcagcacagagaggactggagagcccagcgccagcagtgacagcacaggcaagccccggcagcccaacccagactggagatacagcgccagcctgcgggccggcatgcacagctctgtgcacctggaggaggccggcatcctgcgggccggccctgggggccctgaccagcagtggcccaccgtgagcagcgccaccccagagcctgaggccggggaggtgagcccccctgtgggcgctggggtgaacagcaacagctggaccttcaagtatggccctggcaaccccaagcagagcggccctggagagctgcctgacaagttcatcatccctggcagccctgccatcatcagcatccggcaggagcccaccaacagccagattgacaagagtgacttcatcaccttcggcaagaaggaggagaccaagaagaagaagaagaagaagaagggcaacaagacccaggagaagaaggagaagggcaacagcaccacagacaacagcgaccagtag

SEQ ID NO: 166513 - DNA, 2892 bp, synthetic construct
  misc_feature 1..2892: note = Description of Artificial Sequence: Synthetic coding sequence
  source 1..2892: mol_type = other DNA
atggtgggctgcggcgtggccgtgctgtgcctgtgggtgtcctgtggggctgctgctggccagctggagtacagcgtgcctgaggagacagagcggggcgtggccgtgggcaacctgtctgctgacctgcggctgcctgctgctgccatgagcagcaggaacttccgcttcctgagcagccaccgggagctgtactttggagtggacctgcccagcggcaacctggtggtgcgggagcctgctgaccgggagcagctgtgccgggccaaggccgcctgtgtgctgacctatgacctggtgctggaggaccccctggagctgcacaagatccgcatccacgtgctggacaccaatgacaacagccccctcttccctgctggagatgtgcagctgcacatccctgagttcctgacccctggggcccgcttcaccctgcccaatgcccaggatgatgatgagggcagcaatggcatcctgagctacagcctgagccccagccagcacttccggctggacatgggcagccgggtggatggcagcgagtacccagagctggtgctggagaaggccctggaccgggagcagagggccacccacctgctggtgctgacagccagagatggcggcctgcctgcccggtctggagatgcccaggtgaccatcatcgtggtggacaccaatgacaatgcccctgtgtttgagaggtctgtgtaccgcaccaaggtgcctgagacagcccccaacggcaccgtgctcttccgggtgcaggccctggaccctgatgagggcagcaatggagaggtgcagtacagcctgagcaacagcacccaggccgagctgcggcaccgcttccacgtgcaccccaagagcggggaggtgcaggtggccgccagcctgggccccccagagaccctgctggaggcctacatcgaggccagagatgagggcgtgtttggcctggccagcacagccaagctgctggtggaggtgacagatgtgaatgaccacgcccctgagctggacttcctgaccctgagcaaccctgtgcctgaagatgctgcccctggcaccgtgattgccctcttctctgtgaaggatgaggacctggacagcaatggccgggtcatctgtggcatgagcagcgctggccccttccagctgacagccagctttgacaactactacagcctgctgattgatggccccctggaccgggagcagatcagcgagtaccaggtgctgatcacagccagtgacagcggcagcccccccctgagcaccaggaggaccatcaccgtgtctgtggctgatgtgaatgacaacacccccaacttcccccagccccagcaggagctgtttgtggccgagaacaacggccctggggccagcctgggccgggtgtttgcccaggaccctgacctgggcaagaatggcctggtgtcctatgagctgctggatgtgatcagcgagggccccagcgccagcagcctgctggccgtggagagcagcagcggggccatcacagccaagaccagctttgattttgagcagctgcggggcttccacttccaggtggagggcagagatggcggcatccccccaagaagtgccaccgtgaccatcaacctgtttgtggtggacagaaatgacaactaccctgtgatcctcttccccctgcccagaaatggatctgtgcctgtggagatcgtgcccaggtctgccaggacaggccacctggtgaccaaggtggtggccgaggatgctgacagcggcagcaatgcctggctgagctaccacatcagccgggccagtgacagcagcctcttccgcatcagcgccaacattggagagctgaggacagcccggctggtgctgcccacagatgctgtgaagcagagggtggtggtggtggtgcgggaccatggagacccccccctgagcagctctgtgaccctgggcgtgctgctgagcaacagcgtgccccagctgctgcctgactttgaagatgtgtgggagcccggcggccagctgagcgcccagaacctgtacctggtgattgccctggcctgcatctccttcctgttcctgggctgcctgctcttctttgtgtgcaccaagctgcaccagagccctggctgctgtgcccagagctgctgccgcagcacagaggacctgcgctatggcagcaagatggtgagcaacccctgcatgaccagcgccaccattgatgtgaccaccgtggagcggctgagccagacctacctgtaccgggccagcctgggcctgggcagtgacaacaacagcctgctgctgcggggggagtacaatgctgctgacctgaggaacctggccactggagtgggcctgaacctgcccatcagctgcatccagatccggaacaggaagggggaccacgccaacgtgaatgccatgccccggcagcccaacccagactggagatacagcgccagcctgcgggccggcatgcacagctctgtgcacctggaggaggccggcatcctgcgggccggccctgggggccctgaccagcagtggcccaccgtgtcctctgccaccccagagcctgaggccggggaggtgtccccacctgtgggcgccggcgtgaacagcaacagctggaccttcaagtatggccctggcaaccccaagcagagcggccctggagagctgcctgacaagttcatcatccctggcagccctgccatcatcagcatccggcaggagcccaccaacagccagattgacaagagtgacttcatcaccttcggcaagaaggaggagaccaagaagaagaagaagaagaagaagggcaacaagacccaggagaagaaggagaagggcaacagcaccacagacaacagcgaccagtag

SEQ ID NO: 166514 - DNA, 2457 bp, synthetic construct
  misc_feature 1..2457: note = Description of Artificial Sequence: Synthetic coding sequence
  source 1..2457: mol_type = other DNA
atggtgggctgcggcgtggccgtgctgtgcctgtgggtgtcctgtggggctgctgctggccagctggagtacagcgtgcctgaggagacagagcggggcgtggccgtgggcaacctgtctgctgacctgcggctgcctgctgctgccatgagcagcaggaacttccgcttcctgagcagccaccgggagctgtactttggagtggacctgcccagcggcaacctggtggtgcgggagcctgctgaccgggagcagctgtgccgggccaaggccgcctgtgtgctgacctatgacctggtgctggaggaccccctggagctgcacaagatccgcatccacgtgctggacaccaatgacaacagccccctcttccctgctggagatgtgcagctgcacatccctgagttcctgacccctggggcccgcttcaccctgcccaatgcccaggatgatgatgagggcagcaatggcatcctgagctacagcctgagccccagccagcacttccggctggacatgggcagccgggtggatggcagcgagtacccagagctggtgctggagaaggccctggaccgggagcagagggccacccacctgctggtgctgacagccagagatggcggcctgcctgcccggtctggagatgcccaggtgaccatcatcgtggtggacaccaatgacaatgcccctgtgtttgagaggtctgtgtaccgcaccaaggtgcctgagacagcccccaacggcaccgtgctcttccgggtgcaggccctggaccctgatgagggcagcaatggagaggtgcagtacagcctgagcaacagcacccaggccgagctgcggcaccgcttccacgtgcaccccaagagcggggaggtgcaggtggccgccagcctgggccccccagagaccctgctggaggcctacatcgaggccagagatgagggcgtgtttggcctggccagcacagccaagctgctggtggaggtgacagatgtgaatgaccacgcccctgagctggacttcctgaccctgagcaaccctgtgcctgaagatgctgcccctggcaccgtgattgccctcttctctgtgaaggatgaggacctggacagcaatggccgggtcatctgtggcatgagcagcgctggccccttccagctgacagccagctttgacaactactacagcctgctgattgatggccccctggaccgggagcagatcagcgagtaccaggtgctgatcacagccagtgacagcggcagcccccccctgagcaccaggaggaccatcaccgtgtctgtggctgatgtgaatgacaacacccccaacttcccccagccccagcaggagctgtttgtggccgagaacaacggccctggggccagcctgggccgggtgtttgcccaggaccctgacctgggcaagaatggcctggtgtcctatgagctgctggatgtgatcagcgagggccccagcgccagcagcctgctggccgtggagagcagcagcggggccatcacagccaagaccagctttgattttgagcagctgcggggcttccacttccaggtggagggcagagatggcggcatccccccaagaagtgccaccgtgaccatcaacctgtttgtggtggacagaaatgacaactaccctgtgatcctcttccccctgcccagaaatggatctgtgcctgtggagatcgtgcccaggtctgccaggacaggccacctggtgaccaaggtggtggccgaggatgctgacagcggcagcaatgcctggctgagctaccacatcagccgggccagtgacagcagcctcttccgcatcagcgccaacattggagagctgaggacagcccggctggtgctgcccacagatgctgtgaagcagagggtggtggtggtggtgcgggaccatggagacccccccctgagcagctctgtgaccctgggcgtgctgctgagcaacagcgtgccccagctgctgcctgactttgaagatgtgtgggagcccggcggccagctgagcgcccagaacctgtacctggtgattgccctggcctgcatctccttcctgttcctgggctgcctgctcttctttgtgtgcaccaagctgcaccagagccctggctgctgtgcccagagctgctgccgcagcacagaggacctgcgctatggcagcaagatggtgagcaacccctgcatgaccagcgccaccattgatgtgaccaccgtggagcggctgagccagacctacctgtaccgggccagcctgggcctgggcagtgacaacaacagcctgctgctgcggggggagtacaatgctgctgacctgaggaacctggccactggagtgggcctgaacctgcccatcagctgcatccagatccggaacaggaagggggaccacgccaacgtgaatgccatggtgtccaagttctacggcatctag

SEQ ID NO: 166515 - DNA, 3024 bp, synthetic construct
  misc_feature 1..3024: note = Description of Artificial Sequence: Synthetic coding sequence
  source 1..3024: mol_type = other DNA
atggagcaggccggcaccaggcctgctgccacagagcacccccggctgcggcggcccatgccctggctgctgctgctgcccctgctgctgctgctgctgctgctgctgcccggccctgctgccagccagctgcgctacagcgtgcctgaggagcaggcccctggggccctggtgggcaatgtggcccgggccctgggcctggagctgcggcggctgggccctggctgcctgcgcatcaaccacctgggcgcccccagcccccgctacctggagctggacctgaccagcggggccctgtttgtgaatgaaagaattgaccgggaggccctgtgtgagcagaggccccgctgcctgctgagcctggaggtgctggcccacaaccctgtggccgtgtctgctgtggaggtggagatcctggacatcaatgacaacagcccccgcttcccccggcccaactaccagctgcaggtgtctgagagcgtggcccctggggcccgcttccacattgaaagtgcccaggaccctgatgtgggcgccaacagcgtgcagacctatgagctgagccccagcgagcactttgagctggacctgaagcccctgcaggagaacagcaaggtgctggagctggtgctgaggaagggcctggaccgggagcaggccgccctgcaccacctggtgctgacagctgtggatggcggcatcccagcccggagcggcacagcccagatctctgtgcgggtgctggacaccaatgacaacagccctgcctttgaccagagcacctacagagtgcagctgcgggaggacagccccccaggcaccctggtggtgaagctgaatgccagtgaccctgatgagggcagcaatggagagctgcgctacagcctgagcagctacaccagtgaccgggagcggcagctgttcagcattgatgccagcactggagaggtgcgggtcatcggcggcctggactatgaggaggccagcagctaccagatctacgtgcaggccacagaccggggccctgtgcccatggccggccactgcaaggtgctggtggacatcgtggatgtgaatgacaatgcccctgaggtggtgctgacagacctgtacagccctgtgcctgaaaatgccacccccaacaccatcgtggccgtgctgtctgtgaatgaccaggacagcggccccaacaggaaggtgtccctgggcctggaggccaccctgcccttccggctgaatggatttggaaacagctacaccctggtggtgtctggccccctggaccgggagcgggtggccgtgtacaacatcaccgtgacagccacagatggcggcatcccccagctgaccagcctgcggaccctgaaggtggagatcagtgacatcaatgacaacccccccagcttcctggaggacagctacagcatctacatccaggagaacaacctgcccggggtgctgctgtgcaccgtgcaggccacagatcctgatgagaaggaaaatgctgaggtgacctacagcctgctggagcgggagatccagggcctgcctgtgaccagctatgtgtccatcaacagcgccagcggcagcctgtatgctgtgaacagctttgattatgagaagttccgggagttctttgtgacagtggaggcccaggacaagggcagcccccccctgagcagcacagtgacagccaacgtgtatgtggtggacatgaatgaccacgccccccacatcctgtaccccaccagcaccaacagcagcgctgcctttgagatggtgcccaggacagccccagctggctacctggtgaccaaggtgattgccatggacagcgacagcggccagaatgcctggctgttctaccacctggcccagaccagtgacctggacctcttcaaggtggagctgcacactggagagatccgcaccaccaggaagatgggagatgagagcggcagcaccttcaacctgactgtggtggtgcgggacaatggagagcccagcctgagcgcctctgtggccatcaccgtggccgtggtggacagagtgtccaagatcctgcctgacacccagagacatgtgaagagccccaggacctacagcgagatcaccctgtacctgatcatcgccctgagcacagtgtccttcatcttcctgctgaccatcatcatcctgagcatcatcaagtgctaccgctacacagcctatggaacagcctgctgcggcggcttctgtggggtgcgggagaggagccctgctgagctgtacaagcaggccaacaacaacattgatgcccgcatcccccacggcctgaaggtgcagccccacttcatcgaggtgagaggaaatggcagcctgaccaagacctactgctacaaggcctgcctgacagctggcagcggcagtgacaccttcatgttctacaacacaggagcccagacaggccctggccccagcggggcccaggccgctgtgacagacagcaggaacctgaccggccagagcggccagaatgccggcaacctgatcatcctgaagaatgaggccgtgtcccagaatgagccccggcagcccaacccagactggagatacagcgccagcctgcgggccggcatgcacagctctgtgcacctggaggaggccggcatcctgcgggccggccctgggggccctgaccagcagtggcccaccgtgtcctctgccaccccagagcctgaggccggggaggtgtccccacctgtgggcgccggcgtgaacagcaacagctggaccttcaagtatggccctggcaaccccaagcagagcggccctggagagctgcctgacaagttcatcatccctggcagccctgccatcatcagcatccggcaggagcccaccaacagccagattgacaagagtgacttcatcaccttcggcaagaaggaggagaccaagaagaagaagaagaagaagaagggcaacaagacccaggagaagaaggagaagggcaacagcaccacagacaacagcgaccagtag

SEQ ID NO: 166516 - DNA, 2457 bp, synthetic construct
  misc_feature 1..2457: note = Description of Artificial Sequence: Synthetic coding sequence
  source 1..2457: mol_type = other DNA
atggccggcaccaggaggaagagcctgcagaaccggcaggtgggcagcctgctgatcttcctgtgcatctctgtgggagatgccaccaccatccgctacagcgtggccgaggagatggagagcggcagctttgtggccaacgtggccaaggacctgggcctggaggtgggcaagctggccgcccggggggcccggctggtgtctgagggcaacaagatgcacttccggctgcacaggaagacaggagacctgtttgtgaaggagaagctggaccgggagagcctgtgtgggaaggctgacccctgtgtgctgcactttgaggtggtgctggtggagcccctgcagagcttccgggcagaggtgcgggtgtttgacatcaatgacaatgcccctgtgttcctgaacaaggagcccctgctgaagatccctgagagcacccccctgggcagccgcttccccctgcagagcgcccaggacctggatgtgggcctgaatggcctgcagaactacaccctgagcgccaacggctacttccacctgcacacccgcttctgcagccacggccccaagtatgcagagctggtgctgaacaagcccctggaccgggaggagcagcctgaggtgaacctgaccatcacagctgtggatggcggcagcccccccaagtctggaacagcccacatccacgtggtggtgctggatgtgaatgaccacgtgccccagttcagccggctggtgtaccgggcccaggtgtctgagaacagccccaacggcagcctggtggccaccgtgacagctgtggacctggatgagggcaccaacaaggccatcacctacagcctggcccagaaccctgaggccatcctgaagaccttccagattgacccccagaatggagaggtgcggctgcggggccccctggactttgaggccatcgagacctatgacatcgacatccaggccacagatggcggcggcctgagcgcccacagcaaggtgctggtggaggtggtggatgtgaatgacaaccccccagaggtgatggtgtcctctgtgagcagccccctgcctgaggacagccccccccagacagtggtggccctcttcaccatccgggaccgggacatccgggtgggcggcaaggtgacctgcttcctgcgggaggacctgcccttcgtcatcaagcccaccttcggcaacagctacagcctggtgacagacaggagcctggaccgggaggaggtgtctggctacaacatcaccatcgtggccatggacaccggcccccccagcctgtctgctgagaccatgattgaggtgctgatcagtgatgtgaatgacaacccccccatcttccgggaggacagctacatcctgactgtgcgggagaacaacagccctgctgtgttcatcggcaaggtgcatgctgaggacctggacctgggagaaaatgcccagatcacctacagcctgctgccccccaagaatggagacctgtctgtgtttgcctacatcagcatcaacagcggaaatggcaagctgtatgccctgcggaccatggactatgaggccatccaggacttccagtttgtggtgaaggccacagatggcggcttcctgagcctgagcagccaggtgacagtgcgggtggtggtgctggatgacaatgacaaccggcccatgatcctgtaccccctgcagaatggcaccctgccctgcaatgacctggtgcccaggtctgctgaggccggctacctggtgaccaaggtggtggccgtggatggagacagcggccagaacagctggctgagctaccacctgctgaaggccacagacctgggcctcttctctgtgcagaggcagaatggagagatccacaccctgcggcagatcagcgagcgggaccccatgatgcagaagctgatcatcctggtgcaggaccacggccagcctgccctgagcaccaccgtgtccctgaacatcctgctggtggatggcttcagcgagccctacctgcagttccaggaccccaccaagcacagcaggaaggtgaaccccagcaccaagtacctggtgatcagcctggtgatcctgtccttcctgttcctgctgtctgtgattgtcatcttcatcatccacgtgtaccagaagatcaagtaccgggagaagttcaccatccaggagcacttctatgatgactgcaacttcagcaacaacctggtgcagggccagggcaatggcagcctgagccggccctgcccctatgagatgtgcagcgccactggaactggaaacagcgagttccgcttcctgaagcgcttcatgcccaacttccccttcccccacgccaccggggagatcaagatggaggccggcagcagcctgccccccaacagcgacaggaacaagagccagaggctggagggccatgaccaggtgtctgatgactacatgtag

SEQ ID NO: 166517 - DNA, 2394 bp, synthetic construct
  misc_feature 1..2394: note = Description of Artificial Sequence: Synthetic coding sequence
  source 1..2394: mol_type = other DNA
atggagaaccagggcaccaggacccagcagatccggcaggtgctgctgctgtttgtgctgctgggcatgagccaggccggcagcgagacctggagcttctctgtggccgaggagatgcagagcggcagctttgtgggcaacctggccaaggacctgggcctgaaggtgcgggagctgagcagcagaggagcccgggtggtgtccaatgacaagaagcagaggctgcagctggacatcaacacaggagacctgctgctgtctgagaccctggaccgggaggagctgtgtggcagcattgagccctgtgtgctgcacctgcaggtgctgatgcagaaccccacccagttcctgcagatcgagctgcaggtgcgggacatcaatgaccacagccccatcttcagcgagaagcagatgctgctggagatccctgagaacagccctgtgggcgctgtgttcctgctggagagcgccaaggacctggatgtgggcatcaatgctgtgaagagctacaccatcagccccaacagccacttccacatcaagatgagggtcatcccagacaacaggaagtacccagagctggtgctggacaaggccctggactatgaggagctgcctgagctgtccttcatcctgagcgccctggatggcggcagcccccccaggtctggaacagccctggtgcgggtggtggtggtggacatcaatgacaacagccctgagtttgagcaggccttctatgaggtgaagatcagagaaaattccatcctgggcagcctcatcctgattgtgtctgcctgggacctggacagcggcaccaacggggagatctgctacaccttcagccacgccagcgaggacatcaggaagacctttgagatcaaccagaagagcggggagatcaccctgcgggcccccctggactttgagaccatcgagagctacagcatcatcatccaggccacagatggcggcggcctgtttgggaagagcaccgtcatcatccacgtgattgatgtgaatgacaatgcccctgagatcaccgtgagcagcatcaccagccccatccctgagaacaccccagagaccgtggtgatggtgttcagcatccaggacattgattctggggacaatggaagaattgtgtgcagcatccctgaggacctgccctttgtgctgaagagctctgtggagaactactacaccctggagacagagcggcccctggaccgggagagcacagctgagtacaacatcaccatcaccgtgacagacctgggcatcccccggctgaagacagagcacaacaccaccgtgctggtgtctgatgtgaatgacaatgcccccaccttcacccagaccagctacaccctgtttgtgcgggagaacaacagccctgccctgcacatcggctctgtgtctgccacagaccgggacagcggcaccaatgcccaggtgaactacagcctgctgcccccccaggacctgcacctgcccctggccagcctggtgtccatcaacacagacaatggccacctgtttgccctgcggagcctggactatgaggccctgcaggcctttgacttccgggtgggcgccacagaccggggcagccctgccctgagcagcgaggccctggtgcgggtgctggtgctggatgccaatgacaacagcccctttgtgctgtaccccctgcagaatggaagtgccccctgcacagagctggtgcccagggctgctgagcccggctacctggtgaccaaggtggtggccgtggatggagacagcggccagaatgcctggctgagctaccagctgctgaaggccacagagcccggcctgtttggagtgtgggcccacaatggagaggtgaggacagcccggctgctgtctgaaagagatgctgccaagcaccggctggtggtgctggtgaaggacaatggagagccccccaggtctgccacagccaccctgcaggtgctgctggtggatggcttcagccagccctacctgcccctgcctgaggccgccccagcccaggcccaggccgacagcctgactgtgtacctggtggtggccctggcctctgtgagcagcctcttcctgttctctgtgctgctgtttgtggccgtgcggctgtgcagaagaagcagagctgcctctgtgggcagctgcagcgtgcccaagggccccttccctggccacctggtggatgtgtctggcaccggcaccctgagccagagctaccagtatgaggtgtgcctgaccggcggcagcgagaccaatgagttcaagttcctgaagcctgtgatccccaacatccaggccaagggcctgggcaagaacagcgaggagaacagcaccttcaggaacagctttggcttcaacttctag

SEQ ID NO: 166518 - DNA, 1299 bp, synthetic construct
  misc_feature 1..1299: note = Description of Artificial Sequence: Synthetic coding sequence
  source 1..1299: mol_type = other DNA
atggtgttcagcatccaggacatcgacagcggggacaatggccgcatcgtgtgcagcatccctgaggacctgccctttgtgctgaagagctctgtggagaactactacaccctggagacagagcggcccctggaccgggagagcacagctgagtacaacatcaccatcaccgtgacagacctgggcatcccccggctgaagacagagcacaacaccaccgtgctggtgtctgatgtgaatgacaatgcccccaccttcacccagaccagctacaccctgtttgtgcgggagaacaacagccctgccctgcacatcggctctgtgtctgccacagaccgggacagcggcaccaatgcccaggtgaactacagcctgctgcccccccaggacctgcacctgcccctggccagcctggtgtccatcaacacagacaatggccacctgtttgccctgcggagcctggactatgaggccctgcaggcctttgacttccgggtgggcgccacagaccggggcagccctgccctgagcagcgaggccctggtgcgggtgctggtgctggatgccaatgacaacagcccctttgtgctgtaccccctgcagaatggcagcgccccctgcacagagctggtgcccagggctgctgagcccggctacctggtgaccaaggtggtggccgtggatggagacagcggccagaatgcctggctgagctaccagctgctgaaggccacagagcccggcctgtttggagtgtgggcccacaacggggaggtgaggacagcccggctgctgtctgaaagagatgctgccaagcaccggctggtggtgctggtgaaggacaacggggagcccccaagaagtgccacagccaccctgcaggtgctgctggtggatggcttcagccagccctacctgcccctgcctgaggccgccccagcccaggcccaggccgacagcctgactgtgtacctggtggtggccctggcctctgtgagcagcctcttcctgttctctgtgctgctgtttgtggccgtgcggctgtgccgccgcagccgggccgcctctgtgggcagctgcagcgtgcccaagggccccttccctggccacctggtggatgtgtctggaacaggcaccctgagccagagctaccagtatgaggtgtgcctgactggaggcagcgagaccaatgagttcaagttcctgaagcctgtgatccccaacatccaggccaagggcctgggcaagaacagcgaggagaacagcaccttcagaaattcctttggcttcaacttctag

SEQ ID NO: 166519 - DNA, 399 bp, synthetic construct
  misc_feature 1..399: note = Description of Artificial Sequence: Synthetic coding sequence
  source 1..399: mol_type = other DNA
accatcgagagctacagcatcatcatccaggccacagatggcggcggcctgtttgggaagagcaccgtcatcatccacgtgattgatgtgaatgacaatgcccctgagatcaccgtgagcagcatcaccagccccatccctgagaacaccccagagaccgtggtgatggtgttcagcatccaggacattgatggcaccacagaggagctgtttgtgcccttcaggaagaccagccacgtgctgaagagctctgtggagaactactacaccctggagacagagcggcccctggaccgggagagcacagctgagtacaacatcaccatcaccgtgacagacctgggcatcccccggctgaagacagagcacaacaccaccgtgctggtgtctgatgtgtag

SEQ ID NO: 166520 - DNA, 2388 bp, synthetic construct
  misc_feature 1..2388: note = Description of Artificial Sequence: Synthetic coding sequence
  source 1..2388: mol_type = other DNA
atggagaatggaggagctggcaccctgcagatccggcaggtgctgctcttctttgtgctgctgggcatgagccaggccggcagcgagaccggcaacttcctggtgatggaggagctgcagagcggcagctttgtgggcaacctggccaagaccctgggcctggaggtgtctgagctgagcagcagaggagcccgggtggtgtccaatgacaacaaggaatgtctgcagctggacaccaacacaggagacctgctgctgcgggagatgctggaccgggaggagctgtgtggcagcaatgagccctgtgtgctgtacttccaggtgctgatgaagaaccccacccagttcctgcagatcgagctgcaggtgcgggacatcaatgaccacagccctgtgttcctggagaaggagatgctgctggagatccctgagaacagccctgtgggcgctgtgttcctgctggagagcgccaaggacctggatgtgggcatcaatgctgtgaagagctacaccatcaaccccaacagccacttccacgtgaagatccgggtgaacccagacaacaggaagtacccagagctggtgctggacaaggccctggactatgaggagaggcctgagctgtccttcatcctgacagccctggatggcggcagcccccccaggtctggaacagccctggtgcgggtggtggtggtggacatcaatgacaacagccctgagtttgagcaggccttctatgaggtgaagatcctggagaacagcatcctgggcagcctggtggtgacagtgtctgcctgggacctggacagcggcaccaacagcgagctgagctacaccttcagccacgccagcgaggacatcaggaagacctttgagatcaaccagaagagcggggacatcaccctgacagcccccctggactttgaggccatcgagagctacagcatcatcatccaggccacagatggcggcggcctgtttgggaagagcacagtgcgcatccaggtgatggatgtgaatgacaatgcccctgagatcaccgtgagcagcatcaccagccccatccctgagaacaccccagagaccgtggtgatggtgttccgcatccgggaccgggacagcggggacaacgggaagatggtgtgcagcatccctgaggacatcccctttgtgctgaagagctctgtgaacaactactacaccctggagacagagcggcccctggaccgggagagcagagctgagtacaacatcaccatcaccgtgacagacctgggcaccccccggctgaagacagagcacaacatcaccgtgctggtgtctgatgtgaatgacaatgccccagccttcacccagaccagctatgccctgtttgtgcgggagaacaacagccctgccctgcacatcggcagcatcagcgccacagaccgggacagcggcaccaatgcccaggtgaactacagcctgctgcccagccaggacccccacctgcccctggccagcctggtgtccatcaatgctgacaatggccacctgtttgccctgcggagcctggactatgaggccctgcagggcttccagttccgggtgggcgccacagaccacggcagccctgccctgagcagcgaggccctggtgcgggtgctggtgctggatgccaatgacaacagcccctttgtgctgtaccccctgcagaatggaagtgccccctgcacagagctggtgccctgggccgctgagcccggctacctggtgaccaaggtggtggccgtggatggagacagcggccagaatgcctggctgagctaccagctgctgaaggccacagagcccggcctgtttggagtgtgggcccacaatggagaggtgaggacagcccggctgctgtctgaaagagatgctgccaagcaccggctggtggtgctggtgaaggacaatggagagccccccaggtctgccacagccaccctgcacgtgctgctggtggatggcttcagccagccctacctgcccctgcctgaggccgccccagcccaggcccaggccgacagcctgactgtgtacctggtggtggccctggcctctgtgagcagcctcttcctgttctctgtgctgctgtttgtggccgtgcggctgtgcagaagaagcagagctgcccctgtgggccgctgcagcgtgcctgagggccccttccctggccacctggtggatgtgtctggcaccggcaccctgagccagagctaccactatgaggtgtgtgtgactggaggcagccgcagcaacaagttcaagttcctgaagcccatcatccccaacttcctgccccagagcactggaagtgaggtggaggagaacccccccttccagaacaacctgggcttctag

SEQ ID NO: 166521 - DNA, 1257 bp, synthetic construct
  misc_feature 1..1257: note = Description of Artificial Sequence: Synthetic coding sequence
  source 1..1257: mol_type = other DNA
atggtgtgcagcatccctgaggacatcccctttgtgctgaagagctctgtgaacaactactacaccctggagacagagcggcccctggaccgggagagcagagctgagtacaacatcaccatcaccgtgacagacctgggcaccccccggctgaagacagagcacaacatcaccgtgctggtgtctgatgtgaatgacaatgccccagccttcacccagaccagctatgccctgtttgtgcgggagaacaacagccctgccctgcacatcggcagcatcagcgccacagaccgggacagcggcaccaatgcccaggtgaactacagcctgctgcccagccaggacccccacctgcccctggccagcctggtgtccatcaatgctgacaatggccacctgtttgccctgcggagcctggactatgaggccctgcagggcttccagttccgggtgggcgccacagaccacggcagccctgccctgagcagcgaggccctggtgcgggtgctggtgctggatgccaatgacaacagcccctttgtgctgtaccccctgcagaatggaagtgccccctgcacagagctggtgccctgggccgctgagcccggctacctggtgaccaaggtggtggccgtggatggagacagcggccagaatgcctggctgagctaccagctgctgaaggccacagagcccggcctgtttggagtgtgggcccacaatggagaggtgaggacagcccggctgctgtctgaaagagatgctgccaagcaccggctggtggtgctggtgaaggacaatggagagccccccaggtctgccacagccaccctgcacgtgctgctggtggatggcttcagccagccctacctgcccctgcctgaggccgccccagcccaggcccaggccgacagcctgactgtgtacctggtggtggccctggcctctgtgagcagcctcttcctgttctctgtgctgctgtttgtggccgtgcggctgtgcagaagaagcagagctgcccctgtgggccgctgcagcgtgcctgagggccccttccctggccacctggtggatgtgtctggcaccggcaccctgagccagagctaccactatgaggtgtgtgtgactggaggcagccgcagcaacaagttcaagttcctgaagcccatcatccccaacttcctgccccagagcactggaagtgaggtggaggagaacccccccttccagaacaacctgggcttctggatccagtag

SEQ ID NO: 166522 - DNA, 1377 bp, synthetic construct
  misc_feature 1..1377: note = Description of Artificial Sequence: Synthetic coding sequence
  source 1..1377: mol_type = other DNA
atggatgtgaatgacaatgcccctgagatcaccgtgagcagcatcaccagccccatccctgagaacaccccagagaccgtggtgatggtgttccgcatccgggaccgggacagcggggacaatggcaagatggtgtgcagcatccctgaggacatcccctttgtgctgaagagctctgtgaacaactactacaccctggagacagagcggcccctggaccgggagagcagagctgagtacaacatcaccatcaccgtgacagacctgggcaccccccggctgaagacagagcacaacatcaccgtgctggtgtctgatgtgaatgacaatgccccagccttcacccagaccagctatgccctgtttgtgcgggagaacaacagccctgccctgcacatcggcagcatcagcgccacagaccgggacagcggcaccaatgcccaggtgaactacagcctgctgcccagccaggacccccacctgcccctggccagcctggtgtccatcaatgctgacaatggccacctgtttgccctgcggagcctggactatgaggccctgcagggcttccagttccgggtgggcgccacagaccacggcagccctgccctgagcagcgaggccctggtgcgggtgctggtgctggatgccaatgacaacagcccctttgtgctgtaccccctgcagaatggcagcgccccctgcacagagctggtgccctgggccgctgagcccggctacctggtgaccaaggtggtggccgtggatggagacagcggccagaatgcctggctgagctaccagctgctgaaggccacagagcccggcctgtttggagtgtgggcccacaacggggaggtgaggacagcccggctgctgtctgaaagagatgctgccaagcaccggctggtggtgctggtgaaggacaacggggagcccccaagaagtgccacagccaccctgcacgtgctgctggtggatggcttcagccagccctacctgcccctgcctgaggccgccccagcccaggcccaggccgacagcctgactgtgtacctggtggtggccctggcctctgtgagcagcctcttcctgttctctgtgctgctgtttgtggccgtgcggctgtgccgccgcagccgggccgcccctgtgggccgctgcagcgtgcctgagggccccttccctggccacctggtggatgtgtctggaacaggcaccctgagccagagctaccactatgaggtgtgtgtgactggaggcagccgcagcaacaagttcaagttcctgaagcccatcatccccaacttcctgccccagagcacaggcagcgaggtggaggagaacccccccttccagaacaacctgggcttctag

SEQ ID NO: 166523 - DNA, 2397 bp, synthetic construct
  misc_feature 1..2397: note = Description of Artificial Sequence: Synthetic coding sequence
  source 1..2397: mol_type = other DNA
atggaggccagcggcaagctgatctgccggcagaggcaggtgctcttctccttcctgctgctgggcctgagcctggccggggctgctgagcccaggagctacagcgtggtggaggagacagagggcagcagctttgtgaccaacctggccaaggacctgggcctggagcagcgggagttcagccggcggggcgtgcgggtggtgtcccggggcaacaagctgcacctgcagctgaaccaggagacagctgacctgctgctgaatgagaagctggaccgggaggacctgtgtggccacacagagccctgtgtgctgcgcttccaggtgctgctggagagcccctttgagttcttccaggccgagctgcaggtgattgacatcaatgaccacagccctgtgttcctggacaagcagatgctggtgaaggtgtctgagagcagccccccaggcaccaccttccccctgaagaatgctgaggacctggatgtgggccagaacaacatcgagaactacatcatcagccccaacagctacttccgggtgctgaccaggaagagaagtgatggcaggaagtacccagagctggtgctggacaaggccctggaccgggaggaggaggccgagctgcggctgaccctgacagccctggatggcggcagccccccaagaagtggcacagcccaggtgtacatcgaggtgctggatgtgaatgacaatgcccctgagtttgagcagcccttctacagagtgcagatcagcgaggacagccctgtgggcttcctggtggtgaaggtgtctgccacagatgtggacaccggggtgaatggagagatctcctacagcctcttccaggccagcgaggagatcggcaagaccttcaagatcaaccccctgactggagaaattgagctgaagaagcagctggactttgagaagctgcagagctatgaggtgaacatcgaggccagagatgctggcaccttctctggaaaatgtactgtgctgatccaggtgattgatgtgaatgaccacgcccctgaggtgaccatgtctgccttcaccagccccatcccagaaaatgcccctgagaccgtggtggccctcttctctgtgtctgacctggacagcggggagaatggcaagatcagctgcagcatccaggaggacctgcccttcctgctgaagtctgctgagaacttctacaccctgctgacagagcggcccctggaccgggagagcagagctgagtacaacatcaccatcaccgtgacagacctgggcacccccatgctgatcacccagctgaacatgacagtgctgattgctgatgtgaatgacaatgccccagccttcacccagaccagctacaccctgtttgtgcgggagaacaacagccctgccctgcacatccgctctgtgtctgccacagaccgggacagcggcaccaatgcccaggtgacctacagcctgctgcccccccaggacccccacctgcccctgaccagcctggtgtccatcaatgctgacaatggccacctgtttgccctgcggagcctggactatgaggccctgcagggcttccagttccgggtgggcgccagtgaccacggcagccctgccctgagcagcgaggccctggtgcgggtggtggtgctggatgccaatgacaacagcccctttgtgctgtaccccctgcagaatggaagtgccccctgcacagagctggtgcccagggctgctgagcccggctacctggtgaccaaggtggtggccgtggatggagacagcggccagaatgcctggctgagctaccagctgctgaaggccacagagctgggcctgtttggagtgtgggcccacaatggagaggtgaggacagcccggctgctgtctgaaagagatgctgccaagcaccggctggtggtgctggtgaaggacaatggagagccccccaggtctgccacagccaccctgcacgtgctgctggtggatggcttcagccagccctacctgcccctgcctgaggccgcccccacccaggcccaggccgacctgctgactgtgtacctggtggtggccctggcctctgtgagcagcctcttcctgttctctgtgctgctgtttgtggccgtgcggctgtgcagaagaagcagagctgcctctgtgggccgctgcctggtgcctgagggccccctgcccggccacctggtggacatgagcggcaccaggaccctgagccagagctaccagtatgaggtgtgcctggccggcggcagcggcaccaatgagttcaagttcctgaagcccatcatccccaacttccccccccagtgccctgggaaggagatccagggcaacagcaccttccccaacaactttggcttcaacatccagtag

SEQ ID NO: 166524 - DNA, 2235 bp, synthetic construct
  misc_feature 1..2235: note = Description of Artificial Sequence: Synthetic coding sequence
  source 1..2235: mol_type = other DNA
atggaggccagcggcaagctgatctgccggcagaggcaggtgctcttctccttcctgctgctgggcctgagcctggccggggctgctgagcccaggagctacagcgtggtggaggagacagagggcagcagctttgtgaccaacctggccaaggacctgggcctggagcagcgggagttcagccggcggggcgtgcgggtggtgtcccggggcaacaagctgcacctgcagctgaaccaggagacagctgacctgctgctgaatgagaagctggaccgggaggacctgtgtggccacacagagccctgtgtgctgcgcttccaggtgctgctggagagcccctttgagttcttccaggccgagctgcaggtgattgacatcaatgaccacagccctgtgttcctggacaagcagatgctggtgaaggtgtctgagagcagccccccaggcaccaccttccccctgaagaatgctgaggacctggatgtgggccagaacaacatcgagaactacatcatcagccccaacagctacttccgggtgctgaccaggaagagaagtgatggcaggaagtacccagagctggtgctggacaaggccctggaccgggaggaggaggccgagctgcggctgaccctgacagccctggatggcggcagccccccaagaagtggcacagcccaggtgtacatcgaggtgctggatgtgaatgacaatgcccctgagtttgagcagcccttctacagagtgcagatcagcgaggacagccctgtgggcttcctggtggtgaaggtgtctgccacagatgtggacaccggggtgaatggagagatctcctacagcctcttccaggccagcgaggagatcggcaagaccttcaagatcaaccccctgactggagaaattgagctgaagaagcagctggactttgagaagctgcagagctatgaggtgaacatcgaggccagagatgctggcaccttctctggaaaatgtactgtgctgatccaggtgattgatgtgaatgaccacgcccctgaggtgaccatgtctgccttcaccagccccatcccagaaaatgcccctgagaccgtggtggccctcttctctgtgtctgacctggacagcggggagaatggcaagatcagctgcagcatccaggaggacctgcccttcctgctgaagtctgctgagaacttctacaccctgctgacagagcggcccctggaccgggagagcagagctgagtacaacatcaccatcaccgtgacagacctgggcacccccatgctgatcacccagctgaacatgacagtgctgattgctgatgtgaatgacaatgccccagccttcacccagaccagctacaccctgtttgtgcgggagaacaacagccctgccctgcacatccgctctgtgtctgccacagaccgggacagcggcaccaatgcccaggtgacctacagcctgctgcccccccgggtggtggtgctggatgccaatgacaacagcccctttgtgctgtaccccctgcagaatggaagtgccccctgcacagagctggtgcccagggctgctgagcccggctacctggtgaccaaggtggtggccgtggatggagacagcggccagaatgcctggctgagctaccagctgctgaaggccacagagctgggcctgtttggagtgtgggcccacaatggagaggtgaggacagcccggctgctgtctgaaagagatgctgccaagcaccggctggtggtgctggtgaaggacaatggagagccccccaggtctgccacagccaccctgcacgtgctgctggtggatggcttcagccagccctacctgcccctgcctgaggccgcccccacccaggcccaggccgacctgctgactgtgtacctggtggtggccctggcctctgtgagcagcctcttcctgttctctgtgctgctgtttgtggccgtgcggctgtgcagaagaagcagagctgcctctgtgggccgctgcctggtgcctgagggccccctgcccggccacctggtggacatgagcggcaccaggaccctgagccagagctaccagtatgaggtgtgcctggccggcggcagcggcaccaatgagttcaagttcctgaagcccatcatccccaacttccccccccagtgccctgggaaggagatccagggcaacagcaccttccccaacaactttggcttcaacatccagtag

SEQ ID NO: 166525 - DNA, 2409 bp, synthetic construct
  misc_feature 1..2409: note = Description of Artificial Sequence: Synthetic coding sequence
  source 1..2409: mol_type = other DNA
atggaggccagcggcaagctgatctgccggcagaggcaggtgctcttctccttcctgctgctgggcctgagcctggccggggctgctgagcccaggagctacagcgtggtggaggagacagagggcagcagctttgtgaccaacctggccaaggacctgggcctggagcagcgggagttcagccggcggggcgtgcgggtggtgtcccggggcaacaagctgcacctgcagctgaaccaggagacagctgacctgctgctgaatgagaagctggaccgggaggacctgtgtggccacacagagccctgtgtgctgcgcttccaggtgctgctggagagcccctttgagttcttccaggccgagctgcaggtgattgacatcaatgaccacagccctgtgttcctggacaagcagatgctggtgaaggtgtctgagagcagccccccaggcaccaccttccccctgaagaatgctgaggacctggatgtgggccagaacaacatcgagaactacatcatcagccccaacagctacttccgggtgctgaccaggaagagaagtgatggcaggaagtacccagagctggtgctggacaaggccctggaccgggaggaggaggccgagctgcggctgaccctgacagccctggatggcggcagccccccaagaagtggcacagcccaggtgtacatcgaggtgctggatgtgaatgacaatgcccctgagtttgagcagcccttctacagagtgcagatcagcgaggacagccctgtgggcttcctggtggtgaaggtgtctgccacagatgtggacaccggggtgaatggagagatctcctacagcctcttccaggccagcgaggagatcggcaagaccttcaagatcaaccccctgactggagaaattgagctgaagaagcagctggactttgagaagctgcagagctatgaggtgaacatcgaggccagagatgctggcaccttctctggaaaatgtactgtgctgatccaggtgattgatgtgaatgaccacgcccctgaggtgaccatgtctgccttcaccagccccatcccagaaaatgcccctgagaccgtggtggccctcttctctgtgtctgacctggacagcggggagaatggcaagatcagctgcagcatccaggaggacctgcccttcctgctgaagtctgctgagaacttctacaccctgctgacagagcggcccctggaccgggagagcagagctgagtacaacatcaccatcaccgtgacagacctgggcacccccatgctgatcacccagctgaacatgacagtgctgattgctgatgtgaatgacaatgccccagccttcacccagaccagctacaccctgtttgtgcgggagaacaacagccctgccctgcacatccgctctgtgtctgccacagaccgggacagcggcaccaatgcccaggtgacctacagcctgctgcccccccaggacccccacctgcccctgaccagcctggtgtccatcaatgctgacaatggccacctgtttgccctgcggagcctggactatgaggccctgcagggcttccagttccgggtgggcgccagtgaccacggcagccctgccctgagcagcgaggccctggtgcgggtggtggtgctggatgccaatgacaacagcccctttgtgctgtaccccctgcagaatggaagtgccccctgcacagagctggtgcccagggctgctgagcccggctacctggtgaccaaggtggtggccgtggatggagacagcggccagaatgcctggctgagctaccagctgctgaaggccacagagctgggcctgtttggagtgtgggcccacaatggagaggtgaggacagcccggctgctgtctgaaagagatgctgccaagcaccggctggtggtgctggtgaaggacaatggagagccccccaggtctgccacagccaccctgcacgtgctgctggtggatggcttcagccagccctacctgcccctgcctgaggccgcccccacccaggcccaggccgacctgctgactgtgtacctggtggtggccctggcctctgtgagcagcctcttcctgttctctgtgctgctgtttgtggccgtgcggctgtgcagaagaagcagagctgcctctgtgggccgctgcctggtgcctgagggccccctgcccggccacctggtggacatgagcggcaccaggaccctgagccagagctaccagtatgaggtgtgcctggccggcggcagcggcaccaatgagttcaagttcctgaagcccatcatccccaacttccccccccagtgccctgggaaggagatccagggcaacagcaccttccccaacctgtgtgtgtgcaacatcgtgcgcatctacagctag

SEQ ID NO: 166526 - DNA, 2397 bp, synthetic construct
  misc_feature 1..2397: note = Description of Artificial Sequence: Synthetic coding sequence
  source 1..2397: mol_type = other DNA
atggagatccggggggccctggacctgaggaagaggcaggtgctgatcttcctggtgctgctgggcctgagccgggccggcacagagagcgcccactacagcgtggccgaggagacagaaattggcagctttgtggccaacctggcccgggacctgggcctgggcgtggaggagctgagcagccgggaggcccgggtggtgtctgatgacaacaagaagtacctgcacctggacctgctgactggaaacctgctgctgaatgagaagctggacagagatgagctgtgtggcagcacagagccctgtgtgctgcacttccaggtggtgctggagaaccccctgcagttcttccgctttgagctgtgtgtgaaggacatcaatgaccacagccccaccttcctggacaaggagatcctgatcaagatcagcgagggcaccaccgtgggcgccaccttcctgatggagagcgcccaggacctggatgtgggcagcaacagcctgcagaactacaccatcagccccaacagccacttctacatcaagatcccagacagcagtgacaggaagatctacccagagctggtgctggaccgggccctggactatgagcaggaggccgagctgcggctgaccctgacagctgtggatggcggcagcccccccaagagcggcaccaccctggtgctgatcaaggtgctggacatcaatgacaatgcccctgagttcccccagagcctgtatgaggtgcaggtgcctgaagatcggcccctgggctcctggatcgccaccatcagcgccaaggacctggatgctggcaactacggcaagatctcctacaccttcttccacgccagcgaggacatcaggaagacctttgagatcaaccccatcagcggggaggtgaacctgcggagccccctggactttgaagtcatccagagctacaccatcaacatccaggccacagatggcggcggcctgagcggcaagtgcaccctgctggtgaaggtgatggacatcaatgacaaccccccagaggtgaccatcagcagcatcaccaagagaattccagaaaatgccagcgagaccctggtggccctcttcagcatcctggaccaggacagcggggacaatggccgcatgatctgcagcatccaggacaacctgcccttcttcctgaagcccaccttcaagaacttcttcaccctggtgtctgagaaggccctggaccgggagagccaggccgagtacaacatcaccatcaccgtgacagacctgggcaccccccggctgaagacagagtacaacatcaccgtgctgctgagtgatgtgaatgacaatgcccccaccttcacccagaccagctacaccctgtttgtgcgggagaacaacagccctgccctgcacatcggctctgtgtctgccacagaccgggacagcggcaccaatgcccaggtgaactacagcctgctgcccccccaggacagacacctgcccctggccagcctggtgtccatcaatgctgacaatggccacctgtttgccctgcggagcctggactatgaggccctgcaggagtttgagttccgggtgggcgccacagaccggggcagccctgccctgagcagcgaggccctggtgcgggtgctggtgctggatgccaatgacaacagcccctttgtgctgtaccccctgcagaatggaagtgccccctgcacagagctggtgcccagggctgctgagcccggctacctggtgaccaaggtggtggccgtggatggagacagcggccagaatgcctggctgagctaccagctgctgaaggccacagagcccggcctgtttggagtgtgggcccacaatggagaggtgaggacagcccggctgctgtctgaaagagatgctgccaagcaccggctggtggtgctggtgaaggacaatggagagccccccaggtctgccacagccaccctgcacgtgctgctggtggatggcttcagccagccctacctgcccctgcctgaggccgccccagcccaggcccaggccgacagcctgactgtgtacctggtggtggccctggcctctgtgagcagcctcttcctgttctctgtgctgctgtttgtggccgtgcggctgtgcagaagaagcagagctgcctctgtgggccgctgcagcgtgcctgagggccccttccctggccacctggtggatgtgtctggcaccggcaccctgagccagagctaccagtatgaggtgtgcctgaccggcggcagcggcaccaatgagttcaagttcctgaagcccatcatccccaacttccaggtgcatgacacaggaagaaacatgggagaaattgagaacttcaggaacagctttggcctgaacatccagtag

SEQ ID NO: 166527 - DNA, 1938 bp, synthetic construct
  misc_feature 1..1938: note = Description of Artificial Sequence: Synthetic coding sequence
  source 1..1938: mol_type = other DNA
atggagagcgcccaggacctggatgtgggcagcaacagcctgcagaactacaccatcagccccaacagccacttctacatcaagatcccagacagcagtgacaggaagatctacccagagctggtgctggaccgggccctggactatgagcaggaggccgagctgcggctgaccctgacagctgtggatggcggcagcccccccaagagcggcaccaccctggtgctgatcaaggtgctggacatcaatgacaatgcccctgagttcccccagagcctgtatgaggtgcaggtgcctgaggaccggcccctgggctcctggatcgccaccatcagcgccaaggacctggatgctggcaactacggcaagatctcctacaccttcttccacgccagcgaggacatcaggaagacctttgagatcaaccccatctctggagaggtgaacctgcggagccccctggactttgaggtgatccagagctacaccatcaacatccaggccacagatggcggcggcctgagcggcaagtgcaccctgctggtgaaggtgatggacatcaatgacaaccccccagaggtgaccatcagcagcatcaccaagaggatcccagaaaatgccagcgagaccctggtggccctcttcagcatcctggaccaggacagcggggacaatggaaggatgatctgcagcatccaggacaacctgcccttcttcctgaagcccaccttcaagaacttcttcaccctggtgtctgagaaggccctggaccgggagagccaggccgagtacaacatcaccatcaccgtgacagacctgggcaccccccggctgaagacagagtacaacatcaccgtgctgctgagtgatgtgaatgacaatgcccccaccttcacccagaccagctacaccctgtttgtgcgggagaacaacagccctgccctgcacatcggctctgtgtctgccacagaccgggacagcggcaccaatgcccaggtgaactacagcctgctgcccccccaggacagacacctgcccctggccagcctggtgtccatcaatgctgacaatggccacctgtttgccctgcggagcctggactatgaggccctgcaggagtttgagttccgggtgggcgccacagaccggggcagccctgccctgagcagcgaggccctggtgcgggtgctggtgctggatgccaatgacaacagcccctttgtgctgtaccccctgcagaatggcagcgccccctgcacagagctggtgcccagggctgctgagcccggctacctggtgaccaaggtggtggccgtggatggagacagcggccagaatgcctggctgagctaccagctgctgaaggccacagagcccggcctgtttggagtgtgggcccacaacggggaggtgaggacagcccggctgctgtctgaaagagatgctgccaagcaccggctggtggtgctggtgaaggacaacggggagcccccaagaagtgccacagccaccctgcacgtgctgctggtggatggcttcagccagccctacctgcccctgcctgaggccgccccagcccaggcccaggccgacagcctgactgtgtacctggtggtggccctggcctctgtgagcagcctcttcctgttctctgtgctgctgtttgtggccgtgcggctgtgccgccgcagccgggccgcctctgtgggccgctgcagcgtgcctgagggccccttccctggccacctggtggatgtgtctggaacaggcaccctgagccagagctaccagtatgaggtgtgcctgactggaggcagcggcaccaatgagttcaagttcctgaagcccatcatccccaacttccaggtgcatgacaccggcaggaacatgggagaaattgagaacttcagaaattcctttggcctgaacatccagtag

SEQ ID NO: 166528 - DNA, 2382 bp, synthetic construct
  misc_feature 1..2382: note = Description of Artificial Sequence: Synthetic coding sequence
  source 1..2382: mol_type = other DNA
atggaggcccgggtggagagagctgtgcagaagaggcaggtgctcttcctgtgtgtgttcctgggcatgtcctgggccggggctgagcccctgcgctactttgtggccgaggagacagagcggggcaccttcctgaccaacctggccaaggacctgggcctgggcgtgggggagctgcgggcccggggcacccgcatcgtgtctgaccagaacatgcagatcctgctgctgagcagcctgactggagacctgctgctgaatgagaagctggaccgggaggagctgtgtggcccccgggagccctgtgtgctgcccttccagctgctgctggagaagcccttccagatcttccgggcagagctgtgggtgcgggacatcaatgaccacgcccctgtgttcctggaccgggagatcagcctgaagatcctggagagcaccacccctggggccgccttcctgctggagagcgcccaggacagtgatgtgggcaccaacagcctgagcaactacaccatcagccccaatgcctacttccacatcaacgtgcatgattctggagagggcaacatctacccagagctggtgctgaaccaggtgctggaccgggaggagatccctgagttcagcctgaccctgacagccctggatggcggcagcccccccaggtctggaacagccctggtgcgcatcctggtgctggatgtgaatgacaatgccccagactttgtgcgcagcctgtacaaggtgcaggtgcctgagaacagccctgtgggctccatggtggtgtctgtgtctgcccgggacctggacaccggcagcaatggagaaattgcctatgccttctcctatgccacagagcgcatcctgaagaccttccagatcaaccccaccagcggcagcctgcacctgaaggcccagctggactatgaggccatccagacctacaccctgaccatccaggccaaggatggcggcggcctgagcggcaagtgcaccgtggtggtggatgtgacagacatcaatgacaacagacctgagctgctgctgagcagcctgaccagccccatcgccgagaacagccctgagaccgtggtggccgtgttccgcatccgggaccgggacagcggcaacaacgggaagacagtgtgcagcatccaggatgatgtgcccttcatcctgaagcccagcgtggagaacttctacaccctggtgacagagaagcccctggaccgggagaggaacacagagtacaacatcaccatcaccgtgacagacctgggcaccccccggctgaagacagagcacaacatcaccgtgctggtgtctgatgtgaatgacaatgccccagccttcacccagaccagctacaccctgtttgtgcgggagaacaacagccctgccctgcccatcggctctgtgtctgccacagaccgggacagcggcaccaatgcccaggtgatctacagcctgctgcccagccaggacccccacctgcccctggccagcctggtgtccatcaatgctgacaatggccacctgtttgccctgcggagcctggactatgaggccctgcaggcctttgagttccgggtgggcgccacagaccggggcagccctgccctgagcagcgaggccctggtgcgggtgctggtgctggatgccaatgacaacagcccctttgtgctgtaccccctgcagaacagcagcgccccctgcacagagcccctgcccagggctgctgagcccggctacctggtgaccaaggtggtggccgtggatggagacagcggccagaatgcctggctgagctaccagctgctgaaggccacagagcccggcctgtttggagtgtgggcccacaatggagaggtgaggacagcccggctgctgtctgaaagagatgctgccaagcagaggctggtggtgctggtgaaggacaatggagagccccccaggtctgccacagccaccctgcacgtgctgctggtggatggcttcagccagccctacctgcggctgcctgaggccgccccagaccaggccaacagcctgactgtgtacctggtggtggccctggcctctgtgagcagcctcttcctgctgtctgtgctgctgtttgtggccgtgcggctgtgcagaagaagcagagctgcccctgtgggccgctgcagcgtgcctgagggccccttccccaggcacctggtggacctgagcggcaccggcaccctgagccagagctaccagtatgaggtgtgcctgaccggcggcagcggcaccaatgagttcaagttcctgaagcccatcatccccaacctgctgccccagagcacaggccgggaggtggaggagaaccggcccttccagaacaacctgggcttctag

SEQ ID NO: 166529 - DNA, 2331 bp, synthetic construct
  misc_feature 1..2331: note = Description of Artificial Sequence: Synthetic coding sequence
  source 1..2331: mol_type = other DNA
atggagatcggctggatgcacaacagacggcagaggcaggtgctggtgttctttgtgctgctgagcctgagcggggccggggctgagctgggcagctacagcgtggtggaggagacagagcggggcagctttgtggccaacctgggcaaggacctgggcctgggcctgacagagatgagcaccaggaaggcccgcatcatcagccagggcaacaagcagcacctgcagctgaaggcccagacaggagacctgctgatcaatgagaagctggaccgggaggagctgtgtggccccacagagccctgcatcctgcacttccaggtgctgatggagaaccccctggagatcttccaggccgagctgcgggtcatcgacatcaatgaccacagccccatgttcacagagaaggagatgatcctgaagatccctgagaacagccccctgggcacagagttccccctgaaccacgccctggacctggatgtgggcagcaacaacgtgcagaactacaagatcagccccagcagccacttccgggtgctgattcatgagttcagagatggcaggaagtacccagagctggtgctggacaaggagctggaccgggaggaggagccccagctgcggctgaccctgacagccctggatggcggcagcccccccaggtctggaacagcccaggtgcgcatcgaggtggtggacatcaatgacaatgcccctgagtttgagcagcccatctacaaggtgcagatccctgagaacagccccctgggcagcctggtggccaccgtgtctgcccgggacctggatggaggagccaacgggaagatctcctacaccctcttccagcccagcgaggacatcagcaagaccctggaggtgaaccccatgaccggggaggtgcggctgaggaagcaggtggactttgagatggtgaccagctatgaggtgcgcatcaaggccacagatggcggcggcctgagcggcaagtgcaccctgctgctgcaggtggtggatgtgaatgacaaccccccccaggtgaccatgtctgccctgaccagccccatccctgagaacagccctgagatcgtggtggccgtgttttctgtgtctgaccctgattctggcaacaacgggaagaccatcagcagcatccaggaggacctgcccttcctgctgaagcccagcgtgaagaacttctacaccctggtgacagagcgggccctggaccgggaggcccgggcagagtacaacatcaccctgactgtgacagacatgggcaccccccggctgaagacagagcacaacatcaccgtgcagatcagtgatgtgaatgacaatgcccccaccttcacccagaccagctacaccctgtttgtgcgggagaacaacagccctgccctgcacatcggctctgtgtctgccacagaccgggacagcggcaccaatgcccaggtgacctacagcctgctgcccccccaggacccccacctgcccctggccagcctggtgtccatcaatgctgacaatggccacctgtttgccctgcggagcctggactatgaggccctgcgggagtttgagttccgggtgtctgccacagaccggggcagccctgccctgagcagcgaggccctggtgcgggtgctggtgctggatgccaatgacaacagcccctttgtgctgtaccccctgcagaatggaagtgccccctgcacagagctggtgcccagggctgctgagcccggctacctggtgaccaaggtggtggccgtggatggagacagcggccagaatgcctggctgagctaccagctgctgaaggccacagagcccggcctgtttggagtgtgggcccacaatggagaggtgaggacagcccggctgctgtctgaaagagatgctgccaagcagaggctggtggtgctggtgaaggacaatggagagccccccaggtctgccacagccaccctgcacgtgctgctggtggatggcttcagccagcccttcctgcccctgcctgaggccgcccctggccagacccaggccaacagcctgactgtgtacctggtggtggccctggcctctgtgagcagcctcttcctgttctctgtgctgctgtttgtggccgtgcggctgtgcagaagaagcagagctgcctctgtgggccgctgcagcatgcctgagggccccttccctggccgcctggtggatgtgtctggcaccggcaccctgagccagagctaccagtatgaggtgtgcctgaccggcggcagcgagaccagcgagttcaagttcctgaagcccatcatccccaacttcagcccctag

SEQ ID NO: 166530 - DNA, 2397 bp, synthetic construct
  misc_feature 1..2397: note = Description of Artificial Sequence: Synthetic coding sequence
  source 1..2397: mol_type = other DNA
atggaggccggggagggcaaggagcgggtgcccaagcagaggcaggtgctgatcttctttgtgctgctgggcatcgcccaggccagctgccagcccaggcactacagcgtggccgaggagacagaaagtggcagctttgtggccaacctgctgaaggacctgggcctggagatcggggagctggccgtgcggggggcccgggtggtgtccaagggcaagaagatgcacctgcagtttgaccggcagacaggagacctgctgctgaatgagaagctggaccgggaggagctgtgtggccccacagagccctgtgtgctgcccttccaggtgctgctggagaaccccctgcagttcttccaggccgagctgcgcatcagagatgtgaatgaccacagccctgtgttcctggacaaggagatcctgctgaagatccctgagagcatcaccccaggcaccaccttcctgattgaaagagcccaggacctggatgtgggcaccaacagcctgcagaactacaccatcagccccaacttccacttccacctgaacctgcaggacagcctggatggcatcatcctgccccagctggtgctgaacagagccctggaccgggaggagcagcctgagatccggctgaccctgacagccctggatggcggcagcccccccaggtctggaacagccctggtgcgcatcgaggtggtggacatcaatgacaacgtgcctgagtttgccaagctgctgtatgaggtgcagatccctgaggacagccctgtgggcagccaggtggccatcgtgtctgcccgggacctggacatcggcaccaacggggagatctcctatgccttcagccaggccagcgaggacatcaggaagaccttccggctgagcgccaagagcggggagctgctgctgcggcagaagctggactttgagagcatccagacctacacagtgaacatccaggccacagatggcggcggcctgagcggcacctgtgtggtgtttgtgcaggtgatggacctgaatgacaaccccccagagctgaccatgagcaccctcatcaaccagatccctgagaacctgcaggacaccctgattgctgtgttttctgtgtctgaccctgattctggggacaatggccgcatggtgtgcagcatccaggatgacctgcccttcttcctgaagcccagcgtggagaacttctacaccctggtgatcagcacagccctggaccgggagaccaggtctgagtacaacatcaccatcaccgtgacagactttggcaccccccggctgaagacagagcacaacatcaccgtgctggtgtctgatgtgaatgacaatgccccagccttcacccagaccagctacaccctgtttgtgcgggagaacaacagccctgccctgcacatcggctctgtgtctgccacagaccgggacagcggcaccaatgcccaggtgacctacagcctgctgcccccccaggacccccacctgcccctggccagcctggtgtccatcaatgctgacaatggccacctgtttgccctgcagagcctggactatgaggccctgcaggcctttgagttccgggtgggcgctgctgaccggggcagccctgccctgagcagcgaggccctggtgcgggtgctggtgctggatgccaatgacaacagcccctttgtgctgtaccccctgcagaatggaagtgccccctgcacagagctggtgcccagggctgctgagcccggctacctggtgaccaaggtggtggccgtggatggagacagcggccagaatgcctggctgagctaccagctgctgaaggccacagagcccggcctgtttggagtgtgggcccacaatggagaggtgaggacagcccggctgctgcgggagagagatgctgccaagcagaggctggtggtgctggtgaaggacaatggagagccccccaggtctgccacagccaccctgcacgtgctgctggtggatggcttcagccagccctacctgctgctgcctgaggccgccccagcccaggcccaggccgacctgctgactgtgtacctggtggtggccctggcctctgtgagcagcctcttcctgttctctgtgctgctgtttgtggccgtgcggctgtgcagaagaagcagagctgcctctgtgggccgctgcagcgtgcctgagggccccttccctggccagatggtggatgtgtctggcaccggcaccctgagccagagctaccagtatgaggtgtgcctgaccggcggcagcggcaccaatgagttcaagttcctgaagcccatcatccccaactttgtggcccagggcgctgagcgggtgtctgaggccaaccccagcttcaggaagagctttgagttcacctag

SEQ ID NO: 166531 - DNA, 648 bp, synthetic construct
  misc_feature 1..648: note = Description of Artificial Sequence: Synthetic coding sequence
  source 1..648: mol_type = other DNA
atgaacctggtgggcagctatgcccaccaccaccaccaccaccacccccacccagcccaccccatgctgcacgagcccttcctgtttggacctgccagccgctgccaccaggagcggccctacttccagagctggctgctgagccctgcagatgctgccccagacttccctgctgggggccccccacctgctgctgctgctgctgccacagcctacggcccagatgcccggcccggccagagccctggccgcctggaggccctgggcggccgcctgggccgcaggaagggcagcggccccaagaaggagaggagaagaacagagagcatcaacagcgcctttgctgagctgcgggagtgcatccccaacgtgcctgctgacaccaagctgagcaagatcaagaccctgcggctggccaccagctacatcgcctacctgatggatgtgctggccaaggatgcccagagcggggaccctgaggccttcaaggccgagctgaagaaggcagatggcggccgggagagcaagaggaagcgggagctgcagcagcacgagggcttccccccagccctgggccctgtggagaagaggatcaagggccgcacaggctggccccagcaggtgtgggccctggagctgaaccagtag

SEQ ID NO: 166532 - DNA, 2388 bp, synthetic construct
  misc_feature 1..2388: note = Description of Artificial Sequence: Synthetic coding sequence
  source 1..2388: mol_type = other DNA
atgaagaagctgggccgcatccaccccaaccggcaggtgctggccttcatcctgatggtgttcctgagccaggtgcggctggagcccatccgctacagcgtgctggaggagacagagagcggcagctttgtggcccacctggccaaggacctgggcctgggcattggagagctggccagccgcagcgcccgggtgctgagtgatgatgacaagcagaggctgcagctggaccggcagacaggagacctgctgctgcgggagaagctggaccgggaggagctgtgtggccccatcgagccctgtgtgctgcacttccaggtgttcctggagatgcctgtgcagttcttccagggcgagctgctgatccaggacatcaatgaccacagccccatcttccctgagcgggaggtgctgctgaagatcctggagaacagccagcccggcaccctcttccccctgctgattgctgaggacctggatgtgggcagcaatggcctgcagaagtacaccatcagccccaacagccacttccacatcctgaccaggaaccacagcgagggcaagaagtacccagacctggtgcaggacaagcccctggaccgggaggagcagcctgagttcagcctgaccctggtggccctggatggcggcagccccccaagaagtggcaccgtgatggtgcgcatcctgatcatggacatcaatgacaatgcccctgagtttgtgcacaccccctacggcgtgcaggtgctggagaacagccccctggacagccccatcgtgcgggtgctggcccgggacattgatgctggcaactttggatctgtgtcctatggcctcttccaggccagtgatgagatcaagcagaccttcagcatcaatgaggtgactggagagatcctgctgaagaagaagctggactttgagaagatcaagagctaccacgtggagattgaggccacagatggcggcggcctgtctggaaaaggaacagtggtgattgaggtggtggatgtgaatgacaaccccccagagctgatcatcagcagcctgaccagcagcatcccagaaaatgcccctgagaccgtggtgtccatcttccgcatccgggaccgggacagcggggagaatggcaagatgatctgcagcatcccagacaacctgcccttcatcctgaagcccaccctgaagaacttctacaccctggtgacagagcggcccctggaccgggagaccagcgctgagtacaacatcaccatcgctgtgacagacctgggcaccccccggctgaagacccagcagaacatcaccgtgcaggtgtctgatgtgaatgacaatgccccagccttcacccagaccagctacaccctgtttgtgcgggagaacaacagccctgccctgcacatcggctctgtgtctgccacagaccgggacagcggcaccaatgcccaggtgacctacagcctgctgcccccccaggacccccacctgcccctggccagcctggtgtccatcaatgctgacaatggccacctgtttgccctgcggagcctggactatgaggccctgcaggcctttgagttccgggtgggcgccagtgaccggggcagccctgccctgagcagcgaggccctggtgcgggtgctggtgctggacaccaatgacaacagcccctttgtgctgtaccccctgcagaatggcagcgccccctgcacagagctggtgcccagggctgctgagcccggctacctggtgaccaaggtggtggccgtggatggagacagcggccagaatgcctggctgagctaccagctgctgaaggccacagagcccggcctgtttggagtgtgggcccacaacggggaggtgaggacagcccggctgctgtctgaaagagatgctgccaagcaccggctggtggtgctggtgaaggacaacggggagcccccaagaagtgccacagccaccctgcacgtgctgctggtggatggcttcagccagccctacctgcccctgcctgaggccgccccagcccaggcccaggccgacagcctgactgtgtacctggtggtggccctggcctctgtgagcagcctcttcctgttctctgtgctgctgtttgtggccgtgcggctgtgccgccgcagccgggccgcctctgtgggccgctgcagcgtgcctgagggccccttccctggccacctggtggatgtgtctggaacaggcaccctgagccagagctaccagtatgaggtgtgcctgactggagacagcggcaccggggagttcaagttcctgaagcccatcttccccaacctgctggtgcaggacaccggccgggaggtgaaggagaaccccaagttcaggaacagcctggtgttctcctag

SEQ ID NO: 166533 - DNA, 2391 bp, synthetic construct
  misc_feature 1..2391: note = Description of Artificial Sequence: Synthetic coding sequence
  source 1..2391: mol_type = other DNA
atggaggccggcggggagcgcttcctgcggcagaggcaggtgctgctgctgtttgtgttcctgggcggcagcctggccggcagcgagagccgccgctacagcgtggccgaggagaaggagaagggcttcctgattgccaacctggccaaggacctgggcctgcgggtggaggagctggccgcccggggggcccaggtggtgtccaaaggaaacaagcagcacttccagctgagccaccagacaggagacctgctgctgaatgagaagctggaccgggaggagctgtgtggccccacagagccctgcatcctgcacttccagatcctgctgcagaaccccctgcagtttgtgaccaatgagctgcgcatcattgatgtgaatgaccacagccctgtgttctttgaaaatgagatgcacctgaagatcctggagagcaccctgcccggcaccgtcatccccctgggcaatgctgaggacctggatgtgggcaggaacagcctgcagaactacaccatcacccccaacagccacttccacgtgctgaccaggagcagaagagatggcaggaagtacccagagctggtgctggacaaggccctggaccgggaggagcagcctgagctgagcctgaccctgacagccctggatggcggcagcccccccaggtctggaacagcccagatcaacatccaggtgctggacatcaatgacaatgcccctgagtttgcccagcccctgtatgaggtggccgtgctggagaacacccctgtgaacagcgtgattgtgacagtgtctgccagtgacctggacaccggcagctttggcaccatctcctatgccttcttccacgccagcgaggagatcaggaagaccttccagctgaaccccatcaccggggacatgcagctggtgaagtacctgaactttgaggccatcaacagctatgaggtggacatcgaggccaaggatggcggcggcctgagcggcaagagcaccgtcatcgtgcaggtggtggatgtgaatgacaaccccccagagctgaccctgagctctgtgaacagccccatccctgagaacagcggggagaccgtgctggccgtgttttctgtgtctgacctggacagcggggacaatggccgggtgatgtgcagcattgagaacaacctgcccttcttcctgaagcccagcgtggagaacttctacaccctggtgtctgagggcgccctggaccgggagaccaggtctgagtacaacatcaccatcaccatcacagacctgggcaccccccggctgaagaccaagtacaacatcaccgtgctggtgtctgatgtgaatgacaatgccccagccttcacccagatctcctacaccctgtttgtgcgggagaacaacagccctgccctgcacatcggctctgtgtctgccacagaccgggacagcggcaccaatgcccaggtgacctacagcctgctgcccccccaggacccccacctgcccctgagcagcctggtgtccatcaatgctgacaatggccacctgtttgccctgcggagcctggactatgaggccctgcaggcctttgagttccgggtgggcgccacagaccggggcagccctgccctgagcagcgaggccctggtgcgggtgctggtgctggatgccaatgacaacagcccctttgtgctgtaccccctgcagaatggaagtgccccctgcacagagctggtgcccagggctgctgagcccggctacctggtgaccaaggtggtggccgtggatggagacagcggccagaatgcctggctgagctaccagctgctgaaggccacagagcccggcctgtttggagtgtgggcccacaatggagaggtgaggacagcccggctgctgtctgaaagagatgctgccaagcaccggctggtggtgctggtgaaggacaatggagagccccccaggtctgccacagccaccctgcacgtgctgctggtggatggcttcagccagccctacctgcccctgcctgaggccgccccagcccaggcccaggccgacctgctgactgtgtacctggtggtggccctggcctctgtgagcagcctcttcctgttctctgtgctgctgtttgtggccgtgcggctgtgcagaagaagcagagctgcctctgtgggccgctgcagcgtgcctgagggccccttccctggccagatggtggatgtgtctggcaccggcaccctgagccagagctaccagtatgaggtgtgcctgaccggcggcagcggcaccaatgagttcaagttcctgaagcccatcatccccaactttgtggcccagggcgctgagcgggtgtctgaggccaaccccagcttcaggaagagctttgagttctcctag

SEQ ID NO: 166534 - DNA, 1107 bp, synthetic construct
  misc_feature 1..1107: note = Description of Artificial Sequence: Synthetic coding sequence
  source 1..1107: mol_type = other DNA
gggggcgccccacccaggagcggcaccaccaccatccgcatcgtggtgctggacaacaatgacaatgcccctgagttcctgcagagcttctatgaggtgcaggtgcctgagaacagccccctgaacagcctggtggtggtggtgtctgcccgggacctggatgctggggcctacggctctgtggcctatgccctcttccagggagatgaggtgacccagccctttgtgattgatgagaagacagctgagatccggctgaagagggccctggactttgaggccaccccctactacaacgtggagatcgtggccacagatggcggcggcctgtctggaaaatgtactgtggccatcgaggtggtggatgtgaatgacaatgcccctgagctgaccatgagcaccctgagcagccccaccccagaaaatgcccctgagaccgtggtggccgtgttttctgtgtctgaccctgacagcggggacaatggaaggatgatctgcagcatccagaatgacctgcccttcctgctgaagcccaccctgaagaacttctacaccctggtgacccagaggaccctggaccgggagagccaggccgagtacaacatcaccatcaccgtgacagacatgggcaccccccggctgaagacagagcacaacatcaccgtgctggtgtctgatgtgaatgacaatgccccagccttcacccagaccagctacaccctgtttgtgcgggagaacaacagccctgccctgcacatcggctctgtgtctgccacagaccgggacagcggcaccaatgcccaggtgacctacagcctgctgcccccccagaacccccacctgcggctggccagcctggtgtccatcaatgctgacaatggccacctgtttgccctgcggagcctggactatgaggccctgcaggcctttgagttccgggtgggcgccacagaccggggcagccctgccctgagcagcgaggccctggtgcgggtgctgtgctggacccccaccaccacccggcccagctgctgcatccgctgcaggacagcccggcggctggcccccagctggtgccccggccggcccagccgggccacctggtag

SEQ ID NO: 166535 - DNA, 2388 bp, synthetic construct
  misc_feature 1..2388: note = Description of Artificial Sequence: Synthetic coding sequence
  source 1..2388: mol_type = other DNA
atggagacagccctggccaagaccccccagaagaggcaggtgatgttcctggccatcctgctgctgctgtgggaggccggcagcgaggccgtgcgctacagcatccctgaggagacagaaagtggctacagcgtggccaacctggccaaggacctgggcctgggcgtgggggagctggccaccaggggggccaggatgcactacaagggcaacaaggagctgctgcagctggacatcaagacaggcaacctgctgctgtatgagaagctggaccgggaggtgatgtgtggggccacagagccctgcatcctgcacttccagctgctgctggagaaccctgtgcagttcttccagacagacctgcagctgacagacatcaatgaccacgcccctgagttccctgagaaggagatgctgctgaagatccctgagagcacccagcccggcaccgtcttccccctgaagatcgcccaggactttgacatcggcagcaacacagtgcagaactacaccatcagccccaacagccacttccacgtggccacccacaacagaggagatggcaggaagtacccagagctggtgctggacaaggccctggaccgggaggagaggcctgagctgagcctgaccctgacagccctggatggaggagccccacccaggagcggcaccaccaccatccgcatcgtggtgctggacaacaatgacaatgcccctgagttcctgcagagcttctatgaggtgcaggtgcctgagaacagccccctgaacagcctggtggtggtggtgtctgcccgggacctggatgctggggcctacggctctgtggcctatgccctcttccagggagatgaggtgacccagccctttgtgattgatgagaagacagctgagatccggctgaagagggccctggactttgaggccaccccctactacaacgtggagatcgtggccacagatggcggcggcctgtctggaaaatgtactgtggccatcgaggtggtggatgtgaatgacaatgcccctgagctgaccatgagcaccctgagcagccccaccccagaaaatgcccctgagaccgtggtggccgtgttttctgtgtctgaccctgacagcggggacaatggaaggatgatctgcagcatccagaatgacctgcccttcctgctgaagcccaccctgaagaacttctacaccctggtgacccagaggaccctggaccgggagagccaggccgagtacaacatcaccatcaccgtgacagacatgggcaccccccggctgaagacagagcacaacatcaccgtgctggtgtctgatgtgaatgacaatgccccagccttcacccagaccagctacaccctgtttgtgcgggagaacaacagccctgccctgcacatcggctctgtgtctgccacagaccgggacagcggcaccaatgcccaggtgacctacagcctgctgcccccccagaacccccacctgcggctggccagcctggtgtccatcaatgctgacaatggccacctgtttgccctgcggagcctggactatgaggccctgcaggcctttgagttccgggtgggcgccacagaccggggcagccctgccctgagcagcgaggccctggtgcgggtgctggtgctggatgccaatgacaacagcccctttgtgctgtaccccctgcagaatggcagcgccccctgcacagagctggtgcccagggctgctgagcccggctacctggtgaccaaggtggtggccgtggatggagacagcggccagaatgcctggctgagctaccagctgctgaaggccacagagcccggcctcttctccatgtgggcccacaacggggaggtgaggacagcccggctgctgtctgaaagagatgctgccaagcaccggctggtggtgctggtgaaggacaacggggagcccccaagaagtgccacagccaccctgcacgtgctgctggtggatggcttcagccagccctacctgcccctgcctgaggccgccccagcccaggcccaggccgacagcctgactgtgtacctggtggtggccctggcctctgtgagcagcctcttcctgttctctgtgctgctgtttgtggccgtgcggctgtgccgccgcagccgggccgcctctgtgggccgctgcagcgtgcctgagggccccttccctggccacctggtggatgtgtctggaacaggcaccctgagccagagctaccactatgaggtgtgcctgactggagacagcggggccggggagttcaagttcctgaagcccatcatccccaacctgctgccccagggcgctggggaggagatcggcaagacagctgccttcagaaattcctttggcctgaactag

SEQ ID NO: 166536 - DNA, 1107 bp, synthetic construct
  misc_feature 1..1107: note = Description of Artificial Sequence: Synthetic coding sequence
  source 1..1107: mol_type = other DNA
gggggcagcccccccaggagcggcaccagcgagatccagatccaggtgctggacatcaatgacaacgtgcctgagtttgcccaggagctgtatgaggcccaggtgcctgagaacaaccccctgggcagcctggtgatcaccgtgtctgcccgggacctggatgctggcagctttgggaaggtgtcctatgccctcttccaggtggatgatgtgaaccagccctttgagatcaatgccatcactggagagatccggctgaggaaggccctggactttgaggagatccagagctatgatgtggatgtggaggccacagatggcggcggcctgagcggcaagtgcagcctggtggtgcgggtgctggatgtgaatgacaatgcccctgagctgaccatgtccttcttcatcagcctcatccctgagaacctgcctgagatcaccgtggccgtgttttctgtgtctgatgctgacagcggccacaaccagcaggtgatctgcagcattgagaacaacctgcccttcctgctgcggcccagcgtggagaacttctacaccctggtgacagagggcgccctggaccgggagagcagagctgagtacaacatcaccatcaccgtgacagacctgggcaccccccggctgaagacccagcagagcatcaccgtgcaggtgtctgatgtgaatgacaacgtgcctgccttcacccagaccagctacaccctgtttgtgcgggagaacaacagccctgccctgcacatcggctctgtgtctgccacagaccgggacagcggcatcaatgcccaggtgacctacagcctgctgcccccccaggacccccacctgcccctgagcagcctggtgtccatcaatgctgacaatggccacctgtttgccctgcggagcctggactatgaggccctgcagagctttgagttccgggtgggcgccacagaccggggcagccctgccctgagcagcgaggccctggtgcggctgctgtgctggacccccaccaccacccggcccagctgctgcacccgctgcaggacagcccccaggcctgcccccagctggtgccccggccggcccagccgggccacctggtag

SEQ ID NO: 166537 - DNA, 1977 bp, synthetic construct
  misc_feature 1..1977: note = Description of Artificial Sequence: Synthetic coding sequence
  source 1..1977: mol_type = other DNA
atgctgctgaagatcagcgagatcaccatgcctgggaagatcttccccctgaagatggcccatgacctggacaccggcagcaatggcctgcagcgctacaccatcagcagcaacccccacttccacgtgctgaccaggaacagaagtgagggcaggaagtttcctgagctggtgctggacaagcccctggaccgggaggagcagccccagctgcggctgaccctcatcgccctggatggcggcagccccccaagaagtggcaccagcgagatccagatccaggtgctggacatcaatgacaacgtgcctgagtttgcccaggagctgtatgaggcccaggtgcctgagaacaaccccctgggcagcctggtgatcaccgtgtctgcccgggacctggatgctggcagctttgggaaggtgtcctatgccctcttccaggtggatgatgtgaaccagccctttgagatcaatgccatcaccggggagatccggctgaggaaggccctggactttgaggagatccagagctatgatgtggatgtggaggccacagatggcggcggcctgagcggcaagtgcagcctggtggtgcgggtgctggatgtgaatgacaatgcccctgagctgaccatgtccttcttcatcagcctcatccctgagaacctgcctgagatcaccgtggccgtgttttctgtgtctgatgctgacagcggccacaaccagcaggtgatctgcagcattgagaacaacctgcccttcctgctgcggcccagcgtggagaacttctacaccctggtgacagaaggagccctggaccgggagagcagagctgagtacaacatcaccatcaccgtgacagacctgggcaccccccggctgaagacccagcagagcatcaccgtgcaggtgtctgatgtgaatgacaacgtgcctgccttcacccagaccagctacaccctgtttgtgcgggagaacaacagccctgccctgcacatcggctctgtgtctgccacagaccgggacagcggcatcaatgcccaggtgacctacagcctgctgcccccccaggacccccacctgcccctgagcagcctggtgtccatcaatgctgacaatggccacctgtttgccctgcggagcctggactatgaggccctgcagagctttgagttccgggtgggcgccacagaccggggcagccctgccctgagcagcgaggccctggtgcggctgctggtgctggatgccaatgacaacagcccctttgtgctgtaccccctgcagaatggaagtgccccctgcacagagctggtgcccagggctgctgagcccggctacctggtgaccaaggtggtggccgtggatggagacagcggccagaatgcctggctgagctaccagctgctgaaggccacagagctgggcctgtttggagtgtgggcccacaatggagaggtgaggacagcccggctgctgtctgaaagagatgctgccaagcaccggctggtggtgctggtgaaggacaatggagagccccccaggtctgccacagccaccctgcacgtgctgctggtggatggcttcagccagccctacctgcccctgcctgaggccgccccagcccaggcccaggccgacagcctgactgtgtacctggtggtggccctggcctctgtgagcagcctcttcctgttctctgtgctgctgtttgtggccgtgcggctgtgcagaagaagcagagctgcctctgtgggccgctacagcgtgcctgagggccccttccctggccacctggtggatgtgtctggcaccggcaccctgagccagagctaccagtacaaggtgtgcctgaccggcggcagcgagaccaatgagttcaagttcctgaagcccatcatgcccaacttccccccccagggcacagagcgggagatggaggagacccccaccagcaggaacagcttccccttctcctag

SEQ ID NO: 166538 - DNA, 2385 bp, synthetic construct
  misc_feature 1..2385: note = Description of Artificial Sequence: Synthetic coding sequence
  source 1..2385: mol_type = other DNA
atgatgcagaccaaggtgcagaacaagaagaggcaggtggccttcttcatcctgctgatgctgtggggcgaggtgggcagcgagagcatccagtacagcgtgctggaggagacagagagcggcacctttgtggccaacctgaccaaggacctgggcctgcgggtgggggagctggccagcagaggagcccgggtggtgttcaagggcaaccggcagcacctgcagtttgacccccagacccatgacctgctgctgaatgagaagctggaccgggaggagctgtgtggcagcacagagccctgtgtgctgcccttccaggtgctgctggagaaccccctgcagttcttccaggccagcctgcgggtgcgggacatcaatgaccacgcccctgagttccctgcccgggagatgctgctgaagatcagcgagatcaccatgcctgggaagatcttccccctgaagatggcccatgacctggacaccggcagcaatggcctgcagcgctacaccatcagcagcaacccccacttccacgtgctgaccaggaacagaagtgagggcaggaagtttcctgagctggtgctggacaagcccctggaccgggaggagcagccccagctgcggctgaccctcatcgccctggatggcggcagccccccaagaagtggcaccagcgagatccagatccaggtgctggacatcaatgacaacgtgcctgagtttgcccaggagctgtatgaggcccaggtgcctgagaacaaccccctgggcagcctggtgatcaccgtgtctgcccgggacctggatgctggcagctttgggaaggtgtcctatgccctcttccaggtggatgatgtgaaccagccctttgagatcaatgccatcaccggggagatccggctgaggaaggccctggactttgaggagatccagagctatgatgtggatgtggaggccacagatggcggcggcctgagcggcaagtgcagcctggtggtgcgggtgctggatgtgaatgacaatgcccctgagctgaccatgtccttcttcatcagcctcatccctgagaacctgcctgagatcaccgtggccgtgttttctgtgtctgatgctgacagcggccacaaccagcaggtgatctgcagcattgagaacaacctgcccttcctgctgcggcccagcgtggagaacttctacaccctggtgacagaaggagccctggaccgggagagcagagctgagtacaacatcaccatcaccgtgacagacctgggcaccccccggctgaagacccagcagagcatcaccgtgcaggtgtctgatgtgaatgacaacgtgcctgccttcacccagaccagctacaccctgtttgtgcgggagaacaacagccctgccctgcacatcggctctgtgtctgccacagaccgggacagcggcatcaatgcccaggtgacctacagcctgctgcccccccaggacccccacctgcccctgagcagcctggtgtccatcaatgctgacaatggccacctgtttgccctgcggagcctggactatgaggccctgcagagctttgagttccgggtgggcgccacagaccggggcagccctgccctgagcagcgaggccctggtgcggctgctggtgctggatgccaatgacaacagcccctttgtgctgtaccccctgcagaatggaagtgccccctgcacagagctggtgcccagggctgctgagcccggctacctggtgaccaaggtggtggccgtggatggagacagcggccagaatgcctggctgagctaccagctgctgaaggccacagagctgggcctgtttggagtgtgggcccacaatggagaggtgaggacagcccggctgctgtctgaaagagatgctgccaagcaccggctggtggtgctggtgaaggacaatggagagccccccaggtctgccacagccaccctgcacgtgctgctggtggatggcttcagccagccctacctgcccctgcctgaggccgccccagcccaggcccaggccgacagcctgactgtgtacctggtggtggccctggcctctgtgagcagcctcttcctgttctctgtgctgctgtttgtggccgtgcggctgtgcagaagaagcagagctgcctctgtgggccgctacagcgtgcctgagggccccttccctggccacctggtggatgtgtctggcaccggcaccctgagccagagctaccagtacaaggtgtgcctgaccggcggcagcgagaccaatgagttcaagttcctgaagcccatcatgcccaacttccccccccagggcacagagcgggagatggaggagacccccaccagcaggaacagcttccccttctcctag

SEQ ID NO: 166539 - DNA, 1107 bp, synthetic construct
  misc_feature 1..1107: note = Description of Artificial Sequence: Synthetic coding sequence
  source 1..1107: mol_type = other DNA
ggcagccccccaagaagtggcacagccctggtgcgcatcctggtgctggatgtgaatgacaatgccccagactttgtgcgcagcctgtacaaggtgcaggtgcctgagaacagccctgtgggctccatggtggtgtctgtgtctgcccgggacctggacaccggcagcaatggagagatcgcctatgccttctcctatgccacagagcgcatcctgaagaccttccagatcaaccccaccagcggcagcctgcacctgaaggcccagctggactatgaggccatccagacctacaccctgaccatccaggccaaggatggcggcggcctgtctggaaaatgtactgtggtggtggatgtgacagacatcaatgacaacagacctgagctgctgctgagcagcctgaccagccccatcgccgagaacagccctgagaccgtggtggccgtgttccgcatccgggaccgggacagcggcaacaacgggaagacagtgtgcagcatccaggatgatgtgcccttcatcctgaagcccagcgtggagaacttctacaccctggtgacagagaagcccctggaccgggagaggaacacagagtacaacatcaccatcaccgtgacagacctgggcaccccccggctgaagacagagcacaacatcaccgtgctggtgtctgatgtgaatgacaatgccccagccttcacccagaccagctacaccctgtttgtgcgggagaacaacagccctgccctgcccatcggctctgtgtctgccacagaccgggacagcggcaccaatgcccaggtgatctacagcctgctgcccagccaggacccccacctgcccctggccagcctggtgtccatcaatgctgacaatggccacctgtttgccctgcggagcctggactatgaggccctgcaggcctttgagttccgggtgggcgccacagaccggggcagccctgccctgagcagcgaggccctggtgcgggtgctgtgctggacccccaccaccacccggcccagctgctgcacccgctgcaggacagcccccaggcctgcccccagccgctgccccggccggcccagccgggccacctggtag

SEQ ID NO: 166540 - DNA, 2406 bp, synthetic construct
  misc_feature 1..2406: note = Description of Artificial Sequence: Synthetic coding sequence
  source 1..2406: mol_type = other DNA
atggaggccagcggcaagctgatctgccggcagaggcaggtgctcttctccttcctgctgctgggcctgagcctggccggggctgctgagcccaggagctacagcgtggtggaggagacagagggcagcagctttgtgaccaacctggccaaggacctgggcctggagcagcgggagttcagccggcggggcgtgcgggtggtgtcccggggcaacaagctgcacctgcagctgaaccaggagacagctgacctgctgctgaatgagaagctggaccgggaggacctgtgtggccacacagagccctgtgtgctgcgcttccaggtgctgctggagagcccctttgagttcttccaggccgagctgcaggtgattgacatcaatgaccacagccctgtgttcctggacaagcagatgctggtgaaggtgtctgagagcagccccccaggcacagccttccccctgaagaatgctgaggacctggacatcggccagaacaacatcgagaactacatcatcagccccaacagctacttccgggtgctgaccaggaagagaagtgatggcaggaagtacccagagctggtgctggacaaggccctggaccgggaggaggaggccgagctgcggctgaccctgacagccctggatggcggcagccccccaagaagtggcacagcccaggtgtacatcgaggtggtggatgtgaatgacaatgcccctgagtttgagcagcccttctacagagtgcagatcagcgaggacagccccatctccttcctggtggtgaaggtgtctgccacagatgtggacaccggggtgaatggagagatctcctacagcctcttccaggccagtgatgagatcagcaagaccttcaaggtggacttcctgactggagagatccggctgaagaagcagctggactttgagaagttccagagctatgaggtgaacatcgaggccagagatgctgggggcttctctggaaaatgtactgtgctgatccaggtgattgatgtgaatgaccacgcccctgaggtgaccatgtctgccttcaccagccccatcccagaaaatgcccctgagaccgtggtggccctcttctctgtgtctgacctggacagcggggagaatggcaagatcagctgcagcatccaggaggacctgcccttcctgctgaagagctctgtgggcaacttctacaccctgctgacagagacccccctggaccgggagagcagagctgagtacaacgtgaccatcaccgtgacagacctgggcaccccccggctgaccacccacctgaacatgacagtgctggtgtctgatgtgaatgacaatgccccagccttcacccagaccagctacaccctgtttgtgcgggagaacaacagccctgccctgcacatcggctctgtgtctgccacagaccgggacagcggcaccaatgcccaggtgacctacagcctgctgcccccccaggacccccacctgcccctggccagcctggtgtccatcaacacagacaatggccacctgtttgccctgcggagcctggactatgaggccctgcaggcctttgagttccgggtgggcgccagtgaccggggcagccctgccctgagcagcgaggccctggtgcgggtgctggtgctggatgccaatgacaacagcccctttgtgctgtaccccctgcagaatggcagcgccccctgcacagagctggtgcccagggctgctgagcccggctacctggtgaccaaggtggtggccgtggatggagacagcggccagaatgcctggctgagctaccagctgctgaaggccacagagcccggcctgtttggagtgtgggcccacaacggggaggtgaggacagcccggctgctgtctgaaagagatgctgccaagcagaggctggtggtgctggtgaaggacaacggggagcccccctgcagcgccacagccaccctgcacctgctgctggtggatggcttcagccagccctacctgcccctgcctgaggccgccccagcccagggccaggccgacagcctgactgtgtacctggtggtggccctggcctctgtgagcagcctcttcctgttctctgtgctgctgtttgtggccgtgctgctgtgccgccgcagccgggccgcctctgtgggccgctgcagcgtgcctgagggccccttccctggccacctggtggatgtgcggggcaccggcagcctgagccagaactaccagtatgaggtgtgcctggccggcggcagcggcaccaatgagttccagttcctgaagcctgtgctgcccaacatccagggccacagctttggacctgagatggagcagaacagcaacttcagaaatggcttcggcttcagcctgcagctgaagtag

SEQ ID NO: 166541 - DNA, 2472 bp, synthetic construct
  misc_feature 1..2472: note = Description of Artificial Sequence: Synthetic coding sequence
  source 1..2472: mol_type = other DNA
atgaagatccagaagaagctgaccggctgcagccggctgatgctgctgtgcctgagcctggagctgctgctggaggccggggccggcaacatccactacagcgtgcctgaggagacagacaagggcagctttgtgggcaacatcgccaaggacctgggcctgcagccccaggagctggctgatggaggagtgcgcatcgtgtcccggggccgcatgcccctgtttgccctgaaccccaggagcggcagcctcatcacagccaggagaattgaccgggaggagctgtgtgcccagagcatgccctgcctggtgtccttcaacatcctggtggaggacaagatgaagctgtttcctgtggaggtggagatcatcgacatcaatgacaacaccccccagttccagctggaggagctggagttcaagatgaatgagatcaccaccccaggcaccagggtgtccctgcccttcggccaggacctggatgtgggcatgaacagcctgcagagctaccagctgagcagcaacccccacttcagcctggatgtgcagcagggcgcagatggcccccagcaccctgagatggtgctgcagagccccctggaccgggaggaggaggccgtgcaccacctgatcctgacagccagtgatggaggagagcctgtgcgcagcggcaccctgcgcatctacatccaggtggtggatgccaatgacaaccccccagccttcacccaggcccagtaccacatcaacgtgcctgaaaatgtgcccctgggcacccagctgctgatggtgaatgccacagatcctgatgagggcgccaacggggaggtgacctacagcttccacaacgtggaccaccgggtggcccagatcttccggctggacagctacaccggggagatcagcaacaaggagcccctggactttgaggagtacaagatgtacagcatggaggtgcaggcccaggatggagctggcctgatggccaaggtgaaggtgctgatcaaggtgctggatgtgaatgacaatgcccctgaggtgaccatcacctctgtgaccacagctgtgcctgagaacttccccccaggcaccatcatcgccctgatctctgtgcatgaccaggacagcggggacaatggctacaccacctgcttcatccctggcaacctgcccttcaagctggagaagctggtggacaactactaccgcctggtgacagagaggaccctggaccgggagctgatcagcggctacaacatcaccatcacagccatcgaccagggcaccccagccctgagcacagagacccacatcagcctgctggtgacagacatcaatgacaacagccctgtgttccaccaggacagctacagcgcctacatccctgagaacaaccccaggggggccagcatcttctctgtgcgggcccatgacctggacagcaatgaaaatgcccagatcacctacagcctgattgaggacaccatccagggcgcccccctgagcgcctacctgagcatcaacagcgacacaggagtgctgtatgccctgcggagctttgattatgagcagttccgggacatgcagctgaaggtgatggcccgggacagcggggacccccccctgagcagcaatgtgtccctgagcctcttcctgctggaccagaatgacaatgcccctgagatcctgtacccagccctgcccacagatggcagcactggagtggagctggcccccctgtctgctgagcccggctacctggtgaccaaggtggtggccgtggaccgggacagcggccagaatgcctggctgagctaccgcctgctgaaggccagcgagcccggcctcttctctgtgggcctgcacactggagaggtgaggacagcccgggccctgctggacagagatgccctgaagcagagcctggtggtggccgtgcaggaccacggccagccccccctgagcgccaccgtgaccctgactgtggccgtggccgaccgcatcagtgacatcctggccgacctgggcagcctggagcccagcgccaagcccaatgacagcgacctgaccctgtacctggtggtggccgctgctgctgtgtcctgtgtgttcctggcctttgtgattgtgctgctggcccaccggctgcggcgctggcacaagagccggctgctgcaggccagcggcggcggcctggcctccatgcctggcagccactttgtgggcgtggatggagtgcgggccttcctgcagacctacagccatgaggtgtccctgacagctgacagcaggaagagccacctgatcttcccccagcccaactatgctgacaccctcatcagccaggagagctgtgagaagaagggcttcctgagcgccccccagagcctgctggaggacaagaaggagcccttcagccaggtgaacttctgtgatgagtgcatctcctacctggagaagaacaacagctag

SEQ ID NO: 166542 - DNA, 2796 bp, synthetic construct
  misc_feature 1..2796: note = Description of Artificial Sequence: Synthetic coding sequence
  source 1..2796: mol_type = other DNA
atgaagatccagaagaagctgaccggctgcagccggctgatgctgctgtgcctgagcctggagctgctgctggaggccggggccggcaacatccactacagcgtgcctgaggagacagacaagggcagctttgtgggcaacatcgccaaggacctgggcctgcagccccaggagctggctgatggaggagtgcgcatcgtgtcccggggccgcatgcccctgtttgccctgaaccccaggagcggcagcctcatcacagccaggagaattgaccgggaggagctgtgtgcccagagcatgccctgcctggtgtccttcaacatcctggtggaggacaagatgaagctgtttcctgtggaggtggagatcatcgacatcaatgacaacaccccccagttccagctggaggagctggagttcaagatgaatgagatcaccaccccaggcaccagggtgtccctgcccttcggccaggacctggatgtgggcatgaacagcctgcagagctaccagctgagcagcaacccccacttcagcctggatgtgcagcagggcgcagatggcccccagcaccctgagatggtgctgcagagccccctggaccgggaggaggaggccgtgcaccacctgatcctgacagccagtgatggaggagagcctgtgcgcagcggcaccctgcgcatctacatccaggtggtggatgccaatgacaaccccccagccttcacccaggcccagtaccacatcaacgtgcctgaaaatgtgcccctgggcacccagctgctgatggtgaatgccacagatcctgatgagggcgccaacggggaggtgacctacagcttccacaacgtggaccaccgggtggcccagatcttccggctggacagctacaccggggagatcagcaacaaggagcccctggactttgaggagtacaagatgtacagcatggaggtgcaggcccaggatggagctggcctgatggccaaggtgaaggtgctgatcaaggtgctggatgtgaatgacaatgcccctgaggtgaccatcacctctgtgaccacagctgtgcctgagaacttccccccaggcaccatcatcgccctgatctctgtgcatgaccaggacagcggggacaatggctacaccacctgcttcatccctggcaacctgcccttcaagctggagaagctggtggacaactactaccgcctggtgacagagaggaccctggaccgggagctgatcagcggctacaacatcaccatcacagccatcgaccagggcaccccagccctgagcacagagacccacatcagcctgctggtgacagacatcaatgacaacagccctgtgttccaccaggacagctacagcgcctacatccctgagaacaaccccaggggggccagcatcttctctgtgcgggcccatgacctggacagcaatgaaaatgcccagatcacctacagcctgattgaggacaccatccagggcgcccccctgagcgcctacctgagcatcaacagcgacacaggagtgctgtatgccctgcggagctttgattatgagcagttccgggacatgcagctgaaggtgatggcccgggacagcggggacccccccctgagcagcaatgtgtccctgagcctcttcctgctggaccagaatgacaatgcccctgagatcctgtacccagccctgcccacagatggcagcactggagtggagctggcccccctgtctgctgagcccggctacctggtgaccaaggtggtggccgtggaccgggacagcggccagaatgcctggctgagctaccgcctgctgaaggccagcgagcccggcctcttctctgtgggcctgcacactggagaggtgaggacagcccgggccctgctggacagagatgccctgaagcagagcctggtggtggccgtgcaggaccacggccagccccccctgagcgccaccgtgaccctgactgtggccgtggccgaccgcatcagtgacatcctggccgacctgggcagcctggagcccagcgccaagcccaatgacagcgacctgaccctgtacctggtggtggccgctgctgctgtgtcctgtgtgttcctggcctttgtgattgtgctgctggcccaccggctgcggcgctggcacaagagccggctgctgcaggccagcggcggcggcctggcctccatgcctggcagccactttgtgggcgtggatggagtgcgggccttcctgcagacctacagccatgaggtgtccctgacagctgacagcaggaagagccacctgatcttcccccagcccaactatgctgacaccctcatcagccaggagagctgtgagaagaagggcttcctgagcgccccccagagcctgctggaggacaagaaggagcccttcagccagcaggccccacccaacacagactggaggttcagccaggcccagaggcctggcaccagcggcagccagaatggagatgacaccggcacctggcccaacaaccagtttgacacagagatgctgcaggccatgatcctggccagcgccagcgaggccgcagatggcagcagcaccctgggcggcggggccggcaccatgggcctgagcgcccgctatggcccccagttcaccctgcagcacgtgcctgactaccggcagaatgtgtacatccctggcagcaatgccaccctgaccaatgctgctgggaagagagatggcaaggccccagctggaggaaatggaaacaagaagaagagcggcaagaaggagaagaagtag

SEQ ID NO: 166543 - DNA, 2811 bp, synthetic construct
  misc_feature 1..2811: note = Description of Artificial Sequence: Synthetic coding sequence
  source 1..2811: mol_type = other DNA
atggccgcccagaggaacagaagcaaggagagcaaggactgcagcggcctggtgctgctgtgcctcttcttcggcatcccctgggaggccggggcccggcagatctcctacagcatccctgaggagctggagaagggcagctttgtgggcaacatcagcaaggacctgggcctggccccccgggagctggccgagcggggcgtgcgcatcgtgtcccggggccgcacccagctgttcagcctgaaccccaggagcggcagcctcatcacagctggaagaattgaccgggaggagctgtgtgcccagagcgcccgctgtgtggtgtccttcaacatcctggtggaggacagagtgaagctgtttggaattgaaattgaggtgacagacatcaatgacaatgcccccaagttccaggccgagaacctggatgtgaagatcaatgaaaatgtggccgccggcatgaggttccccctgcctgaggccatcgaccctgatgtgggcgtgaacagcctgcagagctaccagctgagccccaacaagcacttcagcctgcgggtgcagagccgggccaatggagtgaagtacccagagctggtgctggagcacagcctggaccgggaggaggaggccatccaccacctggtgctgacagccagtgatggaggagaccccctgcggtctggaacagtgctggtgtctgtgacagtgtttgatgccaatgacaatgcccctgtgttcaccctgcctgagtacagagtgtctgtgcctgagaacctgcctgtgggcacccagctgctgactgtgacagccacagacagagatgagggcgccaacggggaggtgacctacagcttcaggaagctgcctgacacccagctgctgaagttccagctgaacaagtacaccggggagatcaagatcagcgagaacctggactatgaggagaccggcttctatgaaattgagatccaggccgaggatggaggagcctacctggccacagccaaggtgctgatcaccgtggaggatgtgaatgacaacagccctgagctgaccatcaccagcctcttcagccctgtgacagaggacagccccctgggcaccgtggtggccctgctgaatgtgcatgacctggacagcgagcagaatggccaggtgacctgcagcatcctggcctacctgcccttcaagctggagaagagcattgacagctactaccgcctggtgatccaccgggccctggaccgggagcaggtgtcctcctacaacatcaccgtgacagccacagatggcggcagcccccccctgagcacagaggcccacttcatgctgcaggtggccgacatcaatgacaacccccccaccttcagccaggtgtcctacttcacctacatcccagaaaataatgcccggggggccagcatcttctctgtgacagccctggaccctgacagcaaagaaaatgcccagatcatctacagcctggccgaggacaccatccagggcgtgcccctgagcagctacatcagcatcaacagcgacacaggagtgctgtatgccctgcggagctttgattatgagcagttccacgagctgcagatgcaggtgacagccagtgacagcggggacccccccctgagcagcaatgtgtccctgagcctgtttgtgctggaccagaatgacaatgcccctgagatcctgtacccagccctgcccacagatggcagcactggagtggagctggcccccaggtctgctgagcccggctacctggtgaccaaggtggtggccgtggaccgggacagcggccagaatgcctggctgagctaccgcctgctgaaggccagcgagcccggcctgtttgctgtgggggagcacactggagaggtgaggacagcccgggccctgctggacagagatgccctgaagcagagcctggtggtggccgtgcaggaccacggccagccccccctgagcgccaccgtgaccctgactgtggccgtggccgacagcatcccccaggtgctggccgacctgggcagctttgagagccctgccaacagcgagaccagtgacctgaccctgtacctggtggtggccgtggccgctgtgtcctgtgtgttcctggcctttgtgattgtgctgctggcccaccggctgcggcgctggcacaagagccggctgctgcaggccagcggcggcggcctgactggagtgtctggcagccactttgtgggcgtggatggagtgcgggccttcctgcagacctacagccatgaggtgtccctgacagctgacagcaggaagagccacctgatcttcccccagcccaactatgctgacaccctcatcagccaggagagctgtgagaagaatgaccccctgagcctgctggatgacagcaagttccccatcgaggacacccccctggtgccccaggccccacccaacacagactggaggttcagccaggcccagaggcctggcaccagcggcagccagaatggagatgacaccggcacctggcccaacaaccagtttgacacagagatgctgcaggccatgatcctggccagcgccagcgaggccgcagatggcagcagcaccctgggcggcggggccggcaccatgggcctgagcgcccgctatggcccccagttcaccctgcagcacgtgcctgactaccggcagaatgtgtacatccctggcagcaatgccaccctgaccaatgctgctgggaagagagatggcaaggccccagctggaggaaatggaaacaagaagaagagcggcaagaaggagaagaagtag

SEQ ID NO: 166544 - DNA, 2808 bp, synthetic construct
  misc_feature 1..2808: note = Description of Artificial Sequence: Synthetic coding sequence
  source 1..2808: mol_type = other DNA
atggccaaccggctgcagagaggagacaggagccggctgctgctgctgctgtgcatcttcctgggcaccctgcggggcttccgggcccggcagatccgctacagcgtgcctgaggagacagagaagggcagctttgtgggcaacatcagcaaggacctgggcctggagccccgggagctggccaagaggggcgtgagaattgtgtcccggggcaagacccagctgtttgctgtgaaccccaggagcggcagcctcatcacagctggaagaattgaccgggaggagctgtgtgaaacagtgagcagctgcttcctgaacatggagctgctggtggaggacaccctgaagatctacggcgtggaggtggagatcatcgacatcaatgacaatgcccccagcttccaggaggatgaggtggagatcaaggtgtctgagcacgccatccctggggccaggtttgccctgcccaatgcccgggaccctgatgtgggcgtgaacagcctgcagagctaccagctgagccccaacaactacttcagcctgcagctgcggggccgcacagatggagccaagaaccctgagctggtgctggagggcagcctggaccgggagaaggaggccgcccacctgctgctgctgacagccctggatggaggagaccccatcagaaaaggagctgtgcccatccgggtggtggtgctggatgtgaatgaccacatccccatgttcacccagagcgtgtacagagtgtctgtgcctgagaacatcagcagcggcaccagggtgctgatggtgaatgccacagatcctgatgagggcatcaatggagaggtgatgtacagcttcaggaacatggagagcaaggccagcgagatcttccagctggacagccagacaggagaggtgcaggtgcggggcagcctggactttgagaagtaccgcttctatgagatggagatccagggccaggacggcggcggcctcttcaccaccaccaccatgctgatcaccgtggtggatgtgaatgacaatgcccctgagatcaccatcaccagcagcatcaacagcatcctggagaacagccccccaggcaccgtgattgccctgctgaatgtgcaggaccaggacagcggagaaaatggccaggtgtcctgcttcatccccaaccacctgcccttcaagctggagaagacctacggcaactactacaagctgatcaccagccgggtgctggaccgggagctggtgcagagctacaacatcaccctgacagccacagaccagggcagcccccccctgtctgctgagacccacgtgtggctgaatgtggctgatgacaatgacaacccccctgtgttcccccacagcagctacagcgcctacatccctgagaacaaccccaggggggccagcatcttctctgtgacagccctggaccctgacagcaagcagaatgccctggtgacctacagcctgacagatgacacagtgcagggcgtgcccctgagcagctatgtgtccatcaacagcaacacaggagtgctgtatgccctgcagagctttgattatgagcagttccgggacctggagctgcgggtcatcgcccgggacagcggggacccccccctgagcagcaatgtgtccctgagcctgtttgtgctggaccagaatgacaatgcccctgagatcctgtacccagccctgcccacagatggcagcactggagtggagctggcccccaggtctgctgagcccggctacctggtgaccaaggtggtggccgtggacaaggacagcggccagaatgcctggctgagctaccgcctgctgaaggccagcgagcccggcctgtttgctgtgggggagcacactggagaggtgaggacagcccgggccctgctggacagagatgccctgaagcagagcctggtggtggccgtgcaggaccacggccagccccccctgagcgccaccgtgaccctgactgtggccgtggccgacagcatccctgaggtgctggccgacctgggcagcctggagagcctggccaacagcgagaccagtgacctgagcctgtacctggtggtggccgtggccgctgtgtcctgcatcttcctggtgtttgtgattgtgctgctggccctgcggctgtggcgctggcacaagagccggctgctgcaggccagcgagggcggcctggccggcatgcccaccagccactttgtgggcgtggatggagtgcaggccttcctgcagacctacagccatgaggtgtccctgattgctgacagccagaagagccacctgatcttcccccagcccaactacggggacaccctcatcagccaggagagctgtgagaagtctgagcccctgctgattgctgaggacagcgccatcatcctgggcaaatgtgaccccaccagcaaccagcaggccccacccaacacagactggaggttcagccaggcccagaggcctggcaccagcggcagccagaatggagatgacaccggcacctggcccaacaaccagtttgacacagagatgctgcaggccatgatcctggccagcgccagcgaggccgcagatggcagcagcaccctgggcggcggggccggcaccatgggcctgagcgcccgctatggcccccagttcaccctgcagcacgtgcctgactaccggcagaatgtgtacatccctggcagcaatgccaccctgaccaatgctgctgggaagagagatggcaaggccccagctggaggaaatggaaacaagaagaagagcggcaagaaggagaagaagtag

SEQ ID NO: 166545 - DNA, 2253 bp, synthetic construct
  misc_feature 1..2253: note = Description of Artificial Sequence: Synthetic coding sequence
  source 1..2253: mol_type = other DNA
atggccaaccggctgcagagaggagacaggagccggctgctgctgctgctgtgcatcttcctgggcaccctgcggggcttccgggcccggcagatccgctacagcgtgcctgaggagacagagaagggcagctttgtgggcaacatcagcaaggacctgggcctggagccccgggagctggccaagaggggcgtgagaattgtgtcccggggcaagacccagctgtttgctgtgaaccccaggagcggcagcctcatcacagctggaagaattgaccgggaggagctgtgtgaaacagtgagcagctgcttcctgaacatggagctgctggtggaggacaccctgaagatctacggcgtggaggtggagatcatcgacatcaatgacaatgcccccagcttccaggaggatgaggtggagatcaaggtgtctgagcacgccatccctggggccaggtttgccctgcccaatgcccgggaccctgatgtgggcgtgaacagcctgcagagctaccagctgagccccaacaactacttcagcctgcagctgcggggccgcacagatggagccaagaaccctgagctggtgctggagggcagcctggaccgggagaaggaggccgcccacctgctgctgctgacagccctggatggaggagaccccatcagaaaaggagctgtgcccatccgggtggtggtgctggatgtgaatgaccacatccccatgttcacccagagcgtgtacagagtgtctgtgcctgagaacatcagcagcggcaccagggtgctgatggtgaatgccacagatcctgatgagggcatcaatggagaggtgatgtacagcttcaggaacatggagagcaaggccagcgagatcttccagctggacagccagacaggagaggtgcaggtgcggggcagcctggactttgagaagtaccgcttctatgagatggagatccagggccaggacggcggcggcctcttcaccaccaccaccatgctgatcaccgtggtggatgtgaatgacaatgcccctgagatcaccatcaccagcagcatcaacagcatcctggagaacagccccccaggcaccgtgattgccctgctgaatgtgcaggaccaggacagcggagaaaatggccaggtgtcctgcttcatccccaaccacctgcccttcaagctggagaagacctacggcaactactacaagctgatcaccagccgggtgctggaccgggagctggtgcagagctacaacatcaccctgacagccacagaccagggcagcccccccctgtctgctgagacccacgtgtggctgaatgtggctgatgacaatgacaacccccctgtgttcccccacagcagctacagcgcctacatccctgagaacaaccccaggggggccagcatcttctctgtgacagccctggaccctgacagcaagcagaatgccctggtgacctacagcctgacagatgacacagtgcagggcgtgcccctgagcagctatgtgtccatcaacagcaacacaggagtgctgtatgccctgcagagctttgattatgagcagttccgggacctggagctgcgggtcatcgcccgggacagcggggacccccccctgagcagcaatgtgtccctgagcctgtttgtgctggaccagaatgacaatgcccctgagatcctgtacccagccctgcccacagatggcagcactggagtggagctggcccccaggtctgctgagcccggctacctggtgaccaaggtggtggccgtggacaaggacagcggccagaatgcctggctgagctaccgcctgctgaaggccagcgagcccggcctgtttgctgtgggggagcacactggagagcaggccccacccaacacagactggaggttcagccaggcccagaggcctggcaccagcggcagccagaatggagatgacaccggcacctggcccaacaaccagtttgacacagagatgctgcaggccatgatcctggccagcgccagcgaggccgcagatggcagcagcaccctgggcggcggggccggcaccatgggcctgagcgcccgctatggcccccagttcaccctgcagcacgtgcctgactaccggcagaatgtgtacatccctggcagcaatgccaccctgaccaatgctgctgggaagagagatggcaaggccccagctggaggaaatggaaacaagaagaagagcggcaagaaggagaagaagtag

SEQ ID NO: 166546 - DNA, 2799 bp, synthetic construct
  misc_feature 1..2799: note = Description of Artificial Sequence: Synthetic coding sequence
  source 1..2799: mol_type = other DNA
atgatcccagcccggctgcaccgggactacaagggcctggtgctgctgggcatcctgctgggcaccctgtgggagaccggctgcacccagatccgctacagcgtgcctgaggagctggagaagggcagccgggtgggggacatcagccgggacctgggcctggagccccgggagctggccgagcggggcgtgcgcatcatcccccggggccgcacccagctgtttgccctgaaccccaggagcggcagcctggtgacagctggaagaattgaccgggaggagctgtgcatgggcgccatcaagtgccagctgaacctggacatcctgatggaggacaaggtgaagatctatggagtggaggtggaggtgcgggacatcaatgacaatgccccctacttccgggagagcgagctggagatcaagatcagtgaaaatgctgccacagagatgaggttccccctgccccacgcctgggaccctgacatcggcaagaacagcctgcagagctatgagctgagccccaacacccacttcagcctgattgtgcagaatggagcagatggcagcaagtacccagagctggtgctgaagagggccctggaccgggaggagaaggccgcccaccacctggtgctgacagccagtgatggaggagaccctgtgaggactggaacagcccgcatccgggtgatggtgctggatgccaatgacaatgccccagcctttgcccagcctgagtaccgggcctctgtgcctgagaacctggccctgggcacccagctgctggtggtgaatgccacagatcctgatgagggcgtgaatgctgaggtgcgctacagcttccgctacgtggatgacaaggccgcccaggtgttcaagctggactgcaacagcggcaccatcagcaccatcggggagctggaccacgaggagagcggcttctaccagatggaggtgcaggccatggacaatgccggctacagcgcccgggccaaggtgctgatcaccgtgctggatgtgaatgacaatgcccctgaggtggtgctgaccagcctggccagctctgtgcctgagaacagcccccggggcaccctcatcgccctgctgaatgtgaatgaccaggacagcgaggagaatggccaggtgatctgcttcatccagggcaacctgcccttcaagctggagaagagctatggcaactactacagcctggtgacagacatcgtgctggaccgggagcaggtgcccagctacaacatcaccgtgacagccacagaccggggcaccccacccctgagcacagagacccacatcagcctgaatgtggccgacaccaatgacaacccccctgtgttcccccaggccagctacagcgcctacatccctgagaacaacccccggggcgtgtccctggtgtctgtgacagcccatgaccctgactgtgaagaaaatgcccagatcacctacagcctggccgagaacaccatccagggcgccagcctgagcagctatgtgtccatcaacagcgacacaggagtgctgtatgccctgagcagctttgattatgagcagttccgggacctgcaggtgaaggtgatggcccgggacaatggccacccccccctgagcagcaatgtgtccctgagcctgtttgtgctggaccagaatgacaatgcccctgagatcctgtacccagccctgcccacagatggcagcactggagtggagctggcccccaggtctgctgagcccggctacctggtgaccaaggtggtggccgtggaccgggacagcggccagaatgcctggctgagctaccgcctgctgaaggccagcgagcccggcctcttctctgtgggcctgcacactggagaggtgaggacagcccgggccctgctggacagagatgccctgaagcagagcctggtggtggccgtgcaggaccacggccagccccccctgagcgccaccgtgaccctgactgtggccgtggccgacagcatcccccaggtgctggccgacctgggcagcctggagagccctgccaacagcgagaccagtgacctgaccctgtacctggtggtggccgtggccgctgtgtcctgtgtgttcctggcctttgtgatcctgctgctggccctgcggctgcggcgctggcacaagagccggctgctgcaggccagcggcggcggcctgactggagccccagccagccactttgtgggcgtggatggagtgcaggccttcctgcagacctacagccatgaggtgtccctgaccacagacagcaggaagagccacctgatcttcccccagcccaactatgctgacatgctggtgtcccaggagagctttgagaagtctgagcccctgctgctgagcggggacagcgtcttcagcaaggacagccacggcctgattgagcaggccccacccaacacagactggaggttcagccaggcccagaggcctggcaccagcggcagccagaatggagatgacaccggcacctggcccaacaaccagtttgacacagagatgctgcaggccatgatcctggccagcgccagcgaggccgcagatggcagcagcaccctgggcggcggggccggcaccatgggcctgagcgcccgctatggcccccagttcaccctgcagcacgtgcctgactaccggcagaatgtgtacatccctggcagcaatgccaccctgaccaatgctgctgggaagagagatggcaaggccccagctggaggaaatggaaacaagaagaagagcggcaagaaggagaagaagtag

SEQ ID NO: 166547 - DNA, 2799 bp, synthetic construct
  misc_feature 1..2799: note = Description of Artificial Sequence: Synthetic coding sequence
  source 1..2799: mol_type = other DNA
atggccgccctgcagaagctgccccactgcaggaagctggtgctgctgtgcttcctgctggccaccctgtgggaggcccgggccggccagatccgctacagcgtgcgggaggagattgaccggggcagctttgtgggcaacatcgccaaggacctgggcctggagcccctggccctggccgagcagggcgtgcgcatcgtgtcccggggccgcagccagctgtttgccctgaaccccaggagcggcagcctggtgacagccaacagaattgaccgggaggagctgtgtgcccagagcgccccctgcctgctgaacttcaacatcctgctggaggacaagctgaccatctacagcgtggaggtggagatcacagacatcaatgacaatgcccccaggtttggagtggaggagctggagctgaagatcagcgagaccaccaccccaggcttccgcatccccctgaagaatgcccatgatgctgatgtgggggagaatgccctgcagaagtatgccctgaaccccaatgaccacttcagcctggatgtgagaagaggagcagatggcaacaagtacccagagctggtgctggagaggagcctggaccgggaggaggaggccgtgcaccacctggtgctggtggccagtgatggaggagaccctgtgctgagcggcaccagccgcatctgtgtgaaggtgctggatgccaatgacaatgcccctgtgttcacccagcctgagtaccgcatcagcatccctgagaacaccctggtgggcacccgcatcctgactgtgacagccacagatgctgatgagggctactatgcccaggtggtgtacttcctggagaagagccctggagagaccagcgaggtgtttgagctgaagagcaccagcggggagctgaccatcatcaaggacctggactatgaagatgccaccttccatgaaattgatattgaggcccaggacggccctggcctgctgacccgggccaaggtgattgtgacagtgctggatgtgaatgacaatgcccctgagttctacatgaccagcgccaccagctctgtgtctgaggacagcctgcccggcaccatcatcggcctcttcaacgtgcatgaccgggacagcggccagaatgccttcaccacctgcagcctgcctgaggacctgcccttcaagctggagaagtctgtggacaactactaccgcctggtgaccacccgggccctggaccgggagcagttctccttctacaacatcaccctgacagccaaggatggcggcaaccccagcctgagcacagatgcccacatcctgctgcaggtggccgacatcaatgacaatgccccagccttcagcaggaccagctacagcacctacatccctgagaacaaccccaggggggccagcgtcttctctgtgacagcccatgaccctgacagcaatgacaatgcccacgtgacctacagctttgctgaagatactgtgcagggcgcccccctgagcagctacatcagcatcaacagcgacacaggagtgctgtatgccctgcggagctttgattatgagcagctgcgggacctgcaggtgtgggtgattgcccgggacagcggcaacccccccctgagcagcaatgtgtccctgagcctgtttgtgctggaccagaatgacaatgcccctgagatcctgtacccagccttccccacagatggcagcactggagtggagctggcccccaggtctgctgagcccggctacctggtgaccaaggtggtggccgtggaccgggacagcggccagaatgcctggctgagctaccacctgctgaaggccagcgagcccggcctcttctctgtgggcctgcacactggagaggtgaggacagcccgggccctgctggacagagatgccctgaagcagagcctggtggtggccatccaggaccacggccagccccccctgagcgccaccgtgaccctgactgtggccgtggccgaccgcatcccagacatcctggccgacctgggcagcctggagcccagcgccatccccaatgacagcgacctgaccctgtacctggtggtggccgtggccgctgtgtcctgtgtgttcctggcctttgtgattgtgctgctggcccaccggctgcggcgctggcacaagagccggctgctgcaggccagcggcggcagcctgaccggcatgcagagcagccactttgtgggcgtggatggagtgcgggccttcctgcagacctacagccatgaggtgtccctgacagctgacagcaggaagagccacctgatcttcccccagcccaactatgctgacaccctcatcagccaggagagctgtgagaagaaggacttcctgagcgccccccagagcctgctggaggaggagcgggaggagaccttcagccagcaggccccacccaacacagactggaggttcagccaggcccagaggcctggcaccagcggcagccagaatggagatgacaccggcacctggcccaacaaccagtttgacacagagatgctgcaggccatgatcctggccagcgccagcgaggccgcagatggcagcagcaccctgggcggcggggccggcaccatgggcctgagcgcccgctatggcccccagttcaccctgcagcacgtgcctgactaccggcagaatgtgtacatccctggcagcaatgccaccctgaccaatgctgctgggaagagagatggcaaggccccagctggaggaaatggaaacaagaagaagagcggcaagaaggagaagaagtag

SEQ ID NO: 166548 - DNA, 2799 bp, synthetic construct
  misc_feature 1..2799: note = Description of Artificial Sequence: Synthetic coding sequence
  source 1..2799: mol_type = other DNA
atgaccaactgcctgtccttcagaaatggccggggcctggccctgctgtgtgccctgctgggcaccctgtgtgagaccggcagcggccagatccgctacagcgtgtctgaggagctggacaagggcagctttgtgggcaacatcgccaatgacctgggcctggagccccgggagctggccgagcggggcgtgcgcatcgtgtcccggggccgcacccagctgttcagcctgaacccccagagcggcagcctggtgacagctgagagaattgaccgggaggagctgtgtgcccagatccccctgtgcctggtgaagatcaacatcctggtggaggacaagctgaagatctttgaggtggagattgagatcaaggacatcaatgacaatgcccccaacttccccacagaggagctggagatcaagatcggggagctgactgtgcccggcacccgcttccccatcaagacagcctttgatcctgatgtgggcatcaacagcctgcagaactacaagctgagccccaatgactacttcagcctggccgtgaacagcgtgtctgagggcgccaagtacccagagctggtgctggagcgggccctggaccgggagaagaaggagatccaccagctggtgctggtggccagtgatggaggagaccctgtgcacagcggcaacctgcacatccaggtgattgtgctggatgccaatgacaacccccccatgttcacccagcctgagtacagagtgtctgtgtgggagaatgtgcctgtgggcacccggctgctgactgtgaatgccacagatcctgatgagggcttcaatgcccaggtgtcctacatcctggacaagatgcctgggaagattgctgagatcttccacctgaacagcgtgtctggagaggtgtccatcctgaagagcctggactatgaagatgccatgttttatgagatcaagattgaggcccaggacggccctggcctgctgagccgggccaagatcctggtgacagtgctggatgtgaatgacaatgcccctgagatcaccatcaccagcctgaccagctctgtgcctgaggagggcaccgtgggccgggagatcgccctgattgatgtgcatgaccgggacagcggccagaatggccaggtggaggtgtttgtgctgggcaacctgcccttcaagctggagaagagcattgaccagtactaccgcctggtgacagccaccagcctggaccgggagcagatcagcgagtacaacatcagcctgcgggccagtgatggcggcagcccccccctgagcacagagacccacatcaccctgcacgtgattgacatcaatgacaacccccccaccttcccccacctgagctacagcgcctacatccctgagaacaaccccaggggggccagcatcttctctgtgacagcccaggaccctgacagcaacaacaatgcccgcatcacctacgccctgacagaggacaccctgcagggcgcccccctgagcagctttgtgtccatcaacagcaacacaggagtgctgtatgccctgcggagctttgattatgagcagttccgggacctgaagctgctggtgacagccagtgacagcggcaacccccccctgagcagcaatgtgtccctgaacctgtttgtgctggaccagaatgacaatgcccctgagatcctgtacccagccctgcccacagatggcagcactggagtggagctggcccccaggtctgctgagcccggctacctggtgaccaaggtggtggccgtggaccgggacagcggccagaatgcctggctgagctaccgcctgctgaaggccagcgagcccggcctcttctctgtgggcctgcacactggagaggtgaggacagcccgggccctgctggacagagatgccctgaagcagagcctggtggtggccgtgcaggaccacggccagccccccctgagcgccaccgtgaccctgactgtggccgtggccgaccgcatcccagacatcctggccgacctgggcagcctggagcccagcgccaagcccaatgacagcgacctgaccctgtacctggtggtggccgtggccgctgtgtcctgtgtgttcctggcctttgtgattgtgctgctggccctgcggctgcggcgctggcacaagagccggctgctgcaggccagcggcggcggcctggccagcaccccaggcagccactttgtgggcgcagatggagtgcgggccttcctgcagacctacagccatgaggtgtccctgacagctgacagcaggaagagccacctgatcttcccccagcccaactatgctgacaccctcatcagccaggagagctgtgagaagtctgagcccctgctgatcacccaggacctgctggagatgaagggggacagcaacctgctgcagcaggccccacccaacacagactggaggttcagccaggcccagaggcctggcaccagcggcagccagaatggagatgacaccggcacctggcccaacaaccagtttgacacagagatgctgcaggccatgatcctggccagcgccagcgaggccgcagatggcagcagcaccctgggcggcggggccggcaccatgggcctgagcgcccgctatggcccccagttcaccctgcagcacgtgcctgactaccggcagaatgtgtacatccctggcagcaatgccaccctgaccaatgctgctgggaagagagatggcaaggccccagctggaggaaatggaaacaagaagaagagcggcaagaaggagaagaagtag

SEQ ID NO: 166549 - DNA, 2796 bp, synthetic construct
  misc_feature 1..2796: note = Description of Artificial Sequence: Synthetic coding sequence
  source 1..2796: mol_type = other DNA
atggccagccccccccggggctggggctgtggggagctgctgctgcccttcatgctgctgggcaccctgtgtgagcccggcagcggccagatccgctacagcatgcctgaggagctggacaagggcagctttgtgggcaacatcgccaaggacctgggcctggagccccaggagctggccgagcggggcgtgcgcatcgtgtcccggggccgcacccagctgtttgccctgaaccccaggagcggcagcctggtgacagctggaagaattgaccgggaggagctgtgtgcccagagccccctgtgtgtggtgaacttcaacatcctggtggagaacaagatgaagatctatggagtggaggtggagatcatcgacatcaatgacaacttcccccgcttcagagatgaggagctgaaggtgaaggtgaatgaaaatgctgctgctggcacccggctggtgctgccctttgccagagatgctgatgtgggcgtgaacagcctgcggagctaccagctgagcagcaacctgcacttcagcctggatgtggtgtctggaacagatggccagaagtacccagagctggtgctggagcagcccctggaccgggagaaggagaccgtgcatgacctgctgctgacagccctggatggaggagaccctgtgctgagcggcaccacccacatccgggtgacagtgctggatgccaatgacaatgcccccctcttcaccccatctgagtacagcgtgtctgtgcctgagaacatccctgtgggcacccggctgctgatgctgacagccacagatcctgatgagggcatcaacgggaagctgacctacagcttcagaaatgaggaggagaagatcagcgagaccttccagctggacagcaacctgggggagatcagcaccctgcagagcctggactatgaggagagccgcttctacctgatggaggtggtggcccaggatggaggagccctggtggccagcgccaaggtggtggtgacagtgcaggatgtgaatgacaatgcccctgaggtgatcctgaccagcctgaccagcagcatcagcgaggactgcctgcccggcaccgtcatcgccctcttctctgtgcatgatggagacagcggggagaatggagagatcgcctgcagcatccccaggaacctgcccttcaagctggagaagtctgtggacaactactaccacctgctgaccacccgggacctggaccgggaggagaccagtgactacaacatcaccctgactgtgatggaccacggcaccccacccctgagcacagagagccacatccccctgaaggtggctgatgtgaatgacaacccccccaacttcccccaggccagctacagcacctctgtgacagagaacaacccccggggcgtgtccatcttctctgtgacagcccatgaccctgattctggggacaatgcccgggtgacctacagcctggccgaggacaccttccagggcgcccccctgagcagctatgtgtccatcaacagcgacacaggagtgctgtatgccctgcggagctttgattatgagcagctgcgggacctgcagctgtgggtgacagccagtgacagcggcaacccccccctgagcagcaatgtgtccctgagcctgtttgtgctggaccagaatgacaacaccccagagatcctgtacccagccctgcccacagatggcagcactggagtggagctggcccccaggtctgctgagcccggctacctggtgaccaaggtggtggccgtggacaaggacagcggccagaatgcctggctgagctaccgcctgctgaaggccagcgagcccggcctgtttgctgtgggcctgcacactggagaggtgaggacagcccgggccctgctggacagagatgccctgaagcagagcctggtggtggccgtggaggaccacggccagccccccctgagcgccaccttcaccgtgacagtggccgtggccgaccgcatcccagacatcctggccgacctgggcagcatcaagacccccatcgaccctgaggacctggacctgaccctgtacctggtggtggccgtggccgctgtgtcctgtgtgttcctggcctttgtgattgtgctgctggtgctgcggctgcggcgctggcacaagagccggctgctgcaggccgagggcagccggctggccggcgtgcctgccagccactttgtgggcgtggatggagtgcgggccttcctgcagacctacagccatgaggtgtccctgacagctgacagcaggaagagccacctgatcttcccccagcccaactatgctgacaccctgctgtctgaggagagctgtgagaagtctgagcccctgctgatgtctgacaaggtggatgccaacaaggaggagcggcgggtgcagcaggccccacccaacacagactggaggttcagccaggcccagaggcctggcaccagcggcagccagaatggagatgacaccggcacctggcccaacaaccagtttgacacagagatgctgcaggccatgatcctggccagcgccagcgaggccgcagatggcagcagcaccctgggcggcggggccggcaccatgggcctgagcgcccgctatggcccccagttcaccctgcagcacgtgcctgactaccggcagaatgtgtacatccctggcagcaatgccaccctgaccaatgctgctgggaagagagatggcaaggccccagctggaggaaatggaaacaagaagaagagcggcaagaaggagaagaagtag

SEQ ID NO: 166550 - DNA, 2799 bp, synthetic construct
  misc_feature 1..2799: note = Description of Artificial Sequence: Synthetic coding sequence
  source 1..2799: mol_type = other DNA
atggccccaccccagaggcacccccagaggtctgagcaggtgctgctgctgaccctgctgggcaccctgtggggcgctgctgctgcccagatccgctacagcatccctgaggagctggagaagggcagctttgtgggcaacatcgtgaaggacctgggcctggagccccaggagctggccgagcacggcgtgcgcatcgtgtcccggggccgcatgcagctgttcagcctgaaccccagaaatggcagcctggtgacagctggaagaattgaccgggaggagctgtgtgcccagagcccccgctgcctggtgtccttcaacatcctggtggaggacaagctgaacctgtaccctgtggaggtggagatcgtggacatcaatgacaacaccccccgcttcctgaaggaggagctggaggtgaagatcctggagaatgctgcccccagcagccgcttccccctgatggaggtgtatgaccctgatgtgggcatgaacagcctgcagggcttcaagctgagcggcaacagccacttctctgtggatgtgcagagcgaggcccacggccccaagtacccagagctggtgctggagggcaccctggaccgggagggggaggccgtgtaccgcctggtgctgacagccatggatggaggagaccctgtgcgcagctctgtggcccagatcctggtgacagtgctggatgtgaatgacaacacccccatgttcacccagcctgtgtacagagtgtctgtgcctgagaacctgcctgtgggcacccctgtgctggccgtgacagccacagaccaggatgagggcgtgcacggggaggtgacctacagctttgtgaagatcacagagaagatcagccagatcttctgcctgaatgtgctgaccggggagatcagcaccagcgccaacctggactatgaggacagcagcttctatgagctgggcgtggaggccagagatggccctggcctgcgggaccgggccaaggtgctgatcaccatcctggatgtgaatgacaacgtgcctgaggtggtggtgaccagcggcagcaggaccatcgccgagagcgcccctcctggcaccgtcatcgccctcttccaggtgtttgaccgggacagcggcctgaatggcctggtgacctgcagcatccccaggagcctgccctttgagctggagaagtctgtgggcaactactaccgcctggtgaccaatgctgccctggaccgggaggaggtgttcctgtacaacatcaccgtgacagccacagacaagggcaccccacccctgagcacagagaccatcatcagcctgaatgtggccgacaccaatgacaacccccccaccttcccccacagcagctacagcgtgtatgtgctggagaacaaccccaggggggccagcatcttctctgtgaatgccctggaccctgatgtggaccagaatgcccaggtgtcctacagcctggccgaggacaccctgcagggcgcccccctgagcagctatgtgtccatcaacagcgacaccggcatcctgtatgccctgcggagctttgattatgagcagctgcgggacctgcagctgtgggtgacagccagtgacagcggggacccccccctgagcagcaatgtgtccctgagcctgtttgtgctggaccagaatgacaatgcccctgagatcctgtacccagccctgcccacagatggcagcactggagtggagctggcccccaggtctgctgagcccggctacctggtgaccaaggtggtggccgtggaccgggacagcggccagaatgcctggctgagctaccgcctgctgaaggccagcgagcccggcctcttctctgtgggcctgcacactggagaggtgaggacagcccgggccctgctggacagagatgccctgaagcagagcctggtggtggccgtgcaggaccacggccagccccccctgagcgccaccgtgaccctgactgtggccgtggccgaccgcatcccagacatcctggccgacctgggcagcctggagcccagcgccaagcccaatgacagcgacctgaccctgtacctggtggtggccgtggccgctgtgtcctgtgtgttcctggcctttgtgattgtgctgctggccctgcggctgcagcgctggcacaagagccggctgctgcaggccagcggcggcggcctggcctccatgcctggcagccactttgtgggcgtggagggcgtgcgggccttcctgcagacctacagccatgaggtgtccctgacagctgacagcaggaagagccacctgatcttcccccagcccaactatgctgacaccctcatcaaccaggagagctatgagaagtctgagcccctgctgatcacccaggacctgctggagaccaagggggagccccggcagctgcagcaggccccacccaacacagactggaggttcagccaggcccagaggcctggcaccagcggcagccagaatggagatgacaccggcacctggcccaacaaccagtttgacacagagatgctgcaggccatgatcctggccagcgccagcgaggccgcagatggcagcagcaccctgggcggcggggccggcaccatgggcctgagcgcccgctatggcccccagttcaccctgcagcacgtgcctgactaccggcagaatgtgtacatccctggcagcaatgccaccctgaccaatgctgctgggaagagagatggcaaggccccagctggaggaaatggaaacaagaagaagagcggcaagaaggagaagaagtag

SEQ ID NO: 166551 - DNA, 2799 bp, synthetic construct
  misc_feature 1..2799: note = Description of Artificial Sequence: Synthetic coding sequence
  source 1..2799: mol_type = other DNA
atggccgcccagccccggggcggggactaccggggcttcttcctgctgagcatcctgctgggcaccccctgggaggcctgggccggccgcatcctgtacagcgtgtctgaggagacagacaagggcagctttgtgggggacatcgccaaggacctgggcctggagccccgggagctggccgagcggggcgtgcgcatcatcagccggggccgcacccagctgtttgccctgaaccagaggagcggcagcctggtgacagctggaagaattgaccgggaggagatctgtgcccagagcgcccgctgcctggtgaacttcaacatcctgatggaggacaagatgaacctgtaccccattgatgtggagatcatcgacatcaatgacaacgtgccccgcttcctgacagaggagatcaacgtgaagatcatggagaacacagcccctggggtgcgcttccccctgtctgaggccggggaccctgatgtgggcaccaacagcctgcagagctaccagctgagccccaacagacacttcagcctggccgtgcagagcggagatgatgagaccaagtacccagagctggtgctggagcgggtgctggaccgggaggaggagcgggtgcaccacctggtgctgacagccagtgatggaggagacccccccaggagcagcacagcccacatccaggtgacagtggtggatgtgaatgaccacacccctgtgttcagcctgccccagtaccaggtgacagtgcctgaaaatgtgcctgtgggcacccggctgctgactgtgcacgccatcgacctggatgagggcgtgaatggagaggtgacctacagcttcaggaagatcacccccaagctgcccaagatgttccacctgaacagcctgaccggggagatcagcaccctggagggcctggactatgaggagacagccttctatgagatggaggtgcaggcccaggacggccctggcagcctgaccaaggccaaggtgctgatcaccgtgctggatgtgaatgacaatgcccctgaggtgaccatgaccagcctgagcagcagcatccctgaggacacccccctgggcaccgtcatcgccctcttctacctgcaggaccgggacagcggcaagaatggagaggtgacctgcaccatccctgagaacctgcccttcaagctggagaagagcattgacaactactaccgcctggtgaccaccaagaacctggaccgggagaccctgagcctgtacaacatcaccctgaaggccacagatggcggcaccccacccctgagccgggagacccacatcttcatgcaggtggccgacaccaatgacaacccccccaccttcccccacagcagctacagcgtgtacatcgccgagaacaaccccaggggggccagcatcttcctggtgacagcccaggaccatgattctgaggacaatgcccagatcacctacagcctggccgaggacaccatccagggcgcccctgtgtcctcctatgtgtccatcaacagcgacacaggagtgctgtatgccctgcagagctttgattatgagcagctgcgggagctgcagctgcgggtgacagcccatgattctggggacccccccctgagcagcaacatgagcctgagcctgtttgtgctggaccagaatgacaaccccccagagatcctgtacccagccctgcccacagatggcagcacaggcatggagctggcccccaggtctgctgagcccggctacctggtgaccaaggtggtggccgtggacaaggacagcggccagaatgcctggctgagctacctgctgctgaaggccagcgagcccggcctgtttgctgtgggcctgtacacaggagaggtgaggacagcccgggccctgctggacagagatgccctgaagcagagcctggtggtggccgtgcaggaccacggccagccccccctgagcgccaccgtgaccctgactgtggccgtggccgacagcatccctgaggtgctggccgacctgggcagcctggagcccagtgatggcccctacaactatgacctgaccctgtacctggtggtggccgtggccaccgtgtcctgtgtgttcctggcctttgtgctggtgctgctggccctgcggctgcggcgctggcacaagagccggctgctgcaggccagcgagggcggcctggccaacgtgcccaccagccactttgtgggcatggatggagtgcaggccttcctgcagacctacagccatgaggtgtccctgacagctgacagcaggaagagccacctgatcttcccccagcccaactacgtggacatgctgatcagccaggagagctgtgagaagaatgacagcctgctgacctctgtggacttccaggagtgcaaggagaacctgcccagcatccagcaggccccacccaacacagactggaggttcagccaggcccagaggcctggcaccagcggcagccagaatggagatgacaccggcacctggcccaacaaccagtttgacacagagatgctgcaggccatgatcctggccagcgccagcgaggccgcagatggcagcagcaccctgggcggcggggccggcaccatgggcctgagcgcccgctatggcccccagttcaccctgcagcacgtgcctgactaccggcagaatgtgtacatccctggcagcaatgccaccctgaccaatgctgctgggaagagagatggcaaggccccagctggaggaaatggaaacaagaagaagagcggcaagaaggagaagaagtag

SEQ ID NO: 166552 - DNA, 2799 bp, synthetic construct
  misc_feature 1..2799: note = Description of Artificial Sequence: Synthetic coding sequence
  source 1..2799: mol_type = other DNA
atggccgccccccagagccggcccaggagaggagagctgatcctgctgtgtgccctgctgggcaccctgtgggagatcggccggggccagatccgctacagcgtgcctgaggagacagacaagggcagctttgtgggcaacatcagcaaggacctgggcctggaccccaggaagctggccaagcacggcgtgcgcatcgtgtcccggggccgcacccagctgtttgccctgaaccccaggagcggcagcctcatcacagctggaagaattgaccgggaggagctgtgtgcccagagcccccgctgcctgatcaacatcaacaccctggtggaggacaagggcaagctgtttggagtggagattgagatcatcgacatcaatgacaacaaccccaagttccaggtggaggacctggaggtgaagatcaatgaaattgctgtgcctggggcccgctaccccctgcctgaggccgtggaccctgatgtgggcgtgaacagcctgcagagctaccagctgagccccaaccaccacttcagcctggatgtgcagacaggagacaatggagccatcaaccctgagctggtgctggagcgggccctggaccgggaggaggaggccgcccaccacctggtgctgacagccagtgatggcggcaagccacccaggagcagcacagtgcgcatccacgtgacagtgctggacaccaatgacaatgcccctgtgttcccccaccccatctacagagtgaaggtgctggagaacatgcctcctggcacccggctgctgactgtgacagccagtgaccctgatgagggcatcaacgggaaggtggcctacaagttcaggaagatcaatgagaagcagacccccctcttccagctgaatgaaaatactggagagatcagcatcgccaagagcctggactatgaagaatgttccttctatgagatggagatccaggccgaggatgtgggcgccctgctgggccgcaccaagctgctgatctctgtggaggatgtgaatgacaacagacctgaggtgatcatcaccagcctcttcagccctgtgctggagaacagcctgcccggcaccgtcatcgccttcctgtctgtgcatgaccaggacagcggcaagaatggccaggtggtgtgctacacccgggacaacctgcccttcaagctggagaagagcatcggcaactactaccgcctggtgaccaggaagtacctggacagagaaaatgtgtccatctacaacatcaccgtgatggccagtgacctgggcaccccacccctgagcacagagacccagatcgccctgcacgtggccgacatcaatgacaacccccccaccttcccccacgccagctacagcgcctacatcctggagaacaacctgcggggggccagcatcttcagcctgacagcccatgaccctgacagccaggagaatgcccaggtgacctacagcgtgacagaggacaccctgcagggcgcccccctgagcagctacatcagcatcaacagcgacacaggagtgctgtatgccctgcagagctttgattatgagcagatccgggacctgcagctgctggtgacagccagtgacagcggggacccccccctgagcagcaacatgagcctgagcctgtttgtgctggaccagaatgacaatgcccctgagatcctgtacccagccctgcccacagatggcagcactggagtggagctggcccccaggtctgctgagcggggctacctggtgaccaaggtggtggccgtggaccgggacagcggccagaatgcctggctgagctaccgcctgctgaaggccagcgagcccggcctcttctctgtgggcctgcacactggagaggtgaggacagcccgggccctgctggacagagatgccctgaagcagagcctggtggtggccgtgcaggaccacggccagccccccctgagcgccaccgtgaccctgactgtggccgtggccgacagcatccctgaggtgctgacagagctgggcagcctgaagcccagcgtggaccccaatgacagcagcctgaccctgtacctggtggtggccgtggccgccatcagctgtgtgttcctggcctttgtggccgtgctgctgggcctgcggctgcggcgctggcacaagagccggctgctgcaggacagcggcggccgcctggtgggcgtgcctgccagccactttgtgggcgtggaggaggtgcaggccttcctgcagacctacagccaggaggtgtccctgacagctgacagcaggaagagccacctgatcttcccccagcccaactatgctgacatgctgatcagccaggagggctgtgagaagaatgacagcctgctgacctctgtggacttccacgagtacaagaatgaggccgaccacggccagcaggccccacccaacacagactggaggttcagccaggcccagaggcctggcaccagcggcagccagaatggagatgacaccggcacctggcccaacaaccagtttgacacagagatgctgcaggccatgatcctggccagcgccagcgaggccgcagatggcagcagcaccctgggcggcggggccggcaccatgggcctgagcgcccgctatggcccccagttcaccctgcagcacgtgcctgactaccggcagaatgtgtacatccctggcagcaatgccaccctgaccaatgctgctgggaagagagatggcaaggccccagctggaggaaatggaaacaagaagaagagcggcaagaaggagaagaagtag

SEQ ID NO: 166553 - DNA, 2784 bp, synthetic construct
  misc_feature 1..2784: note = Description of Artificial Sequence: Synthetic coding sequence
  source 1..2784: mol_type = other DNA
atgcagagggcccgggaggccgagatgatgaagagccaggtgctcttccccttcctgctgagcctcttctgtggggccatcagccagcagatccgctacaccatccctgaggagctggccaacggcagccgggtgggcaagctggccaaggacctgggcctgtctgtgcgggagctgcccaccaggaagctgcgggtgtctgctgaggactacttcaacgtgtccctggagagcggggacctgctggtgaatggaagaattgaccgggagaagatctgtggcaggaagctggagtgtgccctggagtttgaaacagtggccgagaaccccatgaatgtgttccacgtggtggtggtgatccaggacatcaatgacaatgcccccaggtttgtggccaagggcatcgacctggagatctgtgagagcgccctgcccggggtgaagttcagcctggacagcgcccaggatgctgatgtggagggcaacagcctgaagctgtacaccatcaaccccaaccagtacttcagcctgagcaccaaggagagcccagatggcagcaagtaccctgtgctgctgctggagaagcccctggaccgggagcaccagagcagccacaggctcatcctgacagccatggatggaggagacccccccctgagcggcaccacccacatctggatccgggtgacagatgccaatgacaatgcccctgtgttcagccaggaggtgtacagagtgtccctgcaggagaatgtgccctggggcacctctgtgctgcgggtgatggccacagaccaggatgagggcatcaatgctgagatcacctacgccttcctgaacagccccatcagcaccagcctcttcaacctgaaccccaacacaggagacatcaccaccaacggcaccctggactttgaggagaccagccgctacgtgctgtctgtggaggccaaggatggaggagtgcacacagcccactgcaatgtgcagattgaaattgtggatgaaaatgacaatgcccctgaggtgaccttcatgtccttcagcaaccagatccctgaggacagcgacctgggcaccgtcatcgccctgatcaaggtgcgggacaaggacagcggccagaatggcatggtgacctgctacacccaggaggaggtgcccttcaagctggagagcaccagcaagaactactacaagctggtgattgctggggccctgaaccgggagcagacagctgactacaacgtgaccatcatcgccacagacaagggcaagccagccctgagcagcaggaccagcatcaccctgcacatcagtgacatcaatgacaatgcccctgtgttccaccaggccagctatgtggtgcacgtgtctgagaacaaccccccaggggccagcatcgcccaggtgtctgccagtgaccctgacctgggccccaacggccgggtgtcctacagcatcctggccagtgacctggagccccgggagctgctgtcctatgtgtctgtgagcccccagagcggcgtggtgtttgcccagagggcctttgaccacgagcagctgcgggcctttgagctgaccctgcaggcccgggaccagggcagccctgccctgagcgccaacgtgtccctgcgggtgctggtgggggacctgaatgacaatgccccccgggtgctgtacccagccctgggcccagatggcagcgccctgtttgacatggtgcccagggctgctgagcccggctacctggtgaccaaggtggtggccgtggatgctgacagcggccacaatgcctggctgagctaccacgtgctgcaggccagcgagcccggcctcttcagcctgggcctgaggactggagaggtgaggacagcccgggccctgggggacagagatgctgcccggcagaggctgctggtggccgtgagagatggcggccagccccccctgagcgccacagccaccctgcacctgatctttgctgacagcctgcaggaggtgctgcctgacctgagtgacaggcctgagcccagcgacccccagacagagctgcagttctacctggtggtggccctggccctgatctctgtgctcttcctgctggccgtcatcctggccatcgccctgcggctgcggcgcagcagcagcctggacacagagggctgcttccagacaggcctgtgcagcaagagcggccctggggtgccccccaaccacagcgagggcaccctgccctacagctacaacctgtgcatcgccagccacagcgccaagacagagttcaacagcctgaacctgaccccagagatggccccaccccaggacctgctgtgtgatgaccccagcatggtggtgtgtgccagcaatgaagaccacaagatcgcctatgaccccagcctgagcagccaccaggccccacccaacacagactggaggttcagccaggcccagaggcctggcaccagcggcagccagaatggagatgacaccggcacctggcccaacaaccagtttgacacagagatgctgcaggccatgatcctggccagcgccagcgaggccgcagatggcagcagcaccctgggcggcggggccggcaccatgggcctgagcgcccgctatggcccccagttcaccctgcagcacgtgcctgactaccggcagaatgtgtacatccctggcagcaatgccaccctgaccaatgctgctgggaagagagatggcaaggccccagctggaggaaatggaaacaagaagaagagcggcaagaaggagaagaagtag

SEQ ID NO: 166554 - DNA, 2796 bp, synthetic construct
  misc_feature 1..2796: note = Description of Artificial Sequence: Synthetic coding sequence
  source 1..2796: mol_type = other DNA
atgaaggccagcagcggccgctgtggcctggtgcgctggctgcaggtgctgctgcccttcctgctgagcctcttccctggggccctgcctgtgcagatccgctacagcatccctgaggagctggccaagaacagcgtggtgggcaacctggccaaggacctgggcctgtctgtgcgggacctgcctgccaggaagctgcgggtgtctgctgagaaggagtacttcaccgtgaaccctgagagcggggacctgctggtgtctgacagaattgaccgggagcagatctgtgggaagcagcccctgtgtgtgctggactttgacacagtggccgagaaccccctgaacatcttctacatcgccgtcatcgtgcaggacatcaatgacaacacccccctcttcaagcagaccaagatcaacctgaagatcggggagagcaccaagccaggcaccaccttccccctggaccctgccctggacagtgatgtgggccccaacagcctgcagcgctaccacctgaatgacaatgagtactttgacctggccgagaagcagaccccagatggcaggaagtacccagagctgatcctgaagcacagcctggaccgggaggagcacagcctgcaccagctggtgctgacagctgtggatggaggagaccccccccagagcggcaccacccagatccgcatcaaggtgacagatgccaatgacaacccccctgtgttcagccaggatgtgtacagagtgaccctgagagaagatgtgcccccaggcttctttgtgctgcaggtgacagccacagacagagatgagggcatcaatgctgagatcacctacagcttccacaacgtggatgagcaggtgaagcacttcttcaacctgaatgagaagacaggagagatcaccaccaaggatgacctggactttgaaattgccagcagctacaccctgagcattgaggccaaggaccccggggacctggccgcccactgcagcatccaggtggagatcctggatgacaatgactgtgcccctgaggtgattgtgacctctgtgtccacccccctgcctgaggacagccccccaggcaccgtcatcgccctgatcaagacccgggaccgggacagcggggagaatggagaggtgtactgccaggtgctgggcaatgccaagttcatcctgaagagcagcagcaagaactactacaagctggtgacagatggagccctggaccgggaggagatccctgagtacaacctgaccatcacagccacagatggcggcaagccacccctgagcagcagcatcatcgtgaccctgcacatcagtgatgtgaatgacaatgcccctgtgttccagcagaccagctacatggtgcacgtggccgagaacaaccccccaggggccagcatcgcccagatcagcgccagtgaccctgacctgggccccagcggccaggtgtcctacagcatcgtggccagtgacctgaagccccgggagatcctgtcctatgtgtctgtgtctgcccagagcggcgtggtgtttgcccagagggcctttgaccacgagcagctgcgggcctttgagctgaccctgcaggcccgggaccagggcagccctgccctgagcgccaacgtgtccctgcgggtgctggtgggggacctgaatgacaatgccccccgggtgctgtacccagccctgggcccagatggcagcgccctgtttgacatggtgcccagggctgctgagcccggctacctggtgaccaaggtggtggccgtggatgctgacagcggccacaatgcctggctgagctaccacgtgctgcaggccagcgagcccggcctcttcagcctgggcctgaggactggagaggtgaggacagcccgggccctgggggacagagatgctgcccggcagaggctgctggtggccgtgagagatggcggccagccccccctgagcgccacagccaccctgcacctgatctttgctgacagcctgcaggaggtgctgcctgacctgagtgaccggcgggagcccagcgacccccaggccaagctgcagttctacctggtggtggccctggccctgatctctgtgctcttcttcctggccgtcatcctggccatcagcctgcggctgcggctgagcagcagaagtgatgcctgggactgcttccagcccggcctgagcagcaagccaggccctggggtgctgcccaactacagcgagggcaccctgccctacagctacaacctgtgtgtggccagccagagcgccaagacagagttcaacttcctgaacatcaccccagagctggtgcctgcccaggacctggtgtgtgacaatgcctcctgggagcagaacaccaaccacggggccgccggcgtgccctttgccagtgacaccatcctgaagcaggccccacccaacacagactggaggttcagccaggcccagaggcctggcaccagcggcagccagaatggagatgacaccggcacctggcccaacaaccagtttgacacagagatgctgcaggccatgatcctggccagcgccagcgaggccgcagatggcagcagcaccctgggcggcggggccggcaccatgggcctgagcgcccgctatggcccccagttcaccctgcagcacgtgcctgactaccggcagaatgtgtacatccctggcagcaatgccaccctgaccaatgctgctgggaagagagatggcaaggccccagctggaggaaatggaaacaagaagaagagcggcaagaaggagaagaagtag

SEQ ID NO: 166555 - DNA, 2772 bp, synthetic construct
  misc_feature 1..2772: note = Description of Artificial Sequence: Synthetic coding sequence
  source 1..2772: mol_type = other DNA
atgggcagcggggccggggagctgggccgggcagagcggctgcctgtgctcttcctgttcctgctgagcctcttctgcccagccctgtgtgagcagatccgctaccgcatccctgaggagatgcccaagggctctgtggtgggcaacctggccacagacctgggcttctctgtgcaggagctgcccaccaggaagctgcgggtgagcagcgagaagccctacttcaccgtgtctgctgagagcggggagctgctggtgagcagccggctggaccgggaggagatctgtgggaagaagccagcctgtgccctggagtttgaggccgtggccgagaaccccctgaacttctaccacgtgaatgtggagattgaggacatcaatgaccacacccccaagttcacccagaacagctttgagctgcagatcagcgagagcgcccagcccggcacccgcttcatcctgggcagcgcccatgatgctgacatcggcagcaacaccctgcagaactaccagctgagccccagcgaccacttcagcctcatcaacaaggagaagagtgatggcagcaagtacccagagatggtgctgaagacccccctggaccgggagaagcagaagagctaccacctgaccctgacagccctggactttggagccccacccctgagcagcacagcccagatccacgtgctggtgacagatgccaatgacaatgcccctgtgttcagccaggatgtgtacagagtgtccctgtctgaaaatgtgtacccaggcaccaccgtgctgcaggtgacagccacagaccaggatgagggcgtgaatgctgagatcaccttctccttcagcgaggccagccagatcacccagtttgacctgaacagcaacacaggagagatcaccgtgctgaacaccctggactttgaggaggtgaaggagtacagcatcgtgctggaggccagagatggcggcggcatgattgcccagtgcaccgtggaggtggaggtgattgatgaaaatgacaatgcccctgaggtgatcttccagagcctgcccaacctgatcatggaggatgctgagctgggcacccacatcgccctgctgaaggtgcgggacaaggacagccgccacaatggagaggtgacctgcaagctggagggagatgtgcccttcaagatcctgaccagcagcaggaacacctacaagctggtgacagatgctgtgctggaccgggagcagaaccctgagtacaacatcaccgtgacagccacagaccggggcaagccacccctgagcagcagcagcagcatcaccctgcacatcggagatgtgaatgacaatgcccctgtgttcagccagagcagctacatcgtgcacgtggccgagaacaaccccccaggggccagcatcagccaggtgcgggccagtgaccctgacctgggccccaacggccaggtgtcctactgcatcatggccagtgacctggagcagcgggagctgagcagctatgtgtccatctctgctgagagcggcgtggtgtttgcccagagggcctttgaccacgagcagctgcgggcctttgagctgaccctgcaggcccgggaccagggcagccctgccctgagcgccaacgtgtccctgcgggtgctggtggatgacagaaatgacaatgccccccgggtgctgtacccagccctgggcccagatggcagcgccctgtttgacatggtgccccatgctgctgagcccggctacctggtgaccaaggtggtggccgtggatgctgacagcggccacaatgcctggctgagctaccacgtgctgcaggccagcgagcccggcctcttcagcctgggcctgaggactggagaggtgaggacagcccgggccctgggggacagagatgctgtgcggcagaggctgctggtggccgtgagagatggcggccagccccccctgagcgccacagccaccctgcacctggtgtttgctgacagcctgcaggaggtgctgcctgacatcacagacagaccagaccccagcgacctgcaggccgagctgcagttctacctggtggtggccctggccctgatctctgtgctcttcctggtggccatgatcctggccatcgccctgcggctgcggcgcagcagcagccctgcctcctggagctgcttccagcccggcctgtgtgtgaagtctgagagcgtggtgccccccaactacagcgagggcaccctgccctacagctacaacctgtgtgtggcccacacaggcaagacagagttcaacttcctgaagtgcagcgagcagctgagcagcggccaggacatcctgtgtggggacagcagcggggccctcttccccctgtgcaacagcagcgagctgaccagccaccagcaggccccacccaacacagactggaggttcagccaggcccagaggcctggcaccagcggcagccagaatggagatgacaccggcacctggcccaacaaccagtttgacacagagatgctgcaggccatgatcctggccagcgccagcgaggccgcagatggcagcagcaccctgggcggcggggccggcaccatgggcctgagcgcccgctatggcccccagttcaccctgcagcacgtgcctgactaccggcagaatgtgtacatccctggcagcaatgccaccctgaccaatgctgctgggaagagagatggcaaggccccagctggaggaaatggaaacaagaagaagagcggcaagaaggagaagaagtag

SEQ ID NO: 166556 - DNA, 2793 bp, synthetic construct
  misc_feature 1..2793: note = Description of Artificial Sequence: Synthetic coding sequence
  source 1..2793: mol_type = other DNA
atgggcggcagctgtgcccagaggagaagagctggcccccggcaggtgctcttccccctgctgctgcccctcttctaccccaccctgtctgagcccatccgctacagcatccctgaggagctggccaagggctctgtggtgggcaacctggccaaggacctgggcctgtctgtgctggatgtgtctgccaggaagctgcgggtgtctgctgagaagctgcacttctctgtggatgctgagagcggggacctgctggtgaagaacagaattgaccgggagcagatctgcaaggagcggcggcgctgtgagctgcagctggaggccgtggtggagaaccccctgaacatcttccacgtgattgtggtgattgaagatgtgaatgaccacgccccccagtttgacaagaaggagatccacctggagatctttgaaagtgccagcgctggcacccggctgagcctggaccctgccacagatcctgacatcaacatcaacagcatcaaggactacaagatcaacagcaacccctacttcagcctgatggtgcgggtgaacagtgatggcggcaagtacccagagctgagcctggagaagctgctggaccgggaggagcagaggagccacagcctcatcctgacagccctggatggaggagacccccccaggtctgccacagcccacatcgagatctctgtgaaggacaccaatgacaacccccctgtgttcagcagagatgagtaccgcatcagcctgtctgagaacctgcccccaggcagccctgtgctgcaggtgacagccacagaccaggatgagggcgtgaatgctgagatcaactactacttccgcagcacagcccagagcaccaagcacatgttcagcctggatgagaagacaggcatgatcaagaacaaccagagctttgattttgaagatgtggagcgctacaccatggaggtggaggccaaggatggcggcggcctgagcacccagtgcaaggtgatcatcgagatcctggatgaaaatgacaacagccctgagatcatcatcaccagcctgagtgaccagatcctggagaacagccccccaggcatggtggtggccctcttcaagacccgggacctggactttggaggaaatggagaggtgcgctgcaacatcgagacagacatccccttcaagatctacagcagcagcaacaactactacaagctggtgacagatggagccctggaccgggagcagaccccagagtacaacgtgaccatcgtggccacagaccggggcaagccacccctgagcagcagccgcagcatcaccctgtatgtggccgacatcaatgacaatgcccctgtgtttgaccagaccagctatgtggtgcacgtggccgagaacaaccccccaggggccagcatcgcccaggtgtctgccagtgaccctgacctgggcctgaatggccacatctcctacagcatcgtggccagtgacctggagcccctggccgtgtcctcctatgtgtctgtgtctgcccagagcggcgtggtgtttgcccagagggcctttgaccacgagcagctgcgggcctttgccctgaccctgcaggcccgggaccacggcagccccaccctgagcgccaacgtgtccctgcgggtgctggtgggggacagaaatgacaatgccccccgggtgctgtacccagccctgggcccagatggcagcgccttctttgacatggtgcccaggtctgctgagcccggctacctggtgaccaaggtggtggccgtggatgctgacagcggccacaatgcctggctgagctaccacgtgctgcaggccagcgagcccggcctcttcagcctgggcctgaggactggagaggtgaggacagcccgggccctgggggacagagatgctgcccggcagaggctgctggtggccgtgagagatggcggccagccccccctgagcgccacagccaccctgcacctggtgtttgctgacaacctgcaggagatcctgcctgacctgagtgacaggcctgtgctgagtgacccccaggccgagctgcagttctacctggtggtggccctggccctgatctctgtgctcttcctgctggccgtcatcctggccatcgccctgcggctgcggcgcagcctgagccctgccacctgggactgcttccaccctggcctgtgtgtgaagagcggccctgtggtgccccccaactacagcgagggcaccctgccctacagctacaacctgtgcatcgcccacacaggcaccaaggagttcaacttcctgaagtgcagcgtgcccctgcacagcaatgaagacatggtgtgcagcgtgtcccctggggccctgatccccccccacggcggggaggacctgaccagccaccctgagaccctgaccagccaggccccacccaacacagactggaggttcagccaggcccagaggcctggcaccagcggcagccagaatggagatgacaccggcacctggcccaacaaccagtttgacacagagatgctgcaggccatgatcctggccagcgccagcgaggccgcagatggcagcagcaccctgggcggcggggccggcaccatgggcctgagcgcccgctatggcccccagttcaccctgcagcacgtgcctgactaccggcagaatgtgtacatccctggcagcaatgccaccctgaccaatgctgctgggaagagagatggcaaggccccagctggaggaaatggaaacaagaagaagagcggcaagaaggagaagaagtag

SEQ ID NO: 166557 - DNA, 2790 bp, synthetic construct
  misc_feature 1..2790: note = Description of Artificial Sequence: Synthetic coding sequence
  source 1..2790: mol_type = other DNA
atgggcggcagctgtgcccagaggagaagagctggcccccggcaggtgctcttccccctgctgctgcccctcttctaccccaccctgtgtgagcccatccgctacagcatccctgaggagctggccaagggctctgtggtgggcaacctggccaaggacctgggcctgtctgtgctggatgtgtctgcccgggagctgcgggtgtctgctgagaagctgcacttctctgtggatgcccagagcggggacctgctggtgaaggacagaattgaccgggagcagatctgcaaggagcggcggcgctgtgagctgcagctggaggccgtggtggagaaccccctgaacatcttccacgtgattgtggtgattgaagatgtgaatgaccacgccccccagttcaggaaggatgagatcaacctggagatcagcgagagcgtgtccctgggcatgggcaccatcctggagagcgctgaggaccctgacatctccatgaacagcctgagcaagtaccagctgagccccaatgagtacttcagcctggtggagaaggacaacccagatggcggcaagtacccagagctggtgctgcagaagaccctggaccgggagacccagagcgcccaccacctggtgctgacagccctggatggaggagacccccccaggtctggaacagcccagatccgcatcctggtgattgatgccaatgacaacccccctgtgttcagccaggatgtgtacagagtgtccctgagagaagatgtgcccccaggcaccagcatcctgcgggtgaaggccacagaccaggatgagggcatcaacagcgagatcacctacagcttcttcggcgtggccgacaaggcccagcacgtgttcagcctggactacaccaccggcaacatcctgacccagcagcccctggactttgaggaggtggagcgctacaccatcaacatcgaggccaaggaccggggcagcctgagcacccgctgcaaggtgattgtggaggtggtggatgaaaatgacaacagccctgagatcatcatcaccagcctgagtgaccagatcatggaggacagccccccaggagtggtggtggccctcttcaagacccgggaccaggacagcggggagaatggagaggtgcgctgcagcctgagcagaggagtgcccttcaagatccacagcagcagcaacaactactacaagctggtgacagatgaggccctggaccgggagcagaccccagagtacaacgtgaccatcgccgccacagaccggggcaagccacccctgagcagcagcaagaccatcaccctgcacatcacagatgtgaatgacaatgcccctgtgtttggccagagcgcctacctggtgcacgtgcctgagaacaaccagcccggggccagcatcgcccaggtgtctgccagtgaccctgactttggcctgaatggccgggtgtcctacagcctcatcgccagtgacctggagagcaggaccctgagcagctatgtgtctgtgtctgcccagagcggcgtggtgtttgcccagagggcctttgaccacgagcagctgcggacctttgagctgaccctgcaggcccgggaccagggcagccctgccctgagcgccaacgtgtccctgcgggtgctggtgggggacagaaatgacaatgccccccgggtgctgtacccagccctgggcccagatggcagcgccctgtttgacacagtgcccagggctgcccagcccggctacctggtgaccaaggtggtggccgtggatgctgacagcggccacaatgcctggctgagctaccacgtggtgcaggccagcgagcccggcctcttcagcctgggcctgaggactggagaggtgaggatggtgcgggccctgggggacaaggacagcgtgcggcagaggctgctggtggccgtgagagatggcggccagccccccctgagcgccacagccaccctgcacctggtgtttgctgacagcctgcaggaggtgctgcctgacttcagtgaccaccccacccccagcgacagccaggccgagatgcagttctacctggtggtggccctggccctgatctctgtgctcttcctgctggccgtcatcctggccatcgccctgcggctgcggcagagcttcagccccacagctggggactgctttgaatctgtgctgtgcagcaagagcggccctgtgggcccccccaactacagcgagggcaccctgccctatgcctacaacttctgtgtgcctggggaccagatgaaccctgagttcaacttcttcacctctgtggaccactgcccagccacccaggacaacctgaacaaggacagcatgctgctggccagcatcctgaccccatctgtggaggccgacaagaagatcctgaagcagcaggccccacccaacacagactggaggttcagccaggcccagaggcctggcaccagcggcagccagaatggagatgacaccggcacctggcccaacaaccagtttgacacagagatgctgcaggccatgatcctggccagcgccagcgaggccgcagatggcagcagcaccctgggcggcggggccggcaccatgggcctgagcgcccgctatggcccccagttcaccctgcagcacgtgcctgactaccggcagaatgtgtacatccctggcagcaatgccaccctgaccaatgctgctgggaagagagatggcaaggccccagctggaggaaatggaaacaagaagaagagcggcaagaaggagaagaagtag

SEQ ID NO: 166558 - DNA, 2805 bp, synthetic construct
  misc_feature 1..2805: note = Description of Artificial Sequence: Synthetic coding sequence
  source 1..2805: mol_type = other DNA
atggtgcctgaggcctggaggagcggcctggtgtccacaggccgggtggtgggcgtgctgctgctgctgggcgccctgaacaaggccagcaccgtcatccactatgagatccctgaggagcgggagaagggctttgctgtgggcaatgtggtggccaacctgggcctggacctgggcagcctgagcgcccggcgcttccgggtggtgtctggggccagccgccgcttctttgaggtgaaccgggagactggagagatgtttgtgaatgaccggctggaccgggaggagctgtgtggcaccctgcccagctgcaccgtgaccctggagctggtggtggagaaccccctggagctgttctctgtggaggtggtgatccaggacatcaatgacaacaacccagccttccccacccaggagatgaagctggagatcagcgaggccgtggcccctggcacccgcttccccctggagagcgcccatgaccctgatgtgggcagcaacagcctgcagacctatgagctgagcagaaatgagtactttgccctgcgggtgcagacccgggaggacagcaccaagtatgcagagctggtgctggagcgggccctggaccgggagcgggagcccagcctgcagctggtgctgacagccctggatggcggcaccccagccctgagcgccagcctgcccatccacatcaaggtgctggatgccaatgacaatgcccctgtgttcaaccagagcctgtaccgggcccgggtgctggaggatgcccccagcggcaccagggtggtgcaggtgctggccacagacctggatgagggccccaacggggagatcatctacagctttggcagccacaacagagctggggtgcggcagctgtttgccctggacctggtgacaggcatgctgaccatcaagggccgcctggactttgaggacaccaagctgcacgagatctacatccaggccaaggacaagggggccaaccctgagggcgcccactgcaaggtgctggtggaggtggtggatgtgaatgacaatgcccctgagatcaccgtgacctctgtgtacagccctgtgcctgaagatgcccccctgggcaccgtgattgccctgctgtctgtgacagacctggatgctggagaaaatggcctggtgacctgtgaggtgcccccaggcctgcccttcagcctgaccagcagcctgaagaactacttcaccctgaagaccagcgctgacctggaccgggagaccgtgcctgagtacaacctgagcatcacagccagagatgctggcacccccagcctgagcgccctgaccatcgtgcgggtgcaggtgtctgacatcaatgacaaccccccccagagcagccagagcagctatgatgtgtacatcgaggagaacaacctgcccggggcccccatcctgaacctgtctgtgtgggaccctgatgccccccagaatgcccggctgtccttcttcctgctggagcagggcgctgagaccggcctggtgggccgctacttcaccatcaacagagacaatggcatcgtgagcagcctggtgcccctggactatgaggaccggcgggagtttgagctgacagcccacatcagtgatggcggcacccctgtgctggccaccaacatctctgtgaacatctttgtgacagacagaaatgacaatgccccccaggtgctgtaccccaggcctgggggcagctctgtggagatgctgccccggggcaccagcgctggccacctggtgtcccgggtggtgggctgggatgctgatgctggccacaatgcctggctgagctacagcctgctgggcagccccaaccagagcctgtttgccatcggcctgcacacaggccagatcagcacagcccggcctgtgcaggacacagacagcccccggcagaccctgactgtgctgatcaaggacaatggagagcccagcctgagcaccacagccaccctgactgtgtctgtgacagaggacagccctgaggcccgggcagagttccccagcggcagcgccccccgggagcagaagaagaacctgaccttctacctgctgctgagcctcatcctggtgtctgtgggctttgtggtgacagtgtttggagtcatcatcttcaaggtgtacaagtggaagcagagccgggacctgtaccgggcccctgtgagcagcctgtaccgcaccccaggccccagcctgcacgcagatgctgtgcggggcggcctgatgagcccccacctgtaccaccaggtgtacctgaccacagacagcagaagaagtgaccccctgctgaagaagccaggggccgccagccccctggccagccggcagaacaccctgcggagctgtgaccccgtcttctaccggcaggtgctgggcgctgagagcgcccctcctggccagcaggccccacccaacacagactggaggttcagccaggcccagaggcctggcaccagcggcagccagaatggagatgacaccggcacctggcccaacaaccagtttgacacagagatgctgcaggccatgatcctggccagcgccagcgaggccgcagatggcagcagcaccctgggcggcggggccggcaccatgggcctgagcgcccgctatggcccccagttcaccctgcagcacgtgcctgactaccggcagaatgtgtacatccctggcagcaatgccaccctgaccaatgctgctgggaagagagatggcaaggccccagctggaggaaatggaaacaagaagaagagcggcaagaaggagaagaagtag

SEQ ID NO: 166559 - DNA, 2817 bp, synthetic construct
  misc_feature 1..2817: note = Description of Artificial Sequence: Synthetic coding sequence
  source 1..2817: mol_type = other DNA
atgctgaggaaggtgcgctcctggacagagatctggcgctgggccaccctgctcttcctgttctaccacctgggctacgtgtgtggccagatccgctaccctgtgcctgaggagagccaggagggcacctttgtgggcaatgtggcccaggacttcctgctggacacagacagcctgagcgcccggcggctgcaggtggccggggaggtgaaccagaggcacttccgggtggacctggacagcggggccctgctgatcaagaaccccatcgaccgggaggccctgtgtggcctgagcgccagctgcatcgtgcccctggagtttgtgacagagggccccctggagatgtacagagctgaggtggagatcgtggatgtgaatgaccacgccccccgcttcccccggcagcagctggacctggagatcggggaggccgcccctcctggccagcgcttccccctggagaaggcccaggatgctgatgtgggcagcaacagcatcagcagctaccgcctgagcagcaatgagcactttgccctggatgtgaagaagagaagtgatggcagcctggtgcctgagctgctgctggagaagcccctggaccgggagaagcagagcgactaccgcctggtgctgacagctgtggatggcggcaacccccccaggtctggaacagctgagctgcgggtgtctgtgctggatgtgaatgacaatgccccagccttccagcagagcagctaccgcatctctgtgctggagagcgccccagctggcatggtgctgatccagctgaatgccagtgaccctgacctgggccccagcggaaatgtgaccttctacttcagcggccacaccccagacagagtgaggaacctcttcagcctgcaccccaccaccgggaagctgaccctgctgggccccctggactttgaaagtgagaactactatgaatttgatgtgcgggccagagatggcggcagccctgccatggagcagcactgcagcctgcgggtggacctgctggatgtgaatgacaatgccccctacatcaccgtgaccagcgagctgggcaccctgcctgagagcgctgagcccggcaccgtggtggccctgatctctgtgcaggaccctgattctggcagcaatggagatgtgtccctgcgcatcccagaccacctgccctttgccctgaagagcgccttcaggaaccagttcagcctggtgacagctggccccctggaccgggaggccaagagcagctatgacatcatggtgacagccagtgatgctggcaacccccccctgagcacccacaggaccatcttcctgaacatcagtgatgtgaatgacaacccccccagcttcttccagaggagccatgaggtgtttgtgcctgagaacaacagacctggggacctgctgtgcagcctggccgccagtgaccctgacagcggcctgaatgccctgatctcctacagcctgctggagcccaggaacagagatgtgtctgccagcagcttcatcagcctgaacccccagacaggagctgtgcacgccaccaggagctttgattatgagcagacccagaccctgcagtttgaggtgcaggcccgggaccggggcaacccccccctgagcagcacagtgacagtgcggctgtttgtgctggacctgaatgacaatgccccagctgtgctgcggccccgggcccggcccggcagcctgtgcccccaggccctgcccccatctgtgggcgccggccacctgatcaccaaggtgacagctgtggacctggacagcggctacaatgcctgggtgtcctaccagctgctggaggccccagaccccagcctgtttgctgtgagccgctatgctggggaggtgaggacagctgtgcccatcccagctgacctgcccccccagaagctggtgattgtggtgaaggacagcggcagcccccccctgagcacctctgtgaccctgctggtgtccctggaggaggacacccaccctgtggtgcctgacctgcgggagagcagcgccccccgggagggggagagccggctgaccctgtacctggccgtgtccctggtggccatctgctttgtgtcctttggcagctttgtggccctgctgagcaagtgcctgcggggagctgcctgtggggtgacctgcttccctgctggcacctgtgcctgcctgaccaggagcagaagaagagagggcctgccccccagcaatggcatcctgcgcatccagctgggcagtgatgaccccatcaagtttgtggatgtgggcggccacagccacggctgcacccccctggccagcgcccccaccaggagtgacagcttcatgatggtgaagagccccagcgcccccatggccggggagcctgtgcggcccagctgccccccaagtgacctgctgtatggcctggagcaggccccacccaacacagactggaggttcagccaggcccagaggcctggcaccagcggcagccagaatggagatgacaccggcacctggcccaacaaccagtttgacacagagatgctgcaggccatgatcctggccagcgccagcgaggccgcagatggcagcagcaccctgggcggcggggccggcaccatgggcctgagcgcccgctatggcccccagttcaccctgcagcacgtgcctgactaccggcagaatgtgtacatccctggcagcaatgccaccctgaccaatgctgctgggaagagagatggcaaggccccagctggaggaaatggaaacaagaagaagagcggcaagaaggagaagaagtag

SEQ ID NO: 166560 - DNA, 2835 bp, synthetic construct
  misc_feature 1..2835: note = Description of Artificial Sequence: Synthetic coding sequence
  source 1..2835: mol_type = other DNA
atgggccccaagaccctgccccagctggccggcaagtggcaggtgctgtgcatgctgagcctgtgctgctggggctgggtgtctggccagctgcgctacagcgtggtggaggagagcgagcccggcaccctggtgggcaatgtggcccaggacctgggcctgaagatgacagacctgctgagccggcggctgcagctgggcagcgaggagaatggccgctacttcagcctgagcctgatgtctggggccctggccgtgaaccagaagattgaccgggagagcctgtgtggggccagcaccagctgcctgctgcctgtgcaggtggtgacagagcaccccctggagctgatccgggtggaggtggagatcctggacctgaatgacaacagccccagctttgccaccccagagcgggagatgaggatcagcgagagcgctgccagcggggcccgcttccccctggacagcgcccaggaccctgatgtgggcaccaacacagtgtccttctacaccctgagccccaacagccacttcagcctgaatgtgaagaccctgaaggatggcaagcccttccctgagctggtgctggagcagcagctggaccgggaggcccaggcccggcaccagctggtgctgacagctgtggatggcggcaccccagcccggagcggcaccaccctcatctctgtgattgtgctggacatcaatgacaatgcccccaccttccagagctctgtgctgcgggtgggcatcccagaaaatgcccccatcggcaccctgctgctgcggctgaatgccacagatcctgatgagggcaccaacggccagctggactacagctttggagaccacaccagcgaggccgtgaggaacctgtttggcctggaccccagcagcggggccatccacgtgctgggccccatcgactttgaggagagccgcttctatgagatccacgcccgggcccgggaccagggccagcctgccatggagggccactgcgtcatccaggtggatgtgggagatgtgaatgacaatgcccctgaggtgctgctggccagcctggccaaccctgtgctggagagcacccctgtgggcaccgtggtgggcctcttcaacgtgcgggaccgggacagcggcagaaatggagaggtgtccctggacatcagcccagacctgcccttccagatcaagcccagcgagaaccactacagcctgctgaccagccagcccctggaccgggaggccaccagccactacatcatcgagctgctggccagtgatgctggcagccccagcctgcacaagcacctgaccatccggctgaacatcagtgatgtgaatgacaatgccccccgcttcaaccagcagctgtacacagcctacatcctggagaaccggcccccaggcagcctgctgtgcaccgtggccgccagtgaccctgacacaggagacaatgcccggctgacctacagcatcgtgggcaaccaggtgcagggcgccccagccagcagctttgtgtatgtgaacccagaagatggccgcatctttgcccagaggacctttgattatgagctgctgcagatgctgcagatcgtggtgggcgtgcgggacagcggcagcccccccctgcacgccaacaccagcctgcacgtgtttgtgctggatgaaaatgacaatgccccagctgtgctgcaccccaggccagactgggagcacagcgccccccagaggctgcccaggtctgcccctcctggcagcctggtgaccaaggtgacagctgtggatgctgatgctggccacaatgcctggctgagctacagcctgctgccccagagcacagcccctggcctcttcctggtgtccacccacactggagaggtgaggacagcccgggccctgctggaggatgacagcgacacccagcaggtggtggtgctggtgcgggacaatggagaccccagcctgagcagcacagccaccgtgctgctggtgctggaggatgaagatcctgaggagatgcccaagagcagtgacttcctgatccaccccccagagaggagtgacctgaccctgtacctgattgtggccctggccaccgtgtccctgctgagcctggtgaccttcaccttcctgagcgccaagtgcctgcagggcaatgctgatggagatggcggcggcggccagtgctgccggcggcaggacagccccagcccagacttctacaagcagagcagccccaacctgcaggtgtccagtgatggcaccctgaagtacatggaggtgaccctgcggcccacagacagccagagccactgctaccgcacctgcttcagccctgccagtgatggcagtgacttcaccttcctgcggcccctgtctgtgcagcagcccacagccctggccctggagccagatgccatccgcagccgcagcaacaccctgcgggagaggagccagcaggccccacccaacacagactggaggttcagccaggcccagaggcctggcaccagcggcagccagaatggagatgacaccggcacctggcccaacaaccagtttgacacagagatgctgcaggccatgatcctggccagcgccagcgaggccgcagatggcagcagcaccctgggcggcggggccggcaccatgggcctgagcgcccgctatggcccccagttcaccctgcagcacgtgcctgactaccggcagaatgtgtacatccctggcagcaatgccaccctgaccaatgctgctgggaagagagatggcaaggccccagctggaggaaatggaaacaagaagaagagcggcaagaaggagaagaagtag

SEQ ID NO: 166561 - DNA, 5868 bp, synthetic construct
  misc_feature 1..5868: note = Description of Artificial Sequence: Synthetic coding sequence
  source 1..5868: mol_type = other DNA
atgttccggcagttctacctgtggacctgcctggccagcggcatcatcctgggcagcctgtttgagatctgcctgggccagtatgatgatgactgcaagctggcccggggcggccccccagccaccatcgtggccattgatgaggagagcagaaatggcaccatcctggtggacaacatgctgatcaagggcacagctgggggccctgaccccaccatcgagctgagcctgaaggacaacgtggactactgggtgctgatggaccctgtgaagcagatgctgttcctgaacagcacaggccgggtgctggaccgggacccccccatgaacatccacagcatcgtggtgcaggtgcagtgcatcaacaagaaggtgggcaccatcatctaccacgaggtgagaattgtggtgcgggacagaaatgacaacagccccaccttcaagcatgagagctactatgccaccgtgaatgagctgacccctgtgggcaccaccatcttcaccggcttcagcggggacaacggggccacagacattgatgatggccccaacggccagattgaatatgtgatccagtacaacccagatgaccccaccagcaatgacacctttgagatccccctgatgctgactggaaacatcgtgctgaggaagaggctgaactatgaggacaagacccgctactttgtgatcatccaggccaatgaccgggcccagaacctgaatgaaagaaggaccaccaccaccaccctgactgtggatgtgctggatggagatgacctgggccccatgttcctgccctgtgtgctggtgcccaacacccgggactgccggcccctgacctaccaggccgccatccctgagctgcggaccccagaggagctgaaccccatcatcgtgaccccacccatccaggccatcgaccaggacaggaacatccagcccccaagtgaccggcccggcatcctgtacagcatcctggtgggcaccccagaggactacccccgcttcttccacatgcaccccaggacagctgagctgagcctgctggagcctgtgaacagagacttccaccagaagtttgacctggtgatcaaggccgagcaggacaatggccaccccctgcctgcctttgctggcctgcacatcgagatcctggatgagaacaaccagagcccctacttcaccatgcccagctaccagggctacatcctggagagcgcccctgtgggcgccaccatcagtgacagcctgaacctgaccagccccctgcgcatcgtggccctggacaaggacatcgaggacaccaaggaccctgagctgcacctgttcctgaatgactacaccagcgtcttcaccgtgacccagacaggcatcacccgctacctgaccctgctgcagcctgtggaccgggaggagcagcagacctacaccttcagcatcacagcctttgatggagtgcaggagagcgagcccgtcatcgtgaacatccaggtgatggatgccaatgacaacacccccaccttccctgagatctcctatgatgtgtatgtgtacacagacatgaggcctggggacagcgtcatccagctgacagctgtggatgctgatgagggcagcaatggagagatcacctatgagatcctggtgggcgcccagggcgacttcatcatcaacaagaccaccggcctcatcaccatcgcccctggggtggagatgattgtgggccgcacctacgccctgactgtgcaggccgctgacaatgcccccccagctgagaggagaaattccatctgcaccgtgtacatcgaggtgctgccccccaacaaccagagccccccacgcttcccccagctgatgtacagcctggagatcagcgaggccatgagggtgggcgctgtgctgctgaacctgcaggccacagaccgggagggggacagcatcacctacgccattgaaaatggagacccccagagggtcttcaacctgtctgagaccaccggcatcctgaccctgggcaaggccctggaccgggagagcacagaccgctacatcctgatcatcacagccagtgatggccgcccagatggcaccagcacagccaccgtgaacatcgtggtgacagatgtgaatgacaatgcccctgtgtttgacccctacctgcccaggaacctgtctgtggtggaggaggaggccaatgcctttgtgggccaggtgaaggccacagatcctgatgctggcatcaatggccaggtgcactacagcctgggcaacttcaacaacctcttccgcatcaccagcaatggcagcatctacacagctgtgaagctgaaccgggaggtgcgggactactatgagctggtggtggtggccacagatggagctgtgcaccccaggcacagcaccctgaccctggccatcaaggtgctggacattgatgacaacagccctgtgttcaccaacagcacctacacagtgctggtggaggagaacctgcctgctggcaccaccatcctgcagatcgaggccaaggatgtggacctgggcgccaacgtgtcctaccgcatccgcagccctgaggtgaagcacttctttgccctgcaccccttcaccggggagctgagcctgctgcggagcctggactatgaggccttcccagaccaggaggccagcatcaccttcctggtggaggcctttgacatctacggcaccatgcctcctggcatcgccaccgtgacagtgattgtgaaggacatgaatgactacccacctgtgttcagcaagaggatctacaagggcatggtggccccagatgctgtgaagggcacccccatcaccaccgtgtatgcagaagatgctgaccccccaggcctgcctgccagccgggtgcgctacagagtggatgatgtgcagttcccctacccagccagcatctttgaggtggaggaggacagcggccgggtcatcaccagggtgaacctgaatgaggagcccaccaccatcttcaagctggtggtggtggcctttgatgatggagagcctgtgatgagcagcagcgccaccgtgaagatcctggtgctgcaccctggagagatcccccgcttcacccaggaggagtaccggcccccacctgtgtctgagctggccaccaagggcaccatggtgggcgtcatctctgctgctgccatcaaccagagcatcgtgtacagcatcgtgtctggaaatgaggaggacaccttcggcatcaacaacatcaccggggtcatctacgtgaatggccccctggactatgagaccaggaccagctatgtgctgcgggtgcaggccgacagcctggaggtggtgctggccaacctgcgggtgcccagcaagagcaacacagccaaggtgtacatcgagatccaggatgagaacaaccacccccctgtgttccagaagaagttctacatcggcggcgtgtctgaagatgccaggatgttcacctctgtgctgcgggtgaaggccacagacaaggacaccggcaactacagcgtgatggcctaccgcctcatcatcccccccatcaaggagggcaaggagggctttgtggtggagacctacacaggcctcatcaagacagccatgctgttccacaacatgaggaggagctacttcaagttccaggtgattgccacagatgattatggcaagggcctgagcggcaaggcagatgtgctggtgtctgtggtgaaccagctggacatgcaggtgattgtgtccaatgtgccccccaccctggtggagaagaagattgaggacctgacagagatcctggaccgctacgtgcaggagcagatccctggggccaaggtggtggtggagagcattggagccaggagacatggagatgccttcagcctggaggactacaccaagtgtgacctgactgtgtatgccatcgacccccagaccaacagagccatcgacagaaatgagctgttcaagttcctggatggcaagctgctggacatcaacaaggacttccagccctactatggagagggcggccgcatcctggagatccgcaccccagaggccgtgaccagcatcaagaagagaggagagagcctgggctacacagaaggagccctgctggccctggccttcatcatcatcctgtgctgcatcccagccatcctggtggtgctggtgtcctaccggcagttcaaggtgcggcaggccgagtgcaccaagacagcccgcatccaggccgccctgcctgctgccaagccagctgtgcctgccccagcccctgtggccgcccctcctcctcctcctcctcctcctcctggggcccacctgtatgaggagctgggggacagcagcatcctcttcctgctgtaccacttccagcagagccggggcaacaacagcgtgtctgaggacaggaagcaccagcaggtggtgatgcccttcagcagcaacaccatcgaggcccacaagagcgcccacgtggatggcagcctgaagagcaacaagctgaagagcgccaggaagttcaccttcctgagtgatgaagatgacctgagcgcccacaaccccctgtacaaggagaacatcagccaggtgtccaccaacagcgacatcagccagaggacagactttgtggaccccttcagccccaagatccaggccaagagcaagagcctgcggggcccccgggagaagatccagaggctgtggagccagagcgtgtccctgccccggcggctgatgaggaaggtgcccaacagacctgagatcatcgacctgcagcagtggcagggcacccggcagaaggccgagaatgaaaatacaggcatctgcaccaacaagaggggcagcagcaaccccctgctgaccacagaggaggccaacctgacagagaaggaggagatccggcagggcgagaccctgatgattgagggcacagagcagctgaagagcctgagcagtgacagcagcttctgcttcccccggccccacttctccttcagcaccctgcccaccgtgtccaggacagtggagctgaagtctgagcccaacgtcatcagcagccctgcagaatgttccctggagctgagccccagccggccctgtgtgctgcacagcagcctgagccggcgggagacccccatctgcatgctgcccatcgagacagagaggaacatctttgagaactttgcccacccccccaacatcagccccagcgcctgccccctgcccccacctccacccatcagcccccccagccccccaccagccccagcccccctggcccctcctccagacatcagccccttcagcctcttctgccccccacccagccccccatccatccccctgcccctgcccccacccaccttcttccccctgtctgtgtccaccagcggcccccccaccccacccctgctgccccccttccccacccccctgcccccacctccacccagcatcccctgccccccaccacccagcgccagcttcctgagcacagaatgtgtgtgcatcaccggggtgaagtgcaccaccaacctgatgcctgctgagaagatcaagagctccatgacccagctgagcaccaccaccgtgtgcaagacagacccccagcgggagcccaagggcatcctgcggcacgtgaagaacctggccgagctggagaagtctgtggccaacatgtacagccagatcgagaagaactacctgcggaccaacgtgtctgagctgcagaccatgtgccccagcgaggtgaccaacatggagatcaccagcgagcagaacaagggcagcctgaacaacatcgtggagggcacagagaagcagagccacagccagagcaccagcctgtag

SEQ ID NO: 166562 - DNA, 5874 bp, synthetic construct
  misc_feature 1..5874: note = Description of Artificial Sequence: Synthetic coding sequence
  source 1..5874: mol_type = other DNA
atgttccggcagttctacctgtggacctgcctggccagcggcatcatcctgggcagcctgtttgagatctgcctgggccagtatgatgatgactgcaagctggcccggggcggccccccagccaccatcgtggccattgatgaggagagcagaaatggcaccatcctggtggacaacatgctgatcaagggcacagctgggggccctgaccccaccatcgagctgagcctgaaggacaacgtggactactgggtgctgatggaccctgtgaagcagatgctgttcctgaacagcacaggccgggtgctggaccgggacccccccatgaacatccacagcatcgtggtgcaggtgcagtgcatcaacaagaaggtgggcaccatcatctaccacgaggtgagaattgtggtgcgggacagaaatgacaacagccccaccttcaagcatgagagctactatgccaccgtgaatgagctgacccctgtgggcaccaccatcttcaccggcttcagcggggacaacggggccacagacattgatgatggccccaacggccagattgaatatgtgatccagtacaacccagatgaccccaccagcaatgacacctttgagatccccctgatgctgactggaaacatcgtgctgaggaagaggctgaactatgaggacaagacccgctactttgtgatcatccaggccaatgaccgggcccagaacctgaatgaaagaaggaccaccaccaccaccctgactgtggatgtgctggatggagatgacctgggccccatgttcctgccctgtgtgctggtgcccaacacccgggactgccggcccctgacctaccaggccgccatccctgagctgcggaccccagaggagctgaaccccatcatcgtgaccccacccatccaggccatcgaccaggacaggaacatccagcccccaagtgaccggcccggcatcctgtacagcatcctggtgggcaccccagaggactacccccgcttcttccacatgcaccccaggacagctgagctgagcctgctggagcctgtgaacagagacttccaccagaagtttgacctggtgatcaaggccgagcaggacaatggccaccccctgcctgcctttgctggcctgcacatcgagatcctggatgagaacaaccagagcccctacttcaccatgcccagctaccagggctacatcctggagagcgcccctgtgggcgccaccatcagtgacagcctgaacctgaccagccccctgcgcatcgtggccctggacaaggacatcgaggacaccaaggaccctgagctgcacctgttcctgaatgactacaccagcgtcttcaccgtgacccagacaggcatcacccgctacctgaccctgctgcagcctgtggaccgggaggagcagcagacctacaccttcagcatcacagcctttgatggagtgcaggagagcgagcccgtcatcgtgaacatccaggtgatggatgccaatgacaacacccccaccttccctgagatctcctatgatgtgtatgtgtacacagacatgaggcctggggacagcgtcatccagctgacagctgtggatgctgatgagggcagcaatggagagatcacctatgagatcctggtgggcgcccagggcgacttcatcatcaacaagaccaccggcctcatcaccatcgcccctggggtggagatgattgtgggccgcacctacgccctgactgtgcaggccgctgacaatgcccccccagctgagaggagaaattccatctgcaccgtgtacatcgaggtgctgccccccaacaaccagagccccccacgcttcccccagctgatgtacagcctggagatcagcgaggccatgagggtgggcgctgtgctgctgaacctgcaggccacagaccgggagggggacagcatcacctacgccattgaaaatggagacccccagagggtcttcaacctgtctgagaccaccggcatcctgaccctgggcaaggccctggaccgggagagcacagaccgctacatcctgatcatcacagccagtgatggccgcccagatggcaccagcacagccaccgtgaacatcgtggtgacagatgtgaatgacaatgcccctgtgtttgacccctacctgcccaggaacctgtctgtggtggaggaggaggccaatgcctttgtgggccaggtgaaggccacagatcctgatgctggcatcaatggccaggtgcactacagcctgggcaacttcaacaacctcttccgcatcaccagcaatggcagcatctacacagctgtgaagctgaaccgggaggtgcgggactactatgagctggtggtggtggccacagatggagctgtgcaccccaggcacagcaccctgaccctggccatcaaggtgctggacattgatgacaacagccctgtgttcaccaacagcacctacacagtgctggtggaggagaacctgcctgctggcaccaccatcctgcagatcgaggccaaggatgtggacctgggcgccaacgtgtcctaccgcatccgcagccctgaggtgaagcacttctttgccctgcaccccttcaccggggagctgagcctgctgcggagcctggactatgaggccttcccagaccaggaggccagcatcaccttcctggtggaggcctttgacatctacggcaccatgcctcctggcatcgccaccgtgacagtgattgtgaaggacatgaatgactacccacctgtgttcagcaagaggatctacaagggcatggtggccccagatgctgtgaagggcacccccatcaccaccgtgtatgcagaagatgctgaccccccaggcctgcctgccagccgggtgcgctacagagtggatgatgtgcagttcccctacccagccagcatctttgaggtggaggaggacagcggccgggtcatcaccagggtgaacctgaatgaggagcccaccaccatcttcaagctggtggtggtggcctttgatgatggagagcctgtgatgagcagcagcgccaccgtgaagatcctggtgctgcaccctggagagatcccccgcttcacccaggaggagtaccggcccccacctgtgtctgagctggccaccaagggcaccatggtgggcgtcatctctgctgctgccatcaaccagagcatcgtgtacagcatcgtgtctggaaatgaggaggacaccttcggcatcaacaacatcaccggggtcatctacgtgaatggccccctggactatgagaccaggaccagctatgtgctgcgggtgcaggccgacagcctggaggtggtgctggccaacctgcgggtgcccagcaagagcaacacagccaaggtgtacatcgagatccaggatgagaacaaccacccccctgtgttccagaagaagttctacatcggcggcgtgtctgaagatgccaggatgttcacctctgtgctgcgggtgaaggccacagacaaggacaccggcaactacagcgtgatggcctaccgcctcatcatcccccccatcaaggagggcaaggagggctttgtggtggagacctacacaggcctcatcaagacagccatgctgttccacaacatgaggaggagctacttcaagttccaggtgattgccacagatgattatggcaagggcctgagcggcaaggcagatgtgctggtgtctgtggtgaaccagctggacatgcaggtgattgtgtccaatgtgccccccaccctggtggagaagaagattgaggacctgacagagatcctggaccgctacgtgcaggagcagatccctggggccaaggtggtggtggagagcattggagccaggagacatggagatgccttcagcctggaggactacaccaagtgtgacctgactgtgtatgccatcgacccccagaccaacagagccatcgacagaaatgagctgttcaagttcctggatggcaagctgctggacatcaacaaggacttccagccctactatggagagggcggccgcatcctggagatccgcaccccagaggccgtgaccagcatcaagaagagaggagagagcctgggctacacagaaggagccctgctggccctggccttcatcatcatcctgtgctgcatcccagccatcctggtggtgctggtgtcctaccggcagttcaaggtgcggcaggccgagtgcaccaagacagcccgcatccaggccgccctgcctgctgccaagccagctgtgcctgccccagcccctgtggccgcccctcctcctcctcctcctcctcctcctggggcccacctgtatgaggagctgggggacagctccatgcacaacctcttcctgctgtaccacttccagcagagccggggcaacaacagcgtgtctgaggacaggaagcaccagcaggtggtgatgcccttcagcagcaacaccatcgaggcccacaagagcgcccacgtggatggcagcctgaagagcaacaagctgaagagcgccaggaagttcaccttcctgagtgatgaagatgacctgagcgcccacaaccccctgtacaaggagaacatcagccaggtgtccaccaacagcgacatcagccagaggacagactttgtggaccccttcagccccaagatccaggccaagagcaagagcctgcggggcccccgggagaagatccagaggctgtggagccagagcgtgtccctgccccggcggctgatgaggaaggtgcccaacagacctgagatcatcgacctgcagcagtggcagggcacccggcagaaggccgagaatgaaaatacaggcatctgcaccaacaagaggggcagcagcaaccccctgctgaccacagaggaggccaacctgacagagaaggaggagatccggcagggcgagaccctgatgattgagggcacagagcagctgaagagcctgagcagtgacagcagcttctgcttcccccggccccacttctccttcagcaccctgcccaccgtgtccaggacagtggagctgaagtctgagcccaacgtcatcagcagccctgcagaatgttccctggagctgagccccagccggccctgtgtgctgcacagcagcctgagccggcgggagacccccatctgcatgctgcccatcgagacagagaggaacatctttgagaactttgcccacccccccaacatcagccccagcgcctgccccctgcccccacctccacccatcagcccccccagccccccaccagccccagcccccctggcccctcctccagacatcagccccttcagcctcttctgccccccacccagccccccatccatccccctgcccctgcccccacccaccttcttccccctgtctgtgtccaccagcggcccccccaccccacccctgctgccccccttccccacccccctgcccccacctccacccagcatcccctgccccccaccacccagcgccagcttcctgagcacagaatgtgtgtgcatcaccggggtgaagtgcaccaccaacctgatgcctgctgagaagatcaagagctccatgacccagctgagcaccaccaccgtgtgcaagacagacccccagcgggagcccaagggcatcctgcggcacgtgaagaacctggccgagctggagaagtctgtggccaacatgtacagccagatcgagaagaactacctgcggaccaacgtgtctgagctgcagaccatgtgccccagcgaggtgaccaacatggagatcaccagcgagcagaacaagggcagcctgaacaacatcgtggagggcacagagaagcagagccacagccagagcaccagcctgtag

SEQ ID NO: 166563 - DNA, 2886 bp, synthetic construct
  misc_feature 1..2886: note = Description of Artificial Sequence: Synthetic coding sequence
  source 1..2886: mol_type = other DNA
atgttccggcagttctacctgtggacctgcctggccagcggcatcatcctgggcagcctgtttgagatctgcctgggccagtatgatgatgactgcaagctggcccggggcggccccccagccaccatcgtggccattgatgaggagagcagaaatggcaccatcctggtggacaacatgctgatcaagggcacagctgggggccctgaccccaccatcgagctgagcctgaaggacaacgtggactactgggtgctgatggaccctgtgaagcagatgctgttcctgaacagcacaggccgggtgctggaccgggacccccccatgaacatccacagcatcgtggtgcaggtgcagtgcatcaacaagaaggtgggcaccatcatctaccacgaggtgagaattgtggtgcgggacagaaatgacaacagccccaccttcaagcatgagagctactatgccaccgtgaatgagctgacccctgtgggcaccaccatcttcaccggcttcagcggggacaacggggccacagacattgatgatggccccaacggccagattgaatatgtgatccagtacaacccagatgaccccaccagcaatgacacctttgagatccccctgatgctgactggaaacatcgtgctgaggaagaggctgaactatgaggacaagacccgctactttgtgatcatccaggccaatgaccgggcccagaacctgaatgaaagaaggaccaccaccaccaccctgactgtggatgtgctggatggagatgacctgggccccatgttcctgccctgtgtgctggtgcccaacacccgggactgccggcccctgacctaccaggccgccatccctgagctgcggaccccagaggagctgaaccccatcatcgtgaccccacccatccaggccatcgaccaggacaggaacatccagcccccaagtgaccggcccggcatcctgtacagcatcctggtgggcaccccagaggactacccccgcttcttccacatgcaccccaggacagctgagctgagcctgctggagcctgtgaacagagacttccaccagaagtttgacctggtgatcaaggccgagcaggacaatggccaccccctgcctgcctttgctggcctgcacatcgagatcctggatgagaacaaccagagcccctacttcaccatgcccagctaccagggctacatcctggagagcgcccctgtgggcgccaccatcagtgacagcctgaacctgaccagccccctgcgcatcgtggccctggacaaggacatcgaggacaccaaggaccctgagctgcacctgttcctgaatgactacaccagcgtcttcaccgtgacccagacaggcatcacccgctacctgaccctgctgcagcctgtggaccgggaggagcagcagacctacaccttcagcatcacagcctttgatggagtgcaggagagcgagcccgtcatcgtgaacatccaggtgatggatgccaatgacaacacccccaccttccctgagatctcctatgatgtgtatgtgtacacagacatgaggcctggggacagcgtcatccagctgacagctgtggatgctgatgagggcagcaatggagagatcacctatgagatcctggtgggcgcccagggcgacttcatcatcaacaagaccaccggcctcatcaccatcgcccctggggtggagatgattgtgggccgcacctacgccctgactgtgcaggccgctgacaatgcccccccagctgagaggagaaattccatctgcaccgtgtacatcgaggtgctgccccccaacaaccagagccccccacgcttcccccagctgatgtacagcctggagatcagcgaggccatgagggtgggcgctgtgctgctgaacctgcaggccacagaccgggagggggacagcatcacctacgccattgaaaatggagacccccagagggtcttcaacctgtctgagaccaccggcatcctgaccctgggcaaggccctggaccgggagagcacagaccgctacatcctgatcatcacagccagtgatggccgcccagatggcaccagcacagccaccgtgaacatcgtggtgacagatgtgaatgacaatgcccctgtgtttgacccctacctgcccaggaacctgtctgtggtggaggaggaggccaatgcctttgtgggccaggtgaaggccacagatcctgatgctggcatcaatggccaggtgcactacagcctgggcaacttcaacaacctcttccgcatcaccagcaatggcagcatctacacagctgtgaagctgaaccgggaggtgcgggactactatgagctggtggtggtggccacagatggagctgtgcaccccaggcacagcaccctgaccctggccatcaaggtgctggacattgatgacaacagccctgtgttcaccaacagcacctacacagtgctggtggaggagaacctgcctgctggcaccaccatcctgcagatcgaggccaaggatgtggacctgggcgccaacgtgtcctaccgcatccgcagccctgaggtgaagcacttctttgccctgcaccccttcaccggggagctgagcctgctgcggagcctggactatgaggccttcccagaccaggaggccagcatcaccttcctggtggaggcctttgacatctacggcaccatgcctcctggcatcgccaccgtgacagtgattgtgaaggacatgaatgactacccacctgtgttcagcaagaggatctacaagggcatggtggccccagatgctgtgaagggcacccccatcaccaccgtgtatgcagaagatgctgacccccctgtgtccagaagacactag

SEQ ID NO: 166564 - DNA, 2430 bp, synthetic construct
  misc_feature 1..2430: note = Description of Artificial Sequence: Synthetic coding sequence
  source 1..2430: mol_type = other DNA
atgttccggcagttctacctgtggacctgcctggccagcggcatcatcctgggcagcctgtttgagatctgcctgggccagtatgatgatggcaccatcctggtggacaacatgctgatcaagggcacagctgggggccctgaccccaccatcgagctgagcctgaaggacaacgtggactactgggtgctgatggaccctgtgaagcagatgctgttcctgaacagcacaggccgggtgctggaccgggacccccccatgaacatccacagcatcgtggtgcaggtgcagtgcatcaacaagaaggtgggcaccatcatctaccacgaggtgagaattgtggtgcgggacagaaatgacaacagccccaccttcaagcatgagagctactatgccaccgtgaatgagctgacccctgtgggcaccaccatcttcaccggcttcagcggggacaacggggccacagacattgatgatggccccaacggccagattgaatatgtgatccagtacaacccagatgaccccaccagcaatgacacctttgagatccccctgatgctgactggaaacatcgtgctgaggaagaggctgaactatgaggacaagacccgctactttgtgatcatccaggccaatgaccgggcccagaacctgaatgaaagaaggaccaccaccaccaccctgactgtggatgtgctggatggagatgacctgggccccatgttcctgccctgtgtgctggtgcccaacacccgggactgccggcccctgacctaccaggccgccatccctgagctgcggaccccagaggagctgaaccccatcatcgtgaccccacccatccaggccatcgaccaggacaggaacatccagcccccaagtgaccggcccggcatcctgtacagcatcctggtgggcaccccagaggactacccccgcttcttccacatgcaccccaggacagctgagctgagcctgctggagcctgtgaacagagacttccaccagaagtttgacctggtgatcaaggccgagcaggacaatggccaccccctgcctgcctttgctggcctgcacatcgagatcctggatgagaacaaccagagcccctacttcaccatgcccagctaccagggctacatcctggagagcgcccctgtgggcgccaccatcagtgacagcctgaacctgaccagccccctgcgcatcgtggccctggacaaggacatcgaggacaccaaggaccctgagctgcacctgttcctgaatgactacaccagcgtcttcaccgtgacccagacaggcatcacccgctacctgaccctgctgcagcctgtggaccgggaggagcagcagacctacaccttcagcatcacagcctttgatggagtgcaggagagcgagcccgtcatcgtgaacatccaggtgatggatgccaatgacaacacccccaccttccctgagatctcctatgatgtgtatgtgtacacagacatgaggcctggggacagcgtcatccagctgacagctgtggatgctgatgagggcagcaatggagagatcacctatgagatcctggtgggcgcccagggcgacttcatcatcaacaagaccaccggcctcatcaccatcgcccctggggtggagatgattgtgggccgcacctacgccctgactgtgcaggccgctgacaatgcccccccagctgagaggagaaattccatctgcaccgtgtacatcgaggtgctgccccccaacaaccagagccccccacgcttcccccagctgatgtacagcctggagatcagcgaggccatgagggtgggcgctgtgctgctgaacctgcaggccacagaccgggagggggacagcatcacctacgccattgaaaatggagacccccagagggtcttcaacctgtctgagaccaccggcatcctgaccctgggcaaggccctggaccgggagagcacagaccgctacatcctgatcatcacagccagtgatggccgcccagatggcaccagcacagccaccgtgaacatcgtggtgacagatgtgaatgacaatgcccctgtgtttgacccctacctgcccaggaacctgtctgtggtggaggaggaggccaatgcctttgtgggccaggtgaagctgagcaccaccaccgtgtgcaagacagacccccagcgggagcccaagggcatcctgcggcacgtgaagaacctggccgagctggagaagtctgtggccaacatgtacagccagatcgagaagaactacctgcggaccaacgtgtctgagctgcagaccatgtgccccagcgaggtgaccaacatggagatcaccagcgagcagaacaagggcagcctgaacaacatcgtggagggcacagagaagcagagccacagccagagcaccagcctgtag

SEQ ID NO: 166565 - DNA, 5055 bp, synthetic construct
  misc_feature 1..5055: note = Description of Artificial Sequence: Synthetic coding sequence
  source 1..5055: mol_type = other DNA
atgttccggcagttctacctgtggacctgcctggccagcggcatcatcctgggcagcctgtttgagatctgcctgggccagtatgatgatgactgcaagctggcccggggcggccccccagccaccatcgtggccattgatgaggagagcagaaatggcaccatcctggtggacaacatgctgatcaagggcacagctgggggccctgaccccaccatcgagctgagcctgaaggacaacgtggactactgggtgctgatggaccctgtgaagcagatgctgttcctgaacagcacaggccgggtgctggaccgggacccccccatgaacatccacagcatcgtggtgcaggtgcagtgcatcaacaagaaggtgggcaccatcatctaccacgaggtgagaattgtggtgcgggacagaaatgacaacagccccaccttcaagcatgagagctactatgccaccgtgaatgagctgacccctgtgggcaccaccatcttcaccggcttcagcggggacaacggggccacagacattgatgatggccccaacggccagattgaatatgtgatccagtacaacccagatgaccccaccagcaatgacacctttgagatccccctgatgctgactggaaacatcgtgctgaggaagaggctgaactatgaggacaagacccgctactttgtgatcatccaggccaatgaccgggcccagaacctgaatgaaagaaggaccaccaccaccaccctgactgtggatgtgctggatggagatgacctgggccccatgttcctgccctgtgtgctggtgcccaacacccgggactgccggcccctgacctaccaggccgccatccctgagctgcggaccccagaggagctgaaccccatcatcgtgaccccacccatccaggccatcgaccaggacaggaacatccagcccccaagtgaccggcccggcatcctgtacagcatcctggtgggcaccccagaggactacccccgcttcttccacatgcaccccaggacagctgagctgagcctgctggagcctgtgaacagagacttccaccagaagtttgacctggtgatcaaggccgagcaggacaatggccaccccctgcctgcctttgctggcctgcacatcgagatcctggatgagaacaaccagagcccctacttcaccatgcccagctaccagggctacatcctggagagcgcccctgtgggcgccaccatcagtgacagcctgaacctgaccagccccctgcgcatcgtggccctggacaaggacattgaagatgtgcccccatctggagtgcccaccaaggaccctgagctgcacctgttcctgaatgactacacctctgtgttcaccgtgacccagacaggcatcacccgctacctgaccctgctgcagcctgtggaccgggaggagcagcagacctacaccttcagcatcacagcctttgatggagtgcaggagagcgagcctgtgattgtgaacatccaggtgatggatgccaatgacaacacccccaccttccctgagatctcctatgatgtgtatgtgtacacagacatgaggcctggggacagcgtcatccagctgacagctgtggatgctgatgagggcagcaatggagagatcacctatgagatcctggtgggcgcccagggcgacttcatcatcaacaagaccaccggcctcatcaccatcgcccctggggtggagatgattgtgggccgcacctacgccctgactgtgcaggccgctgacaatgcccctcctgctgagaggaggaacagcatctgcaccgtgtacatcgaggtgctgccccccaacaaccagagccccccacgcttcccccagctgatgtacagcctggagatcagcgaggccatgagggtgggcgctgtgctgctgaacctgcaggccacagaccgggagggggacagcatcacctacgccattgaaaatggagacccccagagggtcttcaacctgtctgagaccaccggcatcctgaccctgggcaaggccctggaccgggagagcacagaccgctacatcctgatcatcacagccagtgatggccgcccagatggcaccagcacagccaccgtgaacatcgtggtgacagatgtgaatgacaatgcccctgtgtttgacccctacctgcccaggaacctgtctgtggtggaggaggaggccaatgcctttgtgggccaggtgaaggccacagatcctgatgctggcatcaatggccaggtgcactacagcctgggcaacttcaacaacctcttccgcatcaccagcaatggcagcatctacacagctgtgaagctgaaccgggaggtgcgggactactatgagctggtggtggtggccacagatggagctgtgcaccccaggcacagcaccctgaccctggccatcaaggtgctggacattgatgacaacagccctgtgttcaccaacagcacctacacagtgctggtggaggagaacctgcctgctggcaccaccatcctgcagatcgaggccaaggatgtggacctgggcgccaacgtgtcctaccgcatccgcagccctgaggtgaagcacttctttgccctgcaccccttcaccggggagctgagcctgctgcggagcctggactatgaggccttcccagaccaggaggccagcatcaccttcctggtggaggcctttgacatctacggcaccatgcctcctggcatcgccaccgtgaccgtcatcgtgaaggacatgaatgactacccacctgtgttcagcaagaggatctacaagggcatggtggccccagatgctgtgaagggcacccccatcaccaccgtgtatgcagaagatgctgaccccccaggcctgcctgccagccgggtgcgctacagagtggatgatgtgcagttcccctacccagccagcatctttgaggtggaggaggacagcggccgggtcatcaccagggtgaacctgaatgaggagcccaccaccatcttcaagctggtggtggtggcctttgatgatggagagcctgtgatgagcagcagcgccaccgtgaagatcctggtgctgcaccctggagagatcccccgcttcacccaggaggagtacagacctcctcctgtgtctgagctggccaccaagggcaccatggtgggcgtcatctctgctgctgccatcaaccagagcatcgtgtacagcatcgtgtctggaaatgaggaggacaccttcggcatcaacaacatcactggagtcatctacgtgaatggccccctggactatgagaccaggaccagctatgtgctgcgggtgcaggccgacagcctggaggtggtgctggccaacctgcgggtgcccagcaagagcaacacagccaaggtgtacatcgagatccaggatgagaacaaccacccccctgtgttccagaagaagttctacatcggcggcgtgtctgaagatgccaggatgttcacctctgtgctgcgggtgaaggccacagacaaggacaccggcaactacagcgtgatggcctaccgcctcatcatcccccccatcaaggagggcaaggagggctttgtggtggagacctacacaggcctcatcaagacagccatgctgttccacaacatgagaagaagctacttcaagttccaggtgattgccacagatgattatggcaagggcctgagcggcaaggcagatgtgctggtgtctgtggtgaaccagctggacatgcaggtgattgtgtccaatgtgccccccaccctggtggagaagaagattgaggacctgacagagatcctggacagatatgtgcaggagcagatccctggggccaaggtggtggtggagagcatcggggccaggagacatggagatgccttcagcctggaggactacaccaagtgtgacctgactgtgtatgccatcgacccccagaccaacagagccatcgacagaaatgaactcttcaagttcctggatggcaagctgctggacatcaacaaggacttccagccctactacggggagggcggccgcatcctggagatccgcaccccagaggccgtgaccagcatcaagaagagaggagagagcctgggctacacagagggcgccctgctggccctggccttcatcatcatcctgtgctgcatcccagccatcctggtggtgctggtgtcctaccggcagttcaaggtgcggcaggctgaatgtaccaagacagcccgcatccaggccgccctgcctgctgccaagccagctgtgcctgccccagcccctgtggccgcccctcctcctcctcctcctcctcctcctggggcccacctgtatgaggagctgggggacagctccatgcacaagtatgagatgccccagtatggcagcagaagaaggctgctgcccccagctggccaggaggagtatggagaggtggtgggggaggccgaggaggagtatgaggaggaggagtgggccaggaagaggatgatcaagctggtggtggaccgggagtatgagaccagcagcactggagaagattctgcccctgagtgccagaggaaccggctgcaccaccccagcatccacagcaacatcaatggaaacatctacatcgcccagaatggatctgtggtgaggacccggcgggcctgcctgacagacaacctgaaggtggccagccctgtgcggctgggcggccccttcaagaagctggacaagctggccgtgacccatgaagaaaatgtgcccctgaacaccctgagcaagggccccttcagcacagagaagatgaatgcccggcccaccctggtgacctttgccccctgccctgtgggcacagacaacacagctgtgaagcccctgaggaaccggctgaagagcacagtggagcaggagagcatgattgacagcaagaacatcaaggaggccctggagttccacagcgaccacacccagagtgatgatgaggagctgtggatgggcccctggaacaacctgcacatccccatgaccaagctgtag

SEQ ID NO: 166566 - DNA, 5859 bp, synthetic construct
  misc_feature 1..5859: note = Description of Artificial Sequence: Synthetic coding sequence
  source 1..5859: mol_type = other DNA
atgttccggcagttctacctgtggacctgcctggccagcggcatcatcctgggcagcctgtttgagatctgcctgggccagtatgatgatgactgcaagctggcccggggcggccccccagccaccatcgtggccattgatgaggagagcagaaatggcaccatcctggtggacaacatgctgatcaagggcacagctgggggccctgaccccaccatcgagctgagcctgaaggacaacgtggactactgggtgctgatggaccctgtgaagcagatgctgttcctgaacagcacaggccgggtgctggaccgggacccccccatgaacatccacagcatcgtggtgcaggtgcagtgcatcaacaagaaggtgggcaccatcatctaccacgaggtgagaattgtggtgcgggacagaaatgacaacagccccaccttcaagcatgagagctactatgccaccgtgaatgagctgacccctgtgggcaccaccatcttcaccggcttcagcggggacaacggggccacagacattgatgatggccccaacggccagattgaatatgtgatccagtacaacccagatgaccccaccagcaatgacacctttgagatccccctgatgctgactggaaacatcgtgctgaggaagaggctgaactatgaggacaagacccgctactttgtgatcatccaggccaatgaccgggcccagaacctgaatgaaagaaggaccaccaccaccaccctgactgtggatgtgctggatggagatgacctgggccccatgttcctgccctgtgtgctggtgcccaacacccgggactgccggcccctgacctaccaggccgccatccctgagctgcggaccccagaggagctgaaccccatcatcgtgaccccacccatccaggccatcgaccaggacaggaacatccagcccccaagtgaccggcccggcatcctgtacagcatcctggtgggcaccccagaggactacccccgcttcttccacatgcaccccaggacagctgagctgagcctgctggagcctgtgaacagagacttccaccagaagtttgacctggtgatcaaggccgagcaggacaatggccaccccctgcctgcctttgctggcctgcacatcgagatcctggatgagaacaaccagagcccctacttcaccatgcccagctaccagggctacatcctggagagcgcccctgtgggcgccaccatcagtgacagcctgaacctgaccagccccctgcgcatcgtggccctggacaaggacatcgaggacaccaaggaccctgagctgcacctgttcctgaatgactacaccagcgtcttcaccgtgacccagacaggcatcacccgctacctgaccctgctgcagcctgtggaccgggaggagcagcagacctacaccttcagcatcacagcctttgatggagtgcaggagagcgagcccgtcatcgtgaacatccaggtgatggatgccaatgacaacacccccaccttccctgagatctcctatgatgtgtatgtgtacacagacatgaggcctggggacagcgtcatccagctgacagctgtggatgctgatgagggcagcaatggagagatcacctatgagatcctggtgggcgcccagggcgacttcatcatcaacaagaccaccggcctcatcaccatcgcccctggggtggagatgattgtgggccgcacctacgccctgactgtgcaggccgctgacaatgcccccccagctgagaggagaaattccatctgcaccgtgtacatcgaggtgctgccccccaacaaccagagccccccacgcttcccccagctgatgtacagcctggagatcagcgaggccatgagggtgggcgctgtgctgctgaacctgcaggccacagaccgggagggggacagcatcacctacgccattgaaaatggagacccccagagggtcttcaacctgtctgagaccaccggcatcctgaccctgggcaaggccctggaccgggagagcacagaccgctacatcctgatcatcacagccagtgatggccgcccagatggcaccagcacagccaccgtgaacatcgtggtgacagatgtgaatgacaatgcccctgtgtttgacccctacctgcccaggaacctgtctgtggtggaggaggaggccaatgcctttgtgggccaggtgaaggccacagatcctgatgctggcatcaatggccaggtgcactacagcctgggcaacttcaacaacctcttccgcatcaccagcaatggcagcatctacacagctgtgaagctgaaccgggaggtgcgggactactatgagctggtggtggtggccacagatggagctgtgcaccccaggcacagcaccctgaccctggccatcaaggtgctggacattgatgacaacagccctgtgttcaccaacagcacctacacagtgctggtggaggagaacctgcctgctggcaccaccatcctgcagatcgaggccaaggatgtggacctgggcgccaacgtgtcctaccgcatccgcagccctgaggtgaagcacttctttgccctgcaccccttcaccggggagctgagcctgctgcggagcctggactatgaggccttcccagaccaggaggccagcatcaccttcctggtggaggcctttgacatctacggcaccatgcctcctggcatcgccaccgtgacagtgattgtgaaggacatgaatgactacccacctgtgttcagcaagaggatctacaagggcatggtggccccagatgctgtgaagggcacccccatcaccaccgtgtatgcagaagatgctgaccccccaggcctgcctgccagccgggtgcgctacagagtggatgatgtgcagttcccctacccagccagcatctttgaggtggaggaggacagcggccgggtcatcaccagggtgaacctgaatgaggagcccaccaccatcttcaagctggtggtggtggcctttgatgatggagagcctgtgatgagcagcagcgccaccgtgaagatcctggtgctgcaccctggagagatcccccgcttcacccaggaggagtaccggcccccacctgtgtctgagctggccaccaagggcaccatggtgggcgtcatctctgctgctgccatcaaccagagcatcgtgtacagcatcgtgtctggaaatgaggaggacaccttcggcatcaacaacatcaccggggtcatctacgtgaatggccccctggactatgagaccaggaccagctatgtgctgcgggtgcaggccgacagcctggaggtggtgctggccaacctgcgggtgcccagcaagagcaacacagccaaggtgtacatcgagatccaggatgagaacaaccacccccctgtgttccagaagaagttctacatcggcggcgtgtctgaagatgccaggatgttcacctctgtgctgcgggtgaaggccacagacaaggacaccggcaactacagcgtgatggcctaccgcctcatcatcccccccatcaaggagggcaaggagggctttgtggtggagacctacacaggcctcatcaagacagccatgctgttccacaacatgaggaggagctacttcaagttccaggtgattgccacagatgattatggcaagggcctgagcggcaaggcagatgtgctggtgtctgtggtgaaccagctggacatgcaggtgattgtgtccaatgtgccccccaccctggtggagaagaagattgaggacctgacagagatcctggaccgctacgtgcaggagcagatccctggggccaaggtggtggtggagagcattggagccaggagacatggagatgccttcagcctggaggactacaccaagtgtgacctgactgtgtatgccatcgacccccagaccaacagagccatcgacagaaatgagctgttcaagttcctggatggcaagctgctggacatcaacaaggacttccagccctactatggagagggcggccgcatcctggagatccgcaccccagaggccgtgaccagcatcaagaagagaggagagagcctgggctacacagaaggagccctgctggccctggccttcatcatcatcctgtgctgcatcccagccatcctggtggtgctggtgtcctaccggcagaggcaggctgaatgtaccaagacagcccgcatccaggccgccctgcctgctgccaagccagctgtgcctgccccagcccctgtggccgcccctcctcctcctcctcctcctcctcctggggcccacctgtatgaggagctgggggacagcagcatcctcttcctgctgtaccacttccagcagagccggggcaacaacagcgtgtctgaggacaggaagcaccagcaggtggtgatgcccttcagcagcaacaccatcgaggcccacaagagcgcccacgtggatggcagcctgaagagcaacaagctgaagagcgccaggaagttcaccttcctgagtgatgaagatgacctgagcgcccacaaccccctgtacaaggagaacatcagccaggtgtccaccaacagcgacatcagccagaggacagactttgtggaccccttcagccccaagatccaggccaagagcaagagcctgcggggcccccgggagaagatccagaggctgtggagccagagcgtgtccctgccccggcggctgatgaggaaggtgcccaacagacctgagatcatcgacctgcagcagtggcagggcacccggcagaaggcagaaaatgaaaatacaggcatctgcaccaacaagaggggcagcagcaaccccctgctgaccacagaggaggccaacctgacagagaaggaggagatccggcagggcgagaccctgatgattgagggcacagagcagctgaagagcctgagcagtgacagcagcttctgcttcccccggccccacttctccttcagcaccctgcccaccgtgtccaggacagtggagctgaagtctgagcccaacgtcatcagcagccctgctgagtgcagcctggagctgagccccagccggccctgtgtgctgcacagcagcctgagcagaagagagacccccatctgcatgctgcccattgaaacagaaagaaacatctttgaaaattttgcccacccccccaacatcagccccagcgcctgccccctgcccccacctccacccatcagcccccccagccccccaccagccccagcccccctggcccctcctccagacatcagccccttcagcctcttctgccccccacccagcccccccagcatccccctgcccctgcccccacccaccttcttccccctgtctgtgtccaccagcggcccccccaccccacccctgctgccccccttccccacccccctgcccccacctcctccttccatcccctgccccccacctccttctgccagcttcctgagcacagaatgtgtgtgcatcactggagtgaagtgcaccaccaacctgatgcctgctgagaagatcaagagctccatgacccagctgagcaccaccaccgtgtgcaagacagacccccagcgggagcccaagggcatcctgcggcacgtgaagaacctggccgagctggagaagtctgtggccaacatgtacagccagatcgagaagaactacctgcggaccaacgtgtctgagctgcagaccatgtgccccagcgaggtgaccaacatggagatcaccagcgagcagaacaagggcagcctgaacaacatcgtggagggcacagagaagcagagccacagccagagcaccagcctgtag

SEQ ID NO: 166567 - DNA, 5748 bp, synthetic construct
  misc_feature 1..5748: note = Description of Artificial Sequence: Synthetic coding sequence
  source 1..5748: mol_type = other DNA
atgttccggcagttctacctgtggacctgcctggccagcggcatcatcctgggcagcctgtttgagatctgcctgggccagtatgatgatgactgcaagctggcccggggcggccccccagccaccatcgtggccattgatgaggagagcagaaatggcaccatcctggtggacaacatgctgatcaagggcacagctgggggccctgaccccaccatcgagctgagcctgaaggacaacgtggactactgggtgctgatggaccctgtgaagcagatgctgttcctgaacagcacaggccgggtgctggaccgggacccccccatgaacatccacagcatcgtggtgcaggtgcagtgcatcaacaagaaggtgggcaccatcatctaccacgaggtgagaattgtggtgcgggacagaaatgacaacagccccaccttcaagcatgagagctactatgccaccgtgaatgagctgacccctgtgggcaccaccatcttcaccggcttcagcggggacaacggggccacagacattgatgatggccccaacggccagattgaatatgtgatccagtacaacccagatgatcctgaccgggcccagaacctgaatgaaagaaggaccaccaccaccaccctgactgtggatgtgctggatggagatgacctgggccccatgttcctgccctgtgtgctggtgcccaacacccgggactgccggcccctgacctaccaggccgccatccctgagctgcggaccccagaggagctgaaccccatcatcgtgaccccacccatccaggccatcgaccaggacaggaacatccagccccccagcgacaggcctggcatcctgtacagcatcctggtgggcaccccagaggactacccccgcttcttccacatgcaccccaggacagctgagctgagcctgctggagcctgtgaacagagacttccaccagaagtttgacctggtgatcaaggccgagcaggacaatggccaccccctgcctgcctttgctggcctgcacatcgagatcctggatgagaacaaccagagcccctacttcaccatgcccagctaccagggctacatcctggagagcgcccctgtgggcgccaccatcagtgacagcctgaacctgaccagccccctgagaattgtggccctggacaaggacatcgaggacaccaaggaccctgagctgcacctgttcctgaatgactacacctctgtgttcaccgtgacccagacaggcatcacccgctacctgaccctgctgcagcctgtggaccgggaggagcagcagacctacaccttcagcatcacagcctttgatggagtgcaggagagcgagcctgtgattgtgaacatccaggtgatggatgccaatgacaacacccccaccttccctgagatctcctatgatgtgtatgtgtacacagacatgaggcctggggacagcgtcatccagctgacagctgtggatgctgatgagggcagcaatggagagatcacctatgagatcctggtgggcgcccagggcgacttcatcatcaacaagaccaccggcctcatcaccatcgcccctggggtggagatgattgtgggccgcacctacgccctgactgtgcaggccgctgacaatgcccctcctgctgagaggaggaacagcatctgcaccgtgtacatcgaggtgctgccccccaacaaccagagccccccacgcttcccccagctgatgtacagcctggagatcagcgaggccatgagggtgggcgctgtgctgctgaacctgcaggccacagaccgggagggggacagcatcacctacgccattgaaaatggagacccccagagggtcttcaacctgtctgagaccaccggcatcctgaccctgggcaaggccctggaccgggagagcacagaccgctacatcctgatcatcacagccagtgatggccgcccagatggcaccagcacagccaccgtgaacatcgtggtgacagatgtgaatgacaatgcccctgtgtttgacccctacctgcccaggaacctgtctgtggtggaggaggaggccaatgcctttgtgggccaggtgaaggccacagatcctgatgctggcatcaatggccaggtgcactacagcctgggcaacttcaacaacctcttccgcatcaccagcaatggcagcatctacacagctgtgaagctgaaccgggaggtgcgggactactatgagctggtggtggtggccacagatggagctgtgcaccccaggcacagcaccctgaccctggccatcaaggtgctggacattgatgacaacagccctgtgttcaccaacagcacctacacagtgctggtggaggagaacctgcctgctggcaccaccatcctgcagatcgaggccaaggatgtggacctgggcgccaacgtgtcctaccgcatccgcagccctgaggtgaagcacttctttgccctgcaccccttcaccggggagctgagcctgctgcggagcctggactatgaggccttcccagaccaggaggccagcatcaccttcctggtggaggcctttgacatctacggcaccatgcctcctggcatcgccaccgtgaccgtcatcgtgaaggacatgaatgactacccacctgtgttcagcaagaggatctacaagggcatggtggccccagatgctgtgaagggcacccccatcaccaccgtgtatgcagaagatgctgaccccccaggcctgcctgccagccgggtgcgctacagagtggatgatgtgcagttcccctacccagccagcatctttgaggtggaggaggacagcggccgggtcatcaccagggtgaacctgaatgaggagcccaccaccatcttcaagctggtggtggtggcctttgatgatggagagcctgtgatgagcagcagcgccaccgtgaagatcctggtgctgcaccctggagagatcccccgcttcacccaggaggagtacagacctcctcctgtgtctgagctggccaccaagggcaccatggtgggcgtcatctctgctgctgccatcaaccagagcatcgtgtacagcatcgtgtctggaaatgaggaggacaccttcggcatcaacaacatcactggagtcatctacgtgaatggccccctggactatgagaccaggaccagctatgtgctgcgggtgcaggccgacagcctggaggtggtgctggccaacctgcgggtgcccagcaagagcaacacagccaaggtgtacatcgagatccaggatgagaacaaccacccccctgtgttccagaagaagttctacatcggcggcgtgtctgaagatgccaggatgttcacctctgtgctgcgggtgaaggccacagacaaggacaccggcaactacagcgtgatggcctaccgcctcatcatcccccccatcaaggagggcaaggagggctttgtggtggagacctacacaggcctcatcaagacagccatgctgttccacaacatgagaagaagctacttcaagttccaggtgattgccacagatgattatggcaagggcctgagcggcaaggcagatgtgctggtgtctgtggtgaaccagctggacatgcaggtgattgtgtccaatgtgccccccaccctggtggagaagaagattgaggacctgacagagatcctggacagatatgtgcaggagcagatccctggggccaaggtggtggtggagagcatcggggccaggagacatggagatgccttcagcctggaggactacaccaagtgtgacctgactgtgtatgccatcgacccccagaccaacagagccatcgacagaaatgaactcttcaagttcctggatggcaagctgctggacatcaacaaggacttccagccctactacggggagggcggccgcatcctggagatccgcaccccagaggccgtgaccagcatcaagaagagaggagagagcctgggctacacagagggcgccctgctggccctggccttcatcatcatcctgtgctgcatcccagccatcctggtggtgctggtgtcctaccggcagaggcaggccgagtgcaccaagacagcccgcatccaggccgccctgcctgctgccaagccagctgtgcctgccccagcccctgtggccgcccctcctcctcctcctcctcctcctcctggggcccacctgtatgaggagctgggggacagcagcatcctcttcctgctgtaccacttccagcagagccggggcaacaacagcgtgtctgaggacaggaagcaccagcaggtggtgatgcccttcagcagcaacaccatcgaggcccacaagagcgcccacgtggatggcagcctgaagagcaacaagctgaagagcgccaggaagttcaccttcctgagtgatgaagatgacctgagcgcccacaaccccctgtacaaggagaacatcagccaggtgtccaccaacagcgacatcagccagaggacagactttgtggaccccttcagccccaagatccaggccaagagcaagagcctgcggggcccccgggagaagatccagaggctgtggagccagagcgtgtccctgccccggcggctgatgaggaaggtgcccaacagacctgagatcatcgacctgcagcagtggcagggcacccggcagaaggccgagaatgaaaatacaggcatctgcaccaacaagaggggcagcagcaaccccctgctgaccacagaggaggccaacctgacagagaaggaggagatccggcagggcgagaccctgatgattgagggcacagagcagctgaagagcctgagcagtgacagcagcttctgcttcccccggccccacttctccttcagcaccctgcccaccgtgtccaggacagtggagctgaagtctgagcccaacgtcatcagcagccctgcagaatgttccctggagctgagccccagccggccctgtgtgctgcacagcagcctgagccggcgggagacccccatctgcatgctgcccatcgagacagagaggaacatctttgagaactttgcccacccccccaacatcagccccagcgcctgccccctgcccccacctccacccatcagcccccccagccccccaccagccccagcccccctggcccctcctccagacatcagccccttcagcctcttctgccccccacccagccccccatccatccccctgcccctgcccccacccaccttcttccccctgtctgtgtccaccagcggcccccccaccccacccctgctgccccccttccccacccccctgcccccacctccacccagcatcccctgccccccaccacccagcgccagcttcctgagcacagaatgtgtgtgcatcaccggggtgaagtgcaccaccaacctgatgcctgctgagaagatcaagagctccatgacccagctgagcaccaccaccgtgtgcaagacagacccccagcgggagcccaagggcatcctgcggcacgtgaagaacctggccgagctggagaagtctgtggccaacatgtacagccagatcgagaagaactacctgcggaccaacgtgtctgagctgcagaccatgtgccccagcgaggtgaccaacatggagatcaccagcgagcagaacaagggcagcctgaacaacatcgtggagggcacagagaagcagagccacagccagagcaccagcctgtag

SEQ ID NO: 166568 - DNA, 5799 bp, synthetic construct
  misc_feature 1..5799: note = Description of Artificial Sequence: Synthetic coding sequence
  source 1..5799: mol_type = other DNA
atgttccggcagttctacctgtggacctgcctggccagcggcatcatcctgggcagcctgtttgagatctgcctgggccagtatgatgatggcaccatcctggtggacaacatgctgatcaagggcacagctgggggccctgaccccaccatcgagctgagcctgaaggacaacgtggactactgggtgctgatggaccctgtgaagcagatgctgttcctgaacagcacaggccgggtgctggaccgggacccccccatgaacatccacagcatcgtggtgcaggtgcagtgcatcaacaagaaggtgggcaccatcatctaccacgaggtgagaattgtggtgcgggacagaaatgacaacagccccaccttcaagcatgagagctactatgccaccgtgaatgagctgacccctgtgggcaccaccatcttcaccggcttcagcggggacaacggggccacagacattgatgatggccccaacggccagattgaatatgtgatccagtacaacccagatgaccccaccagcaatgacacctttgagatccccctgatgctgactggaaacatcgtgctgaggaagaggctgaactatgaggacaagacccgctactttgtgatcatccaggccaatgaccgggcccagaacctgaatgaaagaaggaccaccaccaccaccctgactgtggatgtgctggatggagatgacctgggccccatgttcctgccctgtgtgctggtgcccaacacccgggactgccggcccctgacctaccaggccgccatccctgagctgcggaccccagaggagctgaaccccatcatcgtgaccccacccatccaggccatcgaccaggacaggaacatccagcccccaagtgaccggcccggcatcctgtacagcatcctggtgggcaccccagaggactacccccgcttcttccacatgcaccccaggacagctgagctgagcctgctggagcctgtgaacagagacttccaccagaagtttgacctggtgatcaaggccgagcaggacaatggccaccccctgcctgcctttgctggcctgcacatcgagatcctggatgagaacaaccagagcccctacttcaccatgcccagctaccagggctacatcctggagagcgcccctgtgggcgccaccatcagtgacagcctgaacctgaccagccccctgcgcatcgtggccctggacaaggacatcgaggacaccaaggaccctgagctgcacctgttcctgaatgactacaccagcgtcttcaccgtgacccagacaggcatcacccgctacctgaccctgctgcagcctgtggaccgggaggagcagcagacctacaccttcagcatcacagcctttgatggagtgcaggagagcgagcccgtcatcgtgaacatccaggtgatggatgccaatgacaacacccccaccttccctgagatctcctatgatgtgtatgtgtacacagacatgaggcctggggacagcgtcatccagctgacagctgtggatgctgatgagggcagcaatggagagatcacctatgagatcctggtgggcgcccagggcgacttcatcatcaacaagaccaccggcctcatcaccatcgcccctggggtggagatgattgtgggccgcacctacgccctgactgtgcaggccgctgacaatgcccccccagctgagaggagaaattccatctgcaccgtgtacatcgaggtgctgccccccaacaaccagagccccccacgcttcccccagctgatgtacagcctggagatcagcgaggccatgagggtgggcgctgtgctgctgaacctgcaggccacagaccgggagggggacagcatcacctacgccattgaaaatggagacccccagagggtcttcaacctgtctgagaccaccggcatcctgaccctgggcaaggccctggaccgggagagcacagaccgctacatcctgatcatcacagccagtgatggccgcccagatggcaccagcacagccaccgtgaacatcgtggtgacagatgtgaatgacaatgcccctgtgtttgacccctacctgcccaggaacctgtctgtggtggaggaggaggccaatgcctttgtgggccaggtgaaggccacagatcctgatgctggcatcaatggccaggtgcactacagcctgggcaacttcaacaacctcttccgcatcaccagcaatggcagcatctacacagctgtgaagctgaaccgggaggtgcgggactactatgagctggtggtggtggccacagatggagctgtgcaccccaggcacagcaccctgaccctggccatcaaggtgctggacattgatgacaacagccctgtgttcaccaacagcacctacacagtgctggtggaggagaacctgcctgctggcaccaccatcctgcagatcgaggccaaggatgtggacctgggcgccaacgtgtcctaccgcatccgcagccctgaggtgaagcacttctttgccctgcaccccttcaccggggagctgagcctgctgcggagcctggactatgaggccttcccagaccaggaggccagcatcaccttcctggtggaggcctttgacatctacggcaccatgcctcctggcatcgccaccgtgacagtgattgtgaaggacatgaatgactacccacctgtgttcagcaagaggatctacaagggcatggtggccccagatgctgtgaagggcacccccatcaccaccgtgtatgcagaagatgctgaccccccaggcctgcctgccagccgggtgcgctacagagtggatgatgtgcagttcccctacccagccagcatctttgaggtggaggaggacagcggccgggtcatcaccagggtgaacctgaatgaggagcccaccaccatcttcaagctggtggtggtggcctttgatgatggagagcctgtgatgagcagcagcgccaccgtgaagatcctggtgctgcaccctggagagatcccccgcttcacccaggaggagtaccggcccccacctgtgtctgagctggccaccaagggcaccatggtgggcgtcatctctgctgctgccatcaaccagagcatcgtgtacagcatcgtgtctggaaatgaggaggacaccttcggcatcaacaacatcaccggggtcatctacgtgaatggccccctggactatgagaccaggaccagctatgtgctgcgggtgcaggccgacagcctggaggtggtgctggccaacctgcgggtgcccagcaagagcaacacagccaaggtgtacatcgagatccaggatgagaacaaccacccccctgtgttccagaagaagttctacatcggcggcgtgtctgaagatgccaggatgttcacctctgtgctgcgggtgaaggccacagacaaggacaccggcaactacagcgtgatggcctaccgcctcatcatcccccccatcaaggagggcaaggagggctttgtggtggagacctacacaggcctcatcaagacagccatgctgttccacaacatgaggaggagctacttcaagttccaggtgattgccacagatgattatggcaagggcctgagcggcaaggcagatgtgctggtgtctgtggtgaaccagctggacatgcaggtgattgtgtccaatgtgccccccaccctggtggagaagaagattgaggacctgacagagatcctggaccgctacgtgcaggagcagatccctggggccaaggtggtggtggagagcattggagccaggagacatggagatgccttcagcctggaggactacaccaagtgtgacctgactgtgtatgccatcgacccccagaccaacagagccatcgacagaaatgagctgttcaagttcctggatggcaagctgctggacatcaacaaggacttccagccctactatggagagggcggccgcatcctggagatccgcaccccagaggccgtgaccagcatcaagaagagaggagagagcctgggctacacagaaggagccctgctggccctggccttcatcatcatcctgtgctgcatcccagccatcctggtggtgctggtgtcctaccggcagaggcaggctgaatgtaccaagacagcccgcatccaggccgccctgcctgctgccaagccagctgtgcctgccccagcccctgtggccgcccctcctcctcctcctcctcctcctcctggggcccacctgtatgaggagctgggggacagctccatgcacaacctcttcctgctgtaccacttccagcagagccggggcaacaacagcgtgtctgaggacaggaagcaccagcaggtggtgatgcccttcagcagcaacaccatcgaggcccacaagagcgcccacgtggatggcagcctgaagagcaacaagctgaagagcgccaggaagttcaccttcctgagtgatgaagatgacctgagcgcccacaaccccctgtacaaggagaacatcagccaggtgtccaccaacagcgacatcagccagaggacagactttgtggaccccttcagccccaagatccaggccaagagcaagagcctgcggggcccccgggagaagatccagaggctgtggagccagagcgtgtccctgccccggcggctgatgaggaaggtgcccaacagacctgagatcatcgacctgcagcagtggcagggcacccggcagaaggcagaaaatgaaaatacaggcatctgcaccaacaagaggggcagcagcaaccccctgctgaccacagaggaggccaacctgacagagaaggaggagatccggcagggcgagaccctgatgattgagggcacagagcagctgaagagcctgagcagtgacagcagcttctgcttcccccggccccacttctccttcagcaccctgcccaccgtgtccaggacagtggagctgaagtctgagcccaacgtcatcagcagccctgctgagtgcagcctggagctgagccccagccggccctgtgtgctgcacagcagcctgagcagaagagagacccccatctgcatgctgcccattgaaacagaaagaaacatctttgaaaattttgcccacccccccaacatcagccccagcgcctgccccctgcccccacctccacccatcagcccccccagccccccaccagccccagcccccctggcccctcctccagacatcagccccttcagcctcttctgccccccacccagcccccccagcatccccctgcccctgcccccacccaccttcttccccctgtctgtgtccaccagcggcccccccaccccacccctgctgccccccttccccacccccctgcccccacctcctccttccatcccctgccccccacctccttctgccagcttcctgagcacagaatgtgtgtgcatcactggagtgaagtgcaccaccaacctgatgcctgctgagaagatcaagagctccatgacccagctgagcaccaccaccgtgtgcaagacagacccccagcgggagcccaagggcatcctgcggcacgtgaagaacctggccgagctggagaagtctgtggccaacatgtacagccagatcgagaagaactacctgcggaccaacgtgtctgagctgcagaccatgtgccccagcgaggtgaccaacatggagatcaccagcgagcagaacaagggcagcctgaacaacatcgtggagggcacagagaagcagagccacagccagagcaccagcctgtag

SEQ ID NO: 166569 - DNA, 4620 bp, synthetic construct
  misc_feature 1..4620: note = Description of Artificial Sequence: Synthetic coding sequence
  source 1..4620: mol_type = other DNA
atgttccggcagttctacctgtggacctgcctggccagcggcatcatcctgggcagcctgtttgagatctgcctgggccagtatgatgatgactgcaagctggcccggggcggccccccagccaccatcgtggccattgatgaggagagcagaaatggcaccatcctggtggacaacatgctgatcaagggcacagctgggggccctgaccccaccatcgagctgagcctgaaggacaacgtggactactgggtgctgatggaccctgtgaagcagatgctgttcctgaacagcacaggccgggtgctggaccgggacccccccatgaacatccacagcatcgtggtgcaggtgcagtgcatcaacaagaaggtgggcaccatcatctaccacgaggtgagaattgtggtgcgggacagaaatgacaacagccccaccttcaagcatgagagctactatgccaccgtgaatgagctgacccctgtgggcaccaccatcttcaccggcttcagcggggacaacggggccacagacattgatgatggccccaacggccagattgaatatgtgatccagtacaacccagatgaccccaccagcaatgacacctttgagatccccctgatgctgactggaaacatcgtgctgaggaagaggctgaactatgaggacaagacccgctactttgtgatcatccaggccaatgaccgggcccagaacctgaatgaaagaaggaccaccaccaccaccctgactgtggatgtgctggatggagatgacctgggccccatgttcctgccctgtgtgctggtgcccaacacccgggactgccggcccctgacctaccaggccgccatccctgagctgcggaccccagaggagctgaaccccatcatcgtgaccccacccatccaggccatcgaccaggacaggaacatccagcccccaagtgaccggcccggcatcctgtacagcatcctggtgggcaccccagaggactacccccgcttcttccacatgcaccccaggacagctgagctgagcctgctggagcctgtgaacagagacttccaccagaagtttgacctggtgatcaaggccgagcaggacaatggccaccccctgcctgcctttgctggcctgcacatcgagatcctggatgagaacaaccagagcccctacttcaccatgcccagctaccagggctacatcctggagagcgcccctgtgggcgccaccatcagtgacagcctgaacctgaccagccccctgcgcatcgtggccctggacaaggacatcgaggacaccaaggaccctgagctgcacctgttcctgaatgactacaccagcgtcttcaccgtgacccagacaggcatcacccgctacctgaccctgctgcagcctgtggaccgggaggagcagcagacctacaccttcagcatcacagcctttgatggagtgcaggagagcgagcccgtcatcgtgaacatccaggtgatggatgccaatgacaacacccccaccttccctgagatctcctatgatgtgtatgtgtacacagacatgaggcctggggacagcgtcatccagctgacagctgtggatgctgatgagggcagcaatggagagatcacctatgagatcctggtgggcgcccagggcgacttcatcatcaacaagaccaccggcctcatcaccatcgcccctggggtggagatgattgtgggccgcacctacgccctgactgtgcaggccgctgacaatgcccccccagctgagaggagaaattccatctgcaccgtgtacatcgaggtgctgccccccaacaaccagagccccccacgcttcccccagctgatgtacagcctggagatcagcgaggccatgagggtgggcgctgtgctgctgaacctgcaggccacagaccgggagggggacagcatcacctacgccattgaaaatggagacccccagagggtcttcaacctgtctgagaccaccggcatcctgaccctgggcaaggccctggaccgggagagcacagaccgctacatcctgatcatcacagccagtgatggccgcccagatggcaccagcacagccaccgtgaacatcgtggtgacagatgtgaatgacaatgcccctgtgtttgacccctacctgcccaggaacctgtctgtggtggaggaggaggccaatgcctttgtgggccaggtgaaggccacagatcctgatgctggcatcaatggccaggtgcactacagcctgggcaacttcaacaacctcttccgcatcaccagcaatggcagcatctacacagctgtgaagctgaaccgggaggtgcgggactactatgagctggtggtggtggccacagatggagctgtgcaccccaggcacagcaccctgaccctggccatcaaggtgctggacattgatgacaacagccctgtgttcaccaacagcacctacacagtgctggtggaggagaacctgcctgctggcaccaccatcctgcagatcgaggccaaggatgtggacctgggcgccaacgtgtcctaccgcatccgcagccctgaggtgaagcacttctttgccctgcaccccttcaccggggagctgagcctgctgcggagcctggactatgaggccttcccagaccaggaggccagcatcaccttcctggtggaggcctttgacatctacggcaccatgcctcctggcatcgccaccgtgacagtgattgtgaaggacatgaatgactacccacctgtgttcagcaagaggatctacaagggcatggtggccccagatgctgtgaagggcacccccatcaccaccgtgtatgcagaagatgctgaccccccaggcctgcctgccagccgggtgcgctacagagtggatgatgtgcagttcccctacccagccagcatctttgaggtggaggaggacagcggccgggtcatcaccagggtgaacctgaatgaggagcccaccaccatcttcaagctggtggtggtggcctttgatgatggagagcctgtgatgagcagcagcgccaccgtgaagatcctggtgctgcaccctggagagatcccccgcttcacccaggaggagtaccggcccccacctgtgtctgagctggccaccaagggcaccatggtgggcgtcatctctgctgctgccatcaaccagagcatcgtgtacagcatcgtgtctggaaatgaggaggacaccttcggcatcaacaacatcaccggggtcatctacgtgaatggccccctggactatgagaccaggaccagctatgtgctgcgggtgcaggccgacagcctggaggtggtgctggccaacctgcgggtgcccagcaagagcaacacagccaaggtgtacatcgagatccaggatgagaacaaccacccccctgtgttccagaagaagttctacatcggcggcgtgtctgaagatgccaggatgttcacctctgtgctgcgggtgaaggccacagacaaggacaccggcaactacagcgtgatggcctaccgcctcatcatcccccccatcaaggagggcaaggagggctttgtggtggagacctacacaggcctcatcaagacagccatgctgttccacaacatgaggaggagctacttcaagttccaggtgattgccacagatgattatggcaagggcctgagcggcaaggcagatgtgctggtgtctgtggtgaaccagctggacatgcaggtgattgtgtccaatgtgccccccaccctggtggagaagaagattgaggacctgacagagatcctggaccgctacgtgcaggagcagatccctggggccaaggtggtggtggagagcattggagccaggagacatggagatgccttcagcctggaggactacaccaagtgtgacctgactgtgtatgccatcgacccccagaccaacagagccatcgacagaaatgagctgttcaagttcctggatggcaagctgctggacatcaacaaggacttccagccctactatggagagggcggccgcatcctggagatccgcaccccagaggccgtgaccagcatcaagaagagaggagagagcctgggctacacagaaggagccctgctggccctggccttcatcatcatcctgtgctgcatcccagccatcctggtggtgctggtgtcctaccggcagttcaaggtgcggcaggccgagtgcaccaagacagcccgcatccaggccgccctgcctgctgccaagccagctgtgcctgccccagcccctgtggccgcccctcctcctcctcctcctcctcctcctggggcccacctgtatgaggagctgggggacagctccatgcacaagaactacccctggagcctggagctgatcctggccaggaacatggacaagatcatcaccgtgatgtccatgggcatgaagtgcctgaacatgggcgtggccgtggactgctaccaccagctggacagaagaaacatggtgcgctggctggtgaagctgaggaagaacatgaggaggaagaggaagagccagaggaagctgaagaaccagaggctgaagctggagagcctggtgcggaggaagaagtag

SEQ ID NO: 166570 - DNA, 2160 bp, synthetic construct
  misc_feature 1..2160: note = Description of Artificial Sequence: Synthetic coding sequence
  source 1..2160: mol_type = other DNA
atgttccggcagttctacctgtggacctgcctggccagcggcatcatcctgggcagcctgtttgagatctgcctgggccagtatgatgatgactgcaagctggcccggggcggccccccagccaccatcgtggccattgatgaggagagcagaaatggcaccatcctggtggacaacatgctgatcaagggcacagctgggggccctgaccccaccatcgagctgagcctgaaggacaacgtggactactgggtgctgatggaccctgtgaagcagatgctgttcctgaacagcacaggccgggtgctggaccgggacccccccatgaacatccacagcatcgtggtgcaggtgcagtgcatcaacaagaaggtgggcaccatcatctaccacgaggtgagaattgtggtgcgggacagaaatgacaacagccccaccttcaagcatgagagctactatgccaccgtgaatgagctgacccctgtgggcaccaccatcttcaccggcttcagcggggacaacggggccacagacattgatgatggccccaacggccagattgaatatgtgatccagtacaacccagatgaccccaccagcaatgacacctttgagatccccctgatgctgactggaaacatcgtgctgaggaagaggctgaactatgaggacaagacccgctactttgtgatcatccaggccaatgaccgggcccagaacctgaatgaaagaaggaccaccaccaccaccctgactgtggatgtgctggatggagatgacctgggccccatgttcctgccctgtgtgctggtgcccaacacccgggactgccggcccctgacctaccaggccgccatccctgagctgcggaccccagaggagctgaaccccatcatcgtgaccccacccatccaggccatcgaccaggacaggaacatccagcccccaagtgaccggcccggcatcctgtacagcatcctggtgggcaccccagaggactacccccgcttcttccacatgcaccccaggacagctgagctgagcctgctggagcctgtgaacagagacttccaccagaagtttgacctggtgatcaaggccgagcaggacaatggccaccccctgcctgcctttgctggcctgcacatcgagatcctggatgagaacaaccagagcccctacttcaccatgcccagctaccagggctacatcctggagagcgcccctgtgggcgccaccatcagtgacagcctgaacctgaccagccccctgcgcatcgtggccctggacaaggacattgaagatgaggagcccaagaagatcaagaagcccaaggtggagatccgggagcccagcgaggaggaggaggtggtggtgaccatcgagaagcccccagctgctgagcccacctacaccacctggaagagggcccgcatcttccccatgatcttcaagaaggtgcggggcctggccgacaagaggggcatcgtggacctggagggggaggagtggcagaggcggctggaggaggaggacaaggactacctgaagctgaccctggaccaggaggaggccacagagagcacagtggagagcgaggaggagagcagcagtgactacacagagtacagcgaggaggagagcgagttcagcgagagcgagaccacagaggaggagagcgagagcgagacccccagcgaggaggaggagagcagcaccccagagagcgaggagagcgagagcacagagagcgagggggagaaggccaggaagaacatcgtgctggcccggcggcggcccatggtggaggaggtgaaggaggtgaagggcaggaaggaggagccccaggaggagcagaaggagcccaagatggaggaggaggagcacagcgaggaggaggagagcggccctgcccctgtggaggagagcacagatcctgaggcccaggacatccctgaggagggcagcgctgagagcgcctctgtggagggcggcgtggagagcgaggaggagagcgagagcggcagcagcagcagcagcagcgagagccagagcggcggcccctggggctaccaggtgcctgcctatgacaggagcaagaatgccaaccagaagaagagccctggggccaacagcgagggctacaacacagccctgtag

SEQ ID NO: 166571 - DNA, 1953 bp, synthetic construct
  misc_feature 1..1953: note = Description of Artificial Sequence: Synthetic coding sequence
  source 1..1953: mol_type = other DNA
atgttccggcagttctacctgtggacctgcctggccagcggcatcatcctgggcagcctgtttgagatctgcctgggccagtatgatgatgactgcaagctggcccggggcggccccccagccaccatcgtggccattgatgaggagagcagaaatggcaccatcctggtggacaacatgctgatcaagggcacagctgggggccctgaccccaccatcgagctgagcctgaaggacaacgtggactactgggtgctgatggaccctgtgaagcagatgctgttcctgaacagcacaggccgggtgctggaccgggacccccccatgaacatccacagcatcgtggtgcaggtgcagtgcatcaacaagaaggtgggcaccatcatctaccacgaggtgagaattgtggtgcgggacagaaatgacaacagccccaccttcaagcatgagagctactatgccaccgtgaatgagctgacccctgtgggcaccaccatcttcaccggcttcagcggggacaacggggccacagacattgatgatggccccaacggccagattgaatatgtgatccagtacaacccagatgaccccaccagcaatgacacctttgagatccccctgatgctgactggaaacatcgtgctgaggaagaggctgaactatgaggacaagacccgctactttgtgatcatccaggccaatgaccgggcccagaacctgaatgaaagaaggaccaccaccaccaccctgactgtggatgtgctggatggagatgacctgggccccatgttcctgccctgtgtgctggtgcccaacacccgggactgccggcccctgacctaccaggccgccatccctgagctgcggaccccagaggagctgaaccccatcatcgtgaccccacccatccaggccatcgaccaggacaggaacatccagcccccaagtgaccggcccggcatcctgtacagcatcctggtgggcaccccagaggactacccccgcttcttccacatgcaccccaggacagctgagctgagcctgctggagcctgtgaacagagacttccaccagaagtttgacctggtgatcaaggaggagcccaagaagatcaagaagcccaaggtggagatccgggagcccagcgaggaggaggaggtggtggtgaccatcgagaagcccccagctgctgagcccacctacaccacctggaagagggcccgcatcttccccatgatcttcaagaaggtgcggggcctggccgacaagaggggcatcgtggacctggagggggaggagtggcagaggcggctggaggaggaggacaaggactacctgaagctgaccctggaccaggaggaggccacagagagcacagtggagagcgaggaggagagcagcagtgactacacagagtacagcgaggaggagagcgagttcagcgagagcgagaccacagaggaggagagcgagagcgagaccccatctgaggaggaggagagcagcaccccagagagcgaggagagcgagagcacagaaagtgaaggagagaaggccaggaagaacatcgtgctggccaggagaagacccatggtggaggaggtgaaggaggtgaagggcaggaaggaggagccccaggaggagcagaaggagcccaagatggaggaggaggagcacagcgaggaggaggagagcggccctgcccctgtggaggagagcacagatcctgaggcccaggacatccctgaggagggcagcgctgagagcgcctctgtggagggcggcgtggagagcgaggaggagagcgagagcggcagcagcagcagcagcagcgagagccagagcggcggcccctggggctaccaggtgcctgcctatgacaggagcaagaatgccaaccagaagaagagccctggggccaacagcgagggctacaacacagccctgtag

SEQ ID NO: 166572 - DNA, 5358 bp, synthetic construct
  misc_feature 1..5358: note = Description of Artificial Sequence: Synthetic coding sequence
  source 1..5358: mol_type = other DNA
atgttccggcagttctacctgtggacctgcctggccagcggcatcatcctgggcagcctgtttgagatctgcctgggccagtatgatgatgactgcaagctggcccggggcggccccccagccaccatcgtggccattgatgaggagagcagaaatggcaccatcctggtggacaacatgctgatcaagggcacagctgggggccctgaccccaccatcgagctgagcctgaaggacaacgtggactactgggtgctgatggaccctgtgaagcagatgctgttcctgaacagcacaggccgggtgctggaccgggacccccccatgaacatccacagcatcgtggtgcaggtgcagtgcatcaacaagaaggtgggcaccatcatctaccacgaggtgagaattgtggtgcgggacagaaatgacaacagccccaccttcaagcatgagagctactatgccaccgtgaatgagctgacccctgtgggcaccaccatcttcaccggcttcagcggggacaacggggccacagacattgatgatggccccaacggccagattgaatatgtgatccagtacaacccagatgaccccaccagcaatgacacctttgagatccccctgatgctgactggaaacatcgtgctgaggaagaggctgaactatgaggacaagacccgctactttgtgatcatccaggccaatgaccgggcccagaacctgaatgaaagaaggaccaccaccaccaccctgactgtggatgtgctggatggagatgacctgggccccatgttcctgccctgtgtgctggtgcccaacacccgggactgccggcccctgacctaccaggccgccatccctgagctgcggaccccagaggagctgaaccccatcatcgtgaccccacccatccaggccatcgaccaggacaggaacatccagcccccaagtgaccggcccggcatcctgtacagcatcctggtgggcaccccagaggactacccccgcttcttccacatgcaccccaggacagctgagctgagcctgctggagcctgtgaacagagacttccaccagaagtttgacctggtgatcaaggccgagcaggacaatggccaccccctgcctgcctttgctggcctgcacatcgagatcctggatgagaacaaccagagcccctacttcaccatgcccagctaccagggctacatcctggagagcgcccctgtgggcgccaccatcagtgacagcctgaacctgaccagccccctgcgcatcgtggccctggacaaggacattgaagatgtgcccccatctggagtgcccaccaaggaccctgagctgcacctgttcctgaatgactacacctctgtgttcaccgtgacccagacaggcatcacccgctacctgaccctgctgcagcctgtggaccgggaggagcagcagacctacaccttcagcatcacagcctttgatggagtgcaggagagcgagcctgtgattgtgaacatccaggtgatggatgccaatgacaacacccccaccttccctgagatctcctatgatgtgtatgtgtacacagacatgaggcctggggacagcgtcatccagctgacagctgtggatgctgatgagggcagcaatggagagatcacctatgagatcctggtgggcgcccagggcgacttcatcatcaacaagaccaccggcctcatcaccatcgcccctggggtggagatgattgtgggccgcacctacgccctgactgtgcaggccgctgacaatgcccctcctgctgagaggaggaacagcatctgcaccgtgtacatcgaggtgctgccccccaacaaccagagccccccacgcttcccccagctgatgtacagcctggagatcagcgaggccatgagggtgggcgctgtgctgctgaacctgcaggccacagaccgggagggggacagcatcacctacgccattgaaaatggagacccccagagggtcttcaacctgtctgagaccaccggcatcctgaccctgggcaaggccctggaccgggagagcacagaccgctacatcctgatcatcacagccagtgatggccgcccagatggcaccagcacagccaccgtgaacatcgtggtgacagatgtgaatgacaatgcccctgtgtttgacccctacctgcccaggaacctgtctgtggtggaggaggaggccaatgcctttgtgggccaggtgaaggccacagatcctgatgctggcatcaatggccaggtgcactacagcctgggcaacttcaacaacctcttccgcatcaccagcaatggcagcatctacacagctgtgaagctgaaccgggaggtgcgggactactatgagctggtggtggtggccacagatggagctgtgcaccccaggcacagcaccctgaccctggccatcaaggtgctggacattgatgacaacagccctgtgttcaccaacagcacctacacagtgctggtggaggagaacctgcctgctggcaccaccatcctgcagatcgaggccaaggatgtggacctgggcgccaacgtgtcctaccgcatccgcagccctgaggtgaagcacttctttgccctgcaccccttcaccggggagctgagcctgctgcggagcctggactatgaggccttcccagaccaggaggccagcatcaccttcctggtggaggcctttgacatctacggcaccatgcctcctggcatcgccaccgtgaccgtcatcgtgaaggacatgaatgactacccacctgtgttcagcaagaggatctacaagggcatggtggccccagatgctgtgaagggcacccccatcaccaccgtgtatgcagaagatgctgaccccccaggcctgcctgccagccgggtgcgctacagagtggatgatgtgcagttcccctacccagccagcatctttgaggtggaggaggacagcggccgggtcatcaccagggtgaacctgaatgaggagcccaccaccatcttcaagctggtggtggtggcctttgatgatggagagcctgtgatgagcagcagcgccaccgtgaagatcctggtgctgcaccctggagagatcccccgcttcacccaggaggagtacagacctcctcctgtgtctgagctggccaccaagggcaccatggtgggcgtcatctctgctgctgccatcaaccagagcatcgtgtacagcatcgtgtctggaaatgaggaggacaccttcggcatcaacaacatcactggagtcatctacgtgaatggccccctggactatgagaccaggaccagctatgtgctgcgggtgcaggccgacagcctggaggtggtgctggccaacctgcgggtgcccagcaagagcaacacagccaaggtgtacatcgagatccaggatgagaacaaccacccccctgtgttccagaagaagttctacatcggcggcgtgtctgaagatgccaggatgttcacctctgtgctgcgggtgaaggccacagacaaggacaccggcaactacagcgtgatggcctaccgcctcatcatcccccccatcaaggagggcaaggagggctttgtggtggagacctacacaggcctcatcaagacagccatgctgttccacaacatgagaagaagctacttcaagttccaggtgattgccacagatgattatggcaagggcctgagcggcaaggcagatgtgctggtgtctgtggtgaaccagctggacatgcaggtgattgtgtccaatgtgccccccaccctggtggagaagaagattgaggacctgacagagatcctggacagatatgtgcaggagcagatccctggggccaaggtggtggtggagagcatcggggccaggagacatggagatgccttcagcctggaggactacaccaagtgtgacctgactgtgtatgccatcgacccccagaccaacagagccatcgacagaaatgaactcttcaagttcctggatggcaagctgctggacatcaacaaggacttccagccctactacggggagggcggccgcatcctggagatccgcaccccagaggccgtgaccagcatcaagaagagaggagagagcctgggctacacagagggcgccctgctggccctggccttcatcatcatcctgtgctgcatcccagccatcctggtggtgctggtgtcctaccggcagttcaaggtgcggcaggctgaatgtaccaagacagcccgcatccaggccgccctgcctgctgccaagccagctgtgcctgccccagcccctgtggccgcccctcctcctcctcctcctcctcctcctggggcccacctgtatgaggagctgggggacagctccatgcacaagtatgagatgccccagtatggcagcagaagaaggctgctgcccccagctggccaggaggagtatggagaggtggtgggggaggccgaggaggagtatgaggaggaggaggaggagcccaagaagatcaagaagcccaaggtggagatccgggagcccagcgaggaggaggaggtggtggtgaccatcgagaagcccccagctgctgagcccacctacaccacctggaagagggcccgcatcttccccatgatcttcaagaaggtgcggggcctggccgacaagaggggcatcgtggacctggagggggaggagtggcagaggcggctggaggaggaggacaaggactacctgaagctgaccctggaccaggaggaggccacagagagcacagtggagagcgaggaggagagcagcagtgactacacagagtacagcgaggaggagagcgagttcagcgagagcgagaccacagaggaggagagcgagagcgagacccccagcgaggaggaggagagcagcaccccagagagcgaggagagcgagagcacagagagcgagggggagaaggccaggaagaacatcgtgctggcccggcggcggcccatggtggaggaggtgaaggaggtgaagggcaggaaggaggagccccaggaggagcagaaggagcccaagatggaggaggaggagcacagcgaggaggaggagagcggccctgcccctgtggaggagagcacagatcctgaggcccaggacatccctgaggagggcagcgctgagagcgcctctgtggagggcggcgtggagagcgaggaggagagcgagagcggcagcagcagcagcagcagcgagagccagagcggcggcccctggggctaccaggtgcctgcctatgacaggagcaagaatgccaaccagaagaagagccctggggccaacagcgagggctacaacacagccctgtag

SEQ ID NO: 166573 - DNA, 2946 bp, synthetic construct
  misc_feature 1..2946: note = Description of Artificial Sequence: Synthetic coding sequence
  source 1..2946: mol_type = other DNA
atgttccggcagttctacctgtggacctgcctggccagcggcatcatcctgggcagcctgtttgagatctgcctgggccagtatgatgatgactgcaagctggcccggggcggccccccagccaccatcgtggccattgatgaggagagcagaaatggcaccatcctggtggacaacatgctgatcaagggcacagctgggggccctgaccccaccatcgagctgagcctgaaggacaacgtggactactgggtgctgatggaccctgtgaagcagatgctgttcctgaacagcacaggccgggtgctggaccgggacccccccatgaacatccacagcatcgtggtgcaggtgcagtgcatcaacaagaaggtgggcaccatcatctaccacgaggtgagaattgtggtgcgggacagaaatgacaacagccccaccttcaagcatgagagctactatgccaccgtgaatgagctgacccctgtgggcaccaccatcttcaccggcttcagcggggacaacggggccacagacattgatgatggccccaacggccagattgaatatgtgatccagtacaacccagatgaccccaccagcaatgacacctttgagatccccctgatgctgactggaaacatcgtgctgaggaagaggctgaactatgaggacaagacccgctactttgtgatcatccaggccaatgaccgggcccagaacctgaatgaaagaaggaccaccaccaccaccctgactgtggatgtgctggatggagatgacctgggccccatgttcctgccctgtgtgctggtgcccaacacccgggactgccggcccctgacctaccaggccgccatccctgagctgcggaccccagaggagctgaaccccatcatcgtgaccccacccatccaggccatcgaccaggacaggaacatccagcccccaagtgaccggcccggcatcctgtacagcatcctggtgggcaccccagaggactacccccgcttcttccacatgcaccccaggacagctgagctgagcctgctggagcctgtgaacagagacttccaccagaagtttgacctggtgatcaaggccgagcaggacaatggccaccccctgcctgcctttgctggcctgcacatcgagatcctggatgagaacaaccagagcccctacttcaccatgcccagctaccagggctacatcctggagagcgcccctgtgggcgccaccatcagtgacagcctgaacctgaccagccccctgcgcatcgtggccctggacaaggacatcgaggacaccaaggaccctgagctgcacctgttcctgaatgactacaccagcgtcttcaccgtgacccagacaggcatcacccgctacctgaccctgctgcagcctgtggaccgggaggagcagcagacctacaccttcagcatcacagcctttgatggagtgcaggagagcgagcccgtcatcgtgaacatccaggtgatggatgccaatgacaacacccccaccttccctgagatctcctatgatgtgtatgtgtacacagacatgaggcctggggacagcgtcatccagctgacagctgtggatgctgatgagggcagcaatggagagatcacctatgagatcctggtgggcgcccagggcgacttcatcatcaacaagaccaccggcctcatcaccatcgcccctggggtggagatgattgtgggccgcacctacgccctgactgtgcaggccgctgacaatgcccccccagctgagaggagaaattccatctgcaccgtgtacatcgaggtgctgccccccaacaaccagagccccccacgcttcccccagctgatgtacagcctggagatcagcgaggccatgagggtgggcgctgtgctgctgaacctgcaggccacagaccgggagggggacagcatcacctacgccattgaaaatggagacccccagagggtcttcaacctgtctgagaccaccggcatcctgaccctgggcaaggccctggaccgggagagcacagaccgctacatcctgatcatcacagccagtgatggccgcccagatggagaggagcccaagaagatcaagaagcccaaggtggagatccgggagcccagcgaggaggaggaggtggtggtgaccatcgagaagcccccagctgctgagcccacctacaccacctggaagagggcccgcatcttccccatgatcttcaagaaggtgcggggcctggccgacaagaggggcatcgtggacctggagggggaggagtggcagaggcggctggaggaggaggacaaggactacctgaagctgaccctggaccaggaggaggccacagagagcacagtggagagcgaggaggagagcagcagtgactacacagagtacagcgaggaggagagcgagttcagcgagagcgagaccacagaggaggagagcgagagcgagacccccagcgaggaggaggagagcagcaccccagagagcgaggagagcgagagcacagagagcgagggggagaaggccaggaagaacatcgtgctggcccggcggcggcccatggtggaggaggtgaaggaggtgaagggcaggaaggaggagccccaggaggagcagaaggagcccaagatggaggaggaggagcacagcgaggaggaggagagcggccctgcccctgtggaggagagcacagatcctgaggcccaggacatccctgaggagggcagcgctgagagcgcctctgtggagggcggcgtggagagcgaggaggagagcgagagcggcagcagcagcagcagcagcgagagccagagcggcggcccctggggctaccaggtgcctgcctatgacaggagcaagaatgccaaccagaagaagagccctggggccaacagcgagggctacaacacagccctgtag

SEQ ID NO: 166574 - DNA, 3453 bp, synthetic construct
  misc_feature 1..3453: note = Description of Artificial Sequence: Synthetic coding sequence
  source 1..3453: mol_type = other DNA
atgcccagctaccagggctacatcctggagagcgcccctgtgggcgccaccatcagtgacagcctgaacctgaccagccccctgcgcatcgtggccctggacaaggacattgaagatgtgcccccatctggagtgcccaccaaggaccctgagctgcacctgttcctgaatgactacacctctgtgttcaccgtgacccagacaggcatcacccgctacctgaccctgctgcagcctgtggaccgggaggagcagcagacctacaccttcagcatcacagcctttgatggagtgcaggagagcgagcctgtgattgtgaacatccaggtgatggatgccaatgacaacacccccaccttccctgagatctcctatgatgtgtatgtgtacacagacatgaggcctggggacagcgtcatccagctgacagctgtggatgctgatgagggcagcaatggagagatcacctatgagatcctggtgggcgcccagggcgacttcatcatcaacaagaccaccggcctcatcaccatcgcccctggggtggagatgattgtgggccgcacctacgccctgactgtgcaggccgctgacaatgcccctcctgctgagaggaggaacagcatctgcaccgtgtacatcgaggtgctgccccccaacaaccagagccccccacgcttcccccagctgatgtacagcctggagatcagcgaggccatgagggtgggcgctgtgctgctgaacctgcaggccacagaccgggagggggacagcatcacctacgccattgaaaatggagacccccagagggtcttcaacctgtctgagaccaccggcatcctgaccctgggcaaggccctggaccgggagagcacagaccgctacatcctgatcatcacagccagtgatggccgcccagatggcaccagcacagccaccgtgaacatcgtggtgacagatgtgaatgacaatgcccctgtgtttgacccctacctgcccaggaacctgtctgtggtggaggaggaggccaatgcctttgtgggccaggtgaaggccacagatcctgatgctggcatcaatggccaggtgcactacagcctgggcaacttcaacaacctcttccgcatcaccagcaatggcagcatctacacagctgtgaagctgaaccgggaggtgcgggactactatgagctggtggtggtggccacagatggagctgtgcaccccaggcacagcaccctgaccctggccatcaaggtgctggacattgatgacaacagccctgtgttcaccaacagcacctacacagtgctggtggaggagaacctgcctgctggcaccaccatcctgcagatcgaggccaaggatgtggacctgggcgccaacgtgtcctaccgcatccgcagccctgaggtgaagcacttctttgccctgcaccccttcaccggggagctgagcctgctgcggagcctggactatgaggccttcccagaccaggaggccagcatcaccttcctggtggaggcctttgacatctacggcaccatgcctcctggcatcgccaccgtgaccgtcatcgtgaaggacatgaatgactacccacctgtgttcagcaagaggatctacaagggcatggtggccccagatgctgtgaagggcacccccatcaccaccgtgtatgcagaagatgctgaccccccaggcctgcctgccagccgggtgcgctacagagtggatgatgtgcagttcccctacccagccagcatctttgaggtggaggaggacagcggccgggtcatcaccagggtgaacctgaatgaggagcccaccaccatcttcaagctggtggtggtggcctttgatgatggagagcctgtgatgagcagcagcgccaccgtgaagatcctggtgctgcaccctggagagatcccccgcttcacccaggaggagtacagacctcctcctgtgtctgagctggccaccaagggcaccatggtgggcgtcatctctgctgctgccatcaaccagagcatcgtgtacagcatcgtgtctggaaatgaggaggacaccttcggcatcaacaacatcactggagtcatctacgtgaatggccccctggactatgagaccaggaccagctatgtgctgcgggtgcaggccgacagcctggaggtggtgctggccaacctgcgggtgcccagcaagagcaacacagccaaggtgtacatcgagatccaggatgagaacaaccacccccctgtgttccagaagaagttctacatcggcggcgtgtctgaagatgccaggatgttcacctctgtgctgcgggtgaaggccacagacaaggacaccggcaactacagcgtgatggcctaccgcctcatcatcccccccatcaaggagggcaaggagggctttgtggtggagacctacacaggcctcatcaagacagccatgctgttccacaacatgagaagaagctacttcaagttccaggtgattgccacagatgattatggcaagggcctgagcggcaaggcagatgtgctggtgtctgtggtgaaccagctggacatgcaggtgattgtgtccaatgtgccccccaccctggtggagaagaagattgaggacctgacagagatcctggacagatatgtgcaggagcagatccctggggccaaggtggtggtggagagcatcggggccaggagacatggagatgccttcagcctggaggactacaccaagtgtgacctgactgtgtatgccatcgacccccagaccaacagagccatcgacagaaatgaactcttcaagttcctggatggcaagctgctggacatcaacaaggacttccagccctactacggggagggcggccgcatcctggagatccgcaccccagaggccgtgaccagcatcaagaagagaggagagagcctgggctacacagagggcgccctgctggccctggccttcatcatcatcctgtgctgcatcccagccatcctggtggtgctggtgtcctaccggcagttcaaggtgcggcaggctgaatgtaccaagacagcccgcatccaggccgccctgcctgctgccaagccagctgtgcctgccccagcccctgtggccgcccctcctcctcctcctcctcctcctcctggggcccacctgtatgaggagctgggggacagctccatgcacaagaactacccctggagcctggagctgatcctggccaggaacatggacaagatcatcaccgtgatgtccatgggcatgaagtgcctgaacatgggcgtggccgtggactgctaccaccagctggacagaagaaacatggtgcgctggctggtgaagctgaggaagaacatgaggaggaagaggaagagccagaggaagctgaagaaccagaggctgaagctggagagcctggtgcggaggaagaagtag

SEQ ID NO: 166575 - DNA, 990 bp, synthetic construct
  misc_feature 1..990: note = Description of Artificial Sequence: Synthetic coding sequence
  source 1..990: mol_type = other DNA
atgttccggcagttctacctgtggacctgcctggccagcggcatcatcctgggcagcctgtttgagatctgcctgggccagtatgatgatgactgcaagctggcccggggcggccccccagccaccatcgtggccattgatgaggagagcagaaatggcaccatcctggtggacaacatgctgatcaagggcacagctgggggccctgaccccaccatcgagctgagcctgaaggacaacgtggactactgggtgctgatggaccctgtgaagcagatgctgttcctgaacagcacaggccgggtgctggaccgggacccccccatgaacatccacagcatcgtggtgcaggtgcagtgcatcaacaagaaggtgggcaccatcatctaccacgaggtgagaattgtggtgcgggacagaaatgacaacagccccaccttcaagcatgagagctactatgccaccgtgaatgagctgacccctgtgggcaccaccatcttcaccggcttcagcggggacaacggggccacagacattgatgatggccccaacggccagattgaatatgtgatccagtacaacccagatgaccccaccagcaatgacacctttgagatccccctgatgctgactggaaacatcgtgctgaggaagaggctgaactatgaggacaagacccgctactttgtgatcatccaggccaatgaccgggcccagaacctgaatgaaagaaggaccaccaccaccaccctgactgtggatgtgctggatggagatgacctgggccccatgttcctgccctgtgtgctggtgcccaacacccgggactgccggcccctgacctaccaggccgccatccctgagctgcggaccccagacctgggcagcctgtgcagcggcaccaacagctggtgccagggccgctctggagtgcactggagcagccctgcctggcgctgcctcttcccccggcggctgcaccagatgtag

SEQ ID NO: 166576 - DNA, 5046 bp, synthetic construct
  misc_feature 1..5046: note = Description of Artificial Sequence: Synthetic coding sequence
  source 1..5046: mol_type = other DNA
atgttccggcagttctacctgtggacctgcctggccagcggcatcatcctgggcagcctgtttgagatctgcctgggccagtatgatgatggctggagatacatgtactgcaagctggcccggggcggccccccagccaccatcgtggccattgatgaggagagcagaaatggcaccatcctggtggacaacatgctgatcaagggcacagctgggggccctgaccccaccatcgagctgagcctgaaggacaacgtggactactgggtgctgatggaccctgtgaagcagatgctgttcctgaacagcacaggccgggtgctggaccgggacccccccatgaacatccacagcatcgtggtgcaggtgcagtgcatcaacaagaaggtgggcaccatcatctaccacgaggtgcgcatcgtggtgcgggacagaaatgacaacagccccaccttcaagcatgagagctactatgccaccgtgaatgagctgacccctgtgggcaccaccatcttcaccggcttcagcggggacaatggagccacagacattgatgatggccccaacggccagatcgagtatgtgatccagtacaacccagatgaccccaccagcaatgacacctttgagatccccctgatgctgaccggcaacatcgtgctgaggaagaggctgaactatgaggacaagacccgctacttcgtcatcatccaggccaatgaccgggcccagaacctgaatgaaagaaggaccaccaccaccaccctgactgtggatgtgctggatggagatgacctgggccccatgttcctgccctgtgtgctggtgcccaacacccgggactgccggcccctgacctaccaggccgccatccctgagctgcggaccccagaggagctgaaccccatcatcgtgaccccacccatccaggccatcgaccaggacaggaacatccagccccccagcgacaggcctggcatcctgtacagcatcctggtgggcaccccagaggactacccccgcttcttccacatgcaccccaggacagctgagctgagcctgctggagcctgtgaacagagacttccaccagaagtttgacctggtgatcaaggccgagcaggacaatggccaccccctgcctgcctttgctggcctgcacatcgagatcctggatgagaacaaccagagcccctacttcaccatgcccagctaccagggctacatcctggagagcgcccctgtgggcgccaccatcagtgacagcctgaacctgaccagccccctgagaattgtggccctggacaaggacatcgaggacaccaaggaccctgagctgcacctgttcctgaatgactacacctctgtgttcaccgtgacccagacaggcatcacccgctacctgaccctgctgcagcctgtggaccgggaggagcagcagacctacaccttcagcatcacagcctttgatggagtgcaggagagcgagcctgtgattgtgaacatccaggtgatggatgccaatgacaacacccccaccttccctgagatctcctatgatgtgtatgtgtacacagacatgaggcctggggacagcgtcatccagctgacagctgtggatgctgatgagggcagcaatggagagatcacctatgagatcctggtgggcgcccagggcgacttcatcatcaacaagaccaccggcctcatcaccatcgcccctggggtggagatgattgtgggccgcacctacgccctgactgtgcaggccgctgacaatgcccctcctgctgagaggaggaacagcatctgcaccgtgtacatcgaggtgctgccccccaacaaccagagccccccacgcttcccccagctgatgtacagcctggagatcagcgaggccatgagggtgggcgctgtgctgctgaacctgcaggccacagaccgggagggggacagcatcacctacgccattgaaaatggagacccccagagggtcttcaacctgtctgagaccaccggcatcctgaccctgggcaaggccctggaccgggagagcacagaccgctacatcctgatcatcacagccagtgatggccgcccagatggcaccagcacagccaccgtgaacatcgtggtgacagatgtgaatgacaatgcccctgtgtttgacccctacctgcccaggaacctgtctgtggtggaggaggaggccaatgcctttgtgggccaggtgaaggccacagatcctgatgctggcatcaatggccaggtgcactacagcctgggcaacttcaacaacctcttccgcatcaccagcaatggcagcatctacacagctgtgaagctgaaccgggaggtgcgggactactatgagctggtggtggtggccacagatggagctgtgcaccccaggcacagcaccctgaccctggccatcaaggtgctggacattgatgacaacagccctgtgttcaccaacagcacctacacagtgctggtggaggagaacctgcctgctggcaccaccatcctgcagatcgaggccaaggatgtggacctgggcgccaacgtgtcctaccgcatccgcagccctgaggtgaagcacttctttgccctgcaccccttcaccggggagctgagcctgctgcggagcctggactatgaggccttcccagaccaggaggccagcatcaccttcctggtggaggcctttgacatctacggcaccatgcctcctggcatcgccaccgtgaccgtcatcgtgaaggacatgaatgactacccacctgtgttcagcaagaggatctacaagggcatggtggccccagatgctgtgaagggcacccccatcaccaccgtgtatgcagaagatgctgaccccccaggcctgcctgccagccgggtgcgctacagagtggatgatgtgcagttcccctacccagccagcatctttgaggtggaggaggacagcggccgggtcatcaccagggtgaacctgaatgaggagcccaccaccatcttcaagctggtggtggtggcctttgatgatggagagcctgtgatgagcagcagcgccaccgtgaagatcctggtgctgcaccctggagagatcccccgcttcacccaggaggagtacagacctcctcctgtgtctgagctggccaccaagggcaccatggtgggcgtcatctctgctgctgccatcaaccagagcatcgtgtacagcatcgtgtctggaaatgaggaggacaccttcggcatcaacaacatcactggagtcatctacgtgaatggccccctggactatgagaccaggaccagctatgtgctgcgggtgcaggccgacagcctggaggtggtgctggccaacctgcgggtgcccagcaagagcaacacagccaaggtgtacatcgagatccaggatgagaacaaccacccccctgtgttccagaagaagttctacatcggcggcgtgtctgaagatgccaggatgttcacctctgtgctgcgggtgaaggccacagacaaggacaccggcaactacagcgtgatggcctaccgcctcatcatcccccccatcaaggagggcaaggagggctttgtggtggagacctacacaggcctcatcaagacagccatgctgttccacaacatgagaagaagctacttcaagttccaggtgattgccacagatgattatggcaagggcctgagcggcaaggcagatgtgctggtgtctgtggtgaaccagctggacatgcaggtgattgtgtccaatgtgccccccaccctggtggagaagaagattgaggacctgacagagatcctggacagatatgtgcaggagcagatccctggggccaaggtggtggtggagagcatcggggccaggagacatggagatgccttcagcctggaggactacaccaagtgtgacctgactgtgtatgccatcgacccccagaccaacagagccatcgacagaaatgaactcttcaagttcctggatggcaagctgctggacatcaacaaggacttccagccctactacggggagggcggccgcatcctggagatccgcaccccagaggccgtgaccagcatcaagaagagaggagagagcctgggctacacagagggcgccctgctggccctggccttcatcatcatcctgtgctgcatcccagccatcctggtggtgctggtgtcctaccggcagaggcaggccgagtgcaccaagacagcccgcatccaggccgccctgcctgctgccaagccagctgtgcctgccccagcccctgtggccgcccctcctcctcctcctcctcctcctcctggggcccacctgtatgaggagctgggggacagcagcatcctgtactaccgctatgagatgccccagtatggcagcagaagaaggctgctgcccccagctggccaggaggagtatggagaggtggtgggggaggccgaggaggagtatgaggaggaggagtgggccaggaagaggatgatcaagctggtggtggaccgggagtatgagaccagcagcactggagaggacagcgcccctgagtgccagaggaaccggctgcaccaccccagcatccacagcaacatcaatggaaacatctacatcgcccagaatggatctgtggtgaggacccggcgggcctgcctgacagacaacctgaaggtggccagccctgtgcggctgggcggccccttcaagaagctggacaagctggccgtgacccatgaggagaatgtgcccctgaacaccctgagcaagggccccttcagcacagagaagatgaatgcccggcccaccctggtgacctttgccccctgccctgtgggcacagacaacacagctgtgaagcccctgaggaaccggctgaagagcacagtggagcaggagagcatgattgacagcaagaacatcaaggaggccctggagttccacagcgaccacacccagagtgatgatgaggagctgtggatgggcccctggaacaacctgcacatccccatgaccaagctgtag

SEQ ID NO: 166577 - DNA, 5889 bp, synthetic construct
  misc_feature 1..5889: note = Description of Artificial Sequence: Synthetic coding sequence
  source 1..5889: mol_type = other DNA
atgttccggcagttctacctgtggacctgcctggccagcggcatcatcctgggcagcctgtttgagatctgcctgggccagtatgatgatgcctacagctatgaggactgcaagctggcccggggcggccccccagccaccatcgtggccattgatgaggagagcagaaatggcaccatcctggtggacaacatgctgatcaagggcacagctgggggccctgaccccaccatcgagctgagcctgaaggacaacgtggactactgggtgctgatggaccctgtgaagcagatgctgttcctgaacagcacaggccgggtgctggaccgggacccccccatgaacatccacagcatcgtggtgcaggtgcagtgcatcaacaagaaggtgggcaccatcatctaccacgaggtgcgcatcgtggtgcgggacagaaatgacaacagccccaccttcaagcatgagagctactatgccaccgtgaatgagctgacccctgtgggcaccaccatcttcaccggcttcagcggggacaatggagccacagacattgatgatggccccaacggccagatcgagtatgtgatccagtacaacccagatgaccccaccagcaatgacacctttgagatccccctgatgctgaccggcaacatcgtgctgaggaagaggctgaactatgaggacaagacccgctacttcgtcatcatccaggccaatgaccgggcccagaacctgaatgaaagaaggaccaccaccaccaccctgactgtggatgtgctggatggagatgacctgggccccatgttcctgccctgtgtgctggtgcccaacacccgggactgccggcccctgacctaccaggccgccatccctgagctgcggaccccagaggagctgaaccccatcatcgtgaccccacccatccaggccatcgaccaggacaggaacatccagccccccagcgacaggcctggcatcctgtacagcatcctggtgggcaccccagaggactacccccgcttcttccacatgcaccccaggacagctgagctgagcctgctggagcctgtgaacagagacttccaccagaagtttgacctggtgatcaaggccgagcaggacaatggccaccccctgcctgcctttgctggcctgcacatcgagatcctggatgagaacaaccagagcccctacttcaccatgcccagctaccagggctacatcctggagagcgcccctgtgggcgccaccatcagtgacagcctgaacctgaccagccccctgagaattgtggccctggacaaggacatcgaggacaccaaggaccctgagctgcacctgttcctgaatgactacacctctgtgttcaccgtgacccagacaggcatcacccgctacctgaccctgctgcagcctgtggaccgggaggagcagcagacctacaccttcagcatcacagcctttgatggagtgcaggagagcgagcctgtgattgtgaacatccaggtgatggatgccaatgacaacacccccaccttccctgagatctcctatgatgtgtatgtgtacacagacatgaggcctggggacagcgtcatccagctgacagctgtggatgctgatgagggcagcaatggagagatcacctatgagatcctggtgggcgcccagggcgacttcatcatcaacaagaccaccggcctcatcaccatcgcccctggggtggagatgattgtgggccgcacctacgccctgactgtgcaggccgctgacaatgcccctcctgctgagaggaggaacagcatctgcaccgtgtacatcgaggtgctgccccccaacaaccagagccccccacgcttcccccagctgatgtacagcctggagatcagcgaggccatgagggtgggcgctgtgctgctgaacctgcaggccacagaccgggagggggacagcatcacctacgccattgaaaatggagacccccagagggtcttcaacctgtctgagaccaccggcatcctgaccctgggcaaggccctggaccgggagagcacagaccgctacatcctgatcatcacagccagtgatggccgcccagatggcaccagcacagccaccgtgaacatcgtggtgacagatgtgaatgacaatgcccctgtgtttgacccctacctgcccaggaacctgtctgtggtggaggaggaggccaatgcctttgtgggccaggtgaaggccacagatcctgatgctggcatcaatggccaggtgcactacagcctgggcaacttcaacaacctcttccgcatcaccagcaatggcagcatctacacagctgtgaagctgaaccgggaggtgcgggactactatgagctggtggtggtggccacagatggagctgtgcaccccaggcacagcaccctgaccctggccatcaaggtgctggacattgatgacaacagccctgtgttcaccaacagcacctacacagtgctggtggaggagaacctgcctgctggcaccaccatcctgcagatcgaggccaaggatgtggacctgggcgccaacgtgtcctaccgcatccgcagccctgaggtgaagcacttctttgccctgcaccccttcaccggggagctgagcctgctgcggagcctggactatgaggccttcccagaccaggaggccagcatcaccttcctggtggaggcctttgacatctacggcaccatgcctcctggcatcgccaccgtgaccgtcatcgtgaaggacatgaatgactacccacctgtgttcagcaagaggatctacaagggcatggtggccccagatgctgtgaagggcacccccatcaccaccgtgtatgcagaagatgctgaccccccaggcctgcctgccagccgggtgcgctacagagtggatgatgtgcagttcccctacccagccagcatctttgaggtggaggaggacagcggccgggtcatcaccagggtgaacctgaatgaggagcccaccaccatcttcaagctggtggtggtggcctttgatgatggagagcctgtgatgagcagcagcgccaccgtgaagatcctggtgctgcaccctggagagatcccccgcttcacccaggaggagtacagacctcctcctgtgtctgagctggccaccaagggcaccatggtgggcgtcatctctgctgctgccatcaaccagagcatcgtgtacagcatcgtgtctggaaatgaggaggacaccttcggcatcaacaacatcactggagtcatctacgtgaatggccccctggactatgagaccaggaccagctatgtgctgcgggtgcaggccgacagcctggaggtggtgctggccaacctgcgggtgcccagcaagagcaacacagccaaggtgtacatcgagatccaggatgagaacaaccacccccctgtgttccagaagaagttctacatcggcggcgtgtctgaagatgccaggatgttcacctctgtgctgcgggtgaaggccacagacaaggacaccggcaactacagcgtgatggcctaccgcctcatcatcccccccatcaaggagggcaaggagggctttgtggtggagacctacacaggcctcatcaagacagccatgctgttccacaacatgagaagaagctacttcaagttccaggtgattgccacagatgattatggcaagggcctgagcggcaaggcagatgtgctggtgtctgtggtgaaccagctggacatgcaggtgattgtgtccaatgtgccccccaccctggtggagaagaagattgaggacctgacagagatcctggacagatatgtgcaggagcagatccctggggccaaggtggtggtggagagcatcggggccaggagacatggagatgccttcagcctggaggactacaccaagtgtgacctgactgtgtatgccatcgacccccagaccaacagagccatcgacagaaatgaactcttcaagttcctggatggcaagctgctggacatcaacaaggacttccagccctactacggggagggcggccgcatcctggagatccgcaccccagaggccgtgaccagcatcaagaagagaggagagagcctgggctacacagagggcgccctgctggccctggccttcatcatcatcctgtgctgcatcccagccatcctggtggtgctggtgtcctaccgccacttcaagaggcggcaggctgaatgtaccaagacagcccgcatccaggccgccctgcctgctgccaagccagctgtgcctgccccagcccctgtggccgcccctcctcctcctcctcctcctcctcctggggcccacctgtatgaggagctgggggacagctccatgaagggcctcttcctgctgtaccacttccagcagagccggggcaacaacagcgtgtctgaggacaggaagcaccagcaggtggtgatgcccttcagcagcaacaccatcgaggcccacaagagcgcccacgtggatggcagcctgaagagcaacaagctgaagagcgccaggaagttcaccttcctgagtgatgaagatgacctgagcgcccacaaccccctgtacaaggagaacatcagccaggtgtccaccaacagcgacatcagccagaggacagactttgtggaccccttcagccccaagatccaggccaagagcaagagcctgcggggcccccgggagaagatccagaggctgtggagccagagcgtgtccctgccccggcggctgatgaggaaggtgcccaacagacctgagatcatcgacctgcagcagtggcagggcacccggcagaaggcagaaaatgaaaatacaggcatctgcaccaacaagaggggcagcagcaaccccctgctgaccacagaggaggccaacctgacagagaaggaggagatccggcagggcgagaccctgatgattgagggcacagagcagctgaagagcctgagcagtgacagcagcttctgcttcccccggccccacttctccttcagcaccctgcccaccgtgtccaggacagtggagctgaagtctgagcccaacgtcatcagcagccctgctgagtgcagcctggagctgagccccagccggccctgtgtgctgcacagcagcctgagcagaagagagacccccatctgcatgctgcccattgaaacagaaagaaacatctttgaaaattttgcccacccccccaacatcagccccagcgcctgccccctgcccccacctccacccatcagcccccccagccccccaccagccccagcccccctggcccctcctccagacatcagccccttcagcctcttctgccccccacccagcccccccagcatccccctgcccctgcccccacccaccttcttccccctgtctgtgtccaccagcggcccccccaccccacccctgctgccccccttccccacccccctgcccccacctcctccttccatcccctgccccccacctccttctgccagcttcctgagcacagaatgtgtgtgcatcactggagtgaagtgcaccaccaacctgatgcctgctgagaagatcaagagctccatgacccagctgagcaccaccaccgtgtgcaagacagacccccagcgggagcccaagggcatcctgcggcacgtgaagaacctggccgagctggagaagtctgtggccaacatgtacagccagatcgagaagaactacctgcggaccaacgtgtctgagctgcagaccatgtgccccagcgaggtgaccaacatggagatcaccagcgagcagaacaagggcagcctgaacaacatcgtggagggcacagagaagcagagccacagccagagcaccagcctgtag

SEQ ID NO: 166578 - DNA, 5661 bp, synthetic construct
  misc_feature 1..5661: note = Description of Artificial Sequence: Synthetic coding sequence
  source 1..5661: mol_type = other DNA
atgttccggcagttctacctgtggacctgcctggccagcggcatcatcctgggcagcctgtttgagatctgcctgggccagtatgatgatgactgcaagctggcccggggcggccccccagccaccatcgtggccattgatgaggagagcagaaatggcaccatcctggtggacaacatgctgatcaagggcacagctgggggccctgaccccaccatcgagctgagcctgaaggacaacgtggactactgggtgctgatggaccctgtgaagcagatgctgttcctgaacagcacaggccgggtgctggaccgggacccccccatgaacatccacagcatcgtggtgcaggtgcagtgcatcaacaagaaggtgggcaccatcatctaccacgaggtgagaattgtggtgcgggacagaaatgacaacagccccaccttcaagcatgagagctactatgccaccgtgaatgagctgacccctgtgggcaccaccatcttcaccggcttcagcggggacaacggggccacagacattgatgatggccccaacggccagattgaatatgtgatccagtacaacccagatgaccccaccagcaatgacacctttgagatccccctgatgctgactggaaacatcgtgctgaggaagaggctgaactatgaggacaagacccgctactttgtgatcatccaggccaatgaccgggcccagaacctgaatgaaagaaggaccaccaccaccaccctgactgtggatgtgctggatggagatgacctgggccccatgttcctgccctgtgtgctggtgcccaacacccgggactgccggcccctgacctaccaggccgccatccctgagctgcggaccccagaggagctgaaccccatcatcgtgaccccacccatccaggccatcgaccaggacaggaacatccagcccccaagtgaccggcccggcatcctgtacagcatcctggtgggcaccccagaggactacccccgcttcttccacatgcaccccaggacagctgagctgagcctgctggagcctgtgaacagagacttccaccagaagtttgacctggtgatcaaggccgagcaggacaatggccaccccctgcctgcctttgctggcctgcacatcgagatcctggatgagaacaaccagagcccctacttcaccatgcccagctaccagggctacatcctggagagcgcccctgtgggcgccaccatcagtgacagcctgaacctgaccagccccctgcgcatcgtggccctggacaaggacatcgaggacaccaaggaccctgagctgcacctgttcctgaatgactacaccagcgtcttcaccgtgacccagacaggcatcacccgctacctgaccctgctgcagcctgtggaccgggaggagcagcagacctacaccttcagcatcacagcctttgatggagtgcaggagagcgagcccgtcatcgtgaacatccaggtgatggatgccaatgacaacacccccaccttccctgagatctcctatgatgtgtatgtgtacacagacatgaggcctggggacagcgtcatccagctgacagctgtggatgctgatgagggcagcaatggagagatcacctatgagatcctggtgggcgcccagggcgacttcatcatcaacaagaccaccggcctcatcaccatcgcccctggggtggagatgattgtgggccgcacctacgccctgactgtgcaggccgctgacaatgcccccccagctgagaggagcacaggcatcctgaccctgggcaaggccctggaccgggagagcacagaccgctacatcctgatcatcacagccagtgatggccgcccagatggcaccagcacagccaccgtgaacatcgtggtgacagatgtgaatgacaatgcccctgtgtttgacccctacctgcccaggaacctgtctgtggtggaggaggaggccaatgcctttgtgggccaggtgaaggccacagatcctgatgctggcatcaatggccaggtgcactacagcctgggcaacttcaacaacctcttccgcatcaccagcaatggcagcatctacacagctgtgaagctgaaccgggaggtgcgggactactatgagctggtggtggtggccacagatggagctgtgcaccccaggcacagcaccctgaccctggccatcaaggtgctggacattgatgacaacagccctgtgttcaccaacagcacctacacagtgctggtggaggagaacctgcctgctggcaccaccatcctgcagatcgaggccaaggatgtggacctgggcgccaacgtgtcctaccgcatccgcagccctgaggtgaagcacttctttgccctgcaccccttcaccggggagctgagcctgctgcggagcctggactatgaggccttcccagaccaggaggccagcatcaccttcctggtggaggcctttgacatctacggcaccatgcctcctggcatcgccaccgtgaccgtcatcgtgaaggacatgaatgactacccacctgtgttcagcaagaggatctacaagggcatggtggccccagatgctgtgaagggcacccccatcaccaccgtgtatgcagaagatgctgaccccccaggcctgcctgccagccgggtgcgctacagagtggatgatgtgcagttcccctacccagccagcatctttgaggtggaggaggacagcggccgggtcatcaccagggtgaacctgaatgaggagcccaccaccatcttcaagctggtggtggtggcctttgatgatggagagcctgtgatgagcagcagcgccaccgtgaagatcctggtgctgcaccctggagagatcccccgcttcacccaggaggagtacagacctcctcctgtgtctgagctggccaccaagggcaccatggtgggcgtcatctctgctgctgccatcaaccagagcatcgtgtacagcatcgtgtctggaaatgaggaggacaccttcggcatcaacaacatcactggagtcatctacgtgaatggccccctggactatgagaccaggaccagctatgtgctgcgggtgcaggccgacagcctggaggtggtgctggccaacctgcgggtgcccagcaagagcaacacagccaaggtgtacatcgagatccaggatgagaacaaccacccccctgtgttccagaagaagttctacatcggcggcgtgtctgaagatgccaggatgttcacctctgtgctgcgggtgaaggccacagacaaggacaccggcaactacagcgtgatggcctaccgcctcatcatcccccccatcaaggagggcaaggagggctttgtggtggagacctacacaggcctcatcaagacagccatgctgttccacaacatgagaagaagctacttcaagttccaggtgattgccacagatgattatggcaagggcctgagcggcaaggcagatgtgctggtgtctgtggtgaaccagctggacatgcaggtgattgtgtccaatgtgccccccaccctggtggagaagaagattgaggacctgacagagatcctggacagatatgtgcaggagcagatccctggggccaaggtggtggtggagagcatcggggccaggagacatggagatgccttcagcctggaggactacaccaagtgtgacctgactgtgtatgccatcgacccccagaccaacagagccatcgacagaaatgaactcttcaagttcctggatggcaagctgctggacatcaacaaggacttccagccctactacggggagggcggccgcatcctggagatccgcaccccagaggccgtgaccagcatcaagaagagaggagagagcctgggctacacagagggcgccctgctggccctggccttcatcatcatcctgtgctgcatcccagccatcctggtggtgctggtgtcctaccgccacttcaagaggcggcaggctgaatgtaccaagacagcccgcatccaggccgccctgcctgctgccaagccagctgtgcctgccccagcccctgtggccgcccctcctcctcctcctcctcctcctcctggggcccacctgtatgaggagctgggggacagctccatgaagggcctcttcctgctgtaccacttccagcagagccggggcaacaacagcgtgtctgaggacaggaagcaccagcaggtggtgatgcccttcagcagcaacaccatcgaggcccacaagagcgcccacgtggatggcagcctgaagagcaacaagctgaagagcgccaggaagttcaccttcctgagtgatgaagatgacctgagcgcccacaaccccctgtacaaggagaacatcagccaggtgtccaccaacagcgacatcagccagaggacagactttgtggaccccttcagccccaagatccaggccaagagcaagagcctgcggggcccccgggagaagatccagaggctgtggagccagagcgtgtccctgccccggcggctgatgaggaaggtgcccaacagacctgagatcatcgacctgcagcagtggcagggcacccggcagaaggcagaaaatgaaaatacaggcatctgcaccaacaagaggggcagcagcaaccccctgctgaccacagaggaggccaacctgacagagaaggaggagatccggcagggcgagaccctgatgattgagggcacagagcagctgaagagcctgagcagtgacagcagcttctgcttcccccggccccacttctccttcagcaccctgcccaccgtgtccaggacagtggagctgaagtctgagcccaacgtcatcagcagccctgctgagtgcagcctggagctgagccccagccggccctgtgtgctgcacagcagcctgagcagaagagagacccccatctgcatgctgcccattgaaacagaaagaaacatctttgaaaattttgcccacccccccaacatcagccccagcgcctgccccctgcccccacctccacccatcagcccccccagccccccaccagccccagcccccctggcccctcctccagacatcagccccttcagcctcttctgccccccacccagcccccccagcatccccctgcccctgcccccacccaccttcttccccctgtctgtgtccaccagcggcccccccaccccacccctgctgccccccttccccacccccctgcccccacctcctccttccatcccctgccccccacctccttctgccagcttcctgagcacagaatgtgtgtgcatcactggagtgaagtgcaccaccaacctgatgcctgctgagaagatcaagagctccatgacccagctgagcaccaccaccgtgtgcaagacagacccccagcgggagcccaagggcatcctgcggcacgtgaagaacctggccgagctggagaagtctgtggccaacatgtacagccagatcgagaagaactacctgcggaccaacgtgtctgagctgcagaccatgtgccccagcgaggtgaccaacatggagatcaccagcgagcagaacaagggcagcctgaacaacatcgtggagggcacagagaagcagagccacagccagagcaccagcctgtag

SEQ ID NO: 166579 - DNA, 1965 bp, synthetic construct
  misc_feature 1..1965: note = Description of Artificial Sequence: Synthetic coding sequence
  source 1..1965: mol_type = other DNA
atgttccggcagttctacctgtggacctgcctggccagcggcatcatcctgggcagcctgtttgagatctgcctgggccagtatgatgatgactgcaagctggcccggggcggccccccagccaccatcgtggccattgatgaggagagcagaaatggcaccatcctggtggacaacatgctgatcaagggcacagctgggggccctgaccccaccatcgagctgagcctgaaggacaacgtggactactgggtgctgatggaccctgtgaagcagatgctgttcctgaacagcacaggccgggtgctggaccgggacccccccatgaacatccacagcatcgtggtgcaggtgcagtgcatcaacaagaaggtgggcaccatcatctaccacgaggtgagaattgtggtgcgggacagaaatgacaacagccccaccttcaagcatgagagctactatgccaccgtgaatgagctgacccctgtgggcaccaccatcttcaccggcttcagcggggacaacggggccacagacattgatgatggccccaacggccagattgaatatgtgatccagtacaacccagatgaccccaccagcaatgacacctttgagatccccctgatgctgactggaaacatcgtgctgaggaagaggctgaactatgaggacaagacccgctactttgtgatcatccaggccaatgaccgggcccagaacctgaatgaaagaaggaccaccaccaccaccctgactgtggatgtgctggatggagatgacctgggccccatgttcctgccctgtgtgctggtgcccaacacccgggactgccggcccctgacctaccaggccgccatccctgagctgcggaccccagaggagctgaaccccatcatcgtgaccccacccatccaggccatcgaccaggacaggaacatccagcccccaagtgaccggcccggcatcctgtacagcatcctggtgggcaccccagaggactacccccgcttcttccacatgcaccccaggacagctgagctgagcctgctggagcctgtgaacagagacttccaccagaagtttgacctggtgatcaaggccgagcaggacaatggccaccccctgcctgcctttgctggcctgcacatcgagatcctggatgagaacaaccagagcccctacttcaccatgcccagctaccagggctacatcctggagagcgcccctgtgggcgccaccatcagtgacagcctgaacctgaccagccccctgcgcatcgtggccctggacaaggacatcgaggacaccaaggaccctgagctgcacctgttcctgaatgactacaccagcgtcttcaccgtgacccagacaggcatcacccgctacctgaccctgctgcagcctgtggaccgggaggagcagcagacctacaccttcagcatcacagcctttgatggagtgcaggagagcgagcccgtcatcgtgaacatccaggtgatggatgccaatgacaacacccccaccttccctgagatctcctatgatgtgtatgtgtacacagacatgaggcctggggacagcgtcatccagctgacagctgtggatgctgatgagggcagcaatggagagatcacctatgagatcctggtgggcgcccagggcgacttcatcatcaacaagaccaccggcctcatcaccatcgcccctggggtggagatgattgtgggccgcacctacgccctgactgtgcaggccgctgacaatgcccccccagctgagaggagaaattccatctgcaccgtgtacatcgaggtgctgccccccaacaaccagagccccccacgcttcccccagctgatgtacagcctggagatcagcgaggccatgagggtgggcgctgtgctgctgaacctgcagcacggggacagcaacctgcgggagagcacaggccagggcaagcactag

SEQ ID NO: 166580 - DNA, 5034 bp, synthetic construct
  misc_feature 1..5034: note = Description of Artificial Sequence: Synthetic coding sequence
  source 1..5034: mol_type = other DNA
atgttccggcagttctacctgtggacctgcctggccagcggcatcatcctgggcagcctgtttgagatctgcctgggccagtatgatgatgactgcaagctggcccggggcggccccccagccaccatcgtggccattgatgaggagagcagaaatggcaccatcctggtggacaacatgctgatcaagggcacagctgggggccctgaccccaccatcgagctgagcctgaaggacaacgtggactactgggtgctgatggaccctgtgaagcagatgctgttcctgaacagcacaggccgggtgctggaccgggacccccccatgaacatccacagcatcgtggtgcaggtgcagtgcatcaacaagaaggtgggcaccatcatctaccacgaggtgagaattgtggtgcgggacagaaatgacaacagccccaccttcaagcatgagagctactatgccaccgtgaatgagctgacccctgtgggcaccaccatcttcaccggcttcagcggggacaacggggccacagacattgatgatggccccaacggccagattgaatatgtgatccagtacaacccagatgaccccaccagcaatgacacctttgagatccccctgatgctgactggaaacatcgtgctgaggaagaggctgaactatgaggacaagacccgctactttgtgatcatccaggccaatgaccgggcccagaacctgaatgaaagaaggaccaccaccaccaccctgactgtggatgtgctggatggagatgacctgggccccatgttcctgccctgtgtgctggtgcccaacacccgggactgccggcccctgacctaccaggccgccatccctgagctgcggaccccagaggagctgaaccccatcatcgtgaccccacccatccaggccatcgaccaggacaggaacatccagcccccaagtgaccggcccggcatcctgtacagcatcctggtgggcaccccagaggactacccccgcttcttccacatgcaccccaggacagctgagctgagcctgctggagcctgtgaacagagacttccaccagaagtttgacctggtgatcaaggccgagcaggacaatggccaccccctgcctgcctttgctggcctgcacatcgagatcctggatgagaacaaccagagcccctacttcaccatgcccagctaccagggctacatcctggagagcgcccctgtgggcgccaccatcagtgacagcctgaacctgaccagccccctgcgcatcgtggccctggacaaggacatcgaggacaccaaggaccctgagctgcacctgttcctgaatgactacaccagcgtcttcaccgtgacccagacaggcatcacccgctacctgaccctgctgcagcctgtggaccgggaggagcagcagacctacaccttcagcatcacagcctttgatggagtgcaggagagcgagcccgtcatcgtgaacatccaggtgatggatgccaatgacaacacccccaccttccctgagatctcctatgatgtgtatgtgtacacagacatgaggcctggggacagcgtcatccagctgacagctgtggatgctgatgagggcagcaatggagagatcacctatgagatcctggtgggcgcccagggcgacttcatcatcaacaagaccaccggcctcatcaccatcgcccctggggtggagatgattgtgggccgcacctacgccctgactgtgcaggccgctgacaatgcccccccagctgagaggagaaattccatctgcaccgtgtacatcgaggtgctgccccccaacaaccagagccccccacgcttcccccagctgatgtacagcctggagatcagcgaggccatgagggtgggcgctgtgctgctgaacctgcaggccacagaccgggagggggacagcatcacctacgccattgaaaatggagacccccagagggtcttcaacctgtctgagaccaccggcatcctgaccctgggcaaggccctggaccgggagagcacagaccgctacatcctgatcatcacagccagtgatggccgcccagatggcaccagcacagccaccgtgaacatcgtggtgacagatgtgaatgacaatgcccctgtgtttgacccctacctgcccaggaacctgtctgtggtggaggaggaggccaatgcctttgtgggccaggtgaaggccacagatcctgatgctggcatcaatggccaggtgcactacagcctgggcaacttcaacaacctcttccgcatcaccagcaatggcagcatctacacagctgtgaagctgaaccgggaggtgcgggactactatgagctggtggtggtggccacagatggagctgtgcaccccaggcacagcaccctgaccctggccatcaaggtgctggacattgatgacaacagccctgtgttcaccaacagcacctacacagtgctggtggaggagaacctgcctgctggcaccaccatcctgcagatcgaggccaaggatgtggacctgggcgccaacgtgtcctaccgcatccgcagccctgaggtgaagcacttctttgccctgcaccccttcaccggggagctgagcctgctgcggagcctggactatgaggccttcccagaccaggaggccagcatcaccttcctggtggaggcctttgacatctacggcaccatgcctcctggcatcgccaccgtgacagtgattgtgaaggacatgaatgactacccacctgtgttcagcaagaggatctacaagggcatggtggccccagatgctgtgaagggcacccccatcaccaccgtgtatgcagaagatgctgaccccccaggcctgcctgccagccgggtgcgctacagagtggatgatgtgcagttcccctacccagccagcatctttgaggtggaggaggacagcggccgggtcatcaccagggtgaacctgaatgaggagcccaccaccatcttcaagctggtggtggtggcctttgatgatggagagcctgtgatgagcagcagcgccaccgtgaagatcctggtgctgcaccctggagagatcccccgcttcacccaggaggagtaccggcccccacctgtgtctgagctggccaccaagggcaccatggtgggcgtcatctctgctgctgccatcaaccagagcatcgtgtacagcatcgtgtctggaaatgaggaggacaccttcggcatcaacaacatcaccggggtcatctacgtgaatggccccctggactatgagaccaggaccagctatgtgctgcgggtgcaggccgacagcctggaggtggtgctggccaacctgcgggtgcccagcaagagcaacacagccaaggtgtacatcgagatccaggatgagaacaaccacccccctgtgttccagaagaagttctacatcggcggcgtgtctgaagatgccaggatgttcacctctgtgctgcgggtgaaggccacagacaaggacaccggcaactacagcgtgatggcctaccgcctcatcatcccccccatcaaggagggcaaggagggctttgtggtggagacctacacaggcctcatcaagacagccatgctgttccacaacatgaggaggagctacttcaagttccaggtgattgccacagatgattatggcaagggcctgagcggcaaggcagatgtgctggtgtctgtggtgaaccagctggacatgcaggtgattgtgtccaatgtgccccccaccctggtggagaagaagattgaggacctgacagagatcctggaccgctacgtgcaggagcagatccctggggccaaggtggtggtggagagcattggagccaggagacatggagatgccttcagcctggaggactacaccaagtgtgacctgactgtgtatgccatcgacccccagaccaacagagccatcgacagaaatgagctgttcaagttcctggatggcaagctgctggacatcaacaaggacttccagccctactatggagagggcggccgcatcctggagatccgcaccccagaggccgtgaccagcatcaagaagagaggagagagcctgggctacacagaaggagccctgctggccctggccttcatcatcatcctgtgctgcatcccagccatcctggtggtgctggtgtcctaccgccacttcaagaggcggcaggccgagtgcaccaagacagcccgcatccaggccgccctgcctgctgccaagccagctgtgcctgccccagcccctgtggccgcccctcctcctcctcctcctcctcctcctggggcccacctgtatgaggagctgggggacagcagcatctaccgctatgagatgccccagtatggcagcagaagaaggctgctgcccccagctggccaggaggagtatggagaggtggtgggggaggccgaggaggagtatgaggaggaggagtgggccaggaagaggatgatcaagctggtggtggaccgggagtatgagaccagcagcactggagaggacagcgcccctgagtgccagaggaaccggctgcaccaccccagcatccacagcaacatcaatggaaacatctacatcgcccagaatggatctgtggtgaggacccggcgggcctgcctgacagacaacctgaaggtggccagccctgtgcggctgggcggccccttcaagaagctggacaagctggccgtgacccatgaggagaatgtgcccctgaacaccctgagcaagggccccttcagcacagagaagatgaatgcccggcccaccctggtgacctttgccccctgccctgtgggcacagacaacacagctgtgaagcccctgaggaaccggctgaagagcacagtggagcaggagagcatgattgacagcaagaacatcaaggaggccctggagttccacagcgaccacacccagagtgatgatgaggagctgtggatgggcccctggaacaacctgcacatccccatgaccaagctgtag

SEQ ID NO: 166581 - DNA, 279 bp, synthetic construct
  misc_feature 1..279: note = Description of Artificial Sequence: Synthetic coding sequence
  source 1..279: mol_type = other DNA
atgttccggcagttctacctgtggacctgcctggccagcggcatcatcctgggcagcctgtttgagatctgcctgggccagtatgatgatgactgcaagctggcccggggcggccccccagccaccatcgtggccattgatgaggagagcagaaatggcaccatcctggtggacaacatgctgatcaagggcacagctgggggccctgaccccaccatcgagctgagcctgaaggacaacgtggactactgggtgctgatggaccctgtgaagcagtag

SEQ ID NO: 166582 - DNA, 3453 bp, synthetic construct
  misc_feature 1..3453: note = Description of Artificial Sequence: Synthetic coding sequence
  source 1..3453: mol_type = other DNA
atggccccacccctgcggcccctggcccggctgcggcccccaggcatgctgctgcgggccctgctgctgctgctgctgctgagccccctgcccggggtgtggtgcttcagcgagctgagctttgtgaaggagccccaggatgtgacagtgaccaggaaggaccctgtggtgctggactgccaggcccatggagaggtgcccatcaaggtgacctggctgaagaatggagccaagatgtctgagaacaagagaattgaggtgctgagcaatggcagcctgtacatcagcgaggtggagggcagaagaggagagcagagtgatgagggcttctaccagtgcctggccatgaacaagtatggagccatcctgagccagaaggcccacctggccctgagcaccatcagcgcctttgaggtgcagcccatcagcacagaggtgcatgaaggaggagtggccaggtttgcctgcaagatcagcagccaccccccagctgtgatcacctgggagttcaacagaaccaccctgcccatgaccatggaccgcatcacagccctgcccactggagtgctgcagatctatgatgtgtcccagagggacagcggcaactaccgctgcatcgccgccaccgtggcccacaggaggaagtccatggaggccagcctgaccgtcatcccagccaaggagagcaagagcttccacacccccaccatcatcgccggcccccagaacatcaccaccagcctgcaccagacagtggtgctggagtgcatggccactggaaaccccaagcccatcatctcctggagccggctggaccacaagagcattgatgtgttcaacaccagggtgctgggcaatggaaacctgatgatcagtgatgtgcggctgcagcacgccggcgtgtatgtgtgccgggccaccaccccaggcaccaggaacttcaccgtggccatggccaccctgactgtgctggccccacccagctttgtggagtggccagagagcctgacccggcccagggctggaacagccaggtttgtgtgccaggccgagggcatccccagccccaagatgtcctggctgaagaatggaaggaagatccacagcaatggccgcatcaagatgtacaacagcaagctggtgatcaaccagatcatcccagaagatgatgccatctaccagtgcatggccgagaacagccagggcagcatcctgagccgggcccggctgactgtggtgatgtctgaggaccggcccagcgccccctacaacgtgcatgctgagaccatgagcagcagcgccatcctgctggcctgggagcggcccctgtacaacagcgacaaggtgattgcctacagcgtgcactacatgaaggccgagggcctgaacaatgaggagtaccaggtggtgattggaaatgacaccacccactacatcattgatgacctggagcccgccagcaactacaccttctacatcgtggcctacatgcccatgggcgccagccagatgtctgaccacgtgacccagaacaccctggaggatgtgcccctgcggcccccagagatcagcctgaccagccgcagccccacagacatcctgatctcctggctgcccatcccagccaagtacagaagaggccaggtggtgctgtaccgcctgtccttccggctgagcacagaaaattccatccaggtgctggagctgcccggcaccacccatgagtacctgctggagggcctgaagccagattctgtgtacctggtgcgcatcacagctgccaccagggtgggcctgggggagagctctgtgtggaccagccacaggacccccaaggccacctctgtgaaggcccccaagagccctgagctgcacctggagcccctgaactgcaccaccatctctgtgcgctggcagcaggatgtggaggacacagctgccatccagggctacaagctgtactacaaggaggagggccagcaggagaatggccccatcttcctggacaccaaggacctgctgtacaccctgagcggcctggaccccaggaggaagtaccacgtgcggctgctggcctacaacaacattgatgatggctaccaggccgaccagacagtgtccaccccaggctgtgtgtctgtgcgggacaggatggtgcccccacctcctccaccccaccacctgtatgccaaggccaacaccagcagcagcatcttcctgcactggaggaggcctgccttcaccgctgcccagatcatcaactacaccatccgctgcaaccctgtgggcctgcagaatgccagcctggtgctgtacctgcagaccagcgagacccacatgctggtgcagggcctggagcccaacaccaagtatgaatttgctgtgcggctgcacgtggaccagctgagcagcccctggagccctgtggtgtaccacagcaccctgcctgaggccccagctggcccccctgtgggcgtgaaggtgaccctgattgaagatgacacagccctggtgtcctggaagcccccagatggccctgagaccgtggtgacccgctacaccatcctgtatgccagcaggaaggcctggattgctggggagtggcaggtgctgcaccgggagggcgccatcaccatggccctgctggagaacctggtggccggaaatgtgtacatcgtgaagatcagcgccagcaatgaggtgggggagggccccttcagcaacagcgtggagctggccgtgctgcccaaggagaccagcgagagcaaccagaggcccaagaggctggacagcgcagatgccaaggtgtacagcggctactaccacctggaccagaagtccatgactggaattgctgtgggcgtgggcatcgccctgacctgcatcctgatctgtgtgctgatcctgatctaccgcagcaaggccaggaagagcagcgccagcaagacagcccagaatggcacccagcagctgcccaggaccagcgccagcctggccagcggaaatgaggtgggcaagaacctggagggcgctgtgggcaatgaggagagcctgatgcccatgatcatgcccaacagcttcattgatgccaagggcggcacagacctgatcatcaacagctatggccccatcatcaagaacaacagcaagaagaagtggttcttcttccaggacagcaagaagatccaggtggagcagccccagaggcgcttcaccccagctgtgtgcttctaccagcccggcaccaccgtgctgatcagtgatgaggacagccccagcagccctggccagaccaccagcttcagccggccctttggagtggccgctgacacagagcacagcgccaacagcgagggcagccatgaaacaggagacagcggccgcttcagccatgagagcaatgatgagatccacctgagcagcgtcatcagcaccaccccacccaacctgtag

SEQ ID NO: 166583 - DNA, 1434 bp, synthetic construct
  misc_feature 1..1434: note = Description of Artificial Sequence: Synthetic coding sequence
  source 1..1434: mol_type = other DNA
atgggccgcacagtggtggtgctgggcggcggcatcagcggcctggccgccagctaccacctgagccgggccccctgcccccccaaggtggtgctggtggagagcagcgagcggctgggcggctggatccgctctgtgcggggccccaacggggccatctttgagctgggcccccggggcatccggcctgctggggccctgggcgcccggaccctgctgctggtgtctgagctgggcctggacagcgaggtgctgcctgtgcggggggaccaccctgctgcccagaaccgcttcctgtatgtgggcggggccctgcacgccctgcccaccggcctgcggggcctgctgcggcccagcccccccttcagcaagcccctcttctgggccggcctgcgggagctgaccaagccccggggcaaggagccagatgaaacagtgcacagctttgcccagaggcggctgggccctgaggtggccagcctggccatggacagcctgtgccggggcgtgtttgctggcaacagccgggagctgagcatccgcagctgcttccccagcctcttccaggccgagcagacccacaggagcatcctgctgggcctgctgctgggcgccggccgcaccccccagccagattctgccctgatccggcaggccctggccgagcgctggagccagtggagcctgcggggcggcctggagatgctgccccaggccctggagacccacctgaccagccggggcgtgtctgtgctgcggggccagcctgtgtgtggcctgagcctgcaggccgagggccgctggaaggtgtccctgcgggacagcagcctggaggccgaccacgtgatcagcgccatcccagcctctgtgctgtctgagctgctgcctgctgaggccgcccccctggcccgggccctgagcgccatcacagctgtgtctgtggccgtggtgaacctgcagtaccagggcgcccacctgcctgtgcagggcttcggccacctggtgcccagcagtgaagatcctggggtgctgggcatcgtgtatgacagcgtggccttccctgagcaggacggcagccccccaggcctgcgggtgacagtgatgctgggcggctcctggctgcagaccctggaggccagcggctgtgtgctgagccaggagctgttccagcagagggcccaggaggccgccgccacccagctgggcctgaaggagatgcccagccactgcctggtgcacctgcacaagaactgcatcccccagtacaccctgggccactggcagaagctggagagcgcccggcagttcctgacagcccaccggctgcccctgaccctggccggggccagctatgaaggagtggccgtgaatgactgcatcgagagcggccggcaggccgctgtgtctgtgctgggcacagagcccaacagctag

SEQ ID NO: 166584 - DNA, 1434 bp, synthetic construct; identical to SEQ ID NO: 166583
  misc_feature 1..1434: note = Description of Artificial Sequence: Synthetic coding sequence
  source 1..1434: mol_type = other DNA

SEQ ID NO: 166585 - DNA, 717 bp, synthetic construct
  misc_feature 1..717: note = Description of Artificial Sequence: Synthetic coding sequence
  source 1..717: mol_type = other DNA
atgggccgcacagtggtggtgctgggcggcggcatcagcggcctggccgccagctaccacctgagccgggccccctgcccccccaaggtggtgctggtggagagcagcgagcggctgggcggctggatccgctctgtgcggggccccaacggggccatctttgagctgggcccccggggcatccggcctgctggggccctgggcgcccggaccctgctgctgggcttcggccacctggtgcccagcagcgaggaccccggggtgctgggcatcgtgtatgattctgtggccttccctgagcaggacggcagccccccaggcctgcgggtgacagtgatgctgggcggctcctggctgcagaccctggaggccagcggctgtgtgctgagccaggagctgttccagcagagggcccaggaggccgccgccacccagctgggcctgaaggagatgcccagccactgcctggtgcacctgcacaagaccaagaaccagctgaagtggaggcagagccatgacagaacagtggagtggcccaaggagtacccaggccgcagcaggaagcaggcccccagcatcctgcacgtgcccggctgccagctgctgcgctgccgggaccgggaccacctgggcgctgtgtctgagcagcccaggagcagcgctgagagccgggtgggcgtggccagcagcaccttcagcaccttccccctcttctag

SEQ ID NO: 166586 - DNA, 1335 bp, synthetic construct
  misc_feature 1..1335: note = Description of Artificial Sequence: Synthetic coding sequence
  source 1..1335: mol_type = other DNA
atgggccgcacagtggtggtgctgggcggcggcatcagcggcctggccgccagctaccacctgagccgggccccctgcccccccaaggtggtgctggtggagagcagcgagcggctgggcggctggatccgctctgtgcggggccccaacggggccatctttgagctgggcccccggggcatccggcctgctggggccctgggcgcccggaccctgctgctggcctgtggggagcaggtgtctgagctgggcctggacagcgaggtgctgcctgtgcggggggaccaccctgctgcccagaaccgcttcctgtatgtgggcggggccctgcacgccctgcccaccggcctgagccccagcctgaccctgaaggtggccagcctggccatggacagcctgtgccggggcgtgtttgctggcaacagccgggagctgagcatccgcagctgcttccccagcctcttccaggccgagcagacccacaggagcatcctgctgggcctgctgctgggcgccggccgcaccccccagcctgacagcgccctgatccggcaggccctggccgagcgctggagccagtggagcctgcggggcggcctggagatgctgccccaggccctggagacccacctgaccagcagaggagtgtctgtgctgcggggccagcctgtgtgtggcctgagcctgcaggccgagggccgctggaaggtgtccctgcgggacagcagcctggaggccgaccacgtgatcagcgccatcccagcctctgtgctgtctgagctgctgcctgctgaggccgcccccctggcccgggccctgagcgccatcacagctgtgtctgtggccgtggtgaacctgcagtaccagggcgcccacctgcctgtgcagggcttcggccacctggtgcccagcagcgaggaccccggggtgctgggcatcgtgtatgattctgtggccttccctgagcaggacggcagccccccaggcctgcgggtgacagtgatgctgggcggctcctggctgcagaccctggaggccagcggctgtgtgctgagccaggagctgttccagcagagggcccaggaggccgccgccacccagctgggcctgaaggagatgcccagccactgcctggtgcacctgcacaagaactgcatcccccagtacaccctgggccactggcagaagctggagagcgcccggcagttcctgacagcccaccggctgcccctgaccctggccggggccagctatgagggcgtggccgtgaatgactgcattgaaagtggccggcaggccgctgtgtctgtgctgggcacagagcccaacagctag

SEQ ID NO: 166587 - DNA, 144 bp, synthetic construct
  misc_feature 1..144: note = Description of Artificial Sequence: Synthetic coding sequence
  source 1..144: mol_type = other DNA
atggacatcctgaagtctgagatcctgaggaagaggcagctggtggaggacaggaacctgctgtctgagagcatgtgtgccaatgatgcctacctgcagatggccatcggaaatgccccctggcccatcggcgtgaccatgtag

SEQ ID NO: 166588 - DNA, 504 bp, synthetic construct
  misc_feature 1..504: note = Description of Artificial Sequence: Synthetic coding sequence
  source 1..504: mol_type = other DNA
atgatccgcaccttccctggagagaacaagaagtacttcaagaggtctgagctggccaagaaggaggaggaggcctactttgagcgctgtggctacaagatccagcccaaggaggaggaccagaagcccctgaccagcagcaaccctgtgctggagctggagctggccgaggagaagctgcccatgaccctgagccggcaggaggtgatccggcggctgcgggagcggggggagcccatccggctgtttggagaaacagattatgatgccttccagaggctgaggaagattgagatcctgaccccagaggtgaacaagggcctgagaaatgacctgaaggccgccctggacaagattgaccagcagtacctgaatgaaattgtgggcggccaggagcctggagaggaggacacccagaatgacctgaaggtgcatgaggagaacaccaccatcgaggagctggaggccctgggggagagcctgggcaaaggagatgaccactag

SEQ ID NO: 166589 - DNA, 750 bp, synthetic construct
  misc_feature 1..750: note = Description of Artificial Sequence: Synthetic coding sequence
  source 1..750: mol_type = other DNA
atgatccgcaccttccctggagagaacaagaagtacttcaagaggtctgagctggccaagaaggaggaggaggcctactttgagcgctgtggctacaagcccatcaatgagaagcccagcggggagatccagcccaaggaggaggaccagaagcccctgaccagcagcaaccctgtgctggagctggagctggccgaggagaagctgcccatgaccctgagccggcaggaggtgatccggcggctgcgggagcggggggagcccatccggctgtttggagaaacagattatgatgccttccagaggctgaggaagattgagatcctgaccccagaggtgaacaagggcctgagaaatgacctgaaggccgccctggacaagattgaccagcagtacctgaatgagatcgtgggcggccaggagcccggggaggaggacacccagaatgacctgaaggtgcatgaggagaacaccaccatcgaggagctggaggccctgggggagagcctgggcaaaggagatgaccacaaggacatggacatcatcaccaagttcctgaagttcctgctgggcgtgtgggccaaggagctgaatgccagagaagattatgtgaagaggtctgtgcagggcaagctgaacagcgccacccagaagcagacagagagctacctgcggcccctcttcaggaagctgaggaagaggaacctgcctgctgacatcaaggagagcatcacagacatcatcaagtag

SEQ ID NO: 166590 - DNA, 1029 bp, synthetic construct
  misc_feature 1..1029: note = Description of Artificial Sequence: Synthetic coding sequence
  source 1..1029: mol_type = other DNA
atggacatcctgaagtctgagatcctgaggaagaggcagctggtggaggacaggaacctgctggtggagaacaagaagtacttcaagaggtctgagctggccaagaaggaggaggaggcctactttgagcgctgtggctacaagatccagcccaaggaggaggaccagaagcccctgaccagcagcaaccctgtgctggagctggagctggccgaggagaagctgcccatgaccctgagccggcaggaggtgatccggcggctgcgggagcggggggagcccatccggctgtttggagaaacagattatgatgccttccagaggctgaggaagattgagatcctgaccccagaggtgaacaagggcctgagaaatgacctgaaggccgccctggacaagattgaccagcagtacctgaatgagatcgtgggcggccaggagcccggggaggaggacacccagaatgacctgaaggtgcatgaggagaacaccaccatcgaggagctggaggccctgggggagagcctgggcaaaggagatgaccacaaggacatggacatcatcaccaagttcctgaagttcctgctgggcgtgtgggccaaggagctgaatgccagagaagattatgtgaagaggtctgtgcagggcaagctgaacagcgccacccagaagcagacagagagctacctgcggcccctcttcaggaagctgaggaagaggaacctgcctgctgacatcaaggagagcatcacagacatcatcaagttcatgctgcagcgggagtatgtgaaggccaatgatgcctacctgcagatggccatcggaaatgccccctggcccatcggcgtgaccatggtgggcatccacgccaggacaggccgggagaagatcttcagcaagcacgtggcccacgtgctgaatgatgagacccagaggaagtacatccagggcctgaagaggctgatgaccatctgccagaagcacttccccacagaccccagcaaatgtgtggagtacaatgccctgtag

SEQ ID NO: 166591 - DNA, 750 bp, synthetic construct; identical to SEQ ID NO: 166589
  misc_feature 1..750: note = Description of Artificial Sequence: Synthetic coding sequence
  source 1..750: mol_type = other DNA

SEQ ID NO: 166592 - DNA, 1083 bp, synthetic construct
  misc_feature 1..1083: note = Description of Artificial Sequence: Synthetic coding sequence
  source 1..1083: mol_type = other DNA
atggacacccccctgcggcgcagccggcggctgggcggcctgcggcctgagagccctgagagcctgacctctgtgtccaggacccggcgggccctggtggagtttgagagcaaccctgaggagacccgggagcccggcagcccccccagcgtgcagagagctggcctgggcagccctgagcggccccccaagaccagccctggcagcccccggctgcagcagggcgccggcctggagagcccccagggccagcctgagcctggagctgccagcccccagaggcagcaggacctgcacctggagagcccccagaggcagcctgagtacagccctgagagcccccgctgccagcccaagcccagcgaggaggcccccaagtgcagccaggaccagggcgtgctggccagcgagctggcccagaacaaggaggagctgacccctggggccccccagcaccagctgccccctgtgcccggcagccctgagccctacccaggccagcaggcccctggccctgagcccagccagcccctgctggagctgaccccccgggcccctggcagcccccggggccagcacgagcccagcaagcccccacctgctggggagaccgtgactggaggctttggagccaagaagaggaagggcagcagcagccaggccccagccagcaagaagctgaacaaggaggagctgcctgtgatccccaagggcaagcccaagagcggccgggtgtggaaggacaggagcaagaagcgcttcagccagatgctgcaggacaagcccctgcggacctcctggcagaggaagatgaaggagcggcaggagaggaagctggccaaggactttgcccggcacctggaggaggagaaggagcggcggcggcaggagaagaagcagaggagagctgagaacctgaagaggcggctggagaatgaaaggaaggccgaggtggtgcaggtgatcagaaatcctgccaagctgaagagggccaagaagaagcagctgcggagcattgagaagagggacaccctggccctgctgcagaagcagcccccccagcagcctgctgccaagatctag

SEQ ID NO: 166593 - DNA, 1095 bp, synthetic construct
  misc_feature 1..1095: note = Description of Artificial Sequence: Synthetic coding sequence
  source 1..1095: mol_type = other DNA
atgagcctggctgatgagctgctggccgacctggaggaggccgctgaggaggaggagggcggcagctatggagaggaggaggaggagcccgccattgaagatgtgcaggaggagacccagctggacctgagcggggacagcgtgaagaccatcgccaagctgtgggacagcaagatgtttgctgagatcatgatgaagattgaggagtacatcagcaagcaggccaaggccagcgaggtgatgggccctgtggaggccgcccctgagtacagagtgattgtggatgccaacaacctgactgtggagattgaaaatgagctgaacatcatccacaagttcatccgggacaagtacagcaagcgcttccctgagctggagagcctggtgcccaatgccctggactacatcagaacagtgaaggagctgggcaacagcctggacaagtgcaagaacaatgaaaacctgcagcagatcctgaccaatgccaccatcatggtggtgtctgtgacagccagcaccacccagggccagcagctgtctgaggaggagctggagcggctggaggaggcctgtgacatggccctggagctgaatgccagcaagcaccgcatctatgaatatgtggagagcaggatgtccttcatcgcccccaacctgagcatcatcattggagccagcacagctgccaagatcatgggcgtggccggcggcctgaccaacctgagcaagatgcctgcctgcaacatcatgctgctgggcgcccagaggaagaccctgagcggcttcagcagcacctctgtgctgccccacacaggctacatctaccacagcgacatcgtgcagagcctgcccccagacctgcggaggaaggccgcccggctggtggccgccaagtgcaccctggccgcccgggtggacagcttccacgagagcacagagggcaaggtgggctatgagctgaaggatgaaattgaaaggaagtttgacaagtggcagaggcggcgctggctgcggcccaccaggagcatcagccctgcctggctgagcagcagccgcagccgggcccggcgggtggccctgtgccccccagagtag

SEQ ID NO: 166594 - DNA, 1500 bp, synthetic construct
  misc_feature 1..1500: note = Description of Artificial Sequence: Synthetic coding sequence
  source 1..1500: mol_type = other DNA
atgagcctggctgatgagctgctggccgacctggaggaggccgctgaggaggaggagggcggcagctatggagaggaggaggaggagcccgccattgaagatgtgcaggaggagacccagctggacctgagcggggacagcgtgaagaccatcgccaagctgtgggacagcaagatgtttgctgagatcatgatgaagattgaggagtacatcagcaagcaggccaaggccagcgaggtgatgggccctgtggaggccgcccctgagtacagagtgattgtggatgccaacaacctgactgtggagattgaaaatgagctgaacatcatccacaagttcatccgggacaagtacagcaagcgcttccctgagctggagagcctggtgcccaatgccctggactacatcagaacagtgaaggagctgggcaacagcctggacaagtgcaagaacaatgaaaacctgcagcagatcctgaccaatgccaccatcatggtggtgtctgtgacagccagcaccacccagggccagcagctgtctgaggaggagctggagcggctggaggaggcctgtgacatggccctggagctgaatgccagcaagcaccgcatctatgaatatgtggagagcaggatgtccttcatcgcccccaacctgagcatcatcattggagccagcacagctgccaagatcatgggcgtggccggcggcctgaccaacctgagcaagatgcctgcctgcaacatcatgctgctgggcgcccagaggaagaccctgagcggcttcagcagcacctctgtgctgccccacacaggctacatctaccacagcgacatcgtgcagagcctgcccccagacctgcggaggaaggccgcccggctggtggccgccaagtgcaccctggccgcccgggtggacagcttccacgagagcacagagggcaaggtgggctatgagctgaaggatgaaattgaaaggaagtttgacaagtggcaggagcccccacctgtgaagcaggtgaagcccctgcctgcccccctggatggccagaggaagaagagaggaggaagacgctacaggaagatgaaggagcggctgggcctgacagagatcaggaagcaggccaacaggatgagctttggagaaattgaagaagatgcctaccaggaggacctgggcttcagcctgggccacctgggcaagagcggcagcggccgggtgcggcagacccaggtgaatgaggccaccaaggcccgcatcagcaagaccctgcagaggaccctgcagaagcagagcgtggtgtatggaggcaagagcaccatccgggacaggagcagcggcacagccagctctgtggccttcacccccctgcagggcctggagatcgtgaacccccaggccgctgagaagaaggtggccgaggccaaccagaagtacttcagctccatggccgagttcctgaaggtgaagggggagaagagcggcctgatgagcacctag

SEQ ID NO: 166595 - DNA, 1353 bp, synthetic construct
  misc_feature 1..1353: note = Description of Artificial Sequence: Synthetic coding sequence
  source 1..1353: mol_type = other DNA
atgagcctggctgatgagctgctggccgacctggaggaggccgctgaggaggaggagggcggcagctatggagaggaggaggaggagcccgccattgaagatgtgcaggaggagacccagctggacctgagcggggacagcgtgaagaccatcgccaagctgtgggacagcaagatgtttgctgagatcatgatgaagattgaggagtacatcagcaagcaggccaaggccagcgaggtgatgggccctgtggaggccgcccctgagtacagagtgattgtggatgccaacaacctgactgtggagattgaaaatgagctgaacatcatccacaagttcatccgggacaagtacagcaagcgcttccctgagctggagagcctggtgcccaatgccctggactacatcagaacagtgaaggagctgggcaacagcctggacaagtgcaagaacaatgaaaacctgcagcagatcctgaccaatgccaccatcatggtggtgtctgtgacagccagcaccacccagggccagcagctgtctgaggaggagctggagcggctggaggaggcctgtgacatggccctggagctgaatgccagcaagcaccgcatctatgaatatgtggagagcaggatgtccttcatcgcccccaacctgagcatcatcattggagccagcacagctgccaagatcatgggcgtggccggcggcctgaccaacctgagcaagatgcctgcctgcaacatcatgctgctgggcgcccagaggaagaccctgagcggcttcagcagcacctctgtgctgccccacacaggctacatctaccacagcgacatcgtgcagagcctgcccccagacctgcggaggaaggccgcccggctggtggccgccaagtgcaccctggccgcccgggtggacagcttccacgagagcacagagggcaaggtgggctatgagctgaaggatgaaattgaaaggaagtttgacaagtggcaggagcccccacctgtgaagcaggtgaagcccctgcctgcccccctggatggccagaggaagaagagaggaggaagacgctacaggaagatgaaggagcggctgggcctgacagagatcaggaagcaggccaacaggatgagctttggagaaattgaagaagatgcctaccaggaggacctgggcttcagcctgggccacctggatgctgctgctgaccctgctgaggccgagcggcgcatctggagggaggtgcaccacccccggcccctgctgggccacggcctgcagaggggcctgcaccccaccccaggccctggggactgtgagcccactggaggccgggaggagggcggctag

SEQ ID NO: 166596 - DNA, 831 bp, synthetic construct
  misc_feature 1..831: note = Description of Artificial Sequence: Synthetic coding sequence
  source 1..831: mol_type = other DNA
atgagcctggctgatgagctgctggccgacctggaggaggccgctgaggaggaggagggcggcagctatggagaggaggaggaggagcccgccattgaagatgtgcaggaggagacccagctggacctgagcggggacagcgtgaagaccatcgccaagctgtgggacagcaagatgtttgctgagatcatgatgaagattgaggagtacatcagcaagcaggccaaggccagcgaggtgatgggccctgtggaggccgcccctgagtacagagtgattgtggatgccaacaacctgactgtggagattgaaaatgagctgaacatcatccacaagttcatccgggacaagtacagcaagcgcttccctgagctggagagcctggtgcccaatgccctggactacatcagaacagtgaaggagctgggcaacagcctggacaagtgcaagaacaatgaaaacctgcagcagatcctgaccaatgccaccatcatggtggtgtctgtgacagccagcaccacccagggccagcagctgtctgaggaggagctggagcggctggaggaggcctgtgacatggccctggagctgaatgccagcaagcaccgcatctatgaatatgtggagagcaggatgtccttcatcgcccccaacctgagcatcatcattggagccagcacagctgccaagatcatgggcgtggccggcggcctgaccaacctgagcaagatgcctgcctgcaacatcatgctgctgggcgcccagaggaagaccctgagcggcttcagcagcacctctgtgctgccccacacaggctacatctaccactag

SEQ ID NO: 166597 - DNA, 855 bp, synthetic construct
  misc_feature 1..855: note = Description of Artificial Sequence: Synthetic coding sequence
  source 1..855: mol_type = other DNA
atgagcctggctgatgagctgctggccgacctggaggaggccgctgaggaggaggagggcggcagctatggagaggaggaggaggagcccgccattgaagatgtgcaggaggagacccagctggacctgagcggggacagcgtgaagaccatcgccaagctgtgggacagcaagatgtttgctgagatcatgatgaagattgaggagtacatcagcaagcaggccaaggccagcgaggtgatgggccctgtggaggccgcccctgagtacagagtgattgtggatgccaacaacctgactgtggagattgaaaatgagctgaacatcatccacaagttcatccgggacaagtacagcaagcgcttccctgagctggagagcctggtgcccaatgccctggactacatcagaacagtgaaggagctgggcaacagcctggacaagtgcaagaacaatgaaaacctgcagcagatcctgaccaatgccaccatcatggtggtgtctgtgacagccagcaccacccagggccagcagctgtctgaggaggagctggagcggctggaggaggcctgtgacatggccctggagctgaatgccagcaagcaccgcatctatgaatatgtggagagcaggatgtccttcatcgcccccaacctgagcatcatcattggagccagcacagctgccaagatcatgggcgtggccggcggcctgaccaacctgagcaagatgcctgcctgcaacatcatgctgctgggcgcccagaggaagaccctgagcggcttcagcagcacctctgtgctgccccacacaggctacatctaccacagcgacatcgtgcagagcctgccctag

SEQ ID NO: 166598 - DNA, 786 bp, synthetic construct
  misc_feature 1..786: note = Description of Artificial Sequence: Synthetic coding sequence
  source 1..786: mol_type = other DNA
atgagcctggctgatgagctgctggccgacctggaggaggccgctgaggaggaggagggcggcagctatggagaggaggaggaggagcccgccattgaagatgtgcaggaggagacccagctggacctgagcggggacagcgtgaagaccatcgccaagctgtgggacagcaagatgtttgctgagatcatgatgaagattgaggagtacatcagcaagcaggccaaggccagcgaggtgatgggccctgtggaggccgcccctgagtacagagtgattgtggatgccaacaacctgactgtggagattgaaaatgagctgaacatcatccacaagttcatccgggacaagtacagcaagcgcttccctgagctggagagcctggtgcccaatgccctggactacatcagaacagtgaaggagctgggcaacagcctggacaagtgcaagaacaatgaaaacctgcagcagatcctgaccaatgccaccatcatggtggtgtctgtgacagccagcaccacccagggccagcagctgtctgaggaggagctggagcggctggaggaggcctgtgacatggccctggagctgaatgccagcaagcaccgcatctatgaatatgtggagagcaggatgtccttcatcgcccccaacctgagcatcatcattggagccagcacagctgccaagatcatgggcgtggccggcggcctgaccaacctgagcaagatgcctgcctgcaacatcatgctgctgggcgcccagaggaagaccctgagcggctag

SEQ ID NO: 166599 - DNA, 1569 bp, synthetic construct
  misc_feature 1..1569: note = Description of Artificial Sequence: Synthetic coding sequence
  source 1..1569: mol_type = other DNA
atggccagcagccgggccagcagcacccaggccaccaagaccaaggccccagatgacctggtggcccctgtggtgaagaagccccacatctactacggcagcctggaggagaaggagcgggagcggctggccaagggggagagcggcatcctgggcaaggatggcctgaaggccggcatcgaggccggcaacatcaacatcaccagcggggaggtgtttgaaattgaggagcacatcagcgagcggcaggccgaggtgctggccgagtttgagaggaggaagagggcccggcagatcaacgtgtccacagatgacagcgaggtgaaggcctgcctgcgggccctgggggagcccatcaccctgtttggagagggccctgctgagcggcgggagcggctgaggaacatcctgtctgtggtgggcacagatgccctgaagaagaccaagaaggatgatgagaagagcaagaagagcaaggaggagtaccagcagacctggtaccacgagggccccaacagcctgaaggtggcccggctgtggatcgccaactacagcctgccccgggccatgaagaggctggaggaggcccggctgcacaaggagatccctgagaccaccaggaccagccagatgcaggagctgcacaagagcctgcggagcctgaacaacttctgcagccagattggagatgaccggcccatctcctactgccacttcagccccaacagcaagatgctggccacagcctgctggagcggcctgtgcaagctgtggagcgtgcctgactgcaacctgctgcacaccctgcggggccacaacaccaacgtgggcgccatcgtgttccaccccaagagcacagtgtccctggaccccaaggatgtgaacctggccagctgtgccgcagatggctctgtgaagctgtggagcctggacagtgatgagcctgtggccgacatcgagggccacacagtgcgggtggcccgggtgatgtggcaccccagcggccgcttcctgggcaccacctgctatgaccgctcctggaggctgtgggacctggaggcccaggaggagatcctgcaccaggagggccacagcatgggcgtgtatgacatcgccttccaccaggacggcagcctggccggcaccggcggcctggatgccttcggccgggtgtgggacctgaggacaggccgctgcatcatgttcctggagggccacctgaaggagatctacggcatcaacttcagccccaacggctaccacatcgccaccggcagcggggacaacacctgcaaggtgtgggacctgcggcagaggcgctgtgtgtacaccatcccagcccaccagaacctggtgactggagtgaagtttgagcccatccacggcaacttcctgctgactggagcctatgacaacacagccaagatctggacccaccctggctggagccccctgaagaccctggccggccacgagggcaaggtgatgggcctggacatcagcagtgatggccagctgattgccacctgcagctatgacaggaccttcaagctgtggatggccgagtag

SEQ ID NO: 166600 - DNA, 1566 bp, synthetic construct
  misc_feature 1..1566: note = Description of Artificial Sequence: Synthetic coding sequence
  source 1..1566: mol_type = other DNA
atggccagcagccgggccagcagcacagccaccaagaccaaggccccagatgacctggtggcccctgtggtgaagaagccccacatctactacggcagcctggaggagaaggagcgggagcggctggccaagggggagagcggcatcctgggcaaggatggcctgaaggccggcattgaagctggcaacatcaacatcaccagcggggaggtgtttgaaattgaggagcacatcagcgagcggcaggccgaggtgctggccgagtttgaaagaaggaagagggcccggcagatcaacgtgtccacagatgattctgaggtgaaggcctgcctgcgggccctgggggagcccatcaccctgtttggagagggccctgctgagcggcgggagcggctgaggaacatcctgtctgtggtgggcacagatgccctgaagaagaccaagaaggatgatgagaagagcaagaagagcaaggaggagtaccagcagacctggtaccacgagggccccaacagcctgaaggtggcccggctgtggatcgccaactacagcctgccccgggccatgaagaggctggaggaggcccggctgcacaaggagatccctgagaccaccaggaccagccagatgcaggagctgcacaagagcctgcggagcctgaacaacttctgcagccagattggagatgaccggcccatctcctactgccacttcagccccaacagcaagatgctggccacagcctgctggagcggcctgtgcaagctgtggagcgtgcctgactgcaacctgctgcacaccctgcggggccacaacaccaacgtgggcgccatcgtgttccaccccaagagcacagtgtccctggaccccaaggatgtgaacctggccagctgtgccgcagatggctctgtgaagctgtggagcctggacagtgatgagcctgtggccgacatcgagggccacacagtgcgggtggcccgggtgatgtggcaccccagcggccgcttcctgggcaccacctgctatgaccgctcctggaggctgtgggacctggaggcccaggaggagatcctgcaccaggagggccacagcatgggcgtgtatgacatcgccttccaccaggacggcagcctggccggcactggaggcctggatgccttcggccgggtgtgggacctgaggacaggccgctgcatcatgttcctggagggccacctgaaggagatctacggcatcaacttcagccccaacggctaccacatcgccactggaagtggggacaacacctgcaaggtgtgggacctgcggcagaggcgctgtgtgtacaccatcccagcccaccagaacctggtgactggagtgaagtttgagcccatccacggcaacttcctgctgaccggggcctatgacaacacagccaagatctggacccaccctggctggagccccctgaagaccctggccggccacgagggcaaggtgatgggcctggacatcagcagtgatggccagctgattgccacctgcagctatgacaggaccttcaagctgtggatggccgagtag

SEQ ID NO: 166601 - DNA, 3024 bp, synthetic construct
  misc_feature 1..3024: note = Description of Artificial Sequence: Synthetic coding sequence
  source 1..3024: mol_type = other DNA
atggctgctgctgagacccagagcctgcgggagcagcctgagatggaggatgccaacagcgagaagagcatcaatgaagaaaatggagaggtgtctgaggaccagagccagaacaagcacagccgccacaagaagaagaagcacaagcacaggagcaagcacaagaagcacaagcacagcagcgaggaggacaaggacaagaagcacaagcacaagcacaagcacaagaagcacaagaggaaggagatcattgatgccagtgacaaggagggcatgagccctgccaagaggaccaagctggatgacctggccctgctggaggacctggagaagcagagggccctgatcaaggccgagctggacaatgagctgatggagggcaaggtgcagagcggcatgggcctcatcctgcagggctatgagagcggcagcgaggaggagggggagatccacgagaaggccagaaatggaaacagaagcagcaccaggagcagcagcaccaagggcaagctggagctggtggacaacaagatcaccaccaagaagaggagcaagagccgcagcaaggagaggaccaggcacagaagtgacaagaagaagagcaagggcggcattgaaattgtgaaggagaagaccaccaggagcaagagcaaggagaggaagaagagcaagagccccagcaagaggagcaagagccaggaccaggccaggaagagcaagagccccaccctgcggcggcgcagccaggagaagattggcaaggcccggagccccacagatgacaaggtgaagattgaggacaagagcaagagcaaggacaggaagaagagccccatcatcaatgaaagccgcagccgggaccggggcaagaagagccgcagccctgtggacctgcggggcaagagcaaggacagaagaagccgcagcaaggagaggaagagcaagagaagtgaaacagacaaggagaagaagcccatcaagagccccagcaaggatgccagcagcggcaaggagaacagaagccccagccggcggcccggccgcagccccaagaggaggagcctgagccccaagccccgggacaagagccgccgcagccgcagccccctgctgaatgaccggcgcagcaagcagagcaagagccccagcaggaccctgagccctggccggcgggccaagagccgcagcctggagaggaagagaagagagcctgagcggcggcggctgagcagccccaggacccggcccagagatgacatcctgagcagaagagagaggagcaaggatgccagccccatcaaccgctggagccccaccaggagaagaagccgcagccccatcagaagaagaagccgcagccccctgcggcgcagccgcagccccaggagaagaagccgcagcccccggcggcgggaccggggcagaagaagccgcagccggctgcggcggcgcagccgcagcagaggaggaagaagaagaagaagccgcagcaaggtgaaggaggacaagttcaagggcagcctgtctgagggcatgaaggtggagcaggagagcagcagtgatgacaacctggaggactttgatgtggaggaggaggatgaggaggccctgattgagcagaggcgcatccagaggcaggccatcgtgcagaagtacaagtacctggccgaggacagcaacatgtctgtgcccagcgagcccagcagcccccagagcagcaccaggaccaggagccccagcccagatgacatcctggagcgggtggccgcagatgtgaaggagtatgagcgggagaatgtggacacctttgaggcctctgtgaaggccaagcacaacctgatgacagtggagcagaacaacggcagcagccagaagaagctgctggccccagacatgttcacagaaagtgatgacatgtttgctgcctactttgacagcgcccggctgcgggccgccggcatcggcaaggacttcaaggagaaccccaacctgcgggacaactggacagatgctgagggctactacagagtgaacattggagaggtgctggacaagcgctacaacgtgtatggctacacaggccagggcgtcttcagcaatgtggtgcgggcccgggacaatgcccgggccaaccaggaggtggccgtgaagatcatccggaacaatgagctgatgcagaagacaggcctgaaggagctggagttcctgaagaagctgaatgatgctgaccctgatgacaagttccactgcctgcggctcttccgccacttctaccacaagcagcacctgtgcctggtgtttgagcccctgtccatgaacctgcgggaggtgctgaagaagtatggcaaggatgtgggcctgcacatcaaggctgtgcgcagctacagccagcagctgttcctggccctgaagctgctgaagcgctgcaacatcctgcacgccgacatcaagccagacaacatcctggtgaatgaaagcaagaccatcctgaagctgtgtgactttggaagtgccagccacgtggccgacaatgacatcaccccctacctggtgagccgcttctaccgggcccctgagatcatcatcggcaagagctatgactatggcatcgacatgtggagcgtgggctgcaccctgtatgagctgtacaccgggaagatcctcttccctgggaagaccaacaaccacatgctgaagctggccatggacctgaagggcaagatgcccaacaagatgatcagaaaaggagtcttcaaggaccagcactttgaccagaacctgaacttcatgtacatcgaggtggacaaggtgacagagcgggagaaggtgacagtgatgagcaccatcaaccccaccaaggacctgctggccgacctgattggctgccagaggctgcctgaggaccagaggaagaaggtgcaccagctgaaggacctgctggaccagatcctgatgctggaccctgccaagaggatcagcatcaaccaggccctgcagcacgccttcatccaggagaagatctag

SEQ ID NO: 166602 - DNA, 3024 bp, synthetic construct; identical to SEQ ID NO: 166601
  misc_feature 1..3024: note = Description of Artificial Sequence: Synthetic coding sequence
  source 1..3024: mol_type = other DNA

SEQ ID NO: 166603 - DNA, 2982 bp, synthetic construct
  misc_feature 1..2982: note = Description of Artificial Sequence: Synthetic coding sequence
  source 1..2982: mol_type = other DNA
atggaggatgccaacagcgagaagagcatcaatgaagaaaatggagaggtgtctgaggaccagagccagaacaagcacagccgccacaagaagaagaagcacaagcacaggagcaagcacaagaagcacaagcacagcagcgaggaggacaaggacaagaagcacaagcacaagcacaagcacaagaagcacaagaggaaggagatcattgatgccagtgacaaggagggcatgagccctgccaagaggaccaagctggatgacctggccctgctggaggacctggagaagcagagggccctgatcaaggccgagctggacaatgagctgatggagggcaaggtgcagagcggcatgggcctcatcctgcagggctatgagagcggcagcgaggaggagggggagatccacgagaaggccagaaatggaaacagaagcagcaccaggagcagcagcaccaagggcaagctggagctggtggacaacaagatcaccaccaagaagaggagcaagagccgcagcaaggagaggaccaggcacagaagtgacaagaagaagagcaagggcggcattgaaattgtgaaggagaagaccaccaggagcaagagcaaggagaggaagaagagcaagagccccagcaagaggagcaagagccaggaccaggccaggaagagcaagagccccaccctgcggcggcgcagccaggagaagattggcaaggcccggagccccacagatgacaaggtgaagattgaggacaagagcaagagcaaggacaggaagaagagccccatcatcaatgaaagccgcagccgggaccggggcaagaagagccgcagccctgtggacctgcggggcaagagcaaggacagaagaagccgcagcaaggagaggaagagcaagagaagtgaaacagacaaggagaagaagcccatcaagagccccagcaaggatgccagcagcggcaaggagaacagaagccccagccggcggcccggccgcagccccaagaggaggagcctgagccccaagccccgggacaagagccgccgcagccgcagccccctgctgaatgaccggcgcagcaagcagagcaagagccccagcaggaccctgagccctggccggcgggccaagagccgcagcctggagaggaagagaagagagcctgagcggcggcggctgagcagccccaggacccggcccagagatgacatcctgagcagaagagagaggagcaaggatgccagccccatcaaccgctggagccccaccaggagaagaagccgcagccccatcagaagaagaagccgcagccccctgcggcgcagccgcagccccaggagaagaagccgcagcccccggcggcgggaccggggcagaagaagccgcagccggctgcggcggcgcagccgcagcagaggaggaagaagaagaagaagccgcagcaaggtgaaggaggacaagttcaagggcagcctgtctgagggcatgaaggtggagcaggagagcagcagtgatgacaacctggaggactttgatgtggaggaggaggatgaggaggccctgattgagcagaggcgcatccagaggcaggccatcgtgcagaagtacaagtacctggccgaggacagcaacatgtctgtgcccagcgagcccagcagcccccagagcagcaccaggaccaggagccccagcccagatgacatcctggagcgggtggccgcagatgtgaaggagtatgagcgggagaatgtggacacctttgaggcctctgtgaaggccaagcacaacctgatgacagtggagcagaacaacggcagcagccagaagaagctgctggccccagacatgttcacagaaagtgatgacatgtttgctgcctactttgacagcgcccggctgcgggccgccggcatcggcaaggacttcaaggagaaccccaacctgcgggacaactggacagatgctgagggctactacagagtgaacattggagaggtgctggacaagcgctacaacgtgtatggctacacaggccagggcgtcttcagcaatgtggtgcgggcccgggacaatgcccgggccaaccaggaggtggccgtgaagatcatccggaacaatgagctgatgcagaagacaggcctgaaggagctggagttcctgaagaagctgaatgatgctgaccctgatgacaagttccactgcctgcggctcttccgccacttctaccacaagcagcacctgtgcctggtgtttgagcccctgtccatgaacctgcgggaggtgctgaagaagtatggcaaggatgtgggcctgcacatcaaggctgtgcgcagctacagccagcagctgttcctggccctgaagctgctgaagcgctgcaacatcctgcacgccgacatcaagccagacaacatcctggtgaatgaaagcaagaccatcctgaagctgtgtgactttggaagtgccagccacgtggccgacaatgacatcaccccctacctggtgagccgcttctaccgggcccctgagatcatcatcggcaagagctatgactatggcatcgacatgtggagcgtgggctgcaccctgtatgagctgtacaccgggaagatcctcttccctgggaagaccaacaaccacatgctgaagctggccatggacctgaagggcaagatgcccaacaagatgatcagaaaaggagtcttcaaggaccagcactttgaccagaacctgaacttcatgtacatcgaggtggacaaggtgacagagcgggagaaggtgacagtgatgagcaccatcaaccccaccaaggacctgctggccgacctgattggctgccagaggctgcctgaggaccagaggaagaaggtgcaccagctgaaggacctgctggaccagatcctgatgctggaccctgccaagaggatcagcatcaaccaggccctgcagcacgccttcatccaggagaagatctag

SEQ ID NO: 166604 - DNA, 2820 bp, synthetic construct
  misc_feature 1..2820: note = Description of Artificial Sequence: Synthetic coding sequence
  source 1..2820: mol_type = other DNA
atgaggcctggcactggagctgagcggggcggcctgatggtgtctgagatggagagccacccccccagccagggccctggagatggagagcggcggctgagcggcagcagcctgtgcagcggctcctgggtgtctgcagatggcttcctgcggcggcggcccagcatgggccaccctggcatgcactacgcccccatgggcatgcaccccatgggccagagggccaacatgcctcctgtgccccacggcatgatgccccagatgatgccacccatgggcggcccccccatgggccagatgcctggcatgatgagctctgtgatgcctggcatgatgatgagccacatgagccaggcctccatgcagcctgccctgcccccaggagtgaacagcatggatgtggccgccggcacctacaccctgtacaagtccatgtggacagagcacaagagcccagatggccgcacctactactacaacacagagaccaagcagagcacctgggagaagccagatgacctgaagaccccagctgagcagctgctgagcaagtgcccctggaaggagtacaagagtgacagcggcaagccctactactacaacagccagaccaaggagagccgctgggccaagcccaaggagctggaggacctggagggcaagatgggcaagatcaagtacagcaagcaggaggagtgcaccaccaccagcacagcccctgtgcccaccacagagatccccaccaccatgagcaccatggctgctgctgaggccgctgctgctgtggtggccgctgctgctgctgctgctgctgctgctgctgctgccaatgccaatgccagcaccagcgccagcaacacagtgtctggaacagtgcctgtggtgcctgagcctgaggtgaccagcatcgtggccaccgtggtggacaatgaaaatacagtgaccatcagcacagaggagcaggcccagctgaccagcaccccagccatccaggaccagagcgtggaggtgagcagcaacacaggagaggagaccagcaagcaggagaccgtggccgacttcacccccaagaaggaggaggaggagagccagcctgccaagaagacctacacctggaacaccaaggaggaggccaagcaggccttcaaggagctgctgaaggagaagagggtgcccagcaatgcctcctgggagcaggccatgaagatgatcatcaatgacccccgctacagcgccctggccaagctgtctgagaagaagcaggccttcaatgcctacaaggtgcagacagagaaggaggagaaggaggaggcccggagcaagtacaaggaggccaaggagagcttccagcgcttcctggagaaccacgagaagatgaccagcaccacccgctacaagaaggccgagcagatgtttggagagatggaggtgtggaatgccatcagcgagcgggaccggctggagatctatgaagatgtgctcttcttcctgagcaagaaggagaaggagcaggccaagcagctgaggaagaggaactgggaggccctgaagaacatcctggacaacatggccaacgtgacctacagcaccacctggagcgaggcccagcagtacctgatggacaaccccacctttgctgaagatgaggagctgcagaacatggacaaggaggatgccctgatctgctttgaggagcacatccgggccctggagaaggaggaggaggaggagaagcagaagagcctgctgcgggagcggcggcggcagaggaagaaccgggagagcttccagatcttcctggatgagctgcacgagcacggccagctgcacagcatgagctcctggatggagctgtaccccaccatcagcagtgacatccgcttcaccaacatgctgggccagcccggcagcacagccctggacctcttcaagttctacgtggaggacctgaaggcccgctaccatgatgagaagaagatcatcaaggacatcctgaaggacaagggctttgtggtggaggtgaacaccacctttgaagattttgtggccatcatcagcagcaccaagaggagcaccaccctggatgctggcaacatcaagctggccttcaacagcctgctggagaaggccgaggcccgggagcgggagcgggagaaggaggaggccaggaagatgaagaggaaggagagcgccttcaagtccatgctgaagcaggccgccccacccatcgagctggatgctgtgtgggaggacatccgggagagatttgtgaaggagcccgcctttgaggacatcaccctggagagcgagaggaagaggatcttcaaggacttcatgcacgtgctggagcacgagtgccagcaccaccacagcaagaacaagaagcacagcaagaagagcaagaagcaccacaggaagaggagccgcagccgcagcggcagtgacagtgatgatgatgacagccacagcaagaagaagaggcagaggtctgagagccgcagcgccagcgagcacagcagcagcgctgagagcgagaggagctacaagaagagcaagaagcacaagaagaagagcaagaagagaagacacaagagtgacagccctgagagtgatgctgagcgggagaaggacaagaaggagaaggaccgggagagcgagaaggacaggacccggcagaggtctgagagcaagcacaagagccccaagaagaagacaggcaaggacagcggcaactgggacaccagcggcagcgagctgtctgagggggagctggagaagagaagaaggaccctgctggagcagctggatgatgaccagtag

SEQ ID NO: 166605 - DNA, 2451 bp, synthetic construct
  misc_feature 1..2451: note = Description of Artificial Sequence: Synthetic coding sequence
  source 1..2451: mol_type = other DNA
atgtgcagcggcagcggcagaagaagaagcagcctgagccccaccatgaggcctggcaccggggctgagcggggcggcctgatgatgggccaccctggcatgcactacgcccccatgggcatgcaccccatgggccagagggccaacatgcctcctgtgccccacggcatgatgccccagatgatgccacccatgggcggcccccccatgggccagatgcctggcatgatgagctctgtgatgcctggcatgatgatgagccacatgagccaggcctccatgcagcctgccctgccccagctgctgagcaagtgcccctggaaggagtacaagagtgacagcggcaagccctactactacaacagccagaccaaggagagccgctgggccaagcccaaggagctggaggacctggagggctaccagaacaccatcgtggccggcagcctcatcaccaagagcaacctgcacggcatgctgacagagctgaagtacagcaagcaggaggagtgcaccaccaccagcacagcccctgtgcccaccacagagatccccaccaccatgagcaccatggctgctgctgaggccgctgctgctgtggtggccgctgctgctgctgctgctgctgctgctgctgctgccaatgccaatgccagcaccagcgccagcaacacagtgtctggaacagtgcctgtggtgcctgagcctgaggtgaccagcatcgtggccaccgtggtggacaatgaaaatacagtgaccatcagcacagaggagcaggcccagctgaccagcaccccagccatccaggaccagagcgtggaggtgagcagcaacacaggagaggagaccagcaagcaggagaccgtggccgacttcacccccaagaaggaggaggaggagagccagcctgccaagaagacctacacctggaacaccaaggaggaggccaagcaggccttcaaggagctgctgaaggagaagagggtgcccagcaatgcctcctgggagcaggccatgaagatgatcatcaatgacccccgctacagcgccctggccaagctgtctgagaagaagcaggccttcaatgcctacaaggtgcagacagagaaggaggagaaggaggaggcccggagcaagtacaaggaggccaaggagagcttccagcgcttcctggagaaccacgagaagatgaccagcaccacccgctacaagaaggccgagcagatgtttggagagatggaggtgtggaatgccatcagcgagcgggaccggctggagatctatgaagatgtgctcttcttcctgagcaagaaggagaaggagcaggccaagcagctgaggaagaggaactgggaggccctgaagaacatcctggacaacatggccaacgtgacctacagcaccacctggagcgaggcccagcagtacctgatggacaaccccacctttgctgaagatgaggagctgcagaacatggacaaggaggatgccctgatctgctttgaggagcacatccgggccctggagaaggaggaggaggaggagaagcagaagagcctgctgcgggagcggcggcggcagaggaagaaccgggagagcttccagatcttcctggatgagctgcacgagcacggccagctgcacagcatgagctcctggatggagctgtaccccaccatcagcagtgacatccgcttcaccaacatgctgggccagcctgtgttcagcctgggcagcacagccctggacctcttcaagttctacgtggaggacctgaaggcccgctaccatgatgagaagaagatcatcaaggacatcctgaaggacaagggctttgtggtggaggtgaacaccacctttgaagattttgtggccatcatcagcagcaccaagaggagcaccaccctggatgctggcaacatcaagctggccttcaacagcctgctggagaaggccgaggcccgggagcgggagcgggagaaggaggaggccaggaagatgaagaggaaggagagcgccttcaagtccatgctgaagcaggccgccccacccatcgagctggatgctgtgtgggaggacatccgggagagatttgtgaaggagcccgcctttgaggacatcaccctggagagcgagaggaagaggatcttcaaggacttcatgcacgtgctggagcacgagtgccagcaccaccacagcaagaacaagaagcacagcaagaagagcaagaagcaccacaggaagaggagccgcagccgcagcggcagtgacagtgatgatgatgacagccacagcaagaagaagaggcagaggtctgagagccgcagcgccagcgagcacagcagcagcgctgagagcgagaggagctacaagaagagcaagaagcacaagaagaagagcaagaagagaagacacaagagtgacagccctgagagtgatgctgagaggtag

SEQ ID NO: 166606 - DNA, 2793 bp, synthetic construct
  misc_feature 1..2793: note = Description of Artificial Sequence: Synthetic coding sequence
  source 1..2793: mol_type = other DNA
atgtgcagcggcagcggcagaagaagaagcagcctgagccccaccatgaggcctggcaccggggctgagcggggcggcctgatgatgggccaccctggcatgcactacgcccccatgggcatgcaccccatgggccagagggccaacatgcctcctgtgccccacggcatgatgccccagatgatgccacccatgggcggcccccccatgggccagatgcctggcatgatgagctctgtgatgcctggcatgatgatgagccacatgagccaggcctccatgcagcctgccctgcccccaggagtgaacagcatggatgtggccgccggcacagccagcggggccaagtccatgtggacagagcacaagagcccagatggccgcacctactactacaacacagagaccaagcagagcacctgggagaagccagatgacctgaagaccccagctgagcagctgctgagcaaatgtccctggaaggagtacaagagtgacagcggcaagccctactactacaacagccagaccaaggagagccgctgggccaagcccaaggagctggaggacctggagggctaccagaacaccatcgtggccggcagcctcatcaccaagagcaacctgcacgccatgatcaaggccgaggagagcagcaagcaggaggagtgcaccaccaccagcacagcccctgtgcccaccacagagatccccaccaccatgagcaccatggctgctgctgaggccgctgctgctgtggtggccgctgctgctgctgctgctgctgctgctgctgctgccaatgccaatgccagcaccagcgccagcaacacagtgtctggcaccgtgcctgtggtgcctgagcctgaggtgaccagcatcgtggccaccgtggtggacaatgaaaatacagtgaccatcagcacagaggagcaggcccagctgaccagcaccccagccatccaggaccagagcgtggaggtgagcagcaacacaggagaggagaccagcaagcaggagaccgtggccgacttcacccccaagaaggaggaggaggagagccagcctgccaagaagacctacacctggaacaccaaggaggaggccaagcaggccttcaaggagctgctgaaggagaagagggtgcccagcaatgcctcctgggagcaggccatgaagatgatcatcaatgacccccgctacagcgccctggccaagctgtctgagaagaagcaggccttcaatgcctacaaggtgcagacagagaaggaggagaaggaggaggcccggagcaagtacaaggaggccaaggagagcttccagcgcttcctggagaaccacgagaagatgaccagcaccacccgctacaagaaggccgagcagatgtttggagagatggaggtgtggaatgccatcagcgagcgggaccggctggagatctatgaagatgtgctcttcttcctgagcaagaaggagaaggagcaggccaagcagctgaggaagaggaactgggaggccctgaagaacatcctggacaacatggccaacgtgacctacagcaccacctggagcgaggcccagcagtacctgatggacaaccccacctttgctgaagatgaggagctgcagaacatggacaaggaggatgccctgatctgctttgaggagcacatccgggccctggagaaggaggaggaggaggagaagcagaagagcctgctgcgggagcggcggcggcagaggaagaaccgggagagcttccagatcttcctggatgagctgcatgaacatggccagctgcacagcatgagctcctggatggagctgtaccccaccatcagcagtgacatccgcttcaccaacatgctgggccagcccggcagcacagccctggacctcttcaagttctacgtggaggacctgaaggcccgctaccatgatgagaagaagatcatcaaggacatcctgaaggacaagggctttgtggtggaggtgaacaccacctttgaggactttgtggccatcatcagcagcaccaagaggagcaccaccctggatgctggcaacatcaagctggccttcaacagcctgctggagaaggccgaggcccgggagcgggagcgggagaaggaggaggccaggaagatgaagaggaaggagagcgccttcaagtccatgctgaagcaggccgccccacccatcgagctggatgctgtgtgggaggacatccgggagagatttgtgaaggagcccgcctttgaggacatcaccctggagagcgagaggaagaggatcttcaaggacttcatgcacgtgctggagcacgagtgccagcaccaccacagcaagaacaagaagcacagcaagaagagcaagaagcaccacaggaagaggagccgcagccgcagcggcagtgacagtgatgatgatgacagccacagcaagaagaagaggcagaggtctgagagccgcagcgccagcgagcacagcagcagcgctgagagcgagaggagctacaagaagagcaagaagcacaagaagaagagcaagaagaggaggcacaagagtgacagccctgagagtgatgctgagcgggagaaggacaagaaggagaaggaccgggagagcgagaaggacaggacccggcagaggtctgagagcaagcacaagagccccaagaagaagacaggcaaggacagcggcaactgggacaccagcggcagcgagctgtctgagggggagctggagaagagaagaaggaccctgctggagcagctggatgatgaccagtag

SEQ ID NO: 166607 - DNA, 2481 bp, synthetic construct
  misc_feature 1..2481: note = Description of Artificial Sequence: Synthetic coding sequence
  source 1..2481: mol_type = other DNA
atggatgtggccgccggcacagccagcggggccaagtccatgtggacagagcacaagagcccagatggccgcacctactactacaacacagagaccaagcagagcacctgggagaagccagatgacctgaagaccccagctgagcagctgctgagcaaatgtccctggaaggagtacaagagtgacagcggcaagccctactactacaacagccagaccaaggagagccgctgggccaagcccaaggagctggaggacctggagggctaccagaacaccatcgtggccggcagcctcatcaccaagagcaacctgcacggcatgctgacagagctgaagtacagcaagcaggaggagtgcaccaccaccagcacagcccctgtgcccaccacagagatccccaccaccatgagcaccatggctgctgctgaggccgctgctgctgtggtggccgctgctgctgctgctgctgctgctgctgctgctgccaatgccaatgccagcaccagcgccagcaacacagtgtctggcaccgtgcctgtggtgcctgagcctgaggtgaccagcatcgtggccaccgtggtggacaatgaaaatacagtgaccatcagcacagaggagcaggcccagctgaccagcaccccagccatccaggaccagagcgtggaggtgagcagcaacacaggagaggagaccagcaagcaggagaccgtggccgacttcacccccaagaaggaggaggaggagagccagcctgccaagaagacctacacctggaacaccaaggaggaggccaagcaggccttcaaggagctgctgaaggagaagagggtgcccagcaatgcctcctgggagcaggccatgaagatgatcatcaatgacccccgctacagcgccctggccaagctgtctgagaagaagcaggccttcaatgcctacaaggtgcagacagagaaggaggagaaggaggaggcccggagcaagtacaaggaggccaaggagagcttccagcgcttcctggagaaccacgagaagatgaccagcaccacccgctacaagaaggccgagcagatgtttggagagatggaggtgtggaatgccatcagcgagcgggaccggctggagatctatgaagatgtgctcttcttcctgagcaagaaggagaaggagcaggccaagcagctgaggaagaggaactgggaggccctgaagaacatcctggacaacatggccaacgtgacctacagcaccacctggagcgaggcccagcagtacctgatggacaaccccacctttgctgaagatgaggagctgcagaacatggacaaggaggatgccctgatctgctttgaggagcacatccgggccctggagaaggaggaggaggaggagaagcagaagagcctgctgcgggagcggcggcggcagaggaagaaccgggagagcttccagatcttcctggatgagctgcatgaacatggccagctgcacagcatgagctcctggatggagctgtaccccaccatcagcagtgacatccgcttcaccaacatgctgggccagcccggcagcacagccctggacctcttcaagttctacgtggaggacctgaaggcccgctaccatgatgagaagaagatcatcaaggacatcctgaaggacaagggctttgtggtggaggtgaacaccacctttgaggactttgtggccatcatcagcagcaccaagaggagcaccaccctggatgctggcaacatcaagctggccttcaacagcctgctggagaaggccgaggcccgggagcgggagcgggagaaggaggaggccaggaagatgaagaggaaggagagcgccttcaagtccatgctgaagcaggccgccccacccatcgagctggatgctgtgtgggaggacatccgggagagatttgtgaaggagcccgcctttgaggacatcaccctggagagcgagaggaagaggatcttcaaggacttcatgcacgtgctggagcacgagtgccagcaccaccacagcaagaacaagaagcacagcaagaagagcaagaagcaccacaggaagaggagccgcagccgcagcggcagtgacagtgatgatgatgacagccacagcaagaagaagaggcagaggtctgagagccgcagcgccagcgagcacagcagcagcgctgagagcgagaggagctacaagaagagcaagaagcacaagaagaagagcaagaagaggaggcacaagagtgacagccctgagagtgatgctgagcgggagaaggacaagaaggagaaggaccgggagagcgagaaggacaggacccggcagaggtctgagagcaagcacaagagccccaagaagaagacaggcaaggacagcggcaactgggacaccagcggcagcgagctgtctgagggggagctggagaagagaagaaggaccctgctggagcagctggatgatgaccagtag

SEQ ID NO: 166608 - DNA, 1347 bp, synthetic construct
  misc_feature 1..1347: note = Description of Artificial Sequence: Synthetic coding sequence
  source 1..1347: mol_type = other DNA
atgaggcctggcactggagctgagcggggcggcctgatggtgtctgagatggagagccacccccccagccagggccctggagatggagagcggcggctgagcggcagcagcctgtgcagcggctcctgggtgtctgcagatggcttcctgcggcggcggcccagcatgggccaccctggcatgcactacgcccccatgggcatgcaccccatgggccagagggccaacatgcctcctgtgccccacggcatgatgccccagatgatgccacccatgggcggcccccccatgggccagatgcctggcatgatgagctctgtgatgcctggcatgatgatgagccacatgagccaggcctccatgcagcctgccctgcccccaggagtgaacagcatggatgtggccgccggcacagccagcggggccaagtccatgtggacagagcacaagagcccagatggccgcacctactactacaacacagagaccaagcagagcacctgggagaagccagatgacctgaagaccccagctgagcagctgctgagcaagtgcccctggaaggagtacaagagtgacagcggcaagccctactactacaacagccagaccaaggagagccgctgggccaagcccaaggagctggaggacctggagggctaccagaacaccatcgtggccggcagcctcatcaccaagagcaacctgcacgccatgatcaaggccgaggagagcagcaagcaggaggagtgcaccaccaccagcacagcccctgtgcccaccacagagatccccaccaccatgagcaccatggctgctgctgaggccgctgctgctgtggtggccgctgctgctgctgctgctgctgctgctgctgctgccaatgccaatgccagcaccagcgccagcaacacagtgtctggaacagtgcctgtggtgcctgagcctgaggtgaccagcatcgtggccaccgtggtggacaatgaaaatacagtgaccatcagcacagaggagcaggcccagctgaccagcaccccagccatccaggaccagagcgtggaggtgagcagcaacacaggagaggagaccagcaagcaggagaccgtggccgacttcacccccaagaaggaggaggaggagagccagcctgccaagaagacctacacctggaacaccaaggaggaggccaagcaggccttcaaggagctgctgaaggagaagagggtgcccagcaatgcctcctgggagcaggccatgaagatgatcatcaatgacccccgctacagcgccctggccaagctgtctgagaagaagcaggccttcaatgcctacaaggtgcagacctag

SEQ ID NO: 166609 - DNA, 2826 bp, synthetic construct
  misc_feature 1..2826: note = Description of Artificial Sequence: Synthetic coding sequence
  source 1..2826: mol_type = other DNA
atgaacaagaagaagaagcccttcctgggcatgcctgcccccctgggctacgtgcccggcctgggccgcggggccaccggcttcaccaccaggagtgacatcggccctgccagagatgccaatgaccctgtggatgacagacatgcccctcctgggaagaggacagtgggggaccagatgaagaagaaccaggccgcagatgatgatgatgaggacctgaatgacaccaactatgatgagttcaacggctacgccggcagcctcttcagcagcggcccctatgagaaggatgatgaggaggctgatgccatctatgctgccctggacaagaggatggatgaaagaaggaaggagcggcgggagcagcgggagaaggaggagattgagaagtacaggatggagcggcccaagatccagcagcagttcagtgacctgaagaggaagctggccgaggtgacagaggaggagtggctgagcatccctgaggtgggagatgccaggaacaagaggcagaggaaccccaggtatgagaagctgacccctgtgcctgacagcttctttgccaagcacctgcagacaggagagaaccacacctctgtggacccccggcagacccagtttggaggcctgaacaccccctacccaggcggcctgaacaccccctacccaggcggcatgaccccaggcctgatgaccccaggcactggagagctggacatgaggaagattggccaggccaggaacaccctgatggacatgaggctgagccaggtgtctgattctgtgtctggccagacagtggtggaccccaagggctacctgacagacctgaacagcatgatccccacccacggcggggacatcaatgacatcaagaaggcccggctgctgctgaagtctgtgcgggagaccaacccccaccaccccccagcctggatcgccagcgcccggctggaggaggtgacaggcaagctgcaggtggccaggaacctgatcatgaagggcacagagatgtgccccaagtcagaagatgtgtggctggaggccgcccggctgcagcccggggacacagccaaggctgtggtggcccaggccgtgcgccacctgccccagagcgtgcgcatctacatccgggctgctgagctggagacagacatccgggccaagaagagggtgctgaggaaggccctggagcacgtgcccaacagcgtgcggctgtggaaggctgctgtggagctggaggagccagaagatgcccgcatcatgctgagcagagctgtggagtgctgccccacctctgtggagctgtggctggccctggcccggctggagacctatgaaaatgccaggaaggtgctgaacaaggcccgggagaacatccccacagacagacacatctggatcacagctgccaagctggaggaggccaatggaaacacccagatggtggagaagatcatcgaccgggccatcaccagcctgcgggccaatggagtggagatcaaccgggagcagtggatccaggatgctgaggagtgtgaccgggccggctctgtggccacctgccaggccgtgatgagagctgtgattggcatcggcatcgaggaggaggacaggaagcacacctggatggaggatgctgacagctgtgtggcccacaatgccctggagtgtgcccgggccatctatgcctatgccctgcaggtgttccccagcaagaagtctgtgtggctgcgggccgcctactttgagaagaaccacggcacccgggagagcctggaggccctgctgcagagagctgtggcccactgccccaaggccgaggtgctgtggctgatgggcgccaagagcaagtggctggccggagatgtgcctgctgcccggagcatcctggccctggccttccaggccaaccccaacagcgaggagatctggctggccgctgtgaagctggagagtgaaaatgatgaatatgaaagagcccggcggctgctggccaaggcccggagcagcgcccccacagcccgggtcttcatgaagtctgtgaagctggagtgggtgcaggacaacatccgggccgcccaggacctgtgtgaggaggccctgcggcactatgaggacttccccaagctgtggatgatgaagggccagatcgaggagcagaaggagatgatggagaaggcccgggaggcctacaaccagggcctgaagaagtgcccccacagcacccccctgtggctgctgctgagccggctggaggagaagattggccagctgacccgggcccgggccatcctggagaagagccggctgaagaaccccaagaaccctggcctgtggctggagagcgtgcggctggagtaccgggccggcctgaagaacatcgccaacaccctgatggccaaggccctgcaggagtgccccaacagcggcatcctgtggagcgaggccatcttcctggaggcccggccccagaggaggaccaagtctgtggatgccctgaagaagtgtgaacatgacccccacgtgctgctggccgtggccaagctgttctggagccagaggaagatcaccaaggcccgggagtggttccacaggacagtgaagattgacagcgacctgggagatgcctgggccttcttctacaagtttgagctgcagcacggcacagaggagcagcaggaggaggtgaggaagagatgtgagagcgctgagcccaggcatggagagctgtggtgtgctgtgtccaaggacatcgccaactggcagaagaagatcggggacatcctgcggctggtggccggccgcatcaagaacaccttctag

SEQ ID NO: 166610 - DNA, 2706 bp, synthetic construct
  misc_feature 1..2706: note = Description of Artificial Sequence: Synthetic coding sequence
  source 1..2706: mol_type = other DNA
atgaacaagaagaagaagcccttcctgggcatgcctgcccccctgggctacgtgcccggcctgggccgcggggccaccggcttcaccaccaggagtgacatcggccctgccagagatgccaatgaccctgtggatgacagacatgcccctcctgggaagaggacagtgggggaccagatgaagaagaaccaggccgcagatgatgatgatgaggacctgaatgacaccaactatgatgagttcaacggctacgccggcagcctcttcagcagcggcccctatgagaaggatgatgaggaggctgatgccatctatgctgccctggacaagaggatggatgaaagaaggaaggagcggcgggagcagcgggagaaggaggagattgagaagtacaggatggagcggcccaagatccagcagcagttcagtgacctgaagaggaagctggccgaggtgacagaggaggagtggctgagcatccctgaggtgggagatgccaggaacaagaggcagaggaaccccaggtatgagaagctgacccctgtgcctgacagcttctttgccaagcacctgcagacaggagagaaccacacctctgtggacccccggcagacccagtttggaggcctgaacaccccctacccaggcggcctgaacaccccctacccaggcggcatgaccccaggcctgatgaccccaggcactggagagctggacatgaggaagattggccaggccaggaacaccctgatggacatgaggctgagccaggtgtctgattctgtgtctggccagacagtggtggaccccaagggctacctgacagacctgaacagcatgatccccacccacggcggggacatcaatgacatcaagaaggcccggctgctgctgaagtctgtgcgggagaccaacccccaccaccccccagcctggatcgccagcgcccggctggaggaggtgacaggcaagctgcaggtggccaggaacctgatcatgaagggcacagagatgtgccccaagtcagaagatgtgtggctggaggccgcccggctgcagcccggggacacagccaaggctgtggtggcccaggccgtgcgccacctgccccagagcgtgcgcatctacatccgggctgctgagctggagacagacatccgggccaagaagagggtgctgaggaaggccctggagcacgtgcccaacagcgtgcggctgtggaaggctgctgtggagctggaggagccagaagatgcccgcatcatgctgagcagagctgtggagtgctgccccacctctgtggagctgtggctggccctggcccggctggagacctatgaaaatgccaggaaggtgctgaacaaggcccgggagaacatccccacagacagacacatctggatcacagctgccaagctggaggaggccaatggaaacacccagatggtggagaagatcatcgaccgggccatcaccagcctgcgggccaatggagtggagatcaaccgggagcagtggatccaggatgctgaggagtgtgaccgggccggctctgtggccacctgccaggccgtgatgagagctgtgattggcatcggcatcgaggaggaggacaggaagcacacctggatggaggatgctgacagctgtgtggcccacaatgccctggagtgtgcccgggccatctatgcctatgccctgcaggtgttccccagcaagaagtctgtgtggctgcgggccgcctactttgagaagaaccacggcacccgggagagcctggaggccctgctgcagagagctgtggcccactgccccaaggccgaggtgctgtggctgatgggcgccaagagcaagtggctggccggagatgtgcctgctgcccggagcatcctggccctggccttccaggtgttcatgaagtctgtgaagctggagtgggtgcaggacaacatccgggccgcccaggacctgtgtgaggaggccctgcggcactatgaggacttccccaagctgtggatgatgaagggccagatcgaggagcagaaggagatgatggagaaggcccgggaggcctacaaccagggcctgaagaagtgcccccacagcacccccctgtggctgctgctgagccggctggaggagaagattggccagctgacccgggcccgggccatcctggagaagagccggctgaagaaccccaagaaccctggcctgtggctggagagcgtgcggctggagtaccgggccggcctgaagaacatcgccaacaccctgatggccaaggccctgcaggagtgccccaacagcggcatcctgtggagcgaggccatcttcctggaggcccggccccagaggaggaccaagtctgtggatgccctgaagaagtgtgaacatgacccccacgtgctgctggccgtggccaagctgttctggagccagaggaagatcaccaaggcccgggagtggttccacaggacagtgaagattgacagcgacctgggagatgcctgggccttcttctacaagtttgagctgcagcacggcacagaggagcagcaggaggaggtgaggaagagatgtgagagcgctgagcccaggcatggagagctgtggtgtgctgtgtccaaggacatcgccaactggcagaagaagatcggggacatcctgcggctggtggccggccgcatcaagaacaccttctag

SEQ ID NO: 166611 - DNA, 7008 bp, synthetic construct
  misc_feature 1..7008: note = Description of Artificial Sequence: Synthetic coding sequence
  source 1..7008: mol_type = other DNA
atggccggggtcttcccctaccggggccctggcaaccctgtgcccggccccctggcccccctgcctgactacatgtctgaggagaagctgcaggagaaggccaggaagtggcagcagctgcaggccaagagatatgcagagaagaggaagtttggatttgtggatgcccagaaggaggacatgcctcctgagcacgtgaggaagatcatccgggaccatggagacatgaccaacaggaagttcagacatgacaagagggtgtacctgggcgccctgaagtacatgcctcatgctgtgctgaagctgctggagaacatgcccatgccctgggagcagatcagagatgtgcctgtgctgtaccacatcactggagccatcagctttgtgaatgagatcccctgggtgattgagcctgtgtacatcagccagtggggctccatgtggatcatgatgaggcgggagaagagggaccggcggcacttcaagaggatgagatttcctccatttgatgatgaggagccccccctggactatgctgacaacatcctggatgtggagcccctggaggccatccagctggagctggaccctgaagaagatgcccctgtgctggactggttctatgaccaccagcccctgcgggacagcaggaaatatgtgaatggcagcacctaccagcgctggcagttcaccctgcccatgatgagcaccctgtaccgcctggccaaccagctgctgacagacctggtggatgacaactacttctacctgtttgacctgaaggccttcttcaccagcaaggccctgaacatggccatccctgggggccccaagtttgagcccctggtgcgggacatcaacctgcaggatgaggactggaatgagttcaatgacatcaacaagatcatcatccggcagcccatcagaacagagtacaagatcgccttcccctacctgtacaacaacctgccccaccacgtgcacctgacctggtaccacacccccaacgtggtgttcatcaagacagaagatcctgacctgcctgccttctactttgaccccctcatcaaccccatcagccaccgccacagcgtgaagagccaggagcccctgcctgatgatgatgaggagtttgagctgcctgagtttgtggagcccttcctgaaggacacccccctgtacacagacaacacagccaacggcatcgccctgctgtgggccccccggcccttcaacctgcggagcggccgcacccggcgggccctggacatccccctggtgaagaactggtaccgggagcactgcccagctggccagcctgtgaaggtgcgggtgtcctaccagaagctgctgaagtactacgtgctgaatgccctgaagcacaggcctcccaaggcccagaagaagcgctacctgttccgctccttcaaggccaccaagttcttccagagcaccaagctggactgggtggaggtgggcctgcaggtgtgccggcagggctacaacatgctgaacctgctgatccacaggaagaacctgaactacctgcacctggactacaacttcaacctgaagcctgtgaagaccctgaccaccaaggagaggaagaagagcagatttggaaatgccttccacctgtgccgggaggtgctgcggctgaccaagctggtggtggacagccacgtgcagtaccgcctgggcaatgtggatgccttccagctggctgatggcctgcagtacatctttgcccacgtgggccagctgaccggcatgtaccgctacaagtacaagctgatgaggcagatccgcatgtgcaaggacctgaagcacctgatctactaccgcttcaacacaggccctgtgggcaaaggacctggctgcggcttctgggccgccggctggagggtgtggctgttcttcatgaggggcatcacccccctgctggagcgctggctgggcaacctgctggcccggcagtttgagggccgccacagcaagggcgtggccaagacagtgaccaagcagagggtggagagccactttgacctggagctgcgggctgctgtgatgcatgacatcctggacatgatgcctgagggcatcaagcagaacaaggcccggaccatcctgcagcacctgtctgaggcctggcgctgctggaaggccaacatcccctggaaggtgcccggcctgcccacccccatcgagaacatgatcctgcgctacgtgaaggccaaggctgactggtggaccaacacagcccactacaaccgggagcgcatccggcggggggccaccgtggacaagacagtgtgcaagaagaacctgggccgcctgacccggctgtacctgaaggccgagcaggagcggcagcacaactacctgaaggatggcccctacatcacagctgaggaggccgtggccgtgtacaccaccaccgtgcactggctggagagccgccgcttcagccccatccccttcccccccctgagctacaagcatgacaccaagctgctgatcctggccctggagcggctgaaggaggcctacagcgtgaagagccggctgaaccagagccagcgggaggagctgggcctgattgagcaggcctatgacaacccccatgaggccctgagccgcatcaagaggcacctgctgacccagagggccttcaaggaggtgggcatcgagttcatggacctgtacagccacctggtgcctgtgtatgatgtggagcccctggagaagatcacagatgcctacctggaccagtacctgtggtatgaggccgacaagagaagactcttccccccctggatcaagccagctgacacagagcccccacccctgctggtgtacaagtggtgccagggcatcaacaacctgcaggatgtgtgggagaccagcgagggggagtgcaatgtgatgctggagagcagatttgagaagatgtatgagaagattgacctgaccctgctgaaccggctgctgcggctcatcgtggaccacaacattgctgactacatgacagccaagaacaacgtggtgatcaactacaaggacatgaaccacaccaacagctatggcatcatccggggcctgcagtttgccagcttcatcgtgcagtactacggcctggtgatggacctgctggtgctgggcctgcaccgggccagcgagatggccggccccccccagatgcccaatgacttcctgtccttccaggacatcgccacagaagctgcccaccccatccgcctcttctgccgctacatcgaccgcatccacatcttcttccgcttcaccgcagatgaggcccgggacctgatccagcgctacctgacagagcacccagaccccaacaatgaaaatattgtgggctacaacaacaagaagtgctggcccagagatgccaggatgaggctgatgaagcatgatgtgaacctgggccgggctgtgttctgggacatcaagaaccggctgcccaggtctgtgaccaccgtgcagtgggagaacagctttgtgtctgtgtacagcaaggacaaccccaacctgctcttcaacatgtgtggctttgaatgtcgcatcctgcccaagtgcaggaccagctatgaggagttcacccacaaggatggagtgtggaacctgcagaatgaggtgaccaaggagaggacagcccagtgcttcctgcgggtggatgatgagagcatgcagcgcttccacaacagagtgcggcagatcctgatggccagcggcagcaccaccttcaccaagatcgtgaacaagtggaacacagccctgattggcctgatgacctacttccgggaggccgtggtgaacacccaggagctgctggacctgctggtgaagtgtgagaacaagatccagacccgcatcaagattggcctgaacagcaagatgcccagccgcttcccccctgtggtgttctacacccccaaggagctgggcggcctgggcatgctgtccatgggccacgtgctgatcccccagagcgacctgcgctggagcaagcagacagatgtgggcatcacccacttccgcagcggcatgagccatgaggaggaccagctgatccccaacctgtaccgctacatccagccctgggagagcgagttcatcgacagccagagggtgtgggccgagtatgccctgaagaggcaggaggccatcgcccagaacagaaggctgaccctggaggacctggaggacagctgggaccggggcatcccccgcatcaacaccctcttccagaaggacagacacaccctggcctatgacaagggctggagggtgaggacagacttcaagcagtaccaggtgctgaagcagaaccccttctggtggacccaccagagacatgatggcaagctgtggaacctgaacaactacagaacagacatgatccaggccctgggcggcgtggagggcatcctggagcacaccctcttcaagggcacctacttccccacctgggagggcctcttctgggagaaggccagcggctttgaggagagcatgaagtggaagaagctgaccaatgcccagaggagcggcctgaaccagatccccaacagacgcttcaccctgtggtggagccccaccatcaacagagccaacgtgtatgtgggcttccaggtgcagctggacctgaccggcatcttcatgcacggcaagatccccaccctgaagatcagcctcatccagatcttccgggcccacctgtggcagaagatccacgagagcatcgtgatggacctgtgccaggtgtttgaccaggagctggatgccctggagattgagaccgtgcagaaggagaccatccaccccaggaagagctacaagatgaacagcagctgtgccgacatcctgctgtttgccagctacaagtggaatgtgtcccggcccagcctgctggccgacagcaaggatgtgatggacagcaccaccacccagaagtactggattgacatccagctgcgctggggagactatgacagccatgacatcgagagatatgcccgggccaagttcctggactacaccacagacaacatgagcatctaccccagccccactggagtgctgattgccatcgacctggcctacaacctgcacagcgcctacggcaactggttccctggcagcaagcccctcatccagcaggccatggccaagatcatgaaggccaacccagccctgtatgtgctgcgggagcgcatcaggaagggcctgcagctgtacagcagcgagcccacagagccctacctgagcagccagaactacggggagctgttcagcaaccagatcatctggtttgtggatgacaccaacgtgtacagagtgaccatccacaagacctttgagggcaacctgaccaccaagcccatcaacggggccatcttcatcttcaaccccaggacaggccagctgttcctgaagatcatccacacctctgtgtgggccggccagaagaggctgggccagctggccaagtggaagacagctgaggaggtggccgccctgatccgcagcctgcctgtggaggagcagcccaagcagatcatcgtgaccaggaagggcatgctggaccccctggaggtgcacctgctggacttccccaacatcgtcatcaagggcagcgagctgcagctgcccttccaggcctgcctgaaggtggagaagtttggagacctgatcctgaaggccacagagccccagatggtgctcttcaacctgtatgatgactggctgaagaccatcagcagctacacagccttcagccgcctcatcctgatcctgcgggccctgcacgtgaacaatgaccgggccaaggtgatcctgaagccagacaagaccaccatcacagagccccaccacatctggcccaccctgacagatgaggagtggatcaaggtggaggtgcagctgaaggacctgatcctggccgactatggcaagaagaacaacgtgaatgtggccagcctgacccagagcgagatccgggacatcatcctgggcatggagatcagcgcccccagccagcagaggcagcagattgctgagattgagaagcagaccaaggagcagagccagctgacagccacccagaccaggacagtgaacaagcatggagatgagatcatcaccagcaccaccagcaactatgagacccagaccttcagcagcaagacagagtggagggtgcgggccatctctgctgccaacctgcacctgcggaccaaccacatctacgtgtccagtgatgacatcaaggagaccggctacacctacatcctgcccaagaatgtgctgaagaagttcatctgcatcagtgacctgcgggcccagattgctggctacctgtatggagtgtccccaccagacaacccccaggtgaaggagatccgctgcatcgtgatggtgccccagtggggcacccaccagacagtgcacctgcccggccagctgccccagcacgagtacctgaaggagatggagcccctgggctggatccacacccagcccaatgaaagcccccagctgagcccccaggatgtgaccacccacgccaagatcatggctgacaaccccagctgggatggagagaagaccatcatcatcacctgcagcttcaccccaggcagctgcaccctgacagcctacaagctgaccccatctggctatgagtggggccggcagaacacagacaagggcaacaaccccaagggctacctgcccagccactatgaaagagtgcagatgctgctgagtgaccgcttcctgggcttcttcatggtgcctgcccagagctcctggaactacaacttcatgggcgtgagacatgaccccaacatgaagtatgagctgcagctggccaaccccaaggagttctaccacgaggtgcaccggcccagccacttcctgaactttgccctgctgcaggagggggaggtgtacagcgctgaccgggaggacctgtatgcctag

SEQ ID NO: 166612 - DNA, 1392 bp, synthetic construct
  misc_feature 1..1392: note = Description of Artificial Sequence: Synthetic coding sequence
  source 1..1392: mol_type = other DNA
atgatccaggccctgggcggcgtggagggcatcctggagcacaccctcttcaagggcacctacttccccacctgggagggcctcttctgggagaaggccagcggctttgaggagagcatgaagtggaagaagctgaccaatgcccagaggagcggcctgaaccagatccccaacagacgcttcaccctgtggtggagccccaccatcaacagagccaacgtgtatgtgggcttccaggtgcagctggacctgaccggcatcttcatgcacggcaagatccccaccctgaagatcagcctcatccagatcttccgggcccacctgtggcagaagatccacgagagcatcgtgatggacctgtgccaggtgtttgaccaggagctggatgccctggagattgaaacagtgcagaaggagaccatccaccccaggaagagctacaagatgaacagcagctgtgccgacatcctgctgtttgccagctacaagtggaatgtgtcccggcccagcctgctggccgacagcaaggatgtgatggacagcaccaccacccagaagtactggattgacatccagctgcgctggggagactatgacagccatgacatcgagagatatgcccgggccaagttcctggactacaccacagacaacatgagcatctaccccagccccaccggggtgctgattgccatcgacctggcctacaacctgcacagctacagcgaggtgggcagcctgcagcaggccagccacaccaccggggccaagatcatgaaggccaacccagccctgtatgtgctgcgggagcgcatcaggaagggcctgcagctgtacagcagcgagcccacagagccctacctgagcagccagaactatggagagctgttcagcaaccagatcatctggtttgtggatgacaccaacgtgtacagagtgaccatccacaagacctttgagggcaacctgaccaccaagcccatcaatggagccatcttcatcttcaaccccaggacaggccagctgttcctgaagatcatccacacctctgtgtgggccggccagaagaggctgggccagctggccaagtggaagacagctgaggaggtggccgccctgatccgcagcctgcctgtggaggagcagcccaagcagatcatcgtgaccaggaagggcatgctggaccccctggaggtgcacctgctggacttccccaacatcgtcatcaagggcagcgagctgcagctgcccttccaggcctgcctgaaggtggagaagtttggagacctgatcctgaaggccacagagccccagatggtgctcttcaacctgtatgatgactggctgaagaccatcagcagctacacagccttcagccgcctcatcctgtag

SEQ ID NO: 166613 - DNA, 2727 bp, synthetic construct
  misc_feature 1..2727: note = Description of Artificial Sequence: Synthetic coding sequence
  source 1..2727: mol_type = other DNA
atggctgatggcggcggccccaaggatgcccccagcctgcggagcagccctggccctgccccccgggtgcccagggctgtgggccccagcggcggcggcggggagacccccaggacagctgccctggccctgcgctttgacaagcccatcaagcaggccttctacaacacaggagctgtgctgtttgtgtgcctgtgctgcggggctgctgtgctggtgtacttcatcctggaggccttcctgcggcccctgctgtgggccgtgctgtgtggcaccttcctgcaccccttcaagagcagcctgacccggctgggccgccactggctgcagaggctgcaccgggcccacacccccatcgtgctggccgccctgctgctgcccctgtgctttgtggactatggagtggaggccctgggggagcaggccctgcggcggcggcggctgctgctgctgctgggcgctgggggccccctgctgtatggcctgtactgcctgggcagctacctgggcgtgcaggtgctgctggtgcacgccgccaccctcatctgccggggcctggactacttcagcagcctgtggatctggaccctggtggtgggctacgtgctgactgtgtccttcaagtggaatgccagcacagagcgctacctgcgggctgtgtccatccctgtgtggatcatcctgctcttccacctggccagcctggccggctcctggagaattcctgtgttcctggtgattgtgttcctgatgtctgtgggcaccctgtatgagaagcagaatggcaaggagagcagcggggctgagctgcccggccaggtgatctccatggccgccagcaccctggccaacctggccatcagcatcaccggctatgagagcagcagcgaggaccagcccagcacccagcctgctgaggccgtggacagaggagagagcgcccccaccctgagcaccagccccagccccagcagccccagccccaccagccccagccccaccctgggcagaagaagacctgagatcggcaccttcctgaggaagaagaagaccagtgacatctactttgtgtccctggtgtgggccatcgtggtgatgcagatctggctgaacctgtggatcgtgcagctgctgcctgtgcccatcgctgtgtggatcctgaagaagctggtgatccactttggagtggtggacttcctggagaagcgctaccacgtgtggtggggcatcatcgagagcttcctgaaggagcggcagggcgccctggccccctggcccatcgtgggcctgggcaagttcctgctgaaggtggacagcaagctgtggcactggctgaacaagaagatgatcatctggctggagaagatgctggacaagatcatcagcatcttcatcatcttcctgctggtgattggcaccctgctgctggccctgctgctgacagccaaggtgcaccaggagagcgtgcacatgattgaggtgaccagcaacctgatcaatgagaccctggccaaccaccctgagtgggccaactggctgcctgaggcccaggtggtgcagagggccctgaacagcgctgccaacaacgtgtaccagtatggccgggagtggatcacccacaagctgcacaagatcctgggggacaaggtgaacaacacagctgtgattgagaagcaggtgctggagctgtgggaccggctgtaccacagctggtttgtgaagaatgtgacccacagcggccgccacaagggccagaagctgcacgtgtcccggcagaacagctggctgggggacatcctggactggcaggacatcgtgtcctttgtgcatgaaaatattgagaccttcctgagcatcctggagagcctgtggatcgtgatgagcagaaatgtgtccctgctcttcaccaccgtgaccaccctgctgaccatcctcttctacagcggcacagccctgctgaactttgtgctgagcctcatcatcttcctgaccaccctcttctacctgctgagcagcagtgatgagtactacaagcctgtgaagtgggtgatcagcctgacccccctgagccagcccggccccagcagcaacatcatcggccagagcgtggaggaggccatccggggcgtgtttgatgccagcctgaagatggccggcttctacggcctgtacacctggctgacccacaccatgtttggcatcaacatcgtgttcatccccagcgccctggccgccatcctgggcgctgtgcccttcctgggcacctactgggccgctgtgcctgctgtgctggacctgtggctgacccagggcctgggctgcaaggccatcctgctgctgatcttccacctgctgcccacctactttgtggacacagccatctacagcgacatcagcggcggcggccacccctacctgaccggcctggccgtggccggcggggcctactacctgggcctggagggcgccatcatcggccccatcctgctgtgcatcctggtggtggccagcaacatctacagcgccatgctggtgagccccaccaacagcgtgcccacccccaaccagaccccctggccagcccagccccagaggaccttccgggacatcagccgctctgagatcttctctgtggatgtggtgtcctctgctgtgatcttcaggaagttcaagtttgacagcgagttcagcagcgctgtggccctgtgccccagcagctgtgcctag

SEQ ID NO: 166614 - DNA, 1062 bp, synthetic construct
  misc_feature 1..1062: note = Description of Artificial Sequence: Synthetic coding sequence
  source 1..1062: mol_type = other DNA
atgctgaagagctgcagccgggccagcttcagccccagcgtgaggaagcccccactcatcctgcggcggctgctgtctgaagatgtgggcatggacatcccctttgaggagggcgtgctgagccccagcgctgctgacatgaggcctgagccccccaacagcctggacctgaatgacacccacccccggcgcatcaagctgacagcccccaacatcaacctgagcctggaccagagcgagggcagcatcctgagtgatgacaacctggacagcccagatgaaattgacatcaacgtggatgagctggacaccccagatgaggccgacagctttgagtacacaggccacgaggaccccacagccaacaaggacagcggccaggagagcgagagcatccctgagtacacagctgaggaggagcgggaggacaaccggctgtggaggacagtggtgattggagagcaggagcagagaattgacatgaaggtgattgagccctaccgccgggtcatcagccatggaggctactatggagatggcctgaatgccatcatcgtgtttgctgcctgcttcctgcctgacagcagcagagctgactaccactacgtgatggagaacctcttcctgtatgtgatcagcaccctggagctgatggtggccgaggactacatgattgtgtacctgaatggagccacccccaggaggaggatgcctggcctgggctggatgaagaagtgctaccagatgattgaccggcggctgaggaagaacctgaagagcttcatcatcgtgcaccccagctggttcatccgcaccatcctggccgtgacccggcccttcatcagcagcaagttcagcagcaagatcaagtatgtgaacagcctgtctgagctgagcggcctcatccccatggactgcatccacatccctgagagcatcatcaagctggatgaggagctgcgggaggccagcgaggccgccaagaccagctgcctgtacaatgaccctgagatgagctccatggagaaggacatcgacctgaagctgaaggagaagccctag

SEQ ID NO: 166615 - DNA, 9267 bp, synthetic construct
  misc_feature 1..9267: note = Description of Artificial Sequence: Synthetic coding sequence
  source 1..9267: mol_type = other DNA
atggaggagttcctgcagagggccaagagcaagctgaacagaagcaagaggctggagaaggtgcacgtggtgattggccccaagagctgtgacctggacagcctcatcagcaccttcacctacgcctacttcctggacaaggtgagccccccaggagtgctgtgcctgcctgtgctgaacatccccaggacagagttcaactacttcacagagacccgcttcatcctggaggagctgaacatcagcgagagcttccacatcttcagagatgagatcaacctgcaccagctgaatgatgagggcaagctgagcatcaccctggtgggcagctctgtgctggccagcgaggacaagaccctggagagcgctgtggtgaaggtgatcaaccctgtggagcagagtgatgccaacgtggagttccgggagagcagcagcagcctggtgctgaaggagatcctgcaggaggcccctgagctgatcacagagcagctggcccaccggctgcggggcagcatcctcttcaagtggatgaccatggagagcgagaagatcagcgagaagcaggaggagatcctgagcatcctggaggagaagttccccaacctgcccccccgggaggacatcatcaacgtgctgcaggagacccagttcagcgcccagggcctgagcattgagcagaccatgctgaaggacctgaaggagctgagtgatggagagatcaaggtggccatcagcacagtgtccatgaacctggagaactgcctcttccacagcaacatcaccagtgacctgaaggccttcacagacaagtttggatttgatgtgctgatcctcttcagcagctacctgtctgaggagcagcagccccggcggcagattgctgtgtacagcgagaacatggagctgtgcagccagatctgctgtgagctggaggagtgccagaacccctgcctggagctggagccctttgactgtggctgtgatgagatcctggtgtaccagcaggaggaccccagcgtgacctgtgaccaggtggtgctggtggtgaaggaggtgatcaacagacgctgcccagagatggtgagcaacagcaggaccagcagcacagaagctgtggccggcagcgcccccctgagccagggcagcagcggcatcatggagctgtatggcagtgacatcgagccccagcccagctctgtgaacttcatcgagaaccccccagacctgaatgacagcaaccaggcccaggtggatgccaacgtggacctggtgtccccagacagcggcctggccaccatccgcagcagccgcagcagcaaggagagctctgtgttcctgagtgatgacagccctgtgggggagggcgccggcccccaccacaccctgctgcccggcctggacagctacagccccatccctgagggcgctgtggccgaggagcacgcctggagcggggagcacggggagcactttgacctcttcaactttgatcctgcccccatggccagcggccagagccagcagagcagccacagcgctgactacagccctgcagatgacttcttccccaacagcgacctgtctgagggccagctgcctgctggccctgagggcctggatggcatgggcaccaacatgagcaactacagcagcagcagcctgctgagcggggccggcaaggacagcctggtggagcatgatgaggagtttgtgcagaggcaggacagcccccgggacaacagcgagaggaacctgagcctgacagactttgtgggagatgagagccccagccctgagcggctgaagaacacaggcaagagaattcctcccacccccatgaacagcctggtggagagcagccccagcacagaggagcccgccagcctgtacacagaggacatgacccagaaggccacagacaccggccacatgggccccccccagacccacgcccgctgcagctcctggtggggcggcctggagattgacagcaagaacattgctgatgcctggagcagcagcgagcaggagagcgtcttccagagccctgagagctggaaggagcacaagcccagcagcattgaccggcgggccagtgacagcgtcttccagcccaagagcctggagttcaccaagagcggcccctgggagagcgagtttggccagcctgagctgggcagcaatgacatccaggacaagaatgaggagagcctgcccttccagaacctgcccatggagaagagccccctgcccaacaccagcccccagggcaccaaccacctgattgaagattttgccagcctgtggcacagcggccgcagccccacagccatgcctgagccctggggcaaccccacagatgatggagagcctgctgctgtggcccccttccctgcctggagcgccttcggcaaggaggaccatgatgaggccctgaagaacacctggaacctgcaccccaccagcagcaagaccccatctgtgcgggaccccaatgagtgggccatggccaagagcggctttgccttcagcagcagcgagctgctggacaacagccccagcgagatcaacaatgaggccgcccctgagatctggggcaagaagaacaatgacagccgggaccacatctttgcccctggcaaccccagcagtgacctggaccacacctggaccaacagcaagccacccaaggaggaccagaatggcctggtggaccccaagacccggggcaaggtgtatgagaaggtggacagctggaacctgtttgaggagaacatgaagaagggcggcagtgatgtgctggtgccctgggaggacagcttcctgagctacaagtgcagcgactacagcgccagcaacctgggggaggacagcgtgcccagccccctggacaccaactacagcaccagtgacagctacaccagccccacctttgctggagatgagaaggagacagagcacaagccctttgccaaggaggagggctttgagagcaaggatggcaacagcacagctgaggagacagacatccccccccagagcctgcagcagagcagcaggaaccgcatcagcagcggccctggcaacctggacatgtgggccagcccccacacagacaacagcagcgagatcaacaccacccacaacctggatgaaaatgagctgaagacagagcacacagatggcaagaacatctccatggaggatgatgtgggggagagcagccagagcagctatgatgaccccagcatgatgcagctgtacaatgagaccaaccggcagctgaccctgctgcacagcagcaccaacagccggcagacagccccagacagcctggacctgtggaacagagtcatcctggaggacacccagagcacagccaccatcagtgacatggacaatgacctggactgggatgactgcagcggcggggccgccatccccagtgatggccagacagagggctacatggccgagggcagcgagcctgagacccgcttcaccgtgcggcagctggagccctggggcctggagtaccaggaggccaaccaggtggactgggagctgcctgccagtgatgagcacaccaaggacagcgcccccagcgagcaccacaccctgaatgagaagagcggccagctgattgccaacagcatctgggacagcgtgatgagggacaaggacatgagcagcttcatgctgcccggcagcagccacatcacagattctgagcagcgggagctgcccccagagatccccagccacagcgccaacgtgaaggacacccacagcccagatgccccagctgccagcggcaccagcgagagcgaggccctgatcagccacctggacaagcaggacacagagcgggagaccctgcagagtgatgctgccagcctggccacccggctggagaaccctggctacttcccccacccagacccctggaagggccatggagatggccagagcgagagcgagaaggaggcccagggcgccacagaccggggccacctggatgaggaggaggtgattgccagcggcgtggagaatgccagcggcatcagcgagaagggccagagcgaccaggagctgagcagcctggtggccagcgagcaccaggagatctgcatcaagagcggcaagatcagcagcctggccgtgaccttcagcccccagacagaggagcctgaggaggtgctggagtatgaggagggcagctacaacctggacagcagagatgtgcagacaggcatgtctgctgacaacctgcagcccaaggacacccatgagaagcacctgatgagccagaggaacagcggggagaccacagagaccagtgatggcatgaacttcaccaagtatgtgtctgtgcctgagaaggacctggagaagacagaggagtgcaacttcctggagccagaaaatgtgggcggcggccccccccaccgggtgcccaggagcctggactttggagatgtgcccatcgacagtgatgtgcacgtgagcagcacctgcagcgagatcaccaagaacctggatgtgaagggcagcgagaacagcctgcctggagctggcagcagcggcaactttgaccgggacaccatcagcagcgagtacacccacagcagcgccagcagccctgagctgaatgacagctctgtggccctgagctcctggggccagcagcccagcagcggctaccaggaggagaaccagggcaactggagcgagcagaaccaccaggagagcgagctgatcaccacagatggccaggtggagatcgtgaccaaggtgaaggacctggagaagaaccgcatcaatgaatttgagaagagctttgacaggaagacccccaccttcctggagatctggaatgacagcgtggatggagacagcttcagcagcctgagcagccctgagaccgggaagtacagcgagcacagcggcacccaccaggagagcaacctgattgccagctaccaggagaagaatgaacatgacatcagcgccaccgtgcagccagaagatgcccgggtcatcagcaccagcagcggcagtgatgatgattctgtgggcggggaggagagcattgaggaggagatccaggtggccaactgccacgtggctgaagatgagagccgggcctgggacagcctgaatgaaagcaacaagttcctggtgacagctgaccccaagtctgagaacatctatgactacctggacagcagcgagccagcagaaaatgaaaacaagagcaaccccttctgtgacaaccagcagagcagcccagacccctggaccttcagccccctgacagaaacagagatgcagatcacagctgtggagaaggagaagaggagcagccctgagaccggcaccactggagatgtggcctggcagatcagccccaaggccagcttccccaagaatgaagacaacagccagctggagatgctgggcttctctgctgacagcacagagtggtggaaggccagcccccaggagggccgcctcatcgagagcccctttgagcgggagctgagtgacagcagcggcgtgctggagatcaacagctctgtgcaccagaatgccagcccctggggcgtgcctgtgcagggcgacatcgagcctgtggagacccactacaccaaccccttcagtgacaaccaccagagccccttcctggagggcaatggcaagaacagccatgagcagctgtggaacatccagccccggcagcctgaccctgatgctgacaagttcagccagctggtgaagctggaccagatcaaggagaaggacagccgggagcagacctttgtgtctgctgctggagatgagctgaccccagagacccccacccaggagcagtgccaggacaccatgctgcctgtgtgtgaccacccagacacagccttcacccatgctgaggagaacagctgtgtgaccagcaatgtgtccaccaatgaaggccaggagaccaaccagtgggagcaggagaagagctacctgggggagatgaccaacagcagcatcgccacagagaacttccctgctgtgagcagccccacccagctgatcatgaagccaggcagcgagtgggatggcagcaccccatctgaggacagccggggcacctttgtgcctgacatcctgcacggcaacttccaggagggcggccagctggccagcgctgccccagacctgtggattgatgccaagaagcccttcagcctgaaggcagatggagaaaatccagacatcctgacccactgtgaacatgacagcaacagccaggccagtgacagcccagacatctgccatgattctgaggccaagcaggagacagagaagcacctgagcgcctgcatgggccctgaggtggagagcagcgagctgtgcctgacagagcctgagattgatgaggagcccatctatgagcccggccgggagtttgtgcccagcaatgctgagctggacagtgaaaatgccaccgtgctgccccccatcggctaccaggccgacatcaagggcagcagccagcctgccagccacaagggcagccctgagcccagcgagatcaacggggacaacagcacaggcctgcaggtgtctgagaagggggccagcccagacatggcccccatcctggagcctgtggaccggcgcatccccagaattgaaaatgtggccaccagcatctttgtgacccaccaggagcccaccccagaaggagatggctcctggatcagtgacagcttcagccctgagagccagcccggggcccgggccctgtttgatggagacccccacctgagcacagagaacccagccctggtgcctgatgccctgctggccagtgacacctgcctggacatcagcgaggccgcctttgaccacagcttcagtgatgccagcggcctgaacaccagcacaggcaccattgatgacatgagcaagctgaccctgtctgagggccaccctgagacccctgtggatggagacctgggcaagcaggacatctgcagcagcgaggcctcctggggagactttgaatatgatgtgatgggccagaacattgatgaggacctgctgcgggagcctgagcacttcctgtatggaggagacccccccctggaggaggacagcctgaagcagagcctggccccctacaccccaccatttgacctgagctacctgacagagcccgcccagagcgctgagaccatcgaggaggccggcagcccagaagatgagagcctgggctgcagagctgctgagatcgtgctgagcgccctgcctgacagaagaagtgagggcaaccaggccgagaccaagaaccggctgcccggcagccagctggccgtgctgcacatccgggaggaccctgagagcgtgtacctgcctgtgggcgccggcagcaacatcctgagccccagcaatgtggactgggaggtggagacagacaacagcgacctgcctgctggaggagacatcggcccccccaacggggccagcaaggagatcagcgagctggaggaggagaagaccatccccaccaaggagcctgagcagatcaagtctgagtacaaggaggagcgctgcacagagaagaatgaagatagacatgccctgcacatggactacatcctggtgaaccgggaggagaacagccacagcaagccagagacctgtgaggagcgggagagcattgctgagctggagctgtatgtgggcagcaaggagaccggcctgcagggcacccagctggccagcttcccagacacctgccagcctgccagcctgaatgaaaggaagggcctgtctgctgagaagatgagcagcaagagtgacaccaggagcagctttgagagccctgcccaggaccagagctggatgttcctgggccacagcgaggtgggggaccccagcctggatgcccgggacagcggccctggctggagcggcaagacagtggagcccttcagcgagctgggcctgggggagggcccccagctgcagatcctggaggagatgaagcccctggagagcctggccctggaggaggccagcggccctgtgtcccagagccagaagagcaagagccggggccgggccggcccagatgctgtgaccctgcaggccgtgacccatgacaatgagtgggagatgctgagcccccagcctgtgcagaagaacatgatcccagacacagagatggaggaggagacagagttcctggagctgggcacccgcatcagccggcccaacggcctgctgtctgaagatgtgggcatggacatcccctttgaggagggcgtgctgagccccagcgctgctgacatgaggcctgagccccccaacagcctggacctgaatgacacccacccccggcgcatcaagctgacagcccccaacatcaacctgagcctggaccagagcgagggcagcatcctgagtgatgacaacctggacagcccagatgaaattgacatcaacgtggatgagctggacaccccagatgaggccgacagctttgagtacacaggccatgaccccacagccaacaaggacagcggccaggagagcgagagcatccctgagtacacagctgaggaggagcgggaggacaaccggctgtggaggacagtggtgattggagagcaggagcagagaattgacatgaaggtgattgagccctacagaagagtcatcagccacggcggctactatggagatggcctgaatgccatcatcgtgtttgctgcctgcttcctgcctgacagcagcagagctgactaccactacgtgatggagaacctcttcctgtatgtgatcagcaccctggagctgatggtggccgaggactacatgattgtgtacctgaatggagccaccccaagaagaaggatgcctggcctgggctggatgaagaagtgctaccagatgattgaccggcggctgaggaagaacctgaagagcttcatcatcgtgcaccccagctggttcatccgcaccatcctggccgtgacccggcccttcatcagcagcaagttcagcagcaagatcaagtatgtgaacagcctgtctgagctgagcggcctcatccccatggactgcatccacatccctgagagcatcatcaagctggatgaggagctgcgggaggccagcgaggccgccaagaccagctgcctgtacaatgaccctgagatgagctccatggagaaggacatcgacctgaagctgaaggagaagccctag

SEQ ID NO: 166616 - DNA, 9165 bp, synthetic construct
  misc_feature 1..9165: note = Description of Artificial Sequence: Synthetic coding sequence
  source 1..9165: mol_type = other DNA
agaaacctgatgcacaggatgaaggagagtgaaaatagaagcaagaggctggagaaggtgcacgtggtgattggccccaagagctgtgacctggacagcctcatcagcaccttcacctacgcctacttcctggacaaggtgtccccacctggggtgctgtgcctgcctgtgctgaacatccccaggacagagttcaactacttcacagagacccgcttcatcctggaggagctgaacatcagcgagagcttccacatcttcagagatgagatcaacctgcaccagctgaatgatgagggcaagctgagcatcaccctggtgggcagctctgtgctggccagcgaggacaagaccctggagagcgctgtggtgaaggtgatcaaccctgtggagcagagtgatgccaacgtggagttccgggagagcagcagcagcctggtgctgaaggagatcctgcaggaggcccctgagctgatcacagagcagctggcccaccggctgcggggcagcatcctcttcaagtggatgaccatggagagcgagaagatcagcgagaagcaggaggagatcctgagcatcctggaggagaagttccccaacctgcccccccgggaggacatcatcaacgtgctgcaggagacccagttcagcgcccagggcctgagcattgagcagaccatgctgaaggacctgaaggagctgagtgatggagagatcaaggtggccatcagcacagtgtccatgaacctggagaactgcctcttccacagcaacatcaccagtgacctgaaggccttcacagacaagtttggatttgatgtgctgatcctcttcagcagctacctgtctgaggagcagcagccccggcggcagattgctgtgtacagcgagaacatggagctgtgcagccagatctgctgtgagctggaggagtgccagaacccctgcctggagctggagccctttgactgtggctgtgatgagatcctggtgtaccagcaggaggaccccagcgtgacctgtgaccaggtggtgctggtggtgaaggaggtgatcaacagacgctgcccagagatggtgagcaacagcaggaccagcagcacagaggccgtggccggcagcgcccccctgagccagggcagcagcggcatcatggagctgtatggcagtgacatcgagccccagcccagctctgtgaacttcattgaaaatcctccagacctgaatgacagcaaccaggcccaggtggatgccaacgtggacctggtgtccccagattctggcctggccaccatccgcagcagccgcagcagcaaggagagcagcgtcttcctgagtgatgacagccctgtgggggagggcgccggcccccaccacaccctgctgcccggcctggacagctacagccccatccctgagggcgctgtggccgaggagcacgcctggagcggggagcacggggagcactttgacctcttcaactttgatcctgcccccatggccagcggccagagccagcagagcagccacagcgctgactacagccctgcagatgacttcttccccaacagcgacctgtctgagggccagctgcctgctggccctgagggcctggatggcatgggcaccaacatgagcaactacagcagcagcagcctgctgtctggagctgggaaggacagcctggtggagcatgatgaggagtttgtgcagaggcaggacagcccccgggacaacagcgagaggaacctgagcctgacagactttgtgggagatgagagccccagccctgagcggctgaagaacacaggcaagaggatcccccccacccccatgaacagcctggtggagagcagccccagcacagaggagcccgccagcctgtacacagaggacatgacccagaaggccacagacaccggccacatgggccccccccagacccacgcccgctgcagctcctggtggggcggcctggagattgacagcaagaacattgctgatgcctggagcagcagcgagcaggagagcgtcttccagagccctgagagctggaaggagcacaagcccagcagcattgacagaagagccagtgacagcgtcttccagcccaagagcctggagttcaccaagagcggcccctgggagagcgagtttggccagcctgagctgggcagcaatgacatccaggacaagaatgaggagagcctgcccttccagaacctgcccatggagaagagccccctgcccaacaccagcccccagggcaccaaccacctgattgaggactttgccagcctgtggcacagcggccgcagccccacagccatgcctgagccctggggcaaccccacagatgatggagagcctgctgctgtggcccccttccctgcctggagcgccttcggcaaggaggaccatgatgaggccctgaagaacacctggaacctgcaccccaccagcagcaagacccccagcgtgcgggaccccaatgagtgggccatggccaagagcggctttgccttcagcagcagcgagctgctggacaacagccccagcgagatcaacaatgaagctgcccctgagatctggggcaagaagaacaatgacagccgggaccacatctttgcccctggcaaccccagcagtgacctggaccacacctggaccaacagcaagccacccaaggaggaccagaatggcctggtggaccccaagacccggggcaaggtgtatgagaaggtggacagctggaacctgtttgaggagaacatgaagaagggcggcagtgatgtgctggtgccctgggaggacagcttcctgagctacaagtgcagcgactacagcgccagcaacctgggagaagattctgtgcccagccccctggacaccaactacagcaccagtgacagctacaccagccccacctttgctggagatgagaaggagacagagcacaagccctttgccaaggaggagggctttgagagcaaggatggcaacagcacagctgaggagacagacatccccccccagagcctgcagcagagcagcaggaaccgcatcagcagcggccctggcaacctggacatgtgggccagcccccacacagacaacagcagcgagatcaacaccacccacaacctggatgaaaatgagctgaagacagagcacacagatggcaagaacatctccatggaggatgatgtgggggagagcagccagagcagctatgatgaccccagcatgatgcagctgtacaatgagaccaaccggcagctgaccctgctgcacagcagcaccaacagccggcagacagccccagacagcctggacctgtggaacagagtcatcctggaggacacccagagcacagccaccatcagtgacatggacaatgacctggactgggatgactgcagcggcggggccgccatccccagtgatggccagacagagggctacatggccgagggcagcgagcctgagacccgcttcaccgtgcggcagctggagccctggggcctggagtaccaggaggccaaccaggtggactgggagctgcctgccagtgatgagcacaccaaggacagcgcccccagcgagcaccacaccctgaatgagaagagcggccagctgattgccaacagcatctgggacagcgtgatgagggacaaggacatgagcagcttcatgctgcccggcagcagccacatcacagacagcgagcagcgggagctgcccccagagatccccagccacagcgccaacgtgaaggacacccacagcccagatgccccagctgccagcggcaccagcgagagcgaggccctgatcagccacctggacaagcaggacacagagcgggagaccctgcagagtgatgctgccagcctggccacccggctggagaaccctggctacttcccccacccagacccctggaagggccatggagatggccagagcgagagcgagaaggaggcccagggcgccacagaccggggccacctggatgaggaggaggtgattgccagcggcgtggagaatgccagcggcatcagcgagaagggccagagcgaccaggagctgagcagcctggtggccagcgagcaccaggagatctgcatcaagagcggcaagatcagcagcctggccgtgaccttcagcccccagacagaggagcctgaggaggtgctggagtatgaggagggcagctacaacctggacagcagagatgtgcagacaggcatgtctgctgacaacctgcagcccaaggacacccatgagaagcacctgatgagccagagaaattctggagagaccacagagaccagtgatggcatgaacttcaccaagtatgtgtctgtgcctgagaaggacctggagaagacagaggagtgcaacttcctggagccagaaaatgtgggcggcggccccccccaccgggtgcccaggagcctggactttggagatgtgcccatcgacagtgatgtgcacgtgagcagcacctgcagcgagatcaccaagaacctggatgtgaagggcagcgagaacagcctgcccggggccggcagcagcggcaactttgaccgggacaccatcagcagcgagtacacccacagcagcgccagcagccctgagctgaatgacagctctgtggccctgagctcctggggccagcagcccagcagcggctaccaggaggagaaccagggcaactggagcgagcagaaccaccaggagagcgagctgatcaccacagatggccaggtggagatcgtgaccaaggtgaaggacctggagaagaaccgcatcaatgaatttgagaagagctttgacaggaagacccccaccttcctggagatctggaatgattctgtggatggagacagcttcagcagcctgagcagccctgagaccgggaagtacagcgagcacagcggcacccaccaggagagcaacctgattgccagctaccaggagaagaatgaacatgacatcagcgccaccgtgcagccagaagatgcccgggtcatcagcaccagcagcggcagtgatgatgacagcgtgggcggggaggagagcattgaggaggagatccaggtggccaactgccacgtggccgaggatgagagccgggcctgggacagcctgaatgaaagcaacaagttcctggtgacagctgaccccaagtctgagaacatctatgactacctggacagcagcgagccagcagaaaatgaaaacaagagcaaccccttctgtgacaaccagcagagcagcccagacccctggaccttcagccccctgacagaaacagagatgcagatcacagctgtggagaaggagaagaggagcagccctgagaccggcaccactggagatgtggcctggcagatcagccccaaggccagcttccccaagaatgaagacaacagccagctggagatgctgggcttctctgctgacagcacagagtggtggaaggccagcccccaggagggccgcctgattgagagcccctttgagcgggagctgagtgacagcagtggagtgctggagatcaacagctctgtgcaccagaatgccagcccctggggcgtgcctgtgcagggcgacatcgagcctgtggagacccactacaccaaccccttcagtgacaaccaccagagccccttcctggagggcaatggcaagaacagccatgagcagctgtggaacatccagccccggcagcctgaccctgatgctgacaagttcagccagctggtgaagctggaccagatcaaggagaaggacagccgggagcagacctttgtgtctgctgctggagatgagctgaccccagagacccccacccaggagcagtgccaggacaccatgctgcctgtgtgtgaccacccagacacagccttcacccacgccgaggagaacagctgtgtgaccagcaatgtgtccaccaatgaaggccaggagaccaaccagtgggagcaggagaagagctacctgggggagatgaccaacagcagcatcgccacagagaacttccctgctgtgagcagccccacccagctgatcatgaagccaggcagcgagtgggatggcagcacccccagcgaggacagccggggcacctttgtgcctgacatcctgcacggcaacttccaggagggcggccagctggccagcgctgccccagacctgtggattgatgccaagaagcccttcagcctgaaggcagatggagagaacccagacatcctgacccactgtgaacatgacagcaacagccaggccagtgacagcccagacatctgccacgacagcgaggccaagcaggagacagagaagcacctgagcgcctgcatgggccctgaggtggagagcagcgagctgtgcctgacagagcctgagattgatgaggagcccatctatgagcccggccgggagtttgtgcccagcaatgctgagctggacagtgaaaatgccaccgtgctgccccccatcggctaccaggccgacatcaagggcagcagccagcctgccagccacaagggcagccctgagcccagcgagatcaatggagacaacagcacaggcctgcaggtgtctgagaagggggccagcccagacatggcccccatcctggagcctgtggaccggcgcatccccagaattgaaaatgtggccaccagcatctttgtgacccaccaggagcccaccccagaaggagatggctcctggatcagtgacagcttcagccctgagagccagcccggggcccgggccctgtttgatggagacccccacctgagcacagaaaatcctgccctggtgcctgatgccctgctggccagtgacacctgcctggacatcagcgaggccgcctttgaccacagcttcagtgatgccagcggcctgaacaccagcacaggcaccattgatgacatgagcaagctgaccctgtctgagggccaccctgagacccctgtggatggagacctgggcaagcaggacatctgcagcagcgaggcctcctggggagactttgaatatgatgtgatgggccagaacattgatgaggacctgctgcgggagcctgagcacttcctgtatggaggagacccccccctggaggaggacagcctgaagcagagcctggccccctacaccccaccatttgacctgagctacctgacagagcccgcccagagcgctgagaccatcgaggaggccggcagcccagaagatgagagcctgggctgcagagctgctgagatcgtgctgagcgccctgcctgaccggcgctctgagggcaaccaggccgagaccaagaaccggctgcccggcagccagctggccgtgctgcacatcagagaagatcctgagagcgtgtacctgcctgtgggcgccggcagcaacatcctgagccccagcaatgtggactgggaggtggagacagacaacagcgacctgcctgctggaggagacatcggccccccaaatggagccagcaaggagatcagcgagctggaggaggagaagaccatccccaccaaggagcctgagcagatcaagtctgagtacaaggaggagcgctgcacagagaagaatgaagatagacatgccctgcacatggactacatcctggtgaaccgggaggagaacagccacagcaagccagagacctgtgaggagcgggagagcattgctgagctggagctgtatgtgggcagcaaggagaccggcctgcagggcacccagctggccagcttcccagacacctgccagcctgccagcctgaatgaaaggaagggcctgtctgctgagaagatgagcagcaagagtgacaccaggagcagctttgagagccctgcccaggaccagagctggatgttcctgggccacagcgaggtgggggaccccagcctggatgcccgggacagcggccctggctggagcggcaagacagtggagcccttcagcgagctgggcctgggggagggcccccagctgcagatcctggaggagatgaagcccctggagagcctggccctggaggaggccagcggccctgtgtcccagagccagaagagcaagagccggggccgggccggcccagatgctgtgaccctgcaggccgtgacccatgacaatgagtgggagatgctgagcccccagcctgtgcagaagaacatgatcccagacacagagatggaggaggagacagagttcctggagctgggcacccgcatcagccggcccaacggcctgctgtctgaagatgtgggcatggacatcccctttgaggagggcgtgctgagccccagcgctgctgacatgaggcctgagccccccaacagcctggacctgaatgacacccacccccggcgcatcaagctgacagcccccaacatcaacctgagcctggaccagagcgagggcagcatcctgagtgatgacaacctggacagcccagatgaaattgacatcaacgtggatgagctggacaccccagatgaagctgacagctttgagtacacaggccacgaggaccccacagccaacaaggacagcggccaggagagcgagagcatccctgagtacacagctgaggaggagcgggaggacaaccggctgtggaggacagtggtgattggagagcaggagcagagaattgacatgaaggtgattgagccctacagaagagtcatcagccacggcggcagccggggctactatggagatggcctgaatgccatcatcgtgtttgctgcctgcttcctgcctgacagcagcagagctgactaccactacgtgatggagaacctcttcctgtatgtgatcagcaccctggagctgatggtggccgaggactacatgattgtgtacctgaatggagccacccccaggaggaggatgcctggcctgggctggatgaagaagtgctaccagatgattgaccggcggctgaggaagaacctgaagagcttcatcatcgtgcaccccagctggttcatccgcaccatcctggccgtgacccggcccttcatcagcagcaagttcagcagcaagatcaagtatgtgaacagcctgtctgagctgagcggcctcatccccatggactgcatccacatccctgagagcatcatcaactactag

SEQ ID NO: 166617 - DNA, 783 bp, synthetic construct
  misc_feature 1..783: note = Description of Artificial Sequence: Synthetic coding sequence
  source 1..783: mol_type = other DNA
attgacatcaacgtggatgagctggacaccccagatgaggccgacagctttgagtacacaggccatgaccccacagccaacaaggacagcggccaggagagcgagagcatccctgagtacacagctgaggaggagcgggaggacaaccggctgtggaggacagtggtgattggagagcaggagcagagaattgacatgaaggtgattgagccctacagaagagtcatcagccacggcggggacagcggctactatggagatggcctgaatgccatcatcgtgtttgctgcctgcttcctgcctgacagcagcagagctgactaccactacgtgatggagaacctcttcctgtatgtgatcagcaccctggagctgatggtggccgaggactacatgattgtgtacctgaatggagccacccccaggaggaggatgcctggcctgggctggatgaagaagtgctaccagatgattgaccggcggctgaggaagaacctgaagagcttcatcatcgtgcaccccagctggttcatccgcaccatcctggccgtgacccggcccttcatcagcagcaagttcagcagcaagatcaagtatgtgaacagcctgtctgagctgagcggcctcatccccatggactgcatccacatccctgagagcatcatcaagtatgatgaggagaggagctacaagaggtctgtgaggaccagctgcctgtacaatgaccctgagatgagctccatggagaaggacatcgacctgaagctgaaggagaagccctag

SEQ ID NO: 166618 - DNA, 7155 bp, synthetic construct
  misc_feature 1..7155: note = Description of Artificial Sequence: Synthetic coding sequence
  source 1..7155: mol_type = other DNA
tgattccagagccctgagagctggaaggagcacaagcccagcagcattgaccggcgggccagtgacagcgtcttccagcccaagagcctggagttcaccaagagcggcccctgggagagcgagtttggccagcctgagctgggcagcaatgacatccaggacaagaatgaggagagcctgcccttccagaacctgcccatggagaagagccccctgcccaacaccagcccccagggcaccaaccacctgattgaagattttgccagcctgtggcacagcggccgcagccccacagccatgcctgagccctggggcaaccccacagatgatggagagcctgctgctgtggcccccttccctgcctggagcgccttcggcaaggaggaccatgatgaggccctgaagaacacctggaacctgcaccccaccagcagcaagaccccatctgtgcgggaccccaatgagtgggccatggccaagagcggctttgccttcagcagcagcgagctgctggacaacagccccagcgagatcaacaatgaggccgcccctgagatctggggcaagaagaacaatgacagccgggaccacatctttgcccctggcaaccccagcagtgacctggaccacacctggaccaacagcaagccacccaaggaggaccagaatggcctggtggaccccaagacccggggcaaggtgtatgagaaggtggacagctggaacctgtttgaggagaacatgaagaagggcggcagtgatgtgctggtgccctgggaggacagcttcctgagctacaagtgcagcgactacagcgccagcaacctgggggaggacagcgtgcccagccccctggacaccaactacagcaccagtgacagctacaccagccccacctttgctggagatgagaaggagacagagcacaagccctttgccaaggaggagggctttgagagcaaggatggcaacagcacagctgaggagacagacatccccccccagagcctgcagcagagcagcaggaaccgcatcagcagcggccctggcaacctggacatgtgggccagcccccacacagacaacagcagcgagatcaacaccacccacaacctggatgaaaatgagctgaagacagagcacacagatggcaagaacatctccatggaggatgatgtgggggagagcagccagagcagctatgatgaccccagcatgatgcagctgtacaatgagaccaaccggcagctgaccctgctgcacagcagcaccaacagccggcagacagccccagacagcctggacctgtggaacagagtcatcctggaggacacccagagcacagccaccatcagtgacatggacaatgacctggactgggatgactgcagcggcggggccgccatccccagtgatggccagacagagggctacatggccgagggcagcgagcctgagacccgcttcaccgtgcggcagctggagccctggggcctggagtaccaggaggccaaccaggtggactgggagctgcctgccagtgatgagcacaccaaggacagcgcccccagcgagcaccacaccctgaatgagaagagcggccagctgattgccaacagcatctgggacagcgtgatgagggacaaggacatgagcagcttcatgctgcccggcagcagccacatcacagattctgagcagcgggagctgcccccagagatccccagccacagcgccaacgtgaaggacacccacagcccagatgccccagctgccagcggcaccagcgagagcgaggccctgatcagccacctggacaagcaggacacagagcgggagaccctgcagagtgatgctgccagcctggccacccggctggagaaccctggctacttcccccacccagacccctggaagggccatggagatggccagagcgagagcgagaaggaggcccagggcgccacagaccggggccacctggatgaggaggaggtgattgccagcggcgtggagaatgccagcggcatcagcgagaagggccagagcgaccaggagctgagcagcctggtggccagcgagcaccaggagatctgcatcaagagcggcaagatcagcagcctggccgtgaccttcagcccccagacagaggagcctgaggaggtgctggagtatgaggagggcagctacaacctggacagcagagatgtgcagacaggcatgtctgctgacaacctgcagcccaaggacacccatgagaagcacctgatgagccagaggaacagcggggagaccacagagaccagtgatggcatgaacttcaccaagtatgtgtctgtgcctgagaaggacctggagaagacagaggagtgcaacttcctggagccagaaaatgtgggcggcggccccccccaccgggtgcccaggagcctggactttggagatgtgcccatcgacagtgatgtgcacgtgagcagcacctgcagcgagatcaccaagaacctggatgtgaagggcagcgagaacagcctgcctggagctggcagcagcggcaactttgaccgggacaccatcagcagcgagtacacccacagcagcgccagcagccctgagctgaatgacagctctgtggccctgagctcctggggccagcagcccagcagcggctaccaggaggagaaccagggcaactggagcgagcagaaccaccaggagagcgagctgatcaccacagatggccaggtggagatcgtgaccaaggtgaaggacctggagaagaaccgcatcaatgaatttgagaagagctttgacaggaagacccccaccttcctggagatctggaatgacagcgtggatggagacagcttcagcagcctgagcagccctgagaccgggaagtacagcgagcacagcggcacccaccaggagagcaacctgattgccagctaccaggagaagaatgaacatgacatcagcgccaccgtgcagccagaagatgcccgggtcatcagcaccagcagcggcagtgatgatgattctgtgggcggggaggagagcattgaggaggagatccaggtggccaactgccacgtggctgaagatgagagccgggcctgggacagcctgaatgaaagcaacaagttcctggtgacagctgaccccaagtctgagaacatctatgactacctggacagcagcgagccagcagaaaatgaaaacaagagcaaccccttctgtgacaaccagcagagcagcccagacccctggaccttcagccccctgacagaaacagagatgcagatcacagctgtggagaaggagaagaggagcagccctgagaccggcaccactggagatgtggcctggcagatcagccccaaggccagcttccccaagaatgaagacaacagccagctggagatgctgggcttctctgctgacagcacagagtggtggaaggccagcccccaggagggccgcctcatcgagagcccctttgagcgggagctgagtgacagcagcggcgtgctggagatcaacagctctgtgcaccagaatgccagcccctggggcgtgcctgtgcagggcgacatcgagcctgtggagacccactacaccaaccccttcagtgacaaccaccagagccccttcctggagggcaatggcaagaacagccatgagcagctgtggaacatccagccccggcagcctgaccctgatgctgacaagttcagccagctggtgaagctggaccagatcaaggagaaggacagccgggagcagacctttgtgtctgctgctggagatgagctgaccccagagacccccacccaggagcagtgccaggacaccatgctgcctgtgtgtgaccacccagacacagccttcacccatgctgaggagaacagctgtgtgaccagcaatgtgtccaccaatgaaggccaggagaccaaccagtgggagcaggagaagagctacctgggggagatgaccaacagcagcatcgccacagagaacttccctgctgtgagcagccccacccagctgatcatgaagccaggcagcgagtgggatggcagcaccccatctgaggacagccggggcacctttgtgcctgacatcctgcacggcaacttccaggagggcggccagctggccagcgctgccccagacctgtggattgatgccaagaagcccttcagcctgaaggcagatggagaaaatccagacatcctgacccactgtgaacatgacagcaacagccaggccagtgacagcccagacatctgccatgattctgaggccaagcaggagacagagaagcacctgagcgcctgcatgggccctgaggtggagagcagcgagctgtgcctgacagagcctgagattgatgaggagcccatctatgagcccggccgggagtttgtgcccagcaatgctgagctggacagtgaaaatgccaccgtgctgccccccatcggctaccaggccgacatcaagggcagcagccagcctgccagccacaagggcagccctgagcccagcgagatcaacggggacaacagcacaggcctgcaggtgtctgagaagggggccagcccagacatggcccccatcctggagcctgtggaccggcgcatccccagaattgaaaatgtggccaccagcatctttgtgacccaccaggagcccaccccagaaggagatggctcctggatcagtgacagcttcagccctgagagccagcccggggcccgggccctgtttgatggagacccccacctgagcacagagaacccagccctggtgcctgatgccctgctggccagtgacacctgcctggacatcagcgaggccgcctttgaccacagcttcagtgatgccagcggcctgaacaccagcacaggcaccattgatgacatgagcaagctgaccctgtctgagggccaccctgagacccctgtggatggagacctgggcaagcaggacatctgcagcagcgaggcctcctggggagactttgaatatgatgtgatgggccagaacattgatgaggacctgctgcgggagcctgagcacttcctgtatggaggagacccccccctggaggaggacagcctgaagcagagcctggccccctacaccccaccatttgacctgagctacctgacagagcccgcccagagcgctgagaccatcgaggaggccggcagcccagaagatgagagcctgggctgcagagctgctgagatcgtgctgagcgccctgcctgacagaagaagtgagggcaaccaggccgagaccaagaaccggctgcccggcagccagctggccgtgctgcacatccgggaggaccctgagagcgtgtacctgcctgtgggcgccggcagcaacatcctgagccccagcaatgtggactgggaggtggagacagacaacagcgacctgcctgctggaggagacatcggcccccccaacggggccagcaaggagatcagcgagctggaggaggagaagaccatccccaccaaggagcctgagcagatcaagtctgagtacaaggaggagcgctgcacagagaagaatgaagatagacatgccctgcacatggactacatcctggtgaaccgggaggagaacagccacagcaagccagagacctgtgaggagcgggagagcattgctgagctggagctgtatgtgggcagcaaggagaccggcctgcagggcacccagctggccagcttcccagacacctgccagcctgccagcctgaatgaaaggaagggcctgtctgctgagaagatgagcagcaagagtgacaccaggagcagctttgagagccctgcccaggaccagagctggatgttcctgggccacagcgaggtgggggaccccagcctggatgcccgggacagcggccctggctggagcggcaagacagtggagcccttcagcgagctgggcctgggggagggcccccagctgcagatcctggaggagatgaagcccctggagagcctggccctggaggaggccagcggccctgtgtcccagagccagaagagcaagagccggggccgggccggcccagatgctgtgaccctgcaggccgtgacccatgacaatgagtgggagatgctgagcccccagcctgtgcagaagaacatgatcccagacacagagatggaggaggagacagagttcctggagctgggcacccgcatcagccggcccaacggcctgctgtctgaagatgtgggcatggacatcccctttgaggagggcgtgctgagccccagcgctgctgacatgaggcctgagccccccaacagcctggacctgaatgacacccacccccggcgcatcaagctgacagcccccaacatcaacctgagcctggaccagagcgagggcagcatcctgagtgatgacaacctggacagcccagatgaaattgacatcaacgtggatgagctggacaccccagatgaggccgacagctttgagtacacaggccatgaccccacagccaacaaggacagcggccaggagagcgagagcatccctgagtacacagctgaggaggagcgggaggacaaccggctgtggaggacagtggtgattggagagcaggagcagagaattgacatgaaggtgattgagccctacagaagagtcatcagccacggcggggacagcggctactatggagatggcctgaatgccatcatcgtgtttgctgcctgcttcctgcctgacagcagcagagctgactaccactacgtgatggagaacctcttcctgtatgtgatcagcaccctggagctgatggtggccgaggactacatgattgtgtacctgaatggagccacccccaggaggaggatgcctggcctgggctggatgaagaagtgctaccagatgattgaccggcggctgaggaagaacctgaagagcttcatcatcgtgcaccccagctggttcatccgcaccatcctggccgtgacccggcccttcatcagcagcaagttcagcagcaagatcaagtatgtgaacagcctgtctgagctgagcggcctcatccccatggactgcatccacatccctgagagcatcatcaacatcgacctgaagctgaaggagaagccctag

SEQ ID NO: 166619 - DNA, 8193 bp, synthetic construct
  misc_feature 1..8193: note = Description of Artificial Sequence: Synthetic coding sequence
  source 1..8193: mol_type = other DNA
atggtgagcaacagcaggaccagcagcacagaggccgtggccggcagcgcccccctgagccagggcagcagcggcatcatggagctgtatggcagtgacatcgagccccagcccagctctgtgaacttcattgaaaatcctccagacctgaatgacagcaaccaggcccaggtggatgccaacgtggacctggtgtccccagattctggcctggccaccatccgcagcagccgcagcagcaaggagagcagcgtcttcctgagtgatgacagccctgtgggggagggcgccggcccccaccacaccctgctgcccggcctggacagctacagccccatccctgagggcgctgtggccgaggagcacgcctggagcggggagcacggggagcactttgacctcttcaactttgatcctgcccccatggccagcggccagagccagcagagcagccacagcgctgactacagccctgcagatgacttcttccccaacagcgacctgtctgagggccagctgcctgctggccctgagggcctggatggcatgggcaccaacatgagcaactacagcagcagcagcctgctgtctggagctgggaaggacagcctggtggagcatgatgaggagtttgtgcagaggcaggacagcccccgggacaacagcgagaggaacctgagcctgacagactttgtgggagatgagagccccagccctgagcggctgaagaacacaggcaagaggatcccccccacccccatgaacagcctggtggagagcagccccagcacagaggagcccgccagcctgtacacagaggacatgacccagaaggccacagacaccggccacatgggccccccccagacccacgcccgctgcagctcctggtggggcggcctggagattgacagcaagaacattgctgatgcctggagcagcagcgagcaggagagcgtcttccagagccctgagagctggaaggagcacaagcccagcagcattgacagaagagccagtgacagcgtcttccagcccaagagcctggagttcaccaagagcggcccctgggagagcgagtttggccagcctgagctgggcagcaatgacatccaggacaagaatgaggagagcctgcccttccagaacctgcccatggagaagagccccctgcccaacaccagcccccagggcaccaaccacctgattgaggactttgccagcctgtggcacagcggccgcagccccacagccatgcctgagccctggggcaaccccacagatgatggagagcctgctgctgtggcccccttccctgcctggagcgccttcggcaaggaggaccatgatgaggccctgaagaacacctggaacctgcaccccaccagcagcaagacccccagcgtgcgggaccccaatgagtgggccatggccaagagcggctttgccttcagcagcagcgagctgctggacaacagccccagcgagatcaacaatgaagctgcccctgagatctggggcaagaagaacaatgacagccgggaccacatctttgcccctggcaaccccagcagtgacctggaccacacctggaccaacagcaagccacccaaggaggaccagaatggcctggtggaccccaagacccggggcaaggtgtatgagaaggtggacagctggaacctgtttgaggagaacatgaagaagggcggcagtgatgtgctggtgccctgggaggacagcttcctgagctacaagtgcagcgactacagcgccagcaacctgggagaagattctgtgcccagccccctggacaccaactacagcaccagtgacagctacaccagccccacctttgctggagatgagaaggagacagagcacaagccctttgccaaggaggagggctttgagagcaaggatggcaacagcacagctgaggagacagacatccccccccagagcctgcagcagagcagcaggaaccgcatcagcagcggccctggcaacctggacatgtgggccagcccccacacagacaacagcagcgagatcaacaccacccacaacctggatgaaaatgagctgaagacagagcacacagatggcaagaacatctccatggaggatgatgtgggggagagcagccagagcagctatgatgaccccagcatgatgcagctgtacaatgagaccaaccggcagctgaccctgctgcacagcagcaccaacagccggcagacagccccagacagcctggacctgtggaacagagtcatcctggaggacacccagagcacagccaccatcagtgacatggacaatgacctggactgggatgactgcagcggcggggccgccatccccagtgatggccagacagagggctacatggccgagggcagcgagcctgagacccgcttcaccgtgcggcagctggagccctggggcctggagtaccaggaggccaaccaggtggactgggagctgcctgccagtgatgagcacaccaaggacagcgcccccagcgagcaccacaccctgaatgagaagagcggccagctgattgccaacagcatctgggacagcgtgatgagggacaaggacatgagcagcttcatgctgcccggcagcagccacatcacagacagcgagcagcgggagctgcccccagagatccccagccacagcgccaacgtgaaggacacccacagcccagatgccccagctgccagcggcaccagcgagagcgaggccctgatcagccacctggacaagcaggacacagagcgggagaccctgcagagtgatgctgccagcctggccacccggctggagaaccctggctacttcccccacccagacccctggaagggccatggagatggccagagcgagagcgagaaggaggcccagggcgccacagaccggggccacctggatgaggaggaggtgattgccagcggcgtggagaatgccagcggcatcagcgagaagggccagagcgaccaggagctgagcagcctggtggccagcgagcaccaggagatctgcatcaagagcggcaagatcagcagcctggccgtgaccttcagcccccagacagaggagcctgaggaggtgctggagtatgaggagggcagctacaacctggacagcagagatgtgcagacaggcatgtctgctgacaacctgcagcccaaggacacccatgagaagcacctgatgagccagagaaattctggagagaccacagagaccagtgatggcatgaacttcaccaagtatgtgtctgtgcctgagaaggacctggagaagacagaggagtgcaacttcctggagccagaaaatgtgggcggcggccccccccaccgggtgcccaggagcctggactttggagatgtgcccatcgacagtgatgtgcacgtgagcagcacctgcagcgagatcaccaagaacctggatgtgaagggcagcgagaacagcctgcccggggccggcagcagcggcaactttgaccgggacaccatcagcagcgagtacacccacagcagcgccagcagccctgagctgaatgacagctctgtggccctgagctcctggggccagcagcccagcagcggctaccaggaggagaaccagggcaactggagcgagcagaaccaccaggagagcgagctgatcaccacagatggccaggtggagatcgtgaccaaggtgaaggacctggagaagaaccgcatcaatgaatttgagaagagctttgacaggaagacccccaccttcctggagatctggaatgattctgtggatggagacagcttcagcagcctgagcagccctgagaccgggaagtacagcgagcacagcggcacccaccaggagagcaacctgattgccagctaccaggagaagaatgaacatgacatcagcgccaccgtgcagccagaagatgcccgggtcatcagcaccagcagcggcagtgatgatgacagcgtgggcggggaggagagcattgaggaggagatccaggtggccaactgccacgtggccgaggatgagagccgggcctgggacagcctgaatgaaagcaacaagttcctggtgacagctgaccccaagtctgagaacatctatgactacctggacagcagcgagccagcagaaaatgaaaacaagagcaaccccttctgtgacaaccagcagagcagcccagacccctggaccttcagccccctgacagaaacagagatgcagatcacagctgtggagaaggagaagaggagcagccctgagaccggcaccactggagatgtggcctggcagatcagccccaaggccagcttccccaagaatgaagacaacagccagctggagatgctgggcttctctgctgacagcacagagtggtggaaggccagcccccaggagggccgcctgattgagagcccctttgagcgggagctgagtgacagcagtggagtgctggagatcaacagctctgtgcaccagaatgccagcccctggggcgtgcctgtgcagggcgacatcgagcctgtggagacccactacaccaaccccttcagtgacaaccaccagagccccttcctggagggcaatggcaagaacagccatgagcagctgtggaacatccagccccggcagcctgaccctgatgctgacaagttcagccagctggtgaagctggaccagatcaaggagaaggacagccgggagcagacctttgtgtctgctgctggagatgagctgaccccagagacccccacccaggagcagtgccaggacaccatgctgcctgtgtgtgaccacccagacacagccttcacccacgccgaggagaacagctgtgtgaccagcaatgtgtccaccaatgaaggccaggagaccaaccagtgggagcaggagaagagctacctgggggagatgaccaacagcagcatcgccacagagaacttccctgctgtgagcagccccacccagctgatcatgaagccaggcagcgagtgggatggcagcacccccagcgaggacagccggggcacctttgtgcctgacatcctgcacggcaacttccaggagggcggccagctggccagcgctgccccagacctgtggattgatgccaagaagcccttcagcctgaaggcagatggagagaacccagacatcctgacccactgtgaacatgacagcaacagccaggccagtgacagcccagacatctgccacgacagcgaggccaagcaggagacagagaagcacctgagcgcctgcatgggccctgaggtggagagcagcgagctgtgcctgacagagcctgagattgatgaggagcccatctatgagcccggccgggagtttgtgcccagcaatgctgagctggacagtgaaaatgccaccgtgctgccccccatcggctaccaggccgacatcaagggcagcagccagcctgccagccacaagggcagccctgagcccagcgagatcaatggagacaacagcacaggcctgcaggtgtctgagaagggggccagcccagacatggcccccatcctggagcctgtggaccggcgcatccccagaattgaaaatgtggccaccagcatctttgtgacccaccaggagcccaccccagaaggagatggctcctggatcagtgacagcttcagccctgagagccagcccggggcccgggccctgtttgatggagacccccacctgagcacagaaaatcctgccctggtgcctgatgccctgctggccagtgacacctgcctggacatcagcgaggccgcctttgaccacagcttcagtgatgccagcggcctgaacaccagcacaggcaccattgatgacatgagcaagctgaccctgtctgagggccaccctgagacccctgtggatggagacctgggcaagcaggacatctgcagcagcgaggcctcctggggagactttgaatatgatgtgatgggccagaacattgatgaggacctgctgcgggagcctgagcacttcctgtatggaggagacccccccctggaggaggacagcctgaagcagagcctggccccctacaccccaccatttgacctgagctacctgacagagcccgcccagagcgctgagaccatcgaggaggccggcagcccagaagatgagagcctgggctgcagagctgctgagatcgtgctgagcgccctgcctgaccggcgctctgagggcaaccaggccgagaccaagaaccggctgcccggcagccagctggccgtgctgcacatcagagaagatcctgagagcgtgtacctgcctgtgggcgccggcagcaacatcctgagccccagcaatgtggactgggaggtggagacagacaacagcgacctgcctgctggaggagacatcggccccccaaatggagccagcaaggagatcagcgagctggaggaggagaagaccatccccaccaaggagcctgagcagatcaagtctgagtacaaggaggagcgctgcacagagaagaatgaagatagacatgccctgcacatggactacatcctggtgaaccgggaggagaacagccacagcaagccagagacctgtgaggagcgggagagcattgctgagctggagctgtatgtgggcagcaaggagaccggcctgcagggcacccagctggccagcttcccagacacctgccagcctgccagcctgaatgaaaggaagggcctgtctgctgagaagatgagcagcaagagtgacaccaggagcagctttgagagccctgcccaggaccagagctggatgttcctgggccacagcgaggtgggggaccccagcctggatgcccgggacagcggccctggctggagcggcaagacagtggagcccttcagcgagctgggcctgggggagggcccccagctgcagatcctggaggagatgaagcccctggagagcctggccctggaggaggccagcggccctgtgtcccagagccagaagagcaagagccggggccgggccggcccagatgctgtgaccctgcaggccgtgacccatgacaatgagtgggagatgctgagcccccagcctgtgcagaagaacatgatcccagacacagagatggaggaggagacagagttcctggagctgggcacccgcatcagccggcccaacggcctgctgtctgaagatgtgggcatggacatcccctttgaggagggcgtgctgagccccagcgctgctgacatgaggcctgagccccccaacagcctggacctgaatgacacccacccccggcgcatcaagctgacagcccccaacatcaacctgagcctggaccagagcgagggcagcatcctgagtgatgacaacctggacagcccagatgaaattgacatcaacgtggatgagctggacaccccagatgaagctgacagctttgagtacacaggccacgaggaccccacagccaacaaggacagcggccaggagagcgagagcatccctgagtacacagctgaggaggagcgggaggacaaccggctgtggaggacagtggtgattggagagcaggagcagagaattgacatgaaggtgattgagccctacagaagagtcatcagccacggcggctactatggagatggcctgaatgccatcatcgtgtttgctgcctgcttcctgcctgacagcagcagagctgactaccactacgtgatggagaacctcttcctgtatgtgatcagcaccctggagctgatggtggccgaggactacatgattgtgtacctgaatggagccaccccaagaagaaggatgcctggcctgggctggatgaagaagtgctaccagatgattgaccggcggctgaggaagaacctgaagagcttcatcatcgtgcaccccagctggttcatccgcaccatcctggccgtgacccggcccttcatcagcagcaagttcagcagcaagatcaagtatgtgaacagcctgtctgagctgagcggcctcatccccatggactgcatccacatccctgagagcatcatcaagctggatgaggagctgcgggaggccagcgaggccgccaagaccagctgcctgtacaatgaccctgagatgagctccatggagaaggacatcgacctgaagctgaaggagaagccctag

SEQ ID NO: 166620 - DNA, 927 bp, synthetic construct
  misc_feature 1..927: note = Description of Artificial Sequence: Synthetic coding sequence
  source 1..927: mol_type = other DNA
atgaggcctgagccccccaacagcctggacctgaatgacacccacccccggcgcatcaagctgacagcccccaacatcaacctgagcctggaccagagcgagggcagcatcctgagtgatgacaacctggacagcccagatgaaattgacatcaacgtggatgagctggacaccccagatgaggccgacagctttgagtacacaggccatgaccccacagccaacaaggacagcggccaggagagcgagagcatccctgagtacacagctgaggaggagcgggaggacaaccggctgtggaggacagtggtgattggagagcaggagcagagaattgacatgaaggtgattgagccctacagaagagtcatcagccacggcggcaagctgcgctactatggagatggcctgaatgccatcatcgtgtttgctgcctgcttcctgcctgacagcagcagagctgactaccactacgtgatggagaacctcttcctgtatgtgatcagcaccctggagctgatggtggccgaggactacatgattgtgtacctgaatggagccacccccaggaggaggatgcctggcctgggctggatgaagaagtgctaccagatgattgaccggcggctgaggaagaacctgaagagcttcatcatcgtgcaccccagctggttcatccgcaccatcctggccgtgacccggcccttcatcagcagcaagttcagcagcaagatcaagtatgtgaacagcctgtctgagctgagcggcctcatccccatggactgcatccacatccctgagagcatcatcaagtatgatgaggagaggagctacaagaggtctgtgaggaccagctgcctgtacaatgaccctgagatgagctccatggagaaggacatcgacctgaagctgaaggagaagccctag

SEQ ID NO: 166621 - DNA, 1014 bp, synthetic construct
  misc_feature 1..1014: note = Description of Artificial Sequence: Synthetic coding sequence
  source 1..1014: mol_type = other DNA
atgaatggcctgaggaacaagcagctgctgtctgaagatgtgggcatggacatcccctttgaggagggcgtgctgagccccagcgctgctgacatgaggcctgagccccccaacagcctggacctgaatgacacccacccccggcgcatcaagctgacagcccccaacatcaacctgagcctggaccagagcgagggcagcatcctgagtgatgacaacctggacagcccagatgaaattgacatcaacgtggatgagctggacaccccagatgaagctgacagctttgagtacacaggccatgaccccacagccaacaaggacagcggccaggagagcgagagcatccctgagtacacagctgaggaggagcgggaggacaaccggctgtggaggacagtggtgattggagagcaggagcagagaattgacatgaaggtgattgagccctaccgccgggtcatcagccatggaggctactatggagatggcctgaatgccatcatcgtgtttgctgcctgcttcctgcctgacagcagcagagctgactaccactacgtgatggagaacctcttcctgtatgtgatcagcaccctggagctgatggtggccgaggactacatgattgtgtacctgaatggagccacccccaggaggaggatgcctggcctgggctggatgaagaagtgctaccagatgattgaccggcggctgaggaagaacctgaagagcttcatcatcgtgcaccccagctggttcatccgcaccatcctggccgtgacccggcccttcatcagcagcaagttcagcagcaagatcaagtatgtgaacagcctgtctgagctgagcggcctcatccccatggactgcatccacatccctgagagcatcatcaagctggatgaggagctgcgggaggccagcgaggccgccaagaccagctgcctgtacaatgaccctgagatgagctccatggagaaggacatcgacctgaagctgaaggagaagccctag

SEQ ID NO: 166622 - DNA, 1155 bp, synthetic construct
  misc_feature 1..1155: note = Description of Artificial Sequence: Synthetic coding sequence
  source 1..1155: mol_type = other DNA
atggctggaaatgctgagcccccacctgctggggccgcctgcccccaggaccggcgcagctgcagcggccgggccggcggggacagagtgtgggaggatggagagcacccagccaagaagctgaagtctggaggagatgaggagcggcgggagaagccacccaagaggaagatcgtgctgctgatggcctacagcggcaagggctaccacggcatgcagagaaatgtgggcagcagccagttcaagaccattgaagatgacctggtgtctgccctggtgcgcagcggctgcatccctgagaaccacggggaggacatgaggaagatgtccttccagagatgtgccaggacagacaagggcgtgtctgctgctggccaggtggtgtccctgaaggtgtggctgattgatgacatcctggagaagatcaacagccacctgcccagccacatccgcatcctgggcctgaagagggtgactggaggcttcaacagcaagaacagatgtgatgcccggacctactgctacctgctgcccacctttgcctttgcccacaaggacagagatgtgcaggatgagacctaccgcctgtctgctgagaccctgcagcaggtgaaccggctgctggcctgctacaagggcacccacaacttccacaacttcaccagccagaagggcccccaggaccccagcgcctgccgctacatcctggagatgtactgtgaggagccctttgtgcgggagggcctggagtttgctgtgatccgggtgaagggccagagcttcatgatgcaccagatcaggaagatggtgggcctggtggtggccatcgtgaagggctacgcccctgagagcgtgctggagaggtcctggggcacagagaaggtggatgtgcccaaggcccctggcctgggcctggtgctggagcgggtgcactttgagaagtacaaccagagatttggaaatgatggcctgcacgagcccctggactgggcccaggaggagggcaaggtggccgccttcaaggaggagcacatctaccccaccatcatcggcacagaaagagatgagaggtccatggcccagtggctgagcaccctgcccatccacaacttcagcgccacagccctgacagctgggggcactggagccaagtag

SEQ ID NO: 166623 - DNA, 1284 bp, synthetic construct
  misc_feature 1..1284: note = Description of Artificial Sequence: Synthetic coding sequence
  source 1..1284: mol_type = other DNA
atgggcctgcagctgcgggccctgctgggcgccttcggccgctggaccctgcggctgggcccccggcccagctgcagccccaggatggctggaaatgctgagcccccacctgctggggccgcctgcccccaggaccggcgcagctgcagcggccgggccggcggggacagagtgtgggaggatggagagcacccagccaagaagctgaagtctggaggagatgaggagcggcgggagaagccacccaagaggaagatcgtgctgctgatggcctacagcggcaagggctaccacggcatgcagagaaatgtgggcagcagccagttcaagaccattgaagatgacctggtgtctgccctggtgcgcagcggctgcatccctgagaaccacggggaggacatgaggaagatgtccttccagagatgtgccaggacagacaagggcgtgtctgctgctggccaggtggtgtccctgaaggtgtggctgattgatgacatcctggagaagatcaacagccacctgcccagccacatccgcatcctgggcctgaagagggtgactggaggcttcaacagcaagaacagatgtgatgcccggacctactgctacctgctgcccacctttgcctttgcccacaaggacagagatgtgcaggatgagacctaccgcctgtctgctgagaccctgcagcaggtgaaccggctgctggcctgctacaagggcacccacaacttccacaacttcaccagccagaagggcccccaggaccccagcgcctgccgctacatcctggagatgtactgtgaggagccctttgtgcgggagggcctggagtttgctgtgatccgggtgaagggccagagcttcatgatgcaccagatcaggaagatggtgggcctggtggtggccatcgtgaagggctacgcccctgagagcgtgctggagaggtcctggggcacagagaaggtggatgtgcccaaggcccctggcctgggcctggtgctggagcgggtgcactttgagaagtacaaccagagatttggaaatgatggcctgcacgagcccctggactgggcccaggaggagggcaaggtggccgccttcaaggaggagcacatctaccccaccatcatcggcacagaaagagatgagaggtccatggcccagtggctgagcaccctgcccatccacaacttcagcgccacagccctgacagctgggggcactggagccaaggtgcccagccccctggagggctctgaaggagatggagacacagactag

SEQ ID NO: 166624 - DNA, 1200 bp, synthetic construct
  misc_feature 1..1200: note = Description of Artificial Sequence: Synthetic coding sequence
  source 1..1200: mol_type = other DNA
atggctggaaatgctgagcccccacctgctggggccgcctgcccccaggaccggcgcagctgcagcggccgggccggcggggacagagtgtgggaggatggagagcacccagccaagaagctgaagtctggaggagatgaggagcggcgggagaagccacccaagaggaagatcgtgctgctgatggcctacagcggcaagggctaccacggcatgcagagaaatgtgggcagcagccagttcaagaccattgaagatgacctggtgtctgccctggtgcgcagcggctgcatccctgagaaccacggggaggacatgaggaagatgtccttccagagatgtgccaggacagacaagggcgtgtctgctgctggccaggtggtgtccctgaaggtgtggctgattgatgacatcctggagaagatcaacagccacctgcccagccacatccgcatcctgggcctgaagagggtgactggaggcttcaacagcaagaacagatgtgatgcccggacctactgctacctgctgcccacctttgcctttgcccacaaggacagagatgtgcaggatgagacctaccgcctgtctgctgagaccctgcagcaggtgaaccggctgctggcctgctacaagggcacccacaacttccacaacttcaccagccagaagggcccccaggaccccagcgcctgccgctacatcctggagatgtactgtgaggagccctttgtgcgggagggcctggagtttgctgtgatccgggtgaagggccagagcttcatgatgcaccagatcaggaagatggtgggcctggtggtggccatcgtgaagggctacgcccctgagagcgtgctggagaggtcctggggcacagagaaggtggatgtgcccaaggcccctggcctgggcctggtgctggagcgggtgcactttgagaagtacaaccagagatttggaaatgatggcctgcacgagcccctggactgggcccaggaggagggcaaggtggccgccttcaaggaggagcacatctaccccaccatcatcggcacagaaagagatgagaggtccatggcccagtggctgagcaccctgcccatccacaacttcagcgccacagccctgacagctgggggcactggagccaaggtgcccagccccctggagggctctgaaggagatggagacacagactag

SEQ ID NO: 166625 - DNA, 1200 bp, synthetic construct; identical to SEQ ID NO: 166624
  misc_feature 1..1200: note = Description of Artificial Sequence: Synthetic coding sequence
  source 1..1200: mol_type = other DNA

SEQ ID NO: 166626 - DNA, 465 bp, synthetic construct
  misc_feature 1..465: note = Description of Artificial Sequence: Synthetic coding sequence
  source 1..465: mol_type = other DNA
atggctggaaatgctgagcccccacctgctggggccgcctgcccccaggaccggcgcagctgcagcggccgggccggcggggacagagtgtgggaggatggagagcacccagccaagaagctgaagtctggaggagatgaggagcggcgggagaagccacccaagaggaagatcgtgctgctgatggcctacagcggcaagggctaccacggcatgcagagaaatgtgggcagcagccagttcaagaccattgaagatgacctggtgtctgccctggtgcgcagcggctgcatccctgagaaccacggggaggacatgaggaagatgtccttccagagatgtgccaggacagacaagggcgtgtctgctgctggccaggtggtgtccctgaaggtgtggctgattgatgacatcctggagaagatcaacagccacctgcccagccacatccgcatcctgggctag

SEQ ID NO: 166627 - DNA, 618 bp, synthetic construct
  misc_feature 1..618: note = Description of Artificial Sequence: Synthetic coding sequence
  source 1..618: mol_type = other DNA
atgagcaagggccgggcagaggccgccgccggggctgctggcatcctgctgcgctacctgcaggagcagaaccggccctacagcagccaggatgtgtttggaaacctgcagcgggagcacggcctgggcaaggctgtggtggtgaagaccctggagcagctggcccagcagggcaagatcaaggagaagatgtatggcaagcagaagatctactttgctgaccaggaccagtttgacatggtgtctgatgctgacctgcaggtgctggatggcaagatcgtggccctgacagccaaggtgcagagcctgcagcagagctgccgctacatggaggccgagatgcagaaggagatccaggagctgaagaaggaatgtgccggctaccgggagcggctgaagaacatcaaggccgccaccaaccacgtgaccccagaggagaaggagcaggtgtaccgggagcggcagaagtactgcaaggagtggaggaagaggaagaggatggccacagagctgagtgatgccatcctggagggctaccccaagagcaagaagcagttctttgaggaggtgggcatcgagacagatgaggactacaacgtgaccctgcctgacccctag

SEQ ID NO: 166628 - DNA, 654 bp, synthetic construct
  misc_feature 1..654: note = Description of Artificial Sequence: Synthetic coding sequence
  source 1..654: mol_type = other DNA
atgagcaagggccgggcagaggccgccgccggggctgctggcatcctgctgcgctacctgcaggagcagaaccggccctacagcagccaggatgtgtttggaaacctgcagcgggagcacggcctgggcaaggctgtggtggtgaagaccctggagcagctggcccagcagggcaagatcaaggagaagatgtatggcaagcagaagatctactttgctgaccaggaccagtttgacatggtgtctgatgctgacctgcaggtgctggatggcaagatcgtggccctgacagccaaggtgcagagcctgcagcagagctgccgctacatggaggccgagctgaaggagctgagcagcgccctgaccaccccagagatgcagaaggagatccaggagctgaagaaggaatgtgccggctaccgggagcggctgaagaacatcaaggccgccaccaaccacgtgaccccagaggagaaggagcaggtgtaccgggagcggcagaagtactgcaaggagtggaggaagaggaagaggatggccacagagctgagtgatgccatcctggagggctaccccaagagcaagaagcagttctttgaggaggtgggcatcgagacagatgaggactacaacgtgaccctgcctgacccctag

SEQ ID NO: 166629 - DNA, 465 bp, synthetic construct
  misc_feature 1..465: note = Description of Artificial Sequence: Synthetic coding sequence
  source 1..465: mol_type = other DNA
atgtatggcaagcagaagatctactttgctgaccaggaccagtttgacatggtgtctgatgctgacctgcaggtgctggatggcaagatcgtggccctgacagccaaggtgcagagcctgcagcagagctgccgctacatggaggccgagctgaaggagctgagcagcgccctgaccaccccagagatgcagaaggagatccaggagctgaagaaggaatgtgccggctaccgggagcggctgaagaacatcaaggccgccaccaaccacgtgaccccagaggagaaggagcaggtgtaccgggagcggcagaagtactgcaaggagtggaggaagaggaagaggatggccacagagctgagtgatgccatcctggagggctaccccaagagcaagaagcagttctttgaggaggtgggcattgaaacagatgaggactacaacgtgaccctgcctgacccctag

SEQ ID NO: 166630 - DNA, 915 bp, synthetic construct
  misc_feature 1..915: note = Description of Artificial Sequence: Synthetic coding sequence
  source 1..915: mol_type = other DNA
atgttttctgtgctgtcctatggccgcctggtggcccgggctgtgctgggcggcctgagccagacagacccccgggccggcggcggcggcggcggggactatggcctggtgacagctggctgcggctttgggaaggacttcaggaagggcctgctgaagaagggggcctgctatggagatgatgcctgctttgtggcccggcacaggtctgcagatgtgctgggcgtggctgatggagtgggcggctggagggactatggagtggaccccagccagttcagcggcaccctgatgaggacctgtgagcggctggtgaaggagggccgctttgtgcccagcaaccccatcggcatcctgaccaccagctactgtgagctgctgcagaacaaggtgcccctgctgggcagcagcacagcctgcatcgtggtgctggacaggaccagccaccggctgcacacagccaacctgggggacagcggcttcctggtggtgcggggcggggaggtggtgcacagaagtgatgagcagcagcactacttcaacacccccttccagctgagcatcgcccctcctgaggccgagggcgtggtgctgagtgacagcccagatgctgctgacagcaccagctttgatgtgcagctgggggacatcatcctgacagccacagatggcctgtttgacaacatgccagactacatgatcctgcaggagctgaagaagctgaagaacagcaactatgagagcatccagcagacagcccggagcattgctgagcaggcccacgagctggcctatgaccccaactacatgagcccctttgcccagtttgcctgtgacaatggcctgaatgtgcggggcggcaagccagatgacatcaccgtgctgctgagcatcgtggccgagtacacagactag

SEQ ID NO: 166631 - DNA, 1746 bp, synthetic construct
  misc_feature 1..1746: note = Description of Artificial Sequence: Synthetic coding sequence
  source 1..1746: mol_type = other DNA
atggctgtgcggcaggccctgggccggggcctgcagctgggccgggccctgctgctgcgcttcaccgggaagccaggccgggcctacggcctgggccggcccggccctgctgctggctgtgtgcggggggagcggcccggctgggccgccggccctggagctgagcccaggagagtgggcctgggcctgcccaaccggctgcgcttcttccggcagagcgtggccggcctggccgcccggctgcagaggcagtttgtggtgcgggcctggggctgtgccggcccctgtggccgggctgtgttcctggccttcggcctgggcctgggcctgattgaggagaagcaggccgagagcagaagagctgtgtctgcctgccaggagatccaggccatcttcacccagaagagcaagccaggccctgaccccctggacacccggcggctgcagggcttccggctggaggagtacctgattggccagagcatcggcaagggctgcagcgctgctgtgtatgaggccaccatgcccaccctgccccagaacctggaggtgaccaagagcacaggcctgctgcccggccggggccctggcaccagcgcccctggagagggccaggagcgggcccctggggccccagccttccccctggccatcaagatgatgtggaacatctctgctggcagcagcagcgaggccatcctgaacaccatgagccaggagctggtgcctgccagccgggtggccctggccggggagtatggagctgtgacctacaggaagagcaagaggggccccaagcagctggccccccaccccaacatcatccgggtgctgcgggccttcaccagctctgtgcccctgctgcccggggccctggtggactacccagatgtgctgcccagccggctgcaccctgagggcctgggccacggccgcaccctcttcctggtgatgaagaactacccctgcaccctgcggcagtacctgtgtgtgaacacccccagcccccggctggccgccatgatgctgctgcagctgctggagggcgtggaccacctggtgcagcagggcatcgcccaccgggacctgaagagtgacaacatcctggtggagctggaccctgatggctgcccctggctggtgattgctgactttggctgctgcctggctgatgagagcatcggcctgcagctgcccttcagctcctggtacgtggaccggggcggcaatggctgcctgatggcccctgaggtgtccacagcccggcccggccccagggctgtgattgactacagcaaggcagatgcctgggccgtgggcgccatcgcctatgagatcttcggcctggtgaaccccttctacggccagggcaaggcccacctggagagccgcagctaccaggaggcccagctgcctgccctgcctgagagcgtgcccccagatgtgcggcagctggtgcgggccctgctgcagcgggaggccagcaagaggccttctgcccgggtggccgccaacgtgctgcacctgagcctgtggggcgagcacatcctggccctgaagaacctgaagctggacaagatggtgggctggctgctgcagcagagcgctgccaccctgctggccaaccggctgacagagaagtgctgcgtggagaccaagatgaagatgctgttcctggccaacctggagtgtgagaccctgtgccaggccgccctgctgctgtgctcctggagggctgccctgtag

SEQ ID NO: 166632 - DNA, 393 bp, synthetic construct
  misc_feature 1..393: note = Description of Artificial Sequence: Synthetic coding sequence
  source 1..393: mol_type = other DNA
atggctgctgtgctgggcgccctgggcgccacccggcggctgctggccgccctgcggggccagagcctgggcctggccgccatgagcagcggcacccaccggctgacagctgaggagaggaaccaggccatcctggacctgaaggccgccggctggagcgagctgtctgaaagagatgccatctacaaggagttctccttccacaacttcaaccaggccttcggcttcatgagccgggtggccctgcaggccgagaagatgaaccaccaccctgagtggttcaacgtgtacaacaaggtgcagatcaccctgaccagccatgactgtggggagctgaccaagaaggatgtgaagctggccaagttcatcgagaaggctgctgcctctgtgtag

SEQ ID NO: 166633 - DNA, 393 bp, synthetic construct; identical to SEQ ID NO: 166632
  misc_feature 1..393: note = Description of Artificial Sequence: Synthetic coding sequence
  source 1..393: mol_type = other DNA

SEQ ID NO: 166634 - DNA, 1041 bp, synthetic construct
  misc_feature 1..1041: note = Description of Artificial Sequence: Synthetic coding sequence
  source 1..1041: mol_type = other DNA
atggccctgctgaaggtgaagtttgaccagaagaagagggtgaagctggcccagggcctgtggctgatgaactggttctctgtgctggccggcatcatcatcttcagcctgggcctcttcctgaagattgagctgaggaagagaagtgatgtgatgaacaacagcgagagccactttgtgcccaacagcctgattggcatgggcgtgctgagctgtgtgttcaacagcctggccggcaagatctgctatgatgccctggaccctgccaagtatgcccgctggaagccctggctgaagccctacctggccatctgtgtgctcttcaacatcatcctcttcctggtggccctgtgctgcttcctgctgcggggcagcctggagaacaccctgggccagggcctgaagaatggcatgaagtactacagagacacagacaccccaggccgctgcttcatgaagaagaccatcgacatgctgcagatcgagttcaagtgctgcggcaacaacggcttccgggactggtttgagatccagtggatcagcaaccgctacctggacttcagcagcaaggaggtgaaggaccgcatcaagagcaatgtggatggccgctacctggtggatggagtgcccttcagctgctgcaaccccagcagcccccggccctgcatccagtaccagatcaccaacaacagcgcccactacagctatgaccaccagacagaggagctgaacctgtgggtgcggggctgccgggccgccctgctgagctactacagcagcctgatgaacagcatgggcgtggtgaccctgctgatctggctgtttgaggtgaccatcaccatcggcctgcgctacctgcagaccagcctggatggagtgagcaaccctgaggagagcgagagcgagagccagggctggctgctggagaggtctgtgcctgagacctggaaggccttcctggagagcgtgaagaagctgggcaagggcaaccaggtggaggccgagggcgcagatgctggccaggcccctgaggccggctag

SEQ ID NO: 166635 - DNA, 1191 bp, synthetic construct
  misc_feature 1..1191: note = Description of Artificial Sequence: Synthetic coding sequence
  source 1..1191: mol_type = other DNA
atgcccctgtttgagcccagggtcttcaccgctggcagcgaggagcgggtgacctgcctgccccccaagggcctgcctgagcccagcgtgtggtgggagcacgccggcgtgcggctgcccacccacggccgggtgtaccagaagggccacgagctggtgctggccaacattgctgagagtgatgctggggtgtacacctgccacgccgccaacctggccggccagaggcggcaggatgtgaacatcaccgtggccaccgtgcccagctggctgaagaagccccaggacagccagctggaggagggcaagccaggctacctggactgcctgacccaggccacccccaagcccaccgtggtgtggtacagaaaccagatgctgatcagcgaggacagcagatttgaggtgttcctggccaaggcccagggcctggaggagggcgtggccgagaccctggtgctggtgaagagcctgcagagcaaggatgagcagcagcagctggacttccggcgggagctggagatgtttgggaagctgaaccacgccaacgtggtgcggctgctgggcctgtgccgggaggccgagccccactacatggtgctggagtatgtggacctgggggacctgaagcagttcctgcgcatcagcaagagcaaggatgagaagctgaagagccagcccctgagcaccaagcagaaggtggccctgtgcacccaggtggccctgggcatggagcacctgagcaacaacagatttgtgcacaaggacctggccgccaggaactgcctggtgtctgcccagaggcaggtgaaggtgtctgccctgggcctgagcaaggatgtgtacaacagcgagtactaccacttccggcaggcctgggtgcccctgcgctggatgagccctgaggccatcctggagggggacttcagcaccaagagtgatgtgtgggccttcggcgtgctgatgtgggaggtgttcacccacggggagatgcctcatggaggccaggctgatgatgaggtgctggccgacctgcaggccggcaaggcccggctgccccagcctgagggctgccccagcaagctgtaccgcctgatgcagcgctgctgggccctgagccccaaggaccggcccagcttcagcgagatcgccagcgccctgggggacagcacagtggacagcaagccctag

SEQ ID NO: 166636 - DNA, 3093 bp, synthetic construct
  misc_feature 1..3093: note = Description of Artificial Sequence: Synthetic coding sequence
  source 1..3093: mol_type = other DNA
atgggcgccgcccggggcagccctgcccggccccggcggctgcccctgctgtctgtgctgctgctgcccctgctgggcggcacccagacagccatcgtgttcatcaagcagcccagcagccaggatgccctgcagggcagaagagccctgctgcgctgtgaggtggaggcccctggccctgtgcacgtgtactggctgctggatggagcccctgtgcaggacacagaaagaagatttgcccagggcagcagcctgagctttgctgctgtggaccggctgcaggacagcggcaccttccagtgtgtggccagagatgatgtgactggagaggaggcccggagcgccaatgccagcttcaacatcaagtggattgaggccggccctgtggtgctgaagcacccagccagcgaggccgagatccagccccagacccaggtgaccctgcgctgccacattgatggccacccccggcccacctaccagtggttcagagatggcacccccctgagtgatggccagagcaaccacacagtgagcagcaaggagaggaacctgaccctgcggcctgctggccctgagcacagcggcctgtacagctgctgtgcccacagcgccttcggccaggcctgcagcagccagaacttcaccctgagcattgctgatgagagctttgcccgggtggtgctggccccccaggatgtggtggtggcccgctatgaggaggccatgttccactgccagttcagcgcccagcccccacccagcctgcagtggctgtttgaagatgagacccccatcaccaacagaagccggcccccccacctgcggcgggccaccgtgtttgccaacggcagcctgctgctgacccaggtgcggcccagaaatgccggcatctaccgctgcatcggccagggccagaggggcccccccatcatcctggaggccaccctgcacctggccgagattgaggacatgcccctgtttgagcccagggtcttcaccgctggcagcgaggagcgggtgacctgcctgccccccaagggcctgcctgagcccagcgtgtggtgggagcacgccggcgtgcggctgcccacccacggccgggtgtaccagaagggccacgagctggtgctggccaacattgctgagagtgatgctggggtgtacacctgccacgccgccaacctggccggccagaggcggcaggatgtgaacatcaccgtggccaccgtgcccagctggctgaagaagccccaggacagccagctggaggagggcaagccaggctacctggactgcctgacccaggccacccccaagcccaccgtggtgtggtacagaaaccagatgctgatcagcgaggacagcagatttgaggtgttcaagaatggcaccctgcgcatcaacagcgtggaggtgtatgatggcacctggtaccgctgcatgagcagcaccccagctggcagcattgaggcccaggcccgggtgcaggtgctggatggcagcagcctgcctgagtgggtgacagacaatgccggcaccctgcactttgcccgggtgaccagagatgatgctggcaactacacctgcatcgccagcaatggcccccagggccagatccgggcccacgtgcagctgactgtggccgtgttcatcaccttcaaggtggagcctgagaggaccaccgtgtaccagggccacacagccctgctgcagtgtgaggcccagggcgaccccaagcccctcatccagtggaagggcaaggaccgcatcctggaccccaccaagctgggccccaggatgcacatcttccagaatggcagcctggtgattcatgatgtggccccagaagattctggccgctacacctgcatcgccggcaacagctgcaacatcaagcacacagaggcccccctgtatgtggtggacaagcctgtgcctgaggagagcgagggccctggcagccccccaccctacaagatgatccagaccatcggcctgtctgtgggcgctgctgtggcctacatcatcgctgtgctgggcctgatgttctactgcaagaagcgctgcaaggccaagaggctgcagaagcagcctgagggggaggagcctgagatggagtgcctgaatggaggccccctgcagaatggccagcccagcgctgagatccaggaggaggtggccctgaccagcctgggcagcggccctgctgccaccaacaagaggcacagcaccagtgacaagatgcacttccccaggagcagcctgcagcccatcaccaccctgggcaagtcagaatttggagaggtgttcctggccaaggcccagggcctggaggagggcgtggccgagaccctggtgctggtgaagagcctgcagagcaaggatgagcagcagcagctggacttccggcgggagctggagatgtttgggaagctgaaccacgccaacgtggtgcggctgctgggcctgtgccgggaggccgagccccactacatggtgctggagtatgtggacctgggggacctgaagcagttcctgcgcatcagcaagagcaaggatgagaagctgaagagccagcccctgagcaccaagcagaaggtggccctgtgcacccaggtggccctgggcatggagcacctgagcaacaacagatttgtgcacaaggacctggccgccaggaactgcctggtgtctgcccagaggcaggtgaaggtgtctgccctgggcctgagcaaggatgtgtacaacagcgagtactaccacttccggcaggcctgggtgcccctgcgctggatgagccctgaggccatcctggagggggacttcagcaccaagagtgatgtgtgggccttcggcgtgctgatgtgggaggtgttcacccacggggagatgcctcatggaggccaggctgatgatgaggtgctggccgacctgcaggccggcaaggcccggctgccccagcctgagggctgccccagcaagctgtaccgcctgatgcagcgctgctgggccctgagccccaaggaccggcccagcttcagcgagatcgccagcgccctgggggacagcacagtggacagcaagccctag

SEQ ID NO: 166637 - DNA, 2823 bp, synthetic construct
  misc_feature 1..2823: note = Description of Artificial Sequence: Synthetic coding sequence
  source 1..2823: mol_type = other DNA
atgggcgccgcccggggcagccctgcccggccccggcggctgcccctgctgtctgtgctgctgctgcccctgctgggcggcacccagacagccatcgtgttcatcaagcagcccagcagccaggatgccctgcagggcagaagagccctgctgcgctgtgaggtggaggcccctggccctgtgcacgtgtactggctgctggatggagcccctgtgcaggacacagaaagaagatttgcccagggcagcagcctgagctttgctgctgtggaccggctgcaggacagcggcaccttccagtgtgtggccagagatgatgtgactggagaggaggcccggagcgccaatgccagcttcaacatcaagtggattgaggccggccctgtggtgctgaagcacccagccagcgaggccgagatccagccccagacccaggtgaccctgcgctgccacattgatggccacccccggcccacctaccagtggttcagagatggcacccccctgagtgatggccagagcaaccacacagtgagcagcaaggagaggaacctgaccctgcggcctgctggccctgagcacagcggcctgtacagctgctgtgcccacagcgccttcggccaggcctgcagcagccagaacttcaccctgagcattgctgatgagagctttgcccgggtggtgctggccccccaggatgtggtggtggcccgctatgaggaggccatgttccactgccagttcagcgcccagcccccacccagcctgcagtggctgtttgaagatgagacccccatcaccaacagaagccggcccccccacctgcggcgggccaccgtgtttgccaacggcagcctgctgctgacccaggtgcggcccagaaatgccggcatctaccgctgcatcggccagggccagaggggcccccccatcatcctggaggccaccctgcacctggccgagattgaggacatgcccctgtttgagcccagggtcttcaccgctggcagcgaggagcgggtgacctgcctgccccccaagggcctgcctgagcccagcgtgtggtgggagcacgccggcgtgcggctgcccacccacggccgggtgtaccagaagggccacgagctggtgctggccaacattgctgagagtgatgctggggtgtacacctgccacgccgccaacctggccggccagaggcggcaggatgtgaacatcaccgtggccaacggcagcagcctgcctgagtgggtgacagacaatgccggcaccctgcactttgcccgggtgaccagagatgatgctggcaactacacctgcatcgccagcaatggcccccagggccagatccgggcccacgtgcagctgactgtggccgtgttcatcaccttcaaggtggagcctgagaggaccaccgtgtaccagggccacacagccctgctgcagtgtgaggcccagggcgaccccaagcccctcatccagtggaagggcaaggaccgcatcctggaccccaccaagctgggccccaggatgcacatcttccagaatggcagcctggtgattcatgatgtggccccagaagattctggccgctacacctgcatcgccggcaacagctgcaacatcaagcacacagaggcccccctgtatgtggtggacaagcctgtgcctgaggagagcgagggccctggcagccccccaccctacaagatgatccagaccatcggcctgtctgtgggcgctgctgtggcctacatcatcgctgtgctgggcctgatgttctactgcaagaagcgctgcaaggccaagaggctgcagaagcagcctgagggggaggagcctgagatggagtgcctgaatggaggccccctgcagaatggccagcccagcgctgagatccaggaggaggtggccctgaccagcctgggcagcggccctgctgccaccaacaagaggcacagcaccagtgacaagatgcacttccccaggagcagcctgcagcccatcaccaccctgggcaagtcagaatttggagaggtgttcctggccaaggcccagggcctggaggagggcgtggccgagaccctggtgctggtgaagagcctgcagagcaaggatgagcagcagcagctggacttccggcgggagctggagatgtttgggaagctgaaccacgccaacgtggtgcggctgctgggcctgtgccgggaggccgagccccactacatggtgctggagtatgtggacctgggggacctgaagcagttcctgcgcatcagcaagagcaaggatgagaagctgaagagccagcccctgagcaccaagcagaaggtggccctgtgcacccaggtggccctgggcatggagcacctgagcaacaacagatttgtgcacaaggacctggccgccaggaactgcctggtgtctgcccagaggcaggtgaaggtgtctgccctgggcctgagcaaggatgtgtacaacagcgagtactaccacttccggcaggcctgggtgcccctgcgctggatgagccctgaggccatcctggagggggacttcagcaccaagagtgatgtgtgggccttcggcgtgctgatgtgggaggtgttcacccacggggagatgcctcatggaggccaggctgatgatgaggtgctggccgacctgcaggccggcaaggcccggctgccccagcctgagggctgccccagcaagctgtaccgcctgatgcagcgctgctgggccctgagccccaaggaccggcccagcttcagcgagatcgccagcgccctgggggacagcacagtggacagcaagccctag

SEQ ID NO: 166638 - DNA, 3045 bp, synthetic construct
  misc_feature 1..3045: note = Description of Artificial Sequence: Synthetic coding sequence
  source 1..3045: mol_type = other DNA
atgggcgccgcccggggcagccctgcccggccccggcggctgcccctgctgtctgtgctgctgctgcccctgctgggcggcacccagacagccatcgtgttcatcaagcagcccagcagccaggatgccctgcagggcagaagagccctgctgcgctgtgaggtggaggcccctggccctgtgcacgtgtactggctgctggatggagcccctgtgcaggacacagaaagaagatttgcccagggcagcagcctgagctttgctgctgtggaccggctgcaggacagcggcaccttccagtgtgtggccagagatgatgtgactggagaggaggcccggagcgccaatgccagcttcaacatcaagtggattgaggccggccctgtggtgctgaagcacccagccagcgaggccgagatccagccccagacccaggtgaccctgcgctgccacattgatggccacccccggcccacctaccagtggttcagagatggcacccccctgagtgatggccagagcaaccacacagtgagcagcaaggagaggaacctgaccctgcggcctgctggccctgagcacagcggcctgtacagctgctgtgcccacagcgccttcggccaggcctgcagcagccagaacttcaccctgagcattgctgatgagagctttgcccgggtggtgctggccccccaggatgtggtggtggcccgctatgaggaggccatgttccactgccagttcagcgcccagcccccacccagcctgcagtggctgtttgaagatgagacccccatcaccaacagaagccggcccccccacctgcggcgggccaccgtgtttgccaacggcagcctgctgctgacccaggtgcggcccagaaatgccggcatctaccgctgcatcggccagggccagaggggcccccccatcatcctggaggccaccctgcacctggccgagattgaggacatgcccctgtttgagcccagggtcttcaccgctggcagcgaggagcgggtgacctgcctgccccccaagggcctgcctgagcccagcgtgtggtgggagcacgccggcgtgcggctgcccacccacggccgggtgtaccagaagggccacgagctggtgctggccaacattgctgagagtgatgctggggtgtacacctgccacgccgccaacctggccggccagaggcggcaggatgtgaacatcaccgtggccaccgtgcccagctggctgaagaagccccaggacagccagctggaggagggcaagccaggctacctggactgcctgacccaggccacccccaagcccaccgtggtgtggtacagaaaccagatgctgatcagcgaggacagcagatttgaggtgttcaagaatggcaccctgcgcatcaacagcgtggaggtgtatgatggcacctggtaccgctgcatgagcagcaccccagctggcagcattgaggcccaggcccgggtgcaggtgctggagaagctgaagttcaccccaccaccccagccccagcagtgcatggagtttgacaaggaggccaccgtgccctgcagcgccaccggccgggagaagcccaccatcaagtgggagcgggcagatggcagcagcctgcctgagtgggtgacagacaatgccggcaccctgcactttgcccgggtgaccagagatgatgctggcaactacacctgcatcgccagcaatggcccccagggccagatccgggcccacgtgcagctgactgtggccgtgttcatcaccttcaaggtggagcctgagaggaccaccgtgtaccagggccacacagccctgctgcagtgtgaggcccagggcgaccccaagcccctcatccagtggaaggacaagcctgtgcctgaggagagcgagggccctggcagccccccaccctacaagatgatccagaccatcggcctgtctgtgggcgctgctgtggcctacatcatcgctgtgctgggcctgatgttctactgcaagaagcgctgcaaggccaagaggctgcagaagcagcctgagggggaggagcctgagatggagtgcctgaatggaggccccctgcagaatggccagcccagcgctgagatccaggaggaggtggccctgaccagcctgggcagcggccctgctgccaccaacaagaggcacagcaccagtgacaagatgcacttccccaggagcagcctgcagcccatcaccaccctgggcaagtcagaatttggagaggtgttcctggccaaggcccagggcctggaggagggcgtggccgagaccctggtgctggtgaagagcctgcagagcaaggatgagcagcagcagctggacttccggcgggagctggagatgtttgggaagctgaaccacgccaacgtggtgcggctgctgggcctgtgccgggaggccgagccccactacatggtgctggagtatgtggacctgggggacctgaagcagttcctgcgcatcagcaagagcaaggatgagaagctgaagagccagcccctgagcaccaagcagaaggtggccctgtgcacccaggtggccctgggcatggagcacctgagcaacaacagatttgtgcacaaggacctggccgccaggaactgcctggtgtctgcccagaggcaggtgaaggtgtctgccctgggcctgagcaaggatgtgtacaacagcgagtactaccacttccggcaggcctgggtgcccctgcgctggatgagccctgaggccatcctggagggggacttcagcaccaagagtgatgtgtgggccttcggcgtgctgatgtgggaggtgttcacccacggggagatgcctcatggaggccaggctgatgatgaggtgctggccgacctgcaggccggcaaggcccggctgccccagcctgagggctgccccagcaagctgtaccgcctgatgcagcgctgctgggccctgagccccaaggaccggcccagcttcagcgagatcgccagcgccctgggggacagcacagtggacagcaagccctag

SEQ ID NO: 166639 - DNA, 1212 bp, synthetic construct
  misc_feature 1..1212: note = Description of Artificial Sequence: Synthetic coding sequence
  source 1..1212: mol_type = other DNA
atgggcagcttcctgagcggggagaagaggcccagcgcccccaccgtgggcagcgccatggagaagaaggagttccccaccccacctggccgggtgggccctggcacccagacagccatcgtgttcatcaagcagcccagcagccaggatgccctgcagggcagaagagccctgctgcgctgtgaggtggaggcccctggccctgtgcacgtgtactggctgctggatggagcccctgtgcaggacacagaaagaagatttgcccagggcagcagcctgagctttgctgctgtggaccggctgcaggacagcggcaccttccagtgtgtggccagagatgatgtgactggagaggaggcccggagcgccaatgccagcttcaacatcaagtggattgaggccggccctgtggtgctgaagcacccagccagcgaggccgagatccagccccagacccaggtgaccctgcgctgccacattgatggccacccccggcccacctaccagtggttcagagatggcacccccctgagtgatggccagagcaaccacacagtgagcagcaaggagaggaacctgaccctgcggcctgctggccctgagcacagcggcctgtacagctgctgtgcccacagcgccttcggccaggcctgcagcagccagaacttcaccctgagcattgctgatgagagctttgcccgggtggtgctggccccccaggatgtggtggtggcccgctatgaggaggccatgttccactgccagttcagcgcccagcccccacccagcctgcagtggctgtttgaagatgagacccccatcaccaacagaagccggcccccccacctgcggcgggccaccgtgtttgccaacggcagcctgctgctgacccaggtgcggcccagaaatgccggcatctaccgctgcatcggccagggccagaggggcccccccatcatcctggaggccaccctgcacctggccgagattgaggacatgcccctgtttgagcccagggtcttcaccgctggcagcgaggagcgggtgacctgcctgccccccatggccggcagcacccggcgggccacctcctggtgctggcccatcctgctgaaggtgatgctggtgtccaccccagccacccggcccacctggctggtgtctggggacaggatgagcaccagcctgtggcccctgtgccccccaggatag

SEQ ID NO: 166640 - DNA, 810 bp, synthetic construct
  misc_feature 1..810: note = Description of Artificial Sequence: Synthetic coding sequence
  source 1..810: mol_type = other DNA
ttcagcgcccagcccccacccagcctgcagtggctgtttgaagatgagacccccatcaccaacagaagcaggcctccccacctgcggcgggccaccgtgtttgccaacggcagcctgctgctgacccaggtgcggcccagaaatgccggcatctaccgctgcatcggccagggccagaggggcccccccatcatcctggaggccaccctgcacctggccgagattgaggacatgcccctgtttgagcccagggtcttcaccgctggcagcgaggagcgggtgacctgcctgccccccaagggcctgcctgagcccagcgtgtggtgggagcacgccggcgtgcggctgcccacccacggccgggtgtaccagaagggccacgagctggtgctggccaacattgctgagagtgatgctggggtgtacacctgccacgccgccaacctggccggccagaggcggcaggatgtgaacatcaccgtggccagcgagcacctgtgcccagagggccagggcgaggtggagggcaacacaggcctgggcgtgatggaccggggcttccctgctgtgcccagctggctgaagaagccccaggacagccagctggaggagggcaagccaggctacctggactgcctgacccaggccacccccaagcccaccgtggtgtggtacagaaaccagatgctgatcagcgaggacagcagatttgaggtgttcaagaatggcaccctgcgcatcaacagcgtggaggtgtatgatggcacctggtaccgctgcatgagcagcaccccagctggcagcatctag

SEQ ID NO: 166641 - DNA, 444 bp, synthetic construct
  misc_feature 1..444: note = Description of Artificial Sequence: Synthetic coding sequence
  source 1..444: mol_type = other DNA
atgggcgccaccggcctgggcttcctgctgtcctggaggcaggacaacctgaatggaacagactgccagggctgcaacatcctgtacttcagcgagaccaccggctccatgtgcagcgagctgagcctgaacagaggcctggaggcccggaggaagaaggacctgaaggacagcttcctgtggaggtatggcaaggtgggctgcatcagcctgcccctgcgggagatgacagcctggatcaaccccccccagatcagcgagatcttccagggctaccaccagagggtgcatggagcagatgccctgagcctgcagaccaacagcctgcggagccggctgagcagccagtgcctgggccagagcttcctgctgcggaccctggagcggggccggggcttccgggccctgggggacatctgtggccacgtgcatgaggaggactag

SEQ ID NO: 166642 - DNA, 216 bp, synthetic construct
  misc_feature 1..216: note = Description of Artificial Sequence: Synthetic coding sequence
  source 1..216: mol_type = other DNA
atgggcgccaccggcctgggcttcctgctgtcctggaggcaggacaacctgaatggaacagactgccagggctgcaacatcctgtacttcagcgagaccaccggctccatgtgcagcgagctgagcctgaacagaggcctggaggcccggaggaagaaggacctgaaggacagcttcctgtggagagatggagtgagcccctgcctgccctgctag

SEQ ID NO: 166643 - DNA, 444 bp, synthetic construct; identical to SEQ ID NO: 166641
  misc_feature 1..444: note = Description of Artificial Sequence: Synthetic coding sequence
  source 1..444: mol_type = other DNA

SEQ ID NO: 166644 - DNA, 216 bp, synthetic construct; identical to SEQ ID NO: 166642
  misc_feature 1..216: note = Description of Artificial Sequence: Synthetic coding sequence
  source 1..216: mol_type = other DNA

SEQ ID NO: 166645 - DNA, 3561 bp, synthetic construct
  misc_feature 1..3561: note = Description of Artificial Sequence: Synthetic coding sequence
  source 1..3561: mol_type = other DNA
atgtctgtggcctgtgtgctgaagaggaaggctgtgctgtggcaggacagcttcagcccccacctgaagcaccacccccaggagcccgccaaccccaacatgcctgtggtgctgaccagcggcaccggcagccaggcccagccccagcctgctgccaaccaggccctggccgccggcacccacagcagccctgtgcccggcagcattggagtggccggccgcagccaggatgatgccatggtggactacttcttccagaggcagcacggggagcagctgggcggcggcggcagcggcggcggcggctacaacaacagcaagcaccgctggcccaccggggacaacatccacgccgagcaccaggtgcgctccatggatgagctgaaccacgacttccaggccctggccctggagggccgggccatgggagagcagctgctgcccgggaagaagttctgggagacagatgagagcagcaaggatggccccaagggcatcttcctgggggaccagtggagggacagcgcctggggcaccagtgaccacagcgtgtcccagcccatcatggtgcagaggcggcccggccagagcttccacgtgaacagcgaggtgaacagcgtgctgagccccaggtctgagagcggcggcctgggcgtgtccatggtggagtatgtgctgagcagcagccctggggacagctgcctgaggaaaggaggcttcggccccagagatgctgacagtgatgaaaatgacaagggggagaagaagaacaagggcacctttgatggagacaagctgggggacctgaaggaggagggagatgtgatggacaagaccaacggcctgcctgtgcagaatggaattgatgctgatgtgaaggacttcagcaggaccccaggcaactgccagaacagcgccaatgaggtggacctgctgggccccaaccagaatggaagtgagggcctggcccagctgaccagcaccaatggagccaagcctgtggaggacttcagcaacatggagagccagagcgtgcccctggaccccatggagcacgtgggcatggagcccctgcagtttgactacagcggcacccaggtgcctgtggacagcgctgctgccaccgtgggcctgtttgactacaacagccagcagcagctgttccagaggcccaatgccctggccgtgcagcagctgacagctgcccagcagcagcagtatgccctggccgccgcccaccagccccacatcggcctggccccagctgcctttgtgcccaacccctacatcatctctgctgcccctcctggaacagacccctacacagctggcctggccgccgccgccaccctgggccctgctgtggtgccccaccagtactatggagtgaccccctggggcgtgtacccagccagcctcttccagcagcaggccgctgctgctgctgctgccaccaacagcgccaaccagcagaccaccccccaggcccagcagggccagcagcaggtgctgcggggcggggccagccagaggcccctgacccccaaccagaaccagcagggccagcagacagaccccctggtggccgctgctgctgtgaacagcgccctggccttcggccagggcctggccgccggcatgcctggctaccctgtgctggccccagctgcctactatgaccagacaggagccctggtggtgaatgctggggccagaaatggcctgggcgcccctgtgcggctggtggccccagcccctgtgatcatcagcagcagcgctgcccaggccgctgtggccgctgctgctgccagcgccaacggggctgctgggggcctggccggcaccaccaacggccccttccggcccctgggcacccagcagccccagccccagccccagcagcagcccaacaacaacctggccagcagcagcttctacggcaacaacagcctgaacagcaacagccagagcagcagcctcttcagccagggcagcgcccagcctgccaacaccagcctgggcttcggcagcagcagcagcctgggcgccaccctgggcagcgccctgggcggcttcggcacagctgtggccaacagcaacacaggcagcggcagccggcgggacagcctgaccggcagcagtgacctgtacaagaggaccagcagcagcctgacccccatcggccacagcttctacaacggcctgtccttcagcagcagccctggccctgtgggcatgcccctgcccagccagggccctggccacagccagaccccaccacccagcctgagcagccacggcagcagcagcagcctgaacctgggcggcctgaccaatggaagtggccgctacatctctgctgcccctggagctgaggccaagtacagaagtgccagcagcgccagcagcctcttcagccccagcagcaccctcttcagcagcagccggctgcgctatggcatgtctgatgtgatgcccagcggccgcagccggctgctggaggacttcaggaacaaccgctaccccaacctgcagctgcgggagattgctggccacatcatggagttcagccaggaccagcacggcagccgcttcatccagctgaagctggagcgggccaccccagctgagcggcagctggtgttcaatgagatcctgcaggccgcctaccagctgatggtggatgtgtttggaaactacgtgatccagaagttctttgaatttggcagcctggagcagaagctggccctggccgagcgcatccggggccacgtgctgagcctggccctgcagatgtatggctgcagggtcatccagaaggccctggagttcatccccagcgaccagcagaatgagatggtgcgggagctggatggccacgtgctgaagtgtgtgaaggaccagaatggaaaccacgtggtgcagaagtgcattgaatgtgtgcagccccagagcctgcagttcatcattgatgccttcaagggccaggtgtttgccctgagcacccacccctacggctgcagggtcatccagaggatcctggagcactgcctgcctgaccagaccctgcccatcctggaggagctgcaccagcacacagagcagctggtgcaggaccagtatggcaactacgtgatccagcacgtgctggagcacggccggcctgaggacaagagcaagatcgtggccgagatcagaggaaatgtgctggtgctgagccagcacaagtttgccagcaatgtggtggagaagtgtgtgacccacgccagcaggacagaaagagctgtgctgattgatgaggtgtgcaccatgaatgatggcccccacagcgccctgtacaccatgatgaaggaccagtatgccaactacgtggtgcagaagatgattgatgtggccgagcccggccagaggaagatcgtgatgcacaagatccggccccacatcgccaccctgaggaagtacacctacggcaagcacatcctggccaagctggagaagtactacatgaagaatggagtggacctgggccccatctgtggccccccaaatggcatcatctag

SEQ ID NO: 166646 - DNA, 2781 bp, synthetic construct
  misc_feature 1..2781: note = Description of Artificial Sequence: Synthetic coding sequence
  source 1..2781: mol_type = other DNA
atgtctgtggcctgtgtgctgaagaggaaggctgtgctgtggcaggacagcttcagcccccacctgaagcaccacccccaggagcccgccaaccccaacatgcctgtggtgctgaccagcggcaccggcagccaggcccagccccagcctgctgccaaccaggccctggccgccggcacccacagcagccctgtgcccggcagcattggagtggccggccgcagccaggatgatgccatggtggactacttcttccagaggcagcacggggagcagctgggcggcggcggcagcggcggcggcggctacaacaacagcaagcaccgctggcccaccaccgtgggcctgtttgactacaacagccagcagcagctgttccagaggcccaatgccctggccgtgcagcagctgacagctgcccagcagcagcagtatgccctggccgccgcccaccagccccacatcggcctggccccagctgcctttgtgcccaacccctacatcatctctgctgcccctcctggaacagacccctacacagctggcctggccgccgccgccaccctgggccctgctgtggtgccccaccagtactatggagtgaccccctggggcgtgtacccagccagcctcttccagcagcaggccgctgctgctgctgctgccaccaacagcgccaaccagcagaccaccccccaggcccagcagggccagcagcaggtgctgcggggcggggccagccagaggcccctgacccccaaccagaaccagcagggccagcagacagaccccctggtggccgctgctgctgtgaacagcgccctggccttcggccagggcctggccgccggcatgcctggctaccctgtgctggccccagctgcctactatgaccagacaggagccctggtggtgaatgctggggccagaaatggcctgggcgcccctgtgcggctggtggccccagcccctgtgatcatcagcagcagcgctgcccaggccgctgtggccgctgctgctgccagcgccaacggggctgctgggggcctggccggcaccaccaacggccccttccggcccctgggcacccagcagccccagccccagccccagcagcagcccaacaacaacctggccagcagcagcttctacggcaacaacagcctgaacagcaacagccagagcagcagcctcttcagccagggcagcgcccagcctgccaacaccagcctgggcttcggcagcagcagcagcctgggcgccaccctgggcagcgccctgggcggcttcggcacagctgtggccaacagcaacacaggcagcggcagccggcgggacagcctgaccggcagcagtgacctgtacaagaggaccagcagcagcctgacccccatcggccacagcttctacaacggcctgtccttcagcagcagccctggccctgtgggcatgcccctgcccagccagggccctggccacagccagaccccaccacccagcctgagcagccacggcagcagcagcagcctgaacctgggcggcctgaccaatggaagtggccgctacatctctgctgcccctggagctgaggccaagtacagaagtgccagcagcgccagcagcctcttcagccccagcagcaccctcttcagcagcagccggctgcgctatggcatgtctgatgtgatgcccagcggccgcagccggctgctggaggacttcaggaacaaccgctaccccaacctgcagctgcgggagattgctggccacatcatggagttcagccaggaccagcacggcagccgcttcatccagctgaagctggagcgggccaccccagctgagcggcagctggtgttcaatgagatcctgcaggccgcctaccagctgatggtggatgtgtttggaaactacgtgatccagaagttctttgaatttggcagcctggagcagaagctggccctggccgagcgcatccggggccacgtgctgagcctggccctgcagatgtatggctgcagggtcatccagaaggccctggagttcatccccagcgaccagcaggtgatcaatgagatggtgcgggagctggatggccacgtgctgaagtgtgtgaaggaccagaatggaaaccacgtggtgcagaagtgcattgaatgtgtgcagccccagagcctgcagttcatcattgatgccttcaagggccaggtgtttgccctgagcacccacccctacggctgcagggtcatccagaggatcctggagcactgcctgcctgaccagaccctgcccatcctggaggagctgcaccagcacacagagcagctggtgcaggaccagtatggcaactacgtgatccagcacgtgctggagcacggccggcctgaggacaagagcaagatcgtggccgagatcagaggaaatgtgctggtgctgagccagcacaagtttgccagcaatgtggtggagaagtgtgtgacccacgccagcaggacagaaagagctgtgctgattgatgaggtgtgcaccatgaatgatggcccccacagcgccctgtacaccatgatgaaggaccagtatgccaactacgtggtgcagaagatgattgatgtggccgagcccggccagaggaagatcgtgatgcacaagatccggccccacatcgccaccctgaggaagtacacctacggcaagcacatcctggccaagctggagaagtactacatgaagaatggagtggacctgggccccatctgtggccccccaaatggcatcatctag

SEQ ID NO: 166647 - DNA, 3135 bp, synthetic construct
  misc_feature 1..3135: note = Description of Artificial Sequence: Synthetic coding sequence
  source 1..3135: mol_type = other DNA
atgtctgtggcctgtgtgctgaagaggaaggctgtgctgtggcaggacagcttcagcccccacctgaagcaccacccccaggagcccgccaaccccaacatgcctgtggtgctgaccagcggcaccggcagccaggcccagccccagcctgctgccaaccaggccctggccgccggcacccacagcagccctgtgcccggcagcattggagtggccggccgcagccaggatgatgccatggtggactacttcttccagaggcagcacggggagcagctgggcggcggcggcagcggcggcggcggctacaacaacagcaagcaccgctggcccaccggggacaacatccacgccgagcaccaggtgcgctccatggatgagctgaaccacgacttccaggccctggccctggagggccgggccatgggagagggccccagagatgctgacagtgatgaaaatgacaagggggagaagaagaacaagggcacctttgatggagacaagctgggggacctgaaggaggagggagatgtgatggacaagaccaacggcctgcctgtgcagaatggaattgatgctgatgtgaaggacttcagcaggaccccaggcaactgccagaacagcgccaatgaggtggacctgctgggccccaaccagaatggaagtgagggcctggcccagctgaccagcaccaatggagccaagcctgtggaggacttcagcaacatggagagccagagcgtgcccctggaccccatggagcacgtgggcatggagcccctgcagtttgactacagcggcacccaggtgcctgtggacagcgctgctgccaccgtgggcctgtttgactacaacagccagcagcagctgttccagaggcccaatgccctggccgtgcagcagctgacagctgcccagcagcagcagtatgccctggccgccgcccaccagccccacatcggcctggccccagctgcctttgtgcccaacccctacatcatctctgctgcccctcctggaacagacccctacacagctggcctggccgccgccgccaccctgggccctgctgtggtgccccaccagtactatggagtgaccccctggggcgtgtacccagccagcctcttccagcagcaggccgctgctgctgctgctgccaccaacagcgccaaccagcagaccaccccccaggcccagcagggccagcagcaggtgctgcggggcggggccagccagaggcccctgacccccaaccagaaccagcagggccagcagacagaccccctggtggccgctgctgctgtgaacagcgccctggccttcggccagggcctggccgccggcatgcctgctgtggccgctgctgctgccagcgccaacggggctgctgggggcctggccggcaccaccaacggccccttccggcccctgggcacccagcagccccagccccagccccagcagcagcccaacaacaacctggccagcagcagcttctacggcaacaacagcctgaacagcaacagccagagcagcagcctcttcagccagggcagcgcccagcctgccaacaccagcctgggcttcggcagcagcagcagcctgggcgccaccctgggcagcgccctgggcggcttcggcacagctgtggccaacagcaacacaggcagcggcagccggcgggacagcctgaccggcagcagtgacctgtacaagaggaccagcagcagcctgacccccatcggccacagcttctacaacggcctgtccttcagcagcagccctggccctgtgggcatgcccctgcccagccagggccctggccacagccagaccccaccacccagcctgagcagccacggcagcagcagcagcctgaacctgggcggcctgaccaatggaagtggccgctacatctctgctgcccctggagctgaggccaagtacagaagtgccagcagcgccagcagcctcttcagccccagcagcaccctcttcagcagcagccggctgcgctatggcatgtctgatgtgatgcccagcggccgcagccggctgctggaggacttcaggaacaaccgctaccccaacctgcagctgcgggagattgctggccacatcatggagttcagccaggaccagcacggcagccgcttcatccagctgaagctggagcgggccaccccagctgagcggcagctggtgttcaatgagatcctgcaggccgcctaccagctgatggtggatgtgtttggaaactacgtgatccagaagttctttgaatttggcagcctggagcagaagctggccctggccgagcgcatccggggccacgtgctgagcctggccctgcagatgtatggctgcagggtcatccagaaggccctggagttcatccccagcgaccagcaggtgatcaatgagatggtgcgggagctggatggccacgtgctgaagtgtgtgaaggaccagaatggaaaccacgtggtgcagaagtgcattgaatgtgtgcagccccagagcctgcagttcatcattgatgccttcaagggccaggtgtttgccctgagcacccacccctacggctgcagggtcatccagaggatcctggagcactgcctgcctgaccagaccctgcccatcctggaggagctgcaccagcacacagagcagctggtgcaggaccagtatggcaactacgtgatccagcacgtgctggagcacggccggcctgaggacaagagcaagatcgtggccgagatcagaggaaatgtgctggtgctgagccagcacaagtttgccagcaatgtggtggagaagtgtgtgacccacgccagcaggacagaaagagctgtgctgattgatgaggtgtgcaccatgaatgatggcccccacagcgccctgtacaccatgatgaaggaccagtatgccaactacgtggtgcagaagatgattgatgtggccgagcccggccagaggaagatcgtgatgcacaagatccggccccacatcgccaccctgaggaagtacacctacggcaagcacatcctggccaagctggagaagtactacatgaagaatggagtggacctgggccccatctgtggccccccaaatggcatcatctag

SEQ ID NO: 166648 - DNA, 3567 bp, synthetic construct
  misc_feature 1..3567: note = Description of Artificial Sequence: Synthetic coding sequence
  source 1..3567: mol_type = other DNA
atgtctgtggcctgtgtgctgaagaggaaggctgtgctgtggcaggacagcttcagcccccacctgaagcaccacccccaggagcccgccaaccccaacatgcctgtggtgctgaccagcggcaccggcagccaggcccagccccagcctgctgccaaccaggccctggccgccggcacccacagcagccctgtgcccggcagcattggagtggccggccgcagccaggatgatgccatggtggactacttcttccagaggcagcacggggagcagctgggcggcggcggcagcggcggcggcggctacaacaacagcaagcaccgctggcccaccggggacaacatccacgccgagcaccaggtgcgctccatggatgagctgaaccacgacttccaggccctggccctggagggccgggccatgggagagcagctgctgcccgggaagaagttctgggagacagatgagagcagcaaggatggccccaagggcatcttcctgggggaccagtggagggacagcgcctggggcaccagtgaccacagcgtgtcccagcccatcatggtgcagaggcggcccggccagagcttccacgtgaacagcgaggtgaacagcgtgctgagccccaggtctgagagcggcggcctgggcgtgtccatggtggagtatgtgctgagcagcagccctggggacagctgcctgaggaaaggaggcttcggccccagagatgctgacagtgatgaaaatgacaagggggagaagaagaacaagggcacctttgatggagacaagctgggggacctgaaggaggagggagatgtgatggacaagaccaacggcctgcctgtgcagaatggaattgatgctgatgtgaaggacttcagcaggaccccaggcaactgccagaacagcgccaatgaggtggacctgctgggccccaaccagaatggaagtgagggcctggcccagctgaccagcaccaatggagccaagcctgtggaggacttcagcaacatggagagccagagcgtgcccctggaccccatggagcacgtgggcatggagcccctgcagtttgactacagcggcacccaggtgcctgtggacagcgctgctgccaccgtgggcctgtttgactacaacagccagcagcagctgttccagaggcccaatgccctggccgtgcagcagctgacagctgcccagcagcagcagtatgccctggccgccgcccaccagccccacatcggcctggccccagctgcctttgtgcccaacccctacatcatctctgctgcccctcctggaacagacccctacacagctggcctggccgccgccgccaccctgggccctgctgtggtgccccaccagtactatggagtgaccccctggggcgtgtacccagccagcctcttccagcagcaggccgctgctgctgctgctgccaccaacagcgccaaccagcagaccaccccccaggcccagcagggccagcagcaggtgctgcggggcggggccagccagaggcccctgacccccaaccagaaccagcagggccagcagacagaccccctggtggccgctgctgctgtgaacagcgccctggccttcggccagggcctggccgccggcatgcctggctaccctgtgctggccccagctgcctactatgaccagacaggagccctggtggtgaatgctggggccagaaatggcctgggcgcccctgtgcggctggtggccccagcccctgtgatcatcagcagcagcgctgcccaggccgctgtggccgctgctgctgccagcgccaacggggctgctgggggcctggccggcaccaccaacggccccttccggcccctgggcacccagcagccccagccccagccccagcagcagcccaacaacaacctggccagcagcagcttctacggcaacaacagcctgaacagcaacagccagagcagcagcctcttcagccagggcagcgcccagcctgccaacaccagcctgggcttcggcagcagcagcagcctgggcgccaccctgggcagcgccctgggcggcttcggcacagctgtggccaacagcaacacaggcagcggcagccggcgggacagcctgaccggcagcagtgacctgtacaagaggaccagcagcagcctgacccccatcggccacagcttctacaacggcctgtccttcagcagcagccctggccctgtgggcatgcccctgcccagccagggccctggccacagccagaccccaccacccagcctgagcagccacggcagcagcagcagcctgaacctgggcggcctgaccaatggaagtggccgctacatctctgctgcccctggagctgaggccaagtacagaagtgccagcagcgccagcagcctcttcagccccagcagcaccctcttcagcagcagccggctgcgctatggcatgtctgatgtgatgcccagcggccgcagccggctgctggaggacttcaggaacaaccgctaccccaacctgcagctgcgggagattgctggccacatcatggagttcagccaggaccagcacggcagccgcttcatccagctgaagctggagcgggccaccccagctgagcggcagctggtgttcaatgagatcctgcaggccgcctaccagctgatggtggatgtgtttggaaactacgtgatccagaagttctttgaatttggcagcctggagcagaagctggccctggccgagcgcatccggggccacgtgctgagcctggccctgcagatgtatggctgcagggtcatccagaaggccctggagttcatccccagcgaccagcaggtgatcaatgagatggtgcgggagctggatggccacgtgctgaagtgtgtgaaggaccagaatggaaaccacgtggtgcagaagtgcattgaatgtgtgcagccccagagcctgcagttcatcattgatgccttcaagggccaggtgtttgccctgagcacccacccctacggctgcagggtcatccagaggatcctggagcactgcctgcctgaccagaccctgcccatcctggaggagctgcaccagcacacagagcagctggtgcaggaccagtatggcaactacgtgatccagcacgtgctggagcacggccggcctgaggacaagagcaagatcgtggccgagatcagaggaaatgtgctggtgctgagccagcacaagtttgccagcaatgtggtggagaagtgtgtgacccacgccagcaggacagaaagagctgtgctgattgatgaggtgtgcaccatgaatgatggcccccacagcgccctgtacaccatgatgaaggaccagtatgccaactacgtggtgcagaagatgattgatgtggccgagcccggccagaggaagatcgtgatgcacaagatccggccccacatcgccaccctgaggaagtacacctacggcaagcacatcctggccaagctggagaagtactacatgaagaatggagtggacctgggccccatctgtggccccccaaatggcatcatctag

SEQ ID NO: 166649 - DNA, 3489 bp, synthetic construct
  misc_feature 1..3489: note = Description of Artificial Sequence: Synthetic coding sequence
  source 1..3489: mol_type = other DNA
atgtctgtggcctgtgtgctgaagaggaaggctgtgctgtggcaggacagcttcagcccccacctgaagcaccacccccaggagcccgccaaccccaacatgcctgtggtgctgaccagcggcaccggcagccaggcccagccccagcctgctgccaaccaggccctggccgccggcacccacagcagccctgtgcccggcagcattggagtggccggccgcagccaggatgatgccatggtggactacttcttccagaggcagcacggggagcagctgggcggcggcggcagcggcggcggcggctacaacaacagcaagcaccgctggcccaccggggacaacatccacgccgagcaccaggtgcgctccatggatgagctgaaccacgacttccaggccctggccctggagggccgggccatgggagagcagctgctgcccgggaagaagttctgggagacagatgagagcagcaaggatggccccaagggcatcttcctgggggaccagtggagggacagcgcctggggcaccagtgaccacagcgtgtcccagcccatcatggtgcagaggcggcccggccagagcttccacgtgaacagcgaggtgaacagcgtgctgagccccaggtctgagagcggcggcctgggcgtgtccatggtggagtatgtgctgagcagcagccctggggacagctgcctgaggaaaggaggcttcggccccagagatgctgacagtgatgaaaatgacaagggggagaagaagaacaagggcacctttgatggagacaagctgggggacctgaaggaggagggagatgtgatggacaagaccaacggcctgcctgtgcagaatggaattgatgctgatgtgaaggacttcagcaggaccccaggcaactgccagaacagcgccaatgaggtggacctgctgggccccaaccagaatggaagtgagggcctggcccagctgaccagcaccaatggagccaagcctgtggaggacttcagcaacatggagagccagagcgtgcccctggaccccatggagcacgtgggcatggagcccctgcagtttgactacagcggcacccaggtgcctgtggacagcgctgctgccaccgtgggcctgtttgactacaacagccagcagcagctgttccagaggcccaatgccctggccgtgcagcagctgacagctgcccagcagcagcagtatgccctggccgccgcccaccagccccacatcgccggcctggccccagctgcctttgtgcccaacccctacatcatctctgctgcccctcctggaacagacccctacacagctggcctggccgctgctgccaccctgggccctgctgtggtgccccaccagtactacggcgtgaccccctggggcgtgtacccagccagcctcttccagcagcaggccgctgctgctgctgctgccaccaacagcgccaaccagcagaccaccccccaggcccagcagggccagcagcaggtgctgcggggcggggccagccagaggcccctgacccccaaccagaaccagcagggccagcagacagaccccctggtggccgctgctgctgtgaacagcgccctggccttcggccagggcctggccgccggcatgcctggctaccctgtgctggccccagctgcctactatgaccagacaggagccctggtggtgaatgctggggccagaaatggcctgggcgcccctgtgcggctggtggccccagcccctgtgatcatcagcagcagcgctgcccaggccggcacccagcagccccagccccagccccagcagcagcccaacaacaacctggccagcagcagcttctacggcaacaacagcctgaacagcaacagccagagcagcagcctcttcagccagggcagcgcccagcctgccaacaccagcctgggcttcggcagcagcagcagcctgggcgccaccctgggcagcgccctgggcggcttcggcacagctgtggccaacagcaacacaggcagcggcagccggcgggacagcctgaccggcagcagtgacctgtacaagaggaccagcagcagcctgacccccatcggccacagcttctacaacggcctgtccttcagcagcagccctggccctgtgggcatgcccctgcccagccagggccctggccacagccagaccccaccacccagcctgagcagccacggcagcagcagcagcctgaacctgggcggcctgaccaatggaagtggccgctacatctctgctgcccctggagctgaggccaagtacagaagtgccagcagcgccagcagcctcttcagccccagcagcaccctcttcagcagcagccggctgcgctatggcatgtctgatgtgatgcccagcggccgcagccggctgctggaggacttcaggaacaaccgctaccccaacctgcagctgcgggagattgctggccacatcatggagttcagccaggaccagcacggcagccgcttcatccagctgaagctggagcgggccaccccagctgagcggcagctggtgttcaatgagatcctgcaggccgcctaccagctgatggtggatgtgtttggaaactacgtgatccagaagttctttgaatttggcagcctggagcagaagctggccctggccgagcgcatccggggccacgtgctgagcctggccctgcagatgtatggctgcagggtcatccagaaggccctggagttcatccccagcgaccagcaggtgatcaatgagatggtgcgggagctggatggccacgtgctgaagtgtgtgaaggaccagaatggaaaccacgtggtgcagaagtgcattgaatgtgtgcagccccagagcctgcagttcatcattgatgccttcaagggccaggtgtttgccctgagcacccacccctacggctgcagggtcatccagaggatcctggagcactgcctgcctgaccagaccctgcccatcctggaggagctgcaccagcacacagagcagctggtgcaggaccagtatggcaactacgtgatccagcacgtgctggagcacggccggcctgaggacaagagcaagatcgtggccgagatcagaggaaatgtgctggtgctgagccagcacaagtttgccagcaatgtggtggagaagtgtgtgacccacgccagcaggacagaaagagctgtgctgattgatgaggtgtgcaccatgaatgatggcccccacagcgccctgtacaccatgatgaaggaccagtatgccaactacgtggtgcagaagatgattgatgtggccgagcccggccagaggaagatcgtgatgcacaagatccggccccacatcgccaccctgaggaagtacacctacggcaagcacatcctggccaagctggagaagtactacatgaagaatggagtggacctgggccccatctgtggccccccaaatggcatcatctag

SEQ ID NO: 166650 - DNA, 291 bp, synthetic construct
  misc_feature 1..291: note = Description of Artificial Sequence: Synthetic coding sequence
  source 1..291: mol_type = other DNA
atgtctgtggcctgtgtgctgaagaggaaggctgtgctgtggcaggacagcttcagcccccacctgaagcaccacccccaggagcccgccaaccccaacatgcctgtggtgctgaccagcggcaccggcagccaggcccagccccagcctgctgccaaccaggccctggccgccggcacccacagcagccctgtgcccggcagcattggagtggccggccgcagccaggatgatgccatggtggactacttcttccagaggcagcacggggagcagctgggcggcggctag

SEQ ID NO: 166651 - DNA, 1551 bp, synthetic construct
  misc_feature 1..1551: note = Description of Artificial Sequence: Synthetic coding sequence
  source 1..1551: mol_type = other DNA
atgtctgtggcctgtgtgctgaagaggaaggctgtgctgtggcaggacagcttcagcccccacctgaagcaccacccccaggagcccgccaaccccaacatgcctgtggtgctgaccagcggcaccggcagccaggcccagccccagcctgctgccaaccaggccctggccgccggcacccacagcagccctgtgcccggcagcattggagtggccggccgcagccaggatgatgccatggtggactacttcttccagaggcagcacggggagcagctgggcggcggcggcagcggcggcggcggctacaacaacagcaagcaccgctggcccaccggggacaacatccacgccgagcaccaggtgcgctccatggatgagctgaaccacgacttccaggccctggccctggagggccgggccatgggagagcagctgctgcccgggaagaagttctgggagacagatgagagcagcaaggatggccccaagggcatcttcctgggggaccagtggagggacagcgcctggggcaccagtgaccacagcgtgtcccagcccatcatggtgcagaggcggcccggccagagcttccacgtgaacagcgaggtgaacagcgtgctgagccccaggtctgagagcggcggcctgggcgtgtccatggtggagtatgtgctgagcagcagccctggggacagctgcctgaggaaaggaggcttcggccccagagatgctgacagtgatgaaaatgacaagggggagaagaagaacaagggcacctttgatggagacaagctgggggacctgaaggaggagggagatgtgatggacaagaccaacggcctgcctgtgcagaatggaattgatgctgatgtgaaggacttcagcaggaccccaggcaactgccagaacagcgccaatgaggtggacctgctgggccccaaccagaatggaagtgagggcctggcccagctgaccagcaccaatggagccaagcctgtggaggacttcagcaacatggagagccagagcgtgcccctggaccccatggagcacgtgggcatggagcccctgcagtttgactacagcggcacccaggtgcctgtggacagcgctgctgccaccgtgggcctgtttgactacaacagccagcagcagctgttccagaggcccaatgccctggccgtgcagcagctgacagctgcccagcagcagcagtatgccctggccgccgcccaccagccccacatcggcctggccccagctgcctttgtgcccaacccctacatcatctctgctgcccctcctggaacagacccctacacagctggcctggccgccgccgccaccctgggccctgctgtggtgccccaccagtactatggagtgaccccctggggcgtgtacccagccagcctcttccagcagcaggccgctgctgctgctgctgccaccaacagcgccaaccagcagaccaccccccaggcccagcagggccagcagcagacagagttctgcttctgctgccccggctggagcgccatggtgtag

SEQ ID NO: 166652 - DNA, 2964 bp, synthetic construct
  misc_feature 1..2964: note = Description of Artificial Sequence: Synthetic coding sequence
  source 1..2964: mol_type = other DNA
atgaaccacgacttccaggccctggccctggagagccggggcatgggagagctgctgcccaccaagaagttctgggagccagatgacagcaccaaggatggccagaagggcatcttcctgggagatgatgagtggagggagacagcctggggcgccagccaccacagcatgagccagcccatcatggtgcagaggagaagtggccagggcttccacggcaacagcgaggtgaatgccatcctgagccccaggtctgagagcggcggcctgggcgtgtccatggtggagtatgtgctgagcagcagccctgctgacaagctggacagccgcttcagaaaaggaaactttggcaccagagatgctgagacagatggccctgagaagggggaccagaagggcaaggccagcccctttgaggaggaccagaacagagacctgaagcagggagatgatgatgacagcaagatcaatggccggggcctgcccaacggcatggatgctgactgcaaggacttcaacagaacacctggcagccggcaggccagccccacagaggtggtggagcggctgggccccaacaccaaccccagcgagggcctgggccccctgcccaaccccacagccaacaagcccctggtggaggagttcagcaaccctgagacccagaacctggatgccatggagcaggtgggcctggagagcctgcagtttgactacccaggcaaccaggtgcccatggacagcagcggggccaccgtgggcctgtttgactacaacagccagcagcagctgttccagaggaccaatgccctgactgtgcagcagctgacagctgcccagcagcagcagtatgccctggccgccgcccagcagccccacatcgccggggtcttctctgctggcctggccccagctgcctttgtgcccaacccctacatcatctctgctgcccctcctggaacagacccctacacagctgctggcctggccgccgccgccaccctggccggccctgctgtggtgcccccccagtactacggcgtgccctggggcgtgtacccagccaacctcttccagcagcaggccgctgctgctgccaacaacacagccagccagcaggccgccagccaggcccagcccggccagcagcaggtgctgcgggccggggccggccagaggcccctgacccccaaccagggccagcagggccagcaggccgagagcctggccgctgctgctgctgccaaccccaccctggccttcggccagggcctggccaccggcatgcctggctaccaggtgctggcccccacagcctactatgaccagacaggagccctggtggtgggccctggggccaggacaggcctgggcgcccctgtgcggctgatggcccccacccctgtgctgatcagcagcgctgctgcccaggccgctgctgctgctgctgctgggggcacagccagcagcctgaccggcagcaccaacggcctcttccggcccatcggcacccagcccccccagcagcagcagcagcagcccagcaccaacctgcagagcaacagcttctacggcagcagcagcctgaccaacagcagccagagcagcagcctcttcagccacggccctggccagcccggcagcaccagcctgggctttggaagtggcaacagcctgggcgccgccatcggcagcgccctgagcggcttcggcagcagcggcggcctgaccaacggcagcggccgctacatctctgctgcccctggagctgaggccaagtaccgcagcgccagcagcaccagcagcctcttcagcagcagcagccagctgttcccccccagccggctgcgctacaacagaagtgacatcatgcccagcggccgcagccggctgctggaggacttcaggaacaaccgcttccccaacctgcagctgcgggacctgattggccacatcgtggagttcagccaggaccagcacggcagccgcttcatccagcagaagctggagcgggccaccccagctgagcggcagatggtgttcaatgagatcctgcaggccgcctaccagctgatgacagatgtgtttggaaattatgtgatccagaagttctttgaatttggcagcctggaccagaagctggccctggccacccgcatccggggccacgtgctgcccctggccctgcagatgtatggctgcagggtcatccagaaggccctggagagcatcagcagtgaccagcaggtgatcagcgagatggtgaaggagctggatggccacgtgctgaagtgtgtgaaggaccagaatggaaatcatgtggtgcagaagtgcattgaatgtgtgcagccccagagcctgcagttcatcattgatgccttcaagggccaggtgtttgtgctgagcacccacccctacggctgcagggtcatccagaggatcctggagcactgcacagctgagcagaccctgcccatcctggaggagctgcaccagcacacagagcagctggtgcaggaccagtatggcaactacgtgatccagcacgtgctggagcacggccggcctgaggacaagagcaagatcgtgtctgagatccggggcaaggtgctggccctgagccagcacaagtttgccagcaatgtggtggagaagtgtgtgacccacgccagcagagctgagcgggccctgctgattgatgaggtgtgctgccagaatgatggcccccacagcgccctgtacaccatgatgaaggaccagtatgccaactacgtggtgcagaagatgattgacatggccgagcccgcccagaggaagatcatcatgcacaagatccggccccacatcaccaccctgaggaagtacacctacggcaagcacatcctggccaagctggagaagtactacctgaagaacagcccagacctgggccccatcggcggcccccccaacggcatgctgtag

SEQ ID NO: 166653 - DNA, 3195 bp, synthetic construct
  misc_feature 1..3195: note = Description of Artificial Sequence: Synthetic coding sequence
  source 1..3195: mol_type = other DNA
atgaaccacgacttccaggccctggccctggagagccggggcatgggagagctgctgcccaccaagaagttctgggagccagatgacagcaccaaggatggccagaagggcatcttcctgggagatgatgagtggagggagacagcctggggcgccagccaccacagcatgagccagcccatcatggtgcagaggagaagtggccagggcttccacggcaacagcgaggtgaatgccatcctgagccccaggtctgagagcggcggcctgggcgtgtccatggtggagtatgtgctgagcagcagccctgctgacaagctggacagccgcttcagaaaaggaaactttggcaccagagatgctgagacagatggccctgagaagggggaccagaagggcaaggccagcccctttgaggaggaccagaacagagacctgaagcagggagatgatgatgacagcaagatcaatggccggggcctgcccaacggcatggatgctgactgcaaggacttcaacagaacacctggcagccggcaggccagccccacagaggtggtggagcggctgggccccaacaccaaccccagcgagggcctgggccccctgcccaaccccacagccaacaagcccctggtggaggagttcagcaaccctgagacccagaacctggatgccatggagcaggtgggcctggagagcctgcagtttgactacccaggcaaccaggtgcccatggacagcagcggggccaccgtgggcctgtttgactacaacagccagcagcagctgttccagaggaccaatgccctgactgtgcagcagctgacagctgcccagcagcagcagtatgccctggccgccgcccagcagccccacatcgccggggtcttctctgctggcctggccccagctgcctttgtgcccaacccctacatcatctctgctgcccctcctggaacagacccctacacagctgctggcctggccgccgccgccaccctggccggccctgctgtggtgcccccccagtactacggcgtgccctggggcgtgtacccagccaacctcttccagcagcaggccgctgctgctgccaacaacacagccagccagcaggccgccagccaggcccagcccggccagcagcaggtgctgcgggccggggccggccagaggcccctgacccccaaccagggccagcagggccagcaggccgagagcctggccgctgctgctgctgccaaccccaccctggccttcggccagggcctggccaccggcatgcctggctaccaggtgctggcccccacagcctactatgaccagacaggagccctggtggtgggccctggggccaggacaggcctgggcgcccctgtgcggctgatggcccccacccctgtgctgatcagcagcgctgctgcccaggccgctgctgctgctgctgctgggggcacagccagcagcctgaccggcagcaccaacggcctcttccggcccatcggcacccagcccccccagcagcagcagcagcagcccagcaccaacctgcagagcaacagcttctacggcagcagcagcctgaccaacagcagccagagcagcagcctcttcagccacggccctggccagcccggcagcaccagcctgggctttggaagtggcaacagcctgggcgccgccatcggcagcgccctgagcggcttcggcagctctgtgggcagcagcgccagcagcagcgccacccggcgggagagcctgagcaccagcagtgacctgtacaagaggagcagcagcagcctggcccccatcggccagcccttctacaacagcctgggcttcagcagcagccccagccccatcggcatgcccctgcccagccagaccccaggccacagcctgaccccaccacccagcctgagcagccacggcagcagcagcagcctgcacctgggcggcctgaccaatggaagtggccgctacatctctgctgcccctggagctgaggccaagtacagaagtgccagcagcaccagcagcctcttcagcagcagcagccagctgtttcctcccagccggctgcgctacaacagaagtgacatcatgcccagcggccgcagccggctgctggaggacttcaggaacaaccgcttccccaacctgcagctgcgggacctgattggccacatcgtggagttcagccaggaccagcacggcagccgcttcatccagcagaagctggagcgggccaccccagctgagcggcagatggtgttcaatgagatcctgcaggccgcctaccagctgatgacagatgtgtttggaaactacgtgatccagaagttctttgaatttggcagcctggaccagaagctggccctggccacccgcatccggggccacgtgctgcccctggccctgcagatgtatggctgcagggtcatccagaaggccctggagagcatcagcagtgaccagcagagcgagatggtgaaggagctggatggccacgtgctgaagtgtgtgaaggaccagaatggaaaccacgtggtgcagaagtgcattgaatgtgtgcagccccagagcctgcagttcatcattgatgccttcaagggccaggtgtttgtgctgagcacccacccctacggctgcagggtcatccagaggatcctggagcactgcacagctgagcagaccctgcccatcctggaggagctgcaccagcacacagagcagctggtgcaggaccagtatggcaactacgtgatccagcacgtgctggagcacggccggcctgaggacaagagcaagatcgtgtctgagatccggggcaaggtgctggccctgagccagcacaagtttgccagcaatgtggtggagaagtgtgtgacccacgccagcagagctgagcgggccctgctgattgatgaggtgtgctgccagaatgatggcccccacagcgccctgtacaccatgatgaaggaccagtatgccaactacgtggtgcagaagatgattgacatggccgagcccgcccagaggaagatcatcatgcacaagatccggccccacatcaccaccctgaggaagtacacctacggcaagcacatcctggccaagctggagaagtactacctgaagaacagcccagacctgggccccatcggcggccccccaaatggcatgctgtag

SEQ ID NO: 166654 - DNA, 3201 bp, synthetic construct
  misc_feature 1..3201: note = Description of Artificial Sequence: Synthetic coding sequence
  source 1..3201: mol_type = other DNA
atgaaccacgacttccaggccctggccctggagagccggggcatgggagagctgctgcccaccaagaagttctgggagccagatgacagcaccaaggatggccagaagggcatcttcctgggagatgatgagtggagggagacagcctggggcgccagccaccacagcatgagccagcccatcatggtgcagaggagaagtggccagggcttccacggcaacagcgaggtgaatgccatcctgagccccaggtctgagagcggcggcctgggcgtgtccatggtggagtatgtgctgagcagcagccctgctgacaagctggacagccgcttcagaaaaggaaactttggcaccagagatgctgagacagatggccctgagaagggggaccagaagggcaaggccagcccctttgaggaggaccagaacagagacctgaagcagggagatgatgatgacagcaagatcaatggccggggcctgcccaacggcatggatgctgactgcaaggacttcaacagaacacctggcagccggcaggccagccccacagaggtggtggagcggctgggccccaacaccaaccccagcgagggcctgggccccctgcccaaccccacagccaacaagcccctggtggaggagttcagcaaccctgagacccagaacctggatgccatggagcaggtgggcctggagagcctgcagtttgactacccaggcaaccaggtgcccatggacagcagcggggccaccgtgggcctgtttgactacaacagccagcagcagctgttccagaggaccaatgccctgactgtgcagcagctgacagctgcccagcagcagcagtatgccctggccgccgcccagcagccccacatcgccggggtcttctctgctggcctggccccagctgcctttgtgcccaacccctacatcatctctgctgcccctcctggaacagacccctacacagctgctggcctggccgccgccgccaccctggccggccctgctgtggtgcccccccagtactacggcgtgccctggggcgtgtacccagccaacctcttccagcagcaggccgctgctgctgccaacaacacagccagccagcaggccgccagccaggcccagcccggccagcagcaggtgctgcgggccggggccggccagaggcccctgacccccaaccagggccagcagggccagcaggccgagagcctggccgctgctgctgctgccaaccccaccctggccttcggccagggcctggccaccggcatgcctggctaccaggtgctggcccccacagcctactatgaccagacaggagccctggtggtgggccctggggccaggacaggcctgggcgcccctgtgcggctgatggcccccacccctgtgctgatcagcagcgctgctgcccaggccgctgctgctgctgctgctgggggcacagccagcagcctgaccggcagcaccaacggcctcttccggcccatcggcacccagcccccccagcagcagcagcagcagcccagcaccaacctgcagagcaacagcttctacggcagcagcagcctgaccaacagcagccagagcagcagcctcttcagccacggccctggccagcccggcagcaccagcctgggctttggaagtggcaacagcctgggcgccgccatcggcagcgccctgagcggcttcggcagctctgtgggcagcagcgccagcagcagcgccacccggcgggagagcctgagcaccagcagtgacctgtacaagaggagcagcagcagcctggcccccatcggccagcccttctacaacagcctgggcttcagcagcagccccagccccatcggcatgcccctgcccagccagaccccaggccacagcctgaccccaccacccagcctgagcagccacggcagcagcagcagcctgcacctgggcggcctgaccaatggaagtggccgctacatctctgctgcccctggagctgaggccaagtacagaagtgccagcagcaccagcagcctcttcagcagcagcagccagctgtttcctcccagccggctgcgctacaacagaagtgacatcatgcccagcggccgcagccggctgctggaggacttcaggaacaaccgcttccccaacctgcagctgcgggacctgattggccacatcgtggagttcagccaggaccagcacggcagccgcttcatccagcagaagctggagcgggccaccccagctgagcggcagatggtgttcaatgagatcctgcaggccgcctaccagctgatgacagatgtgtttggaaactacgtgatccagaagttctttgaatttggcagcctggaccagaagctggccctggccacccgcatccggggccacgtgctgcccctggccctgcagatgtatggctgcagggtcatccagaaggccctggagagcatcagcagtgaccagcaggtgatcagcgagatggtgaaggagctggatggccacgtgctgaagtgtgtgaaggaccagaatggaaaccacgtggtgcagaagtgcattgaatgtgtgcagccccagagcctgcagttcatcattgatgccttcaagggccaggtgtttgtgctgagcacccacccctacggctgcagggtcatccagaggatcctggagcactgcacagctgagcagaccctgcccatcctggaggagctgcaccagcacacagagcagctggtgcaggaccagtatggcaactacgtgatccagcacgtgctggagcacggccggcctgaggacaagagcaagatcgtgtctgagatccggggcaaggtgctggccctgagccagcacaagtttgccagcaatgtggtggagaagtgtgtgacccacgccagcagagctgagcgggccctgctgattgatgaggtgtgctgccagaatgatggcccccacagcgccctgtacaccatgatgaaggaccagtatgccaactacgtggtgcagaagatgattgacatggccgagcccgcccagaggaagatcatcatgcacaagatccggccccacatcaccaccctgaggaagtacacctacggcaagcacatcctggccaagctggagaagtactacctgaagaacagcccagacctgggccccatcggcggccccccaaatggcatgctgtag

SEQ ID NO: 166655 - DNA, 3195 bp, synthetic construct; identical to SEQ ID NO: 166653
  misc_feature 1..3195: note = Description of Artificial Sequence: Synthetic coding sequence
  source 1..3195: mol_type = other DNA

SEQ ID NO: 166656 - DNA, 105 bp, synthetic construct
  misc_feature 1..105: note = Description of Artificial Sequence: Synthetic coding sequence
  source 1..105: mol_type = other DNA
atgaaccacgacttccaggccctggccctggagagccggggcatgggagagctgctgcccaccaagaagttctgggagccagatgacagcaccaaggatggatag

SEQ ID NO: 166657 - DNA, 882 bp, synthetic construct
  misc_feature 1..882: note = Description of Artificial Sequence: Synthetic coding sequence
  source 1..882: mol_type = other DNA
atgaaccacgacttccaggccctggccctggagagccggggcatgggagagctgctgcccaccaagaagttctgggagccagatgacagcaccaaggatggccagaagggcatcttcctgggagatgatgagtggagggagacagcctggggcgccagccaccacagcatgagccagcccatcatggtgcagaggagaagtggccagggcttccacggcaacagcgaggtgaatgccatcctgagccccaggtctgagagcggcggcctgggcgtgtccatggtggagtatgtgctgagcagcagccctgctgacaagctggacagccgcttcagaaaaggaaactttggcaccagagatgctgagacagatggccctgagaagggggaccagaagggcaaggccagcccctttgaggaggaccagaacagagacctgaagcagggagatgatgatgacagcaagatcaatggccggggcctgcccaacggcatggatgctgactgcaaggacttcaacagaacacctggcagccggcaggccagccccacagaggtggtggagcggctgggccccaacaccaaccccagcgagggcctgggccccctgcccaaccccacagccaacaagcccctggtggaggagttcagcaaccctgagacccagaacctggatgccatggagcaggtgggcctggagagcctgcagtttgactacccaggcaaccaggtgcccatggacagcagcggggccaccgtgggcctgtttgactacaacagccagcagcagctgttccagaggaccaatgccctgactgtgcagcagctgacagctgcccagcagcagcagtatgccctggccgccgcccagcagccccactag

SEQ ID NO: 166658 - DNA, 3027 bp, synthetic construct
  misc_feature 1..3027: note = Description of Artificial Sequence: Synthetic coding sequence
  source 1..3027: mol_type = other DNA
atgagccagcccatcatggtgcagaggagaagtggccagggcttccacggcaacagcgaggtgaatgccatcctgagccccaggtctgagagcggcggcctgggcgtgtccatggtggagtatgtgctgagcagcagccctgctgacaagctggacagccgcttcagaaaaggaaactttggcaccagagatgctgagacagatggccctgagaagggggaccagaagggcaaggccagcccctttgaggaggaccagaacagagacctgaagcagggagatgatgatgacagcaagatcaatggccggggcctgcccaacggcatggatgctgactgcaaggacttcaacagaacacctggcagccggcaggccagccccacagaggtggtggagcggctgggccccaacaccaaccccagcgagggcctgggccccctgcccaaccccacagccaacaagcccctggtggaggagttcagcaaccctgagacccagaacctggatgccatggagcaggtgggcctggagagcctgcagtttgactacccaggcaaccaggtgcccatggacagcagcggggccaccgtgggcctgtttgactacaacagccagcagcagctgttccagaggaccaatgccctgactgtgcagcagctgacagctgcccagcagcagcagtatgccctggccgccgcccagcagccccacatcgccggggtcttctctgctggcctggccccagctgcctttgtgcccaacccctacatcatctctgctgcccctcctggaacagacccctacacagctgctggcctggccgccgccgccaccctggccggccctgctgtggtgcccccccagtactacggcgtgccctggggcgtgtacccagccaacctcttccagcagcaggccgctgctgctgccaacaacacagccagccagcaggccgccagccaggcccagcccggccagcagcaggtgctgcgggccggggccggccagaggcccctgacccccaaccagggccagcagggccagcaggccgagagcctggccgctgctgctgctgccaaccccaccctggccttcggccagggcctggccaccggcatgcctggctaccaggtgctggcccccacagcctactatgaccagacaggagccctggtggtgggccctggggccaggacaggcctgggcgcccctgtgcggctgatggcccccacccctgtgctgatcagcagcgctgctgcccaggccgctgctgctgctgctgctgggggcacagccagcagcctgaccggcagcaccaacggcctcttccggcccatcggcacccagcccccccagcagcagcagcagcagcccagcaccaacctgcagagcaacagcttctacggcagcagcagcctgaccaacagcagccagagcagcagcctcttcagccacggccctggccagcccggcagcaccagcctgggctttggaagtggcaacagcctgggcgccgccatcggcagcgccctgagcggcttcggcagctctgtgggcagcagcgccagcagcagcgccacccggcgggagagcctgagcaccagcagtgacctgtacaagaggagcagcagcagcctggcccccatcggccagcccttctacaacagcctgggcttcagcagcagccccagccccatcggcatgcccctgcccagccagaccccaggccacagcctgaccccaccacccagcctgagcagccacggcagcagcagcagcctgcacctgggcggcctgaccaatggaagtggccgctacatctctgctgcccctggagctgaggccaagtacagaagtgccagcagcaccagcagcctcttcagcagcagcagccagctgtttcctcccagccggctgcgctacaacagaagtgacatcatgcccagcggccgcagccggctgctggaggacttcaggaacaaccgcttccccaacctgcagctgcgggacctgattggccacatcgtggagttcagccaggaccagcacggcagccgcttcatccagcagaagctggagcgggccaccccagctgagcggcagatggtgttcaatgagatcctgcaggccgcctaccagctgatgacagatgtgtttggaaactacgtgatccagaagttctttgaatttggcagcctggaccagaagctggccctggccacccgcatccggggccacgtgctgcccctggccctgcagatgtatggctgcagggtcatccagaaggccctggagagcatcagcagtgaccagcagagcgagatggtgaaggagctggatggccacgtgctgaagtgtgtgaaggaccagaatggaaaccacgtggtgcagaagtgcattgaatgtgtgcagccccagagcctgcagttcatcattgatgccttcaagggccaggtgtttgtgctgagcacccacccctacggctgcagggtcatccagaggatcctggagcactgcacagctgagcagaccctgcccatcctggaggagctgcaccagcacacagagcagctggtgcaggaccagtatggcaactacgtgatccagcacgtgctggagcacggccggcctgaggacaagagcaagatcgtgtctgagatccggggcaaggtgctggccctgagccagcacaagtttgccagcaatgtggtggagaagtgtgtgacccacgccagcagagctgagcgggccctgctgattgatgaggtgtgctgccagaatgatggcccccacagcgccctgtacaccatgatgaaggaccagtatgccaactacgtggtgcagaagatgattgacatggccgagcccgcccagaggaagatcatcatgcacaagatccggccccacatcaccaccctgaggaagtacacctacggcaagcacatcctggccaagctggagaagtactacctgaagaacagcccagacctgggccccatcggcggccccccaaatggcatgctgtag

SEQ ID NO: 166659 - DNA, 870 bp, synthetic construct
  misc_feature 1..870: note = Description of Artificial Sequence: Synthetic coding sequence
  source 1..870: mol_type = other DNA
atggagaatggctacacctatgaggactacaagaacacagctgagtggctgctgagccacaccaagcaccggccccaggtggccatcatctgtggcagcggcctgggcggcctgacagacaagctgacccaggcccagatctttgattatggagagatccccaacttccccaggagcacagtgcccggccatgctggccgcctggtgtttggcttcctgaatggccgggcctgtgtgatgatgcagggccgcttccacatgtatgagggctaccccctgtggaaggtgaccttccctgtgcgggtcttccacctgctgggcgtggacaccctggtggtgaccaatgctgctgggggcctgaaccccaagtttgaggtgggggacatcatgctgatccgggaccacatcaacctgcccggcttcagcggccagaaccccctgcggggccccaatgatgaaagatttggagaccgcttccctgccatgtctgatgcctatgacaggaccatgaggcagagggccctgagcacctggaagcagatgggagagcagcgggagctgcaggagggcacctacgtgatggtggccggccccagctttgagaccgtggctgaatgtcgggtgctgcagaagctgggcgcagatgctgtgggcatgagcacagtgcctgaggtgattgtggcccggcactgcggcctgcgggtgtttggcttcagcctcatcaccaacaaggtgatcatggactatgagagcctggagaaggccaaccacgaggaggtgctggccgccggcaagcaggccgcccagaagctggagcagtttgtgtccatcctgatggccagcatccccctgcctgacaaggccagctag

SEQ ID NO: 166660 - DNA, 282 bp, synthetic construct
  misc_feature 1..282: note = Description of Artificial Sequence: Synthetic coding sequence
  source 1..282: mol_type = other DNA
atggagaatggctacacctatgaggactacaagaacacagctgagtggctgctgagccacaccaagcaccggccccaggtggccatcatctgtggcagcggcctgggcggcctgacagacaagctgacccaggcccagatctttgattatggagagatccccaacttccccaggagcacagtgcccggccatgctggccgcctggtgtttggcttcctgaatggccgggcctgtgtgatgatgcagggccgcttccacatgtatgagggctaccccctgtag

SEQ ID NO: 166661 - DNA, 375 bp, synthetic construct
  misc_feature 1..375: note = Description of Artificial Sequence: Synthetic coding sequence
  source 1..375: mol_type = other DNA
atgagctacatccctggccagcctgtgacagctgtggtgcagagggtggagatccacaagctgcggcagggagaaaatctcatcctgggcttcagcattggaggcggcatcgaccaggaccccagccagaaccccttcagcgaggacaagacagacaagggcatctacgtgaccagggtgtctgagggcggccctgctgagattgctggcctgcagattggagacaagatcatgcaggtgaatggctgggacatgaccatggtgacccatgaccaggccaggaagaggctgaccaagaggtctgaggaggtggtgcggctgctggtgacccggcagagcctgcagaaggctgtgcagcagagcatgctgtcctag

SEQ ID NO: 166662 - DNA, 1194 bp, synthetic construct
  misc_feature 1..1194: note = Description of Artificial Sequence: Synthetic coding sequence
  source 1..1194: mol_type = other DNA
atgaactgcatcagtgacttcttcacctatgagaccaccaagtctgtggtggtgaagtcctggaccatcggcatcatcaacagagtggtgcagctgctgatcatctcctactttgtgggctgggtgttcctgcacgagaaggcctaccaggtgcgggacacagccatcgagagctctgtggtgaccaaggtgaagggcagcggcctgtatgccaacagagtgatggatgtgtctgactatgtgaccccaccccagggcacctctgtgtttgtgatcatcaccaagatgattgtgacagagaaccagatgcagggcttctgcccagagagcgaggagaagtaccgctgtgtgtctgacagccagtgtggccctgagcggctgcccggcggcggcatcctgaccggccgctgtgtgaactacagctctgtgctgcggacctgtgagatccagggctggtgccccacagaggtggacacagtggagacccccatcatgatggaggccgagaacttcaccatcttcatcaagaacagcatccgcttccccctcttcaactttgagaagggcaacctgctgcccaacctgacagcccgggacatgaagacctgccgcttccacccagacaaggaccccttctgccccatcctgcgggtgggagatgtggtgaagtttgctggccaggactttgccaagctggccaggactggaggagtgctgggcatcaagattggctgggtgtgtgacctggacaaggcctgggaccagtgcatccccaagtacagcttcacccggctggacagcgtgtctgagaagagctctgtgtccccaggctacaacttccgctttgccaagtactacaagatggagaatggcagcgagtaccgcaccctgctgaaggccttcggcatccgctttgatgtgctggtgtatggaaatgccggcaagttcaacatcatccccaccatcatcagctctgtggccgccttcacctctgtgggcgtgggcaccgtgctgtgtgacatcatcctgctgaacttcctgaagggagctgaccagtacaaggccaagaagtttgaggaggtgaatgagaccaccctgaagattgctgccctgaccaaccctgtgtaccccagcgaccagaccacagctgagaagcagagcacagacagcggggccttcagcatcggccactag

SEQ ID NO: 166663 - DNA, 1191 bp, synthetic construct
  misc_feature 1..1191: note = Description of Artificial Sequence: Synthetic coding sequence
  source 1..1191: mol_type = other DNA
atgaactgcatcagtgacttcttcacctatgagaccaccaagtctgtggtggtgaagtcctggaccatcggcatcatcaacagagtggtgcagctgctgatcatctcctactttgtgggctgggtgttcctgcacgagaaggcctaccaggtgcgggacacagccatcgagagctctgtggtgaccaaggtgaagggcagcggcctgtatgccaacagagtgatggatgtgtctgactatgtgaccccaccccagggcacctctgtgtttgtgatcatcaccaagatgattgtgacagagaaccagatgcagggcttctgcccagagagcgaggagaagtaccgctgtgtgtctgacagccagtgtggccctgagcggctgcccggcggcggcatcctgaccggccgctgtgtgaactacagctctgtgctgcggacctgtgagatccagggctggtgccccacagaggtggacacagtggagacccccatcatgatggaggccgagaacttcaccatcttcatcaagaacagcatccgcttccccctcttcaactttgagaagggcaacctgctgcccaacctgacagcccgggacatgaagacctgccgcttccacccagacaaggaccccttctgccccatcctgcgggtgggagatgtggtgaagtttgctggccaggactttgccaagctggccaggactggaggagtgctgggcatcaagattggctgggtgtgtgacctggacaaggcctgggaccagtgcatccccaagtacagcttcacccggctggacagcgtgtctgagaagagctctgtgtccccaggctacaacttccgctttgccaagtactacaagatggagaatggcagcgagtaccgcaccctgctgaaggccttcggcatccgctttgatgtgctgtacaccggggccggcaagttcaacatcatccccaccatcatcagctctgtggccgccttcacctctgtgggcgtgggcaccgtgctgtgtgacatcatcctgctgaacttcctgaagggagctgaccagtacaaggccaagaagtttgaggaggtgaatgagaccaccctgaagattgctgccctgaccaaccctgtgtaccccagcgaccagaccacagctgagaagcagagcacagattctggggccttcagcatcggccactag

SEQ ID NO: 166664 - DNA, 1167 bp, synthetic construct
  misc_feature 1..1167: note = Description of Artificial Sequence: Synthetic coding sequence
  source 1..1167: mol_type = other DNA
atggccggctgctgtgccgccctggccgccttcctgtttgaatatgacaccccccgcatcgtgctgatccgcagcaggaaggtgggcctgatgaacagagctgtgcagctgctgatcctggcctacgtgattggctgggtgtttgtgtgggagaagggctaccaggagacagattctgtggtgtcctctgtgaccaccaaggtgaagggcgtggccgtgaccaacaccagcaagctgggcttccgcatctgggatgtggccgactatgtgatcccagcccaggaggagaacagcctgtttgtgatgaccaacgtcatcctgaccatgaaccagacccagggcctgtgcccagagatcccagatgccaccaccgtgtgcaagagtgatgccagctgcacagctggcagcgctggcacccacagcaatggagtgtccacaggccgctgtgtggccttcaatggatctgtgaagacctgtgaggtggccgcctggtgccctgtggaggatgacacccacgtgccccagcctgccttcctgaaggctgctgagaacttcaccctgctggtgaagaacaacatctggtaccccaagttcaacttcagcaagaggaacatcctgcccaacatcaccaccacctacctgaagagctgcatctatgatgccaagacagaccccttctgccccatcttccggctgggcaagatcgtggagaatgccggccacagcttccaggacatggctgtggagggcggcatcatgggcatccaggtgaactgggactgcaacctggaccgggccgccagcctgtgcctgccccgctacagcttccggcggctggacaccagagatgtggagcacaacgtgtccccaggctacaacttccgctttgccaagtactacagagacctggccggaaatgagcagaggaccctcatcaaggcctacggcatccgctttgacatcatcgtgtttgggaaggccggcaagtttgacatcatccccaccatgatcaacatcggcagcggcctggccctgctgggcatggccaccgtgctgtgtgacatcatcgtgctgtactgcatgaagaagaggctgtactaccgggagaagaagtacaagtatgtggaggactatgagcagggcctggccagcgagctggaccagtag

SEQ ID NO: 166665 - DNA, 1215 bp, synthetic construct
  misc_feature 1..1215: note = Description of Artificial Sequence: Synthetic coding sequence
  source 1..1215: mol_type = other DNA
atggccggctgctgtgccgccctggccgccttcctgtttgaatatgacaccccccgcatcgtgctgatccgcagcaggaaggtgggcctgatgaacagagctgtgcagctgctgatcctggcctacgtgattggctgctaccacccccacctggccgaggtggagatggagagcccccggcgctgggtgtttgtgtgggagaagggctaccaggagacagattctgtggtgtcctctgtgaccaccaaggtgaagggcgtggccgtgaccaacaccagcaagctgggcttccgcatctgggatgtggccgactatgtgatcccagcccaggaggagaacagcctgtttgtgatgaccaacgtcatcctgaccatgaaccagacccagggcctgtgcccagagatcccagatgccaccaccgtgtgcaagagtgatgccagctgcacagctggcagcgctggcacccacagcaatggagtgtccacaggccgctgtgtggccttcaatggatctgtgaagacctgtgaggtggccgcctggtgccctgtggaggatgacacccacgtgccccagcctgccttcctgaaggctgctgagaacttcaccctgctggtgaagaacaacatctggtaccccaagttcaacttcagcaagaggaacatcctgcccaacatcaccaccacctacctgaagagctgcatctatgatgccaagacagaccccttctgccccatcttccggctgggcaagatcgtggagaatgccggccacagcttccaggacatggctgtggagggcggcatcatgggcatccaggtgaactgggactgcaacctggaccgggccgccagcctgtgcctgccccgctacagcttccggcggctggacaccagagatgtggagcacaacgtgtccccaggctacaacttccgctttgccaagtactacagagacctggccggaaatgagcagaggaccctcatcaaggcctacggcatccgctttgacatcatcgtgtttgggaaggccggcaagtttgacatcatccccaccatgatcaacatcggcagcggcctggccctgctgggcatggccaccgtgctgtgtgacatcatcgtgctgtactgcatgaagaagaggctgtactaccgggagaagaagtacaagtatgtggaggactatgagcagggcctggccagcgagctggaccagtag

SEQ ID NO: 166666 - DNA, 441 bp, synthetic construct
  misc_feature 1..441: note = Description of Artificial Sequence: Synthetic coding sequence
  source 1..441: mol_type = other DNA
atggccggctgctgtgccgccctggccgccttcctgtttgaatatgacaccccccgcatcgtgctgatccgcagcaggaaggtgggcctgatgaacagagctgtgcagctgctgatcctggcctacgtgattggctgggtgtttgtgtgggagaagggctaccaggagacagattctgtggtgtcctctgtgaccaccaaggtgaagggcgtggccgtgaccaacaccagcaagctgggcttccgcatctgggatgtggccgactatgtgatcccagcccaggaggagaacagcctgtttgtgatgaccaacgtcatcctgaccatgaaccagacccagggcctgtgcccagagatcccagatgccaccaccgtgtgcaagagtgatgccagctgcacagctggcagcgctggcacccacagcaatgacctgctcttctag

SEQ ID NO: 166667 - DNA, 1086 bp, synthetic construct
  misc_feature 1..1086: note = Description of Artificial Sequence: Synthetic coding sequence
  source 1..1086: mol_type = other DNA
atggccggctgctgtgccgccctggccgccttcctgtttgaatatgacaccccccgcatcgtgctgatccgcagcaggaaggtgggcctgatgaacagagctgtgcagctgctgatcctggcctacgtgattggctgggtgtttgtgtgggagaagggctaccaggagacagattctgtggtgtcctctgtgaccaccaaggtgaagggcgtggccgtgaccaacaccagcaagctgggcttccgcatctgggatgtggccgactatgtgatcccagcccaggaggagaacagcctgtttgtgatgaccaacgtcatcctgaccatgaaccagacccagggcctgtgcccagagatcccagatgccaccaccgtgtgcaagagtgatgccagctgcacagctggcagcgctggcacccacagcaatggagtgtccacaggccgcccagccttcctgaaggctgctgagaacttcaccctgctggtgaagaacaacatctggtaccccaagttcaacttcagcaagaggaacatcctgcccaacatcaccaccacctacctgaagagctgcatctatgatgccaagacagaccccttctgccccatcttccggctgggcaagatcgtggagaatgccggccacagcttccaggacatggctgtggagggcggcatcatgggcatccaggtgaactgggactgcaacctggacagagctgccagcctgtgcctgccccgctacagcttccggcggctggacaccagagatgtggagcacaacgtgtccccaggctacaacttccgctttgccaagtactacagagacctggccggaaatgagcagaggaccctcatcaaggcctacggcatccgctttgacatcatcgtgtttgggaaggccggcaagtttgacatcatccccaccatgatcaacatcggcagcggcctggccctgctgggcatggccaccgtgctgtgtgacatcatcgtgctgtactgcatgaagaagaggctgtactaccgggagaagaagtacaagtatgtggaggactatgagcagggcctggccagcgagctggaccagtag

SEQ ID NO: 166668 - DNA, 864 bp, synthetic construct
  misc_feature 1..864: note = Description of Artificial Sequence: Synthetic coding sequence
  source 1..864: mol_type = other DNA
atgaccaacgtcatcctgaccatgaaccagacccagggcctgtgcccagagatcccagatgccaccaccgtgtgcaagagtgatgccagctgcacagctggcagcgctggcacccacagcaatggagtgtccacaggccgctgtgtggccttcaacggctctgtgaagacctgtgaggtggccgcctggtgccctgtggaggatgacacccacgtgccccagcctgccttcctgaaggctgctgagaacttcaccctgctggtgaagaacaacatctggtaccccaagttcaacttcagcaagaggaacatcctgcccaacatcaccaccacctacctgaagagctgcatctatgatgccaagacagaccccttctgccccatcttccggctgggcaagatcgtggagaatgccggccacagcttccaggacatggctgtggagggcggcatcatgggcatccaggtgaactgggactgcaacctggacagagctgccagcctgtgcctgccccgctacagcttccggcggctggacaccagagatgtggagcacaacgtgtccccaggctacaacttccgctttgccaagtactacagagacctggccggaaatgagcagaggaccctcatcaaggcctacggcatccgctttgacatcatcgtgtttgggaaggccggcaagtttgacatcatccccaccatgatcaacatcggcagcggcctggccctgctgggcatggccaccgtgctgtgtgacatcatcgtgctgtactgcatgaagaagaggctgtactaccgggagaagaagtacaagtatgtggaggactatgagcagggcctggccagcgagctggaccagtag

SEQ ID NO: 166669 - DNA, 1278 bp, synthetic construct
  misc_feature 1..1278: note = Description of Artificial Sequence: Synthetic coding sequence
  source 1..1278: mol_type = other DNA
atggatggccctgctgagcagaggcctgccctgctgaacagcgctgagaacttcaccgtgctgatcaagaacaacatcgacttccctggccacaactacaccaccaggaacatcctgcccggcctgaacatcacctgcaccttccacaagacccagaacccccagtgccccatcttccggctgggggacatcttccgggagaccggggacaacttcagtgatgtggccatccagggcggcatcatgggcatcgagatctactgggactgcaacctggaccgctggttccaccactgccggcccaagtacagcttccggcggctggatgacaagaccaccaacgtgtccctgtacccaggctacaacttccgctatgccaagtactacaaggaaaataatgtggagaagaggaccctcatcaaggtgtttggcatccgctttgacatcctggtgtttggcaccggcggcaagtttgacatcatccagctggtggtgtacatcggcagcaccctgagctacttcggcctggccgctgtgttcatcgacttcctgattgacacctacagcagcaactgctgccgcagccacatctacccctggtgcaagtgctgccagccctgtgtggtgaatgagtactactacaggaagaagtgtgagagcatcgtggagcccaagcccaccctgaagtatgtgtcctttgtggatgagagccacatccgcatggtgaaccagcagctgctgggccgcagcctgcaggatgtgaagggccaggaggtgcccaggcctgccatggacttcacagacctgagccggctgcccctggccctgcatgacaccccacccatccctggccagcctgaggagatccagctgctgaggaaggaggccacccccaggagccgggacagccctgtgtggtgccagtgtggcagctgcctgcccagccagctgcctgagagccaccgctgcctggaggagctgtgctgcaggaagaagccaggggcctgcatcaccaccagcgagctgttcaggaagctggtgctgagcagacatgtgctgcagttcctgctgctgtaccaggagcccctgctggccctggatgtggacagcaccaacagccggctgcggcactgtgcctaccgctgctacgccacctggaggtttggcagccaggacatggctgactttgccaacctgcccagctgctgccgctggaggatcaggaaggagttccccaagtctgagggccagtacagcggcttcaagagcccctactag

SEQ ID NO: 166670 - DNA, 828 bp, synthetic construct
  misc_feature 1..828: note = Description of Artificial Sequence: Synthetic coding sequence
  source 1..828: mol_type = other DNA
atgcctgcctgctgcagctgcagtgatgtgttccagtatgagaccaacaaggtgacccgcatccagagcatgaactacggcaccatcaagtggttcttccacgtgatcatcttctcctatgtgtgctttgccctggtgtctgacaagctgtaccagaggaaggagcccgtcatcagctctgtgcacaccaaggtgaagggcattgctgaggtgaaggaggagatcgtggagaatggagtgaagaagctggtgcacagcgtgtttgacacagctgactacaccttccccctgcagggcaacagcttctttgtgatgaccaacttcctgaagacagagggccaggagcagaggctgtgcccagagtaccccaccaggaggaccctgtgcagcagtgaccggggctgcaagaagggctggatggacccccagagcaagggcatccagacaggccgctgtgtggtgtatgagggcaaccagaagacctgtgaggtgtctgcctggtgccccatcgaggccgtggaggaggcccccaggcctgccctgctgaacagcgctgagaacttcaccgtgctgatcaagaacaacatcgacttccctggccacaactacaccacctacgccaagtactacaaggagaacaacgtggagaagaggaccctcatcaaggtgtttggcatccgctttgacatcctggtgtttggaactggaggcaagtttgacatcatccagctggtggtgtacatcggcagcaccctgagctacttcggcctggtgcgggacagcctcttccacgccctgggcaagtggtttggagagggcagtgactag

SEQ ID NO: 166671 - DNA, 1518 bp, synthetic construct
  misc_feature 1..1518: note = Description of Artificial Sequence: Synthetic coding sequence
  source 1..1518: mol_type = other DNA
atgacccctggggaccacagctggggcaacagcttctttgtgatgaccaacttcctgaagacagagggccaggagcagaggctgtgcccagagtaccccaccaggaggaccctgtgcagcagtgaccggggctgcaagaagggctggatggacccccagagcaagggcatccagacaggccgctgtgtggtgtatgagggcaaccagaagacctgtgaggtgtctgcctggtgccccatcgaggccgtggaggaggcccccaggcctgccctgctgaacagcgctgagaacttcaccgtgctgatcaagaacaacatcgacttccctggccacaactacaccaccaggaacatcctgcccggcctgaacatcacctgcaccttccacaagacccagaacccccagtgccccatcttccggctgggggacatcttccgggagaccggggacaacttcagtgatgtggccatccagggcggcatcatgggcatcgagatctactgggactgcaacctggaccgctggttccaccactgccggcccaagtacagcttccggcggctggatgacaagaccaccaacgtgtccctgtacccaggctacaacttccgctatgccaagtactacaaggaaaataatgtggagaagaggaccctcatcaaggtgtttggcatccgctttgacatcctggtgtttggcaccggcggcaagtttgacatcatccagctggtggtgtacatcggcagcaccctgagctacttcggcctggccgctgtgttcatcgacttcctgattgacacctacagcagcaactgctgccgcagccacatctacccctggtgcaagtgctgccagccctgtgtggtgaatgagtactactacaggaagaagtgtgagagcatcgtggagcccaagcccaccctgaagtatgtgtcctttgtggatgagagccacatccgcatggtgaaccagcagctgctgggccgcagcctgcaggatgtgaagggccaggaggtgcccaggcctgccatggacttcacagacctgagccggctgcccctggccctgcatgacaccccacccatccctggccagcctgaggagatccagctgctgaggaaggaggccacccccaggagccgggacagccctgtgtggtgccagtgtggcagctgcctgcccagccagctgcctgagagccaccgctgcctggaggagctgtgctgcaggaagaagccaggggcctgcatcaccaccagcgagctgttcaggaagctggtgctgagcagacatgtgctgcagttcctgctgctgtaccaggagcccctgctggccctggatgtggacagcaccaacagccggctgcggcactgtgcctaccgctgctacgccacctggaggtttggcagccaggacatggctgactttgccaacctgcccagctgctgccgctggaggatcaggaaggagttccccaagtctgagggccagtacagcggcttcaagagcccctactag

SEQ ID NO: 166672 - DNA, 387 bp, synthetic construct
  misc_feature 1..387: note = Description of Artificial Sequence: Synthetic coding sequence
  source 1..387: mol_type = other DNA
atgcctgcctgctgcagctgcagtgatgtgttccagtatgagaccaacaaggtgacccgcatccagagcatgaactacggcaccatcaagtggttcttccacgtgatcatcttctcctatgtgtgctttgccctggtgtctgacaagctgtaccagaggaaggagcccgtcatcagctctgtgcacaccaaggtgaagggcattgctgaggtgaaggaggagatcgtggagaatggagtgaagaagctggtgcacagcgtgtttgacacagctgactacaccttccccctgcagggcaacagcttctttgtgatgaccaacttcctgaagacagagggccaggagcagaggctgtgcccagaggagttccggcctgagggcgtgtag

SEQ ID NO: 166673 - DNA, 921 bp, synthetic construct
  misc_feature 1..921: note = Description of Artificial Sequence: Synthetic coding sequence
  source 1..921: mol_type = other DNA
atgtggcagttccgctatgccaagtactacaaggagaacaacgtggagaagaggaccctcatcaaggtgtttggcatccgctttgacatcctggtgtttggaactggaggcaagtttgacatcatccagctggtggtgtacatcggcagcaccctgagctacttcggcctggccgctgtgttcatcgacttcctgattgacacctacagcagcaactgctgccgcagccacatctacccctggtgcaagtgctgccagccctgtgtggtgaatgagtactactacaggaagaagtgtgagagcatcgtggagcccaagcccaccctgaagtatgtgtcctttgtggatgagagccacatccgcatggtgaaccagcagctgctgggccgcagcctgcaggatgtgaagggccaggaggtgcccaggcctgccatggacttcacagacctgagccggctgcccctggccctgcatgacaccccacccatccctggccagcctgaggagatccagctgctgaggaaggaggccacccccaggagccgggacagccctgtgtggtgccagtgtggcagctgcctgcccagccagctgcctgagagccaccgctgcctggaggagctgtgctgcaggaagaagccaggggcctgcatcaccaccagcgagctgttcaggaagctggtgctgagccgccacgtgctgcagttcctgctgctgtaccaggagcccctgctggccctggatgtggacagcaccaacagccggctgcggcactgtgcctaccgctgctacgccacctggaggtttggcagccaggacatggctgactttgccaacctgcccagctgctgccgctggaggatcaggaaggagttccccaagtctgagggccagtacagcggcttcaagagcccctactag

SEQ ID NO: 166674 - DNA, 387 bp, synthetic construct; identical to SEQ ID NO: 166672
  misc_feature 1..387: note = Description of Artificial Sequence: Synthetic coding sequence
  source 1..387: mol_type = other DNA

SEQ ID NO: 166675 - DNA, 1788 bp, synthetic construct
  misc_feature 1..1788: note = Description of Artificial Sequence: Synthetic coding sequence
  source 1..1788: mol_type = other DNA
atgcctgcctgctgcagctgcagtgatgtgttccagtatgagaccaacaaggtgacccgcatccagagcatgaactacggcaccatcaagtggttcttccacgtgatcatcttctcctatgtgtgctttgccctggtgtctgacaagctgtaccagaggaaggagcccgtcatcagctctgtgcacaccaaggtgaagggcattgctgaggtgaaggaggagatcgtggagaatggagtgaagaagctggtgcacagcgtgtttgacacagctgactacaccttccccctgcagggcaacagcttctttgtgatgaccaacttcctgaagacagagggccaggagcagaggctgtgcccagagtaccccaccaggaggaccctgtgcagcagtgaccggggctgcaagaagggctggatggacccccagagcaagggcatccagacaggccgctgtgtggtgtatgagggcaaccagaagacctgtgaggtgtctgcctggtgccccatcgaggccgtggaggaggcccccaggcctgccctgctgaacagcgctgagaacttcaccgtgctgatcaagaacaacatcgacttccctggccacaactacaccaccaggaacatcctgcccggcctgaacatcacctgcaccttccacaagacccagaacccccagtgccccatcttccggctgggggacatcttccgggagaccggggacaacttcagtgatgtggccatccagggcggcatcatgggcatcgagatctactgggactgcaacctggaccgctggttccaccactgccggcccaagtacagcttccggcggctggatgacaagaccaccaacgtgtccctgtacccaggctacaacttccgctatgccaagtactacaaggaaaataatgtggagaagaggaccctcatcaaggtgtttggcatccgctttgacatcctggtgtttggcaccggcggcaagtttgacatcatccagctggtggtgtacatcggcagcaccctgagctacttcggcctggccgctgtgttcatcgacttcctgattgacacctacagcagcaactgctgccgcagccacatctacccctggtgcaagtgctgccagccctgtgtggtgaatgagtactactacaggaagaagtgtgagagcatcgtggagcccaagcccaccctgaagtatgtgtcctttgtggatgagagccacatccgcatggtgaaccagcagctgctgggccgcagcctgcaggatgtgaagggccaggaggtgcccaggcctgccatggacttcacagacctgagccggctgcccctggccctgcatgacaccccacccatccctggccagcctgaggagatccagctgctgaggaaggaggccacccccaggagccgggacagccctgtgtggtgccagtgtggcagctgcctgcccagccagctgcctgagagccaccgctgcctggaggagctgtgctgcaggaagaagccaggggcctgcatcaccaccagcgagctgttcaggaagctggtgctgagcagacatgtgctgcagttcctgctgctgtaccaggagcccctgctggccctggatgtggacagcaccaacagccggctgcggcactgtgcctaccgctgctacgccacctggaggtttggcagccaggacatggctgactttgccaacctgcccagctgctgccgctggaggatcaggaaggagttccccaagtctgagggccagtacagcggcttcaagagcccctactag

SEQ ID NO: 166676 - DNA, 1122 bp, synthetic construct
  misc_feature 1..1122: note = Description of Artificial Sequence: Synthetic coding sequence
  source 1..1122: mol_type = other DNA
atgacagaggtgctgtggccagctgtgcccaatggaacagatgctgccttcctggccggccctggcagctcctggggcaacagcacagtggccagcacagctgctgtgagcagcagcttcaagtgtgccctgaccaagacaggcttccagttctactacctgcctgctgtgtacatcctggtgttcatcatcggcttcctgggcaacagcgtggccatctggatgtttgtgttccacatgaagccctggagcggcatctctgtgtacatgttcaacctggccctggccgacttcctgtatgtgctgaccctgcctgccctgatcttctactacttcaacaagacagactggatctttggagatgccatgtgcaagctgcagcgcttcatcttccacgtgaacctgtatggcagcatcctcttcctgacctgcatcagcgcccaccgctacagcggcgtggtgtaccccctgaagagcctgggccgcctgaagaagaagaatgccatctgcatctctgtgctggtgtggctgattgtggtggtggccatcagccccatcctcttctacagcggcaccggggtgaggaagaacaagaccatcacctgctatgacaccaccagtgatgagtacctgcggagctacttcatctacagcatgtgcaccaccgtggccatgttctgtgtgcccctggtgctgatcctgggctgctacggcctcatcgtgcgggccctgatctacaaggacctggacaacagccccctgcggaggaagagcatctacctggtgatcatcgtgctgactgtgtttgctgtgtcctacatccccttccacgtgatgaagaccatgaacctgcgggcccggctggacttccagaccccagccatgtgtgccttcaatgacagagtgtatgccacctaccaggtgacccggggcctggccagcctgaacagctgtgtggaccccatcctgtacttcctggccggggacaccttcagaagaaggctgagccgggccaccaggaaggccagccgccgctctgaggccaacctgcagagcaagtctgaggacatgaccctgaacatcctgcctgagttcaagcagaatggagacaccagcctgtag

SEQ ID NO: 166677 - DNA, 1125 bp, synthetic construct
  misc_feature 1..1125: note = Description of Artificial Sequence: Synthetic coding sequence
  source 1..1125: mol_type = other DNA
atggccgccaacgtgtctggggccaagagctgcccagccaacttcctggccgctgctgatgacaagctgagcggcttccagggcgacttcctgtggcccatcctggtggtggagttcctggtggccgtggccagcaatggcctggccctgtaccgcttcagcatcaggaagcagaggccctggcaccctgctgtggtgttttctgtgcagctggccgtgtctgacctgctgtgtgccctgaccctgccccccctggccgcctacctgtacccacccaagcactggaggtatggagaggccgcctgccgcctggagcgcttcctgttcacctgcaacctgctgggcagcgtcatcttcatcacctgcatcagcctgaaccgctacctgggcatcgtgcaccccttctttgcccggagccacctgcggcccaagcacgcctgggccgtgtctgctgctggctgggtgctggccgccctgctggccatgcccaccctgtccttcagccacctgaagaggccccagcagggcgccggcaactgcagcgtggcccggcctgaggcctgcatcaagtgcctgggcacagctgaccacggcctggccgcctaccgggcctacagcctggtgctggccggcctgggctgcggcctgcccctgctgctgaccctggccgcctatggagccctgggccgggctgtgctgcggagccctggcatgacagtggccgagaagctgcgggtggccgccctggtggccagcggcgtggccctgtatgccagcagctatgtgccctaccacatcatgagggtgctgaatgtggatgcccggcggcgctggagcacccgctgccccagctttgctgacatcgcccaggccacagctgccctggagctgggcccctacgtgggctaccaggtgatgaggggcctgatgcccctggccttctgtgtgcaccccctgctgtacatggctgctgtgcccagcctgggctgctgctgccgccactgccccggctacagagacagctggaacccagaagatgccaagagcacaggccaggccctgcccctgaatgccacagctgcccccaagcccagcgagccccagagccgggagctgagccagtag

SEQ ID NO: 166678 - DNA, 1029 bp, synthetic construct
  misc_feature 1..1029: note = Description of Artificial Sequence: Synthetic coding sequence
  source 1..1029: mol_type = other DNA
atgcaggccgtggacaacctgaccagcgcccctggcaacaccagcctgtgcacccgggactacaagatcacccaggtgctcttccccctgctgtacacagtgctcttctttgtgggcctcatcaccaacggcctggccatgaggatcttcttccagatccgcagcaagagcaacttcatcatcttcctgaagaacacagtcatcagtgacctgctgatgatcctgaccttccccttcaagatcctgagtgatgccaagctgggcaccggccccctgcggacctttgtgtgccaggtgaccagcgtcatcttctacttcaccatgtacatcagcatctccttcctgggcctcatcaccatcgaccgctaccagaagaccacccggcccttcaagaccagcaaccccaagaacctgctgggcgccaagatcctgtctgtggtgatctgggccttcatgttcctgctgagcctgcccaacatgatcctgaccaaccggcagccccgggacaagaatgtgaagaagtgcagcttcctgaagtcagaatttggcctggtgtggcatgaaattgtgaactacatctgccaggtgatcttctggatcaacttcctgattgtcatcgtgtgctacaccctcatcaccaaggagctgtaccgctcctatgtgaggacccggggcgtgggcaaggtgcccaggaagaaggtgaatgtgaaggtgttcatcatcatcgctgtgttcttcatctgctttgtgcccttccactttgcccgcatcccctacaccctgagccagaccagagatgtgtttgactgcacagctgagaacaccctcttctacgtgaaggagagcaccctgtggctgaccagcctgaatgcctgcctggaccccttcatctacttcttcctgtgcaagagcttcaggaacagcctcatctccatgctgaagtgccccaacagcgccaccagcctgagccaggacaacaggaagaaggagcaggacggcggggaccccaatgaggagacccccatgtag

SEQ ID NO: 166679 - DNA, 738 bp, synthetic construct
  misc_feature 1..738: note = Description of Artificial Sequence: Synthetic coding sequence
  source 1..738: mol_type = other DNA
atgcaggccgtggacaacctgaccagcgcccctggcaacaccagcctgtgcacccgggactacaagatcacccaggtgctcttccccctgctgtacacagtgctcttctttgtgggcctcatcaccaacggcctggccatgaggatcttcttccagatccgcagcaagagcaacttcatcatcttcctgaagaacacagtcatcagtgacctgctgatgatcctgaccttccccttcaagatcctgagtgatgccaagctgggcaccggccccctgcggacctttgtgtgccaggtgatcttctggatcaacttcctgattgtgattgtgtgctacaccctcatcaccaaggagctgtaccgctcctatgtgaggacccggggcgtgggcaaggtgcccaggaagaaggtgaatgtgaaggtgttcatcatcatcgctgtgttcttcatctgctttgtgcccttccactttgcccgcatcccctacaccctgagccagaccagagatgtgtttgactgcacagctgagaacaccctcttctacgtgaaggagagcaccctgtggctgaccagcctgaatgcctgcctggaccccttcatctacttcttcctgtgcaagagcttcaggaacagcctcatctccatgctgaagtgccccaacagcgccaccagcctgagccaggacaacaggaagaaggagcaggatggaggagaccccaatgaggagacccccatgtag

SEQ ID NO: 166680 - DNA, 1134 bp, synthetic construct
  misc_feature 1..1134: note = Description of Artificial Sequence: Synthetic coding sequence
  source 1..1134: mol_type = other DNA
atggctgctgacctgggcccctggaatgacaccatcaatggcacctgggatggagatgagctgggctaccgctgccgcttcaatgaagacttcaagtatgtgctgctgcctgtgtcctatggagtggtgtgtgtgcccggcctgtgcctgaatgctgtggccctgtacatcttcctgtgccgcctgaagacctggaatgccagcaccacctacatgttccacctggccgtgtctgatgccctgtatgctgccagcctgcccctgctggtgtactactatgcccggggggaccactggcccttcagcacagtgctgtgcaagctggtgcgcttcctgttctacaccaacctgtactgcagcatcctcttcctgacctgcatctctgtgcaccgctgcctgggcgtgctgcggcccctgcggagcctgcgctggggccgggcccgctatgccaggagagtggccggggctgtgtgggtgctggtgctggcctgccaggcccctgtgctgtactttgtgaccaccagcgcccggggcggccgggtgacctgccacgacaccagcgcccctgagctgttcagcagatttgtggcctacagctctgtgatgctgggcctgctgtttgctgtgccctttgctgtgatcctggtgtgctacgtgctgatggcccggcggctgctgaagccagcctacggcaccagcggcggcctgccccgggccaagaggaagtctgtgaggaccatcgctgtggtgctggccgtgtttgccctgtgcttcctgcccttccacgtgaccaggaccctgtactacagcttccgcagcctggacctgagctgccacaccctgaatgccatcaacatggcctacaaggtgacccggcccctggccagcgccaacagctgcctggaccctgtgctgtacttcctggccggccagaggctggtgcgctttgccagagatgccaagccacccaccggccccagccctgccaccccagcccggcggcggctgggcctgcggcggagtgacagaacagacatgcagagaattgaagatgtgctgggcagcagcgaggacagcagaagaacagagagcaccccagctggcagcgagaacaccaaggacatccggctgtag

SEQ ID NO: 166681 - DNA, 1134 bp, synthetic construct; identical to SEQ ID NO: 166680
  misc_feature 1..1134: note = Description of Artificial Sequence: Synthetic coding sequence
  source 1..1134: mol_type = other DNA

SEQ ID NO: 166682 - DNA, 1134 bp, synthetic construct; identical to SEQ ID NO: 166680
  misc_feature 1..1134: note = Description of Artificial Sequence: Synthetic coding sequence
  source 1..1134: mol_type = other DNA

SEQ ID NO: 166683 - DNA, 1080 bp, synthetic construct
  misc_feature 1..1080: note = Description of Artificial Sequence: Synthetic coding sequence
  source 1..1080: mol_type = other DNA
atgcaggtgcccaacagcactggaccagacaatgccaccctgcagatgctgaggaacccagccatcgctgtggccctgcctgtggtgtacagcctggtggccgctgtgtccatccctggcaacctcttcagcctgtgggtgctgtgcaggaggatgggccccaggagccccagcgtcatcttcatgatcaacctgtctgtgacagacctgatgctggcctctgtgctgcccttccagatctactaccactgcaacagacaccactgggtgtttggagtgctgctgtgcaatgtggtgacagtggccttctacgccaacatgtacagcagcatcctgaccatgacctgcatctctgtggagcgcttcctgggcgtgctgtaccccctgagcagcaagcgctggaggagaagaagatatgctgtggccgcctgtgccggcacctggctgctgctgctgacagccctgagccccctggccaggacagacctgacctaccctgtgcacgccctgggcatcatcacctgctttgatgtgctgaagtggaccatgctgcccagcgtggccatgtgggccgtgttcctgttcaccatcttcatcctgctcttcctgatccccttcgtcatcaccgtggcctgctacacagccaccatcctgaagctgctgaggacagaggaggcccacggccgggagcagaggagaagagctgtgggcctggccgctgtggtgctgctggcctttgtgacctgctttgcccccaacaactttgtgctgctggcccacatcgtgagccgcctcttctacggcaagagctactaccacgtgtacaagctgaccctgtgcctgagctgcctgaacaactgcctggacccctttgtgtactactttgccagccgggagttccagctgcggctgcgggagtacctgggctgcagaagagtgccccgggacaccctggacacccggcgggagagcctcttcagcgcccggaccacctctgtgcgctctgaggccggggcccaccctgagggcatggagggcgccacccggcccggcctgcagaggcaggagagcgtcttctag

SEQ ID NO: 166684 - DNA, 189 bp, synthetic construct
  misc_feature 1..189: note = Description of Artificial Sequence: Synthetic coding sequence
  source 1..189: mol_type = other DNA
atgtctgagcggcagggcgctggggccaccaacgggaaggacaagaccagcggagaaaatgatggccagaagaaggtgcaggaggagtttgacatcgacatggatgcccctgagacagaaagagctgctgtggccatccagagccagttcaggaagttccagaagaagaaggccggcagccagagctag

SEQ ID NO: 166685 - DNA, 1914 bp, synthetic construct
  misc_feature 1..1914: note = Description of Artificial Sequence: Synthetic coding sequence
  source 1..1914: mol_type = other DNA
atggccagcaatgaaagagatgccatctcctggtaccagaagaagatcggggcctatgaccagcagatctgggagaagagcattgagcagacccagatcaagggcctgaagaacaagcccaagaagatgggccacatcaagccagacctgattgatgtggacctgatccggggcagcacctttgccaaggccaagccagagatcccctggaccagcctgaccaggaagggcctggtgcgggtggtgttcttccccctcttcagcaactggtggatccaggtgaccagcctgcgcatctttgtgtggctgctgctgctgtacttcatgcaggtgattgccatcgtgctgtacctgatgatgcccatcgtgaacatcagcgaggtgctgggccccctgtgcctgatgctgctgatgggcaccgtgcactgccagatcgtgtccacccagatcacccggcccagcggcaacaatggaaacagaagaagaaggaagctgaggaagacagtgaatggagatggcagccgggagaatggaaacaacagcagtgacaaggtgcggggcatcgagaccctggagagcgtgcccatcattggaggcttctgggagaccatctttggaaaccgcatcaagagggtgaagctgatcagcaacaagggcacagaaacagacaatgaccccagctgtgtgcaccccatcatcaagaggcggcagtgcaggcctgagatccgcatgtggcagacccgggagaaggccaagttcagtgatggagagaagtgccggcgggaggccttccggcggctgggcaatggagtgtctgatgacctgagcagtgaagaagatggagaggcccggacccagatgatcctgctgcggcgctctgtggagggcgccagcagtgacaatggctgtgaggtgaagaacaggaagagcatcctgagccgccacctgaacagccaggtgaagaagaccaccacccgctggtgccacatcgtgcgggacagcgacagcctggccgagagcgagtttgagagcgctgccttcagccagggcagccgctctggagtgtctgggggcagccgcagcctgaacatgagccggcgggacagcgagagcaccaggcatgacagcgagacagaggacatgctgtgggatgacctgctgcacggcccagaatgtcgcagctctgtgaccagtgacagcgagggcgcccacgtgaacaccctgcacagcggcaccaagagggaccccaaggaggatgtgttccagcagaaccacctgttctggctgcagaacagcagccccagcagtgacagagtgtctgccatcatctgggagggcaatgaatgcaagaagatggacatgtctgtgctggagatcagcggcatcatcatgagccgggtgaatgcctaccagcagggcgtgggctaccagatgctgggcaatgtggtgaccatcggcctggccttcttccccttcctgcacaggctcttccgggagaagagcctggaccagctgaagagcatctctgctgaggagatcctgaccctcttctgtggggcccctcctgtgacccccatcatcgtgctgagcatcatcaacttctttgagcggctgtgcctgacctggatgttcttcttcatgatgtgtgtggccgagaggacctacaagcagcgcttcctgtttgccaagctgttcagccacatcaccagcgccaggaaggccaggaaatatgagatcccccacttccggctgaagaaggtggagaacatcaagatctggctgagcctgcggagctacctgaagaggcggggcccccagaggtctgtggatgtggtggtgtcctctgtgttcctgctgaccctgagcatcgccttcatctgctgtgcccaggtgaaggtgagccacctgctgtag

SEQ ID NO: 166686 - DNA, 2130 bp, synthetic construct
  misc_feature 1..2130: note = Description of Artificial Sequence: Synthetic coding sequence
  source 1..2130: mol_type = other DNA
atggccagcaatgaaagagatgccatctcctggtaccagaagaagatcggggcctatgaccagcagatctgggagaagagcattgagcagacccagatcaagggcctgaagaacaagcccaagaagatgggccacatcaagccagacctgattgatgtggacctgatccgggtgattgccatcgtgctgtacctgatgatgcccatcgtgaacatcagcgaggtgctgggccccctgtgcctgatgctgctgatgggcaccgtgcactgccagatcgtgtccacccagatcacccggcccagcggcaacaacggcaacagaagaagaaggaagctgaggaagacagtgaatggagatggcagcagagaaaatggaaacaacagcagtgacaaggtgcggggcatcgagaccctggagagcgtgcccatcatcggcggcttctgggagaccatcttcggcaaccgcatcaagagggtgaagctgatcagcaacaagggcacagaaacagacaatgaccccagctgtgtgcaccccatcatcaagaggcggcagtgcaggcctgagatccgcatgtggcagacccgggagaaggccaagttcagtgatggagagaagtgcagaagagaggccttccggcggctgggcaatggagtgtctgatgacctgagcagcgaggaggatggagaggcccggacccagatgatcctgctgcggcgctctgtggagggcgccagcagtgacaatggctgtgaggtgaagaacaggaagagcatcctgagccgccacctgaacagccaggtgaagaagaccaccacccgctggtgccacatcgtgcgggacagcgacagcctggccgagagcgagtttgaatctgctgccttcagccagggcagccgcagcggcgtgtctgggggcagccgcagcctgaacatgagcagaagagacagcgagagcaccaggcatgattctgaaacagaggacatgctgtgggatgacctgctgcacggccctgagtgccgcagctctgtgaccagtgacagcgagggcgcccacgtgaacaccctgcacagcggcaccaagagggaccccaaggaggatgtgttccagcagaaccacctgttctggctgcagaacagcagccccagcagtgacagagtgtctgccatcatctgggagggcaatgaatgcaagaagatggacatgtctgtgctggagatcagcggcatcatcatgagccgggtgaatgcctaccagcagggcgtgggctaccagatgctgggcaatgtggtgaccatcggcctggccttcttccccttcctgcacaggctcttccgggagaagagcctggaccagctgaagagcatctctgctgaggagatcctgaccctcttctgtggggcccctcctgtgacccccatcatcgtgctgagcatcatcaacttctttgagcggctgtgcctgacctggatgttcttcttcatgatgtgtgtggccgagaggacctacaagcagcgcttcctgtttgccaagctgttcagccacatcaccagcgccaggaaggccaggaaatatgagatcccccacttccggctgaagaaggtggagaacatcaagatctggctgagcctgcggagctacctgaagagaagaggcccccagaggtctgtggatgtggtggtgagcagcgtcttcctgctgaccctgagcatcgccttcatctgctgtgcccaggtgctgcagggccacaagaccttcctgaatgatgcctacaactgggagttcctgatctgggagacagccctgctgctcttcctgctgcggctggccagcctgggcagcgagaccaacaagaagtacagcaatgtgtccatcctgctgacagagcagatcaacctgtacctgaagatggagaagaagcccaacaagaaggagcagctgaccctggtgaacaacgtgctgaagctgagcaccaagctgctgaaggagctggacacccccttccggctgtatggcctgaccatgaaccccctcatctacaacatcaccagggtggtgatcctgtctgctgtgtctggagtcatcagtgacctgctgggcttcaacatccggctgtggaagatcaagagctag

SEQ ID NO: 166687 - DNA, 2154 bp, synthetic construct
  misc_feature 1..2154: note = Description of Artificial Sequence: Synthetic coding sequence
  source 1..2154: mol_type = other DNA
atggccagcaatgaaagagatgccatctcctggtaccagaagaagatcggggcctatgaccagcagatctgggagaagagcattgagcagacccagatcaagggcctgaagaacaagcccaagaagatgggccacatcaagccagacctgattgatgtggacctgatccggggcagcacctttgccaaggccaagccagagatcccctggaccagcctgaccaggaagggcctggtgcgggtggtgttcttccccctcttcagcaactggtggatccaggtgaccagcctgcgcatctttgtgtggctgctgctgctgtacttcatgcaggtgattgccatcgtgctgtacctgatgatgcccatcgtgaacatcagcgaggtgctgggccccctgtgcctgatgctgctgatgggcaccgtgcactgccagatcgtgtccacccagatcacccggcccagcggcaacaatggaaacagaagaagacgcatcaagagggtgaagctgatcagcaacaagggcacagaaacagacaatgaccccagctgtgtgcaccccatcatcaagaggcggcagtgcaggcctgagatccgcatgtggcagacccgggagaaggccaagttcagtgatggagagaagtgcagaagagaggccttccggcggctgggcaatggagtgtctgatgacctgagcagcgaggaggatggagaggcccggacccagatgatcctgctgcggcgctctgtggagggcgccagcagtgacaatggctgtgaggtgaagaacaggaagagcatcctgagccgccacctgaacagccaggtgaagaagaccaccacccgctggtgccacatcgtgcgggacagcgacagcctggccgagagcgagtttgaatctgctgccttcagccagggcagccgcagcggcgtgtctgggggcagccgcagcctgaacatgagcagaagagacagcgagagcaccaggcatgattctgaaacagaggacatgctgtgggatgacctgctgcacggccctgagtgccgcagctctgtgaccagtgacagcgagggcgcccacgtgaacaccctgcacagcggcaccaagagggaccccaaggaggatgtgttccagcagaaccacctgttctggctgcagaacagcagccccagcagtgacagagtgtctgccatcatctgggagggcaatgaatgcaagaagatggacatgtctgtgctggagatcagcggcatcatcatgagccgggtgaatgcctaccagcagggcgtgggctaccagatgctgggcaatgtggtgaccatcggcctggccttcttccccttcctgcacaggctcttccgggagaagagcctggaccagctgaagagcatctctgctgaggagatcctgaccctcttctgtggggcccctcctgtgacccccatcatcgtgctgagcatcatcaacttctttgagcggctgtgcctgacctggatgttcttcttcatgatgtgtgtggccgagaggacctacaagcagcgcttcctgtttgccaagctgttcagccacatcaccagcgccaggaaggccaggaaatatgagatcccccacttccggctgaagaaggtggagaacatcaagatctggctgagcctgcggagctacctgaagagaagaggcccccagaggtctgtggatgtggtggtgagcagcgtcttcctgctgaccctgagcatcgccttcatctgctgtgcccaggtgctgcagggccacaagaccttcctgaatgatgcctacaactgggagttcctgatctgggagacagccctgctgctcttcctgctgcggctggccagcctgggcagcgagaccaacaagaagtacagcaatgtgtccatcctgctgacagagcagatcaacctgtacctgaagatggagaagaagcccaacaagaaggagcagctgaccctggtgaacaacgtgctgaagctgagcaccaagctgctgaaggagctggacacccccttccggctgtatggcctgaccatgaaccccctcatctacaacatcaccagggtggtgatcctgtctgctgtgtctggagtcatcagtgacctgctgggcttcaacatccgcatctggaagcacagcagctag

SEQ ID NO: 166688 - DNA, 2154 bp, synthetic construct
  misc_feature 1..2154: note = Description of Artificial Sequence: Synthetic coding sequence
  source 1..2154: mol_type = other DNA
atggccagcaatgaaagagatgccatctcctggtaccagaagaagatcggggcctatgaccagcagatctgggagaagagcattgagcagacccagatcaagggcctgaagaacaagcccaagaagatgggccacatcaagccagacctgattgatgtggacctgatccggggcagcacctttgccaaggccaagccagagatcccctggaccagcctgaccaggaagggcctggtgcgggtggtgttcttccccctcttcagcaactggtggatccaggtgaccagcctgcgcatctttgtgtggctgctgctgctgtacttcatgcaggtgattgccatcgtgctgtacctgatgatgcccatcgtgaacatcagcgaggtgctgggccccctgtgcctgatgctgctgatgggcaccgtgcactgccagatcgtgtccacccagatcacccggcccagcggcaacaatggaaacagaagaagacgcatcaagagggtgaagctgatcagcaacaagggcacagaaacagacaatgaccccagctgtgtgcaccccatcatcaagaggcggcagtgcaggcctgagatccgcatgtggcagacccgggagaaggccaagttcagtgatggagagaagtgcagaagagaggccttccggcggctgggcaatggagtgtctgatgacctgagcagcgaggaggatggagaggcccggacccagatgatcctgctgcggcgctctgtggagggcgccagcagtgacaatggctgtgaggtgaagaacaggaagagcatcctgagccgccacctgaacagccaggtgaagaagaccaccacccgctggtgccacatcgtgcgggacagcgacagcctggccgagagcgagtttgaatctgctgccttcagccagggcagccgcagcggcgtgtctgggggcagccgcagcctgaacatgagcagaagagacagcgagagcaccaggcatgattctgaaacagaggacatgctgtgggatgacctgctgcacggccctgagtgccgcagctctgtgaccagtgacagcgagggcgcccacgtgaacaccctgcacagcggcaccaagagggaccccaaggaggatgtgttccagcagaaccacctgttctggctgcagaacagcagccccagcagtgacagagtgtctgccatcatctgggagggcaatgaatgcaagaagatggacatgtctgtgctggagatcagcggcatcatcatgagccgggtgaatgcctaccagcagggcgtgggctaccagatgctgggcaatgtggtgaccatcggcctggccttcttccccttcctgcacaggctcttccgggagaagagcctggaccagctgaagagcatctctgctgaggagatcctgaccctcttctgtggggcccctcctgtgacccccatcatcgtgctgagcatcatcaacttctttgagcggctgtgcctgacctggatgttcttcttcatgatgtgtgtggccgagaggacctacaagcagcgcttcctgtttgccaagctgttcagccacatcaccagcgccaggaaggccaggaaatatgagatcccccacttccggctgaagaaggtggagaacatcaagatctggctgagcctgcggagctacctgaagagaagaggcccccagaggtctgtggatgtggtggtgagcagcgtcttcctgctgaccctgagcatcgccttcatctgctgtgcccaggtgctgcagggccacaagaccttcctgaatgatgcctacaactgggagttcctgatctgggagacagccctgctgctcttcctgctgcggctggccagcctgggcagcgagaccaacaagaagtacagcaatgtgtccatcctgctgacagagcagatcaacctgtacctgaagatggagaagaagcccaacaagaaggagcagctgaccctggtgaacaacgtgctgaagctgagcaccaagctgctgaaggagctggacacccccttccggctgtatggcctgaccatgaaccccctcatctacaacatcaccagggtggtgatcctgtctgctgtgtctggagtcatcagtgacctgctgggcttcaacatccggctgtggaagatcaagagctag

SEQ ID NO: 166689 - DNA, 2130 bp, synthetic construct; identical to SEQ ID NO: 166686
  misc_feature 1..2130: note = Description of Artificial Sequence: Synthetic coding sequence
  source 1..2130: mol_type = other DNA

SEQ ID NO: 166690 - DNA, 2289 bp, synthetic construct
  misc_feature 1..2289: note = Description of Artificial Sequence: Synthetic coding sequence
  source 1..2289: mol_type = other DNA
atggccagcaatgaaagagatgccatctcctggtaccagaagaagatcggggcctatgaccagcagatctgggagaagagcattgagcagacccagatcaagggcctgaagaacaagcccaagaagatgggccacatcaagccagacctgattgatgtggacctgatccggggcagcacctttgccaaggccaagccagagatcccctggaccagcctgaccaggaagggcctggtgcgggtggtgttcttccccctcttcagcaactggtggatccaggtgaccagcctgcgcatctttgtgtggctgctgctgctgtacttcatgcaggtgattgccatcgtgctgtacctgatgatgcccatcgtgaacatcagcgaggtgctgggccccctgtgcctgatgctgctgatgggcaccgtgcactgccagatcgtgtccacccagatcacccggcccagcggcaacaatggaaacagaagaagaaggaagctgaggaagacagtgaatggagatggcagccgggagaatggaaacaacagcagtgacaaggtgcggggcatcgagaccctggagagcgtgcccatcattggaggcttctgggagaccatctttggaaaccgcatcaagagggtgaagctgatcagcaacaagggcacagaaacagacaatgaccccagctgtgtgcaccccatcatcaagaggcggcagtgcaggcctgagatccgcatgtggcagacccgggagaaggccaagttcagtgatggagagaagtgccggcgggaggccttccggcggctgggcaatggagtgtctgatgacctgagcagtgaagaagatggagaggcccggacccagatgatcctgctgcggcgctctgtggagggcgccagcagtgacaatggctgtgaggtgaagaacaggaagagcatcctgagccgccacctgaacagccaggtgaagaagaccaccacccgctggtgccacatcgtgcgggacagcgacagcctggccgagagcgagtttgagagcgctgccttcagccagggcagccgctctggagtgtctgggggcagccgcagcctgaacatgagccggcgggacagcgagagcaccaggcatgacagcgagacagaggacatgctgtgggatgacctgctgcacggcccagaatgtcgcagctctgtgaccagtgacagcgagggcgcccacgtgaacaccctgcacagcggcaccaagagggaccccaaggaggatgtgttccagcagaaccacctgttctggctgcagaacagcagccccagcagtgacagagtgtctgccatcatctgggagggcaatgaatgcaagaagatggacatgtctgtgctggagatcagcggcatcatcatgagccgggtgaatgcctaccagcagggcgtgggctaccagatgctgggcaatgtggtgaccatcggcctggccttcttccccttcctgcacaggctcttccgggagaagagcctggaccagctgaagagcatctctgctgaggagatcctgaccctcttctgtggggcccctcctgtgacccccatcatcgtgctgagcatcatcaacttctttgagcggctgtgcctgacctggatgttcttcttcatgatgtgtgtggccgagaggacctacaagcagcgcttcctgtttgccaagctgttcagccacatcaccagcgccaggaaggccaggaaatatgagatcccccacttccggctgaagaaggtggagaacatcaagatctggctgagcctgcggagctacctgaagaggcggggcccccagaggtctgtggatgtggtggtgtcctctgtgttcctgctgaccctgagcatcgccttcatctgctgtgcccaggtgctgcagggccacaagaccttcctgaatgatgcctacaactgggagttcctgatctgggagacagccctgctgctcttcctgctgcggctggccagcctgggcagcgagaccaacaagaagtacagcaatgtgtccatcctgctgacagagcagatcaacctgtacctgaagatggagaagaagcccaacaagaaggagcagctgaccctggtgaacaacgtgctgaagctgagcaccaagctgctgaaggagctggacacccccttccggctgtatggcctgaccatgaaccccctcatctacaacatcaccagggtggtgatcctgtctgctgtgtctggagtcatcagtgacctgctgggcttcaacatccggctgtggaagatcaagagctag

SEQ ID NO: 166691 - DNA, 2289 bp, synthetic construct; identical to SEQ ID NO: 166690
  misc_feature 1..2289: note = Description of Artificial Sequence: Synthetic coding sequence
  source 1..2289: mol_type = other DNA

SEQ ID NO: 166692 - DNA, 996 bp, synthetic construct
  misc_feature 1..996: note = Description of Artificial Sequence: Synthetic coding sequence
  source 1..996: mol_type = other DNA
tgacagacccgggagaaggccaagttcagtgatggagagaagtgccggcgggaggccttccggcggctgggcaatggagtgtctgatgacctgagcagtgaagaagatggagaggcccggacccagatgatcctgctgcggcgctctgtggagggcgccagcagtgacaatggctgtgaggtgaagaacaggaagagcatcctgagccgccacctgaacagccaggtgaagaagaccaccacccgctggtgccacatcgtgcgggacagcgacagcctggccgagagcgagtttgagagcgctgccttcagccagggcagccgctctggagtgtctgggggcagccgcagcctgaacatgagccggcgggacagcgagagcaccaggcatgacagcgagacagaggacatgctgtgggatgacctgctgcacggcccagaatgtcgcagctctgtgaccagtgacagcgagggcgcccacgtgaacaccctgcacagcggcaccaagagggaccccaaggaggatgtgttccagcagaaccacctgttctggctgcagaacagcagccccagcagtgacagagtgtctgccatcatctgggagggcaatgaatgcaagaagatggacatgtctgtgctggagatcagcggcatcatcatgagccgggtgaatgcctaccagcagggcgtgggctaccagatgctgggcaatgtggtgaccatcggcctggccttcttccccttcctgcacaggctcttccgggagaagagcctggaccagctgaagagcatctctgctgaggagatcctgaccctcttctgtggggcccctcctgtgacccccatcatcgtgctgagcatcatcaacttctttgagcggctgtgcctgacctggatgttcttcttcatgatgtgtgtggccgagaggacctacaagcaggtgtctggagagatcaggaagatcttctacctgttcctgtacatgatcttccactag
